United States Patent Application Publication US 2016/0319361 A1 - sequence listing, part 13

SEQ ID NO: 335012 - DNA, 30 bp, Artificial Sequence
  Synthetic oligonucleotide
ttggcaatctggctctctgaagcggaaaag

SEQ ID NO: 335013 - DNA, 30 bp, Artificial Sequence
  Synthetic oligonucleotide
taggggcatgggaagaggaatggggaaaag

SEQ ID NO: 335014 - DNA, 30 bp, Artificial Sequence
  Synthetic oligonucleotide
cggcaggcggtcttggttaggaatgaaaag

SEQ ID NO: 335015 - DNA, 30 bp, Artificial Sequence
  Synthetic oligonucleotide
tgacccggtatcgtgtggtcgcctgaaaag

SEQ ID NO: 335016 - DNA, 30 bp, Artificial Sequence
  Synthetic oligonucleotide
ccgaatacagaagctttaccttgtgaaaag

SEQ ID NO: 335017 - DNA, 30 bp, Artificial Sequence
  Synthetic oligonucleotide
ctttaggcaaggccagtagctgttgaaaag

SEQ ID NO: 335018 - DNA, 30 bp, Artificial Sequence
  Synthetic oligonucleotide
tgtggattgcaaagttcaccctttgaaaag

SEQ ID NO: 335019 - DNA, 30 bp, Artificial Sequence
  Synthetic oligonucleotide
tagttagaggtgaatctcggttttgaaaag

SEQ ID NO: 335020 - DNA, 30 bp, Artificial Sequence
  Synthetic oligonucleotide
gacagtccttcacggcctggacaataaaag

SEQ ID NO: 335021 - DNA, 30 bp, Artificial Sequence
  Synthetic oligonucleotide
cttcgcctttgcgcaaatcggcaataaaag

SEQ ID NO: 335022 - DNA, 30 bp, Artificial Sequence
  Synthetic oligonucleotide
taaaataattccgggccggtaggataaaag

SEQ ID NO: 335023 - DNA, 30 bp, Artificial Sequence
  Synthetic oligonucleotide
ccctctagcaatccagctgcgggataaaag

SEQ ID NO: 335024 - DNA, 30 bp, Artificial Sequence
  Synthetic oligonucleotide
tgggtttgagactatccgggcgagtaaaag

SEQ ID NO: 335025 - DNA, 30 bp, Artificial Sequence
  Synthetic oligonucleotide
taaagcctgtaaatatatcggtggtaaaag

SEQ ID NO: 335026 - DNA, 30 bp, Artificial Sequence
  Synthetic oligonucleotide
gaaaaaggcaagtagtgtagtgcttaaaag

SEQ ID NO: 335027 - DNA, 30 bp, Artificial Sequence
  Synthetic oligonucleotide
accttaccttcgaatgagccaacaacaaag

SEQ ID NO: 335028 - DNA, 30 bp, Artificial Sequence
  Synthetic oligonucleotide
tatatgttacgacagacacaggcaacaaag

SEQ ID NO: 335029 - DNA, 30 bp, Artificial Sequence
  Synthetic oligonucleotide
tatctataatcaaagaccggttcaacaaag

SEQ ID NO: 335030 - DNA, 30 bp, Artificial Sequence
  Synthetic oligonucleotide
cctactacgtgtaagattcgaagaacaaag

SEQ ID NO: 335031 - DNA, 30 bp, Artificial Sequence
  Synthetic oligonucleotide
gctggtgtttcgcgtgactatagaacaaag

SEQ ID NO: 335032 - DNA, 30 bp, Artificial Sequence
  Synthetic oligonucleotide
gctaatctgttttgcaactcctccacaaag

SEQ ID NO: 335033 - DNA, 30 bp, Artificial Sequence
  Synthetic oligonucleotide
atataactaatttccgcccctgggacaaag

SEQ ID NO: 335034 - DNA, 30 bp, Artificial Sequence
  Synthetic oligonucleotide
tcccggggaattgctatactgcatacaaag

SEQ ID NO: 335035 - DNA, 30 bp, Artificial Sequence
  Synthetic oligonucleotide
gttgcgctaccggaactagggcctacaaag

SEQ ID NO: 335036 - DNA, 30 bp, Artificial Sequence
  Synthetic oligonucleotide
aaacgtttgaatagtgtagatcctacaaag

SEQ ID NO: 335037 - DNA, 30 bp, Artificial Sequence
  Synthetic oligonucleotide
cttcctcctgtatgggatacaaggccaaag

SEQ ID NO: 335038 - DNA, 30 bp, Artificial Sequence
  Synthetic oligonucleotide
actccggagcaggccttatatctgccaaag

SEQ ID NO: 335039 - DNA, 30 bp, Artificial Sequence
  Synthetic oligonucleotide
ttaaacccaaacatctcgttcgctccaaag

SEQ ID NO: 335040 - DNA, 30 bp, Artificial Sequence
  Synthetic oligonucleotide
acctgttggtgggtgagtgatacagcaaag

SEQ ID NO: 335041 - DNA, 30 bp, Artificial Sequence
  Synthetic oligonucleotide
ttaacgcagcccgcctcaggatcagcaaag

SEQ ID NO: 335042 - DNA, 30 bp, Artificial Sequence
  Synthetic oligonucleotide
ggacatcctctgtatggaagctgggcaaag

SEQ ID NO: 335043 - DNA, 30 bp, Artificial Sequence
  Synthetic oligonucleotide
tctaggctccgcaccaaatagggtgcaaag

SEQ ID NO: 335044 - DNA, 30 bp, Artificial Sequence
  Synthetic oligonucleotide
tccgaccgcactaaatccttttgtgcaaag

SEQ ID NO: 335045 - DNA, 30 bp, Artificial Sequence
  Synthetic oligonucleotide
gcttggaaatgctggaaatggtggtcaaag

SEQ ID NO: 335046 - DNA, 30 bp, Artificial Sequence
  Synthetic oligonucleotide
ttcccgtttccataaggaggaacttcaaag

SEQ ID NO: 335047 - DNA, 30 bp, Artificial Sequence
  Synthetic oligonucleotide
ctactactttagatttagaccacttcaaag

SEQ ID NO: 335048 - DNA, 30 bp, Artificial Sequence
  Synthetic oligonucleotide
acatagttggtcaggaggggccgttcaaag

SEQ ID NO: 335049 - DNA, 30 bp, Artificial Sequence
  Synthetic oligonucleotide
gtagactcgccccttgaatgtatttcaaag

SEQ ID NO: 335050 - DNA, 30 bp, Artificial Sequence
  Synthetic oligonucleotide
cctagcgacggcgcttcgaacgtttcaaag

SEQ ID NO: 335051 - DNA, 30 bp, Artificial Sequence
  Synthetic oligonucleotide
tgtgtggatcactgcatttaaagaagaaag

SEQ ID NO: 335052 - DNA, 30 bp, Artificial Sequence
  Synthetic oligonucleotide
gagcgcttcatgtaaatcagcgacagaaag

SEQ ID NO: 335053 - DNA, 30 bp, Artificial Sequence
  Synthetic oligonucleotide
gatgatccggcagaatggagcaccagaaag

SEQ ID NO: 335054 - DNA, 30 bp, Artificial Sequence
  Synthetic oligonucleotide
tgtcctgagatgggcgtcacttagagaaag

SEQ ID NO: 335055 - DNA, 30 bp, Artificial Sequence
  Synthetic oligonucleotide
cttcctgtaagccaaacagtacggagaaag

SEQ ID NO: 335056 - DNA, 30 bp, Artificial Sequence
  Synthetic oligonucleotide
aacctgtcagtcgaaggtcataatagaaag

SEQ ID NO: 335057 - DNA, 30 bp, Artificial Sequence
  Synthetic oligonucleotide
gggaaaggtaggggaatagcatatagaaag

SEQ ID NO: 335058 - DNA, 30 bp, Artificial Sequence
  Synthetic oligonucleotide
gaaaggatcctttagtcacaacaccgaaag

SEQ ID NO: 335059 - DNA, 30 bp, Artificial Sequence
  Synthetic oligonucleotide
atccggaccctgagggttaaagatcgaaag

SEQ ID NO: 335060 - DNA, 30 bp, Artificial Sequence
  Synthetic oligonucleotide
ctggttcggacaattgggcatggtcgaaag

SEQ ID NO: 335061 - DNA, 30 bp, Artificial Sequence
  Synthetic oligonucleotide
ccgctacaaattagctctcagtgtcgaaag

SEQ ID NO: 335062 - DNA, 30 bp, Artificial Sequence
  Synthetic oligonucleotide
agcgttcttagtctccgttaaacaggaaag

SEQ ID NO: 335063 - DNA, 30 bp, Artificial Sequence
  Synthetic oligonucleotide
gtcttctgtatccaatggtataccggaaag

SEQ ID NO: 335064 - DNA, 30 bp, Artificial Sequence
  Synthetic oligonucleotide
aaacagtggactgtctccaaatccggaaag

SEQ ID NO: 335065 - DNA, 30 bp, Artificial Sequence
  Synthetic oligonucleotide
attcaaaaggacctaggtagatgcggaaag

SEQ ID NO: 335066 - DNA, 30 bp, Artificial Sequence
  Synthetic oligonucleotide
gacgatacgaccgggaagcccgggggaaag

SEQ ID NO: 335067 - DNA, 30 bp, Artificial Sequence
  Synthetic oligonucleotide
atgttggcagctggtcataggaatggaaag

SEQ ID NO: 335068 - DNA, 30 bp, Artificial Sequence
  Synthetic oligonucleotide
gggttccgggaggtctatccctgtggaaag

SEQ ID NO: 335069 - DNA, 30 bp, Artificial Sequence
  Synthetic oligonucleotide
gaagagacctagaggtctctgcttggaaag

SEQ ID NO: 335070 - DNA, 30 bp, Artificial Sequence
  Synthetic oligonucleotide
gtcaatgcccaatcgcgttccgttggaaag

SEQ ID NO: 335071 - DNA, 30 bp, Artificial Sequence
  Synthetic oligonucleotide
tggtcatagttcttaatgatctttggaaag

SEQ ID NO: 335072 - DNA, 30 bp, Artificial Sequence
  Synthetic oligonucleotide
ccggattttttaaacaggttaaaatgaaag

SEQ ID NO: 335073 - DNA, 30 bp, Artificial Sequence
  Synthetic oligonucleotide
attgtgtaacatttccctgttggatgaaag

SEQ ID NO: 335074 - DNA, 30 bp, Artificial Sequence
  Synthetic oligonucleotide
gttcccctggagataaacgcgcggtgaaag

SEQ ID NO: 335075 - DNA, 30 bp, Artificial Sequence
  Synthetic oligonucleotide
aacgtataatcacaacaaactgtgtgaaag

SEQ ID NO: 335076 - DNA, 30 bp, Artificial Sequence
  Synthetic oligonucleotide
ttaaacatgcggtcgtaacgcaattgaaag

SEQ ID NO: 335077 - DNA, 30 bp, Artificial Sequence
  Synthetic oligonucleotide
tcgcacgcgtaaacgagttgttcaataaag

SEQ ID NO: 335078 - DNA, 30 bp, Artificial Sequence
  Synthetic oligonucleotide
gtgcgaagtaatctccatttcgccataaag

SEQ ID NO: 335079 - DNA, 30 bp, Artificial Sequence
  Synthetic oligonucleotide
gaaatgacgatcacagcctcgcagataaag

SEQ ID NO: 335080 - DNA, 30 bp, Artificial Sequence
  Synthetic oligonucleotide
tttgtatatgaagcctggcacgagataaag

SEQ ID NO: 335081 - DNA, 30 bp, Artificial Sequence
  Synthetic oligonucleotide
tgttaatggttactatccgaatagataaag

SEQ ID NO: 335082 - DNA, 30 bp, Artificial Sequence
  Synthetic oligonucleotide
gactaataactctgttgtaattagataaag

SEQ ID NO: 335083 - DNA, 30 bp, Artificial Sequence
  Synthetic oligonucleotide
tgtagaatccagccgtgaatgggtataaag

SEQ ID NO: 335084 - DNA, 30 bp, Artificial Sequence
  Synthetic oligonucleotide
atcactggacaaacgttgggttcactaaag

SEQ ID NO: 335085 - DNA, 30 bp, Artificial Sequence
  Synthetic oligonucleotide
aatacctcattaaattgtctcagactaaag

SEQ ID NO: 335086 - DNA, 30 bp, Artificial Sequence
  Synthetic oligonucleotide
ccgtacagtattcatgtaagatttctaaag

SEQ ID NO: 335087 - DNA, 30 bp, Artificial Sequence
  Synthetic oligonucleotide
catactgtaccgtacccctgaacagtaaag

SEQ ID NO: 335088 - DNA, 30 bp, Artificial Sequence
  Synthetic oligonucleotide
ttagcattagtggggtaccgtagagtaaag

SEQ ID NO: 335089 - DNA, 30 bp, Artificial Sequence
  Synthetic oligonucleotide
caaaatcattgtctataccacttcgtaaag

SEQ ID NO: 335090 - DNA, 30 bp, Artificial Sequence
  Synthetic oligonucleotide
caggtggctgaatttgcaatgccggtaaag

SEQ ID NO: 335091 - DNA, 30 bp, Artificial Sequence
  Synthetic oligonucleotide
cgctaatgatttttagaacacctggtaaag

SEQ ID NO: 335092 - DNA, 30 bp, Artificial Sequence
  Synthetic oligonucleotide
gagcactctcgtgtcaggatcaaattaaag

SEQ ID NO: 335093 - DNA, 30 bp, Artificial Sequence
  Synthetic oligonucleotide
gctatggagtgggataatatctcattaaag

SEQ ID NO: 335094 - DNA, 30 bp, Artificial Sequence
  Synthetic oligonucleotide
ctgtttagtattagtagtgagagcttaaag

SEQ ID NO: 335095 - DNA, 30 bp, Artificial Sequence
  Synthetic oligonucleotide
cgcctaaaccaagtcctccaagatttaaag

SEQ ID NO: 335096 - DNA, 30 bp, Artificial Sequence
  Synthetic oligonucleotide
acattaggacaccacgtctgatatttaaag

SEQ ID NO: 335097 - DNA, 30 bp, Artificial Sequence
  Synthetic oligonucleotide
cttacttgctacagaagttgcggtttaaag

SEQ ID NO: 335098 - DNA, 30 bp, Artificial Sequence
  Synthetic oligonucleotide
aggcatctgtcagccacgaccttaaacaag

SEQ ID NO: 335099 - DNA, 30 bp, Artificial Sequence
  Synthetic oligonucleotide
ataaaatctcacttcagttttgtgaacaag

SEQ ID NO: 335100 - DNA, 30 bp, Artificial Sequence
  Synthetic oligonucleotide
gaagaaataagctgggtcaaaaataacaag

SEQ ID NO: 335101 - DNA, 30 bp, Artificial Sequence
  Synthetic oligonucleotide
actatgtttcttttaagaatagcccacaag

SEQ ID NO: 335102 - DNA, 30 bp, Artificial Sequence
  Synthetic oligonucleotide
tgtttgatggaaggggggagctggcacaag

SEQ ID NO: 335103 - DNA, 30 bp, Artificial Sequence
  Synthetic oligonucleotide
attgaagccgcaagagcccgcactcacaag

SEQ ID NO: 335104 - DNA, 30 bp, Artificial Sequence
  Synthetic oligonucleotide
tgtttagtgcggtctatttaggtagacaag

SEQ ID NO: 335105 - DNA, 30 bp, Artificial Sequence
  Synthetic oligonucleotide
ggttacggttagagtctccaaatggacaag

SEQ ID NO: 335106 - DNA, 30 bp, Artificial Sequence
  Synthetic oligonucleotide
tatcgatatgtactgtgcatattggacaag

SEQ ID NO: 335107 - DNA, 30 bp, Artificial Sequence
  Synthetic oligonucleotide
tgccgatcgattatgacgaaacaatacaag

SEQ ID NO: 335108 - DNA, 30 bp, Artificial Sequence
  Synthetic oligonucleotide
tgacaaggtctggaccggggcacctacaag

SEQ ID NO: 335109 - DNA, 30 bp, Artificial Sequence
  Synthetic oligonucleotide
ttgtgtgtacagctttaaatgctctacaag

SEQ ID NO: 335110 - DNA, 30 bp, Artificial Sequence
  Synthetic oligonucleotide
tatgaccggatttttgttatggaaaccaag

SEQ ID NO: 335111 - DNA, 30 bp, Artificial Sequence
  Synthetic oligonucleotide
agattatttaacttggacgcgtcaaccaag

SEQ ID NO: 335112 - DNA, 30 bp, Artificial Sequence
  Synthetic oligonucleotide
cagcagtcattcgccttttattgaaccaag

SEQ ID NO: 335113 - DNA, 30 bp, Artificial Sequence
  Synthetic oligonucleotide
ttgtttggcaatctcgtgagggacaccaag

SEQ ID NO: 335114 - DNA, 30 bp, Artificial Sequence
  Synthetic oligonucleotide
acctagattatccacatatgtgacaccaag

SEQ ID NO: 335115 - DNA, 30 bp, Artificial Sequence
  Synthetic oligonucleotide
tcgttgtccgggtagcggagagtgaccaag

SEQ ID NO: 335116 - DNA, 30 bp, Artificial Sequence
  Synthetic oligonucleotide
caagttacgtatcttgaaaactataccaag

SEQ ID NO: 335117 - DNA, 30 bp, Artificial Sequence
  Synthetic oligonucleotide
cccagaattccagagcctcgtattaccaag

SEQ ID NO: 335118 - DNA, 30 bp, Artificial Sequence
  Synthetic oligonucleotide
accactattacccggttcgggtttaccaag

SEQ ID NO: 335119 - DNA, 30 bp, Artificial Sequence
  Synthetic oligonucleotide
tggtcaatgctatttaatcgcaaacccaag

SEQ ID NO: 335120 - DNA, 30 bp, Artificial Sequence
  Synthetic oligonucleotide
aataatgaacagcccacggtagcacccaag

SEQ ID NO: 335121 - DNA, 30 bp, Artificial Sequence
  Synthetic oligonucleotide
cgtcgccacgaggacaccaatgcgcccaag

SEQ ID NO: 335122 - DNA, 30 bp, Artificial Sequence
  Synthetic oligonucleotide
tgtataatcgtacctaggtgttcgcccaag

SEQ ID NO: 335123 - DNA, 30 bp, Artificial Sequence
  Synthetic oligonucleotide
cagggagacagcacaggcggggggcccaag

SEQ ID NO: 335124 - DNA, 30 bp, Artificial Sequence
  Synthetic oligonucleotide
ttaggtggtagcagtccacgcaacgccaag

SEQ ID NO: 335125 - DNA, 30 bp, Artificial Sequence
  Synthetic oligonucleotide
gacaagtcccgctaatgctgtcaggccaag

SEQ ID NO: 335126 - DNA, 30 bp, Artificial Sequence
  Synthetic oligonucleotide
tttgggccgagggaatcttattagtccaag

SEQ ID NO: 335127 - DNA, 30 bp, Artificial Sequence
  Synthetic oligonucleotide
gagccacgatatcgacatcgcacgtccaag

SEQ ID NO: 335128 - DNA, 30 bp, Artificial Sequence
  Synthetic oligonucleotide
aatccactagatgggagagagcattccaag

SEQ ID NO: 335129 - DNA, 30 bp, Artificial Sequence
  Synthetic oligonucleotide
gaatgtctagcggtggtcgggagttccaag

SEQ ID NO: 335130 - DNA, 30 bp, Artificial Sequence
  Synthetic oligonucleotide
gatcaaggcgcaatcagatattgttccaag

SEQ ID NO: 335131 - DNA, 30 bp, Artificial Sequence
  Synthetic oligonucleotide
gctgatgacttactggtgtgtgcaagcaag

SEQ ID NO: 335132 - DNA, 30 bp, Artificial Sequence
  Synthetic oligonucleotide
cattttcatacagtagcctcctacagcaag

SEQ ID NO: 335133 - DNA, 30 bp, Artificial Sequence
  Synthetic oligonucleotide
taatcatttgcaaacaccgccaagagcaag

SEQ ID NO: 335134 - DNA, 30 bp, Artificial Sequence
  Synthetic oligonucleotide
tcaaggtgggaaaggtcctataatagcaag

SEQ ID NO: 335135 - DNA, 30 bp, Artificial Sequence
  Synthetic oligonucleotide
ccgcctcgcaaggccgagcactgtagcaag

SEQ ID NO: 335136 - DNA, 30 bp, Artificial Sequence
  Synthetic oligonucleotide
taaggttacctcaaaaggtagtgtagcaag

SEQ ID NO: 335137 - DNA, 30 bp, Artificial Sequence
  Synthetic oligonucleotide
gtccacattcgcaggggcgggagacgcaag

SEQ ID NO: 335138 - DNA, 30 bp, Artificial Sequence
  Synthetic oligonucleotide
gtgattaaacacgagatgacgcaccgcaag

SEQ ID NO: 335139 - DNA, 30 bp, Artificial Sequence
  Synthetic oligonucleotide
gtacgttcttaactggggacatagcgcaag

SEQ ID NO: 335140 - DNA, 30 bp, Artificial Sequence
  Synthetic oligonucleotide
tctttgcgtcgcacgcttttgacgcgcaag

SEQ ID NO: 335141 - DNA, 30 bp, Artificial Sequence
  Synthetic oligonucleotide
gtggagagctaggtatgggttacgcgcaag

SEQ ID NO: 335142 - DNA, 30 bp, Artificial Sequence
  Synthetic oligonucleotide
tggccgtccacatatcgggccaggcgcaag

SEQ ID NO: 335143 - DNA, 30 bp, Artificial Sequence
  Synthetic oligonucleotide
tgcagagacgcaagcgaacaaactcgcaag

SEQ ID NO: 335144 - DNA, 30 bp, Artificial Sequence
  Synthetic oligonucleotide
aaaagctaggaggtagctagcacaggcaag

SEQ ID NO: 335145 - DNA, 30 bp, Artificial Sequence
  Synthetic oligonucleotide
agaatccggcgcgaagggttgtgaggcaag

SEQ ID NO: 335146 - DNA, 30 bp, Artificial Sequence
  Synthetic oligonucleotide
ttggttcaagctgatcggcacttcggcaag

SEQ ID NO: 335147 - DNA, 30 bp, Artificial Sequence
  Synthetic oligonucleotide
gtgatttgacgtgtcacggtgcagggcaag

SEQ ID NO: 335148 - DNA, 30 bp, Artificial Sequence
  Synthetic oligonucleotide
ttgtcaggatcttagagtatgacgggcaag

SEQ ID NO: 335149 - DNA, 30 bp, Artificial Sequence
  Synthetic oligonucleotide
aatcacagtgtgtgtgggtgtccgggcaag

SEQ ID NO: 335150 - DNA, 30 bp, Artificial Sequence
  Synthetic oligonucleotide
catagtaattaggcgctatgggggggcaag

SEQ ID NO: 335151 - DNA, 30 bp, Artificial Sequence
  Synthetic oligonucleotide
gggactataatctcttcggctgttggcaag

SEQ ID NO: 335152 - DNA, 30 bp, Artificial Sequence
  Synthetic oligonucleotide
tcgatttagagtagtacgttaggatgcaag

SEQ ID NO: 335153 - DNA, 30 bp, Artificial Sequence
  Synthetic oligonucleotide
ctgaccctgttcaaagtgattgtatgcaag

SEQ ID NO: 335154 - DNA, 30 bp, Artificial Sequence
  Synthetic oligonucleotide
agacgatatccggggccttaggtgtgcaag

SEQ ID NO: 335155 - DNA, 30 bp, Artificial Sequence
  Synthetic oligonucleotide
ggaggttcaggagcccccgtgccttgcaag

SEQ ID NO: 335156 - DNA, 30 bp, Artificial Sequence
  Synthetic oligonucleotide
acgatgcgcccggtgcaaagcgtttgcaag

SEQ ID NO: 335157 - DNA, 30 bp, Artificial Sequence
  Synthetic oligonucleotide
accatgtgtaaaggtccggcttaaatcaag

SEQ ID NO: 335158 - DNA, 30 bp, Artificial Sequence
  Synthetic oligonucleotide
atagtggcgctatgtcgaccgctaatcaag

SEQ ID NO: 335159 - DNA, 30 bp, Artificial Sequence
  Synthetic oligonucleotide
tgaactgcatgttagataaccaacatcaag

SEQ ID NO: 335160 - DNA, 30 bp, Artificial Sequence
  Synthetic oligonucleotide
ttagtttagcattccaactggttcatcaag

SEQ ID NO: 335161 - DNA, 30 bp, Artificial Sequence
  Synthetic oligonucleotide
tccccggagtatcaactattgtcgatcaag

SEQ ID NO: 335162 - DNA, 30 bp, Artificial Sequence
  Synthetic oligonucleotide
gggggtcttgtcgtagcggtggatatcaag

SEQ ID NO: 335163 - DNA, 30 bp, Artificial Sequence
  Synthetic oligonucleotide
ctggacttcatgtcacaagcgggcctcaag

SEQ ID NO: 335164 - DNA, 30 bp, Artificial Sequence
  Synthetic oligonucleotide
ggttaacgtataacgctgtggtgcctcaag

SEQ ID NO: 335165 - DNA, 30 bp, Artificial Sequence
  Synthetic oligonucleotide
aataccgattacaggtgagggtgtctcaag

SEQ ID NO: 335166 - DNA, 30 bp, Artificial Sequence
  Synthetic oligonucleotide
cacatccggagcgggtgacgtgcagtcaag

SEQ ID NO: 335167 - DNA, 30 bp, Artificial Sequence
  Synthetic oligonucleotide
aatggggggctgcgatggcgcacggtcaag

SEQ ID NO: 335168 - DNA, 30 bp, Artificial Sequence
  Synthetic oligonucleotide
tagcgcgcacggtgccaagagacggtcaag

SEQ ID NO: 335169 - DNA, 30 bp, Artificial Sequence
  Synthetic oligonucleotide
ctgcagggttaacccggcgaggatgtcaag

SEQ ID NO: 335170 - DNA, 30 bp, Artificial Sequence
  Synthetic oligonucleotide
taatttaccgtgtgaaggtaagctgtcaag

SEQ ID NO: 335171 - DNA, 30 bp, Artificial Sequence
  Synthetic oligonucleotide
gatttttcagtgtgtgaagcatgtgtcaag

SEQ ID NO: 335172 - DNA, 30 bp, Artificial Sequence
  Synthetic oligonucleotide
tatcaacggcgctacgcccgatgtgtcaag

SEQ ID NO: 335173 - DNA, 30 bp, Artificial Sequence
  Synthetic oligonucleotide
caaagttttgccaagattgcgcttgtcaag

SEQ ID NO: 335174 - DNA, 30 bp, Artificial Sequence
  Synthetic oligonucleotide
agtcacggcttggtgacgggcagattcaag

SEQ ID NO: 335175 - DNA, 30 bp, Artificial Sequence
  Synthetic oligonucleotide
ttattcatttctataagaactataaagaag

SEQ ID NO: 335176 - DNA, 30 bp, Artificial Sequence
  Synthetic oligonucleotide
tgactcgtagccgctggtgctgacaagaag

SEQ ID NO: 335177 - DNA, 30 bp, Artificial Sequence
  Synthetic oligonucleotide
ggttgttttaaatagccccccatgaagaag

SEQ ID NO: 335178 - DNA, 30 bp, Artificial Sequence
  Synthetic oligonucleotide
tgtctgtaaaccggctatgatagtaagaag

SEQ ID NO: 335179 - DNA, 30 bp, Artificial Sequence
  Synthetic oligonucleotide
ggtcagtttgggtaacccctgtgtaagaag

SEQ ID NO: 335180 - DNA, 30 bp, Artificial Sequence
  Synthetic oligonucleotide
agattgaatgcgcactgcgtgagacagaag

SEQ ID NO: 335181 - DNA, 30 bp, Artificial Sequence
  Synthetic oligonucleotide
ctgccacaggcagtgggcgtaaggcagaag

SEQ ID NO: 335182 - DNA, 30 bp, Artificial Sequence
  Synthetic oligonucleotide
aggagattctcatgaaaatccactcagaag

SEQ ID NO: 335183 - DNA, 30 bp, Artificial Sequence
  Synthetic oligonucleotide
tatttgagagctaaagcggacgttcagaag

SEQ ID NO: 335184 - DNA, 30 bp, Artificial Sequence
  Synthetic oligonucleotide
ttggttgtagatatatggaggctagagaag

SEQ ID NO: 335185 - DNA, 30 bp, Artificial Sequence
  Synthetic oligonucleotide
tgcggagaaatgaatcagtcagtggagaag

SEQ ID NO: 335186 - DNA, 30 bp, Artificial Sequence
  Synthetic oligonucleotide
aattttcgggagaacagaagagtggagaag

SEQ ID NO: 335187 - DNA, 30 bp, Artificial Sequence
  Synthetic oligonucleotide
tggggtcaatttaatcctggacgtgagaag

SEQ ID NO: 335188 - DNA, 30 bp, Artificial Sequence
  Synthetic oligonucleotide
gaagccaagatacccccgttggttgagaag

SEQ ID NO: 335189 - DNA, 30 bp, Artificial Sequence
  Synthetic oligonucleotide
cgcctagaggcgacgccacttaagtagaag

SEQ ID NO: 335190 - DNA, 30 bp, Artificial Sequence
  Synthetic oligonucleotide
ttttgcgttctacgatggcgttcttagaag

SEQ ID NO: 335191 - DNA, 30 bp, Artificial Sequence
  Synthetic oligonucleotide
cacggtacccgctttacggagctttagaag

SEQ ID NO: 335192 - DNA, 30 bp, Artificial Sequence
  Synthetic oligonucleotide
ccccatgccggacaccggaccatcccgaag

SEQ ID NO: 335193 - DNA, 30 bp, Artificial Sequence
  Synthetic oligonucleotide
gccctaccctagagagtctaattcccgaag

SEQ ID NO: 335194 - DNA, 30 bp, Artificial Sequence
  Synthetic oligonucleotide
tagaataattacggacagggtaggccgaag

SEQ ID NO: 335195 - DNA, 30 bp, Artificial Sequence
  Synthetic oligonucleotide
gagaacgcctgcattaatggcagtccgaag

SEQ ID NO: 335196 - DNA, 30 bp, Artificial Sequence
  Synthetic oligonucleotide
gtattagctgagccggatgactgtccgaag

SEQ ID NO: 335197 - DNA, 30 bp, Artificial Sequence
  Synthetic oligonucleotide
gcatttgcaatgctcgcatgctaagcgaag

SEQ ID NO: 335198 - DNA, 30 bp, Artificial Sequence
  Synthetic oligonucleotide
cagttggtagccacacttcggagggcgaag

SEQ ID NO: 335199 - DNA, 30 bp, Artificial Sequence
  Synthetic oligonucleotide
aagaacattacggcgcgcagagactcgaag

SEQ ID NO: 335200 - DNA, 30 bp, Artificial Sequence
  Synthetic oligonucleotide
taggttccttataatatgcgtacgtcgaag

SEQ ID NO: 335201 - DNA, 30 bp, Artificial Sequence
  Synthetic oligonucleotide
gtcaatacgacctggttattagtttcgaag

SEQ ID NO: 335202 - DNA, 30 bp, Artificial Sequence
  Synthetic oligonucleotide
agttgtcctggatggtcgcgggaaaggaag

SEQ ID NO: 335203 - DNA, 30 bp, Artificial Sequence
  Synthetic oligonucleotide
ctgaagtaggttggcggtatgcgcaggaag

SEQ ID NO: 335204 - DNA, 30 bp, Artificial Sequence
  Synthetic oligonucleotide
cagtttgctcctgtaccctaccagaggaag

SEQ ID NO: 335205 - DNA, 30 bp, Artificial Sequence
  Synthetic oligonucleotide
ctgaacgaccgagtggcctatccgaggaag

SEQ ID NO: 335206 - DNA, 30 bp, Artificial Sequence
  Synthetic oligonucleotide
agcttttgtaccgtatagcgatggaggaag

SEQ ID NO: 335207 - DNA, 30 bp, Artificial Sequence
  Synthetic oligonucleotide
gggcgaagccgtgtcagcgacaataggaag

SEQ ID NO: 335208 - DNA, 30 bp, Artificial Sequence
  Synthetic oligonucleotide
tctttagctgttgtaaaagtaactaggaag

SEQ ID NO: 335209 - DNA, 30 bp, Artificial Sequence
  Synthetic oligonucleotide
atacgggggccttggaacccacctaggaag

SEQ ID NO: 335210 - DNA, 30 bp, Artificial Sequence
  Synthetic oligonucleotide
ggacataatgtctgattctatgttaggaag

SEQ ID NO: 335211 - DNA, 31 bp, Artificial Sequence
  Synthetic oligonucleotide
gttctgcgggggtgtagtgtctacccggaag

SEQ ID NO: 335212 - DNA, 30 bp, Artificial Sequence
  Synthetic oligonucleotide
attgagttgtacggggcgccatcccggaag

SEQ ID NO: 335213 - DNA, 30 bp, Artificial Sequence
  Synthetic oligonucleotide
ccattatattggtaaacgttcaaagggaag

SEQ ID NO: 335214 - DNA, 30 bp, Artificial Sequence
  Synthetic oligonucleotide
aagcaatgccatctccctaaacaagggaag

SEQ ID NO: 335215 - DNA, 30 bp, Artificial Sequence
  Synthetic oligonucleotide
cggacactagccgagcatgcctcagggaag

SEQ ID NO: 335216 - DNA, 30 bp, Artificial Sequence
  Synthetic oligonucleotide
gcgtccctggagattaatgtctcagggaag

SEQ ID NO: 335217 - DNA, 30 bp, Artificial Sequence
  Synthetic oligonucleotide
gttcagaaatcagagacttgaatagggaag

SEQ ID NO: 335218 - DNA, 30 bp, Artificial Sequence
  Synthetic oligonucleotide
actatgcccttcggggtgtcacacgggaag

SEQ ID NO: 335219 - DNA, 30 bp, Artificial Sequence
  Synthetic oligonucleotide
cgcataatctttatcagacggaaggggaag

SEQ ID NO: 335220 - DNA, 30 bp, Artificial Sequence
  Synthetic oligonucleotide
gtgtaaaaatttatgtaattaggggggaag

SEQ ID NO: 335221 - DNA, 30 bp, Artificial Sequence
  Synthetic oligonucleotide
aacggggaagaagtatgggggtgggggaag

SEQ ID NO: 335222 - DNA, 30 bp, Artificial Sequence
  Synthetic oligonucleotide
tttcaaaacggggtattcttttatgggaag

SEQ ID NO: 335223 - DNA, 30 bp, Artificial Sequence
  Synthetic oligonucleotide
gcatggcgtaccaaggggtttctatggaag

SEQ ID NO: 335224 - DNA, 30 bp, Artificial Sequence
  Synthetic oligonucleotide
tgtttgcggaatcttccgataagctggaag

SEQ ID NO: 335225 - DNA, 30 bp, Artificial Sequence
  Synthetic oligonucleotide
tgggctcctagtataaagaggttctggaag

SEQ ID NO: 335226 - DNA, 30 bp, Artificial Sequence
  Synthetic oligonucleotide
atgattatcgctcaacgagtgtcgtggaag

SEQ ID NO: 335227 - DNA, 30 bp, Artificial Sequence
  Synthetic oligonucleotide
gaaatgccaagcatagactactcttggaag

SEQ ID NO: 335228 - DNA, 30 bp, Artificial Sequence
  Synthetic oligonucleotide
tttgtaatgggatgcgagtggtcaatgaag

SEQ ID NO: 335229 - DNA, 30 bp, Artificial Sequence
  Synthetic oligonucleotide
aagtgtgtgaggtctgtagagttaatgaag

SEQ ID NO: 335230 - DNA, 30 bp, Artificial Sequence
  Synthetic oligonucleotide
aatacgagtttatcgagagtctagatgaag

SEQ ID NO: 335231 - DNA, 30 bp, Artificial Sequence
  Synthetic oligonucleotide
gccggctcataaatggttatacggctgaag

SEQ ID NO: 335232 - DNA, 30 bp, Artificial Sequence
  Synthetic oligonucleotide
aacatccgcacactttccggcatgctgaag

SEQ ID NO: 335233 - DNA, 30 bp, Artificial Sequence
  Synthetic oligonucleotide
aaggttcataacggtttatctcttctgaag

SEQ ID NO: 335234 - DNA, 30 bp, Artificial Sequence
  Synthetic oligonucleotide
ctgtgtcaggagcggttggcctaagtgaag

SEQ ID NO: 335235 - DNA, 30 bp, Artificial Sequence
  Synthetic oligonucleotide
tgggatgaataatatagcataatagtgaag

SEQ ID NO: 335236 - DNA, 30 bp, Artificial Sequence
  Synthetic oligonucleotide
cgtaaagatcggtcgtcacttcccgtgaag

SEQ ID NO: 335237 - DNA, 30 bp, Artificial Sequence
  Synthetic oligonucleotide
gagtgcaagactacttttgtctgcgtgaag

SEQ ID NO: 335238 - DNA, 30 bp, Artificial Sequence
  Synthetic oligonucleotide
attataatacccattggtcaataggtgaag

SEQ ID NO: 335239 - DNA, 30 bp, Artificial Sequence
  Synthetic oligonucleotide
ggttaagcgatcggcagatcacctgtgaag

SEQ ID NO: 335240 - DNA, 30 bp, Artificial Sequence
  Synthetic oligonucleotide
gtcgtagattaagagcgagaggctgtgaag

SEQ ID NO: 335241 - DNA, 30 bp, Artificial Sequence
  Synthetic oligonucleotide
aatataaggacgacggccgagcgcttgaag

SEQ ID NO: 335242 - DNA, 30 bp, Artificial Sequence
  Synthetic oligonucleotide
aactactatgacaattaaacgggcttgaag

SEQ ID NO: 335243 - DNA, 30 bp, Artificial Sequence
  Synthetic oligonucleotide
acggatgggattttcgagttgttgttgaag

SEQ ID NO: 335244 - DNA, 30 bp, Artificial Sequence
  Synthetic oligonucleotide
gtgtagacactgggctgcggagctttgaag

SEQ ID NO: 335245 - DNA, 30 bp, Artificial Sequence
  Synthetic oligonucleotide
caacagccgggcaaggtggcctctttgaag

SEQ ID NO: 335246 - DNA, 30 bp, Artificial Sequence
  Synthetic oligonucleotide
taagcgtcacccccgtcgcgtaaaaataag

SEQ ID NO: 335247 - DNA, 30 bp, Artificial Sequence
  Synthetic oligonucleotide
ttagggtgtctatggttatttataaataag

SEQ ID NO: 335248 - DNA, 30 bp, Artificial Sequence
  Synthetic oligonucleotide
cgcgcataattattccgataacttaataag

SEQ ID NO: 335249 - DNA, 30 bp, Artificial Sequence
  Synthetic oligonucleotide
ttactaccagtaaagtcaatataacataag

SEQ ID NO: 335250 - DNA, 30 bp, Artificial Sequence
  Synthetic oligonucleotide
accccgacgccctcggtcggccgacataag

SEQ ID NO: 335251 - DNA, 30 bp, Artificial Sequence
  Synthetic oligonucleotide
attcagagtagagacccatgattacataag

SEQ ID NO: 335252 - DNA, 30 bp, Artificial Sequence
  Synthetic oligonucleotide
tctatcagtgctattggcagtccccataag

SEQ ID NO: 335253 - DNA, 30 bp, Artificial Sequence
  Synthetic oligonucleotide
agcgcatattaaaagggccctccgcataag

SEQ ID NO: 335254 - DNA, 30 bp, Artificial Sequence
  Synthetic oligonucleotide
gtgtagtcattcaaaaatgaatatcataag

SEQ ID NO: 335255 - DNA, 28 bp, Artificial Sequence
  Synthetic oligonucleotide
ttaagagtctcttagctagagtcataag

SEQ ID NO: 335256 - DNA, 30 bp, Artificial Sequence
  Synthetic oligonucleotide
tgagtacatagaaggggtagacgtcataag

SEQ ID NO: 335257 - DNA, 30 bp, Artificial Sequence
  Synthetic oligonucleotide
gtggattattagtaaaatcgaggtcataag

SEQ ID NO: 335258 - DNA, 30 bp, Artificial Sequence
  Synthetic oligonucleotide
ggattacccaaccaatgcactgcagataag

SEQ ID NO: 335259 - DNA, 30 bp, Artificial Sequence
  Synthetic oligonucleotide
gcgttctgtatcctaccgagatgagataag

SEQ ID NO: 335260 - DNA, 30 bp, Artificial Sequence
  Synthetic oligonucleotide
acagtgacttgtggcggactttgagataag

SEQ ID NO: 335261 - DNA, 30 bp, Artificial Sequence
  Synthetic oligonucleotide
ggaccaggcatcgccttctctgacgataag

SEQ ID NO: 335262 - DNA, 30 bp, Artificial Sequence
  Synthetic oligonucleotide
agtaagctcggtaacacggttatcgataag

SEQ ID NO: 335263 - DNA, 30 bp, Artificial Sequence
  Synthetic oligonucleotide
cttcatgcgatgatgcgtctcgttgataag

SEQ ID NO: 335264 - DNA, 30 bp, Artificial Sequence
  Synthetic oligonucleotide
agacctttgggggtcgcgcttaaatataag

SEQ ID NO: 335265 - DNA, 30 bp, Artificial Sequence
  Synthetic oligonucleotide
gcttatattgcaagatcagtttaatataag

SEQ ID NO: 335266 - DNA, 30 bp, Artificial Sequence
  Synthetic oligonucleotide
atattcgggaaatgtaggtatacatataag

SEQ ID NO: 335267 - DNA, 31 bp, Artificial Sequence
  Synthetic oligonucleotide
gagacagggtatacataccttgggatataag

SEQ ID NO: 335268 - DNA, 30 bp, Artificial Sequence
  Synthetic oligonucleotide
attgagcaccggtctcaacggctatataag

SEQ ID NO: 335269 - DNA, 30 bp, Artificial Sequence
  Synthetic oligonucleotide
atcccccttacgacctaaaccgtatataag

SEQ ID NO: 335270 - DNA, 30 bp, Artificial Sequence
  Synthetic oligonucleotide
tagcgtgctcaaaggggtccgacctataag

SEQ ID NO: 335271 - DNA, 30 bp, Artificial Sequence
  Synthetic oligonucleotide
agttgtgcgtcagaaacgcttatttataag

SEQ ID NO: 335272 - DNA, 30 bp, Artificial Sequence
  Synthetic oligonucleotide
gacgtggcaaaataggcgatagaaactaag

SEQ ID NO: 335273 - DNA, 30 bp, Artificial Sequence
  Synthetic oligonucleotide
ccccaggacttgtacacccttgaaactaag

SEQ ID NO: 335274 - DNA, 30 bp, Artificial Sequence
  Synthetic oligonucleotide
agaaagcagcttccgggtgaccacactaag

SEQ ID NO: 335275 - DNA, 30 bp, Artificial Sequence
  Synthetic oligonucleotide
cgagcccgcatattgagacacaggactaag

SEQ ID NO: 335276 - DNA, 30 bp, Artificial Sequence
  Synthetic oligonucleotide
tagtgctaaacttagtttgggatgactaag

SEQ ID NO: 335277 - DNA, 30 bp, Artificial Sequence
  Synthetic oligonucleotide
ccattgaggcaccgcatctggttgactaag

SEQ ID NO: 335278 - DNA, 30 bp, Artificial Sequence
  Synthetic oligonucleotide
caaccgctaggtgggaggcactctactaag

SEQ ID NO: 335279 - DNA, 30 bp, Artificial Sequence
  Synthetic oligonucleotide
tatgagcaccgcggtccttgtctacctaag

SEQ ID NO: 335280 - DNA, 30 bp, Artificial Sequence
  Synthetic oligonucleotide
actgggtactcaatcctaaagacccctaag

SEQ ID NO: 335281 - DNA, 30 bp, Artificial Sequence
  Synthetic oligonucleotide
gttattttcaccttgtcttgcttccctaag

SEQ ID NO: 335282 - DNA, 30 bp, Artificial Sequence
  Synthetic oligonucleotide
cggacagagaggcctaggcttcggcctaag

SEQ ID NO: 335283 - DNA, 30 bp, Artificial Sequence
  Synthetic oligonucleotide
aaagccgtaacgtttaaggggggtcctaag

SEQ ID NO: 335284 - DNA, 30 bp, Artificial Sequence
  Synthetic oligonucleotide
gtaatgggggctcgaagccagattcctaag

SEQ ID NO: 335285 - DNA, 30 bp, Artificial Sequence
  Synthetic oligonucleotide
gtacaaggttcatcggcgaggaccgctaag

SEQ ID NO: 335286 - DNA, 30 bp, Artificial Sequence
  Synthetic oligonucleotide
cgtaatggggacggaaactacgccgctaag

SEQ ID NO: 335287 - DNA, 30 bp, Artificial Sequence
  Synthetic oligonucleotide
gttaaactcaattcgatccatatcgctaag

SEQ ID NO: 335288 - DNA, 30 bp, Artificial Sequence
  Synthetic oligonucleotide
ttgatgactaatattagacttagggctaag

SEQ ID NO: 335289 - DNA, 30 bp, Artificial Sequence
  Synthetic oligonucleotide
agtccgcaaggtcttggggtagcctctaag

SEQ ID NO: 335290 - DNA, 30 bp, Artificial Sequence
  Synthetic oligonucleotide
aagatcggcgcacagcggacacggtctaag

SEQ ID NO: 335291 - DNA, 30 bp, Artificial Sequence
  Synthetic oligonucleotide
ctctaatcgacagaaccttaccggtctaag

SEQ ID NO: 335292 - DNA, 30 bp, Artificial Sequence
  Synthetic oligonucleotide
gtagctaaattataacccgtttggtctaag

SEQ ID NO: 335293 - DNA, 30 bp, Artificial Sequence
  Synthetic oligonucleotide
gacaatgtgaacagttccgaaaattctaag

SEQ ID NO: 335294 - DNA, 30 bp, Artificial Sequence
  Synthetic oligonucleotide
actgacaatgtgagcgacgatctttctaag

SEQ ID NO: 335295 - DNA, 30 bp, Artificial Sequence
  Synthetic oligonucleotide
gaggatcggtgcttcctcttatccagtaag

SEQ ID NO: 335296 - DNA, 30 bp, Artificial Sequence
  Synthetic oligonucleotide
gactcgggcttcgagttcactgtcagtaag

SEQ ID NO: 335297 - DNA, 30 bp, Artificial Sequence
  Synthetic oligonucleotide
tcttttagaccccagcggacgttcagtaag

SEQ ID NO: 335298 - DNA, 30 bp, Artificial Sequence
  Synthetic oligonucleotide
gcattaagggcacgcccagataggagtaag

SEQ ID NO: 335299 - DNA, 30 bp, Artificial Sequence
  Synthetic oligonucleotide
gggtgcgccgcacggcgcgaaaatagtaag

SEQ ID NO: 335300 - DNA, 30 bp, Artificial Sequence
  Synthetic oligonucleotide
aaatgggtatctggcctaagcagccgtaag

SEQ ID NO: 335301 - DNA, 30 bp, Artificial Sequence
  Synthetic oligonucleotide
aataacgacggatgccggaaactccgtaag

SEQ ID NO: 335302 - DNA, 30 bp, Artificial Sequence
  Synthetic oligonucleotide
aagttacttaatttttaattgcagcgtaag

SEQ ID NO: 335303 - DNA, 30 bp, Artificial Sequence
  Synthetic oligonucleotide
attgctactccgcctcatgcggctcgtaag

SEQ ID NO: 335304 - DNA, 30 bp, Artificial Sequence
  Synthetic oligonucleotide
gaatcttggtgcgtgtaagatattcgtaag

SEQ ID NO: 335305 - DNA, 30 bp, Artificial Sequence
  Synthetic oligonucleotide
gacgtcgacttttggttaggatttcgtaag

SEQ ID NO: 335306 - DNA, 30 bp, Artificial Sequence
  Synthetic oligonucleotide
tagtgtgtaagggctgcaaaacacggtaag

SEQ ID NO: 335307 - DNA, 30 bp, Artificial Sequence
  Synthetic oligonucleotide
aaagcctactcagccaatactctcggtaag

SEQ ID NO: 335308 - DNA, 30 bp, Artificial Sequence
  Synthetic oligonucleotide
aaaaaattgtgatctggcaagtcgggtaag

SEQ ID NO: 335309 - DNA, 30 bp, Artificial Sequence
  Synthetic oligonucleotide
gaaattatgcgagagaacctcggtggtaag

SEQ ID NO: 335310 - DNA, 30 bp, Artificial Sequence
  Synthetic oligonucleotide
tccagctctggctcttgccagacatgtaag

SEQ ID NO: 335311 - DNA, 30 bp, Artificial Sequence
  Synthetic oligonucleotide
tcgggtttaaaattcataaacccatgtaag

SEQ ID NO: 335312 - DNA, 30 bp, Artificial Sequence
  Synthetic oligonucleotide
tgtacgttggctcaaggcctaatctgtaag

SEQ ID NO: 335313 - DNA, 30 bp, Artificial Sequence
  Synthetic oligonucleotide
cagcaagaaacgtctcccgatacgtgtaag

SEQ ID NO: 335314 - DNA, 30 bp, Artificial Sequence
  Synthetic oligonucleotide
cgggtcgaaaactctcggggcaggtgtaag

SEQ ID NO: 335315 - DNA, 29 bp, Artificial Sequence
  Synthetic oligonucleotide
aatacagtgtcgcaaggtatgcttgtaag

SEQ ID NO: 335316 - DNA, 30 bp, Artificial Sequence
  Synthetic oligonucleotide
gtttggctcaaatccggggaaaaaattaag

SEQ ID NO: 335317 - DNA, 30 bp, Artificial Sequence
  Synthetic oligonucleotide
aagaatgactaggaattggtcgtaattaag

SEQ ID NO: 335318 - DNA, 30 bp, Artificial Sequence
  Synthetic oligonucleotide
gttggagtatgcttgtacgtagacattaag

SEQ ID NO: 335319 - DNA, 30 bp, Artificial Sequence
  Synthetic oligonucleotide
tgtattggccgcctcgtatggtacattaag

SEQ ID NO: 335320 - DNA, 30 bp, Artificial Sequence
  Synthetic oligonucleotide
attgtgtggccttccaccgaaaccattaag

SEQ ID NO: 335321 - DNA, 30 bp, Artificial Sequence
  Synthetic oligonucleotide
gcacaggtctggcttcagagatccattaag

SEQ ID NO: 335322 - DNA, 30 bp, Artificial Sequence
  Synthetic oligonucleotide
ccgaacagatcgttacacggcatcattaag

SEQ ID NO: 335323 - DNA, 30 bp, Artificial Sequence
  Synthetic oligonucleotide
gtctaatatacggataaatatgtgattaag

SEQ ID NO: 335324 - DNA, 30 bp, Artificial Sequence
  Synthetic oligonucleotide
cagcgcaaaaaccgttattgtgtgattaag

SEQ ID NO: 335325 - DNA, 30 bp, Artificial Sequence
  Synthetic oligonucleotide
aatgctgagattatgcagtgtttgattaag

SEQ ID NO: 335326 - DNA, 30 bp, Artificial Sequence
  Synthetic oligonucleotide
gtctggcatacggccaccggctatattaag

SEQ ID NO: 335327 - DNA, 30 bp, Artificial Sequence
  Synthetic oligonucleotide
tatgttaggaatcaggtttggtcccttaag

SEQ ID NO: 335328 - DNA, 30 bp, Artificial Sequence
  Synthetic oligonucleotide
tgaacagctacacgcggtctgtagcttaag

SEQ ID NO: 335329 - DNA, 30 bp, Artificial Sequence
  Synthetic oligonucleotide
tctgtccaacatcgagatgattctcttaag

SEQ ID NO: 335330 - DNA, 30 bp, Artificial Sequence
  Synthetic oligonucleotide
tcttcactcatggaacgctccagagttaag

SEQ ID NO: 335331 - DNA, 30 bp, Artificial Sequence
  Synthetic oligonucleotide
gatgattctgtggtccaaatgagagttaag

SEQ ID NO: 335332 - DNA, 30 bp, Artificial Sequence
  Synthetic oligonucleotide
ttcgtaccttcattcatcgtaggcgttaag

SEQ ID NO: 335333 - DNA, 30 bp, Artificial Sequence
  Synthetic oligonucleotide
ttcacggacatccgtatttcttaggttaag

SEQ ID NO: 335334 - DNA, 30 bp, Artificial Sequence
  Synthetic oligonucleotide
aggcagggcgtactcactactaatgttaag

SEQ ID NO: 335335 - DNA, 30 bp, Artificial Sequence
  Synthetic oligonucleotide
tcctctcttggcaacgtatgttctgttaag

SEQ ID NO: 335336 - DNA, 30 bp, Artificial Sequence
  Synthetic oligonucleotide
attatggtgagtactggtgaaaaatttaag

SEQ ID NO: 335337 - DNA, 30 bp, Artificial Sequence
  Synthetic oligonucleotide
gtcaccgccattagactatcgggatttaag

SEQ ID NO: 335338 - DNA, 30 bp, Artificial Sequence
  Synthetic oligonucleotide
acgatgggacctaaacttacggtatttaag

SEQ ID NO: 335339 - DNA, 30 bp, Artificial Sequence
  Synthetic oligonucleotide
aggcgctaattgttctagaataactttaag

SEQ ID NO: 335340 - DNA, 30 bp, Artificial Sequence
  Synthetic oligonucleotide
aggggtcaaacggtcgtaggatcctttaag

SEQ ID NO: 335341 - DNA, 30 bp, Artificial Sequence
  Synthetic oligonucleotide
tttggtgtatttgggtgaaaaagctttaag

SEQ ID NO: 335342 - DNA, 30 bp, Artificial Sequence
  Synthetic oligonucleotide
tgtgcgttaagacagcaccatagctttaag

SEQ ID NO: 335343 - DNA, 30 bp, Artificial Sequence
  Synthetic oligonucleotide
catgcagtcaacagcaattaacgctttaag

SEQ ID NO: 335344 - DNA, 30 bp, Artificial Sequence
  Synthetic oligonucleotide
ctgtaagttcgtgatactggcttgtttaag

SEQ ID NO: 335345 - DNA, 30 bp, Artificial Sequence
  Synthetic oligonucleotide
cttctatcccaaagttggtataattttaag

SEQ ID NO: 335346 - DNA, 30 bp, Artificial Sequence
  Synthetic oligonucleotide
tgataattggcggggccccggttttttaag

SEQ ID NO: 335347 - DNA, 30 bp, Artificial Sequence
  Synthetic oligonucleotide
cacgagttgtgcgcaggattcaaaaaacag

SEQ ID NO: 335348 - DNA, 30 bp, Artificial Sequence
  Synthetic oligonucleotide
acacgtcgaggtccgccctgtttcaaacag

SEQ ID NO: 335349 - DNA, 30 bp, Artificial Sequence
  Synthetic oligonucleotide
gatgttttcacgtgcgttgcgcagaaacag

SEQ ID NO: 335350 - DNA, 30 bp, Artificial Sequence
  Synthetic oligonucleotide
tctcggttaatcccggcagccgagaaacag

SEQ ID NO: 335351 - DNA, 30 bp, Artificial Sequence
  Synthetic oligonucleotide
cgctccggccaacagcaattgtagaaacag

SEQ ID NO: 335352 - DNA, 30 bp, Artificial Sequence
  Synthetic oligonucleotide
aatacaatcccctaccgaagcgttaaacag

SEQ ID NO: 335353 - DNA, 30 bp, Artificial Sequence
  Synthetic oligonucleotide
aagcgctcgttggatgagccgtttaaacag

SEQ ID NO: 335354 - DNA, 30 bp, Artificial Sequence
  Synthetic oligonucleotide
aatcacacccggagatgaatcacacaacag

SEQ ID NO: 335355 - DNA, 30 bp, Artificial Sequence
  Synthetic oligonucleotide
gtccccgcgcgacttatagcgatacaacag

SEQ ID NO: 335356 - DNA, 30 bp, Artificial Sequence
  Synthetic oligonucleotide
aaatcgagtgacaagactctgatacaacag

SEQ ID NO: 335357 - DNA, 30 bp, Artificial Sequence
  Synthetic oligonucleotide
atttaccgcaaatgccacagcgtacaacag

SEQ ID NO: 335358 - DNA, 30 bp, Artificial Sequence
  Synthetic oligonucleotide
gggattgctggtaagcaccgtgtacaacag

SEQ ID NO: 335359 - DNA, 30 bp, Artificial Sequence
  Synthetic oligonucleotide
agtttttaaactgaacaaacacaccaacag

SEQ ID NO: 335360 - DNA, 30 bp, Artificial Sequence
  Synthetic oligonucleotide
taaccagaaatcctaagacctgcccaacag

SEQ ID NO: 335361 - DNA, 30 bp, Artificial Sequence
  Synthetic oligonucleotide
ctgctagtagtgtaatttatgatccaacag

SEQ ID NO: 335362 - DNA, 30 bp, Artificial Sequence
  Synthetic oligonucleotide
gtactagggggttgcaaatcactccaacag

SEQ ID NO: 335363 - DNA, 30 bp, Artificial Sequence
  Synthetic oligonucleotide
aacacgtctttgcacttagtgtcgcaacag

SEQ ID NO: 335364 - DNA, 30 bp, Artificial Sequence
  Synthetic oligonucleotide
catgctcgcggtacagatataatagaacag

SEQ ID NO: 335365 - DNA, 30 bp, Artificial Sequence
  Synthetic oligonucleotide
aggtctccctaatgaacgcgcgacgaacag

SEQ ID NO: 335366 - DNA, 30 bp, Artificial Sequence
  Synthetic oligonucleotide
ctggcgggaatttttagggctggggaacag

SEQ ID NO: 335367 - DNA, 30 bp, Artificial Sequence
  Synthetic oligonucleotide
ggtttaggtaagattgagtatgaataacag

SEQ ID NO: 335368 - DNA, 30 bp, Artificial Sequence
  Synthetic oligonucleotide
tattccacctccgagggctgtggataacag

SEQ ID NO: 335369 - DNA, 30 bp, Artificial Sequence
  Synthetic oligonucleotide
gggagccagaacatgaatgcactataacag

SEQ ID NO: 335370 - DNA, 30 bp, Artificial Sequence
  Synthetic oligonucleotide
gtgctagaatatagtagccggctataacag

SEQ ID NO: 335371 - DNA, 30 bp, Artificial Sequence
  Synthetic oligonucleotide
gtaagcagtgtgtagacacggcactaacag

SEQ ID NO: 335372 - DNA, 30 bp, Artificial Sequence
  Synthetic oligonucleotide
tacttgcgaattgagcagtgtacctaacag

SEQ ID NO: 335373 - DNA, 30 bp, Artificial Sequence
  Synthetic oligonucleotide
gaacgaaataagttcaatagcttctaacag

SEQ ID NO: 335374 - DNA, 30 bp, Artificial Sequence
  Synthetic oligonucleotide
gagagccggagggccagacctcgaacacag

SEQ ID NO: 335375 - DNA, 30 bp, Artificial Sequence
  Synthetic oligonucleotide
acatggggatctttcggctttacgacacag

SEQ ID NO: 335376 - DNA, 30 bp, Artificial Sequence
  Synthetic oligonucleotide
tgtttatgtatgaacagatgagggacacag

SEQ ID NO: 335377 - DNA, 30 bp, Artificial Sequence
  Synthetic oligonucleotide
cataatatggtttctggtttgcaaccacag

SEQ ID NO: 335378 - DNA, 30 bp, Artificial Sequence
  Synthetic oligonucleotide
ggtccaccggccaggaggattcacccacag

SEQ ID NO: 335379 - DNA, 30 bp, Artificial Sequence
  Synthetic oligonucleotide
agtggccagctaaagcgctcggtgccacag

SEQ ID NO: 335380 - DNA, 30 bp, Artificial Sequence
  Synthetic oligonucleotide
taaagacagaggtatggcataagtccacag

SEQ ID NO: 335381 - DNA, 30 bp, Artificial Sequence
  Synthetic oligonucleotide
acactgaggtttattttccatattccacag

SEQ ID NO: 335382 - DNA, 30 bp, Artificial Sequence
  Synthetic oligonucleotide
ctgtatacgtagcttaagcacacagcacag

SEQ ID NO: 335383 - DNA, 30 bp, Artificial Sequence
  Synthetic oligonucleotide
cactgtgttgacgctaggactccagcacag

SEQ ID NO: 335384 - DNA, 30 bp, Artificial Sequence
  Synthetic oligonucleotide
aacgcgtccgggttattgagtatcgcacag

SEQ ID NO: 335385 - DNA, 30 bp, Artificial Sequence
  Synthetic oligonucleotide
tatcctataagtaacaatgttcgggcacag

SEQ ID NO: 335386 - DNA, 30 bp, Artificial Sequence
  Synthetic oligonucleotide
tacccgtagcccgggagaccagctgcacag

SEQ ID NO: 335387 - DNA, 30 bp, Artificial Sequence
  Synthetic oligonucleotide
ggaagcgcgtcgcttggggttcgtgcacag

SEQ ID NO: 335388 - DNA, 30 bp, Artificial Sequence
  Synthetic oligonucleotide
cctagttaacagactggaataattgcacag

SEQ ID NO: 335389 - DNA, 31 bp, Artificial Sequence
  Synthetic oligonucleotide
atgcaagccggcgcacaatgcgtaatcacag

SEQ ID NO: 335390 - DNA, 30 bp, Artificial Sequence
  Synthetic oligonucleotide
gcagtatagtctattgtagggagttcacag

SEQ ID NO: 335391 - DNA, 30 bp, Artificial Sequence
  Synthetic oligonucleotide
tctagagcgcggccacaacgttcaagacag

SEQ ID NO: 335392 - DNA, 30 bp, Artificial Sequence
  Synthetic oligonucleotide
gccgattcataagagcatagtcgaagacag

SEQ ID NO: 335393 - DNA, 31 bp, Artificial Sequence
  Synthetic oligonucleotide
cattctcagtggctcctgaaaccggagacag

SEQ ID NO: 335394 - DNA, 30 bp, Artificial Sequence
  Synthetic oligonucleotide
aaaactagccttcacatatcggggagacag

SEQ ID NO: 335395 - DNA, 30 bp, Artificial Sequence
  Synthetic oligonucleotide
cgtatgaatccccgtgcagactggagacag

SEQ ID NO: 335396 - DNA, 30 bp, Artificial Sequence
  Synthetic oligonucleotide
gttgtacctatttctctcagagaacgacag

SEQ ID NO: 335397 - DNA, 30 bp, Artificial Sequence
  Synthetic oligonucleotide
tgccgatgtccgcttatacggtgacgacag

SEQ ID NO: 335398 - DNA, 30 bp, Artificial Sequence
  Synthetic oligonucleotide
gaagtctggaaacgatcttgatcccgacag

SEQ ID NO: 335399 - DNA, 30 bp, Artificial Sequence
  Synthetic oligonucleotide
tgggacgatggtcggcgcatcgtccgacag

SEQ ID NO: 335400 - DNA, 30 bp, Artificial Sequence
  Synthetic oligonucleotide
tgtctcgtacggacacatcgtgctcgacag

SEQ ID NO: 335401 - DNA, 30 bp, Artificial Sequence
  Synthetic oligonucleotide
ctcatgaaatcataagggttttcaggacag

SEQ ID NO: 335402 - DNA, 30 bp, Artificial Sequence
  Synthetic oligonucleotide
aagaatatagtgaggcgtataaacggacag

SEQ ID NO: 335403 - DNA, 30 bp, Artificial Sequence
  Synthetic oligonucleotide
caataatccagcactcgtatagacggacag

SEQ ID NO: 335404 - DNA, 30 bp, Artificial Sequence
  Synthetic oligonucleotide
tcacttgaaataagtggtcgacgcggacag

SEQ ID NO: 335405 - DNA, 30 bp, Artificial Sequence
  Synthetic oligonucleotide
tccatagggggggtcagccctttcggacag

SEQ ID NO: 335406 - DNA, 30 bp, Artificial Sequence
  Synthetic oligonucleotide
caattggatctgttcggaaggtagggacag

SEQ ID NO: 335407 - DNA, 30 bp, Artificial Sequence
  Synthetic oligonucleotide
tgtctgacaagccgttacatcacgggacag

SEQ ID NO: 335408 - DNA, 30 bp, Artificial Sequence
  Synthetic oligonucleotide
aatggatcatttatgcgcggacttggacag

SEQ ID NO: 335409 - DNA, 30 bp, Artificial Sequence
  Synthetic oligonucleotide
gaatggtccacttccgcgcctaaatgacag

SEQ ID NO: 335410 - DNA, 30 bp, Artificial Sequence
  Synthetic oligonucleotide
gttcagctccatagaggttaaacctgacag

SEQ ID NO: 335411 - DNA, 30 bp, Artificial Sequence
  Synthetic oligonucleotide
ctcacggttgccacggtttttccgtgacag

SEQ ID NO: 335412 - DNA, 30 bp, Artificial Sequence
  Synthetic oligonucleotide
gcctaagctctcgctggtgccaattgacag

SEQ ID NO: 335413 - DNA, 30 bp, Artificial Sequence
  Synthetic oligonucleotide
ttttgtcgttaagagatcactaattgacag

SEQ ID NO: 335414 - DNA, 30 bp, Artificial Sequence
  Synthetic oligonucleotide
tggcgatgttccgtattagattattgacag

SEQ ID NO: 335415 - DNA, 30 bp, Artificial Sequence
  Synthetic oligonucleotide
tacgtggaaattatttgtaaggtttgacag

SEQ ID NO: 335416 - DNA, 30 bp, Artificial Sequence
  Synthetic oligonucleotide
ctataccgggagagcaagtagatcatacag

SEQ ID NO: 335417 - DNA, 30 bp, Artificial Sequence
  Synthetic oligonucleotide
agcatagtttcgatggcagcggggatacag

SEQ ID NO: 335418 - DNA, 30 bp, Artificial Sequence
  Synthetic oligonucleotide
aactcgttttacgtatgtaatgggatacag

SEQ ID NO: 335419 - DNA, 30 bp, Artificial Sequence
  Synthetic oligonucleotide
cccatccatctagagggggccatgatacag

SEQ ID NO: 335420 - DNA, 30 bp, Artificial Sequence
  Synthetic oligonucleotide
accactgcttggatcctcggtatgatacag

SEQ ID NO: 335421 - DNA, 30 bp, Artificial Sequence
  Synthetic oligonucleotide
agccagtctacggtcagacccgttatacag

SEQ ID NO: 335422 - DNA, 30 bp, Artificial Sequence
  Synthetic oligonucleotide
gtaaccgggcggaagcccaccaaactacag

SEQ ID NO: 335423 - DNA, 30 bp, Artificial Sequence
  Synthetic oligonucleotide
gaacagtatataaccggccaaggactacag

SEQ ID NO: 335424 - DNA, 30 bp, Artificial Sequence
  Synthetic oligonucleotide
aacccggtctgcagcggatttatactacag

SEQ ID NO: 335425 - DNA, 30 bp, Artificial Sequence
  Synthetic oligonucleotide
ctttatggggaacaaggtgagactctacag

SEQ ID NO: 335426 - DNA, 30 bp, Artificial Sequence
  Synthetic oligonucleotide
agagagcacagatgcaagctactagtacag

SEQ ID NO: 335427 - DNA, 30 bp, Artificial Sequence
  Synthetic oligonucleotide
aatcatgagcgacttgatcaggacgtacag

SEQ ID NO: 335428 - DNA, 30 bp, Artificial Sequence
  Synthetic oligonucleotide
ctttggcaggcgtgcacgcgtgtcgtacag

SEQ ID NO: 335429 - DNA, 30 bp, Artificial Sequence
  Synthetic oligonucleotide
gaatacagcatcacctgcggtggtgtacag

SEQ ID NO: 335430 - DNA, 30 bp, Artificial Sequence
  Synthetic oligonucleotide
atcgggtacccgtaagtgacccgattacag

SEQ ID NO: 335431 - DNA, 30 bp, Artificial Sequence
  Synthetic oligonucleotide
tatagaggcacccagggacctcccttacag

SEQ ID NO: 335432 - DNA, 30 bp, Artificial Sequence
  Synthetic oligonucleotide
ggtaagaggaagaccggtgtttagttacag

SEQ ID NO: 335433 - DNA, 30 bp, Artificial Sequence
  Synthetic oligonucleotide
ttaggcacgtcggagcgttgaacgttacag

SEQ ID NO: 335434 - DNA, 30 bp, Artificial Sequence
  Synthetic oligonucleotide
aatttgtaggtgtgttccatgccgttacag

SEQ ID NO: 335435 - DNA, 30 bp, Artificial Sequence
  Synthetic oligonucleotide
ggtgctcttacgcggcatacaatgttacag

SEQ ID NO: 335436 - DNA, 30 bp, Artificial Sequence
  Synthetic oligonucleotide
aaaagatcattatagaagtgcatgttacag

SEQ ID NO: 335437 - DNA, 30 bp, Artificial Sequence
  Synthetic oligonucleotide
tcgcgaaacccatgatgtagcattttacag

SEQ ID NO: 335438 - DNA, 30 bp, Artificial Sequence
  Synthetic oligonucleotide
cagaacagaattcgagcgcgtataaaccag

SEQ ID NO: 335439 - DNA, 30 bp, Artificial Sequence
  Synthetic oligonucleotide
aacaggcgttagcgagccttccagaaccag

SEQ ID NO: 335440 - DNA, 30 bp, Artificial Sequence
  Synthetic oligonucleotide
tcggacacggacgaacgaaatacgaaccag

SEQ ID NO: 335441 - DNA, 30 bp, Artificial Sequence
  Synthetic oligonucleotide
tacccgagtcggagttaaattttgaaccag

SEQ ID NO: 335442 - DNA, 30 bp, Artificial Sequence
  Synthetic oligonucleotide
atcggctattaaggtctatagaataaccag

SEQ ID NO: 335443 - DNA, 30 bp, Artificial Sequence
  Synthetic oligonucleotide
gttcgcgagattgttttaattactaaccag

SEQ ID NO: 335444 - DNA, 30 bp, Artificial Sequence
  Synthetic oligonucleotide
ctcgcagtcgttcgcctctatgcccaccag

SEQ ID NO: 335445 - DNA, 30 bp, Artificial Sequence
  Synthetic oligonucleotide
taatactgacacgtttcgggtggccaccag

SEQ ID NO: 335446 - DNA, 30 bp, Artificial Sequence
  Synthetic oligonucleotide
gattggcgtgtcggcgactggcggcaccag

SEQ ID NO: 335447 - DNA, 30 bp, Artificial Sequence
  Synthetic oligonucleotide
gcctagggtgtcacacggcacgtgcaccag

SEQ ID NO: 335448 - DNA, 30 bp, Artificial Sequence
  Synthetic oligonucleotide
tgaaactaattttagagtctggttcaccag

SEQ ID NO: 335449 - DNA, 30 bp, Artificial Sequence
  Synthetic oligonucleotide
tgatagttaatagtggggacaagagaccag

SEQ ID NO: 335450 - DNA, 30 bp, Artificial Sequence
  Synthetic oligonucleotide
agtgattccccctaggtatccttagaccag

SEQ ID NO: 335451 - DNA, 30 bp, Artificial Sequence
  Synthetic oligonucleotide
cccgcaccagtgcaaacacgccaggaccag

SEQ ID NO: 335452 - DNA, 30 bp, Artificial Sequence
  Synthetic oligonucleotide
ctagggtgccaaagtgcgtgctaggaccag

SEQ ID NO: 335453 - DNA, 30 bp, Artificial Sequence
  Synthetic oligonucleotide
tgatctgaactcccggcctcgcgggaccag

SEQ ID NO: 335454 - DNA, 30 bp, Artificial Sequence
  Synthetic oligonucleotide
tgcggtaaataccaagcatacctggaccag

SEQ ID NO: 335455 - DNA, 30 bp, Artificial Sequence
  Synthetic oligonucleotide
cgcgccgtccagttcgtattaaatgaccag

SEQ ID NO: 335456 - DNA, 30 bp, Artificial Sequence
  Synthetic oligonucleotide
gtacgagggtgatgcgtatgtaactaccag

SEQ ID NO: 335457 - DNA, 30 bp, Artificial Sequence
  Synthetic oligonucleotide
gttacacacctaacgtccgtgttctaccag

SEQ ID NO: 335458 - DNA, 30 bp, Artificial Sequence
  Synthetic oligonucleotide
tagggccactctagcggaatttagtaccag

SEQ ID NO: 335459 - DNA, 30 bp, Artificial Sequence
  Synthetic oligonucleotide
tgtaggcgtctggcagcgcgagcgtaccag

SEQ ID NO: 335460 - DNA, 30 bp, Artificial Sequence
  Synthetic oligonucleotide
tggaagaggtttacacgtaaattgtaccag

SEQ ID NO: 335461 - DNA, 30 bp, Artificial Sequence
  Synthetic oligonucleotide
acatctttggcgcttagaaatctaacccag

SEQ ID NO: 335462 - DNA, 30 bp, Artificial Sequence
  Synthetic oligonucleotide
tgaatcaacggcgctctagagttaacccag

SEQ ID NO: 335463 - DNA, 30 bp, Artificial Sequence
  Synthetic oligonucleotide
ctgtgagctcatacaatcggtttcacccag

SEQ ID NO: 335464 - DNA, 30 bp, Artificial Sequence
  Synthetic oligonucleotide
attggacacatccatgaagcacaaccccag

SEQ ID NO: 335465 - DNA, 30 bp, Artificial Sequence
  Synthetic oligonucleotide
accggtcatggggtagtgtccagaccccag

SEQ ID NO: 335466 - DNA, 30 bp, Artificial Sequence
  Synthetic oligonucleotide
gggacacggagtagcgatttaggcccccag

SEQ ID NO: 335467 - DNA, 30 bp, Artificial Sequence
  Synthetic oligonucleotide
tcgggaacgtattacctgccaccgccccag

SEQ ID NO: 335468 - DNA, 30 bp, Artificial Sequence
  Synthetic oligonucleotide
ttgtagatgatccttactcggtggccccag

SEQ ID NO: 335469 - DNA, 30 bp, Artificial Sequence
  Synthetic oligonucleotide
gtcaattactgacggaatatgtttccccag

SEQ ID NO: 335470 - DNA, 30 bp, Artificial Sequence
  Synthetic oligonucleotide
gatttgtctcggtacggggatggagcccag

SEQ ID NO: 335471 - DNA, 30 bp, Artificial Sequence
  Synthetic oligonucleotide
aatgcggctttaaataagtatgtagcccag

SEQ ID NO: 335472 - DNA, 30 bp, Artificial Sequence
  Synthetic oligonucleotide
tagcgataataccgctcaagcttcgcccag

SEQ ID NO: 335473 - DNA, 30 bp, Artificial Sequence
  Synthetic oligonucleotide
agtgtaatttcttgtctcaagaaggcccag

SEQ ID NO: 335474 - DNA, 30 bp, Artificial Sequence
  Synthetic oligonucleotide
gttaacacttgcggcataatagaggcccag

SEQ ID NO: 335475 - DNA, 30 bp, Artificial Sequence
  Synthetic oligonucleotide
accggtgttggacatggagacggggcccag

SEQ ID NO: 335476 - DNA, 30 bp, Artificial Sequence
  Synthetic oligonucleotide
tccacagacaacgggaaacaagtctcccag

SEQ ID NO: 335477 - DNA, 30 bp, Artificial Sequence
  Synthetic oligonucleotide
aagcatcttagcagacgtctggtctcccag

SEQ ID NO: 335478 - DNA, 30 bp, Artificial Sequence
  Synthetic oligonucleotide
cgggttgaatcacagagggtcgcgtcccag

SEQ ID NO: 335479 - DNA, 30 bp, Artificial Sequence
  Synthetic oligonucleotide
cggagcatgctgcaggttcaactgtcccag

SEQ ID NO: 335480 - DNA, 30 bp, Artificial Sequence
  Synthetic oligonucleotide
catcgctgggagggacgtcggacttcccag

SEQ ID NO: 335481 - DNA, 30 bp, Artificial Sequence
  Synthetic oligonucleotide
atattcttactatacgataagtgaagccag

SEQ ID NO: 335482 - DNA, 30 bp, Artificial Sequence
  Synthetic oligonucleotide
ccgaatcaagacatggaacgccacagccag

SEQ ID NO: 335483 - DNA, 30 bp, Artificial Sequence
  Synthetic oligonucleotide
cgggcgtctaccgtgtactttcgcagccag

SEQ ID NO: 335484 - DNA, 30 bp, Artificial Sequence
  Synthetic oligonucleotide
agacgttatagagtgaccctcggcagccag

SEQ ID NO: 335485 - DNA, 30 bp, Artificial Sequence
  Synthetic oligonucleotide
ccagattaatcgggccgcacgtagagccag

SEQ ID NO: 335486 - DNA, 30 bp, Artificial Sequence
  Synthetic oligonucleotide
tgggtatttatggaacccatgagtagccag

SEQ ID NO: 335487 - DNA, 30 bp, Artificial Sequence
  Synthetic oligonucleotide
ttatcgatgacttatgattcgtgtagccag

SEQ ID NO: 335488 - DNA, 31 bp, Artificial Sequence
  Synthetic oligonucleotide
gtagaatcgctgccccctatcctgacgccag

SEQ ID NO: 335489 - DNA, 30 bp, Artificial Sequence
  Synthetic oligonucleotide
ccggcgactggctagcagacagaccgccag

SEQ ID NO: 335490 - DNA, 30 bp, Artificial Sequence
  Synthetic oligonucleotide
gcaatggcatgtttaactgtatagcgccag

SEQ ID NO: 335491 - DNA, 30 bp, Artificial Sequence
  Synthetic oligonucleotide
agggcaaaactactacaatgagctcgccag

SEQ ID NO: 335492 - DNA, 30 bp, Artificial Sequence
  Synthetic oligonucleotide
atcttcgccatagcttgagattctcgccag

SEQ ID NO: 335493 - DNA, 30 bp, Artificial Sequence
  Synthetic oligonucleotide
gcttggcagatacgaggttaccttcgccag

SEQ ID NO: 335494 - DNA, 30 bp, Artificial Sequence
  Synthetic oligonucleotide
aagtatgtgaaccgtcaatgcgaaggccag

SEQ ID NO: 335495 - DNA, 30 bp, Artificial Sequence
  Synthetic oligonucleotide
tactaattatgtgacgtccttagcggccag

SEQ ID NO: 335496 - DNA, 31 bp, Artificial Sequence
  Synthetic oligonucleotide
gttggagacccatgaccattacctcggccag

SEQ ID NO: 335497 - DNA, 30 bp, Artificial Sequence
  Synthetic oligonucleotide
gtaaaagggtgcggctatagtccgggccag

SEQ ID NO: 335498 - DNA, 30 bp, Artificial Sequence
  Synthetic oligonucleotide
gtgtgtttagcggagaggctagtgggccag

SEQ ID NO: 335499 - DNA, 29 bp, Artificial Sequence
  Synthetic oligonucleotide
acgttaatgcaagatgggataatggccag

SEQ ID NO: 335500 - DNA, 30 bp, Artificial Sequence
  Synthetic oligonucleotide
ctttgaatatgtcgcgccgtaactggccag

SEQ ID NO: 335501 - DNA, 30 bp, Artificial Sequence
  Synthetic oligonucleotide
gaaataagtaaccaaggccgagcctgccag

SEQ ID NO: 335502 - DNA, 29 bp, Artificial Sequence
  Synthetic oligonucleotide
ggctgctgccggccgtgacggggtgccag

SEQ ID NO: 335503 - DNA, 30 bp, Artificial Sequence
  Synthetic oligonucleotide
acccaacgccttttatggagttattgccag

SEQ ID NO: 335504 - DNA, 30 bp, Artificial Sequence
  Synthetic oligonucleotide
gcgctgcccgacggatgcattctttgccag

SEQ ID NO: 335505 - DNA, 30 bp, Artificial Sequence
  Synthetic oligonucleotide
taatggagcttggcttaaaacttttgccag

SEQ ID NO: 335506 - DNA, 30 bp, Artificial Sequence
  Synthetic oligonucleotide
tgcacgtgaccggaaaggacgcaaatccag

SEQ ID NO: 335507 - DNA, 30 bp, Artificial Sequence
  Synthetic oligonucleotide
gtactatgccgattgccgagataaatccag

SEQ ID NO: 335508 - DNA, 30 bp, Artificial Sequence
  Synthetic oligonucleotide
gttctctcaatagaaaaccatcgaatccag

SEQ ID NO: 335509 - DNA, 30 bp, Artificial Sequence
  Synthetic oligonucleotide
agttcctcttaagacaataaggtaatccag

SEQ ID NO: 335510 - DNA, 30 bp, Artificial Sequence
  Synthetic oligonucleotide
gtctaagatacggtccacgaaagcatccag

SEQ ID NO: 335511 - DNA, 30 bp, Artificial Sequence
  Synthetic oligonucleotide
ttctaaaacgttgactcttacgtcatccag

SEQ ID NO: 335512 - DNA, 30 bp, Artificial Sequence
  Synthetic oligonucleotide
acccacaaatgtcttgtatcctagatccag

SEQ ID NO: 335513 - DNA, 30 bp, Artificial Sequence
  Synthetic oligonucleotide
ccactgtctttgcctccagcaaatatccag

SEQ ID NO: 335514 - DNA, 30 bp, Artificial Sequence
  Synthetic oligonucleotide
cgtggcgtcgagaccataagtgatatccag

SEQ ID NO: 335515 - DNA, 30 bp, Artificial Sequence
  Synthetic oligonucleotide
agtcaccgcacgttgctgttctttatccag

SEQ ID NO: 335516 - DNA, 30 bp, Artificial Sequence
  Synthetic oligonucleotide
tcacggcgcctgaccctcaaagaactccag

SEQ ID NO: 335517 - DNA, 30 bp, Artificial Sequence
  Synthetic oligonucleotide
tcacgagccctgggataagcggcactccag

SEQ ID NO: 335518 - DNA, 30 bp, Artificial Sequence
  Synthetic oligonucleotide
tatctatcctcccggtctggctcactccag

SEQ ID NO: 335519 - DNA, 30 bp, Artificial Sequence
  Synthetic oligonucleotide
gtgtcgggctgttattcgtaattcctccag

SEQ ID NO: 335520 - DNA, 30 bp, Artificial Sequence
  Synthetic oligonucleotide
attggattgagctttgtaggcaatctccag

SEQ ID NO: 335521 - DNA, 30 bp, Artificial Sequence
  Synthetic oligonucleotide
gagctgtgatacaaccaggagaatctccag

SEQ ID NO: 335522 - DNA, 30 bp, Artificial Sequence
  Synthetic oligonucleotide
agttcccagcatgagtgaggtcaagtccag

SEQ ID NO: 335523 - DNA, 30 bp, Artificial Sequence
  Synthetic oligonucleotide
aattgtgtggagacacagtatttagtccag

SEQ ID NO: 335524 - DNA, 30 bp, Artificial Sequence
  Synthetic oligonucleotide
agttgtacccggtaaatggaaaacgtccag

SEQ ID NO: 335525 - DNA, 30 bp, Artificial Sequence
  Synthetic oligonucleotide
atacagtaagtcagcctggagaacgtccag

SEQ ID NO: 335526 - DNA, 30 bp, Artificial Sequence
  Synthetic oligonucleotide
gcctacgttgaagacgtatcgaacgtccag

SEQ ID NO: 335527 - DNA, 30 bp, Artificial Sequence
  Synthetic oligonucleotide
tctgaatgcaccactcgtcctgaggtccag

SEQ ID NO: 335528 - DNA, 30 bp, Artificial Sequence
  Synthetic oligonucleotide
gcgctggggagatgaacttttggggtccag

SEQ ID NO: 335529 - DNA, 30 bp, Artificial Sequence
  Synthetic oligonucleotide
ccggcagcaatataacttatggctgtccag

SEQ ID NO: 335530 - DNA, 30 bp, Artificial Sequence
  Synthetic oligonucleotide
aatgaaccagtagggtctctgattgtccag

SEQ ID NO: 335531 - DNA, 30 bp, Artificial Sequence
  Synthetic oligonucleotide
tgcgtgtccccgattttgctccaattccag

SEQ ID NO: 335532 - DNA, 30 bp, Artificial Sequence
  Synthetic oligonucleotide
aaagtgtattgctataaggtacgattccag

SEQ ID NO: 335533 - DNA, 30 bp, Artificial Sequence
  Synthetic oligonucleotide
cccctagaagtagggaagaccggattccag

SEQ ID NO: 335534 - DNA, 30 bp, Artificial Sequence
  Synthetic oligonucleotide
ttataggatattggatcctagtacttccag

SEQ ID NO: 335535 - DNA, 30 bp, Artificial Sequence
  Synthetic oligonucleotide
ccagtgagacaaataagcgcctgcttccag

SEQ ID NO: 335536 - DNA, 30 bp, Artificial Sequence
  Synthetic oligonucleotide
taaagcgggatgaagcctaggcggttccag

SEQ ID NO: 335537 - DNA, 30 bp, Artificial Sequence
  Synthetic oligonucleotide
cttctagacacgtgccgtcccgtgttccag

SEQ ID NO: 335538 - DNA, 28 bp, Artificial Sequence
  Synthetic oligonucleotide
aagtattacatactatgtcgctttccag

SEQ ID NO: 335539 - DNA, 30 bp, Artificial Sequence
  Synthetic oligonucleotide
ctgtcaacttacggagagcttgtaaagcag

SEQ ID NO: 335540 - DNA, 30 bp, Artificial Sequence
  Synthetic oligonucleotide
atatattagggaagacgtaagtacaagcag

SEQ ID NO: 335541 - DNA, 30 bp, Artificial Sequence
  Synthetic oligonucleotide
atgccgttgctcacttggagctccaagcag

SEQ ID NO: 335542 - DNA, 30 bp, Artificial Sequence
  Synthetic oligonucleotide
gcacattctagaggtcgggccttgaagcag

SEQ ID NO: 335543 - DNA, 30 bp, Artificial Sequence
  Synthetic oligonucleotide
accatcgaaggcacggcgacgccacagcag

SEQ ID NO: 335544 - DNA, 29 bp, Artificial Sequence
  Synthetic oligonucleotide
taacagactgatgaaacacttcccagcag

SEQ ID NO: 335545 - DNA, 30 bp, Artificial Sequence
  Synthetic oligonucleotide
gatggccccagcaggatggtgagccagcag

SEQ ID NO: 335546 - DNA, 30 bp, Artificial Sequence
  Synthetic oligonucleotide
tttattgggcatcccggtggttcgcagcag

SEQ ID NO: 335547 - DNA, 30 bp, Artificial Sequence
  Synthetic oligonucleotide
ctagtgtgatgttataacatctttcagcag

SEQ ID NO: 335548 - DNA, 30 bp, Artificial Sequence
  Synthetic oligonucleotide
ccccgtgcacggttaagcccgcgcgagcag

SEQ ID NO: 335549 - DNA, 30 bp, Artificial Sequence
  Synthetic oligonucleotide
actacgccgggttctcgcccaaaggagcag

SEQ ID NO: 335550 - DNA, 30 bp, Artificial Sequence
  Synthetic oligonucleotide
ggacttcatgacgtgggatctagggagcag

SEQ ID NO: 335551 - DNA, 30 bp, Artificial Sequence
  Synthetic oligonucleotide
aaagggtgggagggaatagagaatgagcag

SEQ ID NO: 335552 - DNA, 30 bp, Artificial Sequence
  Synthetic oligonucleotide
gcagcctgataggggtcacggcgtgagcag

SEQ ID NO: 335553 - DNA, 30 bp, Artificial Sequence
  Synthetic oligonucleotide
tttcattatgggaatggtttcggatagcag

SEQ ID NO: 335554 - DNA, 30 bp, Artificial Sequence
  Synthetic oligonucleotide
gtatcccgtctatttactgatgactagcag

SEQ ID NO: 335555 - DNA, 30 bp, Artificial Sequence
  Synthetic oligonucleotide
ctccaagtcgggtctcgataacgctagcag

SEQ ID NO: 335556 - DNA, 30 bp, Artificial Sequence
  Synthetic oligonucleotide
cgagagtacaaacgtagctgatccacgcag

SEQ ID NO: 335557 - DNA, 30 bp, Artificial Sequence
  Synthetic oligonucleotide
ggagcccagcttccgcaatcaagtacgcag

SEQ ID NO: 335558 - DNA, 30 bp, Artificial Sequence
  Synthetic oligonucleotide
tatatcgaaattgctctctactaaccgcag

SEQ ID NO: 335559 - DNA, 30 bp, Artificial Sequence
  Synthetic oligonucleotide
gctgatgccataggacggcatgtcccgcag

SEQ ID NO: 335560 - DNA, 30 bp, Artificial Sequence
  Synthetic oligonucleotide
ttggcaaactatggtaatttcccgccgcag

SEQ ID NO: 335561 - DNA, 30 bp, Artificial Sequence
  Synthetic oligonucleotide
tatagaaaggggctttcccactatccgcag

SEQ ID NO: 335562 - DNA, 30 bp, Artificial Sequence
  Synthetic oligonucleotide
ggtatacagggctgaacccacattccgcag

SEQ ID NO: 335563 - DNA, 30 bp, Artificial Sequence
  Synthetic oligonucleotide
ttgtataggggttggcttgggcgagcgcag

SEQ ID NO: 335564 - DNA, 30 bp, Artificial Sequence
  Synthetic oligonucleotide
gacgacgatgcggtgcatagccacgcgcag

SEQ ID NO: 335565 - DNA, 30 bp, Artificial Sequence
  Synthetic oligonucleotide
aaactatagtaccggtcacgttttgcgcag

SEQ ID NO: 335566 - DNA, 30 bp, Artificial Sequence
  Synthetic oligonucleotide
aggtgatgacataagatctgctagtcgcag

SEQ ID NO: 335567 - DNA, 30 bp, Artificial Sequence
  Synthetic oligonucleotide
ttctactgagcgtttacgaccctcaggcag

SEQ ID NO: 335568 - DNA, 30 bp, Artificial Sequence
  Synthetic oligonucleotide
gaatcagacatcgaggttcacccgaggcag

SEQ ID NO: 335569 - DNA, 30 bp, Artificial Sequence
  Synthetic oligonucleotide
attgtcagggttaattcttaacggaggcag

SEQ ID NO: 335570 - DNA, 30 bp, Artificial Sequence
  Synthetic oligonucleotide
atggggaccgtagggggtgaaggtaggcag

SEQ ID NO: 335571 - DNA, 30 bp, Artificial Sequence
  Synthetic oligonucleotide
tgccgcgctgtagtaaagcatggtaggcag

SEQ ID NO: 335572 - DNA, 30 bp, Artificial Sequence
  Synthetic oligonucleotide
tacgtctggaacgctaacgggcttaggcag

SEQ ID NO: 335573 - DNA, 30 bp, Artificial Sequence
  Synthetic oligonucleotide
taagatgcagcgagctcatcgccacggcag

SEQ ID NO: 335574 - DNA, 30 bp, Artificial Sequence
  Synthetic oligonucleotide
gggttcacttagccacgcatccgacggcag

SEQ ID NO: 335575 - DNA, 30 bp, Artificial Sequence
  Synthetic oligonucleotide
gtaggctatctagctctaactcggcggcag

SEQ ID NO: 335576 - DNA, 30 bp, Artificial Sequence
  Synthetic oligonucleotide
cgtgttctccaggggtcattatatcggcag

SEQ ID NO: 335577 - DNA, 30 bp, Artificial Sequence
  Synthetic oligonucleotide
aatgagggctttcggtcgactagcgggcag

SEQ ID NO: 335578 - DNA, 30 bp, Artificial Sequence
  Synthetic oligonucleotide
gaggatggaaagccccgcccgaaggggcag

SEQ ID NO: 335579 - DNA, 30 bp, Artificial Sequence
  Synthetic oligonucleotide
gtgcggcgcagtattgcaaaccgggggcag

SEQ ID NO: 335580 - DNA, 30 bp, Artificial Sequence
  Synthetic oligonucleotide
gatggggacagtaaaggggatcgtgggcag

SEQ ID NO: 335581 - DNA, 30 bp, Artificial Sequence
  Synthetic oligonucleotide
atttgcaaagattagttagaaattgggcag

SEQ ID NO: 335582 - DNA, 30 bp, Artificial Sequence
  Synthetic oligonucleotide
atcttgatgctggtttataacaaatggcag

SEQ ID NO: 335583 - DNA, 30 bp, Artificial Sequence
  Synthetic oligonucleotide
agtcacgcggagcgaaattgttaatggcag

SEQ ID NO: 335584 - DNA, 30 bp, Artificial Sequence
  Synthetic oligonucleotide
aaaaacggccgcctcaaggggaactggcag

SEQ ID NO: 335585 - DNA, 30 bp, Artificial Sequence
  Synthetic oligonucleotide
ctgaggatgatatatgggatgcagtggcag

SEQ ID NO: 335586 - DNA, 30 bp, Artificial Sequence
  Synthetic oligonucleotide
acggtgtacgaggtggactctaggtggcag

SEQ ID NO: 335587 - DNA, 30 bp, Artificial Sequence
  Synthetic oligonucleotide
acagtatcacgagtgtctaataattggcag

SEQ ID NO: 335588 - DNA, 30 bp, Artificial Sequence
  Synthetic oligonucleotide
ggcactttgtgaggaacgtggacttggcag

SEQ ID NO: 335589 - DNA, 30 bp, Artificial Sequence
  Synthetic oligonucleotide
tatatggtcttccggtgcggtagaatgcag

SEQ ID NO: 335590 - DNA, 30 bp, Artificial Sequence
  Synthetic oligonucleotide
gattagtctcatttaaccggacacatgcag

SEQ ID NO: 335591 - DNA, 30 bp, Artificial Sequence
  Synthetic oligonucleotide
ctcgaatttcaaaccgcaaagcacatgcag

SEQ ID NO: 335592 - DNA, 30 bp, Artificial Sequence
  Synthetic oligonucleotide
gcaatgctgtgcgcggcgaagcctatgcag

SEQ ID NO: 335593 - DNA, 30 bp, Artificial Sequence
  Synthetic oligonucleotide
agtgtgcacggcctgggtgcctgtatgcag

SEQ ID NO: 335594 - DNA, 30 bp, Artificial Sequence
  Synthetic oligonucleotide
gcacgtgtgtgtacatgatcgacactgcag

SEQ ID NO: 335595 - DNA, 30 bp, Artificial Sequence
  Synthetic oligonucleotide
ggaatttccagggagatcttccggctgcag

SEQ ID NO: 335596 - DNA, 30 bp, Artificial Sequence
  Synthetic oligonucleotide
tgccgaatgccacaagatcgaagtctgcag

SEQ ID NO: 335597 - DNA, 30 bp, Artificial Sequence
  Synthetic oligonucleotide
agtagtatcatctaccggctaccagtgcag

SEQ ID NO: 335598 - DNA, 30 bp, Artificial Sequence
  Synthetic oligonucleotide
gtggttatgtaaccgcactaggtggtgcag

SEQ ID NO: 335599 - DNA, 30 bp, Artificial Sequence
  Synthetic oligonucleotide
ccctgtctagggctgatcgaatacttgcag

SEQ ID NO: 335600 - DNA, 30 bp, Artificial Sequence
  Synthetic oligonucleotide
acctaatcaacctaggagtccagaaatcag

SEQ ID NO: 335601 - DNA, 30 bp, Artificial Sequence
  Synthetic oligonucleotide
agtgctctattaatacttctcagaaatcag

SEQ ID NO: 335602 - DNA, 30 bp, Artificial Sequence
  Synthetic oligonucleotide
cccgaccgcattcggagaccctgaaatcag

SEQ ID NO: 335603 - DNA, 30 bp, Artificial Sequence
  Synthetic oligonucleotide
gggttcttctgacaggatggcttaaatcag

SEQ ID NO: 335604 - DNA, 30 bp, Artificial Sequence
  Synthetic oligonucleotide
agcgcgcgagtcccgaggtctcgcaatcag

SEQ ID NO: 335605 - DNA, 30 bp, Artificial Sequence
  Synthetic oligonucleotide
accggatttattatttgattcggcaatcag

SEQ ID NO: 335606 - DNA, 30 bp, Artificial Sequence
  Synthetic oligonucleotide
agcctcccactaagatttgtgcagaatcag

SEQ ID NO: 335607 - DNA, 30 bp, Artificial Sequence
  Synthetic oligonucleotide
gcagcctggaccactcaattatcgaatcag

SEQ ID NO: 335608 - DNA, 30 bp, Artificial Sequence
  Synthetic oligonucleotide
gcctcccgtggaggctctgaaaggaatcag

SEQ ID NO: 335609 - DNA, 30 bp, Artificial Sequence
  Synthetic oligonucleotide
attaacaccggcgacttatgtgataatcag

SEQ ID NO: 335610 - DNA, 30 bp, Artificial Sequence
  Synthetic oligonucleotide
ggatgttattggcgttgaggaggtaatcag

SEQ ID NO: 335611 - DNA, 30 bp, Artificial Sequence
  Synthetic oligonucleotide
gtcttaatgggtatagcatatggtaatcag

SEQ ID NO: 335612 - DNA, 30 bp, Artificial Sequence
  Synthetic oligonucleotide
tcttcgtgattagattgtcatgttaatcag

SEQ ID NO: 335613 - DNA, 30 bp, Artificial Sequence
  Synthetic oligonucleotide
cgccttgatcaatatatccatatagatcag

SEQ ID NO: 335614 - DNA, 30 bp, Artificial Sequence
  Synthetic oligonucleotide
taaaactcatgaagcggatatagggatcag

SEQ ID NO: 335615 - DNA, 30 bp, Artificial Sequence
  Synthetic oligonucleotide
agactggtaagcgttacgcgccactatcag

SEQ ID NO: 335616 - DNA, 30 bp, Artificial Sequence
  Synthetic oligonucleotide
caaccgatggacaaggcattgacctatcag

SEQ ID NO: 335617 - DNA, 30 bp, Artificial Sequence
  Synthetic oligonucleotide
ttagccggtggatagatggtgtcctatcag

SEQ ID NO: 335618 - DNA, 30 bp, Artificial Sequence
  Synthetic oligonucleotide
gtgatataagctcggatccagcagtatcag

SEQ ID NO: 335619 - DNA, 30 bp, Artificial Sequence
  Synthetic oligonucleotide
aagtattaacgtgtacttaatcaacctcag

SEQ ID NO: 335620 - DNA, 29 bp, Artificial Sequence
  Synthetic oligonucleotide
aagccacacagtgacagtcgtcacctcag

SEQ ID NO: 335621 - DNA, 30 bp, Artificial Sequence
  Synthetic oligonucleotide
gacacaagcattgtcgcggccaagcctcag

SEQ ID NO: 335622 - DNA, 30 bp, Artificial Sequence
  Synthetic oligonucleotide
acaccgctaatctgtacagaaaggcctcag

SEQ ID NO: 335623 - DNA, 30 bp, Artificial Sequence
  Synthetic oligonucleotide
taccagggttattgttcccagggcgctcag

SEQ ID NO: 335624 - DNA, 30 bp, Artificial Sequence
  Synthetic oligonucleotide
ggtatataattggtttatggaaatgctcag

SEQ ID NO: 335625 - DNA, 30 bp, Artificial Sequence
  Synthetic oligonucleotide
gctatttaataagtaatcaaaacatctcag

SEQ ID NO: 335626 - DNA, 30 bp, Artificial Sequence
  Synthetic oligonucleotide
gatatttagtgagtcactggcgtctctcag

SEQ ID NO: 335627 - DNA, 30 bp, Artificial Sequence
  Synthetic oligonucleotide
aaacatcgtttcggtggcgcctggtctcag

SEQ ID NO: 335628 - DNA, 30 bp, Artificial Sequence
  Synthetic oligonucleotide
tagtcatctgcacagaaagatatgtctcag

SEQ ID NO: 335629 - DNA, 30 bp, Artificial Sequence
  Synthetic oligonucleotide
ctctctcgaccggttgatctagattctcag

SEQ ID NO: 335630 - DNA, 30 bp, Artificial Sequence
  Synthetic oligonucleotide
ccggtaacatcccagcgggactgttctcag

SEQ ID NO: 335631 - DNA, 30 bp, Artificial Sequence
  Synthetic oligonucleotide
aaaggagagcctctgggacttcaaagtcag

SEQ ID NO: 335632 - DNA, 30 bp, Artificial Sequence
  Synthetic oligonucleotide
gacttagtagtattgcttaaatgaagtcag

SEQ ID NO: 335633 - DNA, 30 bp, Artificial Sequence
  Synthetic oligonucleotide
ttatcgaccctgtcatgtgtcggcagtcag

SEQ ID NO: 335634 - DNA, 30 bp, Artificial Sequence
  Synthetic oligonucleotide
aacatcgcatgtgattatcaaacgagtcag

SEQ ID NO: 335635 - DNA, 30 bp, Artificial Sequence
  Synthetic oligonucleotide
gtcattatgcctggggagatccggagtcag

SEQ ID NO: 335636 - DNA, 30 bp, Artificial Sequence
  Synthetic oligonucleotide
tggtcattccgatccccaagcgcacgtcag

SEQ ID NO: 335637 - DNA, 30 bp, Artificial Sequence
  Synthetic oligonucleotide
tttactcgtacaccgtcatgtgagcgtcag

SEQ ID NO: 335638 - DNA, 30 bp, Artificial Sequence
  Synthetic oligonucleotide
catatgcacgatgtagcaacgacgcgtcag

SEQ ID NO: 335639 - DNA, 30 bp, Artificial Sequence
  Synthetic oligonucleotide
cgcagaattccacgtgtggggcatcgtcag

SEQ ID NO: 335640 - DNA, 30 bp, Artificial Sequence
  Synthetic oligonucleotide
tcggcgggctgggtgcagcttgttcgtcag

SEQ ID NO: 335641 - DNA, 30 bp, Artificial Sequence
  Synthetic oligonucleotide
gtcccgctcgcgagggcacatacaggtcag

SEQ ID NO: 335642 - DNA, 30 bp, Artificial Sequence
  Synthetic oligonucleotide
gcggttgttgccatgatcctacgaggtcag

SEQ ID NO: 335643 - DNA, 30 bp, Artificial Sequence
  Synthetic oligonucleotide
aagttcatcgactataatgggataggtcag

SEQ ID NO: 335644 - DNA, 30 bp, Artificial Sequence
  Synthetic oligonucleotide
atgcgtatccttatcgacggtttaggtcag

SEQ ID NO: 335645 - DNA, 30 bp, Artificial Sequence
  Synthetic oligonucleotide
atagtgcaagtacagatgccacggggtcag

SEQ ID NO: 335646 - DNA, 30 bp, Artificial Sequence
  Synthetic oligonucleotide
ttatcgactatgtttgatggcaatggtcag

SEQ ID NO: 335647 - DNA, 30 bp, Artificial Sequence
  Synthetic oligonucleotide
gtataagcggcggaatcggggagtggtcag

SEQ ID NO: 335648 - DNA, 31 bp, Artificial Sequence
  Synthetic oligonucleotide
ggaccacgccacgagctacaacattggtcag

SEQ ID NO: 335649 - DNA, 30 bp, Artificial Sequence
  Synthetic oligonucleotide
gagaaatgctgacacctgaggaaatgtcag

SEQ ID NO: 335650 - DNA, 30 bp, Artificial Sequence
  Synthetic oligonucleotide
ctgctaaagggaacccggtgtctatgtcag

SEQ ID NO: 335651 - DNA, 30 bp, Artificial Sequence
  Synthetic oligonucleotide
actgtccggaaaagcacaggcacctgtcag

SEQ ID NO: 335652 - DNA, 30 bp, Artificial Sequence
  Synthetic oligonucleotide
aagggtccaaagttgtttaaacgctgtcag

SEQ ID NO: 335653 - DNA, 30 bp, Artificial Sequence
  Synthetic oligonucleotide
gtcactgccaacgacaactcaacgtgtcag

SEQ ID NO: 335654 - DNA, 30 bp, Artificial Sequence
  Synthetic oligonucleotide
atatgcatttgccgggagtcagggtgtcag

SEQ ID NO: 335655 - DNA, 30 bp, Artificial Sequence
  Synthetic oligonucleotide
aatatattacgctacccacgcgggtgtcag

SEQ ID NO: 335656 - DNA, 30 bp, Artificial Sequence
  Synthetic oligonucleotide
cacccccgccatgcgcgttaactgtgtcag

SEQ ID NO: 335657 - DNA, 30 bp, Artificial Sequence
  Synthetic oligonucleotide
tcttacacagctctatccaaaaattgtcag

SEQ ID NO: 335658 - DNA, 30 bp, Artificial Sequence
  Synthetic oligonucleotide
tatacacatgagctggactgcttaattcag

SEQ ID NO: 335659 - DNA, 30 bp, Artificial Sequence
  Synthetic oligonucleotide
taatcctcggttggaaaactcctgattcag

SEQ ID NO: 335660 - DNA, 30 bp, Artificial Sequence
  Synthetic oligonucleotide
tctgtggtagttaggtttcaaaatattcag

SEQ ID NO: 335661 - DNA, 30 bp, Artificial Sequence
  Synthetic oligonucleotide
gtagttcttcagtcgggtatgaatattcag

SEQ ID NO: 335662 - DNA, 30 bp, Artificial Sequence
  Synthetic oligonucleotide
aaaaaagcgatcctttcataagctattcag

SEQ ID NO: 335663 - DNA, 30 bp, Artificial Sequence
  Synthetic oligonucleotide
tcccagtttcaaaagggcaggagtattcag

SEQ ID NO: 335664 - DNA, 30 bp, Artificial Sequence
  Synthetic oligonucleotide
tgcactttcacaaatctatcttgtattcag

SEQ ID NO: 335665 - DNA, 30 bp, Artificial Sequence
  Synthetic oligonucleotide
aatggttatagttcagaggagaaacttcag

SEQ ID NO: 335666 - DNA, 30 bp, Artificial Sequence
  Synthetic oligonucleotide
gaatcgccttacggacagactgtacttcag

SEQ ID NO: 335667 - DNA, 30 bp, Artificial Sequence
  Synthetic oligonucleotide
tatgacaacggtgtgaggtatcagcttcag

SEQ ID NO: 335668 - DNA, 30 bp, Artificial Sequence
  Synthetic oligonucleotide
cgagcccgattcataagaagggggcttcag

SEQ ID NO: 335669 - DNA, 30 bp, Artificial Sequence
  Synthetic oligonucleotide
cagcgaccctttaacagccaaatgcttcag

SEQ ID NO: 335670 - DNA, 30 bp, Artificial Sequence
  Synthetic oligonucleotide
cgtgtacgtttagagagggtttatcttcag

SEQ ID NO: 335671 - DNA, 30 bp, Artificial Sequence
  Synthetic oligonucleotide
aacccctaatctgaacaggcgattcttcag

SEQ ID NO: 335672 - DNA, 30 bp, Artificial Sequence
  Synthetic oligonucleotide
gattaattcattgcgtcttcctttcttcag

SEQ ID NO: 335673 - DNA, 30 bp, Artificial Sequence
  Synthetic oligonucleotide
tgttgaatgtaggtaggcatctaagttcag

SEQ ID NO: 335674 - DNA, 30 bp, Artificial Sequence
  Synthetic oligonucleotide
aaaaatgtgaaggattaagacttagttcag

SEQ ID NO: 335675 - DNA, 30 bp, Artificial Sequence
  Synthetic oligonucleotide
acggcaagtttcaaccgttcggacgttcag

SEQ ID NO: 335676 - DNA, 30 bp, Artificial Sequence
  Synthetic oligonucleotide
gatgtatagttaagccaccgcgaggttcag

SEQ ID NO: 335677 - DNA, 30 bp, Artificial Sequence
  Synthetic oligonucleotide
tatgaatacaagcatgctcaataggttcag

SEQ ID NO: 335678 - DNA, 30 bp, Artificial Sequence
  Synthetic oligonucleotide
ggaagcccgaaagcgggaaacgcggttcag

SEQ ID NO: 335679 - DNA, 30 bp, Artificial Sequence
  Synthetic oligonucleotide
ctcactaaggtgagggcggttacatttcag

SEQ ID NO: 335680 - DNA, 30 bp, Artificial Sequence
  Synthetic oligonucleotide
atcgtcatgtacggggtagacccatttcag

SEQ ID NO: 335681 - DNA, 31 bp, Artificial Sequence
  Synthetic oligonucleotide
actcgaggatggagtcaataatcactttcag

SEQ ID NO: 335682 - DNA, 30 bp, Artificial Sequence
  Synthetic oligonucleotide
agctcgtcctgagagttcgggctctttcag

SEQ ID NO: 335683 - DNA, 30 bp, Artificial Sequence
  Synthetic oligonucleotide
ggctgtgccttcgtgatcgtcccgtttcag

SEQ ID NO: 335684 - DNA, 30 bp, Artificial Sequence
  Synthetic oligonucleotide
gactctcgataggacggtcttaattttcag

SEQ ID NO: 335685 - DNA, 30 bp, Artificial Sequence
  Synthetic oligonucleotide
gctttgataacatgtgactgtgaaaaagag

SEQ ID NO: 335686 - DNA, 30 bp, Artificial Sequence
  Synthetic oligonucleotide
atggtcaatcaatttatgatatgaaaagag

SEQ ID NO: 335687 - DNA, 30 bp, Artificial Sequence
  Synthetic oligonucleotide
caggtggcccacaatcagaatccgaaagag

SEQ ID NO: 335688 - DNA, 30 bp, Artificial Sequence
  Synthetic oligonucleotide
ccgccgaccagaggaaatattttgaaagag

SEQ ID NO: 335689 - DNA, 30 bp, Artificial Sequence
  Synthetic oligonucleotide
tttaccgggcaactatttagtgataaagag

SEQ ID NO: 335690 - DNA, 30 bp, Artificial Sequence
  Synthetic oligonucleotide
gaaatcgggtcattatagccatataaagag

SEQ ID NO: 335691 - DNA, 30 bp, Artificial Sequence
  Synthetic oligonucleotide
cgcccaccttgtggctcgtaataacaagag

SEQ ID NO: 335692 - DNA, 30 bp, Artificial Sequence
  Synthetic oligonucleotide
ttaaacacccatggatgggctttacaagag

SEQ ID NO: 335693 - DNA, 30 bp, Artificial Sequence
  Synthetic oligonucleotide
gcatctatacttgcttttcttccccaagag

SEQ ID NO: 335694 - DNA, 30 bp, Artificial Sequence
  Synthetic oligonucleotide
gagtagaaactaaatacaaatgatcaagag

SEQ ID NO: 335695 - DNA, 30 bp, Artificial Sequence
  Synthetic oligonucleotide
gtccagaggagtctgcaaccgtaggaagag

SEQ ID NO: 335696 - DNA, 30 bp, Artificial Sequence
  Synthetic oligonucleotide
caggcgactgcttgttttatctgtgaagag

SEQ ID NO: 335697 - DNA, 30 bp, Artificial Sequence
  Synthetic oligonucleotide
tcggttctccgttcgatgatcagataagag

SEQ ID NO: 335698 - DNA, 30 bp, Artificial Sequence
  Synthetic oligonucleotide
acaaggcgggaccgggcaattggataagag

SEQ ID NO: 335699 - DNA, 30 bp, Artificial Sequence
  Synthetic oligonucleotide
tcaagtttggatttgactgtttgataagag

SEQ ID NO: 335700 - DNA, 30 bp, Artificial Sequence
  Synthetic oligonucleotide
tatgcattcacgctacagtattactaagag

SEQ ID NO: 335701 - DNA, 30 bp, Artificial Sequence
  Synthetic oligonucleotide
gctcacgcgctaagtgggcccacctaagag

SEQ ID NO: 335702 - DNA, 30 bp, Artificial Sequence
  Synthetic oligonucleotide
atcaatgaatcgtgttttgttacctaagag

SEQ ID NO: 335703 - DNA, 30 bp, Artificial Sequence
  Synthetic oligonucleotide
gccaaaaaggaacgcagcttagggtaagag

SEQ ID NO: 335704 - DNA, 30 bp, Artificial Sequence
  Synthetic oligonucleotide
cgagagtaattccctcggacgcaaacagag

SEQ ID NO: 335705 - DNA, 30 bp, Artificial Sequence
  Synthetic oligonucleotide
acagttgccctgggtgggttgttaacagag

SEQ ID NO: 335706 - DNA, 30 bp, Artificial Sequence
  Synthetic oligonucleotide
cgggccttagaatcaataccctggacagag

SEQ ID NO: 335707 - DNA, 30 bp, Artificial Sequence
  Synthetic oligonucleotide
aaacgatggcagtctatttagatgacagag

SEQ ID NO: 335708 - DNA, 30 bp, Artificial Sequence
  Synthetic oligonucleotide
tccctacgtgaacacgtggggcatacagag

SEQ ID NO: 335709 - DNA, 30 bp, Artificial Sequence
  Synthetic oligonucleotide
aacaccatccaggcttctgttcatacagag

SEQ ID NO: 335710 - DNA, 30 bp, Artificial Sequence
  Synthetic oligonucleotide
cgcataatgttcatgcacgtggtagcagag

SEQ ID NO: 335711 - DNA, 30 bp, Artificial Sequence
  Synthetic oligonucleotide
cgtgaccgcaagtcacgatgatacgcagag

SEQ ID NO: 335712 - DNA, 30 bp, Artificial Sequence
  Synthetic oligonucleotide
tcgatcacgggaccctaaatacccgcagag

SEQ ID NO: 335713 - DNA, 30 bp, Artificial Sequence
  Synthetic oligonucleotide
tggacggttcgaccccccttaagcgcagag

SEQ ID NO: 335714 - DNA, 30 bp, Artificial Sequence
  Synthetic oligonucleotide
attgagggggtcacagagacgtgcgcagag

SEQ ID NO: 335715 - DNA, 30 bp, Artificial Sequence
  Synthetic oligonucleotide
tcggctgcaatctaggcttagatcgcagag

SEQ ID NO: 335716 - DNA, 30 bp, Artificial Sequence
  Synthetic oligonucleotide
tacgcaatattggtttatcctcaggcagag

SEQ ID NO: 335717 - DNA, 30 bp, Artificial Sequence
  Synthetic oligonucleotide
atcccaccatctttagtcaccaactcagag

SEQ ID NO: 335718 - DNA, 30 bp, Artificial Sequence
  Synthetic oligonucleotide
aagaacgccgagcagcgtcgaagctcagag

SEQ ID NO: 335719 - DNA, 30 bp, Artificial Sequence
  Synthetic oligonucleotide
aaagccggccttggtggtactatctcagag

SEQ ID NO: 335720 - DNA, 30 bp, Artificial Sequence
  Synthetic oligonucleotide
agtctgggcctgtaacccaagttctcagag

SEQ ID NO: 335721 - DNA, 30 bp, Artificial Sequence
  Synthetic oligonucleotide
tttagtcatggcccctcagtaaagtcagag

SEQ ID NO: 335722 - DNA, 30 bp, Artificial Sequence
  Synthetic oligonucleotide
tccggttccccggtgtgcgacaagtcagag

SEQ ID NO: 335723 - DNA, 30 bp, Artificial Sequence
  Synthetic oligonucleotide
ttgccacttcgttggccgattgcgtcagag

SEQ ID NO: 335724 - DNA, 30 bp, Artificial Sequence
  Synthetic oligonucleotide
attggcctaccgaggttttccgtgtcagag

SEQ ID NO: 335725 - DNA, 29 bp, Artificial Sequence
  Synthetic oligonucleotide
tgagtcatgtacacttctggaattcagag

SEQ ID NO: 335726 - DNA, 30 bp, Artificial Sequence
  Synthetic oligonucleotide
caaagaccacgtcggtcgaccaaaagagag

SEQ ID NO: 335727 - DNA, 30 bp, Artificial Sequence
  Synthetic oligonucleotide
tgcaccgtcgtgtattagtgcaggagagag

SEQ ID NO: 335728 - DNA, 30 bp, Artificial Sequence
  Synthetic oligonucleotide
ttgtctaatcgagaggtacgtaggagagag

SEQ ID NO: 335729 - DNA, 30 bp, Artificial Sequence
  Synthetic oligonucleotide
gaaaaacgctgatatgttaagtggagagag

SEQ ID NO: 335730 - DNA, 30 bp, Artificial Sequence
  Synthetic oligonucleotide
cacctacctggtgtagcaaatagtagagag

SEQ ID NO: 335731 - DNA, 30 bp, Artificial Sequence
  Synthetic oligonucleotide
aagttgaaaccccaagttctaagacgagag

SEQ ID NO: 335732 - DNA, 30 bp, Artificial Sequence
  Synthetic oligonucleotide
tagagtagcaatgccttctatgggcgagag

SEQ ID NO: 335733 - DNA, 30 bp, Artificial Sequence
  Synthetic oligonucleotide
tcagtgatacgggccctactaggtcgagag

SEQ ID NO: 335734 - DNA, 30 bp, Artificial Sequence
  Synthetic oligonucleotide
attcaacgcctcgcgaacacattaggagag

SEQ ID NO: 335735 - DNA, 30 bp, Artificial Sequence
  Synthetic oligonucleotide
ggtcggacgttgagtttttataacggagag

SEQ ID NO: 335736 - DNA, 30 bp, Artificial Sequence
  Synthetic oligonucleotide
gatgtgcaaggggtttagctcaccggagag

SEQ ID NO: 335737 - DNA, 30 bp, Artificial Sequence
  Synthetic oligonucleotide
tcggtaccttcccgcgcatcctccggagag

SEQ ID NO: 335738 - DNA, 30 bp, Artificial Sequence
  Synthetic oligonucleotide
gcatctatactccagtatccacagggagag

SEQ ID NO: 335739 - DNA, 30 bp, Artificial Sequence
  Synthetic oligonucleotide
gcctgcgccatctttctgccaagatgagag

SEQ ID NO: 335740 - DNA, 30 bp, Artificial Sequence
  Synthetic oligonucleotide
cattaccttgagattaagctgtgatgagag

SEQ ID NO: 335741 - DNA, 30 bp, Artificial Sequence
  Synthetic oligonucleotide
ggtgtttttagatcatgggtggtatgagag

SEQ ID NO: 335742 - DNA, 30 bp, Artificial Sequence
  Synthetic oligonucleotide
tattaaaagctataccggggcctctgagag

SEQ ID NO: 335743 - DNA, 30 bp, Artificial Sequence
  Synthetic oligonucleotide
tggttcaatttgcctgagagagcttgagag

SEQ ID NO: 335744 - DNA, 30 bp, Artificial Sequence
  Synthetic oligonucleotide
gctttgcgtcgcaaagtcacatcttgagag

SEQ ID NO: 335745 - DNA, 30 bp, Artificial Sequence
  Synthetic oligonucleotide
aggtctactcagacgtagcgtatttgagag

SEQ ID NO: 335746 - DNA, 30 bp, Artificial Sequence
  Synthetic oligonucleotide
aaacgcgggtgctgtcgatggctaatagag

SEQ ID NO: 335747 - DNA, 30 bp, Artificial Sequence
  Synthetic oligonucleotide
ggtgctccgcacatacctagagtaatagag

SEQ ID NO: 335748 - DNA, 30 bp, Artificial Sequence
  Synthetic oligonucleotide
tattgtctgagcgggagaacggccatagag

SEQ ID NO: 335749 - DNA, 30 bp, Artificial Sequence
  Synthetic oligonucleotide
agaaattacccacaacggttcgagatagag

SEQ ID NO: 335750 - DNA, 30 bp, Artificial Sequence
  Synthetic oligonucleotide
aatgaggtatacaaacgaggtcctatagag

SEQ ID NO: 335751 - DNA, 30 bp, Artificial Sequence
  Synthetic oligonucleotide
agcggacaagtcaatggcttagctatagag

SEQ ID NO: 335752 - DNA, 30 bp, Artificial Sequence
  Synthetic oligonucleotide
atgcaagagttttatggctcaccagtagag

SEQ ID NO: 335753 - DNA, 30 bp, Artificial Sequence
  Synthetic oligonucleotide
atccgcggaatcttgtagtctagagtagag

SEQ ID NO: 335754 - DNA, 31 bp, Artificial Sequence
  Synthetic oligonucleotide
ttgtgctttacacataccataacacgtagag

SEQ ID NO: 335755 - DNA, 30 bp, Artificial Sequence
  Synthetic oligonucleotide
caattccgagaactcgtacctttcgtagag

SEQ ID NO: 335756 - DNA, 30 bp, Artificial Sequence
  Synthetic oligonucleotide
taactgattcagaaatgtgtgaaggtagag

SEQ ID NO: 335757 - DNA, 30 bp, Artificial Sequence
  Synthetic oligonucleotide
tcaagtgtctttatatcgcggcatgtagag

SEQ ID NO: 335758 - DNA, 30 bp, Artificial Sequence
  Synthetic oligonucleotide
tgctggtctgactccaggcaagatgtagag

SEQ ID NO: 335759 - DNA, 30 bp, Artificial Sequence
  Synthetic oligonucleotide
agtgtggattactaaaaggagggtgtagag

SEQ ID NO: 335760 - DNA, 30 bp, Artificial Sequence
  Synthetic oligonucleotide
tccgggtacgaaaatttctatgaattagag

SEQ ID NO: 335761 - DNA, 30 bp, Artificial Sequence
  Synthetic oligonucleotide
aactcaaagttgcaattagtttgattagag

SEQ ID NO: 335762 - DNA, 30 bp, Artificial Sequence
  Synthetic oligonucleotide
cttcttttgggggtaagccaaatattagag

SEQ ID NO: 335763 - DNA, 30 bp, Artificial Sequence
  Synthetic oligonucleotide
tgcgtgctgttggtctaacgatgcttagag

SEQ ID NO: 335764 - DNA, 30 bp, Artificial Sequence
  Synthetic oligonucleotide
ctctgcatatttgggtgaccgaagttagag

SEQ ID NO: 335765 - DNA, 30 bp, Artificial Sequence
  Synthetic oligonucleotide
aaattaatccaagcctaactgcggttagag

SEQ ID NO: 335766 - DNA, 30 bp, Artificial Sequence
  Synthetic oligonucleotide
tactcgaacctcggacccgttaatttagag

SEQ ID NO: 335767 - DNA, 30 bp, Artificial Sequence
  Synthetic oligonucleotide
ttcaggctaccacgcgtccccaacaacgag

SEQ ID NO: 335768 - DNA, 30 bp, Artificial Sequence
  Synthetic oligonucleotide
gtttcgagcctgtccgcccgcgacaacgag

SEQ ID NO: 335769 - DNA, 30 bp, Artificial Sequence
  Synthetic oligonucleotide
aagtgtaaattagtattgttactgaacgag

SEQ ID NO: 335770 - DNA, 30 bp, Artificial Sequence
  Synthetic oligonucleotide
ttatctctctgccgcggcgagaaccacgag

SEQ ID NO: 335771 - DNA, 30 bp, Artificial Sequence
  Synthetic oligonucleotide
aatggtcaactcgaaggttttgcccacgag

SEQ ID NO: 335772 - DNA, 30 bp, Artificial Sequence
  Synthetic oligonucleotide
catctttcctattagccggatgatcacgag

SEQ ID NO: 335773 - DNA, 30 bp, Artificial Sequence
  Synthetic oligonucleotide
gcacttataaccgatatgcatgaagacgag

SEQ ID NO: 335774 - DNA, 30 bp, Artificial Sequence
  Synthetic oligonucleotide
ttgggggcgagcacaggtcacgcagacgag

SEQ ID NO: 335775 - DNA, 30 bp, Artificial Sequence
  Synthetic oligonucleotide
tataggtatattttaaaaggtatagacgag

SEQ ID NO: 335776 - DNA, 30 bp, Artificial Sequence
  Synthetic oligonucleotide
cctcttaaatcggggtgtgtcaacgacgag

SEQ ID NO: 335777 - DNA, 30 bp, Artificial Sequence
  Synthetic oligonucleotide
ggatcaggtcaagtaacgagcaccgacgag

SEQ ID NO: 335778 - DNA, 30 bp, Artificial Sequence
  Synthetic oligonucleotide
ctcggacagttcggagctgctctcgacgag

SEQ ID NO: 335779 - DNA, 30 bp, Artificial Sequence
  Synthetic oligonucleotide
tgtagcgttttgcaaatcgctacggacgag

SEQ ID NO: 335780 - DNA, 30 bp, Artificial Sequence
  Synthetic oligonucleotide
tgcgcatatttaggcagacttacggacgag

SEQ ID NO: 335781 - DNA, 27 bp, Artificial Sequence
  Synthetic oligonucleotide
ttactggagaagccgtagggggacgag

SEQ ID NO: 335782 - DNA, 30 bp, Artificial Sequence
  Synthetic oligonucleotide
gcacgttattttgtagcgacgtgggacgag

SEQ ID NO: 335783 - DNA, 30 bp, Artificial Sequence
  Synthetic oligonucleotide
atacgttaacgttgtatattctatgacgag

SEQ ID NO: 335784 - DNA, 30 bp, Artificial Sequence
  Synthetic oligonucleotide
cgaccattactgcaacggcgtggtgacgag

SEQ ID NO: 335785 - DNA, 30 bp, Artificial Sequence
  Synthetic oligonucleotide
ggagtgttcctaggttatgtatcatacgag

SEQ ID NO: 335786 - DNA, 30 bp, Artificial Sequence
  Synthetic oligonucleotide
gagttatctttttataagatttgatacgag

SEQ ID NO: 335787 - DNA, 31 bp, Artificial Sequence
  Synthetic oligonucleotide
gcactatgccagcggggtttcagtctacgag

SEQ ID NO: 335788 - DNA, 30 bp, Artificial Sequence
  Synthetic oligonucleotide
caggcacgtgtggtagactgatattacgag

SEQ ID NO: 335789 - DNA, 30 bp, Artificial Sequence
  Synthetic oligonucleotide
gttccatcgttgtataccatcggaaccgag

SEQ ID NO: 335790 - DNA, 30 bp, Artificial Sequence
  Synthetic oligonucleotide
gaggccgacgcattggccacgcgcaccgag

SEQ ID NO: 335791 - DNA, 30 bp, Artificial Sequence
  Synthetic oligonucleotide
aattactctcaaatcgggttgcgcaccgag

SEQ ID NO: 335792 - DNA, 30 bp, Artificial Sequence
  Synthetic oligonucleotide
ttagccacctggtaggtgatccggaccgag

SEQ ID NO: 335793 - DNA, 30 bp, Artificial Sequence
  Synthetic oligonucleotide
gctataactatatttgactccctgaccgag

SEQ ID NO: 335794 - DNA, 30 bp, Artificial Sequence
  Synthetic oligonucleotide
aactagaggtatccgcaagtccctaccgag

SEQ ID NO: 335795 - DNA, 30 bp, Artificial Sequence
  Synthetic oligonucleotide
gtagtctggcggcatcttaaatcacccgag

SEQ ID NO: 335796 - DNA, 30 bp, Artificial Sequence
  Synthetic oligonucleotide
caccgatacagtcccgagttgagacccgag

SEQ ID NO: 335797 - DNA, 30 bp, Artificial Sequence
  Synthetic oligonucleotide
tgccttaggtggtcattgggatgacccgag

SEQ ID NO: 335798 - DNA, 30 bp, Artificial Sequence
  Synthetic oligonucleotide
gtagtatggtttggaagtgtctgacccgag

SEQ ID NO: 335799 - DNA, 30 bp, Artificial Sequence
  Synthetic oligonucleotide
ttttcgactccttgtctaaagcagcccgag

SEQ ID NO: 335800 - DNA, 30 bp, Artificial Sequence
  Synthetic oligonucleotide
ctttcgcccggggggtgtttagttcccgag

SEQ ID NO: 335801 - DNA, 30 bp, Artificial Sequence
  Synthetic oligonucleotide
cgttactttacacggtgcctccagtccgag

SEQ ID NO: 335802 - DNA, 30 bp, Artificial Sequence
  Synthetic oligonucleotide
caagataggatatcgcattcggattccgag

SEQ ID NO: 335803 - DNA, 30 bp, Artificial Sequence
  Synthetic oligonucleotide
ttctcgacttgttgtggtaaaaaaagcgag

SEQ ID NO: 335804 - DNA, 30 bp, Artificial Sequence
  Synthetic oligonucleotide
agcggatcttttggttcacccaaaagcgag

SEQ ID NO: 335805 - DNA, 30 bp, Artificial Sequence
  Synthetic oligonucleotide
tcgattgacccctgcgttcaattaagcgag

SEQ ID NO: 335806 - DNA, 30 bp, Artificial Sequence
  Synthetic oligonucleotide
gtgcttttgatcagccgcgtcaatagcgag

SEQ ID NO: 335807 - DNA, 30 bp, Artificial Sequence
  Synthetic oligonucleotide
gaatcactatctttgagcacgagtagcgag

SEQ ID NO: 335808 - DNA, 30 bp, Artificial Sequence
  Synthetic oligonucleotide
ccgctatgtctcttttccgtgagtagcgag

SEQ ID NO: 335809 - DNA, 30 bp, Artificial Sequence
  Synthetic oligonucleotide
gctggcaagctcccgatctaatgccgcgag

SEQ ID NO: 335810 - DNA, 30 bp, Artificial Sequence
  Synthetic oligonucleotide
atggcccgcatacggacggggcggcgcgag

SEQ ID NO: 335811 - DNA, 30 bp, Artificial Sequence
  Synthetic oligonucleotide
gtggaagttgccggggagcgacggggcgag

SEQ ID NO: 335812 - DNA, 30 bp, Artificial Sequence
  Synthetic oligonucleotide
tgcgtcgcttggatctgaggccggggcgag

SEQ ID NO: 335813 - DNA, 30 bp, Artificial Sequence
  Synthetic oligonucleotide
gggttagagacgcgccctgacgttggcgag

SEQ ID NO: 335814 - DNA, 30 bp, Artificial Sequence
  Synthetic oligonucleotide
gcaaaaaattttggtgtggagtttggcgag

SEQ ID NO: 335815 - DNA, 30 bp, Artificial Sequence
  Synthetic oligonucleotide
gttagggactcgttatggattgcttgcgag

SEQ ID NO: 335816 - DNA, 30 bp, Artificial Sequence
  Synthetic oligonucleotide
gccagaattggaggcgtcagctcttgcgag

SEQ ID NO: 335817 - DNA, 30 bp, Artificial Sequence
  Synthetic oligonucleotide
ttcgccgtcagtagggagcgtgtttgcgag

SEQ ID NO: 335818 - DNA, 29 bp, Artificial Sequence
  Synthetic oligonucleotide
tgaatgtaaccggatttctcgaaatcgag

SEQ ID NO: 335819 - DNA, 30 bp, Artificial Sequence
  Synthetic oligonucleotide
tactcactccaggaaatcggcataatcgag

SEQ ID NO: 335820 - DNA, 30 bp, Artificial Sequence
  Synthetic oligonucleotide
agttatggacttttggcgtcacgcatcgag

SEQ ID NO: 335821 - DNA, 30 bp, Artificial Sequence
  Synthetic oligonucleotide
gaaatcatggaacctcttgaccggatcgag

SEQ ID NO: 335822 - DNA, 30 bp, Artificial Sequence
  Synthetic oligonucleotide
aaacgcttgggttacatatctactatcgag

SEQ ID NO: 335823 - DNA, 30 bp, Artificial Sequence
  Synthetic oligonucleotide
ttaatagcaaaaacagctgattgactcgag

SEQ ID NO: 335824 - DNA, 29 bp, Artificial Sequence
  Synthetic oligonucleotide
agcaggagagcttgcaacgcttactcgag

SEQ ID NO: 335825 - DNA, 30 bp, Artificial Sequence
  Synthetic oligonucleotide
ccgcgaccgattcgcattttttccctcgag

SEQ ID NO: 335826 - DNA, 30 bp, Artificial Sequence
  Synthetic oligonucleotide
ttcaatatgtaatgaatgtggcagctcgag

SEQ ID NO: 335827 - DNA, 30 bp, Artificial Sequence
  Synthetic oligonucleotide
cacgccctctgtatggacttaaggctcgag

SEQ ID NO: 335828 - DNA, 30 bp, Artificial Sequence
  Synthetic oligonucleotide
aaatacattaccatactcaatagtctcgag

SEQ ID NO: 335829 - DNA, 30 bp, Artificial Sequence
  Synthetic oligonucleotide
tatctctgcttagtggaattgccagtcgag

SEQ ID NO: 335830 - DNA, 30 bp, Artificial Sequence
  Synthetic oligonucleotide
ccaaattctggagctgcataacgagtcgag

SEQ ID NO: 335831 - DNA, 30 bp, Artificial Sequence
  Synthetic oligonucleotide
gttgtcacggggcggacggacagcgtcgag

SEQ ID NO: 335832 - DNA, 30 bp, Artificial Sequence
  Synthetic oligonucleotide
atttagtcgcaactacagaattgcgtcgag

SEQ ID NO: 335833 - DNA, 30 bp, Artificial Sequence
  Synthetic oligonucleotide
aatagatgaaaaacggcatatgatgtcgag

SEQ ID NO: 335834 - DNA, 30 bp, Artificial Sequence
  Synthetic oligonucleotide
gtacaatacagtctgtcaaatcaattcgag

SEQ ID NO: 335835 - DNA, 30 bp, Artificial Sequence
  Synthetic oligonucleotide
agaatcggcggtcgtgggacgctattcgag

SEQ ID NO: 335836 - DNA, 30 bp, Artificial Sequence
  Synthetic oligonucleotide
ttattcgttagggggcggcatacgttcgag

SEQ ID NO: 335837 - DNA, 30 bp, Artificial Sequence
  Synthetic oligonucleotide
ttagtagtgtaactgcacccagaaaaggag

SEQ ID NO: 335838 - DNA, 30 bp, Artificial Sequence
  Synthetic oligonucleotide
agttcgaaatagaacctctgttaaaaggag

SEQ ID NO: 335839 - DNA, 30 bp, Artificial Sequence
  Synthetic oligonucleotide
tgagacacttttagccagtgtccaaaggag

SEQ ID NO: 335840 - DNA, 30 bp, Artificial Sequence
  Synthetic oligonucleotide
gatacgtacagtagctggactggaaaggag

SEQ ID NO: 335841 - DNA, 30 bp, Artificial Sequence
  Synthetic oligonucleotide
ggatgaggtttgtaacggcctgggaaggag

SEQ ID NO: 335842 - DNA, 30 bp, Artificial Sequence
  Synthetic oligonucleotide
tgccctcttctttatcggggtgggaaggag

SEQ ID NO: 335843 - DNA, 30 bp, Artificial Sequence
  Synthetic oligonucleotide
aacattgtcttcatgtatttttgtaaggag

SEQ ID NO: 335844 - DNA, 30 bp, Artificial Sequence
  Synthetic oligonucleotide
ctgacgtgagattcttaactaattaaggag

SEQ ID NO: 335845 - DNA, 30 bp, Artificial Sequence
  Synthetic oligonucleotide
tgacaccccctgaagaactgtctacaggag

SEQ ID NO: 335846 - DNA, 30 bp, Artificial Sequence
  Synthetic oligonucleotide
aacgtagtcagtagtgagtgatgccaggag

SEQ ID NO: 335847 - DNA, 30 bp, Artificial Sequence
  Synthetic oligonucleotide
atgaattgcacgcacaactattgccaggag

SEQ ID NO: 335848 - DNA, 30 bp, Artificial Sequence
  Synthetic oligonucleotide
ctccgttgacgaggcccacttgtccaggag

SEQ ID NO: 335849 - DNA, 30 bp, Artificial Sequence
  Synthetic oligonucleotide
ctaaggcttcggggccgctttcagcaggag

SEQ ID NO: 335850 - DNA, 30 bp, Artificial Sequence
  Synthetic oligonucleotide
gatcccacccgctgtcggtgacggcaggag

SEQ ID NO: 335851 - DNA, 30 bp, Artificial Sequence
  Synthetic oligonucleotide
cacgtcgggtggtgggttccccatcaggag

SEQ ID NO: 335852 - DNA, 30 bp, Artificial Sequence
  Synthetic oligonucleotide
gttaaggattttatggcagctcatcaggag

SEQ ID NO: 335853 - DNA, 30 bp, Artificial Sequence
  Synthetic oligonucleotide
tgtggggtttgcgactcttccatcgaggag

SEQ ID NO: 335854 - DNA, 30 bp, Artificial Sequence
  Synthetic oligonucleotide
atgtattggtgcacttgagcaggataggag

SEQ ID NO: 335855 - DNA, 30 bp, Artificial Sequence
  Synthetic oligonucleotide
ctctttcgggcttccgcccagggataggag

SEQ ID NO: 335856 - DNA, 30 bp, Artificial Sequence
  Synthetic oligonucleotide
gttttaacgattcggagcacggcgtaggag

SEQ ID NO: 335857 - DNA, 30 bp, Artificial Sequence
  Synthetic oligonucleotide
actttccaggtttacagggatgaaacggag

SEQ ID NO: 335858 - DNA, 30 bp, Artificial Sequence
  Synthetic oligonucleotide
ttctggtgcgtgagcactatatggacggag

SEQ ID NO: 335859 - DNA, 30 bp, Artificial Sequence
  Synthetic oligonucleotide
ctcataggagggtgacggtgaagtacggag

SEQ ID NO: 335860 - DNA, 30 bp, Artificial Sequence
  Synthetic oligonucleotide
cactaaatcgctagcacgtagattacggag

SEQ ID NO: 335861 - DNA, 30 bp, Artificial Sequence
  Synthetic oligonucleotide
tggacagtatgttggacctaatttacggag

SEQ ID NO: 335862 - DNA, 30 bp, Artificial Sequence
  Synthetic oligonucleotide
aaagctcctctgtgctctggttgcccggag

SEQ ID NO: 335863 - DNA, 30 bp, Artificial Sequence
  Synthetic oligonucleotide
tatatggttttttttccattcatcccggag

SEQ ID NO: 335864 - DNA, 30 bp, Artificial Sequence
  Synthetic oligonucleotide
gcgtctctgagttcgatattagtgccggag

SEQ ID NO: 335865 - DNA, 30 bp, Artificial Sequence
  Synthetic oligonucleotide
acgatgcataaggggaacttagtgccggag

SEQ ID NO: 335866 - DNA, 30 bp, Artificial Sequence
  Synthetic oligonucleotide
cggtgacttttggattgcaggattccggag

SEQ ID NO: 335867 - DNA, 30 bp, Artificial Sequence
  Synthetic oligonucleotide
ggtcgtagcaggtttcgcttttgagcggag

SEQ ID NO: 335868 - DNA, 30 bp, Artificial Sequence
  Synthetic oligonucleotide
catataagagggtacttaaaagtagcggag

SEQ ID NO: 335869 - DNA, 30 bp, Artificial Sequence
  Synthetic oligonucleotide
actggtgttaagattcgattcgacgcggag

SEQ ID NO: 335870 - DNA, 30 bp, Artificial Sequence
  Synthetic oligonucleotide
aggttctagcctcggtaaaactgtgcggag

SEQ ID NO: 335871 - DNA, 30 bp, Artificial Sequence
  Synthetic oligonucleotide
cagcccaaatggaagcggcttattgcggag

SEQ ID NO: 335872 - DNA, 30 bp, Artificial Sequence
  Synthetic oligonucleotide
aaattgaacactccgtattgttcatcggag

SEQ ID NO: 335873 - DNA, 30 bp, Artificial Sequence
  Synthetic oligonucleotide
gttacagttgtctttaaatagtgatcggag

SEQ ID NO: 335874 - DNA, 30 bp, Artificial Sequence
  Synthetic oligonucleotide
attattccgctcgatatatgcacctcggag

SEQ ID NO: 335875 - DNA, 30 bp, Artificial Sequence
  Synthetic oligonucleotide
ggatcggaaaagaccggtgcgttctcggag

SEQ ID NO: 335876 - DNA, 30 bp, Artificial Sequence
  Synthetic oligonucleotide
tttatactcagtttaggaaaagagtcggag

SEQ ID NO: 335877 - DNA, 30 bp, Artificial Sequence
  Synthetic oligonucleotide
atttagtgtgaccgtgacgtaatgtcggag

SEQ ID NO: 335878 - DNA, 30 bp, Artificial Sequence
  Synthetic oligonucleotide
gacatacatttacccttagaaagttcggag

SEQ ID NO: 335879 - DNA, 30 bp, Artificial Sequence
  Synthetic oligonucleotide
gagtcgcccgccggtgtcgtagcaagggag

SEQ ID NO: 335880 - DNA, 30 bp, Artificial Sequence
  Synthetic oligonucleotide
gtactagacacggttcgatagagaagggag

SEQ ID NO: 335881 - DNA, 30 bp, Artificial Sequence
  Synthetic oligonucleotide
ttatactgaacaatggttttgtagagggag

SEQ ID NO: 335882 - DNA, 30 bp, Artificial Sequence
  Synthetic oligonucleotide
cgccgcacaaactgcgttcagtgacgggag

SEQ ID NO: 335883 - DNA, 30 bp, Artificial Sequence
  Synthetic oligonucleotide
tggtaacagctacatgattatgtacgggag

SEQ ID NO: 335884 - DNA, 30 bp, Artificial Sequence
  Synthetic oligonucleotide
cggtggaaataaggaaagctctaccgggag

SEQ ID NO: 335885 - DNA, 30 bp, Artificial Sequence
  Synthetic oligonucleotide
gagtagaaggacctcattgttcgccgggag

SEQ ID NO: 335886 - DNA, 30 bp, Artificial Sequence
  Synthetic oligonucleotide
tatgtcgtggtgagagccgcgaagcgggag

SEQ ID NO: 335887 - DNA, 30 bp, Artificial Sequence
  Synthetic oligonucleotide
ttcgtcagggtctaaataacccggcgggag

SEQ ID NO: 335888 - DNA, 30 bp, Artificial Sequence
  Synthetic oligonucleotide
ccgtgaggtcccgtgcaggtgactcgggag

SEQ ID NO: 335889 - DNA, 30 bp, Artificial Sequence
  Synthetic oligonucleotide
tataaggatatgtcatgaattacaggggag

SEQ ID NO: 335890 - DNA, 30 bp, Artificial Sequence
  Synthetic oligonucleotide
tcgcgccatgctctagatggccgaggggag

SEQ ID NO: 335891 - DNA, 30 bp, Artificial Sequence
  Synthetic oligonucleotide
gcgttttagaccatcgccggtataggggag

SEQ ID NO: 335892 - DNA, 30 bp, Artificial Sequence
  Synthetic oligonucleotide
taatcattctggtcgatatttaagggggag

SEQ ID NO: 335893 - DNA, 30 bp, Artificial Sequence
  Synthetic oligonucleotide
gagagtatcgtattggtcgttcagggggag

SEQ ID NO: 335894 - DNA, 30 bp, Artificial Sequence
  Synthetic oligonucleotide
taggcactctggcgattaaagtatggggag

SEQ ID NO: 335895 - DNA, 30 bp, Artificial Sequence
  Synthetic oligonucleotide
ccttaccagtcatatgttttgtgtggggag

SEQ ID NO: 335896 - DNA, 30 bp, Artificial Sequence
  Synthetic oligonucleotide
aaaaagggcgctctcattaggcttggggag

SEQ ID NO: 335897 - DNA, 30 bp, Artificial Sequence
  Synthetic oligonucleotide
cccaacatagcggttaccgcaaaatgggag

SEQ ID NO: 335898 - DNA, 30 bp, Artificial Sequence
  Synthetic oligonucleotide
gggtcttagcagatgggggttccatgggag

SEQ ID NO: 335899 - DNA, 30 bp, Artificial Sequence
  Synthetic oligonucleotide
tcttccttactatgggaaagtgcatgggag

SEQ ID NO: 335900 - DNA, 30 bp, Artificial Sequence
  Synthetic oligonucleotide
gagcctttttcccagcacgtgtcatgggag

SEQ ID NO: 335901 - DNA, 30 bp, Artificial Sequence
  Synthetic oligonucleotide
attcaatcctaacaataccaattatgggag

SEQ ID NO: 335902 - DNA, 30 bp, Artificial Sequence
  Synthetic oligonucleotide
atcggatcttgggtcaatactgcgtgggag

SEQ ID NO: 335903 - DNA, 30 bp, Artificial Sequence
  Synthetic oligonucleotide
gaaaggtgccgtgccatcacggcttgggag

SEQ ID NO: 335904 - DNA, 30 bp, Artificial Sequence
  Synthetic oligonucleotide
gtgtacaagctccctacgtgcggttgggag

SEQ ID NO: 335905 - DNA, 30 bp, Artificial Sequence
  Synthetic oligonucleotide
catagggtggttccggtaaccttttgggag

SEQ ID NO: 335906 - DNA, 31 bp, Artificial Sequence
  Synthetic oligonucleotide
ttacaaacgtgaggggcatccatgaatggag

SEQ ID NO: 335907 - DNA, 30 bp, Artificial Sequence
  Synthetic oligonucleotide
aaattggggcggtgcagtcgagtcatggag

SEQ ID NO: 335908 - DNA, 30 bp, Artificial Sequence
  Synthetic oligonucleotide
atgctaggggcggtttgatggaatatggag

SEQ ID NO: 335909 - DNA, 30 bp, Artificial Sequence
  Synthetic oligonucleotide
ggtacaacctcggtctccacctctatggag

SEQ ID NO: 335910 - DNA, 30 bp, Artificial Sequence
  Synthetic oligonucleotide
aggttggcaccagtcgttatgtgtatggag

SEQ ID NO: 335911 - DNA, 30 bp, Artificial Sequence
  Synthetic oligonucleotide
gttagtcagattgacgactcacttatggag

SEQ ID NO: 335912 - DNA, 30 bp, Artificial Sequence
  Synthetic oligonucleotide
ttccatagatacaggacctaataactggag

SEQ ID NO: 335913 - DNA, 30 bp, Artificial Sequence
  Synthetic oligonucleotide
cagacaagggtatggttttatacactggag

SEQ ID NO: 335914 - DNA, 30 bp, Artificial Sequence
  Synthetic oligonucleotide
atggttgtagctcttactcatctactggag

SEQ ID NO: 335915 - DNA, 30 bp, Artificial Sequence
  Synthetic oligonucleotide
ggtcgaacacgaatatccggtgggctggag

SEQ ID NO: 335916 - DNA, 30 bp, Artificial Sequence
  Synthetic oligonucleotide
tcgagaagagacgccactggcattctggag

SEQ ID NO: 335917 - DNA, 30 bp, Artificial Sequence
  Synthetic oligonucleotide
cccgggttggtctgagaagacaaagtggag

SEQ ID NO: 335918 - DNA, 30 bp, Artificial Sequence
  Synthetic oligonucleotide
gggtgttctccgaaacgggtgggagtggag

SEQ ID NO: 335919 - DNA, 30 bp, Artificial Sequence
  Synthetic oligonucleotide
ttcttggaactgaacgtgatagacgtggag

SEQ ID NO: 335920 - DNA, 30 bp, Artificial Sequence
  Synthetic oligonucleotide
cgtgttcttttctcgcgtagggacgtggag

SEQ ID NO: 335921 - DNA, 30 bp, Artificial Sequence
  Synthetic oligonucleotide
gtttctcctaaacgagagatagcggtggag

SEQ ID NO: 335922 - DNA, 30 bp, Artificial Sequence
  Synthetic oligonucleotide
aatctcgcacgagagttgcaggcggtggag

SEQ ID NO: 335923 - DNA, 30 bp, Artificial Sequence
  Synthetic oligonucleotide
ttacaaccttctgtcggtgagttggtggag

SEQ ID NO: 335924 - DNA, 30 bp, Artificial Sequence
  Synthetic oligonucleotide
gactgtagcgccgtccgtaacaatgtggag

SEQ ID NO: 335925 - DNA, 30 bp, Artificial Sequence
  Synthetic oligonucleotide
atacaagcagtacccttcggaactgtggag

SEQ ID NO: 335926 - DNA, 30 bp, Artificial Sequence
  Synthetic oligonucleotide
gtgaggtaatgcaattagctccctgtggag

SEQ ID NO: 335927 - DNA, 30 bp, Artificial Sequence
  Synthetic oligonucleotide
gattcggactgctttccagtaagattggag

SEQ ID NO: 335928 - DNA, 30 bp, Artificial Sequence
  Synthetic oligonucleotide
agtgatcaataagcagaacatatattggag

SEQ ID NO: 335929 - DNA, 30 bp, Artificial Sequence
  Synthetic oligonucleotide
ctatgcaattacaacaaagcgatgttggag

SEQ ID NO: 335930 - DNA, 30 bp, Artificial Sequence
  Synthetic oligonucleotide
aaggtttgatgagggacttgccatttggag

SEQ ID NO: 335931 - DNA, 30 bp, Artificial Sequence
  Synthetic oligonucleotide
agacgggttgccctcacctccgctttggag

SEQ ID NO: 335932 - DNA, 30 bp, Artificial Sequence
  Synthetic oligonucleotide
cacgtgtcttacgcactcacgcgcaatgag

SEQ ID NO: 335933 - DNA, 30 bp, Artificial Sequence
  Synthetic oligonucleotide
cattattctccgtgaagtgtagagaatgag

SEQ ID NO: 335934 - DNA, 30 bp, Artificial Sequence
  Synthetic oligonucleotide
caattatgactcggcgtcaattttaatgag

SEQ ID NO: 335935 - DNA, 30 bp, Artificial Sequence
  Synthetic oligonucleotide
tgttggtaatctgcgcctactgaccatgag

SEQ ID NO: 335936 - DNA, 30 bp, Artificial Sequence
  Synthetic oligonucleotide
tctcttgggttagatggcaacgagcatgag

SEQ ID NO: 335937 - DNA, 30 bp, Artificial Sequence
  Synthetic oligonucleotide
aaggcggaaatcgccagggggccgcatgag

SEQ ID NO: 335938 - DNA, 30 bp, Artificial Sequence
  Synthetic oligonucleotide
cagtagttcggtgagatcctatatcatgag

SEQ ID NO: 335939 - DNA, 30 bp, Artificial Sequence
  Synthetic oligonucleotide
gatgtcggggtatccgcaacatctcatgag

SEQ ID NO: 335940 - DNA, 30 bp, Artificial Sequence
  Synthetic oligonucleotide
gtaaacttagtcattagacaatgtcatgag

SEQ ID NO: 335941 - DNA, 30 bp, Artificial Sequence
  Synthetic oligonucleotide
ctgttgcaatatgtggagggttttcatgag

SEQ ID NO: 335942 - DNA, 30 bp, Artificial Sequence
  Synthetic oligonucleotide
tttatttgcgatggctattgtatagatgag

SEQ ID NO: 335943 - DNA, 30 bp, Artificial Sequence
  Synthetic oligonucleotide
aacacatctggctcaatcattttagatgag

SEQ ID NO: 335944 - DNA, 30 bp, Artificial Sequence
  Synthetic oligonucleotide
agtaatggggtgttcatctagtcggatgag

SEQ ID NO: 335945 - DNA, 30 bp, Artificial Sequence
  Synthetic oligonucleotide
cttttaagcacgatggtaaaaatggatgag

SEQ ID NO: 335946 - DNA, 30 bp, Artificial Sequence
  Synthetic oligonucleotide
agaattgatggattgatatttttatatgag

SEQ ID NO: 335947 - DNA, 31 bp, Artificial Sequence
  Synthetic oligonucleotide
gattattgaatctttgcgtctcggctatgag

SEQ ID NO: 335948 - DNA, 30 bp, Artificial Sequence
  Synthetic oligonucleotide
gtaatgagagtacagtctgaactctatgag

SEQ ID NO: 335949 - DNA, 30 bp, Artificial Sequence
  Synthetic oligonucleotide
ccggtcacggctgtactttcaaagtatgag

SEQ ID NO: 335950 - DNA, 30 bp, Artificial Sequence
  Synthetic oligonucleotide
tctccgaatatacgttatgcttcgtatgag

SEQ ID NO: 335951 - DNA, 30 bp, Artificial Sequence
  Synthetic oligonucleotide
cattctgataagcttaggattacttatgag

SEQ ID NO: 335952 - DNA, 30 bp, Artificial Sequence
  Synthetic oligonucleotide
attattccgtgtagcaaaaaggccactgag

SEQ ID NO: 335953 - DNA, 30 bp, Artificial Sequence
  Synthetic oligonucleotide
tagtggggtcgccaataaacttggcctgag

SEQ ID NO: 335954 - DNA, 30 bp, Artificial Sequence
  Synthetic oligonucleotide
tccgggtgtaactagcctatgtatcctgag

SEQ ID NO: 335955 - DNA, 30 bp, Artificial Sequence
  Synthetic oligonucleotide
agtatgcaagcagtttcaactggtcctgag

SEQ ID NO: 335956 - DNA, 30 bp, Artificial Sequence
  Synthetic oligonucleotide
cggaacccagcgacaggggggtttcctgag

SEQ ID NO: 335957 - DNA, 30 bp, Artificial Sequence
  Synthetic oligonucleotide
gcggagggggtcgcgcccgggcaagctgag

SEQ ID NO: 335958 - DNA, 30 bp, Artificial Sequence
  Synthetic oligonucleotide
agggtaaacgtacgcctgttggacgctgag

SEQ ID NO: 335959 - DNA, 30 bp, Artificial Sequence
  Synthetic oligonucleotide
aatggggagtacactccaagactcgctgag

SEQ ID NO: 335960 - DNA, 30 bp, Artificial Sequence
  Synthetic oligonucleotide
aaaagctctggcaaaggacaccctgctgag

SEQ ID NO: 335961 - DNA, 30 bp, Artificial Sequence
  Synthetic oligonucleotide
gttcttggtcctcagagaaattgtgctgag

SEQ ID NO: 335962 - DNA, 30 bp, Artificial Sequence
  Synthetic oligonucleotide
gggtctttgtctgacttgcagattgctgag

SEQ ID NO: 335963 - DNA, 30 bp, Artificial Sequence
  Synthetic oligonucleotide
atctcccagatcacccggagtggatctgag

SEQ ID NO: 335964 - DNA, 30 bp, Artificial Sequence
  Synthetic oligonucleotide
gacttgtgtcatgaaatcggagtctctgag

SEQ ID NO: 335965 - DNA, 30 bp, Artificial Sequence
  Synthetic oligonucleotide
cctccagcggatgaactccagtgttctgag

SEQ ID NO: 335966 - DNA, 30 bp, Artificial Sequence
  Synthetic oligonucleotide
tacagtctttatacgcatccttgttctgag

SEQ ID NO: 335967 - DNA, 30 bp, Artificial Sequence
  Synthetic oligonucleotide
ctgagtgacgggaacgacgatcaaagtgag

SEQ ID NO: 335968 - DNA, 30 bp, Artificial Sequence
  Synthetic oligonucleotide
acctcttggatcggttccgggatgagtgag

SEQ ID NO: 335969 - DNA, 30 bp, Artificial Sequence
  Synthetic oligonucleotide
catggggtgatgagtaataaaattagtgag

SEQ ID NO: 335970 - DNA, 30 bp, Artificial Sequence
  Synthetic oligonucleotide
agaacttggcgtggacccttaattagtgag

SEQ ID NO: 335971 - DNA, 30 bp, Artificial Sequence
  Synthetic oligonucleotide
gtccctactaaggacaacgtgtcacgtgag

SEQ ID NO: 335972 - DNA, 30 bp, Artificial Sequence
  Synthetic oligonucleotide
gaatgacgcgttcaaacatccggacgtgag

SEQ ID NO: 335973 - DNA, 30 bp, Artificial Sequence
  Synthetic oligonucleotide
tgtcccagactcagggtatatggacgtgag

SEQ ID NO: 335974 - DNA, 30 bp, Artificial Sequence
  Synthetic oligonucleotide
attttagtgttagagtagtgaacgcgtgag

SEQ ID NO: 335975 - DNA, 30 bp, Artificial Sequence
  Synthetic oligonucleotide
gaacggacagcacaggtatctgtgcgtgag

SEQ ID NO: 335976 - DNA, 30 bp, Artificial Sequence
  Synthetic oligonucleotide
ttttagcaatcacaagtgaaatgtcgtgag

SEQ ID NO: 335977 - DNA, 30 bp, Artificial Sequence
  Synthetic oligonucleotide
gctagtttcatttacttaaccattcgtgag

SEQ ID NO: 335978 - DNA, 30 bp, Artificial Sequence
  Synthetic oligonucleotide
tatgtcactgttcttccgcaacaaggtgag

SEQ ID NO: 335979 - DNA, 30 bp, Artificial Sequence
  Synthetic oligonucleotide
cggacactcagtgactcgtgtccaggtgag

SEQ ID NO: 335980 - DNA, 30 bp, Artificial Sequence
  Synthetic oligonucleotide
aagaactctcactgacagagatgcggtgag

SEQ ID NO: 335981 - DNA, 30 bp, Artificial Sequence
  Synthetic oligonucleotide
acaccggtttgttttcgtgcatttggtgag

SEQ ID NO: 335982 - DNA, 30 bp, Artificial Sequence
  Synthetic oligonucleotide
atattggagttagccactcttctatgtgag

SEQ ID NO: 335983 - DNA, 30 bp, Artificial Sequence
  Synthetic oligonucleotide
taagtcattttctagtgcctgtagtgtgag

SEQ ID NO: 335984 - DNA, 30 bp, Artificial Sequence
  Synthetic oligonucleotide
agtgtacacactcgggctctggaaattgag

SEQ ID NO: 335985 - DNA, 30 bp, Artificial Sequence
  Synthetic oligonucleotide
tagactgctgctgggggcgttggaattgag

SEQ ID NO: 335986 - DNA, 30 bp, Artificial Sequence
  Synthetic oligonucleotide
ttaatactaccggcaaacgcaataattgag

SEQ ID NO: 335987 - DNA, 30 bp, Artificial Sequence
  Synthetic oligonucleotide
agtatcgtagttcgacaggagctaattgag

SEQ ID NO: 335988 - DNA, 30 bp, Artificial Sequence
  Synthetic oligonucleotide
aacccccctggcaccggtctctgcattgag

SEQ ID NO: 335989 - DNA, 30 bp, Artificial Sequence
  Synthetic oligonucleotide
agtaatcattgtcattcctggtggattgag

SEQ ID NO: 335990 - DNA, 30 bp, Artificial Sequence
  Synthetic oligonucleotide
aacacggagtcctcgcttagtgatattgag

SEQ ID NO: 335991 - DNA, 30 bp, Artificial Sequence
  Synthetic oligonucleotide
gggaatactggcttagcctactgacttgag

SEQ ID NO: 335992 - DNA, 30 bp, Artificial Sequence
  Synthetic oligonucleotide
tgacaggtcctgtgttgcctaagtcttgag

SEQ ID NO: 335993 - DNA, 30 bp, Artificial Sequence
  Synthetic oligonucleotide
tcaggcatccactattgtgtggaagttgag

SEQ ID NO: 335994 - DNA, 30 bp, Artificial Sequence
  Synthetic oligonucleotide
cgtcccgctattcaacttgccatcgttgag

SEQ ID NO: 335995 - DNA, 30 bp, Artificial Sequence
  Synthetic oligonucleotide
cggtttgtattagggatatgtacggttgag

SEQ ID NO: 335996 - DNA, 30 bp, Artificial Sequence
  Synthetic oligonucleotide
ggttccagcgttcaattgtcggtggttgag

SEQ ID NO: 335997 - DNA, 30 bp, Artificial Sequence
  Synthetic oligonucleotide
cgctaataacataggtcccttattgttgag

SEQ ID NO: 335998 - DNA, 30 bp, Artificial Sequence
  Synthetic oligonucleotide
tatgatctgtctcgaattatattctttgag

SEQ ID NO: 335999 - DNA, 30 bp, Artificial Sequence
  Synthetic oligonucleotide
aaaccctcggcagaggacacggcgtttgag

SEQ ID NO: 336000 - DNA, 30 bp, Artificial Sequence
  Synthetic oligonucleotide
aggtacaccaattgaaatttttcttttgag

SEQ ID NO: 336001 - DNA, 30 bp, Artificial Sequence
  Synthetic oligonucleotide
tttagacgttaggaaccacggcgttttgag

SEQ ID NO: 336002 - DNA, 30 bp, Artificial Sequence
  Synthetic oligonucleotide
tatctttttccatggccgtctacaaaatag

SEQ ID NO: 336003 - DNA, 30 bp, Artificial Sequence
  Synthetic oligonucleotide
tccctgccacatttcgagccgtcaaaatag

SEQ ID NO: 336004 - DNA, 30 bp, Artificial Sequence
  Synthetic oligonucleotide
cggctagttggcctaatactactgaaatag

SEQ ID NO: 336005 - DNA, 30 bp, Artificial Sequence
  Synthetic oligonucleotide
ataattcatcgaccaggggtaaataaatag

SEQ ID NO: 336006 - DNA, 30 bp, Artificial Sequence
  Synthetic oligonucleotide
ttggggctttcagggcaatcagctaaatag

SEQ ID NO: 336007 - DNA, 30 bp, Artificial Sequence
  Synthetic oligonucleotide
gagggccctagcagtctcgtcgttaaatag

SEQ ID NO: 336008 - DNA, 30 bp, Artificial Sequence
  Synthetic oligonucleotide
atcgattgagaataagatgcacaacaatag

SEQ ID NO: 336009 - DNA, 30 bp, Artificial Sequence
  Synthetic oligonucleotide
cttgagtatgtgtcgctgcgtggacaatag

SEQ ID NO: 336010 - DNA, 30 bp, Artificial Sequence
  Synthetic oligonucleotide
ggattctaacaatctgtaaggatacaatag

SEQ ID NO: 336011 - DNA, 30 bp, Artificial Sequence
  Synthetic oligonucleotide
tattgtgagtcatctacggatgaccaatag

SEQ ID NO: 336012 - DNA, 30 bp, Artificial Sequence
  Synthetic oligonucleotide
tttcagtttggcccgcatcgataccaatag

SEQ ID NO: 336013 - DNA, 30 bp, Artificial Sequence
  Synthetic oligonucleotide
caacgatgcggctactagtgtggccaatag

SEQ ID NO: 336014 - DNA, 30 bp, Artificial Sequence
  Synthetic oligonucleotide
cgggaatgcgccaaagcgacattccaatag

SEQ ID NO: 336015 - DNA, 30 bp, Artificial Sequence
  Synthetic oligonucleotide
ttaggggggcaattgtaataagtgcaatag

SEQ ID NO: 336016 - DNA, 30 bp, Artificial Sequence
  Synthetic oligonucleotide
cctattggaggtgcgggggccttgcaatag

SEQ ID NO: 336017 - DNA, 30 bp, Artificial Sequence
  Synthetic oligonucleotide
taaagggtggcaacgagcggcaatcaatag

SEQ ID NO: 336018 - DNA, 30 bp, Artificial Sequence
  Synthetic oligonucleotide
taattgtgccttcgccaggttaatcaatag

SEQ ID NO: 336019 - DNA, 30 bp, Artificial Sequence
  Synthetic oligonucleotide
gtatcggtcgcagacctgtgccgtcaatag

SEQ ID NO: 336020 - DNA, 30 bp, Artificial Sequence
  Synthetic oligonucleotide
gacatgcacttccggctgcatattcaatag

SEQ ID NO: 336021 - DNA, 30 bp, Artificial Sequence
  Synthetic oligonucleotide
gataactaaatttgtaaggactttcaatag

SEQ ID NO: 336022 - DNA, 30 bp, Artificial Sequence
  Synthetic oligonucleotide
actggcagccaatcactgtggacagaatag

SEQ ID NO: 336023 - DNA, 30 bp, Artificial Sequence
  Synthetic oligonucleotide
ctagtcctaatggatgtagatcgagaatag

SEQ ID NO: 336024 - DNA, 31 bp, Artificial Sequence
  Synthetic oligonucleotide
cagccacaattgtccataaggattagaatag

SEQ ID NO: 336025 - DNA, 30 bp, Artificial Sequence
  Synthetic oligonucleotide
gccagacccatagtgcaaagatgcgaatag

SEQ ID NO: 336026 - DNA, 30 bp, Artificial Sequence
  Synthetic oligonucleotide
atcatatctatttcaatcccccaggaatag

SEQ ID NO: 336027 - DNA, 30 bp, Artificial Sequence
  Synthetic oligonucleotide
aaccattaggatctggtgaaatgggaatag

SEQ ID NO: 336028 - DNA, 30 bp, Artificial Sequence
  Synthetic oligonucleotide
cgacggagcctatgcggggaattggaatag

SEQ ID NO: 336029 - DNA, 30 bp, Artificial Sequence
  Synthetic oligonucleotide
ctgattatacgcgcaatgcaaaatgaatag

SEQ ID NO: 336030 - DNA, 30 bp, Artificial Sequence
  Synthetic oligonucleotide
aagcactcggggttgtattgcgatgaatag

SEQ ID NO: 336031 - DNA, 30 bp, Artificial Sequence
  Synthetic oligonucleotide
gcgggatcattgtagacatactatgaatag

SEQ ID NO: 336032 - DNA, 30 bp, Artificial Sequence
  Synthetic oligonucleotide
atcggcggacctggggaccgctttgaatag

SEQ ID NO: 336033 - DNA, 30 bp, Artificial Sequence
  Synthetic oligonucleotide
ggagagtaatgtagatctatgtttgaatag

SEQ ID NO: 336034 - DNA, 30 bp, Artificial Sequence
  Synthetic oligonucleotide
catatgagggctgacaataataaataatag

SEQ ID NO: 336035 - DNA, 30 bp, Artificial Sequence
  Synthetic oligonucleotide
gcctcctcaccgtcggagggccgctaatag

SEQ ID NO: 336036 - DNA, 30 bp, Artificial Sequence
  Synthetic oligonucleotide
accctgctagagccgtagctgctctaatag

SEQ ID NO: 336037 - DNA, 30 bp, Artificial Sequence
  Synthetic oligonucleotide
acttaagtgcacgtgcaggcacattaatag

SEQ ID NO: 336038 - DNA, 30 bp, Artificial Sequence
  Synthetic oligonucleotide
gtatccacgttttacgcttgatattaatag

SEQ ID NO: 336039 - DNA, 30 bp, Artificial Sequence
  Synthetic oligonucleotide
ttactggcaaaggaatggtagtattaatag

SEQ ID NO: 336040 - DNA, 30 bp, Artificial Sequence
  Synthetic oligonucleotide
ctgcagctaggtttaacggttttaacatag

SEQ ID NO: 336041 - DNA, 30 bp, Artificial Sequence
  Synthetic oligonucleotide
aagtaatggattttaaataggcgcacatag

SEQ ID NO: 336042 - DNA, 30 bp, Artificial Sequence
  Synthetic oligonucleotide
ttctgaataatgattgcttaaatcacatag

SEQ ID NO: 336043 - DNA, 31 bp, Artificial Sequence
  Synthetic oligonucleotide
cccatcagggttcacacgctcctagacatag

SEQ ID NO: 336044 - DNA, 30 bp, Artificial Sequence
  Synthetic oligonucleotide
ggtttcaatcatgagaaagactttacatag

SEQ ID NO: 336045 - DNA, 30 bp, Artificial Sequence
  Synthetic oligonucleotide
tagatctgtctacttcctcggctcccatag

SEQ ID NO: 336046 - DNA, 30 bp, Artificial Sequence
  Synthetic oligonucleotide
gcttcgtaatggggtagaggcttcccatag

SEQ ID NO: 336047 - DNA, 30 bp, Artificial Sequence
  Synthetic oligonucleotide
cttatagcagggcttatggggcatccatag

SEQ ID NO: 336048 - DNA, 30 bp, Artificial Sequence
  Synthetic oligonucleotide
agggccgggcgcgtattcgacgaagcatag

SEQ ID NO: 336049 - DNA, 30 bp, Artificial Sequence
  Synthetic oligonucleotide
aatgtcctgatcaagtaacaagcagcatag

SEQ ID NO: 336050 - DNA, 30 bp, Artificial Sequence
  Synthetic oligonucleotide
accatacgatcaaaaatgatagacgcatag

SEQ ID NO: 336051 - DNA, 30 bp, Artificial Sequence
  Synthetic oligonucleotide
atcaaccatggagaaactctttacgcatag

SEQ ID NO: 336052 - DNA, 30 bp, Artificial Sequence
  Synthetic oligonucleotide
ggggttctcatactcggtgggcctgcatag

SEQ ID NO: 336053 - DNA, 30 bp, Artificial Sequence
  Synthetic oligonucleotide
aagtcaggctccgggtatatacaatcatag

SEQ ID NO: 336054 - DNA, 30 bp, Artificial Sequence
  Synthetic oligonucleotide
atttgactacggttttatagccaatcatag

SEQ ID NO: 336055 - DNA, 30 bp, Artificial Sequence
  Synthetic oligonucleotide
aattacgacatgcatcccaggtcctcatag

SEQ ID NO: 336056 - DNA, 30 bp, Artificial Sequence
  Synthetic oligonucleotide
gactcgcagagcagattaggcggctcatag

SEQ ID NO: 336057 - DNA, 30 bp, Artificial Sequence
  Synthetic oligonucleotide
aaataaagggtatgacgtattaagtcatag

SEQ ID NO: 336058 - DNA, 30 bp, Artificial Sequence
  Synthetic oligonucleotide
ggccatataaaaatgcgggcgcggtcatag

SEQ ID NO: 336059 - DNA, 30 bp, Artificial Sequence
  Synthetic oligonucleotide
cactttgctcgcttccgtgccgattcatag

SEQ ID NO: 336060 - DNA, 30 bp, Artificial Sequence
  Synthetic oligonucleotide
gtgatcgtggtatgggagggtgattcatag

SEQ ID NO: 336061 - DNA, 30 bp, Artificial Sequence
  Synthetic oligonucleotide
cgacttctggtcgcgttatactattcatag

SEQ ID NO: 336062 - DNA, 30 bp, Artificial Sequence
  Synthetic oligonucleotide
taaaagaatctctagtatcggtgttcatag

SEQ ID NO: 336063 - DNA, 30 bp, Artificial Sequence
  Synthetic oligonucleotide
ggggggacgttcccctaatgaagaagatag

SEQ ID NO: 336064 - DNA, 31 bp, Artificial Sequence
  Synthetic oligonucleotide
ttccaactcccgctaaagatatggaagatag

SEQ ID NO: 336065 - DNA, 30 bp, Artificial Sequence
  Synthetic oligonucleotide
cagtgcacagctagatagggcaagagatag

SEQ ID NO: 336066 - DNA, 30 bp, Artificial Sequence
  Synthetic oligonucleotide
caggcgacgctttgttggagcgcgagatag

SEQ ID NO: 336067 - DNA, 30 bp, Artificial Sequence
  Synthetic oligonucleotide
agtctatatgtacggatatcactgagatag

SEQ ID NO: 336068 - DNA, 30 bp, Artificial Sequence
  Synthetic oligonucleotide
acgttagcacgctaacgttggcgtagatag

SEQ ID NO: 336069 - DNA, 30 bp, Artificial Sequence
  Synthetic oligonucleotide
gattcatttaagcatataagttcacgatag

SEQ ID NO: 336070 - DNA, 30 bp, Artificial Sequence
  Synthetic oligonucleotide
gaaccgttatgtagatccttttcacgatag

SEQ ID NO: 336071 - DNA, 30 bp, Artificial Sequence
  Synthetic oligonucleotide
tacaaatgcgcgcggctatcctagcgatag

SEQ ID NO: 336072 - DNA, 30 bp, Artificial Sequence
  Synthetic oligonucleotide
tttaagcaatcacagctgcgcactcgatag

SEQ ID NO: 336073 - DNA, 30 bp, Artificial Sequence
  Synthetic oligonucleotide
gttctccaagtcgggtgaagctgaggatag

SEQ ID NO: 336074 - DNA, 30 bp, Artificial Sequence
  Synthetic oligonucleotide
gacctcagcggtttagcaactataggatag

SEQ ID NO: 336075 - DNA, 30 bp, Artificial Sequence
  Synthetic oligonucleotide
cacgggagcagagcgtccgacctaggatag

SEQ ID NO: 336076 - DNA, 30 bp, Artificial Sequence
  Synthetic oligonucleotide
cggtgcgatgccgcacttgcgcacggatag

SEQ ID NO: 336077 - DNA, 30 bp, Artificial Sequence
  Synthetic oligonucleotide
gaagaccagacacgctaagttgccggatag

SEQ ID NO: 336078 - DNA, 30 bp, Artificial Sequence
  Synthetic oligonucleotide
atgcagttctatacaatgccagtgggatag

SEQ ID NO: 336079 - DNA, 30 bp, Artificial Sequence
  Synthetic oligonucleotide
acggcgagtctaaaatttttctctggatag

SEQ ID NO: 336080 - DNA, 30 bp, Artificial Sequence
  Synthetic oligonucleotide
ccggggaagcactattataagggtggatag

SEQ ID NO: 336081 - DNA, 30 bp, Artificial Sequence
  Synthetic oligonucleotide
atcaagacccccagggggtagcttggatag

SEQ ID NO: 336082 - DNA, 30 bp, Artificial Sequence
  Synthetic oligonucleotide
gtgattaaattaagcaatctatttggatag

SEQ ID NO: 336083 - DNA, 30 bp, Artificial Sequence
  Synthetic oligonucleotide
ggccccctatagtgacgttcataatgatag

SEQ ID NO: 336084 - DNA, 30 bp, Artificial Sequence
  Synthetic oligonucleotide
cattgtcgtaaaggcgggaactcatgatag

SEQ ID NO: 336085 - DNA, 30 bp, Artificial Sequence
  Synthetic oligonucleotide
cggccgactggctcctactttgaaatatag

SEQ ID NO: 336086 - DNA, 30 bp, Artificial Sequence
  Synthetic oligonucleotide
actagaatattttgtagtgaaagaatatag

SEQ ID NO: 336087 - DNA, 30 bp, Artificial Sequence
  Synthetic oligonucleotide
caactacttgagaagggagacgacatatag

SEQ ID NO: 336088 - DNA, 30 bp, Artificial Sequence
  Synthetic oligonucleotide
tagttaatgaggtccttttgaaccatatag

SEQ ID NO: 336089 - DNA, 30 bp, Artificial Sequence
  Synthetic oligonucleotide
acactggcactcgtcggctcatccatatag

SEQ ID NO: 336090 - DNA, 30 bp, Artificial Sequence
  Synthetic oligonucleotide
cccggtcagtagccgttgagaacgatatag

SEQ ID NO: 336091 - DNA, 30 bp, Artificial Sequence
  Synthetic oligonucleotide
cctcattgacatgaggtaggatcgatatag

SEQ ID NO: 336092 - DNA, 30 bp, Artificial Sequence
  Synthetic oligonucleotide
tcgagtcgcctgtatatacggaatatatag

SEQ ID NO: 336093 - DNA, 30 bp, Artificial Sequence
  Synthetic oligonucleotide
gatcgtgcactcgcggcctggaatatatag

SEQ ID NO: 336094 - DNA, 30 bp, Artificial Sequence
  Synthetic oligonucleotide
gtgcgccagataatgcaaatgcccctatag

SEQ ID NO: 336095 - DNA, 30 bp, Artificial Sequence
  Synthetic oligonucleotide
ggcattgcggcgtgtacaggcgggctatag

SEQ ID NO: 336096 - DNA, 30 bp, Artificial Sequence
  Synthetic oligonucleotide
ccacggttgtttgcgtactcgatagtatag

SEQ ID NO: 336097 - DNA, 30 bp, Artificial Sequence
  Synthetic oligonucleotide
aaaaattggcgactgggtatggtagtatag

SEQ ID NO: 336098 - DNA, 30 bp, Artificial Sequence
  Synthetic oligonucleotide
attgagcctctgctcagagcgttagtatag

SEQ ID NO: 336099 - DNA, 30 bp, Artificial Sequence
  Synthetic oligonucleotide
agcatactcaagcacacgcttttagtatag

SEQ ID NO: 336100 - DNA, 30 bp, Artificial Sequence
  Synthetic oligonucleotide
atagagcggtttcgagggtaatacgtatag

SEQ ID NO: 336101 - DNA, 30 bp, Artificial Sequence
  Synthetic oligonucleotide
gttggtttatgcctttagtggctcgtatag

SEQ ID NO: 336102 - DNA, 30 bp, Artificial Sequence
  Synthetic oligonucleotide
gagtgccgataaatcgtccgcgcggtatag

SEQ ID NO: 336103 - DNA, 30 bp, Artificial Sequence
  Synthetic oligonucleotide
ggaaggtggcggggctcaaagtcggtatag

SEQ ID NO: 336104 - DNA, 30 bp, Artificial Sequence
  Synthetic oligonucleotide
tatatccttttggtgctcaggctggtatag

SEQ ID NO: 336105 - DNA, 30 bp, Artificial Sequence
  Synthetic oligonucleotide
tgaattcgggttacgtcagtacctgtatag

SEQ ID NO: 336106 - DNA, 28 bp, Artificial Sequence
  Synthetic oligonucleotide
atccgtgagcggtactaagagtgtatag

SEQ ID NO: 336107 - DNA, 30 bp, Artificial Sequence
  Synthetic oligonucleotide
agcttcttaggcaattaaacttgtgtatag

SEQ ID NO: 336108 - DNA, 30 bp, Artificial Sequence
  Synthetic oligonucleotide
ttacattgaaggctaacttaacaattatag

SEQ ID NO: 336109 - DNA, 30 bp, Artificial Sequence
  Synthetic oligonucleotide
tcttaaaggccccagagcctaatattatag

SEQ ID NO: 336110 - DNA, 30 bp, Artificial Sequence
  Synthetic oligonucleotide
atgcgatgcgcgcagtctgggcccttatag

SEQ ID NO: 336111 - DNA, 30 bp, Artificial Sequence
  Synthetic oligonucleotide
atttggtgggggtggagtggggccttatag

SEQ ID NO: 336112 - DNA, 30 bp, Artificial Sequence
  Synthetic oligonucleotide
gcatgtatttacaaagtcgtcgggttatag

SEQ ID NO: 336113 - DNA, 30 bp, Artificial Sequence
  Synthetic oligonucleotide
tatgtgaattaagctaggggggctttatag

SEQ ID NO: 336114 - DNA, 30 bp, Artificial Sequence
  Synthetic oligonucleotide
tatgaataacaacaagtccaatttttatag

SEQ ID NO: 336115 - DNA, 30 bp, Artificial Sequence
  Synthetic oligonucleotide
aaactgggaaagaaggactagtaaaactag

SEQ ID NO: 336116 - DNA, 30 bp, Artificial Sequence
  Synthetic oligonucleotide
cgctgattgtgagtatgtggcctaaactag

SEQ ID NO: 336117 - DNA, 30 bp, Artificial Sequence
  Synthetic oligonucleotide
ataccttcgatgatcttcaagaagaactag

SEQ ID NO: 336118 - DNA, 30 bp, Artificial Sequence
  Synthetic oligonucleotide
gtgtaggtagggcctcggcgatagaactag

SEQ ID NO: 336119 - DNA, 30 bp, Artificial Sequence
  Synthetic oligonucleotide
tggtacattacacccttactgtataactag

SEQ ID NO: 336120 - DNA, 30 bp, Artificial Sequence
  Synthetic oligonucleotide
cttacggtgcggcattagtttaaccactag

SEQ ID NO: 336121 - DNA, 30 bp, Artificial Sequence
  Synthetic oligonucleotide
cggaattattgacccagcaggatccactag

SEQ ID NO: 336122 - DNA, 30 bp, Artificial Sequence
  Synthetic oligonucleotide
atagcgggccagagtgttcaatcgcactag

SEQ ID NO: 336123 - DNA, 31 bp, Artificial Sequence
  Synthetic oligonucleotide
agaatggggtttgggtacgcaagttcactag

SEQ ID NO: 336124 - DNA, 30 bp, Artificial Sequence
  Synthetic oligonucleotide
ggacccacgctagtcaagcgatttcactag

SEQ ID NO: 336125 - DNA, 30 bp, Artificial Sequence
  Synthetic oligonucleotide
cctgaagagctctttaaggcttttcactag

SEQ ID NO: 336126 - DNA, 30 bp, Artificial Sequence
  Synthetic oligonucleotide
ggaccgacccccggactagaagtagactag

SEQ ID NO: 336127 - DNA, 30 bp, Artificial Sequence
  Synthetic oligonucleotide
tggctgtcgcgagggtggggtcgcgactag

SEQ ID NO: 336128 - DNA, 30 bp, Artificial Sequence
  Synthetic oligonucleotide
aagttaaactggcgaccgtgtggcgactag

SEQ ID NO: 336129 - DNA, 30 bp, Artificial Sequence
  Synthetic oligonucleotide
gattcgaccggcgagactaggtgcgactag

SEQ ID NO: 336130 - DNA, 30 bp, Artificial Sequence
  Synthetic oligonucleotide
ttggtggagattatcccctacgtggactag

SEQ ID NO: 336131 - DNA, 30 bp, Artificial Sequence
  Synthetic oligonucleotide
aagctgttgctaattttattggttgactag

SEQ ID NO: 336132 - DNA, 30 bp, Artificial Sequence
  Synthetic oligonucleotide
ttacctaaagaattccgggggagatactag

SEQ ID NO: 336133 - DNA, 30 bp, Artificial Sequence
  Synthetic oligonucleotide
ttgcgatagacaaatttaatggtgtactag

SEQ ID NO: 336134 - DNA, 30 bp, Artificial Sequence
  Synthetic oligonucleotide
cctttcgtagaccgataagcttggacctag

SEQ ID NO: 336135 - DNA, 30 bp, Artificial Sequence
  Synthetic oligonucleotide
gatttaagcttgcgatactgaaatacctag

SEQ ID NO: 336136 - DNA, 30 bp, Artificial Sequence
  Synthetic oligonucleotide
ggtgggaccagactagcactgaacccctag

SEQ ID NO: 336137 - DNA, 30 bp, Artificial Sequence
  Synthetic oligonucleotide
aggtgagtttacttggcatataacccctag

SEQ ID NO: 336138 - DNA, 30 bp, Artificial Sequence
  Synthetic oligonucleotide
gatgtaacgctcgggtgtggggacccctag

SEQ ID NO: 336139 - DNA, 30 bp, Artificial Sequence
  Synthetic oligonucleotide
ggaaataccgcgacgtcttgcaccccctag

SEQ ID NO: 336140 - DNA, 31 bp, Artificial Sequence
  Synthetic oligonucleotide
ggacggcaccggctgataaacgggcccctag

SEQ ID NO: 336141 - DNA, 30 bp, Artificial Sequence
  Synthetic oligonucleotide
gcctgacttttagaagtataagtcccctag

SEQ ID NO: 336142 - DNA, 30 bp, Artificial Sequence
  Synthetic oligonucleotide
ccgggttagatgtaagcgacccctccctag

SEQ ID NO: 336143 - DNA, 30 bp, Artificial Sequence
  Synthetic oligonucleotide
gaataccggcgacgtatacgataagcctag

SEQ ID NO: 336144 - DNA, 30 bp, Artificial Sequence
  Synthetic oligonucleotide
gcattttataaatcacaaagcgcagcctag

SEQ ID NO: 336145 - DNA, 30 bp, Artificial Sequence
  Synthetic oligonucleotide
gggggttggatataacgggtcatagcctag

SEQ ID NO: 336146 - DNA, 30 bp, Artificial Sequence
  Synthetic oligonucleotide
ggaaaagctttgtgtgtgcagaccgcctag

SEQ ID NO: 336147 - DNA, 30 bp, Artificial Sequence
  Synthetic oligonucleotide
ttacggatataattacaccgcattgcctag

SEQ ID NO: 336148 - DNA, 30 bp, Artificial Sequence
  Synthetic oligonucleotide
gttccgtactcgcaaagctaactatcctag

SEQ ID NO: 336149 - DNA, 30 bp, Artificial Sequence
  Synthetic oligonucleotide
aatcaacgtgtagagtaattcacctcctag

SEQ ID NO: 336150 - DNA, 30 bp, Artificial Sequence
  Synthetic oligonucleotide
gtgctgttttcttgcaagtatcgttcctag

SEQ ID NO: 336151 - DNA, 30 bp, Artificial Sequence
  Synthetic oligonucleotide
tacgttcgggctccgccgtttgcaagctag

SEQ ID NO: 336152 - DNA, 30 bp, Artificial Sequence
  Synthetic oligonucleotide
ttgggctaggctatcttgggggacagctag

SEQ ID NO: 336153 - DNA, 30 bp, Artificial Sequence
  Synthetic oligonucleotide
cataaggatgcttgctgtagaccgagctag

SEQ ID NO: 336154 - DNA, 30 bp, Artificial Sequence
  Synthetic oligonucleotide
gatctcacggaaccaatacgttcgagctag

SEQ ID NO: 336155 - DNA, 30 bp, Artificial Sequence
  Synthetic oligonucleotide
aggataggctacgccattctcttgagctag

SEQ ID NO: 336156 - DNA, 28 bp, Artificial Sequence
  Synthetic oligonucleotide
gcacccaataggaaggacctctagctag

SEQ ID NO: 336157 - DNA, 30 bp, Artificial Sequence
  Synthetic oligonucleotide
gcgcgtaccataaaaccattcggtagctag

SEQ ID NO: 336158 - DNA, 30 bp, Artificial Sequence
  Synthetic oligonucleotide
ctgaatctttcgtcaaggcgctaacgctag

SEQ ID NO: 336159 - DNA, 30 bp, Artificial Sequence
  Synthetic oligonucleotide
gtctttggtggctgcggaaacctacgctag

SEQ ID NO: 336160 - DNA, 30 bp, Artificial Sequence
  Synthetic oligonucleotide
ttcgtcacatttcttgccccaacccgctag

SEQ ID NO: 336161 - DNA, 30 bp, Artificial Sequence
  Synthetic oligonucleotide
cagactctgttacagccacgatgccgctag

SEQ ID NO: 336162 - DNA, 30 bp, Artificial Sequence
  Synthetic oligonucleotide
acacgttaggcatgtcggtgtaggcgctag

SEQ ID NO: 336163 - DNA, 30 bp, Artificial Sequence
  Synthetic oligonucleotide
ttccttctgtgaaaaaggtgaatgcgctag

SEQ ID NO: 336164 - DNA, 30 bp, Artificial Sequence
  Synthetic oligonucleotide
gtattatatgttgttaactagcttcgctag

SEQ ID NO: 336165 - DNA, 30 bp, Artificial Sequence
  Synthetic oligonucleotide
tccttcagcgtgcgtgtggacaaaggctag

SEQ ID NO: 336166 - DNA, 30 bp, Artificial Sequence
  Synthetic oligonucleotide
tcaatggaatttgattgtataccaggctag

SEQ ID NO: 336167 - DNA, 30 bp, Artificial Sequence
  Synthetic oligonucleotide
atggtgcgtcttggcggcggcccaggctag

SEQ ID NO: 336168 - DNA, 30 bp, Artificial Sequence
  Synthetic oligonucleotide
tatcaagtcgttacggcgttgcacggctag

SEQ ID NO: 336169 - DNA, 30 bp, Artificial Sequence
  Synthetic oligonucleotide
gcatctggtattaagggaagtacctgctag

SEQ ID NO: 336170 - DNA, 30 bp, Artificial Sequence
  Synthetic oligonucleotide
cttgaacaaggtgcttacttcacaatctag

SEQ ID NO: 336171 - DNA, 30 bp, Artificial Sequence
  Synthetic oligonucleotide
cccttcgtccgctgggtgtaaaacatctag

SEQ ID NO: 336172 - DNA, 30 bp, Artificial Sequence
  Synthetic oligonucleotide
taggcatgcgtaagttcaatgtacatctag

SEQ ID NO: 336173 - DNA, 30 bp, Artificial Sequence
  Synthetic oligonucleotide
ctatgtcgtagaatctttttccggatctag

SEQ ID NO: 336174 - DNA, 30 bp, Artificial Sequence
  Synthetic oligonucleotide
ggccctgtcaacctttattttcggatctag

SEQ ID NO: 336175 - DNA, 30 bp, Artificial Sequence
  Synthetic oligonucleotide
gtaataaggttaactgaatggctgatctag

SEQ ID NO: 336176 - DNA, 30 bp, Artificial Sequence
  Synthetic oligonucleotide
gtgatgggtgtgcgtagcacgttgatctag

SEQ ID NO: 336177 - DNA, 30 bp, Artificial Sequence
  Synthetic oligonucleotide
gtgcacgggctgttcaagagctacctctag

SEQ ID NO: 336178 - DNA, 30 bp, Artificial Sequence
  Synthetic oligonucleotide
caaattggcatagttctaaaacgcctctag

SEQ ID NO: 336179 - DNA, 30 bp, Artificial Sequence
  Synthetic oligonucleotide
gtcgtagaatcctagttaaggctcctctag

SEQ ID NO: 336180 - DNA, 30 bp, Artificial Sequence
  Synthetic oligonucleotide
tctcatggttttatgtatgctaagctctag

SEQ ID NO: 336181 - DNA, 30 bp, Artificial Sequence
  Synthetic oligonucleotide
cttgtttagactgtcctacatcagctctag

SEQ ID NO: 336182 - DNA, 30 bp, Artificial Sequence
  Synthetic oligonucleotide
gcgaagctccttgttcatcctaaagtctag

SEQ ID NO: 336183 - DNA, 30 bp, Artificial Sequence
  Synthetic oligonucleotide
catccggcaagcgctccttggcacgtctag

SEQ ID NO: 336184 - DNA, 30 bp, Artificial Sequence
  Synthetic oligonucleotide
gaagacgatcatactgaacgctacgtctag

SEQ ID NO: 336185 - DNA, 30 bp, Artificial Sequence
  Synthetic oligonucleotide
atactaggcatgcaggtgctaaccgtctag

SEQ ID NO: 336186 - DNA, 30 bp, Artificial Sequence
  Synthetic oligonucleotide
cgttacggctagctatagctccccgtctag

SEQ ID NO: 336187 - DNA, 30 bp, Artificial Sequence
  Synthetic oligonucleotide
ttgaagggggggcactatgagtccgtctag

SEQ ID NO: 336188 - DNA, 30 bp, Artificial Sequence
  Synthetic oligonucleotide
gcataaaacgccgtttactcgttcgtctag

SEQ ID NO: 336189 - DNA, 30 bp, Artificial Sequence
  Synthetic oligonucleotide
catgcgcccatgaaggtctcaccggtctag

SEQ ID NO: 336190 - DNA, 30 bp, Artificial Sequence
  Synthetic oligonucleotide
tgacacttatggaccctggatcatgtctag

SEQ ID NO: 336191 - DNA, 30 bp, Artificial Sequence
  Synthetic oligonucleotide
ggggtgcaccatacccgtctatgtgtctag

SEQ ID NO: 336192 - DNA, 30 bp, Artificial Sequence
  Synthetic oligonucleotide
taatgtgagacgggggatccctttgtctag

SEQ ID NO: 336193 - DNA, 30 bp, Artificial Sequence
  Synthetic oligonucleotide
gccaatgcaggtcaatttactagattctag

SEQ ID NO: 336194 - DNA, 30 bp, Artificial Sequence
  Synthetic oligonucleotide
aaaataagcacgtggaacgctaacttctag

SEQ ID NO: 336195 - DNA, 30 bp, Artificial Sequence
  Synthetic oligonucleotide
attccaaaaccattcgaattccacttctag

SEQ ID NO: 336196 - DNA, 30 bp, Artificial Sequence
  Synthetic oligonucleotide
ggagtatatgattctcggtctcagttctag

SEQ ID NO: 336197 - DNA, 30 bp, Artificial Sequence
  Synthetic oligonucleotide
tgtcacgcaggcacgccgtgtgggttctag

SEQ ID NO: 336198 - DNA, 30 bp, Artificial Sequence
  Synthetic oligonucleotide
tataacgaatatgtaacagcagccaagtag

SEQ ID NO: 336199 - DNA, 30 bp, Artificial Sequence
  Synthetic oligonucleotide
agttaatagctaaaaatccggggtaagtag

SEQ ID NO: 336200 - DNA, 30 bp, Artificial Sequence
  Synthetic oligonucleotide
aataccatttgttcggactactgtaagtag

SEQ ID NO: 336201 - DNA, 30 bp, Artificial Sequence
  Synthetic oligonucleotide
agacagccacagtccacagcctttaagtag

SEQ ID NO: 336202 - DNA, 30 bp, Artificial Sequence
  Synthetic oligonucleotide
cagtacccatttacgcttgtctgacagtag

SEQ ID NO: 336203 - DNA, 30 bp, Artificial Sequence
  Synthetic oligonucleotide
cggtgcaatgctcatagatagcacgagtag

SEQ ID NO: 336204 - DNA, 30 bp, Artificial Sequence
  Synthetic oligonucleotide
tgtgttaaaatttaaagggttgtcgagtag

SEQ ID NO: 336205 - DNA, 30 bp, Artificial Sequence
  Synthetic oligonucleotide
aatttaaacacagtgcggtatgaatagtag

SEQ ID NO: 336206 - DNA, 30 bp, Artificial Sequence
  Synthetic oligonucleotide
aataactcagtaccgggttactcatagtag

SEQ ID NO: 336207 - DNA, 29 bp, Artificial Sequence
  Synthetic oligonucleotide
caaagaagacgtgtttgagttgatagtag

SEQ ID NO: 336208 - DNA, 30 bp, Artificial Sequence
  Synthetic oligonucleotide
accgccacagggttgtcatcagtatagtag

SEQ ID NO: 336209 - DNA, 30 bp, Artificial Sequence
  Synthetic oligonucleotide
cagttacttccatcggtcgggagctagtag

SEQ ID NO: 336210 - DNA, 30 bp, Artificial Sequence
  Synthetic oligonucleotide
aggcttagtcgttataaacgggtctagtag

SEQ ID NO: 336211 - DNA, 30 bp, Artificial Sequence
  Synthetic oligonucleotide
gggctccgggttccgattacgccgtagtag

SEQ ID NO: 336212 - DNA, 30 bp, Artificial Sequence
  Synthetic oligonucleotide
tctagggctttcaaatatatgaattagtag

SEQ ID NO: 336213 - DNA, 30 bp, Artificial Sequence
  Synthetic oligonucleotide
acttaggggtcgtttttgggatattagtag

SEQ ID NO: 336214 - DNA, 30 bp, Artificial Sequence
  Synthetic oligonucleotide
tataattcgtatagtaatcgtacttagtag

SEQ ID NO: 336215 - DNA, 30 bp, Artificial Sequence
  Synthetic oligonucleotide
tttagtacctggggtaatcggcaaacgtag

SEQ ID NO: 336216 - DNA, 30 bp, Artificial Sequence
  Synthetic oligonucleotide
tctcagtaaacaaagtacgttttaacgtag

SEQ ID NO: 336217 - DNA, 30 bp, Artificial Sequence
  Synthetic oligonucleotide
ggaccggaggcctttcggttgctcacgtag

SEQ ID NO: 336218 - DNA, 30 bp, Artificial Sequence
  Synthetic oligonucleotide
cctataggttagtttgaagccaatacgtag

SEQ ID NO: 336219 - DNA, 30 bp, Artificial Sequence
  Synthetic oligonucleotide
taggattaccgacttaccttggacccgtag

SEQ ID NO: 336220 - DNA, 30 bp, Artificial Sequence
  Synthetic oligonucleotide
catagcgcgaacgcgcggtggggcccgtag

SEQ ID NO: 336221 - DNA, 30 bp, Artificial Sequence
  Synthetic oligonucleotide
cctccaatcaaaaggcgagcaccgccgtag

SEQ ID NO: 336222 - DNA, 30 bp, Artificial Sequence
  Synthetic oligonucleotide
acatcctatgtcttgtccacccaagcgtag

SEQ ID NO: 336223 - DNA, 30 bp, Artificial Sequence
  Synthetic oligonucleotide
tgcgcgttggaattgacccaaaacgcgtag

SEQ ID NO: 336224 - DNA, 30 bp, Artificial Sequence
  Synthetic oligonucleotide
gttctaacggtagcagttgatcaggcgtag

SEQ ID NO: 336225 - DNA, 30 bp, Artificial Sequence
  Synthetic oligonucleotide
atagttggcgtgaaagaaaacacggcgtag

SEQ ID NO: 336226 - DNA, 30 bp, Artificial Sequence
  Synthetic oligonucleotide
gacgatgtacataccagtgttagtgcgtag

SEQ ID NO: 336227 - DNA, 30 bp, Artificial Sequence
  Synthetic oligonucleotide
tggtcctagaaagaacccgttcttgcgtag

SEQ ID NO: 336228 - DNA, 30 bp, Artificial Sequence
  Synthetic oligonucleotide
tgtctgaatgttccacccataaaatcgtag

SEQ ID NO: 336229 - DNA, 30 bp, Artificial Sequence
  Synthetic oligonucleotide
ctgacagggtgagttcctagtttatcgtag

SEQ ID NO: 336230 - DNA, 30 bp, Artificial Sequence
  Synthetic oligonucleotide
ccggacggacgagcacccagtagctcgtag

SEQ ID NO: 336231 - DNA, 30 bp, Artificial Sequence
  Synthetic oligonucleotide
ggtataggtcttagttgccgttggtcgtag

SEQ ID NO: 336232 - DNA, 30 bp, Artificial Sequence
  Synthetic oligonucleotide
tgaagttacgtcaccgcgggcctaaggtag

SEQ ID NO: 336233 - DNA, 30 bp, Artificial Sequence
  Synthetic oligonucleotide
gtagtatagcatcgtggtgctcacaggtag

SEQ ID NO: 336234 - DNA, 30 bp, Artificial Sequence
  Synthetic oligonucleotide
atgtatgcacatagaactcgatccaggtag

SEQ ID NO: 336235 - DNA, 30 bp, Artificial Sequence
  Synthetic oligonucleotide
ggcagatattagttcaccgagcctaggtag

SEQ ID NO: 336236 - DNA, 30 bp, Artificial Sequence
  Synthetic oligonucleotide
tatcattagtccaccctagggatccggtag

SEQ ID NO: 336237 - DNA, 30 bp, Artificial Sequence
  Synthetic oligonucleotide
agactggactccggacgtactaagcggtag

SEQ ID NO: 336238 - DNA, 30 bp, Artificial Sequence
  Synthetic oligonucleotide
tcacacgccagggcagtaagcccgcggtag

SEQ ID NO: 336239 - DNA, 30 bp, Artificial Sequence
  Synthetic oligonucleotide
tagatattactcgacggtaaatcgcggtag

SEQ ID NO: 336240 - DNA, 30 bp, Artificial Sequence
  Synthetic oligonucleotide
tagggcctccagtttatacataggcggtag

SEQ ID NO: 336241 - DNA, 30 bp, Artificial Sequence
  Synthetic oligonucleotide
ggtatctttaaaggcccaaggtggcggtag

SEQ ID NO: 336242 - DNA, 30 bp, Artificial Sequence
  Synthetic oligonucleotide
gcacttcagcccaaaaattttctgcggtag

SEQ ID NO: 336243 - DNA, 30 bp, Artificial Sequence
  Synthetic oligonucleotide
accgtacgtaagcttgatacccatcggtag

SEQ ID NO: 336244 - DNA, 30 bp, Artificial Sequence
  Synthetic oligonucleotide
agtgcactacacgtaagtccgcaagggtag

SEQ ID NO: 336245 - DNA, 30 bp, Artificial Sequence
  Synthetic oligonucleotide
attgcacggtacgggatccggcccgggtag

SEQ ID NO: 336246 - DNA, 30 bp, Artificial Sequence
  Synthetic oligonucleotide
tcggccggggatggactatatcgcgggtag

SEQ ID NO: 336247 - DNA, 30 bp, Artificial Sequence
  Synthetic oligonucleotide
cgataattgttgaagcacagcggggggtag

SEQ ID NO: 336248 - DNA, 30 bp, Artificial Sequence
  Synthetic oligonucleotide
tcaattcctcaaagggcaaggtgtgggtag

SEQ ID NO: 336249 - DNA, 30 bp, Artificial Sequence
  Synthetic oligonucleotide
atctttggtgaacaaggccaaattgggtag

SEQ ID NO: 336250 - DNA, 30 bp, Artificial Sequence
  Synthetic oligonucleotide
tagtaaccttctttccatcaaagatggtag

SEQ ID NO: 336251 - DNA, 30 bp, Artificial Sequence
  Synthetic oligonucleotide
tattcggtcaagttgacttagcgctggtag

SEQ ID NO: 336252 - DNA, 30 bp, Artificial Sequence
  Synthetic oligonucleotide
gcatcaccactgtcaacattaaattggtag

SEQ ID NO: 336253 - DNA, 30 bp, Artificial Sequence
  Synthetic oligonucleotide
cccggttaaatcactcagaattgttggtag

SEQ ID NO: 336254 - DNA, 30 bp, Artificial Sequence
  Synthetic oligonucleotide
gtgatacttagccaattctaggtaatgtag

SEQ ID NO: 336255 - DNA, 30 bp, Artificial Sequence
  Synthetic oligonucleotide
agtatgttactcagaggtatacccatgtag

SEQ ID NO: 336256 - DNA, 30 bp, Artificial Sequence
  Synthetic oligonucleotide
gagtgtgaagagcagaaaccgatcatgtag

SEQ ID NO: 336257 - DNA, 30 bp, Artificial Sequence
  Synthetic oligonucleotide
agtgactcgtgtcccgctcctaagatgtag

SEQ ID NO: 336258 - DNA, 30 bp, Artificial Sequence
  Synthetic oligonucleotide
cgttataaacgttagtacgcatttatgtag

SEQ ID NO: 336259 - DNA, 30 bp, Artificial Sequence
  Synthetic oligonucleotide
ctaggtctacacctcggaggtgagctgtag

SEQ ID NO: 336260 - DNA, 30 bp, Artificial Sequence
  Synthetic oligonucleotide
ggatacatcttcaaactccttttgctgtag

SEQ ID NO: 336261 - DNA, 30 bp, Artificial Sequence
  Synthetic oligonucleotide
ttttcccgtcgacaataagcggaagtgtag

SEQ ID NO: 336262 - DNA, 30 bp, Artificial Sequence
  Synthetic oligonucleotide
aaggtcgacaactgcctcaaacgcgtgtag

SEQ ID NO: 336263 - DNA, 30 bp, Artificial Sequence
  Synthetic oligonucleotide
ggatcgaatccccttatggcgccggtgtag

SEQ ID NO: 336264 - DNA, 30 bp, Artificial Sequence
  Synthetic oligonucleotide
tctcccaggtcggacgggcgccgggtgtag

SEQ ID NO: 336265 - DNA, 30 bp, Artificial Sequence
  Synthetic oligonucleotide
gtccacaatactccgggatagtgggtgtag

SEQ ID NO: 336266 - DNA, 30 bp, Artificial Sequence
  Synthetic oligonucleotide
catttaatcgtacttaacaacatggtgtag

SEQ ID NO: 336267 - DNA, 30 bp, Artificial Sequence
  Synthetic oligonucleotide
aagccgacatcaattaacgcagtggtgtag

SEQ ID NO: 336268 - DNA, 30 bp, Artificial Sequence
  Synthetic oligonucleotide
cggcgacactaggggtcaggagctgtgtag

SEQ ID NO: 336269 - DNA, 30 bp, Artificial Sequence
  Synthetic oligonucleotide
ttggtggtacggttgcgatccacattgtag

SEQ ID NO: 336270 - DNA, 30 bp, Artificial Sequence
  Synthetic oligonucleotide
ctatatgatacacctcaggatctcttgtag

SEQ ID NO: 336271 - DNA, 30 bp, Artificial Sequence
  Synthetic oligonucleotide
gctcatgttggcacagtattgattttgtag

SEQ ID NO: 336272 - DNA, 30 bp, Artificial Sequence
  Synthetic oligonucleotide
tctagcgttcttattgcaccaggaaattag

SEQ ID NO: 336273 - DNA, 30 bp, Artificial Sequence
  Synthetic oligonucleotide
agggatcgtactccggagtttataaattag

SEQ ID NO: 336274 - DNA, 30 bp, Artificial Sequence
  Synthetic oligonucleotide
ttcggtcaatcaccatccggagtaaattag

SEQ ID NO: 336275 - DNA, 30 bp, Artificial Sequence
  Synthetic oligonucleotide
aagcgcttggtaaatatggccgccaattag

SEQ ID NO: 336276 - DNA, 30 bp, Artificial Sequence
  Synthetic oligonucleotide
ttttcggatcaaaggttggtgtgcaattag

SEQ ID NO: 336277 - DNA, 31 bp, Artificial Sequence
  Synthetic oligonucleotide
actggtatacaaatttacacgtaggaattag

SEQ ID NO: 336278 - DNA, 30 bp, Artificial Sequence
  Synthetic oligonucleotide
ctcacatgaatggtggtcagtgggaattag

SEQ ID NO: 336279 - DNA, 30 bp, Artificial Sequence
  Synthetic oligonucleotide
gatggatctcatcttgatcgcgataattag

SEQ ID NO: 336280 - DNA, 30 bp, Artificial Sequence
  Synthetic oligonucleotide
gatcggagtccactgggactgtgtaattag

SEQ ID NO: 336281 - DNA, 30 bp, Artificial Sequence
  Synthetic oligonucleotide
aattggtatcacattatttagatacattag

SEQ ID NO: 336282 - DNA, 30 bp, Artificial Sequence
  Synthetic oligonucleotide
actaattacgattttcaagttttacattag

SEQ ID NO: 336283 - DNA, 30 bp, Artificial Sequence
  Synthetic oligonucleotide
tatctgggcgggaaggttgataaccattag

SEQ ID NO: 336284 - DNA, 30 bp, Artificial Sequence
  Synthetic oligonucleotide
acatcttgcaaacaaaatacctctcattag

SEQ ID NO: 336285 - DNA, 30 bp, Artificial Sequence
  Synthetic oligonucleotide
ttcgccctacttacgatcaattttcattag

SEQ ID NO: 336286 - DNA, 30 bp, Artificial Sequence
  Synthetic oligonucleotide
gaactcactggacgaaggaggcccgattag

SEQ ID NO: 336287 - DNA, 30 bp, Artificial Sequence
  Synthetic oligonucleotide
gttacgattgtctacccaaaagaggattag

SEQ ID NO: 336288 - DNA, 30 bp, Artificial Sequence
  Synthetic oligonucleotide
ggacacattgtctgtttgttcggggattag

SEQ ID NO: 336289 - DNA, 30 bp, Artificial Sequence
  Synthetic oligonucleotide
gtgtgtgtgcgataccgagcatgtgattag

SEQ ID NO: 336290 - DNA, 30 bp, Artificial Sequence
  Synthetic oligonucleotide
ctatttcagtatggccggtgaaaatattag

SEQ ID NO: 336291 - DNA, 30 bp, Artificial Sequence
  Synthetic oligonucleotide
atccggcaatggtactgaaatggatattag

SEQ ID NO: 336292 - DNA, 30 bp, Artificial Sequence
  Synthetic oligonucleotide
cttcaggaaacatggaggcgtgagtattag

SEQ ID NO: 336293 - DNA, 31 bp, Artificial Sequence
  Synthetic oligonucleotide
cttaagacatggcgctggtgaacggtattag

SEQ ID NO: 336294 - DNA, 30 bp, Artificial Sequence
  Synthetic oligonucleotide
ttaaactcatgccttgggttgtggtattag

SEQ ID NO: 336295 - DNA, 30 bp, Artificial Sequence
  Synthetic oligonucleotide
gctgaatgagtagttcggtgccattattag

SEQ ID NO: 336296 - DNA, 30 bp, Artificial Sequence
  Synthetic oligonucleotide
acaggcccaggaggcttaggctattattag

SEQ ID NO: 336297 - DNA, 28 bp, Artificial Sequence
  Synthetic oligonucleotide
agttgggcgaaggacggaacgttattag

SEQ ID NO: 336298 - DNA, 30 bp, Artificial Sequence
  Synthetic oligonucleotide
ggaacccatgttatacttgaccgttattag

SEQ ID NO: 336299 - DNA, 30 bp, Artificial Sequence
  Synthetic oligonucleotide
agtggaccagggcgacagttacttacttag

SEQ ID NO: 336300 - DNA, 30 bp, Artificial Sequence
  Synthetic oligonucleotide
cacctcggcacatagggaaagtaaccttag

SEQ ID NO: 336301 - DNA, 30 bp, Artificial Sequence
  Synthetic oligonucleotide
ctgtatatggaacttgtactgagaccttag

SEQ ID NO: 336302 - DNA, 30 bp, Artificial Sequence
  Synthetic oligonucleotide
ttgctggtctaaattgtatcagtgccttag

SEQ ID NO: 336303 - DNA, 30 bp, Artificial Sequence
  Synthetic oligonucleotide
tgcttccatagtatttcaacttttccttag

SEQ ID NO: 336304 - DNA, 30 bp, Artificial Sequence
  Synthetic oligonucleotide
aaccgcgccacaggcgatctttttccttag

SEQ ID NO: 336305 - DNA, 30 bp, Artificial Sequence
  Synthetic oligonucleotide
tggcgtctgtgctccgcgcaattagcttag

SEQ ID NO: 336306 - DNA, 30 bp, Artificial Sequence
  Synthetic oligonucleotide
gggatacaggccatacccccaaaggcttag

SEQ ID NO: 336307 - DNA, 30 bp, Artificial Sequence
  Synthetic oligonucleotide
tgaaaaatatgttgattcgaaagggcttag

SEQ ID NO: 336308 - DNA, 30 bp, Artificial Sequence
  Synthetic oligonucleotide
attatggactacctctcggcaggtgcttag

SEQ ID NO: 336309 - DNA, 30 bp, Artificial Sequence
  Synthetic oligonucleotide
acagccagatggtataattcctgtgcttag

SEQ ID NO: 336310 - DNA, 30 bp, Artificial Sequence
  Synthetic oligonucleotide
cgagatccttgggccgtttagacatcttag

SEQ ID NO: 336311 - DNA, 30 bp, Artificial Sequence
  Synthetic oligonucleotide
caagaatgccatcaattctgttcgtcttag

SEQ ID NO: 336312 - DNA, 30 bp, Artificial Sequence
  Synthetic oligonucleotide
gtgcgatgggtttttcagcgggggtcttag

SEQ ID NO: 336313 - DNA, 30 bp, Artificial Sequence
  Synthetic oligonucleotide
ctcattcagtagagtttggctatgtcttag

SEQ ID NO: 336314 - DNA, 30 bp, Artificial Sequence
  Synthetic oligonucleotide
ggaacggatgagaactccaggggttcttag

SEQ ID NO: 336315 - DNA, 30 bp, Artificial Sequence
  Synthetic oligonucleotide
cttcgaacatgacatatggcggtttcttag

SEQ ID NO: 336316 - DNA, 30 bp, Artificial Sequence
  Synthetic oligonucleotide
actcatcgttcggagccccctgcaagttag

SEQ ID NO: 336317 - DNA, 30 bp, Artificial Sequence
  Synthetic oligonucleotide
gcggaaaagggttcggatctgagaagttag

SEQ ID NO: 336318 - DNA, 30 bp, Artificial Sequence
  Synthetic oligonucleotide
tttcgcgggcggtactctgaccccagttag

SEQ ID NO: 336319 - DNA, 30 bp, Artificial Sequence
  Synthetic oligonucleotide
gaagaatggggctagttttcggttagttag

SEQ ID NO: 336320 - DNA, 30 bp, Artificial Sequence
  Synthetic oligonucleotide
ctacgttttggatataaattataacgttag

SEQ ID NO: 336321 - DNA, 30 bp, Artificial Sequence
  Synthetic oligonucleotide
caaccacacgactgctgaggtatccgttag

SEQ ID NO: 336322 - DNA, 30 bp, Artificial Sequence
  Synthetic oligonucleotide
aggggtttacggaccttatctacgcgttag

SEQ ID NO: 336323 - DNA, 30 bp, Artificial Sequence
  Synthetic oligonucleotide
tctaagggacagatttgcttggtgcgttag

SEQ ID NO: 336324 - DNA, 30 bp, Artificial Sequence
  Synthetic oligonucleotide
gtaagtgaaggaggacaagtatctcgttag

SEQ ID NO: 336325 - DNA, 30 bp, Artificial Sequence
  Synthetic oligonucleotide
agttaccaggcgtcctgcgttgtaggttag

SEQ ID NO: 336326 - DNA, 30 bp, Artificial Sequence
  Synthetic oligonucleotide
ggttccttaacatcgagtggcaacggttag

SEQ ID NO: 336327 - DNA, 30 bp, Artificial Sequence
  Synthetic oligonucleotide
agtcaactggagcccctatgagccggttag

SEQ ID NO: 336328 - DNA, 30 bp, Artificial Sequence
  Synthetic oligonucleotide
cctgtataactcggtactgacttgggttag

SEQ ID NO: 336329 - DNA, 30 bp, Artificial Sequence
  Synthetic oligonucleotide
ggtagttccccaacgggttcccatggttag

SEQ ID NO: 336330 - DNA, 30 bp, Artificial Sequence
  Synthetic oligonucleotide
cttactgggtattgacgtgtgcatggttag

SEQ ID NO: 336331 - DNA, 30 bp, Artificial Sequence
  Synthetic oligonucleotide
aatttgcactcaggatcaatgagatgttag

SEQ ID NO: 336332 - DNA, 30 bp, Artificial Sequence
  Synthetic oligonucleotide
cctattctcgagacaagcgtcccctgttag

SEQ ID NO: 336333 - DNA, 30 bp, Artificial Sequence
  Synthetic oligonucleotide
acacacccggcgtccaagggcggctgttag

SEQ ID NO: 336334 - DNA, 30 bp, Artificial Sequence
  Synthetic oligonucleotide
gttattgttcttaacaccgtgggctgttag

SEQ ID NO: 336335 - DNA, 30 bp, Artificial Sequence
  Synthetic oligonucleotide
cagaccagtaaatggtatgggttctgttag

SEQ ID NO: 336336 - DNA, 30 bp, Artificial Sequence
  Synthetic oligonucleotide
gcgtttccaaagtcagaaaaatcttgttag

SEQ ID NO: 336337 - DNA, 30 bp, Artificial Sequence
  Synthetic oligonucleotide
tttaaggcggacacgggaatgaaaatttag

SEQ ID NO: 336338 - DNA, 30 bp, Artificial Sequence
  Synthetic oligonucleotide
agatggagcataaaacaatggcaaatttag

SEQ ID NO: 336339 - DNA, 30 bp, Artificial Sequence
  Synthetic oligonucleotide
aatgggcaaaatcggggccaccacatttag

SEQ ID NO: 336340 - DNA, 30 bp, Artificial Sequence
  Synthetic oligonucleotide
agtaatagcggttctatcggcgggatttag

SEQ ID NO: 336341 - DNA, 30 bp, Artificial Sequence
  Synthetic oligonucleotide
ggttaatccggagctgtagggacactttag

SEQ ID NO: 336342 - DNA, 30 bp, Artificial Sequence
  Synthetic oligonucleotide
agtcaccatctcgtgcaatgtttactttag

SEQ ID NO: 336343 - DNA, 30 bp, Artificial Sequence
  Synthetic oligonucleotide
gtgccctgtacgacataccttttactttag

SEQ ID NO: 336344 - DNA, 30 bp, Artificial Sequence
  Synthetic oligonucleotide
cgtgtagggtaggcggtcagatccctttag

SEQ ID NO: 336345 - DNA, 30 bp, Artificial Sequence
  Synthetic oligonucleotide
tgtcattgactatctagctcaagcctttag

SEQ ID NO: 336346 - DNA, 30 bp, Artificial Sequence
  Synthetic oligonucleotide
ggaacgccgggataccccgcagagctttag

SEQ ID NO: 336347 - DNA, 30 bp, Artificial Sequence
  Synthetic oligonucleotide
cagcccatgtgggctacgctgtcgctttag

SEQ ID NO: 336348 - DNA, 30 bp, Artificial Sequence
  Synthetic oligonucleotide
tcaaaaataaagtgcacggacgatctttag

SEQ ID NO: 336349 - DNA, 30 bp, Artificial Sequence
  Synthetic oligonucleotide
caactgacttgttggcattacagtctttag

SEQ ID NO: 336350 - DNA, 30 bp, Artificial Sequence
  Synthetic oligonucleotide
cgcgctttatgctactcgggtcgtctttag

SEQ ID NO: 336351 - DNA, 30 bp, Artificial Sequence
  Synthetic oligonucleotide
ccatgctgttaggtcctaacatgtctttag

SEQ ID NO: 336352 - DNA, 30 bp, Artificial Sequence
  Synthetic oligonucleotide
gtcagccggtgcgtaggtgtttcagtttag

SEQ ID NO: 336353 - DNA, 30 bp, Artificial Sequence
  Synthetic oligonucleotide
gctcttccacgctggattcggccggtttag

SEQ ID NO: 336354 - DNA, 30 bp, Artificial Sequence
  Synthetic oligonucleotide
atgtactgggaccgtacgctattggtttag

SEQ ID NO: 336355 - DNA, 30 bp, Artificial Sequence
  Synthetic oligonucleotide
agggatagattcgatgctcacgaattttag

SEQ ID NO: 336356 - DNA, 30 bp, Artificial Sequence
  Synthetic oligonucleotide
ggtcatacctaatataggtcagtattttag

SEQ ID NO: 336357 - DNA, 30 bp, Artificial Sequence
  Synthetic oligonucleotide
cgttttgccaatgcatttgtgttattttag

SEQ ID NO: 336358 - DNA, 30 bp, Artificial Sequence
  Synthetic oligonucleotide
tagccatcagggacatcagaccccttttag

SEQ ID NO: 336359 - DNA, 30 bp, Artificial Sequence
  Synthetic oligonucleotide
tagtatcgcgggatccgatacagcttttag

SEQ ID NO: 336360 - DNA, 30 bp, Artificial Sequence
  Synthetic oligonucleotide
aatcgacttcaatagggcatctgcttttag

SEQ ID NO: 336361 - DNA, 30 bp, Artificial Sequence
  Synthetic oligonucleotide
atcatacctttggagggggtgccgttttag

SEQ ID NO: 336362 - DNA, 30 bp, Artificial Sequence
  Synthetic oligonucleotide
ctcattttattttcacctcacgcgttttag

SEQ ID NO: 336363 - DNA, 31 bp, Artificial Sequence
  Synthetic oligonucleotide
gctagagcccatcggatcgagcaggttttag

SEQ ID NO: 336364 - DNA, 30 bp, Artificial Sequence
  Synthetic oligonucleotide
cttttcgcattcgtgtaggcgagtttttag

SEQ ID NO: 336365 - DNA, 30 bp, Artificial Sequence
  Synthetic oligonucleotide
gggtttaagcgagtatcaagcggtttttag

SEQ ID NO: 336366 - DNA, 30 bp, Artificial Sequence
  Synthetic oligonucleotide
atggttgggcgccatcgattgattttttag

SEQ ID NO: 336367 - DNA, 30 bp, Artificial Sequence
  Synthetic oligonucleotide
tcagtctcttaccatgaacattgaaaaacg

SEQ ID NO: 336368 - DNA, 30 bp, Artificial Sequence
  Synthetic oligonucleotide
gattatcacacagttcgggaagacaaaacg

SEQ ID NO: 336369 - DNA, 30 bp, Artificial Sequence
  Synthetic oligonucleotide
cagaaaaatgtgtcgcgggtcgtcaaaacg

SEQ ID NO: 336370 - DNA, 30 bp, Artificial Sequence
  Synthetic oligonucleotide
agatttctttgcgttcagggggtcaaaacg

SEQ ID NO: 336371 - DNA, 30 bp, Artificial Sequence
  Synthetic oligonucleotide
aatgagctcgagcatgattctttcaaaacg

SEQ ID NO: 336372 - DNA, 30 bp, Artificial Sequence
  Synthetic oligonucleotide
gtccttctaatatagattagctggaaaacg

SEQ ID NO: 336373 - DNA, 30 bp, Artificial Sequence
  Synthetic oligonucleotide
tacaatgttgaacgccttctgtctaaaacg

SEQ ID NO: 336374 - DNA, 30 bp, Artificial Sequence
  Synthetic oligonucleotide
gcgaggacgcggttcggtggcgttaaaacg

SEQ ID NO: 336375 - DNA, 30 bp, Artificial Sequence
  Synthetic oligonucleotide
ctccataagctctccccgggctcacaaacg

SEQ ID NO: 336376 - DNA, 30 bp, Artificial Sequence
  Synthetic oligonucleotide
agtaccgaatacgacttgttcttacaaacg

SEQ ID NO: 336377 - DNA, 30 bp, Artificial Sequence
  Synthetic oligonucleotide
gaaaggttatctcgggctaagcgccaaacg

SEQ ID NO: 336378 - DNA, 30 bp, Artificial Sequence
  Synthetic oligonucleotide
cagtaatgacgtctgattgtactccaaacg

SEQ ID NO: 336379 - DNA, 30 bp, Artificial Sequence
  Synthetic oligonucleotide
tgtagtagccttacataccatgcgcaaacg

SEQ ID NO: 336380 - DNA, 30 bp, Artificial Sequence
  Synthetic oligonucleotide
gtcccgcgttaggatgaaaaccggcaaacg

SEQ ID NO: 336381 - DNA, 30 bp, Artificial Sequence
  Synthetic oligonucleotide
ttctggtccgatttcacgtacttgcaaacg

SEQ ID NO: 336382 - DNA, 30 bp, Artificial Sequence
  Synthetic oligonucleotide
tggaggcggaaacaacgatcggttcaaacg

SEQ ID NO: 336383 - DNA, 30 bp, Artificial Sequence
  Synthetic oligonucleotide
tggctaggtgcattcgcccagtaggaaacg

SEQ ID NO: 336384 - DNA, 30 bp, Artificial Sequence
  Synthetic oligonucleotide
gctctaataccacaaggggcactggaaacg

SEQ ID NO: 336385 - DNA, 28 bp, Artificial Sequence
  Synthetic oligonucleotide
attgtgatattgcggtgggccataaacg

SEQ ID NO: 336386 - DNA, 30 bp, Artificial Sequence
  Synthetic oligonucleotide
ggcaccaattcactatgtgatgcataaacg

SEQ ID NO: 336387 - DNA, 30 bp, Artificial Sequence
  Synthetic oligonucleotide
tgtcatagcggtcggccacacagctaaacg

SEQ ID NO: 336388 - DNA, 30 bp, Artificial Sequence
  Synthetic oligonucleotide
atatgcaatgattagccacgcgtgtaaacg

SEQ ID NO: 336389 - DNA, 30 bp, Artificial Sequence
  Synthetic oligonucleotide
tgacccgatcggcctgtgctaggttaaacg

SEQ ID NO: 336390 - DNA, 30 bp, Artificial Sequence
  Synthetic oligonucleotide
tcattctactcagtttgtgccctttaaacg

SEQ ID NO: 336391 - DNA, 30 bp, Artificial Sequence
  Synthetic oligonucleotide
tctgaccaccactgatccctggtttaaacg

SEQ ID NO: 336392 - DNA, 30 bp, Artificial Sequence
  Synthetic oligonucleotide
aatagagatatattttaagatggaacaacg

SEQ ID NO: 336393 - DNA, 30 bp, Artificial Sequence
  Synthetic oligonucleotide
gtgccctagacaaattgaatgttcacaacg

SEQ ID NO: 336394 - DNA, 30 bp, Artificial Sequence
  Synthetic oligonucleotide
caagcgtatacattcaaagatgggacaacg

SEQ ID NO: 336395 - DNA, 30 bp, Artificial Sequence
  Synthetic oligonucleotide
gactcatatgagggaataagccgtacaacg

SEQ ID NO: 336396 - DNA, 30 bp, Artificial Sequence
  Synthetic oligonucleotide
aagggggggcgtcttagctactgtacaacg

SEQ ID NO: 336397 - DNA, 30 bp, Artificial Sequence
  Synthetic oligonucleotide
ttagggagccgcatgcgcttaggtccaacg

SEQ ID NO: 336398 - DNA, 30 bp, Artificial Sequence
  Synthetic oligonucleotide
gtgtctaatgctaaggtcactggtccaacg

SEQ ID NO: 336399 - DNA, 30 bp, Artificial Sequence
  Synthetic oligonucleotide
aggggtacaatcaaatcttccgtagcaacg

SEQ ID NO: 336400 - DNA, 30 bp, Artificial Sequence
  Synthetic oligonucleotide
tcaccatcttttgcattcgccggggcaacg

SEQ ID NO: 336401 - DNA, 30 bp, Artificial Sequence
  Synthetic oligonucleotide
tacggcacatcaggcttaccacgatcaacg

SEQ ID NO: 336402 - DNA, 30 bp, Artificial Sequence
  Synthetic oligonucleotide
ttccactagaatcgtcttgtctagtcaacg

SEQ ID NO: 336403 - DNA, 30 bp, Artificial Sequence
  Synthetic oligonucleotide
agagagtctcaaatactttctatgtcaacg

SEQ ID NO: 336404 - DNA, 30 bp, Artificial Sequence
  Synthetic oligonucleotide
cttattaccttaatggcaatgctgtcaacg

SEQ ID NO: 336405 - DNA, 30 bp, Artificial Sequence
  Synthetic oligonucleotide
taacagcgtgatcagggttgtgcttcaacg

SEQ ID NO: 336406 - DNA, 30 bp, Artificial Sequence
  Synthetic oligonucleotide
aagggtatatagatcttagagtcttcaacg

SEQ ID NO: 336407 - DNA, 30 bp, Artificial Sequence
  Synthetic oligonucleotide
gccgatcactgtcgtggaaattaaagaacg

SEQ ID NO: 336408 - DNA, 30 bp, Artificial Sequence
  Synthetic oligonucleotide
tcccaagtttactctgggcgtggaagaacg

SEQ ID NO: 336409 - DNA, 30 bp, Artificial Sequence
  Synthetic oligonucleotide
tatagtgattggcgggctccgcacagaacg

SEQ ID NO: 336410 - DNA, 30 bp, Artificial Sequence
  Synthetic oligonucleotide
tgcgagaaagcacttctgtgttccagaacg

SEQ ID NO: 336411 - DNA, 30 bp, Artificial Sequence
  Synthetic oligonucleotide
taatagcatcctttaccaagttatagaacg

SEQ ID NO: 336412 - DNA, 30 bp, Artificial Sequence
  Synthetic oligonucleotide
ttgactacgggacacgtattagctagaacg

SEQ ID NO: 336413 - DNA, 30 bp, Artificial Sequence
  Synthetic oligonucleotide
aggataggagtcagcctctgcgttcgaacg

SEQ ID NO: 336414 - DNA, 30 bp, Artificial Sequence
  Synthetic oligonucleotide
gccgtaacacgaggctgtatatttcgaacg

SEQ ID NO: 336415 - DNA, 30 bp, Artificial Sequence
  Synthetic oligonucleotide
cgcccatcgggggggctcaggcgaggaacg

SEQ ID NO: 336416 - DNA, 30 bp, Artificial Sequence
  Synthetic oligonucleotide
gattattgtgcctcccctccgtccggaacg

SEQ ID NO: 336417 - DNA, 29 bp, Artificial Sequence
  Synthetic oligonucleotide
acgtcagcacagatgactaccgcggaacg

SEQ ID NO: 336418 - DNA, 30 bp, Artificial Sequence
  Synthetic oligonucleotide
cgatggtattcttgttagattctcggaacg

SEQ ID NO: 336419 - DNA, 30 bp, Artificial Sequence
  Synthetic oligonucleotide
gaggttagtagtgcctgcactcggggaacg

SEQ ID NO: 336420 - DNA, 30 bp, Artificial Sequence
  Synthetic oligonucleotide
gatgcgcccggacagcagggcgaatgaacg

SEQ ID NO: 336421 - DNA, 30 bp, Artificial Sequence
  Synthetic oligonucleotide
gcacccgtaaattggtcacttacgtgaacg

SEQ ID NO: 336422 - DNA, 30 bp, Artificial Sequence
  Synthetic oligonucleotide
tagtgatctctgaataaaatccggtgaacg

SEQ ID NO: 336423 - DNA, 30 bp, Artificial Sequence
  Synthetic oligonucleotide
ctcgaaatcgattttatattgaattgaacg

SEQ ID NO: 336424 - DNA, 30 bp, Artificial Sequence
  Synthetic oligonucleotide
gagagctacaaacgcgcggcctattgaacg

SEQ ID NO: 336425 - DNA, 30 bp, Artificial Sequence
  Synthetic oligonucleotide
tactaatctctattcatccgttcttgaacg

SEQ ID NO: 336426 - DNA, 30 bp, Artificial Sequence
  Synthetic oligonucleotide
ccaacaataatcccaccttggggttgaacg

SEQ ID NO: 336427 - DNA, 30 bp, Artificial Sequence
  Synthetic oligonucleotide
atcgcagagttgctatccccggtttgaacg

SEQ ID NO: 336428 - DNA, 30 bp, Artificial Sequence
  Synthetic oligonucleotide
tgaagactgtacatctgtttataaataacg

SEQ ID NO: 336429 - DNA, 30 bp, Artificial Sequence
  Synthetic oligonucleotide
acaaaagaatctatagttgagccaataacg

SEQ ID NO: 336430 - DNA, 30 bp, Artificial Sequence
  Synthetic oligonucleotide
tcgcattccaagtgttgttgtatcataacg

SEQ ID NO: 336431 - DNA, 30 bp, Artificial Sequence
  Synthetic oligonucleotide
atgttggccacccgaacctgttggataacg

SEQ ID NO: 336432 - DNA, 30 bp, Artificial Sequence
  Synthetic oligonucleotide
tccgcccctcccgttactgatatgataacg

SEQ ID NO: 336433 - DNA, 30 bp, Artificial Sequence
  Synthetic oligonucleotide
agatagaatccagatacgcacactataacg

SEQ ID NO: 336434 - DNA, 30 bp, Artificial Sequence
  Synthetic oligonucleotide
tatgagaccagtactggagaaggtataacg

SEQ ID NO: 336435 - DNA, 29 bp, Artificial Sequence
  Synthetic oligonucleotide
gaggtatcatccagcatagaatactaacg

SEQ ID NO: 336436 - DNA, 30 bp, Artificial Sequence
  Synthetic oligonucleotide
gtgcttcatatcgggtcaagcgatctaacg

SEQ ID NO: 336437 - DNA, 30 bp, Artificial Sequence
  Synthetic oligonucleotide
gtccagtgtatgttgggtccttctctaacg

SEQ ID NO: 336438 - DNA, 30 bp, Artificial Sequence
  Synthetic oligonucleotide
gttcgcgggcatattccccgtagtctaacg

SEQ ID NO: 336439 - DNA, 30 bp, Artificial Sequence
  Synthetic oligonucleotide
tccctaaccttatccattgtacgagtaacg

SEQ ID NO: 336440 - DNA, 30 bp, Artificial Sequence
  Synthetic oligonucleotide
tggccgaagtcacttcaatttgtagtaacg

SEQ ID NO: 336441 - DNA, 30 bp, Artificial Sequence
  Synthetic oligonucleotide
aattcactcgatggttaccctctcgtaacg

SEQ ID NO: 336442 - DNA, 30 bp, Artificial Sequence
  Synthetic oligonucleotide
cttcacacgggccaaccctcaaaggtaacg

SEQ ID NO: 336443 - DNA, 30 bp, Artificial Sequence
  Synthetic oligonucleotide
gtgatatgggacggtgttagcccggtaacg

SEQ ID NO: 336444 - DNA, 30 bp, Artificial Sequence
  Synthetic oligonucleotide
aaaaactccgtattaaactgccgggtaacg

SEQ ID NO: 336445 - DNA, 30 bp, Artificial Sequence
  Synthetic oligonucleotide
catagccgggacattccggaggatgtaacg

SEQ ID NO: 336446 - DNA, 30 bp, Artificial Sequence
  Synthetic oligonucleotide
taccagaagctggaaaacagctctgtaacg

SEQ ID NO: 336447 - DNA, 30 bp, Artificial Sequence
  Synthetic oligonucleotide
tatcaccaatgcatgagcaatcacttaacg

SEQ ID NO: 336448 - DNA, 30 bp, Artificial Sequence
  Synthetic oligonucleotide
ctttccgataaacgatatttttacttaacg

SEQ ID NO: 336449 - DNA, 30 bp, Artificial Sequence
  Synthetic oligonucleotide
tgcctcgttaactaaggagtctcgttaacg

SEQ ID NO: 336450 - DNA, 30 bp, Artificial Sequence
  Synthetic oligonucleotide
tgtgcgtaggtcgagataagttcgttaacg

SEQ ID NO: 336451 - DNA, 30 bp, Artificial Sequence
  Synthetic oligonucleotide
ccgtgcgaaatctagttgacccggttaacg

SEQ ID NO: 336452 - DNA, 30 bp, Artificial Sequence
  Synthetic oligonucleotide
tagttggaatgccggtttccgagtttaacg

SEQ ID NO: 336453 - DNA, 30 bp, Artificial Sequence
  Synthetic oligonucleotide
tagcggtcgaacatacatacgattttaacg

SEQ ID NO: 336454 - DNA, 30 bp, Artificial Sequence
  Synthetic oligonucleotide
tctcaaactgtcttggcgggctcaaacacg

SEQ ID NO: 336455 - DNA, 30 bp, Artificial Sequence
  Synthetic oligonucleotide
catgtaccctgtatggggctctcaaacacg

SEQ ID NO: 336456 - DNA, 30 bp, Artificial Sequence
  Synthetic oligonucleotide
aaatcataagatattcataatggcaacacg

SEQ ID NO: 336457 - DNA, 30 bp, Artificial Sequence
  Synthetic oligonucleotide
gttccacaactctagtacccggctaacacg

SEQ ID NO: 336458 - DNA, 30 bp, Artificial Sequence
  Synthetic oligonucleotide
gacagaattgggggcatgggatttaacacg

SEQ ID NO: 336459 - DNA, 30 bp, Artificial Sequence
  Synthetic oligonucleotide
tagggtgtcctagccatattccaacacacg

SEQ ID NO: 336460 - DNA, 30 bp, Artificial Sequence
  Synthetic oligonucleotide
tggatccacaaggtcctcgatgaacacacg

SEQ ID NO: 336461 - DNA, 30 bp, Artificial Sequence
  Synthetic oligonucleotide
ccagcggaacaacgcacgttagctcacacg

SEQ ID NO: 336462 - DNA, 30 bp, Artificial Sequence
  Synthetic oligonucleotide
acatcgcgacacttgtccaatggtcacacg

SEQ ID NO: 336463 - DNA, 30 bp, Artificial Sequence
  Synthetic oligonucleotide
cagcgtttcatgaaccgccgtcaagacacg

SEQ ID NO: 336464 - DNA, 30 bp, Artificial Sequence
  Synthetic oligonucleotide
ggattgggagctcctagcacgttagacacg

SEQ ID NO: 336465 - DNA, 30 bp, Artificial Sequence
  Synthetic oligonucleotide
atcatggggggaattctagaaagggacacg

SEQ ID NO: 336466 - DNA, 30 bp, Artificial Sequence
  Synthetic oligonucleotide
ggcttggaacgaattgctcaacgggacacg

SEQ ID NO: 336467 - DNA, 30 bp, Artificial Sequence
  Synthetic oligonucleotide
cctctacggattagctgatagacatacacg

SEQ ID NO: 336468 - DNA, 30 bp, Artificial Sequence
  Synthetic oligonucleotide
accggcgcaagtccgacagttgggtacacg

SEQ ID NO: 336469 - DNA, 30 bp, Artificial Sequence
  Synthetic oligonucleotide
tttttacagacaggcatcggccgttacacg

SEQ ID NO: 336470 - DNA, 30 bp, Artificial Sequence
  Synthetic oligonucleotide
acaatatatgtgtcttgggttgcaaccacg

SEQ ID NO: 336471 - DNA, 30 bp, Artificial Sequence
  Synthetic oligonucleotide
gttatataacagatgcatacgaccaccacg

SEQ ID NO: 336472 - DNA, 30 bp, Artificial Sequence
  Synthetic oligonucleotide
agctgcccgtaattgcctacggagaccacg

SEQ ID NO: 336473 - DNA, 30 bp, Artificial Sequence
  Synthetic oligonucleotide
ctgtccaacgacaactatgcggagaccacg

SEQ ID NO: 336474 - DNA, 30 bp, Artificial Sequence
  Synthetic oligonucleotide
gttggacaacagtgggaaccccggaccacg

SEQ ID NO: 336475 - DNA, 30 bp, Artificial Sequence
  Synthetic oligonucleotide
gagtccttgcaccgaccctaggtgaccacg

SEQ ID NO: 336476 - DNA, 30 bp, Artificial Sequence
  Synthetic oligonucleotide
attcaggctttgtaagtggttcataccacg

SEQ ID NO: 336477 - DNA, 30 bp, Artificial Sequence
  Synthetic oligonucleotide
aatgtaatgtcgccggggctatataccacg

SEQ ID NO: 336478 - DNA, 30 bp, Artificial Sequence
  Synthetic oligonucleotide
ctttaatctattcctctatggtataccacg

SEQ ID NO: 336479 - DNA, 30 bp, Artificial Sequence
  Synthetic oligonucleotide
gccttcgccatggctagaccgttacccacg

SEQ ID NO: 336480 - DNA, 30 bp, Artificial Sequence
  Synthetic oligonucleotide
aagcatactttcttgggtaccggccccacg

SEQ ID NO: 336481 - DNA, 30 bp, Artificial Sequence
  Synthetic oligonucleotide
gccaattaggaataatagatctgtcccacg

SEQ ID NO: 336482 - DNA, 30 bp, Artificial Sequence
  Synthetic oligonucleotide
ttgcctggttttcggtgcagagaagccacg

SEQ ID NO: 336483 - DNA, 30 bp, Artificial Sequence
  Synthetic oligonucleotide
tgattacattaggcgtgttgcgacgccacg

SEQ ID NO: 336484 - DNA, 30 bp, Artificial Sequence
  Synthetic oligonucleotide
ccagagcacggtcgtttgtgacccgccacg

SEQ ID NO: 336485 - DNA, 30 bp, Artificial Sequence
  Synthetic oligonucleotide
gtgcctacgggctctgctaacgccgccacg

SEQ ID NO: 336486 - DNA, 30 bp, Artificial Sequence
  Synthetic oligonucleotide
gttagtatggcctccggatggtccgccacg

SEQ ID NO: 336487 - DNA, 30 bp, Artificial Sequence
  Synthetic oligonucleotide
tgtatatgctagtattccactctcgccacg

SEQ ID NO: 336488 - DNA, 30 bp, Artificial Sequence
  Synthetic oligonucleotide
cgcacaagggctggttcagaagttgccacg

SEQ ID NO: 336489 - DNA, 30 bp, Artificial Sequence
  Synthetic oligonucleotide
gcacttgactaataataaatatttgccacg

SEQ ID NO: 336490 - DNA, 30 bp, Artificial Sequence
  Synthetic oligonucleotide
ttactaatatcaatgaataagaaatccacg

SEQ ID NO: 336491 - DNA, 30 bp, Artificial Sequence
  Synthetic oligonucleotide
taaatggttaagacaaggtatccatccacg

SEQ ID NO: 336492 - DNA, 30 bp, Artificial Sequence
  Synthetic oligonucleotide
attaatgcgcatggaagaaacgcgtccacg

SEQ ID NO: 336493 - DNA, 30 bp, Artificial Sequence
  Synthetic oligonucleotide
ttagcagggattgtccgttagtggtccacg

SEQ ID NO: 336494 - DNA, 30 bp, Artificial Sequence
  Synthetic oligonucleotide
aacagcttacagatgtgcagcagttccacg

SEQ ID NO: 336495 - DNA, 30 bp, Artificial Sequence
  Synthetic oligonucleotide
gctctcctaagctacctagctggttccacg

SEQ ID NO: 336496 - DNA, 30 bp, Artificial Sequence
  Synthetic oligonucleotide
atcatgttggtacctcgttattgttccacg

SEQ ID NO: 336497 - DNA, 30 bp, Artificial Sequence
  Synthetic oligonucleotide
ggacggatgcggtcacccgttaggagcacg

SEQ ID NO: 336498 - DNA, 30 bp, Artificial Sequence
  Synthetic oligonucleotide
ttcgtagttacgttggcgagtgatagcacg

SEQ ID NO: 336499 - DNA, 30 bp, Artificial Sequence
  Synthetic oligonucleotide
tgtgggcaccaattgatactcagacgcacg

SEQ ID NO: 336500 - DNA, 30 bp, Artificial Sequence
  Synthetic oligonucleotide
ctaggaccggtcttttcttcatggcgcacg

SEQ ID NO: 336501 - DNA, 30 bp, Artificial Sequence
  Synthetic oligonucleotide
attcaaagtaacgtagataaccatcgcacg

SEQ ID NO: 336502 - DNA, 30 bp, Artificial Sequence
  Synthetic oligonucleotide
gcattttggttctacggttgacgtcgcacg

SEQ ID NO: 336503 - DNA, 30 bp, Artificial Sequence
  Synthetic oligonucleotide
ggctaagatgttgaatctgcgacaggcacg

SEQ ID NO: 336504 - DNA, 30 bp, Artificial Sequence
  Synthetic oligonucleotide
gttgtgatcaatttaataagcagcggcacg

SEQ ID NO: 336505 - DNA, 30 bp, Artificial Sequence
  Synthetic oligonucleotide
tgcgcggtaatcttgcctggagtcggcacg

SEQ ID NO: 336506 - DNA, 30 bp, Artificial Sequence
  Synthetic oligonucleotide
aacagactttcaaagtcccttcagggcacg

SEQ ID NO: 336507 - DNA, 30 bp, Artificial Sequence
  Synthetic oligonucleotide
aatctaagatatcgcgaatgatagggcacg

SEQ ID NO: 336508 - DNA, 30 bp, Artificial Sequence
  Synthetic oligonucleotide
ccggcagctgtgagcctttatctgggcacg

SEQ ID NO: 336509 - DNA, 30 bp, Artificial Sequence
  Synthetic oligonucleotide
aagtaagatggtaaacgacgccatggcacg

SEQ ID NO: 336510 - DNA, 30 bp, Artificial Sequence
  Synthetic oligonucleotide
ttgacccgcacgaaccgactttaatgcacg

SEQ ID NO: 336511 - DNA, 30 bp, Artificial Sequence
  Synthetic oligonucleotide
actaggacttctggggtaacgcactgcacg

SEQ ID NO: 336512 - DNA, 30 bp, Artificial Sequence
  Synthetic oligonucleotide
gcctgaattttgccaagcgggtcctgcacg

SEQ ID NO: 336513 - DNA, 30 bp, Artificial Sequence
  Synthetic oligonucleotide
tgtttgctgacaatactaggtatctgcacg

SEQ ID NO: 336514 - DNA, 30 bp, Artificial Sequence
  Synthetic oligonucleotide
cctgtgttacccctcttctgtcattgcacg

SEQ ID NO: 336515 - DNA, 30 bp, Artificial Sequence
  Synthetic oligonucleotide
cagccgttatatcctaagaaggaaatcacg

SEQ ID NO: 336516 - DNA, 30 bp, Artificial Sequence
  Synthetic oligonucleotide
aggcattgagattatgacttatgaatcacg

SEQ ID NO: 336517 - DNA, 30 bp, Artificial Sequence
  Synthetic oligonucleotide
tgcaatgtttcagctcacacaataatcacg

SEQ ID NO: 336518 - DNA, 30 bp, Artificial Sequence
  Synthetic oligonucleotide
ataatgacggaacaggcacagctaatcacg

SEQ ID NO: 336519 - DNA, 30 bp, Artificial Sequence
  Synthetic oligonucleotide
tgccggagagtaacacattccgacatcacg

SEQ ID NO: 336520 - DNA, 30 bp, Artificial Sequence
  Synthetic oligonucleotide
ttctggggaattgctattagttgcatcacg

SEQ ID NO: 336521 - DNA, 30 bp, Artificial Sequence
  Synthetic oligonucleotide
aatctatccgcacgataatttttcatcacg

SEQ ID NO: 336522 - DNA, 30 bp, Artificial Sequence
  Synthetic oligonucleotide
ccccggcttagccttcaaaccgcgatcacg

SEQ ID NO: 336523 - DNA, 30 bp, Artificial Sequence
  Synthetic oligonucleotide
tctatgtaccttggtacgtacaggatcacg

SEQ ID NO: 336524 - DNA, 31 bp, Artificial Sequence
  Synthetic oligonucleotide
cgggtgagcacgggttggtgatcggatcacg

SEQ ID NO: 336525 - DNA, 30 bp, Artificial Sequence
  Synthetic oligonucleotide
ggacgcgccgtacgatgataagtgatcacg

SEQ ID NO: 336526 - DNA, 30 bp, Artificial Sequence
  Synthetic oligonucleotide
ccgctgggaagacgtgtccggtctatcacg

SEQ ID NO: 336527 - DNA, 30 bp, Artificial Sequence
  Synthetic oligonucleotide
gaatactggagaagccgtcggatactcacg

SEQ ID NO: 336528 - DNA, 30 bp, Artificial Sequence
  Synthetic oligonucleotide
cgtttgagtgagtccttgcaggacctcacg

SEQ ID NO: 336529 - DNA, 30 bp, Artificial Sequence
  Synthetic oligonucleotide
ccgcgtgggttttggtatacgcgcctcacg

SEQ ID NO: 336530 - DNA, 31 bp, Artificial Sequence
  Synthetic oligonucleotide
gtgcacagtctagcattcaccgacgctcacg

SEQ ID NO: 336531 - DNA, 30 bp, Artificial Sequence
  Synthetic oligonucleotide
agaccttgatatgtccctaattatctcacg

SEQ ID NO: 336532 - DNA, 30 bp, Artificial Sequence
  Synthetic oligonucleotide
aagccaagtacaaactacccctctctcacg

SEQ ID NO: 336533 - DNA, 30 bp, Artificial Sequence
  Synthetic oligonucleotide
tctataaagtaattaccgtaaggtctcacg

SEQ ID NO: 336534 - DNA, 30 bp, Artificial Sequence
  Synthetic oligonucleotide
gggtccctggacggcgtcctgtttctcacg

SEQ ID NO: 336535 - DNA, 30 bp, Artificial Sequence
  Synthetic oligonucleotide
taatctatcggaacggtgtaatccgtcacg

SEQ ID NO: 336536 - DNA, 30 bp, Artificial Sequence
  Synthetic oligonucleotide
gttaggcagtttccctaaaggagcgtcacg

SEQ ID NO: 336537 - DNA, 30 bp, Artificial Sequence
  Synthetic oligonucleotide
ctacatggagcggatgaaaaaatcgtcacg

SEQ ID NO: 336538 - DNA, 30 bp, Artificial Sequence
  Synthetic oligonucleotide
ggatttgagagcacactcgtagaggtcacg

SEQ ID NO: 336539 - DNA, 30 bp, Artificial Sequence
  Synthetic oligonucleotide
ccctggaatgccattcgtattatggtcacg

SEQ ID NO: 336540 - DNA, 30 bp, Artificial Sequence
  Synthetic oligonucleotide
agaaggtaatagcgagcgtttaatgtcacg

SEQ ID NO: 336541 - DNA, 30 bp, Artificial Sequence
  Synthetic oligonucleotide
gatgagctacaccgtggagaccaattcacg

SEQ ID NO: 336542 - DNA, 30 bp, Artificial Sequence
  Synthetic oligonucleotide
aataagtagagtgaggagtaaaagttcacg

SEQ ID NO: 336543 - DNA, 30 bp, Artificial Sequence
  Synthetic oligonucleotide
cttgaagcactattctcgtaggtgttcacg

SEQ ID NO: 336544 - DNA, 30 bp, Artificial Sequence
  Synthetic oligonucleotide
gagactcttaaacgttccacgacaaagacg

SEQ ID NO: 336545 - DNA, 30 bp, Artificial Sequence
  Synthetic oligonucleotide
cactattcaatccatcacttttacaagacg

SEQ ID NO: 336546 - DNA, 30 bp, Artificial Sequence
  Synthetic oligonucleotide
ttacagtacctcttagggaaaacgaagacg

SEQ ID NO: 336547 - DNA, 30 bp, Artificial Sequence
  Synthetic oligonucleotide
cacataccaacctattctccaaggaagacg

SEQ ID NO: 336548 - DNA, 30 bp, Artificial Sequence
  Synthetic oligonucleotide
gaatattgtaagaaagtaacattgaagacg

SEQ ID NO: 336549 - DNA, 30 bp, Artificial Sequence
  Synthetic oligonucleotide
aaatattccgaggggatcaataataagacg

SEQ ID NO: 336550 - DNA, 30 bp, Artificial Sequence
  Synthetic oligonucleotide
tccggacactcttgtgtctatcttaagacg

SEQ ID NO: 336551 - DNA, 30 bp, Artificial Sequence
  Synthetic oligonucleotide
aggttatggcgcagacgagagcgccagacg

SEQ ID NO: 336552 - DNA, 30 bp, Artificial Sequence
  Synthetic oligonucleotide
acatctagttctaggaaacgtcagcagacg

SEQ ID NO: 336553 - DNA, 30 bp, Artificial Sequence
  Synthetic oligonucleotide
gccgagttggcgcggtggttgatgcagacg

SEQ ID NO: 336554 - DNA, 30 bp, Artificial Sequence
  Synthetic oligonucleotide
gtagttatacaatgagtaattcgtcagacg

SEQ ID NO: 336555 - DNA, 30 bp, Artificial Sequence
  Synthetic oligonucleotide
gcgtcctgatttacaagggcgacggagacg

SEQ ID NO: 336556 - DNA, 30 bp, Artificial Sequence
  Synthetic oligonucleotide
agttaacgtgcgagcccttatatggagacg

SEQ ID NO: 336557 - DNA, 30 bp, Artificial Sequence
  Synthetic oligonucleotide
acaattggggaagggaccactaatgagacg

SEQ ID NO: 336558 - DNA, 29 bp, Artificial Sequence
  Synthetic oligonucleotide
ctagcccgttcagggcaagagcatagacg

SEQ ID NO: 336559 - DNA, 30 bp, Artificial Sequence
  Synthetic oligonucleotide
accattgaaacccaaaaggcttcatagacg

SEQ ID NO: 336560 - DNA, 30 bp, Artificial Sequence
  Synthetic oligonucleotide
aaaccgtgtcggcattcgggtaactagacg

SEQ ID NO: 336561 - DNA, 30 bp, Artificial Sequence
  Synthetic oligonucleotide
attaatgttaagtgtgggtatatctagacg

SEQ ID NO: 336562 - DNA, 30 bp, Artificial Sequence
  Synthetic oligonucleotide
gtgtgcgtgctcggtgcacataattagacg

SEQ ID NO: 336563 - DNA, 30 bp, Artificial Sequence
  Synthetic oligonucleotide
tctggataaattgatcaataatattagacg

SEQ ID NO: 336564 - DNA, 30 bp, Artificial Sequence
  Synthetic oligonucleotide
gctctttgcgttcgcactaactgttagacg

SEQ ID NO: 336565 - DNA, 30 bp, Artificial Sequence
  Synthetic oligonucleotide
tacaatgaacgggaacaagctttttagacg

SEQ ID NO: 336566 - DNA, 30 bp, Artificial Sequence
  Synthetic oligonucleotide
aacttatacgagcccgttccggacacgacg

SEQ ID NO: 336567 - DNA, 30 bp, Artificial Sequence
  Synthetic oligonucleotide
ccgtcttcatctcgggtcccttacacgacg

SEQ ID NO: 336568 - DNA, 30 bp, Artificial Sequence
  Synthetic oligonucleotide
gactgatccgtcattcacggggagccgacg

SEQ ID NO: 336569 - DNA, 30 bp, Artificial Sequence
  Synthetic oligonucleotide
gcccactatttttatcagaatggtccgacg

SEQ ID NO: 336570 - DNA, 30 bp, Artificial Sequence
  Synthetic oligonucleotide
gggccgtgtgacctttatgagtaagcgacg

SEQ ID NO: 336571 - DNA, 30 bp, Artificial Sequence
  Synthetic oligonucleotide
ctcaatgacccgggcgacgtgggagcgacg

SEQ ID NO: 336572 - DNA, 30 bp, Artificial Sequence
  Synthetic oligonucleotide
gcagtaagggggatataggtcaacgcgacg

SEQ ID NO: 336573 - DNA, 30 bp, Artificial Sequence
  Synthetic oligonucleotide
acctaaaagtcagctgccatgtccgcgacg

SEQ ID NO: 336574 - DNA, 30 bp, Artificial Sequence
  Synthetic oligonucleotide
acccggaagcgcgtgctagttagcgcgacg

SEQ ID NO: 336575 - DNA, 30 bp, Artificial Sequence
  Synthetic oligonucleotide
agcacaagggaactagatgagttcgcgacg

SEQ ID NO: 336576 - DNA, 30 bp, Artificial Sequence
  Synthetic oligonucleotide
tccatgcaattgccggctatcgaggcgacg

SEQ ID NO: 336577 - DNA, 30 bp, Artificial Sequence
  Synthetic oligonucleotide
gcaagccgacctactctcacagcggcgacg

SEQ ID NO: 336578 - DNA, 30 bp, Artificial Sequence
  Synthetic oligonucleotide
atccattgacgtcaggaggcaggggcgacg

SEQ ID NO: 336579 - DNA, 30 bp, Artificial Sequence
  Synthetic oligonucleotide
atcacggcattttggcttgtatatgcgacg

SEQ ID NO: 336580 - DNA, 30 bp, Artificial Sequence
  Synthetic oligonucleotide
ggttgtaggtaggagtcgcattgatcgacg

SEQ ID NO: 336581 - DNA, 30 bp, Artificial Sequence
  Synthetic oligonucleotide
ttcgcctatgaaatacgctcgatatcgacg

SEQ ID NO: 336582 - DNA, 30 bp, Artificial Sequence
  Synthetic oligonucleotide
atgcgtctcagtttcgatctattatcgacg

SEQ ID NO: 336583 - DNA, 30 bp, Artificial Sequence
  Synthetic oligonucleotide
ataaattaggttgattggtggcactcgacg

SEQ ID NO: 336584 - DNA, 30 bp, Artificial Sequence
  Synthetic oligonucleotide
acagcttcaacccagattacttaaaggacg

SEQ ID NO: 336585 - DNA, 30 bp, Artificial Sequence
  Synthetic oligonucleotide
ctttcgttagccaatgggacgctaaggacg

SEQ ID NO: 336586 - DNA, 30 bp, Artificial Sequence
  Synthetic oligonucleotide
catgtaaggcagttcacgccgcgcaggacg

SEQ ID NO: 336587 - DNA, 30 bp, Artificial Sequence
  Synthetic oligonucleotide
gtcggtgcataagcatttgagtcgaggacg

SEQ ID NO: 336588 - DNA, 30 bp, Artificial Sequence
  Synthetic oligonucleotide
aagcttgagtaggcttatcgcctgaggacg

SEQ ID NO: 336589 - DNA, 30 bp, Artificial Sequence
  Synthetic oligonucleotide
ttatcatggaggtctgaaaatttgaggacg

SEQ ID NO: 336590 - DNA, 30 bp, Artificial Sequence
  Synthetic oligonucleotide
caacttacgagacagacgactaataggacg

SEQ ID NO: 336591 - DNA, 30 bp, Artificial Sequence
  Synthetic oligonucleotide
aatggcgttagatacatctgtaataggacg

SEQ ID NO: 336592 - DNA, 30 bp, Artificial Sequence
  Synthetic oligonucleotide
accggatagtttccgcgtgacctacggacg

SEQ ID NO: 336593 - DNA, 30 bp, Artificial Sequence
  Synthetic oligonucleotide
gggtctctccgacatttccagcggcggacg

SEQ ID NO: 336594 - DNA, 30 bp, Artificial Sequence
  Synthetic oligonucleotide
cgcaagcgtggtagggttattatgcggacg

SEQ ID NO: 336595 - DNA, 30 bp, Artificial Sequence
  Synthetic oligonucleotide
gtttggcgactcgacccttcgactcggacg

SEQ ID NO: 336596 - DNA, 30 bp, Artificial Sequence
  Synthetic oligonucleotide
gttgagatcccacgcgggcatagtcggacg

SEQ ID NO: 336597 - DNA, 30 bp, Artificial Sequence
  Synthetic oligonucleotide
cctttggttgaatcatggttgcgcgggacg

SEQ ID NO: 336598 - DNA, 30 bp, Artificial Sequence
  Synthetic oligonucleotide
gattcggtaggcaggacggactaggggacg

SEQ ID NO: 336599 - DNA, 30 bp, Artificial Sequence
  Synthetic oligonucleotide
catcgatagtgcaatagttcggcctggacg

SEQ ID NO: 336600 - DNA, 30 bp, Artificial Sequence
  Synthetic oligonucleotide
tgctagattaataggtacccacgctggacg

SEQ ID NO: 336601 - DNA, 30 bp, Artificial Sequence
  Synthetic oligonucleotide
cgcgtgtcgataagaaatcaaatgtggacg

SEQ ID NO: 336602 - DNA, 30 bp, Artificial Sequence
  Synthetic oligonucleotide
aattaagagtgggaaatcatcctgtggacg

SEQ ID NO: 336603 - DNA, 30 bp, Artificial Sequence
  Synthetic oligonucleotide
ctaatcaatcgcgtcaccatgtattggacg

SEQ ID NO: 336604 - DNA, 30 bp, Artificial Sequence
  Synthetic oligonucleotide
agccgcgtcgaagtttcaaactgttggacg

SEQ ID NO: 336605 - DNA, 30 bp, Artificial Sequence
  Synthetic oligonucleotide
agtagcgacgtgcttgggactctttggacg

SEQ ID NO: 336606 - DNA, 30 bp, Artificial Sequence
  Synthetic oligonucleotide
ggctagcccggttagcgtcttgcaatgacg

SEQ ID NO: 336607 - DNA, 30 bp, Artificial Sequence
  Synthetic oligonucleotide
aaggtgcggacttcctgtgaaataatgacg

SEQ ID NO: 336608 - DNA, 30 bp, Artificial Sequence
  Synthetic oligonucleotide
tggttttaccgaacggaaactaacatgacg

SEQ ID NO: 336609 - DNA, 30 bp, Artificial Sequence
  Synthetic oligonucleotide
ccacaagcgaccttaaataaggtcatgacg

SEQ ID NO: 336610 - DNA, 30 bp, Artificial Sequence
  Synthetic oligonucleotide
gaaatatatcatcatcacaggacgatgacg

SEQ ID NO: 336611 - DNA, 30 bp, Artificial Sequence
  Synthetic oligonucleotide
agtcgagctacttgacattaccgactgacg

SEQ ID NO: 336612 - DNA, 30 bp, Artificial Sequence
  Synthetic oligonucleotide
atcgacgctgccagccactttcgcctgacg

SEQ ID NO: 336613 - DNA, 30 bp, Artificial Sequence
  Synthetic oligonucleotide
gttcgaagttgcgagagcgtctagctgacg

SEQ ID NO: 336614 - DNA, 30 bp, Artificial Sequence
  Synthetic oligonucleotide
ggatcacccgtgcagtctccaccgctgacg

SEQ ID NO: 336615 - DNA, 30 bp, Artificial Sequence
  Synthetic oligonucleotide
agtaccacctccgtgaaaaccccgctgacg

SEQ ID NO: 336616 - DNA, 30 bp, Artificial Sequence
  Synthetic oligonucleotide
aaactattaggcctataccgttatctgacg

SEQ ID NO: 336617 - DNA, 30 bp, Artificial Sequence
  Synthetic oligonucleotide
cacaggaaatttcgtgtatagcaagtgacg

SEQ ID NO: 336618 - DNA, 30 bp, Artificial Sequence
  Synthetic oligonucleotide
tgaatataccaataacttctgcaagtgacg

SEQ ID NO: 336619 - DNA, 30 bp, Artificial Sequence
  Synthetic oligonucleotide
ctcctctttactacttaagagccagtgacg

SEQ ID NO: 336620 - DNA, 30 bp, Artificial Sequence
  Synthetic oligonucleotide
aagagctatttccagtaagatccagtgacg

SEQ ID NO: 336621 - DNA, 30 bp, Artificial Sequence
  Synthetic oligonucleotide
agcaggacacctgcatgaatgaccgtgacg

SEQ ID NO: 336622 - DNA, 30 bp, Artificial Sequence
  Synthetic oligonucleotide
agtcgtgtttggttgggcattggtgtgacg

SEQ ID NO: 336623 - DNA, 30 bp, Artificial Sequence
  Synthetic oligonucleotide
agaagcctgtaacagttcgaggttgtgacg

SEQ ID NO: 336624 - DNA, 30 bp, Artificial Sequence
  Synthetic oligonucleotide
gacgacaggtccctagaacctaaattgacg

SEQ ID NO: 336625 - DNA, 30 bp, Artificial Sequence
  Synthetic oligonucleotide
cacgctacgacatagcacaaacacttgacg

SEQ ID NO: 336626 - DNA, 30 bp, Artificial Sequence
  Synthetic oligonucleotide
caatgggtccgtctaggtagccggttgacg

SEQ ID NO: 336627 - DNA, 30 bp, Artificial Sequence
  Synthetic oligonucleotide
tcggcacaatcgaaaaaaggtgggttgacg

SEQ ID NO: 336628 - DNA, 30 bp, Artificial Sequence
  Synthetic oligonucleotide
aaatccaatttgagggagtgagtgttgacg

SEQ ID NO: 336629 - DNA, 30 bp, Artificial Sequence
  Synthetic oligonucleotide
gtcggctgggaacattacggtcatttgacg

SEQ ID NO: 336630 - DNA, 28 bp, Artificial Sequence
  Synthetic oligonucleotide
agagatgcacttgataggtcctttgacg

SEQ ID NO: 336631 - DNA, 30 bp, Artificial Sequence
  Synthetic oligonucleotide
tcttagaataggacaaataatgcaaatacg

SEQ ID NO: 336632 - DNA, 30 bp, Artificial Sequence
  Synthetic oligonucleotide
ctaattccccatagtcgtctggtaaatacg

SEQ ID NO: 336633 - DNA, 30 bp, Artificial Sequence
  Synthetic oligonucleotide
tgccagctctcgctaggttaatacaatacg

SEQ ID NO: 336634 - DNA, 30 bp, Artificial Sequence
  Synthetic oligonucleotide
gtaagaatatcgcacaatcgctccaatacg

SEQ ID NO: 336635 - DNA, 30 bp, Artificial Sequence
  Synthetic oligonucleotide
gtatcgatttagattatgtgcggcaatacg

SEQ ID NO: 336636 - DNA, 30 bp, Artificial Sequence
  Synthetic oligonucleotide
cactcgagactatggttatggtgcaatacg

SEQ ID NO: 336637 - DNA, 30 bp, Artificial Sequence
  Synthetic oligonucleotide
gaaaaagatcgtctgcgtaaaatcaatacg

SEQ ID NO: 336638 - DNA, 30 bp, Artificial Sequence
  Synthetic oligonucleotide
agtcaacgtgactgtcatcagatcaatacg

SEQ ID NO: 336639 - DNA, 30 bp, Artificial Sequence
  Synthetic oligonucleotide
gctcctggatatagtggggcagtcaatacg

SEQ ID NO: 336640 - DNA, 30 bp, Artificial Sequence
  Synthetic oligonucleotide
taattaaatacgtatcagcgtgtcaatacg

SEQ ID NO: 336641 - DNA, 30 bp, Artificial Sequence
  Synthetic oligonucleotide
agtgttatcgagaggcctccatggaatacg

SEQ ID NO: 336642 - DNA, 30 bp, Artificial Sequence
  Synthetic oligonucleotide
acgtttaatagtgatgtcctatttaatacg

SEQ ID NO: 336643 - DNA, 31 bp, Artificial Sequence
  Synthetic oligonucleotide
aaactgttcgcggattctttgaacacatacg

SEQ ID NO: 336644 - DNA, 30 bp, Artificial Sequence
  Synthetic oligonucleotide
atgtagcgcaggttagtaggctgccatacg

SEQ ID NO: 336645 - DNA, 30 bp, Artificial Sequence
  Synthetic oligonucleotide
gctagccccagcggccaaaccatccatacg

SEQ ID NO: 336646 - DNA, 30 bp, Artificial Sequence
  Synthetic oligonucleotide
gcagggtctcgagttctgcttcggcatacg

SEQ ID NO: 336647 - DNA, 30 bp, Artificial Sequence
  Synthetic oligonucleotide
gtcgcgggatggtgtcatatctctcatacg

SEQ ID NO: 336648 - DNA, 30 bp, Artificial Sequence
  Synthetic oligonucleotide
ggaatcggaacacgttgaactgaagatacg

SEQ ID NO: 336649 - DNA, 30 bp, Artificial Sequence
  Synthetic oligonucleotide
ggtatccatgcgaattgacacgacgatacg

SEQ ID NO: 336650 - DNA, 30 bp, Artificial Sequence
  Synthetic oligonucleotide
gtgtgacctacgggctatgggtcggatacg

SEQ ID NO: 336651 - DNA, 30 bp, Artificial Sequence
  Synthetic oligonucleotide
tgatcatccggaggggaagtggttgatacg

SEQ ID NO: 336652 - DNA, 30 bp, Artificial Sequence
  Synthetic oligonucleotide
ttcattcccgattcgcaagtctcatatacg

SEQ ID NO: 336653 - DNA, 30 bp, Artificial Sequence
  Synthetic oligonucleotide
tagcgaatatactgagaacgctgatatacg

SEQ ID NO: 336654 - DNA, 30 bp, Artificial Sequence
  Synthetic oligonucleotide
actaccttcaatcgggtaaacaattatacg

SEQ ID NO: 336655 - DNA, 30 bp, Artificial Sequence
  Synthetic oligonucleotide
caagcatatccagtctttcctggttatacg

SEQ ID NO: 336656 - DNA, 31 bp, Artificial Sequence
  Synthetic oligonucleotide
acggtgtttggcaggtgtttttatttatacg

SEQ ID NO: 336657 - DNA, 30 bp, Artificial Sequence
  Synthetic oligonucleotide
actagataaccatggaggggtgtttatacg

SEQ ID NO: 336658 - DNA, 30 bp, Artificial Sequence
  Synthetic oligonucleotide
atctatttggaggttacttgatgaactacg

SEQ ID NO: 336659 - DNA, 30 bp, Artificial Sequence
  Synthetic oligonucleotide
taatcgaagtttgatatagttcacactacg

SEQ ID NO: 336660 - DNA, 30 bp, Artificial Sequence
  Synthetic oligonucleotide
ttgtagagcccgtcggagggccgcactacg

SEQ ID NO: 336661 - DNA, 30 bp, Artificial Sequence
  Synthetic oligonucleotide
ctccagatagttagtcaggatgtgactacg

SEQ ID NO: 336662 - DNA, 30 bp, Artificial Sequence
  Synthetic oligonucleotide
ccagacacgtggtgattagtttatactacg

SEQ ID NO: 336663 - DNA, 30 bp, Artificial Sequence
  Synthetic oligonucleotide
atgggtgacaccgcggagcaaagccctacg

SEQ ID NO: 336664 - DNA, 30 bp, Artificial Sequence
  Synthetic oligonucleotide
atacgacacagtatataggctgttcctacg

SEQ ID NO: 336665 - DNA, 30 bp, Artificial Sequence
  Synthetic oligonucleotide
ctgtggcagaaataaatgaactgagctacg

SEQ ID NO: 336666 - DNA, 30 bp, Artificial Sequence
  Synthetic oligonucleotide
aaatcagatgatgctgacttgtccgctacg

SEQ ID NO: 336667 - DNA, 30 bp, Artificial Sequence
  Synthetic oligonucleotide
ttatctaacgagctattctatccggctacg

SEQ ID NO: 336668 - DNA, 30 bp, Artificial Sequence
  Synthetic oligonucleotide
ttactgggtcaaggtgtcagcagggctacg

SEQ ID NO: 336669 - DNA, 30 bp, Artificial Sequence
  Synthetic oligonucleotide
attgatgttgcagtgaacttgggtgctacg

SEQ ID NO: 336670 - DNA, 30 bp, Artificial Sequence
  Synthetic oligonucleotide
gggggattcggtgcctatggtattgctacg

SEQ ID NO: 336671 - DNA, 30 bp, Artificial Sequence
  Synthetic oligonucleotide
gtcgggccgatcccacatatgcgctctacg

SEQ ID NO: 336672 - DNA, 30 bp, Artificial Sequence
  Synthetic oligonucleotide
ttcctctaagggcctccgtggagttctacg

SEQ ID NO: 336673 - DNA, 30 bp, Artificial Sequence
  Synthetic oligonucleotide
atggttgattcatggttggttagttctacg

SEQ ID NO: 336674 - DNA, 30 bp, Artificial Sequence
  Synthetic oligonucleotide
gttgtcgataggacgaaaacttgaagtacg

SEQ ID NO: 336675 - DNA, 30 bp, Artificial Sequence
  Synthetic oligonucleotide
ctccgggcgcgtggcgattattacagtacg

SEQ ID NO: 336676 - DNA, 30 bp, Artificial Sequence
  Synthetic oligonucleotide
tccacaatgatcacaatattgcagagtacg

SEQ ID NO: 336677 - DNA, 30 bp, Artificial Sequence
  Synthetic oligonucleotide
ccggcccgacctttgtgcaactcgagtacg

SEQ ID NO: 336678 - DNA, 30 bp, Artificial Sequence
  Synthetic oligonucleotide
tcttagaagttaccctgggtaatgagtacg

SEQ ID NO: 336679 - DNA, 30 bp, Artificial Sequence
  Synthetic oligonucleotide
attttaccccgcacgataagactgagtacg

SEQ ID NO: 336680 - DNA, 30 bp, Artificial Sequence
  Synthetic oligonucleotide
gtagactttcgcaatcagtaacctagtacg

SEQ ID NO: 336681 - DNA, 30 bp, Artificial Sequence
  Synthetic oligonucleotide
gtgtggcaatggcagcctaggtgtagtacg

SEQ ID NO: 336682 - DNA, 30 bp, Artificial Sequence
  Synthetic oligonucleotide
tctagatatggcacagtcgcaacacgtacg

SEQ ID NO: 336683 - DNA, 30 bp, Artificial Sequence
  Synthetic oligonucleotide
gcgcagcgccaggttataaggagacgtacg

SEQ ID NO: 336684 - DNA, 30 bp, Artificial Sequence
  Synthetic oligonucleotide
gcgcccttatcatttcagggaaaccgtacg

SEQ ID NO: 336685 - DNA, 30 bp, Artificial Sequence
  Synthetic oligonucleotide
tctcccttccatacggacggaccccgtacg

SEQ ID NO: 336686 - DNA, 30 bp, Artificial Sequence
  Synthetic oligonucleotide
gccgtaatgagcactctggtagcccgtacg

SEQ ID NO: 336687 - DNA, 30 bp, Artificial Sequence
  Synthetic oligonucleotide
gagattattgctataagtgttatccgtacg

SEQ ID NO: 336688 - DNA, 30 bp, Artificial Sequence
  Synthetic oligonucleotide
gtaaccattatcggccacgcattccgtacg

SEQ ID NO: 336689 - DNA, 30 bp, Artificial Sequence
  Synthetic oligonucleotide
cacgttgtggacgagggtctccggcgtacg

SEQ ID NO: 336690 - DNA, 30 bp, Artificial Sequence
  Synthetic oligonucleotide
atcccacgtgcaacccacgtcgggcgtacg

SEQ ID NO: 336691 - DNA, 30 bp, Artificial Sequence
  Synthetic oligonucleotide
ttctaggggaagaaatacatgtacggtacg

SEQ ID NO: 336692 - DNA, 30 bp, Artificial Sequence
  Synthetic oligonucleotide
cgcgtaattctaccttccacactcggtacg

SEQ ID NO: 336693 - DNA, 30 bp, Artificial Sequence
  Synthetic oligonucleotide
agcaatcggcattatacgtccgcgggtacg

SEQ ID NO: 336694 - DNA, 30 bp, Artificial Sequence
  Synthetic oligonucleotide
gcgtattagaataagtattattcgggtacg

SEQ ID NO: 336695 - DNA, 30 bp, Artificial Sequence
  Synthetic oligonucleotide
gagcgttttaactaccctgtgacctgtacg

SEQ ID NO: 336696 - DNA, 30 bp, Artificial Sequence
  Synthetic oligonucleotide
cggcgcatttcacccagtaactcctgtacg

SEQ ID NO: 336697 - DNA, 30 bp, Artificial Sequence
  Synthetic oligonucleotide
tttaatctcgcgatcggtctagagtgtacg

SEQ ID NO: 336698 - DNA, 30 bp, Artificial Sequence
  Synthetic oligonucleotide
tgtatgatgagaaacaatatttagtgtacg

SEQ ID NO: 336699 - DNA, 30 bp, Artificial Sequence
  Synthetic oligonucleotide
agcttaacacgagctgggggttcgtgtacg

SEQ ID NO: 336700 - DNA, 30 bp, Artificial Sequence
  Synthetic oligonucleotide
atagctgcaaggagacgtcacggttgtacg

SEQ ID NO: 336701 - DNA, 30 bp, Artificial Sequence
  Synthetic oligonucleotide
ttatcgtactaattactggcaagaattacg

SEQ ID NO: 336702 - DNA, 30 bp, Artificial Sequence
  Synthetic oligonucleotide
agatatttcatattagccgataggattacg

SEQ ID NO: 336703 - DNA, 30 bp, Artificial Sequence
  Synthetic oligonucleotide
tgaactataaagaagtgcattaatattacg

SEQ ID NO: 336704 - DNA, 30 bp, Artificial Sequence
  Synthetic oligonucleotide
tacccggttagcgttcgcgttacacttacg

SEQ ID NO: 336705 - DNA, 30 bp, Artificial Sequence
  Synthetic oligonucleotide
gttccaaagaattctcaaaagcgacttacg

SEQ ID NO: 336706 - DNA, 30 bp, Artificial Sequence
  Synthetic oligonucleotide
cccgtagttggataattgctgatacttacg

SEQ ID NO: 336707 - DNA, 30 bp, Artificial Sequence
  Synthetic oligonucleotide
agcgtaagtataacagttgcggtacttacg

SEQ ID NO: 336708 - DNA, 30 bp, Artificial Sequence
  Synthetic oligonucleotide
gaacggttgagcttgcgcatcacccttacg

SEQ ID NO: 336709 - DNA, 30 bp, Artificial Sequence
  Synthetic oligonucleotide
cgcttcgccacgactctccagccgcttacg

SEQ ID NO: 336710 - DNA, 30 bp, Artificial Sequence
  Synthetic oligonucleotide
caagtagcgaaccctggacacgggcttacg

SEQ ID NO: 336711 - DNA, 30 bp, Artificial Sequence
  Synthetic oligonucleotide
tttactaaaaacgtcttgaagcaagttacg

SEQ ID NO: 336712 - DNA, 30 bp, Artificial Sequence
  Synthetic oligonucleotide
atcgcctgactttcgtgataaacagttacg

SEQ ID NO: 336713 - DNA, 30 bp, Artificial Sequence
  Synthetic oligonucleotide
ttcggtttcggttaaacggtaccagttacg

SEQ ID NO: 336714 - DNA, 30 bp, Artificial Sequence
  Synthetic oligonucleotide
cttactgaatgtttctctcgatgagttacg

SEQ ID NO: 336715 - DNA, 30 bp, Artificial Sequence
  Synthetic oligonucleotide
tctcctggactttaaagaacttccgttacg

SEQ ID NO: 336716 - DNA, 30 bp, Artificial Sequence
  Synthetic oligonucleotide
tgtacgtccaccgtgccaattcgcgttacg

SEQ ID NO: 336717 - DNA, 30 bp, Artificial Sequence
  Synthetic oligonucleotide
ctttggagccatggtccggactgcgttacg

SEQ ID NO: 336718 - DNA, 30 bp, Artificial Sequence
  Synthetic oligonucleotide
cctggtgtgatcgtcaaatactgcgttacg

SEQ ID NO: 336719 - DNA, 30 bp, Artificial Sequence
  Synthetic oligonucleotide
ttaaaacggcacaggcacaaattcgttacg

SEQ ID NO: 336720 - DNA, 30 bp, Artificial Sequence
  Synthetic oligonucleotide
atcctgccaaaataatggcagttcgttacg

SEQ ID NO: 336721 - DNA, 30 bp, Artificial Sequence
  Synthetic oligonucleotide
ttcgaacacgcccgtgtttggcaggttacg

SEQ ID NO: 336722 - DNA, 30 bp, Artificial Sequence
  Synthetic oligonucleotide
atcgagtacatggtggcctccgtggttacg

SEQ ID NO: 336723 - DNA, 30 bp, Artificial Sequence
  Synthetic oligonucleotide
gacccccctatcccagtttccgtatttacg

SEQ ID NO: 336724 - DNA, 30 bp, Artificial Sequence
  Synthetic oligonucleotide
gttgatcagggccatgttctcacctttacg

SEQ ID NO: 336725 - DNA, 30 bp, Artificial Sequence
  Synthetic oligonucleotide
ttattgatgacgtaagcgggaccctttacg

SEQ ID NO: 336726 - DNA, 30 bp, Artificial Sequence
  Synthetic oligonucleotide
ctattcgactagctttttatgcgctttacg

SEQ ID NO: 336727 - DNA, 30 bp, Artificial Sequence
  Synthetic oligonucleotide
tgtgccgaccctttaggcttcccgtttacg

SEQ ID NO: 336728 - DNA, 30 bp, Artificial Sequence
  Synthetic oligonucleotide
ccagtcgttatacaataacataggtttacg

SEQ ID NO: 336729 - DNA, 30 bp, Artificial Sequence
  Synthetic oligonucleotide
gtaaggcccaggaatacaggttattttacg

SEQ ID NO: 336730 - DNA, 30 bp, Artificial Sequence
  Synthetic oligonucleotide
cttatccattcgtagtgatcatcaaaaccg

SEQ ID NO: 336731 - DNA, 30 bp, Artificial Sequence
  Synthetic oligonucleotide
cgtgcaacgctggtttaatgcataaaaccg

SEQ ID NO: 336732 - DNA, 30 bp, Artificial Sequence
  Synthetic oligonucleotide
tttgacaagaaggcacgggcgttaaaaccg

SEQ ID NO: 336733 - DNA, 30 bp, Artificial Sequence
  Synthetic oligonucleotide
ttccccagctataagttacctaacaaaccg

SEQ ID NO: 336734 - DNA, 30 bp, Artificial Sequence
  Synthetic oligonucleotide
catatgagccaacatttctgggacaaaccg

SEQ ID NO: 336735 - DNA, 30 bp, Artificial Sequence
  Synthetic oligonucleotide
atcgagattgtacctgcgtggggcaaaccg

SEQ ID NO: 336736 - DNA, 30 bp, Artificial Sequence
  Synthetic oligonucleotide
atatgtactaaacgcaagaccgagaaaccg

SEQ ID NO: 336737 - DNA, 30 bp, Artificial Sequence
  Synthetic oligonucleotide
cattttgattccgcaacagtatggaaaccg

SEQ ID NO: 336738 - DNA, 30 bp, Artificial Sequence
  Synthetic oligonucleotide
tggccgagggctggcgcggggcaccaaccg

SEQ ID NO: 336739 - DNA, 30 bp, Artificial Sequence
  Synthetic oligonucleotide
acgtcctctttttccaaaatattccaaccg

SEQ ID NO: 336740 - DNA, 30 bp, Artificial Sequence
  Synthetic oligonucleotide
gcttcgaacttgaacggtctcgttcaaccg

SEQ ID NO: 336741 - DNA, 30 bp, Artificial Sequence
  Synthetic oligonucleotide
taataagtaaacttagtatgcacggaaccg

SEQ ID NO: 336742 - DNA, 30 bp, Artificial Sequence
  Synthetic oligonucleotide
aggttctagtcttatttgcgaatggaaccg

SEQ ID NO: 336743 - DNA, 30 bp, Artificial Sequence
  Synthetic oligonucleotide
tgcaaaaaacggtatggtggctgtgaaccg

SEQ ID NO: 336744 - DNA, 31 bp, Artificial Sequence
  Synthetic oligonucleotide
gtctcaaatttcccttattgatagataaccg

SEQ ID NO: 336745 - DNA, 30 bp, Artificial Sequence
  Synthetic oligonucleotide
atgaccacaccgacgtggtccacgtaaccg

SEQ ID NO: 336746 - DNA, 30 bp, Artificial Sequence
  Synthetic oligonucleotide
tagtgagaaaattaaagaagcgtttaaccg

SEQ ID NO: 336747 - DNA, 30 bp, Artificial Sequence
  Synthetic oligonucleotide
ctaatttgatcatgagggatgttttaaccg

SEQ ID NO: 336748 - DNA, 30 bp, Artificial Sequence
  Synthetic oligonucleotide
ttcagacaaatgcatcgttaatgaacaccg

SEQ ID NO: 336749 - DNA, 30 bp, Artificial Sequence
  Synthetic oligonucleotide
aaactggcgcgttggacgctatgaacaccg

SEQ ID NO: 336750 - DNA, 30 bp, Artificial Sequence
  Synthetic oligonucleotide
gggcactagatacgctaatgtggtacaccg

SEQ ID NO: 336751 - DNA, 30 bp, Artificial Sequence
  Synthetic oligonucleotide
ggcattgggcagcaaccaatgaccgcaccg

SEQ ID NO: 336752 - DNA, 30 bp, Artificial Sequence
  Synthetic oligonucleotide
cgcagagtgttgttcctcctcatggcaccg

SEQ ID NO: 336753 - DNA, 30 bp, Artificial Sequence
  Synthetic oligonucleotide
ctacagttccgttgttggtaggtggcaccg

SEQ ID NO: 336754 - DNA, 30 bp, Artificial Sequence
  Synthetic oligonucleotide
tcagagctgttattgtatttgcgtgcaccg

SEQ ID NO: 336755 - DNA, 30 bp, Artificial Sequence
  Synthetic oligonucleotide
ctggtgttgattagcctttcctaatcaccg

SEQ ID NO: 336756 - DNA, 30 bp, Artificial Sequence
  Synthetic oligonucleotide
gagtcaactgagatcacgggcatatcaccg

SEQ ID NO: 336757 - DNA, 30 bp, Artificial Sequence
  Synthetic oligonucleotide
aacgccagggttacgcgcctaacaagaccg

SEQ ID NO: 336758 - DNA, 30 bp, Artificial Sequence
  Synthetic oligonucleotide
ttcagtgattcaacctttacagtcagaccg

SEQ ID NO: 336759 - DNA, 30 bp, Artificial Sequence
  Synthetic oligonucleotide
tccataacagggacgtttgggatgagaccg

SEQ ID NO: 336760 - DNA, 30 bp, Artificial Sequence
  Synthetic oligonucleotide
cttagcgcaatacaacgggcgagtagaccg

SEQ ID NO: 336761 - DNA, 30 bp, Artificial Sequence
  Synthetic oligonucleotide
attccggctgttggctgagaacgtagaccg

SEQ ID NO: 336762 - DNA, 30 bp, Artificial Sequence
  Synthetic oligonucleotide
gaaacagtagtcagaggcggtgcacgaccg

SEQ ID NO: 336763 - DNA, 30 bp, Artificial Sequence
  Synthetic oligonucleotide
tgctgcacagcagccatttacagacgaccg

SEQ ID NO: 336764 - DNA, 30 bp, Artificial Sequence
  Synthetic oligonucleotide
ggaggtatataaaacggcattcagcgaccg

SEQ ID NO: 336765 - DNA, 30 bp, Artificial Sequence
  Synthetic oligonucleotide
gccaataatatgcgggtgcggactcgaccg

SEQ ID NO: 336766 - DNA, 30 bp, Artificial Sequence
  Synthetic oligonucleotide
gtctatctatttggacctaaatttcgaccg

SEQ ID NO: 336767 - DNA, 30 bp, Artificial Sequence
  Synthetic oligonucleotide
caaagggttgcagcggccaatagaggaccg

SEQ ID NO: 336768 - DNA, 30 bp, Artificial Sequence
  Synthetic oligonucleotide
attaaatcgtggaggtcggcatgaggaccg

SEQ ID NO: 336769 - DNA, 30 bp, Artificial Sequence
  Synthetic oligonucleotide
tacgcccggggagtgttcggccacggaccg

SEQ ID NO: 336770 - DNA, 30 bp, Artificial Sequence
  Synthetic oligonucleotide
cctactaggacgcttcctgccaccggaccg

SEQ ID NO: 336771 - DNA, 30 bp, Artificial Sequence
  Synthetic oligonucleotide
ccaataaagaccagcctacgaagcggaccg

SEQ ID NO: 336772 - DNA, 30 bp, Artificial Sequence
  Synthetic oligonucleotide
gctatcttagcctaaaattataggggaccg

SEQ ID NO: 336773 - DNA, 30 bp, Artificial Sequence
  Synthetic oligonucleotide
gttcagagggagcggtccactggtggaccg

SEQ ID NO: 336774 - DNA, 30 bp, Artificial Sequence
  Synthetic oligonucleotide
aatagcataagaaaagtacgatgctgaccg

SEQ ID NO: 336775 - DNA, 30 bp, Artificial Sequence
  Synthetic oligonucleotide
agcctttaaaaccggaatgtgtgctgaccg

SEQ ID NO: 336776 - DNA, 30 bp, Artificial Sequence
  Synthetic oligonucleotide
caagagtattgtagcaacatacaaataccg

SEQ ID NO: 336777 - DNA, 30 bp, Artificial Sequence
  Synthetic oligonucleotide
gggtgagacctttccgtcaagataataccg

SEQ ID NO: 336778 - DNA, 30 bp, Artificial Sequence
  Synthetic oligonucleotide
ttaacttatgtgacgcctatgaacataccg

SEQ ID NO: 336779 - DNA, 30 bp, Artificial Sequence
  Synthetic oligonucleotide
cagggtaaattgcttggccaattcataccg

SEQ ID NO: 336780 - DNA, 30 bp, Artificial Sequence
  Synthetic oligonucleotide
atgaatatatgactggtggctaagataccg

SEQ ID NO: 336781 - DNA, 30 bp, Artificial Sequence
  Synthetic oligonucleotide
tctgatgcccgtatcaatggtgctataccg

SEQ ID NO: 336782 - DNA, 30 bp, Artificial Sequence
  Synthetic oligonucleotide
gaatacagttgattagggtttagcctaccg

SEQ ID NO: 336783 - DNA, 30 bp, Artificial Sequence
  Synthetic oligonucleotide
tttgcagcgttgtccaaccccatcctaccg

SEQ ID NO: 336784 - DNA, 30 bp, Artificial Sequence
  Synthetic oligonucleotide
tgcggggctgtttctaatacccagctaccg

SEQ ID NO: 336785 - DNA, 30 bp, Artificial Sequence
  Synthetic oligonucleotide
tgtacatggtgtgcgtataaacaagtaccg

SEQ ID NO: 336786 - DNA, 30 bp, Artificial Sequence
  Synthetic oligonucleotide
ttaggagaggtggtgtacagggcagtaccg

SEQ ID NO: 336787 - DNA, 30 bp, Artificial Sequence
  Synthetic oligonucleotide
cacttcttaatctggaagttatgagtaccg

SEQ ID NO: 336788 - DNA, 30 bp, Artificial Sequence
  Synthetic oligonucleotide
taagaagtgaggaccgggcgtgtagtaccg

SEQ ID NO: 336789 - DNA, 30 bp, Artificial Sequence
  Synthetic oligonucleotide
ggacggaaccgtgttatatggtacgtaccg

SEQ ID NO: 336790 - DNA, 30 bp, Artificial Sequence
  Synthetic oligonucleotide
accaatttgagactttgagctccggtaccg

SEQ ID NO: 336791 - DNA, 30 bp, Artificial Sequence
  Synthetic oligonucleotide
tttcagtattctggataacctagggtaccg

SEQ ID NO: 336792 - DNA, 30 bp, Artificial Sequence
  Synthetic oligonucleotide
accagcgactaagaattcatgctggtaccg

SEQ ID NO: 336793 - DNA, 30 bp, Artificial Sequence
  Synthetic oligonucleotide
cattgtcgattcatcctcccgactgtaccg

SEQ ID NO: 336794 - DNA, 30 bp, Artificial Sequence
  Synthetic oligonucleotide
atctcgagaatcatgagacacgctgtaccg

SEQ ID NO: 336795 - DNA, 30 bp, Artificial Sequence
  Synthetic oligonucleotide
gttgaacaagggtattttcctgcattaccg

SEQ ID NO: 336796 - DNA, 30 bp, Artificial Sequence
  Synthetic oligonucleotide
agtctctctgcagccatgggtaccttaccg

SEQ ID NO: 336797 - DNA, 30 bp, Artificial Sequence
  Synthetic oligonucleotide
ctaatactacgggcaaagtcctgtttaccg

SEQ ID NO: 336798 - DNA, 30 bp, Artificial Sequence
  Synthetic oligonucleotide
ttgattttttttagaggtacaggaaacccg

SEQ ID NO: 336799 - DNA, 30 bp, Artificial Sequence
  Synthetic oligonucleotide
ctccgcaagaccggggtgcccgccaacccg

SEQ ID NO: 336800 - DNA, 30 bp, Artificial Sequence
  Synthetic oligonucleotide
ttcaaacgccggtgtccttctctcaacccg

SEQ ID NO: 336801 - DNA, 30 bp, Artificial Sequence
  Synthetic oligonucleotide
ccgagtatttaggaacttcgatggaacccg

SEQ ID NO: 336802 - DNA, 30 bp, Artificial Sequence
  Synthetic oligonucleotide
gccaaatgtaaagggttcattactaacccg

SEQ ID NO: 336803 - DNA, 30 bp, Artificial Sequence
  Synthetic oligonucleotide
tcatgggtgatgtttcctccacgtaacccg

SEQ ID NO: 336804 - DNA, 30 bp, Artificial Sequence
  Synthetic oligonucleotide
gtcggtaagtaatcgatagtctgtaacccg

SEQ ID NO: 336805 - DNA, 30 bp, Artificial Sequence
  Synthetic oligonucleotide
tgcagtgatgccctaaagccactacacccg

SEQ ID NO: 336806 - DNA, 30 bp, Artificial Sequence
  Synthetic oligonucleotide
ggagtggaaatttacaagaggcaccacccg

SEQ ID NO: 336807 - DNA, 30 bp, Artificial Sequence
  Synthetic oligonucleotide
tctccagtcttcagctcatgggggcacccg

SEQ ID NO: 336808 - DNA, 30 bp, Artificial Sequence
  Synthetic oligonucleotide
actgcagtggtcgagttcccctggcacccg

SEQ ID NO: 336809 - DNA, 30 bp, Artificial Sequence
  Synthetic oligonucleotide
caggacatgtttagactggtctaagacccg

SEQ ID NO: 336810 - DNA, 30 bp, Artificial Sequence
  Synthetic oligonucleotide
ctttatagggctgagacgacgtaggacccg

SEQ ID NO: 336811 - DNA, 30 bp, Artificial Sequence
  Synthetic oligonucleotide
tggacgaataacgcgcatggttaggacccg

SEQ ID NO: 336812 - DNA, 30 bp, Artificial Sequence
  Synthetic oligonucleotide
gatatgagtgcgagggtctctccggacccg

SEQ ID NO: 336813 - DNA, 30 bp, Artificial Sequence
  Synthetic oligonucleotide
gacactactcaacgggccattcgggacccg

SEQ ID NO: 336814 - DNA, 30 bp, Artificial Sequence
  Synthetic oligonucleotide
ggctgtaaaccctaagcaccaaatgacccg

SEQ ID NO: 336815 - DNA, 30 bp, Artificial Sequence
  Synthetic oligonucleotide
acgaagtagggtgtatggcgccgctacccg

SEQ ID NO: 336816 - DNA, 30 bp, Artificial Sequence
  Synthetic oligonucleotide
ctggtgcacttcgacgatgcaaagtacccg

SEQ ID NO: 336817 - DNA, 30 bp, Artificial Sequence
  Synthetic oligonucleotide
gcttggctaccaagagctagtcggtacccg

SEQ ID NO: 336818 - DNA, 30 bp, Artificial Sequence
  Synthetic oligonucleotide
tgggtcatttctaatcagatagggtacccg

SEQ ID NO: 336819 - DNA, 30 bp, Artificial Sequence
  Synthetic oligonucleotide
tggtttcgaagctctgttaagtcttacccg

SEQ ID NO: 336820 - DNA, 30 bp, Artificial Sequence
  Synthetic oligonucleotide
tagtactgcggatgcttctgaataaccccg

SEQ ID NO: 336821 - DNA, 30 bp, Artificial Sequence
  Synthetic oligonucleotide
atctggcctaggagacgcaattacaccccg

SEQ ID NO: 336822 - DNA, 30 bp, Artificial Sequence
  Synthetic oligonucleotide
ttttcgcgatcccgctcttccaccaccccg

SEQ ID NO: 336823 - DNA, 30 bp, Artificial Sequence
  Synthetic oligonucleotide
tcacgagcgttagccacatgtagcaccccg

SEQ ID NO: 336824 - DNA, 30 bp, Artificial Sequence
  Synthetic oligonucleotide
gaccttttcacaaggagctatcaacccccg

SEQ ID NO: 336825 - DNA, 30 bp, Artificial Sequence
  Synthetic oligonucleotide
gacctgaatagcgatgacaccatacccccg

SEQ ID NO: 336826 - DNA, 30 bp, Artificial Sequence
  Synthetic oligonucleotide
gaagtagttatcttcatcgtaagccccccg

SEQ ID NO: 336827 - DNA, 30 bp, Artificial Sequence
  Synthetic oligonucleotide
cccccccatccacgaacaataaagcccccg

SEQ ID NO: 336828 - DNA, 30 bp, Artificial Sequence
  Synthetic oligonucleotide
aataattcggggaaagttagccggcccccg

SEQ ID NO: 336829 - DNA, 30 bp, Artificial Sequence
  Synthetic oligonucleotide
gcaattgggagttttagaaacgctcccccg

SEQ ID NO: 336830 - DNA, 30 bp, Artificial Sequence
  Synthetic oligonucleotide
ggtggtaatgcttgtttggaatctcccccg

SEQ ID NO: 336831 - DNA, 30 bp, Artificial Sequence
  Synthetic oligonucleotide
attaagacgattgggacaattacagccccg

SEQ ID NO: 336832 - DNA, 30 bp, Artificial Sequence
  Synthetic oligonucleotide
gtttatagtaaatgcatccaactagccccg

SEQ ID NO: 336833 - DNA, 30 bp, Artificial Sequence
  Synthetic oligonucleotide
gtattgcatttgcaatttcaacgcgccccg

SEQ ID NO: 336834 - DNA, 30 bp, Artificial Sequence
  Synthetic oligonucleotide
aggaagggaatttttgaaaaaggcgccccg

SEQ ID NO: 336835 - DNA, 30 bp, Artificial Sequence
  Synthetic oligonucleotide
gaaagtgtcgactgcatcgcactggccccg

SEQ ID NO: 336836 - DNA, 30 bp, Artificial Sequence
  Synthetic oligonucleotide
tgccgatcagagctcgcacggttggccccg

SEQ ID NO: 336837 - DNA, 30 bp, Artificial Sequence
  Synthetic oligonucleotide
ggcagccctgtcgcgaacgtacatgccccg

SEQ ID NO: 336838 - DNA, 30 bp, Artificial Sequence
  Synthetic oligonucleotide
gcatcaccccaatggtccggggatgccccg

SEQ ID NO: 336839 - DNA, 30 bp, Artificial Sequence
  Synthetic oligonucleotide
tgataagacgaccctgggcagactgccccg

SEQ ID NO: 336840 - DNA, 30 bp, Artificial Sequence
  Synthetic oligonucleotide
gcaatcttagctccaaacatccgttccccg

SEQ ID NO: 336841 - DNA, 30 bp, Artificial Sequence
  Synthetic oligonucleotide
aaaaaaagttcgtatgtgaagttttccccg

SEQ ID NO: 336842 - DNA, 30 bp, Artificial Sequence
  Synthetic oligonucleotide
ttcccataagaacataaacgcgacagcccg

SEQ ID NO: 336843 - DNA, 30 bp, Artificial Sequence
  Synthetic oligonucleotide
tttgccataaagcatattaggtccagcccg

SEQ ID NO: 336844 - DNA, 30 bp, Artificial Sequence
  Synthetic oligonucleotide
gcggttggagtgggtttggccctcagcccg

SEQ ID NO: 336845 - DNA, 30 bp, Artificial Sequence
  Synthetic oligonucleotide
tggcaggtgttcgcgctgctacagagcccg

SEQ ID NO: 336846 - DNA, 30 bp, Artificial Sequence
  Synthetic oligonucleotide
aaaacgaagacccagggttgccttagcccg

SEQ ID NO: 336847 - DNA, 30 bp, Artificial Sequence
  Synthetic oligonucleotide
taggcgaggcggctataggcagaaggcccg

SEQ ID NO: 336848 - DNA, 30 bp, Artificial Sequence
  Synthetic oligonucleotide
ggctaaaacatattgtttagtcagggcccg

SEQ ID NO: 336849 - DNA, 30 bp, Artificial Sequence
  Synthetic oligonucleotide
ccgcctcctgttagatcaaagaggggcccg

SEQ ID NO: 336850 - DNA, 30 bp, Artificial Sequence
  Synthetic oligonucleotide
ggatgggctggccctcaaggatcatgcccg

SEQ ID NO: 336851 - DNA, 30 bp, Artificial Sequence
  Synthetic oligonucleotide
gattctaacattgtgtctgacggatgcccg

SEQ ID NO: 336852 - DNA, 30 bp, Artificial Sequence
  Synthetic oligonucleotide
atctaaaaacgggtgagaggtgtctgcccg

SEQ ID NO: 336853 - DNA, 30 bp, Artificial Sequence
  Synthetic oligonucleotide
ctcgaggacaggttctcttaaccgtgcccg

SEQ ID NO: 336854 - DNA, 30 bp, Artificial Sequence
  Synthetic oligonucleotide
tgtgagctctacgtcttgtcgtggtgcccg

SEQ ID NO: 336855 - DNA, 30 bp, Artificial Sequence
  Synthetic oligonucleotide
aaaaacccgcgcaactagtttgtgtgcccg

SEQ ID NO: 336856 - DNA, 30 bp, Artificial Sequence
  Synthetic oligonucleotide
gcccaggggctaagtcagcagagttgcccg

SEQ ID NO: 336857 - DNA, 30 bp, Artificial Sequence
  Synthetic oligonucleotide
tatccagatgtcatgccttgaagaatcccg

SEQ ID NO: 336858 - DNA, 30 bp, Artificial Sequence
  Synthetic oligonucleotide
acactcaccataattggtacctgcatcccg

SEQ ID NO: 336859 - DNA, 30 bp, Artificial Sequence
  Synthetic oligonucleotide
tctgtctggctagagcaagatttgatcccg

SEQ ID NO: 336860 - DNA, 30 bp, Artificial Sequence
  Synthetic oligonucleotide
gcaagggttgactaatcgttaggactcccg

SEQ ID NO: 336861 - DNA, 30 bp, Artificial Sequence
  Synthetic oligonucleotide
atgagccaatctagaaggcggtggctcccg

SEQ ID NO: 336862 - DNA, 30 bp, Artificial Sequence
  Synthetic oligonucleotide
caaatctgaaaagccgagtccagagtcccg

SEQ ID NO: 336863 - DNA, 30 bp, Artificial Sequence
  Synthetic oligonucleotide
ccgaatggacgtagggcctatcaggtcccg

SEQ ID NO: 336864 - DNA, 30 bp, Artificial Sequence
  Synthetic oligonucleotide
gatatgtaggtagggaggtatcaggtcccg

SEQ ID NO: 336865 - DNA, 30 bp, Artificial Sequence
  Synthetic oligonucleotide
acacgttcaaggcgcgggataagggtcccg

SEQ ID NO: 336866 - DNA, 30 bp, Artificial Sequence
  Synthetic oligonucleotide
cgctaccacggagtttaggaattggtcccg

SEQ ID NO: 336867 - DNA, 30 bp, Artificial Sequence
  Synthetic oligonucleotide
tagtacgtgttcgtcgtctttaccttcccg

SEQ ID NO: 336868 - DNA, 30 bp, Artificial Sequence
  Synthetic oligonucleotide
gacatctcgaatatgtcatagcgcttcccg

SEQ ID NO: 336869 - DNA, 30 bp, Artificial Sequence
  Synthetic oligonucleotide
gggtataatgggggcagattgtgtttcccg

SEQ ID NO: 336870 - DNA, 30 bp, Artificial Sequence
  Synthetic oligonucleotide
caaatcgtggtgatggtatttaaccagccg

SEQ ID NO: 336871 - DNA, 30 bp, Artificial Sequence
  Synthetic oligonucleotide
tggggagttctcgacgatagggagcagccg

SEQ ID NO: 336872 - DNA, 30 bp, Artificial Sequence
  Synthetic oligonucleotide
tgattgctgacctacgtacttttagagccg

SEQ ID NO: 336873 - DNA, 30 bp, Artificial Sequence
  Synthetic oligonucleotide
gtaccgagtttaatctatagatacgagccg

SEQ ID NO: 336874 - DNA, 30 bp, Artificial Sequence
  Synthetic oligonucleotide
aactgtttatcaggctctcgctccgagccg

SEQ ID NO: 336875 - DNA, 30 bp, Artificial Sequence
  Synthetic oligonucleotide
ggacttcgtgtgattcgacaggaggagccg

SEQ ID NO: 336876 - DNA, 30 bp, Artificial Sequence
  Synthetic oligonucleotide
cagggtggtttgcactaggttacggagccg

SEQ ID NO: 336877 - DNA, 30 bp, Artificial Sequence
  Synthetic oligonucleotide
tgtaacacatagtcgtgttcgggggagccg

SEQ ID NO: 336878 - DNA, 30 bp, Artificial Sequence
  Synthetic oligonucleotide
ccagcggcttgtttccgggccctggagccg

SEQ ID NO: 336879 - DNA, 30 bp, Artificial Sequence
  Synthetic oligonucleotide
atccgggacagcctcggtgggatatagccg

SEQ ID NO: 336880 - DNA, 30 bp, Artificial Sequence
  Synthetic oligonucleotide
aatagtggtgcgcagcgatgaatctagccg

SEQ ID NO: 336881 - DNA, 30 bp, Artificial Sequence
  Synthetic oligonucleotide
aaggaaaggtatatgtggctatagtagccg

SEQ ID NO: 336882 - DNA, 30 bp, Artificial Sequence
  Synthetic oligonucleotide
gtccactcagccgctttaagcgtgtagccg

SEQ ID NO: 336883 - DNA, 30 bp, Artificial Sequence
  Synthetic oligonucleotide
cttcggatgtgccatgttcaaggttagccg

SEQ ID NO: 336884 - DNA, 30 bp, Artificial Sequence
  Synthetic oligonucleotide
caaatgtgcgtttaacagagcgaaacgccg

SEQ ID NO: 336885 - DNA, 30 bp, Artificial Sequence
  Synthetic oligonucleotide
aacggaccgatgtcctgtagcttaacgccg

SEQ ID NO: 336886 - DNA, 30 bp, Artificial Sequence
  Synthetic oligonucleotide
actaggacacttgccatacgttccacgccg

SEQ ID NO: 336887 - DNA, 30 bp, Artificial Sequence
  Synthetic oligonucleotide
tagttttctactgacctatcgagcacgccg

SEQ ID NO: 336888 - DNA, 30 bp, Artificial Sequence
  Synthetic oligonucleotide
gtaatacgtggcgggacatacggcacgccg

SEQ ID NO: 336889 - DNA, 30 bp, Artificial Sequence
  Synthetic oligonucleotide
acatcgcgacagcgataaactctcacgccg

SEQ ID NO: 336890 - DNA, 30 bp, Artificial Sequence
  Synthetic oligonucleotide
ctctacgcgggatgggccacttcgacgccg

SEQ ID NO: 336891 - DNA, 30 bp, Artificial Sequence
  Synthetic oligonucleotide
ctccctacctaaggtaatacgcatacgccg

SEQ ID NO: 336892 - DNA, 30 bp, Artificial Sequence
  Synthetic oligonucleotide
ttgtgtgcctcgtgatcgctgcatacgccg

SEQ ID NO: 336893 - DNA, 30 bp, Artificial Sequence
  Synthetic oligonucleotide
agggcagtaatcggcatgggtagtacgccg

SEQ ID NO: 336894 - DNA, 30 bp, Artificial Sequence
  Synthetic oligonucleotide
ggcgttaacttcatttatatatccccgccg

SEQ ID NO: 336895 - DNA, 30 bp, Artificial Sequence
  Synthetic oligonucleotide
atagcttcacttttgcgagccggtccgccg

SEQ ID NO: 336896 - DNA, 30 bp, Artificial Sequence
  Synthetic oligonucleotide
gactaggtaaacattcaggctgttccgccg

SEQ ID NO: 336897 - DNA, 30 bp, Artificial Sequence
  Synthetic oligonucleotide
gctagtatatatagaatgataagcgcgccg

SEQ ID NO: 336898 - DNA, 30 bp, Artificial Sequence
  Synthetic oligonucleotide
cgtccgtagtacttattgaccgaggcgccg

SEQ ID NO: 336899 - DNA, 30 bp, Artificial Sequence
  Synthetic oligonucleotide
aacctagagataccgggatccggtgcgccg

SEQ ID NO: 336900 - DNA, 30 bp, Artificial Sequence
  Synthetic oligonucleotide
tttgtgaataggcccctaggcccctcgccg

SEQ ID NO: 336901 - DNA, 30 bp, Artificial Sequence
  Synthetic oligonucleotide
ttgcaatgggcatcgttatgtgtaaggccg

SEQ ID NO: 336902 - DNA, 30 bp, Artificial Sequence
  Synthetic oligonucleotide
gcggcctcacgcagataactgagcaggccg

SEQ ID NO: 336903 - DNA, 30 bp, Artificial Sequence
  Synthetic oligonucleotide
gccgacatgaaagacgttgttgagaggccg

SEQ ID NO: 336904 - DNA, 31 bp, Artificial Sequence
  Synthetic oligonucleotide
atgaccagattagggggtgggacaacggccg

SEQ ID NO: 336905 - DNA, 30 bp, Artificial Sequence
  Synthetic oligonucleotide
tgagacgagacggctaacactgcgcggccg

SEQ ID NO: 336906 - DNA, 30 bp, Artificial Sequence
  Synthetic oligonucleotide
catccctggacagcgccaggttcagggccg

SEQ ID NO: 336907 - DNA, 30 bp, Artificial Sequence
  Synthetic oligonucleotide
tcccgttccagactcagtaagttagggccg

SEQ ID NO: 336908 - DNA, 30 bp, Artificial Sequence
  Synthetic oligonucleotide
atatatgtatgggaagtgccgtgggggccg

SEQ ID NO: 336909 - DNA, 30 bp, Artificial Sequence
  Synthetic oligonucleotide
ttagaattgtggcataggatcgctgggccg

SEQ ID NO: 336910 - DNA, 30 bp, Artificial Sequence
  Synthetic oligonucleotide
gccacgtccggggtactgccgcttgggccg

SEQ ID NO: 336911 - DNA, 30 bp, Artificial Sequence
  Synthetic oligonucleotide
tttatccatgccgtatttccactatggccg

SEQ ID NO: 336912 - DNA, 30 bp, Artificial Sequence
  Synthetic oligonucleotide
gactcactatgggccacccattgttggccg

SEQ ID NO: 336913 - DNA, 30 bp, Artificial Sequence
  Synthetic oligonucleotide
tcgggggctttctcccagaagctaatgccg

SEQ ID NO: 336914 - DNA, 30 bp, Artificial Sequence
  Synthetic oligonucleotide
tttgggtccttagctcagtactagatgccg

SEQ ID NO: 336915 - DNA, 31 bp, Artificial Sequence
  Synthetic oligonucleotide
aactcacatagaaaaagccacttctatgccg

SEQ ID NO: 336916 - DNA, 30 bp, Artificial Sequence
  Synthetic oligonucleotide
ggaacagggttttggatttcgggtatgccg

SEQ ID NO: 336917 - DNA, 30 bp, Artificial Sequence
  Synthetic oligonucleotide
agaggttgcgtatctccgccctggctgccg

SEQ ID NO: 336918 - DNA, 30 bp, Artificial Sequence
  Synthetic oligonucleotide
cctatggtgaccccagtgggtactctgccg

SEQ ID NO: 336919 - DNA, 30 bp, Artificial Sequence
  Synthetic oligonucleotide
tcttccgcccaaggtccgctgagagtgccg

SEQ ID NO: 336920 - DNA, 30 bp, Artificial Sequence
  Synthetic oligonucleotide
gggtgaatccgatataaatgagacgtgccg

SEQ ID NO: 336921 - DNA, 30 bp, Artificial Sequence
  Synthetic oligonucleotide
ggctctacttggtctgggcctcgcgtgccg

SEQ ID NO: 336922 - DNA, 30 bp, Artificial Sequence
  Synthetic oligonucleotide
gcactcagatgcccgtcccagacggtgccg

SEQ ID NO: 336923 - DNA, 30 bp, Artificial Sequence
  Synthetic oligonucleotide
tcggtatccgacgggggggcaccattgccg

SEQ ID NO: 336924 - DNA, 30 bp, Artificial Sequence
  Synthetic oligonucleotide
gcaattatatactggatttacttattgccg

SEQ ID NO: 336925 - DNA, 30 bp, Artificial Sequence
  Synthetic oligonucleotide
gagcggactcatcgcatattcaatttgccg

SEQ ID NO: 336926 - DNA, 30 bp, Artificial Sequence
  Synthetic oligonucleotide
gcaatacatcgacagatcgggaatttgccg

SEQ ID NO: 336927 - DNA, 31 bp, Artificial Sequence
  Synthetic oligonucleotide
gagagggttaaatccatcgttgaatttgccg

SEQ ID NO: 336928 - DNA, 30 bp, Artificial Sequence
  Synthetic oligonucleotide
tccaggagagaacacggctctgaaaatccg

SEQ ID NO: 336929 - DNA, 30 bp, Artificial Sequence
  Synthetic oligonucleotide
ctgaggactgtttcttatgtcagaaatccg

SEQ ID NO: 336930 - DNA, 30 bp, Artificial Sequence
  Synthetic oligonucleotide
gcactaacgtaccctgaggcactaaatccg

SEQ ID NO: 336931 - DNA, 30 bp, Artificial Sequence
  Synthetic oligonucleotide
aagcagcttgtccattgacgggtaaatccg

SEQ ID NO: 336932 - DNA, 30 bp, Artificial Sequence
  Synthetic oligonucleotide
cactctggtatttcttgtcacaacaatccg

SEQ ID NO: 336933 - DNA, 30 bp, Artificial Sequence
  Synthetic oligonucleotide
ttcgtcttctgacgggttgaattcaatccg

SEQ ID NO: 336934 - DNA, 30 bp, Artificial Sequence
  Synthetic oligonucleotide
cacccgaacgcacagggttcgcggaatccg

SEQ ID NO: 336935 - DNA, 30 bp, Artificial Sequence
  Synthetic oligonucleotide
gctctaacctgatgacggggtcggaatccg

SEQ ID NO: 336936 - DNA, 30 bp, Artificial Sequence
  Synthetic oligonucleotide
ggatgatacaccggagtacttcggaatccg

SEQ ID NO: 336937 - DNA, 30 bp, Artificial Sequence
  Synthetic oligonucleotide
gcgctaaatgaacgaagggcctgtaatccg

SEQ ID NO: 336938 - DNA, 30 bp, Artificial Sequence
  Synthetic oligonucleotide
tactttgcctgtcataaacgccttaatccg

SEQ ID NO: 336939 - DNA, 30 bp, Artificial Sequence
  Synthetic oligonucleotide
ccggcctggggtcgcaaattaaaacatccg

SEQ ID NO: 336940 - DNA, 30 bp, Artificial Sequence
  Synthetic oligonucleotide
cagatgggtatcgagtaatagtaacatccg

SEQ ID NO: 336941 - DNA, 30 bp, Artificial Sequence
  Synthetic oligonucleotide
aacgtgtgcgattcatcctacctccatccg

SEQ ID NO: 336942 - DNA, 30 bp, Artificial Sequence
  Synthetic oligonucleotide
gcgaaagtatcgccggttctatagcatccg

SEQ ID NO: 336943 - DNA, 30 bp, Artificial Sequence
  Synthetic oligonucleotide
acggtccgtaaggcttagacgtagcatccg

SEQ ID NO: 336944 - DNA, 30 bp, Artificial Sequence
  Synthetic oligonucleotide
gagaggagtttggtccctgttttagatccg

SEQ ID NO: 336945 - DNA, 30 bp, Artificial Sequence
  Synthetic oligonucleotide
aacttgaggttgttttgatctgccgatccg

SEQ ID NO: 336946 - DNA, 30 bp, Artificial Sequence
  Synthetic oligonucleotide
taagtcagacttgttaacggtgaggatccg

SEQ ID NO: 336947 - DNA, 30 bp, Artificial Sequence
  Synthetic oligonucleotide
actccacgcggtgtgtgctctgcggatccg

SEQ ID NO: 336948 - DNA, 30 bp, Artificial Sequence
  Synthetic oligonucleotide
actatgactggacgatgccaatgggatccg

SEQ ID NO: 336949 - DNA, 30 bp, Artificial Sequence
  Synthetic oligonucleotide
ttaccgtgcgggtgccccgttatggatccg

SEQ ID NO: 336950 - DNA, 30 bp, Artificial Sequence
  Synthetic oligonucleotide
ggctcgtttttcggccgttaactggatccg

SEQ ID NO: 336951 - DNA, 30 bp, Artificial Sequence
  Synthetic oligonucleotide
caattcttacaagtatgtggagcatatccg

SEQ ID NO: 336952 - DNA, 30 bp, Artificial Sequence
  Synthetic oligonucleotide
gctctcggctgctacgcacaaccctatccg

SEQ ID NO: 336953 - DNA, 30 bp, Artificial Sequence
  Synthetic oligonucleotide
atgcacgttatatgctaacttttctatccg

SEQ ID NO: 336954 - DNA, 30 bp, Artificial Sequence
  Synthetic oligonucleotide
attctgatatcactgtggcataattatccg

SEQ ID NO: 336955 - DNA, 30 bp, Artificial Sequence
  Synthetic oligonucleotide
cagatttccatttgtgagtgcggttatccg

SEQ ID NO: 336956 - DNA, 30 bp, Artificial Sequence
  Synthetic oligonucleotide
tgaccagtaaatacgttccggtaaactccg

SEQ ID NO: 336957 - DNA, 30 bp, Artificial Sequence
  Synthetic oligonucleotide
gcaatgaagttttgccgtgaatacactccg

SEQ ID NO: 336958 - DNA, 30 bp, Artificial Sequence
  Synthetic oligonucleotide
aggttttgtccaaatgttctaaagactccg

SEQ ID NO: 336959 - DNA, 30 bp, Artificial Sequence
  Synthetic oligonucleotide
tttgaaagcagcgatcataattatactccg

SEQ ID NO: 336960 - DNA, 30 bp, Artificial Sequence
  Synthetic oligonucleotide
caaatccgtgtgtgctatcccaaccctccg

SEQ ID NO: 336961 - DNA, 30 bp, Artificial Sequence
  Synthetic oligonucleotide
ccggggagttgttatcgcgaaaagcctccg

SEQ ID NO: 336962 - DNA, 30 bp, Artificial Sequence
  Synthetic oligonucleotide
ggcattggaaacccctcgctttcgcctccg

SEQ ID NO: 336963 - DNA, 30 bp, Artificial Sequence
  Synthetic oligonucleotide
aggcaggggattgaggaacggcggcctccg

SEQ ID NO: 336964 - DNA, 30 bp, Artificial Sequence
  Synthetic oligonucleotide
tagtcgctcggctcaggatttgtgcctccg

SEQ ID NO: 336965 - DNA, 30 bp, Artificial Sequence
  Synthetic oligonucleotide
taacagcacagaattgtccgggatcctccg

SEQ ID NO: 336966 - DNA, 30 bp, Artificial Sequence
  Synthetic oligonucleotide
gctacacaggtcggccggcccggtcctccg

SEQ ID NO: 336967 - DNA, 30 bp, Artificial Sequence
  Synthetic oligonucleotide
gcaaagtttccccggaaaacaaacgctccg

SEQ ID NO: 336968 - DNA, 30 bp, Artificial Sequence
  Synthetic oligonucleotide
cattcttggatgagtggatgctccgctccg

SEQ ID NO: 336969 - DNA, 30 bp, Artificial Sequence
  Synthetic oligonucleotide
gatacactgttgagtataaggagcgctccg

SEQ ID NO: 336970 - DNA, 30 bp, Artificial Sequence
  Synthetic oligonucleotide
gtttgagtttttaccccaagaattgctccg

SEQ ID NO: 336971 - DNA, 30 bp, Artificial Sequence
  Synthetic oligonucleotide
atcaccttgcgaaaggaccaccttgctccg

SEQ ID NO: 336972 - DNA, 30 bp, Artificial Sequence
  Synthetic oligonucleotide
ttacgatcaggacggtcgtgtcaatctccg

SEQ ID NO: 336973 - DNA, 30 bp, Artificial Sequence
  Synthetic oligonucleotide
agtgggtgagcaattatatatctatctccg

SEQ ID NO: 336974 - DNA, 30 bp, Artificial Sequence
  Synthetic oligonucleotide
tgcgcagatctcaacgtcaccagctctccg

SEQ ID NO: 336975 - DNA, 30 bp, Artificial Sequence
  Synthetic oligonucleotide
caaaaccagaatcccttcacgaggtctccg

SEQ ID NO: 336976 - DNA, 30 bp, Artificial Sequence
  Synthetic oligonucleotide
aataacctgagctcggagatcctgtctccg

SEQ ID NO: 336977 - DNA, 30 bp, Artificial Sequence
  Synthetic oligonucleotide
tgtcttccttcgggagggtagtatagtccg

SEQ ID NO: 336978 - DNA, 30 bp, Artificial Sequence
  Synthetic oligonucleotide
ggatgaagatgctcgtggagtcctagtccg

SEQ ID NO: 336979 - DNA, 30 bp, Artificial Sequence
  Synthetic oligonucleotide
ccacgtaaggtgtgaaaacgcgaacgtccg

SEQ ID NO: 336980 - DNA, 30 bp, Artificial Sequence
  Synthetic oligonucleotide
tgacaaagagtggcgcggagagtacgtccg

SEQ ID NO: 336981 - DNA, 30 bp, Artificial Sequence
  Synthetic oligonucleotide
cggatacgggcatcgactacgatccgtccg

SEQ ID NO: 336982 - DNA, 30 bp, Artificial Sequence
  Synthetic oligonucleotide
tcatgggcaaaccatgaagggactcgtccg

SEQ ID NO: 336983 - DNA, 30 bp, Artificial Sequence
  Synthetic oligonucleotide
tagaaaagcgcatagtgtttcgtaggtccg

SEQ ID NO: 336984 - DNA, 30 bp, Artificial Sequence
  Synthetic oligonucleotide
gcaacgatacccagcccaggtccgggtccg

SEQ ID NO: 336985 - DNA, 30 bp, Artificial Sequence
  Synthetic oligonucleotide
gacgcagatacaaagcacaaagtgggtccg

SEQ ID NO: 336986 - DNA, 30 bp, Artificial Sequence
  Synthetic oligonucleotide
acaagcagacatactattatttatggtccg

SEQ ID NO: 336987 - DNA, 30 bp, Artificial Sequence
  Synthetic oligonucleotide
ggctattacccccgcgactgacttggtccg

SEQ ID NO: 336988 - DNA, 30 bp, Artificial Sequence
  Synthetic oligonucleotide
gtggttagctgtgcgaccctcagatgtccg

SEQ ID NO: 336989 - DNA, 30 bp, Artificial Sequence
  Synthetic oligonucleotide
attgttaaaggggatctgttcggatgtccg

SEQ ID NO: 336990 - DNA, 30 bp, Artificial Sequence
  Synthetic oligonucleotide
ataacagctcatgtaactgtgggctgtccg

SEQ ID NO: 336991 - DNA, 30 bp, Artificial Sequence
  Synthetic oligonucleotide
aaaatattaggggcgcgtggaacgtgtccg

SEQ ID NO: 336992 - DNA, 30 bp, Artificial Sequence
  Synthetic oligonucleotide
ggtaatgtttgtacgagccccctgtgtccg

SEQ ID NO: 336993 - DNA, 30 bp, Artificial Sequence
  Synthetic oligonucleotide
cgaatactcgattagcagccgaattgtccg

SEQ ID NO: 336994 - DNA, 30 bp, Artificial Sequence
  Synthetic oligonucleotide
gtatttgaaggacatcgcgggacttgtccg

SEQ ID NO: 336995 - DNA, 30 bp, Artificial Sequence
  Synthetic oligonucleotide
agcagttactatgtggtttggtaaattccg

SEQ ID NO: 336996 - DNA, 30 bp, Artificial Sequence
  Synthetic oligonucleotide
tcttggagaacggcggtcagcaacattccg

SEQ ID NO: 336997 - DNA, 30 bp, Artificial Sequence
  Synthetic oligonucleotide
gcacaactgaggattgtggggcccattccg

SEQ ID NO: 336998 - DNA, 30 bp, Artificial Sequence
  Synthetic oligonucleotide
ttacgccacgcgtatcatgatggcattccg

SEQ ID NO: 336999 - DNA, 30 bp, Artificial Sequence
  Synthetic oligonucleotide
agccgtaacgccctattttcggcgattccg

SEQ ID NO: 337000 - DNA, 30 bp, Artificial Sequence
  Synthetic oligonucleotide
cataaggtatttctgccaaggaaacttccg

SEQ ID NO: 337001 - DNA, 30 bp, Artificial Sequence
  Synthetic oligonucleotide
aacagatgagaaggtatgacaggacttccg

SEQ ID NO: 337002 - DNA, 30 bp, Artificial Sequence
  Synthetic oligonucleotide
gggcgcccacagaagcacccaggccttccg

SEQ ID NO: 337003 - DNA, 30 bp, Artificial Sequence
  Synthetic oligonucleotide
cctaaatggtcccgacattggtttcttccg

SEQ ID NO: 337004 - DNA, 30 bp, Artificial Sequence
  Synthetic oligonucleotide
caggtagcaacggtttattaaccagttccg

SEQ ID NO: 337005 - DNA, 30 bp, Artificial Sequence
  Synthetic oligonucleotide
aaattgctccccatcagtccgtcagttccg

SEQ ID NO: 337006 - DNA, 30 bp, Artificial Sequence
  Synthetic oligonucleotide
ccacgattctgccaaaactcttcagttccg

SEQ ID NO: 337007 - DNA, 30 bp, Artificial Sequence
  Synthetic oligonucleotide
atcaacgtggcagaaaaatttggagttccg

SEQ ID NO: 337008 - DNA, 30 bp, Artificial Sequence
  Synthetic oligonucleotide
ttaggaagtatcttactgcctagggttccg

SEQ ID NO: 337009 - DNA, 30 bp, Artificial Sequence
  Synthetic oligonucleotide
gtaattgaagccaaacgtcattctgttccg

SEQ ID NO: 337010 - DNA, 30 bp, Artificial Sequence
  Synthetic oligonucleotide
taataggtcgctccaaactctccctttccg

SEQ ID NO: 337011 - DNA, 30 bp, Artificial Sequence
  Synthetic oligonucleotide
accgggggatcattgcaacaccagtttccg

SEQ ID NO: 337012 - DNA, 30 bp, Artificial Sequence
  Synthetic oligonucleotide
accaactccatccaaaccatatagtttccg

SEQ ID NO: 337013 - DNA, 30 bp, Artificial Sequence
  Synthetic oligonucleotide
caacaggctccaggcccttacgggtttccg

SEQ ID NO: 337014 - DNA, 30 bp, Artificial Sequence
  Synthetic oligonucleotide
ccaatatagttgagcgactcattttttccg

SEQ ID NO: 337015 - DNA, 30 bp, Artificial Sequence
  Synthetic oligonucleotide
gtatactctgtgcgcatgtctccaaaagcg

SEQ ID NO: 337016 - DNA, 30 bp, Artificial Sequence
  Synthetic oligonucleotide
ctcgatgcgttgcgcagctggggaaaagcg

SEQ ID NO: 337017 - DNA, 30 bp, Artificial Sequence
  Synthetic oligonucleotide
tcctaaatttactgccggtagttaaaagcg

SEQ ID NO: 337018 - DNA, 30 bp, Artificial Sequence
  Synthetic oligonucleotide
taatgtgcccagaatgcctataccaaagcg

SEQ ID NO: 337019 - DNA, 30 bp, Artificial Sequence
  Synthetic oligonucleotide
ccaagcgatgcgtttctaggtcgcaaagcg

SEQ ID NO: 337020 - DNA, 30 bp, Artificial Sequence
  Synthetic oligonucleotide
gtattggccacagatgcatgttcacaagcg

SEQ ID NO: 337021 - DNA, 30 bp, Artificial Sequence
  Synthetic oligonucleotide
agttgggagttccgtagccggctacaagcg

SEQ ID NO: 337022 - DNA, 30 bp, Artificial Sequence
  Synthetic oligonucleotide
agtcccaaaatcggggttatgcgccaagcg

SEQ ID NO: 337023 - DNA, 30 bp, Artificial Sequence
  Synthetic oligonucleotide
gccgcgataccgcagagagtaatccaagcg

SEQ ID NO: 337024 - DNA, 29 bp, Artificial Sequence
  Synthetic oligonucleotide
aaaaactagagttagaccgaggtcaagcg

SEQ ID NO: 337025 - DNA, 30 bp, Artificial Sequence
  Synthetic oligonucleotide
tcgggaatggcaattttgccccgagaagcg

SEQ ID NO: 337026 - DNA, 30 bp, Artificial Sequence
  Synthetic oligonucleotide
cctcagttctcgcctcttgacagcgaagcg

SEQ ID NO: 337027 - DNA, 30 bp, Artificial Sequence
  Synthetic oligonucleotide
ggtgcgtacatcactgaaacgctcgaagcg

SEQ ID NO: 337028 - DNA, 30 bp, Artificial Sequence
  Synthetic oligonucleotide
cgctcttcaggccagaattcaaaggaagcg

SEQ ID NO: 337029 - DNA, 30 bp, Artificial Sequence
  Synthetic oligonucleotide
cgaaggatgccgtggcggcttcgtgaagcg

SEQ ID NO: 337030 - DNA, 30 bp, Artificial Sequence
  Synthetic oligonucleotide
ttgcattaagctgttattaaggaataagcg

SEQ ID NO: 337031 - DNA, 30 bp, Artificial Sequence
  Synthetic oligonucleotide
tgtcggccacctacgtatggtcgataagcg

SEQ ID NO: 337032 - DNA, 30 bp, Artificial Sequence
  Synthetic oligonucleotide
acacgctagcatcagcggaaatcctaagcg

SEQ ID NO: 337033 - DNA, 30 bp, Artificial Sequence
  Synthetic oligonucleotide
aatgtgcgttgtcacctaccaaagtaagcg

SEQ ID NO: 337034 - DNA, 30 bp, Artificial Sequence
  Synthetic oligonucleotide
aggtcttgatctagagcttcaaagtaagcg

SEQ ID NO: 337035 - DNA, 30 bp, Artificial Sequence
  Synthetic oligonucleotide
agaaccgctgttctaggggtcgattaagcg

SEQ ID NO: 337036 - DNA, 30 bp, Artificial Sequence
  Synthetic oligonucleotide
gacaactgatgtgtacggtcctcaacagcg

SEQ ID NO: 337037 - DNA, 30 bp, Artificial Sequence
  Synthetic oligonucleotide
cacaagctgtaggccaaaatcatcacagcg

SEQ ID NO: 337038 - DNA, 30 bp, Artificial Sequence
  Synthetic oligonucleotide
cttcttttgctttttcgtgtactcacagcg

SEQ ID NO: 337039 - DNA, 30 bp, Artificial Sequence
  Synthetic oligonucleotide
ggcgatccaaggatgtcggtggcgacagcg

SEQ ID NO: 337040 - DNA, 30 bp, Artificial Sequence
  Synthetic oligonucleotide
gctgaaccgattatttattgtaggacagcg

SEQ ID NO: 337041 - DNA, 30 bp, Artificial Sequence
  Synthetic oligonucleotide
gactgatcgtcgtgtgtcgacgggacagcg

SEQ ID NO: 337042 - DNA, 30 bp, Artificial Sequence
  Synthetic oligonucleotide
atgctgaaacctatgactctgtaaccagcg

SEQ ID NO: 337043 - DNA, 30 bp, Artificial Sequence
  Synthetic oligonucleotide
ggcaccggcgccgccctgggacgaccagcg

SEQ ID NO: 337044 - DNA, 30 bp, Artificial Sequence
  Synthetic oligonucleotide
acgagctggtgcacgcaatttttaccagcg

SEQ ID NO: 337045 - DNA, 30 bp, Artificial Sequence
  Synthetic oligonucleotide
gagtagtggtcaggctgccggaatccagcg

SEQ ID NO: 337046 - DNA, 30 bp, Artificial Sequence
  Synthetic oligonucleotide
gccctaacctccagtctagaaaaagcagcg

SEQ ID NO: 337047 - DNA, 30 bp, Artificial Sequence
  Synthetic oligonucleotide
acggaaaccttatccgggggcacagcagcg

SEQ ID NO: 337048 - DNA, 30 bp, Artificial Sequence
  Synthetic oligonucleotide
atgtccaccagccggaaatgaaacgcagcg

SEQ ID NO: 337049 - DNA, 30 bp, Artificial Sequence
  Synthetic oligonucleotide
cgcctgagagttcgacgaggcggcgcagcg

SEQ ID NO: 337050 - DNA, 30 bp, Artificial Sequence
  Synthetic oligonucleotide
tgacgttggcccaactcgtaagtcgcagcg

SEQ ID NO: 337051 - DNA, 30 bp, Artificial Sequence
  Synthetic oligonucleotide
ataagctcacgtgtagtgggcgtcgcagcg

SEQ ID NO: 337052 - DNA, 30 bp, Artificial Sequence
  Synthetic oligonucleotide
cctgaccaatatgtagtgcagcctgcagcg

SEQ ID NO: 337053 - DNA, 30 bp, Artificial Sequence
  Synthetic oligonucleotide
ttgcgggcagaattgatgttgtctgcagcg

SEQ ID NO: 337054 - DNA, 30 bp, Artificial Sequence
  Synthetic oligonucleotide
aactcagatgttcatagaaaaattgcagcg

SEQ ID NO: 337055 - DNA, 30 bp, Artificial Sequence
  Synthetic oligonucleotide
gatactgatcatgacggttaagcgtcagcg

SEQ ID NO: 337056 - DNA, 30 bp, Artificial Sequence
  Synthetic oligonucleotide
cgtcctgattttgaactaagaacttcagcg

SEQ ID NO: 337057 - DNA, 30 bp, Artificial Sequence
  Synthetic oligonucleotide
cgacggtccgattgattcgttgtttcagcg

SEQ ID NO: 337058 - DNA, 30 bp, Artificial Sequence
  Synthetic oligonucleotide
tcataccgctcgtcccggtaggcaagagcg

SEQ ID NO: 337059 - DNA, 30 bp, Artificial Sequence
  Synthetic oligonucleotide
ttcggctcttgattcgtctaaggaagagcg

SEQ ID NO: 337060 - DNA, 30 bp, Artificial Sequence
  Synthetic oligonucleotide
gtgttcttggatagtcaattttgcagagcg

SEQ ID NO: 337061 - DNA, 30 bp, Artificial Sequence
  Synthetic oligonucleotide
cagaacgacatgcgggttctgggtagagcg

SEQ ID NO: 337062 - DNA, 30 bp, Artificial Sequence
  Synthetic oligonucleotide
cagtccacggggtttgttgtcaaacgagcg

SEQ ID NO: 337063 - DNA, 30 bp, Artificial Sequence
  Synthetic oligonucleotide
gagatccggtgagttcggtgctaacgagcg

SEQ ID NO: 337064 - DNA, 30 bp, Artificial Sequence
  Synthetic oligonucleotide
tggcgccacggtcaacgtggttaacgagcg

SEQ ID NO: 337065 - DNA, 30 bp, Artificial Sequence
  Synthetic oligonucleotide
cgtgtatgtctgcagacgaggcgccgagcg

SEQ ID NO: 337066 - DNA, 30 bp, Artificial Sequence
  Synthetic oligonucleotide
gtcgcgtagatgactcatagaacgcgagcg

SEQ ID NO: 337067 - DNA, 30 bp, Artificial Sequence
  Synthetic oligonucleotide
gcccggtgatgaggctaaaggtggcgagcg

SEQ ID NO: 337068 - DNA, 30 bp, Artificial Sequence
  Synthetic oligonucleotide
cgatatgctcgcgcaatacagtatcgagcg

SEQ ID NO: 337069 - DNA, 30 bp, Artificial Sequence
  Synthetic oligonucleotide
ctcgcatattagcaatgccagcctcgagcg

SEQ ID NO: 337070 - DNA, 30 bp, Artificial Sequence
  Synthetic oligonucleotide
gtgtccccatgcaatcgcgtttgtcgagcg

SEQ ID NO: 337071 - DNA, 30 bp, Artificial Sequence
  Synthetic oligonucleotide
ctggttacagtgggtctcgttcggggagcg

SEQ ID NO: 337072 - DNA, 30 bp, Artificial Sequence
  Synthetic oligonucleotide
ttaactaagcgttattctggcactggagcg

SEQ ID NO: 337073 - DNA, 30 bp, Artificial Sequence
  Synthetic oligonucleotide
agtgatagagtatccctcggtccatgagcg

SEQ ID NO: 337074 - DNA, 30 bp, Artificial Sequence
  Synthetic oligonucleotide
gcgaattgcggccctctggttgcatgagcg

SEQ ID NO: 337075 - DNA, 30 bp, Artificial Sequence
  Synthetic oligonucleotide
cagtttccggactcacgggtaatatgagcg

SEQ ID NO: 337076 - DNA, 30 bp, Artificial Sequence
  Synthetic oligonucleotide
gctggggactccctaggtggtttatgagcg

SEQ ID NO: 337077 - DNA, 30 bp, Artificial Sequence
  Synthetic oligonucleotide
tgcggtaagtgagctctcgctccctgagcg

SEQ ID NO: 337078 - DNA, 30 bp, Artificial Sequence
  Synthetic oligonucleotide
ggaatcgatcacctttttgattagtgagcg

SEQ ID NO: 337079 - DNA, 30 bp, Artificial Sequence
  Synthetic oligonucleotide
ggcgtgactgggcatctcgtgctgtgagcg

SEQ ID NO: 337080 - DNA, 30 bp, Artificial Sequence
  Synthetic oligonucleotide
aacctgtgggcgcgcgagcacttgtgagcg

SEQ ID NO: 337081 - DNA, 30 bp, Artificial Sequence
  Synthetic oligonucleotide
actccgctaatggtaaccgtgtgaatagcg

SEQ ID NO: 337082 - DNA, 30 bp, Artificial Sequence
  Synthetic oligonucleotide
aatttctgatctacaaggacaccgatagcg

SEQ ID NO: 337083 - DNA, 30 bp, Artificial Sequence
  Synthetic oligonucleotide
aaaacgattagcatgggtcttttgatagcg

SEQ ID NO: 337084 - DNA, 30 bp, Artificial Sequence
  Synthetic oligonucleotide
taggagtacaacatatacaaccatatagcg

SEQ ID NO: 337085 - DNA, 30 bp, Artificial Sequence
  Synthetic oligonucleotide
aaatattgatattgtaagcgaagtatagcg

SEQ ID NO: 337086 - DNA, 30 bp, Artificial Sequence
  Synthetic oligonucleotide
cttggacactgtcgcctggcgcgtatagcg

SEQ ID NO: 337087 - DNA, 30 bp, Artificial Sequence
  Synthetic oligonucleotide
tccccgcgcaaagagggatctcgtatagcg

SEQ ID NO: 337088 - DNA, 30 bp, Artificial Sequence
  Synthetic oligonucleotide
attagctctcaatcaggccaggtactagcg

SEQ ID NO: 337089 - DNA, 30 bp, Artificial Sequence
  Synthetic oligonucleotide
ccggcatactaccccgacggggtactagcg

SEQ ID NO: 337090 - DNA, 30 bp, Artificial Sequence
  Synthetic oligonucleotide
cgcctatgtcggcggccttttaagctagcg

SEQ ID NO: 337091 - DNA, 30 bp, Artificial Sequence
  Synthetic oligonucleotide
gcactacaaaccatgacttgcgacgtagcg

SEQ ID NO: 337092 - DNA, 30 bp, Artificial Sequence
  Synthetic oligonucleotide
ggtagagtccgggaccatgccggggtagcg

SEQ ID NO: 337093 - DNA, 30 bp, Artificial Sequence
  Synthetic oligonucleotide
ttccggaggcagactaggtacagtgtagcg

SEQ ID NO: 337094 - DNA, 30 bp, Artificial Sequence
  Synthetic oligonucleotide
acaaagggtgacgatataaatgttgtagcg

SEQ ID NO: 337095 - DNA, 30 bp, Artificial Sequence
  Synthetic oligonucleotide
gttcggtgaactacgaccgcttggttagcg

SEQ ID NO: 337096 - DNA, 30 bp, Artificial Sequence
  Synthetic oligonucleotide
cggtagattcggacaatttgacaaaacgcg

SEQ ID NO: 337097 - DNA, 30 bp, Artificial Sequence
  Synthetic oligonucleotide
cttactggcaccgtgacggccgaaaacgcg

SEQ ID NO: 337098 - DNA, 30 bp, Artificial Sequence
  Synthetic oligonucleotide
tcagacggtcctacgcgtatggaaaacgcg

SEQ ID NO: 337099 - DNA, 30 bp, Artificial Sequence
  Synthetic oligonucleotide
gactcaggaataaactttgtaaacaacgcg

SEQ ID NO: 337100 - DNA, 30 bp, Artificial Sequence
  Synthetic oligonucleotide
gacatgaccccatgggcgaaagccaacgcg

SEQ ID NO: 337101 - DNA, 30 bp, Artificial Sequence
  Synthetic oligonucleotide
aaagtagattgatcggtagatcgcaacgcg

SEQ ID NO: 337102 - DNA, 30 bp, Artificial Sequence
  Synthetic oligonucleotide
ccgggagttgttataagcctcaagaacgcg

SEQ ID NO: 337103 - DNA, 30 bp, Artificial Sequence
  Synthetic oligonucleotide
cttttggaacacggagaacatccgaacgcg

SEQ ID NO: 337104 - DNA, 30 bp, Artificial Sequence
  Synthetic oligonucleotide
aaggggtttacgttaagccgcttgaacgcg

SEQ ID NO: 337105 - DNA, 30 bp, Artificial Sequence
  Synthetic oligonucleotide
tgaactgccactgccccagtacataacgcg

SEQ ID NO: 337106 - DNA, 30 bp, Artificial Sequence
  Synthetic oligonucleotide
ggacaacttcacccttcttaggataacgcg

SEQ ID NO: 337107 - DNA, 30 bp, Artificial Sequence
  Synthetic oligonucleotide
ataggcatttgactgaggtaggaacacgcg

SEQ ID NO: 337108 - DNA, 30 bp, Artificial Sequence
  Synthetic oligonucleotide
ctgaaagaggacactcctgacagacacgcg

SEQ ID NO: 337109 - DNA, 30 bp, Artificial Sequence
  Synthetic oligonucleotide
acgcggaacgggacaatgtttcgacacgcg

SEQ ID NO: 337110 - DNA, 30 bp, Artificial Sequence
  Synthetic oligonucleotide
cactacctcgggatacggaactaccacgcg

SEQ ID NO: 337111 - DNA, 30 bp, Artificial Sequence
  Synthetic oligonucleotide
acattaatttgggcatggtgactccacgcg

SEQ ID NO: 337112 - DNA, 30 bp, Artificial Sequence
  Synthetic oligonucleotide
tgtcttcaggacgtgccaactaatcacgcg

SEQ ID NO: 337113 - DNA, 30 bp, Artificial Sequence
  Synthetic oligonucleotide
cgcgtcctaatgaaaaacccgtatcacgcg

SEQ ID NO: 337114 - DNA, 30 bp, Artificial Sequence
  Synthetic oligonucleotide
tatctgaattagcatactcaccgtcacgcg

SEQ ID NO: 337115 - DNA, 30 bp, Artificial Sequence
  Synthetic oligonucleotide
tcgatttatagggagggagatattcacgcg

SEQ ID NO: 337116 - DNA, 30 bp, Artificial Sequence
  Synthetic oligonucleotide
tttttggggcgacaagtaacaacagacgcg

SEQ ID NO: 337117 - DNA, 30 bp, Artificial Sequence
  Synthetic oligonucleotide
tccgtggggtaatttgcaattgaggacgcg

SEQ ID NO: 337118 - DNA, 30 bp, Artificial Sequence
  Synthetic oligonucleotide
ccgccacgccggagttagagaaactacgcg

SEQ ID NO: 337119 - DNA, 30 bp, Artificial Sequence
  Synthetic oligonucleotide
tggtatcggaaagtctgttccccctacgcg

SEQ ID NO: 337120 - DNA, 30 bp, Artificial Sequence
  Synthetic oligonucleotide
gttttgggcaatgacttcgtctcctacgcg

SEQ ID NO: 337121 - DNA, 30 bp, Artificial Sequence
  Synthetic oligonucleotide
gtccaaacgctctcacatccaagctacgcg

SEQ ID NO: 337122 - DNA, 30 bp, Artificial Sequence
  Synthetic oligonucleotide
cgcttatcgatcgtagctgcaacgtacgcg

SEQ ID NO: 337123 - DNA, 30 bp, Artificial Sequence
  Synthetic oligonucleotide
ggtacatgaagttggcttatgtcttacgcg

SEQ ID NO: 337124 - DNA, 30 bp, Artificial Sequence
  Synthetic oligonucleotide
tgctctggctatttgcatggcatttacgcg

SEQ ID NO: 337125 - DNA, 30 bp, Artificial Sequence
  Synthetic oligonucleotide
accacgcgcgaaacgctttcagaaaccgcg

SEQ ID NO: 337126 - DNA, 30 bp, Artificial Sequence
  Synthetic oligonucleotide
gagatgctaatttacgcatccgacaccgcg

SEQ ID NO: 337127 - DNA, 30 bp, Artificial Sequence
  Synthetic oligonucleotide
ttgatcggtggatttgagagcaagaccgcg

SEQ ID NO: 337128 - DNA, 30 bp, Artificial Sequence
  Synthetic oligonucleotide
ttgtatcttaaattaacgaaaattaccgcg

SEQ ID NO: 337129 - DNA, 30 bp, Artificial Sequence
  Synthetic oligonucleotide
tggtccgctaactctgttgcgacacccgcg

SEQ ID NO: 337130 - DNA, 30 bp, Artificial Sequence
  Synthetic oligonucleotide
aatacgttacggcattcagtgatagccgcg

SEQ ID NO: 337131 - DNA, 30 bp, Artificial Sequence
  Synthetic oligonucleotide
aatcacgacgataccctgcgcagggccgcg

SEQ ID NO: 337132 - DNA, 30 bp, Artificial Sequence
  Synthetic oligonucleotide
tgtaaattagtttatgtgtcctatgccgcg

SEQ ID NO: 337133 - DNA, 30 bp, Artificial Sequence
  Synthetic oligonucleotide
cggccatcttcgggtaacgaaaactccgcg

SEQ ID NO: 337134 - DNA, 30 bp, Artificial Sequence
  Synthetic oligonucleotide
aagccggacccgaaccggcttgcgtccgcg

SEQ ID NO: 337135 - DNA, 30 bp, Artificial Sequence
  Synthetic oligonucleotide
cagtttaagcaatgacgatctagttccgcg

SEQ ID NO: 337136 - DNA, 30 bp, Artificial Sequence
  Synthetic oligonucleotide
cggatttgggtaccgacttttccaagcgcg

SEQ ID NO: 337137 - DNA, 30 bp, Artificial Sequence
  Synthetic oligonucleotide
ctaacctatatatgatagaatagaagcgcg

SEQ ID NO: 337138 - DNA, 30 bp, Artificial Sequence
  Synthetic oligonucleotide
gaccatgatgcaaaaaattgtaggagcgcg

SEQ ID NO: 337139 - DNA, 30 bp, Artificial Sequence
  Synthetic oligonucleotide
acttagcgggagacccggagggtgagcgcg

SEQ ID NO: 337140 - DNA, 30 bp, Artificial Sequence
  Synthetic oligonucleotide
gcaatccaatcgtacccaaagcaacgcgcg

SEQ ID NO: 337141 - DNA, 30 bp, Artificial Sequence
  Synthetic oligonucleotide
gttccgctacagtcgtctagcagccgcgcg

SEQ ID NO: 337142 - DNA, 30 bp, Artificial Sequence
  Synthetic oligonucleotide
tagtgcaacccccgtatcagtacgcgcgcg

SEQ ID NO: 337143 - DNA, 30 bp, Artificial Sequence
  Synthetic oligonucleotide
agtccagatacatcggcatggcttcgcgcg

SEQ ID NO: 337144 - DNA, 30 bp, Artificial Sequence
  Synthetic oligonucleotide
cacctaggcgggcgcgacgcaacaggcgcg

SEQ ID NO: 337145 - DNA, 30 bp, Artificial Sequence
  Synthetic oligonucleotide
atagatagagccgggtctaaaagcggcgcg

SEQ ID NO: 337146 - DNA, 30 bp, Artificial Sequence
  Synthetic oligonucleotide
gaagctgctaaaataagctgtctgggcgcg

SEQ ID NO: 337147 - DNA, 30 bp, Artificial Sequence
  Synthetic oligonucleotide
ttgcatgcccgaagatatcaggatggcgcg

SEQ ID NO: 337148 - DNA, 30 bp, Artificial Sequence
  Synthetic oligonucleotide
acacctacgacatttgttatttggtgcgcg

SEQ ID NO: 337149 - DNA, 30 bp, Artificial Sequence
  Synthetic oligonucleotide
gagaacgtttatctcaggataatgtgcgcg

SEQ ID NO: 337150 - DNA, 30 bp, Artificial Sequence
  Synthetic oligonucleotide
taggtttcgaactcgaagctgtgttgcgcg

SEQ ID NO: 337151 - DNA, 30 bp, Artificial Sequence
  Synthetic oligonucleotide
tatcctgggaccgaggatatcataatcgcg

SEQ ID NO: 337152 - DNA, 30 bp, Artificial Sequence
  Synthetic oligonucleotide
aacgaacatggtgctggacgtgacatcgcg

SEQ ID NO: 337153 - DNA, 30 bp, Artificial Sequence
  Synthetic oligonucleotide
ctcggttcagtcatcggataagccatcgcg

SEQ ID NO: 337154 - DNA, 30 bp, Artificial Sequence
  Synthetic oligonucleotide
gaagagtaagtgtctaaagaagatatcgcg

SEQ ID NO: 337155 - DNA, 30 bp, Artificial Sequence
  Synthetic oligonucleotide
tgaatgacgttgcacaccgcaaaactcgcg

SEQ ID NO: 337156 - DNA, 30 bp, Artificial Sequence
  Synthetic oligonucleotide
gcaaggccacctataccgccggcgctcgcg

SEQ ID NO: 337157 - DNA, 30 bp, Artificial Sequence
  Synthetic oligonucleotide
tcgcctattaaacacagcgttattctcgcg

SEQ ID NO: 337158 - DNA, 30 bp, Artificial Sequence
  Synthetic oligonucleotide
cgttttcttgcagttggtgtttgagtcgcg

SEQ ID NO: 337159 - DNA, 30 bp, Artificial Sequence
  Synthetic oligonucleotide
ggtgccgcgaccgagattctttacgtcgcg

SEQ ID NO: 337160 - DNA, 30 bp, Artificial Sequence
  Synthetic oligonucleotide
caaatactatgttagacggatgcggtcgcg

SEQ ID NO: 337161 - DNA, 30 bp, Artificial Sequence
  Synthetic oligonucleotide
atttacacaaacaaagggatttcggtcgcg

SEQ ID NO: 337162 - DNA, 30 bp, Artificial Sequence
  Synthetic oligonucleotide
ggtcgggaatttagcaataattgtgtcgcg

SEQ ID NO: 337163 - DNA, 30 bp, Artificial Sequence
  Synthetic oligonucleotide
ttgggttaagattaaagtatactattcgcg

SEQ ID NO: 337164 - DNA, 30 bp, Artificial Sequence
  Synthetic oligonucleotide
cacagtcacctctttcgtgaatggttcgcg

SEQ ID NO: 337165 - DNA, 30 bp, Artificial Sequence
  Synthetic oligonucleotide
cgcacgtccccataacgtgcctggttcgcg

SEQ ID NO: 337166 - DNA, 30 bp, Artificial Sequence
  Synthetic oligonucleotide
gcattgggagggtcctacgcatctttcgcg

SEQ ID NO: 337167 - DNA, 30 bp, Artificial Sequence
  Synthetic oligonucleotide
ttcatacctccgctcatacctccaaaggcg

SEQ ID NO: 337168 - DNA, 30 bp, Artificial Sequence
  Synthetic oligonucleotide
tgaagtgtcggcggcaccccatgaaaggcg

SEQ ID NO: 337169 - DNA, 30 bp, Artificial Sequence
  Synthetic oligonucleotide
gagcgtgccaaagttttgagattaaaggcg

SEQ ID NO: 337170 - DNA, 30 bp, Artificial Sequence
  Synthetic oligonucleotide
ggcacccctactcgccatatgggcaaggcg

SEQ ID NO: 337171 - DNA, 30 bp, Artificial Sequence
  Synthetic oligonucleotide
aaccgtaaggttcttcaatagactaaggcg

SEQ ID NO: 337172 - DNA, 30 bp, Artificial Sequence
  Synthetic oligonucleotide
tatagttcgtagcctgtccacacacaggcg

SEQ ID NO: 337173 - DNA, 30 bp, Artificial Sequence
  Synthetic oligonucleotide
atcggaccgctaccctttaatgtacaggcg

SEQ ID NO: 337174 - DNA, 30 bp, Artificial Sequence
  Synthetic oligonucleotide
cggctgaccccataaggggctaatcaggcg

SEQ ID NO: 337175 - DNA, 30 bp, Artificial Sequence
  Synthetic oligonucleotide
tgatgcccctgcgtaatccacgttcaggcg

SEQ ID NO: 337176 - DNA, 30 bp, Artificial Sequence
  Synthetic oligonucleotide
ttggtgcagccgactgggacgccagaggcg

SEQ ID NO: 337177 - DNA, 30 bp, Artificial Sequence
  Synthetic oligonucleotide
gtttaacatgctcattgggcggcggaggcg

SEQ ID NO: 337178 - DNA, 30 bp, Artificial Sequence
  Synthetic oligonucleotide
ttaaaaaaaggggttacttgaagggaggcg

SEQ ID NO: 337179 - DNA, 30 bp, Artificial Sequence
  Synthetic oligonucleotide
tcgaccagcccgctgtcggcgtgataggcg

SEQ ID NO: 337180 - DNA, 30 bp, Artificial Sequence
  Synthetic oligonucleotide
gtagtacagtcgcgttaggggaactaggcg

SEQ ID NO: 337181 - DNA, 30 bp, Artificial Sequence
  Synthetic oligonucleotide
gataagttgaacgctcagggggcctaggcg

SEQ ID NO: 337182 - DNA, 30 bp, Artificial Sequence
  Synthetic oligonucleotide
gacgaccccgctgcatgcttgtcgtaggcg

SEQ ID NO: 337183 - DNA, 30 bp, Artificial Sequence
  Synthetic oligonucleotide
aagttaagataaaagtcttgttcgtaggcg

SEQ ID NO: 337184 - DNA, 30 bp, Artificial Sequence
  Synthetic oligonucleotide
caaactgagtacggcagaaagttttaggcg

SEQ ID NO: 337185 - DNA, 30 bp, Artificial Sequence
  Synthetic oligonucleotide
ttcgatggattagatgacaatatcacggcg

SEQ ID NO: 337186 - DNA, 30 bp, Artificial Sequence
  Synthetic oligonucleotide
gacctgcccagttcaaaagccttcacggcg

SEQ ID NO: 337187 - DNA, 30 bp, Artificial Sequence
  Synthetic oligonucleotide
ctgtactcacgcgagcttgacgggacggcg

SEQ ID NO: 337188 - DNA, 30 bp, Artificial Sequence
  Synthetic oligonucleotide
caggtggcgtttaggggtcaatatacggcg

SEQ ID NO: 337189 - DNA, 30 bp, Artificial Sequence
  Synthetic oligonucleotide
tgacagtaggttccgtgaaggattacggcg

SEQ ID NO: 337190 - DNA, 30 bp, Artificial Sequence
  Synthetic oligonucleotide
ggaaccccgagcgcgggcggtataccggcg

SEQ ID NO: 337191 - DNA, 30 bp, Artificial Sequence
  Synthetic oligonucleotide
atcggaccctcaattactgtgacagcggcg

SEQ ID NO: 337192 - DNA, 30 bp, Artificial Sequence
  Synthetic oligonucleotide
ctacacaggtcatctttgaggcaatcggcg

SEQ ID NO: 337193 - DNA, 30 bp, Artificial Sequence
  Synthetic oligonucleotide
gccagtccccatgttcctcctccgtcggcg

SEQ ID NO: 337194 - DNA, 30 bp, Artificial Sequence
  Synthetic oligonucleotide
tctgaaatttgggtgtgcttactgtcggcg

SEQ ID NO: 337195 - DNA, 30 bp, Artificial Sequence
  Synthetic oligonucleotide
tatgcatcgcgatgcataacggcttcggcg

SEQ ID NO: 337196 - DNA, 30 bp, Artificial Sequence
  Synthetic oligonucleotide
cccgaaggaactagagcgattaaaagggcg

SEQ ID NO: 337197 - DNA, 30 bp, Artificial Sequence
  Synthetic oligonucleotide
acaggtataggttttccgaagccacgggcg

SEQ ID NO: 337198 - DNA, 30 bp, Artificial Sequence
  Synthetic oligonucleotide
ttcacagggagatagctgttgatacgggcg

SEQ ID NO: 337199 - DNA, 30 bp, Artificial Sequence
  Synthetic oligonucleotide
ttcgtgcttgcggtatcggacggccgggcg

SEQ ID NO: 337200 - DNA, 30 bp, Artificial Sequence
  Synthetic oligonucleotide
ggctacacgggtaatgactcgggccgggcg

SEQ ID NO: 337201 - DNA, 30 bp, Artificial Sequence
  Synthetic oligonucleotide
aaaagactggcgattttttccccgcgggcg

SEQ ID NO: 337202 - DNA, 30 bp, Artificial Sequence
  Synthetic oligonucleotide
aagatatattatcgtataaatccgcgggcg

SEQ ID NO: 337203 - DNA, 30 bp, Artificial Sequence
  Synthetic oligonucleotide
ataggaatggtaagatgggcagttcgggcg

SEQ ID NO: 337204 - DNA, 30 bp, Artificial Sequence
  Synthetic oligonucleotide
gccacatggcatatgcatacacgcggggcg

SEQ ID NO: 337205 - DNA, 30 bp, Artificial Sequence
  Synthetic oligonucleotide
aagcggagctcttctgtgaaactcggggcg

SEQ ID NO: 337206 - DNA, 30 bp, Artificial Sequence
  Synthetic oligonucleotide
tagggtagggcggatgcacgtcagggggcg

SEQ ID NO: 337207 - DNA, 30 bp, Artificial Sequence
  Synthetic oligonucleotide
gacttgcggccagcaaggtctcggggggcg

SEQ ID NO: 337208 - DNA, 30 bp, Artificial Sequence
  Synthetic oligonucleotide
tcacgtagctcctacggggcgccatgggcg

SEQ ID NO: 337209 - DNA, 30 bp, Artificial Sequence
  Synthetic oligonucleotide
ctggtgtggttccggtgacctggctgggcg

SEQ ID NO: 337210 - DNA, 30 bp, Artificial Sequence
  Synthetic oligonucleotide
agagattgggggcatggcctttggtgggcg

SEQ ID NO: 337211 - DNA, 30 bp, Artificial Sequence
  Synthetic oligonucleotide
aaacagtgtagtgaaagcaatgccatggcg

SEQ ID NO: 337212 - DNA, 30 bp, Artificial Sequence
  Synthetic oligonucleotide
tacattaaaacaccgtggggaatcatggcg

SEQ ID NO: 337213 - DNA, 30 bp, Artificial Sequence
  Synthetic oligonucleotide
tttcacattagacaggataacaagatggcg

SEQ ID NO: 337214 - DNA, 30 bp, Artificial Sequence
  Synthetic oligonucleotide
atacctgatacgatgtacacgtcgatggcg

SEQ ID NO: 337215 - DNA, 30 bp, Artificial Sequence
  Synthetic oligonucleotide
ctctgtggagggagcgccggccggatggcg

SEQ ID NO: 337216 - DNA, 30 bp, Artificial Sequence
  Synthetic oligonucleotide
gcatcggcaggtgccgagtgtaacctggcg

SEQ ID NO: 337217 - DNA, 30 bp, Artificial Sequence
  Synthetic oligonucleotide
gaaatggtgagtggcctggttcgcctggcg

SEQ ID NO: 337218 - DNA, 31 bp, Artificial Sequence
  Synthetic oligonucleotide
atgcgagattcaagatcgctgtactctggcg

SEQ ID NO: 337219 - DNA, 30 bp, Artificial Sequence
  Synthetic oligonucleotide
gggaaccaacttcctaatgcttttctggcg

SEQ ID NO: 337220 - DNA, 30 bp, Artificial Sequence
  Synthetic oligonucleotide
cgctccgccggcacggttacaaaagtggcg

SEQ ID NO: 337221 - DNA, 30 bp, Artificial Sequence
  Synthetic oligonucleotide
aattcgcttaattcaggtcgttgtgtggcg

SEQ ID NO: 337222 - DNA, 30 bp, Artificial Sequence
  Synthetic oligonucleotide
taaaatttacgttaatcaaagattgtggcg

SEQ ID NO: 337223 - DNA, 30 bp, Artificial Sequence
  Synthetic oligonucleotide
ttataacccctgcggagttccgaattggcg

SEQ ID NO: 337224 - DNA, 30 bp, Artificial Sequence
  Synthetic oligonucleotide
gtttctccttactgacccgactcattggcg

SEQ ID NO: 337225 - DNA, 30 bp, Artificial Sequence
  Synthetic oligonucleotide
tttaaatccccaggggaacagatattggcg

SEQ ID NO: 337226 - DNA, 30 bp, Artificial Sequence
  Synthetic oligonucleotide
tacacgtcggcaatgtgttgattattggcg

SEQ ID NO: 337227 - DNA, 30 bp, Artificial Sequence
  Synthetic oligonucleotide
tccaggcggcagcataaatcgtggttggcg

SEQ ID NO: 337228 - DNA, 30 bp, Artificial Sequence
  Synthetic oligonucleotide
gttaatagaatggtgtagaaacatttggcg

SEQ ID NO: 337229 - DNA, 30 bp, Artificial Sequence
  Synthetic oligonucleotide
aagttgatcgacactccgcagaacaatgcg

SEQ ID NO: 337230 - DNA, 30 bp, Artificial Sequence
  Synthetic oligonucleotide
cataaatatatatggatccttatcaatgcg

SEQ ID NO: 337231 - DNA, 30 bp, Artificial Sequence
  Synthetic oligonucleotide
aagagttcgcacatcgtttaatcgaatgcg

SEQ ID NO: 337232 - DNA, 30 bp, Artificial Sequence
  Synthetic oligonucleotide
tgtgggcatcgaggacccttcgtgaatgcg

SEQ ID NO: 337233 - DNA, 30 bp, Artificial Sequence
  Synthetic oligonucleotide
actagacttctatactttttccataatgcg

SEQ ID NO: 337234 - DNA, 30 bp, Artificial Sequence
  Synthetic oligonucleotide
tctcgttgagtcttgaatgagtttaatgcg

SEQ ID NO: 337235 - DNA, 30 bp, Artificial Sequence
  Synthetic oligonucleotide
atcgggtcacacgaacgctagaaccatgcg

SEQ ID NO: 337236 - DNA, 30 bp, Artificial Sequence
  Synthetic oligonucleotide
ccatatatatcactatagtgctcgcatgcg

SEQ ID NO: 337237 - DNA, 30 bp, Artificial Sequence
  Synthetic oligonucleotide
caggtcgatctcagcaggattgggcatgcg

SEQ ID NO: 337238 - DNA, 30 bp, Artificial Sequence
  Synthetic oligonucleotide
gccaacacaattctgcgattgatgcatgcg

SEQ ID NO: 337239 - DNA, 30 bp, Artificial Sequence
  Synthetic oligonucleotide
ggcgggttcgcggcgtgtaaaattcatgcg

SEQ ID NO: 337240 - DNA, 30 bp, Artificial Sequence
  Synthetic oligonucleotide
aacttgttcttacgcagtttgggagatgcg

SEQ ID NO: 337241 - DNA, 30 bp, Artificial Sequence
  Synthetic oligonucleotide
gtattagcgaaagattgcatgtgagatgcg

SEQ ID NO: 337242 - DNA, 30 bp, Artificial Sequence
  Synthetic oligonucleotide
taatctcctagaatggtgcatgaggatgcg

SEQ ID NO: 337243 - DNA, 30 bp, Artificial Sequence
  Synthetic oligonucleotide
ggcgcatctgacataaaattagtggatgcg

SEQ ID NO: 337244 - DNA, 30 bp, Artificial Sequence
  Synthetic oligonucleotide
ttttgcaagaacgagaagtaggttgatgcg

SEQ ID NO: 337245 - DNA, 30 bp, Artificial Sequence
  Synthetic oligonucleotide
tagtaatagcgtatcactctgtttgatgcg

SEQ ID NO: 337246 - DNA, 30 bp, Artificial Sequence
  Synthetic oligonucleotide
tccacgctctcaaatggcacaagatatgcg

SEQ ID NO: 337247 - DNA, 30 bp, Artificial Sequence
  Synthetic oligonucleotide
ctcattcattgaaaggctcagggatatgcg

SEQ ID NO: 337248 - DNA, 30 bp, Artificial Sequence
  Synthetic oligonucleotide
cacttccatccaggccgtcgagagtatgcg

SEQ ID NO: 337249 - DNA, 30 bp, Artificial Sequence
  Synthetic oligonucleotide
tacaagagtttgacgggtgggatgtatgcg

SEQ ID NO: 337250 - DNA, 30 bp, Artificial Sequence
  Synthetic oligonucleotide
gggtctctggccccttttgtacattatgcg

SEQ ID NO: 337251 - DNA, 30 bp, Artificial Sequence
  Synthetic oligonucleotide
cccacgactatttaataagtacgttatgcg

SEQ ID NO: 337252 - DNA, 30 bp, Artificial Sequence
  Synthetic oligonucleotide
acgtaacgctcaactacgcgtggttatgcg

SEQ ID NO: 337253 - DNA, 30 bp, Artificial Sequence
  Synthetic oligonucleotide
accaacacccgcagaacttctacgactgcg

SEQ ID NO: 337254 - DNA, 30 bp, Artificial Sequence
  Synthetic oligonucleotide
tagaccttcggtaataattagctgactgcg

SEQ ID NO: 337255 - DNA, 30 bp, Artificial Sequence
  Synthetic oligonucleotide
acgacatctgggccttattcgttgactgcg

SEQ ID NO: 337256 - DNA, 30 bp, Artificial Sequence
  Synthetic oligonucleotide
ataggtccctggtgatcgtcattccctgcg

SEQ ID NO: 337257 - DNA, 30 bp, Artificial Sequence
  Synthetic oligonucleotide
tagaatggacagtgcaggccccagcctgcg

SEQ ID NO: 337258 - DNA, 30 bp, Artificial Sequence
  Synthetic oligonucleotide
atgcggggcatgggtggtgcacctcctgcg

SEQ ID NO: 337259 - DNA, 30 bp, Artificial Sequence
  Synthetic oligonucleotide
tggaccggagagcctgagcaagttcctgcg

SEQ ID NO: 337260 - DNA, 29 bp, Artificial Sequence
  Synthetic oligonucleotide
gctctcgggagtaaagtacaaaagctgcg

SEQ ID NO: 337261 - DNA, 30 bp, Artificial Sequence
  Synthetic oligonucleotide
cgataaccttttatgtgggccttggctgcg

SEQ ID NO: 337262 - DNA, 30 bp, Artificial Sequence
  Synthetic oligonucleotide
aagatgcccgcaaccgtgagctcctctgcg

SEQ ID NO: 337263 - DNA, 30 bp, Artificial Sequence
  Synthetic oligonucleotide
agattgtatagtgctaggcaggagtctgcg

SEQ ID NO: 337264 - DNA, 30 bp, Artificial Sequence
  Synthetic oligonucleotide
cgtgacccggcgttaactaacgggtctgcg

SEQ ID NO: 337265 - DNA, 30 bp, Artificial Sequence
  Synthetic oligonucleotide
gccgtctagataacaaatgcttattctgcg

SEQ ID NO: 337266 - DNA, 30 bp, Artificial Sequence
  Synthetic oligonucleotide
cccacctcatgcacaggggtcgcttctgcg

SEQ ID NO: 337267 - DNA, 30 bp, Artificial Sequence
  Synthetic oligonucleotide
ataagcgaccattagtgtctgttaagtgcg

SEQ ID NO: 337268 - DNA, 30 bp, Artificial Sequence
  Synthetic oligonucleotide
cgtccctccggatgggaggcagacagtgcg

SEQ ID NO: 337269 - DNA, 30 bp, Artificial Sequence
  Synthetic oligonucleotide
tgacagacgctccaacgataccccagtgcg

SEQ ID NO: 337270 - DNA, 30 bp, Artificial Sequence
  Synthetic oligonucleotide
aaataaaaacggctacctaaattgagtgcg

SEQ ID NO: 337271 - DNA, 40 bp, Artificial Sequence
  Synthetic oligonucleotide
gcattggtaggccggggggtcccgccccggttctagtgcg

SEQ ID NO: 337272 - DNA, 30 bp, Artificial Sequence
  Synthetic oligonucleotide
ctcatttatcacttaaggtatgcccgtgcg

SEQ ID NO: 337273 - DNA, 30 bp, Artificial Sequence
  Synthetic oligonucleotide
aacagtctgcaagtggcgaatgtccgtgcg

SEQ ID NO: 337274 - DNA, 30 bp, Artificial Sequence
  Synthetic oligonucleotide
ctgatagcaataccgctggttacaggtgcg

SEQ ID NO: 337275 - DNA, 30 bp, Artificial Sequence
  Synthetic oligonucleotide
tcgtgcgatgttagtcagctgtcaggtgcg

SEQ ID NO: 337276 - DNA, 30 bp, Artificial Sequence
  Synthetic oligonucleotide
tattgtggggatcctcacctcgatggtgcg

SEQ ID NO: 337277 - DNA, 30 bp, Artificial Sequence
  Synthetic oligonucleotide
cccgcaatcgtagttggtttgtatggtgcg

SEQ ID NO: 337278 - DNA, 30 bp, Artificial Sequence
  Synthetic oligonucleotide
ctagggtgcgattccactgattctggtgcg

SEQ ID NO: 337279 - DNA, 30 bp, Artificial Sequence
  Synthetic oligonucleotide
cagcggccggccgattctactcaatgtgcg

SEQ ID NO: 337280 - DNA, 30 bp, Artificial Sequence
  Synthetic oligonucleotide
aacaagatgttataggtggatgcctgtgcg

SEQ ID NO: 337281 - DNA, 30 bp, Artificial Sequence
  Synthetic oligonucleotide
aacggggaggatctccccccgggctgtgcg

SEQ ID NO: 337282 - DNA, 30 bp, Artificial Sequence
  Synthetic oligonucleotide
atgcagccgtgcatcgacacaaagattgcg

SEQ ID NO: 337283 - DNA, 30 bp, Artificial Sequence
  Synthetic oligonucleotide
atgtcaatcacccggttggaaggtattgcg

SEQ ID NO: 337284 - DNA, 30 bp, Artificial Sequence
  Synthetic oligonucleotide
taatgagaggatcatcaggaaattattgcg

SEQ ID NO: 337285 - DNA, 30 bp, Artificial Sequence
  Synthetic oligonucleotide
tgatttgtaggtttactcctctaccttgcg

SEQ ID NO: 337286 - DNA, 30 bp, Artificial Sequence
  Synthetic oligonucleotide
acatggctcaaattgtgagagacccttgcg

SEQ ID NO: 337287 - DNA, 30 bp, Artificial Sequence
  Synthetic oligonucleotide
cctgaaaggtttaccctctaaagccttgcg

SEQ ID NO: 337288 - DNA, 30 bp, Artificial Sequence
  Synthetic oligonucleotide
gaggtcaccacccgcgagttgatccttgcg

SEQ ID NO: 337289 - DNA, 30 bp, Artificial Sequence
  Synthetic oligonucleotide
gctttggatgtagagcaactatagcttgcg

SEQ ID NO: 337290 - DNA, 30 bp, Artificial Sequence
  Synthetic oligonucleotide
cacgcatgttaagccgatcagccggttgcg

SEQ ID NO: 337291 - DNA, 30 bp, Artificial Sequence
  Synthetic oligonucleotide
gcgtagtaatcagtatcttaatgatttgcg

SEQ ID NO: 337292 - DNA, 30 bp, Artificial Sequence
  Synthetic oligonucleotide
cacacgggccgtcactatcacgcctttgcg

SEQ ID NO: 337293 - DNA, 30 bp, Artificial Sequence
  Synthetic oligonucleotide
gcgcgggattggatgagcctggtctttgcg

SEQ ID NO: 337294 - DNA, 30 bp, Artificial Sequence
  Synthetic oligonucleotide
tcagcattagcaggaacgcattagtttgcg

SEQ ID NO: 337295 - DNA, 30 bp, Artificial Sequence
  Synthetic oligonucleotide
gtccagtgtctcttgaaggaagggtttgcg

SEQ ID NO: 337296 - DNA, 30 bp, Artificial Sequence
  Synthetic oligonucleotide
ctctatcgggctcgtggaccaatttttgcg

SEQ ID NO: 337297 - DNA, 30 bp, Artificial Sequence
  Synthetic oligonucleotide
gtatccacggtgtcataggcaggaaaatcg

SEQ ID NO: 337298 - DNA, 30 bp, Artificial Sequence
  Synthetic oligonucleotide
gtgcaatggttacgctacaaatgaaaatcg

SEQ ID NO: 337299 - DNA, 30 bp, Artificial Sequence
  Synthetic oligonucleotide
aagaggcagggtcgataacgtgtaaaatcg

SEQ ID NO: 337300 - DNA, 30 bp, Artificial Sequence
  Synthetic oligonucleotide
catttacgtgtaggtgttaaaatcaaatcg

SEQ ID NO: 337301 - DNA, 31 bp, Artificial Sequence
  Synthetic oligonucleotide
acgtagcctatcgaaaagtacgttcaaatcg

SEQ ID NO: 337302 - DNA, 30 bp, Artificial Sequence
  Synthetic oligonucleotide
attaggcatagagatttcccaacgaaatcg

SEQ ID NO: 337303 - DNA, 30 bp, Artificial Sequence
  Synthetic oligonucleotide
agctactttggttcattcgctgcgaaatcg

SEQ ID NO: 337304 - DNA, 30 bp, Artificial Sequence
  Synthetic oligonucleotide
gtacgcgcactttgtcgattacataaatcg

SEQ ID NO: 337305 - DNA, 30 bp, Artificial Sequence
  Synthetic oligonucleotide
ttgagcaatcccagcctactaattaaatcg

SEQ ID NO: 337306 - DNA, 30 bp, Artificial Sequence
  Synthetic oligonucleotide
tggtgactcctccaagatgatattaaatcg

SEQ ID NO: 337307 - DNA, 30 bp, Artificial Sequence
  Synthetic oligonucleotide
ccccggtttcgtacgggttgagaacaatcg

SEQ ID NO: 337308 - DNA, 30 bp, Artificial Sequence
  Synthetic oligonucleotide
acggatgatccaggtccacgataacaatcg

SEQ ID NO: 337309 - DNA, 30 bp, Artificial Sequence
  Synthetic oligonucleotide
accgacgatccagttttatatagacaatcg

SEQ ID NO: 337310 - DNA, 30 bp, Artificial Sequence
  Synthetic oligonucleotide
acggtttgttttggggtttcttaccaatcg

SEQ ID NO: 337311 - DNA, 30 bp, Artificial Sequence
  Synthetic oligonucleotide
cctgtgcggcagttgtggtaccagcaatcg

SEQ ID NO: 337312 - DNA, 30 bp, Artificial Sequence
  Synthetic oligonucleotide
ttcaaggtctattatgaaccacatcaatcg

SEQ ID NO: 337313 - DNA, 30 bp, Artificial Sequence
  Synthetic oligonucleotide
tctaccgtccgcggacagtagtatcaatcg

SEQ ID NO: 337314 - DNA, 30 bp, Artificial Sequence
  Synthetic oligonucleotide
tcgcccctttaaactgcttcgcttcaatcg

SEQ ID NO: 337315 - DNA, 30 bp, Artificial Sequence
  Synthetic oligonucleotide
tgtatcttgggtcacgggggattcgaatcg

SEQ ID NO: 337316 - DNA, 29 bp, Artificial Sequence
  Synthetic oligonucleotide
atgatagtagtgtttacatgacggaatcg

SEQ ID NO: 337317 - DNA, 30 bp, Artificial Sequence
  Synthetic oligonucleotide
tcacaaaagggtgtaatcgtgatggaatcg

SEQ ID NO: 337318 - DNA, 30 bp, Artificial Sequence
  Synthetic oligonucleotide
caatgcttaaggttgcctaggcctgaatcg

SEQ ID NO: 337319 - DNA, 30 bp, Artificial Sequence
  Synthetic oligonucleotide
ttgaaatggacaattgtctagattgaatcg

SEQ ID NO: 337320 - DNA, 30 bp, Artificial Sequence
  Synthetic oligonucleotide
gtatgttgatcatcagcgatgacctaatcg

SEQ ID NO: 337321 - DNA, 30 bp, Artificial Sequence
  Synthetic oligonucleotide
cgcaagcctaagataatgttcttctaatcg

SEQ ID NO: 337322 - DNA, 30 bp, Artificial Sequence
  Synthetic oligonucleotide
gagctcggcgggcgctatgactgttaatcg

SEQ ID NO: 337323 - DNA, 30 bp, Artificial Sequence
  Synthetic oligonucleotide
cagtaccctttggtcggctctatttaatcg

SEQ ID NO: 337324 - DNA, 30 bp, Artificial Sequence
  Synthetic oligonucleotide
gttagcgtgatgtgggttatgtaaacatcg

SEQ ID NO: 337325 - DNA, 30 bp, Artificial Sequence
  Synthetic oligonucleotide
gtaccaaacgccatcccagtacgaacatcg

SEQ ID NO: 337326 - DNA, 30 bp, Artificial Sequence
  Synthetic oligonucleotide
cccaaattaccggtagtgagcaggacatcg

SEQ ID NO: 337327 - DNA, 30 bp, Artificial Sequence
  Synthetic oligonucleotide
ctccgaaccgtcggacaagccgatacatcg

SEQ ID NO: 337328 - DNA, 30 bp, Artificial Sequence
  Synthetic oligonucleotide
tgcattgagagcttacgcccacgaccatcg

SEQ ID NO: 337329 - DNA, 30 bp, Artificial Sequence
  Synthetic oligonucleotide
ttgcgccacggtattagcggagtaccatcg

SEQ ID NO: 337330 - DNA, 30 bp, Artificial Sequence
  Synthetic oligonucleotide
ccaacggaggacctgcacgacttaccatcg

SEQ ID NO: 337331 - DNA, 30 bp, Artificial Sequence
  Synthetic oligonucleotide
gaattgttggctatcggccaatgcccatcg

SEQ ID NO: 337332 - DNA, 30 bp, Artificial Sequence
  Synthetic oligonucleotide
atggttgaccaagctttggcttagccatcg

SEQ ID NO: 337333 - DNA, 30 bp, Artificial Sequence
  Synthetic oligonucleotide
ggtataaacatgtgttaacatatgccatcg

SEQ ID NO: 337334 - DNA, 30 bp, Artificial Sequence
  Synthetic oligonucleotide
gccagtttccgaaacgatgagcaagcatcg

SEQ ID NO: 337335 - DNA, 30 bp, Artificial Sequence
  Synthetic oligonucleotide
gccgggtaaaacgtcgatttgacagcatcg

SEQ ID NO: 337336 - DNA, 30 bp, Artificial Sequence
  Synthetic oligonucleotide
tgtaaactcagcgcctacggcggcgcatcg

SEQ ID NO: 337337 - DNA, 30 bp, Artificial Sequence
  Synthetic oligonucleotide
aaaataaaacgcgacaccgcgctcgcatcg

SEQ ID NO: 337338 - DNA, 30 bp, Artificial Sequence
  Synthetic oligonucleotide
caactgcaaccgctggcagaacaatcatcg

SEQ ID NO: 337339 - DNA, 30 bp, Artificial Sequence
  Synthetic oligonucleotide
taaagctgtaggaagtgtcagttctcatcg

SEQ ID NO: 337340 - DNA, 30 bp, Artificial Sequence
  Synthetic oligonucleotide
cagcttatgatacagaaaattgagtcatcg

SEQ ID NO: 337341 - DNA, 30 bp, Artificial Sequence
  Synthetic oligonucleotide
tttcgttaaatatcaaccggctagtcatcg

SEQ ID NO: 337342 - DNA, 30 bp, Artificial Sequence
  Synthetic oligonucleotide
caatttctctccgcatcactttagtcatcg

SEQ ID NO: 337343 - DNA, 30 bp, Artificial Sequence
  Synthetic oligonucleotide
agtttagtccttcagctcgttaggtcatcg

SEQ ID NO: 337344 - DNA, 30 bp, Artificial Sequence
  Synthetic oligonucleotide
ccccggcataaaagccgcatggggtcatcg

SEQ ID NO: 337345 - DNA, 30 bp, Artificial Sequence
  Synthetic oligonucleotide
tatataaatttgtgatttaaggacagatcg

SEQ ID NO: 337346 - DNA, 30 bp, Artificial Sequence
  Synthetic oligonucleotide
gaagagggccggtggcacggtctcagatcg

SEQ ID NO: 337347 - DNA, 30 bp, Artificial Sequence
  Synthetic oligonucleotide
gagggtcgctacacaaggaccacgagatcg

SEQ ID NO: 337348 - DNA, 30 bp, Artificial Sequence
  Synthetic oligonucleotide
gtacaagggttatatcgtacatatagatcg

SEQ ID NO: 337349 - DNA, 30 bp, Artificial Sequence
  Synthetic oligonucleotide
taaaatgtataagaagtgtccactagatcg

SEQ ID NO: 337350 - DNA, 30 bp, Artificial Sequence
  Synthetic oligonucleotide
tttgatcagtgtagcggctcgaaacgatcg

SEQ ID NO: 337351 - DNA, 30 bp, Artificial Sequence
  Synthetic oligonucleotide
tcgatttgtaaaagatttgttccacgatcg

SEQ ID NO: 337352 - DNA, 30 bp, Artificial Sequence
  Synthetic oligonucleotide
cgtcacgactgtcatgattgccgtcgatcg

SEQ ID NO: 337353 - DNA, 30 bp, Artificial Sequence
  Synthetic oligonucleotide
taaggtgcaaacgagccggttgtcggatcg

SEQ ID NO: 337354 - DNA, 30 bp, Artificial Sequence
  Synthetic oligonucleotide
cgtcacgggttttgctagggattcggatcg

SEQ ID NO: 337355 - DNA, 30 bp, Artificial Sequence
  Synthetic oligonucleotide
cgccaaaagcttatagtacgtggtggatcg

SEQ ID NO: 337356 - DNA, 30 bp, Artificial Sequence
  Synthetic oligonucleotide
accactcactaaaactcggtaaagtgatcg

SEQ ID NO: 337357 - DNA, 30 bp, Artificial Sequence
  Synthetic oligonucleotide
gatcaatacacggggacttataagtgatcg

SEQ ID NO: 337358 - DNA, 30 bp, Artificial Sequence
  Synthetic oligonucleotide
gtttaataattggctggaagggagtgatcg

SEQ ID NO: 337359 - DNA, 30 bp, Artificial Sequence
  Synthetic oligonucleotide
ggtcctagagtggccattttcccttgatcg

SEQ ID NO: 337360 - DNA, 30 bp, Artificial Sequence
  Synthetic oligonucleotide
gcaaccctgtgtggccacgatacaatatcg

SEQ ID NO: 337361 - DNA, 30 bp, Artificial Sequence
  Synthetic oligonucleotide
gcgtgcttatgcatatgcggtttaatatcg

SEQ ID NO: 337362 - DNA, 30 bp, Artificial Sequence
  Synthetic oligonucleotide
tatggtggagcaacgagaggatagatatcg

SEQ ID NO: 337363 - DNA, 30 bp, Artificial Sequence
  Synthetic oligonucleotide
ggctccaactcggcatactacaggatatcg

SEQ ID NO: 337364 - DNA, 30 bp, Artificial Sequence
  Synthetic oligonucleotide
tccgaccacgtgcgtcactatcggatatcg

SEQ ID NO: 337365 - DNA, 30 bp, Artificial Sequence
  Synthetic oligonucleotide
ctcgcacacgggtgatgcgttatgatatcg

SEQ ID NO: 337366 - DNA, 30 bp, Artificial Sequence
  Synthetic oligonucleotide
gaataccggatccactgcgaggcactatcg

SEQ ID NO: 337367 - DNA, 30 bp, Artificial Sequence
  Synthetic oligonucleotide
agaactacgctcggcaccttacatctatcg

SEQ ID NO: 337368 - DNA, 30 bp, Artificial Sequence
  Synthetic oligonucleotide
gcacggtcacgattgtaggtgaaagtatcg

SEQ ID NO: 337369 - DNA, 30 bp, Artificial Sequence
  Synthetic oligonucleotide
tcggcaatatggccccgtgaacgagtatcg

SEQ ID NO: 337370 - DNA, 30 bp, Artificial Sequence
  Synthetic oligonucleotide
atctccaaattgtagaccagcgccgtatcg

SEQ ID NO: 337371 - DNA, 30 bp, Artificial Sequence
  Synthetic oligonucleotide
tagagcggaagttgtgtcatatgcgtatcg

SEQ ID NO: 337372 - DNA, 30 bp, Artificial Sequence
  Synthetic oligonucleotide
gcgctatgtttgttatttacaaaggtatcg

SEQ ID NO: 337373 - DNA, 30 bp, Artificial Sequence
  Synthetic oligonucleotide
gtagaatgccggacccgcaatagggtatcg

SEQ ID NO: 337374 - DNA, 30 bp, Artificial Sequence
  Synthetic oligonucleotide
tgtccgcttgcggctatttatctggtatcg

SEQ ID NO: 337375 - DNA, 30 bp, Artificial Sequence
  Synthetic oligonucleotide
gcgtctctgctcatctcgacagtggtatcg

SEQ ID NO: 337376 - DNA, 30 bp, Artificial Sequence
  Synthetic oligonucleotide
gcagggtgcacgccgagacgcacattatcg

SEQ ID NO: 337377 - DNA, 30 bp, Artificial Sequence
  Synthetic oligonucleotide
tatgaaaattgcccctaatgttcattatcg

SEQ ID NO: 337378 - DNA, 30 bp, Artificial Sequence
  Synthetic oligonucleotide
ataaaagtatctaacactcttcgattatcg

SEQ ID NO: 337379 - DNA, 30 bp, Artificial Sequence
  Synthetic oligonucleotide
atcggtcttgcattaacaggggacttatcg

SEQ ID NO: 337380 - DNA, 30 bp, Artificial Sequence
  Synthetic oligonucleotide
gataagttatggaatcacgggcgcttatcg

SEQ ID NO: 337381 - DNA, 30 bp, Artificial Sequence
  Synthetic oligonucleotide
aggacggtacaattccggggcccgttatcg

SEQ ID NO: 337382 - DNA, 30 bp, Artificial Sequence
  Synthetic oligonucleotide
atgcagtaagatttaggatggccgttatcg

SEQ ID NO: 337383 - DNA, 30 bp, Artificial Sequence
  Synthetic oligonucleotide
tctacgcaatgggatcaagcattgttatcg

SEQ ID NO: 337384 - DNA, 30 bp, Artificial Sequence
  Synthetic oligonucleotide
aaaaggcggtagacgggcagagatttatcg

SEQ ID NO: 337385 - DNA, 30 bp, Artificial Sequence
  Synthetic oligonucleotide
atgatagtctgcttttttgaatatttatcg

SEQ ID NO: 337386 - DNA, 30 bp, Artificial Sequence
  Synthetic oligonucleotide
gctgagtttgccccaaaacaaggtttatcg

SEQ ID NO: 337387 - DNA, 30 bp, Artificial Sequence
  Synthetic oligonucleotide
gaacacagagaccggccttgctacaactcg

SEQ ID NO: 337388 - DNA, 30 bp, Artificial Sequence
  Synthetic oligonucleotide
gtaattgatgagcttcaaagcctcaactcg

SEQ ID NO: 337389 - DNA, 30 bp, Artificial Sequence
  Synthetic oligonucleotide
aaacacgacgccgttggtcaaaagaactcg

SEQ ID NO: 337390 - DNA, 30 bp, Artificial Sequence
  Synthetic oligonucleotide
agaacggcagcactcttcattgagaactcg

SEQ ID NO: 337391 - DNA, 30 bp, Artificial Sequence
  Synthetic oligonucleotide
gcgccgacctcctatcggagaaagcactcg

SEQ ID NO: 337392 - DNA, 30 bp, Artificial Sequence
  Synthetic oligonucleotide
tttggattagtggattaatttaagcactcg

SEQ ID NO: 337393 - DNA, 30 bp, Artificial Sequence
  Synthetic oligonucleotide
agactgctatatatgctcttgatagactcg

SEQ ID NO: 337394 - DNA, 30 bp, Artificial Sequence
  Synthetic oligonucleotide
atcacagttatattgctctgcttagactcg

SEQ ID NO: 337395 - DNA, 30 bp, Artificial Sequence
  Synthetic oligonucleotide
gggatattacgcctggatctcagcgactcg

SEQ ID NO: 337396 - DNA, 30 bp, Artificial Sequence
  Synthetic oligonucleotide
accttgacgtacgtatcgcattgcgactcg

SEQ ID NO: 337397 - DNA, 30 bp, Artificial Sequence
  Synthetic oligonucleotide
gttatgtttgttcgaacattattcgactcg

SEQ ID NO: 337398 - DNA, 30 bp, Artificial Sequence
  Synthetic oligonucleotide
cgagatttactgggctcgggccctgactcg

SEQ ID NO: 337399 - DNA, 30 bp, Artificial Sequence
  Synthetic oligonucleotide
tggcgtagagacagctggccttgctactcg

SEQ ID NO: 337400 - DNA, 30 bp, Artificial Sequence
  Synthetic oligonucleotide
ttgtgggacgccaagcatattttgtactcg

SEQ ID NO: 337401 - DNA, 30 bp, Artificial Sequence
  Synthetic oligonucleotide
ttattatgggtcaatgaggaatcaacctcg

SEQ ID NO: 337402 - DNA, 30 bp, Artificial Sequence
  Synthetic oligonucleotide
catttatcataggtacgcatgtcaacctcg

SEQ ID NO: 337403 - DNA, 30 bp, Artificial Sequence
  Synthetic oligonucleotide
actacgcgaaaacacagggccttcacctcg

SEQ ID NO: 337404 - DNA, 30 bp, Artificial Sequence
  Synthetic oligonucleotide
tatagtagcctgggtactaggcgtacctcg

SEQ ID NO: 337405 - DNA, 30 bp, Artificial Sequence
  Synthetic oligonucleotide
gaagcttggtcgggacaatagagaccctcg

SEQ ID NO: 337406 - DNA, 30 bp, Artificial Sequence
  Synthetic oligonucleotide
ttttgcacgatagctaagttaagcccctcg

SEQ ID NO: 337407 - DNA, 30 bp, Artificial Sequence
  Synthetic oligonucleotide
ccagggacagagatattcctctgcccctcg

SEQ ID NO: 337408 - DNA, 30 bp, Artificial Sequence
  Synthetic oligonucleotide
gatcagcaactcgtcgcgcaaacgccctcg

SEQ ID NO: 337409 - DNA, 30 bp, Artificial Sequence
  Synthetic oligonucleotide
acggcccggactagataatgcgcagcctcg

SEQ ID NO: 337410 - DNA, 30 bp, Artificial Sequence
  Synthetic oligonucleotide
aggtcgtttagctataaccagtccgcctcg

SEQ ID NO: 337411 - DNA, 30 bp, Artificial Sequence
  Synthetic oligonucleotide
tagtctgtgtgagcagaccctaaggcctcg

SEQ ID NO: 337412 - DNA, 30 bp, Artificial Sequence
  Synthetic oligonucleotide
atgtgaaccctggttccacttatggcctcg

SEQ ID NO: 337413 - DNA, 30 bp, Artificial Sequence
  Synthetic oligonucleotide
ggccgtcagtgcatcgctagcaattcctcg

SEQ ID NO: 337414 - DNA, 30 bp, Artificial Sequence
  Synthetic oligonucleotide
tgcccggttgtgcatatcctcgattcctcg

SEQ ID NO: 337415 - DNA, 30 bp, Artificial Sequence
  Synthetic oligonucleotide
cgaccgggcgttgtaaaaggttattcctcg

SEQ ID NO: 337416 - DNA, 30 bp, Artificial Sequence
  Synthetic oligonucleotide
tcggtagcaatctgaaattaatggagctcg

SEQ ID NO: 337417 - DNA, 30 bp, Artificial Sequence
  Synthetic oligonucleotide
aaaaaatgatgattatcactttgtagctcg

SEQ ID NO: 337418 - DNA, 30 bp, Artificial Sequence
  Synthetic oligonucleotide
ataatttagaacgcgttgggttaccgctcg

SEQ ID NO: 337419 - DNA, 30 bp, Artificial Sequence
  Synthetic oligonucleotide
aatatacagaatacattgtttacccgctcg

SEQ ID NO: 337420 - DNA, 30 bp, Artificial Sequence
  Synthetic oligonucleotide
atagttttattcgtataagatctccgctcg

SEQ ID NO: 337421 - DNA, 30 bp, Artificial Sequence
  Synthetic oligonucleotide
gggtatagtgcgcgtttgttgaatcgctcg

SEQ ID NO: 337422 - DNA, 30 bp, Artificial Sequence
  Synthetic oligonucleotide
accccacaaggtgggctgtctgcaggctcg

SEQ ID NO: 337423 - DNA, 30 bp, Artificial Sequence
  Synthetic oligonucleotide
gtgtctaaatcgcgtgtcccgcgcggctcg

SEQ ID NO: 337424 - DNA, 30 bp, Artificial Sequence
  Synthetic oligonucleotide
ttgtgttttcttttttataaggtgggctcg

SEQ ID NO: 337425 - DNA, 30 bp, Artificial Sequence
  Synthetic oligonucleotide
gactcgtgactcaccggcccatttggctcg

SEQ ID NO: 337426 - DNA, 30 bp, Artificial Sequence
  Synthetic oligonucleotide
tctatcgccctgtgcatttttaaatgctcg

SEQ ID NO: 337427 - DNA, 30 bp, Artificial Sequence
  Synthetic oligonucleotide
acttgaatacaagttaaagcactatgctcg

SEQ ID NO: 337428 - DNA, 30 bp, Artificial Sequence
  Synthetic oligonucleotide
atgccttaaatataggaacagttgtgctcg

SEQ ID NO: 337429 - DNA, 30 bp, Artificial Sequence
  Synthetic oligonucleotide
accactcgttggagtgttgctacaatctcg

SEQ ID NO: 337430 - DNA, 30 bp, Artificial Sequence
  Synthetic oligonucleotide
agtggaccgttagaatctcttagaatctcg

SEQ ID NO: 337431 - DNA, 30 bp, Artificial Sequence
  Synthetic oligonucleotide
agcatttcggtaccaattgacatcatctcg

SEQ ID NO: 337432 - DNA, 30 bp, Artificial Sequence
  Synthetic oligonucleotide
cacataagagaaggctttggtgtcatctcg

SEQ ID NO: 337433 - DNA, 30 bp, Artificial Sequence
  Synthetic oligonucleotide
tatggttcgaagtacgcctgtgggatctcg

SEQ ID NO: 337434 - DNA, 30 bp, Artificial Sequence
  Synthetic oligonucleotide
gatcagagaatagcgcactattggatctcg

SEQ ID NO: 337435 - DNA, 30 bp, Artificial Sequence
  Synthetic oligonucleotide
tattgtactgggccgcgcgtatttatctcg

SEQ ID NO: 337436 - DNA, 30 bp, Artificial Sequence
  Synthetic oligonucleotide
cacctggctgcggtcaggtatttactctcg

SEQ ID NO: 337437 - DNA, 30 bp, Artificial Sequence
  Synthetic oligonucleotide
ccggtatttcatggtagtccttacctctcg

SEQ ID NO: 337438 - DNA, 30 bp, Artificial Sequence
  Synthetic oligonucleotide
gtggtcgttggtccttggatgattctctcg

SEQ ID NO: 337439 - DNA, 30 bp, Artificial Sequence
  Synthetic oligonucleotide
cactagcggacgaggtaccgggaagtctcg

SEQ ID NO: 337440 - DNA, 30 bp, Artificial Sequence
  Synthetic oligonucleotide
atcaccctaaataagaaaaggtcagtctcg

SEQ ID NO: 337441 - DNA, 30 bp, Artificial Sequence
  Synthetic oligonucleotide
ataagggtctttgaaagccgattggtctcg

SEQ ID NO: 337442 - DNA, 30 bp, Artificial Sequence
  Synthetic oligonucleotide
cctgaaccatacgggcccagcgtattctcg

SEQ ID NO: 337443 - DNA, 30 bp, Artificial Sequence
  Synthetic oligonucleotide
cgtctcaaatactcttaacttgtattctcg

SEQ ID NO: 337444 - DNA, 30 bp, Artificial Sequence
  Synthetic oligonucleotide
atcaggcctgggcatcaggcaaacttctcg

SEQ ID NO: 337445 - DNA, 30 bp, Artificial Sequence
  Synthetic oligonucleotide
taactaaggcacatattgcttcgcttctcg

SEQ ID NO: 337446 - DNA, 30 bp, Artificial Sequence
  Synthetic oligonucleotide
gctcattaccgctaacctccgtcgttctcg

SEQ ID NO: 337447 - DNA, 30 bp, Artificial Sequence
  Synthetic oligonucleotide
atcaactatgcgacgccaagtcatttctcg

SEQ ID NO: 337448 - DNA, 30 bp, Artificial Sequence
  Synthetic oligonucleotide
agatttgctatagttagtgaagatttctcg

SEQ ID NO: 337449 - DNA, 30 bp, Artificial Sequence
  Synthetic oligonucleotide
taaatttgttctccttaccatgacaagtcg

SEQ ID NO: 337450 - DNA, 30 bp, Artificial Sequence
  Synthetic oligonucleotide
aatagggctagtaattcctagggcaagtcg

SEQ ID NO: 337451 - DNA, 30 bp, Artificial Sequence
  Synthetic oligonucleotide
cgaagcattggagatgagtctgtcaagtcg

SEQ ID NO: 337452 - DNA, 31 bp, Artificial Sequence
  Synthetic oligonucleotide
tcggtcaagaatatataggagttttaagtcg

SEQ ID NO: 337453 - DNA, 30 bp, Artificial Sequence
  Synthetic oligonucleotide
gtgatatgggcagcatcctgttaacagtcg

SEQ ID NO: 337454 - DNA, 30 bp, Artificial Sequence
  Synthetic oligonucleotide
gccacaaatgtatgcctatgcgtacagtcg

SEQ ID NO: 337455 - DNA, 30 bp, Artificial Sequence
  Synthetic oligonucleotide
aggataacttaatgtcaggccccccagtcg

SEQ ID NO: 337456 - DNA, 30 bp, Artificial Sequence
  Synthetic oligonucleotide
gtgaggaacgtgcgacaaacgtatcagtcg

SEQ ID NO: 337457 - DNA, 30 bp, Artificial Sequence
  Synthetic oligonucleotide
tcctctgaacaagcaaggtccgacgagtcg

SEQ ID NO: 337458 - DNA, 30 bp, Artificial Sequence
  Synthetic oligonucleotide
gacaaagtagcaagataactgaaggagtcg

SEQ ID NO: 337459 - DNA, 30 bp, Artificial Sequence
  Synthetic oligonucleotide
ggcgtcataaatggagagacgatggagtcg

SEQ ID NO: 337460 - DNA, 30 bp, Artificial Sequence
  Synthetic oligonucleotide
taggtagatttgtaatgccggtgtgagtcg

SEQ ID NO: 337461 - DNA, 30 bp, Artificial Sequence
  Synthetic oligonucleotide
cgattcccctgtgagttttcgccatagtcg

SEQ ID NO: 337462 - DNA, 30 bp, Artificial Sequence
  Synthetic oligonucleotide
cacaatcgtggctcgtcattgccatagtcg

SEQ ID NO: 337463 - DNA, 30 bp, Artificial Sequence
  Synthetic oligonucleotide
tttgctctacaatgtcgagtctgctagtcg

SEQ ID NO: 337464 - DNA, 30 bp, Artificial Sequence
  Synthetic oligonucleotide
tctcttgccaaccaggttataaagtagtcg

SEQ ID NO: 337465 - DNA, 30 bp, Artificial Sequence
  Synthetic oligonucleotide
accagcaacttagggtttaacaattagtcg

SEQ ID NO: 337466 - DNA, 30 bp, Artificial Sequence
  Synthetic oligonucleotide
gcttagacctattgaccgcgcgtaacgtcg

SEQ ID NO: 337467 - DNA, 29 bp, Artificial Sequence
  Synthetic oligonucleotide
aagtacaagaaaaatcccagaccacgtcg

SEQ ID NO: 337468 - DNA, 30 bp, Artificial Sequence
  Synthetic oligonucleotide
gttaatgccaggggttgaggaagcacgtcg

SEQ ID NO: 337469 - DNA, 30 bp, Artificial Sequence
  Synthetic oligonucleotide
ttgagacaaagaagatcgcttaagacgtcg

SEQ ID NO: 337470 - DNA, 30 bp, Artificial Sequence
  Synthetic oligonucleotide
aatgtttgccggcattaaccaccgacgtcg

SEQ ID NO: 337471 - DNA, 30 bp, Artificial Sequence
  Synthetic oligonucleotide
atagggagcagtgcgtggttccatacgtcg

SEQ ID NO: 337472 - DNA, 30 bp, Artificial Sequence
  Synthetic oligonucleotide
aataatgaagggttcaatacgaaaccgtcg

SEQ ID NO: 337473 - DNA, 30 bp, Artificial Sequence
  Synthetic oligonucleotide
gtgataatgccttgacgatcattaccgtcg

SEQ ID NO: 337474 - DNA, 30 bp, Artificial Sequence
  Synthetic oligonucleotide
aagccgggaacctgtatacgcaagccgtcg

SEQ ID NO: 337475 - DNA, 30 bp, Artificial Sequence
  Synthetic oligonucleotide
tcggaccctcaggggttaaaatatccgtcg

SEQ ID NO: 337476 - DNA, 30 bp, Artificial Sequence
  Synthetic oligonucleotide
tccgaggtaagtgtatccaacactccgtcg

SEQ ID NO: 337477 - DNA, 30 bp, Artificial Sequence
  Synthetic oligonucleotide
tgaacatatggaaaagggggggcagcgtcg

SEQ ID NO: 337478 - DNA, 30 bp, Artificial Sequence
  Synthetic oligonucleotide
tttgtgcgaccgacatgataataggcgtcg

SEQ ID NO: 337479 - DNA, 30 bp, Artificial Sequence
  Synthetic oligonucleotide
ctgaatatatcctatatcgtcttggcgtcg

SEQ ID NO: 337480 - DNA, 30 bp, Artificial Sequence
  Synthetic oligonucleotide
tagtttttgatcgtttcaggacgatcgtcg

SEQ ID NO: 337481 - DNA, 30 bp, Artificial Sequence
  Synthetic oligonucleotide
gaatgtcgtcgcaaatgtccaggatcgtcg

SEQ ID NO: 337482 - DNA, 30 bp, Artificial Sequence
  Synthetic oligonucleotide
taagctatccaggagatttcccggtcgtcg

SEQ ID NO: 337483 - DNA, 31 bp, Artificial Sequence
  Synthetic oligonucleotide
aaaattcaggtggtgctctgacgacaggtcg

SEQ ID NO: 337484 - DNA, 30 bp, Artificial Sequence
  Synthetic oligonucleotide
gattactcgggcaagctccccgccaggtcg

SEQ ID NO: 337485 - DNA, 30 bp, Artificial Sequence
  Synthetic oligonucleotide
aagtaattatcttttacgtgtagcaggtcg

SEQ ID NO: 337486 - DNA, 30 bp, Artificial Sequence
  Synthetic oligonucleotide
tgcttcaaatgtgacccgtgggtcaggtcg

SEQ ID NO: 337487 - DNA, 30 bp, Artificial Sequence
  Synthetic oligonucleotide
gttggatatataaatttttaatagaggtcg

SEQ ID NO: 337488 - DNA, 30 bp, Artificial Sequence
  Synthetic oligonucleotide
cctccacacacctcttactacgggaggtcg

SEQ ID NO: 337489 - DNA, 30 bp, Artificial Sequence
  Synthetic oligonucleotide
gcgacaagataatccaattccctgaggtcg

SEQ ID NO: 337490 - DNA, 30 bp, Artificial Sequence
  Synthetic oligonucleotide
tgacgcggtcggcggcactcacataggtcg

SEQ ID NO: 337491 - DNA, 30 bp, Artificial Sequence
  Synthetic oligonucleotide
tacgcggcaggcagtagattggaacggtcg

SEQ ID NO: 337492 - DNA, 30 bp, Artificial Sequence
  Synthetic oligonucleotide
tttacacagaagcacattcgggtacggtcg

SEQ ID NO: 337493 - DNA, 30 bp, Artificial Sequence
  Synthetic oligonucleotide
tcggttcattaaaccgtctaataccggtcg

SEQ ID NO: 337494 - DNA, 30 bp, Artificial Sequence
  Synthetic oligonucleotide
tttggaggtgtcgttcttatgggccggtcg

SEQ ID NO: 337495 - DNA, 30 bp, Artificial Sequence
  Synthetic oligonucleotide
aacgcaaatcgacaatggagattccggtcg

SEQ ID NO: 337496 - DNA, 30 bp, Artificial Sequence
  Synthetic oligonucleotide
tcggacgtctcaacaaagttggcgcggtcg

SEQ ID NO: 337497 - DNA, 30 bp, Artificial Sequence
  Synthetic oligonucleotide
cgggccgagaacctccagtgtgttcggtcg

SEQ ID NO: 337498 - DNA, 30 bp, Artificial Sequence
  Synthetic oligonucleotide
tattctgacccggctcacgttcaagggtcg

SEQ ID NO: 337499 - DNA, 30 bp, Artificial Sequence
  Synthetic oligonucleotide
aaactacaggttattgattattcagggtcg

SEQ ID NO: 337500 - DNA, 30 bp, Artificial Sequence
  Synthetic oligonucleotide
gctaccgaccttcgaatagcgatagggtcg

SEQ ID NO: 337501 - DNA, 30 bp, Artificial Sequence
  Synthetic oligonucleotide
cgacgcagagatcagtgtgtgcccgggtcg

SEQ ID NO: 337502 - DNA, 30 bp, Artificial Sequence
  Synthetic oligonucleotide
accattcgcccatgcagacaacaggggtcg

SEQ ID NO: 337503 - DNA, 30 bp, Artificial Sequence
  Synthetic oligonucleotide
atagcggttgtgacccgcctcccggggtcg

SEQ ID NO: 337504 - DNA, 30 bp, Artificial Sequence
  Synthetic oligonucleotide
atcgagagtacatagccttcaaatgggtcg

SEQ ID NO: 337505 - DNA, 30 bp, Artificial Sequence
  Synthetic oligonucleotide
agcggtccgcctctgagacgtccatggtcg

SEQ ID NO: 337506 - DNA, 30 bp, Artificial Sequence
  Synthetic oligonucleotide
ccgcgacttcgtcgggcacgggtctggtcg

SEQ ID NO: 337507 - DNA, 30 bp, Artificial Sequence
  Synthetic oligonucleotide
tctggcctcagactaacgcaaacgtggtcg

SEQ ID NO: 337508 - DNA, 30 bp, Artificial Sequence
  Synthetic oligonucleotide
ccagcgctcccaattcgaagcccgtggtcg

SEQ ID NO: 337509 - DNA, 30 bp, Artificial Sequence
  Synthetic oligonucleotide
gtattgctagagctgcactatcggtggtcg

SEQ ID NO: 337510 - DNA, 30 bp, Artificial Sequence
  Synthetic oligonucleotide
gcttaaacgatttgcaactacatgtggtcg

SEQ ID NO: 337511 - DNA, 30 bp, Artificial Sequence
  Synthetic oligonucleotide
ctcacgtagacatgccaaaccaattggtcg

SEQ ID NO: 337512 - DNA, 30 bp, Artificial Sequence
  Synthetic oligonucleotide
gacgggtgcatatagggcgagacttggtcg

SEQ ID NO: 337513 - DNA, 30 bp, Artificial Sequence
  Synthetic oligonucleotide
ctcgtacattcctcctttggaggttggtcg

SEQ ID NO: 337514 - DNA, 30 bp, Artificial Sequence
  Synthetic oligonucleotide
gcagaacatgtggacggaggctgcatgtcg

SEQ ID NO: 337515 - DNA, 30 bp, Artificial Sequence
  Synthetic oligonucleotide
tcccgtagtacacgagcctcgcagatgtcg

SEQ ID NO: 337516 - DNA, 30 bp, Artificial Sequence
  Synthetic oligonucleotide
ccgatccggcgcgctagactgacgatgtcg

SEQ ID NO: 337517 - DNA, 30 bp, Artificial Sequence
  Synthetic oligonucleotide
aaatctccgctcaacgtctacaatatgtcg

SEQ ID NO: 337518 - DNA, 30 bp, Artificial Sequence
  Synthetic oligonucleotide
tggcacctggggcaatgcgtttatatgtcg

SEQ ID NO: 337519 - DNA, 30 bp, Artificial Sequence
  Synthetic oligonucleotide
ttcaaacttcgcacaataccggaactgtcg

SEQ ID NO: 337520 - DNA, 30 bp, Artificial Sequence
  Synthetic oligonucleotide
ataagaatgtgcccgaccccggaactgtcg

SEQ ID NO: 337521 - DNA, 30 bp, Artificial Sequence
  Synthetic oligonucleotide
tgcccgcctgcacaacccggggtactgtcg

SEQ ID NO: 337522 - DNA, 30 bp, Artificial Sequence
  Synthetic oligonucleotide
tgtgaagtgcaacgagccatgggcctgtcg

SEQ ID NO: 337523 - DNA, 30 bp, Artificial Sequence
  Synthetic oligonucleotide
tttccatcttatcaatcagcacatctgtcg

SEQ ID NO: 337524 - DNA, 30 bp, Artificial Sequence
  Synthetic oligonucleotide
ctccgggaatgcggtatcccttctctgtcg

SEQ ID NO: 337525 - DNA, 30 bp, Artificial Sequence
  Synthetic oligonucleotide
tggtatggaatatacaaagatggagtgtcg

SEQ ID NO: 337526 - DNA, 30 bp, Artificial Sequence
  Synthetic oligonucleotide
ttacttcaagcatctcgatcttgggtgtcg

SEQ ID NO: 337527 - DNA, 30 bp, Artificial Sequence
  Synthetic oligonucleotide
caatataacacaatttcgggtgtggtgtcg

SEQ ID NO: 337528 - DNA, 30 bp, Artificial Sequence
  Synthetic oligonucleotide
aaagactttgcatccatagagattgtgtcg

SEQ ID NO: 337529 - DNA, 30 bp, Artificial Sequence
  Synthetic oligonucleotide
tatggaatgctctacaaggaaaaattgtcg

SEQ ID NO: 337530 - DNA, 30 bp, Artificial Sequence
  Synthetic oligonucleotide
ttgttgtaaaaatcggtagttacattgtcg

SEQ ID NO: 337531 - DNA, 30 bp, Artificial Sequence
  Synthetic oligonucleotide
ccaaggtcgcaacgggtcagcttcttgtcg

SEQ ID NO: 337532 - DNA, 30 bp, Artificial Sequence
  Synthetic oligonucleotide
gcgattacctcgtagcggcgaaggttgtcg

SEQ ID NO: 337533 - DNA, 30 bp, Artificial Sequence
  Synthetic oligonucleotide
aacgcaggagtactcctggaaaatttgtcg

SEQ ID NO: 337534 - DNA, 30 bp, Artificial Sequence
  Synthetic oligonucleotide
gttactcggtatgagattaatgatttgtcg

SEQ ID NO: 337535 - DNA, 30 bp, Artificial Sequence
  Synthetic oligonucleotide
cgtccctggtgtattgtcactattttgtcg

SEQ ID NO: 337536 - DNA, 30 bp, Artificial Sequence
  Synthetic oligonucleotide
tacggtaaggggaccggtacgctaaattcg

SEQ ID NO: 337537 - DNA, 30 bp, Artificial Sequence
  Synthetic oligonucleotide
ataacttgctatagacggtcgttaaattcg

SEQ ID NO: 337538 - DNA, 30 bp, Artificial Sequence
  Synthetic oligonucleotide
aaagtgacagtctatacggctgcgaattcg

SEQ ID NO: 337539 - DNA, 30 bp, Artificial Sequence
  Synthetic oligonucleotide
ctgcgagtcaaacccgcacgctctaattcg

SEQ ID NO: 337540 - DNA, 30 bp, Artificial Sequence
  Synthetic oligonucleotide
gctatcaccggtgctacgcctattaattcg

SEQ ID NO: 337541 - DNA, 30 bp, Artificial Sequence
  Synthetic oligonucleotide
ttattagtgtaacttctagttgcccattcg

SEQ ID NO: 337542 - DNA, 30 bp, Artificial Sequence
  Synthetic oligonucleotide
ttgcgcgcggcaagatgagcatcccattcg

SEQ ID NO: 337543 - DNA, 30 bp, Artificial Sequence
  Synthetic oligonucleotide
gccacaagacagggggcaccccgccattcg

SEQ ID NO: 337544 - DNA, 30 bp, Artificial Sequence
  Synthetic oligonucleotide
acatccagcagagcacgtcatcgtcattcg

SEQ ID NO: 337545 - DNA, 30 bp, Artificial Sequence
  Synthetic oligonucleotide
ggccaatctaattttcgttatctagattcg

SEQ ID NO: 337546 - DNA, 30 bp, Artificial Sequence
  Synthetic oligonucleotide
gccgatttgatcagatcctaacacgattcg

SEQ ID NO: 337547 - DNA, 30 bp, Artificial Sequence
  Synthetic oligonucleotide
tttactcctcggtcggacctgttggattcg

SEQ ID NO: 337548 - DNA, 30 bp, Artificial Sequence
  Synthetic oligonucleotide
tgaacttagttcgccggtgtggttgattcg

SEQ ID NO: 337549 - DNA, 30 bp, Artificial Sequence
  Synthetic oligonucleotide
accattaaccgagaaccagatctgtattcg

SEQ ID NO: 337550 - DNA, 30 bp, Artificial Sequence
  Synthetic oligonucleotide
tctccattgtcagagaccactaattattcg

SEQ ID NO: 337551 - DNA, 30 bp, Artificial Sequence
  Synthetic oligonucleotide
ctgcacggcgttaatcgcgcatgttattcg

SEQ ID NO: 337552 - DNA, 30 bp, Artificial Sequence
  Synthetic oligonucleotide
agccgggatggagttatcggcctttattcg

SEQ ID NO: 337553 - DNA, 30 bp, Artificial Sequence
  Synthetic oligonucleotide
tttactgaactaggttccggtgtttattcg

SEQ ID NO: 337554 - DNA, 30 bp, Artificial Sequence
  Synthetic oligonucleotide
tgactgctaacgcttcttggcaaaacttcg

SEQ ID NO: 337555 - DNA, 30 bp, Artificial Sequence
  Synthetic oligonucleotide
tagtccgcttctcgcaggacttcaacttcg

SEQ ID NO: 337556 - DNA, 30 bp, Artificial Sequence
  Synthetic oligonucleotide
tgttcgaatcaataatacgacggcacttcg

SEQ ID NO: 337557 - DNA, 30 bp, Artificial Sequence
  Synthetic oligonucleotide
taggtaccggcctagggaggggtaccttcg

SEQ ID NO: 337558 - DNA, 30 bp, Artificial Sequence
  Synthetic oligonucleotide
atgcattttaaagacttcctttatccttcg

SEQ ID NO: 337559 - DNA, 30 bp, Artificial Sequence
  Synthetic oligonucleotide
tttgggagtgtacgacaggaaacggcttcg

SEQ ID NO: 337560 - DNA, 31 bp, Artificial Sequence
  Synthetic oligonucleotide
ctcgcacgatataacaagtgtctcatcttcg

SEQ ID NO: 337561 - DNA, 30 bp, Artificial Sequence
  Synthetic oligonucleotide
ctccgcggagcggatgtccggatatcttcg

SEQ ID NO: 337562 - DNA, 30 bp, Artificial Sequence
  Synthetic oligonucleotide
aacacccaaaggactgggctgccttcttcg

SEQ ID NO: 337563 - DNA, 30 bp, Artificial Sequence
  Synthetic oligonucleotide
cgaagatctataattccgtcgctaagttcg

SEQ ID NO: 337564 - DNA, 30 bp, Artificial Sequence
  Synthetic oligonucleotide
ggcgttaaacagacgtcgttggagagttcg

SEQ ID NO: 337565 - DNA, 30 bp, Artificial Sequence
  Synthetic oligonucleotide
tcctgttcacaggcttatatggcgagttcg

SEQ ID NO: 337566 - DNA, 30 bp, Artificial Sequence
  Synthetic oligonucleotide
acatgaaagagcacgaaagcccggagttcg

SEQ ID NO: 337567 - DNA, 30 bp, Artificial Sequence
  Synthetic oligonucleotide
catgttggtgattacacacacatgagttcg

SEQ ID NO: 337568 - DNA, 30 bp, Artificial Sequence
  Synthetic oligonucleotide
taagtaacagcttggggggttactagttcg

SEQ ID NO: 337569 - DNA, 30 bp, Artificial Sequence
  Synthetic oligonucleotide
tcggttttgacgatggttcaatctagttcg

SEQ ID NO: 337570 - DNA, 30 bp, Artificial Sequence
  Synthetic oligonucleotide
tataagttcgcgtcactcaacttacgttcg

SEQ ID NO: 337571 - DNA, 30 bp, Artificial Sequence
  Synthetic oligonucleotide
gagatcggaccaccagaagtgatccgttcg

SEQ ID NO: 337572 - DNA, 30 bp, Artificial Sequence
  Synthetic oligonucleotide
agagcgcatttggtagcttagtagcgttcg

SEQ ID NO: 337573 - DNA, 30 bp, Artificial Sequence
  Synthetic oligonucleotide
tcctcggccctgcaattgctaccgcgttcg

SEQ ID NO: 337574 - DNA, 30 bp, Artificial Sequence
  Synthetic oligonucleotide
tctactaaggctgtgagatccccgcgttcg

SEQ ID NO: 337575 - DNA, 30 bp, Artificial Sequence
  Synthetic oligonucleotide
atcagaaacggtcggctggtgctgcgttcg

SEQ ID NO: 337576 - DNA, 30 bp, Artificial Sequence
  Synthetic oligonucleotide
ggccggtactagcatttctatggtcgttcg

SEQ ID NO: 337577 - DNA, 30 bp, Artificial Sequence
  Synthetic oligonucleotide
taaggttttttcgggacagcttacggttcg

SEQ ID NO: 337578 - DNA, 30 bp, Artificial Sequence
  Synthetic oligonucleotide
cagtatttaagaatcagtacaggcggttcg

SEQ ID NO: 337579 - DNA, 30 bp, Artificial Sequence
  Synthetic oligonucleotide
taactgtaggaattctgggataggggttcg

SEQ ID NO: 337580 - DNA, 30 bp, Artificial Sequence
  Synthetic oligonucleotide
ttgattcttcaatcgtaacaaaatggttcg

SEQ ID NO: 337581 - DNA, 30 bp, Artificial Sequence
  Synthetic oligonucleotide
cctctttagaagctcccctcgactggttcg

SEQ ID NO: 337582 - DNA, 30 bp, Artificial Sequence
  Synthetic oligonucleotide
ttcatggtgccaagaaagacgcctggttcg

SEQ ID NO: 337583 - DNA, 30 bp, Artificial Sequence
  Synthetic oligonucleotide
gatatcggctaactcttacatattggttcg

SEQ ID NO: 337584 - DNA, 30 bp, Artificial Sequence
  Synthetic oligonucleotide
agactggaccgtaggatataggttggttcg

SEQ ID NO: 337585 - DNA, 30 bp, Artificial Sequence
  Synthetic oligonucleotide
atggtcccactgacgcttgccgaatgttcg

SEQ ID NO: 337586 - DNA, 30 bp, Artificial Sequence
  Synthetic oligonucleotide
taactcgcaacggactgtgtctcatgttcg

SEQ ID NO: 337587 - DNA, 30 bp, Artificial Sequence
  Synthetic oligonucleotide
tatagaacaagcaagttgcggcactgttcg

SEQ ID NO: 337588 - DNA, 30 bp, Artificial Sequence
  Synthetic oligonucleotide
gacttctcttaaggtagaacgacttgttcg

SEQ ID NO: 337589 - DNA, 30 bp, Artificial Sequence
  Synthetic oligonucleotide
gccaaattcgctccggggacctcttgttcg

SEQ ID NO: 337590 - DNA, 30 bp, Artificial Sequence
  Synthetic oligonucleotide
tcttccgcagtcatattcaaagaaatttcg

SEQ ID NO: 337591 - DNA, 30 bp, Artificial Sequence
  Synthetic oligonucleotide
ttggacctattggctcatcgaccaatttcg

SEQ ID NO: 337592 - DNA, 30 bp, Artificial Sequence
  Synthetic oligonucleotide
aacgttacattttgtcgtaattgaatttcg

SEQ ID NO: 337593 - DNA, 30 bp, Artificial Sequence
  Synthetic oligonucleotide
ccgtccttaaggaaatgcttcaacatttcg

SEQ ID NO: 337594 - DNA, 30 bp, Artificial Sequence
  Synthetic oligonucleotide
attgctagacgggacaggccggacatttcg

SEQ ID NO: 337595 - DNA, 30 bp, Artificial Sequence
  Synthetic oligonucleotide
gcaccctaataggtccaaccagttatttcg

SEQ ID NO: 337596 - DNA, 30 bp, Artificial Sequence
  Synthetic oligonucleotide
ccagtgctgatgctgagttaccgactttcg

SEQ ID NO: 337597 - DNA, 30 bp, Artificial Sequence
  Synthetic oligonucleotide
cactttgggttcacgtcattagtactttcg

SEQ ID NO: 337598 - DNA, 30 bp, Artificial Sequence
  Synthetic oligonucleotide
tacctaaacggggatgatctgcccctttcg

SEQ ID NO: 337599 - DNA, 30 bp, Artificial Sequence
  Synthetic oligonucleotide
tggtgatacagacataagtacgccctttcg

SEQ ID NO: 337600 - DNA, 30 bp, Artificial Sequence
  Synthetic oligonucleotide
agtgaaatcagaagccctcttggtctttcg

SEQ ID NO: 337601 - DNA, 30 bp, Artificial Sequence
  Synthetic oligonucleotide
tacttttgcgaggagtgtcttggtctttcg

SEQ ID NO: 337602 - DNA, 30 bp, Artificial Sequence
  Synthetic oligonucleotide
actcagccacgggcttacggtaacgtttcg

SEQ ID NO: 337603 - DNA, 30 bp, Artificial Sequence
  Synthetic oligonucleotide
ggctgacttctattggctaccaaggtttcg

SEQ ID NO: 337604 - DNA, 30 bp, Artificial Sequence
  Synthetic oligonucleotide
cacgtgtacgtcgattgggccggggtttcg

SEQ ID NO: 337605 - DNA, 30 bp, Artificial Sequence
  Synthetic oligonucleotide
tctggaggatggaaagctgaactggtttcg

SEQ ID NO: 337606 - DNA, 30 bp, Artificial Sequence
  Synthetic oligonucleotide
agtgtctgaggcataagacggacattttcg

SEQ ID NO: 337607 - DNA, 30 bp, Artificial Sequence
  Synthetic oligonucleotide
ttgatatgtatgcacattggttcattttcg

SEQ ID NO: 337608 - DNA, 30 bp, Artificial Sequence
  Synthetic oligonucleotide
taattgagtcgagaatgggtaagattttcg

SEQ ID NO: 337609 - DNA, 30 bp, Artificial Sequence
  Synthetic oligonucleotide
aagtacgccatcaagcccatactattttcg

SEQ ID NO: 337610 - DNA, 30 bp, Artificial Sequence
  Synthetic oligonucleotide
cgttgttatcttaggataagacccttttcg

SEQ ID NO: 337611 - DNA, 30 bp, Artificial Sequence
  Synthetic oligonucleotide
ggggtaccagatgctcaatgaagcttttcg

SEQ ID NO: 337612 - DNA, 30 bp, Artificial Sequence
  Synthetic oligonucleotide
gcaaagttccctcgatgttatagcttttcg

SEQ ID NO: 337613 - DNA, 30 bp, Artificial Sequence
  Synthetic oligonucleotide
tataacgcgcgtaccctgtgacgcttttcg

SEQ ID NO: 337614 - DNA, 30 bp, Artificial Sequence
  Synthetic oligonucleotide
aaaccttcccacgagcgcctggtcttttcg

SEQ ID NO: 337615 - DNA, 30 bp, Artificial Sequence
  Synthetic oligonucleotide
ctgattaggcaactttgatatcctttttcg

SEQ ID NO: 337616 - DNA, 30 bp, Artificial Sequence
  Synthetic oligonucleotide
ttcgggttttcgaagaggggctgtttttcg

SEQ ID NO: 337617 - DNA, 30 bp, Artificial Sequence
  Synthetic oligonucleotide
gagtttacgatatggtcgccattaaaaagg

SEQ ID NO: 337618 - DNA, 30 bp, Artificial Sequence
  Synthetic oligonucleotide
attatactcgtctatgacatagcgaaaagg

SEQ ID NO: 337619 - DNA, 30 bp, Artificial Sequence
  Synthetic oligonucleotide
tgaatctagaacttcagagccggtaaaagg

SEQ ID NO: 337620 - DNA, 30 bp, Artificial Sequence
  Synthetic oligonucleotide
gggggctcaacatttttcctcggtaaaagg

SEQ ID NO: 337621 - DNA, 30 bp, Artificial Sequence
  Synthetic oligonucleotide
caataggtctacgctaggagcattaaaagg

SEQ ID NO: 337622 - DNA, 30 bp, Artificial Sequence
  Synthetic oligonucleotide
cacttacggtgtcgcgacggtccacaaagg

SEQ ID NO: 337623 - DNA, 30 bp, Artificial Sequence
  Synthetic oligonucleotide
atggttaaacctttagattgaggacaaagg

SEQ ID NO: 337624 - DNA, 30 bp, Artificial Sequence
  Synthetic oligonucleotide
tcatacgaagtgctgatgtctggacaaagg

SEQ ID NO: 337625 - DNA, 30 bp, Artificial Sequence
  Synthetic oligonucleotide
taaaaagttactagaatcctgcaccaaagg

SEQ ID NO: 337626 - DNA, 30 bp, Artificial Sequence
  Synthetic oligonucleotide
gaagacaatatttctgcaaagactcaaagg

SEQ ID NO: 337627 - DNA, 30 bp, Artificial Sequence
  Synthetic oligonucleotide
tgctcctttaaagggcatgagtcagaaagg

SEQ ID NO: 337628 - DNA, 30 bp, Artificial Sequence
  Synthetic oligonucleotide
agagcccgtccccgtcacgggtgagaaagg

SEQ ID NO: 337629 - DNA, 30 bp, Artificial Sequence
  Synthetic oligonucleotide
aagaacaagtgtttcgagggttgagaaagg

SEQ ID NO: 337630 - DNA, 30 bp, Artificial Sequence
  Synthetic oligonucleotide
agcttatagtgggtaagcagcctggaaagg

SEQ ID NO: 337631 - DNA, 30 bp, Artificial Sequence
  Synthetic oligonucleotide
tcttattcacggtcataaagacttgaaagg

SEQ ID NO: 337632 - DNA, 30 bp, Artificial Sequence
  Synthetic oligonucleotide
caggagcttttaaaggcagcctcataaagg

SEQ ID NO: 337633 - DNA, 30 bp, Artificial Sequence
  Synthetic oligonucleotide
aggaaaaggttgtgagtttccggataaagg

SEQ ID NO: 337634 - DNA, 30 bp, Artificial Sequence
  Synthetic oligonucleotide
cagtacgacgcttaaccggtcgtataaagg

SEQ ID NO: 337635 - DNA, 30 bp, Artificial Sequence
  Synthetic oligonucleotide
cttagctaagagggtgggcttgtataaagg

SEQ ID NO: 337636 - DNA, 30 bp, Artificial Sequence
  Synthetic oligonucleotide
tggcgttcctatgtcaatgaccactaaagg

SEQ ID NO: 337637 - DNA, 30 bp, Artificial Sequence
  Synthetic oligonucleotide
tagatagaccctcgggggaaaatctaaagg

SEQ ID NO: 337638 - DNA, 30 bp, Artificial Sequence
  Synthetic oligonucleotide
tcactccgcttacccgtacacgtctaaagg

SEQ ID NO: 337639 - DNA, 30 bp, Artificial Sequence
  Synthetic oligonucleotide
tcgttcttaaacggtggcattttctaaagg

SEQ ID NO: 337640 - DNA, 30 bp, Artificial Sequence
  Synthetic oligonucleotide
gtggttccgtgtcggtctcataagtaaagg

SEQ ID NO: 337641 - DNA, 30 bp, Artificial Sequence
  Synthetic oligonucleotide
agccgtgcagagggtccccctcagtaaagg

SEQ ID NO: 337642 - DNA, 30 bp, Artificial Sequence
  Synthetic oligonucleotide
ctccttctggttttacatataaggtaaagg

SEQ ID NO: 337643 - DNA, 30 bp, Artificial Sequence
  Synthetic oligonucleotide
ttaaaaactttcgtcaagggttggtaaagg

SEQ ID NO: 337644 - DNA, 30 bp, Artificial Sequence
  Synthetic oligonucleotide
cagatgagaaagtggcattaagtgtaaagg

SEQ ID NO: 337645 - DNA, 30 bp, Artificial Sequence
  Synthetic oligonucleotide
gaagggtagtgacctgggtgattttaaagg

SEQ ID NO: 337646 - DNA, 30 bp, Artificial Sequence
  Synthetic oligonucleotide
atcagcgcccaattgtacattttaacaagg

SEQ ID NO: 337647 - DNA, 30 bp, Artificial Sequence
  Synthetic oligonucleotide
ctcgcctaaagcgaatacactgacacaagg

SEQ ID NO: 337648 - DNA, 30 bp, Artificial Sequence
  Synthetic oligonucleotide
accatttggcgggtcaggcacatcacaagg

SEQ ID NO: 337649 - DNA, 30 bp, Artificial Sequence
  Synthetic oligonucleotide
gaatacagtacgctccagcatttcacaagg

SEQ ID NO: 337650 - DNA, 30 bp, Artificial Sequence
  Synthetic oligonucleotide
gtcccttgaatcgtaccaaagaggacaagg

SEQ ID NO: 337651 - DNA, 30 bp, Artificial Sequence
  Synthetic oligonucleotide
gtgaaggactatcgagttgacactacaagg

SEQ ID NO: 337652 - DNA, 30 bp, Artificial Sequence
  Synthetic oligonucleotide
cagacaaaggtcccgtatagccccccaagg

SEQ ID NO: 337653 - DNA, 30 bp, Artificial Sequence
  Synthetic oligonucleotide
gcgcctcgggtgctgtaatcttagccaagg

SEQ ID NO: 337654 - DNA, 30 bp, Artificial Sequence
  Synthetic oligonucleotide
acaatgttacgtgagcctgggtttccaagg

SEQ ID NO: 337655 - DNA, 30 bp, Artificial Sequence
  Synthetic oligonucleotide
tgttggttttgactgttacaataggcaagg

SEQ ID NO: 337656 - DNA, 30 bp, Artificial Sequence
  Synthetic oligonucleotide
cacatagcctcgagacggagaccggcaagg

SEQ ID NO: 337657 - DNA, 30 bp, Artificial Sequence
  Synthetic oligonucleotide
tgtggtaacctcgcgctcgcgaatgcaagg

SEQ ID NO: 337658 - DNA, 30 bp, Artificial Sequence
  Synthetic oligonucleotide
cagaagcattggtcaccccggtctgcaagg

SEQ ID NO: 337659 - DNA, 30 bp, Artificial Sequence
  Synthetic oligonucleotide
taatacgccaagcattgtggtacatcaagg

SEQ ID NO: 337660 - DNA, 30 bp, Artificial Sequence
  Synthetic oligonucleotide
ctgaacatccccgtgtttaggggatcaagg

SEQ ID NO: 337661 - DNA, 30 bp, Artificial Sequence
  Synthetic oligonucleotide
tattcgtgtgtgaattcagtgggatcaagg

SEQ ID NO: 337662 - DNA, 30 bp, Artificial Sequence
  Synthetic oligonucleotide
gtggcgcttcagcgtattaattgctcaagg

SEQ ID NO: 337663 - DNA, 30 bp, Artificial Sequence
  Synthetic oligonucleotide
tggctcgtattgcagacactgctgtcaagg

SEQ ID NO: 337664 - DNA, 29 bp, Artificial Sequence
  Synthetic oligonucleotide
tattgtactaaaacgtaaacttgtcaagg

SEQ ID NO: 337665 - DNA, 30 bp, Artificial Sequence
  Synthetic oligonucleotide
gctacgacgaatgctagttaacattcaagg

SEQ ID NO: 337666 - DNA, 30 bp, Artificial Sequence
  Synthetic oligonucleotide
cccgttaggtgaggccgaggctattcaagg

SEQ ID NO: 337667 - DNA, 30 bp, Artificial Sequence
  Synthetic oligonucleotide
acccgcccactgtatttggcagcttcaagg

SEQ ID NO: 337668 - DNA, 30 bp, Artificial Sequence
  Synthetic oligonucleotide
tttttggccacataaatcagacaaagaagg

SEQ ID NO: 337669 - DNA, 30 bp, Artificial Sequence
  Synthetic oligonucleotide
tctgtattacgcgcgatcgatccaagaagg

SEQ ID NO: 337670 - DNA, 30 bp, Artificial Sequence
  Synthetic oligonucleotide
aatggaatatgtataggattcttaagaagg

SEQ ID NO: 337671 - DNA, 30 bp, Artificial Sequence
  Synthetic oligonucleotide
gcaagtgcggtacggctcttaccgagaagg

SEQ ID NO: 337672 - DNA, 30 bp, Artificial Sequence
  Synthetic oligonucleotide
tgcggcgcagtcagtcgacctcctagaagg

SEQ ID NO: 337673 - DNA, 30 bp, Artificial Sequence
  Synthetic oligonucleotide
atctgcgctagtagtgcagagcgtagaagg

SEQ ID NO: 337674 - DNA, 30 bp, Artificial Sequence
  Synthetic oligonucleotide
gctacgagaaatatactataagtacgaagg

SEQ ID NO: 337675 - DNA, 30 bp, Artificial Sequence
  Synthetic oligonucleotide
cattgacgcttggtcatgcgagaaggaagg

SEQ ID NO: 337676 - DNA, 30 bp, Artificial Sequence
  Synthetic oligonucleotide
ccccgccaagcttgaggattggcaggaagg

SEQ ID NO: 337677 - DNA, 30 bp, Artificial Sequence
  Synthetic oligonucleotide
cacctaaggacgtgaggtggacccggaagg

SEQ ID NO: 337678 - DNA, 30 bp, Artificial Sequence
  Synthetic oligonucleotide
aactggttacataaatgttaacagggaagg

SEQ ID NO: 337679 - DNA, 30 bp, Artificial Sequence
  Synthetic oligonucleotide
atccggccgtaacgaattcccacgggaagg

SEQ ID NO: 337680 - DNA, 30 bp, Artificial Sequence
  Synthetic oligonucleotide
ggtcaggtatctgcgcccctcaggggaagg

SEQ ID NO: 337681 - DNA, 30 bp, Artificial Sequence
  Synthetic oligonucleotide
tatgtatattatagaataatagggggaagg

SEQ ID NO: 337682 - DNA, 30 bp, Artificial Sequence
  Synthetic oligonucleotide
tttaaaagcatactttaaatacctggaagg

SEQ ID NO: 337683 - DNA, 30 bp, Artificial Sequence
  Synthetic oligonucleotide
tcagagattcgaccttcctgaagtggaagg

SEQ ID NO: 337684 - DNA, 30 bp, Artificial Sequence
  Synthetic oligonucleotide
gctgatggtcactctacaataattggaagg

SEQ ID NO: 337685 - DNA, 30 bp, Artificial Sequence
  Synthetic oligonucleotide
ctgatcgctaaaaaggggcagcttggaagg

SEQ ID NO: 337686 - DNA, 30 bp, Artificial Sequence
  Synthetic oligonucleotide
gaagttgattggaggaaggccgcatgaagg

SEQ ID NO: 337687 - DNA, 30 bp, Artificial Sequence
  Synthetic oligonucleotide
gtaatgttagactctgtcggggcatgaagg

SEQ ID NO: 337688 - DNA, 30 bp, Artificial Sequence
  Synthetic oligonucleotide
gtacgcatcagctgggatgttgcatgaagg

SEQ ID NO: 337689 - DNA, 30 bp, Artificial Sequence
  Synthetic oligonucleotide
tcgaggatgggtgagtatgccggatgaagg

SEQ ID NO: 337690 - DNA, 30 bp, Artificial Sequence
  Synthetic oligonucleotide
cactttggaggggcttaagctaactgaagg

SEQ ID NO: 337691 - DNA, 30 bp, Artificial Sequence
  Synthetic oligonucleotide
gttcagtaccacaccgcaactcggtgaagg

SEQ ID NO: 337692 - DNA, 30 bp, Artificial Sequence
  Synthetic oligonucleotide
gctgcatgggggggcatcatggtgtgaagg

SEQ ID NO: 337693 - DNA, 30 bp, Artificial Sequence
  Synthetic oligonucleotide
caaacctgggtatagtattacaattgaagg

SEQ ID NO: 337694 - DNA, 30 bp, Artificial Sequence
  Synthetic oligonucleotide
taagtaggtttatctatcagcacttgaagg

SEQ ID NO: 337695 - DNA, 30 bp, Artificial Sequence
  Synthetic oligonucleotide
gagtcctcaaactctcaatatacttgaagg

SEQ ID NO: 337696 - DNA, 30 bp, Artificial Sequence
  Synthetic oligonucleotide
tataagggtattcgaactcggaacataagg

SEQ ID NO: 337697 - DNA, 30 bp, Artificial Sequence
  Synthetic oligonucleotide
gtctaaaagacggtgcgttgcagcataagg

SEQ ID NO: 337698 - DNA, 30 bp, Artificial Sequence
  Synthetic oligonucleotide
atttcgcccagggcgtaatgtaggataagg

SEQ ID NO: 337699 - DNA, 30 bp, Artificial Sequence
  Synthetic oligonucleotide
gcattccggcggcaacaaagccatataagg

SEQ ID NO: 337700 - DNA, 30 bp, Artificial Sequence
  Synthetic oligonucleotide
ggttaacaccacaccaatcggcttataagg

SEQ ID NO: 337701 - DNA, 30 bp, Artificial Sequence
  Synthetic oligonucleotide
ccgaagatcggtccgtcagtgaaactaagg

SEQ ID NO: 337702 - DNA, 30 bp, Artificial Sequence
  Synthetic oligonucleotide
tcttataacatggtccttttaagactaagg

SEQ ID NO: 337703 - DNA, 30 bp, Artificial Sequence
  Synthetic oligonucleotide
gaaacgaggggaactcgcggtcgactaagg

SEQ ID NO: 337704 - DNA, 30 bp, Artificial Sequence
  Synthetic oligonucleotide
ttccgtctcttacagaaagcttagctaagg

SEQ ID NO: 337705 - DNA, 30 bp, Artificial Sequence
  Synthetic oligonucleotide
ggaagattaggtcttagctcaaggctaagg

SEQ ID NO: 337706 - DNA, 30 bp, Artificial Sequence
  Synthetic oligonucleotide
cagatcaaaaccgataactgctggctaagg

SEQ ID NO: 337707 - DNA, 30 bp, Artificial Sequence
  Synthetic oligonucleotide
cgagtatagatttaccatgtgcgtctaagg

SEQ ID NO: 337708 - DNA, 30 bp, Artificial Sequence
  Synthetic oligonucleotide
attcagaattacaattatgagggagtaagg

SEQ ID NO: 337709 - DNA, 30 bp, Artificial Sequence
  Synthetic oligonucleotide
aaggctttgacagttaggtatgtcgtaagg

SEQ ID NO: 337710 - DNA, 30 bp, Artificial Sequence
  Synthetic oligonucleotide
ttgtctctatactagcacagattcgtaagg

SEQ ID NO: 337711 - DNA, 30 bp, Artificial Sequence
  Synthetic oligonucleotide
cttagattcagcacattgattaaggtaagg

SEQ ID NO: 337712 - DNA, 30 bp, Artificial Sequence
  Synthetic oligonucleotide
taatcactgggtatcagtgtatatgtaagg

SEQ ID NO: 337713 - DNA, 30 bp, Artificial Sequence
  Synthetic oligonucleotide
acggtgttctaacgggtaggtagtgtaagg

SEQ ID NO: 337714 - DNA, 30 bp, Artificial Sequence
  Synthetic oligonucleotide
tccgaggcattcgggtcgtgatttgtaagg

SEQ ID NO: 337715 - DNA, 30 bp, Artificial Sequence
  Synthetic oligonucleotide
gagaatcaagcctacgttcgtaaattaagg

SEQ ID NO: 337716 - DNA, 30 bp, Artificial Sequence
  Synthetic oligonucleotide
tggggcttcttgtgacccaatccattaagg

SEQ ID NO: 337717 - DNA, 30 bp, Artificial Sequence
  Synthetic oligonucleotide
tactgctaacgcaggttctcgggattaagg

SEQ ID NO: 337718 - DNA, 30 bp, Artificial Sequence
  Synthetic oligonucleotide
ggatccttaaaggccataattcgcttaagg

SEQ ID NO: 337719 - DNA, 30 bp, Artificial Sequence
  Synthetic oligonucleotide
gccaggttggtgttttatagagcgttaagg

SEQ ID NO: 337720 - DNA, 30 bp, Artificial Sequence
  Synthetic oligonucleotide
ccatacgagcctagggccacctggttaagg

SEQ ID NO: 337721 - DNA, 30 bp, Artificial Sequence
  Synthetic oligonucleotide
tagacctacaccaaaatgtgagatttaagg

SEQ ID NO: 337722 - DNA, 30 bp, Artificial Sequence
  Synthetic oligonucleotide
gagccacaatgcggccggggaccaaacagg

SEQ ID NO: 337723 - DNA, 30 bp, Artificial Sequence
  Synthetic oligonucleotide
gcacccctggagtgaggttccttcaacagg

SEQ ID NO: 337724 - DNA, 30 bp, Artificial Sequence
  Synthetic oligonucleotide
ttccctttaagtgcgaaggacaggaacagg

SEQ ID NO: 337725 - DNA, 30 bp, Artificial Sequence
  Synthetic oligonucleotide
gacggcgggttggcggccgcacggaacagg

SEQ ID NO: 337726 - DNA, 30 bp, Artificial Sequence
  Synthetic oligonucleotide
agaggggcaaggctcgtagtccataacagg

SEQ ID NO: 337727 - DNA, 30 bp, Artificial Sequence
  Synthetic oligonucleotide
gctcgcaggaccttatacggggataacagg

SEQ ID NO: 337728 - DNA, 30 bp, Artificial Sequence
  Synthetic oligonucleotide
gtttggatacgtgctgtgtcgtcgcacagg

SEQ ID NO: 337729 - DNA, 30 bp, Artificial Sequence
  Synthetic oligonucleotide
aaggcgtataaggtgatgcctctgcacagg

SEQ ID NO: 337730 - DNA, 30 bp, Artificial Sequence
  Synthetic oligonucleotide
ggccgagcttcctcgggccgtttgcacagg

SEQ ID NO: 337731 - DNA, 30 bp, Artificial Sequence
  Synthetic oligonucleotide
ttatataggaggcggtgatcggatcacagg

SEQ ID NO: 337732 - DNA, 30 bp, Artificial Sequence
  Synthetic oligonucleotide
ggtcggaataaagattgtcgatatcacagg

SEQ ID NO: 337733 - DNA, 30 bp, Artificial Sequence
  Synthetic oligonucleotide
ctaaaagggttcttcttatcctctcacagg

SEQ ID NO: 337734 - DNA, 30 bp, Artificial Sequence
  Synthetic oligonucleotide
gggaagtgtgacgatcttagtggtgacagg

SEQ ID NO: 337735 - DNA, 30 bp, Artificial Sequence
  Synthetic oligonucleotide
attacggctctgtgattggtaaaatacagg

SEQ ID NO: 337736 - DNA, 30 bp, Artificial Sequence
  Synthetic oligonucleotide
tatcatgaagccgtcgggtatctatacagg

SEQ ID NO: 337737 - DNA, 30 bp, Artificial Sequence
  Synthetic oligonucleotide
gcctgtacgtttgtccacggtctatacagg

SEQ ID NO: 337738 - DNA, 30 bp, Artificial Sequence
  Synthetic oligonucleotide
gatctgggcacgcggtgaaaccgctacagg

SEQ ID NO: 337739 - DNA, 30 bp, Artificial Sequence
  Synthetic oligonucleotide
ctgaagcagtctgacgtcgatggctacagg

SEQ ID NO: 337740 - DNA, 30 bp, Artificial Sequence
  Synthetic oligonucleotide
ttaggaggggtaaagtgttatttgtacagg

SEQ ID NO: 337741 - DNA, 30 bp, Artificial Sequence
  Synthetic oligonucleotide
tgcctctgagtgtataaccttttgtacagg

SEQ ID NO: 337742 - DNA, 30 bp, Artificial Sequence
  Synthetic oligonucleotide
gacatgttaacatttatatggagaaccagg

SEQ ID NO: 337743 - DNA, 30 bp, Artificial Sequence
  Synthetic oligonucleotide
cggtgggtagacagactaagaataaccagg

SEQ ID NO: 337744 - DNA, 30 bp, Artificial Sequence
  Synthetic oligonucleotide
gaagcagttttagtacagacgcgtaccagg

SEQ ID NO: 337745 - DNA, 30 bp, Artificial Sequence
  Synthetic oligonucleotide
ataaactagaaaatgtgtcaccggcccagg

SEQ ID NO: 337746 - DNA, 30 bp, Artificial Sequence
  Synthetic oligonucleotide
catacgtctcggcaggaacaggggcccagg

SEQ ID NO: 337747 - DNA, 30 bp, Artificial Sequence
  Synthetic oligonucleotide
tagactaggtcagttgggctacatcccagg

SEQ ID NO: 337748 - DNA, 30 bp, Artificial Sequence
  Synthetic oligonucleotide
acggtactgctgcgtattaatgaagccagg

SEQ ID NO: 337749 - DNA, 30 bp, Artificial Sequence
  Synthetic oligonucleotide
tctccgatatttatacttggaacagccagg

SEQ ID NO: 337750 - DNA, 30 bp, Artificial Sequence
  Synthetic oligonucleotide
cttctgtaggacacgtcaaagcgagccagg

SEQ ID NO: 337751 - DNA, 30 bp, Artificial Sequence
  Synthetic oligonucleotide
tgcgtagctcttaagttccagctagccagg

SEQ ID NO: 337752 - DNA, 30 bp, Artificial Sequence
  Synthetic oligonucleotide
attgcactttcggattccagtagcgccagg

SEQ ID NO: 337753 - DNA, 30 bp, Artificial Sequence
  Synthetic oligonucleotide
tgctagggaggggtcgggacgactgccagg

SEQ ID NO: 337754 - DNA, 30 bp, Artificial Sequence
  Synthetic oligonucleotide
tctccacattctaggttacgagcatccagg

SEQ ID NO: 337755 - DNA, 30 bp, Artificial Sequence
  Synthetic oligonucleotide
ctataagtggctcaggttaaaacaagcagg

SEQ ID NO: 337756 - DNA, 30 bp, Artificial Sequence
  Synthetic oligonucleotide
gagtcaagacgtatctgcggcgagagcagg

SEQ ID NO: 337757 - DNA, 30 bp, Artificial Sequence
  Synthetic oligonucleotide
caggtaccaattaaaagggggcggagcagg

SEQ ID NO: 337758 - DNA, 30 bp, Artificial Sequence
  Synthetic oligonucleotide
tcgcttcgagcaatacctggggttagcagg

SEQ ID NO: 337759 - DNA, 30 bp, Artificial Sequence
  Synthetic oligonucleotide
gtgtggcaccttccaaaagctgttagcagg

SEQ ID NO: 337760 - DNA, 31 bp, Artificial Sequence
  Synthetic oligonucleotide
ctgtgatgcttcagaggatacctcacgcagg

SEQ ID NO: 337761 - DNA, 30 bp, Artificial Sequence
  Synthetic oligonucleotide
gcgcaagtaaccgaccgcgttggacgcagg

SEQ ID NO: 337762 - DNA, 30 bp, Artificial Sequence
  Synthetic oligonucleotide
ccttacagcaatatctggacaaaccgcagg

SEQ ID NO: 337763 - DNA, 30 bp, Artificial Sequence
  Synthetic oligonucleotide
tctgtgatccataattcccgcgcgcgcagg

SEQ ID NO: 337764 - DNA, 30 bp, Artificial Sequence
  Synthetic oligonucleotide
actaatccgtagagtttcgaacatcgcagg

SEQ ID NO: 337765 - DNA, 30 bp, Artificial Sequence
  Synthetic oligonucleotide
attctaaggtattggtacccccgaggcagg

SEQ ID NO: 337766 - DNA, 30 bp, Artificial Sequence
  Synthetic oligonucleotide
tggtaacatagtataaggtttctaggcagg

SEQ ID NO: 337767 - DNA, 30 bp, Artificial Sequence
  Synthetic oligonucleotide
cgcgtaaacgcccttatggacatcggcagg

SEQ ID NO: 337768 - DNA, 30 bp, Artificial Sequence
  Synthetic oligonucleotide
gggtttcattgggtctggcagtatggcagg

SEQ ID NO: 337769 - DNA, 30 bp, Artificial Sequence
  Synthetic oligonucleotide
taatttaatcggcccgaaggaattggcagg

SEQ ID NO: 337770 - DNA, 30 bp, Artificial Sequence
  Synthetic oligonucleotide
tgtccattgtgagctagttacgcatgcagg

SEQ ID NO: 337771 - DNA, 30 bp, Artificial Sequence
  Synthetic oligonucleotide
gccagaccgtgcacggaattgttctgcagg

SEQ ID NO: 337772 - DNA, 30 bp, Artificial Sequence
  Synthetic oligonucleotide
acgggtatatatcccctagggtattgcagg

SEQ ID NO: 337773 - DNA, 30 bp, Artificial Sequence
  Synthetic oligonucleotide
ggatgtaacgctccgctggtaagaatcagg

SEQ ID NO: 337774 - DNA, 30 bp, Artificial Sequence
  Synthetic oligonucleotide
tccccaccggcggcatcgctcaacatcagg

SEQ ID NO: 337775 - DNA, 31 bp, Artificial Sequence
  Synthetic oligonucleotide
acacgggtgaatacgggacccgtccatcagg

SEQ ID NO: 337776 - DNA, 30 bp, Artificial Sequence
  Synthetic oligonucleotide
tttttaccgccgagactatcggatatcagg

SEQ ID NO: 337777 - DNA, 30 bp, Artificial Sequence
  Synthetic oligonucleotide
cctggacgtactatacagatatgtatcagg

SEQ ID NO: 337778 - DNA, 30 bp, Artificial Sequence
  Synthetic oligonucleotide
tgagaatatattaaagacagcgcactcagg

SEQ ID NO: 337779 - DNA, 30 bp, Artificial Sequence
  Synthetic oligonucleotide
cacgggtggcaaatcgactggatactcagg

SEQ ID NO: 337780 - DNA, 30 bp, Artificial Sequence
  Synthetic oligonucleotide
ccacgtgagctggatacatgtaccctcagg

SEQ ID NO: 337781 - DNA, 30 bp, Artificial Sequence
  Synthetic oligonucleotide
ggcattggatggagttcacacaggctcagg

SEQ ID NO: 337782 - DNA, 30 bp, Artificial Sequence
  Synthetic oligonucleotide
aaaaatatcgggaactcataccggctcagg

SEQ ID NO: 337783 - DNA, 30 bp, Artificial Sequence
  Synthetic oligonucleotide
ttatgactgtatacgttgtccatgctcagg

SEQ ID NO: 337784 - DNA, 30 bp, Artificial Sequence
  Synthetic oligonucleotide
cagcggactgtttcagccgaagtgctcagg

SEQ ID NO: 337785 - DNA, 30 bp, Artificial Sequence
  Synthetic oligonucleotide
aacgttaatgttcgtaaggaacatctcagg

SEQ ID NO: 337786 - DNA, 30 bp, Artificial Sequence
  Synthetic oligonucleotide
ccgccttcgtgcgaagcgtagagtctcagg

SEQ ID NO: 337787 - DNA, 30 bp, Artificial Sequence
  Synthetic oligonucleotide
acttgctgagagagagttctacgtctcagg

SEQ ID NO: 337788 - DNA, 30 bp, Artificial Sequence
  Synthetic oligonucleotide
tggaagcctaagagtaaatctctggtcagg

SEQ ID NO: 337789 - DNA, 30 bp, Artificial Sequence
  Synthetic oligonucleotide
caacatagtcatttcctgcttttggtcagg

SEQ ID NO: 337790 - DNA, 30 bp, Artificial Sequence
  Synthetic oligonucleotide
ctcaacggataaccgtccagggtattcagg

SEQ ID NO: 337791 - DNA, 30 bp, Artificial Sequence
  Synthetic oligonucleotide
atttgaattcaactggttatttacttcagg

SEQ ID NO: 337792 - DNA, 30 bp, Artificial Sequence
  Synthetic oligonucleotide
ttaggggggtgattccataaacgcttcagg

SEQ ID NO: 337793 - DNA, 30 bp, Artificial Sequence
  Synthetic oligonucleotide
atcggctggttcaaaattgttacgttcagg

SEQ ID NO: 337794 - DNA, 30 bp, Artificial Sequence
  Synthetic oligonucleotide
ccctgggctgtactcacttctggtttcagg

SEQ ID NO: 337795 - DNA, 30 bp, Artificial Sequence
  Synthetic oligonucleotide
ctcaggtcaaggtaagggaattgtttcagg

SEQ ID NO: 337796 - DNA, 30 bp, Artificial Sequence
  Synthetic oligonucleotide
atttgtagagagtctctaatacaaaagagg

SEQ ID NO: 337797 - DNA, 30 bp, Artificial Sequence
  Synthetic oligonucleotide
ggccccctgtgtatgcttactggaaagagg

SEQ ID NO: 337798 - DNA, 30 bp, Artificial Sequence
  Synthetic oligonucleotide
aaaaacatttacccagtccacgccaagagg

SEQ ID NO: 337799 - DNA, 30 bp, Artificial Sequence
  Synthetic oligonucleotide
ctttgtatatatgttttaaaacagaagagg

SEQ ID NO: 337800 - DNA, 30 bp, Artificial Sequence
  Synthetic oligonucleotide
caaataacagtggtctcggtcacgaagagg

SEQ ID NO: 337801 - DNA, 30 bp, Artificial Sequence
  Synthetic oligonucleotide
tctccctatcgtctaagccccttcgagagg

SEQ ID NO: 337802 - DNA, 30 bp, Artificial Sequence
  Synthetic oligonucleotide
aaattgtaaaggcataagtaagctgagagg

SEQ ID NO: 337803 - DNA, 30 bp, Artificial Sequence
  Synthetic oligonucleotide
tggtatcctgaattttgaagtacatagagg

SEQ ID NO: 337804 - DNA, 30 bp, Artificial Sequence
  Synthetic oligonucleotide
acccggctctgtaaggcatcctcctagagg

SEQ ID NO: 337805 - DNA, 30 bp, Artificial Sequence
  Synthetic oligonucleotide
atgagctttagagccgctgtatgctagagg

SEQ ID NO: 337806 - DNA, 30 bp, Artificial Sequence
  Synthetic oligonucleotide
gtagtattttaggcgacagacatgtagagg

SEQ ID NO: 337807 - DNA, 30 bp, Artificial Sequence
  Synthetic oligonucleotide
attcacggaaaatcatccagatattagagg

SEQ ID NO: 337808 - DNA, 29 bp, Artificial Sequence
  Synthetic oligonucleotide
atgacgcgttctattaaggccgttagagg

SEQ ID NO: 337809 - DNA, 30 bp, Artificial Sequence
  Synthetic oligonucleotide
tcgtaatcggtgttcgtattctcaacgagg

SEQ ID NO: 337810 - DNA, 30 bp, Artificial Sequence
  Synthetic oligonucleotide
taacttgtcctatcggcaattcgaacgagg

SEQ ID NO: 337811 - DNA, 30 bp, Artificial Sequence
  Synthetic oligonucleotide
acgacctggcaagtgacccaccccacgagg

SEQ ID NO: 337812 - DNA, 30 bp, Artificial Sequence
  Synthetic oligonucleotide
tattcaaagtttcatataaaatccacgagg

SEQ ID NO: 337813 - DNA, 30 bp, Artificial Sequence
  Synthetic oligonucleotide
cctgtgctgggaccatcagtcagtacgagg

SEQ ID NO: 337814 - DNA, 30 bp, Artificial Sequence
  Synthetic oligonucleotide
ctcgctgccttacggtcactccaaccgagg

SEQ ID NO: 337815 - DNA, 30 bp, Artificial Sequence
  Synthetic oligonucleotide
ataagggcgtgtacccccggggcaccgagg

SEQ ID NO: 337816 - DNA, 30 bp, Artificial Sequence
  Synthetic oligonucleotide
agttacatagttgtcgtgaagagcccgagg

SEQ ID NO: 337817 - DNA, 30 bp, Artificial Sequence
  Synthetic oligonucleotide
cttgcgttcatgtcgagcccgagcccgagg

SEQ ID NO: 337818 - DNA, 30 bp, Artificial Sequence
  Synthetic oligonucleotide
ggagccgcttatcccaccctgggcccgagg

SEQ ID NO: 337819 - DNA, 30 bp, Artificial Sequence
  Synthetic oligonucleotide
cctggaatcaagattcaggatggtccgagg

SEQ ID NO: 337820 - DNA, 30 bp, Artificial Sequence
  Synthetic oligonucleotide
ctcggaagcatcacgaggccttgagcgagg

SEQ ID NO: 337821 - DNA, 30 bp, Artificial Sequence
  Synthetic oligonucleotide
gaacaagactggtatgtcttatacgcgagg

SEQ ID NO: 337822 - DNA, 30 bp, Artificial Sequence
  Synthetic oligonucleotide
tgtccctgttatcctttaggcgccgcgagg

SEQ ID NO: 337823 - DNA, 30 bp, Artificial Sequence
  Synthetic oligonucleotide
gttatcgggatggacgcgggagcggcgagg

SEQ ID NO: 337824 - DNA, 30 bp, Artificial Sequence
  Synthetic oligonucleotide
tttcggatggcgactggcaccgctgcgagg

SEQ ID NO: 337825 - DNA, 30 bp, Artificial Sequence
  Synthetic oligonucleotide
ctcttccacaactaaaaacttgcatcgagg

SEQ ID NO: 337826 - DNA, 30 bp, Artificial Sequence
  Synthetic oligonucleotide
tttgagaagtgggcatggcaatcctcgagg

SEQ ID NO: 337827 - DNA, 30 bp, Artificial Sequence
  Synthetic oligonucleotide
gggtcatcagggaccaggatttagtcgagg

SEQ ID NO: 337828 - DNA, 30 bp, Artificial Sequence
  Synthetic oligonucleotide
tacacctcccggatcggtgagacttcgagg

SEQ ID NO: 337829 - DNA, 30 bp, Artificial Sequence
  Synthetic oligonucleotide
gaatgtgacagagtatgtgagaacaggagg

SEQ ID NO: 337830 - DNA, 30 bp, Artificial Sequence
  Synthetic oligonucleotide
tatccctccacgagaccgggtcagaggagg

SEQ ID NO: 337831 - DNA, 30 bp, Artificial Sequence
  Synthetic oligonucleotide
gctccgtctgtgggtattagtaggaggagg

SEQ ID NO: 337832 - DNA, 30 bp, Artificial Sequence
  Synthetic oligonucleotide
tatgccatgcgtgagtgtacccataggagg

SEQ ID NO: 337833 - DNA, 30 bp, Artificial Sequence
  Synthetic oligonucleotide
ggaacttccacactagattcatataggagg

SEQ ID NO: 337834 - DNA, 30 bp, Artificial Sequence
  Synthetic oligonucleotide
tggcgataatccgctgcactataacggagg

SEQ ID NO: 337835 - DNA, 30 bp, Artificial Sequence
  Synthetic oligonucleotide
gcatcgcgggactctagcgcctgtcggagg

SEQ ID NO: 337836 - DNA, 30 bp, Artificial Sequence
  Synthetic oligonucleotide
gtactgtaaggggcttaatgtattcggagg

SEQ ID NO: 337837 - DNA, 30 bp, Artificial Sequence
  Synthetic oligonucleotide
ttacaatgccgtcattccctctcagggagg

SEQ ID NO: 337838 - DNA, 30 bp, Artificial Sequence
  Synthetic oligonucleotide
gaatgttacagtgagtgttttagcgggagg

SEQ ID NO: 337839 - DNA, 30 bp, Artificial Sequence
  Synthetic oligonucleotide
gttcgctaaggaaccggttcttcggggagg

SEQ ID NO: 337840 - DNA, 30 bp, Artificial Sequence
  Synthetic oligonucleotide
taactatggttggtcaggaaatcatggagg

SEQ ID NO: 337841 - DNA, 30 bp, Artificial Sequence
  Synthetic oligonucleotide
aatgactccaccctcccgatgctatggagg

SEQ ID NO: 337842 - DNA, 30 bp, Artificial Sequence
  Synthetic oligonucleotide
ctgattagtcataatgcgcactactggagg

SEQ ID NO: 337843 - DNA, 30 bp, Artificial Sequence
  Synthetic oligonucleotide
tatctaacacgggggcactaatcgtggagg

SEQ ID NO: 337844 - DNA, 30 bp, Artificial Sequence
  Synthetic oligonucleotide
acgcggcataatggtgttatgcattggagg

SEQ ID NO: 337845 - DNA, 30 bp, Artificial Sequence
  Synthetic oligonucleotide
atgcgcatccatcctactgaggattggagg

SEQ ID NO: 337846 - DNA, 30 bp, Artificial Sequence
  Synthetic oligonucleotide
tctcagtttgtgtcagccggttattggagg

SEQ ID NO: 337847 - DNA, 30 bp, Artificial Sequence
  Synthetic oligonucleotide
gttctgttataaacctctataacactgagg

SEQ ID NO: 337848 - DNA, 30 bp, Artificial Sequence
  Synthetic oligonucleotide
tcagttacttaatggtttaatcagctgagg

SEQ ID NO: 337849 - DNA, 30 bp, Artificial Sequence
  Synthetic oligonucleotide
tgccggcgacgggacggcaagaggctgagg

SEQ ID NO: 337850 - DNA, 27 bp, Artificial Sequence
  Synthetic oligonucleotide
gctagctgatacccggagagtctgagg

SEQ ID NO: 337851 - DNA, 30 bp, Artificial Sequence
  Synthetic oligonucleotide
ctacgcgacccgcgccccagcggagtgagg

SEQ ID NO: 337852 - DNA, 30 bp, Artificial Sequence
  Synthetic oligonucleotide
tgtttttaacgggcgatgattcacgtgagg

SEQ ID NO: 337853 - DNA, 30 bp, Artificial Sequence
  Synthetic oligonucleotide
gataatctatatgagcaactagccgtgagg

SEQ ID NO: 337854 - DNA, 30 bp, Artificial Sequence
  Synthetic oligonucleotide
tattcatggggccacgactcgcgcgtgagg

SEQ ID NO: 337855 - DNA, 30 bp, Artificial Sequence
  Synthetic oligonucleotide
cgactgcgacgttaatctccaggcgtgagg

SEQ ID NO: 337856 - DNA, 30 bp, Artificial Sequence
  Synthetic oligonucleotide
gtaccggttttcagcgcccttatggtgagg

SEQ ID NO: 337857 - DNA, 30 bp, Artificial Sequence
  Synthetic oligonucleotide
tgttcgggtttgttggcggcggatgtgagg

SEQ ID NO: 337858 - DNA, 30 bp, Artificial Sequence
  Synthetic oligonucleotide
gcatagattgctatgccgctgtctgtgagg

SEQ ID NO: 337859 - DNA, 30 bp, Artificial Sequence
  Synthetic oligonucleotide
aatgctcggtatcaacataaggaattgagg

SEQ ID NO: 337860 - DNA, 30 bp, Artificial Sequence
  Synthetic oligonucleotide
tgtgggcagtattttccaagttccttgagg

SEQ ID NO: 337861 - DNA, 30 bp, Artificial Sequence
  Synthetic oligonucleotide
caagattacatgtgaaaaggtcggttgagg

SEQ ID NO: 337862 - DNA, 30 bp, Artificial Sequence
  Synthetic oligonucleotide
aacggccaggctccatgggaaagtttgagg

SEQ ID NO: 337863 - DNA, 30 bp, Artificial Sequence
  Synthetic oligonucleotide
tgcatggatgaaataaatcggggtttgagg

SEQ ID NO: 337864 - DNA, 30 bp, Artificial Sequence
  Synthetic oligonucleotide
aggtttctaaacccagaggtggttttgagg

SEQ ID NO: 337865 - DNA, 30 bp, Artificial Sequence
  Synthetic oligonucleotide
tagatgccgttatgttttaatgcaaatagg

SEQ ID NO: 337866 - DNA, 30 bp, Artificial Sequence
  Synthetic oligonucleotide
tccgtcgacgtaggtggaattgagaatagg

SEQ ID NO: 337867 - DNA, 30 bp, Artificial Sequence
  Synthetic oligonucleotide
atttaaaaactgatcaggacagggaatagg

SEQ ID NO: 337868 - DNA, 30 bp, Artificial Sequence
  Synthetic oligonucleotide
gataaaaggttcaggcactactggaatagg

SEQ ID NO: 337869 - DNA, 30 bp, Artificial Sequence
  Synthetic oligonucleotide
agtagataacagtccgaatggttgaatagg

SEQ ID NO: 337870 - DNA, 30 bp, Artificial Sequence
  Synthetic oligonucleotide
tgtaggaagcatgaaaatacatttaatagg

SEQ ID NO: 337871 - DNA, 30 bp, Artificial Sequence
  Synthetic oligonucleotide
tcctataaccgtctgagactgaaacatagg

SEQ ID NO: 337872 - DNA, 30 bp, Artificial Sequence
  Synthetic oligonucleotide
atcatattttgtaactcatcctaacatagg

SEQ ID NO: 337873 - DNA, 30 bp, Artificial Sequence
  Synthetic oligonucleotide
tctttcatgtgtctctgggaaacccatagg

SEQ ID NO: 337874 - DNA, 30 bp, Artificial Sequence
  Synthetic oligonucleotide
ggatacctagaaacgtgaaattcccatagg

SEQ ID NO: 337875 - DNA, 30 bp, Artificial Sequence
  Synthetic oligonucleotide
cttccgtggtacataacctcccggcatagg

SEQ ID NO: 337876 - DNA, 30 bp, Artificial Sequence
  Synthetic oligonucleotide
ctggaaggagtacacatccctactcatagg

SEQ ID NO: 337877 - DNA, 30 bp, Artificial Sequence
  Synthetic oligonucleotide
ctacgttacaattgtatatagggtcatagg

SEQ ID NO: 337878 - DNA, 30 bp, Artificial Sequence
  Synthetic oligonucleotide
agttgcgcgtgacagatactatccgatagg

SEQ ID NO: 337879 - DNA, 30 bp, Artificial Sequence
  Synthetic oligonucleotide
ctagaactgccgtaactacgcttcgatagg

SEQ ID NO: 337880 - DNA, 30 bp, Artificial Sequence
  Synthetic oligonucleotide
ggctcggtctgcagatgattggaggatagg

SEQ ID NO: 337881 - DNA, 30 bp, Artificial Sequence
  Synthetic oligonucleotide
ggttgggggtggttttcgatccgggatagg

SEQ ID NO: 337882 - DNA, 30 bp, Artificial Sequence
  Synthetic oligonucleotide
cacaggatgaataggttcatctaatatagg

SEQ ID NO: 337883 - DNA, 30 bp, Artificial Sequence
  Synthetic oligonucleotide
tatccgcgatgtacgcaagtttgctatagg

SEQ ID NO: 337884 - DNA, 30 bp, Artificial Sequence
  Synthetic oligonucleotide
tagtgtcgtaagcgggacctgatctatagg

SEQ ID NO: 337885 - DNA, 30 bp, Artificial Sequence
  Synthetic oligonucleotide
cagtcgataaggatgtctccgaagtatagg

SEQ ID NO: 337886 - DNA, 30 bp, Artificial Sequence
  Synthetic oligonucleotide
agtgatacgcactttcgtcatcggtatagg

SEQ ID NO: 337887 - DNA, 30 bp, Artificial Sequence
  Synthetic oligonucleotide
tgctgaggtaaccctccacatggttatagg

SEQ ID NO: 337888 - DNA, 30 bp, Artificial Sequence
  Synthetic oligonucleotide
cttttaggcccccttcatcacgaaactagg

SEQ ID NO: 337889 - DNA, 30 bp, Artificial Sequence
  Synthetic oligonucleotide
ctatcttgtgggatatggactagaactagg

SEQ ID NO: 337890 - DNA, 30 bp, Artificial Sequence
  Synthetic oligonucleotide
aaaaagttagagtataaattccgcactagg

SEQ ID NO: 337891 - DNA, 30 bp, Artificial Sequence
  Synthetic oligonucleotide
agaagctatatcaagggcaccctcactagg

SEQ ID NO: 337892 - DNA, 30 bp, Artificial Sequence
  Synthetic oligonucleotide
cgatattcgcatccatcgggtttcactagg

SEQ ID NO: 337893 - DNA, 30 bp, Artificial Sequence
  Synthetic oligonucleotide
gcgaacgggtgacttgctttttgtactagg

SEQ ID NO: 337894 - DNA, 30 bp, Artificial Sequence
  Synthetic oligonucleotide
gtgatgtatgacgccggagcgtaccctagg

SEQ ID NO: 337895 - DNA, 30 bp, Artificial Sequence
  Synthetic oligonucleotide
aatcaagtggtcaaacagtcgcagcctagg

SEQ ID NO: 337896 - DNA, 30 bp, Artificial Sequence
  Synthetic oligonucleotide
tcaagtacggggttaatagtgctgcctagg

SEQ ID NO: 337897 - DNA, 30 bp, Artificial Sequence
  Synthetic oligonucleotide
cgaagaaacctcagcaatgaaaaagctagg

SEQ ID NO: 337898 - DNA, 30 bp, Artificial Sequence
  Synthetic oligonucleotide
tgctcccatgatttgtgtggacgagctagg

SEQ ID NO: 337899 - DNA, 30 bp, Artificial Sequence
  Synthetic oligonucleotide
gtaagttgccctgtcgccaagtaggctagg

SEQ ID NO: 337900 - DNA, 30 bp, Artificial Sequence
  Synthetic oligonucleotide
cctgggcaatctctagtctgagcggctagg

SEQ ID NO: 337901 - DNA, 30 bp, Artificial Sequence
  Synthetic oligonucleotide
ggctccggaagtactactactagggctagg

SEQ ID NO: 337902 - DNA, 30 bp, Artificial Sequence
  Synthetic oligonucleotide
agttagctgcaaaatagccatgtggctagg

SEQ ID NO: 337903 - DNA, 30 bp, Artificial Sequence
  Synthetic oligonucleotide
ggctgagtaaaaagtattgtgtttgctagg

SEQ ID NO: 337904 - DNA, 30 bp, Artificial Sequence
  Synthetic oligonucleotide
ccggacttcccacgtagatattttgctagg

SEQ ID NO: 337905 - DNA, 30 bp, Artificial Sequence
  Synthetic oligonucleotide
ctctgatatgagtagggtggcacatctagg

SEQ ID NO: 337906 - DNA, 30 bp, Artificial Sequence
  Synthetic oligonucleotide
gcaaaaggtcatactgcgctacgatctagg

SEQ ID NO: 337907 - DNA, 30 bp, Artificial Sequence
  Synthetic oligonucleotide
caggctgacgcacgaggtcaaccctctagg

SEQ ID NO: 337908 - DNA, 30 bp, Artificial Sequence
  Synthetic oligonucleotide
cttcgagcggaaagccgatgtttgtctagg

SEQ ID NO: 337909 - DNA, 30 bp, Artificial Sequence
  Synthetic oligonucleotide
tacggccgggtacagtaccctgattctagg

SEQ ID NO: 337910 - DNA, 30 bp, Artificial Sequence
  Synthetic oligonucleotide
gcgtcatgcctccgcgcgagcacttctagg

SEQ ID NO: 337911 - DNA, 30 bp, Artificial Sequence
  Synthetic oligonucleotide
gtgcgcacacctggggaaggctagagtagg

SEQ ID NO: 337912 - DNA, 30 bp, Artificial Sequence
  Synthetic oligonucleotide
gcttcgggttacaaacttgtctagagtagg

SEQ ID NO: 337913 - DNA, 30 bp, Artificial Sequence
  Synthetic oligonucleotide
cggttgtggccttggaatgacgttagtagg

SEQ ID NO: 337914 - DNA, 30 bp, Artificial Sequence
  Synthetic oligonucleotide
ttttcagggggagggagtgcagaccgtagg

SEQ ID NO: 337915 - DNA, 30 bp, Artificial Sequence
  Synthetic oligonucleotide
cataacccatttttaacgcccaagcgtagg

SEQ ID NO: 337916 - DNA, 30 bp, Artificial Sequence
  Synthetic oligonucleotide
ttactagtagcacaagttgtcacgcgtagg

SEQ ID NO: 337917 - DNA, 30 bp, Artificial Sequence
  Synthetic oligonucleotide
gtactcaagtaatgtttgtccatgcgtagg

SEQ ID NO: 337918 - DNA, 30 bp, Artificial Sequence
  Synthetic oligonucleotide
ccttttatcacggtttagggtaaaggtagg

SEQ ID NO: 337919 - DNA, 30 bp, Artificial Sequence
  Synthetic oligonucleotide
acgtgttatcgcataggttacgccggtagg

SEQ ID NO: 337920 - DNA, 30 bp, Artificial Sequence
  Synthetic oligonucleotide
ttgtaggccacttacagtagaaatggtagg

SEQ ID NO: 337921 - DNA, 30 bp, Artificial Sequence
  Synthetic oligonucleotide
aacactcagatccgggaacgcaatggtagg

SEQ ID NO: 337922 - DNA, 30 bp, Artificial Sequence
  Synthetic oligonucleotide
tcgcacccaaaccgggtatatcctggtagg

SEQ ID NO: 337923 - DNA, 30 bp, Artificial Sequence
  Synthetic oligonucleotide
cgctacggttaagaattccgttttggtagg

SEQ ID NO: 337924 - DNA, 30 bp, Artificial Sequence
  Synthetic oligonucleotide
aaagtggaaaccgtcgacttatcatgtagg

SEQ ID NO: 337925 - DNA, 30 bp, Artificial Sequence
  Synthetic oligonucleotide
tctaatttaggacacaccctgatatgtagg

SEQ ID NO: 337926 - DNA, 30 bp, Artificial Sequence
  Synthetic oligonucleotide
gactaacgctgactatgtgttctatgtagg

SEQ ID NO: 337927 - DNA, 30 bp, Artificial Sequence
  Synthetic oligonucleotide
ttaccgctaggattcgcgagtgcctgtagg

SEQ ID NO: 337928 - DNA, 30 bp, Artificial Sequence
  Synthetic oligonucleotide
gtttgcgctctggagggaacgggctgtagg

SEQ ID NO: 337929 - DNA, 30 bp, Artificial Sequence
  Synthetic oligonucleotide
tgaacttagagaacagatatattctgtagg

SEQ ID NO: 337930 - DNA, 30 bp, Artificial Sequence
  Synthetic oligonucleotide
ttaaatcacggctcagttctctggtgtagg

SEQ ID NO: 337931 - DNA, 30 bp, Artificial Sequence
  Synthetic oligonucleotide
cgtgtagatgtagtatggaattggtgtagg

SEQ ID NO: 337932 - DNA, 30 bp, Artificial Sequence
  Synthetic oligonucleotide
gacaatagttataaaattactcaaattagg

SEQ ID NO: 337933 - DNA, 30 bp, Artificial Sequence
  Synthetic oligonucleotide
agcattctcgaacggagaactggaattagg

SEQ ID NO: 337934 - DNA, 30 bp, Artificial Sequence
  Synthetic oligonucleotide
aacttattaggaattgaaccgtgaattagg

SEQ ID NO: 337935 - DNA, 30 bp, Artificial Sequence
  Synthetic oligonucleotide
ggaaagttatgtctgctgtccatcattagg

SEQ ID NO: 337936 - DNA, 30 bp, Artificial Sequence
  Synthetic oligonucleotide
ggcccttatgaggacttgtgacagattagg

SEQ ID NO: 337937 - DNA, 30 bp, Artificial Sequence
  Synthetic oligonucleotide
gtaaactttacacctttgactcggattagg

SEQ ID NO: 337938 - DNA, 30 bp, Artificial Sequence
  Synthetic oligonucleotide
catggttaaggcatgtgtacaaatattagg

SEQ ID NO: 337939 - DNA, 30 bp, Artificial Sequence
  Synthetic oligonucleotide
cttaaggaggccggacacaattcacttagg

SEQ ID NO: 337940 - DNA, 30 bp, Artificial Sequence
  Synthetic oligonucleotide
atattactctggatactattcaaccttagg

SEQ ID NO: 337941 - DNA, 30 bp, Artificial Sequence
  Synthetic oligonucleotide
actggaggatcgttcatcaggtcccttagg

SEQ ID NO: 337942 - DNA, 30 bp, Artificial Sequence
  Synthetic oligonucleotide
gatttcaccagatctactattgagcttagg

SEQ ID NO: 337943 - DNA, 31 bp, Artificial Sequence
  Synthetic oligonucleotide
ggtccgagcacgacgataatcaatgcttagg

SEQ ID NO: 337944 - DNA, 30 bp, Artificial Sequence
  Synthetic oligonucleotide
aaagcatagcctctcatgttataagttagg

SEQ ID NO: 337945 - DNA, 30 bp, Artificial Sequence
  Synthetic oligonucleotide
tgtcggtctgaatgggtgatcgtagttagg

SEQ ID NO: 337946 - DNA, 30 bp, Artificial Sequence
  Synthetic oligonucleotide
agtgacgtcaggccgggtgagcacgttagg

SEQ ID NO: 337947 - DNA, 30 bp, Artificial Sequence
  Synthetic oligonucleotide
gtaataggttggagctggatcatcgttagg

SEQ ID NO: 337948 - DNA, 30 bp, Artificial Sequence
  Synthetic oligonucleotide
aagaacactatcgggggtttaagatttagg

SEQ ID NO: 337949 - DNA, 30 bp, Artificial Sequence
  Synthetic oligonucleotide
atgtagcataagaaatttcatccgtttagg

SEQ ID NO: 337950 - DNA, 30 bp, Artificial Sequence
  Synthetic oligonucleotide
gtctggcacttcggagccgcgcggtttagg

SEQ ID NO: 337951 - DNA, 30 bp, Artificial Sequence
  Synthetic oligonucleotide
cgggccctcctaagaattcatttgtttagg

SEQ ID NO: 337952 - DNA, 30 bp, Artificial Sequence
  Synthetic oligonucleotide
atgaaaatgtaggtaatccaaacttttagg

SEQ ID NO: 337953 - DNA, 30 bp, Artificial Sequence
  Synthetic oligonucleotide
accgacgagcaggcaacgttattaaaacgg

SEQ ID NO: 337954 - DNA, 30 bp, Artificial Sequence
  Synthetic oligonucleotide
tacagtgtcagtcccggccgtcacaaacgg

SEQ ID NO: 337955 - DNA, 30 bp, Artificial Sequence
  Synthetic oligonucleotide
ccagaccaagtaagtgaggtggtcaaacgg

SEQ ID NO: 337956 - DNA, 30 bp, Artificial Sequence
  Synthetic oligonucleotide
gagttgaacaagctttgggttaagaaacgg

SEQ ID NO: 337957 - DNA, 30 bp, Artificial Sequence
  Synthetic oligonucleotide
gatacctatcatgggtctccggggaaacgg

SEQ ID NO: 337958 - DNA, 30 bp, Artificial Sequence
  Synthetic oligonucleotide
gggcctcatacgacttctggttataaacgg

SEQ ID NO: 337959 - DNA, 30 bp, Artificial Sequence
  Synthetic oligonucleotide
atggcttcgcaggaggtcgaacgtaaacgg

SEQ ID NO: 337960 - DNA, 30 bp, Artificial Sequence
  Synthetic oligonucleotide
gccaattacgcgtccatgatctgtaaacgg

SEQ ID NO: 337961 - DNA, 30 bp, Artificial Sequence
  Synthetic oligonucleotide
acgtccatggctggccgtgtttgtaaacgg

SEQ ID NO: 337962 - DNA, 30 bp, Artificial Sequence
  Synthetic oligonucleotide
agactcgtctttggatgctgtcaacaacgg

SEQ ID NO: 337963 - DNA, 30 bp, Artificial Sequence
  Synthetic oligonucleotide
tggcagccgttcgtagcaggaccacaacgg

SEQ ID NO: 337964 - DNA, 30 bp, Artificial Sequence
  Synthetic oligonucleotide
ttgcagagtatggactccgggggacaacgg

SEQ ID NO: 337965 - DNA, 30 bp, Artificial Sequence
  Synthetic oligonucleotide
gaggctgttgtaagcaattgagaccaacgg

SEQ ID NO: 337966 - DNA, 30 bp, Artificial Sequence
  Synthetic oligonucleotide
tggagcgactattacgcccttgaccaacgg

SEQ ID NO: 337967 - DNA, 29 bp, Artificial Sequence
  Synthetic oligonucleotide
ctgataatacttttgctaaaaagcaacgg

SEQ ID NO: 337968 - DNA, 30 bp, Artificial Sequence
  Synthetic oligonucleotide
gagtctactgagcaaaagtgtactcaacgg

SEQ ID NO: 337969 - DNA, 30 bp, Artificial Sequence
  Synthetic oligonucleotide
gtaagagattaaggtaccgagtgcgaacgg

SEQ ID NO: 337970 - DNA, 30 bp, Artificial Sequence
  Synthetic oligonucleotide
accgcacttgagacgaatagcatcgaacgg

SEQ ID NO: 337971 - DNA, 30 bp, Artificial Sequence
  Synthetic oligonucleotide
cgtgatgtactggtggggatcagggaacgg

SEQ ID NO: 337972 - DNA, 30 bp, Artificial Sequence
  Synthetic oligonucleotide
acgtaataggagcttttggtcaatgaacgg

SEQ ID NO: 337973 - DNA, 30 bp, Artificial Sequence
  Synthetic oligonucleotide
attgccccccgtatagtcgctcctgaacgg

SEQ ID NO: 337974 - DNA, 30 bp, Artificial Sequence
  Synthetic oligonucleotide
cgtcatactgggttggagtaccactaacgg

SEQ ID NO: 337975 - DNA, 30 bp, Artificial Sequence
  Synthetic oligonucleotide
tgcaatcaggatcccgttgaagactaacgg

SEQ ID NO: 337976 - DNA, 30 bp, Artificial Sequence
  Synthetic oligonucleotide
tacagcagaatattgagttatagctaacgg

SEQ ID NO: 337977 - DNA, 30 bp, Artificial Sequence
  Synthetic oligonucleotide
acgcacgtagccgggtcaagcatctaacgg

SEQ ID NO: 337978 - DNA, 30 bp, Artificial Sequence
  Synthetic oligonucleotide
gggtattaatgcccaaatccgttctaacgg

SEQ ID NO: 337979 - DNA, 30 bp, Artificial Sequence
  Synthetic oligonucleotide
tgatcagcatcagttaagcgaaagtaacgg

SEQ ID NO: 337980 - DNA, 30 bp, Artificial Sequence
  Synthetic oligonucleotide
tgatggcttttcctggttcattcgtaacgg

SEQ ID NO: 337981 - DNA, 30 bp, Artificial Sequence
  Synthetic oligonucleotide
ggacgaggctcgtggtttacccggtaacgg

SEQ ID NO: 337982 - DNA, 30 bp, Artificial Sequence
  Synthetic oligonucleotide
atgaacaccgagctctgcattgggtaacgg

SEQ ID NO: 337983 - DNA, 30 bp, Artificial Sequence
  Synthetic oligonucleotide
tatatcgccgcatgttcaaaacattaacgg

SEQ ID NO: 337984 - DNA, 30 bp, Artificial Sequence
  Synthetic oligonucleotide
tccgacttcatgttcttgcgtaaaacacgg

SEQ ID NO: 337985 - DNA, 30 bp, Artificial Sequence
  Synthetic oligonucleotide
cggtcctcagagacacggcatgaaacacgg

SEQ ID NO: 337986 - DNA, 30 bp, Artificial Sequence
  Synthetic oligonucleotide
ttgaaacacagtatatttagtataacacgg

SEQ ID NO: 337987 - DNA, 30 bp, Artificial Sequence
  Synthetic oligonucleotide
agtagtcaaccttataaaaaaaagacacgg

SEQ ID NO: 337988 - DNA, 30 bp, Artificial Sequence
  Synthetic oligonucleotide
tgtagccgcgccggaggtaaacatacacgg

SEQ ID NO: 337989 - DNA, 30 bp, Artificial Sequence
  Synthetic oligonucleotide
acaaacagagcattcttgatatgtacacgg

SEQ ID NO: 337990 - DNA, 30 bp, Artificial Sequence
  Synthetic oligonucleotide
ctaaaatacggcctcaaatacaagccacgg

SEQ ID NO: 337991 - DNA, 30 bp, Artificial Sequence
  Synthetic oligonucleotide
actgatatctgcggtaagtgagagccacgg

SEQ ID NO: 337992 - DNA, 30 bp, Artificial Sequence
  Synthetic oligonucleotide
tgggagtagttatgcaaggcggtgccacgg

SEQ ID NO: 337993 - DNA, 30 bp, Artificial Sequence
  Synthetic oligonucleotide
tcttcctccggtcaggagtcaaacgcacgg

SEQ ID NO: 337994 - DNA, 30 bp, Artificial Sequence
  Synthetic oligonucleotide
ccaattggttgaaaaagccacttcgcacgg

SEQ ID NO: 337995 - DNA, 30 bp, Artificial Sequence
  Synthetic oligonucleotide
ttcctaggtacttggcagctctcggcacgg

SEQ ID NO: 337996 - DNA, 30 bp, Artificial Sequence
  Synthetic oligonucleotide
aatacgtaggtcagccggagcaatgcacgg

SEQ ID NO: 337997 - DNA, 30 bp, Artificial Sequence
  Synthetic oligonucleotide
gggaattatcacctcgggaaataatcacgg

SEQ ID NO: 337998 - DNA, 30 bp, Artificial Sequence
  Synthetic oligonucleotide
atgcgggttgtcatttttccgccatcacgg

SEQ ID NO: 337999 - DNA, 30 bp, Artificial Sequence
  Synthetic oligonucleotide
cgtgacggggtcaaacgggattcatcacgg

SEQ ID NO: 338000 - DNA, 30 bp, Artificial Sequence
  Synthetic oligonucleotide
cactaccccccagtatacctcatatcacgg

SEQ ID NO: 338001 - DNA, 30 bp, Artificial Sequence
  Synthetic oligonucleotide
gaacgagagtgtccatttttcttctcacgg

SEQ ID NO: 338002 - DNA, 30 bp, Artificial Sequence
  Synthetic oligonucleotide
attaggccttaacctacgtcaaggtcacgg

SEQ ID NO: 338003 - DNA, 30 bp, Artificial Sequence
  Synthetic oligonucleotide
actcggaatattggaactcaatggtcacgg

SEQ ID NO: 338004 - DNA, 30 bp, Artificial Sequence
  Synthetic oligonucleotide
tttcaaggagcctaagttgctctgtcacgg

SEQ ID NO: 338005 - DNA, 30 bp, Artificial Sequence
  Synthetic oligonucleotide
ttcacctgataccgacctgggggttcacgg

SEQ ID NO: 338006 - DNA, 30 bp, Artificial Sequence
  Synthetic oligonucleotide
acatctccgttgagagggaaggcgagacgg

SEQ ID NO: 338007 - DNA, 30 bp, Artificial Sequence
  Synthetic oligonucleotide
aatacacgttttttaagcatgaatagacgg

SEQ ID NO: 338008 - DNA, 30 bp, Artificial Sequence
  Synthetic oligonucleotide
atttcgtccagacttgtcgatgatagacgg

SEQ ID NO: 338009 - DNA, 30 bp, Artificial Sequence
  Synthetic oligonucleotide
ctaccttttcataagcacgatgttagacgg

SEQ ID NO: 338010 - DNA, 30 bp, Artificial Sequence
  Synthetic oligonucleotide
tcggaataggtaggtgatggaccacgacgg

SEQ ID NO: 338011 - DNA, 30 bp, Artificial Sequence
  Synthetic oligonucleotide
gcgaatgtgcgaaacgttcggccccgacgg

SEQ ID NO: 338012 - DNA, 30 bp, Artificial Sequence
  Synthetic oligonucleotide
gactcagcataggtgggacagcagcgacgg

SEQ ID NO: 338013 - DNA, 30 bp, Artificial Sequence
  Synthetic oligonucleotide
tgatggtcgcggggccgcagcgagcgacgg

SEQ ID NO: 338014 - DNA, 30 bp, Artificial Sequence
  Synthetic oligonucleotide
ggttctcgcagggcagaaaatctgcgacgg

SEQ ID NO: 338015 - DNA, 30 bp, Artificial Sequence
  Synthetic oligonucleotide
gtttacaatgcgaaacatcccttgcgacgg

SEQ ID NO: 338016 - DNA, 30 bp, Artificial Sequence
  Synthetic oligonucleotide
tgctacgaaccaacggcccataaaggacgg

SEQ ID NO: 338017 - DNA, 30 bp, Artificial Sequence
  Synthetic oligonucleotide
gtaccatcacgcggaataattttaggacgg

SEQ ID NO: 338018 - DNA, 30 bp, Artificial Sequence
  Synthetic oligonucleotide
gaaacgctcagacatgatcaaggcggacgg

SEQ ID NO: 338019 - DNA, 30 bp, Artificial Sequence
  Synthetic oligonucleotide
gacgttctcgcatactactctacgggacgg

SEQ ID NO: 338020 - DNA, 30 bp, Artificial Sequence
  Synthetic oligonucleotide
aaatgggaagcctgacctctgaggggacgg

SEQ ID NO: 338021 - DNA, 30 bp, Artificial Sequence
  Synthetic oligonucleotide
tcggggttgcaaatcattgtcctgggacgg

SEQ ID NO: 338022 - DNA, 30 bp, Artificial Sequence
  Synthetic oligonucleotide
cgcagaaagtgtacagactcgctgggacgg

SEQ ID NO: 338023 - DNA, 30 bp, Artificial Sequence
  Synthetic oligonucleotide
catatgcgttaacagttatacgtgggacgg

SEQ ID NO: 338024 - DNA, 30 bp, Artificial Sequence
  Synthetic oligonucleotide
taagttaaattgacataaaggtatggacgg

SEQ ID NO: 338025 - DNA, 30 bp, Artificial Sequence
  Synthetic oligonucleotide
acccgtctgttacagggccatgctggacgg

SEQ ID NO: 338026 - DNA, 30 bp, Artificial Sequence
  Synthetic oligonucleotide
gctccgaaatgctaaaaccagtgtggacgg

SEQ ID NO: 338027 - DNA, 30 bp, Artificial Sequence
  Synthetic oligonucleotide
ccggccgacgatatcgaggttcttggacgg

SEQ ID NO: 338028 - DNA, 30 bp, Artificial Sequence
  Synthetic oligonucleotide
tccgaattctgaggtttaataatctgacgg

SEQ ID NO: 338029 - DNA, 30 bp, Artificial Sequence
  Synthetic oligonucleotide
atgttaacgctaaaaatgacattctgacgg

SEQ ID NO: 338030 - DNA, 30 bp, Artificial Sequence
  Synthetic oligonucleotide
gcgtacagtccatacggggcctcttgacgg

SEQ ID NO: 338031 - DNA, 30 bp, Artificial Sequence
  Synthetic oligonucleotide
cgcaactactgctaagcaccaatttgacgg

SEQ ID NO: 338032 - DNA, 30 bp, Artificial Sequence
  Synthetic oligonucleotide
ttgtcaagaggcggcgagtacttttgacgg

SEQ ID NO: 338033 - DNA, 30 bp, Artificial Sequence
  Synthetic oligonucleotide
atgaagcaccccaaactatagcaaatacgg

SEQ ID NO: 338034 - DNA, 30 bp, Artificial Sequence
  Synthetic oligonucleotide
cagactacgcaacgactcctgaacatacgg

SEQ ID NO: 338035 - DNA, 30 bp, Artificial Sequence
  Synthetic oligonucleotide
gtctgtttcgtgtgagccccggacatacgg

SEQ ID NO: 338036 - DNA, 30 bp, Artificial Sequence
  Synthetic oligonucleotide
ccgaatggtatcccctacagggcgatacgg

SEQ ID NO: 338037 - DNA, 30 bp, Artificial Sequence
  Synthetic oligonucleotide
gaccaacgctcaaatgccagaagtatacgg

SEQ ID NO: 338038 - DNA, 30 bp, Artificial Sequence
  Synthetic oligonucleotide
ggtattgtgcacaagcacttgaagctacgg

SEQ ID NO: 338039 - DNA, 30 bp, Artificial Sequence
  Synthetic oligonucleotide
gatggtcagatgggagaacccgttctacgg

SEQ ID NO: 338040 - DNA, 30 bp, Artificial Sequence
  Synthetic oligonucleotide
tctatcgatattcaattttccgcagtacgg

SEQ ID NO: 338041 - DNA, 30 bp, Artificial Sequence
  Synthetic oligonucleotide
cgtgctaggaggggtcacgcagacgtacgg

SEQ ID NO: 338042 - DNA, 30 bp, Artificial Sequence
  Synthetic oligonucleotide
gccctcaggacccgatgaaccgccgtacgg

SEQ ID NO: 338043 - DNA, 30 bp, Artificial Sequence
  Synthetic oligonucleotide
tagcccgatgtatgttttagtcgcgtacgg

SEQ ID NO: 338044 - DNA, 30 bp, Artificial Sequence
  Synthetic oligonucleotide
gaaagattcatgcatctcgaccaggtacgg

SEQ ID NO: 338045 - DNA, 30 bp, Artificial Sequence
  Synthetic oligonucleotide
atatcgttcggacgcccggagcgggtacgg

SEQ ID NO: 338046 - DNA, 30 bp, Artificial Sequence
  Synthetic oligonucleotide
ttccgatcgggtaaacccgatatggtacgg

SEQ ID NO: 338047 - DNA, 30 bp, Artificial Sequence
  Synthetic oligonucleotide
gcggaataccggagcgagcaccctgtacgg

SEQ ID NO: 338048 - DNA, 30 bp, Artificial Sequence
  Synthetic oligonucleotide
ttcagactactagtttagttatgtgtacgg

SEQ ID NO: 338049 - DNA, 30 bp, Artificial Sequence
  Synthetic oligonucleotide
tggcaggacttaaggggctccgctttacgg

SEQ ID NO: 338050 - DNA, 30 bp, Artificial Sequence
  Synthetic oligonucleotide
cccgtgcaacggaatatctgtggaaaccgg

SEQ ID NO: 338051 - DNA, 30 bp, Artificial Sequence
  Synthetic oligonucleotide
accacagattgcggagtcagcaagaaccgg

SEQ ID NO: 338052 - DNA, 30 bp, Artificial Sequence
  Synthetic oligonucleotide
agattggttcctccagaaggtaagaaccgg

SEQ ID NO: 338053 - DNA, 30 bp, Artificial Sequence
  Synthetic oligonucleotide
aactgtgggctattaagatatttgaaccgg

SEQ ID NO: 338054 - DNA, 30 bp, Artificial Sequence
  Synthetic oligonucleotide
cgctcgacgccactggtagcccgtaaccgg

SEQ ID NO: 338055 - DNA, 30 bp, Artificial Sequence
  Synthetic oligonucleotide
ctcggaatttgcatcgcaggtcaacaccgg

SEQ ID NO: 338056 - DNA, 30 bp, Artificial Sequence
  Synthetic oligonucleotide
gcggcttgggtcatctcacggtaacaccgg

SEQ ID NO: 338057 - DNA, 30 bp, Artificial Sequence
  Synthetic oligonucleotide
agagtaaagcccatggatacatctcaccgg

SEQ ID NO: 338058 - DNA, 30 bp, Artificial Sequence
  Synthetic oligonucleotide
cagggtaggtcaaacagtactattcaccgg

SEQ ID NO: 338059 - DNA, 30 bp, Artificial Sequence
  Synthetic oligonucleotide
attgttctccagctcggataagcagaccgg

SEQ ID NO: 338060 - DNA, 30 bp, Artificial Sequence
  Synthetic oligonucleotide
ccttgtagttattaaacaggtaacgaccgg

SEQ ID NO: 338061 - DNA, 30 bp, Artificial Sequence
  Synthetic oligonucleotide
agagcattttacagggtacgggcggaccgg

SEQ ID NO: 338062 - DNA, 30 bp, Artificial Sequence
  Synthetic oligonucleotide
cgtggtgtcggggacagaactttggaccgg

SEQ ID NO: 338063 - DNA, 30 bp, Artificial Sequence
  Synthetic oligonucleotide
tggcctctccttaactccaaggatgaccgg

SEQ ID NO: 338064 - DNA, 30 bp, Artificial Sequence
  Synthetic oligonucleotide
tgagttccatgattccgtgcggactaccgg

SEQ ID NO: 338065 - DNA, 30 bp, Artificial Sequence
  Synthetic oligonucleotide
aaaatggacagaggccaaaaccgctaccgg

SEQ ID NO: 338066 - DNA, 30 bp, Artificial Sequence
  Synthetic oligonucleotide
cgatatggaacttttcgacgcatgtaccgg

SEQ ID NO: 338067 - DNA, 30 bp, Artificial Sequence
  Synthetic oligonucleotide
atcctccgcgttgtgccgaaacaaacccgg

SEQ ID NO: 338068 - DNA, 30 bp, Artificial Sequence
  Synthetic oligonucleotide
ggtatagtaacaaccgagagctagacccgg

SEQ ID NO: 338069 - DNA, 30 bp, Artificial Sequence
  Synthetic oligonucleotide
aggaacggtgcgccttaggtgtcgacccgg

SEQ ID NO: 338070 - DNA, 30 bp, Artificial Sequence
  Synthetic oligonucleotide
atagagcgacgggagacagtgtctacccgg

SEQ ID NO: 338071 - DNA, 30 bp, Artificial Sequence
  Synthetic oligonucleotide
aggccgttttgggggccaaccggtacccgg

SEQ ID NO: 338072 - DNA, 30 bp, Artificial Sequence
  Synthetic oligonucleotide
tgttgggtggtattctcgcgggttacccgg

SEQ ID NO: 338073 - DNA, 30 bp, Artificial Sequence
  Synthetic oligonucleotide
aactctaataactagcttctcccaccccgg

SEQ ID NO: 338074 - DNA, 30 bp, Artificial Sequence
  Synthetic oligonucleotide
gaaattaccttgccgtatattcacccccgg

SEQ ID NO: 338075 - DNA, 30 bp, Artificial Sequence
  Synthetic oligonucleotide
gggtggggccacgagccgtgagacccccgg

SEQ ID NO: 338076 - DNA, 30 bp, Artificial Sequence
  Synthetic oligonucleotide
atagatctaacgtatactcggtgtccccgg

SEQ ID NO: 338077 - DNA, 28 bp, Artificial Sequence
  Synthetic oligonucleotide
cctggttattaacaccagtccagcccgg

SEQ ID NO: 338078 - DNA, 30 bp, Artificial Sequence
  Synthetic oligonucleotide
ttccaaagtgtctaactagtcgcagcccgg

SEQ ID NO: 338079 - DNA, 30 bp, Artificial Sequence
  Synthetic oligonucleotide
ttgaaaggctcacacataatgtcagcccgg

SEQ ID NO: 338080 - DNA, 30 bp, Artificial Sequence
  Synthetic oligonucleotide
aatagaaaagctgtgtgaagagacgcccgg

SEQ ID NO: 338081 - DNA, 30 bp, Artificial Sequence
  Synthetic oligonucleotide
accatgctggataggatgtcgtaggcccgg

SEQ ID NO: 338082 - DNA, 30 bp, Artificial Sequence
  Synthetic oligonucleotide
gttgtgatactggaactgccatcctcccgg

SEQ ID NO: 338083 - DNA, 30 bp, Artificial Sequence
  Synthetic oligonucleotide
gaggtcactacaccagtgtttgaaagccgg

SEQ ID NO: 338084 - DNA, 30 bp, Artificial Sequence
  Synthetic oligonucleotide
cacacttcaatccctggccattaaagccgg

SEQ ID NO: 338085 - DNA, 30 bp, Artificial Sequence
  Synthetic oligonucleotide
tgccactactccactgaacccatgagccgg

SEQ ID NO: 338086 - DNA, 30 bp, Artificial Sequence
  Synthetic oligonucleotide
ttagtgtaacgtattcaaaggatgagccgg

SEQ ID NO: 338087 - DNA, 30 bp, Artificial Sequence
  Synthetic oligonucleotide
ggcttaatgatgttggcaccgttgagccgg

SEQ ID NO: 338088 - DNA, 30 bp, Artificial Sequence
  Synthetic oligonucleotide
tgagcagccgaggcgggtttaaatagccgg

SEQ ID NO: 338089 - DNA, 30 bp, Artificial Sequence
  Synthetic oligonucleotide
taggcggtacatttcataagaactagccgg

SEQ ID NO: 338090 - DNA, 30 bp, Artificial Sequence
  Synthetic oligonucleotide
tattaggctttacctagcttactacgccgg

SEQ ID NO: 338091 - DNA, 30 bp, Artificial Sequence
  Synthetic oligonucleotide
cgatgttctggcggtaatctcgtacgccgg

SEQ ID NO: 338092 - DNA, 30 bp, Artificial Sequence
  Synthetic oligonucleotide
acgttccggtaaaggttctttttacgccgg

SEQ ID NO: 338093 - DNA, 30 bp, Artificial Sequence
  Synthetic oligonucleotide
ttactcctaaagatagccggccttcgccgg

SEQ ID NO: 338094 - DNA, 30 bp, Artificial Sequence
  Synthetic oligonucleotide
gggtcgcgaataatggatcgggcaggccgg

SEQ ID NO: 338095 - DNA, 30 bp, Artificial Sequence
  Synthetic oligonucleotide
aacaccggcgcaagagacacaataggccgg

SEQ ID NO: 338096 - DNA, 30 bp, Artificial Sequence
  Synthetic oligonucleotide
gtaactccagtatgctgcgcgaacggccgg

SEQ ID NO: 338097 - DNA, 30 bp, Artificial Sequence
  Synthetic oligonucleotide
tacatcgtgttcaagtgggtatgcggccgg

SEQ ID NO: 338098 - DNA, 30 bp, Artificial Sequence
  Synthetic oligonucleotide
tagtccccacgacatgattgaatcggccgg

SEQ ID NO: 338099 - DNA, 30 bp, Artificial Sequence
  Synthetic oligonucleotide
gaatattcaactccggtaggatggggccgg

SEQ ID NO: 338100 - DNA, 30 bp, Artificial Sequence
  Synthetic oligonucleotide
atggcgagcgcacggcgttgaatgggccgg

SEQ ID NO: 338101 - DNA, 30 bp, Artificial Sequence
  Synthetic oligonucleotide
ggcgtcaggtctcccattattgtgggccgg

SEQ ID NO: 338102 - DNA, 30 bp, Artificial Sequence
  Synthetic oligonucleotide
aaccctcacgaaaggaccggggatggccgg

SEQ ID NO: 338103 - DNA, 30 bp, Artificial Sequence
  Synthetic oligonucleotide
gggaacgcaagtgtattgttccgtggccgg

SEQ ID NO: 338104 - DNA, 35 bp, Artificial Sequence
  Synthetic oligonucleotide
gtgcggtccgcgaggggcaacgaccaggtggccgg

SEQ ID NO: 338105 - DNA, 30 bp, Artificial Sequence
  Synthetic oligonucleotide
acatgtaaaaatttcatcagggttggccgg

SEQ ID NO: 338106 - DNA, 30 bp, Artificial Sequence
  Synthetic oligonucleotide
cacgtattggagttctagcgtatatgccgg

SEQ ID NO: 338107 - DNA, 31 bp, Artificial Sequence
  Synthetic oligonucleotide
ctcagcacaaagtatggacggccactgccgg

SEQ ID NO: 338108 - DNA, 30 bp, Artificial Sequence
  Synthetic oligonucleotide
gttactctttaacttgggttcgactgccgg

SEQ ID NO: 338109 - DNA, 30 bp, Artificial Sequence
  Synthetic oligonucleotide
gatcgaggcagggacagggtcgattgccgg

SEQ ID NO: 338110 - DNA, 30 bp, Artificial Sequence
  Synthetic oligonucleotide
tgcgaggggtttaggagcgggctcatccgg

SEQ ID NO: 338111 - DNA, 30 bp, Artificial Sequence
  Synthetic oligonucleotide
attaaagggactagtgtactggagatccgg

SEQ ID NO: 338112 - DNA, 30 bp, Artificial Sequence
  Synthetic oligonucleotide
aagtagatccgctatcaaggatatatccgg

SEQ ID NO: 338113 - DNA, 30 bp, Artificial Sequence
  Synthetic oligonucleotide
accaagatcgttagcaatttcaaactccgg

SEQ ID NO: 338114 - DNA, 29 bp, Artificial Sequence
  Synthetic oligonucleotide
gaggagtgaataaccctcttacgctccgg

SEQ ID NO: 338115 - DNA, 30 bp, Artificial Sequence
  Synthetic oligonucleotide
gacgccacagagtaggtaaccccgctccgg

SEQ ID NO: 338116 - DNA, 30 bp, Artificial Sequence
  Synthetic oligonucleotide
taaaagagcatgggtcggtcaggagtccgg

SEQ ID NO: 338117 - DNA, 30 bp, Artificial Sequence
  Synthetic oligonucleotide
acaacgttactggggccggaggaggtccgg

SEQ ID NO: 338118 - DNA, 30 bp, Artificial Sequence
  Synthetic oligonucleotide
cctaccggattgtacgattgcggtgtccgg

SEQ ID NO: 338119 - DNA, 30 bp, Artificial Sequence
  Synthetic oligonucleotide
tcgtgttagaacgaaagtcatacattccgg

SEQ ID NO: 338120 - DNA, 30 bp, Artificial Sequence
  Synthetic oligonucleotide
tggaatgggtgcaaccgtggggcattccgg

SEQ ID NO: 338121 - DNA, 30 bp, Artificial Sequence
  Synthetic oligonucleotide
tttccactgagaactgggtcaatattccgg

SEQ ID NO: 338122 - DNA, 30 bp, Artificial Sequence
  Synthetic oligonucleotide
aaaccaccgcggattctatgatacttccgg

SEQ ID NO: 338123 - DNA, 30 bp, Artificial Sequence
  Synthetic oligonucleotide
aagctagagacccctcataacggcttccgg

SEQ ID NO: 338124 - DNA, 30 bp, Artificial Sequence
  Synthetic oligonucleotide
ctgtactctggcaagcttgtccagttccgg

SEQ ID NO: 338125 - DNA, 30 bp, Artificial Sequence
  Synthetic oligonucleotide
tacgtgtcaacacgggggctgttgttccgg

SEQ ID NO: 338126 - DNA, 30 bp, Artificial Sequence
  Synthetic oligonucleotide
ggcataagcttatgtggacatggtttccgg

SEQ ID NO: 338127 - DNA, 30 bp, Artificial Sequence
  Synthetic oligonucleotide
aagttacaaatatattattttaaaaagcgg

SEQ ID NO: 338128 - DNA, 30 bp, Artificial Sequence
  Synthetic oligonucleotide
cgcccgtaaaaaacattgtctgcaaagcgg

SEQ ID NO: 338129 - DNA, 30 bp, Artificial Sequence
  Synthetic oligonucleotide
cccgtaggggtaggtgtgtttttaaagcgg

SEQ ID NO: 338130 - DNA, 30 bp, Artificial Sequence
  Synthetic oligonucleotide
ctttaatgagtccgccaaggtaccaagcgg

SEQ ID NO: 338131 - DNA, 30 bp, Artificial Sequence
  Synthetic oligonucleotide
ctggctatgtcggaaattcgaagcaagcgg

SEQ ID NO: 338132 - DNA, 30 bp, Artificial Sequence
  Synthetic oligonucleotide
cgcgtccggccctcaatatatagcaagcgg

SEQ ID NO: 338133 - DNA, 30 bp, Artificial Sequence
  Synthetic oligonucleotide
gggcatatttggctactcgaaatcaagcgg

SEQ ID NO: 338134 - DNA, 30 bp, Artificial Sequence
  Synthetic oligonucleotide
ctaatggaatcgcggtgttttttcaagcgg

SEQ ID NO: 338135 - DNA, 30 bp, Artificial Sequence
  Synthetic oligonucleotide
tggtatttcatggtccctacccataagcgg

SEQ ID NO: 338136 - DNA, 30 bp, Artificial Sequence
  Synthetic oligonucleotide
actgacttcatttatgttctttttaagcgg

SEQ ID NO: 338137 - DNA, 30 bp, Artificial Sequence
  Synthetic oligonucleotide
gtgtgcttgttaatcgaaagcctacagcgg

SEQ ID NO: 338138 - DNA, 30 bp, Artificial Sequence
  Synthetic oligonucleotide
gttgggagacttcgatgcgttgaccagcgg

SEQ ID NO: 338139 - DNA, 30 bp, Artificial Sequence
  Synthetic oligonucleotide
gatagcgtggtgcggccgtcgtaccagcgg

SEQ ID NO: 338140 - DNA, 30 bp, Artificial Sequence
  Synthetic oligonucleotide
aagtaccaactttatgtctgatcccagcgg

SEQ ID NO: 338141 - DNA, 30 bp, Artificial Sequence
  Synthetic oligonucleotide
attgcgacgcctgtactcaataagcagcgg

SEQ ID NO: 338142 - DNA, 30 bp, Artificial Sequence
  Synthetic oligonucleotide
gcaacggaaacatgtcacaacacgcagcgg

SEQ ID NO: 338143 - DNA, 30 bp, Artificial Sequence
  Synthetic oligonucleotide
cgcagtgaggagcgattcagctttcagcgg

SEQ ID NO: 338144 - DNA, 30 bp, Artificial Sequence
  Synthetic oligonucleotide
ggatcactgagtacattcttacaggagcgg

SEQ ID NO: 338145 - DNA, 30 bp, Artificial Sequence
  Synthetic oligonucleotide
accgcttatcgcatacggagattggagcgg

SEQ ID NO: 338146 - DNA, 30 bp, Artificial Sequence
  Synthetic oligonucleotide
tgtaccttcaataagagagccttggagcgg

SEQ ID NO: 338147 - DNA, 30 bp, Artificial Sequence
  Synthetic oligonucleotide
tatagtaatgtaactataaagcgatagcgg

SEQ ID NO: 338148 - DNA, 30 bp, Artificial Sequence
  Synthetic oligonucleotide
aaacctttatcgtaaagtgtgggatagcgg

SEQ ID NO: 338149 - DNA, 30 bp, Artificial Sequence
  Synthetic oligonucleotide
gcttgtaaataagaatttgctggatagcgg

SEQ ID NO: 338150 - DNA, 30 bp, Artificial Sequence
  Synthetic oligonucleotide
aaagagagatccccgaattcggggtagcgg

SEQ ID NO: 338151 - DNA, 30 bp, Artificial Sequence
  Synthetic oligonucleotide
ctcaattacaggcggctaatgccttagcgg

SEQ ID NO: 338152 - DNA, 30 bp, Artificial Sequence
  Synthetic oligonucleotide
gtaagcgacaccttgacaggcgcaacgcgg

SEQ ID NO: 338153 - DNA, 30 bp, Artificial Sequence
  Synthetic oligonucleotide
tctgtcaagtatcatcaggcctcaacgcgg

SEQ ID NO: 338154 - DNA, 30 bp, Artificial Sequence
  Synthetic oligonucleotide
tctgctggagcaaatttttgcagaacgcgg

SEQ ID NO: 338155 - DNA, 30 bp, Artificial Sequence
  Synthetic oligonucleotide
aatccaggagcacgaccgaagtagacgcgg

SEQ ID NO: 338156 - DNA, 30 bp, Artificial Sequence
  Synthetic oligonucleotide
gttgattcttgaaagtttaacgatacgcgg

SEQ ID NO: 338157 - DNA, 30 bp, Artificial Sequence
  Synthetic oligonucleotide
gattttagtatcacacgatccacaccgcgg

SEQ ID NO: 338158 - DNA, 30 bp, Artificial Sequence
  Synthetic oligonucleotide
ttgggcatctatagtgagatatagccgcgg

SEQ ID NO: 338159 - DNA, 30 bp, Artificial Sequence
  Synthetic oligonucleotide
cattagcgactacggaaagcgttgccgcgg

SEQ ID NO: 338160 - DNA, 30 bp, Artificial Sequence
  Synthetic oligonucleotide
gtacggggcagcctgattcacgttccgcgg

SEQ ID NO: 338161 - DNA, 30 bp, Artificial Sequence
  Synthetic oligonucleotide
gccagcctccgggtacttgactttccgcgg

SEQ ID NO: 338162 - DNA, 30 bp, Artificial Sequence
  Synthetic oligonucleotide
gcatacttatcctaaagagctagggcgcgg

SEQ ID NO: 338163 - DNA, 30 bp, Artificial Sequence
  Synthetic oligonucleotide
gtggaacagcctgttctatagaactcgcgg

SEQ ID NO: 338164 - DNA, 30 bp, Artificial Sequence
  Synthetic oligonucleotide
gagagatggaaggtagcgagcatctcgcgg

SEQ ID NO: 338165 - DNA, 30 bp, Artificial Sequence
  Synthetic oligonucleotide
ctcacgggaggggtaatttacgcgtcgcgg

SEQ ID NO: 338166 - DNA, 30 bp, Artificial Sequence
  Synthetic oligonucleotide
ttagcgatagaagtttacaaatggtcgcgg

SEQ ID NO: 338167 - DNA, 30 bp, Artificial Sequence
  Synthetic oligonucleotide
gcccatattacgaggacatcatggtcgcgg

SEQ ID NO: 338168 - DNA, 30 bp, Artificial Sequence
  Synthetic oligonucleotide
agaagcatatttaagctatagccttcgcgg

SEQ ID NO: 338169 - DNA, 30 bp, Artificial Sequence
  Synthetic oligonucleotide
taataacgggcttggttcattggttcgcgg

SEQ ID NO: 338170 - DNA, 30 bp, Artificial Sequence
  Synthetic oligonucleotide
cagaagagtgggctaccgttgtgttcgcgg

SEQ ID NO: 338171 - DNA, 30 bp, Artificial Sequence
  Synthetic oligonucleotide
tggtttatataccctagttatcccaggcgg

SEQ ID NO: 338172 - DNA, 30 bp, Artificial Sequence
  Synthetic oligonucleotide
taaacaccctaagcgtgatccagcaggcgg

SEQ ID NO: 338173 - DNA, 30 bp, Artificial Sequence
  Synthetic oligonucleotide
tgatggaggcataacgtcggcacacggcgg

SEQ ID NO: 338174 - DNA, 30 bp, Artificial Sequence
  Synthetic oligonucleotide
tctatgggagttcggcgaaaggaccggcgg

SEQ ID NO: 338175 - DNA, 30 bp, Artificial Sequence
  Synthetic oligonucleotide
aatgacatcatgagtggtggacatcggcgg

SEQ ID NO: 338176 - DNA, 30 bp, Artificial Sequence
  Synthetic oligonucleotide
ctttggtgcacgggcggtcaataagggcgg

SEQ ID NO: 338177 - DNA, 30 bp, Artificial Sequence
  Synthetic oligonucleotide
tcctgagatccagccggcagcggagggcgg

SEQ ID NO: 338178 - DNA, 30 bp, Artificial Sequence
  Synthetic oligonucleotide
tcagctggttaaagcgagacaatagggcgg

SEQ ID NO: 338179 - DNA, 30 bp, Artificial Sequence
  Synthetic oligonucleotide
ccaactacaacgctttatgctctagggcgg

SEQ ID NO: 338180 - DNA, 29 bp, Artificial Sequence
  Synthetic oligonucleotide
cgtaaattcattgtgaatctgaggggcgg

SEQ ID NO: 338181 - DNA, 30 bp, Artificial Sequence
  Synthetic oligonucleotide
aacttagggagtgctagtaggcgggggcgg

SEQ ID NO: 338182 - DNA, 30 bp, Artificial Sequence
  Synthetic oligonucleotide
agggcgaggggcgcagaatgttgggggcgg

SEQ ID NO: 338183 - DNA, 30 bp, Artificial Sequence
  Synthetic oligonucleotide
cctacgggggcctcttgtccaatggggcgg

SEQ ID NO: 338184 - DNA, 30 bp, Artificial Sequence
  Synthetic oligonucleotide
tcctccagacctaatgtataggtggggcgg

SEQ ID NO: 338185 - DNA, 30 bp, Artificial Sequence
  Synthetic oligonucleotide
agtgacctgtcgcgtttcgtaagctggcgg

SEQ ID NO: 338186 - DNA, 30 bp, Artificial Sequence
  Synthetic oligonucleotide
taatggagggctcacggtcttccgtggcgg

SEQ ID NO: 338187 - DNA, 30 bp, Artificial Sequence
  Synthetic oligonucleotide
gatgtcgcagatgctggccggtcgtggcgg

SEQ ID NO: 338188 - DNA, 30 bp, Artificial Sequence
  Synthetic oligonucleotide
ccaagtgcgttacgcggaattcggtggcgg

SEQ ID NO: 338189 - DNA, 30 bp, Artificial Sequence
  Synthetic oligonucleotide
ggatcgcgttttatggtgcaaagttggcgg

SEQ ID NO: 338190 - DNA, 30 bp, Artificial Sequence
  Synthetic oligonucleotide
taagtgaggataagttatgcgagttggcgg

SEQ ID NO: 338191 - DNA, 30 bp, Artificial Sequence
  Synthetic oligonucleotide
aaagttcacatactggtgcatgaaatgcgg

SEQ ID NO: 338192 - DNA, 30 bp, Artificial Sequence
  Synthetic oligonucleotide
ataaaggcaggcccgtctactaggatgcgg

SEQ ID NO: 338193 - DNA, 30 bp, Artificial Sequence
  Synthetic oligonucleotide
ttaaggtccgaccaagaatggtatatgcgg

SEQ ID NO: 338194 - DNA, 30 bp, Artificial Sequence
  Synthetic oligonucleotide
tcgtgattactttcgcaggcagttatgcgg

SEQ ID NO: 338195 - DNA, 30 bp, Artificial Sequence
  Synthetic oligonucleotide
agatggataagctggtgcacgtttatgcgg

SEQ ID NO: 338196 - DNA, 30 bp, Artificial Sequence
  Synthetic oligonucleotide
tttgagcgtcagcgtaaagaggaactgcgg

SEQ ID NO: 338197 - DNA, 30 bp, Artificial Sequence
  Synthetic oligonucleotide
ataggtgcggctgcgtcttaagtactgcgg

SEQ ID NO: 338198 - DNA, 30 bp, Artificial Sequence
  Synthetic oligonucleotide
tgccgtctgtcagagcacctcaacctgcgg

SEQ ID NO: 338199 - DNA, 30 bp, Artificial Sequence
  Synthetic oligonucleotide
ctggctagctttatgatactagcgctgcgg

SEQ ID NO: 338200 - DNA, 30 bp, Artificial Sequence
  Synthetic oligonucleotide
tggtatccaatcgaccgcacgtatctgcgg

SEQ ID NO: 338201 - DNA, 30 bp, Artificial Sequence
  Synthetic oligonucleotide
gagatttcctttcctcagggataagtgcgg

SEQ ID NO: 338202 - DNA, 30 bp, Artificial Sequence
  Synthetic oligonucleotide
ctttttgtgatggtggcgaaattggtgcgg

SEQ ID NO: 338203 - DNA, 30 bp, Artificial Sequence
  Synthetic oligonucleotide
tcccctgcgtcattcgattacactgtgcgg

SEQ ID NO: 338204 - DNA, 30 bp, Artificial Sequence
  Synthetic oligonucleotide
gaacagcccctatatgattaccttgtgcgg

SEQ ID NO: 338205 - DNA, 30 bp, Artificial Sequence
  Synthetic oligonucleotide
acatgtcactcaaatctgaggtgattgcgg

SEQ ID NO: 338206 - DNA, 30 bp, Artificial Sequence
  Synthetic oligonucleotide
gttatgatcgcagataacgtacaaaatcgg

SEQ ID NO: 338207 - DNA, 30 bp, Artificial Sequence
  Synthetic oligonucleotide
tgtttgcaaatagtctcgggtcaaaatcgg

SEQ ID NO: 338208 - DNA, 30 bp, Artificial Sequence
  Synthetic oligonucleotide
gccaaaaattcgcagtgggacccaaatcgg

SEQ ID NO: 338209 - DNA, 30 bp, Artificial Sequence
  Synthetic oligonucleotide
ccatacgggattcgcggcggttcaaatcgg

SEQ ID NO: 338210 - DNA, 30 bp, Artificial Sequence
  Synthetic oligonucleotide
tgtgagcgtacatcgcccatttacaatcgg

SEQ ID NO: 338211 - DNA, 30 bp, Artificial Sequence
  Synthetic oligonucleotide
gctcggaagaagctttaggttcggaatcgg

SEQ ID NO: 338212 - DNA, 30 bp, Artificial Sequence
  Synthetic oligonucleotide
tgcggttttgtcgtccaaaaacgtaatcgg

SEQ ID NO: 338213 - DNA, 30 bp, Artificial Sequence
  Synthetic oligonucleotide
tccctaggggtggccaaacactgtaatcgg

SEQ ID NO: 338214 - DNA, 30 bp, Artificial Sequence
  Synthetic oligonucleotide
gcctggcgaacggtagccgttaagcatcgg

SEQ ID NO: 338215 - DNA, 30 bp, Artificial Sequence
  Synthetic oligonucleotide
cctaacggttaatttataggccggcatcgg

SEQ ID NO: 338216 - DNA, 30 bp, Artificial Sequence
  Synthetic oligonucleotide
tactctattagaagccccacgcgagatcgg

SEQ ID NO: 338217 - DNA, 30 bp, Artificial Sequence
  Synthetic oligonucleotide
tgtatgacgcgtgctgtactaaccgatcgg

SEQ ID NO: 338218 - DNA, 30 bp, Artificial Sequence
  Synthetic oligonucleotide
ctatcttcattagcattagtttccgatcgg

SEQ ID NO: 338219 - DNA, 30 bp, Artificial Sequence
  Synthetic oligonucleotide
gaagcccgacagccccgaggatcggatcgg

SEQ ID NO: 338220 - DNA, 30 bp, Artificial Sequence
  Synthetic oligonucleotide
aaaaattattgcacgatttgaatggatcgg

SEQ ID NO: 338221 - DNA, 30 bp, Artificial Sequence
  Synthetic oligonucleotide
gcacgatagtgatttaagatatcatatcgg

SEQ ID NO: 338222 - DNA, 30 bp, Artificial Sequence
  Synthetic oligonucleotide
tttcgcgcactagagggtaacgtatatcgg

SEQ ID NO: 338223 - DNA, 30 bp, Artificial Sequence
  Synthetic oligonucleotide
gttttgagactggggtactttatctatcgg

SEQ ID NO: 338224 - DNA, 30 bp, Artificial Sequence
  Synthetic oligonucleotide
aggtagttatgccggtcgtggtagtatcgg

SEQ ID NO: 338225 - DNA, 30 bp, Artificial Sequence
  Synthetic oligonucleotide
accataacctagggacccgaagcgtatcgg

SEQ ID NO: 338226 - DNA, 30 bp, Artificial Sequence
  Synthetic oligonucleotide
acttcaccgtggaataaggcgggttatcgg

SEQ ID NO: 338227 - DNA, 30 bp, Artificial Sequence
  Synthetic oligonucleotide
cccacttgagcatcaaataaactttatcgg

SEQ ID NO: 338228 - DNA, 30 bp, Artificial Sequence
  Synthetic oligonucleotide
cccaaaggtcttttggtgtctgaaactcgg

SEQ ID NO: 338229 - DNA, 30 bp, Artificial Sequence
  Synthetic oligonucleotide
ctagatgcgattttctgggatccaactcgg

SEQ ID NO: 338230 - DNA, 30 bp, Artificial Sequence
  Synthetic oligonucleotide
gggggtaaagacgtggctcttgtaactcgg

SEQ ID NO: 338231 - DNA, 30 bp, Artificial Sequence
  Synthetic oligonucleotide
accggtcgtaatgaattctagttaactcgg

SEQ ID NO: 338232 - DNA, 30 bp, Artificial Sequence
  Synthetic oligonucleotide
ctaataagtgggcactagtcccccactcgg

SEQ ID NO: 338233 - DNA, 30 bp, Artificial Sequence
  Synthetic oligonucleotide
gattcaccattatcggaactgcccactcgg

SEQ ID NO: 338234 - DNA, 30 bp, Artificial Sequence
  Synthetic oligonucleotide
tcctttcaaagaaatcaggggtggactcgg

SEQ ID NO: 338235 - DNA, 30 bp, Artificial Sequence
  Synthetic oligonucleotide
ttaaagagtcattgtgggtcattacctcgg

SEQ ID NO: 338236 - DNA, 30 bp, Artificial Sequence
  Synthetic oligonucleotide
cagaggtggcatgcggatgagtaccctcgg

SEQ ID NO: 338237 - DNA, 30 bp, Artificial Sequence
  Synthetic oligonucleotide
ccgaatggctagtgtcttggccggcctcgg

SEQ ID NO: 338238 - DNA, 30 bp, Artificial Sequence
  Synthetic oligonucleotide
caatattaggaccgcatccccaaagctcgg

SEQ ID NO: 338239 - DNA, 30 bp, Artificial Sequence
  Synthetic oligonucleotide
tacatccggctaagagtgactgtggctcgg

SEQ ID NO: 338240 - DNA, 30 bp, Artificial Sequence
  Synthetic oligonucleotide
gtcaaaagctaccaatctgagggtgctcgg

SEQ ID NO: 338241 - DNA, 30 bp, Artificial Sequence
  Synthetic oligonucleotide
tatagatagagaccgttgttctcctctcgg

SEQ ID NO: 338242 - DNA, 30 bp, Artificial Sequence
  Synthetic oligonucleotide
cggaaaaaacgagttttgctatgctctcgg

SEQ ID NO: 338243 - DNA, 30 bp, Artificial Sequence
  Synthetic oligonucleotide
gacttcgcaccacaattacctctgtctcgg

SEQ ID NO: 338244 - DNA, 30 bp, Artificial Sequence
  Synthetic oligonucleotide
aacgctgatctgggctagcctgattctcgg

SEQ ID NO: 338245 - DNA, 30 bp, Artificial Sequence
  Synthetic oligonucleotide
acccgccatgagcgatgcgtcccaagtcgg

SEQ ID NO: 338246 - DNA, 30 bp, Artificial Sequence
  Synthetic oligonucleotide
cggaccctcttttctttaggcaccagtcgg

SEQ ID NO: 338247 - DNA, 30 bp, Artificial Sequence
  Synthetic oligonucleotide
agtagacgtttaccctagatgccacgtcgg

SEQ ID NO: 338248 - DNA, 30 bp, Artificial Sequence
  Synthetic oligonucleotide
actatccgcctggcgagccccgtccgtcgg

SEQ ID NO: 338249 - DNA, 30 bp, Artificial Sequence
  Synthetic oligonucleotide
aaaatagagataaggtacaaggagcgtcgg

SEQ ID NO: 338250 - DNA, 30 bp, Artificial Sequence
  Synthetic oligonucleotide
gcgtattctgtgcatcgtccaacgcgtcgg

SEQ ID NO: 338251 - DNA, 30 bp, Artificial Sequence
  Synthetic oligonucleotide
cgctcctgactgaattccagtactcgtcgg

SEQ ID NO: 338252 - DNA, 30 bp, Artificial Sequence
  Synthetic oligonucleotide
tactcgattaaaactatcgtgggtcgtcgg

SEQ ID NO: 338253 - DNA, 30 bp, Artificial Sequence
  Synthetic oligonucleotide
caccatatagtgagtagacaacgaggtcgg

SEQ ID NO: 338254 - DNA, 30 bp, Artificial Sequence
  Synthetic oligonucleotide
tcactgaattcagacttctatgtaggtcgg

SEQ ID NO: 338255 - DNA, 30 bp, Artificial Sequence
  Synthetic oligonucleotide
tgttagtagtctgcattgttcggcggtcgg

SEQ ID NO: 338256 - DNA, 30 bp, Artificial Sequence
  Synthetic oligonucleotide
aaagtggtaataagtctctcctggggtcgg

SEQ ID NO: 338257 - DNA, 30 bp, Artificial Sequence
  Synthetic oligonucleotide
gctcttcgcgaaacttattattggggtcgg

SEQ ID NO: 338258 - DNA, 30 bp, Artificial Sequence
  Synthetic oligonucleotide
gggtttgggcacgcaacacatgtgggtcgg

SEQ ID NO: 338259 - DNA, 30 bp, Artificial Sequence
  Synthetic oligonucleotide
agaacgagccttcttgcctggagatgtcgg

SEQ ID NO: 338260 - DNA, 30 bp, Artificial Sequence
  Synthetic oligonucleotide
agccacctaattgtatttccgtagtgtcgg

SEQ ID NO: 338261 - DNA, 30 bp, Artificial Sequence
  Synthetic oligonucleotide
tgtgtttaggatgggagcgtggcgtgtcgg

SEQ ID NO: 338262 - DNA, 30 bp, Artificial Sequence
  Synthetic oligonucleotide
caagacacgctatctcgctaatggtgtcgg

SEQ ID NO: 338263 - DNA, 30 bp, Artificial Sequence
  Synthetic oligonucleotide
ggacctaacgatgctgctactggaattcgg

SEQ ID NO: 338264 - DNA, 30 bp, Artificial Sequence
  Synthetic oligonucleotide
cgggtaaccagtatatatagtaccattcgg

SEQ ID NO: 338265 - DNA, 30 bp, Artificial Sequence
  Synthetic oligonucleotide
tcatgtgtcatcggacataataagattcgg

SEQ ID NO: 338266 - DNA, 30 bp, Artificial Sequence
  Synthetic oligonucleotide
tacaccacgagttggagaatcccgattcgg

SEQ ID NO: 338267 - DNA, 30 bp, Artificial Sequence
  Synthetic oligonucleotide
tgagggatcgcgcccggcttagatattcgg

SEQ ID NO: 338268 - DNA, 30 bp, Artificial Sequence
  Synthetic oligonucleotide
tctagcgtcgctggtgcatgttatattcgg

SEQ ID NO: 338269 - DNA, 30 bp, Artificial Sequence
  Synthetic oligonucleotide
ctttaacgcaatggttgcaattttattcgg

SEQ ID NO: 338270 - DNA, 30 bp, Artificial Sequence
  Synthetic oligonucleotide
tcaaaatgcatggaagagatacaacttcgg

SEQ ID NO: 338271 - DNA, 30 bp, Artificial Sequence
  Synthetic oligonucleotide
attgtaaagaaacctgtcctaggccttcgg

SEQ ID NO: 338272 - DNA, 30 bp, Artificial Sequence
  Synthetic oligonucleotide
ccggcgacatagaaaatggcgaggcttcgg

SEQ ID NO: 338273 - DNA, 30 bp, Artificial Sequence
  Synthetic oligonucleotide
gtaaggttgtagtgcgcagttcgtcttcgg

SEQ ID NO: 338274 - DNA, 30 bp, Artificial Sequence
  Synthetic oligonucleotide
aatttcaagcaatgacacaatgttcttcgg

SEQ ID NO: 338275 - DNA, 30 bp, Artificial Sequence
  Synthetic oligonucleotide
tagcgcaccgtcgcataaccgcgcgttcgg

SEQ ID NO: 338276 - DNA, 30 bp, Artificial Sequence
  Synthetic oligonucleotide
cagaatcctccgcgtgaacgaatcgttcgg

SEQ ID NO: 338277 - DNA, 30 bp, Artificial Sequence
  Synthetic oligonucleotide
cctagcgtaaagggggcggggttcgttcgg

SEQ ID NO: 338278 - DNA, 30 bp, Artificial Sequence
  Synthetic oligonucleotide
catatcctatcacctgacaccgcggttcgg

SEQ ID NO: 338279 - DNA, 30 bp, Artificial Sequence
  Synthetic oligonucleotide
attcgttacatactggtcctatgggttcgg

SEQ ID NO: 338280 - DNA, 30 bp, Artificial Sequence
  Synthetic oligonucleotide
actaactaaattatcgggtaaagtgttcgg

SEQ ID NO: 338281 - DNA, 30 bp, Artificial Sequence
  Synthetic oligonucleotide
gcctaagatgcttgtcatgactgtgttcgg

SEQ ID NO: 338282 - DNA, 30 bp, Artificial Sequence
  Synthetic oligonucleotide
cagtatttatccggtataacgtttgttcgg

SEQ ID NO: 338283 - DNA, 30 bp, Artificial Sequence
  Synthetic oligonucleotide
atagaaagtgctggaccatctctctttcgg

SEQ ID NO: 338284 - DNA, 30 bp, Artificial Sequence
  Synthetic oligonucleotide
cttatagaaacccggcgcgacgtctttcgg

SEQ ID NO: 338285 - DNA, 30 bp, Artificial Sequence
  Synthetic oligonucleotide
gaaaagatatttgctgcaatgaagtttcgg

SEQ ID NO: 338286 - DNA, 30 bp, Artificial Sequence
  Synthetic oligonucleotide
attttcgatgtcagactccatgattttcgg

SEQ ID NO: 338287 - DNA, 30 bp, Artificial Sequence
  Synthetic oligonucleotide
cgcaacgacatgggtcaggtgcgttttcgg

SEQ ID NO: 338288 - DNA, 30 bp, Artificial Sequence
  Synthetic oligonucleotide
tggggcccctcttgggacggttacaaaggg

SEQ ID NO: 338289 - DNA, 30 bp, Artificial Sequence
  Synthetic oligonucleotide
taaatgtgttagggaggagcaggcaaaggg

SEQ ID NO: 338290 - DNA, 30 bp, Artificial Sequence
  Synthetic oligonucleotide
cagtcgcctccagcaccggacaggaaaggg

SEQ ID NO: 338291 - DNA, 30 bp, Artificial Sequence
  Synthetic oligonucleotide
agataacctttactgagcgattataaaggg

SEQ ID NO: 338292 - DNA, 30 bp, Artificial Sequence
  Synthetic oligonucleotide
aatgctgttggaggggtcacgggtaaaggg

SEQ ID NO: 338293 - DNA, 30 bp, Artificial Sequence
  Synthetic oligonucleotide
gaccaaagttgacgggatggttgtaaaggg

SEQ ID NO: 338294 - DNA, 30 bp, Artificial Sequence
  Synthetic oligonucleotide
tataaacactggtagcgactatttaaaggg

SEQ ID NO: 338295 - DNA, 30 bp, Artificial Sequence
  Synthetic oligonucleotide
gttgtttttgggactgtaacataacaaggg

SEQ ID NO: 338296 - DNA, 30 bp, Artificial Sequence
  Synthetic oligonucleotide
ggctttgccagtgctgcgtggtaacaaggg

SEQ ID NO: 338297 - DNA, 30 bp, Artificial Sequence
  Synthetic oligonucleotide
aaatctcacacggaatgactcgtacaaggg

SEQ ID NO: 338298 - DNA, 30 bp, Artificial Sequence
  Synthetic oligonucleotide
aaaataatccaaaaagaaaaattacaaggg

SEQ ID NO: 338299 - DNA, 30 bp, Artificial Sequence
  Synthetic oligonucleotide
agaatagtgaccgaacgttcgtcgcaaggg

SEQ ID NO: 338300 - DNA, 30 bp, Artificial Sequence
  Synthetic oligonucleotide
ttgtgccgcgccgcccggccaatagaaggg

SEQ ID NO: 338301 - DNA, 30 bp, Artificial Sequence
  Synthetic oligonucleotide
tcgcaccctcctccagattaggccgaaggg

SEQ ID NO: 338302 - DNA, 30 bp, Artificial Sequence
  Synthetic oligonucleotide
cacacacctataagatgcctttcataaggg

SEQ ID NO: 338303 - DNA, 30 bp, Artificial Sequence
  Synthetic oligonucleotide
gcacacacttaaaacaaacctatataaggg

SEQ ID NO: 338304 - DNA, 30 bp, Artificial Sequence
  Synthetic oligonucleotide
tagaggatatttcatgcaggtcactaaggg

SEQ ID NO: 338305 - DNA, 30 bp, Artificial Sequence
  Synthetic oligonucleotide
agtttctccacgatcgggaatccctaaggg

SEQ ID NO: 338306 - DNA, 30 bp, Artificial Sequence
  Synthetic oligonucleotide
gataagattaacgacggacagccaacaggg

SEQ ID NO: 338307 - DNA, 30 bp, Artificial Sequence
  Synthetic oligonucleotide
cagcgttcgtttttagagtaacgaacaggg

SEQ ID NO: 338308 - DNA, 30 bp, Artificial Sequence
  Synthetic oligonucleotide
aaaatattctacataaaatctataacaggg

SEQ ID NO: 338309 - DNA, 30 bp, Artificial Sequence
  Synthetic oligonucleotide
cagccatactataataccttccccacaggg

SEQ ID NO: 338310 - DNA, 30 bp, Artificial Sequence
  Synthetic oligonucleotide
gacgactgataaatgcatccggccacaggg

SEQ ID NO: 338311 - DNA, 30 bp, Artificial Sequence
  Synthetic oligonucleotide
gagttaaaattccttttaaaaatgacaggg

SEQ ID NO: 338312 - DNA, 30 bp, Artificial Sequence
  Synthetic oligonucleotide
accccacacaacgttttttcgcaaccaggg

SEQ ID NO: 338313 - DNA, 30 bp, Artificial Sequence
  Synthetic oligonucleotide
aaagtgggatcgatcgtggctcgaccaggg

SEQ ID NO: 338314 - DNA, 30 bp, Artificial Sequence
  Synthetic oligonucleotide
tcgcgacacggctgtgccttacacccaggg

SEQ ID NO: 338315 - DNA, 30 bp, Artificial Sequence
  Synthetic oligonucleotide
gctagttacgtcggaccatgcagcccaggg

SEQ ID NO: 338316 - DNA, 30 bp, Artificial Sequence
  Synthetic oligonucleotide
agctgcgattctaaccaggtccgcccaggg

SEQ ID NO: 338317 - DNA, 30 bp, Artificial Sequence
  Synthetic oligonucleotide
tcagcatctacatgagggcccactccaggg

SEQ ID NO: 338318 - DNA, 30 bp, Artificial Sequence
  Synthetic oligonucleotide
ttagaagtgcgttcgggggtgattccaggg

SEQ ID NO: 338319 - DNA, 30 bp, Artificial Sequence
  Synthetic oligonucleotide
ccttggcatattctaagatcatttccaggg

SEQ ID NO: 338320 - DNA, 30 bp, Artificial Sequence
  Synthetic oligonucleotide
gactaaggcacgtaaagctgtcaagcaggg

SEQ ID NO: 338321 - DNA, 30 bp, Artificial Sequence
  Synthetic oligonucleotide
cccagtccttgtaacccacattaagcaggg

SEQ ID NO: 338322 - DNA, 30 bp, Artificial Sequence
  Synthetic oligonucleotide
ggttgcggcactcacagcgtggtagcaggg

SEQ ID NO: 338323 - DNA, 30 bp, Artificial Sequence
  Synthetic oligonucleotide
aaacaccttatattctgtataaacgcaggg

SEQ ID NO: 338324 - DNA, 30 bp, Artificial Sequence
  Synthetic oligonucleotide
gcagtatgttcatacttgagatccgcaggg

SEQ ID NO: 338325 - DNA, 30 bp, Artificial Sequence
  Synthetic oligonucleotide
gcttagagctctgtaggtgaaacggcaggg

SEQ ID NO: 338326 - DNA, 30 bp, Artificial Sequence
  Synthetic oligonucleotide
actattcagactgacaccattacatcaggg

SEQ ID NO: 338327 - DNA, 30 bp, Artificial Sequence
  Synthetic oligonucleotide
ccctctctggttccatcgtgtacctcaggg

SEQ ID NO: 338328 - DNA, 30 bp, Artificial Sequence
  Synthetic oligonucleotide
agcatcctgtatggacgtgctccaagaggg

SEQ ID NO: 338329 - DNA, 30 bp, Artificial Sequence
  Synthetic oligonucleotide
taactacaaaacggcagacgtggcagaggg

SEQ ID NO: 338330 - DNA, 30 bp, Artificial Sequence
  Synthetic oligonucleotide
tgggccagcttctgcatattgcggagaggg

SEQ ID NO: 338331 - DNA, 30 bp, Artificial Sequence
  Synthetic oligonucleotide
ggtatggggcttgactttcttggtagaggg

SEQ ID NO: 338332 - DNA, 30 bp, Artificial Sequence
  Synthetic oligonucleotide
tggtgtttactgttgacgtgcgcacgaggg

SEQ ID NO: 338333 - DNA, 30 bp, Artificial Sequence
  Synthetic oligonucleotide
aggaaacttgtggcaatgattatacgaggg

SEQ ID NO: 338334 - DNA, 30 bp, Artificial Sequence
  Synthetic oligonucleotide
cctcggctactcattctagacagccgaggg

SEQ ID NO: 338335 - DNA, 30 bp, Artificial Sequence
  Synthetic oligonucleotide
tcgatgtaactactaaactcgcttcgaggg

SEQ ID NO: 338336 - DNA, 30 bp, Artificial Sequence
  Synthetic oligonucleotide
tcacgcgggactcacctgtcggaaggaggg

SEQ ID NO: 338337 - DNA, 30 bp, Artificial Sequence
  Synthetic oligonucleotide
ccaagccagcgttagacagcagcaggaggg

SEQ ID NO: 338338 - DNA, 30 bp, Artificial Sequence
  Synthetic oligonucleotide
gattcttggacagaatttttagcaggaggg

SEQ ID NO: 338339 - DNA, 30 bp, Artificial Sequence
  Synthetic oligonucleotide
gatgaccgagccgtctaagataacggaggg

SEQ ID NO: 338340 - DNA, 30 bp, Artificial Sequence
  Synthetic oligonucleotide
gtcggtagctctgtctgatgatacggaggg

SEQ ID NO: 338341 - DNA, 30 bp, Artificial Sequence
  Synthetic oligonucleotide
ctttgcccaaagagtagcacattcggaggg

SEQ ID NO: 338342 - DNA, 30 bp, Artificial Sequence
  Synthetic oligonucleotide
acagggggcgtggcgcgacattagggaggg

SEQ ID NO: 338343 - DNA, 30 bp, Artificial Sequence
  Synthetic oligonucleotide
atcaagtcgtcaacctagggagggggaggg

SEQ ID NO: 338344 - DNA, 30 bp, Artificial Sequence
  Synthetic oligonucleotide
ggtaccatcgcttacctgaccctgggaggg

SEQ ID NO: 338345 - DNA, 30 bp, Artificial Sequence
  Synthetic oligonucleotide
ggttaatttgtctcaatccatgactgaggg

SEQ ID NO: 338346 - DNA, 30 bp, Artificial Sequence
  Synthetic oligonucleotide
aaacaactcagtctccgagtctcctgaggg

SEQ ID NO: 338347 - DNA, 30 bp, Artificial Sequence
  Synthetic oligonucleotide
gacagtttccaaatgccgaagtcgtgaggg

SEQ ID NO: 338348 - DNA, 30 bp, Artificial Sequence
  Synthetic oligonucleotide
aattaagaggtacttttcaaacggtgaggg

SEQ ID NO: 338349 - DNA, 30 bp, Artificial Sequence
  Synthetic oligonucleotide
tacatgtaccgccaacaaagcgcttgaggg

SEQ ID NO: 338350 - DNA, 30 bp, Artificial Sequence
  Synthetic oligonucleotide
aacttggtatgagatgctactttttgaggg

SEQ ID NO: 338351 - DNA, 30 bp, Artificial Sequence
  Synthetic oligonucleotide
gaatcacttaacccactcacggcaataggg

SEQ ID NO: 338352 - DNA, 30 bp, Artificial Sequence
  Synthetic oligonucleotide
atagatatcgtaagtgtccagtcaataggg

SEQ ID NO: 338353 - DNA, 30 bp, Artificial Sequence
  Synthetic oligonucleotide
gtgggtccgggtgttaaacaatgaataggg

SEQ ID NO: 338354 - DNA, 30 bp, Artificial Sequence
  Synthetic oligonucleotide
gcgtttaaggtaataatttgccccataggg

SEQ ID NO: 338355 - DNA, 30 bp, Artificial Sequence
  Synthetic oligonucleotide
atgtattcgattggtgcaaccatcataggg

SEQ ID NO: 338356 - DNA, 30 bp, Artificial Sequence
  Synthetic oligonucleotide
gtcacgcgggtccaaaggtctactataggg

SEQ ID NO: 338357 - DNA, 30 bp, Artificial Sequence
  Synthetic oligonucleotide
ccgtctactcgtgctcatatgtttataggg

SEQ ID NO: 338358 - DNA, 30 bp, Artificial Sequence
  Synthetic oligonucleotide
cggcttccccgccgaaccggcggactaggg

SEQ ID NO: 338359 - DNA, 30 bp, Artificial Sequence
  Synthetic oligonucleotide
cgagcccctcagcccccctagggactaggg

SEQ ID NO: 338360 - DNA, 30 bp, Artificial Sequence
  Synthetic oligonucleotide
aggagttactttcgacttcccaccctaggg

SEQ ID NO: 338361 - DNA, 30 bp, Artificial Sequence
  Synthetic oligonucleotide
atacactatggtgctcttcggtccctaggg

SEQ ID NO: 338362 - DNA, 30 bp, Artificial Sequence
  Synthetic oligonucleotide
tgtcaagcgggcggtgatcccgcagtaggg

SEQ ID NO: 338363 - DNA, 30 bp, Artificial Sequence
  Synthetic oligonucleotide
gctagctctttctcaggaccttgagtaggg

SEQ ID NO: 338364 - DNA, 30 bp, Artificial Sequence
  Synthetic oligonucleotide
gaataaagagggggaggcgtcctagtaggg

SEQ ID NO: 338365 - DNA, 30 bp, Artificial Sequence
  Synthetic oligonucleotide
gatttcttcagaggtgagacatccgtaggg

SEQ ID NO: 338366 - DNA, 31 bp, Artificial Sequence
  Synthetic oligonucleotide
gctcagcgagtcagggaccccaacggtaggg

SEQ ID NO: 338367 - DNA, 30 bp, Artificial Sequence
  Synthetic oligonucleotide
tgtttcgtctaaaacgtagaaccggtaggg

SEQ ID NO: 338368 - DNA, 30 bp, Artificial Sequence
  Synthetic oligonucleotide
tgttaaagcagctaaccgagaaaattaggg

SEQ ID NO: 338369 - DNA, 30 bp, Artificial Sequence
  Synthetic oligonucleotide
ttgcaatactgggcatccagcagattaggg

SEQ ID NO: 338370 - DNA, 30 bp, Artificial Sequence
  Synthetic oligonucleotide
tttaatggcctagatagaattcgattaggg

SEQ ID NO: 338371 - DNA, 30 bp, Artificial Sequence
  Synthetic oligonucleotide
ttatcccacaatgggttaaatctattaggg

SEQ ID NO: 338372 - DNA, 30 bp, Artificial Sequence
  Synthetic oligonucleotide
gtagcgcaataattagttcaacctttaggg

SEQ ID NO: 338373 - DNA, 30 bp, Artificial Sequence
  Synthetic oligonucleotide
cacggtacgttacaactggtctccaacggg

SEQ ID NO: 338374 - DNA, 30 bp, Artificial Sequence
  Synthetic oligonucleotide
gcgaatacatagccccctaacgcgaacggg

SEQ ID NO: 338375 - DNA, 30 bp, Artificial Sequence
  Synthetic oligonucleotide
gggttcctcaggggtataatgtcgaacggg

SEQ ID NO: 338376 - DNA, 30 bp, Artificial Sequence
  Synthetic oligonucleotide
ggagacgtccagacgatgtttattaacggg

SEQ ID NO: 338377 - DNA, 30 bp, Artificial Sequence
  Synthetic oligonucleotide
tggtttcctaagcattagatgtaacacggg

SEQ ID NO: 338378 - DNA, 30 bp, Artificial Sequence
  Synthetic oligonucleotide
gccgtgctaagttccgggtgtttacacggg

SEQ ID NO: 338379 - DNA, 31 bp, Artificial Sequence
  Synthetic oligonucleotide
agaaggagatccgctctggcgtggccacggg

SEQ ID NO: 338380 - DNA, 30 bp, Artificial Sequence
  Synthetic oligonucleotide
aatagaaggtatccccgcttcgatcacggg

SEQ ID NO: 338381 - DNA, 30 bp, Artificial Sequence
  Synthetic oligonucleotide
cactgtcactgggatgtacggggtcacggg

SEQ ID NO: 338382 - DNA, 30 bp, Artificial Sequence
  Synthetic oligonucleotide
cgcagggcaagcctggaggagattcacggg

SEQ ID NO: 338383 - DNA, 30 bp, Artificial Sequence
  Synthetic oligonucleotide
acgggatatcgggttttagtacgcgacggg

SEQ ID NO: 338384 - DNA, 30 bp, Artificial Sequence
  Synthetic oligonucleotide
agcgatggttacttttgcctcgatgacggg

SEQ ID NO: 338385 - DNA, 30 bp, Artificial Sequence
  Synthetic oligonucleotide
actgctggcgtgggctcttaacgtgacggg

SEQ ID NO: 338386 - DNA, 30 bp, Artificial Sequence
  Synthetic oligonucleotide
gaaaagggggacatttagtttggtgacggg

SEQ ID NO: 338387 - DNA, 30 bp, Artificial Sequence
  Synthetic oligonucleotide
ggacagggacaaatgctatagtttgacggg

SEQ ID NO: 338388 - DNA, 30 bp, Artificial Sequence
  Synthetic oligonucleotide
gagtaaactaccacttgctgaagatacggg

SEQ ID NO: 338389 - DNA, 30 bp, Artificial Sequence
  Synthetic oligonucleotide
cccttcaagtatgaggcgtttagatacggg

SEQ ID NO: 338390 - DNA, 30 bp, Artificial Sequence
  Synthetic oligonucleotide
ggttaaaccgctttctgataatagtacggg

SEQ ID NO: 338391 - DNA, 30 bp, Artificial Sequence
  Synthetic oligonucleotide
ctgacttgaactatgcggattaggtacggg

SEQ ID NO: 338392 - DNA, 30 bp, Artificial Sequence
  Synthetic oligonucleotide
taagtgtcgatgggggctgagtggtacggg

SEQ ID NO: 338393 - DNA, 30 bp, Artificial Sequence
  Synthetic oligonucleotide
gtgcggagccatgatctgcttacaaccggg

SEQ ID NO: 338394 - DNA, 30 bp, Artificial Sequence
  Synthetic oligonucleotide
taacatcggtgtatatgcttacacaccggg

SEQ ID NO: 338395 - DNA, 30 bp, Artificial Sequence
  Synthetic oligonucleotide
aatgtagttttggagccctggcgtaccggg

SEQ ID NO: 338396 - DNA, 30 bp, Artificial Sequence
  Synthetic oligonucleotide
agccgctaggttcacttacaaatacccggg

SEQ ID NO: 338397 - DNA, 30 bp, Artificial Sequence
  Synthetic oligonucleotide
gtgcaagaagggtgcgaagggacccccggg

SEQ ID NO: 338398 - DNA, 30 bp, Artificial Sequence
  Synthetic oligonucleotide
gccgttatcgcctgtcttccgcgagccggg

SEQ ID NO: 338399 - DNA, 30 bp, Artificial Sequence
  Synthetic oligonucleotide
cctctgctcaatctccggtagaacgccggg

SEQ ID NO: 338400 - DNA, 30 bp, Artificial Sequence
  Synthetic oligonucleotide
accgtagtacgagacgtccaggacgccggg

SEQ ID NO: 338401 - DNA, 30 bp, Artificial Sequence
  Synthetic oligonucleotide
gtcgcgggacctaagggccgacctgccggg

SEQ ID NO: 338402 - DNA, 30 bp, Artificial Sequence
  Synthetic oligonucleotide
gatatcaagtctttcccgctggagtccggg

SEQ ID NO: 338403 - DNA, 30 bp, Artificial Sequence
  Synthetic oligonucleotide
gcttaagaagatgacacattcaccagcggg

SEQ ID NO: 338404 - DNA, 30 bp, Artificial Sequence
  Synthetic oligonucleotide
attactggcggcgagatcgaaggcagcggg

SEQ ID NO: 338405 - DNA, 30 bp, Artificial Sequence
  Synthetic oligonucleotide
atccgagtaggtcagactaacactagcggg

SEQ ID NO: 338406 - DNA, 30 bp, Artificial Sequence
  Synthetic oligonucleotide
aggtgccgccccccgtatccagttagcggg

SEQ ID NO: 338407 - DNA, 30 bp, Artificial Sequence
  Synthetic oligonucleotide
ccacggtgccgtaaagacgaaatacgcggg

SEQ ID NO: 338408 - DNA, 30 bp, Artificial Sequence
  Synthetic oligonucleotide
tacgtctgggcctagaatgacgcccgcggg

SEQ ID NO: 338409 - DNA, 30 bp, Artificial Sequence
  Synthetic oligonucleotide
caattccagctcgcagatcacgggcgcggg

SEQ ID NO: 338410 - DNA, 30 bp, Artificial Sequence
  Synthetic oligonucleotide
taccccttaaggtatccgagtcgtcgcggg

SEQ ID NO: 338411 - DNA, 30 bp, Artificial Sequence
  Synthetic oligonucleotide
ctccccgaaaccatcaaagaacttcgcggg

SEQ ID NO: 338412 - DNA, 30 bp, Artificial Sequence
  Synthetic oligonucleotide
ggggggaatacgctggtcacaggaggcggg

SEQ ID NO: 338413 - DNA, 30 bp, Artificial Sequence
  Synthetic oligonucleotide
gttatcgggcatacatacattttaggcggg

SEQ ID NO: 338414 - DNA, 30 bp, Artificial Sequence
  Synthetic oligonucleotide
tatggtagagcagtgacggtcgtcggcggg

SEQ ID NO: 338415 - DNA, 30 bp, Artificial Sequence
  Synthetic oligonucleotide
tccagcgtacgtacgaagaatttcggcggg

SEQ ID NO: 338416 - DNA, 29 bp, Artificial Sequence
  Synthetic oligonucleotide
gctccgggttgagcttagccccatgcggg

SEQ ID NO: 338417 - DNA, 30 bp, Artificial Sequence
  Synthetic oligonucleotide
tgttgtaaataacagtgtcgtttatgcggg

SEQ ID NO: 338418 - DNA, 30 bp, Artificial Sequence
  Synthetic oligonucleotide
gtaaggctgctaagccctcgtagctgcggg

SEQ ID NO: 338419 - DNA, 30 bp, Artificial Sequence
  Synthetic oligonucleotide
ccagggacgatagggtatagaggctgcggg

SEQ ID NO: 338420 - DNA, 30 bp, Artificial Sequence
  Synthetic oligonucleotide
taggttgcatatattaaattacagtgcggg

SEQ ID NO: 338421 - DNA, 30 bp, Artificial Sequence
  Synthetic oligonucleotide
gtgctcgcaccgcagacaatatagtgcggg

SEQ ID NO: 338422 - DNA, 30 bp, Artificial Sequence
  Synthetic oligonucleotide
agcggcgttgacccgggtgatgggtgcggg

SEQ ID NO: 338423 - DNA, 30 bp, Artificial Sequence
  Synthetic oligonucleotide
cggtagttgtggttatacgcggcttgcggg

SEQ ID NO: 338424 - DNA, 30 bp, Artificial Sequence
  Synthetic oligonucleotide
gctgcgccggtacttgaagacttttgcggg

SEQ ID NO: 338425 - DNA, 30 bp, Artificial Sequence
  Synthetic oligonucleotide
tcgcgtaagaaacatgcgtgtttttgcggg

SEQ ID NO: 338426 - DNA, 30 bp, Artificial Sequence
  Synthetic oligonucleotide
gggctatagccgggggagattctcatcggg

SEQ ID NO: 338427 - DNA, 30 bp, Artificial Sequence
  Synthetic oligonucleotide
actcagcgaaacgagttcctcgtgatcggg

SEQ ID NO: 338428 - DNA, 30 bp, Artificial Sequence
  Synthetic oligonucleotide
tatgggagtcttattatattatccctcggg

SEQ ID NO: 338429 - DNA, 30 bp, Artificial Sequence
  Synthetic oligonucleotide
gaaaatccaggatttgtaagaaacgtcggg

SEQ ID NO: 338430 - DNA, 30 bp, Artificial Sequence
  Synthetic oligonucleotide
tagtccacggaacctcgcactgacgtcggg

SEQ ID NO: 338431 - DNA, 30 bp, Artificial Sequence
  Synthetic oligonucleotide
ttcactggtgcatatgtgacggaggtcggg

SEQ ID NO: 338432 - DNA, 30 bp, Artificial Sequence
  Synthetic oligonucleotide
ggcagtaggagcttggtgccgctggtcggg

SEQ ID NO: 338433 - DNA, 30 bp, Artificial Sequence
  Synthetic oligonucleotide
ctgtcagtccatgtacacctcacattcggg

SEQ ID NO: 338434 - DNA, 30 bp, Artificial Sequence
  Synthetic oligonucleotide
ttttgacaacagttagaaaaaaagttcggg

SEQ ID NO: 338435 - DNA, 30 bp, Artificial Sequence
  Synthetic oligonucleotide
ggaagctataaacaaacacgttggttcggg

SEQ ID NO: 338436 - DNA, 30 bp, Artificial Sequence
  Synthetic oligonucleotide
tagtagtccgaggcgagatgtcatttcggg

SEQ ID NO: 338437 - DNA, 30 bp, Artificial Sequence
  Synthetic oligonucleotide
ggaaccaaggtgctggggataaaaaagggg

SEQ ID NO: 338438 - DNA, 30 bp, Artificial Sequence
  Synthetic oligonucleotide
gttaggtacccacctaccacactaaagggg

SEQ ID NO: 338439 - DNA, 30 bp, Artificial Sequence
  Synthetic oligonucleotide
gtaagcaccgtattttaaaagctaaagggg

SEQ ID NO: 338440 - DNA, 30 bp, Artificial Sequence
  Synthetic oligonucleotide
cccagttccgagggaggcaggctaaagggg

SEQ ID NO: 338441 - DNA, 30 bp, Artificial Sequence
  Synthetic oligonucleotide
ctttatgtttgaaaatctcgggtaaagggg

SEQ ID NO: 338442 - DNA, 30 bp, Artificial Sequence
  Synthetic oligonucleotide
ccgggttcatcttgctgggcccacaagggg

SEQ ID NO: 338443 - DNA, 30 bp, Artificial Sequence
  Synthetic oligonucleotide
agaacctcggtggtacctaggcccaagggg

SEQ ID NO: 338444 - DNA, 30 bp, Artificial Sequence
  Synthetic oligonucleotide
taccgttaattaccatggaatttcaagggg

SEQ ID NO: 338445 - DNA, 30 bp, Artificial Sequence
  Synthetic oligonucleotide
ggggcaatccgctgctatgttaggaagggg

SEQ ID NO: 338446 - DNA, 30 bp, Artificial Sequence
  Synthetic oligonucleotide
gcgaccctcaagttgccctaacctaagggg

SEQ ID NO: 338447 - DNA, 30 bp, Artificial Sequence
  Synthetic oligonucleotide
cgctattacactcatctatatattaagggg

SEQ ID NO: 338448 - DNA, 30 bp, Artificial Sequence
  Synthetic oligonucleotide
ccattatatgatgcagtactaaaacagggg

SEQ ID NO: 338449 - DNA, 30 bp, Artificial Sequence
  Synthetic oligonucleotide
gaccttattgaggatgcatctgaacagggg

SEQ ID NO: 338450 - DNA, 29 bp, Artificial Sequence
  Synthetic oligonucleotide
caggtggcattcccctaggtggacagggg

SEQ ID NO: 338451 - DNA, 30 bp, Artificial Sequence
  Synthetic oligonucleotide
ctaggtgggagttttggggggttacagggg

SEQ ID NO: 338452 - DNA, 30 bp, Artificial Sequence
  Synthetic oligonucleotide
ggacctatacagcacacacttgagcagggg

SEQ ID NO: 338453 - DNA, 30 bp, Artificial Sequence
  Synthetic oligonucleotide
taacttcttgacgtccactccgcgcagggg

SEQ ID NO: 338454 - DNA, 30 bp, Artificial Sequence
  Synthetic oligonucleotide
cactctggggtcgcgattctccggcagggg

SEQ ID NO: 338455 - DNA, 30 bp, Artificial Sequence
  Synthetic oligonucleotide
gagctcggatacgtaagcatggggcagggg

SEQ ID NO: 338456 - DNA, 30 bp, Artificial Sequence
  Synthetic oligonucleotide
agacattggacaagccgctgtgttcagggg

SEQ ID NO: 338457 - DNA, 30 bp, Artificial Sequence
  Synthetic oligonucleotide
cctaggggtaaggactctttcactgagggg

SEQ ID NO: 338458 - DNA, 30 bp, Artificial Sequence
  Synthetic oligonucleotide
tatggtggcagcggtctcccagctgagggg

SEQ ID NO: 338459 - DNA, 30 bp, Artificial Sequence
  Synthetic oligonucleotide
ggttaggaaagccgttctcaacgtgagggg

SEQ ID NO: 338460 - DNA, 30 bp, Artificial Sequence
  Synthetic oligonucleotide
gcccatactcgtgatttaagtgaatagggg

SEQ ID NO: 338461 - DNA, 30 bp, Artificial Sequence
  Synthetic oligonucleotide
aaaacgctttgagataaatgtcgatagggg

SEQ ID NO: 338462 - DNA, 30 bp, Artificial Sequence
  Synthetic oligonucleotide
gtttctcccggagcaagggcactctagggg

SEQ ID NO: 338463 - DNA, 30 bp, Artificial Sequence
  Synthetic oligonucleotide
cgtggtaattgaccagtttggtattagggg

SEQ ID NO: 338464 - DNA, 30 bp, Artificial Sequence
  Synthetic oligonucleotide
aggttgattttcattggcttaagttagggg

SEQ ID NO: 338465 - DNA, 30 bp, Artificial Sequence
  Synthetic oligonucleotide
atatcgtacgctgtagggatacacacgggg

SEQ ID NO: 338466 - DNA, 30 bp, Artificial Sequence
  Synthetic oligonucleotide
ggtcttttggtagagggtgtgcagacgggg

SEQ ID NO: 338467 - DNA, 30 bp, Artificial Sequence
  Synthetic oligonucleotide
agtcattcgtatgttgatgtaccaccgggg

SEQ ID NO: 338468 - DNA, 30 bp, Artificial Sequence
  Synthetic oligonucleotide
ctgtggtgtgatactgattgcccaccgggg

SEQ ID NO: 338469 - DNA, 30 bp, Artificial Sequence
  Synthetic oligonucleotide
ttctttgtgcctcgattacggaacccgggg

SEQ ID NO: 338470 - DNA, 30 bp, Artificial Sequence
  Synthetic oligonucleotide
gagcttcattattttagactatacccgggg

SEQ ID NO: 338471 - DNA, 30 bp, Artificial Sequence
  Synthetic oligonucleotide
tggtaatctatatttgcttaccccccgggg

SEQ ID NO: 338472 - DNA, 30 bp, Artificial Sequence
  Synthetic oligonucleotide
actcaggaggaccggcggatattcccgggg

SEQ ID NO: 338473 - DNA, 30 bp, Artificial Sequence
  Synthetic oligonucleotide
gatcgtctgttcccgactaactctccgggg

SEQ ID NO: 338474 - DNA, 30 bp, Artificial Sequence
  Synthetic oligonucleotide
cacggtgtggcctaagcctagtgtccgggg

SEQ ID NO: 338475 - DNA, 30 bp, Artificial Sequence
  Synthetic oligonucleotide
gcactggaggtcgccgatttctcagcgggg

SEQ ID NO: 338476 - DNA, 30 bp, Artificial Sequence
  Synthetic oligonucleotide
tattgttcgaaacagacaacctatgcgggg

SEQ ID NO: 338477 - DNA, 30 bp, Artificial Sequence
  Synthetic oligonucleotide
gacacggggcaagtcccggttatctcgggg

SEQ ID NO: 338478 - DNA, 30 bp, Artificial Sequence
  Synthetic oligonucleotide
cagtatccatggggtgcggcggagtcgggg

SEQ ID NO: 338479 - DNA, 30 bp, Artificial Sequence
  Synthetic oligonucleotide
cttcagggtattgcacgaccgcattcgggg

SEQ ID NO: 338480 - DNA, 30 bp, Artificial Sequence
  Synthetic oligonucleotide
ccttcgtccgggttccctttgcaaaggggg

SEQ ID NO: 338481 - DNA, 30 bp, Artificial Sequence
  Synthetic oligonucleotide
tctagtattgttgagtggttcataaggggg

SEQ ID NO: 338482 - DNA, 30 bp, Artificial Sequence
  Synthetic oligonucleotide
cgtggatctctaacagtgccgctaaggggg

SEQ ID NO: 338483 - DNA, 30 bp, Artificial Sequence
  Synthetic oligonucleotide
gcatagtaagcccagtaatgacacaggggg

SEQ ID NO: 338484 - DNA, 30 bp, Artificial Sequence
  Synthetic oligonucleotide
ccttaacagccaaacgacccagtgaggggg

SEQ ID NO: 338485 - DNA, 30 bp, Artificial Sequence
  Synthetic oligonucleotide
tttcgatatgccatggcggcttataggggg

SEQ ID NO: 338486 - DNA, 30 bp, Artificial Sequence
  Synthetic oligonucleotide
actctgatttgaaacatggtcgctaggggg

SEQ ID NO: 338487 - DNA, 30 bp, Artificial Sequence
  Synthetic oligonucleotide
tcgcttcatacataaaattggtgtaggggg

SEQ ID NO: 338488 - DNA, 30 bp, Artificial Sequence
  Synthetic oligonucleotide
ggactcgacgtgctactcttaattaggggg

SEQ ID NO: 338489 - DNA, 30 bp, Artificial Sequence
  Synthetic oligonucleotide
gaggagcgcactcgccgttgtctccggggg

SEQ ID NO: 338490 - DNA, 30 bp, Artificial Sequence
  Synthetic oligonucleotide
cctgggtagatgcttggggtgcagcggggg

SEQ ID NO: 338491 - DNA, 30 bp, Artificial Sequence
  Synthetic oligonucleotide
aacaatctttacggtagcccgcggcggggg

SEQ ID NO: 338492 - DNA, 30 bp, Artificial Sequence
  Synthetic oligonucleotide
cgagagggagggcttcggaggtggcggggg

SEQ ID NO: 338493 - DNA, 30 bp, Artificial Sequence
  Synthetic oligonucleotide
agttcaataaacagcctatattggcggggg

SEQ ID NO: 338494 - DNA, 30 bp, Artificial Sequence
  Synthetic oligonucleotide
ggatgcttgaccaagatccgggaagggggg

SEQ ID NO: 338495 - DNA, 30 bp, Artificial Sequence
  Synthetic oligonucleotide
gccatgcactccgacttcagcggagggggg

SEQ ID NO: 338496 - DNA, 30 bp, Artificial Sequence
  Synthetic oligonucleotide
aaaccaatatatcgaacgggtgtagggggg

SEQ ID NO: 338497 - DNA, 30 bp, Artificial Sequence
  Synthetic oligonucleotide
ggcagctccatgcttagagatgacgggggg

SEQ ID NO: 338498 - DNA, 30 bp, Artificial Sequence
  Synthetic oligonucleotide
gacgtatccgctagcaacgcttgcgggggg

SEQ ID NO: 338499 - DNA, 40 bp, Artificial Sequence
  Synthetic oligonucleotide
aagataatacattcatggtatggtcggggatcgggggggg

SEQ ID NO: 338500 - DNA, 30 bp, Artificial Sequence
  Synthetic oligonucleotide
gtgagtacttgatgtgcgcctctggggggg

SEQ ID NO: 338501 - DNA, 30 bp, Artificial Sequence
  Synthetic oligonucleotide
tctcggctttatagagagggaagtgggggg

SEQ ID NO: 338502 - DNA, 30 bp, Artificial Sequence
  Synthetic oligonucleotide
aaaacctgatacttaaacctgttgtggggg

SEQ ID NO: 338503 - DNA, 30 bp, Artificial Sequence
  Synthetic oligonucleotide
tcggtgctaaatactgttaaaggttggggg

SEQ ID NO: 338504 - DNA, 30 bp, Artificial Sequence
  Synthetic oligonucleotide
atgggttgccggcagagagcatcaatgggg

SEQ ID NO: 338505 - DNA, 30 bp, Artificial Sequence
  Synthetic oligonucleotide
gttgtgtacatattgtatgatttaatgggg

SEQ ID NO: 338506 - DNA, 30 bp, Artificial Sequence
  Synthetic oligonucleotide
cctctaagatgtgtatggtgacatatgggg

SEQ ID NO: 338507 - DNA, 30 bp, Artificial Sequence
  Synthetic oligonucleotide
aaattgaacgagcaataaacgactatgggg

SEQ ID NO: 338508 - DNA, 30 bp, Artificial Sequence
  Synthetic oligonucleotide
tatttaccaggtgataccgcccctatgggg

SEQ ID NO: 338509 - DNA, 30 bp, Artificial Sequence
  Synthetic oligonucleotide
aaaatctgacacccaggcaaacgtatgggg

SEQ ID NO: 338510 - DNA, 30 bp, Artificial Sequence
  Synthetic oligonucleotide
tttccttgtgtaggtagaccagttatgggg

SEQ ID NO: 338511 - DNA, 30 bp, Artificial Sequence
  Synthetic oligonucleotide
gagtcactctgcatagcacagagactgggg

SEQ ID NO: 338512 - DNA, 30 bp, Artificial Sequence
  Synthetic oligonucleotide
caaaaccttacaatacgcgttttactgggg

SEQ ID NO: 338513 - DNA, 30 bp, Artificial Sequence
  Synthetic oligonucleotide
gaataactggcgtcttgtcacgtcctgggg

SEQ ID NO: 338514 - DNA, 30 bp, Artificial Sequence
  Synthetic oligonucleotide
cgcatccaggccctggatgcaaagctgggg

SEQ ID NO: 338515 - DNA, 30 bp, Artificial Sequence
  Synthetic oligonucleotide
acactcgggatgttcggaacaaatctgggg

SEQ ID NO: 338516 - DNA, 30 bp, Artificial Sequence
  Synthetic oligonucleotide
ctttggcggccattcgtaccttctctgggg

SEQ ID NO: 338517 - DNA, 30 bp, Artificial Sequence
  Synthetic oligonucleotide
atcggagcttcttcagtcgggggagtgggg

SEQ ID NO: 338518 - DNA, 30 bp, Artificial Sequence
  Synthetic oligonucleotide
gcggcattctgacgctaggtcttcgtgggg

SEQ ID NO: 338519 - DNA, 31 bp, Artificial Sequence
  Synthetic oligonucleotide
ggtcgtcagatacctggtcttaacggtgggg

SEQ ID NO: 338520 - DNA, 30 bp, Artificial Sequence
  Synthetic oligonucleotide
gccacagtggtcgcaatgctgatggtgggg

SEQ ID NO: 338521 - DNA, 30 bp, Artificial Sequence
  Synthetic oligonucleotide
ggagcccttcgggccaatccatatgtgggg

SEQ ID NO: 338522 - DNA, 30 bp, Artificial Sequence
  Synthetic oligonucleotide
ttatcggatagttactacactctaaatggg

SEQ ID NO: 338523 - DNA, 30 bp, Artificial Sequence
  Synthetic oligonucleotide
cgtctccttggcggtagggccgtcaatggg

SEQ ID NO: 338524 - DNA, 30 bp, Artificial Sequence
  Synthetic oligonucleotide
cgcaagtcttggtggcgactaaagaatggg

SEQ ID NO: 338525 - DNA, 30 bp, Artificial Sequence
  Synthetic oligonucleotide
tgaatttttcttcttatctaatagaatggg

SEQ ID NO: 338526 - DNA, 30 bp, Artificial Sequence
  Synthetic oligonucleotide
tccctaacactaaaaccaccccggaatggg

SEQ ID NO: 338527 - DNA, 30 bp, Artificial Sequence
  Synthetic oligonucleotide
gaatcttatctaaccagagtagctaatggg

SEQ ID NO: 338528 - DNA, 30 bp, Artificial Sequence
  Synthetic oligonucleotide
atgaccaagtcgccatcatgcattaatggg

SEQ ID NO: 338529 - DNA, 30 bp, Artificial Sequence
  Synthetic oligonucleotide
ggtcggatccattacttatataaacatggg

SEQ ID NO: 338530 - DNA, 30 bp, Artificial Sequence
  Synthetic oligonucleotide
tggcagattatagcccctggcatacatggg

SEQ ID NO: 338531 - DNA, 30 bp, Artificial Sequence
  Synthetic oligonucleotide
gggtctgaggcgttctctcattgccatggg

SEQ ID NO: 338532 - DNA, 30 bp, Artificial Sequence
  Synthetic oligonucleotide
ggactggtagacggctagtttaagcatggg

SEQ ID NO: 338533 - DNA, 30 bp, Artificial Sequence
  Synthetic oligonucleotide
caagaacgtaggactatgtcgagtcatggg

SEQ ID NO: 338534 - DNA, 30 bp, Artificial Sequence
  Synthetic oligonucleotide
cttcgtgagacaacagtaagtagtcatggg

SEQ ID NO: 338535 - DNA, 30 bp, Artificial Sequence
  Synthetic oligonucleotide
atcttagtttatccatgctagctagatggg

SEQ ID NO: 338536 - DNA, 30 bp, Artificial Sequence
  Synthetic oligonucleotide
actgctctcgacaaacattcccccgatggg

SEQ ID NO: 338537 - DNA, 30 bp, Artificial Sequence
  Synthetic oligonucleotide
ctagggaattgccgaagaatgggcgatggg

SEQ ID NO: 338538 - DNA, 30 bp, Artificial Sequence
  Synthetic oligonucleotide
tgaatttcaaccaccaaaaaaccatatggg

SEQ ID NO: 338539 - DNA, 30 bp, Artificial Sequence
  Synthetic oligonucleotide
ttagctgtgaccggaccctaaaactatggg

SEQ ID NO: 338540 - DNA, 30 bp, Artificial Sequence
  Synthetic oligonucleotide
gatgagtcggatttcaaaagctactatggg

SEQ ID NO: 338541 - DNA, 30 bp, Artificial Sequence
  Synthetic oligonucleotide
tgtgtgctagggatttgttcatcctatggg

SEQ ID NO: 338542 - DNA, 30 bp, Artificial Sequence
  Synthetic oligonucleotide
gctctatcgcacttgagtatttgctatggg

SEQ ID NO: 338543 - DNA, 30 bp, Artificial Sequence
  Synthetic oligonucleotide
ccaccgcatagccacggagatatctatggg

SEQ ID NO: 338544 - DNA, 30 bp, Artificial Sequence
  Synthetic oligonucleotide
acatctgccacgcgtactgaagtctatggg

SEQ ID NO: 338545 - DNA, 30 bp, Artificial Sequence
  Synthetic oligonucleotide
gttcgatcaaaagagcgtgctaggtatggg

SEQ ID NO: 338546 - DNA, 30 bp, Artificial Sequence
  Synthetic oligonucleotide
aacccacagcgattatacactcgttatggg

SEQ ID NO: 338547 - DNA, 30 bp, Artificial Sequence
  Synthetic oligonucleotide
acccatcaatctacgtaagcgccaactggg

SEQ ID NO: 338548 - DNA, 30 bp, Artificial Sequence
  Synthetic oligonucleotide
aagtctcttgacaggcatctctagactggg

SEQ ID NO: 338549 - DNA, 30 bp, Artificial Sequence
  Synthetic oligonucleotide
cttctttgagaagtcgagaagaggactggg

SEQ ID NO: 338550 - DNA, 30 bp, Artificial Sequence
  Synthetic oligonucleotide
tgcggttagaagccggcaatcctgactggg

SEQ ID NO: 338551 - DNA, 30 bp, Artificial Sequence
  Synthetic oligonucleotide
atggcgggctatttatgcccctatactggg

SEQ ID NO: 338552 - DNA, 30 bp, Artificial Sequence
  Synthetic oligonucleotide
atgtgcactccgggcttgtgacagcctggg

SEQ ID NO: 338553 - DNA, 30 bp, Artificial Sequence
  Synthetic oligonucleotide
ttataatggttggtcatatcgtggcctggg

SEQ ID NO: 338554 - DNA, 30 bp, Artificial Sequence
  Synthetic oligonucleotide
gggaaaacatgtatgtaatagtgtcctggg

SEQ ID NO: 338555 - DNA, 30 bp, Artificial Sequence
  Synthetic oligonucleotide
cctgtctaatccttccagttgacagctggg

SEQ ID NO: 338556 - DNA, 30 bp, Artificial Sequence
  Synthetic oligonucleotide
accggttaagcccccacgcgccacgctggg

SEQ ID NO: 338557 - DNA, 30 bp, Artificial Sequence
  Synthetic oligonucleotide
tgagcggtctcgcttcgcatcgctgctggg

SEQ ID NO: 338558 - DNA, 30 bp, Artificial Sequence
  Synthetic oligonucleotide
ggaacacggccgacgggagaagcgtctggg

SEQ ID NO: 338559 - DNA, 30 bp, Artificial Sequence
  Synthetic oligonucleotide
tgttcgtagagcgagctccccatgtctggg

SEQ ID NO: 338560 - DNA, 30 bp, Artificial Sequence
  Synthetic oligonucleotide
tgcccgtcgcacacgcgcgaatcttctggg

SEQ ID NO: 338561 - DNA, 30 bp, Artificial Sequence
  Synthetic oligonucleotide
tcttatgaaataggtgggtagggttctggg

SEQ ID NO: 338562 - DNA, 30 bp, Artificial Sequence
  Synthetic oligonucleotide
aacctaaaagagtggccgaacttttctggg

SEQ ID NO: 338563 - DNA, 30 bp, Artificial Sequence
  Synthetic oligonucleotide
cttcagcgcgaagtgtgggatgaaagtggg

SEQ ID NO: 338564 - DNA, 30 bp, Artificial Sequence
  Synthetic oligonucleotide
tggcgctggattttccggtggataagtggg

SEQ ID NO: 338565 - DNA, 31 bp, Artificial Sequence
  Synthetic oligonucleotide
aagctggcagcacatactacagcccagtggg

SEQ ID NO: 338566 - DNA, 30 bp, Artificial Sequence
  Synthetic oligonucleotide
gagccgtttataatgtccggccgtagtggg

SEQ ID NO: 338567 - DNA, 30 bp, Artificial Sequence
  Synthetic oligonucleotide
cgggctgtgaaggggctccggattagtggg

SEQ ID NO: 338568 - DNA, 30 bp, Artificial Sequence
  Synthetic oligonucleotide
aaaattcatgtatacaaacgacaccgtggg

SEQ ID NO: 338569 - DNA, 30 bp, Artificial Sequence
  Synthetic oligonucleotide
tgcggggtgtcaatctcgaatatccgtggg

SEQ ID NO: 338570 - DNA, 30 bp, Artificial Sequence
  Synthetic oligonucleotide
attttagggcctttgggaggactccgtggg

SEQ ID NO: 338571 - DNA, 30 bp, Artificial Sequence
  Synthetic oligonucleotide
agtgacaagtcggaaattcagaatcgtggg

SEQ ID NO: 338572 - DNA, 30 bp, Artificial Sequence
  Synthetic oligonucleotide
cagattcttcggggtccgatgcgcggtggg

SEQ ID NO: 338573 - DNA, 30 bp, Artificial Sequence
  Synthetic oligonucleotide
tggggaaaaccctgtaggtatccgggtggg

SEQ ID NO: 338574 - DNA, 30 bp, Artificial Sequence
  Synthetic oligonucleotide
atagctatgttttctgtatctaggggtggg

SEQ ID NO: 338575 - DNA, 30 bp, Artificial Sequence
  Synthetic oligonucleotide
ggaaggtcggtgtttagagacgtgggtggg

SEQ ID NO: 338576 - DNA, 30 bp, Artificial Sequence
  Synthetic oligonucleotide
ctagcagttctatatgtttcttatggtggg

SEQ ID NO: 338577 - DNA, 31 bp, Artificial Sequence
  Synthetic oligonucleotide
ccgggacgtaacggaggggcatggctgtggg

SEQ ID NO: 338578 - DNA, 30 bp, Artificial Sequence
  Synthetic oligonucleotide
gatagttaattggtcctcttaacgtgtggg

SEQ ID NO: 338579 - DNA, 30 bp, Artificial Sequence
  Synthetic oligonucleotide
attccttagggccccattacacgaattggg

SEQ ID NO: 338580 - DNA, 30 bp, Artificial Sequence
  Synthetic oligonucleotide
atgatgcgggactttcacagtgtaattggg

SEQ ID NO: 338581 - DNA, 30 bp, Artificial Sequence
  Synthetic oligonucleotide
attgggggttccgtacgttggtagattggg

SEQ ID NO: 338582 - DNA, 30 bp, Artificial Sequence
  Synthetic oligonucleotide
cccaccaagcacctaaggaggaggattggg

SEQ ID NO: 338583 - DNA, 30 bp, Artificial Sequence
  Synthetic oligonucleotide
tgacacataaccacatggcaagtgattggg

SEQ ID NO: 338584 - DNA, 30 bp, Artificial Sequence
  Synthetic oligonucleotide
cctgggaaatactgcaaccagactattggg

SEQ ID NO: 338585 - DNA, 30 bp, Artificial Sequence
  Synthetic oligonucleotide
gtgtcaacactgactccccagttccttggg

SEQ ID NO: 338586 - DNA, 30 bp, Artificial Sequence
  Synthetic oligonucleotide
ggatcgcgcttcaaaattttgaagcttggg

SEQ ID NO: 338587 - DNA, 30 bp, Artificial Sequence
  Synthetic oligonucleotide
gcacatagtatggcttgatgcgcgcttggg

SEQ ID NO: 338588 - DNA, 30 bp, Artificial Sequence
  Synthetic oligonucleotide
ctccattaagacaccggcacatgtcttggg

SEQ ID NO: 338589 - DNA, 30 bp, Artificial Sequence
  Synthetic oligonucleotide
gggttagtatattacacctaagttcttggg

SEQ ID NO: 338590 - DNA, 30 bp, Artificial Sequence
  Synthetic oligonucleotide
agtgcgaggccggatgctggtgttcttggg

SEQ ID NO: 338591 - DNA, 30 bp, Artificial Sequence
  Synthetic oligonucleotide
tgacatgtatgtctgcacaatgccgttggg

SEQ ID NO: 338592 - DNA, 30 bp, Artificial Sequence
  Synthetic oligonucleotide
atgatgtttcaataagaggcacctgttggg

SEQ ID NO: 338593 - DNA, 30 bp, Artificial Sequence
  Synthetic oligonucleotide
actgtgatcgggagggaccatgctgttggg

SEQ ID NO: 338594 - DNA, 30 bp, Artificial Sequence
  Synthetic oligonucleotide
caacgttcctcgacgtgacactgtgttggg

SEQ ID NO: 338595 - DNA, 30 bp, Artificial Sequence
  Synthetic oligonucleotide
tgtgcccagcaccgttgcggcgaatttggg

SEQ ID NO: 338596 - DNA, 30 bp, Artificial Sequence
  Synthetic oligonucleotide
ccacattggattaagatcatcgcatttggg

SEQ ID NO: 338597 - DNA, 30 bp, Artificial Sequence
  Synthetic oligonucleotide
ctgcagcaatgtttgagcgatccctttggg

SEQ ID NO: 338598 - DNA, 30 bp, Artificial Sequence
  Synthetic oligonucleotide
gactattgggtagacaattgtcgctttggg

SEQ ID NO: 338599 - DNA, 30 bp, Artificial Sequence
  Synthetic oligonucleotide
ggagcgcagtaattttggttatgctttggg

SEQ ID NO: 338600 - DNA, 30 bp, Artificial Sequence
  Synthetic oligonucleotide
caatttggtgcacaactggcagtctttggg

SEQ ID NO: 338601 - DNA, 30 bp, Artificial Sequence
  Synthetic oligonucleotide
ctcttaaacatgccagcaaccgagtttggg

SEQ ID NO: 338602 - DNA, 30 bp, Artificial Sequence
  Synthetic oligonucleotide
aggacgttgttaacatagggagcgtttggg

SEQ ID NO: 338603 - DNA, 30 bp, Artificial Sequence
  Synthetic oligonucleotide
ttatcgtatagaaggatttagcggtttggg

SEQ ID NO: 338604 - DNA, 30 bp, Artificial Sequence
  Synthetic oligonucleotide
aacaactccacggaagggatgtggtttggg

SEQ ID NO: 338605 - DNA, 30 bp, Artificial Sequence
  Synthetic oligonucleotide
cgactcgcaagaaatgcgttcctttttggg

SEQ ID NO: 338606 - DNA, 30 bp, Artificial Sequence
  Synthetic oligonucleotide
gccctgaaaatttggggacgcccaaaatgg

SEQ ID NO: 338607 - DNA, 30 bp, Artificial Sequence
  Synthetic oligonucleotide
cagaaccactcttgagattagagaaaatgg

SEQ ID NO: 338608 - DNA, 30 bp, Artificial Sequence
  Synthetic oligonucleotide
gcatcctccagaacgcgcccacacaaatgg

SEQ ID NO: 338609 - DNA, 30 bp, Artificial Sequence
  Synthetic oligonucleotide
agcatgaattgcttacacgtgagcaaatgg

SEQ ID NO: 338610 - DNA, 30 bp, Artificial Sequence
  Synthetic oligonucleotide
gggagcgtgtggtccgcgagggataaatgg

SEQ ID NO: 338611 - DNA, 30 bp, Artificial Sequence
  Synthetic oligonucleotide
tgaattgggtttcaatcgtattgtaaatgg

SEQ ID NO: 338612 - DNA, 30 bp, Artificial Sequence
  Synthetic oligonucleotide
ttcatagcaccttgggagccgaaacaatgg

SEQ ID NO: 338613 - DNA, 30 bp, Artificial Sequence
  Synthetic oligonucleotide
cgaagttctgtctaaactcgagcacaatgg

SEQ ID NO: 338614 - DNA, 30 bp, Artificial Sequence
  Synthetic oligonucleotide
gcaccggatttgagctaggtgatacaatgg

SEQ ID NO: 338615 - DNA, 30 bp, Artificial Sequence
  Synthetic oligonucleotide
aacattcatcgccgggtttgcgcgcaatgg

SEQ ID NO: 338616 - DNA, 30 bp, Artificial Sequence
  Synthetic oligonucleotide
ttcgatggtcacatcctcgggaggcaatgg

SEQ ID NO: 338617 - DNA, 30 bp, Artificial Sequence
  Synthetic oligonucleotide
ccttccgtacgcattcctaaagatcaatgg

SEQ ID NO: 338618 - DNA, 30 bp, Artificial Sequence
  Synthetic oligonucleotide
atcgcgtgacatgtatcttctccagaatgg

SEQ ID NO: 338619 - DNA, 30 bp, Artificial Sequence
  Synthetic oligonucleotide
cgctcgctgtagtgaggggcgtcagaatgg

SEQ ID NO: 338620 - DNA, 30 bp, Artificial Sequence
  Synthetic oligonucleotide
gcttgtcactacgcctggatacgagaatgg

SEQ ID NO: 338621 - DNA, 30 bp, Artificial Sequence
  Synthetic oligonucleotide
ttgccgtccagcacaccacgtggcgaatgg

SEQ ID NO: 338622 - DNA, 30 bp, Artificial Sequence
  Synthetic oligonucleotide
tatgtttctacttcattggtacaggaatgg

SEQ ID NO: 338623 - DNA, 30 bp, Artificial Sequence
  Synthetic oligonucleotide
caactctcaaatttcgaggcgcaggaatgg

SEQ ID NO: 338624 - DNA, 30 bp, Artificial Sequence
  Synthetic oligonucleotide
aggatggcccaggctcttgggtcggaatgg

SEQ ID NO: 338625 - DNA, 30 bp, Artificial Sequence
  Synthetic oligonucleotide
caggttcggctgaacacaataatggaatgg

SEQ ID NO: 338626 - DNA, 30 bp, Artificial Sequence
  Synthetic oligonucleotide
cgccgaacaaagtatagggatcaataatgg

SEQ ID NO: 338627 - DNA, 30 bp, Artificial Sequence
  Synthetic oligonucleotide
cgttcgacgacgaccccatgaggataatgg

SEQ ID NO: 338628 - DNA, 30 bp, Artificial Sequence
  Synthetic oligonucleotide
aatcttgagagaaagaattaggtataatgg

SEQ ID NO: 338629 - DNA, 30 bp, Artificial Sequence
  Synthetic oligonucleotide
tatttacgcatcttaaggcccaggtaatgg

SEQ ID NO: 338630 - DNA, 30 bp, Artificial Sequence
  Synthetic oligonucleotide
cgtacccaatcgggcgccatatgcacatgg

SEQ ID NO: 338631 - DNA, 30 bp, Artificial Sequence
  Synthetic oligonucleotide
agaattccgggtaaatttagtaagacatgg

SEQ ID NO: 338632 - DNA, 30 bp, Artificial Sequence
  Synthetic oligonucleotide
catgtagcacatatagttcttgggacatgg

SEQ ID NO: 338633 - DNA, 30 bp, Artificial Sequence
  Synthetic oligonucleotide
ttagtgtggagagtagcaaactggacatgg

SEQ ID NO: 338634 - DNA, 30 bp, Artificial Sequence
  Synthetic oligonucleotide
ttttcgggagatgaagtctgctggacatgg

SEQ ID NO: 338635 - DNA, 30 bp, Artificial Sequence
  Synthetic oligonucleotide
gagtttactgcaacaaataaccatacatgg

SEQ ID NO: 338636 - DNA, 30 bp, Artificial Sequence
  Synthetic oligonucleotide
ccttcagctccgttcgctctgagtacatgg

SEQ ID NO: 338637 - DNA, 30 bp, Artificial Sequence
  Synthetic oligonucleotide
catggtccattggattccggccttacatgg

SEQ ID NO: 338638 - DNA, 30 bp, Artificial Sequence
  Synthetic oligonucleotide
cttaaccgcgtgctgatttaataaccatgg

SEQ ID NO: 338639 - DNA, 30 bp, Artificial Sequence
  Synthetic oligonucleotide
acttatgatagaagtgtgcgccacccatgg

SEQ ID NO: 338640 - DNA, 30 bp, Artificial Sequence
  Synthetic oligonucleotide
gggaaggaaacttacgcacctttcccatgg

SEQ ID NO: 338641 - DNA, 30 bp, Artificial Sequence
  Synthetic oligonucleotide
aaccctgggcatgggctggcacagccatgg

SEQ ID NO: 338642 - DNA, 30 bp, Artificial Sequence
  Synthetic oligonucleotide
aagcatgtgtcgcctcgaccttttccatgg

SEQ ID NO: 338643 - DNA, 30 bp, Artificial Sequence
  Synthetic oligonucleotide
gtcaaattcggtttttatttaaaggcatgg

SEQ ID NO: 338644 - DNA, 30 bp, Artificial Sequence
  Synthetic oligonucleotide
gatacaatttgtacgtcagagggtgcatgg

SEQ ID NO: 338645 - DNA, 30 bp, Artificial Sequence
  Synthetic oligonucleotide
taacgtagctagttgtttattttatcatgg

SEQ ID NO: 338646 - DNA, 30 bp, Artificial Sequence
  Synthetic oligonucleotide
cccctgccaccagaaatgacttcctcatgg

SEQ ID NO: 338647 - DNA, 30 bp, Artificial Sequence
  Synthetic oligonucleotide
gacattaatatcacctctcacctctcatgg

SEQ ID NO: 338648 - DNA, 30 bp, Artificial Sequence
  Synthetic oligonucleotide
gcccagaccaaagtagtccacaggtcatgg

SEQ ID NO: 338649 - DNA, 30 bp, Artificial Sequence
  Synthetic oligonucleotide
gcggtactcttctcaatattcatgagatgg

SEQ ID NO: 338650 - DNA, 30 bp, Artificial Sequence
  Synthetic oligonucleotide
taatgatcgctcggacgtataaatagatgg

SEQ ID NO: 338651 - DNA, 30 bp, Artificial Sequence
  Synthetic oligonucleotide
gttagaccatagagtcacggtcctagatgg

SEQ ID NO: 338652 - DNA, 30 bp, Artificial Sequence
  Synthetic oligonucleotide
taaaattgatgtgtcttagaagctagatgg

SEQ ID NO: 338653 - DNA, 30 bp, Artificial Sequence
  Synthetic oligonucleotide
accacggtttgaatttgtacaacacgatgg

SEQ ID NO: 338654 - DNA, 30 bp, Artificial Sequence
  Synthetic oligonucleotide
ctgctagttgtgcgtacgtgttcacgatgg

SEQ ID NO: 338655 - DNA, 30 bp, Artificial Sequence
  Synthetic oligonucleotide
actgattaaaacagtagggagctacgatgg

SEQ ID NO: 338656 - DNA, 30 bp, Artificial Sequence
  Synthetic oligonucleotide
gagtatttcatgatgctgaaagagcgatgg

SEQ ID NO: 338657 - DNA, 30 bp, Artificial Sequence
  Synthetic oligonucleotide
gagccacgtgtgtcgggtaatatgcgatgg

SEQ ID NO: 338658 - DNA, 30 bp, Artificial Sequence
  Synthetic oligonucleotide
aagaaaaagacacagagtttcttgcgatgg

SEQ ID NO: 338659 - DNA, 31 bp, Artificial Sequence
  Synthetic oligonucleotide
gcctcaattcatggtcttccgtcctcgatgg

SEQ ID NO: 338660 - DNA, 30 bp, Artificial Sequence
  Synthetic oligonucleotide
tgcgactaagtgcatgcgcagtaaggatgg

SEQ ID NO: 338661 - DNA, 30 bp, Artificial Sequence
  Synthetic oligonucleotide
tagtcgcgattgcgcctaaacgcaggatgg

SEQ ID NO: 338662 - DNA, 30 bp, Artificial Sequence
  Synthetic oligonucleotide
aaaacagtccaatggcgcaggtgcggatgg

SEQ ID NO: 338663 - DNA, 30 bp, Artificial Sequence
  Synthetic oligonucleotide
ttggatactaatcatatgcaacatggatgg

SEQ ID NO: 338664 - DNA, 30 bp, Artificial Sequence
  Synthetic oligonucleotide
ccatccgcaacgttctctttcagtggatgg

SEQ ID NO: 338665 - DNA, 30 bp, Artificial Sequence
  Synthetic oligonucleotide
tgaatctaccttaggctagagagtggatgg

SEQ ID NO: 338666 - DNA, 30 bp, Artificial Sequence
  Synthetic oligonucleotide
tgagtcatatatcctgatgatagtggatgg

SEQ ID NO: 338667 - DNA, 30 bp, Artificial Sequence
  Synthetic oligonucleotide
tcgcaccaacccgggttctggtactgatgg

SEQ ID NO: 338668 - DNA, 30 bp, Artificial Sequence
  Synthetic oligonucleotide
atggggtatggtcaagcaatcatctgatgg

SEQ ID NO: 338669 - DNA, 30 bp, Artificial Sequence
  Synthetic oligonucleotide
tcggttaatgtctgtctaatggagtgatgg

SEQ ID NO: 338670 - DNA, 30 bp, Artificial Sequence
  Synthetic oligonucleotide
gttgatctactagatctctagaggtgatgg

SEQ ID NO: 338671 - DNA, 30 bp, Artificial Sequence
  Synthetic oligonucleotide
atctaacgcaaaaatgcggcaagttgatgg

SEQ ID NO: 338672 - DNA, 30 bp, Artificial Sequence
  Synthetic oligonucleotide
ggagttaggtcacagcaagtaggttgatgg

SEQ ID NO: 338673 - DNA, 30 bp, Artificial Sequence
  Synthetic oligonucleotide
taatgcggtgggatttacaacatttgatgg

SEQ ID NO: 338674 - DNA, 30 bp, Artificial Sequence
  Synthetic oligonucleotide
ccccaactggaatgtgatgggctttgatgg

SEQ ID NO: 338675 - DNA, 30 bp, Artificial Sequence
  Synthetic oligonucleotide
cgcggcccaagctttgaatcttcaatatgg

SEQ ID NO: 338676 - DNA, 30 bp, Artificial Sequence
  Synthetic oligonucleotide
aattcaaatgaagaagccattcacatatgg

SEQ ID NO: 338677 - DNA, 30 bp, Artificial Sequence
  Synthetic oligonucleotide
agtcgttagacttgcgtacggggcatatgg

SEQ ID NO: 338678 - DNA, 30 bp, Artificial Sequence
  Synthetic oligonucleotide
ccgttccgtaggacattctttgtcatatgg

SEQ ID NO: 338679 - DNA, 30 bp, Artificial Sequence
  Synthetic oligonucleotide
aatcccactgcggatgtcgggttgatatgg

SEQ ID NO: 338680 - DNA, 30 bp, Artificial Sequence
  Synthetic oligonucleotide
gttaaggccggagtgacagggtctatatgg

SEQ ID NO: 338681 - DNA, 30 bp, Artificial Sequence
  Synthetic oligonucleotide
tgctaaaaactgtaatctgtcggtatatgg

SEQ ID NO: 338682 - DNA, 30 bp, Artificial Sequence
  Synthetic oligonucleotide
gagtcccgggttaacgaggacgaactatgg

SEQ ID NO: 338683 - DNA, 30 bp, Artificial Sequence
  Synthetic oligonucleotide
gaagatgttttgtcgacgtcaccactatgg

SEQ ID NO: 338684 - DNA, 30 bp, Artificial Sequence
  Synthetic oligonucleotide
atgaatgactattgaccaagtctactatgg

SEQ ID NO: 338685 - DNA, 30 bp, Artificial Sequence
  Synthetic oligonucleotide
ccgacgtcttttcttactatttccctatgg

SEQ ID NO: 338686 - DNA, 30 bp, Artificial Sequence
  Synthetic oligonucleotide
atgctatggttagtgtcagcactcctatgg

SEQ ID NO: 338687 - DNA, 30 bp, Artificial Sequence
  Synthetic oligonucleotide
agacaggggcactttctgcacattctatgg

SEQ ID NO: 338688 - DNA, 30 bp, Artificial Sequence
  Synthetic oligonucleotide
cgactgtcgtctcagtgatcggttctatgg

SEQ ID NO: 338689 - DNA, 30 bp, Artificial Sequence
  Synthetic oligonucleotide
cttctggcagccgcgctatgttcagtatgg

SEQ ID NO: 338690 - DNA, 30 bp, Artificial Sequence
  Synthetic oligonucleotide
tcgtgccttgccttatcaattggagtatgg

SEQ ID NO: 338691 - DNA, 30 bp, Artificial Sequence
  Synthetic oligonucleotide
cgaggcctatgtgagggctgcaaggtatgg

SEQ ID NO: 338692 - DNA, 30 bp, Artificial Sequence
  Synthetic oligonucleotide
agctagatgatgtatgtggaagaggtatgg

SEQ ID NO: 338693 - DNA, 30 bp, Artificial Sequence
  Synthetic oligonucleotide
tctggattgaccgtggcatcctaggtatgg

SEQ ID NO: 338694 - DNA, 31 bp, Artificial Sequence
  Synthetic oligonucleotide
cgaaccatccactaccctacggctggtatgg

SEQ ID NO: 338695 - DNA, 30 bp, Artificial Sequence
  Synthetic oligonucleotide
ttcattgggcaattactttgagatgtatgg

SEQ ID NO: 338696 - DNA, 30 bp, Artificial Sequence
  Synthetic oligonucleotide
aaaccccagtgacatatcctaagtgtatgg

SEQ ID NO: 338697 - DNA, 30 bp, Artificial Sequence
  Synthetic oligonucleotide
tggtataacgtgtgatgggaacttgtatgg

SEQ ID NO: 338698 - DNA, 30 bp, Artificial Sequence
  Synthetic oligonucleotide
acttcacgtgtcctctaaccggttgtatgg

SEQ ID NO: 338699 - DNA, 30 bp, Artificial Sequence
  Synthetic oligonucleotide
atgttggttgcagtcgcgcgggaattatgg

SEQ ID NO: 338700 - DNA, 30 bp, Artificial Sequence
  Synthetic oligonucleotide
agcttgaagggttcgaagcaactattatgg

SEQ ID NO: 338701 - DNA, 30 bp, Artificial Sequence
  Synthetic oligonucleotide
gagacaataactgaggtccccaacttatgg

SEQ ID NO: 338702 - DNA, 30 bp, Artificial Sequence
  Synthetic oligonucleotide
ctctccgtgcaggcctaccccgacttatgg

SEQ ID NO: 338703 - DNA, 30 bp, Artificial Sequence
  Synthetic oligonucleotide
ccttacagcgcggtcggatgtaccttatgg

SEQ ID NO: 338704 - DNA, 30 bp, Artificial Sequence
  Synthetic oligonucleotide
ggtgacgggtgttgtattgactccttatgg

SEQ ID NO: 338705 - DNA, 30 bp, Artificial Sequence
  Synthetic oligonucleotide
tgctgatacgtcgcaggcggactcttatgg

SEQ ID NO: 338706 - DNA, 30 bp, Artificial Sequence
  Synthetic oligonucleotide
agggcgtgtgttcaacctaatgagttatgg

SEQ ID NO: 338707 - DNA, 30 bp, Artificial Sequence
  Synthetic oligonucleotide
accggcctacgatatgcttaaccgttatgg

SEQ ID NO: 338708 - DNA, 30 bp, Artificial Sequence
  Synthetic oligonucleotide
ctgcttgatttcatgttgggagatttatgg

SEQ ID NO: 338709 - DNA, 30 bp, Artificial Sequence
  Synthetic oligonucleotide
caaccttagatcacaataaattctttatgg

SEQ ID NO: 338710 - DNA, 30 bp, Artificial Sequence
  Synthetic oligonucleotide
gtataagggtatcacgtctgtacaaactgg

SEQ ID NO: 338711 - DNA, 30 bp, Artificial Sequence
  Synthetic oligonucleotide
ccaaaccgtgctatctctaaagtaaactgg

SEQ ID NO: 338712 - DNA, 30 bp, Artificial Sequence
  Synthetic oligonucleotide
cagaagtccgagtcacgcaagcggaactgg

SEQ ID NO: 338713 - DNA, 30 bp, Artificial Sequence
  Synthetic oligonucleotide
tgattggggtctatttggcgtcggaactgg

SEQ ID NO: 338714 - DNA, 30 bp, Artificial Sequence
  Synthetic oligonucleotide
ggcctggccccccgtatgtaatggaactgg

SEQ ID NO: 338715 - DNA, 30 bp, Artificial Sequence
  Synthetic oligonucleotide
aaggggggtatccctttggtgcataactgg

SEQ ID NO: 338716 - DNA, 30 bp, Artificial Sequence
  Synthetic oligonucleotide
tggaacttaccttgaggaggtaaacactgg

SEQ ID NO: 338717 - DNA, 30 bp, Artificial Sequence
  Synthetic oligonucleotide
aataggtgcattttccgaatcctacactgg

SEQ ID NO: 338718 - DNA, 30 bp, Artificial Sequence
  Synthetic oligonucleotide
tacaccccaggtactaatgaaactcactgg

SEQ ID NO: 338719 - DNA, 30 bp, Artificial Sequence
  Synthetic oligonucleotide
tcatggtatctgttgtagcgcggtcactgg

SEQ ID NO: 338720 - DNA, 30 bp, Artificial Sequence
  Synthetic oligonucleotide
acagccgttgggttgtatgcgtttcactgg

SEQ ID NO: 338721 - DNA, 30 bp, Artificial Sequence
  Synthetic oligonucleotide
gaatgggtctatggtcagtgtagcgactgg

SEQ ID NO: 338722 - DNA, 30 bp, Artificial Sequence
  Synthetic oligonucleotide
gggtgtgttatgtccgagagccgggactgg

SEQ ID NO: 338723 - DNA, 30 bp, Artificial Sequence
  Synthetic oligonucleotide
tttagcgtggaagtgtccactgcatactgg

SEQ ID NO: 338724 - DNA, 30 bp, Artificial Sequence
  Synthetic oligonucleotide
attctttggacgggggcgtgacgatactgg

SEQ ID NO: 338725 - DNA, 30 bp, Artificial Sequence
  Synthetic oligonucleotide
cgcctacacgctaatttatgcgtgtactgg

SEQ ID NO: 338726 - DNA, 30 bp, Artificial Sequence
  Synthetic oligonucleotide
gccagatatttttacactacctgttactgg

SEQ ID NO: 338727 - DNA, 30 bp, Artificial Sequence
  Synthetic oligonucleotide
tgatgcagtgaaaatagttcacaaacctgg

SEQ ID NO: 338728 - DNA, 30 bp, Artificial Sequence
  Synthetic oligonucleotide
caagggctaaaggttcacttttcaacctgg

SEQ ID NO: 338729 - DNA, 30 bp, Artificial Sequence
  Synthetic oligonucleotide
cgtggttcaccattgaattgcaccacctgg

SEQ ID NO: 338730 - DNA, 30 bp, Artificial Sequence
  Synthetic oligonucleotide
ctcgggtgatcggaacgatcatccacctgg

SEQ ID NO: 338731 - DNA, 30 bp, Artificial Sequence
  Synthetic oligonucleotide
ggccgcgttgaagccgtgacgaagacctgg

SEQ ID NO: 338732 - DNA, 30 bp, Artificial Sequence
  Synthetic oligonucleotide
ggtaggtccgactggaattcggatacctgg

SEQ ID NO: 338733 - DNA, 30 bp, Artificial Sequence
  Synthetic oligonucleotide
gactgctagaatggttaaaacactacctgg

SEQ ID NO: 338734 - DNA, 30 bp, Artificial Sequence
  Synthetic oligonucleotide
aatgagaataatgttttagggagaccctgg

SEQ ID NO: 338735 - DNA, 30 bp, Artificial Sequence
  Synthetic oligonucleotide
tgtgatattcatgatatgcattatccctgg

SEQ ID NO: 338736 - DNA, 30 bp, Artificial Sequence
  Synthetic oligonucleotide
gtgtatgagtaacggtggcaaattccctgg

SEQ ID NO: 338737 - DNA, 30 bp, Artificial Sequence
  Synthetic oligonucleotide
gaagttttcgtcgtggaggccgttccctgg

SEQ ID NO: 338738 - DNA, 30 bp, Artificial Sequence
  Synthetic oligonucleotide
gggcgtttagaaaaccggctaaaagcctgg

SEQ ID NO: 338739 - DNA, 30 bp, Artificial Sequence
  Synthetic oligonucleotide
cccacgtgaagaattctagagccagcctgg

SEQ ID NO: 338740 - DNA, 30 bp, Artificial Sequence
  Synthetic oligonucleotide
catgagtacagaaggtttccaagcgcctgg

SEQ ID NO: 338741 - DNA, 30 bp, Artificial Sequence
  Synthetic oligonucleotide
gaagtttcctttaaagtttaggtcgcctgg

SEQ ID NO: 338742 - DNA, 30 bp, Artificial Sequence
  Synthetic oligonucleotide
ttcaggcgaaaaaccctacgtttggcctgg

SEQ ID NO: 338743 - DNA, 30 bp, Artificial Sequence
  Synthetic oligonucleotide
agtccagtcttaagcaacctctatgcctgg

SEQ ID NO: 338744 - DNA, 30 bp, Artificial Sequence
  Synthetic oligonucleotide
aaacaataatctgtcgatcgattatcctgg

SEQ ID NO: 338745 - DNA, 30 bp, Artificial Sequence
  Synthetic oligonucleotide
ctccaacggggcatgttgcctctgtcctgg

SEQ ID NO: 338746 - DNA, 30 bp, Artificial Sequence
  Synthetic oligonucleotide
tgtaataggtaagtcattaagagttcctgg

SEQ ID NO: 338747 - DNA, 30 bp, Artificial Sequence
  Synthetic oligonucleotide
gtccgaccaaccaagcccacggaaagctgg

SEQ ID NO: 338748 - DNA, 30 bp, Artificial Sequence
  Synthetic oligonucleotide
gagaacctccgggtcacgggtgaaagctgg

SEQ ID NO: 338749 - DNA, 30 bp, Artificial Sequence
  Synthetic oligonucleotide
aattcggttggcacgaacatacacagctgg

SEQ ID NO: 338750 - DNA, 30 bp, Artificial Sequence
  Synthetic oligonucleotide
aaattcataggcaaagagggccctagctgg

SEQ ID NO: 338751 - DNA, 30 bp, Artificial Sequence
  Synthetic oligonucleotide
gaacctaggaatatctgagtacttagctgg

SEQ ID NO: 338752 - DNA, 30 bp, Artificial Sequence
  Synthetic oligonucleotide
aaggaagggatgagccggttgggacgctgg

SEQ ID NO: 338753 - DNA, 30 bp, Artificial Sequence
  Synthetic oligonucleotide
actcgcagtgccatgttaacgtaccgctgg

SEQ ID NO: 338754 - DNA, 30 bp, Artificial Sequence
  Synthetic oligonucleotide
ggacatctttcgccgggtgcgccccgctgg

SEQ ID NO: 338755 - DNA, 30 bp, Artificial Sequence
  Synthetic oligonucleotide
attaccgcccgcgagggtgctacgcgctgg

SEQ ID NO: 338756 - DNA, 30 bp, Artificial Sequence
  Synthetic oligonucleotide
ttagatgcctggtggatatgacggcgctgg

SEQ ID NO: 338757 - DNA, 30 bp, Artificial Sequence
  Synthetic oligonucleotide
ataagatttgtgcacctgtgtcatcgctgg

SEQ ID NO: 338758 - DNA, 30 bp, Artificial Sequence
  Synthetic oligonucleotide
tagagacacgaagatccacaatatcgctgg

SEQ ID NO: 338759 - DNA, 30 bp, Artificial Sequence
  Synthetic oligonucleotide
atgataccttggtgagggcccactcgctgg

SEQ ID NO: 338760 - DNA, 30 bp, Artificial Sequence
  Synthetic oligonucleotide
acaagcgcgtacagtagagcaattcgctgg

SEQ ID NO: 338761 - DNA, 31 bp, Artificial Sequence
  Synthetic oligonucleotide
tacgtacacttattgatggtaccttcgctgg

SEQ ID NO: 338762 - DNA, 30 bp, Artificial Sequence
  Synthetic oligonucleotide
tgaggttgaggactggcttggggaggctgg

SEQ ID NO: 338763 - DNA, 30 bp, Artificial Sequence
  Synthetic oligonucleotide
acctcggaggtcgttggtgcacacggctgg

SEQ ID NO: 338764 - DNA, 30 bp, Artificial Sequence
  Synthetic oligonucleotide
cgtctgaacgattgcccaatttacggctgg

SEQ ID NO: 338765 - DNA, 30 bp, Artificial Sequence
  Synthetic oligonucleotide
tatactttgataatcgttctgtccggctgg

SEQ ID NO: 338766 - DNA, 30 bp, Artificial Sequence
  Synthetic oligonucleotide
ccgctgcgtttacagtctcggctcggctgg

SEQ ID NO: 338767 - DNA, 30 bp, Artificial Sequence
  Synthetic oligonucleotide
gaattgttgttgatttgtttctggggctgg

SEQ ID NO: 338768 - DNA, 30 bp, Artificial Sequence
  Synthetic oligonucleotide
aaactaggcgtaaagctccgactgggctgg

SEQ ID NO: 338769 - DNA, 30 bp, Artificial Sequence
  Synthetic oligonucleotide
tcgaaggtatatcctgaggggtctggctgg

SEQ ID NO: 338770 - DNA, 30 bp, Artificial Sequence
  Synthetic oligonucleotide
tcaggtgtacaggcgttggaataatgctgg

SEQ ID NO: 338771 - DNA, 30 bp, Artificial Sequence
  Synthetic oligonucleotide
aattcggcggaaaggatgagaatttgctgg

SEQ ID NO: 338772 - DNA, 30 bp, Artificial Sequence
  Synthetic oligonucleotide
tggaactagtcccggtgtctcgcaatctgg

SEQ ID NO: 338773 - DNA, 30 bp, Artificial Sequence
  Synthetic oligonucleotide
aggcctttcccgtcagggaaagacatctgg

SEQ ID NO: 338774 - DNA, 30 bp, Artificial Sequence
  Synthetic oligonucleotide
agggtcatcattgtctcatgcaccatctgg

SEQ ID NO: 338775 - DNA, 30 bp, Artificial Sequence
  Synthetic oligonucleotide
gagcatcctaatcttcagttcgtcatctgg

SEQ ID NO: 338776 - DNA, 30 bp, Artificial Sequence
  Synthetic oligonucleotide
tgcactatgcggagcgaaagaccactctgg

SEQ ID NO: 338777 - DNA, 30 bp, Artificial Sequence
  Synthetic oligonucleotide
gtaatttagtgcttctagccatacctctgg

SEQ ID NO: 338778 - DNA, 30 bp, Artificial Sequence
  Synthetic oligonucleotide
cggatgtgcagtttaggctccagcctctgg

SEQ ID NO: 338779 - DNA, 30 bp, Artificial Sequence
  Synthetic oligonucleotide
acacggatatgaggcgtcgcacgcctctgg

SEQ ID NO: 338780 - DNA, 30 bp, Artificial Sequence
  Synthetic oligonucleotide
aaatttgcgtcctgatcactctcgctctgg

SEQ ID NO: 338781 - DNA, 30 bp, Artificial Sequence
  Synthetic oligonucleotide
aagtacttagctccacacattgtagtctgg

SEQ ID NO: 338782 - DNA, 30 bp, Artificial Sequence
  Synthetic oligonucleotide
gtgattagtacccgagttagatgcgtctgg

SEQ ID NO: 338783 - DNA, 30 bp, Artificial Sequence
  Synthetic oligonucleotide
aaggtcaatctatcggaatttaaggtctgg

SEQ ID NO: 338784 - DNA, 31 bp, Artificial Sequence
  Synthetic oligonucleotide
ttagcgccatagggttggacgggttgtctgg

SEQ ID NO: 338785 - DNA, 30 bp, Artificial Sequence
  Synthetic oligonucleotide
gatgatgaagaatctggtatataattctgg

SEQ ID NO: 338786 - DNA, 30 bp, Artificial Sequence
  Synthetic oligonucleotide
caacgggtatagcggggggattgattctgg

SEQ ID NO: 338787 - DNA, 30 bp, Artificial Sequence
  Synthetic oligonucleotide
aggcgacgtctctaccctgttatcttctgg

SEQ ID NO: 338788 - DNA, 30 bp, Artificial Sequence
  Synthetic oligonucleotide
taaactggacagtcagattcaaatttctgg

SEQ ID NO: 338789 - DNA, 30 bp, Artificial Sequence
  Synthetic oligonucleotide
gacggaaacccagcatcaattcaaaagtgg

SEQ ID NO: 338790 - DNA, 30 bp, Artificial Sequence
  Synthetic oligonucleotide
ttgagactctatacacacatgagaaagtgg

SEQ ID NO: 338791 - DNA, 30 bp, Artificial Sequence
  Synthetic oligonucleotide
cttggatatgtataatcttgctagaagtgg

SEQ ID NO: 338792 - DNA, 30 bp, Artificial Sequence
  Synthetic oligonucleotide
tcaaaattcgcctttgtgaaggcgaagtgg

SEQ ID NO: 338793 - DNA, 30 bp, Artificial Sequence
  Synthetic oligonucleotide
tctccacatcatgtaagaacgtgtaagtgg

SEQ ID NO: 338794 - DNA, 30 bp, Artificial Sequence
  Synthetic oligonucleotide
cacttagggcttgggcagtccgaacagtgg

SEQ ID NO: 338795 - DNA, 30 bp, Artificial Sequence
  Synthetic oligonucleotide
attgtttacaagaccccaacgtaccagtgg

SEQ ID NO: 338796 - DNA, 30 bp, Artificial Sequence
  Synthetic oligonucleotide
ggctcgagctggtccagtactcgccagtgg

SEQ ID NO: 338797 - DNA, 30 bp, Artificial Sequence
  Synthetic oligonucleotide
aataggaggggatgacatatatggcagtgg

SEQ ID NO: 338798 - DNA, 30 bp, Artificial Sequence
  Synthetic oligonucleotide
tagggaatcgatgggtctttagatcagtgg

SEQ ID NO: 338799 - DNA, 30 bp, Artificial Sequence
  Synthetic oligonucleotide
ggcacactaggggtaaggaatcttcagtgg

SEQ ID NO: 338800 - DNA, 30 bp, Artificial Sequence
  Synthetic oligonucleotide
aagagatatgcacccgattagctagagtgg

SEQ ID NO: 338801 - DNA, 30 bp, Artificial Sequence
  Synthetic oligonucleotide
cctataacgtgaacccatcagtacgagtgg

SEQ ID NO: 338802 - DNA, 30 bp, Artificial Sequence
  Synthetic oligonucleotide
gttaagctttattttgccaaggtcgagtgg

SEQ ID NO: 338803 - DNA, 30 bp, Artificial Sequence
  Synthetic oligonucleotide
tccgcgtttaggctgaagaagtttgagtgg

SEQ ID NO: 338804 - DNA, 30 bp, Artificial Sequence
  Synthetic oligonucleotide
aagcataaacgaagcgtcaccgtctagtgg

SEQ ID NO: 338805 - DNA, 30 bp, Artificial Sequence
  Synthetic oligonucleotide
agtagttctttcgtaaggtggaagtagtgg

SEQ ID NO: 338806 - DNA, 30 bp, Artificial Sequence
  Synthetic oligonucleotide
acggcacgactgcaagttatttcgtagtgg

SEQ ID NO: 338807 - DNA, 30 bp, Artificial Sequence
  Synthetic oligonucleotide
atggcctgcggttgggcgggggggtagtgg

SEQ ID NO: 338808 - DNA, 30 bp, Artificial Sequence
  Synthetic oligonucleotide
tgaaaccgtttttgctcggtgaattagtgg

SEQ ID NO: 338809 - DNA, 30 bp, Artificial Sequence
  Synthetic oligonucleotide
tatagcaagtgtctccctcgacaaacgtgg

SEQ ID NO: 338810 - DNA, 30 bp, Artificial Sequence
  Synthetic oligonucleotide
tgtgcgccttgtctacgtgtcgcaacgtgg

SEQ ID NO: 338811 - DNA, 30 bp, Artificial Sequence
  Synthetic oligonucleotide
aaactagcgacgttttgatgggcaacgtgg

SEQ ID NO: 338812 - DNA, 30 bp, Artificial Sequence
  Synthetic oligonucleotide
ttgtggccacataccgattcttagacgtgg

SEQ ID NO: 338813 - DNA, 30 bp, Artificial Sequence
  Synthetic oligonucleotide
aacaggtcacaggctgcgctgccaccgtgg

SEQ ID NO: 338814 - DNA, 30 bp, Artificial Sequence
  Synthetic oligonucleotide
ggggcaccatttgctcaagttggaccgtgg

SEQ ID NO: 338815 - DNA, 30 bp, Artificial Sequence
  Synthetic oligonucleotide
gcttgaccctcgggctgttgtgtcccgtgg

SEQ ID NO: 338816 - DNA, 28 bp, Artificial Sequence
  Synthetic oligonucleotide
tatgtaggtacgcagatgaaagccgtgg

SEQ ID NO: 338817 - DNA, 30 bp, Artificial Sequence
  Synthetic oligonucleotide
gtttcgggagtaacggcatgtgcgccgtgg

SEQ ID NO: 338818 - DNA, 30 bp, Artificial Sequence
  Synthetic oligonucleotide
ggccaggtgagttccgtcattgtgccgtgg

SEQ ID NO: 338819 - DNA, 30 bp, Artificial Sequence
  Synthetic oligonucleotide
tccgggctatacgttgcttcttgagcgtgg

SEQ ID NO: 338820 - DNA, 30 bp, Artificial Sequence
  Synthetic oligonucleotide
tgtctcaagagataacacattatagcgtgg

SEQ ID NO: 338821 - DNA, 30 bp, Artificial Sequence
  Synthetic oligonucleotide
ttggataaccaaatgcgctctagcgcgtgg

SEQ ID NO: 338822 - DNA, 30 bp, Artificial Sequence
  Synthetic oligonucleotide
caaacagaattcggagggcttagcgcgtgg

SEQ ID NO: 338823 - DNA, 30 bp, Artificial Sequence
  Synthetic oligonucleotide
tgcttcaacacatgctgggcaggggcgtgg

SEQ ID NO: 338824 - DNA, 30 bp, Artificial Sequence
  Synthetic oligonucleotide
gtgcccctccggtaacgcctactatcgtgg

SEQ ID NO: 338825 - DNA, 30 bp, Artificial Sequence
  Synthetic oligonucleotide
tcacacatcgaagttgtagctctatcgtgg

SEQ ID NO: 338826 - DNA, 30 bp, Artificial Sequence
  Synthetic oligonucleotide
agcaggttgccgctttctcggtattcgtgg

SEQ ID NO: 338827 - DNA, 30 bp, Artificial Sequence
  Synthetic oligonucleotide
gtatatcatttgtattcggtgaaaaggtgg

SEQ ID NO: 338828 - DNA, 30 bp, Artificial Sequence
  Synthetic oligonucleotide
gagagtctcatggctaagttagtaaggtgg

SEQ ID NO: 338829 - DNA, 30 bp, Artificial Sequence
  Synthetic oligonucleotide
tggggatcagtaggccccgaaggcaggtgg

SEQ ID NO: 338830 - DNA, 30 bp, Artificial Sequence
  Synthetic oligonucleotide
ggctgggactgtataacagccaggaggtgg

SEQ ID NO: 338831 - DNA, 30 bp, Artificial Sequence
  Synthetic oligonucleotide
ttaccgtacggtaagcatcattggaggtgg

SEQ ID NO: 338832 - DNA, 30 bp, Artificial Sequence
  Synthetic oligonucleotide
atatccgtcccacgaagatgttggaggtgg

SEQ ID NO: 338833 - DNA, 30 bp, Artificial Sequence
  Synthetic oligonucleotide
agtacgtgtgttggctgcccgttgaggtgg

SEQ ID NO: 338834 - DNA, 30 bp, Artificial Sequence
  Synthetic oligonucleotide
ggcccaccttcgccaactaaagaacggtgg

SEQ ID NO: 338835 - DNA, 30 bp, Artificial Sequence
  Synthetic oligonucleotide
aaatctcaaagcgcatactaagaacggtgg

SEQ ID NO: 338836 - DNA, 30 bp, Artificial Sequence
  Synthetic oligonucleotide
cagatataataacgaattctctcccggtgg

SEQ ID NO: 338837 - DNA, 30 bp, Artificial Sequence
  Synthetic oligonucleotide
ataacgcctggtgggatatgctgccggtgg

SEQ ID NO: 338838 - DNA, 30 bp, Artificial Sequence
  Synthetic oligonucleotide
tcttgtaccaactcggtcatggtccggtgg

SEQ ID NO: 338839 - DNA, 30 bp, Artificial Sequence
  Synthetic oligonucleotide
ccagcggatcatctggctatacggcggtgg

SEQ ID NO: 338840 - DNA, 30 bp, Artificial Sequence
  Synthetic oligonucleotide
tagtccgaccgtaattaattgatgcggtgg

SEQ ID NO: 338841 - DNA, 30 bp, Artificial Sequence
  Synthetic oligonucleotide
agtattaatgaagtcggacataatcggtgg

SEQ ID NO: 338842 - DNA, 30 bp, Artificial Sequence
  Synthetic oligonucleotide
ttttgatgacccccgggagggcatcggtgg

SEQ ID NO: 338843 - DNA, 30 bp, Artificial Sequence
  Synthetic oligonucleotide
gccaaatgcgctggattcctgcatcggtgg

SEQ ID NO: 338844 - DNA, 30 bp, Artificial Sequence
  Synthetic oligonucleotide
agtcagtaacatacgacggcctatcggtgg

SEQ ID NO: 338845 - DNA, 30 bp, Artificial Sequence
  Synthetic oligonucleotide
aacgacagcgctgactgagtaactcggtgg

SEQ ID NO: 338846 - DNA, 30 bp, Artificial Sequence
  Synthetic oligonucleotide
gggcatcgtgggtctgtggggagggggtgg

SEQ ID NO: 338847 - DNA, 30 bp, Artificial Sequence
  Synthetic oligonucleotide
cagtatcttcgtatcgtttgatttgggtgg

SEQ ID NO: 338848 - DNA, 30 bp, Artificial Sequence
  Synthetic oligonucleotide
atcgttcaaggttccgtacgaaattggtgg

SEQ ID NO: 338849 - DNA, 30 bp, Artificial Sequence
  Synthetic oligonucleotide
tctaccttacaatgcctggatgcttggtgg

SEQ ID NO: 338850 - DNA, 30 bp, Artificial Sequence
  Synthetic oligonucleotide
tggcgagtagatttaccaattgtttggtgg

SEQ ID NO: 338851 - DNA, 30 bp, Artificial Sequence
  Synthetic oligonucleotide
tgactcccatagtggggccaaacaatgtgg

SEQ ID NO: 338852 - DNA, 30 bp, Artificial Sequence
  Synthetic oligonucleotide
gaatcgattggccactgatcacgaatgtgg

SEQ ID NO: 338853 - DNA, 30 bp, Artificial Sequence
  Synthetic oligonucleotide
cttcgagcaacactagattaattcatgtgg

SEQ ID NO: 338854 - DNA, 30 bp, Artificial Sequence
  Synthetic oligonucleotide
aggcgggacgtttacatgtgtttcatgtgg

SEQ ID NO: 338855 - DNA, 30 bp, Artificial Sequence
  Synthetic oligonucleotide
ggattcaacggcgcttttataaatatgtgg

SEQ ID NO: 338856 - DNA, 30 bp, Artificial Sequence
  Synthetic oligonucleotide
aattgaaagggataaacgccttgtatgtgg

SEQ ID NO: 338857 - DNA, 30 bp, Artificial Sequence
  Synthetic oligonucleotide
tataatggtgcaatacgctgaagactgtgg

SEQ ID NO: 338858 - DNA, 30 bp, Artificial Sequence
  Synthetic oligonucleotide
tagtttgcctaaaatgaattctgactgtgg

SEQ ID NO: 338859 - DNA, 30 bp, Artificial Sequence
  Synthetic oligonucleotide
gtggcgatgacgtcactaggacacctgtgg

SEQ ID NO: 338860 - DNA, 30 bp, Artificial Sequence
  Synthetic oligonucleotide
gtctggcctatgctacgcgtgtcagtgtgg

SEQ ID NO: 338861 - DNA, 30 bp, Artificial Sequence
  Synthetic oligonucleotide
aagtactcccgaaattattcaatagtgtgg

SEQ ID NO: 338862 - DNA, 30 bp, Artificial Sequence
  Synthetic oligonucleotide
aataatgtcgtaaccgatctcctagtgtgg

SEQ ID NO: 338863 - DNA, 30 bp, Artificial Sequence
  Synthetic oligonucleotide
caggactaagtgatatccatcaccgtgtgg

SEQ ID NO: 338864 - DNA, 30 bp, Artificial Sequence
  Synthetic oligonucleotide
tgtagattgttcgggtgtgcctatgtgtgg

SEQ ID NO: 338865 - DNA, 30 bp, Artificial Sequence
  Synthetic oligonucleotide
cagtcgacctcgtcggcgtgccaattgtgg

SEQ ID NO: 338866 - DNA, 30 bp, Artificial Sequence
  Synthetic oligonucleotide
aatggtccgcaccggttgctcgatttgtgg

SEQ ID NO: 338867 - DNA, 30 bp, Artificial Sequence
  Synthetic oligonucleotide
gctaaaggatgtcccaatatcactttgtgg

SEQ ID NO: 338868 - DNA, 30 bp, Artificial Sequence
  Synthetic oligonucleotide
caagggcttgagttgtccattatcaattgg

SEQ ID NO: 338869 - DNA, 30 bp, Artificial Sequence
  Synthetic oligonucleotide
gctgttaggagcagctccagccataattgg

SEQ ID NO: 338870 - DNA, 30 bp, Artificial Sequence
  Synthetic oligonucleotide
ccgtatgcgattgtataataatttaattgg

SEQ ID NO: 338871 - DNA, 30 bp, Artificial Sequence
  Synthetic oligonucleotide
gaatagccaaacatgctaatataccattgg

SEQ ID NO: 338872 - DNA, 30 bp, Artificial Sequence
  Synthetic oligonucleotide
gtccatgaagaacccaaaaccccccattgg

SEQ ID NO: 338873 - DNA, 30 bp, Artificial Sequence
  Synthetic oligonucleotide
cgcctcagtttaggcgggtccagtcattgg

SEQ ID NO: 338874 - DNA, 30 bp, Artificial Sequence
  Synthetic oligonucleotide
gcttacaatggtacaacttgcacagattgg

SEQ ID NO: 338875 - DNA, 30 bp, Artificial Sequence
  Synthetic oligonucleotide
cccttaggaacacgtactgattcagattgg

SEQ ID NO: 338876 - DNA, 30 bp, Artificial Sequence
  Synthetic oligonucleotide
cccccaacttaagtggcgagctgagattgg

SEQ ID NO: 338877 - DNA, 30 bp, Artificial Sequence
  Synthetic oligonucleotide
ccgacgtcgcacttattgcctcccgattgg

SEQ ID NO: 338878 - DNA, 30 bp, Artificial Sequence
  Synthetic oligonucleotide
cttcgacctgtccgcttcatgagcgattgg

SEQ ID NO: 338879 - DNA, 30 bp, Artificial Sequence
  Synthetic oligonucleotide
ttgttgggtgcttcatgtcctttcgattgg

SEQ ID NO: 338880 - DNA, 30 bp, Artificial Sequence
  Synthetic oligonucleotide
cgttcctagcatcttggaattgtggattgg

SEQ ID NO: 338881 - DNA, 30 bp, Artificial Sequence
  Synthetic oligonucleotide
cttatacttcggtcgtactaaaaatattgg

SEQ ID NO: 338882 - DNA, 30 bp, Artificial Sequence
  Synthetic oligonucleotide
gctatactccgcatattaggaatatattgg

SEQ ID NO: 338883 - DNA, 30 bp, Artificial Sequence
  Synthetic oligonucleotide
acttgtcataagctggccaatcactattgg

SEQ ID NO: 338884 - DNA, 30 bp, Artificial Sequence
  Synthetic oligonucleotide
cggtggaaagagttttctgtaggctattgg

SEQ ID NO: 338885 - DNA, 30 bp, Artificial Sequence
  Synthetic oligonucleotide
taagatgttcgcctaagggcagagtattgg

SEQ ID NO: 338886 - DNA, 30 bp, Artificial Sequence
  Synthetic oligonucleotide
gaagtgaccggaaaatttatggcttattgg

SEQ ID NO: 338887 - DNA, 30 bp, Artificial Sequence
  Synthetic oligonucleotide
atatctgcagcgaaaataagtggttattgg

SEQ ID NO: 338888 - DNA, 30 bp, Artificial Sequence
  Synthetic oligonucleotide
agccgtagcctaccgctatccggaacttgg

SEQ ID NO: 338889 - DNA, 30 bp, Artificial Sequence
  Synthetic oligonucleotide
aaatctgcttacaacgtgaaacccacttgg

SEQ ID NO: 338890 - DNA, 30 bp, Artificial Sequence
  Synthetic oligonucleotide
tataagactaatggtaattagagcacttgg

SEQ ID NO: 338891 - DNA, 30 bp, Artificial Sequence
  Synthetic oligonucleotide
gtacctcaataggcgtttcacactacttgg

SEQ ID NO: 338892 - DNA, 30 bp, Artificial Sequence
  Synthetic oligonucleotide
ggtgtttttttcggcaaggttctaccttgg

SEQ ID NO: 338893 - DNA, 30 bp, Artificial Sequence
  Synthetic oligonucleotide
atgtattcgggcttggcgattcgcccttgg

SEQ ID NO: 338894 - DNA, 30 bp, Artificial Sequence
  Synthetic oligonucleotide
taaggaggtatttggtttcgttggccttgg

SEQ ID NO: 338895 - DNA, 30 bp, Artificial Sequence
  Synthetic oligonucleotide
gttagatgatcgttaacattaatgccttgg

SEQ ID NO: 338896 - DNA, 30 bp, Artificial Sequence
  Synthetic oligonucleotide
acgtaagtcttttctatcagacgtccttgg

SEQ ID NO: 338897 - DNA, 30 bp, Artificial Sequence
  Synthetic oligonucleotide
gtcgcccatgggcttaattgtaaagcttgg

SEQ ID NO: 338898 - DNA, 30 bp, Artificial Sequence
  Synthetic oligonucleotide
gacgcactccgggatcgagccatagcttgg

SEQ ID NO: 338899 - DNA, 30 bp, Artificial Sequence
  Synthetic oligonucleotide
gctcgattgcggatatacacgcacgcttgg

SEQ ID NO: 338900 - DNA, 30 bp, Artificial Sequence
  Synthetic oligonucleotide
ggaaggcatgccggggcggcgggggcttgg

SEQ ID NO: 338901 - DNA, 30 bp, Artificial Sequence
  Synthetic oligonucleotide
agacttatgcatacttcgctgattgcttgg

SEQ ID NO: 338902 - DNA, 30 bp, Artificial Sequence
  Synthetic oligonucleotide
tgcgccaggatttagtaatgcatatcttgg

SEQ ID NO: 338903 - DNA, 30 bp, Artificial Sequence
  Synthetic oligonucleotide
aaatgtgagaggtggtgaattatatcttgg

SEQ ID NO: 338904 - DNA, 30 bp, Artificial Sequence
  Synthetic oligonucleotide
gaatgttccatggtgggcttgtgctcttgg

SEQ ID NO: 338905 - DNA, 30 bp, Artificial Sequence
  Synthetic oligonucleotide
tggtgatttgtcgacgaaaggttctcttgg

SEQ ID NO: 338906 - DNA, 30 bp, Artificial Sequence
  Synthetic oligonucleotide
taatctcgcccggaatactttcagtcttgg

SEQ ID NO: 338907 - DNA, 30 bp, Artificial Sequence
  Synthetic oligonucleotide
actgagcaatttcataatgaggagtcttgg

SEQ ID NO: 338908 - DNA, 30 bp, Artificial Sequence
  Synthetic oligonucleotide
agtgcaccaggcggttacgtcaattcttgg

SEQ ID NO: 338909 - DNA, 30 bp, Artificial Sequence
  Synthetic oligonucleotide
gtggtcggtgtcctcttaggacattcttgg

SEQ ID NO: 338910 - DNA, 30 bp, Artificial Sequence
  Synthetic oligonucleotide
cgattctccttcaggaacacttattcttgg

SEQ ID NO: 338911 - DNA, 30 bp, Artificial Sequence
  Synthetic oligonucleotide
taggataatgacctctattgaggttcttgg

SEQ ID NO: 338912 - DNA, 30 bp, Artificial Sequence
  Synthetic oligonucleotide
aacccgtcactaactaggagtatttcttgg

SEQ ID NO: 338913 - DNA, 30 bp, Artificial Sequence
  Synthetic oligonucleotide
gggtccctccggtggtggtcgctttcttgg

SEQ ID NO: 338914 - DNA, 30 bp, Artificial Sequence
  Synthetic oligonucleotide
ttaggatggtcgttcccttgataaagttgg

SEQ ID NO: 338915 - DNA, 30 bp, Artificial Sequence
  Synthetic oligonucleotide
ttagaacgaggcgaactcaacgacagttgg

SEQ ID NO: 338916 - DNA, 30 bp, Artificial Sequence
  Synthetic oligonucleotide
ctgtaagaactttacgcaaatgggagttgg

SEQ ID NO: 338917 - DNA, 30 bp, Artificial Sequence
  Synthetic oligonucleotide
gtactttgaactgataaaaaaagtagttgg

SEQ ID NO: 338918 - DNA, 30 bp, Artificial Sequence
  Synthetic oligonucleotide
gggaccaccatataaaccaaaggacgttgg

SEQ ID NO: 338919 - DNA, 30 bp, Artificial Sequence
  Synthetic oligonucleotide
agggtcaagtcgcaaagcacgctacgttgg

SEQ ID NO: 338920 - DNA, 30 bp, Artificial Sequence
  Synthetic oligonucleotide
atatgatgctctagattttcgttccgttgg

SEQ ID NO: 338921 - DNA, 30 bp, Artificial Sequence
  Synthetic oligonucleotide
aggcagtttttatttaaagctaatcgttgg

SEQ ID NO: 338922 - DNA, 30 bp, Artificial Sequence
  Synthetic oligonucleotide
tcaacgttacgtccctcctatcacggttgg

SEQ ID NO: 338923 - DNA, 30 bp, Artificial Sequence
  Synthetic oligonucleotide
gggtgatattgtctgtcgcttcccggttgg

SEQ ID NO: 338924 - DNA, 30 bp, Artificial Sequence
  Synthetic oligonucleotide
aagtggaggagcaacatccaagccggttgg

SEQ ID NO: 338925 - DNA, 30 bp, Artificial Sequence
  Synthetic oligonucleotide
ttagatgattgggtattggataggggttgg

SEQ ID NO: 338926 - DNA, 30 bp, Artificial Sequence
  Synthetic oligonucleotide
tcaacgggggccgttctgtgctggggttgg

SEQ ID NO: 338927 - DNA, 30 bp, Artificial Sequence
  Synthetic oligonucleotide
caatcgggtccaactcccaaatgtggttgg

SEQ ID NO: 338928 - DNA, 30 bp, Artificial Sequence
  Synthetic oligonucleotide
atcatattccagattgaccacattggttgg

SEQ ID NO: 338929 - DNA, 30 bp, Artificial Sequence
  Synthetic oligonucleotide
cgttcacgttgctgcattttttcatgttgg

SEQ ID NO: 338930 - DNA, 30 bp, Artificial Sequence
  Synthetic oligonucleotide
tagccgcgattgcgtgccaaagagtgttgg

SEQ ID NO: 338931 - DNA, 30 bp, Artificial Sequence
  Synthetic oligonucleotide
ctgcctttggcgtctatgctcgtttgttgg

SEQ ID NO: 338932 - DNA, 30 bp, Artificial Sequence
  Synthetic oligonucleotide
taggacgtgttcatacaattggtttgttgg

SEQ ID NO: 338933 - DNA, 29 bp, Artificial Sequence
  Synthetic oligonucleotide
ggttatattttgtagtctaacgaatttgg

SEQ ID NO: 338934 - DNA, 30 bp, Artificial Sequence
  Synthetic oligonucleotide
tgatagattgaacagtggacgtacatttgg

SEQ ID NO: 338935 - DNA, 30 bp, Artificial Sequence
  Synthetic oligonucleotide
tgtcatctggacgtgtcggactagatttgg

SEQ ID NO: 338936 - DNA, 30 bp, Artificial Sequence
  Synthetic oligonucleotide
gagctaatcggtccatctagaaggatttgg

SEQ ID NO: 338937 - DNA, 30 bp, Artificial Sequence
  Synthetic oligonucleotide
ggtaacgaacagttacaaagggacctttgg

SEQ ID NO: 338938 - DNA, 30 bp, Artificial Sequence
  Synthetic oligonucleotide
gcgttagtcttgtaccatcaatcgctttgg

SEQ ID NO: 338939 - DNA, 30 bp, Artificial Sequence
  Synthetic oligonucleotide
gcaatgagagatcatcataagcgtctttgg

SEQ ID NO: 338940 - DNA, 30 bp, Artificial Sequence
  Synthetic oligonucleotide
tttacgagtaaagctacacgataggtttgg

SEQ ID NO: 338941 - DNA, 30 bp, Artificial Sequence
  Synthetic oligonucleotide
ataagactagccgcatcggtcgcggtttgg

SEQ ID NO: 338942 - DNA, 30 bp, Artificial Sequence
  Synthetic oligonucleotide
tggtcgcaggggcactccttgtcggtttgg

SEQ ID NO: 338943 - DNA, 30 bp, Artificial Sequence
  Synthetic oligonucleotide
cagcttacaagtctttacttatgggtttgg

SEQ ID NO: 338944 - DNA, 30 bp, Artificial Sequence
  Synthetic oligonucleotide
agtccccaatctgcttcacagggtgtttgg

SEQ ID NO: 338945 - DNA, 30 bp, Artificial Sequence
  Synthetic oligonucleotide
tacgaggacccggaggttagaaacttttgg

SEQ ID NO: 338946 - DNA, 30 bp, Artificial Sequence
  Synthetic oligonucleotide
aatgttgctttctcacccactaacttttgg

SEQ ID NO: 338947 - DNA, 30 bp, Artificial Sequence
  Synthetic oligonucleotide
ccgatcactaggtctaaatgggacttttgg

SEQ ID NO: 338948 - DNA, 30 bp, Artificial Sequence
  Synthetic oligonucleotide
gacggggccggctcacatcgctggttttgg

SEQ ID NO: 338949 - DNA, 30 bp, Artificial Sequence
  Synthetic oligonucleotide
acgacgttaggttcagggccgtggttttgg

SEQ ID NO: 338950 - DNA, 30 bp, Artificial Sequence
  Synthetic oligonucleotide
aaataggtattagtatgggattggttttgg

SEQ ID NO: 338951 - DNA, 30 bp, Artificial Sequence
  Synthetic oligonucleotide
gagagcgatgattatacctgttggttttgg

SEQ ID NO: 338952 - DNA, 30 bp, Artificial Sequence
  Synthetic oligonucleotide
ggtaccgtgcccgaatatccttatttttgg

SEQ ID NO: 338953 - DNA, 30 bp, Artificial Sequence
  Synthetic oligonucleotide
atggtcctatcgacccggcgggctttttgg

SEQ ID NO: 338954 - DNA, 30 bp, Artificial Sequence
  Synthetic oligonucleotide
tcttgaaatttgaactctgtatttttttgg

SEQ ID NO: 338955 - DNA, 30 bp, Artificial Sequence
  Synthetic oligonucleotide
aaggtgcttctcgtagcattacagaaaatg

SEQ ID NO: 338956 - DNA, 30 bp, Artificial Sequence
  Synthetic oligonucleotide
taacataccgttttttatgatgggaaaatg

SEQ ID NO: 338957 - DNA, 30 bp, Artificial Sequence
  Synthetic oligonucleotide
aacttgtcatcaatgggaagacataaaatg

SEQ ID NO: 338958 - DNA, 30 bp, Artificial Sequence
  Synthetic oligonucleotide
atgctcactcacgcgcaagtagctaaaatg

SEQ ID NO: 338959 - DNA, 30 bp, Artificial Sequence
  Synthetic oligonucleotide
aatggtgtagtcggtactacgcttaaaatg

SEQ ID NO: 338960 - DNA, 30 bp, Artificial Sequence
  Synthetic oligonucleotide
ctcctatggctgcaagtggagtttaaaatg

SEQ ID NO: 338961 - DNA, 30 bp, Artificial Sequence
  Synthetic oligonucleotide
ttgtgcactcagattacgggcacacaaatg

SEQ ID NO: 338962 - DNA, 30 bp, Artificial Sequence
  Synthetic oligonucleotide
gtaatattggccagacctagagtacaaatg

SEQ ID NO: 338963 - DNA, 30 bp, Artificial Sequence
  Synthetic oligonucleotide
acggatggggcggggtactcttgccaaatg

SEQ ID NO: 338964 - DNA, 30 bp, Artificial Sequence
  Synthetic oligonucleotide
tataggaaggaccggatgcggacgcaaatg

SEQ ID NO: 338965 - DNA, 30 bp, Artificial Sequence
  Synthetic oligonucleotide
gagctcggaacttaccttgccgcgcaaatg

SEQ ID NO: 338966 - DNA, 30 bp, Artificial Sequence
  Synthetic oligonucleotide
tcagttgggtggtgggattggatgcaaatg

SEQ ID NO: 338967 - DNA, 30 bp, Artificial Sequence
  Synthetic oligonucleotide
ttctggagccttgcagataggttgcaaatg

SEQ ID NO: 338968 - DNA, 30 bp, Artificial Sequence
  Synthetic oligonucleotide
acgtcggacgggtaccaatggcctcaaatg

SEQ ID NO: 338969 - DNA, 30 bp, Artificial Sequence
  Synthetic oligonucleotide
tctgcaataagggccagtagggttcaaatg

SEQ ID NO: 338970 - DNA, 30 bp, Artificial Sequence
  Synthetic oligonucleotide
gttggacctttaaagacgtcgggagaaatg

SEQ ID NO: 338971 - DNA, 30 bp, Artificial Sequence
  Synthetic oligonucleotide
ttgctgcttgtcgtgattggaaccgaaatg

SEQ ID NO: 338972 - DNA, 30 bp, Artificial Sequence
  Synthetic oligonucleotide
gtcttgggttagttactaggttccgaaatg

SEQ ID NO: 338973 - DNA, 30 bp, Artificial Sequence
  Synthetic oligonucleotide
atctaaatatcacagtcattctgcgaaatg

SEQ ID NO: 338974 - DNA, 30 bp, Artificial Sequence
  Synthetic oligonucleotide
gtgtcatccgactgccagcaagtcgaaatg

SEQ ID NO: 338975 - DNA, 30 bp, Artificial Sequence
  Synthetic oligonucleotide
gtagcgctatatgggctaccagtcgaaatg

SEQ ID NO: 338976 - DNA, 30 bp, Artificial Sequence
  Synthetic oligonucleotide
ttaactcggttgtgggtggatacggaaatg

SEQ ID NO: 338977 - DNA, 30 bp, Artificial Sequence
  Synthetic oligonucleotide
tgtccaagcacagttccgaggagtgaaatg

SEQ ID NO: 338978 - DNA, 30 bp, Artificial Sequence
  Synthetic oligonucleotide
ttctgtaggtgagggtaacgagcgtaaatg

SEQ ID NO: 338979 - DNA, 30 bp, Artificial Sequence
  Synthetic oligonucleotide
ttcttgaacgggcctagggtagcttaaatg

SEQ ID NO: 338980 - DNA, 30 bp, Artificial Sequence
  Synthetic oligonucleotide
ggtcccccgcacgtcgggcgccaaacaatg

SEQ ID NO: 338981 - DNA, 30 bp, Artificial Sequence
  Synthetic oligonucleotide
gcagttatctgaatgatgtatgaaacaatg

SEQ ID NO: 338982 - DNA, 30 bp, Artificial Sequence
  Synthetic oligonucleotide
ttctgaatgtaaacggatctgggaacaatg

SEQ ID NO: 338983 - DNA, 30 bp, Artificial Sequence
  Synthetic oligonucleotide
agttgtgggtagtctcttcaggacacaatg

SEQ ID NO: 338984 - DNA, 30 bp, Artificial Sequence
  Synthetic oligonucleotide
gcatagcccgcgtatcttctatatacaatg

SEQ ID NO: 338985 - DNA, 30 bp, Artificial Sequence
  Synthetic oligonucleotide
gcggcccgtgtggttgagtaaattacaatg

SEQ ID NO: 338986 - DNA, 30 bp, Artificial Sequence
  Synthetic oligonucleotide
gaaggccagagggttaaaagtacaccaatg

SEQ ID NO: 338987 - DNA, 30 bp, Artificial Sequence
  Synthetic oligonucleotide
ccgcgcgagttgggcagtagcgacccaatg

SEQ ID NO: 338988 - DNA, 30 bp, Artificial Sequence
  Synthetic oligonucleotide
aaggtctttaaccgggggacactagcaatg

SEQ ID NO: 338989 - DNA, 30 bp, Artificial Sequence
  Synthetic oligonucleotide
agtcaacatgtgctgactgtcctagcaatg

SEQ ID NO: 338990 - DNA, 30 bp, Artificial Sequence
  Synthetic oligonucleotide
cacgggcccagcatgggcagagacgcaatg

SEQ ID NO: 338991 - DNA, 30 bp, Artificial Sequence
  Synthetic oligonucleotide
taaattaattgtcgggtggtagaggcaatg

SEQ ID NO: 338992 - DNA, 30 bp, Artificial Sequence
  Synthetic oligonucleotide
ttcaagcactgggcgtcaaattcggcaatg

SEQ ID NO: 338993 - DNA, 30 bp, Artificial Sequence
  Synthetic oligonucleotide
cactatgtctcctccccttgtaaatcaatg

SEQ ID NO: 338994 - DNA, 30 bp, Artificial Sequence
  Synthetic oligonucleotide
actaagtctcacctgcggcttagatcaatg

SEQ ID NO: 338995 - DNA, 30 bp, Artificial Sequence
  Synthetic oligonucleotide
tatagaatagtctgatgctatgcgtcaatg

SEQ ID NO: 338996 - DNA, 30 bp, Artificial Sequence
  Synthetic oligonucleotide
tgatctttttgtaacttagtcggttcaatg

SEQ ID NO: 338997 - DNA, 30 bp, Artificial Sequence
  Synthetic oligonucleotide
aacacttattgaacggaaggtctttcaatg

SEQ ID NO: 338998 - DNA, 30 bp, Artificial Sequence
  Synthetic oligonucleotide
acaacctgcggattgtccctgacaagaatg

SEQ ID NO: 338999 - DNA, 30 bp, Artificial Sequence
  Synthetic oligonucleotide
cgtaatttccgttcttcggaccacagaatg

SEQ ID NO: 339000 - DNA, 30 bp, Artificial Sequence
  Synthetic oligonucleotide
gcgcgtgtggtggaattacctaccagaatg

SEQ ID NO: 339001 - DNA, 30 bp, Artificial Sequence
  Synthetic oligonucleotide
cattccagcacagtggtcgcacccagaatg

SEQ ID NO: 339002 - DNA, 30 bp, Artificial Sequence
  Synthetic oligonucleotide
taagggaacccttaaaggcgattcagaatg

SEQ ID NO: 339003 - DNA, 30 bp, Artificial Sequence
  Synthetic oligonucleotide
tcggagcagttacgcggtttatcgagaatg

SEQ ID NO: 339004 - DNA, 30 bp, Artificial Sequence
  Synthetic oligonucleotide
aatcgaagcgttcaaattggcatgagaatg

SEQ ID NO: 339005 - DNA, 30 bp, Artificial Sequence
  Synthetic oligonucleotide
aacgtctgactgcgcgatgggcaacgaatg

SEQ ID NO: 339006 - DNA, 30 bp, Artificial Sequence
  Synthetic oligonucleotide
gaacccctgagcatgcccgacacacgaatg

SEQ ID NO: 339007 - DNA, 30 bp, Artificial Sequence
  Synthetic oligonucleotide
taggtgatggtttggtcgatcatccgaatg

SEQ ID NO: 339008 - DNA, 30 bp, Artificial Sequence
  Synthetic oligonucleotide
gctccgaccatggcgggctccttccgaatg

SEQ ID NO: 339009 - DNA, 30 bp, Artificial Sequence
  Synthetic oligonucleotide
ggttctcctcaaatcctcgctcttcgaatg

SEQ ID NO: 339010 - DNA, 30 bp, Artificial Sequence
  Synthetic oligonucleotide
gacttaaatactaatgtatacgaaggaatg

SEQ ID NO: 339011 - DNA, 30 bp, Artificial Sequence
  Synthetic oligonucleotide
gtcagggtgtagctggatggagacggaatg

SEQ ID NO: 339012 - DNA, 30 bp, Artificial Sequence
  Synthetic oligonucleotide
cagagtctagatgtcctccgcggcggaatg

SEQ ID NO: 339013 - DNA, 30 bp, Artificial Sequence
  Synthetic oligonucleotide
attggatgtgtccgaagagcgttcggaatg

SEQ ID NO: 339014 - DNA, 30 bp, Artificial Sequence
  Synthetic oligonucleotide
atatgagcaattaggccttctaagggaatg

SEQ ID NO: 339015 - DNA, 30 bp, Artificial Sequence
  Synthetic oligonucleotide
acaatcccatgttttggtttgatgggaatg

SEQ ID NO: 339016 - DNA, 30 bp, Artificial Sequence
  Synthetic oligonucleotide
gtctactcttcctgacatcgtgtgggaatg

SEQ ID NO: 339017 - DNA, 30 bp, Artificial Sequence
  Synthetic oligonucleotide
ctcatattaccttcagtttgctatggaatg

SEQ ID NO: 339018 - DNA, 30 bp, Artificial Sequence
  Synthetic oligonucleotide
gccacggtacaacaagcggaagctggaatg

SEQ ID NO: 339019 - DNA, 30 bp, Artificial Sequence
  Synthetic oligonucleotide
aactattgttacgacatgtacggtggaatg

SEQ ID NO: 339020 - DNA, 30 bp, Artificial Sequence
  Synthetic oligonucleotide
aatcatgcgaaattacacaactttggaatg

SEQ ID NO: 339021 - DNA, 29 bp, Artificial Sequence
  Synthetic oligonucleotide
tcaacaccttttcctgtaatgaatgaatg

SEQ ID NO: 339022 - DNA, 30 bp, Artificial Sequence
  Synthetic oligonucleotide
gtttacttgcgatcagttcggacatgaatg

SEQ ID NO: 339023 - DNA, 30 bp, Artificial Sequence
  Synthetic oligonucleotide
caaacctaggggctgccggcggtctgaatg

SEQ ID NO: 339024 - DNA, 30 bp, Artificial Sequence
  Synthetic oligonucleotide
aggaatgccgatccgtcgtttaagtgaatg

SEQ ID NO: 339025 - DNA, 30 bp, Artificial Sequence
  Synthetic oligonucleotide
gcataaccgtacgctcatatatagtgaatg

SEQ ID NO: 339026 - DNA, 30 bp, Artificial Sequence
  Synthetic oligonucleotide
tctcgacaacgattgtacccgacttgaatg

SEQ ID NO: 339027 - DNA, 30 bp, Artificial Sequence
  Synthetic oligonucleotide
accagtggctgtacgattagtacttgaatg

SEQ ID NO: 339028 - DNA, 30 bp, Artificial Sequence
  Synthetic oligonucleotide
caggcgcatattgattaattcacaataatg

SEQ ID NO: 339029 - DNA, 30 bp, Artificial Sequence
  Synthetic oligonucleotide
tttggctgcttgacctacggaagaataatg

SEQ ID NO: 339030 - DNA, 30 bp, Artificial Sequence
  Synthetic oligonucleotide
atgttacgtggatagattgctggaataatg

SEQ ID NO: 339031 - DNA, 30 bp, Artificial Sequence
  Synthetic oligonucleotide
gttgtacggcgaggaagttttataataatg

SEQ ID NO: 339032 - DNA, 30 bp, Artificial Sequence
  Synthetic oligonucleotide
tagtttggttatagtagaactcgcataatg

SEQ ID NO: 339033 - DNA, 30 bp, Artificial Sequence
  Synthetic oligonucleotide
cccgggggatagtaccactcaggcataatg

SEQ ID NO: 339034 - DNA, 30 bp, Artificial Sequence
  Synthetic oligonucleotide
gcacacgtcggtgtacttcacacgataatg

SEQ ID NO: 339035 - DNA, 30 bp, Artificial Sequence
  Synthetic oligonucleotide
gagtagagattaagtgagttcgtgataatg

SEQ ID NO: 339036 - DNA, 30 bp, Artificial Sequence
  Synthetic oligonucleotide
acgttcaccactgacccggaccatataatg

SEQ ID NO: 339037 - DNA, 30 bp, Artificial Sequence
  Synthetic oligonucleotide
gccgaagactggacgtatgcctctataatg

SEQ ID NO: 339038 - DNA, 30 bp, Artificial Sequence
  Synthetic oligonucleotide
aaattgccaacatgcgcacagcacctaatg

SEQ ID NO: 339039 - DNA, 30 bp, Artificial Sequence
  Synthetic oligonucleotide
aggattcaacgctatacgagatgcctaatg

SEQ ID NO: 339040 - DNA, 30 bp, Artificial Sequence
  Synthetic oligonucleotide
aacatgactgctccaactgaaatcctaatg

SEQ ID NO: 339041 - DNA, 30 bp, Artificial Sequence
  Synthetic oligonucleotide
gggtccgtgattttcgacagctggctaatg

SEQ ID NO: 339042 - DNA, 30 bp, Artificial Sequence
  Synthetic oligonucleotide
atacacgagtagcaagaccttcgtctaatg

SEQ ID NO: 339043 - DNA, 30 bp, Artificial Sequence
  Synthetic oligonucleotide
gtcagtttagcttgcatcggtcaggtaatg

SEQ ID NO: 339044 - DNA, 30 bp, Artificial Sequence
  Synthetic oligonucleotide
gtgggatcaggctcaggggtcccggtaatg

SEQ ID NO: 339045 - DNA, 30 bp, Artificial Sequence
  Synthetic oligonucleotide
cctcgcggatgtaggaacatatcggtaatg

SEQ ID NO: 339046 - DNA, 30 bp, Artificial Sequence
  Synthetic oligonucleotide
ctattacaagtaccactactttcggtaatg

SEQ ID NO: 339047 - DNA, 30 bp, Artificial Sequence
  Synthetic oligonucleotide
cttcataatgatgtactcgagttggtaatg

SEQ ID NO: 339048 - DNA, 30 bp, Artificial Sequence
  Synthetic oligonucleotide
gatcctcggtaagtctcggcgcaattaatg

SEQ ID NO: 339049 - DNA, 30 bp, Artificial Sequence
  Synthetic oligonucleotide
aaactaccagttcgccggtgacgattaatg

SEQ ID NO: 339050 - DNA, 30 bp, Artificial Sequence
  Synthetic oligonucleotide
tctactggtatcgtcatatagatattaatg

SEQ ID NO: 339051 - DNA, 30 bp, Artificial Sequence
  Synthetic oligonucleotide
caatcaatcaccgtatcacatgacttaatg

SEQ ID NO: 339052 - DNA, 30 bp, Artificial Sequence
  Synthetic oligonucleotide
agaactttcttcacctgggcggccttaatg

SEQ ID NO: 339053 - DNA, 30 bp, Artificial Sequence
  Synthetic oligonucleotide
ctaccagaacacgcgtctacgacgttaatg

SEQ ID NO: 339054 - DNA, 30 bp, Artificial Sequence
  Synthetic oligonucleotide
gatggtctcgttaccgtggccatgttaatg

SEQ ID NO: 339055 - DNA, 30 bp, Artificial Sequence
  Synthetic oligonucleotide
gggctcagcccctgaggaaatactttaatg

SEQ ID NO: 339056 - DNA, 30 bp, Artificial Sequence
  Synthetic oligonucleotide
gttagaaaataagggtactctgttttaatg

SEQ ID NO: 339057 - DNA, 30 bp, Artificial Sequence
  Synthetic oligonucleotide
cctccagcaccctttggcaatcaaaacatg

SEQ ID NO: 339058 - DNA, 30 bp, Artificial Sequence
  Synthetic oligonucleotide
ggtcgggatgactggataagaggaaacatg

SEQ ID NO: 339059 - DNA, 30 bp, Artificial Sequence
  Synthetic oligonucleotide
tgtgtacaattgtcggtcggtttcaacatg

SEQ ID NO: 339060 - DNA, 30 bp, Artificial Sequence
  Synthetic oligonucleotide
ggcaaactcacgcatgaccgcaagaacatg

SEQ ID NO: 339061 - DNA, 30 bp, Artificial Sequence
  Synthetic oligonucleotide
tctgttcgtagggtaagcgcacagaacatg

SEQ ID NO: 339062 - DNA, 30 bp, Artificial Sequence
  Synthetic oligonucleotide
gccacgagggtcttacaacactggaacatg

SEQ ID NO: 339063 - DNA, 30 bp, Artificial Sequence
  Synthetic oligonucleotide
tagcgaagactaatgatcatagtacacatg

SEQ ID NO: 339064 - DNA, 30 bp, Artificial Sequence
  Synthetic oligonucleotide
agtctgtaagacgatcagttgcagcacatg

SEQ ID NO: 339065 - DNA, 30 bp, Artificial Sequence
  Synthetic oligonucleotide
ctgtccgaaaatttagcgcattttcacatg

SEQ ID NO: 339066 - DNA, 30 bp, Artificial Sequence
  Synthetic oligonucleotide
atgcaagcactaggatccggataagacatg

SEQ ID NO: 339067 - DNA, 30 bp, Artificial Sequence
  Synthetic oligonucleotide
tccgcgtgggtaacctcgtccagagacatg

SEQ ID NO: 339068 - DNA, 30 bp, Artificial Sequence
  Synthetic oligonucleotide
ttaaatcgaattgcccgtgcaatcgacatg

SEQ ID NO: 339069 - DNA, 30 bp, Artificial Sequence
  Synthetic oligonucleotide
ttagatggtacccctactttaatcgacatg

SEQ ID NO: 339070 - DNA, 30 bp, Artificial Sequence
  Synthetic oligonucleotide
ttccaatgtttgcatgaagaaccggacatg

SEQ ID NO: 339071 - DNA, 30 bp, Artificial Sequence
  Synthetic oligonucleotide
atacacgggtgtctgattaaatcggacatg

SEQ ID NO: 339072 - DNA, 30 bp, Artificial Sequence
  Synthetic oligonucleotide
tacacctatatatggccttgtagggacatg

SEQ ID NO: 339073 - DNA, 30 bp, Artificial Sequence
  Synthetic oligonucleotide
gtgggtaaataggttcacaactcctacatg

SEQ ID NO: 339074 - DNA, 31 bp, Artificial Sequence
  Synthetic oligonucleotide
accacacgtatcgtagacaccgaggtacatg

SEQ ID NO: 339075 - DNA, 30 bp, Artificial Sequence
  Synthetic oligonucleotide
tggaccaaagtacgtcgtccactgtacatg

SEQ ID NO: 339076 - DNA, 30 bp, Artificial Sequence
  Synthetic oligonucleotide
ttatccccttacttcacttgccattacatg

SEQ ID NO: 339077 - DNA, 30 bp, Artificial Sequence
  Synthetic oligonucleotide
caatcgtcggcgggttcggttacttacatg

SEQ ID NO: 339078 - DNA, 30 bp, Artificial Sequence
  Synthetic oligonucleotide
aattggccattggaaaattgggtttacatg

SEQ ID NO: 339079 - DNA, 30 bp, Artificial Sequence
  Synthetic oligonucleotide
aagaaatctctaaacagtttgacaaccatg

SEQ ID NO: 339080 - DNA, 30 bp, Artificial Sequence
  Synthetic oligonucleotide
gagtcacaagcgcgttacggcagaaccatg

SEQ ID NO: 339081 - DNA, 30 bp, Artificial Sequence
  Synthetic oligonucleotide
tcccgtcattaacgtgaaagcgtaaccatg

SEQ ID NO: 339082 - DNA, 30 bp, Artificial Sequence
  Synthetic oligonucleotide
taatattatggcacggacgggcgcaccatg

SEQ ID NO: 339083 - DNA, 30 bp, Artificial Sequence
  Synthetic oligonucleotide
gtaaacgggttattcgttcctaagaccatg

SEQ ID NO: 339084 - DNA, 30 bp, Artificial Sequence
  Synthetic oligonucleotide
taattaagtggattgtacactatgaccatg

SEQ ID NO: 339085 - DNA, 30 bp, Artificial Sequence
  Synthetic oligonucleotide
ttttggccggtggacgactaccctaccatg

SEQ ID NO: 339086 - DNA, 30 bp, Artificial Sequence
  Synthetic oligonucleotide
ttcgtctttcgtcagcgcgtataccccatg

SEQ ID NO: 339087 - DNA, 30 bp, Artificial Sequence
  Synthetic oligonucleotide
taaactcgcttaggctaatggacagccatg

SEQ ID NO: 339088 - DNA, 30 bp, Artificial Sequence
  Synthetic oligonucleotide
caagtggcatgtacagcggcagacgccatg

SEQ ID NO: 339089 - DNA, 30 bp, Artificial Sequence
  Synthetic oligonucleotide
tttcgtaaggtgtgttcatttgcggccatg

SEQ ID NO: 339090 - DNA, 30 bp, Artificial Sequence
  Synthetic oligonucleotide
aagcgaaacaacgaggctaagagggccatg

SEQ ID NO: 339091 - DNA, 30 bp, Artificial Sequence
  Synthetic oligonucleotide
cttctcacatgagtgctacttctatccatg

SEQ ID NO: 339092 - DNA, 30 bp, Artificial Sequence
  Synthetic oligonucleotide
gcttaggaggcgttgtgcataatctccatg

SEQ ID NO: 339093 - DNA, 30 bp, Artificial Sequence
  Synthetic oligonucleotide
aaaaagggcggaccataatttgtgtccatg

SEQ ID NO: 339094 - DNA, 30 bp, Artificial Sequence
  Synthetic oligonucleotide
tatcaacgttgtcaggcgacatattccatg

SEQ ID NO: 339095 - DNA, 29 bp, Artificial Sequence
  Synthetic oligonucleotide
cgtttagtggttggggctcaacttccatg

SEQ ID NO: 339096 - DNA, 30 bp, Artificial Sequence
  Synthetic oligonucleotide
ggaatttttgtattaagggtgagttccatg

SEQ ID NO: 339097 - DNA, 30 bp, Artificial Sequence
  Synthetic oligonucleotide
gcgatatactttgaggaaaccgaaagcatg

SEQ ID NO: 339098 - DNA, 30 bp, Artificial Sequence
  Synthetic oligonucleotide
cgaggggagtcactccggccttccagcatg

SEQ ID NO: 339099 - DNA, 30 bp, Artificial Sequence
  Synthetic oligonucleotide
ggcctggttggtatcgtttttggcagcatg

SEQ ID NO: 339100 - DNA, 31 bp, Artificial Sequence
  Synthetic oligonucleotide
aatagataatacggtgagtacatcgagcatg

SEQ ID NO: 339101 - DNA, 30 bp, Artificial Sequence
  Synthetic oligonucleotide
ctgtttagctctgggcctcctcgtagcatg

SEQ ID NO: 339102 - DNA, 30 bp, Artificial Sequence
  Synthetic oligonucleotide
ggttaaccgggaattcagctactacgcatg

SEQ ID NO: 339103 - DNA, 30 bp, Artificial Sequence
  Synthetic oligonucleotide
tcgggttttgtacacgccatccaccgcatg

SEQ ID NO: 339104 - DNA, 30 bp, Artificial Sequence
  Synthetic oligonucleotide
attacgcggtcatggtttaatatccgcatg

SEQ ID NO: 339105 - DNA, 29 bp, Artificial Sequence
  Synthetic oligonucleotide
ggtggaaacgttgcggtccaaagcgcatg

SEQ ID NO: 339106 - DNA, 30 bp, Artificial Sequence
  Synthetic oligonucleotide
agggccctgacactgcaagcgttaggcatg

SEQ ID NO: 339107 - DNA, 30 bp, Artificial Sequence
  Synthetic oligonucleotide
aggagcctgcacggagtatatcacggcatg

SEQ ID NO: 339108 - DNA, 30 bp, Artificial Sequence
  Synthetic oligonucleotide
tctcccccattaagtaattaccccggcatg

SEQ ID NO: 339109 - DNA, 30 bp, Artificial Sequence
  Synthetic oligonucleotide
tctgattgctgtccatgtcggatcggcatg

SEQ ID NO: 339110 - DNA, 30 bp, Artificial Sequence
  Synthetic oligonucleotide
aacaaagtgcatatagcgcatgggggcatg

SEQ ID NO: 339111 - DNA, 30 bp, Artificial Sequence
  Synthetic oligonucleotide
tcatgtatcggcgtatacctggcatgcatg

SEQ ID NO: 339112 - DNA, 30 bp, Artificial Sequence
  Synthetic oligonucleotide
ttatctcaaattcaaaatttgatatgcatg

SEQ ID NO: 339113 - DNA, 31 bp, Artificial Sequence
  Synthetic oligonucleotide
cgaataggtagggtacggggatctatgcatg

SEQ ID NO: 339114 - DNA, 30 bp, Artificial Sequence
  Synthetic oligonucleotide
ggaattaatcgcataaagcgcctgtgcatg

SEQ ID NO: 339115 - DNA, 30 bp, Artificial Sequence
  Synthetic oligonucleotide
ggcccacataatagaggttcctgaatcatg

SEQ ID NO: 339116 - DNA, 30 bp, Artificial Sequence
  Synthetic oligonucleotide
aaatccagtgttcggactgggaccatcatg

SEQ ID NO: 339117 - DNA, 30 bp, Artificial Sequence
  Synthetic oligonucleotide
gcgattgcatattttcggttgtccatcatg

SEQ ID NO: 339118 - DNA, 30 bp, Artificial Sequence
  Synthetic oligonucleotide
tgagaaggcttagattgcagattcatcatg

SEQ ID NO: 339119 - DNA, 30 bp, Artificial Sequence
  Synthetic oligonucleotide
gtttgttgataataagctaaggagatcatg

SEQ ID NO: 339120 - DNA, 30 bp, Artificial Sequence
  Synthetic oligonucleotide
ggaatgtcttagcgtggtactcgtatcatg

SEQ ID NO: 339121 - DNA, 30 bp, Artificial Sequence
  Synthetic oligonucleotide
ccttatctattatcatgatggggcctcatg

SEQ ID NO: 339122 - DNA, 30 bp, Artificial Sequence
  Synthetic oligonucleotide
ccctcaagttcagatgccacttagctcatg

SEQ ID NO: 339123 - DNA, 30 bp, Artificial Sequence
  Synthetic oligonucleotide
agctccatcgacgccacattggatctcatg

SEQ ID NO: 339124 - DNA, 30 bp, Artificial Sequence
  Synthetic oligonucleotide
gtccagggagtcgcaacaaaatgtctcatg

SEQ ID NO: 339125 - DNA, 30 bp, Artificial Sequence
  Synthetic oligonucleotide
tgctaagctacgaaggctacaggagtcatg

SEQ ID NO: 339126 - DNA, 30 bp, Artificial Sequence
  Synthetic oligonucleotide
aatgacagtgtcggggcgtgcatagtcatg

SEQ ID NO: 339127 - DNA, 30 bp, Artificial Sequence
  Synthetic oligonucleotide
ctttgcttacgtgttgggcctgaggtcatg

SEQ ID NO: 339128 - DNA, 30 bp, Artificial Sequence
  Synthetic oligonucleotide
gcgtataagatctagttctgatttgtcatg

SEQ ID NO: 339129 - DNA, 30 bp, Artificial Sequence
  Synthetic oligonucleotide
tggattggcagcagcccgccgccattcatg

SEQ ID NO: 339130 - DNA, 30 bp, Artificial Sequence
  Synthetic oligonucleotide
gttgtggactcgaggattggcaccttcatg

SEQ ID NO: 339131 - DNA, 30 bp, Artificial Sequence
  Synthetic oligonucleotide
caccattctattttggtaataatcttcatg

SEQ ID NO: 339132 - DNA, 30 bp, Artificial Sequence
  Synthetic oligonucleotide
gcgattaagtgccggcacattacgttcatg

SEQ ID NO: 339133 - DNA, 30 bp, Artificial Sequence
  Synthetic oligonucleotide
ccggtttcatgcacactgacacctttcatg

SEQ ID NO: 339134 - DNA, 30 bp, Artificial Sequence
  Synthetic oligonucleotide
acattactttggactgtttacagtttcatg

SEQ ID NO: 339135 - DNA, 30 bp, Artificial Sequence
  Synthetic oligonucleotide
ttctcctggggtagactagttagtttcatg

SEQ ID NO: 339136 - DNA, 30 bp, Artificial Sequence
  Synthetic oligonucleotide
cctgtatctttacgcccaggctcaaagatg

SEQ ID NO: 339137 - DNA, 30 bp, Artificial Sequence
  Synthetic oligonucleotide
aacatttaattcgggggttgggccaagatg

SEQ ID NO: 339138 - DNA, 30 bp, Artificial Sequence
  Synthetic oligonucleotide
gacgcgtttaacatctaggaacgcaagatg

SEQ ID NO: 339139 - DNA, 30 bp, Artificial Sequence
  Synthetic oligonucleotide
aagggtttttagtaatgtattacgaagatg

SEQ ID NO: 339140 - DNA, 30 bp, Artificial Sequence
  Synthetic oligonucleotide
ccggtctcttaaaagtgtacaaggaagatg

SEQ ID NO: 339141 - DNA, 30 bp, Artificial Sequence
  Synthetic oligonucleotide
atctatccacatcacaccaccaggaagatg

SEQ ID NO: 339142 - DNA, 30 bp, Artificial Sequence
  Synthetic oligonucleotide
atcgttatgtagtatgaagttgtgaagatg

SEQ ID NO: 339143 - DNA, 30 bp, Artificial Sequence
  Synthetic oligonucleotide
cccttaggaaaggttcattacagccagatg

SEQ ID NO: 339144 - DNA, 30 bp, Artificial Sequence
  Synthetic oligonucleotide
gtcactagagtacatcattatgttcagatg

SEQ ID NO: 339145 - DNA, 30 bp, Artificial Sequence
  Synthetic oligonucleotide
gattcaatgtgcattgtacagagagagatg

SEQ ID NO: 339146 - DNA, 30 bp, Artificial Sequence
  Synthetic oligonucleotide
agtacgtacgctcgtaagtataacgagatg

SEQ ID NO: 339147 - DNA, 30 bp, Artificial Sequence
  Synthetic oligonucleotide
gggtaactcagaagaatctcccccgagatg

SEQ ID NO: 339148 - DNA, 30 bp, Artificial Sequence
  Synthetic oligonucleotide
gatcctttggctacccaatatgaggagatg

SEQ ID NO: 339149 - DNA, 30 bp, Artificial Sequence
  Synthetic oligonucleotide
gtagtataggtttgttaaaagtcggagatg

SEQ ID NO: 339150 - DNA, 30 bp, Artificial Sequence
  Synthetic oligonucleotide
tcaggttcgtggctcataggaaaatagatg

SEQ ID NO: 339151 - DNA, 30 bp, Artificial Sequence
  Synthetic oligonucleotide
tcaataaaacgcgcatctgattaatagatg

SEQ ID NO: 339152 - DNA, 30 bp, Artificial Sequence
  Synthetic oligonucleotide
tagctggcatgagaacactacccatagatg

SEQ ID NO: 339153 - DNA, 30 bp, Artificial Sequence
  Synthetic oligonucleotide
ccgataaagaacgtaaaccaatagtagatg

SEQ ID NO: 339154 - DNA, 29 bp, Artificial Sequence
  Synthetic oligonucleotide
tcttttgtcggttatcgtatcggtagatg

SEQ ID NO: 339155 - DNA, 30 bp, Artificial Sequence
  Synthetic oligonucleotide
gcgtcgagcttacacgctgtcgtgtagatg

SEQ ID NO: 339156 - DNA, 30 bp, Artificial Sequence
  Synthetic oligonucleotide
ttttaagggcaatgtagtagcgcttagatg

SEQ ID NO: 339157 - DNA, 30 bp, Artificial Sequence
  Synthetic oligonucleotide
gtgaagacatttaaggatatggtcacgatg

SEQ ID NO: 339158 - DNA, 30 bp, Artificial Sequence
  Synthetic oligonucleotide
cgcattcgggcctatttttgagatacgatg

SEQ ID NO: 339159 - DNA, 30 bp, Artificial Sequence
  Synthetic oligonucleotide
agagcaggtcctcagggggatgcaccgatg

SEQ ID NO: 339160 - DNA, 30 bp, Artificial Sequence
  Synthetic oligonucleotide
gcctcgttgccattgaaatcagcgccgatg

SEQ ID NO: 339161 - DNA, 30 bp, Artificial Sequence
  Synthetic oligonucleotide
cgcagaaataagtcgacgtggcggccgatg

SEQ ID NO: 339162 - DNA, 30 bp, Artificial Sequence
  Synthetic oligonucleotide
cgtacttgacgcatcagtggtgggccgatg

SEQ ID NO: 339163 - DNA, 30 bp, Artificial Sequence
  Synthetic oligonucleotide
tcaattcacgtacgacagaaacttccgatg

SEQ ID NO: 339164 - DNA, 30 bp, Artificial Sequence
  Synthetic oligonucleotide
gtagcagtcacccaaaacactgttccgatg

SEQ ID NO: 339165 - DNA, 30 bp, Artificial Sequence
  Synthetic oligonucleotide
ctttaagggacccaagaaggctttccgatg

SEQ ID NO: 339166 - DNA, 30 bp, Artificial Sequence
  Synthetic oligonucleotide
tactggtggtctgttttttatgaagcgatg

SEQ ID NO: 339167 - DNA, 30 bp, Artificial Sequence
  Synthetic oligonucleotide
ttcggaaccggtgtcaccatatctgcgatg

SEQ ID NO: 339168 - DNA, 30 bp, Artificial Sequence
  Synthetic oligonucleotide
gtttacctccacacgtctttaggatcgatg

SEQ ID NO: 339169 - DNA, 30 bp, Artificial Sequence
  Synthetic oligonucleotide
ataagctgagtgcaaacgctcttctcgatg

SEQ ID NO: 339170 - DNA, 30 bp, Artificial Sequence
  Synthetic oligonucleotide
agatggtgcacagccgcccgggattcgatg

SEQ ID NO: 339171 - DNA, 30 bp, Artificial Sequence
  Synthetic oligonucleotide
ttcggcacccctggaaaagaatattcgatg

SEQ ID NO: 339172 - DNA, 30 bp, Artificial Sequence
  Synthetic oligonucleotide
gaccgcgcgatatgttcttgcctttcgatg

SEQ ID NO: 339173 - DNA, 30 bp, Artificial Sequence
  Synthetic oligonucleotide
atacatttgtgattcttaatgaacaggatg

SEQ ID NO: 339174 - DNA, 30 bp, Artificial Sequence
  Synthetic oligonucleotide
ctggtgccatatcggcactggcgcaggatg

SEQ ID NO: 339175 - DNA, 30 bp, Artificial Sequence
  Synthetic oligonucleotide
ctttctactgttaaggtttctgtgaggatg

SEQ ID NO: 339176 - DNA, 30 bp, Artificial Sequence
  Synthetic oligonucleotide
ttgtattactcccgtaaaaggagtaggatg

SEQ ID NO: 339177 - DNA, 30 bp, Artificial Sequence
  Synthetic oligonucleotide
cgatatcttagaggtaaatgtgcacggatg

SEQ ID NO: 339178 - DNA, 30 bp, Artificial Sequence
  Synthetic oligonucleotide
tagatttaccttaatgtccgcaaccggatg

SEQ ID NO: 339179 - DNA, 30 bp, Artificial Sequence
  Synthetic oligonucleotide
aggccgtccaatggacatcgacaccggatg

SEQ ID NO: 339180 - DNA, 30 bp, Artificial Sequence
  Synthetic oligonucleotide
tcgcttccatcaggtcgggaaccccggatg

SEQ ID NO: 339181 - DNA, 30 bp, Artificial Sequence
  Synthetic oligonucleotide
cgccacaagcagaacatgacagaagggatg

SEQ ID NO: 339182 - DNA, 30 bp, Artificial Sequence
  Synthetic oligonucleotide
cgactcagtgtgcctattacgatagggatg

SEQ ID NO: 339183 - DNA, 30 bp, Artificial Sequence
  Synthetic oligonucleotide
cccagttttgacccgtcgtccgtagggatg

SEQ ID NO: 339184 - DNA, 30 bp, Artificial Sequence
  Synthetic oligonucleotide
aacgacgcatcgttgcttcaccgcgggatg

SEQ ID NO: 339185 - DNA, 30 bp, Artificial Sequence
  Synthetic oligonucleotide
gagcggagtggctagcgtggggtggggatg

SEQ ID NO: 339186 - DNA, 30 bp, Artificial Sequence
  Synthetic oligonucleotide
aattgcccccctaagctaagggctgggatg

SEQ ID NO: 339187 - DNA, 30 bp, Artificial Sequence
  Synthetic oligonucleotide
catcgccatctgcgaatataatttgggatg

SEQ ID NO: 339188 - DNA, 30 bp, Artificial Sequence
  Synthetic oligonucleotide
gggcctatcatggccatgtcgacatggatg

SEQ ID NO: 339189 - DNA, 30 bp, Artificial Sequence
  Synthetic oligonucleotide
ggcgccgttggtggaaatagattgtggatg

SEQ ID NO: 339190 - DNA, 30 bp, Artificial Sequence
  Synthetic oligonucleotide
tgtataatttcgtgcggagctgattggatg

SEQ ID NO: 339191 - DNA, 30 bp, Artificial Sequence
  Synthetic oligonucleotide
taaatgcaatttccaaaagggcgttggatg

SEQ ID NO: 339192 - DNA, 30 bp, Artificial Sequence
  Synthetic oligonucleotide
ggattatggggaacctcaatagagatgatg

SEQ ID NO: 339193 - DNA, 30 bp, Artificial Sequence
  Synthetic oligonucleotide
gatacgtaaagaagccgtaactggatgatg

SEQ ID NO: 339194 - DNA, 30 bp, Artificial Sequence
  Synthetic oligonucleotide
atgttgcctcggacccttggtctgatgatg

SEQ ID NO: 339195 - DNA, 30 bp, Artificial Sequence
  Synthetic oligonucleotide
cgctatgttaggagaggcacgtatatgatg

SEQ ID NO: 339196 - DNA, 30 bp, Artificial Sequence
  Synthetic oligonucleotide
tatgagaaggttgaacatatttttatgatg

SEQ ID NO: 339197 - DNA, 30 bp, Artificial Sequence
  Synthetic oligonucleotide
ttttccagaggggttaaagtaagactgatg

SEQ ID NO: 339198 - DNA, 30 bp, Artificial Sequence
  Synthetic oligonucleotide
gattcaagggtccaagtggctagactgatg

SEQ ID NO: 339199 - DNA, 30 bp, Artificial Sequence
  Synthetic oligonucleotide
gagttaatatagggctatgcgcccctgatg

SEQ ID NO: 339200 - DNA, 30 bp, Artificial Sequence
  Synthetic oligonucleotide
tcacgggtaattagcttaatgttcctgatg

SEQ ID NO: 339201 - DNA, 30 bp, Artificial Sequence
  Synthetic oligonucleotide
caacaaattcctatccaccgcctgctgatg

SEQ ID NO: 339202 - DNA, 30 bp, Artificial Sequence
  Synthetic oligonucleotide
cagaatggattgagcagacggacagtgatg

SEQ ID NO: 339203 - DNA, 30 bp, Artificial Sequence
  Synthetic oligonucleotide
tttaatcagatttccgcgcggcgagtgatg

SEQ ID NO: 339204 - DNA, 30 bp, Artificial Sequence
  Synthetic oligonucleotide
aaaaatcgacgtgatgcccttttagtgatg

SEQ ID NO: 339205 - DNA, 30 bp, Artificial Sequence
  Synthetic oligonucleotide
gagctcgtctactaagaagcactcgtgatg

SEQ ID NO: 339206 - DNA, 30 bp, Artificial Sequence
  Synthetic oligonucleotide
atcggagattactacaatcctagtgtgatg

SEQ ID NO: 339207 - DNA, 30 bp, Artificial Sequence
  Synthetic oligonucleotide
ggctatacttacacacgggaaagattgatg

SEQ ID NO: 339208 - DNA, 30 bp, Artificial Sequence
  Synthetic oligonucleotide
tgctatcaaattgttgaaacaatattgatg

SEQ ID NO: 339209 - DNA, 30 bp, Artificial Sequence
  Synthetic oligonucleotide
tcgcgctgtctacattaatttgtattgatg

SEQ ID NO: 339210 - DNA, 30 bp, Artificial Sequence
  Synthetic oligonucleotide
gtaggtcccagggttcgtctgttattgatg

SEQ ID NO: 339211 - DNA, 30 bp, Artificial Sequence
  Synthetic oligonucleotide
caatcgaaagttaaggcatctaacttgatg

SEQ ID NO: 339212 - DNA, 30 bp, Artificial Sequence
  Synthetic oligonucleotide
taaagtgtccacccggttagtatcttgatg

SEQ ID NO: 339213 - DNA, 30 bp, Artificial Sequence
  Synthetic oligonucleotide
gcgtttgcgcattaaggcttatagttgatg

SEQ ID NO: 339214 - DNA, 30 bp, Artificial Sequence
  Synthetic oligonucleotide
tggatcagacaatggcgctaagggttgatg

SEQ ID NO: 339215 - DNA, 30 bp, Artificial Sequence
  Synthetic oligonucleotide
cactatctaccacctttaaggcgtttgatg

SEQ ID NO: 339216 - DNA, 30 bp, Artificial Sequence
  Synthetic oligonucleotide
agaacgtagcacggataacggtgtttgatg

SEQ ID NO: 339217 - DNA, 30 bp, Artificial Sequence
  Synthetic oligonucleotide
aagcactggaaaatctcagagtttttgatg

SEQ ID NO: 339218 - DNA, 30 bp, Artificial Sequence
  Synthetic oligonucleotide
ggatgggctcgaaacctgccggcaaatatg

SEQ ID NO: 339219 - DNA, 30 bp, Artificial Sequence
  Synthetic oligonucleotide
gagcgataaacgaagtgcgcaagcaatatg

SEQ ID NO: 339220 - DNA, 30 bp, Artificial Sequence
  Synthetic oligonucleotide
atgtaaggttatcctagcctcggcaatatg

SEQ ID NO: 339221 - DNA, 30 bp, Artificial Sequence
  Synthetic oligonucleotide
aaatacggtaacctgctgctgggcaatatg

SEQ ID NO: 339222 - DNA, 30 bp, Artificial Sequence
  Synthetic oligonucleotide
actggtggaatcactaggctagtgaatatg

SEQ ID NO: 339223 - DNA, 30 bp, Artificial Sequence
  Synthetic oligonucleotide
accgtcgcaagcacgtcccataataatatg

SEQ ID NO: 339224 - DNA, 30 bp, Artificial Sequence
  Synthetic oligonucleotide
gccacctgctagaatacgcctactaatatg

SEQ ID NO: 339225 - DNA, 30 bp, Artificial Sequence
  Synthetic oligonucleotide
accgttaaccacataaaggcggctaatatg

SEQ ID NO: 339226 - DNA, 30 bp, Artificial Sequence
  Synthetic oligonucleotide
ttcaatgtaactgtgaggatatgacatatg

SEQ ID NO: 339227 - DNA, 30 bp, Artificial Sequence
  Synthetic oligonucleotide
ccagcttaagagcaggacttttcgcatatg

SEQ ID NO: 339228 - DNA, 30 bp, Artificial Sequence
  Synthetic oligonucleotide
gtgccctatatatatgactgtcatcatatg

SEQ ID NO: 339229 - DNA, 30 bp, Artificial Sequence
  Synthetic oligonucleotide
agcggtaaacaggcgttgtcaactcatatg

SEQ ID NO: 339230 - DNA, 30 bp, Artificial Sequence
  Synthetic oligonucleotide
tagtgagccgggtaataccgccctcatatg

SEQ ID NO: 339231 - DNA, 30 bp, Artificial Sequence
  Synthetic oligonucleotide
ttgtggtgtgacttattgttccgtcatatg

SEQ ID NO: 339232 - DNA, 30 bp, Artificial Sequence
  Synthetic oligonucleotide
attgtgacaagatcacggcctgtcgatatg

SEQ ID NO: 339233 - DNA, 30 bp, Artificial Sequence
  Synthetic oligonucleotide
ttccagacttggtgaccaccgcttgatatg

SEQ ID NO: 339234 - DNA, 30 bp, Artificial Sequence
  Synthetic oligonucleotide
acttccgactcctttagacgggttgatatg

SEQ ID NO: 339235 - DNA, 30 bp, Artificial Sequence
  Synthetic oligonucleotide
tgcctaaacgacgtaaccttaacatatatg

SEQ ID NO: 339236 - DNA, 30 bp, Artificial Sequence
  Synthetic oligonucleotide
aatcggtgacacgtaataggtgtctatatg

SEQ ID NO: 339237 - DNA, 30 bp, Artificial Sequence
  Synthetic oligonucleotide
cacttgtgtcaaggtttctaccagtatatg

SEQ ID NO: 339238 - DNA, 30 bp, Artificial Sequence
  Synthetic oligonucleotide
ttaatgaatgttcttcccttcgagtatatg

SEQ ID NO: 339239 - DNA, 30 bp, Artificial Sequence
  Synthetic oligonucleotide
acggtatgcgtttcctgctgccccactatg

SEQ ID NO: 339240 - DNA, 30 bp, Artificial Sequence
  Synthetic oligonucleotide
tccattacgggtcctggttttttcactatg

SEQ ID NO: 339241 - DNA, 30 bp, Artificial Sequence
  Synthetic oligonucleotide
tgtagcgcacatgttccccatcggactatg

SEQ ID NO: 339242 - DNA, 30 bp, Artificial Sequence
  Synthetic oligonucleotide
tacgcgtataatgacaccccgggtactatg

SEQ ID NO: 339243 - DNA, 30 bp, Artificial Sequence
  Synthetic oligonucleotide
aggacggacagggattggtgcgaacctatg

SEQ ID NO: 339244 - DNA, 30 bp, Artificial Sequence
  Synthetic oligonucleotide
attactatcttctgatatatgacccctatg

SEQ ID NO: 339245 - DNA, 30 bp, Artificial Sequence
  Synthetic oligonucleotide
gcactgataaaaccgcgcgaaggccctatg

SEQ ID NO: 339246 - DNA, 30 bp, Artificial Sequence
  Synthetic oligonucleotide
accattactgcgactttatcaggccctatg

SEQ ID NO: 339247 - DNA, 30 bp, Artificial Sequence
  Synthetic oligonucleotide
gtccgtcaagtatgcatttgagggcctatg

SEQ ID NO: 339248 - DNA, 30 bp, Artificial Sequence
  Synthetic oligonucleotide
agagtggttagtagtgtccatttgcctatg

SEQ ID NO: 339249 - DNA, 30 bp, Artificial Sequence
  Synthetic oligonucleotide
ctttccatctcgcatccggtatacgctatg

SEQ ID NO: 339250 - DNA, 30 bp, Artificial Sequence
  Synthetic oligonucleotide
gcaccagacgtctaactaaactacgctatg

SEQ ID NO: 339251 - DNA, 30 bp, Artificial Sequence
  Synthetic oligonucleotide
acgtgggggtcaatacaccgcaaatctatg

SEQ ID NO: 339252 - DNA, 30 bp, Artificial Sequence
  Synthetic oligonucleotide
cttcggctactcggccttacttcatctatg

SEQ ID NO: 339253 - DNA, 30 bp, Artificial Sequence
  Synthetic oligonucleotide
gtatggccgagtgctcagtagctctctatg

SEQ ID NO: 339254 - DNA, 30 bp, Artificial Sequence
  Synthetic oligonucleotide
aaggggagtcatcggtcactgcattctatg

SEQ ID NO: 339255 - DNA, 30 bp, Artificial Sequence
  Synthetic oligonucleotide
tgcagagggctccaggtattaggaagtatg

SEQ ID NO: 339256 - DNA, 30 bp, Artificial Sequence
  Synthetic oligonucleotide
caccggtgccgtcggcaatgcggaagtatg

SEQ ID NO: 339257 - DNA, 30 bp, Artificial Sequence
  Synthetic oligonucleotide
gaatcaggtttcgggttaaggggcagtatg

SEQ ID NO: 339258 - DNA, 30 bp, Artificial Sequence
  Synthetic oligonucleotide
ttgctggcgggaggaagtggaatcagtatg

SEQ ID NO: 339259 - DNA, 30 bp, Artificial Sequence
  Synthetic oligonucleotide
caacacgaaacgtgtcgccgtttcagtatg

SEQ ID NO: 339260 - DNA, 30 bp, Artificial Sequence
  Synthetic oligonucleotide
tttaagtcctgacgtcgtcgtttcagtatg

SEQ ID NO: 339261 - DNA, 30 bp, Artificial Sequence
  Synthetic oligonucleotide
catttgccggagagccagctgattagtatg

SEQ ID NO: 339262 - DNA, 30 bp, Artificial Sequence
  Synthetic oligonucleotide
actgcccctacagcgcacaagtcacgtatg

SEQ ID NO: 339263 - DNA, 30 bp, Artificial Sequence
  Synthetic oligonucleotide
gtttatgctacgaacttgcgcagacgtatg

SEQ ID NO: 339264 - DNA, 30 bp, Artificial Sequence
  Synthetic oligonucleotide
atgcgcgaccatggacggtatatccgtatg

SEQ ID NO: 339265 - DNA, 30 bp, Artificial Sequence
  Synthetic oligonucleotide
acgctacataggagcattcctaagcgtatg

SEQ ID NO: 339266 - DNA, 30 bp, Artificial Sequence
  Synthetic oligonucleotide
gttgagcgggctatatcagccgcgcgtatg

SEQ ID NO: 339267 - DNA, 30 bp, Artificial Sequence
  Synthetic oligonucleotide
acgggagcctgtcccggggcaaggcgtatg

SEQ ID NO: 339268 - DNA, 30 bp, Artificial Sequence
  Synthetic oligonucleotide
gggcaccgtcatggcatattgaggcgtatg

SEQ ID NO: 339269 - DNA, 30 bp, Artificial Sequence
  Synthetic oligonucleotide
tacagtacactattacaatattggcgtatg

SEQ ID NO: 339270 - DNA, 30 bp, Artificial Sequence
  Synthetic oligonucleotide
ggggtcaacaacacattcgccgtgcgtatg

SEQ ID NO: 339271 - DNA, 30 bp, Artificial Sequence
  Synthetic oligonucleotide
tcaggacgtccgtggattttaccaggtatg

SEQ ID NO: 339272 - DNA, 30 bp, Artificial Sequence
  Synthetic oligonucleotide
ccgtcacctctgggatattatctaggtatg

SEQ ID NO: 339273 - DNA, 30 bp, Artificial Sequence
  Synthetic oligonucleotide
tccgatattgcttgggacatgttaggtatg

SEQ ID NO: 339274 - DNA, 30 bp, Artificial Sequence
  Synthetic oligonucleotide
cctgtaaatatacgaaatgtgcacggtatg

SEQ ID NO: 339275 - DNA, 30 bp, Artificial Sequence
  Synthetic oligonucleotide
tgggttttagtgtcgaaattttacggtatg

SEQ ID NO: 339276 - DNA, 30 bp, Artificial Sequence
  Synthetic oligonucleotide
ctatctatacggcgtctcaagactggtatg

SEQ ID NO: 339277 - DNA, 30 bp, Artificial Sequence
  Synthetic oligonucleotide
actattcaactgccgagtcattgtggtatg

SEQ ID NO: 339278 - DNA, 30 bp, Artificial Sequence
  Synthetic oligonucleotide
atgaatcagcagcgcgcgagccagtgtatg

SEQ ID NO: 339279 - DNA, 30 bp, Artificial Sequence
  Synthetic oligonucleotide
gtctctggtttacatccaaactcttgtatg

SEQ ID NO: 339280 - DNA, 30 bp, Artificial Sequence
  Synthetic oligonucleotide
gatatctcgtgtacctcgggataaattatg

SEQ ID NO: 339281 - DNA, 30 bp, Artificial Sequence
  Synthetic oligonucleotide
gttagctggcacggagttcgtagaattatg

SEQ ID NO: 339282 - DNA, 30 bp, Artificial Sequence
  Synthetic oligonucleotide
ggacgcaaacaagcccccttcctaattatg

SEQ ID NO: 339283 - DNA, 30 bp, Artificial Sequence
  Synthetic oligonucleotide
taagcctacgtttatataaaattgattatg

SEQ ID NO: 339284 - DNA, 30 bp, Artificial Sequence
  Synthetic oligonucleotide
gtatgcggcgagttttgctagactattatg

SEQ ID NO: 339285 - DNA, 30 bp, Artificial Sequence
  Synthetic oligonucleotide
gcgtatatgcagtcatataagtgtattatg

SEQ ID NO: 339286 - DNA, 30 bp, Artificial Sequence
  Synthetic oligonucleotide
cttcaaaggctcgctggcagacaacttatg

SEQ ID NO: 339287 - DNA, 30 bp, Artificial Sequence
  Synthetic oligonucleotide
agctggctatgctaaagcttcaaccttatg

SEQ ID NO: 339288 - DNA, 30 bp, Artificial Sequence
  Synthetic oligonucleotide
tcgttataagatatcccgggcatccttatg

SEQ ID NO: 339289 - DNA, 30 bp, Artificial Sequence
  Synthetic oligonucleotide
aaccccgaggtctgcatcatacggcttatg

SEQ ID NO: 339290 - DNA, 30 bp, Artificial Sequence
  Synthetic oligonucleotide
attggtcgaacgtagggggtaactcttatg

SEQ ID NO: 339291 - DNA, 30 bp, Artificial Sequence
  Synthetic oligonucleotide
aggttattctgggtaaacagggttcttatg

SEQ ID NO: 339292 - DNA, 30 bp, Artificial Sequence
  Synthetic oligonucleotide
gcccaacgtgtggtaacccattaagttatg

SEQ ID NO: 339293 - DNA, 30 bp, Artificial Sequence
  Synthetic oligonucleotide
tagttgttcagcggtggagcgtcagttatg

SEQ ID NO: 339294 - DNA, 30 bp, Artificial Sequence
  Synthetic oligonucleotide
gatggacgtaagaggaggcaaggggttatg

SEQ ID NO: 339295 - DNA, 30 bp, Artificial Sequence
  Synthetic oligonucleotide
caactggtgaagcggtttcgattggttatg

SEQ ID NO: 339296 - DNA, 30 bp, Artificial Sequence
  Synthetic oligonucleotide
ggttttcgcatggcggtccgtcaatttatg

SEQ ID NO: 339297 - DNA, 30 bp, Artificial Sequence
  Synthetic oligonucleotide
gcattatagggacttgtaccagaatttatg

SEQ ID NO: 339298 - DNA, 30 bp, Artificial Sequence
  Synthetic oligonucleotide
acaagataatgaatagagtcttactttatg

SEQ ID NO: 339299 - DNA, 30 bp, Artificial Sequence
  Synthetic oligonucleotide
caaatcatcaagtcggtctagtgctttatg

SEQ ID NO: 339300 - DNA, 30 bp, Artificial Sequence
  Synthetic oligonucleotide
ctggcggaaggccttctagataattttatg

SEQ ID NO: 339301 - DNA, 30 bp, Artificial Sequence
  Synthetic oligonucleotide
atgtttatacactgctgtggcaaaaaactg

SEQ ID NO: 339302 - DNA, 29 bp, Artificial Sequence
  Synthetic oligonucleotide
tgcatgcgacttcagtgttggtaaaactg

SEQ ID NO: 339303 - DNA, 30 bp, Artificial Sequence
  Synthetic oligonucleotide
tgatatcgcagggcagcactagacaaactg

SEQ ID NO: 339304 - DNA, 30 bp, Artificial Sequence
  Synthetic oligonucleotide
tcaggttcggtacggtctaactacaaactg

SEQ ID NO: 339305 - DNA, 30 bp, Artificial Sequence
  Synthetic oligonucleotide
gagcaggctgggattacttaactcaaactg

SEQ ID NO: 339306 - DNA, 30 bp, Artificial Sequence
  Synthetic oligonucleotide
agcagcttgacggggtgtaacctacaactg

SEQ ID NO: 339307 - DNA, 30 bp, Artificial Sequence
  Synthetic oligonucleotide
ctccaattttggccccgtagcgcgcaactg

SEQ ID NO: 339308 - DNA, 30 bp, Artificial Sequence
  Synthetic oligonucleotide
tgagcgtggctctcgtcatgatctcaactg

SEQ ID NO: 339309 - DNA, 30 bp, Artificial Sequence
  Synthetic oligonucleotide
gtatcgcttaacgcgtacgaacttcaactg

SEQ ID NO: 339310 - DNA, 30 bp, Artificial Sequence
  Synthetic oligonucleotide
gcgaacccctgcataacacctcgagaactg

SEQ ID NO: 339311 - DNA, 30 bp, Artificial Sequence
  Synthetic oligonucleotide
aagctactgtgaggagccgcgagcgaactg

SEQ ID NO: 339312 - DNA, 30 bp, Artificial Sequence
  Synthetic oligonucleotide
gccacagtgtcaggtagtttaccggaactg

SEQ ID NO: 339313 - DNA, 30 bp, Artificial Sequence
  Synthetic oligonucleotide
agtattgtctgctatcccaatgcggaactg

SEQ ID NO: 339314 - DNA, 30 bp, Artificial Sequence
  Synthetic oligonucleotide
ccaagtaattggtgcgaatcccgggaactg

SEQ ID NO: 339315 - DNA, 30 bp, Artificial Sequence
  Synthetic oligonucleotide
cgcttaggtcggacatagtctttggaactg

SEQ ID NO: 339316 - DNA, 30 bp, Artificial Sequence
  Synthetic oligonucleotide
tacgacacaacacctcataattatgaactg

SEQ ID NO: 339317 - DNA, 30 bp, Artificial Sequence
  Synthetic oligonucleotide
ttacgtgattatactccccgatttgaactg

SEQ ID NO: 339318 - DNA, 30 bp, Artificial Sequence
  Synthetic oligonucleotide
catatagttatcgatcagcgttaataactg

SEQ ID NO: 339319 - DNA, 30 bp, Artificial Sequence
  Synthetic oligonucleotide
gagctacattctctgtgagttcgataactg

SEQ ID NO: 339320 - DNA, 30 bp, Artificial Sequence
  Synthetic oligonucleotide
ggaacatgcggtgcataactggtataactg

SEQ ID NO: 339321 - DNA, 30 bp, Artificial Sequence
  Synthetic oligonucleotide
cactagagtccctaatccgggacgtaactg

SEQ ID NO: 339322 - DNA, 30 bp, Artificial Sequence
  Synthetic oligonucleotide
gtgaacaggatgcgagtcagtccgtaactg

SEQ ID NO: 339323 - DNA, 30 bp, Artificial Sequence
  Synthetic oligonucleotide
cctgagaactactcctagtacaggtaactg

SEQ ID NO: 339324 - DNA, 30 bp, Artificial Sequence
  Synthetic oligonucleotide
tacgtacatgacgagctgcgggtgtaactg

SEQ ID NO: 339325 - DNA, 30 bp, Artificial Sequence
  Synthetic oligonucleotide
ccagctaacgcatattataagcgttaactg

SEQ ID NO: 339326 - DNA, 30 bp, Artificial Sequence
  Synthetic oligonucleotide
ttacacgagggtggctcgtctggaacactg

SEQ ID NO: 339327 - DNA, 30 bp, Artificial Sequence
  Synthetic oligonucleotide
ggccaatacttcttgggaataagcacactg

SEQ ID NO: 339328 - DNA, 30 bp, Artificial Sequence
  Synthetic oligonucleotide
ctctcaaatcatcatcaacgctgcacactg

SEQ ID NO: 339329 - DNA, 30 bp, Artificial Sequence
  Synthetic oligonucleotide
atcgcgtactgctacgtgaataagacactg

SEQ ID NO: 339330 - DNA, 30 bp, Artificial Sequence
  Synthetic oligonucleotide
ttgaggatatcctagcgggagcggacactg

SEQ ID NO: 339331 - DNA, 30 bp, Artificial Sequence
  Synthetic oligonucleotide
atagcgtgagattgcagagggcaaccactg

SEQ ID NO: 339332 - DNA, 30 bp, Artificial Sequence
  Synthetic oligonucleotide
ttgtaattggcgggtatttgattaccactg

SEQ ID NO: 339333 - DNA, 30 bp, Artificial Sequence
  Synthetic oligonucleotide
gttgttccgctgcctggggtaaagccactg

SEQ ID NO: 339334 - DNA, 31 bp, Artificial Sequence
  Synthetic oligonucleotide
taatccggatagtgtagatattttgccactg

SEQ ID NO: 339335 - DNA, 30 bp, Artificial Sequence
  Synthetic oligonucleotide
gaggcttacacaagctacatctttccactg

SEQ ID NO: 339336 - DNA, 30 bp, Artificial Sequence
  Synthetic oligonucleotide
taaactcaggagccacttgggttagcactg

SEQ ID NO: 339337 - DNA, 30 bp, Artificial Sequence
  Synthetic oligonucleotide
agtctgggtataatcttgaggaccgcactg

SEQ ID NO: 339338 - DNA, 30 bp, Artificial Sequence
  Synthetic oligonucleotide
catgtacatgtcccgaggggcagcgcactg

SEQ ID NO: 339339 - DNA, 30 bp, Artificial Sequence
  Synthetic oligonucleotide
gagggcgttcgctggtcgagaacggcactg

SEQ ID NO: 339340 - DNA, 30 bp, Artificial Sequence
  Synthetic oligonucleotide
gcacttacgactctgtaccgctctgcactg

SEQ ID NO: 339341 - DNA, 29 bp, Artificial Sequence
  Synthetic oligonucleotide
agaattggtgatacttacatggtgcactg

SEQ ID NO: 339342 - DNA, 30 bp, Artificial Sequence
  Synthetic oligonucleotide
tcaataaattgctacgggcacaaatcactg

SEQ ID NO: 339343 - DNA, 30 bp, Artificial Sequence
  Synthetic oligonucleotide
gacgccccacgccaagccagtacatcactg

SEQ ID NO: 339344 - DNA, 30 bp, Artificial Sequence
  Synthetic oligonucleotide
catacgtttatctggacgggccgatcactg

SEQ ID NO: 339345 - DNA, 30 bp, Artificial Sequence
  Synthetic oligonucleotide
ggtgtctttccatcctatagaggatcactg

SEQ ID NO: 339346 - DNA, 30 bp, Artificial Sequence
  Synthetic oligonucleotide
gaattgtgatgcaacggaagattgtcactg

SEQ ID NO: 339347 - DNA, 30 bp, Artificial Sequence
  Synthetic oligonucleotide
gtctcatttgagcggcttgacatttcactg

SEQ ID NO: 339348 - DNA, 30 bp, Artificial Sequence
  Synthetic oligonucleotide
acaccggccaccaccctgctagttagactg

SEQ ID NO: 339349 - DNA, 30 bp, Artificial Sequence
  Synthetic oligonucleotide
aataggtttgtggttcatatggttagactg

SEQ ID NO: 339350 - DNA, 28 bp, Artificial Sequence
  Synthetic oligonucleotide
cttatttcccgctctccagacacgactg

SEQ ID NO: 339351 - DNA, 30 bp, Artificial Sequence
  Synthetic oligonucleotide
ctataagacctaattggtcagaaccgactg

SEQ ID NO: 339352 - DNA, 30 bp, Artificial Sequence
  Synthetic oligonucleotide
acacattgtgggaacagggtggggcgactg

SEQ ID NO: 339353 - DNA, 30 bp, Artificial Sequence
  Synthetic oligonucleotide
tatttcgacatcttactgcgtaatcgactg

SEQ ID NO: 339354 - DNA, 30 bp, Artificial Sequence
  Synthetic oligonucleotide
tggctctaagagttgctattcggtcgactg

SEQ ID NO: 339355 - DNA, 30 bp, Artificial Sequence
  Synthetic oligonucleotide
ccgtccaagtccgcttgatatcaaggactg

SEQ ID NO: 339356 - DNA, 30 bp, Artificial Sequence
  Synthetic oligonucleotide
cactcacttcgaaagtcgatagaaggactg

SEQ ID NO: 339357 - DNA, 30 bp, Artificial Sequence
  Synthetic oligonucleotide
cattgagatgtgcggggctcctaaggactg

SEQ ID NO: 339358 - DNA, 30 bp, Artificial Sequence
  Synthetic oligonucleotide
cggggtatttgaattgcttgtcacggactg

SEQ ID NO: 339359 - DNA, 30 bp, Artificial Sequence
  Synthetic oligonucleotide
gtgagagaggctgcatcaggctgcggactg

SEQ ID NO: 339360 - DNA, 30 bp, Artificial Sequence
  Synthetic oligonucleotide
aagaggccgtgggaatgcgagccgggactg

SEQ ID NO: 339361 - DNA, 30 bp, Artificial Sequence
  Synthetic oligonucleotide
aaaatcccgcggataaattataggggactg

SEQ ID NO: 339362 - DNA, 30 bp, Artificial Sequence
  Synthetic oligonucleotide
cttatggtacttagagctgggtatggactg

SEQ ID NO: 339363 - DNA, 30 bp, Artificial Sequence
  Synthetic oligonucleotide
cgaactttgtaacggagttaaagtggactg

SEQ ID NO: 339364 - DNA, 30 bp, Artificial Sequence
  Synthetic oligonucleotide
gagaagtcgccggaagccatgtcctgactg

SEQ ID NO: 339365 - DNA, 30 bp, Artificial Sequence
  Synthetic oligonucleotide
ggagatttagttagagtacagtagtgactg

SEQ ID NO: 339366 - DNA, 30 bp, Artificial Sequence
  Synthetic oligonucleotide
actcagttagaagttgttcccacttgactg

SEQ ID NO: 339367 - DNA, 30 bp, Artificial Sequence
  Synthetic oligonucleotide
ggttatgttgcccgtgaattgaaaatactg

SEQ ID NO: 339368 - DNA, 30 bp, Artificial Sequence
  Synthetic oligonucleotide
ttaattgggatgtagcagagccagatactg

SEQ ID NO: 339369 - DNA, 30 bp, Artificial Sequence
  Synthetic oligonucleotide
tgcctcagaataagtacgtgtgcgatactg

SEQ ID NO: 339370 - DNA, 30 bp, Artificial Sequence
  Synthetic oligonucleotide
ttacaacgctggatgtactgagctatactg

SEQ ID NO: 339371 - DNA, 30 bp, Artificial Sequence
  Synthetic oligonucleotide
gtcgtggaagttattcgaaaatctatactg

SEQ ID NO: 339372 - DNA, 30 bp, Artificial Sequence
  Synthetic oligonucleotide
aacttatcaagcctcccacacattatactg

SEQ ID NO: 339373 - DNA, 30 bp, Artificial Sequence
  Synthetic oligonucleotide
caaggtcggtgctctagttttacactactg

SEQ ID NO: 339374 - DNA, 30 bp, Artificial Sequence
  Synthetic oligonucleotide
gcatagaggggaatgcggtactacctactg

SEQ ID NO: 339375 - DNA, 30 bp, Artificial Sequence
  Synthetic oligonucleotide
gtgttctaattgagtagtacttttctactg

SEQ ID NO: 339376 - DNA, 30 bp, Artificial Sequence
  Synthetic oligonucleotide
tttgcttgctaataatattaggaagtactg

SEQ ID NO: 339377 - DNA, 30 bp, Artificial Sequence
  Synthetic oligonucleotide
gattagcccgcactccagttgtcagtactg

SEQ ID NO: 339378 - DNA, 30 bp, Artificial Sequence
  Synthetic oligonucleotide
gggctggtcatctatgagcgctgagtactg

SEQ ID NO: 339379 - DNA, 30 bp, Artificial Sequence
  Synthetic oligonucleotide
gatagggtacgtcagttcatatacgtactg

SEQ ID NO: 339380 - DNA, 30 bp, Artificial Sequence
  Synthetic oligonucleotide
aggtaaatccagccaaattttgccgtactg

SEQ ID NO: 339381 - DNA, 30 bp, Artificial Sequence
  Synthetic oligonucleotide
ggtttccataaacggtatctcgtggtactg

SEQ ID NO: 339382 - DNA, 30 bp, Artificial Sequence
  Synthetic oligonucleotide
tgaaattccgtctcgggcaatacattactg

SEQ ID NO: 339383 - DNA, 30 bp, Artificial Sequence
  Synthetic oligonucleotide
acaggacaagcttgttacatcctattactg

SEQ ID NO: 339384 - DNA, 30 bp, Artificial Sequence
  Synthetic oligonucleotide
gagagggatacaaggagggtggtattactg

SEQ ID NO: 339385 - DNA, 30 bp, Artificial Sequence
  Synthetic oligonucleotide
atgattggcccgtaaaattcggaaaacctg

SEQ ID NO: 339386 - DNA, 30 bp, Artificial Sequence
  Synthetic oligonucleotide
agcgggccttagattgtagtctaaaacctg

SEQ ID NO: 339387 - DNA, 30 bp, Artificial Sequence
  Synthetic oligonucleotide
aggacttttatatatcgttcaggaaacctg

SEQ ID NO: 339388 - DNA, 30 bp, Artificial Sequence
  Synthetic oligonucleotide
tgaccttttatgatcgagggacacaacctg

SEQ ID NO: 339389 - DNA, 30 bp, Artificial Sequence
  Synthetic oligonucleotide
tttgggcgattgtagaacaacctcaacctg

SEQ ID NO: 339390 - DNA, 30 bp, Artificial Sequence
  Synthetic oligonucleotide
accgaagaccacgcaaccattgggaacctg

SEQ ID NO: 339391 - DNA, 30 bp, Artificial Sequence
  Synthetic oligonucleotide
gtacactctttgtttaaatacatgaacctg

SEQ ID NO: 339392 - DNA, 30 bp, Artificial Sequence
  Synthetic oligonucleotide
caatccaccagtatctcaccttcccacctg

SEQ ID NO: 339393 - DNA, 30 bp, Artificial Sequence
  Synthetic oligonucleotide
aaacactggcgtttaccagctggccacctg

SEQ ID NO: 339394 - DNA, 30 bp, Artificial Sequence
  Synthetic oligonucleotide
agtgggcggccggtgcaaagttagcacctg

SEQ ID NO: 339395 - DNA, 30 bp, Artificial Sequence
  Synthetic oligonucleotide
gttgtgtacgtcccacatccttcagacctg

SEQ ID NO: 339396 - DNA, 30 bp, Artificial Sequence
  Synthetic oligonucleotide
aaatgccaataaatggggcttctagacctg

SEQ ID NO: 339397 - DNA, 30 bp, Artificial Sequence
  Synthetic oligonucleotide
gatccaaaagctgaacctcggacctacctg

SEQ ID NO: 339398 - DNA, 30 bp, Artificial Sequence
  Synthetic oligonucleotide
gcagtgagattgccgggctgtacaaccctg

SEQ ID NO: 339399 - DNA, 30 bp, Artificial Sequence
  Synthetic oligonucleotide
atcatacctatttgatcaatcgggaccctg

SEQ ID NO: 339400 - DNA, 30 bp, Artificial Sequence
  Synthetic oligonucleotide
gacgttgcgggttgaactttcgttaccctg

SEQ ID NO: 339401 - DNA, 30 bp, Artificial Sequence
  Synthetic oligonucleotide
cagagtgagcgccgtcactgatttaccctg

SEQ ID NO: 339402 - DNA, 30 bp, Artificial Sequence
  Synthetic oligonucleotide
agacaattcgcggatgctcataaccccctg

SEQ ID NO: 339403 - DNA, 30 bp, Artificial Sequence
  Synthetic oligonucleotide
tgacccagtgtccggatcgggatgcccctg

SEQ ID NO: 339404 - DNA, 30 bp, Artificial Sequence
  Synthetic oligonucleotide
ctatagggctctgggtgtgaagctcccctg

SEQ ID NO: 339405 - DNA, 30 bp, Artificial Sequence
  Synthetic oligonucleotide
gtgtttacgtgtacacctcaggttcccctg

SEQ ID NO: 339406 - DNA, 30 bp, Artificial Sequence
  Synthetic oligonucleotide
atagcctgagatgtccaagtacgagccctg

SEQ ID NO: 339407 - DNA, 30 bp, Artificial Sequence
  Synthetic oligonucleotide
taggctagccgggttaagacagccgccctg

SEQ ID NO: 339408 - DNA, 30 bp, Artificial Sequence
  Synthetic oligonucleotide
aacacgaccggattcctaagtcatgccctg

SEQ ID NO: 339409 - DNA, 30 bp, Artificial Sequence
  Synthetic oligonucleotide
cctcagcctcaaaggatataaggatccctg

SEQ ID NO: 339410 - DNA, 30 bp, Artificial Sequence
  Synthetic oligonucleotide
cgtttccattcgatacaaaggctatccctg

SEQ ID NO: 339411 - DNA, 30 bp, Artificial Sequence
  Synthetic oligonucleotide
atctacggtaataattggcctaggtccctg

SEQ ID NO: 339412 - DNA, 30 bp, Artificial Sequence
  Synthetic oligonucleotide
cttggaggcgcgggattgccgcagagcctg

SEQ ID NO: 339413 - DNA, 30 bp, Artificial Sequence
  Synthetic oligonucleotide
ccacctaagaagaaggtatgacgtagcctg

SEQ ID NO: 339414 - DNA, 30 bp, Artificial Sequence
  Synthetic oligonucleotide
tgtttgaccaacaagcagatttttagcctg

SEQ ID NO: 339415 - DNA, 30 bp, Artificial Sequence
  Synthetic oligonucleotide
agtggcgctcaggcgtgaattaaccgcctg

SEQ ID NO: 339416 - DNA, 30 bp, Artificial Sequence
  Synthetic oligonucleotide
gatgtctaacaagtacttttccctcgcctg

SEQ ID NO: 339417 - DNA, 30 bp, Artificial Sequence
  Synthetic oligonucleotide
atcataggttctgaaaactcgtcaggcctg

SEQ ID NO: 339418 - DNA, 30 bp, Artificial Sequence
  Synthetic oligonucleotide
aaaaaattaaggctaacgcatgacggcctg

SEQ ID NO: 339419 - DNA, 30 bp, Artificial Sequence
  Synthetic oligonucleotide
cttgttcgctgcgtgggtggcaccggcctg

SEQ ID NO: 339420 - DNA, 29 bp, Artificial Sequence
  Synthetic oligonucleotide
ctcattgccaggttcaactcggcggcctg

SEQ ID NO: 339421 - DNA, 30 bp, Artificial Sequence
  Synthetic oligonucleotide
ccgcaggcaatctcacttgtgggcggcctg

SEQ ID NO: 339422 - DNA, 30 bp, Artificial Sequence
  Synthetic oligonucleotide
agtgtacttcgttcgggttgccagggcctg

SEQ ID NO: 339423 - DNA, 30 bp, Artificial Sequence
  Synthetic oligonucleotide
taaagggcgggcgacctctggcagggcctg

SEQ ID NO: 339424 - DNA, 30 bp, Artificial Sequence
  Synthetic oligonucleotide
tcggatagataaacgcgacactcgggcctg

SEQ ID NO: 339425 - DNA, 30 bp, Artificial Sequence
  Synthetic oligonucleotide
cgtgaacgaatcatgggcaagaatggcctg

SEQ ID NO: 339426 - DNA, 30 bp, Artificial Sequence
  Synthetic oligonucleotide
gagctcgacacttgaacactggactgcctg

SEQ ID NO: 339427 - DNA, 30 bp, Artificial Sequence
  Synthetic oligonucleotide
gtaagttcagtgtgcggacttgactgcctg

SEQ ID NO: 339428 - DNA, 30 bp, Artificial Sequence
  Synthetic oligonucleotide
atgaagaattaaatcgtgggaatctgcctg

SEQ ID NO: 339429 - DNA, 30 bp, Artificial Sequence
  Synthetic oligonucleotide
acgagtgatttaatctggcaagagtgcctg

SEQ ID NO: 339430 - DNA, 30 bp, Artificial Sequence
  Synthetic oligonucleotide
agatcgaaatcttaagcggagacgtgcctg

SEQ ID NO: 339431 - DNA, 30 bp, Artificial Sequence
  Synthetic oligonucleotide
tcgtggatatgcgccttgtgggccatcctg

SEQ ID NO: 339432 - DNA, 30 bp, Artificial Sequence
  Synthetic oligonucleotide
ttttcgtgaccgctgggtctattcatcctg

SEQ ID NO: 339433 - DNA, 30 bp, Artificial Sequence
  Synthetic oligonucleotide
ataattgtacagatgccttcgcagatcctg

SEQ ID NO: 339434 - DNA, 30 bp, Artificial Sequence
  Synthetic oligonucleotide
taaggatcgcgatcaggggtcgagatcctg

SEQ ID NO: 339435 - DNA, 30 bp, Artificial Sequence
  Synthetic oligonucleotide
atacgagagccgcggatttggtggatcctg

SEQ ID NO: 339436 - DNA, 30 bp, Artificial Sequence
  Synthetic oligonucleotide
caatgcatgcgtcccctaccacttatcctg

SEQ ID NO: 339437 - DNA, 30 bp, Artificial Sequence
  Synthetic oligonucleotide
gacattcgtaactttggtcccacactcctg

SEQ ID NO: 339438 - DNA, 30 bp, Artificial Sequence
  Synthetic oligonucleotide
ctagcgacttcggctcaccctgagctcctg

SEQ ID NO: 339439 - DNA, 30 bp, Artificial Sequence
  Synthetic oligonucleotide
atttgatttccagaaattggaccgctcctg

SEQ ID NO: 339440 - DNA, 30 bp, Artificial Sequence
  Synthetic oligonucleotide
gggtcgtgaaggggctaccgaaggctcctg

SEQ ID NO: 339441 - DNA, 30 bp, Artificial Sequence
  Synthetic oligonucleotide
gtttgtactcagctcaaagcagctctcctg

SEQ ID NO: 339442 - DNA, 30 bp, Artificial Sequence
  Synthetic oligonucleotide
gctatgtatagagtcgcataggtagtcctg

SEQ ID NO: 339443 - DNA, 30 bp, Artificial Sequence
  Synthetic oligonucleotide
agaatcccgcccgaagctcagtacgtcctg

SEQ ID NO: 339444 - DNA, 30 bp, Artificial Sequence
  Synthetic oligonucleotide
ctcgccaacctcggcggtatggctgtcctg

SEQ ID NO: 339445 - DNA, 30 bp, Artificial Sequence
  Synthetic oligonucleotide
tcgccagcgccatgtggttgagttgtcctg

SEQ ID NO: 339446 - DNA, 30 bp, Artificial Sequence
  Synthetic oligonucleotide
attgatgtgtgcagtagcgtaaaattcctg

SEQ ID NO: 339447 - DNA, 30 bp, Artificial Sequence
  Synthetic oligonucleotide
gggacatacgtgtcatatccttaattcctg

SEQ ID NO: 339448 - DNA, 30 bp, Artificial Sequence
  Synthetic oligonucleotide
gaaaaatgtcttatacaaagtagcttcctg

SEQ ID NO: 339449 - DNA, 30 bp, Artificial Sequence
  Synthetic oligonucleotide
attgataaggcttgtctccaaaagttcctg

SEQ ID NO: 339450 - DNA, 30 bp, Artificial Sequence
  Synthetic oligonucleotide
ttgcgtatccgcagtgcggctaatttcctg

SEQ ID NO: 339451 - DNA, 30 bp, Artificial Sequence
  Synthetic oligonucleotide
gtagctcacgcgcgtataacaagtttcctg

SEQ ID NO: 339452 - DNA, 30 bp, Artificial Sequence
  Synthetic oligonucleotide
tgcctatgacaaaacgactaagtaaagctg

SEQ ID NO: 339453 - DNA, 30 bp, Artificial Sequence
  Synthetic oligonucleotide
gcgcaatggctgtaactcatacacaagctg

SEQ ID NO: 339454 - DNA, 30 bp, Artificial Sequence
  Synthetic oligonucleotide
ggcgggggctatctttatttctccaagctg

SEQ ID NO: 339455 - DNA, 30 bp, Artificial Sequence
  Synthetic oligonucleotide
ctccggattgcttgaagaaagggcaagctg

SEQ ID NO: 339456 - DNA, 30 bp, Artificial Sequence
  Synthetic oligonucleotide
agctcgattggacggcattagaggaagctg

SEQ ID NO: 339457 - DNA, 30 bp, Artificial Sequence
  Synthetic oligonucleotide
tggcagtaggaccccgggccggataagctg

SEQ ID NO: 339458 - DNA, 30 bp, Artificial Sequence
  Synthetic oligonucleotide
taatgccggtctcacccgtgagctaagctg

SEQ ID NO: 339459 - DNA, 30 bp, Artificial Sequence
  Synthetic oligonucleotide
cgcacaacgcgtggctaagatagtaagctg

SEQ ID NO: 339460 - DNA, 30 bp, Artificial Sequence
  Synthetic oligonucleotide
ccatcgttgttagtgtatccatgacagctg

SEQ ID NO: 339461 - DNA, 30 bp, Artificial Sequence
  Synthetic oligonucleotide
gggtattcccgttcgcttgcatgccagctg

SEQ ID NO: 339462 - DNA, 30 bp, Artificial Sequence
  Synthetic oligonucleotide
ggtatttcgtcgtcgtattggctccagctg

SEQ ID NO: 339463 - DNA, 30 bp, Artificial Sequence
  Synthetic oligonucleotide
tatggacagagagtgagtaactagcagctg

SEQ ID NO: 339464 - DNA, 30 bp, Artificial Sequence
  Synthetic oligonucleotide
gtcttcttaagtaattcaatggctgagctg

SEQ ID NO: 339465 - DNA, 30 bp, Artificial Sequence
  Synthetic oligonucleotide
acccgatacgcgctaaacataagtgagctg

SEQ ID NO: 339466 - DNA, 30 bp, Artificial Sequence
  Synthetic oligonucleotide
actcgatttataaatggtgtttgtgagctg

SEQ ID NO: 339467 - DNA, 30 bp, Artificial Sequence
  Synthetic oligonucleotide
tctcaagtccctggtgcaaactttgagctg

SEQ ID NO: 339468 - DNA, 30 bp, Artificial Sequence
  Synthetic oligonucleotide
gatcgtgacgaagtcacatgcgaatagctg

SEQ ID NO: 339469 - DNA, 30 bp, Artificial Sequence
  Synthetic oligonucleotide
tttccacatattcagcatcggcagtagctg

SEQ ID NO: 339470 - DNA, 30 bp, Artificial Sequence
  Synthetic oligonucleotide
ctgtttcctttgccttcgagaaggtagctg

SEQ ID NO: 339471 - DNA, 30 bp, Artificial Sequence
  Synthetic oligonucleotide
gtcactatgtgtcatgggttccggtagctg

SEQ ID NO: 339472 - DNA, 30 bp, Artificial Sequence
  Synthetic oligonucleotide
aacgggagaacgtagcaactatggtagctg

SEQ ID NO: 339473 - DNA, 30 bp, Artificial Sequence
  Synthetic oligonucleotide
taggactggtttaagcggcccgtttagctg

SEQ ID NO: 339474 - DNA, 30 bp, Artificial Sequence
  Synthetic oligonucleotide
tccttgggatgcaacggcagtttaacgctg

SEQ ID NO: 339475 - DNA, 30 bp, Artificial Sequence
  Synthetic oligonucleotide
atataaccgcaaacttgcaatgccacgctg

SEQ ID NO: 339476 - DNA, 30 bp, Artificial Sequence
  Synthetic oligonucleotide
gtatgtgaattgaaagcggggcgcacgctg

SEQ ID NO: 339477 - DNA, 30 bp, Artificial Sequence
  Synthetic oligonucleotide
ggagaacgcgggcgcaaggctcttacgctg

SEQ ID NO: 339478 - DNA, 30 bp, Artificial Sequence
  Synthetic oligonucleotide
cgtacgagagtccctccagaggcaccgctg

SEQ ID NO: 339479 - DNA, 30 bp, Artificial Sequence
  Synthetic oligonucleotide
caatgagtctaattttagttcggaccgctg

SEQ ID NO: 339480 - DNA, 30 bp, Artificial Sequence
  Synthetic oligonucleotide
aggggacaaggctgtgcctgcaccccgctg

SEQ ID NO: 339481 - DNA, 30 bp, Artificial Sequence
  Synthetic oligonucleotide
ccagacgatataccacgccctaccccgctg

SEQ ID NO: 339482 - DNA, 30 bp, Artificial Sequence
  Synthetic oligonucleotide
gcggtggggataaataaagggttcccgctg

SEQ ID NO: 339483 - DNA, 30 bp, Artificial Sequence
  Synthetic oligonucleotide
gcgcgaacattgactacacactggccgctg

SEQ ID NO: 339484 - DNA, 30 bp, Artificial Sequence
  Synthetic oligonucleotide
atggcatttttcaacgccgggacagcgctg

SEQ ID NO: 339485 - DNA, 30 bp, Artificial Sequence
  Synthetic oligonucleotide
gcatggttctcccgaagataatgcgcgctg

SEQ ID NO: 339486 - DNA, 30 bp, Artificial Sequence
  Synthetic oligonucleotide
aagatatccgatccgcttccatgcgcgctg

SEQ ID NO: 339487 - DNA, 30 bp, Artificial Sequence
  Synthetic oligonucleotide
ttattgtcatactggttaccggtcgcgctg

SEQ ID NO: 339488 - DNA, 30 bp, Artificial Sequence
  Synthetic oligonucleotide
ccgtctatgtctgtagagtttcgggcgctg

SEQ ID NO: 339489 - DNA, 30 bp, Artificial Sequence
  Synthetic oligonucleotide
tacctccgccttcagcctataactgcgctg

SEQ ID NO: 339490 - DNA, 30 bp, Artificial Sequence
  Synthetic oligonucleotide
gtgatctaagcgaatttgtttatgtcgctg

SEQ ID NO: 339491 - DNA, 30 bp, Artificial Sequence
  Synthetic oligonucleotide
gagttggtgtcgtcgtaggattcaaggctg

SEQ ID NO: 339492 - DNA, 30 bp, Artificial Sequence
  Synthetic oligonucleotide
cacagacttacgttagtaaagtttaggctg

SEQ ID NO: 339493 - DNA, 30 bp, Artificial Sequence
  Synthetic oligonucleotide
taatgttcactaagcctccagcgacggctg

SEQ ID NO: 339494 - DNA, 30 bp, Artificial Sequence
  Synthetic oligonucleotide
tcattcgataataaaatgaatatacggctg

SEQ ID NO: 339495 - DNA, 30 bp, Artificial Sequence
  Synthetic oligonucleotide
tagggtcagtggtgacacttcgaccggctg

SEQ ID NO: 339496 - DNA, 30 bp, Artificial Sequence
  Synthetic oligonucleotide
tccggcagccgttaaacataattccggctg

SEQ ID NO: 339497 - DNA, 30 bp, Artificial Sequence
  Synthetic oligonucleotide
caacccgggataataaaaatttgtcggctg

SEQ ID NO: 339498 - DNA, 30 bp, Artificial Sequence
  Synthetic oligonucleotide
gcaacggatgcgtttaaggtattagggctg

SEQ ID NO: 339499 - DNA, 30 bp, Artificial Sequence
  Synthetic oligonucleotide
ctgtattacatacctttctttcacgggctg

SEQ ID NO: 339500 - DNA, 30 bp, Artificial Sequence
  Synthetic oligonucleotide
actagaatgtaactacggcacttcgggctg

SEQ ID NO: 339501 - DNA, 30 bp, Artificial Sequence
  Synthetic oligonucleotide
taggggtcaccatgcgaagccggggggctg

SEQ ID NO: 339502 - DNA, 30 bp, Artificial Sequence
  Synthetic oligonucleotide
ggcactttaggaggcacttactgggggctg

SEQ ID NO: 339503 - DNA, 30 bp, Artificial Sequence
  Synthetic oligonucleotide
ggcggcgtaccacgccacccaaaatggctg

SEQ ID NO: 339504 - DNA, 30 bp, Artificial Sequence
  Synthetic oligonucleotide
gcagaaattaagagttatttaacatggctg

SEQ ID NO: 339505 - DNA, 30 bp, Artificial Sequence
  Synthetic oligonucleotide
tgatcaggttggccatcgtctcgatggctg

SEQ ID NO: 339506 - DNA, 30 bp, Artificial Sequence
  Synthetic oligonucleotide
atgtatctaaaggtgcgagacggatggctg

SEQ ID NO: 339507 - DNA, 30 bp, Artificial Sequence
  Synthetic oligonucleotide
aaaggtttgatagtggctcgccagtggctg

SEQ ID NO: 339508 - DNA, 30 bp, Artificial Sequence
  Synthetic oligonucleotide
gaccatagtgcttgttgtgcttagtggctg

SEQ ID NO: 339509 - DNA, 30 bp, Artificial Sequence
  Synthetic oligonucleotide
ggttatgtccaagctgtaccatggtggctg

SEQ ID NO: 339510 - DNA, 30 bp, Artificial Sequence
  Synthetic oligonucleotide
cgtgtgaccccggctgttggttctatgctg

SEQ ID NO: 339511 - DNA, 30 bp, Artificial Sequence
  Synthetic oligonucleotide
cccaatttcccacggttcagaacactgctg

SEQ ID NO: 339512 - DNA, 30 bp, Artificial Sequence
  Synthetic oligonucleotide
cttttcccaaatccatcgctagtcctgctg

SEQ ID NO: 339513 - DNA, 30 bp, Artificial Sequence
  Synthetic oligonucleotide
gatcaagcgtagtaaatacgtacgctgctg

SEQ ID NO: 339514 - DNA, 30 bp, Artificial Sequence
  Synthetic oligonucleotide
gttgggcttaactgggaaattggagtgctg

SEQ ID NO: 339515 - DNA, 30 bp, Artificial Sequence
  Synthetic oligonucleotide
tggacctgcatcagtctcagtgatgtgctg

SEQ ID NO: 339516 - DNA, 30 bp, Artificial Sequence
  Synthetic oligonucleotide
attcgatagggccttggaaactgtgtgctg

SEQ ID NO: 339517 - DNA, 30 bp, Artificial Sequence
  Synthetic oligonucleotide
atcgaacattgtgtcgattagattgtgctg

SEQ ID NO: 339518 - DNA, 30 bp, Artificial Sequence
  Synthetic oligonucleotide
ttactgcgtcgttcagtaaggaccttgctg

SEQ ID NO: 339519 - DNA, 30 bp, Artificial Sequence
  Synthetic oligonucleotide
ccagccccattgatatcagtaacgttgctg

SEQ ID NO: 339520 - DNA, 30 bp, Artificial Sequence
  Synthetic oligonucleotide
ctggtgcgtccttaaattttctcgttgctg

SEQ ID NO: 339521 - DNA, 30 bp, Artificial Sequence
  Synthetic oligonucleotide
ggacctggattgggtccagaggttttgctg

SEQ ID NO: 339522 - DNA, 30 bp, Artificial Sequence
  Synthetic oligonucleotide
ctactagatgggacgttagcacctaatctg

SEQ ID NO: 339523 - DNA, 30 bp, Artificial Sequence
  Synthetic oligonucleotide
gatattagcaaactgtgacaaagtaatctg

SEQ ID NO: 339524 - DNA, 30 bp, Artificial Sequence
  Synthetic oligonucleotide
ctgcgataaccttccctggtacgtaatctg

SEQ ID NO: 339525 - DNA, 30 bp, Artificial Sequence
  Synthetic oligonucleotide
acctgcaccttaaggtgtcccacacatctg

SEQ ID NO: 339526 - DNA, 30 bp, Artificial Sequence
  Synthetic oligonucleotide
cgctaataccgagtggaacgcagacatctg

SEQ ID NO: 339527 - DNA, 30 bp, Artificial Sequence
  Synthetic oligonucleotide
taacactagcccaaggtacagtaccatctg

SEQ ID NO: 339528 - DNA, 30 bp, Artificial Sequence
  Synthetic oligonucleotide
tcaaaaacgcaccttacggcgtagcatctg

SEQ ID NO: 339529 - DNA, 30 bp, Artificial Sequence
  Synthetic oligonucleotide
ggactacaagagggggtgttggcgcatctg

SEQ ID NO: 339530 - DNA, 30 bp, Artificial Sequence
  Synthetic oligonucleotide
acttgcacgagagcctgtggattgcatctg

SEQ ID NO: 339531 - DNA, 30 bp, Artificial Sequence
  Synthetic oligonucleotide
tccatgaaaatctttttttagcatcatctg

SEQ ID NO: 339532 - DNA, 30 bp, Artificial Sequence
  Synthetic oligonucleotide
ttagtaactaactatagaggagatcatctg

SEQ ID NO: 339533 - DNA, 30 bp, Artificial Sequence
  Synthetic oligonucleotide
acagttccggtcagacggttgcaagatctg

SEQ ID NO: 339534 - DNA, 30 bp, Artificial Sequence
  Synthetic oligonucleotide
attctccccacgtggcgtcagcgagatctg

SEQ ID NO: 339535 - DNA, 30 bp, Artificial Sequence
  Synthetic oligonucleotide
tgccaaaccgtcatcatccgacgtgatctg

SEQ ID NO: 339536 - DNA, 30 bp, Artificial Sequence
  Synthetic oligonucleotide
ctaacatgggttccacccgtggactatctg

SEQ ID NO: 339537 - DNA, 30 bp, Artificial Sequence
  Synthetic oligonucleotide
gtgacctgagagtctccgtcagtttatctg

SEQ ID NO: 339538 - DNA, 30 bp, Artificial Sequence
  Synthetic oligonucleotide
acaaactcttccatgaagtccgtttatctg

SEQ ID NO: 339539 - DNA, 30 bp, Artificial Sequence
  Synthetic oligonucleotide
cgtttatcacacaaggccgtcttttatctg

SEQ ID NO: 339540 - DNA, 30 bp, Artificial Sequence
  Synthetic oligonucleotide
gtcgcagacccaacgatcgtgtaaactctg

SEQ ID NO: 339541 - DNA, 30 bp, Artificial Sequence
  Synthetic oligonucleotide
tcacgacgccacagatttttgttcactctg

SEQ ID NO: 339542 - DNA, 30 bp, Artificial Sequence
  Synthetic oligonucleotide
agagcctgcgagtggttatataatactctg

SEQ ID NO: 339543 - DNA, 30 bp, Artificial Sequence
  Synthetic oligonucleotide
ctaacgttgaagtgcgacggggcgcctctg

SEQ ID NO: 339544 - DNA, 30 bp, Artificial Sequence
  Synthetic oligonucleotide
acgtgggagagagcgctgtaatcgcctctg

SEQ ID NO: 339545 - DNA, 30 bp, Artificial Sequence
  Synthetic oligonucleotide
tgtgatcgatttggatatgggaggcctctg

SEQ ID NO: 339546 - DNA, 30 bp, Artificial Sequence
  Synthetic oligonucleotide
ggtcctcttcgcgtctgggcgtgtcctctg

SEQ ID NO: 339547 - DNA, 30 bp, Artificial Sequence
  Synthetic oligonucleotide
tgtagcacgcgagtcagcgtacgagctctg

SEQ ID NO: 339548 - DNA, 30 bp, Artificial Sequence
  Synthetic oligonucleotide
tgtttcaagtaagatatgctcgtagctctg

SEQ ID NO: 339549 - DNA, 30 bp, Artificial Sequence
  Synthetic oligonucleotide
gatccaaacaacactagtcttaatgctctg

SEQ ID NO: 339550 - DNA, 30 bp, Artificial Sequence
  Synthetic oligonucleotide
tgttcaatccgcatgggaggcagtgctctg

SEQ ID NO: 339551 - DNA, 30 bp, Artificial Sequence
  Synthetic oligonucleotide
gacggaaatagaacagcgtcgggtgctctg

SEQ ID NO: 339552 - DNA, 30 bp, Artificial Sequence
  Synthetic oligonucleotide
agagtccttacaagttatgtaacatctctg

SEQ ID NO: 339553 - DNA, 30 bp, Artificial Sequence
  Synthetic oligonucleotide
tgctaatgtttctagattggtctatctctg

SEQ ID NO: 339554 - DNA, 30 bp, Artificial Sequence
  Synthetic oligonucleotide
gaatctatacacagtaaggatcactctctg

SEQ ID NO: 339555 - DNA, 30 bp, Artificial Sequence
  Synthetic oligonucleotide
cggatagccgataaggtcgtttactctctg

SEQ ID NO: 339556 - DNA, 30 bp, Artificial Sequence
  Synthetic oligonucleotide
atttaaagagattcgccccgccagtctctg

SEQ ID NO: 339557 - DNA, 30 bp, Artificial Sequence
  Synthetic oligonucleotide
actctcagggctcacaggggcaattctctg

SEQ ID NO: 339558 - DNA, 30 bp, Artificial Sequence
  Synthetic oligonucleotide
ggccgccttgactcgagcagaccttctctg

SEQ ID NO: 339559 - DNA, 30 bp, Artificial Sequence
  Synthetic oligonucleotide
tattcagatgcataagtgcgatccagtctg

SEQ ID NO: 339560 - DNA, 30 bp, Artificial Sequence
  Synthetic oligonucleotide
ggcgtgtgctgtttaagctctttgagtctg

SEQ ID NO: 339561 - DNA, 30 bp, Artificial Sequence
  Synthetic oligonucleotide
tgtaaacaatgggtaatcgcttcacgtctg

SEQ ID NO: 339562 - DNA, 30 bp, Artificial Sequence
  Synthetic oligonucleotide
acagacccttgactgattccttatcgtctg

SEQ ID NO: 339563 - DNA, 30 bp, Artificial Sequence
  Synthetic oligonucleotide
taggatttgtaagcaaagataattcgtctg

SEQ ID NO: 339564 - DNA, 30 bp, Artificial Sequence
  Synthetic oligonucleotide
ccaggcgcagggatttaaggagacggtctg

SEQ ID NO: 339565 - DNA, 30 bp, Artificial Sequence
  Synthetic oligonucleotide
ctggtactaatgcagtcgcctgttggtctg

SEQ ID NO: 339566 - DNA, 30 bp, Artificial Sequence
  Synthetic oligonucleotide
gttactgggaagagggcatccggctgtctg

SEQ ID NO: 339567 - DNA, 30 bp, Artificial Sequence
  Synthetic oligonucleotide
ttgctgagatcctggggcgctacgtgtctg

SEQ ID NO: 339568 - DNA, 30 bp, Artificial Sequence
  Synthetic oligonucleotide
atacaattcgatacgcgaacggattgtctg

SEQ ID NO: 339569 - DNA, 30 bp, Artificial Sequence
  Synthetic oligonucleotide
agtgttcgttttatctcattgcccattctg

SEQ ID NO: 339570 - DNA, 30 bp, Artificial Sequence
  Synthetic oligonucleotide
cgtccccagactgcagatgaaagcattctg

SEQ ID NO: 339571 - DNA, 30 bp, Artificial Sequence
  Synthetic oligonucleotide
caaaagacccgagtcatgggacgcattctg

SEQ ID NO: 339572 - DNA, 30 bp, Artificial Sequence
  Synthetic oligonucleotide
aaccgtggaccgtgggtcactatcattctg

SEQ ID NO: 339573 - DNA, 28 bp, Artificial Sequence
  Synthetic oligonucleotide
ccggcttaccagcattaatcagattctg

SEQ ID NO: 339574 - DNA, 30 bp, Artificial Sequence
  Synthetic oligonucleotide
tgctacgcgacaaatcacgcgacgattctg

SEQ ID NO: 339575 - DNA, 30 bp, Artificial Sequence
  Synthetic oligonucleotide
cttatacacgaagtagaggtcttgattctg

SEQ ID NO: 339576 - DNA, 30 bp, Artificial Sequence
  Synthetic oligonucleotide
tagtatgttaatacggggagttgtattctg

SEQ ID NO: 339577 - DNA, 30 bp, Artificial Sequence
  Synthetic oligonucleotide
agcccgttaccgcgacgaaatattattctg

SEQ ID NO: 339578 - DNA, 30 bp, Artificial Sequence
  Synthetic oligonucleotide
gtgaaaagtatggatatcgttctacttctg

SEQ ID NO: 339579 - DNA, 30 bp, Artificial Sequence
  Synthetic oligonucleotide
aaccgacagatacggctctgattacttctg

SEQ ID NO: 339580 - DNA, 30 bp, Artificial Sequence
  Synthetic oligonucleotide
tcagggttaattggctcctattgccttctg

SEQ ID NO: 339581 - DNA, 30 bp, Artificial Sequence
  Synthetic oligonucleotide
cgtgccttgtaaccagacgaaaatcttctg

SEQ ID NO: 339582 - DNA, 30 bp, Artificial Sequence
  Synthetic oligonucleotide
ctgtttgtgggtttcggattccatcttctg

SEQ ID NO: 339583 - DNA, 30 bp, Artificial Sequence
  Synthetic oligonucleotide
ttcaacaagcaaaccggatatagtcttctg

SEQ ID NO: 339584 - DNA, 30 bp, Artificial Sequence
  Synthetic oligonucleotide
caccagaatgatatattcagacgtcttctg

SEQ ID NO: 339585 - DNA, 30 bp, Artificial Sequence
  Synthetic oligonucleotide
tgccactctttcctataagtgggcgttctg

SEQ ID NO: 339586 - DNA, 30 bp, Artificial Sequence
  Synthetic oligonucleotide
tacacattgaaactgcgagatcatgttctg

SEQ ID NO: 339587 - DNA, 30 bp, Artificial Sequence
  Synthetic oligonucleotide
agcggagtatatcagagatccggtgttctg

SEQ ID NO: 339588 - DNA, 30 bp, Artificial Sequence
  Synthetic oligonucleotide
tacaaggacactttaaaaaggtgtgttctg

SEQ ID NO: 339589 - DNA, 30 bp, Artificial Sequence
  Synthetic oligonucleotide
gctaagaacacaagagagggttgtgttctg

SEQ ID NO: 339590 - DNA, 30 bp, Artificial Sequence
  Synthetic oligonucleotide
ggcggccgcccagtttcctcctttgttctg

SEQ ID NO: 339591 - DNA, 30 bp, Artificial Sequence
  Synthetic oligonucleotide
aagttattaggatgtataggtgtatttctg

SEQ ID NO: 339592 - DNA, 30 bp, Artificial Sequence
  Synthetic oligonucleotide
caaagcttaaacgctgaaactatctttctg

SEQ ID NO: 339593 - DNA, 30 bp, Artificial Sequence
  Synthetic oligonucleotide
acgctcacaataatctaagtgcagtttctg

SEQ ID NO: 339594 - DNA, 30 bp, Artificial Sequence
  Synthetic oligonucleotide
ccacgttgtctctagcaatcgaattttctg

SEQ ID NO: 339595 - DNA, 30 bp, Artificial Sequence
  Synthetic oligonucleotide
cgctccaataaccccttcaggccaaaagtg

SEQ ID NO: 339596 - DNA, 30 bp, Artificial Sequence
  Synthetic oligonucleotide
atatccctatattatggagtactaaaagtg

SEQ ID NO: 339597 - DNA, 30 bp, Artificial Sequence
  Synthetic oligonucleotide
taatgccgtactcgaggtgacaccaaagtg

SEQ ID NO: 339598 - DNA, 30 bp, Artificial Sequence
  Synthetic oligonucleotide
aacaagtattcaactttcaacatgaaagtg

SEQ ID NO: 339599 - DNA, 30 bp, Artificial Sequence
  Synthetic oligonucleotide
aaatacgagttgtctagtacgctgaaagtg

SEQ ID NO: 339600 - DNA, 30 bp, Artificial Sequence
  Synthetic oligonucleotide
aaactttatatccgtaagcgtattaaagtg

SEQ ID NO: 339601 - DNA, 30 bp, Artificial Sequence
  Synthetic oligonucleotide
tttcaagaccttaaaatatcatttaaagtg

SEQ ID NO: 339602 - DNA, 30 bp, Artificial Sequence
  Synthetic oligonucleotide
aaaaatcatctgactctcgagcaccaagtg

SEQ ID NO: 339603 - DNA, 30 bp, Artificial Sequence
  Synthetic oligonucleotide
aagattaaggcttactaagagtatcaagtg

SEQ ID NO: 339604 - DNA, 30 bp, Artificial Sequence
  Synthetic oligonucleotide
gcggctggggcgaaatgttgtgacgaagtg

SEQ ID NO: 339605 - DNA, 30 bp, Artificial Sequence
  Synthetic oligonucleotide
ttctactgaatgaaagagggccccgaagtg

SEQ ID NO: 339606 - DNA, 30 bp, Artificial Sequence
  Synthetic oligonucleotide
acccactatcaaccgtcacaaagcgaagtg

SEQ ID NO: 339607 - DNA, 30 bp, Artificial Sequence
  Synthetic oligonucleotide
tatcccatgagatatgtccctcgggaagtg

SEQ ID NO: 339608 - DNA, 30 bp, Artificial Sequence
  Synthetic oligonucleotide
tggtaccgctcaatatatcagctggaagtg

SEQ ID NO: 339609 - DNA, 30 bp, Artificial Sequence
  Synthetic oligonucleotide
cgctgggacatacaattttcaaaataagtg

SEQ ID NO: 339610 - DNA, 30 bp, Artificial Sequence
  Synthetic oligonucleotide
tacatctgtccgtgcccagccgaataagtg

SEQ ID NO: 339611 - DNA, 30 bp, Artificial Sequence
  Synthetic oligonucleotide
ccgggtttagagtattctttcagataagtg

SEQ ID NO: 339612 - DNA, 30 bp, Artificial Sequence
  Synthetic oligonucleotide
gtcttggcaccaaacgggtgagtataagtg

SEQ ID NO: 339613 - DNA, 30 bp, Artificial Sequence
  Synthetic oligonucleotide
caggttagacagacccgcgatcactaagtg

SEQ ID NO: 339614 - DNA, 30 bp, Artificial Sequence
  Synthetic oligonucleotide
aacctacattgagtcttggagtactaagtg

SEQ ID NO: 339615 - DNA, 30 bp, Artificial Sequence
  Synthetic oligonucleotide
atggtaagggatataataacggcctaagtg

SEQ ID NO: 339616 - DNA, 30 bp, Artificial Sequence
  Synthetic oligonucleotide
gcagacggggtgttagatgccaagtaagtg

SEQ ID NO: 339617 - DNA, 30 bp, Artificial Sequence
  Synthetic oligonucleotide
tggggttaccctggggctaaacggtaagtg

SEQ ID NO: 339618 - DNA, 30 bp, Artificial Sequence
  Synthetic oligonucleotide
cggcttgagtctaggtgaactttgtaagtg

SEQ ID NO: 339619 - DNA, 30 bp, Artificial Sequence
  Synthetic oligonucleotide
aaatccgatagcatgaacggacattaagtg

SEQ ID NO: 339620 - DNA, 30 bp, Artificial Sequence
  Synthetic oligonucleotide
gtacacgatgataggtggagtgaaacagtg

SEQ ID NO: 339621 - DNA, 30 bp, Artificial Sequence
  Synthetic oligonucleotide
agtgttcggtcaccgggttacacgacagtg

SEQ ID NO: 339622 - DNA, 30 bp, Artificial Sequence
  Synthetic oligonucleotide
tttgtatttaacgggagactgaatacagtg

SEQ ID NO: 339623 - DNA, 30 bp, Artificial Sequence
  Synthetic oligonucleotide
tctctccgcacgattgtggctattacagtg

SEQ ID NO: 339624 - DNA, 30 bp, Artificial Sequence
  Synthetic oligonucleotide
cggaaactacagatcgggttgtttacagtg

SEQ ID NO: 339625 - DNA, 30 bp, Artificial Sequence
  Synthetic oligonucleotide
gtaagaaagagacgcttgtggggcccagtg

SEQ ID NO: 339626 - DNA, 30 bp, Artificial Sequence
  Synthetic oligonucleotide
gaccatttttaagtggatgcgatgccagtg

SEQ ID NO: 339627 - DNA, 30 bp, Artificial Sequence
  Synthetic oligonucleotide
gccccatgggcgctatgaataggtccagtg

SEQ ID NO: 339628 - DNA, 30 bp, Artificial Sequence
  Synthetic oligonucleotide
acttgtttcagacactcctctggtccagtg

SEQ ID NO: 339629 - DNA, 30 bp, Artificial Sequence
  Synthetic oligonucleotide
cctagtcatgagcatgattgcgttccagtg

SEQ ID NO: 339630 - DNA, 30 bp, Artificial Sequence
  Synthetic oligonucleotide
agagtactaagggcacttttctcagcagtg

SEQ ID NO: 339631 - DNA, 30 bp, Artificial Sequence
  Synthetic oligonucleotide
gtatgttgtccagctgtaaacgaggcagtg

SEQ ID NO: 339632 - DNA, 30 bp, Artificial Sequence
  Synthetic oligonucleotide
gaatggtacatgcccagcacaagggcagtg

SEQ ID NO: 339633 - DNA, 30 bp, Artificial Sequence
  Synthetic oligonucleotide
atcaacttgtgtacgtgttagtctgcagtg

SEQ ID NO: 339634 - DNA, 30 bp, Artificial Sequence
  Synthetic oligonucleotide
ctaacaggaacctctttcctgaagtcagtg

SEQ ID NO: 339635 - DNA, 30 bp, Artificial Sequence
  Synthetic oligonucleotide
tagtttgtgaactaggctgacacgtcagtg

SEQ ID NO: 339636 - DNA, 30 bp, Artificial Sequence
  Synthetic oligonucleotide
gactcacacgcggtacgtgtggtgtcagtg

SEQ ID NO: 339637 - DNA, 30 bp, Artificial Sequence
  Synthetic oligonucleotide
aagaatatgttatagggggtaaattcagtg

SEQ ID NO: 339638 - DNA, 30 bp, Artificial Sequence
  Synthetic oligonucleotide
taaactggggctaggctaaggggttcagtg

SEQ ID NO: 339639 - DNA, 30 bp, Artificial Sequence
  Synthetic oligonucleotide
ggagaccgaaacgcacactttccaagagtg

SEQ ID NO: 339640 - DNA, 30 bp, Artificial Sequence
  Synthetic oligonucleotide
tactgcgtctatcatattcagctcagagtg

SEQ ID NO: 339641 - DNA, 30 bp, Artificial Sequence
  Synthetic oligonucleotide
cggtggaaggtaaatttaactgtcagagtg

SEQ ID NO: 339642 - DNA, 30 bp, Artificial Sequence
  Synthetic oligonucleotide
aactcagtgtgttgcccgctcaggagagtg

SEQ ID NO: 339643 - DNA, 30 bp, Artificial Sequence
  Synthetic oligonucleotide
ttgattagtggtgcccctatcattagagtg

SEQ ID NO: 339644 - DNA, 30 bp, Artificial Sequence
  Synthetic oligonucleotide
ttttaaacaatttccagagacgaacgagtg

SEQ ID NO: 339645 - DNA, 30 bp, Artificial Sequence
  Synthetic oligonucleotide
tatagaactagtgagtgcaaagcacgagtg

SEQ ID NO: 339646 - DNA, 30 bp, Artificial Sequence
  Synthetic oligonucleotide
aatgggtatagtaattcattaagacgagtg

SEQ ID NO: 339647 - DNA, 30 bp, Artificial Sequence
  Synthetic oligonucleotide
gaacgcgcggggcctcaactgacgcgagtg

SEQ ID NO: 339648 - DNA, 30 bp, Artificial Sequence
  Synthetic oligonucleotide
tggaggtatgtcgcacctctgatgcgagtg

SEQ ID NO: 339649 - DNA, 30 bp, Artificial Sequence
  Synthetic oligonucleotide
tataagggcccccaatctgtcttaggagtg

SEQ ID NO: 339650 - DNA, 30 bp, Artificial Sequence
  Synthetic oligonucleotide
ttagaattatctctttggtatttaggagtg

SEQ ID NO: 339651 - DNA, 30 bp, Artificial Sequence
  Synthetic oligonucleotide
cacttcgaacgggcggttcgggggggagtg

SEQ ID NO: 339652 - DNA, 30 bp, Artificial Sequence
  Synthetic oligonucleotide
ctcggtccagcactggcattgtctggagtg

SEQ ID NO: 339653 - DNA, 30 bp, Artificial Sequence
  Synthetic oligonucleotide
agtttcaaaatgaggcacccgtaatgagtg

SEQ ID NO: 339654 - DNA, 30 bp, Artificial Sequence
  Synthetic oligonucleotide
atagtttatagcggaagtaggccatgagtg

SEQ ID NO: 339655 - DNA, 30 bp, Artificial Sequence
  Synthetic oligonucleotide
tcaatagccatttattataaaatatgagtg

SEQ ID NO: 339656 - DNA, 30 bp, Artificial Sequence
  Synthetic oligonucleotide
aacttaggggatgttgtgaggtactgagtg

SEQ ID NO: 339657 - DNA, 30 bp, Artificial Sequence
  Synthetic oligonucleotide
tgcaccacgtcggcttaactagaaatagtg

SEQ ID NO: 339658 - DNA, 30 bp, Artificial Sequence
  Synthetic oligonucleotide
acacggttacacggttagtagtgaatagtg

SEQ ID NO: 339659 - DNA, 30 bp, Artificial Sequence
  Synthetic oligonucleotide
atccaaagggattgtttaccgcacatagtg

SEQ ID NO: 339660 - DNA, 30 bp, Artificial Sequence
  Synthetic oligonucleotide
accgcagcatttcggcgtgtattgatagtg

SEQ ID NO: 339661 - DNA, 30 bp, Artificial Sequence
  Synthetic oligonucleotide
gttggtttgctacgaaaacgccttatagtg

SEQ ID NO: 339662 - DNA, 30 bp, Artificial Sequence
  Synthetic oligonucleotide
gctcaatggcggaaatgcaagtttatagtg

SEQ ID NO: 339663 - DNA, 30 bp, Artificial Sequence
  Synthetic oligonucleotide
tgtttaagcgtgataacactgtttatagtg

SEQ ID NO: 339664 - DNA, 30 bp, Artificial Sequence
  Synthetic oligonucleotide
ggcataggcaagagtagggtaacactagtg

SEQ ID NO: 339665 - DNA, 30 bp, Artificial Sequence
  Synthetic oligonucleotide
gcaagaatattagctatatattggctagtg

SEQ ID NO: 339666 - DNA, 30 bp, Artificial Sequence
  Synthetic oligonucleotide
cgttacttatgcctccgagcaaaagtagtg

SEQ ID NO: 339667 - DNA, 31 bp, Artificial Sequence
  Synthetic oligonucleotide
ttgtgcagtcactagggatcaacaagtagtg

SEQ ID NO: 339668 - DNA, 30 bp, Artificial Sequence
  Synthetic oligonucleotide
atccccaggttcaaagcaagttcagtagtg

SEQ ID NO: 339669 - DNA, 30 bp, Artificial Sequence
  Synthetic oligonucleotide
aagtcatgcaggaacagtgccaacgtagtg

SEQ ID NO: 339670 - DNA, 30 bp, Artificial Sequence
  Synthetic oligonucleotide
tcgaccactgagattctgttttacgtagtg

SEQ ID NO: 339671 - DNA, 30 bp, Artificial Sequence
  Synthetic oligonucleotide
tccggggctcgcacgtggtatggggtagtg

SEQ ID NO: 339672 - DNA, 30 bp, Artificial Sequence
  Synthetic oligonucleotide
aattcaagaacgtcgaggaaaacgttagtg

SEQ ID NO: 339673 - DNA, 30 bp, Artificial Sequence
  Synthetic oligonucleotide
tagtatatactggaggagcataaaaacgtg

SEQ ID NO: 339674 - DNA, 31 bp, Artificial Sequence
  Synthetic oligonucleotide
agtggtccgactttttaatgtggaaaacgtg

SEQ ID NO: 339675 - DNA, 30 bp, Artificial Sequence
  Synthetic oligonucleotide
gtctgggaccatctatttagatcaaacgtg

SEQ ID NO: 339676 - DNA, 30 bp, Artificial Sequence
  Synthetic oligonucleotide
cctgaattgtaccgggcagcatgaaacgtg

SEQ ID NO: 339677 - DNA, 30 bp, Artificial Sequence
  Synthetic oligonucleotide
cggaaacttagctccacgggcctcaacgtg

SEQ ID NO: 339678 - DNA, 30 bp, Artificial Sequence
  Synthetic oligonucleotide
aatcgctgtacgaaaaatttttcgaacgtg

SEQ ID NO: 339679 - DNA, 30 bp, Artificial Sequence
  Synthetic oligonucleotide
cgccaccagatatatcccgtttggaacgtg

SEQ ID NO: 339680 - DNA, 30 bp, Artificial Sequence
  Synthetic oligonucleotide
catacgcaggagctatgcagttttaacgtg

SEQ ID NO: 339681 - DNA, 30 bp, Artificial Sequence
  Synthetic oligonucleotide
tcgaagtaatcgctgatgccgcaccacgtg

SEQ ID NO: 339682 - DNA, 30 bp, Artificial Sequence
  Synthetic oligonucleotide
ggtcttattgtgagagataaagtccacgtg

SEQ ID NO: 339683 - DNA, 30 bp, Artificial Sequence
  Synthetic oligonucleotide
tgtccgttgcatgcggcaggtgtccacgtg

SEQ ID NO: 339684 - DNA, 30 bp, Artificial Sequence
  Synthetic oligonucleotide
gcccaagaactttggtaaattcagcacgtg

SEQ ID NO: 339685 - DNA, 30 bp, Artificial Sequence
  Synthetic oligonucleotide
cgaagtctgtctttactcgcaccagacgtg

SEQ ID NO: 339686 - DNA, 30 bp, Artificial Sequence
  Synthetic oligonucleotide
accgacaccttgtctccatcctgagacgtg

SEQ ID NO: 339687 - DNA, 30 bp, Artificial Sequence
  Synthetic oligonucleotide
tggagaatggagtacatgcggatagacgtg

SEQ ID NO: 339688 - DNA, 30 bp, Artificial Sequence
  Synthetic oligonucleotide
tcgactaaagatccagggaaaatcgacgtg

SEQ ID NO: 339689 - DNA, 30 bp, Artificial Sequence
  Synthetic oligonucleotide
gatctaacgtcaatggcgtttgatgacgtg

SEQ ID NO: 339690 - DNA, 30 bp, Artificial Sequence
  Synthetic oligonucleotide
tatgaatacctagcgtaaaccgctgacgtg

SEQ ID NO: 339691 - DNA, 30 bp, Artificial Sequence
  Synthetic oligonucleotide
taggaaatatattaaatggtaaaatacgtg

SEQ ID NO: 339692 - DNA, 30 bp, Artificial Sequence
  Synthetic oligonucleotide
ttctaaagcgtgatatacttggcatacgtg

SEQ ID NO: 339693 - DNA, 30 bp, Artificial Sequence
  Synthetic oligonucleotide
gtatgctcgcagtctaaatggcagtacgtg

SEQ ID NO: 339694 - DNA, 30 bp, Artificial Sequence
  Synthetic oligonucleotide
tagccacagccaggattcacctcgtacgtg

SEQ ID NO: 339695 - DNA, 30 bp, Artificial Sequence
  Synthetic oligonucleotide
ccgttgtgtacttgactcctcctgtacgtg

SEQ ID NO: 339696 - DNA, 30 bp, Artificial Sequence
  Synthetic oligonucleotide
ttgaaagggtagcaagccaacccttacgtg

SEQ ID NO: 339697 - DNA, 30 bp, Artificial Sequence
  Synthetic oligonucleotide
atatgtgaaactacccgcaccgaaaccgtg

SEQ ID NO: 339698 - DNA, 30 bp, Artificial Sequence
  Synthetic oligonucleotide
tgtatgtactccataactatgacaaccgtg

SEQ ID NO: 339699 - DNA, 30 bp, Artificial Sequence
  Synthetic oligonucleotide
ttgaatattggatctcgactaggaaccgtg

SEQ ID NO: 339700 - DNA, 30 bp, Artificial Sequence
  Synthetic oligonucleotide
ccgtttagacatgaccaaagctgtaccgtg

SEQ ID NO: 339701 - DNA, 30 bp, Artificial Sequence
  Synthetic oligonucleotide
gcaacgcgcgcatgtgacctgtgtaccgtg

SEQ ID NO: 339702 - DNA, 30 bp, Artificial Sequence
  Synthetic oligonucleotide
ggcggggcccgccgtaggtcgccacccgtg

SEQ ID NO: 339703 - DNA, 30 bp, Artificial Sequence
  Synthetic oligonucleotide
attgaatacatgtggcgacgtgcacccgtg

SEQ ID NO: 339704 - DNA, 30 bp, Artificial Sequence
  Synthetic oligonucleotide
atcaattaagtggcaatgcgccagcccgtg

SEQ ID NO: 339705 - DNA, 30 bp, Artificial Sequence
  Synthetic oligonucleotide
atatccactggaagtatcagcgggcccgtg

SEQ ID NO: 339706 - DNA, 30 bp, Artificial Sequence
  Synthetic oligonucleotide
ggggtgcacgtaacattttgggggcccgtg

SEQ ID NO: 339707 - DNA, 30 bp, Artificial Sequence
  Synthetic oligonucleotide
ttcgtattcagaaaatcccttccagccgtg

SEQ ID NO: 339708 - DNA, 30 bp, Artificial Sequence
  Synthetic oligonucleotide
gtaaagtgggtgagacagccctcagccgtg

SEQ ID NO: 339709 - DNA, 30 bp, Artificial Sequence
  Synthetic oligonucleotide
atcccaacacgcttcgggtggtctgccgtg

SEQ ID NO: 339710 - DNA, 30 bp, Artificial Sequence
  Synthetic oligonucleotide
tcggcatctatcgtaggccacaaatccgtg

SEQ ID NO: 339711 - DNA, 30 bp, Artificial Sequence
  Synthetic oligonucleotide
ttaatagggtccacgtttgatcgatccgtg

SEQ ID NO: 339712 - DNA, 30 bp, Artificial Sequence
  Synthetic oligonucleotide
aaccataaacttctgtacctacggtccgtg

SEQ ID NO: 339713 - DNA, 30 bp, Artificial Sequence
  Synthetic oligonucleotide
tttaacttcctttgtcgagagtaaagcgtg

SEQ ID NO: 339714 - DNA, 30 bp, Artificial Sequence
  Synthetic oligonucleotide
tgagtgcctacgcgtttatgagcaagcgtg

SEQ ID NO: 339715 - DNA, 30 bp, Artificial Sequence
  Synthetic oligonucleotide
acgagccatctaataaggtttataagcgtg

SEQ ID NO: 339716 - DNA, 30 bp, Artificial Sequence
  Synthetic oligonucleotide
gggtggccaaccagtagctaaactagcgtg

SEQ ID NO: 339717 - DNA, 30 bp, Artificial Sequence
  Synthetic oligonucleotide
gatccgaagagttaagactggtatcgcgtg

SEQ ID NO: 339718 - DNA, 30 bp, Artificial Sequence
  Synthetic oligonucleotide
gcctgctatcttacatagaggtttcgcgtg

SEQ ID NO: 339719 - DNA, 30 bp, Artificial Sequence
  Synthetic oligonucleotide
actttgctcatggaccctaatctcggcgtg

SEQ ID NO: 339720 - DNA, 30 bp, Artificial Sequence
  Synthetic oligonucleotide
agacccctgtgctgcctgagtaatggcgtg

SEQ ID NO: 339721 - DNA, 30 bp, Artificial Sequence
  Synthetic oligonucleotide
ctgtcgatgtctatccggctaagtggcgtg

SEQ ID NO: 339722 - DNA, 30 bp, Artificial Sequence
  Synthetic oligonucleotide
tgggatctctattgccaacgctcatgcgtg

SEQ ID NO: 339723 - DNA, 30 bp, Artificial Sequence
  Synthetic oligonucleotide
tgttactgccgacagtcatgcgtatgcgtg

SEQ ID NO: 339724 - DNA, 30 bp, Artificial Sequence
  Synthetic oligonucleotide
acggtcctgacgttactatggtcctgcgtg

SEQ ID NO: 339725 - DNA, 30 bp, Artificial Sequence
  Synthetic oligonucleotide
ggtctttcagcagcacttctgagctgcgtg

SEQ ID NO: 339726 - DNA, 30 bp, Artificial Sequence
  Synthetic oligonucleotide
gtaccgcgagtgaggcactctaattgcgtg

SEQ ID NO: 339727 - DNA, 31 bp, Artificial Sequence
  Synthetic oligonucleotide
gaagtgtgaactggacgcagaaatttgcgtg

SEQ ID NO: 339728 - DNA, 30 bp, Artificial Sequence
  Synthetic oligonucleotide
atttccgattccgacccttggatttgcgtg

SEQ ID NO: 339729 - DNA, 30 bp, Artificial Sequence
  Synthetic oligonucleotide
atctggacgcgttcaagttactaaatcgtg

SEQ ID NO: 339730 - DNA, 30 bp, Artificial Sequence
  Synthetic oligonucleotide
taatctgtccgctcactattatggatcgtg

SEQ ID NO: 339731 - DNA, 30 bp, Artificial Sequence
  Synthetic oligonucleotide
attatcctactccgataccctttgatcgtg

SEQ ID NO: 339732 - DNA, 30 bp, Artificial Sequence
  Synthetic oligonucleotide
tcaacacacgccgttaccctctgtatcgtg

SEQ ID NO: 339733 - DNA, 30 bp, Artificial Sequence
  Synthetic oligonucleotide
agcactgggtctttgatataacaactcgtg

SEQ ID NO: 339734 - DNA, 30 bp, Artificial Sequence
  Synthetic oligonucleotide
tgtagggtttgtcccttctgcgccctcgtg

SEQ ID NO: 339735 - DNA, 29 bp, Artificial Sequence
  Synthetic oligonucleotide
agatgataagatcgctgcagagcctcgtg

SEQ ID NO: 339736 - DNA, 30 bp, Artificial Sequence
  Synthetic oligonucleotide
agcattggacgcatataacgttgcctcgtg

SEQ ID NO: 339737 - DNA, 30 bp, Artificial Sequence
  Synthetic oligonucleotide
gccagtcgtttgaattcagaattagtcgtg

SEQ ID NO: 339738 - DNA, 30 bp, Artificial Sequence
  Synthetic oligonucleotide
gctttagtgacacggcatgaatcggtcgtg

SEQ ID NO: 339739 - DNA, 30 bp, Artificial Sequence
  Synthetic oligonucleotide
gagggccaccttcacccgaagcgggtcgtg

SEQ ID NO: 339740 - DNA, 30 bp, Artificial Sequence
  Synthetic oligonucleotide
gcgcgccccagacacgtctgtggggtcgtg

SEQ ID NO: 339741 - DNA, 30 bp, Artificial Sequence
  Synthetic oligonucleotide
ataagcattgaggatttcagctgggtcgtg

SEQ ID NO: 339742 - DNA, 30 bp, Artificial Sequence
  Synthetic oligonucleotide
tttggctatttcgaagttcatatggtcgtg

SEQ ID NO: 339743 - DNA, 30 bp, Artificial Sequence
  Synthetic oligonucleotide
aacatagcctcccggtgtccgttggtcgtg

SEQ ID NO: 339744 - DNA, 30 bp, Artificial Sequence
  Synthetic oligonucleotide
gtccagtagtgcaataaaggatttgtcgtg

SEQ ID NO: 339745 - DNA, 30 bp, Artificial Sequence
  Synthetic oligonucleotide
cggctaagcgactgtcaggcagaattcgtg

SEQ ID NO: 339746 - DNA, 30 bp, Artificial Sequence
  Synthetic oligonucleotide
atagcaaatttcttaaccccaaacttcgtg

SEQ ID NO: 339747 - DNA, 30 bp, Artificial Sequence
  Synthetic oligonucleotide
gttttctgacgaatgttagttcgcttcgtg

SEQ ID NO: 339748 - DNA, 30 bp, Artificial Sequence
  Synthetic oligonucleotide
ctagccatgcaacgatccgcgacgttcgtg

SEQ ID NO: 339749 - DNA, 30 bp, Artificial Sequence
  Synthetic oligonucleotide
taaagacttgtctgccagattgatttcgtg

SEQ ID NO: 339750 - DNA, 30 bp, Artificial Sequence
  Synthetic oligonucleotide
agccgctccctgatagatgtggaaaaggtg

SEQ ID NO: 339751 - DNA, 30 bp, Artificial Sequence
  Synthetic oligonucleotide
agtgcgataagtccgattttcagtaaggtg

SEQ ID NO: 339752 - DNA, 30 bp, Artificial Sequence
  Synthetic oligonucleotide
cgggtggattctatgggtacgtgtaaggtg

SEQ ID NO: 339753 - DNA, 30 bp, Artificial Sequence
  Synthetic oligonucleotide
atgccaggtatatagtatcctttacaggtg

SEQ ID NO: 339754 - DNA, 30 bp, Artificial Sequence
  Synthetic oligonucleotide
caccacgcgccacctcggacctagcaggtg

SEQ ID NO: 339755 - DNA, 30 bp, Artificial Sequence
  Synthetic oligonucleotide
taaggcgctggcgacccgcctacgcaggtg

SEQ ID NO: 339756 - DNA, 30 bp, Artificial Sequence
  Synthetic oligonucleotide
cagtttttacggttgtggattctgcaggtg

SEQ ID NO: 339757 - DNA, 30 bp, Artificial Sequence
  Synthetic oligonucleotide
agaacaagtcccataatagccaatcaggtg

SEQ ID NO: 339758 - DNA, 30 bp, Artificial Sequence
  Synthetic oligonucleotide
gtatgagagctttcagtgtggatcgaggtg

SEQ ID NO: 339759 - DNA, 30 bp, Artificial Sequence
  Synthetic oligonucleotide
ctttgtaagtgtcagagcactacggaggtg

SEQ ID NO: 339760 - DNA, 30 bp, Artificial Sequence
  Synthetic oligonucleotide
tcgaagaatttagtcgatgcacctgaggtg

SEQ ID NO: 339761 - DNA, 30 bp, Artificial Sequence
  Synthetic oligonucleotide
ttgcacatgtagatgatggtcattgaggtg

SEQ ID NO: 339762 - DNA, 30 bp, Artificial Sequence
  Synthetic oligonucleotide
ccccgctcgccgacgccgtgaatataggtg

SEQ ID NO: 339763 - DNA, 30 bp, Artificial Sequence
  Synthetic oligonucleotide
ggcgatttccgtttgcccagcgtataggtg

SEQ ID NO: 339764 - DNA, 30 bp, Artificial Sequence
  Synthetic oligonucleotide
aagtctctgggtgtttacttcgactaggtg

SEQ ID NO: 339765 - DNA, 30 bp, Artificial Sequence
  Synthetic oligonucleotide
gaagggttatcgagtctgggaggctaggtg

SEQ ID NO: 339766 - DNA, 30 bp, Artificial Sequence
  Synthetic oligonucleotide
ccagatatggtgacctctacagagtaggtg

SEQ ID NO: 339767 - DNA, 30 bp, Artificial Sequence
  Synthetic oligonucleotide
gagagatcccttgaccctctaaggtaggtg

SEQ ID NO: 339768 - DNA, 30 bp, Artificial Sequence
  Synthetic oligonucleotide
cggtatacggaagctcgcattacaacggtg

SEQ ID NO: 339769 - DNA, 30 bp, Artificial Sequence
  Synthetic oligonucleotide
catcctggtatgaagtccggagcaacggtg

SEQ ID NO: 339770 - DNA, 30 bp, Artificial Sequence
  Synthetic oligonucleotide
gtcgcgcaagagacctccgggctaacggtg

SEQ ID NO: 339771 - DNA, 30 bp, Artificial Sequence
  Synthetic oligonucleotide
tattatagaaagacgagacgtcccacggtg

SEQ ID NO: 339772 - DNA, 30 bp, Artificial Sequence
  Synthetic oligonucleotide
gtttagatgaagcccagcatgtagacggtg

SEQ ID NO: 339773 - DNA, 30 bp, Artificial Sequence
  Synthetic oligonucleotide
gctgaaagtaggagtttattacggacggtg

SEQ ID NO: 339774 - DNA, 30 bp, Artificial Sequence
  Synthetic oligonucleotide
tcaggcggacgacgtcctgttctgacggtg

SEQ ID NO: 339775 - DNA, 30 bp, Artificial Sequence
  Synthetic oligonucleotide
atacggcataataggttcacctatacggtg

SEQ ID NO: 339776 - DNA, 30 bp, Artificial Sequence
  Synthetic oligonucleotide
gttcatgtcggcaccttgacctaaccggtg

SEQ ID NO: 339777 - DNA, 30 bp, Artificial Sequence
  Synthetic oligonucleotide
tgcgatctcagggaacagttgacaccggtg

SEQ ID NO: 339778 - DNA, 30 bp, Artificial Sequence
  Synthetic oligonucleotide
agtttatctccagttgccctgggaccggtg

SEQ ID NO: 339779 - DNA, 30 bp, Artificial Sequence
  Synthetic oligonucleotide
ctgagacacaagtctcttccattcccggtg

SEQ ID NO: 339780 - DNA, 30 bp, Artificial Sequence
  Synthetic oligonucleotide
tcggcgccagtaactcggcataagccggtg

SEQ ID NO: 339781 - DNA, 30 bp, Artificial Sequence
  Synthetic oligonucleotide
ctttgcgattatatggtcgccgcgccggtg

SEQ ID NO: 339782 - DNA, 30 bp, Artificial Sequence
  Synthetic oligonucleotide
tattgtattgaagtacaattccatccggtg

SEQ ID NO: 339783 - DNA, 30 bp, Artificial Sequence
  Synthetic oligonucleotide
taaaccgggtctttaacctagaaagcggtg

SEQ ID NO: 339784 - DNA, 30 bp, Artificial Sequence
  Synthetic oligonucleotide
acgtctcgcttatgcgatatggaagcggtg

SEQ ID NO: 339785 - DNA, 30 bp, Artificial Sequence
  Synthetic oligonucleotide
taaatatcgtatctaccgctggaagcggtg

SEQ ID NO: 339786 - DNA, 30 bp, Artificial Sequence
  Synthetic oligonucleotide
cagctgcacaacttttaaatttgcgcggtg

SEQ ID NO: 339787 - DNA, 30 bp, Artificial Sequence
  Synthetic oligonucleotide
atttgaggtaaaagcatattactcgcggtg

SEQ ID NO: 339788 - DNA, 30 bp, Artificial Sequence
  Synthetic oligonucleotide
ctgcaatacagctaagaaacacgggcggtg

SEQ ID NO: 339789 - DNA, 30 bp, Artificial Sequence
  Synthetic oligonucleotide
ttcagcaaaccgccattgctcaatgcggtg

SEQ ID NO: 339790 - DNA, 30 bp, Artificial Sequence
  Synthetic oligonucleotide
tctacacgccctcccgcagggcgctcggtg

SEQ ID NO: 339791 - DNA, 30 bp, Artificial Sequence
  Synthetic oligonucleotide
gggaggtgtatatggttatttcagtcggtg

SEQ ID NO: 339792 - DNA, 30 bp, Artificial Sequence
  Synthetic oligonucleotide
ttccatctgagaataagctaataaagggtg

SEQ ID NO: 339793 - DNA, 30 bp, Artificial Sequence
  Synthetic oligonucleotide
tgaatgtatacacagtaatctacgagggtg

SEQ ID NO: 339794 - DNA, 30 bp, Artificial Sequence
  Synthetic oligonucleotide
tattaaccattcgcttttttgtgtagggtg

SEQ ID NO: 339795 - DNA, 30 bp, Artificial Sequence
  Synthetic oligonucleotide
aatgaagactttagttgtggcacacgggtg

SEQ ID NO: 339796 - DNA, 30 bp, Artificial Sequence
  Synthetic oligonucleotide
taagtgatgacgtgatgttcctcccgggtg

SEQ ID NO: 339797 - DNA, 30 bp, Artificial Sequence
  Synthetic oligonucleotide
tgtttgtagcttaactcaattcgccgggtg

SEQ ID NO: 339798 - DNA, 30 bp, Artificial Sequence
  Synthetic oligonucleotide
tgggcctggggtggatgccactcgcgggtg

SEQ ID NO: 339799 - DNA, 30 bp, Artificial Sequence
  Synthetic oligonucleotide
ataaccttggagccaagttctcggcgggtg

SEQ ID NO: 339800 - DNA, 30 bp, Artificial Sequence
  Synthetic oligonucleotide
ccccataggtatacattgggttatcgggtg

SEQ ID NO: 339801 - DNA, 30 bp, Artificial Sequence
  Synthetic oligonucleotide
gccgtaaccgtgccacagcttggtcgggtg

SEQ ID NO: 339802 - DNA, 30 bp, Artificial Sequence
  Synthetic oligonucleotide
caatcaacggaccattagagccttcgggtg

SEQ ID NO: 339803 - DNA, 30 bp, Artificial Sequence
  Synthetic oligonucleotide
tgctcagaacatgaccagaactgaggggtg

SEQ ID NO: 339804 - DNA, 30 bp, Artificial Sequence
  Synthetic oligonucleotide
gtatcaacatgacattacgcgcggggggtg

SEQ ID NO: 339805 - DNA, 30 bp, Artificial Sequence
  Synthetic oligonucleotide
atgtgatgatcctgatgtacactgggggtg

SEQ ID NO: 339806 - DNA, 30 bp, Artificial Sequence
  Synthetic oligonucleotide
cttgctcggcgcccgcgtaggcctggggtg

SEQ ID NO: 339807 - DNA, 30 bp, Artificial Sequence
  Synthetic oligonucleotide
gaaactgtagtgctagaccatttatgggtg

SEQ ID NO: 339808 - DNA, 30 bp, Artificial Sequence
  Synthetic oligonucleotide
gagagcagtgcaaccccaggcgtctgggtg

SEQ ID NO: 339809 - DNA, 30 bp, Artificial Sequence
  Synthetic oligonucleotide
taagcacagacacatcgaacgttgtgggtg

SEQ ID NO: 339810 - DNA, 30 bp, Artificial Sequence
  Synthetic oligonucleotide
gaatgctggccgtctaactacctttgggtg

SEQ ID NO: 339811 - DNA, 30 bp, Artificial Sequence
  Synthetic oligonucleotide
ttcatggtaagtctgcactatacgatggtg

SEQ ID NO: 339812 - DNA, 30 bp, Artificial Sequence
  Synthetic oligonucleotide
ataaaaatctggagcgtgacgtggatggtg

SEQ ID NO: 339813 - DNA, 30 bp, Artificial Sequence
  Synthetic oligonucleotide
ccgcgggttctacgtaaagggtctatggtg

SEQ ID NO: 339814 - DNA, 30 bp, Artificial Sequence
  Synthetic oligonucleotide
aatatgcaaagaggaaacacgtaactggtg

SEQ ID NO: 339815 - DNA, 30 bp, Artificial Sequence
  Synthetic oligonucleotide
taacaatcgttgggagatttccagctggtg

SEQ ID NO: 339816 - DNA, 30 bp, Artificial Sequence
  Synthetic oligonucleotide
tcgccactcaatgacactttgatgctggtg

SEQ ID NO: 339817 - DNA, 30 bp, Artificial Sequence
  Synthetic oligonucleotide
gcactctgttcagcgagagcctctctggtg

SEQ ID NO: 339818 - DNA, 30 bp, Artificial Sequence
  Synthetic oligonucleotide
attgctcaccttcctgtaaaatcagtggtg

SEQ ID NO: 339819 - DNA, 30 bp, Artificial Sequence
  Synthetic oligonucleotide
ccaaaccgaaggggtgaagatccggtggtg

SEQ ID NO: 339820 - DNA, 30 bp, Artificial Sequence
  Synthetic oligonucleotide
cgttagtacatacttctgtgtttggtggtg

SEQ ID NO: 339821 - DNA, 30 bp, Artificial Sequence
  Synthetic oligonucleotide
ttgacggtcacaatggcggggaaattggtg

SEQ ID NO: 339822 - DNA, 30 bp, Artificial Sequence
  Synthetic oligonucleotide
ctaagcatctctctccgaatagaattggtg

SEQ ID NO: 339823 - DNA, 30 bp, Artificial Sequence
  Synthetic oligonucleotide
aatgttggcgctagaagcataacattggtg

SEQ ID NO: 339824 - DNA, 30 bp, Artificial Sequence
  Synthetic oligonucleotide
gtatcaaccgtcactggcacagcattggtg

SEQ ID NO: 339825 - DNA, 30 bp, Artificial Sequence
  Synthetic oligonucleotide
catatgaagaagttgcgggcttccttggtg

SEQ ID NO: 339826 - DNA, 30 bp, Artificial Sequence
  Synthetic oligonucleotide
caagcttgatctggataccagggcttggtg

SEQ ID NO: 339827 - DNA, 30 bp, Artificial Sequence
  Synthetic oligonucleotide
gagtgtgttagtctacaggtattcttggtg

SEQ ID NO: 339828 - DNA, 30 bp, Artificial Sequence
  Synthetic oligonucleotide
cgtacattatgtgcccacctatatttggtg

SEQ ID NO: 339829 - DNA, 30 bp, Artificial Sequence
  Synthetic oligonucleotide
cttgccgaatatgtaaggtacgctttggtg

SEQ ID NO: 339830 - DNA, 30 bp, Artificial Sequence
  Synthetic oligonucleotide
aattgactcactatgtcaagttgcaatgtg

SEQ ID NO: 339831 - DNA, 30 bp, Artificial Sequence
  Synthetic oligonucleotide
aacacaggagtatgggcggcggagaatgtg

SEQ ID NO: 339832 - DNA, 30 bp, Artificial Sequence
  Synthetic oligonucleotide
tcacctcgagaactaacgccggggaatgtg

SEQ ID NO: 339833 - DNA, 30 bp, Artificial Sequence
  Synthetic oligonucleotide
ggttattggattagcaccttcgtgaatgtg

SEQ ID NO: 339834 - DNA, 30 bp, Artificial Sequence
  Synthetic oligonucleotide
aaagctgacaggttcaaaaggcgacatgtg

SEQ ID NO: 339835 - DNA, 30 bp, Artificial Sequence
  Synthetic oligonucleotide
gtacttttcccaaggctaactgcgcatgtg

SEQ ID NO: 339836 - DNA, 30 bp, Artificial Sequence
  Synthetic oligonucleotide
atcacgctggcggctggtaccaggcatgtg

SEQ ID NO: 339837 - DNA, 30 bp, Artificial Sequence
  Synthetic oligonucleotide
tgaagtaattgtttctctatcgtgcatgtg

SEQ ID NO: 339838 - DNA, 30 bp, Artificial Sequence
  Synthetic oligonucleotide
gttgggccaccttagtcctgtcatcatgtg

SEQ ID NO: 339839 - DNA, 30 bp, Artificial Sequence
  Synthetic oligonucleotide
atcgaacaaagggaaatccaaactcatgtg

SEQ ID NO: 339840 - DNA, 30 bp, Artificial Sequence
  Synthetic oligonucleotide
gccaatagtcgagctaacctgcctcatgtg

SEQ ID NO: 339841 - DNA, 30 bp, Artificial Sequence
  Synthetic oligonucleotide
aggtattgtacgctgcctaagggtcatgtg

SEQ ID NO: 339842 - DNA, 30 bp, Artificial Sequence
  Synthetic oligonucleotide
tctaccgagtcaaagggtcttgtggatgtg

SEQ ID NO: 339843 - DNA, 30 bp, Artificial Sequence
  Synthetic oligonucleotide
aacaaaacgggcaccatagcagatgatgtg

SEQ ID NO: 339844 - DNA, 30 bp, Artificial Sequence
  Synthetic oligonucleotide
ccattcttagttagcttgactgatgatgtg

SEQ ID NO: 339845 - DNA, 30 bp, Artificial Sequence
  Synthetic oligonucleotide
tcgtcttttttaaagaggctgagtgatgtg

SEQ ID NO: 339846 - DNA, 30 bp, Artificial Sequence
  Synthetic oligonucleotide
ttcgtgcaggtcaacggtatgtttgatgtg

SEQ ID NO: 339847 - DNA, 30 bp, Artificial Sequence
  Synthetic oligonucleotide
tggtagtgggtgaactcaggtcgctatgtg

SEQ ID NO: 339848 - DNA, 30 bp, Artificial Sequence
  Synthetic oligonucleotide
tctcttcagcaaatgaagactcggtatgtg

SEQ ID NO: 339849 - DNA, 30 bp, Artificial Sequence
  Synthetic oligonucleotide
gctcaatatgcgtggatgtcaatgtatgtg

SEQ ID NO: 339850 - DNA, 30 bp, Artificial Sequence
  Synthetic oligonucleotide
ttcaaaaaatggactcaaggaccttatgtg

SEQ ID NO: 339851 - DNA, 30 bp, Artificial Sequence
  Synthetic oligonucleotide
tcctccaatggaggcccactcatttatgtg

SEQ ID NO: 339852 - DNA, 30 bp, Artificial Sequence
  Synthetic oligonucleotide
ggataggtctggtaacctgttgacactgtg

SEQ ID NO: 339853 - DNA, 31 bp, Artificial Sequence
  Synthetic oligonucleotide
gttgtaatcttagcgcgacaacggcactgtg

SEQ ID NO: 339854 - DNA, 30 bp, Artificial Sequence
  Synthetic oligonucleotide
acgaagcgctgcgttatcgtggggactgtg

SEQ ID NO: 339855 - DNA, 30 bp, Artificial Sequence
  Synthetic oligonucleotide
ctgactctttgcccttattctagagctgtg

SEQ ID NO: 339856 - DNA, 30 bp, Artificial Sequence
  Synthetic oligonucleotide
cagcgtttaatactattgggattcgctgtg

SEQ ID NO: 339857 - DNA, 30 bp, Artificial Sequence
  Synthetic oligonucleotide
ccccaacacacttcttagtttctggctgtg

SEQ ID NO: 339858 - DNA, 30 bp, Artificial Sequence
  Synthetic oligonucleotide
cagctgtaagtgtcatcatggttatctgtg

SEQ ID NO: 339859 - DNA, 29 bp, Artificial Sequence
  Synthetic oligonucleotide
caactcactttgatctgataaagtctgtg

SEQ ID NO: 339860 - DNA, 30 bp, Artificial Sequence
  Synthetic oligonucleotide
aatatcgagaaaccatcctcgtcgtctgtg

SEQ ID NO: 339861 - DNA, 30 bp, Artificial Sequence
  Synthetic oligonucleotide
ttataacttaacggcactctgcggtctgtg

SEQ ID NO: 339862 - DNA, 30 bp, Artificial Sequence
  Synthetic oligonucleotide
aacgagcgaattatatgtgatgattctgtg

SEQ ID NO: 339863 - DNA, 30 bp, Artificial Sequence
  Synthetic oligonucleotide
gatcgccagccgcaagtaagctattctgtg

SEQ ID NO: 339864 - DNA, 30 bp, Artificial Sequence
  Synthetic oligonucleotide
gtaagtcgggacccaatacacagttctgtg

SEQ ID NO: 339865 - DNA, 30 bp, Artificial Sequence
  Synthetic oligonucleotide
cgctatttcaactcatgacatggttctgtg

SEQ ID NO: 339866 - DNA, 30 bp, Artificial Sequence
  Synthetic oligonucleotide
cgatccacatccataacctggctttctgtg

SEQ ID NO: 339867 - DNA, 30 bp, Artificial Sequence
  Synthetic oligonucleotide
tcaaccggccgaactgagtgcgtttctgtg

SEQ ID NO: 339868 - DNA, 29 bp, Artificial Sequence
  Synthetic oligonucleotide
ttgcaccaatcatgttaccggaaagtgtg

SEQ ID NO: 339869 - DNA, 30 bp, Artificial Sequence
  Synthetic oligonucleotide
ccacaaggcttcttacgcaggccaagtgtg

SEQ ID NO: 339870 - DNA, 30 bp, Artificial Sequence
  Synthetic oligonucleotide
ccccatatggtaataaggttcctaagtgtg

SEQ ID NO: 339871 - DNA, 30 bp, Artificial Sequence
  Synthetic oligonucleotide
catgtcttcgtctcggattcattaagtgtg

SEQ ID NO: 339872 - DNA, 30 bp, Artificial Sequence
  Synthetic oligonucleotide
ttccgcttgaacccaggcagtttaagtgtg

SEQ ID NO: 339873 - DNA, 30 bp, Artificial Sequence
  Synthetic oligonucleotide
taggtcacccattcgggccagagcagtgtg

SEQ ID NO: 339874 - DNA, 30 bp, Artificial Sequence
  Synthetic oligonucleotide
tctcatgattaactatacatacgcagtgtg

SEQ ID NO: 339875 - DNA, 30 bp, Artificial Sequence
  Synthetic oligonucleotide
gatcacatcgctatctcataggtcagtgtg

SEQ ID NO: 339876 - DNA, 30 bp, Artificial Sequence
  Synthetic oligonucleotide
tggatatcttgcaatggccctttgagtgtg

SEQ ID NO: 339877 - DNA, 30 bp, Artificial Sequence
  Synthetic oligonucleotide
actcggtctgtaagactaccgcatagtgtg

SEQ ID NO: 339878 - DNA, 30 bp, Artificial Sequence
  Synthetic oligonucleotide
atttagtttttgatcaccccaacccgtgtg

SEQ ID NO: 339879 - DNA, 30 bp, Artificial Sequence
  Synthetic oligonucleotide
attattaccccgagatacattcgccgtgtg

SEQ ID NO: 339880 - DNA, 30 bp, Artificial Sequence
  Synthetic oligonucleotide
gccaccgctgtcacttgctatctccgtgtg

SEQ ID NO: 339881 - DNA, 30 bp, Artificial Sequence
  Synthetic oligonucleotide
cctatggacgattacgttcaatcgcgtgtg

SEQ ID NO: 339882 - DNA, 30 bp, Artificial Sequence
  Synthetic oligonucleotide
gcagatactgtagtggttcaaggtcgtgtg

SEQ ID NO: 339883 - DNA, 30 bp, Artificial Sequence
  Synthetic oligonucleotide
ctatcctgaacggaccacgtcacaggtgtg

SEQ ID NO: 339884 - DNA, 30 bp, Artificial Sequence
  Synthetic oligonucleotide
tcaatacgtttgagttgcggggcaggtgtg

SEQ ID NO: 339885 - DNA, 30 bp, Artificial Sequence
  Synthetic oligonucleotide
gaacacaaccgtttattgcttggaggtgtg

SEQ ID NO: 339886 - DNA, 30 bp, Artificial Sequence
  Synthetic oligonucleotide
attgtactgaatgcaccacctaccggtgtg

SEQ ID NO: 339887 - DNA, 30 bp, Artificial Sequence
  Synthetic oligonucleotide
ggtgtaaacaccaggtatatcctcggtgtg

SEQ ID NO: 339888 - DNA, 30 bp, Artificial Sequence
  Synthetic oligonucleotide
gttcgcttgagtataatcagctatggtgtg

SEQ ID NO: 339889 - DNA, 30 bp, Artificial Sequence
  Synthetic oligonucleotide
ttatgttaaaaagacctgaggagatgtgtg

SEQ ID NO: 339890 - DNA, 30 bp, Artificial Sequence
  Synthetic oligonucleotide
aacctggttctaatttggcacgactgtgtg

SEQ ID NO: 339891 - DNA, 30 bp, Artificial Sequence
  Synthetic oligonucleotide
gccagacccgcactgccgacatgctgtgtg

SEQ ID NO: 339892 - DNA, 30 bp, Artificial Sequence
  Synthetic oligonucleotide
gcttggaagagcttcctcggttgctgtgtg

SEQ ID NO: 339893 - DNA, 30 bp, Artificial Sequence
  Synthetic oligonucleotide
agttgcagggcaccactgcgggagtgtgtg

SEQ ID NO: 339894 - DNA, 30 bp, Artificial Sequence
  Synthetic oligonucleotide
gtgcacaactgagctgtacgagcgtgtgtg

SEQ ID NO: 339895 - DNA, 30 bp, Artificial Sequence
  Synthetic oligonucleotide
gttcaatgatgaacatgttgttggtgtgtg

SEQ ID NO: 339896 - DNA, 30 bp, Artificial Sequence
  Synthetic oligonucleotide
cccgtctccagttattaactaagaattgtg

SEQ ID NO: 339897 - DNA, 30 bp, Artificial Sequence
  Synthetic oligonucleotide
gctgggagctttaacaacgcagtcattgtg

SEQ ID NO: 339898 - DNA, 30 bp, Artificial Sequence
  Synthetic oligonucleotide
tgtggtaacgggtatcaggaattcattgtg

SEQ ID NO: 339899 - DNA, 30 bp, Artificial Sequence
  Synthetic oligonucleotide
caatgtacgacgttatccccaaagattgtg

SEQ ID NO: 339900 - DNA, 30 bp, Artificial Sequence
  Synthetic oligonucleotide
aaggggttttggcaagccgatactattgtg

SEQ ID NO: 339901 - DNA, 30 bp, Artificial Sequence
  Synthetic oligonucleotide
tataaaaaaggctactgctcatctattgtg

SEQ ID NO: 339902 - DNA, 30 bp, Artificial Sequence
  Synthetic oligonucleotide
cagcgaatatagctgctgagacgtattgtg

SEQ ID NO: 339903 - DNA, 30 bp, Artificial Sequence
  Synthetic oligonucleotide
gaaatgaacgcctcgttggtggttattgtg

SEQ ID NO: 339904 - DNA, 30 bp, Artificial Sequence
  Synthetic oligonucleotide
tactcatggatgggaacgcataaacttgtg

SEQ ID NO: 339905 - DNA, 30 bp, Artificial Sequence
  Synthetic oligonucleotide
taggggacgttttggagtcaaggacttgtg

SEQ ID NO: 339906 - DNA, 30 bp, Artificial Sequence
  Synthetic oligonucleotide
tcgttagttaccaactaaagtatacttgtg

SEQ ID NO: 339907 - DNA, 30 bp, Artificial Sequence
  Synthetic oligonucleotide
gctccgttgtgggagcgcgcgctacttgtg

SEQ ID NO: 339908 - DNA, 30 bp, Artificial Sequence
  Synthetic oligonucleotide
gtcggttttaatgtggaaatcgaccttgtg

SEQ ID NO: 339909 - DNA, 30 bp, Artificial Sequence
  Synthetic oligonucleotide
tgcagataaccaccggatagactccttgtg

SEQ ID NO: 339910 - DNA, 30 bp, Artificial Sequence
  Synthetic oligonucleotide
gttgggcactacccttatcaattccttgtg

SEQ ID NO: 339911 - DNA, 30 bp, Artificial Sequence
  Synthetic oligonucleotide
tacagtcccataaggtggtgattcgttgtg

SEQ ID NO: 339912 - DNA, 30 bp, Artificial Sequence
  Synthetic oligonucleotide
catgtgtgatgtcttgacttaccggttgtg

SEQ ID NO: 339913 - DNA, 30 bp, Artificial Sequence
  Synthetic oligonucleotide
atggttcaagtaataactctcttggttgtg

SEQ ID NO: 339914 - DNA, 30 bp, Artificial Sequence
  Synthetic oligonucleotide
cgttcactattgtaccaggtaacatttgtg

SEQ ID NO: 339915 - DNA, 30 bp, Artificial Sequence
  Synthetic oligonucleotide
agctttagggtggggtaatcagcatttgtg

SEQ ID NO: 339916 - DNA, 30 bp, Artificial Sequence
  Synthetic oligonucleotide
acgaacagcgctatgattatgcattttgtg

SEQ ID NO: 339917 - DNA, 30 bp, Artificial Sequence
  Synthetic oligonucleotide
catggtggcacggattgtgtgtgaaaattg

SEQ ID NO: 339918 - DNA, 30 bp, Artificial Sequence
  Synthetic oligonucleotide
gcaatgattaagtctaaagcgataaaattg

SEQ ID NO: 339919 - DNA, 30 bp, Artificial Sequence
  Synthetic oligonucleotide
atccagccatgatgcaccatacacaaattg

SEQ ID NO: 339920 - DNA, 30 bp, Artificial Sequence
  Synthetic oligonucleotide
gaacaccaagctagctatggacgcaaattg

SEQ ID NO: 339921 - DNA, 30 bp, Artificial Sequence
  Synthetic oligonucleotide
agttgggcgcgtagccccagtaagaaattg

SEQ ID NO: 339922 - DNA, 30 bp, Artificial Sequence
  Synthetic oligonucleotide
tacattatctggtgcctgagtaagaaattg

SEQ ID NO: 339923 - DNA, 30 bp, Artificial Sequence
  Synthetic oligonucleotide
agttaaggtttattcttatgtaggaaattg

SEQ ID NO: 339924 - DNA, 30 bp, Artificial Sequence
  Synthetic oligonucleotide
cgaccttccggaaaagttgttgataaattg

SEQ ID NO: 339925 - DNA, 30 bp, Artificial Sequence
  Synthetic oligonucleotide
tgcccagcataacgccatctctataaattg

SEQ ID NO: 339926 - DNA, 30 bp, Artificial Sequence
  Synthetic oligonucleotide
agagtctaacagaagactctcagacaattg

SEQ ID NO: 339927 - DNA, 30 bp, Artificial Sequence
  Synthetic oligonucleotide
accgtagcgggtcggttggaattacaattg

SEQ ID NO: 339928 - DNA, 30 bp, Artificial Sequence
  Synthetic oligonucleotide
gttgtacacgactgcccgaaatatcaattg

SEQ ID NO: 339929 - DNA, 30 bp, Artificial Sequence
  Synthetic oligonucleotide
tacaattgaatgaccaacttgactcaattg

SEQ ID NO: 339930 - DNA, 30 bp, Artificial Sequence
  Synthetic oligonucleotide
taggtcatgtcagcaaaaatacaagaattg

SEQ ID NO: 339931 - DNA, 30 bp, Artificial Sequence
  Synthetic oligonucleotide
ggcgggagagccctccgttggatagaattg

SEQ ID NO: 339932 - DNA, 30 bp, Artificial Sequence
  Synthetic oligonucleotide
tcagccagttaaggagtgtgtatagaattg

SEQ ID NO: 339933 - DNA, 30 bp, Artificial Sequence
  Synthetic oligonucleotide
gaccttcagctagcctagattatagaattg

SEQ ID NO: 339934 - DNA, 30 bp, Artificial Sequence
  Synthetic oligonucleotide
tagcgccccgcaatagatggccgcgaattg

SEQ ID NO: 339935 - DNA, 30 bp, Artificial Sequence
  Synthetic oligonucleotide
ccgagtgggacatcatgtccggcggaattg

SEQ ID NO: 339936 - DNA, 30 bp, Artificial Sequence
  Synthetic oligonucleotide
catgcttggaagacgattagtaaataattg

SEQ ID NO: 339937 - DNA, 30 bp, Artificial Sequence
  Synthetic oligonucleotide
ggaaaccgcacctaggggggtgaataattg

SEQ ID NO: 339938 - DNA, 30 bp, Artificial Sequence
  Synthetic oligonucleotide
cgccatgtgaaagtggttggcacataattg

SEQ ID NO: 339939 - DNA, 30 bp, Artificial Sequence
  Synthetic oligonucleotide
gggtggcgaccaattagtcgtccataattg

SEQ ID NO: 339940 - DNA, 30 bp, Artificial Sequence
  Synthetic oligonucleotide
atcggtgtttcttcgagagacgtataattg

SEQ ID NO: 339941 - DNA, 30 bp, Artificial Sequence
  Synthetic oligonucleotide
atccataccaagcaatatataacgtaattg

SEQ ID NO: 339942 - DNA, 30 bp, Artificial Sequence
  Synthetic oligonucleotide
cttagtgccctcataggccacacgtaattg

SEQ ID NO: 339943 - DNA, 30 bp, Artificial Sequence
  Synthetic oligonucleotide
atatgcgggtgacttatcgttctgtaattg

SEQ ID NO: 339944 - DNA, 30 bp, Artificial Sequence
  Synthetic oligonucleotide
catgttttagcagtgacagatacttaattg

SEQ ID NO: 339945 - DNA, 30 bp, Artificial Sequence
  Synthetic oligonucleotide
ttgcacaagtggtaccaacgttaaacattg

SEQ ID NO: 339946 - DNA, 30 bp, Artificial Sequence
  Synthetic oligonucleotide
aatttagttcggttacagggtctaacattg

SEQ ID NO: 339947 - DNA, 30 bp, Artificial Sequence
  Synthetic oligonucleotide
tcctagacgatacactttgtacgcacattg

SEQ ID NO: 339948 - DNA, 30 bp, Artificial Sequence
  Synthetic oligonucleotide
aaagtgcaggtaacgtggcggaatacattg

SEQ ID NO: 339949 - DNA, 30 bp, Artificial Sequence
  Synthetic oligonucleotide
tgtccgcatacggggaggcaagcaccattg

SEQ ID NO: 339950 - DNA, 30 bp, Artificial Sequence
  Synthetic oligonucleotide
agagttaatgcacacagagatgcaccattg

SEQ ID NO: 339951 - DNA, 30 bp, Artificial Sequence
  Synthetic oligonucleotide
ccattaccgaagccgcagttgaggccattg

SEQ ID NO: 339952 - DNA, 30 bp, Artificial Sequence
  Synthetic oligonucleotide
tatgtattggctaagaactataggccattg

SEQ ID NO: 339953 - DNA, 30 bp, Artificial Sequence
  Synthetic oligonucleotide
gccaggcgacacatattgcagcggccattg

SEQ ID NO: 339954 - DNA, 30 bp, Artificial Sequence
  Synthetic oligonucleotide
tagtacacggatcttcgagggcggccattg

SEQ ID NO: 339955 - DNA, 30 bp, Artificial Sequence
  Synthetic oligonucleotide
ctacatactggcttaaagcgcttgccattg

SEQ ID NO: 339956 - DNA, 30 bp, Artificial Sequence
  Synthetic oligonucleotide
actttactcgtggcgtatttatctccattg

SEQ ID NO: 339957 - DNA, 30 bp, Artificial Sequence
  Synthetic oligonucleotide
ggtctcaagggttatcacaacagtccattg

SEQ ID NO: 339958 - DNA, 30 bp, Artificial Sequence
  Synthetic oligonucleotide
aaagctgacagagccgtcctgcgcgcattg

SEQ ID NO: 339959 - DNA, 30 bp, Artificial Sequence
  Synthetic oligonucleotide
tctcgtaaaccagcattttggtaggcattg

SEQ ID NO: 339960 - DNA, 30 bp, Artificial Sequence
  Synthetic oligonucleotide
gcagaccgagggggttaggatggggcattg

SEQ ID NO: 339961 - DNA, 30 bp, Artificial Sequence
  Synthetic oligonucleotide
tatatgtagattaggtgccactctgcattg

SEQ ID NO: 339962 - DNA, 30 bp, Artificial Sequence
  Synthetic oligonucleotide
gtctaacgctattgtttaaaaggtgcattg

SEQ ID NO: 339963 - DNA, 30 bp, Artificial Sequence
  Synthetic oligonucleotide
ccccccatagagcaattaaaacttgcattg

SEQ ID NO: 339964 - DNA, 30 bp, Artificial Sequence
  Synthetic oligonucleotide
tctgagtcctgttctgtcgagcgatcattg

SEQ ID NO: 339965 - DNA, 30 bp, Artificial Sequence
  Synthetic oligonucleotide
tgcattgctataatagtggggacctcattg

SEQ ID NO: 339966 - DNA, 30 bp, Artificial Sequence
  Synthetic oligonucleotide
aggtaacaacgagccggaacagtctcattg

SEQ ID NO: 339967 - DNA, 30 bp, Artificial Sequence
  Synthetic oligonucleotide
cagaccggcctgtaggagctctagtcattg

SEQ ID NO: 339968 - DNA, 30 bp, Artificial Sequence
  Synthetic oligonucleotide
aaaactcgtcccaacactcaaaggtcattg

SEQ ID NO: 339969 - DNA, 30 bp, Artificial Sequence
  Synthetic oligonucleotide
gtacacgtttaagtctacgcggtgtcattg

SEQ ID NO: 339970 - DNA, 30 bp, Artificial Sequence
  Synthetic oligonucleotide
atccgagaaacgtagctggtgatttcattg

SEQ ID NO: 339971 - DNA, 30 bp, Artificial Sequence
  Synthetic oligonucleotide
tgaataggtgtttgatacgctaaaagattg

SEQ ID NO: 339972 - DNA, 30 bp, Artificial Sequence
  Synthetic oligonucleotide
ttcttccaaagagaatgctggcacagattg

SEQ ID NO: 339973 - DNA, 30 bp, Artificial Sequence
  Synthetic oligonucleotide
ccctaacccgtttggatgaaggacagattg

SEQ ID NO: 339974 - DNA, 30 bp, Artificial Sequence
  Synthetic oligonucleotide
gcctcggcattaatgtggaaaggcagattg

SEQ ID NO: 339975 - DNA, 30 bp, Artificial Sequence
  Synthetic oligonucleotide
attattcacggaagcaacatctcgagattg

SEQ ID NO: 339976 - DNA, 30 bp, Artificial Sequence
  Synthetic oligonucleotide
ccacgcttaatctagagccctgctagattg

SEQ ID NO: 339977 - DNA, 30 bp, Artificial Sequence
  Synthetic oligonucleotide
gtataatagggtcaggagagggcacgattg

SEQ ID NO: 339978 - DNA, 30 bp, Artificial Sequence
  Synthetic oligonucleotide
gcagatattccagagataatggcgcgattg

SEQ ID NO: 339979 - DNA, 30 bp, Artificial Sequence
  Synthetic oligonucleotide
tacttcgttctcgcgaccaacatgcgattg

SEQ ID NO: 339980 - DNA, 30 bp, Artificial Sequence
  Synthetic oligonucleotide
taacagtggccctttgacggcttaggattg

SEQ ID NO: 339981 - DNA, 28 bp, Artificial Sequence
  Synthetic oligonucleotide
aattcacgaagttcatgttaagggattg

SEQ ID NO: 339982 - DNA, 30 bp, Artificial Sequence
  Synthetic oligonucleotide
ctggatcaaatcgaccatgtgttgggattg

SEQ ID NO: 339983 - DNA, 30 bp, Artificial Sequence
  Synthetic oligonucleotide
gtaacaatctctttataagtgacatgattg

SEQ ID NO: 339984 - DNA, 30 bp, Artificial Sequence
  Synthetic oligonucleotide
aagctgcggttcggccgtactctatgattg

SEQ ID NO: 339985 - DNA, 30 bp, Artificial Sequence
  Synthetic oligonucleotide
gacattgtaatcgctgttgtaaggtgattg

SEQ ID NO: 339986 - DNA, 30 bp, Artificial Sequence
  Synthetic oligonucleotide
ttaagctggggagctccggggatgtgattg

SEQ ID NO: 339987 - DNA, 30 bp, Artificial Sequence
  Synthetic oligonucleotide
gcagggttgatcgggacggactattgattg

SEQ ID NO: 339988 - DNA, 30 bp, Artificial Sequence
  Synthetic oligonucleotide
gcatgctcatgagacgcgcaaacttgattg

SEQ ID NO: 339989 - DNA, 30 bp, Artificial Sequence
  Synthetic oligonucleotide
aagtaatggtccctaagttcgtcttgattg

SEQ ID NO: 339990 - DNA, 30 bp, Artificial Sequence
  Synthetic oligonucleotide
aaaaacataagttcgtccgaacgttgattg

SEQ ID NO: 339991 - DNA, 30 bp, Artificial Sequence
  Synthetic oligonucleotide
taccacagaaggcatggaacaaaaatattg

SEQ ID NO: 339992 - DNA, 30 bp, Artificial Sequence
  Synthetic oligonucleotide
aatgtgaattcatttgggtcaagaatattg

SEQ ID NO: 339993 - DNA, 31 bp, Artificial Sequence
  Synthetic oligonucleotide
gctgaattgtaattagcaatgcataatattg

SEQ ID NO: 339994 - DNA, 30 bp, Artificial Sequence
  Synthetic oligonucleotide
acattgtatttcatccccattataatattg

SEQ ID NO: 339995 - DNA, 30 bp, Artificial Sequence
  Synthetic oligonucleotide
tgagtgcatttagcggcaccttccatattg

SEQ ID NO: 339996 - DNA, 30 bp, Artificial Sequence
  Synthetic oligonucleotide
tcacccattgaaattaaccgcgatatattg

SEQ ID NO: 339997 - DNA, 30 bp, Artificial Sequence
  Synthetic oligonucleotide
tacctaggttatagtcctaacactatattg

SEQ ID NO: 339998 - DNA, 30 bp, Artificial Sequence
  Synthetic oligonucleotide
gtagactgcattctgtaatctcctatattg

SEQ ID NO: 339999 - DNA, 30 bp, Artificial Sequence
  Synthetic oligonucleotide
gcagtgtccctgacacagagtagtatattg

SEQ ID NO: 340000 - DNA, 30 bp, Artificial Sequence
  Synthetic oligonucleotide
accaaagcctatcagctgccagttatattg

SEQ ID NO: 340001 - DNA, 30 bp, Artificial Sequence
  Synthetic oligonucleotide
gtaactctggtagggttggtcagactattg

SEQ ID NO: 340002 - DNA, 30 bp, Artificial Sequence
  Synthetic oligonucleotide
ctcggttaaacactcacgagtggactattg

SEQ ID NO: 340003 - DNA, 30 bp, Artificial Sequence
  Synthetic oligonucleotide
gatacaaactctacgtaagggttcctattg

SEQ ID NO: 340004 - DNA, 30 bp, Artificial Sequence
  Synthetic oligonucleotide
ggctggcaacgacactttctggagctattg

SEQ ID NO: 340005 - DNA, 30 bp, Artificial Sequence
  Synthetic oligonucleotide
ggtggaaagggtatgtaccaccggctattg

SEQ ID NO: 340006 - DNA, 30 bp, Artificial Sequence
  Synthetic oligonucleotide
tatatcggtctatcaacctatcggctattg

SEQ ID NO: 340007 - DNA, 30 bp, Artificial Sequence
  Synthetic oligonucleotide
gtacgtcctagctgaccttgaactctattg

SEQ ID NO: 340008 - DNA, 30 bp, Artificial Sequence
  Synthetic oligonucleotide
gcccaatgtccccgggtgtagagtctattg

SEQ ID NO: 340009 - DNA, 30 bp, Artificial Sequence
  Synthetic oligonucleotide
taagttctagcgccggatgaggacgtattg

SEQ ID NO: 340010 - DNA, 30 bp, Artificial Sequence
  Synthetic oligonucleotide
gactgtagaatacgagtcaaaatcgtattg

SEQ ID NO: 340011 - DNA, 30 bp, Artificial Sequence
  Synthetic oligonucleotide
tagtatcggggcacttttaacgcattattg

SEQ ID NO: 340012 - DNA, 30 bp, Artificial Sequence
  Synthetic oligonucleotide
atgctgcccttattggtatgagacttattg

SEQ ID NO: 340013 - DNA, 30 bp, Artificial Sequence
  Synthetic oligonucleotide
tttcggtatagtgtcatggccgccttattg

SEQ ID NO: 340014 - DNA, 30 bp, Artificial Sequence
  Synthetic oligonucleotide
gtagggtatctgcgaacgtgtacgttattg

SEQ ID NO: 340015 - DNA, 30 bp, Artificial Sequence
  Synthetic oligonucleotide
aatcctggataccaggtgaacaggttattg

SEQ ID NO: 340016 - DNA, 30 bp, Artificial Sequence
  Synthetic oligonucleotide
ttacagcggcccctaactgggatgttattg

SEQ ID NO: 340017 - DNA, 30 bp, Artificial Sequence
  Synthetic oligonucleotide
cttcaaaatggaagggcagtacatttattg

SEQ ID NO: 340018 - DNA, 30 bp, Artificial Sequence
  Synthetic oligonucleotide
ctaaatgtctatagggcaggttgtttattg

SEQ ID NO: 340019 - DNA, 30 bp, Artificial Sequence
  Synthetic oligonucleotide
ggagtgtctttgcttcctctcaagaacttg

SEQ ID NO: 340020 - DNA, 30 bp, Artificial Sequence
  Synthetic oligonucleotide
aaaaccggatgtaggctttatacgaacttg

SEQ ID NO: 340021 - DNA, 30 bp, Artificial Sequence
  Synthetic oligonucleotide
aaggtaaaaaatcggaggtccgggaacttg

SEQ ID NO: 340022 - DNA, 30 bp, Artificial Sequence
  Synthetic oligonucleotide
tcaggcaagccagatattgcattgaacttg

SEQ ID NO: 340023 - DNA, 30 bp, Artificial Sequence
  Synthetic oligonucleotide
aggccccgcgcaagaggaagttttaacttg

SEQ ID NO: 340024 - DNA, 30 bp, Artificial Sequence
  Synthetic oligonucleotide
ttattagtatgaatacatgatacacacttg

SEQ ID NO: 340025 - DNA, 30 bp, Artificial Sequence
  Synthetic oligonucleotide
gggaatgtagcggctggttacgcacacttg

SEQ ID NO: 340026 - DNA, 30 bp, Artificial Sequence
  Synthetic oligonucleotide
tggtcccgcaatcttaagtgcggacacttg

SEQ ID NO: 340027 - DNA, 30 bp, Artificial Sequence
  Synthetic oligonucleotide
acgcaagaactagagactagccagcacttg

SEQ ID NO: 340028 - DNA, 30 bp, Artificial Sequence
  Synthetic oligonucleotide
agaaaacacttaagttttcggtagcacttg

SEQ ID NO: 340029 - DNA, 30 bp, Artificial Sequence
  Synthetic oligonucleotide
tagtatataggctcatacacgccgcacttg

SEQ ID NO: 340030 - DNA, 30 bp, Artificial Sequence
  Synthetic oligonucleotide
agaaccgggcgttgattttgaaatcacttg

SEQ ID NO: 340031 - DNA, 30 bp, Artificial Sequence
  Synthetic oligonucleotide
gccaagacccgttgccaccgtcatcacttg

SEQ ID NO: 340032 - DNA, 30 bp, Artificial Sequence
  Synthetic oligonucleotide
gcacgcgggtattgctccgtgtaagacttg

SEQ ID NO: 340033 - DNA, 30 bp, Artificial Sequence
  Synthetic oligonucleotide
agcccatttgctccatggtatgtagacttg

SEQ ID NO: 340034 - DNA, 30 bp, Artificial Sequence
  Synthetic oligonucleotide
aggaggggggctcgtcgttacgaggacttg

SEQ ID NO: 340035 - DNA, 30 bp, Artificial Sequence
  Synthetic oligonucleotide
cgcacagcattagactggcagtgtgacttg

SEQ ID NO: 340036 - DNA, 30 bp, Artificial Sequence
  Synthetic oligonucleotide
atttaacagctcgcgagaggtacatacttg

SEQ ID NO: 340037 - DNA, 30 bp, Artificial Sequence
  Synthetic oligonucleotide
gttccctggagacggtgtatctgatacttg

SEQ ID NO: 340038 - DNA, 30 bp, Artificial Sequence
  Synthetic oligonucleotide
agtggaccagtgttcatatccgattacttg

SEQ ID NO: 340039 - DNA, 30 bp, Artificial Sequence
  Synthetic oligonucleotide
ctatgctagcggacggaacaatcttacttg

SEQ ID NO: 340040 - DNA, 30 bp, Artificial Sequence
  Synthetic oligonucleotide
aaggacaggtataaggagtcccgttacttg

SEQ ID NO: 340041 - DNA, 30 bp, Artificial Sequence
  Synthetic oligonucleotide
tataaaatgcagtaatacggaggaaccttg

SEQ ID NO: 340042 - DNA, 30 bp, Artificial Sequence
  Synthetic oligonucleotide
gattgagatacacgtgaacaccacaccttg

SEQ ID NO: 340043 - DNA, 30 bp, Artificial Sequence
  Synthetic oligonucleotide
tccccttgctatacaggttaggataccttg

SEQ ID NO: 340044 - DNA, 30 bp, Artificial Sequence
  Synthetic oligonucleotide
ttactggagattgcaccgtgccgacccttg

SEQ ID NO: 340045 - DNA, 30 bp, Artificial Sequence
  Synthetic oligonucleotide
tcagcaagaaaagtgaataaagttcccttg

SEQ ID NO: 340046 - DNA, 30 bp, Artificial Sequence
  Synthetic oligonucleotide
tatagtgtagcatctaaaatcgacgccttg

SEQ ID NO: 340047 - DNA, 30 bp, Artificial Sequence
  Synthetic oligonucleotide
acaacaaagttagttgctgagacggccttg

SEQ ID NO: 340048 - DNA, 30 bp, Artificial Sequence
  Synthetic oligonucleotide
ttgtgagcggacggcctctttgtggccttg

SEQ ID NO: 340049 - DNA, 30 bp, Artificial Sequence
  Synthetic oligonucleotide
acactggtaaaagagcactgcgttgccttg

SEQ ID NO: 340050 - DNA, 30 bp, Artificial Sequence
  Synthetic oligonucleotide
taaaatcggcgtatatcgttttgatccttg

SEQ ID NO: 340051 - DNA, 30 bp, Artificial Sequence
  Synthetic oligonucleotide
aatctcaaggtaaccaagagcgcctccttg

SEQ ID NO: 340052 - DNA, 30 bp, Artificial Sequence
  Synthetic oligonucleotide
ctgcccggaggatgatcaaaaagctccttg

SEQ ID NO: 340053 - DNA, 30 bp, Artificial Sequence
  Synthetic oligonucleotide
gccaggctagaggtttcaggaatgtccttg

SEQ ID NO: 340054 - DNA, 30 bp, Artificial Sequence
  Synthetic oligonucleotide
aaagagaatggaatcatttggatgtccttg

SEQ ID NO: 340055 - DNA, 30 bp, Artificial Sequence
  Synthetic oligonucleotide
ctcaaagtggctgctccgcagctttccttg

SEQ ID NO: 340056 - DNA, 30 bp, Artificial Sequence
  Synthetic oligonucleotide
cgggagggctgggcggaatctttttccttg

SEQ ID NO: 340057 - DNA, 30 bp, Artificial Sequence
  Synthetic oligonucleotide
cgatctttatgacaaatatggaccagcttg

SEQ ID NO: 340058 - DNA, 30 bp, Artificial Sequence
  Synthetic oligonucleotide
atcaagtcatttagataaactggcagcttg

SEQ ID NO: 340059 - DNA, 30 bp, Artificial Sequence
  Synthetic oligonucleotide
atcgacgtgctcacgcttgacaatagcttg

SEQ ID NO: 340060 - DNA, 30 bp, Artificial Sequence
  Synthetic oligonucleotide
gttggtacctttacagatatagctagcttg

SEQ ID NO: 340061 - DNA, 30 bp, Artificial Sequence
  Synthetic oligonucleotide
atcccgctaagcatgccctcgcaacgcttg

SEQ ID NO: 340062 - DNA, 30 bp, Artificial Sequence
  Synthetic oligonucleotide
ttggcgtttcgtgggggacccggccgcttg

SEQ ID NO: 340063 - DNA, 30 bp, Artificial Sequence
  Synthetic oligonucleotide
gcaatgccgtttcaaggagactaaggcttg

SEQ ID NO: 340064 - DNA, 30 bp, Artificial Sequence
  Synthetic oligonucleotide
atgaaaactgggtattctccgccaggcttg

SEQ ID NO: 340065 - DNA, 30 bp, Artificial Sequence
  Synthetic oligonucleotide
gcggctagaacaggaaattacgcaggcttg

SEQ ID NO: 340066 - DNA, 30 bp, Artificial Sequence
  Synthetic oligonucleotide
acgaccaactacaagtcatccgccggcttg

SEQ ID NO: 340067 - DNA, 30 bp, Artificial Sequence
  Synthetic oligonucleotide
gacacggtattcacctggttcagcggcttg

SEQ ID NO: 340068 - DNA, 30 bp, Artificial Sequence
  Synthetic oligonucleotide
gaagcaacactggctttgctgaggggcttg

SEQ ID NO: 340069 - DNA, 30 bp, Artificial Sequence
  Synthetic oligonucleotide
ccaagtaatatttatatcatcatgtgcttg

SEQ ID NO: 340070 - DNA, 30 bp, Artificial Sequence
  Synthetic oligonucleotide
ttgccttatgagttagaggaggattgcttg

SEQ ID NO: 340071 - DNA, 30 bp, Artificial Sequence
  Synthetic oligonucleotide
ccgtagtttaaatgtagggcaggttgcttg

SEQ ID NO: 340072 - DNA, 30 bp, Artificial Sequence
  Synthetic oligonucleotide
ctgtgccgcactgcctcccagggttgcttg

SEQ ID NO: 340073 - DNA, 30 bp, Artificial Sequence
  Synthetic oligonucleotide
gcccgggtggatcggcacgtgtgttgcttg

SEQ ID NO: 340074 - DNA, 30 bp, Artificial Sequence
  Synthetic oligonucleotide
atatattggtaaatagtgaatcgaatcttg

SEQ ID NO: 340075 - DNA, 30 bp, Artificial Sequence
  Synthetic oligonucleotide
actagttaacggtagtatcgatccatcttg

SEQ ID NO: 340076 - DNA, 30 bp, Artificial Sequence
  Synthetic oligonucleotide
cgagccgagagcaatcaagattgcatcttg

SEQ ID NO: 340077 - DNA, 30 bp, Artificial Sequence
  Synthetic oligonucleotide
ccgtcagggcacgcgggatttgtcatcttg

SEQ ID NO: 340078 - DNA, 30 bp, Artificial Sequence
  Synthetic oligonucleotide
agacggcggccatgaagcatctctatcttg

SEQ ID NO: 340079 - DNA, 30 bp, Artificial Sequence
  Synthetic oligonucleotide
aagtctggggcgatactaacttttatcttg

SEQ ID NO: 340080 - DNA, 30 bp, Artificial Sequence
  Synthetic oligonucleotide
ggctacatatctttgaaagcggcactcttg

SEQ ID NO: 340081 - DNA, 30 bp, Artificial Sequence
  Synthetic oligonucleotide
aaacagcaatgaggagtatagagcctcttg

SEQ ID NO: 340082 - DNA, 30 bp, Artificial Sequence
  Synthetic oligonucleotide
agttcaagaaagattgcgttaagtctcttg

SEQ ID NO: 340083 - DNA, 30 bp, Artificial Sequence
  Synthetic oligonucleotide
gcatgctaaatcatgaaatctcttctcttg

SEQ ID NO: 340084 - DNA, 30 bp, Artificial Sequence
  Synthetic oligonucleotide
tagtataggggttatgacggtaatgtcttg

SEQ ID NO: 340085 - DNA, 30 bp, Artificial Sequence
  Synthetic oligonucleotide
tgcccactgattttattggatgttgtcttg

SEQ ID NO: 340086 - DNA, 30 bp, Artificial Sequence
  Synthetic oligonucleotide
tagatttatcgcaattggtcaggattcttg

SEQ ID NO: 340087 - DNA, 30 bp, Artificial Sequence
  Synthetic oligonucleotide
gtgagttggaacaaagcggccatattcttg

SEQ ID NO: 340088 - DNA, 30 bp, Artificial Sequence
  Synthetic oligonucleotide
agggcggtacgtgctgcctaattattcttg

SEQ ID NO: 340089 - DNA, 30 bp, Artificial Sequence
  Synthetic oligonucleotide
aaaacatctcagtgcatcttttacttcttg

SEQ ID NO: 340090 - DNA, 30 bp, Artificial Sequence
  Synthetic oligonucleotide
acagcaggtccatatatgaacggcttcttg

SEQ ID NO: 340091 - DNA, 30 bp, Artificial Sequence
  Synthetic oligonucleotide
tgatgacggttaatcgcggcactcttcttg

SEQ ID NO: 340092 - DNA, 30 bp, Artificial Sequence
  Synthetic oligonucleotide
gagcagttcgtatggggaatagagttcttg

SEQ ID NO: 340093 - DNA, 30 bp, Artificial Sequence
  Synthetic oligonucleotide
gcacgcagtatcacatctacgtgtttcttg

SEQ ID NO: 340094 - DNA, 30 bp, Artificial Sequence
  Synthetic oligonucleotide
cgttagtcgggtagttatcttcaaaagttg

SEQ ID NO: 340095 - DNA, 30 bp, Artificial Sequence
  Synthetic oligonucleotide
aactcttcagaaattttaggcggcaagttg

SEQ ID NO: 340096 - DNA, 30 bp, Artificial Sequence
  Synthetic oligonucleotide
gtcggtgacatcaatggtgtttgcaagttg

SEQ ID NO: 340097 - DNA, 30 bp, Artificial Sequence
  Synthetic oligonucleotide
ttatgggctgcaccaacgcgtttcaagttg

SEQ ID NO: 340098 - DNA, 30 bp, Artificial Sequence
  Synthetic oligonucleotide
ctatggactattctcgctgcggggaagttg

SEQ ID NO: 340099 - DNA, 30 bp, Artificial Sequence
  Synthetic oligonucleotide
cagaccacctgtggacgtgagtggaagttg

SEQ ID NO: 340100 - DNA, 30 bp, Artificial Sequence
  Synthetic oligonucleotide
cagcaaagatcaaccctgcacatgaagttg

SEQ ID NO: 340101 - DNA, 30 bp, Artificial Sequence
  Synthetic oligonucleotide
cactttcgacgtgatatggcctttaagttg

SEQ ID NO: 340102 - DNA, 30 bp, Artificial Sequence
  Synthetic oligonucleotide
caatcccgagatgagaggcttacgcagttg

SEQ ID NO: 340103 - DNA, 30 bp, Artificial Sequence
  Synthetic oligonucleotide
gctcaatttcaggttataaagtcagagttg

SEQ ID NO: 340104 - DNA, 30 bp, Artificial Sequence
  Synthetic oligonucleotide
tgacttttacaaactctttagctagagttg

SEQ ID NO: 340105 - DNA, 29 bp, Artificial Sequence
  Synthetic oligonucleotide
acttaggaatcagagaatagcgcgagttg

SEQ ID NO: 340106 - DNA, 30 bp, Artificial Sequence
  Synthetic oligonucleotide
ggttatccctgcaattgggccgaggagttg

SEQ ID NO: 340107 - DNA, 30 bp, Artificial Sequence
  Synthetic oligonucleotide
agtccgctgtgatatgcgtagtaggagttg

SEQ ID NO: 340108 - DNA, 30 bp, Artificial Sequence
  Synthetic oligonucleotide
taccagtatacccgattaattatggagttg

SEQ ID NO: 340109 - DNA, 30 bp, Artificial Sequence
  Synthetic oligonucleotide
accttacaatcgagacccggaaatgagttg

SEQ ID NO: 340110 - DNA, 30 bp, Artificial Sequence
  Synthetic oligonucleotide
aattcccagttgcacggagtacgtgagttg

SEQ ID NO: 340111 - DNA, 30 bp, Artificial Sequence
  Synthetic oligonucleotide
ttaccacggggcatttaactgattgagttg

SEQ ID NO: 340112 - DNA, 30 bp, Artificial Sequence
  Synthetic oligonucleotide
aagctaatcactcccgcatctattgagttg

SEQ ID NO: 340113 - DNA, 30 bp, Artificial Sequence
  Synthetic oligonucleotide
aacaaccaaactcatttaatctttgagttg

SEQ ID NO: 340114 - DNA, 30 bp, Artificial Sequence
  Synthetic oligonucleotide
ttgtaaggcacgtataaaacgtaatagttg

SEQ ID NO: 340115 - DNA, 30 bp, Artificial Sequence
  Synthetic oligonucleotide
ccggctttttagggaagtaattactagttg

SEQ ID NO: 340116 - DNA, 30 bp, Artificial Sequence
  Synthetic oligonucleotide
ggtttaggtcctgtggattagtgctagttg

SEQ ID NO: 340117 - DNA, 30 bp, Artificial Sequence
  Synthetic oligonucleotide
acaaataattctctaatcgacgagtagttg

SEQ ID NO: 340118 - DNA, 30 bp, Artificial Sequence
  Synthetic oligonucleotide
caatcgttccggataggaatgtgttagttg

SEQ ID NO: 340119 - DNA, 30 bp, Artificial Sequence
  Synthetic oligonucleotide
acggcgtgctatgtaacgctaatttagttg

SEQ ID NO: 340120 - DNA, 30 bp, Artificial Sequence
  Synthetic oligonucleotide
gtgtgcaggcttttcagctcatcaacgttg

SEQ ID NO: 340121 - DNA, 30 bp, Artificial Sequence
  Synthetic oligonucleotide
ctcggtcccgtaacgtttttcaccacgttg

SEQ ID NO: 340122 - DNA, 30 bp, Artificial Sequence
  Synthetic oligonucleotide
tatggagcctgcagtcacgctccgacgttg

SEQ ID NO: 340123 - DNA, 29 bp, Artificial Sequence
  Synthetic oligonucleotide
gattcacagcgcccggtccgtctacgttg

SEQ ID NO: 340124 - DNA, 30 bp, Artificial Sequence
  Synthetic oligonucleotide
aacaccgttatttgcaaccggataccgttg

SEQ ID NO: 340125 - DNA, 30 bp, Artificial Sequence
  Synthetic oligonucleotide
cttggctagtcctgaaagagggccccgttg

SEQ ID NO: 340126 - DNA, 30 bp, Artificial Sequence
  Synthetic oligonucleotide
ccgaagatcacatttgtcgatcctccgttg

SEQ ID NO: 340127 - DNA, 30 bp, Artificial Sequence
  Synthetic oligonucleotide
aaacaacagagtggtagattgtctccgttg

SEQ ID NO: 340128 - DNA, 30 bp, Artificial Sequence
  Synthetic oligonucleotide
ccatttatctggggcgaaccgggtccgttg

SEQ ID NO: 340129 - DNA, 30 bp, Artificial Sequence
  Synthetic oligonucleotide
tattccgagtaaattgtagattcagcgttg

SEQ ID NO: 340130 - DNA, 30 bp, Artificial Sequence
  Synthetic oligonucleotide
tgacgcccggtccgggggaaactagcgttg

SEQ ID NO: 340131 - DNA, 30 bp, Artificial Sequence
  Synthetic oligonucleotide
gagtaatgtgagtcaggcaacgatgcgttg

SEQ ID NO: 340132 - DNA, 30 bp, Artificial Sequence
  Synthetic oligonucleotide
tatatctaaccgacggtcagatctgcgttg

SEQ ID NO: 340133 - DNA, 30 bp, Artificial Sequence
  Synthetic oligonucleotide
cggtcgataagtctgcgatatccatcgttg

SEQ ID NO: 340134 - DNA, 30 bp, Artificial Sequence
  Synthetic oligonucleotide
ccaccggtcttatcgaacgagtcatcgttg

SEQ ID NO: 340135 - DNA, 30 bp, Artificial Sequence
  Synthetic oligonucleotide
gaatattttagatggtttaattgatcgttg

SEQ ID NO: 340136 - DNA, 30 bp, Artificial Sequence
  Synthetic oligonucleotide
acttgggggctatgtatcatttgatcgttg

SEQ ID NO: 340137 - DNA, 30 bp, Artificial Sequence
  Synthetic oligonucleotide
gatgttcagcatccctggatgcgctcgttg

SEQ ID NO: 340138 - DNA, 30 bp, Artificial Sequence
  Synthetic oligonucleotide
ctcgtacatctacagacaactccgtcgttg

SEQ ID NO: 340139 - DNA, 30 bp, Artificial Sequence
  Synthetic oligonucleotide
agagcgtgacaacgtattacagggtcgttg

SEQ ID NO: 340140 - DNA, 30 bp, Artificial Sequence
  Synthetic oligonucleotide
gaaagcgacgtcgcggaccggttaaggttg

SEQ ID NO: 340141 - DNA, 29 bp, Artificial Sequence
  Synthetic oligonucleotide
gctgaaaagcagcaaaacccacgaggttg

SEQ ID NO: 340142 - DNA, 30 bp, Artificial Sequence
  Synthetic oligonucleotide
gcgttatgtacggtttaatgaaggaggttg

SEQ ID NO: 340143 - DNA, 30 bp, Artificial Sequence
  Synthetic oligonucleotide
ctccatccgctagcaaggatctataggttg

SEQ ID NO: 340144 - DNA, 30 bp, Artificial Sequence
  Synthetic oligonucleotide
ctaagttttgaggggatttggaaccggttg

SEQ ID NO: 340145 - DNA, 30 bp, Artificial Sequence
  Synthetic oligonucleotide
gcgcccccagtcatatctggagaccggttg

SEQ ID NO: 340146 - DNA, 30 bp, Artificial Sequence
  Synthetic oligonucleotide
atattgaatcatcgacaaaggcagcggttg

SEQ ID NO: 340147 - DNA, 30 bp, Artificial Sequence
  Synthetic oligonucleotide
aatatgtctgtcaggagtgtttgtcggttg

SEQ ID NO: 340148 - DNA, 30 bp, Artificial Sequence
  Synthetic oligonucleotide
ctcgtttataagtcctcataataagggttg

SEQ ID NO: 340149 - DNA, 30 bp, Artificial Sequence
  Synthetic oligonucleotide
gtttcgctcgcgtggttggctttagggttg

SEQ ID NO: 340150 - DNA, 30 bp, Artificial Sequence
  Synthetic oligonucleotide
gctggatcctttcaagttggggacgggttg

SEQ ID NO: 340151 - DNA, 30 bp, Artificial Sequence
  Synthetic oligonucleotide
gatagattcagtacaacgatattcgggttg

SEQ ID NO: 340152 - DNA, 30 bp, Artificial Sequence
  Synthetic oligonucleotide
gtaaattgacagtaccgaggtacggggttg

SEQ ID NO: 340153 - DNA, 30 bp, Artificial Sequence
  Synthetic oligonucleotide
tcacggtgcacaatatgcttgagggggttg

SEQ ID NO: 340154 - DNA, 30 bp, Artificial Sequence
  Synthetic oligonucleotide
tggtcggagtccatattggttggggggttg

SEQ ID NO: 340155 - DNA, 30 bp, Artificial Sequence
  Synthetic oligonucleotide
cactgtgcaagcatttgtcaaaaatggttg

SEQ ID NO: 340156 - DNA, 30 bp, Artificial Sequence
  Synthetic oligonucleotide
cccaaagcggtggtgctggacacatggttg

SEQ ID NO: 340157 - DNA, 30 bp, Artificial Sequence
  Synthetic oligonucleotide
atcaggttccttaattgcaggagatggttg

SEQ ID NO: 340158 - DNA, 30 bp, Artificial Sequence
  Synthetic oligonucleotide
tttcaaacttataatagtacgtgatggttg

SEQ ID NO: 340159 - DNA, 30 bp, Artificial Sequence
  Synthetic oligonucleotide
gtgcagctactgctgtgctgtgtctggttg

SEQ ID NO: 340160 - DNA, 30 bp, Artificial Sequence
  Synthetic oligonucleotide
cgacggtcattcttgtcaggaatgtggttg

SEQ ID NO: 340161 - DNA, 30 bp, Artificial Sequence
  Synthetic oligonucleotide
cttacctcgaataaaatgacggtgtggttg

SEQ ID NO: 340162 - DNA, 30 bp, Artificial Sequence
  Synthetic oligonucleotide
atgatgttgccaaatcactaggaaatgttg

SEQ ID NO: 340163 - DNA, 30 bp, Artificial Sequence
  Synthetic oligonucleotide
ccacagttttctacatgagcgaccatgttg

SEQ ID NO: 340164 - DNA, 30 bp, Artificial Sequence
  Synthetic oligonucleotide
gattgtattagtcttaagaaactcatgttg

SEQ ID NO: 340165 - DNA, 30 bp, Artificial Sequence
  Synthetic oligonucleotide
gacgcctgtaactagttagtaaagatgttg

SEQ ID NO: 340166 - DNA, 30 bp, Artificial Sequence
  Synthetic oligonucleotide
agatttaaatggtatctagacaagatgttg

SEQ ID NO: 340167 - DNA, 30 bp, Artificial Sequence
  Synthetic oligonucleotide
ggggttgtcaattcgccgaaggagatgttg

SEQ ID NO: 340168 - DNA, 30 bp, Artificial Sequence
  Synthetic oligonucleotide
tggggagctgagcacccctataatatgttg

SEQ ID NO: 340169 - DNA, 30 bp, Artificial Sequence
  Synthetic oligonucleotide
gacaaccgagtctgtaggatgcatatgttg

SEQ ID NO: 340170 - DNA, 30 bp, Artificial Sequence
  Synthetic oligonucleotide
gtttgagtctcctgtaaacgtgttatgttg

SEQ ID NO: 340171 - DNA, 30 bp, Artificial Sequence
  Synthetic oligonucleotide
gacaaggatatagctgtgtatccactgttg

SEQ ID NO: 340172 - DNA, 30 bp, Artificial Sequence
  Synthetic oligonucleotide
atggttgagggctaaggtttggacctgttg

SEQ ID NO: 340173 - DNA, 30 bp, Artificial Sequence
  Synthetic oligonucleotide
gggtttggctggttacgcccataagtgttg

SEQ ID NO: 340174 - DNA, 30 bp, Artificial Sequence
  Synthetic oligonucleotide
ttttaactcttgggcgcgaaggcagtgttg

SEQ ID NO: 340175 - DNA, 30 bp, Artificial Sequence
  Synthetic oligonucleotide
cgaaccgttaaaatatttctgagagtgttg

SEQ ID NO: 340176 - DNA, 30 bp, Artificial Sequence
  Synthetic oligonucleotide
tgagcgactcataacgagctctgagtgttg

SEQ ID NO: 340177 - DNA, 30 bp, Artificial Sequence
  Synthetic oligonucleotide
gattgcaccgtgtaccacaatacggtgttg

SEQ ID NO: 340178 - DNA, 30 bp, Artificial Sequence
  Synthetic oligonucleotide
ttagctcagatcatcatgtacgcggtgttg

SEQ ID NO: 340179 - DNA, 30 bp, Artificial Sequence
  Synthetic oligonucleotide
gaactaacagttccgttccccggggtgttg

SEQ ID NO: 340180 - DNA, 30 bp, Artificial Sequence
  Synthetic oligonucleotide
ctggccgatcactacactaaaatggtgttg

SEQ ID NO: 340181 - DNA, 30 bp, Artificial Sequence
  Synthetic oligonucleotide
cttcgtcctgatcgaatattatcattgttg

SEQ ID NO: 340182 - DNA, 30 bp, Artificial Sequence
  Synthetic oligonucleotide
tattgctacggcgtcatttcacgattgttg

SEQ ID NO: 340183 - DNA, 30 bp, Artificial Sequence
  Synthetic oligonucleotide
tccccaatttctgccgaaaagctattgttg

SEQ ID NO: 340184 - DNA, 30 bp, Artificial Sequence
  Synthetic oligonucleotide
catatatgtttctagacatgattattgttg

SEQ ID NO: 340185 - DNA, 30 bp, Artificial Sequence
  Synthetic oligonucleotide
aagctacaaccagtgtcatcgggcttgttg

SEQ ID NO: 340186 - DNA, 30 bp, Artificial Sequence
  Synthetic oligonucleotide
gacgtctgaaatagcttccccacgttgttg

SEQ ID NO: 340187 - DNA, 30 bp, Artificial Sequence
  Synthetic oligonucleotide
ttataagtactaacgttctccaatttgttg

SEQ ID NO: 340188 - DNA, 30 bp, Artificial Sequence
  Synthetic oligonucleotide
attggtcagagttgtggattccctttgttg

SEQ ID NO: 340189 - DNA, 30 bp, Artificial Sequence
  Synthetic oligonucleotide
agccggcaaatgttggagtctgctttgttg

SEQ ID NO: 340190 - DNA, 30 bp, Artificial Sequence
  Synthetic oligonucleotide
gcacaacttcaaccgccactaaaaaatttg

SEQ ID NO: 340191 - DNA, 30 bp, Artificial Sequence
  Synthetic oligonucleotide
tccttaaaatcgtgtaagatgcccaatttg

SEQ ID NO: 340192 - DNA, 30 bp, Artificial Sequence
  Synthetic oligonucleotide
ttttatacaatgaggggaattggcaatttg

SEQ ID NO: 340193 - DNA, 30 bp, Artificial Sequence
  Synthetic oligonucleotide
cgtagtctctttgccctagattataatttg

SEQ ID NO: 340194 - DNA, 30 bp, Artificial Sequence
  Synthetic oligonucleotide
cagacgcgtacgtctggtcaaattaatttg

SEQ ID NO: 340195 - DNA, 30 bp, Artificial Sequence
  Synthetic oligonucleotide
tctacggcgttagttggggttagacatttg

SEQ ID NO: 340196 - DNA, 30 bp, Artificial Sequence
  Synthetic oligonucleotide
aacgcgctaccttggttggcattccatttg

SEQ ID NO: 340197 - DNA, 30 bp, Artificial Sequence
  Synthetic oligonucleotide
gggtccggctatacgtttaacttccatttg

SEQ ID NO: 340198 - DNA, 30 bp, Artificial Sequence
  Synthetic oligonucleotide
tgatgttgcaatgctttggccgcgcatttg

SEQ ID NO: 340199 - DNA, 30 bp, Artificial Sequence
  Synthetic oligonucleotide
tatatcgcggtaaggagaacccgtcatttg

SEQ ID NO: 340200 - DNA, 30 bp, Artificial Sequence
  Synthetic oligonucleotide
tatgctaagcggtggtgattctgtcatttg

SEQ ID NO: 340201 - DNA, 30 bp, Artificial Sequence
  Synthetic oligonucleotide
gcgtgtccggcaaaagttatcgtagatttg

SEQ ID NO: 340202 - DNA, 30 bp, Artificial Sequence
  Synthetic oligonucleotide
gaatcgtatgataccggaaggcacgatttg

SEQ ID NO: 340203 - DNA, 30 bp, Artificial Sequence
  Synthetic oligonucleotide
gacagggtcacagttaatgcgacggatttg

SEQ ID NO: 340204 - DNA, 30 bp, Artificial Sequence
  Synthetic oligonucleotide
tgatatatgccggggaatcccagggatttg

SEQ ID NO: 340205 - DNA, 31 bp, Artificial Sequence
  Synthetic oligonucleotide
aacttttgggcgacactggagatgggatttg

SEQ ID NO: 340206 - DNA, 30 bp, Artificial Sequence
  Synthetic oligonucleotide
aggtcatttccatcacccgcattggatttg

SEQ ID NO: 340207 - DNA, 31 bp, Artificial Sequence
  Synthetic oligonucleotide
cattgagcacagatgcctattagttgatttg

SEQ ID NO: 340208 - DNA, 30 bp, Artificial Sequence
  Synthetic oligonucleotide
taggagaagagccggggaagataatatttg

SEQ ID NO: 340209 - DNA, 30 bp, Artificial Sequence
  Synthetic oligonucleotide
cgtagtgggcttaagttatctacatatttg

SEQ ID NO: 340210 - DNA, 30 bp, Artificial Sequence
  Synthetic oligonucleotide
ctaagaattaggtcctctgttagatatttg

SEQ ID NO: 340211 - DNA, 30 bp, Artificial Sequence
  Synthetic oligonucleotide
gtgctgttcgttgtttgggacatatatttg

SEQ ID NO: 340212 - DNA, 30 bp, Artificial Sequence
  Synthetic oligonucleotide
aactattgcgggcgcgcgtatcactatttg

SEQ ID NO: 340213 - DNA, 30 bp, Artificial Sequence
  Synthetic oligonucleotide
gtgtcagactcgggcaaatacacctatttg

SEQ ID NO: 340214 - DNA, 30 bp, Artificial Sequence
  Synthetic oligonucleotide
aaggcgagtcgaagaagccttgtgtatttg

SEQ ID NO: 340215 - DNA, 30 bp, Artificial Sequence
  Synthetic oligonucleotide
gatcaagtcgatttatcattgtgttatttg

SEQ ID NO: 340216 - DNA, 30 bp, Artificial Sequence
  Synthetic oligonucleotide
ttgtggcaagtgtgcaccacggcaactttg

SEQ ID NO: 340217 - DNA, 30 bp, Artificial Sequence
  Synthetic oligonucleotide
gggggaacatcgcagcgggcttgcactttg

SEQ ID NO: 340218 - DNA, 30 bp, Artificial Sequence
  Synthetic oligonucleotide
tatccccatcggattactctctagactttg

SEQ ID NO: 340219 - DNA, 30 bp, Artificial Sequence
  Synthetic oligonucleotide
agagatctgcagcattgcacacatactttg

SEQ ID NO: 340220 - DNA, 30 bp, Artificial Sequence
  Synthetic oligonucleotide
atcgaaagggcgccatctagaggtactttg

SEQ ID NO: 340221 - DNA, 30 bp, Artificial Sequence
  Synthetic oligonucleotide
gacttctgtgagatgtgagggcgacctttg

SEQ ID NO: 340222 - DNA, 30 bp, Artificial Sequence
  Synthetic oligonucleotide
acttaagccgcacttcgaggctctcctttg

SEQ ID NO: 340223 - DNA, 30 bp, Artificial Sequence
  Synthetic oligonucleotide
ataattaggatcgtgggcttggcagctttg

SEQ ID NO: 340224 - DNA, 30 bp, Artificial Sequence
  Synthetic oligonucleotide
cgcaccgtgagttgatttcatgcagctttg

SEQ ID NO: 340225 - DNA, 30 bp, Artificial Sequence
  Synthetic oligonucleotide
ttgcggcatagaatacgcttcagagctttg

SEQ ID NO: 340226 - DNA, 30 bp, Artificial Sequence
  Synthetic oligonucleotide
cttggttgttagaggcctaatggagctttg

SEQ ID NO: 340227 - DNA, 30 bp, Artificial Sequence
  Synthetic oligonucleotide
ataagacgtgacaagttagcggtagctttg

SEQ ID NO: 340228 - DNA, 30 bp, Artificial Sequence
  Synthetic oligonucleotide
ggagacctctcaccccaattgaacgctttg

SEQ ID NO: 340229 - DNA, 30 bp, Artificial Sequence
  Synthetic oligonucleotide
ttgcattacgcattgtgaacaatggctttg

SEQ ID NO: 340230 - DNA, 30 bp, Artificial Sequence
  Synthetic oligonucleotide
cgggtcgaagacaagaattatagatctttg

SEQ ID NO: 340231 - DNA, 30 bp, Artificial Sequence
  Synthetic oligonucleotide
ggagaaagtcagtctcttactgtctctttg

SEQ ID NO: 340232 - DNA, 30 bp, Artificial Sequence
  Synthetic oligonucleotide
ttggagtcgactccattgtggcagtctttg

SEQ ID NO: 340233 - DNA, 30 bp, Artificial Sequence
  Synthetic oligonucleotide
acgtgcaccctaagttcgcaacggtctttg

SEQ ID NO: 340234 - DNA, 30 bp, Artificial Sequence
  Synthetic oligonucleotide
aagataatctgctagacccactggtctttg

SEQ ID NO: 340235 - DNA, 30 bp, Artificial Sequence
  Synthetic oligonucleotide
tgcactatcgcttaagtctctgaaagtttg

SEQ ID NO: 340236 - DNA, 30 bp, Artificial Sequence
  Synthetic oligonucleotide
ctccgtgctatctgcacaaggataagtttg

SEQ ID NO: 340237 - DNA, 30 bp, Artificial Sequence
  Synthetic oligonucleotide
catttcagcgttctgacttgacacagtttg

SEQ ID NO: 340238 - DNA, 30 bp, Artificial Sequence
  Synthetic oligonucleotide
cacttcctaagacgaaccagtcggagtttg

SEQ ID NO: 340239 - DNA, 30 bp, Artificial Sequence
  Synthetic oligonucleotide
ttatgaatccaggatgaaggaattagtttg

SEQ ID NO: 340240 - DNA, 30 bp, Artificial Sequence
  Synthetic oligonucleotide
cgttgaaacgggagcacaccatttagtttg

SEQ ID NO: 340241 - DNA, 30 bp, Artificial Sequence
  Synthetic oligonucleotide
ttcatcccaggtaggccccactcgcgtttg

SEQ ID NO: 340242 - DNA, 30 bp, Artificial Sequence
  Synthetic oligonucleotide
gcgcaagagttactcatctgccggcgtttg

SEQ ID NO: 340243 - DNA, 30 bp, Artificial Sequence
  Synthetic oligonucleotide
tcccgcactccagttcaagttcggcgtttg

SEQ ID NO: 340244 - DNA, 30 bp, Artificial Sequence
  Synthetic oligonucleotide
tgaccacctttcctctgaatagggcgtttg

SEQ ID NO: 340245 - DNA, 30 bp, Artificial Sequence
  Synthetic oligonucleotide
ccaggtaactgtgtgacttcctggcgtttg

SEQ ID NO: 340246 - DNA, 30 bp, Artificial Sequence
  Synthetic oligonucleotide
taaagctatggctgaaggggtcttcgtttg

SEQ ID NO: 340247 - DNA, 30 bp, Artificial Sequence
  Synthetic oligonucleotide
acacattgtaatgtatcaatcccaggtttg

SEQ ID NO: 340248 - DNA, 30 bp, Artificial Sequence
  Synthetic oligonucleotide
ggattgaggaagacggataacgcaggtttg

SEQ ID NO: 340249 - DNA, 30 bp, Artificial Sequence
  Synthetic oligonucleotide
gaattccctacatgtgaggtagcgggtttg

SEQ ID NO: 340250 - DNA, 30 bp, Artificial Sequence
  Synthetic oligonucleotide
cgtatctacgtagccaaagattggggtttg

SEQ ID NO: 340251 - DNA, 30 bp, Artificial Sequence
  Synthetic oligonucleotide
cccttaaaaaggggttacagcttgggtttg

SEQ ID NO: 340252 - DNA, 30 bp, Artificial Sequence
  Synthetic oligonucleotide
ggtctatgataaatggtctttgttggtttg

SEQ ID NO: 340253 - DNA, 30 bp, Artificial Sequence
  Synthetic oligonucleotide
caataggctcgttgacttatagtatgtttg

SEQ ID NO: 340254 - DNA, 30 bp, Artificial Sequence
  Synthetic oligonucleotide
ggaactcatgtagatggtccaggctgtttg

SEQ ID NO: 340255 - DNA, 30 bp, Artificial Sequence
  Synthetic oligonucleotide
aactgaaaggtgagcagtggcccgtgtttg

SEQ ID NO: 340256 - DNA, 30 bp, Artificial Sequence
  Synthetic oligonucleotide
aacggcctcttacatcgagttaggtgtttg

SEQ ID NO: 340257 - DNA, 30 bp, Artificial Sequence
  Synthetic oligonucleotide
tcatgtttatagcgctaccaaccttgtttg

SEQ ID NO: 340258 - DNA, 30 bp, Artificial Sequence
  Synthetic oligonucleotide
tacagtatcggatccgagccttaaattttg

SEQ ID NO: 340259 - DNA, 30 bp, Artificial Sequence
  Synthetic oligonucleotide
atttcgtgtctgcggattcaaggaattttg

SEQ ID NO: 340260 - DNA, 30 bp, Artificial Sequence
  Synthetic oligonucleotide
gagaactctgaatgtgctagagtaattttg

SEQ ID NO: 340261 - DNA, 30 bp, Artificial Sequence
  Synthetic oligonucleotide
ggtcactcttcatggctaaaattaattttg

SEQ ID NO: 340262 - DNA, 30 bp, Artificial Sequence
  Synthetic oligonucleotide
gcgtggggattaacgcctcttaagattttg

SEQ ID NO: 340263 - DNA, 30 bp, Artificial Sequence
  Synthetic oligonucleotide
agaagaccctttctcagaggtacgattttg

SEQ ID NO: 340264 - DNA, 30 bp, Artificial Sequence
  Synthetic oligonucleotide
cagtatctcagaaagtatggcatgattttg

SEQ ID NO: 340265 - DNA, 30 bp, Artificial Sequence
  Synthetic oligonucleotide
tgggatcttcatattctgggtaatattttg

SEQ ID NO: 340266 - DNA, 30 bp, Artificial Sequence
  Synthetic oligonucleotide
tcatgtaagtggtgatcgagtactattttg

SEQ ID NO: 340267 - DNA, 30 bp, Artificial Sequence
  Synthetic oligonucleotide
cgcacaggtggtttctcatttgcccttttg

SEQ ID NO: 340268 - DNA, 30 bp, Artificial Sequence
  Synthetic oligonucleotide
cgacgtatactctattataagcggcttttg

SEQ ID NO: 340269 - DNA, 30 bp, Artificial Sequence
  Synthetic oligonucleotide
gccccttttcgtttagtcgttatgcttttg

SEQ ID NO: 340270 - DNA, 30 bp, Artificial Sequence
  Synthetic oligonucleotide
tgtatcatcagggtctcagcagctcttttg

SEQ ID NO: 340271 - DNA, 30 bp, Artificial Sequence
  Synthetic oligonucleotide
tagcgggacacagaggaatagaaagttttg

SEQ ID NO: 340272 - DNA, 30 bp, Artificial Sequence
  Synthetic oligonucleotide
gggtggcgtcctatttgtgataccgttttg

SEQ ID NO: 340273 - DNA, 30 bp, Artificial Sequence
  Synthetic oligonucleotide
gacaaccaaagcaagcttaggacggttttg

SEQ ID NO: 340274 - DNA, 29 bp, Artificial Sequence
  Synthetic oligonucleotide
cgtggtcgcaacggtaacaatcggttttg

SEQ ID NO: 340275 - DNA, 30 bp, Artificial Sequence
  Synthetic oligonucleotide
ggtgtagcattaattggtgatcatgttttg

SEQ ID NO: 340276 - DNA, 30 bp, Artificial Sequence
  Synthetic oligonucleotide
aaggatactgtcgtacctacggttgttttg

SEQ ID NO: 340277 - DNA, 30 bp, Artificial Sequence
  Synthetic oligonucleotide
tgaatttaatcgcgattgcattcatttttg

SEQ ID NO: 340278 - DNA, 30 bp, Artificial Sequence
  Synthetic oligonucleotide
cgggtactatttttgcatacgagatttttg

SEQ ID NO: 340279 - DNA, 30 bp, Artificial Sequence
  Synthetic oligonucleotide
ccagcgatacgtgtaatgggtgcctttttg

SEQ ID NO: 340280 - DNA, 30 bp, Artificial Sequence
  Synthetic oligonucleotide
ctacctgctggtgggcgtaacatgtttttg

SEQ ID NO: 340281 - DNA, 30 bp, Artificial Sequence
  Synthetic oligonucleotide
ctctatagcaggtggactctggcttttttg

SEQ ID NO: 340282 - DNA, 30 bp, Artificial Sequence
  Synthetic oligonucleotide
tcaacaggaatatacgttagcataaaaaat

SEQ ID NO: 340283 - DNA, 30 bp, Artificial Sequence
  Synthetic oligonucleotide
aagcaagggaccacttccgtactaaaaaat

SEQ ID NO: 340284 - DNA, 30 bp, Artificial Sequence
  Synthetic oligonucleotide
ggaaattaggttctcaagtactgcaaaaat

SEQ ID NO: 340285 - DNA, 30 bp, Artificial Sequence
  Synthetic oligonucleotide
gcctccctcccttgacccttcatcaaaaat

SEQ ID NO: 340286 - DNA, 30 bp, Artificial Sequence
  Synthetic oligonucleotide
caagcaagcaggtttccaaggatcaaaaat

SEQ ID NO: 340287 - DNA, 30 bp, Artificial Sequence
  Synthetic oligonucleotide
gtcgattacgaaagctgggtactcaaaaat

SEQ ID NO: 340288 - DNA, 30 bp, Artificial Sequence
  Synthetic oligonucleotide
gctgagcgtggcgattgaaaggagaaaaat

SEQ ID NO: 340289 - DNA, 30 bp, Artificial Sequence
  Synthetic oligonucleotide
tagttctggttagaccacttggggaaaaat

SEQ ID NO: 340290 - DNA, 30 bp, Artificial Sequence
  Synthetic oligonucleotide
cctcaggagttggtatctaagactaaaaat

SEQ ID NO: 340291 - DNA, 30 bp, Artificial Sequence
  Synthetic oligonucleotide
cgactaatccaatatattacgactaaaaat

SEQ ID NO: 340292 - DNA, 30 bp, Artificial Sequence
  Synthetic oligonucleotide
acttaattcaaactaatttaacgtaaaaat

SEQ ID NO: 340293 - DNA, 30 bp, Artificial Sequence
  Synthetic oligonucleotide
atcccggggtggtcagattgggcacaaaat

SEQ ID NO: 340294 - DNA, 30 bp, Artificial Sequence
  Synthetic oligonucleotide
gcaagtatttacattgctactgaccaaaat

SEQ ID NO: 340295 - DNA, 30 bp, Artificial Sequence
  Synthetic oligonucleotide
gagtataggaacagatgcgtgcgccaaaat

SEQ ID NO: 340296 - DNA, 30 bp, Artificial Sequence
  Synthetic oligonucleotide
cttctccattggctgacagaagtccaaaat

SEQ ID NO: 340297 - DNA, 30 bp, Artificial Sequence
  Synthetic oligonucleotide
tgtctaacaggcgtttatgcgactcaaaat

SEQ ID NO: 340298 - DNA, 30 bp, Artificial Sequence
  Synthetic oligonucleotide
attattgcggacataacgtctgctcaaaat

SEQ ID NO: 340299 - DNA, 30 bp, Artificial Sequence
  Synthetic oligonucleotide
gcatgtcaacaatttggaatttctcaaaat

SEQ ID NO: 340300 - DNA, 30 bp, Artificial Sequence
  Synthetic oligonucleotide
ggtaccgattgttcatgattctgtcaaaat

SEQ ID NO: 340301 - DNA, 30 bp, Artificial Sequence
  Synthetic oligonucleotide
cctataccaggagtcacaaatcttcaaaat

SEQ ID NO: 340302 - DNA, 30 bp, Artificial Sequence
  Synthetic oligonucleotide
tgtcaatgactagtgtgtcatgcagaaaat

SEQ ID NO: 340303 - DNA, 30 bp, Artificial Sequence
  Synthetic oligonucleotide
taaacgccacctatacaacgagtagaaaat

SEQ ID NO: 340304 - DNA, 30 bp, Artificial Sequence
  Synthetic oligonucleotide
ctaagaaccctgttctgcggtaacgaaaat

SEQ ID NO: 340305 - DNA, 30 bp, Artificial Sequence
  Synthetic oligonucleotide
tctggatcatcagcccaggtggtcgaaaat

SEQ ID NO: 340306 - DNA, 30 bp, Artificial Sequence
  Synthetic oligonucleotide
accttgctaatccagaaactataggaaaat

SEQ ID NO: 340307 - DNA, 30 bp, Artificial Sequence
  Synthetic oligonucleotide
tgagaggcatcaatgagtaggatggaaaat

SEQ ID NO: 340308 - DNA, 30 bp, Artificial Sequence
  Synthetic oligonucleotide
tagtagacattgtcaatgcgcggtgaaaat

SEQ ID NO: 340309 - DNA, 30 bp, Artificial Sequence
  Synthetic oligonucleotide
cgatggtgcgttgatgtcagtattgaaaat

SEQ ID NO: 340310 - DNA, 30 bp, Artificial Sequence
  Synthetic oligonucleotide
atggaacgcccgcatgcatgagttgaaaat

SEQ ID NO: 340311 - DNA, 30 bp, Artificial Sequence
  Synthetic oligonucleotide
tagggagatagccaaactctcgaataaaat

SEQ ID NO: 340312 - DNA, 30 bp, Artificial Sequence
  Synthetic oligonucleotide
tatagaggtactagagtcttatcataaaat

SEQ ID NO: 340313 - DNA, 30 bp, Artificial Sequence
  Synthetic oligonucleotide
cgaaatgctagttagcaacgcctataaaat

SEQ ID NO: 340314 - DNA, 30 bp, Artificial Sequence
  Synthetic oligonucleotide
tcgtttctatgaaatatcggcgcctaaaat

SEQ ID NO: 340315 - DNA, 30 bp, Artificial Sequence
  Synthetic oligonucleotide
aaagccgtgagttattttgagttctaaaat

SEQ ID NO: 340316 - DNA, 30 bp, Artificial Sequence
  Synthetic oligonucleotide
agctcatactccagtgcatattagtaaaat

SEQ ID NO: 340317 - DNA, 30 bp, Artificial Sequence
  Synthetic oligonucleotide
caatggcgacaacctgatcacaggtaaaat

SEQ ID NO: 340318 - DNA, 30 bp, Artificial Sequence
  Synthetic oligonucleotide
ggaccccatatcgtgactgtcgggtaaaat

SEQ ID NO: 340319 - DNA, 30 bp, Artificial Sequence
  Synthetic oligonucleotide
ggtcttcattgtgaaacgtctttgtaaaat

SEQ ID NO: 340320 - DNA, 30 bp, Artificial Sequence
  Synthetic oligonucleotide
gagccgcaggctaaactcattacttaaaat

SEQ ID NO: 340321 - DNA, 30 bp, Artificial Sequence
  Synthetic oligonucleotide
ttcgacaggtggtgcaaacattacacaaat

SEQ ID NO: 340322 - DNA, 30 bp, Artificial Sequence
  Synthetic oligonucleotide
tgagtggttgcccacggcttcctgacaaat

SEQ ID NO: 340323 - DNA, 30 bp, Artificial Sequence
  Synthetic oligonucleotide
cgcccagagggtcccggcgtcccaccaaat

SEQ ID NO: 340324 - DNA, 30 bp, Artificial Sequence
  Synthetic oligonucleotide
ttaggaaagccatttcatctagcaccaaat

SEQ ID NO: 340325 - DNA, 30 bp, Artificial Sequence
  Synthetic oligonucleotide
caccgggaagatgccacattagcagcaaat

SEQ ID NO: 340326 - DNA, 30 bp, Artificial Sequence
  Synthetic oligonucleotide
acgccacagttgcttactggttgagcaaat

SEQ ID NO: 340327 - DNA, 30 bp, Artificial Sequence
  Synthetic oligonucleotide
gtcaatggactgtgggggctgggcgcaaat

SEQ ID NO: 340328 - DNA, 30 bp, Artificial Sequence
  Synthetic oligonucleotide
tacgacatatttgcgcagggaacggcaaat

SEQ ID NO: 340329 - DNA, 30 bp, Artificial Sequence
  Synthetic oligonucleotide
ctgaagattacgccgtgatacccggcaaat

SEQ ID NO: 340330 - DNA, 30 bp, Artificial Sequence
  Synthetic oligonucleotide
tatgcttatgtggcgcttgcgccggcaaat

SEQ ID NO: 340331 - DNA, 30 bp, Artificial Sequence
  Synthetic oligonucleotide
actacaagctatgtttggccggcggcaaat

SEQ ID NO: 340332 - DNA, 30 bp, Artificial Sequence
  Synthetic oligonucleotide
acatgatctgtcctgaggaggcgggcaaat

SEQ ID NO: 340333 - DNA, 30 bp, Artificial Sequence
  Synthetic oligonucleotide
agtggtctcctcccatatggattggcaaat

SEQ ID NO: 340334 - DNA, 30 bp, Artificial Sequence
  Synthetic oligonucleotide
gtcgacctaggtttttgggcttctgcaaat

SEQ ID NO: 340335 - DNA, 30 bp, Artificial Sequence
  Synthetic oligonucleotide
cctttcgccgttcatcaataagcatcaaat

SEQ ID NO: 340336 - DNA, 30 bp, Artificial Sequence
  Synthetic oligonucleotide
tacccaccgcagccagcttcaagctcaaat

SEQ ID NO: 340337 - DNA, 30 bp, Artificial Sequence
  Synthetic oligonucleotide
cacgtccccgcaaaggccacgcgctcaaat

SEQ ID NO: 340338 - DNA, 31 bp, Artificial Sequence
  Synthetic oligonucleotide
gtttaccccgttgagtaatcactagtcaaat

SEQ ID NO: 340339 - DNA, 30 bp, Artificial Sequence
  Synthetic oligonucleotide
cctaccggaagcactggtacaatgtcaaat

SEQ ID NO: 340340 - DNA, 30 bp, Artificial Sequence
  Synthetic oligonucleotide
gataccatagacccgcatttggtgtcaaat

SEQ ID NO: 340341 - DNA, 30 bp, Artificial Sequence
  Synthetic oligonucleotide
ttgtgctattggctactcgtcgattcaaat

SEQ ID NO: 340342 - DNA, 30 bp, Artificial Sequence
  Synthetic oligonucleotide
tgcatactgatgacttggtttgaaagaaat

SEQ ID NO: 340343 - DNA, 30 bp, Artificial Sequence
  Synthetic oligonucleotide
ttggatcgagatggcgacatagcaagaaat

SEQ ID NO: 340344 - DNA, 30 bp, Artificial Sequence
  Synthetic oligonucleotide
tgactttggtagaccacgggaaacagaaat

SEQ ID NO: 340345 - DNA, 30 bp, Artificial Sequence
  Synthetic oligonucleotide
gggggtacaaattcggaacgcgacagaaat

SEQ ID NO: 340346 - DNA, 30 bp, Artificial Sequence
  Synthetic oligonucleotide
attgacgtacgggtttcactcctcagaaat

SEQ ID NO: 340347 - DNA, 30 bp, Artificial Sequence
  Synthetic oligonucleotide
gtctggtgggcgatcaggacctctagaaat

SEQ ID NO: 340348 - DNA, 30 bp, Artificial Sequence
  Synthetic oligonucleotide
aggcccgtggcgagaattacgtcacgaaat

SEQ ID NO: 340349 - DNA, 30 bp, Artificial Sequence
  Synthetic oligonucleotide
atgacccgtgcgttatggatcaagcgaaat

SEQ ID NO: 340350 - DNA, 30 bp, Artificial Sequence
  Synthetic oligonucleotide
taggtaccggcagggttccctatgcgaaat

SEQ ID NO: 340351 - DNA, 30 bp, Artificial Sequence
  Synthetic oligonucleotide
gcatcctaccactgtaatactcatcgaaat

SEQ ID NO: 340352 - DNA, 30 bp, Artificial Sequence
  Synthetic oligonucleotide
actaactatagtccgccgatcgatcgaaat

SEQ ID NO: 340353 - DNA, 30 bp, Artificial Sequence
  Synthetic oligonucleotide
gcagtctaggggactacaacgtgtcgaaat

SEQ ID NO: 340354 - DNA, 30 bp, Artificial Sequence
  Synthetic oligonucleotide
ttcctagtagtgccgtcgatcattcgaaat

SEQ ID NO: 340355 - DNA, 30 bp, Artificial Sequence
  Synthetic oligonucleotide
tgcggagctagtcattgtaagccaggaaat

SEQ ID NO: 340356 - DNA, 30 bp, Artificial Sequence
  Synthetic oligonucleotide
tacgcgatttcaggcaggttctacggaaat

SEQ ID NO: 340357 - DNA, 30 bp, Artificial Sequence
  Synthetic oligonucleotide
cgtggctccacgagatcggcgttcggaaat

SEQ ID NO: 340358 - DNA, 30 bp, Artificial Sequence
  Synthetic oligonucleotide
ctccgtcatagtgagtcaataaagggaaat

SEQ ID NO: 340359 - DNA, 30 bp, Artificial Sequence
  Synthetic oligonucleotide
tgaatgtcaaggtgtagattctagggaaat

SEQ ID NO: 340360 - DNA, 30 bp, Artificial Sequence
  Synthetic oligonucleotide
ctagttcggctctaccggtacacgggaaat

SEQ ID NO: 340361 - DNA, 30 bp, Artificial Sequence
  Synthetic oligonucleotide
ttacttgccacatattggatacggggaaat

SEQ ID NO: 340362 - DNA, 30 bp, Artificial Sequence
  Synthetic oligonucleotide
aaaattggctcgcgtctaggatggggaaat

SEQ ID NO: 340363 - DNA, 30 bp, Artificial Sequence
  Synthetic oligonucleotide
agcgactctgttcaatcactgtggggaaat

SEQ ID NO: 340364 - DNA, 30 bp, Artificial Sequence
  Synthetic oligonucleotide
aacagagcatagggctaggtactgggaaat

SEQ ID NO: 340365 - DNA, 30 bp, Artificial Sequence
  Synthetic oligonucleotide
gttctcgatcgaacgtactgaactggaaat

SEQ ID NO: 340366 - DNA, 30 bp, Artificial Sequence
  Synthetic oligonucleotide
aggcttatgtttggggatagtcctggaaat

SEQ ID NO: 340367 - DNA, 30 bp, Artificial Sequence
  Synthetic oligonucleotide
tcattggttgtgctagaacaatttggaaat

SEQ ID NO: 340368 - DNA, 30 bp, Artificial Sequence
  Synthetic oligonucleotide
accatgtggctggtgaaatgtctatgaaat

SEQ ID NO: 340369 - DNA, 30 bp, Artificial Sequence
  Synthetic oligonucleotide
atacgaatgcccgaagcatctgtatgaaat

SEQ ID NO: 340370 - DNA, 30 bp, Artificial Sequence
  Synthetic oligonucleotide
ccaccgaccgctccggggccatgctgaaat

SEQ ID NO: 340371 - DNA, 30 bp, Artificial Sequence
  Synthetic oligonucleotide
ttgaaatcttctttgtaatatttctgaaat

SEQ ID NO: 340372 - DNA, 30 bp, Artificial Sequence
  Synthetic oligonucleotide
gaaaacacatttatggactaaacttgaaat

SEQ ID NO: 340373 - DNA, 30 bp, Artificial Sequence
  Synthetic oligonucleotide
tctaattatgagtgagacctggccataaat

SEQ ID NO: 340374 - DNA, 30 bp, Artificial Sequence
  Synthetic oligonucleotide
tacgactggtctaagcaactaggcataaat

SEQ ID NO: 340375 - DNA, 30 bp, Artificial Sequence
  Synthetic oligonucleotide
tcttggtttatgagaataggagtcataaat

SEQ ID NO: 340376 - DNA, 30 bp, Artificial Sequence
  Synthetic oligonucleotide
cgtagtcatgaatcgggcgatgagataaat

SEQ ID NO: 340377 - DNA, 30 bp, Artificial Sequence
  Synthetic oligonucleotide
gaggagcatactagatgatttgatataaat

SEQ ID NO: 340378 - DNA, 30 bp, Artificial Sequence
  Synthetic oligonucleotide
tcaataagtccgaagctaccgattataaat

SEQ ID NO: 340379 - DNA, 30 bp, Artificial Sequence
  Synthetic oligonucleotide
ttgtaacgccggataaacagaaaactaaat

SEQ ID NO: 340380 - DNA, 30 bp, Artificial Sequence
  Synthetic oligonucleotide
ggtgctacgcttacaatggtgtaactaaat

SEQ ID NO: 340381 - DNA, 30 bp, Artificial Sequence
  Synthetic oligonucleotide
gacaaaatttcggctaggttgggactaaat

SEQ ID NO: 340382 - DNA, 30 bp, Artificial Sequence
  Synthetic oligonucleotide
gtggaaccggcgccctacgataagctaaat

SEQ ID NO: 340383 - DNA, 30 bp, Artificial Sequence
  Synthetic oligonucleotide
cgtcgatgggattggatcactagtctaaat

SEQ ID NO: 340384 - DNA, 30 bp, Artificial Sequence
  Synthetic oligonucleotide
ctaccacctccgtggggctgttgtctaaat

SEQ ID NO: 340385 - DNA, 30 bp, Artificial Sequence
  Synthetic oligonucleotide
caaaatgatccaatagaggtatgagtaaat

SEQ ID NO: 340386 - DNA, 30 bp, Artificial Sequence
  Synthetic oligonucleotide
tgttgaaatgccatcatactccacgtaaat

SEQ ID NO: 340387 - DNA, 30 bp, Artificial Sequence
  Synthetic oligonucleotide
acgagtgggtccgcagccttcgacgtaaat

SEQ ID NO: 340388 - DNA, 30 bp, Artificial Sequence
  Synthetic oligonucleotide
ggctggcacacttcgtgcgcggacgtaaat

SEQ ID NO: 340389 - DNA, 30 bp, Artificial Sequence
  Synthetic oligonucleotide
aatgtgacgctcggagaaggtgccgtaaat

SEQ ID NO: 340390 - DNA, 30 bp, Artificial Sequence
  Synthetic oligonucleotide
gcaattcgagcagtcgtaaacgtcgtaaat

SEQ ID NO: 340391 - DNA, 30 bp, Artificial Sequence
  Synthetic oligonucleotide
attgaatcgcggaaaccttagacggtaaat

SEQ ID NO: 340392 - DNA, 30 bp, Artificial Sequence
  Synthetic oligonucleotide
agatccctcaatgacatgtccagggtaaat

SEQ ID NO: 340393 - DNA, 30 bp, Artificial Sequence
  Synthetic oligonucleotide
ggttacaggtttagtcgtggccatgtaaat

SEQ ID NO: 340394 - DNA, 30 bp, Artificial Sequence
  Synthetic oligonucleotide
agcacgctgtaatgacggccacctgtaaat

SEQ ID NO: 340395 - DNA, 30 bp, Artificial Sequence
  Synthetic oligonucleotide
taaacggttagaacagtctcaagtgtaaat

SEQ ID NO: 340396 - DNA, 30 bp, Artificial Sequence
  Synthetic oligonucleotide
ctgattaatggagtaggatccattgtaaat

SEQ ID NO: 340397 - DNA, 30 bp, Artificial Sequence
  Synthetic oligonucleotide
ggtgtctgtcagcaaccctacaaattaaat

SEQ ID NO: 340398 - DNA, 30 bp, Artificial Sequence
  Synthetic oligonucleotide
tcgcacatcgatcatatcgataaattaaat

SEQ ID NO: 340399 - DNA, 30 bp, Artificial Sequence
  Synthetic oligonucleotide
tgcaatttatgggccactacaacattaaat

SEQ ID NO: 340400 - DNA, 30 bp, Artificial Sequence
  Synthetic oligonucleotide
tcattctgttggacaccagcgctcttaaat

SEQ ID NO: 340401 - DNA, 30 bp, Artificial Sequence
  Synthetic oligonucleotide
tatgagactttagtgcaagtatagttaaat

SEQ ID NO: 340402 - DNA, 30 bp, Artificial Sequence
  Synthetic oligonucleotide
gcataggggagcaccagcttgatgttaaat

SEQ ID NO: 340403 - DNA, 30 bp, Artificial Sequence
  Synthetic oligonucleotide
gggttcagtactgcataggttcctttaaat

SEQ ID NO: 340404 - DNA, 30 bp, Artificial Sequence
  Synthetic oligonucleotide
gggtattccaccatattgcacgctttaaat

SEQ ID NO: 340405 - DNA, 30 bp, Artificial Sequence
  Synthetic oligonucleotide
ggatcacagttacgtgcgtattctttaaat

SEQ ID NO: 340406 - DNA, 30 bp, Artificial Sequence
  Synthetic oligonucleotide
gtatcctcgtgcggttaacatggtttaaat

SEQ ID NO: 340407 - DNA, 30 bp, Artificial Sequence
  Synthetic oligonucleotide
atcacgacggaggttagtacctacaacaat

SEQ ID NO: 340408 - DNA, 30 bp, Artificial Sequence
  Synthetic oligonucleotide
ggccaggttaaatcagattttgccaacaat

SEQ ID NO: 340409 - DNA, 30 bp, Artificial Sequence
  Synthetic oligonucleotide
cgggaaaggcataacggctaatggaacaat

SEQ ID NO: 340410 - DNA, 30 bp, Artificial Sequence
  Synthetic oligonucleotide
attacatacttatttctcgccatgaacaat

SEQ ID NO: 340411 - DNA, 30 bp, Artificial Sequence
  Synthetic oligonucleotide
aaatgtgatcatttgagttgcctgaacaat

SEQ ID NO: 340412 - DNA, 30 bp, Artificial Sequence
  Synthetic oligonucleotide
acccgtagctcgaataaatagcataacaat

SEQ ID NO: 340413 - DNA, 30 bp, Artificial Sequence
  Synthetic oligonucleotide
tacgttcggcattcggggagatctaacaat

SEQ ID NO: 340414 - DNA, 30 bp, Artificial Sequence
  Synthetic oligonucleotide
atgtgtaagtaaacttcgggcacacacaat

SEQ ID NO: 340415 - DNA, 30 bp, Artificial Sequence
  Synthetic oligonucleotide
tccgctatatctactagcaacctacacaat

SEQ ID NO: 340416 - DNA, 30 bp, Artificial Sequence
  Synthetic oligonucleotide
ttatataattctctccacattaaccacaat

SEQ ID NO: 340417 - DNA, 30 bp, Artificial Sequence
  Synthetic oligonucleotide
aggggcagatgctcagtggatccccacaat

SEQ ID NO: 340418 - DNA, 30 bp, Artificial Sequence
  Synthetic oligonucleotide
gaaatgtcattctcccaatttcgccacaat

SEQ ID NO: 340419 - DNA, 30 bp, Artificial Sequence
  Synthetic oligonucleotide
aaaaacaaaccctatcttcagtcgcacaat

SEQ ID NO: 340420 - DNA, 30 bp, Artificial Sequence
  Synthetic oligonucleotide
gcttcccgggcgttagcgggttcgcacaat

SEQ ID NO: 340421 - DNA, 30 bp, Artificial Sequence
  Synthetic oligonucleotide
aggggcttcgaagctaacggattgcacaat

SEQ ID NO: 340422 - DNA, 30 bp, Artificial Sequence
  Synthetic oligonucleotide
ctcggcacttcccgttccggcaatcacaat

SEQ ID NO: 340423 - DNA, 30 bp, Artificial Sequence
  Synthetic oligonucleotide
taccacgctcccacgcaatgggtagacaat

SEQ ID NO: 340424 - DNA, 30 bp, Artificial Sequence
  Synthetic oligonucleotide
catgtcccggatcataagtactgggacaat

SEQ ID NO: 340425 - DNA, 30 bp, Artificial Sequence
  Synthetic oligonucleotide
gtctgagaaagatccctcccctctgacaat

SEQ ID NO: 340426 - DNA, 30 bp, Artificial Sequence
  Synthetic oligonucleotide
tcaaacggttggggacggagtcaatacaat

SEQ ID NO: 340427 - DNA, 30 bp, Artificial Sequence
  Synthetic oligonucleotide
gcgaaagctttttggtttttaagatacaat

SEQ ID NO: 340428 - DNA, 30 bp, Artificial Sequence
  Synthetic oligonucleotide
tgatagatgtgcctattcaccttatacaat

SEQ ID NO: 340429 - DNA, 30 bp, Artificial Sequence
  Synthetic oligonucleotide
acctagtccgaaacgggaaccctctacaat

SEQ ID NO: 340430 - DNA, 30 bp, Artificial Sequence
  Synthetic oligonucleotide
ttcgtagtaaaatcgtagctggagtacaat

SEQ ID NO: 340431 - DNA, 30 bp, Artificial Sequence
  Synthetic oligonucleotide
gcagcaagcatttagctcggaaggtacaat

SEQ ID NO: 340432 - DNA, 30 bp, Artificial Sequence
  Synthetic oligonucleotide
tcagttttacggaagaagggctattacaat

SEQ ID NO: 340433 - DNA, 30 bp, Artificial Sequence
  Synthetic oligonucleotide
tttaacatacgggaattggaaccttacaat

SEQ ID NO: 340434 - DNA, 30 bp, Artificial Sequence
  Synthetic oligonucleotide
caattcataggagacccatgaggaaccaat

SEQ ID NO: 340435 - DNA, 31 bp, Artificial Sequence
  Synthetic oligonucleotide
acatccaagcaaatgagggcccgccaccaat

SEQ ID NO: 340436 - DNA, 30 bp, Artificial Sequence
  Synthetic oligonucleotide
ctcataattacaacatgagcgagcaccaat

SEQ ID NO: 340437 - DNA, 30 bp, Artificial Sequence
  Synthetic oligonucleotide
acctatggttatacctgttattggaccaat

SEQ ID NO: 340438 - DNA, 30 bp, Artificial Sequence
  Synthetic oligonucleotide
aattggcagcccttgagaagttaacccaat

SEQ ID NO: 340439 - DNA, 30 bp, Artificial Sequence
  Synthetic oligonucleotide
aacttgattttgatacaatcggcacccaat

SEQ ID NO: 340440 - DNA, 30 bp, Artificial Sequence
  Synthetic oligonucleotide
taagtgtagctttgctgtcacagacccaat

SEQ ID NO: 340441 - DNA, 30 bp, Artificial Sequence
  Synthetic oligonucleotide
caagacagttatccttgtctggaccccaat

SEQ ID NO: 340442 - DNA, 30 bp, Artificial Sequence
  Synthetic oligonucleotide
cagaatacaatggccctatatgatcccaat

SEQ ID NO: 340443 - DNA, 30 bp, Artificial Sequence
  Synthetic oligonucleotide
tgctcctcataagtctaatacggtcccaat

SEQ ID NO: 340444 - DNA, 30 bp, Artificial Sequence
  Synthetic oligonucleotide
taggatcctttcgggtttatgtgtcccaat

SEQ ID NO: 340445 - DNA, 30 bp, Artificial Sequence
  Synthetic oligonucleotide
acagtctaaagtacgtctatatttcccaat

SEQ ID NO: 340446 - DNA, 30 bp, Artificial Sequence
  Synthetic oligonucleotide
gaggcgtcagccttcttgctaagcgccaat

SEQ ID NO: 340447 - DNA, 30 bp, Artificial Sequence
  Synthetic oligonucleotide
gtccaagttagcttccaactgagcgccaat

SEQ ID NO: 340448 - DNA, 30 bp, Artificial Sequence
  Synthetic oligonucleotide
tagaatcttacgtgagtctggcaggccaat

SEQ ID NO: 340449 - DNA, 30 bp, Artificial Sequence
  Synthetic oligonucleotide
ttgaggctattcatggacctcacggccaat

SEQ ID NO: 340450 - DNA, 30 bp, Artificial Sequence
  Synthetic oligonucleotide
agtgacaactaccttcattattctgccaat

SEQ ID NO: 340451 - DNA, 30 bp, Artificial Sequence
  Synthetic oligonucleotide
gtctaaggagtatttaggcaccgatccaat

SEQ ID NO: 340452 - DNA, 30 bp, Artificial Sequence
  Synthetic oligonucleotide
atgtgagattagcgtctggcagtctccaat

SEQ ID NO: 340453 - DNA, 30 bp, Artificial Sequence
  Synthetic oligonucleotide
acaactccgctttggtagatgttctccaat

SEQ ID NO: 340454 - DNA, 30 bp, Artificial Sequence
  Synthetic oligonucleotide
ctatcttcagaaaggggagccgcgtccaat

SEQ ID NO: 340455 - DNA, 30 bp, Artificial Sequence
  Synthetic oligonucleotide
gcgatctgaaaggggtacgcacggtccaat

SEQ ID NO: 340456 - DNA, 30 bp, Artificial Sequence
  Synthetic oligonucleotide
tacacgtgaataggggacgtaatttccaat

SEQ ID NO: 340457 - DNA, 30 bp, Artificial Sequence
  Synthetic oligonucleotide
ttggccaatggcactcataataaaagcaat

SEQ ID NO: 340458 - DNA, 30 bp, Artificial Sequence
  Synthetic oligonucleotide
atcttaactaagcggagctgggaaagcaat

SEQ ID NO: 340459 - DNA, 30 bp, Artificial Sequence
  Synthetic oligonucleotide
ctgtaacagtccctggcgtttaacagcaat

SEQ ID NO: 340460 - DNA, 30 bp, Artificial Sequence
  Synthetic oligonucleotide
tagtattgaccatatcaagagcacagcaat

SEQ ID NO: 340461 - DNA, 30 bp, Artificial Sequence
  Synthetic oligonucleotide
tgggtgatagaagatgcgggcgggagcaat

SEQ ID NO: 340462 - DNA, 29 bp, Artificial Sequence
  Synthetic oligonucleotide
atacgcaatatgaatctctcttgagcaat

SEQ ID NO: 340463 - DNA, 30 bp, Artificial Sequence
  Synthetic oligonucleotide
gtagtgtaccgctagcgagggaatagcaat

SEQ ID NO: 340464 - DNA, 30 bp, Artificial Sequence
  Synthetic oligonucleotide
tctatgggttaggacagggcccttagcaat

SEQ ID NO: 340465 - DNA, 30 bp, Artificial Sequence
  Synthetic oligonucleotide
tgcgacagtgaaaacagggtcggacgcaat

SEQ ID NO: 340466 - DNA, 30 bp, Artificial Sequence
  Synthetic oligonucleotide
gcatccgtgttactggaccgtctacgcaat

SEQ ID NO: 340467 - DNA, 30 bp, Artificial Sequence
  Synthetic oligonucleotide
caggtgcgaccaatgccttgttgccgcaat

SEQ ID NO: 340468 - DNA, 30 bp, Artificial Sequence
  Synthetic oligonucleotide
gggatgttccagtggatattatcgcgcaat

SEQ ID NO: 340469 - DNA, 30 bp, Artificial Sequence
  Synthetic oligonucleotide
atctggttgcgtgtattttggattcgcaat

SEQ ID NO: 340470 - DNA, 30 bp, Artificial Sequence
  Synthetic oligonucleotide
tacctggttgtacgggtcgagtaaggcaat

SEQ ID NO: 340471 - DNA, 30 bp, Artificial Sequence
  Synthetic oligonucleotide
gaagccgcgaagtaaaacatcagaggcaat

SEQ ID NO: 340472 - DNA, 30 bp, Artificial Sequence
  Synthetic oligonucleotide
ccccttgttactaaatcccagcgaggcaat

SEQ ID NO: 340473 - DNA, 30 bp, Artificial Sequence
  Synthetic oligonucleotide
cagccaaacgctctgtaataggtaggcaat

SEQ ID NO: 340474 - DNA, 30 bp, Artificial Sequence
  Synthetic oligonucleotide
ggtgctagtactactgtaacgttaggcaat

SEQ ID NO: 340475 - DNA, 30 bp, Artificial Sequence
  Synthetic oligonucleotide
gtactccaattatggcggaaggacggcaat

SEQ ID NO: 340476 - DNA, 30 bp, Artificial Sequence
  Synthetic oligonucleotide
gtattgtcgcagggagcactcgatggcaat

SEQ ID NO: 340477 - DNA, 30 bp, Artificial Sequence
  Synthetic oligonucleotide
gatcgagtcaatattgagtacctatgcaat

SEQ ID NO: 340478 - DNA, 30 bp, Artificial Sequence
  Synthetic oligonucleotide
tagagtattgcacgggtcgcagtgtgcaat

SEQ ID NO: 340479 - DNA, 30 bp, Artificial Sequence
  Synthetic oligonucleotide
cgctgagcatctttctagagagattgcaat

SEQ ID NO: 340480 - DNA, 30 bp, Artificial Sequence
  Synthetic oligonucleotide
tatcttccctgtcgtgtcgcagtttgcaat

SEQ ID NO: 340481 - DNA, 30 bp, Artificial Sequence
  Synthetic oligonucleotide
cctcgcgttacatgcgggatcacaatcaat

SEQ ID NO: 340482 - DNA, 30 bp, Artificial Sequence
  Synthetic oligonucleotide
ggatcgcggcgcatccgcgttgttatcaat

SEQ ID NO: 340483 - DNA, 30 bp, Artificial Sequence
  Synthetic oligonucleotide
tctctgttcaacctaagtcaccgcctcaat

SEQ ID NO: 340484 - DNA, 30 bp, Artificial Sequence
  Synthetic oligonucleotide
tctattatgattattaaagtgaagctcaat

SEQ ID NO: 340485 - DNA, 30 bp, Artificial Sequence
  Synthetic oligonucleotide
aaaaatacgtgagcgaaagaagtgctcaat

SEQ ID NO: 340486 - DNA, 30 bp, Artificial Sequence
  Synthetic oligonucleotide
gaccaccggtatcactcttgtgatctcaat

SEQ ID NO: 340487 - DNA, 30 bp, Artificial Sequence
  Synthetic oligonucleotide
aggacaaaaaccagcgcacgctctctcaat

SEQ ID NO: 340488 - DNA, 30 bp, Artificial Sequence
  Synthetic oligonucleotide
ggttcaatactttgaaatccgatagtcaat

SEQ ID NO: 340489 - DNA, 30 bp, Artificial Sequence
  Synthetic oligonucleotide
gatgattacctctttttaggcgcattcaat

SEQ ID NO: 340490 - DNA, 30 bp, Artificial Sequence
  Synthetic oligonucleotide
tgcacccggcctcatcgagcccgattcaat

SEQ ID NO: 340491 - DNA, 30 bp, Artificial Sequence
  Synthetic oligonucleotide
gttgatttataggcccaatgtcgattcaat

SEQ ID NO: 340492 - DNA, 30 bp, Artificial Sequence
  Synthetic oligonucleotide
gtaagactggcacaacggggcatattcaat

SEQ ID NO: 340493 - DNA, 30 bp, Artificial Sequence
  Synthetic oligonucleotide
tacggatatgtgaggacctgcaagttcaat

SEQ ID NO: 340494 - DNA, 30 bp, Artificial Sequence
  Synthetic oligonucleotide
agtggaacgcggttcctcatatagttcaat

SEQ ID NO: 340495 - DNA, 30 bp, Artificial Sequence
  Synthetic oligonucleotide
tccgactctagacgtcgagctgctttcaat

SEQ ID NO: 340496 - DNA, 30 bp, Artificial Sequence
  Synthetic oligonucleotide
caaaagaggcaaaaaagccgccgtttcaat

SEQ ID NO: 340497 - DNA, 30 bp, Artificial Sequence
  Synthetic oligonucleotide
cgtttgcggggaaaaatcgggtgtttcaat

SEQ ID NO: 340498 - DNA, 30 bp, Artificial Sequence
  Synthetic oligonucleotide
atgtttatctgggccgggtgccttttcaat

SEQ ID NO: 340499 - DNA, 30 bp, Artificial Sequence
  Synthetic oligonucleotide
atgagtagcgctttcttggcataaaagaat

SEQ ID NO: 340500 - DNA, 30 bp, Artificial Sequence
  Synthetic oligonucleotide
ggagagtggtacgggcgttgctaaaagaat

SEQ ID NO: 340501 - DNA, 30 bp, Artificial Sequence
  Synthetic oligonucleotide
acggtgctggcttctttccccggaaagaat

SEQ ID NO: 340502 - DNA, 30 bp, Artificial Sequence
  Synthetic oligonucleotide
ggacagttattacaagtcgatagcaagaat

SEQ ID NO: 340503 - DNA, 30 bp, Artificial Sequence
  Synthetic oligonucleotide
cgatgggtacgcccccggacacgcaagaat

SEQ ID NO: 340504 - DNA, 30 bp, Artificial Sequence
  Synthetic oligonucleotide
tgaaagttgaatattgttcaatagaagaat

SEQ ID NO: 340505 - DNA, 30 bp, Artificial Sequence
  Synthetic oligonucleotide
aatgtcaggccttatttagatgcgaagaat

SEQ ID NO: 340506 - DNA, 30 bp, Artificial Sequence
  Synthetic oligonucleotide
attaagcaacaatgggtgatttggaagaat

SEQ ID NO: 340507 - DNA, 30 bp, Artificial Sequence
  Synthetic oligonucleotide
gatgcagtgaataaactcggcactaagaat

SEQ ID NO: 340508 - DNA, 30 bp, Artificial Sequence
  Synthetic oligonucleotide
gtgagcaggaacaagtggctaaaacagaat

SEQ ID NO: 340509 - DNA, 30 bp, Artificial Sequence
  Synthetic oligonucleotide
cagtttgtaacagtagcatactgacagaat

SEQ ID NO: 340510 - DNA, 30 bp, Artificial Sequence
  Synthetic oligonucleotide
aggatgtggtttacccgaggtgtacagaat

SEQ ID NO: 340511 - DNA, 30 bp, Artificial Sequence
  Synthetic oligonucleotide
gtgtcggctatcgaagctagttaccagaat

SEQ ID NO: 340512 - DNA, 30 bp, Artificial Sequence
  Synthetic oligonucleotide
caagtctggtaatttagagagggccagaat

SEQ ID NO: 340513 - DNA, 30 bp, Artificial Sequence
  Synthetic oligonucleotide
gcttgggtgccatcatagaggggccagaat

SEQ ID NO: 340514 - DNA, 30 bp, Artificial Sequence
  Synthetic oligonucleotide
tggaggcccggttctatcggacagcagaat

SEQ ID NO: 340515 - DNA, 30 bp, Artificial Sequence
  Synthetic oligonucleotide
gatgcgtttctaggttaataaaggcagaat

SEQ ID NO: 340516 - DNA, 30 bp, Artificial Sequence
  Synthetic oligonucleotide
ttgaggatcgatcggtgttgtctgcagaat

SEQ ID NO: 340517 - DNA, 30 bp, Artificial Sequence
  Synthetic oligonucleotide
atctgataggtaggtatgcccgacgagaat

SEQ ID NO: 340518 - DNA, 30 bp, Artificial Sequence
  Synthetic oligonucleotide
ccatggatgacggacctccggcccgagaat

SEQ ID NO: 340519 - DNA, 30 bp, Artificial Sequence
  Synthetic oligonucleotide
gcttctcgactcgttacaggtgaggagaat

SEQ ID NO: 340520 - DNA, 30 bp, Artificial Sequence
  Synthetic oligonucleotide
acaggatcatttatgcagtcggcggagaat

SEQ ID NO: 340521 - DNA, 30 bp, Artificial Sequence
  Synthetic oligonucleotide
gccgacacggcacaaatagaattggagaat

SEQ ID NO: 340522 - DNA, 30 bp, Artificial Sequence
  Synthetic oligonucleotide
caattatttcgcgaactatatattgagaat

SEQ ID NO: 340523 - DNA, 30 bp, Artificial Sequence
  Synthetic oligonucleotide
aaacttcttaaaaaaggggaatcatagaat

SEQ ID NO: 340524 - DNA, 30 bp, Artificial Sequence
  Synthetic oligonucleotide
caaaacggtcctctttgggcgggctagaat

SEQ ID NO: 340525 - DNA, 30 bp, Artificial Sequence
  Synthetic oligonucleotide
gggtcgtactgtgagataatgttctagaat

SEQ ID NO: 340526 - DNA, 30 bp, Artificial Sequence
  Synthetic oligonucleotide
caggattcgtatcagcggcgtgagtagaat

SEQ ID NO: 340527 - DNA, 30 bp, Artificial Sequence
  Synthetic oligonucleotide
aattggaaaagtccacggaggggaacgaat

SEQ ID NO: 340528 - DNA, 30 bp, Artificial Sequence
  Synthetic oligonucleotide
ttgctactacgagctcgggcttgaacgaat

SEQ ID NO: 340529 - DNA, 30 bp, Artificial Sequence
  Synthetic oligonucleotide
ttgcaatattgggccggcaaagacacgaat

SEQ ID NO: 340530 - DNA, 30 bp, Artificial Sequence
  Synthetic oligonucleotide
cttttcctaggggagagcagaccgacgaat

SEQ ID NO: 340531 - DNA, 30 bp, Artificial Sequence
  Synthetic oligonucleotide
ggccctggggtctagccagacgtgacgaat

SEQ ID NO: 340532 - DNA, 30 bp, Artificial Sequence
  Synthetic oligonucleotide
atgtattgatctatgggcaccacaccgaat

SEQ ID NO: 340533 - DNA, 30 bp, Artificial Sequence
  Synthetic oligonucleotide
cgactgtgtttgatattattatccccgaat

SEQ ID NO: 340534 - DNA, 29 bp, Artificial Sequence
  Synthetic oligonucleotide
cacctctaaaagcgggtagaagcccgaat

SEQ ID NO: 340535 - DNA, 30 bp, Artificial Sequence
  Synthetic oligonucleotide
ctaccaggagcatttaaaaccttcccgaat

SEQ ID NO: 340536 - DNA, 30 bp, Artificial Sequence
  Synthetic oligonucleotide
gatcgcagtctactcgcgagatcgccgaat

SEQ ID NO: 340537 - DNA, 30 bp, Artificial Sequence
  Synthetic oligonucleotide
tgtgttgtgtccctggtctggtgtccgaat

SEQ ID NO: 340538 - DNA, 30 bp, Artificial Sequence
  Synthetic oligonucleotide
atatagtgtgaatcgcctcaaagagcgaat

SEQ ID NO: 340539 - DNA, 31 bp, Artificial Sequence
  Synthetic oligonucleotide
acctgtacgggttttgattttcatcgcgaat

SEQ ID NO: 340540 - DNA, 30 bp, Artificial Sequence
  Synthetic oligonucleotide
caagactgaaagggcgcgttttgggcgaat

SEQ ID NO: 340541 - DNA, 30 bp, Artificial Sequence
  Synthetic oligonucleotide
atcttcagcgagaataatagacaatcgaat

SEQ ID NO: 340542 - DNA, 30 bp, Artificial Sequence
  Synthetic oligonucleotide
acatccacagcaaagtagaatacttcgaat

SEQ ID NO: 340543 - DNA, 30 bp, Artificial Sequence
  Synthetic oligonucleotide
actctcacattcttgtgagccgaaaggaat

SEQ ID NO: 340544 - DNA, 30 bp, Artificial Sequence
  Synthetic oligonucleotide
cgcgacatttatcgccgatagttcaggaat

SEQ ID NO: 340545 - DNA, 30 bp, Artificial Sequence
  Synthetic oligonucleotide
tactttctaacaggtgggaaagagaggaat

SEQ ID NO: 340546 - DNA, 30 bp, Artificial Sequence
  Synthetic oligonucleotide
aagtctggagacgtgatattgatgaggaat

SEQ ID NO: 340547 - DNA, 30 bp, Artificial Sequence
  Synthetic oligonucleotide
gcaatttgcctaactatacgtatacggaat

SEQ ID NO: 340548 - DNA, 30 bp, Artificial Sequence
  Synthetic oligonucleotide
ggaccagagcttagatctcgaagccggaat

SEQ ID NO: 340549 - DNA, 30 bp, Artificial Sequence
  Synthetic oligonucleotide
gtaaatgacgaagtaataacattgcggaat

SEQ ID NO: 340550 - DNA, 30 bp, Artificial Sequence
  Synthetic oligonucleotide
ggcgtatttggcaagaatagccatcggaat

SEQ ID NO: 340551 - DNA, 30 bp, Artificial Sequence
  Synthetic oligonucleotide
tatgaggttaaccagcttgagcatcggaat

SEQ ID NO: 340552 - DNA, 30 bp, Artificial Sequence
  Synthetic oligonucleotide
gtgacacggccgtacgtggaggttcggaat

SEQ ID NO: 340553 - DNA, 30 bp, Artificial Sequence
  Synthetic oligonucleotide
accaataacaccagtcgtcgggcagggaat

SEQ ID NO: 340554 - DNA, 30 bp, Artificial Sequence
  Synthetic oligonucleotide
cttcatgggcaacgttgtaagttagggaat

SEQ ID NO: 340555 - DNA, 30 bp, Artificial Sequence
  Synthetic oligonucleotide
ctgtagtaggaccgtcacaaccacgggaat

SEQ ID NO: 340556 - DNA, 30 bp, Artificial Sequence
  Synthetic oligonucleotide
ttgagcttactagtgtataccaccgggaat

SEQ ID NO: 340557 - DNA, 30 bp, Artificial Sequence
  Synthetic oligonucleotide
tcatttcttggacaaatgagaagcgggaat

SEQ ID NO: 340558 - DNA, 30 bp, Artificial Sequence
  Synthetic oligonucleotide
tttaagcaatgatgcggaggtagcgggaat

SEQ ID NO: 340559 - DNA, 30 bp, Artificial Sequence
  Synthetic oligonucleotide
gatctaagtccgaaagaaatacgcgggaat

SEQ ID NO: 340560 - DNA, 30 bp, Artificial Sequence
  Synthetic oligonucleotide
gctggcgagattacagcctatcgcgggaat

SEQ ID NO: 340561 - DNA, 30 bp, Artificial Sequence
  Synthetic oligonucleotide
agaacactcagttcaggcagccgggggaat

SEQ ID NO: 340562 - DNA, 30 bp, Artificial Sequence
  Synthetic oligonucleotide
tagaggcagactgctcaacgacgtgggaat

SEQ ID NO: 340563 - DNA, 30 bp, Artificial Sequence
  Synthetic oligonucleotide
ccaactcttgtaggcgtaaactgatggaat

SEQ ID NO: 340564 - DNA, 30 bp, Artificial Sequence
  Synthetic oligonucleotide
tcattatgcaatggcttatagttatggaat

SEQ ID NO: 340565 - DNA, 30 bp, Artificial Sequence
  Synthetic oligonucleotide
aaacgttctatccggctagtaagctggaat

SEQ ID NO: 340566 - DNA, 30 bp, Artificial Sequence
  Synthetic oligonucleotide
gaccggtcggagagatgcaaacagtggaat

SEQ ID NO: 340567 - DNA, 30 bp, Artificial Sequence
  Synthetic oligonucleotide
atcggccgagatgtccggcccgagtggaat

SEQ ID NO: 340568 - DNA, 30 bp, Artificial Sequence
  Synthetic oligonucleotide
atcgtctaaggagaaatgtactagtggaat

SEQ ID NO: 340569 - DNA, 30 bp, Artificial Sequence
  Synthetic oligonucleotide
gaatattaagtgttctactaacattggaat

SEQ ID NO: 340570 - DNA, 30 bp, Artificial Sequence
  Synthetic oligonucleotide
ataacaaccctactataagagcattggaat

SEQ ID NO: 340571 - DNA, 30 bp, Artificial Sequence
  Synthetic oligonucleotide
tattgaagcatgcgttattttaacatgaat

SEQ ID NO: 340572 - DNA, 30 bp, Artificial Sequence
  Synthetic oligonucleotide
gctcccgtcaaagttcgggcagacatgaat

SEQ ID NO: 340573 - DNA, 30 bp, Artificial Sequence
  Synthetic oligonucleotide
cagcctaaaccatcacgattgcagatgaat

SEQ ID NO: 340574 - DNA, 30 bp, Artificial Sequence
  Synthetic oligonucleotide
tgatagctcattcacggacgccaactgaat

SEQ ID NO: 340575 - DNA, 30 bp, Artificial Sequence
  Synthetic oligonucleotide
tatcgatgatcatcatttataatactgaat

SEQ ID NO: 340576 - DNA, 30 bp, Artificial Sequence
  Synthetic oligonucleotide
caatacgacgcgcatacttatgtactgaat

SEQ ID NO: 340577 - DNA, 30 bp, Artificial Sequence
  Synthetic oligonucleotide
agaggagcataacaacgtttagtcctgaat

SEQ ID NO: 340578 - DNA, 30 bp, Artificial Sequence
  Synthetic oligonucleotide
ggacacataaccataccgttcgtgctgaat

SEQ ID NO: 340579 - DNA, 30 bp, Artificial Sequence
  Synthetic oligonucleotide
cgagggaagagtgatgttgagacagtgaat

SEQ ID NO: 340580 - DNA, 30 bp, Artificial Sequence
  Synthetic oligonucleotide
aacaaaaggcttaatatacgagccgtgaat

SEQ ID NO: 340581 - DNA, 30 bp, Artificial Sequence
  Synthetic oligonucleotide
tttggcgttactttgaataggatcgtgaat

SEQ ID NO: 340582 - DNA, 30 bp, Artificial Sequence
  Synthetic oligonucleotide
atgagacctggaaaaacgggtggggtgaat

SEQ ID NO: 340583 - DNA, 30 bp, Artificial Sequence
  Synthetic oligonucleotide
ctaataatgcctgtatgcacggatgtgaat

SEQ ID NO: 340584 - DNA, 30 bp, Artificial Sequence
  Synthetic oligonucleotide
gttgaatagcgcggacgtttccacttgaat

SEQ ID NO: 340585 - DNA, 30 bp, Artificial Sequence
  Synthetic oligonucleotide
ctacgacaccacccgctaaagcggttgaat

SEQ ID NO: 340586 - DNA, 31 bp, Artificial Sequence
  Synthetic oligonucleotide
tgatttatattgcggttatgggcatttgaat

SEQ ID NO: 340587 - DNA, 30 bp, Artificial Sequence
  Synthetic oligonucleotide
ttcacgctttctgcctcctactgtttgaat

SEQ ID NO: 340588 - DNA, 30 bp, Artificial Sequence
  Synthetic oligonucleotide
ttagggacaaaagcatatcgtccaaataat

SEQ ID NO: 340589 - DNA, 30 bp, Artificial Sequence
  Synthetic oligonucleotide
ccgatctttttgggtcaccgggcaaataat

SEQ ID NO: 340590 - DNA, 30 bp, Artificial Sequence
  Synthetic oligonucleotide
cactggtacggccgttatgtgcgaaataat

SEQ ID NO: 340591 - DNA, 30 bp, Artificial Sequence
  Synthetic oligonucleotide
ctcagtgtaaaaagataggtgtgaaataat

SEQ ID NO: 340592 - DNA, 30 bp, Artificial Sequence
  Synthetic oligonucleotide
gatcagtctcgggctactccattaaataat

SEQ ID NO: 340593 - DNA, 30 bp, Artificial Sequence
  Synthetic oligonucleotide
ccatctctcatatacgttaaagggaataat

SEQ ID NO: 340594 - DNA, 30 bp, Artificial Sequence
  Synthetic oligonucleotide
ttggttccagtgcggtggttctggaataat

SEQ ID NO: 340595 - DNA, 30 bp, Artificial Sequence
  Synthetic oligonucleotide
attgggaactgcaaggacggtatgaataat

SEQ ID NO: 340596 - DNA, 30 bp, Artificial Sequence
  Synthetic oligonucleotide
tcgttcgaccgaggttcatatcgtaataat

SEQ ID NO: 340597 - DNA, 30 bp, Artificial Sequence
  Synthetic oligonucleotide
ttaagttcatatcgcttataagcacataat

SEQ ID NO: 340598 - DNA, 30 bp, Artificial Sequence
  Synthetic oligonucleotide
tttctgtggtcaacggttggtaaccataat

SEQ ID NO: 340599 - DNA, 30 bp, Artificial Sequence
  Synthetic oligonucleotide
ccgcacgcgtgtcttcatgctacccataat

SEQ ID NO: 340600 - DNA, 30 bp, Artificial Sequence
  Synthetic oligonucleotide
ttgcgtagccctagttacagaatccataat

SEQ ID NO: 340601 - DNA, 30 bp, Artificial Sequence
  Synthetic oligonucleotide
gcaccctttatcacacacatcaatcataat

SEQ ID NO: 340602 - DNA, 30 bp, Artificial Sequence
  Synthetic oligonucleotide
gactaacgcatagctaggatggaagataat

SEQ ID NO: 340603 - DNA, 30 bp, Artificial Sequence
  Synthetic oligonucleotide
gttgagaagacaccaaaaataagagataat

SEQ ID NO: 340604 - DNA, 30 bp, Artificial Sequence
  Synthetic oligonucleotide
tcaaggataaaacggaggcttggcgataat

SEQ ID NO: 340605 - DNA, 30 bp, Artificial Sequence
  Synthetic oligonucleotide
gctctcgtaacatcaccccagtgcgataat

SEQ ID NO: 340606 - DNA, 30 bp, Artificial Sequence
  Synthetic oligonucleotide
ccactcattgctcacttagggttcgataat

SEQ ID NO: 340607 - DNA, 30 bp, Artificial Sequence
  Synthetic oligonucleotide
gactactaaacagccacgtcgtgggataat

SEQ ID NO: 340608 - DNA, 30 bp, Artificial Sequence
  Synthetic oligonucleotide
cgcgacagagtcctggcaagggctgataat

SEQ ID NO: 340609 - DNA, 30 bp, Artificial Sequence
  Synthetic oligonucleotide
aagaaaaccttgggagcctacacctataat

SEQ ID NO: 340610 - DNA, 30 bp, Artificial Sequence
  Synthetic oligonucleotide
cccatacggcatgcgtcccaggcgtataat

SEQ ID NO: 340611 - DNA, 30 bp, Artificial Sequence
  Synthetic oligonucleotide
gcaggtctcgatggtctacgggattataat

SEQ ID NO: 340612 - DNA, 30 bp, Artificial Sequence
  Synthetic oligonucleotide
tggcaggccacttacgacagtgattataat

SEQ ID NO: 340613 - DNA, 30 bp, Artificial Sequence
  Synthetic oligonucleotide
gcattcactggggaaccggggtcttataat

SEQ ID NO: 340614 - DNA, 30 bp, Artificial Sequence
  Synthetic oligonucleotide
caaataagttccgaagatccgtgaactaat

SEQ ID NO: 340615 - DNA, 31 bp, Artificial Sequence
  Synthetic oligonucleotide
acccctgacctggacatttagcgacactaat

SEQ ID NO: 340616 - DNA, 30 bp, Artificial Sequence
  Synthetic oligonucleotide
tctctaggaccatcgtttgtgaagactaat

SEQ ID NO: 340617 - DNA, 30 bp, Artificial Sequence
  Synthetic oligonucleotide
aaccgtttacgcggtcccagcgtgactaat

SEQ ID NO: 340618 - DNA, 30 bp, Artificial Sequence
  Synthetic oligonucleotide
tgcttgagcgtgggtcggctatttactaat

SEQ ID NO: 340619 - DNA, 30 bp, Artificial Sequence
  Synthetic oligonucleotide
tgagaaaacgctaaattggtgggccctaat

SEQ ID NO: 340620 - DNA, 30 bp, Artificial Sequence
  Synthetic oligonucleotide
gagtactccggttgattatagtggcctaat

SEQ ID NO: 340621 - DNA, 30 bp, Artificial Sequence
  Synthetic oligonucleotide
gcgggtgatgcttaaaagcgcgaagctaat

SEQ ID NO: 340622 - DNA, 30 bp, Artificial Sequence
  Synthetic oligonucleotide
cttggttagtagtcccttgtaacagctaat

SEQ ID NO: 340623 - DNA, 30 bp, Artificial Sequence
  Synthetic oligonucleotide
agaagaacccgatgcgtaacgctcgctaat

SEQ ID NO: 340624 - DNA, 30 bp, Artificial Sequence
  Synthetic oligonucleotide
cgttcgaacttaacaatgatgagggctaat

SEQ ID NO: 340625 - DNA, 30 bp, Artificial Sequence
  Synthetic oligonucleotide
gacagatggtaatatcgacagtcatctaat

SEQ ID NO: 340626 - DNA, 30 bp, Artificial Sequence
  Synthetic oligonucleotide
cagtcgcagaagtgataagtgcattctaat

SEQ ID NO: 340627 - DNA, 30 bp, Artificial Sequence
  Synthetic oligonucleotide
gcggtagcgttagcttccgaggattctaat

SEQ ID NO: 340628 - DNA, 30 bp, Artificial Sequence
  Synthetic oligonucleotide
tcaactgcattggcctaatacacaagtaat

SEQ ID NO: 340629 - DNA, 30 bp, Artificial Sequence
  Synthetic oligonucleotide
gaatgtagcaatagcaaaaaggcaagtaat

SEQ ID NO: 340630 - DNA, 30 bp, Artificial Sequence
  Synthetic oligonucleotide
aggagtacggacatgcagggatgaagtaat

SEQ ID NO: 340631 - DNA, 30 bp, Artificial Sequence
  Synthetic oligonucleotide
tagtagcaccctacttcgggagtaagtaat

SEQ ID NO: 340632 - DNA, 30 bp, Artificial Sequence
  Synthetic oligonucleotide
acacgcatccataggatcaggtacagtaat

SEQ ID NO: 340633 - DNA, 30 bp, Artificial Sequence
  Synthetic oligonucleotide
gcaaataagtggcgttgagtttgcagtaat

SEQ ID NO: 340634 - DNA, 30 bp, Artificial Sequence
  Synthetic oligonucleotide
atctcttggcgctatggagtcccgagtaat

SEQ ID NO: 340635 - DNA, 30 bp, Artificial Sequence
  Synthetic oligonucleotide
catattaagcacttgaggataatgagtaat

SEQ ID NO: 340636 - DNA, 30 bp, Artificial Sequence
  Synthetic oligonucleotide
aacatgatcatccaaaatctgatgagtaat

SEQ ID NO: 340637 - DNA, 30 bp, Artificial Sequence
  Synthetic oligonucleotide
aatcggtaggcaatatggtactatagtaat

SEQ ID NO: 340638 - DNA, 30 bp, Artificial Sequence
  Synthetic oligonucleotide
cacgttcgaatacgttccgctgaacgtaat

SEQ ID NO: 340639 - DNA, 30 bp, Artificial Sequence
  Synthetic oligonucleotide
gcagggaattgtgtggcgtaaacacgtaat

SEQ ID NO: 340640 - DNA, 30 bp, Artificial Sequence
  Synthetic oligonucleotide
tcttgtaaaccccttcggccttcacgtaat

SEQ ID NO: 340641 - DNA, 30 bp, Artificial Sequence
  Synthetic oligonucleotide
aatctggtcacacaagccgcgacccgtaat

SEQ ID NO: 340642 - DNA, 30 bp, Artificial Sequence
  Synthetic oligonucleotide
ggaatacactgtagtcgtatggcccgtaat

SEQ ID NO: 340643 - DNA, 30 bp, Artificial Sequence
  Synthetic oligonucleotide
gagggacagtggctctggaaatcgcgtaat

SEQ ID NO: 340644 - DNA, 30 bp, Artificial Sequence
  Synthetic oligonucleotide
caggcgttgttttataggcgtgtgcgtaat

SEQ ID NO: 340645 - DNA, 30 bp, Artificial Sequence
  Synthetic oligonucleotide
gcagataggggggagcattaccctcgtaat

SEQ ID NO: 340646 - DNA, 30 bp, Artificial Sequence
  Synthetic oligonucleotide
gtgctggaccgattgggtaaaggcggtaat

SEQ ID NO: 340647 - DNA, 30 bp, Artificial Sequence
  Synthetic oligonucleotide
ggtaagctacattacgcaacgtagggtaat

SEQ ID NO: 340648 - DNA, 30 bp, Artificial Sequence
  Synthetic oligonucleotide
aacgccacacatgcggggggaacgggtaat

SEQ ID NO: 340649 - DNA, 30 bp, Artificial Sequence
  Synthetic oligonucleotide
ataagcgaccaagccggatttaggggtaat

SEQ ID NO: 340650 - DNA, 30 bp, Artificial Sequence
  Synthetic oligonucleotide
agcaaaagtgtctgggataaaatgggtaat

SEQ ID NO: 340651 - DNA, 30 bp, Artificial Sequence
  Synthetic oligonucleotide
aaatgttagaacgatggccctttgggtaat

SEQ ID NO: 340652 - DNA, 30 bp, Artificial Sequence
  Synthetic oligonucleotide
aatatcaaccgctgacgatcttatggtaat

SEQ ID NO: 340653 - DNA, 30 bp, Artificial Sequence
  Synthetic oligonucleotide
agggaatttagagtagataattctggtaat

SEQ ID NO: 340654 - DNA, 30 bp, Artificial Sequence
  Synthetic oligonucleotide
acgagctatttcagcgagggtcttggtaat

SEQ ID NO: 340655 - DNA, 30 bp, Artificial Sequence
  Synthetic oligonucleotide
aagtagacggttagtatattttttggtaat

SEQ ID NO: 340656 - DNA, 30 bp, Artificial Sequence
  Synthetic oligonucleotide
accccatccccacactacaggaactgtaat

SEQ ID NO: 340657 - DNA, 30 bp, Artificial Sequence
  Synthetic oligonucleotide
ccctcattgaccgggcgaagaggctgtaat

SEQ ID NO: 340658 - DNA, 30 bp, Artificial Sequence
  Synthetic oligonucleotide
aagcttcaaaatgataactataattgtaat

SEQ ID NO: 340659 - DNA, 30 bp, Artificial Sequence
  Synthetic oligonucleotide
aatccgatagcgaaccctggcgattgtaat

SEQ ID NO: 340660 - DNA, 30 bp, Artificial Sequence
  Synthetic oligonucleotide
cggatttaatggtacatagctgcttgtaat

SEQ ID NO: 340661 - DNA, 30 bp, Artificial Sequence
  Synthetic oligonucleotide
tgcggtagacccacctcttagtcttgtaat

SEQ ID NO: 340662 - DNA, 30 bp, Artificial Sequence
  Synthetic oligonucleotide
gaggtaagtcacatcaaggaattaattaat

SEQ ID NO: 340663 - DNA, 30 bp, Artificial Sequence
  Synthetic oligonucleotide
cccctggtgtgtacaagagttatcattaat

SEQ ID NO: 340664 - DNA, 30 bp, Artificial Sequence
  Synthetic oligonucleotide
agctaccgcatgacaaagcatgtcattaat

SEQ ID NO: 340665 - DNA, 30 bp, Artificial Sequence
  Synthetic oligonucleotide
tttcagctcggccaagaagacaagattaat

SEQ ID NO: 340666 - DNA, 30 bp, Artificial Sequence
  Synthetic oligonucleotide
gtatttgagaaccctatctagaagattaat

SEQ ID NO: 340667 - DNA, 30 bp, Artificial Sequence
  Synthetic oligonucleotide
ggcaggtgcgtcttagctatactgattaat

SEQ ID NO: 340668 - DNA, 30 bp, Artificial Sequence
  Synthetic oligonucleotide
taatgccagttatgggtcaatgatattaat

SEQ ID NO: 340669 - DNA, 30 bp, Artificial Sequence
  Synthetic oligonucleotide
caaaatgcgtttatgaatcgtcaacttaat

SEQ ID NO: 340670 - DNA, 30 bp, Artificial Sequence
  Synthetic oligonucleotide
ttccgcgagaactatgaactaaaccttaat

SEQ ID NO: 340671 - DNA, 30 bp, Artificial Sequence
  Synthetic oligonucleotide
ggcaaagtagtacgtaacggaacgcttaat

SEQ ID NO: 340672 - DNA, 30 bp, Artificial Sequence
  Synthetic oligonucleotide
tcccaagacaatcggaatctgtggcttaat

SEQ ID NO: 340673 - DNA, 30 bp, Artificial Sequence
  Synthetic oligonucleotide
gacgattcgtcgaactcgacgactcttaat

SEQ ID NO: 340674 - DNA, 30 bp, Artificial Sequence
  Synthetic oligonucleotide
cgacttaacggaacctggggtattcttaat

SEQ ID NO: 340675 - DNA, 30 bp, Artificial Sequence
  Synthetic oligonucleotide
gaaccaccgcgtaaaaaagaggcagttaat

SEQ ID NO: 340676 - DNA, 30 bp, Artificial Sequence
  Synthetic oligonucleotide
cgggaaagttcacttcgtggagccgttaat

SEQ ID NO: 340677 - DNA, 30 bp, Artificial Sequence
  Synthetic oligonucleotide
cgctgtaatagggaaaacccctccgttaat

SEQ ID NO: 340678 - DNA, 30 bp, Artificial Sequence
  Synthetic oligonucleotide
gcagccgacgctaagatcgtattcgttaat

SEQ ID NO: 340679 - DNA, 30 bp, Artificial Sequence
  Synthetic oligonucleotide
gcctgaagttgtgactttcgtttcgttaat

SEQ ID NO: 340680 - DNA, 30 bp, Artificial Sequence
  Synthetic oligonucleotide
taatgcttgcgtagacggtactcggttaat

SEQ ID NO: 340681 - DNA, 30 bp, Artificial Sequence
  Synthetic oligonucleotide
atctcgacgtgtacggagctaagggttaat

SEQ ID NO: 340682 - DNA, 30 bp, Artificial Sequence
  Synthetic oligonucleotide
gaggttgaggcgggtcttagtagggttaat

SEQ ID NO: 340683 - DNA, 30 bp, Artificial Sequence
  Synthetic oligonucleotide
gccgcctggactcatagggactttgttaat

SEQ ID NO: 340684 - DNA, 30 bp, Artificial Sequence
  Synthetic oligonucleotide
attagagccgagagggaggaagaatttaat

SEQ ID NO: 340685 - DNA, 30 bp, Artificial Sequence
  Synthetic oligonucleotide
caccccgtagcggacctgaaacgctttaat

SEQ ID NO: 340686 - DNA, 30 bp, Artificial Sequence
  Synthetic oligonucleotide
ataaaactcaacctatcctttctctttaat

SEQ ID NO: 340687 - DNA, 30 bp, Artificial Sequence
  Synthetic oligonucleotide
cagagacaggccgtttttacccggtttaat

SEQ ID NO: 340688 - DNA, 30 bp, Artificial Sequence
  Synthetic oligonucleotide
ttacgttgcggaattgaggtaggttttaat

SEQ ID NO: 340689 - DNA, 30 bp, Artificial Sequence
  Synthetic oligonucleotide
ccaggatagtgggggttcttgggttttaat

SEQ ID NO: 340690 - DNA, 30 bp, Artificial Sequence
  Synthetic oligonucleotide
ctatgtgcatagcggtcagatgtttttaat

SEQ ID NO: 340691 - DNA, 30 bp, Artificial Sequence
  Synthetic oligonucleotide
ggagccctattgcatgtttgaaaaaaacat

SEQ ID NO: 340692 - DNA, 30 bp, Artificial Sequence
  Synthetic oligonucleotide
atatcggacgctgcgccacagacaaaacat

SEQ ID NO: 340693 - DNA, 30 bp, Artificial Sequence
  Synthetic oligonucleotide
tcctccatgcgccggtgtcgtacaaaacat

SEQ ID NO: 340694 - DNA, 30 bp, Artificial Sequence
  Synthetic oligonucleotide
cggtcaacgtctgatcaatcaataaaacat

SEQ ID NO: 340695 - DNA, 30 bp, Artificial Sequence
  Synthetic oligonucleotide
attaaggaagtttaacaacagtacaaacat

SEQ ID NO: 340696 - DNA, 30 bp, Artificial Sequence
  Synthetic oligonucleotide
ctagggaagtacatagaagactgcaaacat

SEQ ID NO: 340697 - DNA, 30 bp, Artificial Sequence
  Synthetic oligonucleotide
attaagttcggggattatcatcagaaacat

SEQ ID NO: 340698 - DNA, 30 bp, Artificial Sequence
  Synthetic oligonucleotide
taggaaggcgggcccgtagcaaataaacat

SEQ ID NO: 340699 - DNA, 30 bp, Artificial Sequence
  Synthetic oligonucleotide
gtagctgcctgtcgcacgatgcataaacat

SEQ ID NO: 340700 - DNA, 30 bp, Artificial Sequence
  Synthetic oligonucleotide
tattcgtggttgagtgcgagttataaacat

SEQ ID NO: 340701 - DNA, 30 bp, Artificial Sequence
  Synthetic oligonucleotide
cattctattgtggcaaattaacctaaacat

SEQ ID NO: 340702 - DNA, 30 bp, Artificial Sequence
  Synthetic oligonucleotide
tgggtctattctatgtgccagggtaaacat

SEQ ID NO: 340703 - DNA, 30 bp, Artificial Sequence
  Synthetic oligonucleotide
ctacgacaatccatatatgggcttaaacat

SEQ ID NO: 340704 - DNA, 30 bp, Artificial Sequence
  Synthetic oligonucleotide
accgaaaatctctggatttttatacaacat

SEQ ID NO: 340705 - DNA, 31 bp, Artificial Sequence
  Synthetic oligonucleotide
cggcgtctaatatatctgctagacccaacat

SEQ ID NO: 340706 - DNA, 30 bp, Artificial Sequence
  Synthetic oligonucleotide
cagtaggttcggtcttggatgtctcaacat

SEQ ID NO: 340707 - DNA, 30 bp, Artificial Sequence
  Synthetic oligonucleotide
ggctatgaattccagcatgaatgtcaacat

SEQ ID NO: 340708 - DNA, 30 bp, Artificial Sequence
  Synthetic oligonucleotide
caccaacagcacgccaattaacaagaacat

SEQ ID NO: 340709 - DNA, 30 bp, Artificial Sequence
  Synthetic oligonucleotide
gacgcgttaggtacctccccttccgaacat

SEQ ID NO: 340710 - DNA, 30 bp, Artificial Sequence
  Synthetic oligonucleotide
cgggggttgacagcttcatttggggaacat

SEQ ID NO: 340711 - DNA, 30 bp, Artificial Sequence
  Synthetic oligonucleotide
caaagggccctgttactggcgaatgaacat

SEQ ID NO: 340712 - DNA, 30 bp, Artificial Sequence
  Synthetic oligonucleotide
agagccttacaagggggcttgtatgaacat

SEQ ID NO: 340713 - DNA, 30 bp, Artificial Sequence
  Synthetic oligonucleotide
agaaagtatcagcgatttactcttgaacat

SEQ ID NO: 340714 - DNA, 30 bp, Artificial Sequence
  Synthetic oligonucleotide
aaagatcgttcctttccgtcataataacat

SEQ ID NO: 340715 - DNA, 30 bp, Artificial Sequence
  Synthetic oligonucleotide
tatgaaccactgatctaaatgttataacat

SEQ ID NO: 340716 - DNA, 30 bp, Artificial Sequence
  Synthetic oligonucleotide
ggcctggtccaatttggtagtttataacat

SEQ ID NO: 340717 - DNA, 30 bp, Artificial Sequence
  Synthetic oligonucleotide
tgctaaacccttggcttttgctgctaacat

SEQ ID NO: 340718 - DNA, 30 bp, Artificial Sequence
  Synthetic oligonucleotide
atataaagtacagtcaagaatcagtaacat

SEQ ID NO: 340719 - DNA, 30 bp, Artificial Sequence
  Synthetic oligonucleotide
gctactgtgtaagttactgcggggtaacat

SEQ ID NO: 340720 - DNA, 30 bp, Artificial Sequence
  Synthetic oligonucleotide
ttaggataaatccaatagcaatggtaacat

SEQ ID NO: 340721 - DNA, 30 bp, Artificial Sequence
  Synthetic oligonucleotide
gtgggcaactagcttgcggccatgtaacat

SEQ ID NO: 340722 - DNA, 30 bp, Artificial Sequence
  Synthetic oligonucleotide
ttatcccgagttacagggaggtcttaacat

SEQ ID NO: 340723 - DNA, 30 bp, Artificial Sequence
  Synthetic oligonucleotide
aacgcgcctcgtaaaaaagtcttttaacat

SEQ ID NO: 340724 - DNA, 30 bp, Artificial Sequence
  Synthetic oligonucleotide
ggatatgaaataacataacctacaacacat

SEQ ID NO: 340725 - DNA, 30 bp, Artificial Sequence
  Synthetic oligonucleotide
atacaatgatcagaaagttgcttaacacat

SEQ ID NO: 340726 - DNA, 30 bp, Artificial Sequence
  Synthetic oligonucleotide
acatactactgatgtggtaaggtcacacat

SEQ ID NO: 340727 - DNA, 30 bp, Artificial Sequence
  Synthetic oligonucleotide
atgcattgtttgttgtacaaatcgacacat

SEQ ID NO: 340728 - DNA, 30 bp, Artificial Sequence
  Synthetic oligonucleotide
tataattaagtatatgctcaatatacacat

SEQ ID NO: 340729 - DNA, 30 bp, Artificial Sequence
  Synthetic oligonucleotide
tcctgttcagtgattccggccagtacacat

SEQ ID NO: 340730 - DNA, 30 bp, Artificial Sequence
  Synthetic oligonucleotide
cgtagacaccgctcggttgtacgtacacat

SEQ ID NO: 340731 - DNA, 30 bp, Artificial Sequence
  Synthetic oligonucleotide
aggcgcatactgccatgacagcaaccacat

SEQ ID NO: 340732 - DNA, 30 bp, Artificial Sequence
  Synthetic oligonucleotide
ggagggttccgggtagggtttacaccacat

SEQ ID NO: 340733 - DNA, 30 bp, Artificial Sequence
  Synthetic oligonucleotide
gcaaaactaggctcgtatattggaccacat

SEQ ID NO: 340734 - DNA, 30 bp, Artificial Sequence
  Synthetic oligonucleotide
agacttatgagaggccacaacacgccacat

SEQ ID NO: 340735 - DNA, 30 bp, Artificial Sequence
  Synthetic oligonucleotide
tctgtcgctttctccacgatgacgccacat

SEQ ID NO: 340736 - DNA, 30 bp, Artificial Sequence
  Synthetic oligonucleotide
atggatggatctatgtcgatgcggccacat

SEQ ID NO: 340737 - DNA, 30 bp, Artificial Sequence
  Synthetic oligonucleotide
cggtcaatttccaatcgttcatatccacat

SEQ ID NO: 340738 - DNA, 30 bp, Artificial Sequence
  Synthetic oligonucleotide
gtgcttcccgaccaatatgtccctccacat

SEQ ID NO: 340739 - DNA, 30 bp, Artificial Sequence
  Synthetic oligonucleotide
ttgggaataggcgctacagtcctcgcacat

SEQ ID NO: 340740 - DNA, 30 bp, Artificial Sequence
  Synthetic oligonucleotide
tttcgtttaagacgatccgtcaatgcacat

SEQ ID NO: 340741 - DNA, 30 bp, Artificial Sequence
  Synthetic oligonucleotide
agcactgcttgcgtataacctcatgcacat

SEQ ID NO: 340742 - DNA, 30 bp, Artificial Sequence
  Synthetic oligonucleotide
agccatgaacctcactgctgtactgcacat

SEQ ID NO: 340743 - DNA, 30 bp, Artificial Sequence
  Synthetic oligonucleotide
ctgttgagcggatattcgatgggtgcacat

SEQ ID NO: 340744 - DNA, 30 bp, Artificial Sequence
  Synthetic oligonucleotide
agtctcctatacgttgaaccccttgcacat

SEQ ID NO: 340745 - DNA, 30 bp, Artificial Sequence
  Synthetic oligonucleotide
ttggaaagtgtactcctgttaacctcacat

SEQ ID NO: 340746 - DNA, 30 bp, Artificial Sequence
  Synthetic oligonucleotide
acctacaattagcgtgtataaaagtcacat

SEQ ID NO: 340747 - DNA, 30 bp, Artificial Sequence
  Synthetic oligonucleotide
gcccacctccattggtaacctaagtcacat

SEQ ID NO: 340748 - DNA, 30 bp, Artificial Sequence
  Synthetic oligonucleotide
atcagtggccaccgagagggggtgtcacat

SEQ ID NO: 340749 - DNA, 30 bp, Artificial Sequence
  Synthetic oligonucleotide
tgaaactggattagatcagagctttcacat

SEQ ID NO: 340750 - DNA, 30 bp, Artificial Sequence
  Synthetic oligonucleotide
gagtatttcgggatggcaagagtaagacat

SEQ ID NO: 340751 - DNA, 30 bp, Artificial Sequence
  Synthetic oligonucleotide
cgtggcacgatagggaaccaaggcagacat

SEQ ID NO: 340752 - DNA, 30 bp, Artificial Sequence
  Synthetic oligonucleotide
ggggagccgcgatcccttgggatcagacat

SEQ ID NO: 340753 - DNA, 30 bp, Artificial Sequence
  Synthetic oligonucleotide
ggtcttgaatcaagtaaaatcccacgacat

SEQ ID NO: 340754 - DNA, 30 bp, Artificial Sequence
  Synthetic oligonucleotide
taactatgctacgcggggcgcttacgacat

SEQ ID NO: 340755 - DNA, 30 bp, Artificial Sequence
  Synthetic oligonucleotide
tccacggtcatggccagcagtgaccgacat

SEQ ID NO: 340756 - DNA, 30 bp, Artificial Sequence
  Synthetic oligonucleotide
tagggtccacgcgttggagactgtcgacat

SEQ ID NO: 340757 - DNA, 30 bp, Artificial Sequence
  Synthetic oligonucleotide
aagagcaatcagtgtctgcatcttcgacat

SEQ ID NO: 340758 - DNA, 30 bp, Artificial Sequence
  Synthetic oligonucleotide
ctattaatctactcttgaaggaacggacat

SEQ ID NO: 340759 - DNA, 30 bp, Artificial Sequence
  Synthetic oligonucleotide
gcaacggcggcatcaccagtgaacggacat

SEQ ID NO: 340760 - DNA, 30 bp, Artificial Sequence
  Synthetic oligonucleotide
tggtctcgtacagcaggatataacggacat

SEQ ID NO: 340761 - DNA, 30 bp, Artificial Sequence
  Synthetic oligonucleotide
gtagcctggacatatctatcccacggacat

SEQ ID NO: 340762 - DNA, 30 bp, Artificial Sequence
  Synthetic oligonucleotide
gtttgcgtctcggaaaaaggtcccggacat

SEQ ID NO: 340763 - DNA, 30 bp, Artificial Sequence
  Synthetic oligonucleotide
tccgcgaggctgcactttgcaggcggacat

SEQ ID NO: 340764 - DNA, 30 bp, Artificial Sequence
  Synthetic oligonucleotide
cgccgattccaactatcgtagatcggacat

SEQ ID NO: 340765 - DNA, 30 bp, Artificial Sequence
  Synthetic oligonucleotide
gtcttccggcatatatctatttagggacat

SEQ ID NO: 340766 - DNA, 30 bp, Artificial Sequence
  Synthetic oligonucleotide
aatccctatgaggggcgctatccgggacat

SEQ ID NO: 340767 - DNA, 30 bp, Artificial Sequence
  Synthetic oligonucleotide
tctatcatttttagatgtctcgggggacat

SEQ ID NO: 340768 - DNA, 30 bp, Artificial Sequence
  Synthetic oligonucleotide
gggcatgaccgtcgtgcttttatgggacat

SEQ ID NO: 340769 - DNA, 30 bp, Artificial Sequence
  Synthetic oligonucleotide
atggcgccagctgttatgcgactgggacat

SEQ ID NO: 340770 - DNA, 30 bp, Artificial Sequence
  Synthetic oligonucleotide
cttgtttaccgtactctgccgtcctgacat

SEQ ID NO: 340771 - DNA, 30 bp, Artificial Sequence
  Synthetic oligonucleotide
tcgattgacaatgtgaattgatagtgacat

SEQ ID NO: 340772 - DNA, 30 bp, Artificial Sequence
  Synthetic oligonucleotide
ttggctagggctcgtagcaaacggtgacat

SEQ ID NO: 340773 - DNA, 30 bp, Artificial Sequence
  Synthetic oligonucleotide
tagggtgaaactataaattgtaaaatacat

SEQ ID NO: 340774 - DNA, 30 bp, Artificial Sequence
  Synthetic oligonucleotide
aattagatccacggggatatagaaatacat

SEQ ID NO: 340775 - DNA, 30 bp, Artificial Sequence
  Synthetic oligonucleotide
taatggaccagaatgggagcgttcatacat

SEQ ID NO: 340776 - DNA, 30 bp, Artificial Sequence
  Synthetic oligonucleotide
tgtatcatatcagcctacgttaggatacat

SEQ ID NO: 340777 - DNA, 30 bp, Artificial Sequence
  Synthetic oligonucleotide
atgagattatcagttctaagcctgatacat

SEQ ID NO: 340778 - DNA, 30 bp, Artificial Sequence
  Synthetic oligonucleotide
ttaagtaacatcctagtggacattatacat

SEQ ID NO: 340779 - DNA, 30 bp, Artificial Sequence
  Synthetic oligonucleotide
ttgtcaataaatcgtgaacggattatacat

SEQ ID NO: 340780 - DNA, 30 bp, Artificial Sequence
  Synthetic oligonucleotide
tagatacaagatacaattgcatgcctacat

SEQ ID NO: 340781 - DNA, 30 bp, Artificial Sequence
  Synthetic oligonucleotide
gcttcgctagagtttatgagggtcctacat

SEQ ID NO: 340782 - DNA, 30 bp, Artificial Sequence
  Synthetic oligonucleotide
agtcatcccgagtcggtacccaggctacat

SEQ ID NO: 340783 - DNA, 30 bp, Artificial Sequence
  Synthetic oligonucleotide
ccgcctggaagtaattaaatataagtacat

SEQ ID NO: 340784 - DNA, 30 bp, Artificial Sequence
  Synthetic oligonucleotide
agatatctaacatgtatcacttaagtacat

SEQ ID NO: 340785 - DNA, 30 bp, Artificial Sequence
  Synthetic oligonucleotide
attgaaccgaggaggcattcataggtacat

SEQ ID NO: 340786 - DNA, 28 bp, Artificial Sequence
  Synthetic oligonucleotide
acggacggggaaaagtatccatgtacat

SEQ ID NO: 340787 - DNA, 30 bp, Artificial Sequence
  Synthetic oligonucleotide
tgtgcccgtatcgctttgaatcctgtacat

SEQ ID NO: 340788 - DNA, 30 bp, Artificial Sequence
  Synthetic oligonucleotide
aagacagcgatgaagagagcctctgtacat

SEQ ID NO: 340789 - DNA, 30 bp, Artificial Sequence
  Synthetic oligonucleotide
accaagactatgaagcatgatagattacat

SEQ ID NO: 340790 - DNA, 30 bp, Artificial Sequence
  Synthetic oligonucleotide
tggccaagcctatcagacaaacgattacat

SEQ ID NO: 340791 - DNA, 30 bp, Artificial Sequence
  Synthetic oligonucleotide
gctccacgtgtagtggttaaagtattacat

SEQ ID NO: 340792 - DNA, 30 bp, Artificial Sequence
  Synthetic oligonucleotide
atgccgttggctgggatattctacttacat

SEQ ID NO: 340793 - DNA, 30 bp, Artificial Sequence
  Synthetic oligonucleotide
ggttcgtattcacaagggcagttcttacat

SEQ ID NO: 340794 - DNA, 30 bp, Artificial Sequence
  Synthetic oligonucleotide
ttggacttgataatggagggtcagttacat

SEQ ID NO: 340795 - DNA, 30 bp, Artificial Sequence
  Synthetic oligonucleotide
tactgtattacaacgtaatggtggttacat

SEQ ID NO: 340796 - DNA, 30 bp, Artificial Sequence
  Synthetic oligonucleotide
gacggaatcatgtgagccgttgcaaaccat

SEQ ID NO: 340797 - DNA, 30 bp, Artificial Sequence
  Synthetic oligonucleotide
tcacatacattcacgttgtccgctaaccat

SEQ ID NO: 340798 - DNA, 30 bp, Artificial Sequence
  Synthetic oligonucleotide
acgggcgtgtaagaggatatctgtaaccat

SEQ ID NO: 340799 - DNA, 30 bp, Artificial Sequence
  Synthetic oligonucleotide
ggtactaacagctagattcgtcaccaccat

SEQ ID NO: 340800 - DNA, 30 bp, Artificial Sequence
  Synthetic oligonucleotide
atgatgagggaaatacgaggattagaccat

SEQ ID NO: 340801 - DNA, 30 bp, Artificial Sequence
  Synthetic oligonucleotide
tgataaatatgataggtccgagacgaccat

SEQ ID NO: 340802 - DNA, 30 bp, Artificial Sequence
  Synthetic oligonucleotide
gtaaacttaggtaatttgtcgatcgaccat

SEQ ID NO: 340803 - DNA, 30 bp, Artificial Sequence
  Synthetic oligonucleotide
tgccatgcgatgcgggaagtatgtgaccat

SEQ ID NO: 340804 - DNA, 30 bp, Artificial Sequence
  Synthetic oligonucleotide
cgagctgtcgtacagggtcttcttgaccat

SEQ ID NO: 340805 - DNA, 30 bp, Artificial Sequence
  Synthetic oligonucleotide
gttatgaggggctatcatagtctgtaccat

SEQ ID NO: 340806 - DNA, 30 bp, Artificial Sequence
  Synthetic oligonucleotide
agcctgcgtcacatcatgtgcgcttaccat

SEQ ID NO: 340807 - DNA, 30 bp, Artificial Sequence
  Synthetic oligonucleotide
acaggaacggacctagtggtcagttaccat

SEQ ID NO: 340808 - DNA, 30 bp, Artificial Sequence
  Synthetic oligonucleotide
atatatcaaaaatcattcgcgataacccat

SEQ ID NO: 340809 - DNA, 30 bp, Artificial Sequence
  Synthetic oligonucleotide
ttgacggtgatcctactgcagatcacccat

SEQ ID NO: 340810 - DNA, 30 bp, Artificial Sequence
  Synthetic oligonucleotide
ctcagtctcggattaccatcgttcacccat

SEQ ID NO: 340811 - DNA, 30 bp, Artificial Sequence
  Synthetic oligonucleotide
aacgccgcacaacaactgctgaagacccat

SEQ ID NO: 340812 - DNA, 30 bp, Artificial Sequence
  Synthetic oligonucleotide
ttttaagtggactcgccagaccatacccat

SEQ ID NO: 340813 - DNA, 30 bp, Artificial Sequence
  Synthetic oligonucleotide
attctagcgttttcagataggggagcccat

SEQ ID NO: 340814 - DNA, 30 bp, Artificial Sequence
  Synthetic oligonucleotide
gcaaatgagatgcgactgagcttcgcccat

SEQ ID NO: 340815 - DNA, 30 bp, Artificial Sequence
  Synthetic oligonucleotide
ctcctagcatattccaggataggggcccat

SEQ ID NO: 340816 - DNA, 30 bp, Artificial Sequence
  Synthetic oligonucleotide
gaataggtctatgagccagcgactgcccat

SEQ ID NO: 340817 - DNA, 30 bp, Artificial Sequence
  Synthetic oligonucleotide
cacattttaactgcgcgatcgaagtcccat

SEQ ID NO: 340818 - DNA, 30 bp, Artificial Sequence
  Synthetic oligonucleotide
tgccggtcgggtacgcgagataattcccat

SEQ ID NO: 340819 - DNA, 30 bp, Artificial Sequence
  Synthetic oligonucleotide
tctcgtggtgccagaagcctggaaagccat

SEQ ID NO: 340820 - DNA, 30 bp, Artificial Sequence
  Synthetic oligonucleotide
ctatcatgtagagtacgcgatgtaagccat

SEQ ID NO: 340821 - DNA, 30 bp, Artificial Sequence
  Synthetic oligonucleotide
actgagccaaatttgagagaatagagccat

SEQ ID NO: 340822 - DNA, 30 bp, Artificial Sequence
  Synthetic oligonucleotide
cgatcgcctaccacgctaaaggggagccat

SEQ ID NO: 340823 - DNA, 30 bp, Artificial Sequence
  Synthetic oligonucleotide
aatgtatccgttagatggctgagtagccat

SEQ ID NO: 340824 - DNA, 30 bp, Artificial Sequence
  Synthetic oligonucleotide
cgaacgctcaacatgatggcaggtagccat

SEQ ID NO: 340825 - DNA, 30 bp, Artificial Sequence
  Synthetic oligonucleotide
ctatagcaccctcatacaaaaggacgccat

SEQ ID NO: 340826 - DNA, 30 bp, Artificial Sequence
  Synthetic oligonucleotide
cgttctacgtctccagacactcagcgccat

SEQ ID NO: 340827 - DNA, 30 bp, Artificial Sequence
  Synthetic oligonucleotide
ggcctgcaggacagctttaactcgcgccat

SEQ ID NO: 340828 - DNA, 30 bp, Artificial Sequence
  Synthetic oligonucleotide
atactcgagtggcgctgaaaacgcggccat

SEQ ID NO: 340829 - DNA, 30 bp, Artificial Sequence
  Synthetic oligonucleotide
taacaaatatcttcccacctcggcggccat

SEQ ID NO: 340830 - DNA, 30 bp, Artificial Sequence
  Synthetic oligonucleotide
ctgtatgccagggcatcgcacgtcggccat

SEQ ID NO: 340831 - DNA, 30 bp, Artificial Sequence
  Synthetic oligonucleotide
tgatcttctacatcagggggtccgggccat

SEQ ID NO: 340832 - DNA, 30 bp, Artificial Sequence
  Synthetic oligonucleotide
gtgcgtcctcaaaagacggctgcgggccat

SEQ ID NO: 340833 - DNA, 30 bp, Artificial Sequence
  Synthetic oligonucleotide
gtatcgtaccggcttctcacggggggccat

SEQ ID NO: 340834 - DNA, 30 bp, Artificial Sequence
  Synthetic oligonucleotide
gtctctctagattagtcgtaagttggccat

SEQ ID NO: 340835 - DNA, 30 bp, Artificial Sequence
  Synthetic oligonucleotide
tttgctagcacaattatgcgaaactgccat

SEQ ID NO: 340836 - DNA, 30 bp, Artificial Sequence
  Synthetic oligonucleotide
gcgttggacaagatgggacaaggctgccat

SEQ ID NO: 340837 - DNA, 30 bp, Artificial Sequence
  Synthetic oligonucleotide
aactctgccggatgattaaaattgtgccat

SEQ ID NO: 340838 - DNA, 30 bp, Artificial Sequence
  Synthetic oligonucleotide
gacaaccgggtggtaatcgagttaatccat

SEQ ID NO: 340839 - DNA, 30 bp, Artificial Sequence
  Synthetic oligonucleotide
ctactgttagagcggtttctctacatccat

SEQ ID NO: 340840 - DNA, 30 bp, Artificial Sequence
  Synthetic oligonucleotide
tagcctcgtaatggattccgggctatccat

SEQ ID NO: 340841 - DNA, 30 bp, Artificial Sequence
  Synthetic oligonucleotide
gttttagcccggggtgcgaacccactccat

SEQ ID NO: 340842 - DNA, 30 bp, Artificial Sequence
  Synthetic oligonucleotide
gggagttgaataatgacccgtgccctccat

SEQ ID NO: 340843 - DNA, 30 bp, Artificial Sequence
  Synthetic oligonucleotide
cgtaacttgtttggtttctaagtcctccat

SEQ ID NO: 340844 - DNA, 30 bp, Artificial Sequence
  Synthetic oligonucleotide
cttgagtaaacaagtgagcatcggctccat

SEQ ID NO: 340845 - DNA, 30 bp, Artificial Sequence
  Synthetic oligonucleotide
acaaggcttttaattcgcttctggctccat

SEQ ID NO: 340846 - DNA, 30 bp, Artificial Sequence
  Synthetic oligonucleotide
tactgctaacaacagcgggtatttctccat

SEQ ID NO: 340847 - DNA, 30 bp, Artificial Sequence
  Synthetic oligonucleotide
agggcgggttaaccattgatctttctccat

SEQ ID NO: 340848 - DNA, 30 bp, Artificial Sequence
  Synthetic oligonucleotide
tgatgacggacaatcggcgttacagtccat

SEQ ID NO: 340849 - DNA, 30 bp, Artificial Sequence
  Synthetic oligonucleotide
gcaggtcaagggacggcatacagagtccat

SEQ ID NO: 340850 - DNA, 30 bp, Artificial Sequence
  Synthetic oligonucleotide
agatccctttacttatagctcggagtccat

SEQ ID NO: 340851 - DNA, 30 bp, Artificial Sequence
  Synthetic oligonucleotide
acgacccgcaaagaaaggatcaacgtccat

SEQ ID NO: 340852 - DNA, 30 bp, Artificial Sequence
  Synthetic oligonucleotide
ggtctcttgagagcgtgtcttagcgtccat

SEQ ID NO: 340853 - DNA, 30 bp, Artificial Sequence
  Synthetic oligonucleotide
agccatcgcggttaaccacgtcgcgtccat

SEQ ID NO: 340854 - DNA, 30 bp, Artificial Sequence
  Synthetic oligonucleotide
tggctcgcgccgctgacggaaatggtccat

SEQ ID NO: 340855 - DNA, 30 bp, Artificial Sequence
  Synthetic oligonucleotide
gcacgcttagttcgcgtcctaaatgtccat

SEQ ID NO: 340856 - DNA, 30 bp, Artificial Sequence
  Synthetic oligonucleotide
gaacacctcttcgcttttccttgtgtccat

SEQ ID NO: 340857 - DNA, 30 bp, Artificial Sequence
  Synthetic oligonucleotide
tctgggaaaaactcatggggtgcattccat

SEQ ID NO: 340858 - DNA, 30 bp, Artificial Sequence
  Synthetic oligonucleotide
cagtatctgatgtaagtatgagcaaagcat

SEQ ID NO: 340859 - DNA, 30 bp, Artificial Sequence
  Synthetic oligonucleotide
tgtcgtcgtcacatgatgagctcaaagcat

SEQ ID NO: 340860 - DNA, 30 bp, Artificial Sequence
  Synthetic oligonucleotide
tgcatcacctgtacattttaggggaagcat

SEQ ID NO: 340861 - DNA, 30 bp, Artificial Sequence
  Synthetic oligonucleotide
atcacgcctaaactcctcacgttgaagcat

SEQ ID NO: 340862 - DNA, 30 bp, Artificial Sequence
  Synthetic oligonucleotide
gcataccagtcgcctcgacagcataagcat

SEQ ID NO: 340863 - DNA, 30 bp, Artificial Sequence
  Synthetic oligonucleotide
ctttgtaaggtgtcaataaagagtaagcat

SEQ ID NO: 340864 - DNA, 30 bp, Artificial Sequence
  Synthetic oligonucleotide
ttacatacgtgatagtttggtcttaagcat

SEQ ID NO: 340865 - DNA, 30 bp, Artificial Sequence
  Synthetic oligonucleotide
cggcgcatcccgctaggtcaaaaacagcat

SEQ ID NO: 340866 - DNA, 30 bp, Artificial Sequence
  Synthetic oligonucleotide
ctggtgaggttgacaggtgggggccagcat

SEQ ID NO: 340867 - DNA, 30 bp, Artificial Sequence
  Synthetic oligonucleotide
atctgcgtccgtactctgccattccagcat

SEQ ID NO: 340868 - DNA, 30 bp, Artificial Sequence
  Synthetic oligonucleotide
caatctgacttagaacgagcacggcagcat

SEQ ID NO: 340869 - DNA, 30 bp, Artificial Sequence
  Synthetic oligonucleotide
cataatgcttaagttcctacctacgagcat

SEQ ID NO: 340870 - DNA, 30 bp, Artificial Sequence
  Synthetic oligonucleotide
attctgagtcgttttggtggtcgcgagcat

SEQ ID NO: 340871 - DNA, 30 bp, Artificial Sequence
  Synthetic oligonucleotide
agcacggtaagtatgtggtgagcggagcat

SEQ ID NO: 340872 - DNA, 30 bp, Artificial Sequence
  Synthetic oligonucleotide
tatggagtgcccacacacgacgcggagcat

SEQ ID NO: 340873 - DNA, 30 bp, Artificial Sequence
  Synthetic oligonucleotide
gatttaatcggatcttctggtctggagcat

SEQ ID NO: 340874 - DNA, 30 bp, Artificial Sequence
  Synthetic oligonucleotide
gcaacgaaaacccgcatgaaattggagcat

SEQ ID NO: 340875 - DNA, 30 bp, Artificial Sequence
  Synthetic oligonucleotide
aagatttgctgaactcctcatgatgagcat

SEQ ID NO: 340876 - DNA, 30 bp, Artificial Sequence
  Synthetic oligonucleotide
aaaaaactggtatattgagagtatgagcat

SEQ ID NO: 340877 - DNA, 30 bp, Artificial Sequence
  Synthetic oligonucleotide
ggattccgattctctgaataatctgagcat

SEQ ID NO: 340878 - DNA, 30 bp, Artificial Sequence
  Synthetic oligonucleotide
agtgcctcttacgtagtgtcaatatagcat

SEQ ID NO: 340879 - DNA, 30 bp, Artificial Sequence
  Synthetic oligonucleotide
tcccgacaggttaacggcccagtatagcat

SEQ ID NO: 340880 - DNA, 30 bp, Artificial Sequence
  Synthetic oligonucleotide
tctgtttggcagggataaggatcctagcat

SEQ ID NO: 340881 - DNA, 30 bp, Artificial Sequence
  Synthetic oligonucleotide
ctctcaggtgggattctgtttaattagcat

SEQ ID NO: 340882 - DNA, 30 bp, Artificial Sequence
  Synthetic oligonucleotide
ctacaacatcatggctgccaagcttagcat

SEQ ID NO: 340883 - DNA, 30 bp, Artificial Sequence
  Synthetic oligonucleotide
gtttacgcggtatgggataaactttagcat

SEQ ID NO: 340884 - DNA, 30 bp, Artificial Sequence
  Synthetic oligonucleotide
atcacaagatgttaagagcggtgaacgcat

SEQ ID NO: 340885 - DNA, 30 bp, Artificial Sequence
  Synthetic oligonucleotide
cctttgttccggtggattttgctcacgcat

SEQ ID NO: 340886 - DNA, 30 bp, Artificial Sequence
  Synthetic oligonucleotide
gcatagagcttgccttttgctcagacgcat

SEQ ID NO: 340887 - DNA, 30 bp, Artificial Sequence
  Synthetic oligonucleotide
ccaggtaggcaatggccataaaggacgcat

SEQ ID NO: 340888 - DNA, 30 bp, Artificial Sequence
  Synthetic oligonucleotide
aacactacgctcgcaacgatccatacgcat

SEQ ID NO: 340889 - DNA, 30 bp, Artificial Sequence
  Synthetic oligonucleotide
attatggtattggacgattagactacgcat

SEQ ID NO: 340890 - DNA, 30 bp, Artificial Sequence
  Synthetic oligonucleotide
tcgcattcttttgaacacacaggaccgcat

SEQ ID NO: 340891 - DNA, 30 bp, Artificial Sequence
  Synthetic oligonucleotide
cctcgaaattagctgcgtagacggccgcat

SEQ ID NO: 340892 - DNA, 30 bp, Artificial Sequence
  Synthetic oligonucleotide
actggttgattgataccgtcctggccgcat

SEQ ID NO: 340893 - DNA, 30 bp, Artificial Sequence
  Synthetic oligonucleotide
acacttccttgggtaataacgtgtccgcat

SEQ ID NO: 340894 - DNA, 30 bp, Artificial Sequence
  Synthetic oligonucleotide
aggatctgcatcactcatgcgacggcgcat

SEQ ID NO: 340895 - DNA, 30 bp, Artificial Sequence
  Synthetic oligonucleotide
tggacacttgttaatgatttagatgcgcat

SEQ ID NO: 340896 - DNA, 30 bp, Artificial Sequence
  Synthetic oligonucleotide
caaattaagaaaaactgtcgttgtgcgcat

SEQ ID NO: 340897 - DNA, 30 bp, Artificial Sequence
  Synthetic oligonucleotide
gttagatgtaatcaagctacgggatcgcat

SEQ ID NO: 340898 - DNA, 30 bp, Artificial Sequence
  Synthetic oligonucleotide
gcatcttactataggtgaccaaagtcgcat

SEQ ID NO: 340899 - DNA, 30 bp, Artificial Sequence
  Synthetic oligonucleotide
tagggttagcggcattattggtcgtcgcat

SEQ ID NO: 340900 - DNA, 30 bp, Artificial Sequence
  Synthetic oligonucleotide
aagtcaaaggtcccctggaaaaattcgcat

SEQ ID NO: 340901 - DNA, 30 bp, Artificial Sequence
  Synthetic oligonucleotide
cgaagtatgcgtgccactcgtgattcgcat

SEQ ID NO: 340902 - DNA, 30 bp, Artificial Sequence
  Synthetic oligonucleotide
tagtaccggaaccagtcgaggtattcgcat

SEQ ID NO: 340903 - DNA, 30 bp, Artificial Sequence
  Synthetic oligonucleotide
aatcggccgtgaggatcgggccaaaggcat

SEQ ID NO: 340904 - DNA, 30 bp, Artificial Sequence
  Synthetic oligonucleotide
agcaccaagacgccggcggtcgtaaggcat

SEQ ID NO: 340905 - DNA, 30 bp, Artificial Sequence
  Synthetic oligonucleotide
gcccaaaccacggctttcatggtcaggcat

SEQ ID NO: 340906 - DNA, 30 bp, Artificial Sequence
  Synthetic oligonucleotide
caattatgggggagctgtgcattcaggcat

SEQ ID NO: 340907 - DNA, 30 bp, Artificial Sequence
  Synthetic oligonucleotide
tttaacccgtctcaacggaatcagaggcat

SEQ ID NO: 340908 - DNA, 30 bp, Artificial Sequence
  Synthetic oligonucleotide
ttcggggcaaataaaggacagaaacggcat

SEQ ID NO: 340909 - DNA, 30 bp, Artificial Sequence
  Synthetic oligonucleotide
accatcagctgccatgttactatccggcat

SEQ ID NO: 340910 - DNA, 30 bp, Artificial Sequence
  Synthetic oligonucleotide
gggatggtaccctaggtttacgagcggcat

SEQ ID NO: 340911 - DNA, 30 bp, Artificial Sequence
  Synthetic oligonucleotide
gagggaagagccaaacctgttatagggcat

SEQ ID NO: 340912 - DNA, 30 bp, Artificial Sequence
  Synthetic oligonucleotide
ttaggttctcgtggggatgttagcgggcat

SEQ ID NO: 340913 - DNA, 30 bp, Artificial Sequence
  Synthetic oligonucleotide
gcagttgcaaccagaagtttaatcgggcat

SEQ ID NO: 340914 - DNA, 30 bp, Artificial Sequence
  Synthetic oligonucleotide
gagtggtgttcgaaaaggcaaatggggcat

SEQ ID NO: 340915 - DNA, 30 bp, Artificial Sequence
  Synthetic oligonucleotide
tcatgtccaataccacttgcctttgggcat

SEQ ID NO: 340916 - DNA, 30 bp, Artificial Sequence
  Synthetic oligonucleotide
cggtgtgagtcctccgcaacgacgtggcat

SEQ ID NO: 340917 - DNA, 30 bp, Artificial Sequence
  Synthetic oligonucleotide
cccgtaagtctcctcgagaccgcgtggcat

SEQ ID NO: 340918 - DNA, 30 bp, Artificial Sequence
  Synthetic oligonucleotide
tcttggggctaatatgcaaatgcgtggcat

SEQ ID NO: 340919 - DNA, 30 bp, Artificial Sequence
  Synthetic oligonucleotide
accctcgcagccctgtaagattggtggcat

SEQ ID NO: 340920 - DNA, 30 bp, Artificial Sequence
  Synthetic oligonucleotide
catccaggccatgtttagctgcgttggcat

SEQ ID NO: 340921 - DNA, 30 bp, Artificial Sequence
  Synthetic oligonucleotide
gtgcttcatatcatggacctcctttggcat

SEQ ID NO: 340922 - DNA, 30 bp, Artificial Sequence
  Synthetic oligonucleotide
tcgtttaatcgaaagtcttagttttggcat

SEQ ID NO: 340923 - DNA, 30 bp, Artificial Sequence
  Synthetic oligonucleotide
aaagcttgcaaccaccccctcgaaatgcat

SEQ ID NO: 340924 - DNA, 30 bp, Artificial Sequence
  Synthetic oligonucleotide
cgtgtgttatttggaaaatttgcaatgcat

SEQ ID NO: 340925 - DNA, 30 bp, Artificial Sequence
  Synthetic oligonucleotide
cacgaattttaccctcaaaacagaatgcat

SEQ ID NO: 340926 - DNA, 30 bp, Artificial Sequence
  Synthetic oligonucleotide
ataccttcacgttgccaaagatgaatgcat

SEQ ID NO: 340927 - DNA, 30 bp, Artificial Sequence
  Synthetic oligonucleotide
ccaattatgaacataatacgtgtaatgcat

SEQ ID NO: 340928 - DNA, 30 bp, Artificial Sequence
  Synthetic oligonucleotide
gctagctagatgcgtacacggagcatgcat

SEQ ID NO: 340929 - DNA, 30 bp, Artificial Sequence
  Synthetic oligonucleotide
gagcttgcaatgtatcagatgaagatgcat

SEQ ID NO: 340930 - DNA, 30 bp, Artificial Sequence
  Synthetic oligonucleotide
ggtgttaggtagcgcagggcaaggatgcat

SEQ ID NO: 340931 - DNA, 30 bp, Artificial Sequence
  Synthetic oligonucleotide
gaaacgggggtcctctttacgtatatgcat

SEQ ID NO: 340932 - DNA, 30 bp, Artificial Sequence
  Synthetic oligonucleotide
gcaaacgtgattagtatggggtatatgcat

SEQ ID NO: 340933 - DNA, 30 bp, Artificial Sequence
  Synthetic oligonucleotide
agccgtgctgttattgcactttttatgcat

SEQ ID NO: 340934 - DNA, 30 bp, Artificial Sequence
  Synthetic oligonucleotide
gtcatgtgagtattagggtgctcactgcat

SEQ ID NO: 340935 - DNA, 30 bp, Artificial Sequence
  Synthetic oligonucleotide
ataccgggttatttcgcgtactgactgcat

SEQ ID NO: 340936 - DNA, 30 bp, Artificial Sequence
  Synthetic oligonucleotide
ccttaacaatggcgccaaatgcacctgcat

SEQ ID NO: 340937 - DNA, 30 bp, Artificial Sequence
  Synthetic oligonucleotide
ttcagcgatagagagactaccggcctgcat

SEQ ID NO: 340938 - DNA, 30 bp, Artificial Sequence
  Synthetic oligonucleotide
gagataaatgacaggactattaatctgcat

SEQ ID NO: 340939 - DNA, 30 bp, Artificial Sequence
  Synthetic oligonucleotide
caacgaaacagtcgtgctctgtatctgcat

SEQ ID NO: 340940 - DNA, 30 bp, Artificial Sequence
  Synthetic oligonucleotide
ctctgaacccgacccatgcgctacgtgcat

SEQ ID NO: 340941 - DNA, 30 bp, Artificial Sequence
  Synthetic oligonucleotide
acgtctatgatcgtctattggtccgtgcat

SEQ ID NO: 340942 - DNA, 30 bp, Artificial Sequence
  Synthetic oligonucleotide
ccgaagtttgaggcctataatagtgtgcat

SEQ ID NO: 340943 - DNA, 29 bp, Artificial Sequence
  Synthetic oligonucleotide
aaggggataatatgatagggggtgtgcat

SEQ ID NO: 340944 - DNA, 30 bp, Artificial Sequence
  Synthetic oligonucleotide
tccgcggtctttatcgcccaggcattgcat

SEQ ID NO: 340945 - DNA, 30 bp, Artificial Sequence
  Synthetic oligonucleotide
agcaattagtaaatccggctcggattgcat

SEQ ID NO: 340946 - DNA, 30 bp, Artificial Sequence
  Synthetic oligonucleotide
attaggccctagcataagtcaaggttgcat

SEQ ID NO: 340947 - DNA, 30 bp, Artificial Sequence
  Synthetic oligonucleotide
gactgaactctgaagtgacgttctttgcat

SEQ ID NO: 340948 - DNA, 30 bp, Artificial Sequence
  Synthetic oligonucleotide
tttaggagatggagcgcccctgtaaatcat

SEQ ID NO: 340949 - DNA, 30 bp, Artificial Sequence
  Synthetic oligonucleotide
gcggttggaacgcttgtgggggccaatcat

SEQ ID NO: 340950 - DNA, 30 bp, Artificial Sequence
  Synthetic oligonucleotide
ggtctctcagctcgtggcactcggaatcat

SEQ ID NO: 340951 - DNA, 30 bp, Artificial Sequence
  Synthetic oligonucleotide
tatctgtccatgcgagcgtggctgaatcat

SEQ ID NO: 340952 - DNA, 30 bp, Artificial Sequence
  Synthetic oligonucleotide
gggtatccgcattgagggagaaataatcat

SEQ ID NO: 340953 - DNA, 30 bp, Artificial Sequence
  Synthetic oligonucleotide
agcgtatcacaggagcaactgtataatcat

SEQ ID NO: 340954 - DNA, 30 bp, Artificial Sequence
  Synthetic oligonucleotide
ttaaggcatttggcaggcaaaggtaatcat

SEQ ID NO: 340955 - DNA, 30 bp, Artificial Sequence
  Synthetic oligonucleotide
aggggtctgtaagtgataaagggtaatcat

SEQ ID NO: 340956 - DNA, 30 bp, Artificial Sequence
  Synthetic oligonucleotide
tacgaatcacgtgcccattttgttaatcat

SEQ ID NO: 340957 - DNA, 30 bp, Artificial Sequence
  Synthetic oligonucleotide
ttgtttcaaagaatggtacaatttaatcat

SEQ ID NO: 340958 - DNA, 30 bp, Artificial Sequence
  Synthetic oligonucleotide
tagtaaggccgcaatagtgctaggcatcat

SEQ ID NO: 340959 - DNA, 29 bp, Artificial Sequence
  Synthetic oligonucleotide
atagttgttgacaggtgtccgggcatcat

SEQ ID NO: 340960 - DNA, 30 bp, Artificial Sequence
  Synthetic oligonucleotide
tccttttccgggtcagggaggttgcatcat

SEQ ID NO: 340961 - DNA, 30 bp, Artificial Sequence
  Synthetic oligonucleotide
tgcaaaaagaagagaggcacgcttcatcat

SEQ ID NO: 340962 - DNA, 30 bp, Artificial Sequence
  Synthetic oligonucleotide
gatcaggatgctcgttgagtgttcgatcat

SEQ ID NO: 340963 - DNA, 30 bp, Artificial Sequence
  Synthetic oligonucleotide
tcgggctgcctaaccgattatcgggatcat

SEQ ID NO: 340964 - DNA, 30 bp, Artificial Sequence
  Synthetic oligonucleotide
gttacattaatgcccatcatctgggatcat

SEQ ID NO: 340965 - DNA, 30 bp, Artificial Sequence
  Synthetic oligonucleotide
ccaagtgtccggtggattcataatgatcat

SEQ ID NO: 340966 - DNA, 30 bp, Artificial Sequence
  Synthetic oligonucleotide
ctgaagaggcctgggtttctagcatatcat

SEQ ID NO: 340967 - DNA, 30 bp, Artificial Sequence
  Synthetic oligonucleotide
tagcatgggcaacgcaatgatagatatcat

SEQ ID NO: 340968 - DNA, 30 bp, Artificial Sequence
  Synthetic oligonucleotide
tagacgtggcgaccaagctgaggatatcat

SEQ ID NO: 340969 - DNA, 28 bp, Artificial Sequence
  Synthetic oligonucleotide
acccaattatctgtacctttggtatcat

SEQ ID NO: 340970 - DNA, 30 bp, Artificial Sequence
  Synthetic oligonucleotide
ctatatagcgagctgatatcttgttatcat

SEQ ID NO: 340971 - DNA, 30 bp, Artificial Sequence
  Synthetic oligonucleotide
ttgttgcgcctcacggattatatttatcat

SEQ ID NO: 340972 - DNA, 30 bp, Artificial Sequence
  Synthetic oligonucleotide
gtgccgcgagggcccggcctgcaaactcat

SEQ ID NO: 340973 - DNA, 30 bp, Artificial Sequence
  Synthetic oligonucleotide
taatctagttgcgaattaggtgaaactcat

SEQ ID NO: 340974 - DNA, 30 bp, Artificial Sequence
  Synthetic oligonucleotide
agtcacgcatctttatggcacaacactcat

SEQ ID NO: 340975 - DNA, 30 bp, Artificial Sequence
  Synthetic oligonucleotide
tcagcgagattgggctcgcgggccactcat

SEQ ID NO: 340976 - DNA, 30 bp, Artificial Sequence
  Synthetic oligonucleotide
agtctgtacgagctttgttcgtgtactcat

SEQ ID NO: 340977 - DNA, 30 bp, Artificial Sequence
  Synthetic oligonucleotide
taacgacgattgtaactacgtgttactcat

SEQ ID NO: 340978 - DNA, 30 bp, Artificial Sequence
  Synthetic oligonucleotide
acactggcaatagtatcccagggacctcat

SEQ ID NO: 340979 - DNA, 30 bp, Artificial Sequence
  Synthetic oligonucleotide
gtatgccatgttcaaaatttaacgcctcat

SEQ ID NO: 340980 - DNA, 30 bp, Artificial Sequence
  Synthetic oligonucleotide
atctactatcgggttgggtgggcggctcat

SEQ ID NO: 340981 - DNA, 30 bp, Artificial Sequence
  Synthetic oligonucleotide
gtctgatcctgcgactctggttaatctcat

SEQ ID NO: 340982 - DNA, 30 bp, Artificial Sequence
  Synthetic oligonucleotide
tacgaacaaccttcatgtgttgcatctcat

SEQ ID NO: 340983 - DNA, 30 bp, Artificial Sequence
  Synthetic oligonucleotide
aaacgagattccgttccgatgggatctcat

SEQ ID NO: 340984 - DNA, 30 bp, Artificial Sequence
  Synthetic oligonucleotide
aaaacgcgggcacagtgggttgtatctcat

SEQ ID NO: 340985 - DNA, 30 bp, Artificial Sequence
  Synthetic oligonucleotide
gtgacaatggtaacttaaccctcctctcat

SEQ ID NO: 340986 - DNA, 30 bp, Artificial Sequence
  Synthetic oligonucleotide
cgttgtgtagagacttaatcagcgtctcat

SEQ ID NO: 340987 - DNA, 30 bp, Artificial Sequence
  Synthetic oligonucleotide
gccgcgtaaggtgttcaaacatggtctcat

SEQ ID NO: 340988 - DNA, 30 bp, Artificial Sequence
  Synthetic oligonucleotide
tgtccgcaagctaatctcgcgagttctcat

SEQ ID NO: 340989 - DNA, 30 bp, Artificial Sequence
  Synthetic oligonucleotide
tttagacgcaagcccagtcggttttctcat

SEQ ID NO: 340990 - DNA, 30 bp, Artificial Sequence
  Synthetic oligonucleotide
ggggcatctactgccacgctcgaaagtcat

SEQ ID NO: 340991 - DNA, 30 bp, Artificial Sequence
  Synthetic oligonucleotide
agtgggacgagaagagccatacgcagtcat

SEQ ID NO: 340992 - DNA, 30 bp, Artificial Sequence
  Synthetic oligonucleotide
gaacggttcccacgttgatagcgcagtcat

SEQ ID NO: 340993 - DNA, 30 bp, Artificial Sequence
  Synthetic oligonucleotide
tttaatcttagctagacttggttcagtcat

SEQ ID NO: 340994 - DNA, 30 bp, Artificial Sequence
  Synthetic oligonucleotide
tacccgttgaagcgactgggcaagagtcat

SEQ ID NO: 340995 - DNA, 30 bp, Artificial Sequence
  Synthetic oligonucleotide
gtatcgattctcgtttactccgcgagtcat

SEQ ID NO: 340996 - DNA, 30 bp, Artificial Sequence
  Synthetic oligonucleotide
tgctgcaagtctgggttaagtgggagtcat

SEQ ID NO: 340997 - DNA, 30 bp, Artificial Sequence
  Synthetic oligonucleotide
tctcgtcgagtaatgcgaggctggagtcat

SEQ ID NO: 340998 - DNA, 30 bp, Artificial Sequence
  Synthetic oligonucleotide
tcaatacctgataaatttcgattgagtcat

SEQ ID NO: 340999 - DNA, 30 bp, Artificial Sequence
  Synthetic oligonucleotide
gatatgtagtacaactgtgtcttgagtcat

SEQ ID NO: 341000 - DNA, 30 bp, Artificial Sequence
  Synthetic oligonucleotide
catttgagtgcgcattattcatatagtcat

SEQ ID NO: 341001 - DNA, 30 bp, Artificial Sequence
  Synthetic oligonucleotide
gtccagtagctgcatataacaacccgtcat

SEQ ID NO: 341002 - DNA, 30 bp, Artificial Sequence
  Synthetic oligonucleotide
cgtccgggtaagacatttgctagccgtcat

SEQ ID NO: 341003 - DNA, 30 bp, Artificial Sequence
  Synthetic oligonucleotide
taagtacttagatgtgggggtagccgtcat

SEQ ID NO: 341004 - DNA, 30 bp, Artificial Sequence
  Synthetic oligonucleotide
gagaaagcatataagattatacgccgtcat

SEQ ID NO: 341005 - DNA, 40 bp, Artificial Sequence
  Synthetic oligonucleotide
tgggtgggaggggggtgtcaaatgtgccgtgctgcgtcat

SEQ ID NO: 341006 - DNA, 30 bp, Artificial Sequence
  Synthetic oligonucleotide
gctgtgtacctttagacaaatcctcgtcat

SEQ ID NO: 341007 - DNA, 31 bp, Artificial Sequence
  Synthetic oligonucleotide
tggagctagtgcgtagagacgctttcgtcat

SEQ ID NO: 341008 - DNA, 30 bp, Artificial Sequence
  Synthetic oligonucleotide
cgattgactactactttggttttaggtcat

SEQ ID NO: 341009 - DNA, 30 bp, Artificial Sequence
  Synthetic oligonucleotide
ggtatttaacaggcttgacgggacggtcat

SEQ ID NO: 341010 - DNA, 30 bp, Artificial Sequence
  Synthetic oligonucleotide
cgagtgctcctgacgtctctgttcggtcat

SEQ ID NO: 341011 - DNA, 30 bp, Artificial Sequence
  Synthetic oligonucleotide
gctggtggggcagtaacataggagggtcat

SEQ ID NO: 341012 - DNA, 30 bp, Artificial Sequence
  Synthetic oligonucleotide
ccaattcttggtcaaagagcaaggggtcat

SEQ ID NO: 341013 - DNA, 30 bp, Artificial Sequence
  Synthetic oligonucleotide
ggataaagcatagtgaaatcgtttggtcat

SEQ ID NO: 341014 - DNA, 30 bp, Artificial Sequence
  Synthetic oligonucleotide
aacctgtaaaagagtgaagggggatgtcat

SEQ ID NO: 341015 - DNA, 30 bp, Artificial Sequence
  Synthetic oligonucleotide
gatagacttaaagcagtacgccactgtcat

SEQ ID NO: 341016 - DNA, 31 bp, Artificial Sequence
  Synthetic oligonucleotide
aagatcaagtcaggatttcataccgtgtcat

SEQ ID NO: 341017 - DNA, 30 bp, Artificial Sequence
  Synthetic oligonucleotide
ggatgcgcattcgataaggaaatttgtcat

SEQ ID NO: 341018 - DNA, 30 bp, Artificial Sequence
  Synthetic oligonucleotide
gttcaggagctcgacgaacacttttgtcat

SEQ ID NO: 341019 - DNA, 30 bp, Artificial Sequence
  Synthetic oligonucleotide
gcctgaattaagaagcaccaaaaaattcat

SEQ ID NO: 341020 - DNA, 30 bp, Artificial Sequence
  Synthetic oligonucleotide
catctgggggacagcgaggaaacaattcat

SEQ ID NO: 341021 - DNA, 30 bp, Artificial Sequence
  Synthetic oligonucleotide
atgtgatgatagcaacacgtgggaattcat

SEQ ID NO: 341022 - DNA, 30 bp, Artificial Sequence
  Synthetic oligonucleotide
tttgaaatcaatgggcgattcgtaattcat

SEQ ID NO: 341023 - DNA, 30 bp, Artificial Sequence
  Synthetic oligonucleotide
gtagcagtgtagacccagcgaaacattcat

SEQ ID NO: 341024 - DNA, 30 bp, Artificial Sequence
  Synthetic oligonucleotide
aaattgagctatacgcgatcacggattcat

SEQ ID NO: 341025 - DNA, 30 bp, Artificial Sequence
  Synthetic oligonucleotide
tgacctgaataccccttttttcatattcat

SEQ ID NO: 341026 - DNA, 30 bp, Artificial Sequence
  Synthetic oligonucleotide
acgttggcttcataaacaggagatattcat

SEQ ID NO: 341027 - DNA, 30 bp, Artificial Sequence
  Synthetic oligonucleotide
tgttctattgactgttagtgtgctattcat

SEQ ID NO: 341028 - DNA, 30 bp, Artificial Sequence
  Synthetic oligonucleotide
cagacagcaatagtgttcgacagtattcat

SEQ ID NO: 341029 - DNA, 30 bp, Artificial Sequence
  Synthetic oligonucleotide
gctgggagggcgacctgcgtggttattcat

SEQ ID NO: 341030 - DNA, 30 bp, Artificial Sequence
  Synthetic oligonucleotide
gactgggcgcctcaatccagggcacttcat

SEQ ID NO: 341031 - DNA, 30 bp, Artificial Sequence
  Synthetic oligonucleotide
gaagttgagcagcggtaggaacaccttcat

SEQ ID NO: 341032 - DNA, 30 bp, Artificial Sequence
  Synthetic oligonucleotide
ttgaatcactcaatgccaggaagccttcat

SEQ ID NO: 341033 - DNA, 30 bp, Artificial Sequence
  Synthetic oligonucleotide
aaacaggacgtggcaaatcgaaagcttcat

SEQ ID NO: 341034 - DNA, 30 bp, Artificial Sequence
  Synthetic oligonucleotide
ctattatatcgctgacgcgaaaggcttcat

SEQ ID NO: 341035 - DNA, 30 bp, Artificial Sequence
  Synthetic oligonucleotide
aagattaacaggtgcaatatagtgcttcat

SEQ ID NO: 341036 - DNA, 30 bp, Artificial Sequence
  Synthetic oligonucleotide
tgatggtactctcggatctttactcttcat

SEQ ID NO: 341037 - DNA, 30 bp, Artificial Sequence
  Synthetic oligonucleotide
agatattagacaaaagaacagagtcttcat

SEQ ID NO: 341038 - DNA, 30 bp, Artificial Sequence
  Synthetic oligonucleotide
ggtctcttaccgatcttgagagcagttcat

SEQ ID NO: 341039 - DNA, 29 bp, Artificial Sequence
  Synthetic oligonucleotide
gctagttgggggcagtacagggagttcat

SEQ ID NO: 341040 - DNA, 30 bp, Artificial Sequence
  Synthetic oligonucleotide
agaatacacctatgccgtaacttggttcat

SEQ ID NO: 341041 - DNA, 30 bp, Artificial Sequence
  Synthetic oligonucleotide
cacctagcaaattttcaaagatatgttcat

SEQ ID NO: 341042 - DNA, 30 bp, Artificial Sequence
  Synthetic oligonucleotide
gcattcgctgagggctggggtactgttcat

SEQ ID NO: 341043 - DNA, 30 bp, Artificial Sequence
  Synthetic oligonucleotide
gagcaatcgcgtttacggcgatttgttcat

SEQ ID NO: 341044 - DNA, 30 bp, Artificial Sequence
  Synthetic oligonucleotide
cctagaatggctatgtgccgcacctttcat

SEQ ID NO: 341045 - DNA, 30 bp, Artificial Sequence
  Synthetic oligonucleotide
ggctaggtctcgcactggcgtctctttcat

SEQ ID NO: 341046 - DNA, 30 bp, Artificial Sequence
  Synthetic oligonucleotide
gagtccgaaatagtttgccctttctttcat

SEQ ID NO: 341047 - DNA, 30 bp, Artificial Sequence
  Synthetic oligonucleotide
cgccatcagctcaccaaagtcacgtttcat

SEQ ID NO: 341048 - DNA, 30 bp, Artificial Sequence
  Synthetic oligonucleotide
ctcaggtccgacaatctgtgcgggtttcat

SEQ ID NO: 341049 - DNA, 30 bp, Artificial Sequence
  Synthetic oligonucleotide
cagataagcgtcgatttaattatttttcat

SEQ ID NO: 341050 - DNA, 30 bp, Artificial Sequence
  Synthetic oligonucleotide
ggcgttctggtgattcgaccgctaaaagat

SEQ ID NO: 341051 - DNA, 31 bp, Artificial Sequence
  Synthetic oligonucleotide
gactaaacaagcggcgaagcaacccaaagat

SEQ ID NO: 341052 - DNA, 30 bp, Artificial Sequence
  Synthetic oligonucleotide
gactaacgaccacccatgcaaaagaaagat

SEQ ID NO: 341053 - DNA, 30 bp, Artificial Sequence
  Synthetic oligonucleotide
tagtgtcaatctggtcatataatgaaagat

SEQ ID NO: 341054 - DNA, 30 bp, Artificial Sequence
  Synthetic oligonucleotide
catgtttcctcgtacatcccgttgaaagat

SEQ ID NO: 341055 - DNA, 30 bp, Artificial Sequence
  Synthetic oligonucleotide
gccacggcagctagtaagtacgctaaagat

SEQ ID NO: 341056 - DNA, 30 bp, Artificial Sequence
  Synthetic oligonucleotide
ctgcgtgaaacgcatatcagtggacaagat

SEQ ID NO: 341057 - DNA, 30 bp, Artificial Sequence
  Synthetic oligonucleotide
tgcagcgccacgaaatccaactgacaagat

SEQ ID NO: 341058 - DNA, 30 bp, Artificial Sequence
  Synthetic oligonucleotide
cgtctctggcagatgtccgttacccaagat

SEQ ID NO: 341059 - DNA, 30 bp, Artificial Sequence
  Synthetic oligonucleotide
actattctaacacccgatgtgtgccaagat

SEQ ID NO: 341060 - DNA, 30 bp, Artificial Sequence
  Synthetic oligonucleotide
ggattcggatatattagttaaatccaagat

SEQ ID NO: 341061 - DNA, 30 bp, Artificial Sequence
  Synthetic oligonucleotide
tatcattatcgagtcaggatcgagcaagat

SEQ ID NO: 341062 - DNA, 30 bp, Artificial Sequence
  Synthetic oligonucleotide
cttggtattgaatatagcgaggagcaagat

SEQ ID NO: 341063 - DNA, 30 bp, Artificial Sequence
  Synthetic oligonucleotide
cggacgacctatgcactatcagcgcaagat

SEQ ID NO: 341064 - DNA, 30 bp, Artificial Sequence
  Synthetic oligonucleotide
agctgaagattagggtctttaggtcaagat

SEQ ID NO: 341065 - DNA, 30 bp, Artificial Sequence
  Synthetic oligonucleotide
ctattggtcggaaaggtctactcagaagat

SEQ ID NO: 341066 - DNA, 30 bp, Artificial Sequence
  Synthetic oligonucleotide
taggtgctattgcgaccatcttgtgaagat

SEQ ID NO: 341067 - DNA, 30 bp, Artificial Sequence
  Synthetic oligonucleotide
aagccataggaggagcaatcacttgaagat

SEQ ID NO: 341068 - DNA, 30 bp, Artificial Sequence
  Synthetic oligonucleotide
caccagctacatgtcagcttgcgctaagat

SEQ ID NO: 341069 - DNA, 30 bp, Artificial Sequence
  Synthetic oligonucleotide
tagtccggggctagcgcggcctgctaagat

SEQ ID NO: 341070 - DNA, 30 bp, Artificial Sequence
  Synthetic oligonucleotide
ggtaatctcgtgatgatttattgctaagat

SEQ ID NO: 341071 - DNA, 30 bp, Artificial Sequence
  Synthetic oligonucleotide
tgccgaacagtctcatagactgtctaagat

SEQ ID NO: 341072 - DNA, 30 bp, Artificial Sequence
  Synthetic oligonucleotide
ccgttacagcacctcaacgttaggtaagat

SEQ ID NO: 341073 - DNA, 30 bp, Artificial Sequence
  Synthetic oligonucleotide
cttccctactgttaattctcgatgtaagat

SEQ ID NO: 341074 - DNA, 30 bp, Artificial Sequence
  Synthetic oligonucleotide
agcagtgtgtccattactggcgattaagat

SEQ ID NO: 341075 - DNA, 30 bp, Artificial Sequence
  Synthetic oligonucleotide
gtactagacacgcgagggagattttaagat

SEQ ID NO: 341076 - DNA, 30 bp, Artificial Sequence
  Synthetic oligonucleotide
taaaacatagccaaggataagggaacagat

SEQ ID NO: 341077 - DNA, 30 bp, Artificial Sequence
  Synthetic oligonucleotide
ctgctcgttccaaagcgcgtgttaacagat

SEQ ID NO: 341078 - DNA, 30 bp, Artificial Sequence
  Synthetic oligonucleotide
gacttgtaatacaaacttatgcacacagat

SEQ ID NO: 341079 - DNA, 30 bp, Artificial Sequence
  Synthetic oligonucleotide
aaatcaatgcttattcgcctatacacagat

SEQ ID NO: 341080 - DNA, 30 bp, Artificial Sequence
  Synthetic oligonucleotide
gttatctcggtagaaagacatctcacagat

SEQ ID NO: 341081 - DNA, 30 bp, Artificial Sequence
  Synthetic oligonucleotide
gtagttcgctaggttgtcctccagacagat

SEQ ID NO: 341082 - DNA, 30 bp, Artificial Sequence
  Synthetic oligonucleotide
taagtcgggcaaatatgtagcttgacagat

SEQ ID NO: 341083 - DNA, 30 bp, Artificial Sequence
  Synthetic oligonucleotide
gtgtcgcttagtttgatacggcctacagat

SEQ ID NO: 341084 - DNA, 30 bp, Artificial Sequence
  Synthetic oligonucleotide
ccctagttcaggtcccagccccttacagat

SEQ ID NO: 341085 - DNA, 30 bp, Artificial Sequence
  Synthetic oligonucleotide
gagtatgtatccaggcgatagcagccagat

SEQ ID NO: 341086 - DNA, 30 bp, Artificial Sequence
  Synthetic oligonucleotide
cgtaatacctacattcgcgcgacgccagat

SEQ ID NO: 341087 - DNA, 30 bp, Artificial Sequence
  Synthetic oligonucleotide
cgaactccgctttccggctcgccgccagat

SEQ ID NO: 341088 - DNA, 30 bp, Artificial Sequence
  Synthetic oligonucleotide
tatgcgggacagcacctcggtgggccagat

SEQ ID NO: 341089 - DNA, 30 bp, Artificial Sequence
  Synthetic oligonucleotide
gcctgatttttattgtagacactgccagat

SEQ ID NO: 341090 - DNA, 30 bp, Artificial Sequence
  Synthetic oligonucleotide
gtacgacgtacattctccgaccaagcagat

SEQ ID NO: 341091 - DNA, 30 bp, Artificial Sequence
  Synthetic oligonucleotide
gggtaaatctgtattattcggatagcagat

SEQ ID NO: 341092 - DNA, 30 bp, Artificial Sequence
  Synthetic oligonucleotide
ccggttctgcacctcgtagaactagcagat

SEQ ID NO: 341093 - DNA, 30 bp, Artificial Sequence
  Synthetic oligonucleotide
cactacgggtggtacttggacgtagcagat

SEQ ID NO: 341094 - DNA, 30 bp, Artificial Sequence
  Synthetic oligonucleotide
gagggtaaaggcagggctcagcaggcagat

SEQ ID NO: 341095 - DNA, 30 bp, Artificial Sequence
  Synthetic oligonucleotide
agatctgcgagtacgtatcaaagggcagat

SEQ ID NO: 341096 - DNA, 30 bp, Artificial Sequence
  Synthetic oligonucleotide
tacttttaccgacagcgattgaggtcagat

SEQ ID NO: 341097 - DNA, 30 bp, Artificial Sequence
  Synthetic oligonucleotide
tctctgcaaaagatgggcttcctgtcagat

SEQ ID NO: 341098 - DNA, 30 bp, Artificial Sequence
  Synthetic oligonucleotide
caagccagaaactcgaaggtcgtttcagat

SEQ ID NO: 341099 - DNA, 30 bp, Artificial Sequence
  Synthetic oligonucleotide
taatccttatgccagcgagctttgagagat

SEQ ID NO: 341100 - DNA, 30 bp, Artificial Sequence
  Synthetic oligonucleotide
cgctggcattacctgccgtaaacacgagat

SEQ ID NO: 341101 - DNA, 30 bp, Artificial Sequence
  Synthetic oligonucleotide
tcattgcggcttcgcttcgtgtgacgagat

SEQ ID NO: 341102 - DNA, 30 bp, Artificial Sequence
  Synthetic oligonucleotide
gggaagcccaggcggtcggctccccgagat

SEQ ID NO: 341103 - DNA, 30 bp, Artificial Sequence
  Synthetic oligonucleotide
gatggattattcagagcattccagcgagat

SEQ ID NO: 341104 - DNA, 30 bp, Artificial Sequence
  Synthetic oligonucleotide
tgccgcagccagggccggatcgcgcgagat

SEQ ID NO: 341105 - DNA, 30 bp, Artificial Sequence
  Synthetic oligonucleotide
taattttttgcgagttgctcgtgaggagat

SEQ ID NO: 341106 - DNA, 30 bp, Artificial Sequence
  Synthetic oligonucleotide
tggcccaattatacagctagattcggagat

SEQ ID NO: 341107 - DNA, 30 bp, Artificial Sequence
  Synthetic oligonucleotide
taagccaagggtaaaagtcgtatgggagat

SEQ ID NO: 341108 - DNA, 30 bp, Artificial Sequence
  Synthetic oligonucleotide
aatatgggactctggagtacaagtggagat

SEQ ID NO: 341109 - DNA, 30 bp, Artificial Sequence
  Synthetic oligonucleotide
aacacggtaggtggggttcgacgatgagat

SEQ ID NO: 341110 - DNA, 30 bp, Artificial Sequence
  Synthetic oligonucleotide
gggcgtagtatcttagtttgttgatgagat

SEQ ID NO: 341111 - DNA, 30 bp, Artificial Sequence
  Synthetic oligonucleotide
ccattctatcgaaccgctgcggactgagat

SEQ ID NO: 341112 - DNA, 30 bp, Artificial Sequence
  Synthetic oligonucleotide
gagtgagtcgactagcgacaaagctgagat

SEQ ID NO: 341113 - DNA, 30 bp, Artificial Sequence
  Synthetic oligonucleotide
gagggcaggacgctttcatagggctgagat

SEQ ID NO: 341114 - DNA, 30 bp, Artificial Sequence
  Synthetic oligonucleotide
tatacgatcccgcgcgtacggtcgtgagat

SEQ ID NO: 341115 - DNA, 30 bp, Artificial Sequence
  Synthetic oligonucleotide
gtgtctacacagttccataattattgagat

SEQ ID NO: 341116 - DNA, 30 bp, Artificial Sequence
  Synthetic oligonucleotide
cagcgcgccggcccggggtacttttgagat

SEQ ID NO: 341117 - DNA, 30 bp, Artificial Sequence
  Synthetic oligonucleotide
atagtcgcgaagtcccgactgtaaatagat

SEQ ID NO: 341118 - DNA, 30 bp, Artificial Sequence
  Synthetic oligonucleotide
cggtagaggcctcaggctaggagaatagat

SEQ ID NO: 341119 - DNA, 30 bp, Artificial Sequence
  Synthetic oligonucleotide
tcgcacttaaaagcgcggatgcgaatagat

SEQ ID NO: 341120 - DNA, 30 bp, Artificial Sequence
  Synthetic oligonucleotide
ggtcgcaccatggtgcaaaggggcatagat

SEQ ID NO: 341121 - DNA, 30 bp, Artificial Sequence
  Synthetic oligonucleotide
ctttgatccaggaaaaatgactgcatagat

SEQ ID NO: 341122 - DNA, 30 bp, Artificial Sequence
  Synthetic oligonucleotide
gtacgattagggctttacggacttatagat

SEQ ID NO: 341123 - DNA, 30 bp, Artificial Sequence
  Synthetic oligonucleotide
gccttcatcagttatggtaacaaactagat

SEQ ID NO: 341124 - DNA, 30 bp, Artificial Sequence
  Synthetic oligonucleotide
ctgacaatgtagagtgaaggccagctagat

SEQ ID NO: 341125 - DNA, 30 bp, Artificial Sequence
  Synthetic oligonucleotide
atgagttgtgctttggcctaatagctagat

SEQ ID NO: 341126 - DNA, 30 bp, Artificial Sequence
  Synthetic oligonucleotide
cagacccggattggcggtctcaggctagat

SEQ ID NO: 341127 - DNA, 30 bp, Artificial Sequence
  Synthetic oligonucleotide
gagccgcttgtgtaacaccaccgagtagat

SEQ ID NO: 341128 - DNA, 30 bp, Artificial Sequence
  Synthetic oligonucleotide
aattgcaataaagggatcgcagccgtagat

SEQ ID NO: 341129 - DNA, 30 bp, Artificial Sequence
  Synthetic oligonucleotide
tagtattttactagtcagcgagctgtagat

SEQ ID NO: 341130 - DNA, 30 bp, Artificial Sequence
  Synthetic oligonucleotide
ttgaaatatgatgcgatgaacgttgtagat

SEQ ID NO: 341131 - DNA, 30 bp, Artificial Sequence
  Synthetic oligonucleotide
ggaggtgggggatggttgctggttgtagat

SEQ ID NO: 341132 - DNA, 30 bp, Artificial Sequence
  Synthetic oligonucleotide
aggcttcatttaactttggaagaattagat

SEQ ID NO: 341133 - DNA, 30 bp, Artificial Sequence
  Synthetic oligonucleotide
tgatcaaagcgcagcataagagtcttagat

SEQ ID NO: 341134 - DNA, 30 bp, Artificial Sequence
  Synthetic oligonucleotide
attatcagacatgtatcgacctctttagat

SEQ ID NO: 341135 - DNA, 30 bp, Artificial Sequence
  Synthetic oligonucleotide
gaaagcgagtcagttaatgactgtttagat

SEQ ID NO: 341136 - DNA, 30 bp, Artificial Sequence
  Synthetic oligonucleotide
tggaatcttcgaaacgcccgttgtttagat

SEQ ID NO: 341137 - DNA, 30 bp, Artificial Sequence
  Synthetic oligonucleotide
ggtataattttaacaatagttctaaacgat

SEQ ID NO: 341138 - DNA, 30 bp, Artificial Sequence
  Synthetic oligonucleotide
catccagtggtcttgcgctatcacaacgat

SEQ ID NO: 341139 - DNA, 30 bp, Artificial Sequence
  Synthetic oligonucleotide
tgtatgattccggtagtgtcgtagaacgat

SEQ ID NO: 341140 - DNA, 30 bp, Artificial Sequence
  Synthetic oligonucleotide
aaacatcagtgattgtggaggtcacacgat

SEQ ID NO: 341141 - DNA, 30 bp, Artificial Sequence
  Synthetic oligonucleotide
caagatgggggccagttagaaagacacgat

SEQ ID NO: 341142 - DNA, 30 bp, Artificial Sequence
  Synthetic oligonucleotide
gaacgaggccgtgggctccagggacacgat

SEQ ID NO: 341143 - DNA, 30 bp, Artificial Sequence
  Synthetic oligonucleotide
taaccgagttacaactttaatgtccacgat

SEQ ID NO: 341144 - DNA, 30 bp, Artificial Sequence
  Synthetic oligonucleotide
cacttgggttttgccagggtgactcacgat

SEQ ID NO: 341145 - DNA, 30 bp, Artificial Sequence
  Synthetic oligonucleotide
ccagatgcttcaatcgacacttttcacgat

SEQ ID NO: 341146 - DNA, 30 bp, Artificial Sequence
  Synthetic oligonucleotide
ggtccgatgcggtatgccccgcacgacgat

SEQ ID NO: 341147 - DNA, 30 bp, Artificial Sequence
  Synthetic oligonucleotide
gtacccaacggggccgggtaatacgacgat

SEQ ID NO: 341148 - DNA, 30 bp, Artificial Sequence
  Synthetic oligonucleotide
tgacacctttggacagatcccaaggacgat

SEQ ID NO: 341149 - DNA, 30 bp, Artificial Sequence
  Synthetic oligonucleotide
tgctaattgaatgtatggggtactgacgat

SEQ ID NO: 341150 - DNA, 30 bp, Artificial Sequence
  Synthetic oligonucleotide
accaaaacaactaatcccctgtttgacgat

SEQ ID NO: 341151 - DNA, 30 bp, Artificial Sequence
  Synthetic oligonucleotide
ccggaaaatgatgccggttggacatacgat

SEQ ID NO: 341152 - DNA, 30 bp, Artificial Sequence
  Synthetic oligonucleotide
tgattatatcagactaatcggccatacgat

SEQ ID NO: 341153 - DNA, 30 bp, Artificial Sequence
  Synthetic oligonucleotide
ttaatgttagcgtagggtgccatctacgat

SEQ ID NO: 341154 - DNA, 30 bp, Artificial Sequence
  Synthetic oligonucleotide
gccctacatgcaaagaatatggggtacgat

SEQ ID NO: 341155 - DNA, 30 bp, Artificial Sequence
  Synthetic oligonucleotide
gatcgtgagcacgtaaatgtccattacgat

SEQ ID NO: 341156 - DNA, 30 bp, Artificial Sequence
  Synthetic oligonucleotide
atagcaaggctcaccccagaacgttacgat

SEQ ID NO: 341157 - DNA, 30 bp, Artificial Sequence
  Synthetic oligonucleotide
actggcagaagtctaatggaggtttacgat

SEQ ID NO: 341158 - DNA, 30 bp, Artificial Sequence
  Synthetic oligonucleotide
acttttgggtagagaatcaaaacaaccgat

SEQ ID NO: 341159 - DNA, 30 bp, Artificial Sequence
  Synthetic oligonucleotide
acgtcaatctgaccttgtctcagaaccgat

SEQ ID NO: 341160 - DNA, 30 bp, Artificial Sequence
  Synthetic oligonucleotide
caacatgtaacgtagtaggtaggaaccgat

SEQ ID NO: 341161 - DNA, 30 bp, Artificial Sequence
  Synthetic oligonucleotide
tggtgaaactcggtggaaatttacaccgat

SEQ ID NO: 341162 - DNA, 30 bp, Artificial Sequence
  Synthetic oligonucleotide
tccgacggttgatagcgacggatcaccgat

SEQ ID NO: 341163 - DNA, 31 bp, Artificial Sequence
  Synthetic oligonucleotide
acgacaggctaaagctccatcggtcaccgat

SEQ ID NO: 341164 - DNA, 30 bp, Artificial Sequence
  Synthetic oligonucleotide
gtcggtgcaagtgataccccaacgaccgat

SEQ ID NO: 341165 - DNA, 30 bp, Artificial Sequence
  Synthetic oligonucleotide
ccgttttgccccaacgttctgccgaccgat

SEQ ID NO: 341166 - DNA, 30 bp, Artificial Sequence
  Synthetic oligonucleotide
gcgtccttcacgcggagaaaactgaccgat

SEQ ID NO: 341167 - DNA, 30 bp, Artificial Sequence
  Synthetic oligonucleotide
cgtaatagcattgggctgaatgagcccgat

SEQ ID NO: 341168 - DNA, 30 bp, Artificial Sequence
  Synthetic oligonucleotide
ccccgggataggtcacgcctccacgccgat

SEQ ID NO: 341169 - DNA, 30 bp, Artificial Sequence
  Synthetic oligonucleotide
gtaggcaatgcgcaaggtagttccgccgat

SEQ ID NO: 341170 - DNA, 30 bp, Artificial Sequence
  Synthetic oligonucleotide
ttgtcacatgcatggaataaatgcgccgat

SEQ ID NO: 341171 - DNA, 30 bp, Artificial Sequence
  Synthetic oligonucleotide
tagttccaggatggctaaccgggggccgat

SEQ ID NO: 341172 - DNA, 30 bp, Artificial Sequence
  Synthetic oligonucleotide
ttcggtggacaatcagaatgggctgccgat

SEQ ID NO: 341173 - DNA, 30 bp, Artificial Sequence
  Synthetic oligonucleotide
tgtcgtgcgttgaatacgatgtctgccgat

SEQ ID NO: 341174 - DNA, 30 bp, Artificial Sequence
  Synthetic oligonucleotide
gtacacctgagtatcacggtctgatccgat

SEQ ID NO: 341175 - DNA, 30 bp, Artificial Sequence
  Synthetic oligonucleotide
cccatacgatattagctccaccactccgat

SEQ ID NO: 341176 - DNA, 30 bp, Artificial Sequence
  Synthetic oligonucleotide
gggaagagcactgcgtcttttggctccgat

SEQ ID NO: 341177 - DNA, 30 bp, Artificial Sequence
  Synthetic oligonucleotide
cgtactagaatcactctggaaacgtccgat

SEQ ID NO: 341178 - DNA, 31 bp, Artificial Sequence
  Synthetic oligonucleotide
tttattacgatccggaccagagtcgtccgat

SEQ ID NO: 341179 - DNA, 30 bp, Artificial Sequence
  Synthetic oligonucleotide
aagctacgatccacagggtgggggtccgat

SEQ ID NO: 341180 - DNA, 30 bp, Artificial Sequence
  Synthetic oligonucleotide
ggagtgacactattccctttgctgtccgat

SEQ ID NO: 341181 - DNA, 30 bp, Artificial Sequence
  Synthetic oligonucleotide
ggtccgaccatatcagccattttgtccgat

SEQ ID NO: 341182 - DNA, 30 bp, Artificial Sequence
  Synthetic oligonucleotide
agtaactcttgtgaagcaacaaaaagcgat

SEQ ID NO: 341183 - DNA, 30 bp, Artificial Sequence
  Synthetic oligonucleotide
acaacggggcaatcgatgaagaaaagcgat

SEQ ID NO: 341184 - DNA, 30 bp, Artificial Sequence
  Synthetic oligonucleotide
ttagcttggtgctcctccgccggaagcgat

SEQ ID NO: 341185 - DNA, 30 bp, Artificial Sequence
  Synthetic oligonucleotide
attcgacgtccgagcgcccagataagcgat

SEQ ID NO: 341186 - DNA, 30 bp, Artificial Sequence
  Synthetic oligonucleotide
gcatctgcataacccttaagtgacagcgat

SEQ ID NO: 341187 - DNA, 30 bp, Artificial Sequence
  Synthetic oligonucleotide
acgagagatctgaacgctgaaattagcgat

SEQ ID NO: 341188 - DNA, 30 bp, Artificial Sequence
  Synthetic oligonucleotide
taggacactgctttcatcgggctgcgcgat

SEQ ID NO: 341189 - DNA, 30 bp, Artificial Sequence
  Synthetic oligonucleotide
gctatcggtacggacgggtcattgcgcgat

SEQ ID NO: 341190 - DNA, 30 bp, Artificial Sequence
  Synthetic oligonucleotide
gcgaaatttactggagtctgatctcgcgat

SEQ ID NO: 341191 - DNA, 30 bp, Artificial Sequence
  Synthetic oligonucleotide
catgagcagctaccacgtgggataggcgat

SEQ ID NO: 341192 - DNA, 30 bp, Artificial Sequence
  Synthetic oligonucleotide
gaagacggagattatccgcctgacggcgat

SEQ ID NO: 341193 - DNA, 30 bp, Artificial Sequence
  Synthetic oligonucleotide
ctaaatcgaccgacaggtcgatacggcgat

SEQ ID NO: 341194 - DNA, 30 bp, Artificial Sequence
  Synthetic oligonucleotide
ttattcgctgcggttagcacgaccggcgat

SEQ ID NO: 341195 - DNA, 30 bp, Artificial Sequence
  Synthetic oligonucleotide
gattatcagtcctccaaccacttcggcgat

SEQ ID NO: 341196 - DNA, 30 bp, Artificial Sequence
  Synthetic oligonucleotide
ggcatgcatatgaacacatataagggcgat

SEQ ID NO: 341197 - DNA, 30 bp, Artificial Sequence
  Synthetic oligonucleotide
gtgttgctcgagtaccagctatagggcgat

SEQ ID NO: 341198 - DNA, 30 bp, Artificial Sequence
  Synthetic oligonucleotide
aagatagcagtgtcaggaacctagggcgat

SEQ ID NO: 341199 - DNA, 30 bp, Artificial Sequence
  Synthetic oligonucleotide
gccgactctcgacaacgatacgtgggcgat

SEQ ID NO: 341200 - DNA, 30 bp, Artificial Sequence
  Synthetic oligonucleotide
ttcgagttcttgcggttgcaggtgggcgat

SEQ ID NO: 341201 - DNA, 31 bp, Artificial Sequence
  Synthetic oligonucleotide
tggccggtttgcaaattgtagatctggcgat

SEQ ID NO: 341202 - DNA, 30 bp, Artificial Sequence
  Synthetic oligonucleotide
agatgacggtcaaacgcaccgatgtgcgat

SEQ ID NO: 341203 - DNA, 30 bp, Artificial Sequence
  Synthetic oligonucleotide
tagacagcggattaatggtcgtcttgcgat

SEQ ID NO: 341204 - DNA, 30 bp, Artificial Sequence
  Synthetic oligonucleotide
tgcgcgaagctcacctccttttcaatcgat

SEQ ID NO: 341205 - DNA, 30 bp, Artificial Sequence
  Synthetic oligonucleotide
ttgatgaactaacgatgggtaggaatcgat

SEQ ID NO: 341206 - DNA, 30 bp, Artificial Sequence
  Synthetic oligonucleotide
ataaacgaggcatgtaatcacctaatcgat

SEQ ID NO: 341207 - DNA, 30 bp, Artificial Sequence
  Synthetic oligonucleotide
ctaagagataaaactttgcagctcatcgat

SEQ ID NO: 341208 - DNA, 30 bp, Artificial Sequence
  Synthetic oligonucleotide
tcagaagcagggcagcaattacagatcgat

SEQ ID NO: 341209 - DNA, 30 bp, Artificial Sequence
  Synthetic oligonucleotide
ctgtctatgacgcgaaaacagtagatcgat

SEQ ID NO: 341210 - DNA, 30 bp, Artificial Sequence
  Synthetic oligonucleotide
aaagttatatagagatgctaggatatcgat

SEQ ID NO: 341211 - DNA, 30 bp, Artificial Sequence
  Synthetic oligonucleotide
ggatcatccatccaaggtgggcctatcgat

SEQ ID NO: 341212 - DNA, 30 bp, Artificial Sequence
  Synthetic oligonucleotide
agtcagaatcggcctcagttgcagctcgat

SEQ ID NO: 341213 - DNA, 30 bp, Artificial Sequence
  Synthetic oligonucleotide
cgtattgtgaggaggtaatgggagctcgat

SEQ ID NO: 341214 - DNA, 30 bp, Artificial Sequence
  Synthetic oligonucleotide
aataatcttgaggaaattcagtcgctcgat

SEQ ID NO: 341215 - DNA, 30 bp, Artificial Sequence
  Synthetic oligonucleotide
ctcgaaagtactggcggttaacgtctcgat

SEQ ID NO: 341216 - DNA, 30 bp, Artificial Sequence
  Synthetic oligonucleotide
ttcgctgaagagcgctctggccaagtcgat

SEQ ID NO: 341217 - DNA, 30 bp, Artificial Sequence
  Synthetic oligonucleotide
tcaaggccgtgactctgctcacgcgtcgat

SEQ ID NO: 341218 - DNA, 30 bp, Artificial Sequence
  Synthetic oligonucleotide
aattcggtatatgctccatggctattcgat

SEQ ID NO: 341219 - DNA, 30 bp, Artificial Sequence
  Synthetic oligonucleotide
atcagctagacattacaacgacacttcgat

SEQ ID NO: 341220 - DNA, 30 bp, Artificial Sequence
  Synthetic oligonucleotide
aaattgcaatagatcgtcgaagagttcgat

SEQ ID NO: 341221 - DNA, 30 bp, Artificial Sequence
  Synthetic oligonucleotide
tacatggctcggttgatgttacggttcgat

SEQ ID NO: 341222 - DNA, 30 bp, Artificial Sequence
  Synthetic oligonucleotide
ctctgcattttaagtatctcagggttcgat

SEQ ID NO: 341223 - DNA, 30 bp, Artificial Sequence
  Synthetic oligonucleotide
gctatggcctacctatatagaccaaaggat

SEQ ID NO: 341224 - DNA, 30 bp, Artificial Sequence
  Synthetic oligonucleotide
aagggacctattgtagcacctagaaaggat

SEQ ID NO: 341225 - DNA, 30 bp, Artificial Sequence
  Synthetic oligonucleotide
gtgaatggcgggagtgaccttagcaaggat

SEQ ID NO: 341226 - DNA, 30 bp, Artificial Sequence
  Synthetic oligonucleotide
tccgttaatgtcaagactggagtcaaggat

SEQ ID NO: 341227 - DNA, 30 bp, Artificial Sequence
  Synthetic oligonucleotide
tataataagtctgagaagggcacgaaggat

SEQ ID NO: 341228 - DNA, 30 bp, Artificial Sequence
  Synthetic oligonucleotide
gtatgtttgtgcatagtgcactgtaaggat

SEQ ID NO: 341229 - DNA, 30 bp, Artificial Sequence
  Synthetic oligonucleotide
tctatgctgagttaatcgacgaaacaggat

SEQ ID NO: 341230 - DNA, 30 bp, Artificial Sequence
  Synthetic oligonucleotide
atgacacagttcacacaccatttacaggat

SEQ ID NO: 341231 - DNA, 30 bp, Artificial Sequence
  Synthetic oligonucleotide
acttggttcgaaattgacaggaaccaggat

SEQ ID NO: 341232 - DNA, 30 bp, Artificial Sequence
  Synthetic oligonucleotide
acccacgtcatatccgtaagttgtcaggat

SEQ ID NO: 341233 - DNA, 30 bp, Artificial Sequence
  Synthetic oligonucleotide
gttagggggacctcctcgaagggagaggat

SEQ ID NO: 341234 - DNA, 30 bp, Artificial Sequence
  Synthetic oligonucleotide
acccgactagtggctaaatactgcgaggat

SEQ ID NO: 341235 - DNA, 30 bp, Artificial Sequence
  Synthetic oligonucleotide
acttagctggaaactaattcagcggaggat

SEQ ID NO: 341236 - DNA, 30 bp, Artificial Sequence
  Synthetic oligonucleotide
cttcgaaaattagtccgatcttcggaggat

SEQ ID NO: 341237 - DNA, 30 bp, Artificial Sequence
  Synthetic oligonucleotide
taccgtgtatacggtttgtccatggaggat

SEQ ID NO: 341238 - DNA, 30 bp, Artificial Sequence
  Synthetic oligonucleotide
ggatagtgtctgggattgttggctgaggat

SEQ ID NO: 341239 - DNA, 30 bp, Artificial Sequence
  Synthetic oligonucleotide
tggggtccgtgtatgcatcatagtgaggat

SEQ ID NO: 341240 - DNA, 30 bp, Artificial Sequence
  Synthetic oligonucleotide
aacgtcacacggggtgtgcttgttgaggat

SEQ ID NO: 341241 - DNA, 30 bp, Artificial Sequence
  Synthetic oligonucleotide
tggtctgggcaaggagagtcacgctaggat

SEQ ID NO: 341242 - DNA, 30 bp, Artificial Sequence
  Synthetic oligonucleotide
tttattgtaatcgctcaaaaggagtaggat

SEQ ID NO: 341243 - DNA, 30 bp, Artificial Sequence
  Synthetic oligonucleotide
ggttacggtgagccgtaaaactagtaggat

SEQ ID NO: 341244 - DNA, 30 bp, Artificial Sequence
  Synthetic oligonucleotide
accgggtctctgactgggacgtagtaggat

SEQ ID NO: 341245 - DNA, 30 bp, Artificial Sequence
  Synthetic oligonucleotide
gctggggcataatacagtccaggttaggat

SEQ ID NO: 341246 - DNA, 30 bp, Artificial Sequence
  Synthetic oligonucleotide
ataaatacaacgtgagcaattacaacggat

SEQ ID NO: 341247 - DNA, 30 bp, Artificial Sequence
  Synthetic oligonucleotide
tgtagtaaccaattgcgtgcgaacacggat

SEQ ID NO: 341248 - DNA, 30 bp, Artificial Sequence
  Synthetic oligonucleotide
ccaatagcaattcatttacgttgcacggat

SEQ ID NO: 341249 - DNA, 30 bp, Artificial Sequence
  Synthetic oligonucleotide
ggatgaatcaaaggaagttctcctacggat

SEQ ID NO: 341250 - DNA, 31 bp, Artificial Sequence
  Synthetic oligonucleotide
gaccgcattctctttttgttccattacggat

SEQ ID NO: 341251 - DNA, 30 bp, Artificial Sequence
  Synthetic oligonucleotide
gcacaataatagcatggccatagaccggat

SEQ ID NO: 341252 - DNA, 30 bp, Artificial Sequence
  Synthetic oligonucleotide
gagcgccgccacctggaagtgcgaccggat

SEQ ID NO: 341253 - DNA, 30 bp, Artificial Sequence
  Synthetic oligonucleotide
tgagacagggagtattagatattaccggat

SEQ ID NO: 341254 - DNA, 30 bp, Artificial Sequence
  Synthetic oligonucleotide
ttcatcatacatgggtgaccaggcccggat

SEQ ID NO: 341255 - DNA, 30 bp, Artificial Sequence
  Synthetic oligonucleotide
gtcaagtacaattgtcgaatatatccggat

SEQ ID NO: 341256 - DNA, 30 bp, Artificial Sequence
  Synthetic oligonucleotide
gccagaaaaacttggggtagtcaagcggat

SEQ ID NO: 341257 - DNA, 30 bp, Artificial Sequence
  Synthetic oligonucleotide
tagggcaggatgaggtagtggtcagcggat

SEQ ID NO: 341258 - DNA, 30 bp, Artificial Sequence
  Synthetic oligonucleotide
gcaagcagcatacttgtcggtaacgcggat

SEQ ID NO: 341259 - DNA, 30 bp, Artificial Sequence
  Synthetic oligonucleotide
taggacgttcgaaaggctgtttgcgcggat

SEQ ID NO: 341260 - DNA, 30 bp, Artificial Sequence
  Synthetic oligonucleotide
agttagagaggctgcaaggcaatcgcggat

SEQ ID NO: 341261 - DNA, 30 bp, Artificial Sequence
  Synthetic oligonucleotide
tagtaggttcggacatatactcgggcggat

SEQ ID NO: 341262 - DNA, 30 bp, Artificial Sequence
  Synthetic oligonucleotide
agcctgcgacggatatcctcactggcggat

SEQ ID NO: 341263 - DNA, 30 bp, Artificial Sequence
  Synthetic oligonucleotide
aacatgcgagcggcgtgctggtgtgcggat

SEQ ID NO: 341264 - DNA, 30 bp, Artificial Sequence
  Synthetic oligonucleotide
catggtctccttgttctaaatatgtcggat

SEQ ID NO: 341265 - DNA, 30 bp, Artificial Sequence
  Synthetic oligonucleotide
gttgtaagcttgatgtatgcgtacagggat

SEQ ID NO: 341266 - DNA, 30 bp, Artificial Sequence
  Synthetic oligonucleotide
gaattgtactgggtgggataatagagggat

SEQ ID NO: 341267 - DNA, 30 bp, Artificial Sequence
  Synthetic oligonucleotide
gtggcgggtagggggtagaatccgagggat

SEQ ID NO: 341268 - DNA, 30 bp, Artificial Sequence
  Synthetic oligonucleotide
cagcattggcgtgggacacgtaatagggat

SEQ ID NO: 341269 - DNA, 30 bp, Artificial Sequence
  Synthetic oligonucleotide
agtggcctcctatgggtttgatatagggat

SEQ ID NO: 341270 - DNA, 30 bp, Artificial Sequence
  Synthetic oligonucleotide
cacagtcttcgatataggggggctagggat

SEQ ID NO: 341271 - DNA, 30 bp, Artificial Sequence
  Synthetic oligonucleotide
tatcaggttaagggacactattctagggat

SEQ ID NO: 341272 - DNA, 30 bp, Artificial Sequence
  Synthetic oligonucleotide
agcggagcagcgtttgggagaattagggat

SEQ ID NO: 341273 - DNA, 30 bp, Artificial Sequence
  Synthetic oligonucleotide
tctgtactgggaacctaccgcagacgggat

SEQ ID NO: 341274 - DNA, 30 bp, Artificial Sequence
  Synthetic oligonucleotide
agggatgggaggggccctctgggacgggat

SEQ ID NO: 341275 - DNA, 30 bp, Artificial Sequence
  Synthetic oligonucleotide
tcgctcccgagagcaattatcgtccgggat

SEQ ID NO: 341276 - DNA, 30 bp, Artificial Sequence
  Synthetic oligonucleotide
ggtcgtaagtttcaggtcgagtatcgggat

SEQ ID NO: 341277 - DNA, 30 bp, Artificial Sequence
  Synthetic oligonucleotide
ggcgtcaaacagagagttgtaattcgggat

SEQ ID NO: 341278 - DNA, 30 bp, Artificial Sequence
  Synthetic oligonucleotide
cagctcgctgtgctgagtctcgcaggggat

SEQ ID NO: 341279 - DNA, 30 bp, Artificial Sequence
  Synthetic oligonucleotide
ctgggagagtcaggtagttacggaggggat

SEQ ID NO: 341280 - DNA, 30 bp, Artificial Sequence
  Synthetic oligonucleotide
aagccttctcgtgggcatgctataggggat

SEQ ID NO: 341281 - DNA, 30 bp, Artificial Sequence
  Synthetic oligonucleotide
taattgcaaggcccactgggccgcggggat

SEQ ID NO: 341282 - DNA, 30 bp, Artificial Sequence
  Synthetic oligonucleotide
atcactaagaaccaacggtactatggggat

SEQ ID NO: 341283 - DNA, 30 bp, Artificial Sequence
  Synthetic oligonucleotide
agggaatccccacggagaagcgctggggat

SEQ ID NO: 341284 - DNA, 30 bp, Artificial Sequence
  Synthetic oligonucleotide
ttcactgaacatttgggaaacagtggggat

SEQ ID NO: 341285 - DNA, 30 bp, Artificial Sequence
  Synthetic oligonucleotide
gtctaccgtgggtaagggcgtcgtggggat

SEQ ID NO: 341286 - DNA, 30 bp, Artificial Sequence
  Synthetic oligonucleotide
cagaaattcgtattgcattgttgtggggat

SEQ ID NO: 341287 - DNA, 30 bp, Artificial Sequence
  Synthetic oligonucleotide
ccactaccgcaccagggataacaatgggat

SEQ ID NO: 341288 - DNA, 30 bp, Artificial Sequence
  Synthetic oligonucleotide
ttctcatagtagtaaggtaggggatgggat

SEQ ID NO: 341289 - DNA, 30 bp, Artificial Sequence
  Synthetic oligonucleotide
cttccgggcacgcactggctaatatgggat

SEQ ID NO: 341290 - DNA, 30 bp, Artificial Sequence
  Synthetic oligonucleotide
caaaagcaggctcatggtactatatgggat

SEQ ID NO: 341291 - DNA, 30 bp, Artificial Sequence
  Synthetic oligonucleotide
aatgcaaatttaatgatgcgtccctgggat

SEQ ID NO: 341292 - DNA, 30 bp, Artificial Sequence
  Synthetic oligonucleotide
aacgcttcttaaggtgagcgaatctgggat

SEQ ID NO: 341293 - DNA, 30 bp, Artificial Sequence
  Synthetic oligonucleotide
aaagtctaaagtaaaaagtacttctgggat

SEQ ID NO: 341294 - DNA, 30 bp, Artificial Sequence
  Synthetic oligonucleotide
aagcacgtcctagatggtatcatgtgggat

SEQ ID NO: 341295 - DNA, 30 bp, Artificial Sequence
  Synthetic oligonucleotide
cctctcgcaaatgaagattttcattgggat

SEQ ID NO: 341296 - DNA, 30 bp, Artificial Sequence
  Synthetic oligonucleotide
atcttgattgggctgtcacgcggttgggat

SEQ ID NO: 341297 - DNA, 30 bp, Artificial Sequence
  Synthetic oligonucleotide
cacggaccatagttccggagacgaatggat

SEQ ID NO: 341298 - DNA, 30 bp, Artificial Sequence
  Synthetic oligonucleotide
ggggctttatcacgtcactggctgctggat

SEQ ID NO: 341299 - DNA, 30 bp, Artificial Sequence
  Synthetic oligonucleotide
agcctggcatataccggtggtattctggat

SEQ ID NO: 341300 - DNA, 30 bp, Artificial Sequence
  Synthetic oligonucleotide
agttcaaaagactggcctattgttctggat

SEQ ID NO: 341301 - DNA, 30 bp, Artificial Sequence
  Synthetic oligonucleotide
caggatccgtgttaagggcgtatagtggat

SEQ ID NO: 341302 - DNA, 30 bp, Artificial Sequence
  Synthetic oligonucleotide
tatcaatttcttgagataaaggacgtggat

SEQ ID NO: 341303 - DNA, 30 bp, Artificial Sequence
  Synthetic oligonucleotide
gatctcaatgttgaacggtgtcgcgtggat

SEQ ID NO: 341304 - DNA, 30 bp, Artificial Sequence
  Synthetic oligonucleotide
tgcggtcgcagggctttatttctcgtggat

SEQ ID NO: 341305 - DNA, 30 bp, Artificial Sequence
  Synthetic oligonucleotide
tccgtaggaagactattgcgaatggtggat

SEQ ID NO: 341306 - DNA, 30 bp, Artificial Sequence
  Synthetic oligonucleotide
taggcaagcagttataatacaagtgtggat

SEQ ID NO: 341307 - DNA, 30 bp, Artificial Sequence
  Synthetic oligonucleotide
cgctataaattacaaaacagtgttgtggat

SEQ ID NO: 341308 - DNA, 30 bp, Artificial Sequence
  Synthetic oligonucleotide
aaggttcgaatatcacgcctgttattggat

SEQ ID NO: 341309 - DNA, 30 bp, Artificial Sequence
  Synthetic oligonucleotide
accttaatcacaggccttaaggcgttggat

SEQ ID NO: 341310 - DNA, 30 bp, Artificial Sequence
  Synthetic oligonucleotide
ccagcagtaccatgcccgcactcgttggat

SEQ ID NO: 341311 - DNA, 30 bp, Artificial Sequence
  Synthetic oligonucleotide
aacaggaatttacacgactcgcatttggat

SEQ ID NO: 341312 - DNA, 30 bp, Artificial Sequence
  Synthetic oligonucleotide
gtgaacacattaattcaagcttgtttggat

SEQ ID NO: 341313 - DNA, 30 bp, Artificial Sequence
  Synthetic oligonucleotide
gtggtgaaatggacggtgctgcttttggat

SEQ ID NO: 341314 - DNA, 30 bp, Artificial Sequence
  Synthetic oligonucleotide
taggtaatcaacgtacataagagaaatgat

SEQ ID NO: 341315 - DNA, 30 bp, Artificial Sequence
  Synthetic oligonucleotide
gctcgaagcgtctatcaacgcgacaatgat

SEQ ID NO: 341316 - DNA, 30 bp, Artificial Sequence
  Synthetic oligonucleotide
cagtgttccgactgaagagctcgcaatgat

SEQ ID NO: 341317 - DNA, 30 bp, Artificial Sequence
  Synthetic oligonucleotide
cgtttaagtttacaacttaagccgaatgat

SEQ ID NO: 341318 - DNA, 30 bp, Artificial Sequence
  Synthetic oligonucleotide
gaatatgacggctgtcataggttgaatgat

SEQ ID NO: 341319 - DNA, 30 bp, Artificial Sequence
  Synthetic oligonucleotide
ctctcgggagctctctcggtgttgaatgat

SEQ ID NO: 341320 - DNA, 30 bp, Artificial Sequence
  Synthetic oligonucleotide
tagcgtcgagtgtcgcgggcacataatgat

SEQ ID NO: 341321 - DNA, 30 bp, Artificial Sequence
  Synthetic oligonucleotide
gcaattcaccggtccgctttaagccatgat

SEQ ID NO: 341322 - DNA, 30 bp, Artificial Sequence
  Synthetic oligonucleotide
caaacaaagattctatcttaacgccatgat

SEQ ID NO: 341323 - DNA, 30 bp, Artificial Sequence
  Synthetic oligonucleotide
aatatggtccgtaattccctgaagcatgat

SEQ ID NO: 341324 - DNA, 30 bp, Artificial Sequence
  Synthetic oligonucleotide
tagttcggtcggaactaatgttccgatgat

SEQ ID NO: 341325 - DNA, 30 bp, Artificial Sequence
  Synthetic oligonucleotide
gagtagcaaagttaaactggacgcgatgat

SEQ ID NO: 341326 - DNA, 30 bp, Artificial Sequence
  Synthetic oligonucleotide
atccgtttaaataagacttggaaggatgat

SEQ ID NO: 341327 - DNA, 30 bp, Artificial Sequence
  Synthetic oligonucleotide
atactgctaacgctgacgggctaggatgat

SEQ ID NO: 341328 - DNA, 30 bp, Artificial Sequence
  Synthetic oligonucleotide
gagaatttcagtttcacgcgtgcggatgat

SEQ ID NO: 341329 - DNA, 30 bp, Artificial Sequence
  Synthetic oligonucleotide
tcactatgttatacagacctgagggatgat

SEQ ID NO: 341330 - DNA, 30 bp, Artificial Sequence
  Synthetic oligonucleotide
atggatggggtttcaatatacattgatgat

SEQ ID NO: 341331 - DNA, 30 bp, Artificial Sequence
  Synthetic oligonucleotide
atggacacttgtagcgggtgcattgatgat

SEQ ID NO: 341332 - DNA, 30 bp, Artificial Sequence
  Synthetic oligonucleotide
cctatgcctgtacctttatctattgatgat

SEQ ID NO: 341333 - DNA, 30 bp, Artificial Sequence
  Synthetic oligonucleotide
agcagtgctgtctgcataaatggatatgat

SEQ ID NO: 341334 - DNA, 30 bp, Artificial Sequence
  Synthetic oligonucleotide
atctgtgcaatgtggggcgccttctatgat

SEQ ID NO: 341335 - DNA, 30 bp, Artificial Sequence
  Synthetic oligonucleotide
tagcgaattatcctcccaggcaggtatgat

SEQ ID NO: 341336 - DNA, 30 bp, Artificial Sequence
  Synthetic oligonucleotide
atctttgccattagcaaatcactgtatgat

SEQ ID NO: 341337 - DNA, 28 bp, Artificial Sequence
  Synthetic oligonucleotide
gcgataggtaacgacatagacaactgat

SEQ ID NO: 341338 - DNA, 29 bp, Artificial Sequence
  Synthetic oligonucleotide
cgcatgacctgttttgattggcaactgat

SEQ ID NO: 341339 - DNA, 30 bp, Artificial Sequence
  Synthetic oligonucleotide
agcaagcgcctccgtgagactgtaactgat

SEQ ID NO: 341340 - DNA, 30 bp, Artificial Sequence
  Synthetic oligonucleotide
gcaacacaagtgtctgtcctgaacactgat

SEQ ID NO: 341341 - DNA, 30 bp, Artificial Sequence
  Synthetic oligonucleotide
cgtgttgtatggaatcagtggtacactgat

SEQ ID NO: 341342 - DNA, 30 bp, Artificial Sequence
  Synthetic oligonucleotide
tgtagtacacacgaagccacccgcactgat

SEQ ID NO: 341343 - DNA, 30 bp, Artificial Sequence
  Synthetic oligonucleotide
aagtcatccgatctcgacacgtatactgat

SEQ ID NO: 341344 - DNA, 30 bp, Artificial Sequence
  Synthetic oligonucleotide
aacatcaaacgcgtgcatcaaagtactgat

SEQ ID NO: 341345 - DNA, 30 bp, Artificial Sequence
  Synthetic oligonucleotide
aatgcctggttgaaatgtcagtgtactgat

SEQ ID NO: 341346 - DNA, 30 bp, Artificial Sequence
  Synthetic oligonucleotide
ctaagttgcccgcatggatcgagccctgat

SEQ ID NO: 341347 - DNA, 30 bp, Artificial Sequence
  Synthetic oligonucleotide
cttttgcgttgtgtctatcaccggcctgat

SEQ ID NO: 341348 - DNA, 30 bp, Artificial Sequence
  Synthetic oligonucleotide
acaaagtagattacgtgccggtggcctgat

SEQ ID NO: 341349 - DNA, 30 bp, Artificial Sequence
  Synthetic oligonucleotide
tcacaaaggggcggttaacaatttcctgat

SEQ ID NO: 341350 - DNA, 30 bp, Artificial Sequence
  Synthetic oligonucleotide
tccatcagcatgtatcttttttttcctgat

SEQ ID NO: 341351 - DNA, 30 bp, Artificial Sequence
  Synthetic oligonucleotide
cgatccagctccagcacaagagaagctgat

SEQ ID NO: 341352 - DNA, 30 bp, Artificial Sequence
  Synthetic oligonucleotide
aattgtcagagcaatctttcacacgctgat

SEQ ID NO: 341353 - DNA, 30 bp, Artificial Sequence
  Synthetic oligonucleotide
gatctagacgtaataggggatcatgctgat

SEQ ID NO: 341354 - DNA, 30 bp, Artificial Sequence
  Synthetic oligonucleotide
gaggtggggtcacagtctgcgggtgctgat

SEQ ID NO: 341355 - DNA, 30 bp, Artificial Sequence
  Synthetic oligonucleotide
gagtagaatgtgcccggaaaagactctgat

SEQ ID NO: 341356 - DNA, 30 bp, Artificial Sequence
  Synthetic oligonucleotide
tgtatctcagctagattaagactgtctgat

SEQ ID NO: 341357 - DNA, 30 bp, Artificial Sequence
  Synthetic oligonucleotide
gcccgtgtgattcatatgcgcgaaagtgat

SEQ ID NO: 341358 - DNA, 30 bp, Artificial Sequence
  Synthetic oligonucleotide
ttccaagagcgctataagcatgacagtgat

SEQ ID NO: 341359 - DNA, 30 bp, Artificial Sequence
  Synthetic oligonucleotide
agcttcccgactctgaacttagtcagtgat

SEQ ID NO: 341360 - DNA, 30 bp, Artificial Sequence
  Synthetic oligonucleotide
cgcactcgcgcgacgcggagcaatagtgat

SEQ ID NO: 341361 - DNA, 30 bp, Artificial Sequence
  Synthetic oligonucleotide
cattggaccatgttacgcacagttagtgat

SEQ ID NO: 341362 - DNA, 30 bp, Artificial Sequence
  Synthetic oligonucleotide
ctaggttatccccgtacgcgagcacgtgat

SEQ ID NO: 341363 - DNA, 30 bp, Artificial Sequence
  Synthetic oligonucleotide
ttaggtggggccggccagatatgacgtgat

SEQ ID NO: 341364 - DNA, 30 bp, Artificial Sequence
  Synthetic oligonucleotide
agggcaacctcgtccgtctcacgccgtgat

SEQ ID NO: 341365 - DNA, 30 bp, Artificial Sequence
  Synthetic oligonucleotide
gtgagaagtctggtagcgctcaagcgtgat

SEQ ID NO: 341366 - DNA, 30 bp, Artificial Sequence
  Synthetic oligonucleotide
ggtgggcgtgattttcaacgggagcgtgat

SEQ ID NO: 341367 - DNA, 30 bp, Artificial Sequence
  Synthetic oligonucleotide
tcagtttgggtaagcgatcttgagcgtgat

SEQ ID NO: 341368 - DNA, 30 bp, Artificial Sequence
  Synthetic oligonucleotide
gttgaatctatacacggagacagtcgtgat

SEQ ID NO: 341369 - DNA, 30 bp, Artificial Sequence
  Synthetic oligonucleotide
cgcttgctgcattacgggggcaaaggtgat

SEQ ID NO: 341370 - DNA, 30 bp, Artificial Sequence
  Synthetic oligonucleotide
agtcttgaataagaacatcaagtaggtgat

SEQ ID NO: 341371 - DNA, 30 bp, Artificial Sequence
  Synthetic oligonucleotide
cttagggggtagtaaagggtgcgcggtgat

SEQ ID NO: 341372 - DNA, 30 bp, Artificial Sequence
  Synthetic oligonucleotide
caggtgcccagaagacgcaaaaagggtgat

SEQ ID NO: 341373 - DNA, 30 bp, Artificial Sequence
  Synthetic oligonucleotide
gcaagactattctgaagtcaccttggtgat

SEQ ID NO: 341374 - DNA, 30 bp, Artificial Sequence
  Synthetic oligonucleotide
agtcgttaactctgacaagtgttatgtgat

SEQ ID NO: 341375 - DNA, 30 bp, Artificial Sequence
  Synthetic oligonucleotide
ttcggggttcaggtgaatatatcgtgtgat

SEQ ID NO: 341376 - DNA, 30 bp, Artificial Sequence
  Synthetic oligonucleotide
gtatcgtacaggagaaaaaattggtgtgat

SEQ ID NO: 341377 - DNA, 30 bp, Artificial Sequence
  Synthetic oligonucleotide
tagtaatggaaaattcagaaggtttgtgat

SEQ ID NO: 341378 - DNA, 30 bp, Artificial Sequence
  Synthetic oligonucleotide
tcagatatcatagagagactggtaattgat

SEQ ID NO: 341379 - DNA, 30 bp, Artificial Sequence
  Synthetic oligonucleotide
tctatagtcgtaacatgcgtacgcattgat

SEQ ID NO: 341380 - DNA, 30 bp, Artificial Sequence
  Synthetic oligonucleotide
taaatacacactgctgacagggtcattgat

SEQ ID NO: 341381 - DNA, 30 bp, Artificial Sequence
  Synthetic oligonucleotide
ccaagtgatccagagcgcttatagattgat

SEQ ID NO: 341382 - DNA, 30 bp, Artificial Sequence
  Synthetic oligonucleotide
ggggtatttttgcgcagtcagccgattgat

SEQ ID NO: 341383 - DNA, 30 bp, Artificial Sequence
  Synthetic oligonucleotide
tctaaggtctcaaagggtaacgcgattgat

SEQ ID NO: 341384 - DNA, 30 bp, Artificial Sequence
  Synthetic oligonucleotide
ccggtgttggtgaggatggcttcgattgat

SEQ ID NO: 341385 - DNA, 30 bp, Artificial Sequence
  Synthetic oligonucleotide
tatggaaacacggacccggtatggattgat

SEQ ID NO: 341386 - DNA, 30 bp, Artificial Sequence
  Synthetic oligonucleotide
gccccaagcggacttgcccgtatgattgat

SEQ ID NO: 341387 - DNA, 30 bp, Artificial Sequence
  Synthetic oligonucleotide
acacattgcagcgcgtgccacgatattgat

SEQ ID NO: 341388 - DNA, 30 bp, Artificial Sequence
  Synthetic oligonucleotide
gcgagtgcaattttttcgcgcagtattgat

SEQ ID NO: 341389 - DNA, 30 bp, Artificial Sequence
  Synthetic oligonucleotide
acaagggacagtatcttaaggggtattgat

SEQ ID NO: 341390 - DNA, 31 bp, Artificial Sequence
  Synthetic oligonucleotide
ggcaagccataagattgtccctggtattgat

SEQ ID NO: 341391 - DNA, 30 bp, Artificial Sequence
  Synthetic oligonucleotide
atctggtaagtttaagggtagagacttgat

SEQ ID NO: 341392 - DNA, 30 bp, Artificial Sequence
  Synthetic oligonucleotide
ccacaccaggtacaaaaggcgggacttgat

SEQ ID NO: 341393 - DNA, 30 bp, Artificial Sequence
  Synthetic oligonucleotide
gtagaacacttctcgacatacatacttgat

SEQ ID NO: 341394 - DNA, 30 bp, Artificial Sequence
  Synthetic oligonucleotide
cctgccatggagcgctggaggctacttgat

SEQ ID NO: 341395 - DNA, 30 bp, Artificial Sequence
  Synthetic oligonucleotide
acgaagatgtctgagtgttggctacttgat

SEQ ID NO: 341396 - DNA, 30 bp, Artificial Sequence
  Synthetic oligonucleotide
aaagcccgggttgtgtaccccgtacttgat

SEQ ID NO: 341397 - DNA, 30 bp, Artificial Sequence
  Synthetic oligonucleotide
gctaagggcacctgtcccgatggccttgat

SEQ ID NO: 341398 - DNA, 30 bp, Artificial Sequence
  Synthetic oligonucleotide
tcgatataacgggtacaaacgtatcttgat

SEQ ID NO: 341399 - DNA, 30 bp, Artificial Sequence
  Synthetic oligonucleotide
tgtcgacacgactcgtccggggctcttgat

SEQ ID NO: 341400 - DNA, 30 bp, Artificial Sequence
  Synthetic oligonucleotide
taaatctacaggcaaaatatgcttcttgat

SEQ ID NO: 341401 - DNA, 30 bp, Artificial Sequence
  Synthetic oligonucleotide
gccgataaggtccctccaggggaagttgat

SEQ ID NO: 341402 - DNA, 30 bp, Artificial Sequence
  Synthetic oligonucleotide
attctatttaccggacgaggaagagttgat

SEQ ID NO: 341403 - DNA, 30 bp, Artificial Sequence
  Synthetic oligonucleotide
ctagacaatgatttattatcttacgttgat

SEQ ID NO: 341404 - DNA, 30 bp, Artificial Sequence
  Synthetic oligonucleotide
gttgagttgattagaagcacgaaggttgat

SEQ ID NO: 341405 - DNA, 30 bp, Artificial Sequence
  Synthetic oligonucleotide
ggttcttagacgggtccgtggatggttgat

SEQ ID NO: 341406 - DNA, 30 bp, Artificial Sequence
  Synthetic oligonucleotide
aggccaggactgtaatcttggcatgttgat

SEQ ID NO: 341407 - DNA, 30 bp, Artificial Sequence
  Synthetic oligonucleotide
ctattgagtccccacgcactggatgttgat

SEQ ID NO: 341408 - DNA, 30 bp, Artificial Sequence
  Synthetic oligonucleotide
gatcatatctaaacagccaaaactgttgat

SEQ ID NO: 341409 - DNA, 30 bp, Artificial Sequence
  Synthetic oligonucleotide
gaacatccactactaggtggacttgttgat

SEQ ID NO: 341410 - DNA, 30 bp, Artificial Sequence
  Synthetic oligonucleotide
gtccgtgtgcgaaccgatacggttgttgat

SEQ ID NO: 341411 - DNA, 30 bp, Artificial Sequence
  Synthetic oligonucleotide
taaggggaagttttttgcgacgcatttgat

SEQ ID NO: 341412 - DNA, 30 bp, Artificial Sequence
  Synthetic oligonucleotide
gaggagtcgtcttactgaaatatatttgat

SEQ ID NO: 341413 - DNA, 30 bp, Artificial Sequence
  Synthetic oligonucleotide
caatataaggataatctctgtatatttgat

SEQ ID NO: 341414 - DNA, 30 bp, Artificial Sequence
  Synthetic oligonucleotide
agatcgcacaatcgctggcaccactttgat

SEQ ID NO: 341415 - DNA, 30 bp, Artificial Sequence
  Synthetic oligonucleotide
ggatatagaagctcgacagcggagtttgat

SEQ ID NO: 341416 - DNA, 30 bp, Artificial Sequence
  Synthetic oligonucleotide
tcgacgttatgtggaattagcctgtttgat

SEQ ID NO: 341417 - DNA, 30 bp, Artificial Sequence
  Synthetic oligonucleotide
cgtcggcacgccgttcttttcacttttgat

SEQ ID NO: 341418 - DNA, 30 bp, Artificial Sequence
  Synthetic oligonucleotide
aggagccggcaacaggggagtacttttgat

SEQ ID NO: 341419 - DNA, 30 bp, Artificial Sequence
  Synthetic oligonucleotide
ggcccgggaatgcatttcatgatttttgat

SEQ ID NO: 341420 - DNA, 30 bp, Artificial Sequence
  Synthetic oligonucleotide
gctgattggatactctgtgagctttttgat

SEQ ID NO: 341421 - DNA, 30 bp, Artificial Sequence
  Synthetic oligonucleotide
tatagttaacaaatagagggcggaaaatat

SEQ ID NO: 341422 - DNA, 30 bp, Artificial Sequence
  Synthetic oligonucleotide
ggatagggcgggtaataatattgaaaatat

SEQ ID NO: 341423 - DNA, 30 bp, Artificial Sequence
  Synthetic oligonucleotide
cgggaaaaactttcttcagggggtaaatat

SEQ ID NO: 341424 - DNA, 30 bp, Artificial Sequence
  Synthetic oligonucleotide
tgctaatatactcgcgttttagcacaatat

SEQ ID NO: 341425 - DNA, 30 bp, Artificial Sequence
  Synthetic oligonucleotide
cgtgctgccaagctgtcagtatcacaatat

SEQ ID NO: 341426 - DNA, 30 bp, Artificial Sequence
  Synthetic oligonucleotide
tgggcagccgcctattcttggcgccaatat

SEQ ID NO: 341427 - DNA, 30 bp, Artificial Sequence
  Synthetic oligonucleotide
aaaccccggggacatatggctaagcaatat

SEQ ID NO: 341428 - DNA, 30 bp, Artificial Sequence
  Synthetic oligonucleotide
cattgaaagataaccaagatagcgcaatat

SEQ ID NO: 341429 - DNA, 30 bp, Artificial Sequence
  Synthetic oligonucleotide
tgttacgccgggactgtaatcgcgcaatat

SEQ ID NO: 341430 - DNA, 30 bp, Artificial Sequence
  Synthetic oligonucleotide
cccttgtatcttcggaccgacgtgcaatat

SEQ ID NO: 341431 - DNA, 30 bp, Artificial Sequence
  Synthetic oligonucleotide
cactcccattctatatataacttgcaatat

SEQ ID NO: 341432 - DNA, 30 bp, Artificial Sequence
  Synthetic oligonucleotide
tcctggaataagtcccgctcgtatcaatat

SEQ ID NO: 341433 - DNA, 30 bp, Artificial Sequence
  Synthetic oligonucleotide
cgaggccttgttatcggatagaacgaatat

SEQ ID NO: 341434 - DNA, 30 bp, Artificial Sequence
  Synthetic oligonucleotide
tttacccagtagataaggacgtacgaatat

SEQ ID NO: 341435 - DNA, 31 bp, Artificial Sequence
  Synthetic oligonucleotide
aacgtccagctgtaacgacaacgtcgaatat

SEQ ID NO: 341436 - DNA, 30 bp, Artificial Sequence
  Synthetic oligonucleotide
acatccgctgactcgtaagactaggaatat

SEQ ID NO: 341437 - DNA, 30 bp, Artificial Sequence
  Synthetic oligonucleotide
tgtaactcgggagtctcctacgctgaatat

SEQ ID NO: 341438 - DNA, 30 bp, Artificial Sequence
  Synthetic oligonucleotide
accgagcatgaagtaagcatttgtgaatat

SEQ ID NO: 341439 - DNA, 30 bp, Artificial Sequence
  Synthetic oligonucleotide
ccgcttctgttcggtaggagtgcataatat

SEQ ID NO: 341440 - DNA, 30 bp, Artificial Sequence
  Synthetic oligonucleotide
atagaacgccacctcatcggcatataatat

SEQ ID NO: 341441 - DNA, 30 bp, Artificial Sequence
  Synthetic oligonucleotide
atggtgattaagttgccccttatataatat

SEQ ID NO: 341442 - DNA, 30 bp, Artificial Sequence
  Synthetic oligonucleotide
catagataccatgtttggatcgtataatat

SEQ ID NO: 341443 - DNA, 30 bp, Artificial Sequence
  Synthetic oligonucleotide
gaccaattcaagtgtagatttacgtaatat

SEQ ID NO: 341444 - DNA, 30 bp, Artificial Sequence
  Synthetic oligonucleotide
gctccactcgttttaatatcaaggtaatat

SEQ ID NO: 341445 - DNA, 30 bp, Artificial Sequence
  Synthetic oligonucleotide
aggtcccaaatacaacctctaaggtaatat

SEQ ID NO: 341446 - DNA, 29 bp, Artificial Sequence
  Synthetic oligonucleotide
gtagtagtgcaaccagtaacctgtaatat

SEQ ID NO: 341447 - DNA, 31 bp, Artificial Sequence
  Synthetic oligonucleotide
tgtttaatgtatccaatatggaggaacatat

SEQ ID NO: 341448 - DNA, 30 bp, Artificial Sequence
  Synthetic oligonucleotide
aaagggagcctattaaggattcacacatat

SEQ ID NO: 341449 - DNA, 30 bp, Artificial Sequence
  Synthetic oligonucleotide
agtatatgaagcctttgctaatccacatat

SEQ ID NO: 341450 - DNA, 30 bp, Artificial Sequence
  Synthetic oligonucleotide
gcctagctgattcaaaagagaggcacatat

SEQ ID NO: 341451 - DNA, 30 bp, Artificial Sequence
  Synthetic oligonucleotide
tcatttagtgtcgacggttatctcacatat

SEQ ID NO: 341452 - DNA, 30 bp, Artificial Sequence
  Synthetic oligonucleotide
tagccaagcagccaatctagttcgacatat

SEQ ID NO: 341453 - DNA, 30 bp, Artificial Sequence
  Synthetic oligonucleotide
gatattgaccttaaaccacattggacatat

SEQ ID NO: 341454 - DNA, 30 bp, Artificial Sequence
  Synthetic oligonucleotide
gcttaaagagtattctcgttggttacatat

SEQ ID NO: 341455 - DNA, 30 bp, Artificial Sequence
  Synthetic oligonucleotide
gtagccggggtatgacactcgcaaccatat

SEQ ID NO: 341456 - DNA, 30 bp, Artificial Sequence
  Synthetic oligonucleotide
tattagtcgagaaatagaacagaaccatat

SEQ ID NO: 341457 - DNA, 30 bp, Artificial Sequence
  Synthetic oligonucleotide
aaatggttttgttaaggccgaacaccatat

SEQ ID NO: 341458 - DNA, 30 bp, Artificial Sequence
  Synthetic oligonucleotide
gtcagaaaagaagggtacggaaagccatat

SEQ ID NO: 341459 - DNA, 30 bp, Artificial Sequence
  Synthetic oligonucleotide
cgtatgagagagtatggcacgaatccatat

SEQ ID NO: 341460 - DNA, 30 bp, Artificial Sequence
  Synthetic oligonucleotide
tgcatagatattgtgagtcggggtccatat

SEQ ID NO: 341461 - DNA, 30 bp, Artificial Sequence
  Synthetic oligonucleotide
ggggggcgcgacccttctacaattccatat

SEQ ID NO: 341462 - DNA, 30 bp, Artificial Sequence
  Synthetic oligonucleotide
tagacgcacagagacattccggacgcatat

SEQ ID NO: 341463 - DNA, 30 bp, Artificial Sequence
  Synthetic oligonucleotide
ctcattcgttttaacgggtccgctgcatat

SEQ ID NO: 341464 - DNA, 30 bp, Artificial Sequence
  Synthetic oligonucleotide
atgaactatcattggctagtgcttgcatat

SEQ ID NO: 341465 - DNA, 30 bp, Artificial Sequence
  Synthetic oligonucleotide
gatagtacacgacgtaaatacccatcatat

SEQ ID NO: 341466 - DNA, 30 bp, Artificial Sequence
  Synthetic oligonucleotide
ctggcagtgattacatctcgaggatcatat

SEQ ID NO: 341467 - DNA, 30 bp, Artificial Sequence
  Synthetic oligonucleotide
agagagccttagtgtacttttggatcatat

SEQ ID NO: 341468 - DNA, 30 bp, Artificial Sequence
  Synthetic oligonucleotide
actccgcaaagataagagtattgctcatat

SEQ ID NO: 341469 - DNA, 30 bp, Artificial Sequence
  Synthetic oligonucleotide
ttgggaagttattctgtgcttgagtcatat

SEQ ID NO: 341470 - DNA, 30 bp, Artificial Sequence
  Synthetic oligonucleotide
taatcggatcactcttcttcgacttcatat

SEQ ID NO: 341471 - DNA, 30 bp, Artificial Sequence
  Synthetic oligonucleotide
ggagccccgctggtgttattaatttcatat

SEQ ID NO: 341472 - DNA, 30 bp, Artificial Sequence
  Synthetic oligonucleotide
cacaggagctcgaaccccagcgtttcatat

SEQ ID NO: 341473 - DNA, 30 bp, Artificial Sequence
  Synthetic oligonucleotide
ttgttgtgttctctttttgtgttttcatat

SEQ ID NO: 341474 - DNA, 30 bp, Artificial Sequence
  Synthetic oligonucleotide
ggccggccagagggctataccacaagatat

SEQ ID NO: 341475 - DNA, 30 bp, Artificial Sequence
  Synthetic oligonucleotide
cattgttgtcaggggttggcttgaagatat

SEQ ID NO: 341476 - DNA, 30 bp, Artificial Sequence
  Synthetic oligonucleotide
cttaagacacggtttccctcattaagatat

SEQ ID NO: 341477 - DNA, 30 bp, Artificial Sequence
  Synthetic oligonucleotide
cacgcccaattcagggagaggcacagatat

SEQ ID NO: 341478 - DNA, 30 bp, Artificial Sequence
  Synthetic oligonucleotide
caatcttaggtgatgtcccgttccagatat

SEQ ID NO: 341479 - DNA, 30 bp, Artificial Sequence
  Synthetic oligonucleotide
ttggtaaaaaatagggtttccgtgagatat

SEQ ID NO: 341480 - DNA, 30 bp, Artificial Sequence
  Synthetic oligonucleotide
gaagcttctgatttgccttctactagatat

SEQ ID NO: 341481 - DNA, 30 bp, Artificial Sequence
  Synthetic oligonucleotide
gtaatcatgtaacaccttttgtctagatat

SEQ ID NO: 341482 - DNA, 30 bp, Artificial Sequence
  Synthetic oligonucleotide
tcgagatgcagattgtctctataacgatat

SEQ ID NO: 341483 - DNA, 30 bp, Artificial Sequence
  Synthetic oligonucleotide
gagactgctcgatagacctcaccacgatat

SEQ ID NO: 341484 - DNA, 30 bp, Artificial Sequence
  Synthetic oligonucleotide
tcgcctctgatgtggtcatccgtacgatat

SEQ ID NO: 341485 - DNA, 30 bp, Artificial Sequence
  Synthetic oligonucleotide
agagggcatgtcgatattatcggccgatat

SEQ ID NO: 341486 - DNA, 30 bp, Artificial Sequence
  Synthetic oligonucleotide
tacatgtggaacatcttcacggttcgatat

SEQ ID NO: 341487 - DNA, 30 bp, Artificial Sequence
  Synthetic oligonucleotide
cgggatagaatcggcaatcgaataggatat

SEQ ID NO: 341488 - DNA, 30 bp, Artificial Sequence
  Synthetic oligonucleotide
gcttggtatttaaggtcgttaccgggatat

SEQ ID NO: 341489 - DNA, 30 bp, Artificial Sequence
  Synthetic oligonucleotide
gagcgacaaagagtttacgcggtgggatat

SEQ ID NO: 341490 - DNA, 30 bp, Artificial Sequence
  Synthetic oligonucleotide
ctactactcgtacgtccgaccactggatat

SEQ ID NO: 341491 - DNA, 30 bp, Artificial Sequence
  Synthetic oligonucleotide
gactgcaggttggttcgggcgcttggatat

SEQ ID NO: 341492 - DNA, 30 bp, Artificial Sequence
  Synthetic oligonucleotide
agcgtccgcatcgttgcgattaaatgatat

SEQ ID NO: 341493 - DNA, 30 bp, Artificial Sequence
  Synthetic oligonucleotide
tccagaataaaatggcaactaacatgatat

SEQ ID NO: 341494 - DNA, 30 bp, Artificial Sequence
  Synthetic oligonucleotide
taatgcgcgtccgccgtacccaactgatat

SEQ ID NO: 341495 - DNA, 30 bp, Artificial Sequence
  Synthetic oligonucleotide
acactctctggctagtatactccctgatat

SEQ ID NO: 341496 - DNA, 30 bp, Artificial Sequence
  Synthetic oligonucleotide
aaggatctcggctgttcgacgaagtgatat

SEQ ID NO: 341497 - DNA, 30 bp, Artificial Sequence
  Synthetic oligonucleotide
tgctcggtggcacgcacattggagtgatat

SEQ ID NO: 341498 - DNA, 30 bp, Artificial Sequence
  Synthetic oligonucleotide
cagcgcggatagttttcgtaaacgtgatat

SEQ ID NO: 341499 - DNA, 30 bp, Artificial Sequence
  Synthetic oligonucleotide
ccttatctgtctactcggtgaaaaatatat

SEQ ID NO: 341500 - DNA, 30 bp, Artificial Sequence
  Synthetic oligonucleotide
ggagtgttgtgtacgggataaccaatatat

SEQ ID NO: 341501 - DNA, 30 bp, Artificial Sequence
  Synthetic oligonucleotide
gacaaaggaaattcgcgcgtcgtaatatat

SEQ ID NO: 341502 - DNA, 30 bp, Artificial Sequence
  Synthetic oligonucleotide
tgttccgtctggagaggttgcggcatatat

SEQ ID NO: 341503 - DNA, 30 bp, Artificial Sequence
  Synthetic oligonucleotide
attcaagcgcctttccagatctgcatatat

SEQ ID NO: 341504 - DNA, 30 bp, Artificial Sequence
  Synthetic oligonucleotide
agcctacatccttcaggattacatatatat

SEQ ID NO: 341505 - DNA, 30 bp, Artificial Sequence
  Synthetic oligonucleotide
aagtcaccggaaccggcgacccgtatatat

SEQ ID NO: 341506 - DNA, 29 bp, Artificial Sequence
  Synthetic oligonucleotide
caacctatctgaattctgctcgtatatat

SEQ ID NO: 341507 - DNA, 30 bp, Artificial Sequence
  Synthetic oligonucleotide
gttctaaggaaacgccgacggatactatat

SEQ ID NO: 341508 - DNA, 30 bp, Artificial Sequence
  Synthetic oligonucleotide
cccgcattatattgatggctgtacctatat

SEQ ID NO: 341509 - DNA, 30 bp, Artificial Sequence
  Synthetic oligonucleotide
agcccctgaaacggcgctgctgccctatat

SEQ ID NO: 341510 - DNA, 30 bp, Artificial Sequence
  Synthetic oligonucleotide
tgtaagacgataaattataagttcctatat

SEQ ID NO: 341511 - DNA, 30 bp, Artificial Sequence
  Synthetic oligonucleotide
gatgtaatgcgcgacctgagttagctatat

SEQ ID NO: 341512 - DNA, 30 bp, Artificial Sequence
  Synthetic oligonucleotide
ggatgcaatgagtcgctgcggacgctatat

SEQ ID NO: 341513 - DNA, 30 bp, Artificial Sequence
  Synthetic oligonucleotide
gtttgggcgctctggaaaatggcgctatat

SEQ ID NO: 341514 - DNA, 30 bp, Artificial Sequence
  Synthetic oligonucleotide
tcttctatagttggcggagtcgaagtatat

SEQ ID NO: 341515 - DNA, 30 bp, Artificial Sequence
  Synthetic oligonucleotide
tcaataacgtgagctcgcgcgccagtatat

SEQ ID NO: 341516 - DNA, 30 bp, Artificial Sequence
  Synthetic oligonucleotide
aactgagggtgttatattgaatcagtatat

SEQ ID NO: 341517 - DNA, 30 bp, Artificial Sequence
  Synthetic oligonucleotide
ctcatacacagttttagcactttagtatat

SEQ ID NO: 341518 - DNA, 30 bp, Artificial Sequence
  Synthetic oligonucleotide
tgacaaatatcccgtgttactgacgtatat

SEQ ID NO: 341519 - DNA, 30 bp, Artificial Sequence
  Synthetic oligonucleotide
agggatcgcctaactcgggcctgcgtatat

SEQ ID NO: 341520 - DNA, 30 bp, Artificial Sequence
  Synthetic oligonucleotide
gtgaactgagatgcttgacagcgggtatat

SEQ ID NO: 341521 - DNA, 30 bp, Artificial Sequence
  Synthetic oligonucleotide
aacaagtccagaatgtcacctactgtatat

SEQ ID NO: 341522 - DNA, 30 bp, Artificial Sequence
  Synthetic oligonucleotide
catgctacggggataggaacatgattatat

SEQ ID NO: 341523 - DNA, 30 bp, Artificial Sequence
  Synthetic oligonucleotide
ttatgaatatgcgaagttaacatattatat

SEQ ID NO: 341524 - DNA, 30 bp, Artificial Sequence
  Synthetic oligonucleotide
ggacggatggtcacctatgttttattatat

SEQ ID NO: 341525 - DNA, 30 bp, Artificial Sequence
  Synthetic oligonucleotide
ggctacggcaggataggggcttccttatat

SEQ ID NO: 341526 - DNA, 30 bp, Artificial Sequence
  Synthetic oligonucleotide
ttgaatgttcgggcggctcgtatcttatat

SEQ ID NO: 341527 - DNA, 30 bp, Artificial Sequence
  Synthetic oligonucleotide
cagttgctcaaataagggtcttggttatat

SEQ ID NO: 341528 - DNA, 30 bp, Artificial Sequence
  Synthetic oligonucleotide
caaattgtgttaagacttgttttgttatat

SEQ ID NO: 341529 - DNA, 30 bp, Artificial Sequence
  Synthetic oligonucleotide
tacgcggagagtcaagacaggtgtttatat

SEQ ID NO: 341530 - DNA, 30 bp, Artificial Sequence
  Synthetic oligonucleotide
ttctagttgacgggggtgcagtaaaactat

SEQ ID NO: 341531 - DNA, 30 bp, Artificial Sequence
  Synthetic oligonucleotide
aggtttagtacaatatgtgctcgaaactat

SEQ ID NO: 341532 - DNA, 30 bp, Artificial Sequence
  Synthetic oligonucleotide
tcatggttagtcgggaataatttaaactat

SEQ ID NO: 341533 - DNA, 30 bp, Artificial Sequence
  Synthetic oligonucleotide
gctcaaatctgctttggcacctccaactat

SEQ ID NO: 341534 - DNA, 30 bp, Artificial Sequence
  Synthetic oligonucleotide
tgggacctaggtaataagtagatcaactat

SEQ ID NO: 341535 - DNA, 30 bp, Artificial Sequence
  Synthetic oligonucleotide
tacttggacccccacaatcagtataactat

SEQ ID NO: 341536 - DNA, 30 bp, Artificial Sequence
  Synthetic oligonucleotide
ttaagacgttgtatgcgaggaattaactat

SEQ ID NO: 341537 - DNA, 30 bp, Artificial Sequence
  Synthetic oligonucleotide
acatgcacgcagtgctaataacttaactat

SEQ ID NO: 341538 - DNA, 30 bp, Artificial Sequence
  Synthetic oligonucleotide
ccaatgtaattacgtgcgcggaagcactat

SEQ ID NO: 341539 - DNA, 30 bp, Artificial Sequence
  Synthetic oligonucleotide
ctacctgtatgctttgacacaaggcactat

SEQ ID NO: 341540 - DNA, 30 bp, Artificial Sequence
  Synthetic oligonucleotide
ttaaaattgaaacagtcaatacggcactat

SEQ ID NO: 341541 - DNA, 30 bp, Artificial Sequence
  Synthetic oligonucleotide
cccgtaccgctgcgcccaggtcggcactat

SEQ ID NO: 341542 - DNA, 30 bp, Artificial Sequence
  Synthetic oligonucleotide
agttagtcgcgttattgtgactcagactat

SEQ ID NO: 341543 - DNA, 30 bp, Artificial Sequence
  Synthetic oligonucleotide
atcgcagacccttgactaaaacgagactat

SEQ ID NO: 341544 - DNA, 30 bp, Artificial Sequence
  Synthetic oligonucleotide
agaaactcggaaagattcattatagactat

SEQ ID NO: 341545 - DNA, 30 bp, Artificial Sequence
  Synthetic oligonucleotide
cagacatccggatcctgtcaacacgactat

SEQ ID NO: 341546 - DNA, 30 bp, Artificial Sequence
  Synthetic oligonucleotide
atgctgtcatactggtcacggggggactat

SEQ ID NO: 341547 - DNA, 30 bp, Artificial Sequence
  Synthetic oligonucleotide
catgatacacgtctggtttaaatggactat

SEQ ID NO: 341548 - DNA, 30 bp, Artificial Sequence
  Synthetic oligonucleotide
cagcttggtttagcttacgtcattgactat

SEQ ID NO: 341549 - DNA, 30 bp, Artificial Sequence
  Synthetic oligonucleotide
atctgcgatcacgagcgagcgtgatactat

SEQ ID NO: 341550 - DNA, 30 bp, Artificial Sequence
  Synthetic oligonucleotide
agcgttttcctctaagggctcatatactat

SEQ ID NO: 341551 - DNA, 30 bp, Artificial Sequence
  Synthetic oligonucleotide
cagggagtcgatacttatccgccctactat

SEQ ID NO: 341552 - DNA, 30 bp, Artificial Sequence
  Synthetic oligonucleotide
tatagagcaatgatgtatgttccctactat

SEQ ID NO: 341553 - DNA, 30 bp, Artificial Sequence
  Synthetic oligonucleotide
agcattcaagtagggggatatggctactat

SEQ ID NO: 341554 - DNA, 30 bp, Artificial Sequence
  Synthetic oligonucleotide
cgaccactaataaattatactatttactat

SEQ ID NO: 341555 - DNA, 31 bp, Artificial Sequence
  Synthetic oligonucleotide
tcgtgaaattctcatacctagtccaacctat

SEQ ID NO: 341556 - DNA, 31 bp, Artificial Sequence
  Synthetic oligonucleotide
gcaggcgagactgttactacccctaacctat

SEQ ID NO: 341557 - DNA, 30 bp, Artificial Sequence
  Synthetic oligonucleotide
accactggacgggcgaaggaggtaacctat

SEQ ID NO: 341558 - DNA, 30 bp, Artificial Sequence
  Synthetic oligonucleotide
ccgtcttgatattggcgaccgaacacctat

SEQ ID NO: 341559 - DNA, 30 bp, Artificial Sequence
  Synthetic oligonucleotide
ggttccgttactcgaatgcttcagacctat

SEQ ID NO: 341560 - DNA, 30 bp, Artificial Sequence
  Synthetic oligonucleotide
tgtgtccgaattgcgcaacgatggacctat

SEQ ID NO: 341561 - DNA, 30 bp, Artificial Sequence
  Synthetic oligonucleotide
acggggttggtaacaccgcacggtacctat

SEQ ID NO: 341562 - DNA, 30 bp, Artificial Sequence
  Synthetic oligonucleotide
aatccgcgtgctaaggtactccaaccctat

SEQ ID NO: 341563 - DNA, 30 bp, Artificial Sequence
  Synthetic oligonucleotide
acggcgactgatggaatgctacacccctat

SEQ ID NO: 341564 - DNA, 30 bp, Artificial Sequence
  Synthetic oligonucleotide
gctaagggtttgcttcaattcatgccctat

SEQ ID NO: 341565 - DNA, 30 bp, Artificial Sequence
  Synthetic oligonucleotide
gaaagcccattgcatccatttatgccctat

SEQ ID NO: 341566 - DNA, 30 bp, Artificial Sequence
  Synthetic oligonucleotide
agtgttcacttgccacagacatgtccctat

SEQ ID NO: 341567 - DNA, 30 bp, Artificial Sequence
  Synthetic oligonucleotide
tagatatgagagccagcctgttgtccctat

SEQ ID NO: 341568 - DNA, 30 bp, Artificial Sequence
  Synthetic oligonucleotide
cagagagactatgcgcagtacggagcctat

SEQ ID NO: 341569 - DNA, 30 bp, Artificial Sequence
  Synthetic oligonucleotide
gatcagttgtatttacataaagtagcctat

SEQ ID NO: 341570 - DNA, 30 bp, Artificial Sequence
  Synthetic oligonucleotide
aacactccattggaaccgtatcacgcctat

SEQ ID NO: 341571 - DNA, 30 bp, Artificial Sequence
  Synthetic oligonucleotide
attgatttcagtcaaggtacacaggcctat

SEQ ID NO: 341572 - DNA, 30 bp, Artificial Sequence
  Synthetic oligonucleotide
cttcaatgtacacgggtttgagtggcctat

SEQ ID NO: 341573 - DNA, 30 bp, Artificial Sequence
  Synthetic oligonucleotide
aaaagtccgccaataagaacgagtgcctat

SEQ ID NO: 341574 - DNA, 30 bp, Artificial Sequence
  Synthetic oligonucleotide
gagtataaggtacagagtccctgtgcctat

SEQ ID NO: 341575 - DNA, 30 bp, Artificial Sequence
  Synthetic oligonucleotide
tgaaagtatactgtcaaccgccttgcctat

SEQ ID NO: 341576 - DNA, 30 bp, Artificial Sequence
  Synthetic oligonucleotide
caactagtatgcctctggaacaattcctat

SEQ ID NO: 341577 - DNA, 30 bp, Artificial Sequence
  Synthetic oligonucleotide
aaaaaacagctatggaagatacgttcctat

SEQ ID NO: 341578 - DNA, 30 bp, Artificial Sequence
  Synthetic oligonucleotide
tgatgaaacaaaaagtctatattttcctat

SEQ ID NO: 341579 - DNA, 29 bp, Artificial Sequence
  Synthetic oligonucleotide
ttgttgtgttctcttttgtgttttcctat

SEQ ID NO: 341580 - DNA, 30 bp, Artificial Sequence
  Synthetic oligonucleotide
ttgttgtgttcactttttgtgttttcctat

SEQ ID NO: 341581 - DNA, 30 bp, Artificial Sequence
  Synthetic oligonucleotide
ttattgtgttctctttttgtgttttcctat

SEQ ID NO: 341582 - DNA, 30 bp, Artificial Sequence
  Synthetic oligonucleotide
gacagtatcctgctcgggatcagaagctat

SEQ ID NO: 341583 - DNA, 30 bp, Artificial Sequence
  Synthetic oligonucleotide
accagttaaacgctttctcacggaagctat

SEQ ID NO: 341584 - DNA, 30 bp, Artificial Sequence
  Synthetic oligonucleotide
cgccagaaactaggtgagattaacagctat

SEQ ID NO: 341585 - DNA, 30 bp, Artificial Sequence
  Synthetic oligonucleotide
actccacgactggacaaacatgccagctat

SEQ ID NO: 341586 - DNA, 31 bp, Artificial Sequence
  Synthetic oligonucleotide
tacggattgaagtgcgcgtgttacgagctat

SEQ ID NO: 341587 - DNA, 30 bp, Artificial Sequence
  Synthetic oligonucleotide
gcgacgtctgcgttctatgtgcggagctat

SEQ ID NO: 341588 - DNA, 30 bp, Artificial Sequence
  Synthetic oligonucleotide
agaattaggtgtggtagagattggagctat

SEQ ID NO: 341589 - DNA, 30 bp, Artificial Sequence
  Synthetic oligonucleotide
ttgaggtagtaaatttgggtccaacgctat

SEQ ID NO: 341590 - DNA, 30 bp, Artificial Sequence
  Synthetic oligonucleotide
ttgtcccccgcaattaaaagagtacgctat

SEQ ID NO: 341591 - DNA, 30 bp, Artificial Sequence
  Synthetic oligonucleotide
ttcgtttcaacggggagcattccgcgctat

SEQ ID NO: 341592 - DNA, 30 bp, Artificial Sequence
  Synthetic oligonucleotide
tatgggatatcctatggggattatcgctat

SEQ ID NO: 341593 - DNA, 30 bp, Artificial Sequence
  Synthetic oligonucleotide
cctgtgaggaggatgagctaatcatgctat

SEQ ID NO: 341594 - DNA, 30 bp, Artificial Sequence
  Synthetic oligonucleotide
tagttcaaccacgatatatagtcctgctat

SEQ ID NO: 341595 - DNA, 30 bp, Artificial Sequence
  Synthetic oligonucleotide
ggcccgtacactgggcaattcctctgctat

SEQ ID NO: 341596 - DNA, 30 bp, Artificial Sequence
  Synthetic oligonucleotide
ttagcaatatacctgtgctgtctctgctat

SEQ ID NO: 341597 - DNA, 31 bp, Artificial Sequence
  Synthetic oligonucleotide
agccagaaggtagccttccgcagggtgctat

SEQ ID NO: 341598 - DNA, 30 bp, Artificial Sequence
  Synthetic oligonucleotide
taaaagtgtattggacgtgacatgtgctat

SEQ ID NO: 341599 - DNA, 30 bp, Artificial Sequence
  Synthetic oligonucleotide
cacaactgccgttaggaaagattgtgctat

SEQ ID NO: 341600 - DNA, 30 bp, Artificial Sequence
  Synthetic oligonucleotide
cgaagccgtgcaatacatagaaattgctat

SEQ ID NO: 341601 - DNA, 29 bp, Artificial Sequence
  Synthetic oligonucleotide
aatggacctcctaataattgcattgctat

SEQ ID NO: 341602 - DNA, 30 bp, Artificial Sequence
  Synthetic oligonucleotide
agcgcacggctctccaggcgggtttgctat

SEQ ID NO: 341603 - DNA, 30 bp, Artificial Sequence
  Synthetic oligonucleotide
gaggagatgacgggggtgatctcaatctat

SEQ ID NO: 341604 - DNA, 30 bp, Artificial Sequence
  Synthetic oligonucleotide
ggggcgcggtcacagtataggtcaatctat

SEQ ID NO: 341605 - DNA, 30 bp, Artificial Sequence
  Synthetic oligonucleotide
gcgcccttcgttccctaatactgaatctat

SEQ ID NO: 341606 - DNA, 30 bp, Artificial Sequence
  Synthetic oligonucleotide
tccagaagaaggttctacgccaccatctat

SEQ ID NO: 341607 - DNA, 30 bp, Artificial Sequence
  Synthetic oligonucleotide
gtgtttttctagggtcctgggggcatctat

SEQ ID NO: 341608 - DNA, 28 bp, Artificial Sequence
  Synthetic oligonucleotide
ctcttgcataggaagaaatcagatctat

SEQ ID NO: 341609 - DNA, 30 bp, Artificial Sequence
  Synthetic oligonucleotide
tgttgactcatgccaaaaaaatagatctat

SEQ ID NO: 341610 - DNA, 30 bp, Artificial Sequence
  Synthetic oligonucleotide
gtctagtgtgttagttgttctcggatctat

SEQ ID NO: 341611 - DNA, 30 bp, Artificial Sequence
  Synthetic oligonucleotide
atacgcatctttcttatggacactatctat

SEQ ID NO: 341612 - DNA, 30 bp, Artificial Sequence
  Synthetic oligonucleotide
aacttagcgcgaaatgcgatttttatctat

SEQ ID NO: 341613 - DNA, 30 bp, Artificial Sequence
  Synthetic oligonucleotide
tggttctagaaggttggtgcccagctctat

SEQ ID NO: 341614 - DNA, 30 bp, Artificial Sequence
  Synthetic oligonucleotide
gtggagagcaagcgacactaggttctctat

SEQ ID NO: 341615 - DNA, 30 bp, Artificial Sequence
  Synthetic oligonucleotide
gcaggtccaccagacggttcgccagtctat

SEQ ID NO: 341616 - DNA, 30 bp, Artificial Sequence
  Synthetic oligonucleotide
gagaatagctgcttacctttttcggtctat

SEQ ID NO: 341617 - DNA, 30 bp, Artificial Sequence
  Synthetic oligonucleotide
caggctcgctgccgtactggtagggtctat

SEQ ID NO: 341618 - DNA, 30 bp, Artificial Sequence
  Synthetic oligonucleotide
ccagagaatagacccaggggagtggtctat

SEQ ID NO: 341619 - DNA, 30 bp, Artificial Sequence
  Synthetic oligonucleotide
tgagtcatggggtcaacaatagtggtctat

SEQ ID NO: 341620 - DNA, 30 bp, Artificial Sequence
  Synthetic oligonucleotide
ggcacatctctagtcatcgttcctgtctat

SEQ ID NO: 341621 - DNA, 30 bp, Artificial Sequence
  Synthetic oligonucleotide
aatagtagtctccattacgtaattgtctat

SEQ ID NO: 341622 - DNA, 30 bp, Artificial Sequence
  Synthetic oligonucleotide
taagccaagccaggggccgatttattctat

SEQ ID NO: 341623 - DNA, 30 bp, Artificial Sequence
  Synthetic oligonucleotide
gttgtcctcaacgtgcactggccgttctat

SEQ ID NO: 341624 - DNA, 30 bp, Artificial Sequence
  Synthetic oligonucleotide
ctgctgaacccgagcaaagattcgttctat

SEQ ID NO: 341625 - DNA, 30 bp, Artificial Sequence
  Synthetic oligonucleotide
aatgtacacggggtggtttgggtaaagtat

SEQ ID NO: 341626 - DNA, 30 bp, Artificial Sequence
  Synthetic oligonucleotide
tctgggtatttggtactacggccgaagtat

SEQ ID NO: 341627 - DNA, 30 bp, Artificial Sequence
  Synthetic oligonucleotide
ggcggtcgggggagggctaggtcgaagtat

SEQ ID NO: 341628 - DNA, 30 bp, Artificial Sequence
  Synthetic oligonucleotide
agtcctgatacgaagcccagtagtaagtat

SEQ ID NO: 341629 - DNA, 30 bp, Artificial Sequence
  Synthetic oligonucleotide
acaactattgaggcgcacgtagcacagtat

SEQ ID NO: 341630 - DNA, 30 bp, Artificial Sequence
  Synthetic oligonucleotide
atctctgcaaaggctaggatacgacagtat

SEQ ID NO: 341631 - DNA, 30 bp, Artificial Sequence
  Synthetic oligonucleotide
ccattctcggtatccctattcatacagtat

SEQ ID NO: 341632 - DNA, 30 bp, Artificial Sequence
  Synthetic oligonucleotide
atgcatcgcgcaatcaaagcggagcagtat

SEQ ID NO: 341633 - DNA, 30 bp, Artificial Sequence
  Synthetic oligonucleotide
aaaccaatgcttagcattaggttgcagtat

SEQ ID NO: 341634 - DNA, 30 bp, Artificial Sequence
  Synthetic oligonucleotide
tcaagcagcttcaaaggactcgatcagtat

SEQ ID NO: 341635 - DNA, 30 bp, Artificial Sequence
  Synthetic oligonucleotide
tttagcgacactgttgccattgaagagtat

SEQ ID NO: 341636 - DNA, 30 bp, Artificial Sequence
  Synthetic oligonucleotide
gaaacccattgcgctttgtcgggagagtat

SEQ ID NO: 341637 - DNA, 30 bp, Artificial Sequence
  Synthetic oligonucleotide
tgaccccgagtacgctacaaggtagagtat

SEQ ID NO: 341638 - DNA, 30 bp, Artificial Sequence
  Synthetic oligonucleotide
cactggacaaattttttcagaagcgagtat

SEQ ID NO: 341639 - DNA, 30 bp, Artificial Sequence
  Synthetic oligonucleotide
aaccactgtctaagctgcctgcgcgagtat

SEQ ID NO: 341640 - DNA, 30 bp, Artificial Sequence
  Synthetic oligonucleotide
ggtggtggatcaggccgtatgcaatagtat

SEQ ID NO: 341641 - DNA, 30 bp, Artificial Sequence
  Synthetic oligonucleotide
aaatgactgatgacgcgagcggaatagtat

SEQ ID NO: 341642 - DNA, 30 bp, Artificial Sequence
  Synthetic oligonucleotide
caattcatgaatatttaccaatattagtat

SEQ ID NO: 341643 - DNA, 30 bp, Artificial Sequence
  Synthetic oligonucleotide
cgtggggttgtatccgctattctttagtat

SEQ ID NO: 341644 - DNA, 30 bp, Artificial Sequence
  Synthetic oligonucleotide
agtaataggccggccagatatgaaacgtat

SEQ ID NO: 341645 - DNA, 30 bp, Artificial Sequence
  Synthetic oligonucleotide
aagggtagtgcgaggatcacgcgaacgtat

SEQ ID NO: 341646 - DNA, 30 bp, Artificial Sequence
  Synthetic oligonucleotide
tattcaggatggacagttgtgtccacgtat

SEQ ID NO: 341647 - DNA, 30 bp, Artificial Sequence
  Synthetic oligonucleotide
agtagttgtccacgagtatctcagacgtat

SEQ ID NO: 341648 - DNA, 30 bp, Artificial Sequence
  Synthetic oligonucleotide
ctagctagtagccaagatatggctacgtat

SEQ ID NO: 341649 - DNA, 30 bp, Artificial Sequence
  Synthetic oligonucleotide
aacgagttcttaccccaggatgttacgtat

SEQ ID NO: 341650 - DNA, 30 bp, Artificial Sequence
  Synthetic oligonucleotide
aaacctatcacgacacgattatttacgtat

SEQ ID NO: 341651 - DNA, 30 bp, Artificial Sequence
  Synthetic oligonucleotide
gggatactggtggccagtagtaccccgtat

SEQ ID NO: 341652 - DNA, 30 bp, Artificial Sequence
  Synthetic oligonucleotide
gtcgacacatttcgtcccgtaggcccgtat

SEQ ID NO: 341653 - DNA, 30 bp, Artificial Sequence
  Synthetic oligonucleotide
ctcttttcgacaaagcgccgaatcccgtat

SEQ ID NO: 341654 - DNA, 30 bp, Artificial Sequence
  Synthetic oligonucleotide
aagcccttttccggtatgatcgagccgtat

SEQ ID NO: 341655 - DNA, 30 bp, Artificial Sequence
  Synthetic oligonucleotide
atgaattgacaagtggtacagtagccgtat

SEQ ID NO: 341656 - DNA, 30 bp, Artificial Sequence
  Synthetic oligonucleotide
tagcgggaccaccccatgttctatccgtat

SEQ ID NO: 341657 - DNA, 30 bp, Artificial Sequence
  Synthetic oligonucleotide
gatcgggtacggtccgtattcggagcgtat

SEQ ID NO: 341658 - DNA, 30 bp, Artificial Sequence
  Synthetic oligonucleotide
tagtatacaatcgttgaacgcgacgcgtat

SEQ ID NO: 341659 - DNA, 30 bp, Artificial Sequence
  Synthetic oligonucleotide
atagtaacttctcagcgcgtgtgcgcgtat

SEQ ID NO: 341660 - DNA, 30 bp, Artificial Sequence
  Synthetic oligonucleotide
tatgcacgctcgcacctggtaaatgcgtat

SEQ ID NO: 341661 - DNA, 30 bp, Artificial Sequence
  Synthetic oligonucleotide
atacgaaacttctacgggcctaatgcgtat

SEQ ID NO: 341662 - DNA, 30 bp, Artificial Sequence
  Synthetic oligonucleotide
aattaactatacgttaatttagatgcgtat

SEQ ID NO: 341663 - DNA, 30 bp, Artificial Sequence
  Synthetic oligonucleotide
actccaaagtaatatcgcctaaaatcgtat

SEQ ID NO: 341664 - DNA, 30 bp, Artificial Sequence
  Synthetic oligonucleotide
cgcggcacgcaaagtcgtaggccatcgtat

SEQ ID NO: 341665 - DNA, 30 bp, Artificial Sequence
  Synthetic oligonucleotide
tatagctgttccgtcgattcgggctcgtat

SEQ ID NO: 341666 - DNA, 30 bp, Artificial Sequence
  Synthetic oligonucleotide
tcatttcacgattggatcggagtctcgtat

SEQ ID NO: 341667 - DNA, 30 bp, Artificial Sequence
  Synthetic oligonucleotide
tggtaaaacgcttgttttggagagtcgtat

SEQ ID NO: 341668 - DNA, 30 bp, Artificial Sequence
  Synthetic oligonucleotide
cggtactgatatttaggttgagtgtcgtat

SEQ ID NO: 341669 - DNA, 30 bp, Artificial Sequence
  Synthetic oligonucleotide
aaagccagacaacggctcgttgattcgtat

SEQ ID NO: 341670 - DNA, 30 bp, Artificial Sequence
  Synthetic oligonucleotide
ttatcaagaaattcggaacatctttcgtat

SEQ ID NO: 341671 - DNA, 30 bp, Artificial Sequence
  Synthetic oligonucleotide
cgaagacttgatgtgctcctcttttcgtat

SEQ ID NO: 341672 - DNA, 30 bp, Artificial Sequence
  Synthetic oligonucleotide
atgtaggtcgggaccgcccctccaaggtat

SEQ ID NO: 341673 - DNA, 30 bp, Artificial Sequence
  Synthetic oligonucleotide
gggcatctttagccagtgcgtataaggtat

SEQ ID NO: 341674 - DNA, 30 bp, Artificial Sequence
  Synthetic oligonucleotide
ctagcctactgcatagatactaccaggtat

SEQ ID NO: 341675 - DNA, 30 bp, Artificial Sequence
  Synthetic oligonucleotide
aggcccgtcgtgattttgccctcgaggtat

SEQ ID NO: 341676 - DNA, 30 bp, Artificial Sequence
  Synthetic oligonucleotide
gtgggatgcgcgttgttatatcctaggtat

SEQ ID NO: 341677 - DNA, 30 bp, Artificial Sequence
  Synthetic oligonucleotide
ttgaacagtgcaactatttagcaacggtat

SEQ ID NO: 341678 - DNA, 30 bp, Artificial Sequence
  Synthetic oligonucleotide
ccaggggcgttattcaggccgctgcggtat

SEQ ID NO: 341679 - DNA, 30 bp, Artificial Sequence
  Synthetic oligonucleotide
aagacatggtcaacgcgcaaagctcggtat

SEQ ID NO: 341680 - DNA, 30 bp, Artificial Sequence
  Synthetic oligonucleotide
ctggcctcttgataacgccccaaagggtat

SEQ ID NO: 341681 - DNA, 30 bp, Artificial Sequence
  Synthetic oligonucleotide
gactgtacgtcgacttatttatcagggtat

SEQ ID NO: 341682 - DNA, 30 bp, Artificial Sequence
  Synthetic oligonucleotide
aggcgtctctaatgggttctgctagggtat

SEQ ID NO: 341683 - DNA, 30 bp, Artificial Sequence
  Synthetic oligonucleotide
caccatcaaggcctgagtctattcgggtat

SEQ ID NO: 341684 - DNA, 30 bp, Artificial Sequence
  Synthetic oligonucleotide
aagttgatcgggatagtcccacaggggtat

SEQ ID NO: 341685 - DNA, 30 bp, Artificial Sequence
  Synthetic oligonucleotide
ttcttaagagtaacgccggctcgggggtat

SEQ ID NO: 341686 - DNA, 30 bp, Artificial Sequence
  Synthetic oligonucleotide
tgtatcgtcaacaacgctacaactgggtat

SEQ ID NO: 341687 - DNA, 30 bp, Artificial Sequence
  Synthetic oligonucleotide
acaaatgactatgccgcaagtaactggtat

SEQ ID NO: 341688 - DNA, 30 bp, Artificial Sequence
  Synthetic oligonucleotide
gcatccaattgcctgatggggacctggtat

SEQ ID NO: 341689 - DNA, 30 bp, Artificial Sequence
  Synthetic oligonucleotide
cgaagccccaaaactggttaacggtggtat

SEQ ID NO: 341690 - DNA, 30 bp, Artificial Sequence
  Synthetic oligonucleotide
tgcttagtaattatagccttagattggtat

SEQ ID NO: 341691 - DNA, 30 bp, Artificial Sequence
  Synthetic oligonucleotide
tagtactttttgggagtagtcgtttggtat

SEQ ID NO: 341692 - DNA, 30 bp, Artificial Sequence
  Synthetic oligonucleotide
caagtggtcgacttacgaggaataatgtat

SEQ ID NO: 341693 - DNA, 30 bp, Artificial Sequence
  Synthetic oligonucleotide
cattagtgctagcagggtcgattcatgtat

SEQ ID NO: 341694 - DNA, 30 bp, Artificial Sequence
  Synthetic oligonucleotide
atattgcgagggatcgaatatgtactgtat

SEQ ID NO: 341695 - DNA, 30 bp, Artificial Sequence
  Synthetic oligonucleotide
attatagcacgagtatctgaggtcctgtat

SEQ ID NO: 341696 - DNA, 30 bp, Artificial Sequence
  Synthetic oligonucleotide
gcggggcacttacaaaagcccttcctgtat

SEQ ID NO: 341697 - DNA, 30 bp, Artificial Sequence
  Synthetic oligonucleotide
taaagatcaaggctgcagctaaagctgtat

SEQ ID NO: 341698 - DNA, 30 bp, Artificial Sequence
  Synthetic oligonucleotide
tcacgtatgtgattagggaataaagtgtat

SEQ ID NO: 341699 - DNA, 30 bp, Artificial Sequence
  Synthetic oligonucleotide
tttaggattcagcccggtccataagtgtat

SEQ ID NO: 341700 - DNA, 30 bp, Artificial Sequence
  Synthetic oligonucleotide
tactgcccgcttgaaacggtgtcagtgtat

SEQ ID NO: 341701 - DNA, 30 bp, Artificial Sequence
  Synthetic oligonucleotide
tatgggcatatcctcccaatgagggtgtat

SEQ ID NO: 341702 - DNA, 30 bp, Artificial Sequence
  Synthetic oligonucleotide
tcactttcataaaagtggtagttggtgtat

SEQ ID NO: 341703 - DNA, 30 bp, Artificial Sequence
  Synthetic oligonucleotide
gatagtccctgcctaaacacacatgtgtat

SEQ ID NO: 341704 - DNA, 30 bp, Artificial Sequence
  Synthetic oligonucleotide
tcttatctgttgggttttcctcttgtgtat

SEQ ID NO: 341705 - DNA, 30 bp, Artificial Sequence
  Synthetic oligonucleotide
tcttatctgttatgttttcctcttgtgtat

SEQ ID NO: 341706 - DNA, 30 bp, Artificial Sequence
  Synthetic oligonucleotide
tcttatctgtggtgttttcctcttgtgtat

SEQ ID NO: 341707 - DNA, 30 bp, Artificial Sequence
  Synthetic oligonucleotide
ctatcttatttactgagatgtgaattgtat

SEQ ID NO: 341708 - DNA, 30 bp, Artificial Sequence
  Synthetic oligonucleotide
acccagatagtctgcctgtactagttgtat

SEQ ID NO: 341709 - DNA, 30 bp, Artificial Sequence
  Synthetic oligonucleotide
gcgaagcgccacattcgcttattgttgtat

SEQ ID NO: 341710 - DNA, 30 bp, Artificial Sequence
  Synthetic oligonucleotide
cggggggcaagtttgggttagagtttgtat

SEQ ID NO: 341711 - DNA, 30 bp, Artificial Sequence
  Synthetic oligonucleotide
gatcggccggataaggcccggagaaattat

SEQ ID NO: 341712 - DNA, 30 bp, Artificial Sequence
  Synthetic oligonucleotide
atggccgtagccttggatttgagaaattat

SEQ ID NO: 341713 - DNA, 30 bp, Artificial Sequence
  Synthetic oligonucleotide
tggaatgggtgagccgaggggggaaattat

SEQ ID NO: 341714 - DNA, 30 bp, Artificial Sequence
  Synthetic oligonucleotide
ctattgccaggtgcgaagtaggtcaattat

SEQ ID NO: 341715 - DNA, 30 bp, Artificial Sequence
  Synthetic oligonucleotide
acgaggaaccaccgatgtttgttcaattat

SEQ ID NO: 341716 - DNA, 30 bp, Artificial Sequence
  Synthetic oligonucleotide
ggaaaccattaggattatagcaagaattat

SEQ ID NO: 341717 - DNA, 30 bp, Artificial Sequence
  Synthetic oligonucleotide
tggcgtggtagcgtacaggagagtaattat

SEQ ID NO: 341718 - DNA, 30 bp, Artificial Sequence
  Synthetic oligonucleotide
cttttacattttgcttagaccccccattat

SEQ ID NO: 341719 - DNA, 30 bp, Artificial Sequence
  Synthetic oligonucleotide
ttgcaaagccgattacttagttcgcattat

SEQ ID NO: 341720 - DNA, 30 bp, Artificial Sequence
  Synthetic oligonucleotide
aaatacagtctgaagacgtggtctcattat

SEQ ID NO: 341721 - DNA, 30 bp, Artificial Sequence
  Synthetic oligonucleotide
ggacagctgatctttcggcctagtcattat

SEQ ID NO: 341722 - DNA, 30 bp, Artificial Sequence
  Synthetic oligonucleotide
ggagatagagcactcaagtgggttcattat

SEQ ID NO: 341723 - DNA, 30 bp, Artificial Sequence
  Synthetic oligonucleotide
tacgttcttccgtacgatcgggtagattat

SEQ ID NO: 341724 - DNA, 30 bp, Artificial Sequence
  Synthetic oligonucleotide
ctaattaagaggccgaacgttaccgattat

SEQ ID NO: 341725 - DNA, 30 bp, Artificial Sequence
  Synthetic oligonucleotide
ctacgtgtgctatgtacatgcagggattat

SEQ ID NO: 341726 - DNA, 30 bp, Artificial Sequence
  Synthetic oligonucleotide
gggctctacatgcgggaaagacctgattat

SEQ ID NO: 341727 - DNA, 30 bp, Artificial Sequence
  Synthetic oligonucleotide
tttaccatgttgagccaccggagtgattat

SEQ ID NO: 341728 - DNA, 30 bp, Artificial Sequence
  Synthetic oligonucleotide
ctccacggctccgctctgataaaatattat

SEQ ID NO: 341729 - DNA, 30 bp, Artificial Sequence
  Synthetic oligonucleotide
taaaaggaaacccgtactaccaaatattat

SEQ ID NO: 341730 - DNA, 30 bp, Artificial Sequence
  Synthetic oligonucleotide
tgctagctgtttacctcttggaaatattat

SEQ ID NO: 341731 - DNA, 30 bp, Artificial Sequence
  Synthetic oligonucleotide
ttgtgaagaacgacatggtggcgatattat

SEQ ID NO: 341732 - DNA, 30 bp, Artificial Sequence
  Synthetic oligonucleotide
gtccacgaaaaaaaatagcgttggtattat

SEQ ID NO: 341733 - DNA, 30 bp, Artificial Sequence
  Synthetic oligonucleotide
tttggaattcggtttgttgggttgtattat

SEQ ID NO: 341734 - DNA, 30 bp, Artificial Sequence
  Synthetic oligonucleotide
tgtctgttgtggtgggaccgtataacttat

SEQ ID NO: 341735 - DNA, 30 bp, Artificial Sequence
  Synthetic oligonucleotide
atgaattagatacgcgtgtgaatcacttat

SEQ ID NO: 341736 - DNA, 30 bp, Artificial Sequence
  Synthetic oligonucleotide
ccactccgagaagtatgaaagacgacttat

SEQ ID NO: 341737 - DNA, 30 bp, Artificial Sequence
  Synthetic oligonucleotide
cagcagcgaagcagtccagctggtacttat

SEQ ID NO: 341738 - DNA, 30 bp, Artificial Sequence
  Synthetic oligonucleotide
agcaggatattcaaggaagcccttacttat

SEQ ID NO: 341739 - DNA, 30 bp, Artificial Sequence
  Synthetic oligonucleotide
gaggagcaatagacataccccagaccttat

SEQ ID NO: 341740 - DNA, 30 bp, Artificial Sequence
  Synthetic oligonucleotide
ttaaaatttattgccatttcaataccttat

SEQ ID NO: 341741 - DNA, 30 bp, Artificial Sequence
  Synthetic oligonucleotide
agttagcctgggatagagagactaccttat

SEQ ID NO: 341742 - DNA, 30 bp, Artificial Sequence
  Synthetic oligonucleotide
ttccgaccaatcgcccataagaagccttat

SEQ ID NO: 341743 - DNA, 30 bp, Artificial Sequence
  Synthetic oligonucleotide
cattaagacacgacttcggcacctccttat

SEQ ID NO: 341744 - DNA, 30 bp, Artificial Sequence
  Synthetic oligonucleotide
ccgaccctagtcgtacagtccggtccttat

SEQ ID NO: 341745 - DNA, 30 bp, Artificial Sequence
  Synthetic oligonucleotide
gttctacggaagagcacaaattgtccttat

SEQ ID NO: 341746 - DNA, 30 bp, Artificial Sequence
  Synthetic oligonucleotide
ctcggatccgtgtgtaagagagacgcttat

SEQ ID NO: 341747 - DNA, 30 bp, Artificial Sequence
  Synthetic oligonucleotide
tcactgatgtggtattcatctggcgcttat

SEQ ID NO: 341748 - DNA, 30 bp, Artificial Sequence
  Synthetic oligonucleotide
atgggcccatagctagaatcttgtgcttat

SEQ ID NO: 341749 - DNA, 30 bp, Artificial Sequence
  Synthetic oligonucleotide
acacgagtgaaatctacaatcggatcttat

SEQ ID NO: 341750 - DNA, 30 bp, Artificial Sequence
  Synthetic oligonucleotide
caggtggccttctaactttgtaactcttat

SEQ ID NO: 341751 - DNA, 30 bp, Artificial Sequence
  Synthetic oligonucleotide
gggaccgggaaagagtccttgcagtcttat

SEQ ID NO: 341752 - DNA, 30 bp, Artificial Sequence
  Synthetic oligonucleotide
tagagaagccacgggtcgcgctggtcttat

SEQ ID NO: 341753 - DNA, 30 bp, Artificial Sequence
  Synthetic oligonucleotide
tcaggcatctcaagccatcttggttcttat

SEQ ID NO: 341754 - DNA, 30 bp, Artificial Sequence
  Synthetic oligonucleotide
accagtcacagcagcttaatcgtttcttat

SEQ ID NO: 341755 - DNA, 30 bp, Artificial Sequence
  Synthetic oligonucleotide
tctggccggatctataagttgcaaagttat

SEQ ID NO: 341756 - DNA, 30 bp, Artificial Sequence
  Synthetic oligonucleotide
gggggggcgttctttaaaaaagtaagttat

SEQ ID NO: 341757 - DNA, 30 bp, Artificial Sequence
  Synthetic oligonucleotide
tagggcttctaagccttagacttaagttat

SEQ ID NO: 341758 - DNA, 30 bp, Artificial Sequence
  Synthetic oligonucleotide
tgcatgcaacctggggtccgcggcagttat

SEQ ID NO: 341759 - DNA, 30 bp, Artificial Sequence
  Synthetic oligonucleotide
catagcagaattctacccaccgagagttat

SEQ ID NO: 341760 - DNA, 30 bp, Artificial Sequence
  Synthetic oligonucleotide
ttgtgtacattacacaatgtggggagttat

SEQ ID NO: 341761 - DNA, 30 bp, Artificial Sequence
  Synthetic oligonucleotide
tccaatgttcgttccattaccattagttat

SEQ ID NO: 341762 - DNA, 30 bp, Artificial Sequence
  Synthetic oligonucleotide
catacgtaagagaggacagtgattagttat

SEQ ID NO: 341763 - DNA, 30 bp, Artificial Sequence
  Synthetic oligonucleotide
taatggtgatattatatcaagatacgttat

SEQ ID NO: 341764 - DNA, 30 bp, Artificial Sequence
  Synthetic oligonucleotide
gcgtgcccggaccggggaacgccccgttat

SEQ ID NO: 341765 - DNA, 30 bp, Artificial Sequence
  Synthetic oligonucleotide
tgttaaacgttaacagtagcgcgccgttat

SEQ ID NO: 341766 - DNA, 30 bp, Artificial Sequence
  Synthetic oligonucleotide
taccgcgcatttcagatcctttgtcgttat

SEQ ID NO: 341767 - DNA, 30 bp, Artificial Sequence
  Synthetic oligonucleotide
tgcctttagccctctgcataccttcgttat

SEQ ID NO: 341768 - DNA, 30 bp, Artificial Sequence
  Synthetic oligonucleotide
gatgtagcttggtacaagatctttcgttat

SEQ ID NO: 341769 - DNA, 30 bp, Artificial Sequence
  Synthetic oligonucleotide
gatctatctgtacgttgacaaggaggttat

SEQ ID NO: 341770 - DNA, 30 bp, Artificial Sequence
  Synthetic oligonucleotide
tccccttatcaataccggtgacccggttat

SEQ ID NO: 341771 - DNA, 30 bp, Artificial Sequence
  Synthetic oligonucleotide
tgaaagtttgtactaggtgcggctggttat

SEQ ID NO: 341772 - DNA, 30 bp, Artificial Sequence
  Synthetic oligonucleotide
tagacgccagcgaacagcgcataatgttat

SEQ ID NO: 341773 - DNA, 30 bp, Artificial Sequence
  Synthetic oligonucleotide
acggcataggtcgcaccaggtcactgttat

SEQ ID NO: 341774 - DNA, 30 bp, Artificial Sequence
  Synthetic oligonucleotide
ttaatgaaactggacatgtcctagtgttat

SEQ ID NO: 341775 - DNA, 30 bp, Artificial Sequence
  Synthetic oligonucleotide
tggaataccagaaaagtccatcggtgttat

SEQ ID NO: 341776 - DNA, 30 bp, Artificial Sequence
  Synthetic oligonucleotide
cctcgttaggcgcccgggtgatattgttat

SEQ ID NO: 341777 - DNA, 30 bp, Artificial Sequence
  Synthetic oligonucleotide
ggagagcagttgattgatcaaccttgttat

SEQ ID NO: 341778 - DNA, 30 bp, Artificial Sequence
  Synthetic oligonucleotide
ggatcgttctaacagatgtggccaatttat

SEQ ID NO: 341779 - DNA, 30 bp, Artificial Sequence
  Synthetic oligonucleotide
actcgaacaaagttcaatagcgcaatttat

SEQ ID NO: 341780 - DNA, 30 bp, Artificial Sequence
  Synthetic oligonucleotide
agtagacgataatttttatttatcatttat

SEQ ID NO: 341781 - DNA, 30 bp, Artificial Sequence
  Synthetic oligonucleotide
acgaacctcattaggggttggttcatttat

SEQ ID NO: 341782 - DNA, 30 bp, Artificial Sequence
  Synthetic oligonucleotide
tggttggtgcccatgtaacggaagatttat

SEQ ID NO: 341783 - DNA, 30 bp, Artificial Sequence
  Synthetic oligonucleotide
cgtacgataattatgcgacgctagatttat

SEQ ID NO: 341784 - DNA, 30 bp, Artificial Sequence
  Synthetic oligonucleotide
cggggacggctatagcggatgcatatttat

SEQ ID NO: 341785 - DNA, 30 bp, Artificial Sequence
  Synthetic oligonucleotide
tgggccttgtgcaatagcgttgatatttat

SEQ ID NO: 341786 - DNA, 30 bp, Artificial Sequence
  Synthetic oligonucleotide
acgaccattgccggttgactctatatttat

SEQ ID NO: 341787 - DNA, 30 bp, Artificial Sequence
  Synthetic oligonucleotide
tgtatgcatctcatgctggtacctatttat

SEQ ID NO: 341788 - DNA, 30 bp, Artificial Sequence
  Synthetic oligonucleotide
tatgaacaacctgtgggttggcttatttat

SEQ ID NO: 341789 - DNA, 30 bp, Artificial Sequence
  Synthetic oligonucleotide
cgaagtaagtatctgtgtgcgtttatttat

SEQ ID NO: 341790 - DNA, 30 bp, Artificial Sequence
  Synthetic oligonucleotide
cgtgttgccgcgggtgcgcgttttatttat

SEQ ID NO: 341791 - DNA, 30 bp, Artificial Sequence
  Synthetic oligonucleotide
ttcccacccaaaatgtatacgatactttat

SEQ ID NO: 341792 - DNA, 30 bp, Artificial Sequence
  Synthetic oligonucleotide
gaacgcttgaaccgagggcgacacctttat

SEQ ID NO: 341793 - DNA, 30 bp, Artificial Sequence
  Synthetic oligonucleotide
ggagacggaaataggcagtttcccctttat

SEQ ID NO: 341794 - DNA, 30 bp, Artificial Sequence
  Synthetic oligonucleotide
gactacgctaggtacggcatgacgctttat

SEQ ID NO: 341795 - DNA, 30 bp, Artificial Sequence
  Synthetic oligonucleotide
gcggatatatgtcatccggtgctgctttat

SEQ ID NO: 341796 - DNA, 30 bp, Artificial Sequence
  Synthetic oligonucleotide
atggtagcgttcagcctacaagtgctttat

SEQ ID NO: 341797 - DNA, 30 bp, Artificial Sequence
  Synthetic oligonucleotide
gattgcacgggtaatcactcaactctttat

SEQ ID NO: 341798 - DNA, 30 bp, Artificial Sequence
  Synthetic oligonucleotide
tcgcctatcgctcacacaagccttctttat

SEQ ID NO: 341799 - DNA, 30 bp, Artificial Sequence
  Synthetic oligonucleotide
tattaaacaggtattcattacctcgtttat

SEQ ID NO: 341800 - DNA, 30 bp, Artificial Sequence
  Synthetic oligonucleotide
taatggagatcctagcaatgattcgtttat

SEQ ID NO: 341801 - DNA, 30 bp, Artificial Sequence
  Synthetic oligonucleotide
ccatcgcgatactaagtaatattcgtttat

SEQ ID NO: 341802 - DNA, 30 bp, Artificial Sequence
  Synthetic oligonucleotide
cagcccgggtcgccacacgggaaggtttat

SEQ ID NO: 341803 - DNA, 30 bp, Artificial Sequence
  Synthetic oligonucleotide
agactccatatgaagaaacaataggtttat

SEQ ID NO: 341804 - DNA, 30 bp, Artificial Sequence
  Synthetic oligonucleotide
tccatccctctatggttgactggggtttat

SEQ ID NO: 341805 - DNA, 30 bp, Artificial Sequence
  Synthetic oligonucleotide
ccttaactcgccatccttaaccctgtttat

SEQ ID NO: 341806 - DNA, 30 bp, Artificial Sequence
  Synthetic oligonucleotide
ggtattgcggcctggtcacaaagtgtttat

SEQ ID NO: 341807 - DNA, 30 bp, Artificial Sequence
  Synthetic oligonucleotide
gacgaatcatatgtaggcttacgtgtttat

SEQ ID NO: 341808 - DNA, 30 bp, Artificial Sequence
  Synthetic oligonucleotide
gtgaacaccaggtttggtgcttttgtttat

SEQ ID NO: 341809 - DNA, 30 bp, Artificial Sequence
  Synthetic oligonucleotide
ctgaggtcggtactactttgtgaattttat

SEQ ID NO: 341810 - DNA, 30 bp, Artificial Sequence
  Synthetic oligonucleotide
aagggattgatccgtcctaagccgttttat

SEQ ID NO: 341811 - DNA, 30 bp, Artificial Sequence
  Synthetic oligonucleotide
acaggttctacccaggggactgtgttttat

SEQ ID NO: 341812 - DNA, 30 bp, Artificial Sequence
  Synthetic oligonucleotide
tgggcaggttaatgttcagcggtaaaaact

SEQ ID NO: 341813 - DNA, 30 bp, Artificial Sequence
  Synthetic oligonucleotide
tactggggatcttaatatttcaataaaact

SEQ ID NO: 341814 - DNA, 30 bp, Artificial Sequence
  Synthetic oligonucleotide
cagggtgaccccatgggttcccataaaact

SEQ ID NO: 341815 - DNA, 30 bp, Artificial Sequence
  Synthetic oligonucleotide
gaggaattggggccgggatcccctaaaact

SEQ ID NO: 341816 - DNA, 30 bp, Artificial Sequence
  Synthetic oligonucleotide
tggcagacatacccgacctaatctaaaact

SEQ ID NO: 341817 - DNA, 30 bp, Artificial Sequence
  Synthetic oligonucleotide
ctaatggttacgtgtaggattacacaaact

SEQ ID NO: 341818 - DNA, 30 bp, Artificial Sequence
  Synthetic oligonucleotide
gagtgatgttcgaattcagagctacaaact

SEQ ID NO: 341819 - DNA, 30 bp, Artificial Sequence
  Synthetic oligonucleotide
ctaaacacaagccccgcagtggtacaaact

SEQ ID NO: 341820 - DNA, 30 bp, Artificial Sequence
  Synthetic oligonucleotide
tacgcaatggtcccaggacgagaccaaact

SEQ ID NO: 341821 - DNA, 30 bp, Artificial Sequence
  Synthetic oligonucleotide
ggaccaaatacagattcttgatcccaaact

SEQ ID NO: 341822 - DNA, 30 bp, Artificial Sequence
  Synthetic oligonucleotide
gcagggtttgcgtggtagtaaccgcaaact

SEQ ID NO: 341823 - DNA, 30 bp, Artificial Sequence
  Synthetic oligonucleotide
gtgaactcttcactttgcaacccgcaaact

SEQ ID NO: 341824 - DNA, 30 bp, Artificial Sequence
  Synthetic oligonucleotide
caaattttatcgggtaaaaattggcaaact

SEQ ID NO: 341825 - DNA, 30 bp, Artificial Sequence
  Synthetic oligonucleotide
taggccgggatcacttggaaagtgcaaact

SEQ ID NO: 341826 - DNA, 30 bp, Artificial Sequence
  Synthetic oligonucleotide
atccctcctgtaccgaacgaatctcaaact

SEQ ID NO: 341827 - DNA, 30 bp, Artificial Sequence
  Synthetic oligonucleotide
cttactcaagagtctaagttacaagaaact

SEQ ID NO: 341828 - DNA, 30 bp, Artificial Sequence
  Synthetic oligonucleotide
gtagatagtcgacctaacgttcgagaaact

SEQ ID NO: 341829 - DNA, 30 bp, Artificial Sequence
  Synthetic oligonucleotide
atacgaatgaacatcggtggtgtagaaact

SEQ ID NO: 341830 - DNA, 30 bp, Artificial Sequence
  Synthetic oligonucleotide
aagaatcatgccattgtagactaggaaact

SEQ ID NO: 341831 - DNA, 30 bp, Artificial Sequence
  Synthetic oligonucleotide
ctccgggtcatctttctcagactggaaact

SEQ ID NO: 341832 - DNA, 30 bp, Artificial Sequence
  Synthetic oligonucleotide
gtttggtgaagaagggatattctggaaact

SEQ ID NO: 341833 - DNA, 30 bp, Artificial Sequence
  Synthetic oligonucleotide
ggttaagcgacgaatctgatccctgaaact

SEQ ID NO: 341834 - DNA, 30 bp, Artificial Sequence
  Synthetic oligonucleotide
atacctggattcgtccatcacgaataaact

SEQ ID NO: 341835 - DNA, 30 bp, Artificial Sequence
  Synthetic oligonucleotide
gctttattaaccatgaaataggaataaact

SEQ ID NO: 341836 - DNA, 30 bp, Artificial Sequence
  Synthetic oligonucleotide
gttagtctcgtggccacatcctgctaaact

SEQ ID NO: 341837 - DNA, 30 bp, Artificial Sequence
  Synthetic oligonucleotide
cacacgcctatcggttgaatgttctaaact

SEQ ID NO: 341838 - DNA, 30 bp, Artificial Sequence
  Synthetic oligonucleotide
tagctatgctacttgtgcaaccggtaaact

SEQ ID NO: 341839 - DNA, 30 bp, Artificial Sequence
  Synthetic oligonucleotide
attactgtggactagcgctaagggtaaact

SEQ ID NO: 341840 - DNA, 30 bp, Artificial Sequence
  Synthetic oligonucleotide
gggggcgatgtccccggacgtaattaaact

SEQ ID NO: 341841 - DNA, 30 bp, Artificial Sequence
  Synthetic oligonucleotide
cctatacgattggtatgccgtatttaaact

SEQ ID NO: 341842 - DNA, 30 bp, Artificial Sequence
  Synthetic oligonucleotide
tatagaacgcaccgtacccggataacaact

SEQ ID NO: 341843 - DNA, 30 bp, Artificial Sequence
  Synthetic oligonucleotide
tttggaaacatcccgtccgaggagacaact

SEQ ID NO: 341844 - DNA, 30 bp, Artificial Sequence
  Synthetic oligonucleotide
accctttgccaggtcataccacggacaact

SEQ ID NO: 341845 - DNA, 30 bp, Artificial Sequence
  Synthetic oligonucleotide
ctcagatggagagggtttaagtggacaact

SEQ ID NO: 341846 - DNA, 30 bp, Artificial Sequence
  Synthetic oligonucleotide
gtagcactcagggtgctacaatatacaact

SEQ ID NO: 341847 - DNA, 30 bp, Artificial Sequence
  Synthetic oligonucleotide
agccgtagactatgcaaagtttatacaact

SEQ ID NO: 341848 - DNA, 30 bp, Artificial Sequence
  Synthetic oligonucleotide
atggaatctgagcaacgcgaccgtacaact

SEQ ID NO: 341849 - DNA, 30 bp, Artificial Sequence
  Synthetic oligonucleotide
tagaagtccttaatatgctcgggaccaact

SEQ ID NO: 341850 - DNA, 30 bp, Artificial Sequence
  Synthetic oligonucleotide
atttggtctcacaattttcacgccccaact

SEQ ID NO: 341851 - DNA, 30 bp, Artificial Sequence
  Synthetic oligonucleotide
tagggtggactctcacagtgttttccaact

SEQ ID NO: 341852 - DNA, 30 bp, Artificial Sequence
  Synthetic oligonucleotide
aacaaaagtccggtggtaggtaaagcaact

SEQ ID NO: 341853 - DNA, 30 bp, Artificial Sequence
  Synthetic oligonucleotide
gttcaggggcaaatgcaaggacccgcaact

SEQ ID NO: 341854 - DNA, 30 bp, Artificial Sequence
  Synthetic oligonucleotide
caaataaggtggagttctcagtccgcaact

SEQ ID NO: 341855 - DNA, 30 bp, Artificial Sequence
  Synthetic oligonucleotide
tgacattggtatctgagtcaaggtgcaact

SEQ ID NO: 341856 - DNA, 30 bp, Artificial Sequence
  Synthetic oligonucleotide
cagtgcatcacgagattgattaaatcaact

SEQ ID NO: 341857 - DNA, 30 bp, Artificial Sequence
  Synthetic oligonucleotide
atgtaaatcgtaagctgtttacaatcaact

SEQ ID NO: 341858 - DNA, 30 bp, Artificial Sequence
  Synthetic oligonucleotide
tattggccaggtcctccgttcatatcaact

SEQ ID NO: 341859 - DNA, 30 bp, Artificial Sequence
  Synthetic oligonucleotide
atctatcttggattggtcaggttctcaact

SEQ ID NO: 341860 - DNA, 30 bp, Artificial Sequence
  Synthetic oligonucleotide
gcgaccccattaccggtttgagcgtcaact

SEQ ID NO: 341861 - DNA, 30 bp, Artificial Sequence
  Synthetic oligonucleotide
cctcttgaaggccaaactttttattcaact

SEQ ID NO: 341862 - DNA, 30 bp, Artificial Sequence
  Synthetic oligonucleotide
aaccccacatccgatctatctacttcaact

SEQ ID NO: 341863 - DNA, 30 bp, Artificial Sequence
  Synthetic oligonucleotide
acataactgatccttcgcggaatttcaact

SEQ ID NO: 341864 - DNA, 30 bp, Artificial Sequence
  Synthetic oligonucleotide
cagcggcgacttcaagaaaggttttcaact

SEQ ID NO: 341865 - DNA, 31 bp, Artificial Sequence
  Synthetic oligonucleotide
cgagttgttcctaaagtacctgttttcaact

SEQ ID NO: 341866 - DNA, 30 bp, Artificial Sequence
  Synthetic oligonucleotide
tacgtttggctagaattgaccaaaagaact

SEQ ID NO: 341867 - DNA, 30 bp, Artificial Sequence
  Synthetic oligonucleotide
ccgtgcaactacccgactgccgcaagaact

SEQ ID NO: 341868 - DNA, 30 bp, Artificial Sequence
  Synthetic oligonucleotide
aaagataagatgctgtgttaatacagaact

SEQ ID NO: 341869 - DNA, 30 bp, Artificial Sequence
  Synthetic oligonucleotide
atgctctaaaatggcgtggggctcagaact

SEQ ID NO: 341870 - DNA, 30 bp, Artificial Sequence
  Synthetic oligonucleotide
tcaaagccaatctaagtacgtttcagaact

SEQ ID NO: 341871 - DNA, 30 bp, Artificial Sequence
  Synthetic oligonucleotide
gccatctcactagaaacggaaaagagaact

SEQ ID NO: 341872 - DNA, 30 bp, Artificial Sequence
  Synthetic oligonucleotide
gactacactccggatgaaggtcggagaact

SEQ ID NO: 341873 - DNA, 30 bp, Artificial Sequence
  Synthetic oligonucleotide
ccattttaagttgtcgacaaacctagaact

SEQ ID NO: 341874 - DNA, 30 bp, Artificial Sequence
  Synthetic oligonucleotide
tcgaactagctttcaagaagtatacgaact

SEQ ID NO: 341875 - DNA, 30 bp, Artificial Sequence
  Synthetic oligonucleotide
gctaacataacgccggctcaataccgaact

SEQ ID NO: 341876 - DNA, 30 bp, Artificial Sequence
  Synthetic oligonucleotide
agaacgagtttggccatggtctaccgaact

SEQ ID NO: 341877 - DNA, 30 bp, Artificial Sequence
  Synthetic oligonucleotide
attgtcgcgtctctccgcgataagcgaact

SEQ ID NO: 341878 - DNA, 30 bp, Artificial Sequence
  Synthetic oligonucleotide
ggatcaaggagtgccggtatcgggcgaact

SEQ ID NO: 341879 - DNA, 30 bp, Artificial Sequence
  Synthetic oligonucleotide
gaacaacgcgcaagcgaaaatattcgaact

SEQ ID NO: 341880 - DNA, 30 bp, Artificial Sequence
  Synthetic oligonucleotide
aagcggtgttgctttgacgtgtttcgaact

SEQ ID NO: 341881 - DNA, 30 bp, Artificial Sequence
  Synthetic oligonucleotide
gaacacctgaatattcggtccataggaact

SEQ ID NO: 341882 - DNA, 30 bp, Artificial Sequence
  Synthetic oligonucleotide
tggggtaattatatcaaagggttcggaact

SEQ ID NO: 341883 - DNA, 30 bp, Artificial Sequence
  Synthetic oligonucleotide
gcgttgacagcaatggtctcaaggggaact

SEQ ID NO: 341884 - DNA, 30 bp, Artificial Sequence
  Synthetic oligonucleotide
tgatattggcacgctttgaagttgggaact

SEQ ID NO: 341885 - DNA, 30 bp, Artificial Sequence
  Synthetic oligonucleotide
cgcctggtacgcgtattgtcagatggaact

SEQ ID NO: 341886 - DNA, 30 bp, Artificial Sequence
  Synthetic oligonucleotide
tgttagaaagactagcaatgcagtggaact

SEQ ID NO: 341887 - DNA, 30 bp, Artificial Sequence
  Synthetic oligonucleotide
ctccagaacggttcactttgttttggaact

SEQ ID NO: 341888 - DNA, 30 bp, Artificial Sequence
  Synthetic oligonucleotide
tgtaagtgaatttagtgaaacgcgtgaact

SEQ ID NO: 341889 - DNA, 30 bp, Artificial Sequence
  Synthetic oligonucleotide
ttgcctgctgctcgatggtttaggtgaact

SEQ ID NO: 341890 - DNA, 30 bp, Artificial Sequence
  Synthetic oligonucleotide
ctgatctaagaatccaggggccggtgaact

SEQ ID NO: 341891 - DNA, 30 bp, Artificial Sequence
  Synthetic oligonucleotide
taagccaggaccacaagatttcattgaact

SEQ ID NO: 341892 - DNA, 30 bp, Artificial Sequence
  Synthetic oligonucleotide
gcacaggtcccaaagggccatcgaataact

SEQ ID NO: 341893 - DNA, 30 bp, Artificial Sequence
  Synthetic oligonucleotide
tgcactaccagctgtgcatagggaataact

SEQ ID NO: 341894 - DNA, 30 bp, Artificial Sequence
  Synthetic oligonucleotide
gacggggggccgttatttatagccataact

SEQ ID NO: 341895 - DNA, 30 bp, Artificial Sequence
  Synthetic oligonucleotide
gaagcgcaaccatggaaattgggcataact

SEQ ID NO: 341896 - DNA, 30 bp, Artificial Sequence
  Synthetic oligonucleotide
gcatgcgaagttggtgccaactgcataact

SEQ ID NO: 341897 - DNA, 31 bp, Artificial Sequence
  Synthetic oligonucleotide
gcttactagacatctaactgccatcataact

SEQ ID NO: 341898 - DNA, 30 bp, Artificial Sequence
  Synthetic oligonucleotide
atactgaaaaggccccggttcatcataact

SEQ ID NO: 341899 - DNA, 30 bp, Artificial Sequence
  Synthetic oligonucleotide
acatgaacactagttgcaaaatcgataact

SEQ ID NO: 341900 - DNA, 30 bp, Artificial Sequence
  Synthetic oligonucleotide
gtgactctaaacatattatcgactataact

SEQ ID NO: 341901 - DNA, 30 bp, Artificial Sequence
  Synthetic oligonucleotide
tctgcctgttaccgatttgcgagtataact

SEQ ID NO: 341902 - DNA, 30 bp, Artificial Sequence
  Synthetic oligonucleotide
gaaacacagggctactggtcgacactaact

SEQ ID NO: 341903 - DNA, 30 bp, Artificial Sequence
  Synthetic oligonucleotide
aggagctttcataatgtaaagcgactaact

SEQ ID NO: 341904 - DNA, 30 bp, Artificial Sequence
  Synthetic oligonucleotide
ttcgaatttgctatggaaatgcgactaact

SEQ ID NO: 341905 - DNA, 30 bp, Artificial Sequence
  Synthetic oligonucleotide
tcaaattcacaacgggttaattacctaact

SEQ ID NO: 341906 - DNA, 30 bp, Artificial Sequence
  Synthetic oligonucleotide
tcgaatgaatgcgcttattgcagcctaact

SEQ ID NO: 341907 - DNA, 30 bp, Artificial Sequence
  Synthetic oligonucleotide
catggagcgccttgactctcgctgctaact

SEQ ID NO: 341908 - DNA, 30 bp, Artificial Sequence
  Synthetic oligonucleotide
gggagtgaagctcatggccaacctctaact

SEQ ID NO: 341909 - DNA, 30 bp, Artificial Sequence
  Synthetic oligonucleotide
tgcactcataccgactcatggcctctaact

SEQ ID NO: 341910 - DNA, 30 bp, Artificial Sequence
  Synthetic oligonucleotide
ccggtaccttgtacaagtatcaaagtaact

SEQ ID NO: 341911 - DNA, 30 bp, Artificial Sequence
  Synthetic oligonucleotide
cattttggtttaatgttctgggaagtaact

SEQ ID NO: 341912 - DNA, 30 bp, Artificial Sequence
  Synthetic oligonucleotide
acagacgagaaacgacgataggtagtaact

SEQ ID NO: 341913 - DNA, 30 bp, Artificial Sequence
  Synthetic oligonucleotide
aagttatgggagccgcgaaatcccgtaact

SEQ ID NO: 341914 - DNA, 30 bp, Artificial Sequence
  Synthetic oligonucleotide
tgctgccctattagtgagataggcgtaact

SEQ ID NO: 341915 - DNA, 30 bp, Artificial Sequence
  Synthetic oligonucleotide
gtggagaacaatttaagaagatgcgtaact

SEQ ID NO: 341916 - DNA, 30 bp, Artificial Sequence
  Synthetic oligonucleotide
acttgtgcgcggattctacgaaaggtaact

SEQ ID NO: 341917 - DNA, 30 bp, Artificial Sequence
  Synthetic oligonucleotide
gattgagcttgtggcctaaaccaggtaact

SEQ ID NO: 341918 - DNA, 30 bp, Artificial Sequence
  Synthetic oligonucleotide
aaagttaccggtgccagctctcaggtaact

SEQ ID NO: 341919 - DNA, 31 bp, Artificial Sequence
  Synthetic oligonucleotide
caggctcacgcaacaagcgattagtgtaact

SEQ ID NO: 341920 - DNA, 30 bp, Artificial Sequence
  Synthetic oligonucleotide
cctatgagaaatgttggagtggacttaact

SEQ ID NO: 341921 - DNA, 30 bp, Artificial Sequence
  Synthetic oligonucleotide
taagagttgaataacaaaatccccttaact

SEQ ID NO: 341922 - DNA, 30 bp, Artificial Sequence
  Synthetic oligonucleotide
tgatatgacgtgaaaagccggcccttaact

SEQ ID NO: 341923 - DNA, 30 bp, Artificial Sequence
  Synthetic oligonucleotide
gatgactttaggaacctaccccatttaact

SEQ ID NO: 341924 - DNA, 30 bp, Artificial Sequence
  Synthetic oligonucleotide
tcgtccgatgtttgagatgcattaaacact

SEQ ID NO: 341925 - DNA, 30 bp, Artificial Sequence
  Synthetic oligonucleotide
aacgcgttttggccgtgatcgaacaacact

SEQ ID NO: 341926 - DNA, 30 bp, Artificial Sequence
  Synthetic oligonucleotide
tggggggcagccgttatacaaacgaacact

SEQ ID NO: 341927 - DNA, 30 bp, Artificial Sequence
  Synthetic oligonucleotide
gaggcagacgattgtgcagctgtgaacact

SEQ ID NO: 341928 - DNA, 30 bp, Artificial Sequence
  Synthetic oligonucleotide
gaattatgcttagggcgctggtataacact

SEQ ID NO: 341929 - DNA, 30 bp, Artificial Sequence
  Synthetic oligonucleotide
tgcaagaagcctggcaactcacaacacact

SEQ ID NO: 341930 - DNA, 30 bp, Artificial Sequence
  Synthetic oligonucleotide
atatggtcgcctgtcagactacaacacact

SEQ ID NO: 341931 - DNA, 30 bp, Artificial Sequence
  Synthetic oligonucleotide
tatgcagagccgcctcctaggacccacact

SEQ ID NO: 341932 - DNA, 30 bp, Artificial Sequence
  Synthetic oligonucleotide
cgcaatagtcgaccaaaacggtcgcacact

SEQ ID NO: 341933 - DNA, 30 bp, Artificial Sequence
  Synthetic oligonucleotide
catggacctggcggggtcacactgcacact

SEQ ID NO: 341934 - DNA, 30 bp, Artificial Sequence
  Synthetic oligonucleotide
gggcggatatcatgcttgagttatcacact

SEQ ID NO: 341935 - DNA, 30 bp, Artificial Sequence
  Synthetic oligonucleotide
ataacgctgttcgaataaatgactcacact

SEQ ID NO: 341936 - DNA, 30 bp, Artificial Sequence
  Synthetic oligonucleotide
cctctccagagggcctgcgaccttcacact

SEQ ID NO: 341937 - DNA, 30 bp, Artificial Sequence
  Synthetic oligonucleotide
cctaaggccaagcagcccatcaaagacact

SEQ ID NO: 341938 - DNA, 30 bp, Artificial Sequence
  Synthetic oligonucleotide
cagtcgcgcttgatgttcaagtaagacact

SEQ ID NO: 341939 - DNA, 30 bp, Artificial Sequence
  Synthetic oligonucleotide
aggcgtagcagtcgggcaaaagcagacact

SEQ ID NO: 341940 - DNA, 30 bp, Artificial Sequence
  Synthetic oligonucleotide
tagattggcgccagagcccgggacgacact

SEQ ID NO: 341941 - DNA, 30 bp, Artificial Sequence
  Synthetic oligonucleotide
aggttactctaccgtaaacgtaaggacact

SEQ ID NO: 341942 - DNA, 30 bp, Artificial Sequence
  Synthetic oligonucleotide
tagttataaagggagtacaaaagggacact

SEQ ID NO: 341943 - DNA, 30 bp, Artificial Sequence
  Synthetic oligonucleotide
tttcgctgtccagcaacggcaggggacact

SEQ ID NO: 341944 - DNA, 30 bp, Artificial Sequence
  Synthetic oligonucleotide
caactaacgtgataacttagggttgacact

SEQ ID NO: 341945 - DNA, 30 bp, Artificial Sequence
  Synthetic oligonucleotide
acaaccagggtaacactttcaagatacact

SEQ ID NO: 341946 - DNA, 30 bp, Artificial Sequence
  Synthetic oligonucleotide
gctaaagttttggtttcgatagtatacact

SEQ ID NO: 341947 - DNA, 30 bp, Artificial Sequence
  Synthetic oligonucleotide
ttaagggttttgggcgcgccccactacact

SEQ ID NO: 341948 - DNA, 30 bp, Artificial Sequence
  Synthetic oligonucleotide
agtaaggctttcttcctcggcctctacact

SEQ ID NO: 341949 - DNA, 30 bp, Artificial Sequence
  Synthetic oligonucleotide
tgcggtaatttaatcggtcgctggtacact

SEQ ID NO: 341950 - DNA, 30 bp, Artificial Sequence
  Synthetic oligonucleotide
ttaataaatgcagttgacggacattacact

SEQ ID NO: 341951 - DNA, 30 bp, Artificial Sequence
  Synthetic oligonucleotide
aagatagccgtcccttgttagttaaccact

SEQ ID NO: 341952 - DNA, 30 bp, Artificial Sequence
  Synthetic oligonucleotide
ccatcatagctaggcttactatccaccact

SEQ ID NO: 341953 - DNA, 30 bp, Artificial Sequence
  Synthetic oligonucleotide
gaagccacatgggtgtcgatcccgaccact

SEQ ID NO: 341954 - DNA, 30 bp, Artificial Sequence
  Synthetic oligonucleotide
ttatctatagaaggcatttacttgaccact

SEQ ID NO: 341955 - DNA, 30 bp, Artificial Sequence
  Synthetic oligonucleotide
tggtaaccgtatttgatccggtgtaccact

SEQ ID NO: 341956 - DNA, 30 bp, Artificial Sequence
  Synthetic oligonucleotide
taataagatcccgtatatgtaatacccact

SEQ ID NO: 341957 - DNA, 30 bp, Artificial Sequence
  Synthetic oligonucleotide
cgctgcttttgggacgggacgctacccact

SEQ ID NO: 341958 - DNA, 30 bp, Artificial Sequence
  Synthetic oligonucleotide
gtaatctcacgtcatcgagaactccccact

SEQ ID NO: 341959 - DNA, 30 bp, Artificial Sequence
  Synthetic oligonucleotide
gagtccattaccgagaacaacttccccact

SEQ ID NO: 341960 - DNA, 30 bp, Artificial Sequence
  Synthetic oligonucleotide
gtacacctaaccctcgtccgttggcccact

SEQ ID NO: 341961 - DNA, 30 bp, Artificial Sequence
  Synthetic oligonucleotide
ctccgcccagcattcgtaaaaactcccact

SEQ ID NO: 341962 - DNA, 30 bp, Artificial Sequence
  Synthetic oligonucleotide
caagtccgtactacttgtggaacagccact

SEQ ID NO: 341963 - DNA, 30 bp, Artificial Sequence
  Synthetic oligonucleotide
tggacagcaggttatcaggtaacagccact

SEQ ID NO: 341964 - DNA, 30 bp, Artificial Sequence
  Synthetic oligonucleotide
cggttcgattatggtgttagcttagccact

SEQ ID NO: 341965 - DNA, 32 bp, Artificial Sequence
  Synthetic oligonucleotide
gtacgcgtaaccaacgcacgttagccgccact

SEQ ID NO: 341966 - DNA, 30 bp, Artificial Sequence
  Synthetic oligonucleotide
gtgacccaggtgggtgggatcctcgccact

SEQ ID NO: 341967 - DNA, 30 bp, Artificial Sequence
  Synthetic oligonucleotide
ataataggccatactatcgtcaaggccact

SEQ ID NO: 341968 - DNA, 30 bp, Artificial Sequence
  Synthetic oligonucleotide
ataagattctctggcaccgttacggccact

SEQ ID NO: 341969 - DNA, 30 bp, Artificial Sequence
  Synthetic oligonucleotide
ttgtagaacaggactccctccatggccact

SEQ ID NO: 341970 - DNA, 30 bp, Artificial Sequence
  Synthetic oligonucleotide
gagagacatcattatctttgccatgccact

SEQ ID NO: 341971 - DNA, 30 bp, Artificial Sequence
  Synthetic oligonucleotide
tacgcaactatttgagtcaagcctgccact

SEQ ID NO: 341972 - DNA, 30 bp, Artificial Sequence
  Synthetic oligonucleotide
aagtggtgcatgaggtccatgccatccact

SEQ ID NO: 341973 - DNA, 30 bp, Artificial Sequence
  Synthetic oligonucleotide
aaccaccagaagtggcaacgttgatccact

SEQ ID NO: 341974 - DNA, 30 bp, Artificial Sequence
  Synthetic oligonucleotide
gttcataggtcgctaagtgcccagtccact

SEQ ID NO: 341975 - DNA, 30 bp, Artificial Sequence
  Synthetic oligonucleotide
catagcagacgacacagtcctttttccact

SEQ ID NO: 341976 - DNA, 30 bp, Artificial Sequence
  Synthetic oligonucleotide
ttgttagcgctataatttcagcaaagcact

SEQ ID NO: 341977 - DNA, 30 bp, Artificial Sequence
  Synthetic oligonucleotide
atgctaccttagggcattgtagtcagcact

SEQ ID NO: 341978 - DNA, 30 bp, Artificial Sequence
  Synthetic oligonucleotide
aagagtatgtaatttcctctgaagagcact

SEQ ID NO: 341979 - DNA, 30 bp, Artificial Sequence
  Synthetic oligonucleotide
taccgtcacggtcaagccgttttgagcact

SEQ ID NO: 341980 - DNA, 30 bp, Artificial Sequence
  Synthetic oligonucleotide
ttggaatactgaaccagcggtgatagcact

SEQ ID NO: 341981 - DNA, 30 bp, Artificial Sequence
  Synthetic oligonucleotide
tgggacaaagcattggggtagtatagcact

SEQ ID NO: 341982 - DNA, 30 bp, Artificial Sequence
  Synthetic oligonucleotide
tcaagtcgttgtggttgcaagattagcact

SEQ ID NO: 341983 - DNA, 30 bp, Artificial Sequence
  Synthetic oligonucleotide
gtagctatctgaaccatgtttacacgcact

SEQ ID NO: 341984 - DNA, 30 bp, Artificial Sequence
  Synthetic oligonucleotide
caccgcgttcaccaaatgcggtcacgcact

SEQ ID NO: 341985 - DNA, 30 bp, Artificial Sequence
  Synthetic oligonucleotide
tcccatccactttatcataggtacggcact

SEQ ID NO: 341986 - DNA, 30 bp, Artificial Sequence
  Synthetic oligonucleotide
tgtcacacacttatacaatgagccggcact

SEQ ID NO: 341987 - DNA, 30 bp, Artificial Sequence
  Synthetic oligonucleotide
gtcgccagtaagacaactcgaccgggcact

SEQ ID NO: 341988 - DNA, 30 bp, Artificial Sequence
  Synthetic oligonucleotide
cgcgattcttgatccacactagtgggcact

SEQ ID NO: 341989 - DNA, 30 bp, Artificial Sequence
  Synthetic oligonucleotide
gctcgtcgtcgctcatcaacgaatggcact

SEQ ID NO: 341990 - DNA, 30 bp, Artificial Sequence
  Synthetic oligonucleotide
ttaaatctaggggagatgattagtggcact

SEQ ID NO: 341991 - DNA, 30 bp, Artificial Sequence
  Synthetic oligonucleotide
actttcgagcttgggtccagcgcatgcact

SEQ ID NO: 341992 - DNA, 30 bp, Artificial Sequence
  Synthetic oligonucleotide
cgtgggagattgcggatctaaaactgcact

SEQ ID NO: 341993 - DNA, 30 bp, Artificial Sequence
  Synthetic oligonucleotide
aaatttcgatttggatagggttggtgcact

SEQ ID NO: 341994 - DNA, 30 bp, Artificial Sequence
  Synthetic oligonucleotide
aacccgggcatagtatagcaagtgtgcact

SEQ ID NO: 341995 - DNA, 30 bp, Artificial Sequence
  Synthetic oligonucleotide
aagcgagcaaacagactttaattttgcact

SEQ ID NO: 341996 - DNA, 30 bp, Artificial Sequence
  Synthetic oligonucleotide
tcaactcttgagcagtcaccaataatcact

SEQ ID NO: 341997 - DNA, 30 bp, Artificial Sequence
  Synthetic oligonucleotide
gtttttggtggagtcggaacatccatcact

SEQ ID NO: 341998 - DNA, 30 bp, Artificial Sequence
  Synthetic oligonucleotide
gggattgcgcacggccctagtgtcatcact

SEQ ID NO: 341999 - DNA, 30 bp, Artificial Sequence
  Synthetic oligonucleotide
cctattcattcgaatcaaggtcagatcact

SEQ ID NO: 342000 - DNA, 30 bp, Artificial Sequence
  Synthetic oligonucleotide
tgacaccagattacgcgtctgaatatcact

SEQ ID NO: 342001 - DNA, 30 bp, Artificial Sequence
  Synthetic oligonucleotide
tatagaccaagctccaggctgggtatcact

SEQ ID NO: 342002 - DNA, 30 bp, Artificial Sequence
  Synthetic oligonucleotide
tgtatctccgggctctaccgatgtatcact

SEQ ID NO: 342003 - DNA, 30 bp, Artificial Sequence
  Synthetic oligonucleotide
cacaagtcaatgtgtgacaagtgtatcact

SEQ ID NO: 342004 - DNA, 30 bp, Artificial Sequence
  Synthetic oligonucleotide
cacacaatagcttagctgaatttcctcact

SEQ ID NO: 342005 - DNA, 30 bp, Artificial Sequence
  Synthetic oligonucleotide
gctagggtcacgacgtagtcgtcgctcact

SEQ ID NO: 342006 - DNA, 30 bp, Artificial Sequence
  Synthetic oligonucleotide
ggggcaactagtcaccactacgtgctcact

SEQ ID NO: 342007 - DNA, 30 bp, Artificial Sequence
  Synthetic oligonucleotide
atgcacttttatgtggaagttgaggtcact

SEQ ID NO: 342008 - DNA, 30 bp, Artificial Sequence
  Synthetic oligonucleotide
ggtcttctaaatcctagcagtttggtcact

SEQ ID NO: 342009 - DNA, 30 bp, Artificial Sequence
  Synthetic oligonucleotide
gatggacaactcggatactttggtgtcact

SEQ ID NO: 342010 - DNA, 30 bp, Artificial Sequence
  Synthetic oligonucleotide
tgtccgaaggagctggccactatgttcact

SEQ ID NO: 342011 - DNA, 30 bp, Artificial Sequence
  Synthetic oligonucleotide
cacatgaggagtgtatagcatgatttcact

SEQ ID NO: 342012 - DNA, 30 bp, Artificial Sequence
  Synthetic oligonucleotide
gtataaggcgagcgcattagatatttcact

SEQ ID NO: 342013 - DNA, 30 bp, Artificial Sequence
  Synthetic oligonucleotide
gatattgaatgtcgatatgggactttcact

SEQ ID NO: 342014 - DNA, 30 bp, Artificial Sequence
  Synthetic oligonucleotide
tcattcaggatacaaagtggaattttcact

SEQ ID NO: 342015 - DNA, 30 bp, Artificial Sequence
  Synthetic oligonucleotide
ggacccttctgacaaactcgctgaaagact

SEQ ID NO: 342016 - DNA, 30 bp, Artificial Sequence
  Synthetic oligonucleotide
ctcacggctccgtcggtttagcgcaagact

SEQ ID NO: 342017 - DNA, 30 bp, Artificial Sequence
  Synthetic oligonucleotide
ggaaataaatacggacggtgcaataagact

SEQ ID NO: 342018 - DNA, 30 bp, Artificial Sequence
  Synthetic oligonucleotide
agaagactgcaaccctgtggtcttaagact

SEQ ID NO: 342019 - DNA, 30 bp, Artificial Sequence
  Synthetic oligonucleotide
gaggccgtaatctggtctaggaaacagact

SEQ ID NO: 342020 - DNA, 30 bp, Artificial Sequence
  Synthetic oligonucleotide
ctccgccggtcgagcaataccgaacagact

SEQ ID NO: 342021 - DNA, 30 bp, Artificial Sequence
  Synthetic oligonucleotide
tgttcgatcgcacgacggtggggacagact

SEQ ID NO: 342022 - DNA, 30 bp, Artificial Sequence
  Synthetic oligonucleotide
agtttataggcgcctacgtcgatacagact

SEQ ID NO: 342023 - DNA, 30 bp, Artificial Sequence
  Synthetic oligonucleotide
gcggaagccacgggactgtaagctcagact

SEQ ID NO: 342024 - DNA, 30 bp, Artificial Sequence
  Synthetic oligonucleotide
acctcgggataccaggtcgagtttcagact

SEQ ID NO: 342025 - DNA, 30 bp, Artificial Sequence
  Synthetic oligonucleotide
cgatgcacttacgcacctggttgcgagact

SEQ ID NO: 342026 - DNA, 30 bp, Artificial Sequence
  Synthetic oligonucleotide
ttgcgagttgcataagtcaagccggagact

SEQ ID NO: 342027 - DNA, 30 bp, Artificial Sequence
  Synthetic oligonucleotide
aactacacgtgcttaacaactttggagact

SEQ ID NO: 342028 - DNA, 30 bp, Artificial Sequence
  Synthetic oligonucleotide
caagcatgcgagcaggttgacactgagact

SEQ ID NO: 342029 - DNA, 30 bp, Artificial Sequence
  Synthetic oligonucleotide
aggggacttttaggagccgtggaatagact

SEQ ID NO: 342030 - DNA, 30 bp, Artificial Sequence
  Synthetic oligonucleotide
gagtattcgacttttaggctcgcatagact

SEQ ID NO: 342031 - DNA, 30 bp, Artificial Sequence
  Synthetic oligonucleotide
gtcaattcgtaataagacgttgcatagact

SEQ ID NO: 342032 - DNA, 30 bp, Artificial Sequence
  Synthetic oligonucleotide
atctgaagaattatttgtccaaactagact

SEQ ID NO: 342033 - DNA, 30 bp, Artificial Sequence
  Synthetic oligonucleotide
cgacaagttcatccgtattagggctagact

SEQ ID NO: 342034 - DNA, 30 bp, Artificial Sequence
  Synthetic oligonucleotide
gtgcaaaagtcctacccgtagttctagact

SEQ ID NO: 342035 - DNA, 30 bp, Artificial Sequence
  Synthetic oligonucleotide
aaatgctcatttgaattgtaacggtagact

SEQ ID NO: 342036 - DNA, 30 bp, Artificial Sequence
  Synthetic oligonucleotide
gatccaatctaacggtgaagggattagact

SEQ ID NO: 342037 - DNA, 30 bp, Artificial Sequence
  Synthetic oligonucleotide
tcttacccaaggacgggctccgacacgact

SEQ ID NO: 342038 - DNA, 30 bp, Artificial Sequence
  Synthetic oligonucleotide
agatagtccctggtattgtgcggtacgact

SEQ ID NO: 342039 - DNA, 30 bp, Artificial Sequence
  Synthetic oligonucleotide
tattattgaaagacgggatcatgtacgact

SEQ ID NO: 342040 - DNA, 30 bp, Artificial Sequence
  Synthetic oligonucleotide
gtctggcgtaatcagatataagttacgact

SEQ ID NO: 342041 - DNA, 30 bp, Artificial Sequence
  Synthetic oligonucleotide
actttctgattttgccgttacttaccgact

SEQ ID NO: 342042 - DNA, 30 bp, Artificial Sequence
  Synthetic oligonucleotide
gtaaggccggaactgggtccctacccgact

SEQ ID NO: 342043 - DNA, 30 bp, Artificial Sequence
  Synthetic oligonucleotide
tcgagtggcctcgacctctagaggccgact

SEQ ID NO: 342044 - DNA, 30 bp, Artificial Sequence
  Synthetic oligonucleotide
gcgctcccggtgaaataggcccgtccgact

SEQ ID NO: 342045 - DNA, 30 bp, Artificial Sequence
  Synthetic oligonucleotide
aaacgggatcggagggttatgggtccgact

SEQ ID NO: 342046 - DNA, 30 bp, Artificial Sequence
  Synthetic oligonucleotide
gattcgagactggctgccgccgttccgact

SEQ ID NO: 342047 - DNA, 30 bp, Artificial Sequence
  Synthetic oligonucleotide
ggggatttctccaattctacacacgcgact

SEQ ID NO: 342048 - DNA, 30 bp, Artificial Sequence
  Synthetic oligonucleotide
aaaatagaacatccgcagtcaccggcgact

SEQ ID NO: 342049 - DNA, 30 bp, Artificial Sequence
  Synthetic oligonucleotide
ccctgtcaacgactatctaaacgggcgact

SEQ ID NO: 342050 - DNA, 30 bp, Artificial Sequence
  Synthetic oligonucleotide
gtcgaaggattatccgcagctagctcgact

SEQ ID NO: 342051 - DNA, 30 bp, Artificial Sequence
  Synthetic oligonucleotide
cctttgagccgtcattgttaggtctcgact

SEQ ID NO: 342052 - DNA, 30 bp, Artificial Sequence
  Synthetic oligonucleotide
agtctcgaggatttatatttacggtcgact

SEQ ID NO: 342053 - DNA, 30 bp, Artificial Sequence
  Synthetic oligonucleotide
atgagggtcctaaagaggaatttaaggact

SEQ ID NO: 342054 - DNA, 30 bp, Artificial Sequence
  Synthetic oligonucleotide
tcatatggtcgaagtgataatcacaggact

SEQ ID NO: 342055 - DNA, 30 bp, Artificial Sequence
  Synthetic oligonucleotide
cttgacgattttgtttattaaaagaggact

SEQ ID NO: 342056 - DNA, 30 bp, Artificial Sequence
  Synthetic oligonucleotide
cattctggaggacggggattatagaggact

SEQ ID NO: 342057 - DNA, 30 bp, Artificial Sequence
  Synthetic oligonucleotide
cgttgccccggcactacggtagctaggact

SEQ ID NO: 342058 - DNA, 30 bp, Artificial Sequence
  Synthetic oligonucleotide
accaaagtcccgtgcattcaacgacggact

SEQ ID NO: 342059 - DNA, 30 bp, Artificial Sequence
  Synthetic oligonucleotide
gcggtaacattggttagggtaacccggact

SEQ ID NO: 342060 - DNA, 30 bp, Artificial Sequence
  Synthetic oligonucleotide
aacctcgcaatccgaactgttatccggact

SEQ ID NO: 342061 - DNA, 30 bp, Artificial Sequence
  Synthetic oligonucleotide
tggccaatgacgactccattcgtagggact

SEQ ID NO: 342062 - DNA, 30 bp, Artificial Sequence
  Synthetic oligonucleotide
tgttacagtggagtacgacaggaggggact

SEQ ID NO: 342063 - DNA, 30 bp, Artificial Sequence
  Synthetic oligonucleotide
gtcataaactataataggcagggggggact

SEQ ID NO: 342064 - DNA, 30 bp, Artificial Sequence
  Synthetic oligonucleotide
cggtgaaccacgtgcagaagtgtggggact

SEQ ID NO: 342065 - DNA, 30 bp, Artificial Sequence
  Synthetic oligonucleotide
gccggactgatgtagcgctaagttgggact

SEQ ID NO: 342066 - DNA, 30 bp, Artificial Sequence
  Synthetic oligonucleotide
acgctccatggatagtaattgtactggact

SEQ ID NO: 342067 - DNA, 30 bp, Artificial Sequence
  Synthetic oligonucleotide
cgattcgggcccttaattatttgctggact

SEQ ID NO: 342068 - DNA, 30 bp, Artificial Sequence
  Synthetic oligonucleotide
ggaagcgatgtccgaaggctcatctggact

SEQ ID NO: 342069 - DNA, 30 bp, Artificial Sequence
  Synthetic oligonucleotide
cggcgcatgatcacttgctaatagtggact

SEQ ID NO: 342070 - DNA, 30 bp, Artificial Sequence
  Synthetic oligonucleotide
attaaggcctcaatcaccaacaggtggact

SEQ ID NO: 342071 - DNA, 30 bp, Artificial Sequence
  Synthetic oligonucleotide
ctcaatctagagactttagtattgtggact

SEQ ID NO: 342072 - DNA, 30 bp, Artificial Sequence
  Synthetic oligonucleotide
gccgcgagggaccggacctgggattggact

SEQ ID NO: 342073 - DNA, 30 bp, Artificial Sequence
  Synthetic oligonucleotide
gtaagtgcgtagctcaactcctgttggact

SEQ ID NO: 342074 - DNA, 30 bp, Artificial Sequence
  Synthetic oligonucleotide
atgtgatgaaagggactattccaaatgact

SEQ ID NO: 342075 - DNA, 30 bp, Artificial Sequence
  Synthetic oligonucleotide
ggatttgcgtgcaattcacttcaaatgact

SEQ ID NO: 342076 - DNA, 30 bp, Artificial Sequence
  Synthetic oligonucleotide
atacccatcttgaacctacatgaaatgact

SEQ ID NO: 342077 - DNA, 30 bp, Artificial Sequence
  Synthetic oligonucleotide
ggtccgtcttggaggcgatccggaatgact

SEQ ID NO: 342078 - DNA, 30 bp, Artificial Sequence
  Synthetic oligonucleotide
agaaggaacgccccctgcacagtaatgact

SEQ ID NO: 342079 - DNA, 30 bp, Artificial Sequence
  Synthetic oligonucleotide
tagaggctttgtttacggagtcgcatgact

SEQ ID NO: 342080 - DNA, 30 bp, Artificial Sequence
  Synthetic oligonucleotide
acgcagcggagacccagttaatgcatgact

SEQ ID NO: 342081 - DNA, 30 bp, Artificial Sequence
  Synthetic oligonucleotide
ctgagtattatatctgtaagatgcatgact

SEQ ID NO: 342082 - DNA, 30 bp, Artificial Sequence
  Synthetic oligonucleotide
catggtaaccctctgctaacgctcatgact

SEQ ID NO: 342083 - DNA, 30 bp, Artificial Sequence
  Synthetic oligonucleotide
agcatttacagcggagcgataatgatgact

SEQ ID NO: 342084 - DNA, 30 bp, Artificial Sequence
  Synthetic oligonucleotide
tatcagctaagtccatagccggtactgact

SEQ ID NO: 342085 - DNA, 30 bp, Artificial Sequence
  Synthetic oligonucleotide
aggatgaacgacacaactgctccgctgact

SEQ ID NO: 342086 - DNA, 30 bp, Artificial Sequence
  Synthetic oligonucleotide
cctgcggaggtggtcagaagatctctgact

SEQ ID NO: 342087 - DNA, 30 bp, Artificial Sequence
  Synthetic oligonucleotide
acgcagtttactcgcggggctaaagtgact

SEQ ID NO: 342088 - DNA, 30 bp, Artificial Sequence
  Synthetic oligonucleotide
tgttacatgagaatacatcacctcgtgact

SEQ ID NO: 342089 - DNA, 30 bp, Artificial Sequence
  Synthetic oligonucleotide
atggagttaatttttatttatcaggtgact

SEQ ID NO: 342090 - DNA, 30 bp, Artificial Sequence
  Synthetic oligonucleotide
tggcactttcaatatgagtccgcggtgact

SEQ ID NO: 342091 - DNA, 30 bp, Artificial Sequence
  Synthetic oligonucleotide
gctggggaaagtccggcggggctattgact

SEQ ID NO: 342092 - DNA, 30 bp, Artificial Sequence
  Synthetic oligonucleotide
gcaatgccaacggattggccacccttgact

SEQ ID NO: 342093 - DNA, 30 bp, Artificial Sequence
  Synthetic oligonucleotide
gcctgtgaccattgaatatcaatcttgact

SEQ ID NO: 342094 - DNA, 30 bp, Artificial Sequence
  Synthetic oligonucleotide
gtatccggctaggagtaggaacaaaatact

SEQ ID NO: 342095 - DNA, 30 bp, Artificial Sequence
  Synthetic oligonucleotide
gcctaatagctgtccgtggaacaaaatact

SEQ ID NO: 342096 - DNA, 30 bp, Artificial Sequence
  Synthetic oligonucleotide
aaacgctgagttacgagatgctgcaatact

SEQ ID NO: 342097 - DNA, 30 bp, Artificial Sequence
  Synthetic oligonucleotide
ctgactttaccatgtggctaggagaatact

SEQ ID NO: 342098 - DNA, 30 bp, Artificial Sequence
  Synthetic oligonucleotide
acagtaccaactgctggattgacgaatact

SEQ ID NO: 342099 - DNA, 30 bp, Artificial Sequence
  Synthetic oligonucleotide
agcgtaaatacatgacgggaaatgaatact

SEQ ID NO: 342100 - DNA, 30 bp, Artificial Sequence
  Synthetic oligonucleotide
cgcgaatcccctcgtgatagcgtgaatact

SEQ ID NO: 342101 - DNA, 30 bp, Artificial Sequence
  Synthetic oligonucleotide
tcacgtttggccgtacggacggttaatact

SEQ ID NO: 342102 - DNA, 30 bp, Artificial Sequence
  Synthetic oligonucleotide
atacgcaacaaatcgaatataaaacatact

SEQ ID NO: 342103 - DNA, 30 bp, Artificial Sequence
  Synthetic oligonucleotide
acgggacgactgaacgggccatgacatact

SEQ ID NO: 342104 - DNA, 30 bp, Artificial Sequence
  Synthetic oligonucleotide
aaatatacgagtaaaggaatgcgccatact

SEQ ID NO: 342105 - DNA, 30 bp, Artificial Sequence
  Synthetic oligonucleotide
ccctggcagtcttctcaacccccgcatact

SEQ ID NO: 342106 - DNA, 30 bp, Artificial Sequence
  Synthetic oligonucleotide
actgagcaggttgaatcagcgctgcatact

SEQ ID NO: 342107 - DNA, 30 bp, Artificial Sequence
  Synthetic oligonucleotide
ttcgaacataccgggcatttctaagatact

SEQ ID NO: 342108 - DNA, 30 bp, Artificial Sequence
  Synthetic oligonucleotide
ttgtggactatgagatttcagtgagatact

SEQ ID NO: 342109 - DNA, 30 bp, Artificial Sequence
  Synthetic oligonucleotide
tttcgggccgtttggctcaatatagatact

SEQ ID NO: 342110 - DNA, 30 bp, Artificial Sequence
  Synthetic oligonucleotide
cagcgccaggtcgcggggagttacgatact

SEQ ID NO: 342111 - DNA, 30 bp, Artificial Sequence
  Synthetic oligonucleotide
acagtatctttgccacagagaggcgatact

SEQ ID NO: 342112 - DNA, 30 bp, Artificial Sequence
  Synthetic oligonucleotide
attaatagcacgccccggttcgaggatact

SEQ ID NO: 342113 - DNA, 31 bp, Artificial Sequence
  Synthetic oligonucleotide
ttctacctgtatctcgaaagaccgggatact

SEQ ID NO: 342114 - DNA, 30 bp, Artificial Sequence
  Synthetic oligonucleotide
gttcagcgtgtctaatagctgttggatact

SEQ ID NO: 342115 - DNA, 30 bp, Artificial Sequence
  Synthetic oligonucleotide
gtacttcttgactataccttgtctgatact

SEQ ID NO: 342116 - DNA, 30 bp, Artificial Sequence
  Synthetic oligonucleotide
tatgcgtacagcctcctatgaaactatact

SEQ ID NO: 342117 - DNA, 30 bp, Artificial Sequence
  Synthetic oligonucleotide
tgtagatcggcttttcttcgcgactatact

SEQ ID NO: 342118 - DNA, 30 bp, Artificial Sequence
  Synthetic oligonucleotide
acacggtcgggtcatgtgcgttactatact

SEQ ID NO: 342119 - DNA, 30 bp, Artificial Sequence
  Synthetic oligonucleotide
gccgttaatcgttgacttagaagctatact

SEQ ID NO: 342120 - DNA, 30 bp, Artificial Sequence
  Synthetic oligonucleotide
cacctgcactgaaaatgtattcggtatact

SEQ ID NO: 342121 - DNA, 30 bp, Artificial Sequence
  Synthetic oligonucleotide
gtcgcctgatagaattataaaatgtatact

SEQ ID NO: 342122 - DNA, 30 bp, Artificial Sequence
  Synthetic oligonucleotide
atttcaatgaaggcccacagacgaactact

SEQ ID NO: 342123 - DNA, 30 bp, Artificial Sequence
  Synthetic oligonucleotide
ccgtgttatcacgtcgtagaaaacactact

SEQ ID NO: 342124 - DNA, 30 bp, Artificial Sequence
  Synthetic oligonucleotide
atcaatccagtcggggtgagggccactact

SEQ ID NO: 342125 - DNA, 30 bp, Artificial Sequence
  Synthetic oligonucleotide
agcggccgaagcagtggtccaacgactact

SEQ ID NO: 342126 - DNA, 30 bp, Artificial Sequence
  Synthetic oligonucleotide
acgtggggttttcatgtgatccaccctact

SEQ ID NO: 342127 - DNA, 30 bp, Artificial Sequence
  Synthetic oligonucleotide
gaaattgtagcgaaagcgatcaagcctact

SEQ ID NO: 342128 - DNA, 30 bp, Artificial Sequence
  Synthetic oligonucleotide
gagcggtcgggaacaatcgttcggcctact

SEQ ID NO: 342129 - DNA, 30 bp, Artificial Sequence
  Synthetic oligonucleotide
gccacgacgtctaccctcgcgttgcctact

SEQ ID NO: 342130 - DNA, 30 bp, Artificial Sequence
  Synthetic oligonucleotide
cgaagcttgtaaccctgacgttatcctact

SEQ ID NO: 342131 - DNA, 30 bp, Artificial Sequence
  Synthetic oligonucleotide
ggagatgtaacgtgtaagcagattcctact

SEQ ID NO: 342132 - DNA, 30 bp, Artificial Sequence
  Synthetic oligonucleotide
gtgactaatgagcggagaacacaagctact

SEQ ID NO: 342133 - DNA, 30 bp, Artificial Sequence
  Synthetic oligonucleotide
ttcttatgctgggtctaatgccaggctact

SEQ ID NO: 342134 - DNA, 30 bp, Artificial Sequence
  Synthetic oligonucleotide
cgtcacgaaagtgtgtacaatcaggctact

SEQ ID NO: 342135 - DNA, 30 bp, Artificial Sequence
  Synthetic oligonucleotide
cccatcaatctggcctagcagagggctact

SEQ ID NO: 342136 - DNA, 30 bp, Artificial Sequence
  Synthetic oligonucleotide
caaaaggcaaactttcgcgccccatctact

SEQ ID NO: 342137 - DNA, 30 bp, Artificial Sequence
  Synthetic oligonucleotide
tggtacccagagatcagcccgttatctact

SEQ ID NO: 342138 - DNA, 30 bp, Artificial Sequence
  Synthetic oligonucleotide
gactagggctcgtccagctcgcgctctact

SEQ ID NO: 342139 - DNA, 30 bp, Artificial Sequence
  Synthetic oligonucleotide
acggctttgaagtgtgtgccgttctctact

SEQ ID NO: 342140 - DNA, 30 bp, Artificial Sequence
  Synthetic oligonucleotide
ttacaaagcccttaccggaagcaaagtact

SEQ ID NO: 342141 - DNA, 30 bp, Artificial Sequence
  Synthetic oligonucleotide
tatgggcaactcacaagaatttgaagtact

SEQ ID NO: 342142 - DNA, 30 bp, Artificial Sequence
  Synthetic oligonucleotide
gtttgtgcatagggtccctattccagtact

SEQ ID NO: 342143 - DNA, 30 bp, Artificial Sequence
  Synthetic oligonucleotide
ccgatctcgatgaacggtgactagagtact

SEQ ID NO: 342144 - DNA, 29 bp, Artificial Sequence
  Synthetic oligonucleotide
cacttattcaccgtaataagtcgagtact

SEQ ID NO: 342145 - DNA, 30 bp, Artificial Sequence
  Synthetic oligonucleotide
agattagtcggaacagaactcatgagtact

SEQ ID NO: 342146 - DNA, 30 bp, Artificial Sequence
  Synthetic oligonucleotide
gatgaacttttccagcgagtggctagtact

SEQ ID NO: 342147 - DNA, 30 bp, Artificial Sequence
  Synthetic oligonucleotide
acagttgagtacatggggaacccacgtact

SEQ ID NO: 342148 - DNA, 30 bp, Artificial Sequence
  Synthetic oligonucleotide
cccgagtatcgttgatgggatgtacgtact

SEQ ID NO: 342149 - DNA, 30 bp, Artificial Sequence
  Synthetic oligonucleotide
gatagctggtgaagaatcgactagcgtact

SEQ ID NO: 342150 - DNA, 30 bp, Artificial Sequence
  Synthetic oligonucleotide
tgtggcctcacatactgatagtctcgtact

SEQ ID NO: 342151 - DNA, 30 bp, Artificial Sequence
  Synthetic oligonucleotide
cgcccaaaaaacttgtccaagcaaggtact

SEQ ID NO: 342152 - DNA, 30 bp, Artificial Sequence
  Synthetic oligonucleotide
gtaattaacgagaacagcccggcaggtact

SEQ ID NO: 342153 - DNA, 30 bp, Artificial Sequence
  Synthetic oligonucleotide
gggctgcagggttagactgtttcgggtact

SEQ ID NO: 342154 - DNA, 30 bp, Artificial Sequence
  Synthetic oligonucleotide
gtgtaactagctgtgacaaaactgggtact

SEQ ID NO: 342155 - DNA, 28 bp, Artificial Sequence
  Synthetic oligonucleotide
actaagttatgttggtcgtactggtact

SEQ ID NO: 342156 - DNA, 28 bp, Artificial Sequence
  Synthetic oligonucleotide
tggggctgtacgaagtctgtagtgtact

SEQ ID NO: 342157 - DNA, 30 bp, Artificial Sequence
  Synthetic oligonucleotide
gaacgaccagccacgcaatagaggtgtact

SEQ ID NO: 342158 - DNA, 30 bp, Artificial Sequence
  Synthetic oligonucleotide
ccctgtgcttgtgacgaatactgttgtact

SEQ ID NO: 342159 - DNA, 30 bp, Artificial Sequence
  Synthetic oligonucleotide
cagatcatgcctgtcgcaagggacattact

SEQ ID NO: 342160 - DNA, 30 bp, Artificial Sequence
  Synthetic oligonucleotide
tgtgcagtccgaattaggcgtgccattact

SEQ ID NO: 342161 - DNA, 30 bp, Artificial Sequence
  Synthetic oligonucleotide
agcaaaggttgccacgcttatgatattact

SEQ ID NO: 342162 - DNA, 30 bp, Artificial Sequence
  Synthetic oligonucleotide
tgtaacagtgcttttccgtaatatattact

SEQ ID NO: 342163 - DNA, 30 bp, Artificial Sequence
  Synthetic oligonucleotide
agcgggaacttcccgtgggactatattact

SEQ ID NO: 342164 - DNA, 30 bp, Artificial Sequence
  Synthetic oligonucleotide
gagaatcgttgatgtagtgacagtattact

SEQ ID NO: 342165 - DNA, 30 bp, Artificial Sequence
  Synthetic oligonucleotide
acagttacaaatgaacaatctattattact

SEQ ID NO: 342166 - DNA, 30 bp, Artificial Sequence
  Synthetic oligonucleotide
cggaagaaggtccgggctaagatacttact

SEQ ID NO: 342167 - DNA, 30 bp, Artificial Sequence
  Synthetic oligonucleotide
tagcctccaaagtgtgggggattccttact

SEQ ID NO: 342168 - DNA, 30 bp, Artificial Sequence
  Synthetic oligonucleotide
ctagaatatggttgaatgttccatcttact

SEQ ID NO: 342169 - DNA, 30 bp, Artificial Sequence
  Synthetic oligonucleotide
tatagtgtgactcaatttgtagaagttact

SEQ ID NO: 342170 - DNA, 30 bp, Artificial Sequence
  Synthetic oligonucleotide
cacggggctcaatgtgcgtgcaaggttact

SEQ ID NO: 342171 - DNA, 30 bp, Artificial Sequence
  Synthetic oligonucleotide
tgaactcatgcgcattggccagaggttact

SEQ ID NO: 342172 - DNA, 30 bp, Artificial Sequence
  Synthetic oligonucleotide
gaccgccgttgttttctgtttgaggttact

SEQ ID NO: 342173 - DNA, 30 bp, Artificial Sequence
  Synthetic oligonucleotide
cagacccgagaacatccgttgagggttact

SEQ ID NO: 342174 - DNA, 30 bp, Artificial Sequence
  Synthetic oligonucleotide
tcacctaaaaagcggagaacgcgggttact

SEQ ID NO: 342175 - DNA, 30 bp, Artificial Sequence
  Synthetic oligonucleotide
gacgttaagctgcataaaggctgtgttact

SEQ ID NO: 342176 - DNA, 30 bp, Artificial Sequence
  Synthetic oligonucleotide
ttttcggccagtcatcaacctaaatttact

SEQ ID NO: 342177 - DNA, 30 bp, Artificial Sequence
  Synthetic oligonucleotide
cgtgggtgaacgaacgtgatactatttact

SEQ ID NO: 342178 - DNA, 30 bp, Artificial Sequence
  Synthetic oligonucleotide
aggccagcaaccatacgcgggagctttact

SEQ ID NO: 342179 - DNA, 30 bp, Artificial Sequence
  Synthetic oligonucleotide
tgcaatgtcagatgcggccagggctttact

SEQ ID NO: 342180 - DNA, 30 bp, Artificial Sequence
  Synthetic oligonucleotide
ggctacagctccctcgaaaatatgtttact

SEQ ID NO: 342181 - DNA, 30 bp, Artificial Sequence
  Synthetic oligonucleotide
gcgggattcgtgccagggaaattgtttact

SEQ ID NO: 342182 - DNA, 30 bp, Artificial Sequence
  Synthetic oligonucleotide
taccgtagaataccatcgcagcgttttact

SEQ ID NO: 342183 - DNA, 30 bp, Artificial Sequence
  Synthetic oligonucleotide
ccggtcttgtgtgatgagcggctcaaacct

SEQ ID NO: 342184 - DNA, 30 bp, Artificial Sequence
  Synthetic oligonucleotide
ggccggaggttcgggggttacaagaaacct

SEQ ID NO: 342185 - DNA, 30 bp, Artificial Sequence
  Synthetic oligonucleotide
agtacccggtggaaagcttctaagaaacct

SEQ ID NO: 342186 - DNA, 30 bp, Artificial Sequence
  Synthetic oligonucleotide
aggtatcggccgtctaggtggcggaaacct

SEQ ID NO: 342187 - DNA, 30 bp, Artificial Sequence
  Synthetic oligonucleotide
agagtaacgatatgccttacggtgaaacct

SEQ ID NO: 342188 - DNA, 30 bp, Artificial Sequence
  Synthetic oligonucleotide
taactcgtagggccgagatttaataaacct

SEQ ID NO: 342189 - DNA, 30 bp, Artificial Sequence
  Synthetic oligonucleotide
actctggatatgggaccgtagactaaacct

SEQ ID NO: 342190 - DNA, 30 bp, Artificial Sequence
  Synthetic oligonucleotide
gagtaaggatatcgggctatcattaaacct

SEQ ID NO: 342191 - DNA, 30 bp, Artificial Sequence
  Synthetic oligonucleotide
tcgtcttgagctcaacaaaggcgacaacct

SEQ ID NO: 342192 - DNA, 30 bp, Artificial Sequence
  Synthetic oligonucleotide
ggggtccctgctcataatgcaggacaacct

SEQ ID NO: 342193 - DNA, 30 bp, Artificial Sequence
  Synthetic oligonucleotide
gcctgatctcgtagccacgtgaagcaacct

SEQ ID NO: 342194 - DNA, 30 bp, Artificial Sequence
  Synthetic oligonucleotide
ccgattcgcagggcacttctggagcaacct

SEQ ID NO: 342195 - DNA, 30 bp, Artificial Sequence
  Synthetic oligonucleotide
tgttcgaaatatattgtaaaaacgcaacct

SEQ ID NO: 342196 - DNA, 30 bp, Artificial Sequence
  Synthetic oligonucleotide
atattgaaacacgtccacgcaaggcaacct

SEQ ID NO: 342197 - DNA, 30 bp, Artificial Sequence
  Synthetic oligonucleotide
atggttgagacgaaacacgagaggcaacct

SEQ ID NO: 342198 - DNA, 30 bp, Artificial Sequence
  Synthetic oligonucleotide
ggtacccggttgtgtggcgagaatcaacct

SEQ ID NO: 342199 - DNA, 30 bp, Artificial Sequence
  Synthetic oligonucleotide
ctcgacctcgattacaatggcaaagaacct

SEQ ID NO: 342200 - DNA, 30 bp, Artificial Sequence
  Synthetic oligonucleotide
atgagaaggagaggtcaactagacgaacct

SEQ ID NO: 342201 - DNA, 30 bp, Artificial Sequence
  Synthetic oligonucleotide
ggaagctatgcaagagctcagggggaacct

SEQ ID NO: 342202 - DNA, 30 bp, Artificial Sequence
  Synthetic oligonucleotide
agcgaatagtgagacgcttagattgaacct

SEQ ID NO: 342203 - DNA, 30 bp, Artificial Sequence
  Synthetic oligonucleotide
gcgccttgcgggggaatgggtgcataacct

SEQ ID NO: 342204 - DNA, 30 bp, Artificial Sequence
  Synthetic oligonucleotide
aaccaatgccgtctcagccgtatataacct

SEQ ID NO: 342205 - DNA, 30 bp, Artificial Sequence
  Synthetic oligonucleotide
gaacaaaaggggtggaccgttcactaacct

SEQ ID NO: 342206 - DNA, 30 bp, Artificial Sequence
  Synthetic oligonucleotide
agcgcaactagcgtccaattgtggtaacct

SEQ ID NO: 342207 - DNA, 30 bp, Artificial Sequence
  Synthetic oligonucleotide
cagcagtttttcgaatcagtcaattaacct

SEQ ID NO: 342208 - DNA, 30 bp, Artificial Sequence
  Synthetic oligonucleotide
gaaggatacaacgtacgcgaaacttaacct

SEQ ID NO: 342209 - DNA, 30 bp, Artificial Sequence
  Synthetic oligonucleotide
gtgttcgtgtggtgggtttctacttaacct

SEQ ID NO: 342210 - DNA, 30 bp, Artificial Sequence
  Synthetic oligonucleotide
catgtgacccaacttggtgtgtgttaacct

SEQ ID NO: 342211 - DNA, 30 bp, Artificial Sequence
  Synthetic oligonucleotide
cctttaacggctgagagcagagtttaacct

SEQ ID NO: 342212 - DNA, 30 bp, Artificial Sequence
  Synthetic oligonucleotide
cgattaacaaaaataatgctacaaacacct

SEQ ID NO: 342213 - DNA, 30 bp, Artificial Sequence
  Synthetic oligonucleotide
aaatggtgggagttgagtgctggtacacct

SEQ ID NO: 342214 - DNA, 30 bp, Artificial Sequence
  Synthetic oligonucleotide
gtcctaggtgcgaccgtgtgcaaaccacct

SEQ ID NO: 342215 - DNA, 30 bp, Artificial Sequence
  Synthetic oligonucleotide
ggagttatctaaatcctgatccgcccacct

SEQ ID NO: 342216 - DNA, 30 bp, Artificial Sequence
  Synthetic oligonucleotide
cggcttgacaagaaataattgtggccacct

SEQ ID NO: 342217 - DNA, 30 bp, Artificial Sequence
  Synthetic oligonucleotide
catttcgagcaacccgcctacgtgccacct

SEQ ID NO: 342218 - DNA, 30 bp, Artificial Sequence
  Synthetic oligonucleotide
gggaacataacatggctcacgcacgcacct

SEQ ID NO: 342219 - DNA, 30 bp, Artificial Sequence
  Synthetic oligonucleotide
cgcggaagttgtatctctagaggcgcacct

SEQ ID NO: 342220 - DNA, 30 bp, Artificial Sequence
  Synthetic oligonucleotide
ccagaataacggttggctggaggggcacct

SEQ ID NO: 342221 - DNA, 30 bp, Artificial Sequence
  Synthetic oligonucleotide
ggatgggttagattcgcagcgagtgcacct

SEQ ID NO: 342222 - DNA, 30 bp, Artificial Sequence
  Synthetic oligonucleotide
ttgagtatcgagactttcggatttgcacct

SEQ ID NO: 342223 - DNA, 30 bp, Artificial Sequence
  Synthetic oligonucleotide
acaaagggttctcctgtcagacgatcacct

SEQ ID NO: 342224 - DNA, 30 bp, Artificial Sequence
  Synthetic oligonucleotide
ttagggctcttgcgctggagtttatcacct

SEQ ID NO: 342225 - DNA, 30 bp, Artificial Sequence
  Synthetic oligonucleotide
attgggtcgtccatggttcaatgctcacct

SEQ ID NO: 342226 - DNA, 30 bp, Artificial Sequence
  Synthetic oligonucleotide
tgatctctttttggtcggttagttagacct

SEQ ID NO: 342227 - DNA, 30 bp, Artificial Sequence
  Synthetic oligonucleotide
cattatagagtacaagggcggggacgacct

SEQ ID NO: 342228 - DNA, 30 bp, Artificial Sequence
  Synthetic oligonucleotide
gtgaatcatatacgtataggcagccgacct

SEQ ID NO: 342229 - DNA, 30 bp, Artificial Sequence
  Synthetic oligonucleotide
ctccgggtgcatagctaaatccggcgacct

SEQ ID NO: 342230 - DNA, 30 bp, Artificial Sequence
  Synthetic oligonucleotide
agggcaagcagtgggaagggtcggcgacct

SEQ ID NO: 342231 - DNA, 30 bp, Artificial Sequence
  Synthetic oligonucleotide
gttctccatgctagtgacgtagggcgacct

SEQ ID NO: 342232 - DNA, 30 bp, Artificial Sequence
  Synthetic oligonucleotide
aacacgctacattatcgtaccgatcgacct

SEQ ID NO: 342233 - DNA, 30 bp, Artificial Sequence
  Synthetic oligonucleotide
cgagtacagtatctattacgtattcgacct

SEQ ID NO: 342234 - DNA, 30 bp, Artificial Sequence
  Synthetic oligonucleotide
tgtagatcaccttctcgctataacggacct

SEQ ID NO: 342235 - DNA, 30 bp, Artificial Sequence
  Synthetic oligonucleotide
aagcacatagtgcggatttaggacggacct

SEQ ID NO: 342236 - DNA, 30 bp, Artificial Sequence
  Synthetic oligonucleotide
tacattgttagagggtaataaaccggacct

SEQ ID NO: 342237 - DNA, 30 bp, Artificial Sequence
  Synthetic oligonucleotide
aaagaggatggttggccatttcggggacct

SEQ ID NO: 342238 - DNA, 30 bp, Artificial Sequence
  Synthetic oligonucleotide
atgggtcgtcgcggtaatctatatggacct

SEQ ID NO: 342239 - DNA, 30 bp, Artificial Sequence
  Synthetic oligonucleotide
gcgccactcgttccagtcagtcgatgacct

SEQ ID NO: 342240 - DNA, 30 bp, Artificial Sequence
  Synthetic oligonucleotide
acttaaccaagatacggatgagaaatacct

SEQ ID NO: 342241 - DNA, 30 bp, Artificial Sequence
  Synthetic oligonucleotide
atggaaatttgtcacagtatcgaaatacct

SEQ ID NO: 342242 - DNA, 30 bp, Artificial Sequence
  Synthetic oligonucleotide
cgggctagttctatcatggcagcaatacct

SEQ ID NO: 342243 - DNA, 30 bp, Artificial Sequence
  Synthetic oligonucleotide
ggcgagttgtggaggtgcggagtcatacct

SEQ ID NO: 342244 - DNA, 30 bp, Artificial Sequence
  Synthetic oligonucleotide
agaagcagtctcccgtaacgtaagatacct

SEQ ID NO: 342245 - DNA, 30 bp, Artificial Sequence
  Synthetic oligonucleotide
catccttgttacttcacagggtagatacct

SEQ ID NO: 342246 - DNA, 30 bp, Artificial Sequence
  Synthetic oligonucleotide
cggcaaacataccttctgggcaatatacct

SEQ ID NO: 342247 - DNA, 30 bp, Artificial Sequence
  Synthetic oligonucleotide
tattcatgatcacgcctcggcgctatacct

SEQ ID NO: 342248 - DNA, 30 bp, Artificial Sequence
  Synthetic oligonucleotide
atgccctgagaagaagtcgaaagtatacct

SEQ ID NO: 342249 - DNA, 30 bp, Artificial Sequence
  Synthetic oligonucleotide
ccttgtaccctccagctatccagtatacct

SEQ ID NO: 342250 - DNA, 30 bp, Artificial Sequence
  Synthetic oligonucleotide
ccatcttctagtggacaggtatgtatacct

SEQ ID NO: 342251 - DNA, 30 bp, Artificial Sequence
  Synthetic oligonucleotide
gggtgtgatgtaatgtagtcaagcctacct

SEQ ID NO: 342252 - DNA, 30 bp, Artificial Sequence
  Synthetic oligonucleotide
ggtgactggacttcgtcccaagttctacct

SEQ ID NO: 342253 - DNA, 30 bp, Artificial Sequence
  Synthetic oligonucleotide
aggatattaagtgtccgatcgtaagtacct

SEQ ID NO: 342254 - DNA, 30 bp, Artificial Sequence
  Synthetic oligonucleotide
tgttgggcgacgcgcggtataccggtacct

SEQ ID NO: 342255 - DNA, 31 bp, Artificial Sequence
  Synthetic oligonucleotide
ttaagatcttgtgcgcaacacagatgtacct

SEQ ID NO: 342256 - DNA, 30 bp, Artificial Sequence
  Synthetic oligonucleotide
attcctagagacagaccgcttactgtacct

SEQ ID NO: 342257 - DNA, 30 bp, Artificial Sequence
  Synthetic oligonucleotide
ctaacaccatatgatcacggagtattacct

SEQ ID NO: 342258 - DNA, 30 bp, Artificial Sequence
  Synthetic oligonucleotide
tgaattcacttataccatcacatcttacct

SEQ ID NO: 342259 - DNA, 30 bp, Artificial Sequence
  Synthetic oligonucleotide
gatgaatccaaggtattctaagtcttacct

SEQ ID NO: 342260 - DNA, 30 bp, Artificial Sequence
  Synthetic oligonucleotide
gcagggtaagggagtatcgatcagttacct

SEQ ID NO: 342261 - DNA, 30 bp, Artificial Sequence
  Synthetic oligonucleotide
gccttcggcttccaaaagaacgcgttacct

SEQ ID NO: 342262 - DNA, 30 bp, Artificial Sequence
  Synthetic oligonucleotide
acttggtggtggagagccgctactttacct

SEQ ID NO: 342263 - DNA, 30 bp, Artificial Sequence
  Synthetic oligonucleotide
tcgtcgaggcccgccagagaatctttacct

SEQ ID NO: 342264 - DNA, 31 bp, Artificial Sequence
  Synthetic oligonucleotide
gtcaacaaatcacgttgcgtgcggtttacct

SEQ ID NO: 342265 - DNA, 30 bp, Artificial Sequence
  Synthetic oligonucleotide
ctcgacgactctcggtttttaattttacct

SEQ ID NO: 342266 - DNA, 30 bp, Artificial Sequence
  Synthetic oligonucleotide
aagaaaccccgttggccggcgctcaaccct

SEQ ID NO: 342267 - DNA, 30 bp, Artificial Sequence
  Synthetic oligonucleotide
cccgaccgggggcaactcatggcgaaccct

SEQ ID NO: 342268 - DNA, 30 bp, Artificial Sequence
  Synthetic oligonucleotide
cgagtaattttagtcgtcagatgtaaccct

SEQ ID NO: 342269 - DNA, 30 bp, Artificial Sequence
  Synthetic oligonucleotide
ctatataatggaagcggagtccaacaccct

SEQ ID NO: 342270 - DNA, 30 bp, Artificial Sequence
  Synthetic oligonucleotide
atcgaaggttgccattgaattcaacaccct

SEQ ID NO: 342271 - DNA, 30 bp, Artificial Sequence
  Synthetic oligonucleotide
ctatggatcacttgtttcaatctacaccct

SEQ ID NO: 342272 - DNA, 30 bp, Artificial Sequence
  Synthetic oligonucleotide
gggcacgtgtttttctgggtaactcaccct

SEQ ID NO: 342273 - DNA, 30 bp, Artificial Sequence
  Synthetic oligonucleotide
atcggtgttacgcctgagttaactcaccct

SEQ ID NO: 342274 - DNA, 30 bp, Artificial Sequence
  Synthetic oligonucleotide
gatagggtacagccattcatatttcaccct

SEQ ID NO: 342275 - DNA, 30 bp, Artificial Sequence
  Synthetic oligonucleotide
atcctgatggtccgacgggcctaagaccct

SEQ ID NO: 342276 - DNA, 30 bp, Artificial Sequence
  Synthetic oligonucleotide
aaaacgggtgatagtcctcctggagaccct

SEQ ID NO: 342277 - DNA, 30 bp, Artificial Sequence
  Synthetic oligonucleotide
ttggtgtcaataattacggatagggaccct

SEQ ID NO: 342278 - DNA, 30 bp, Artificial Sequence
  Synthetic oligonucleotide
gtgggcgtgtgccagtagagtaatgaccct

SEQ ID NO: 342279 - DNA, 30 bp, Artificial Sequence
  Synthetic oligonucleotide
gaaagcgtaattcagtggaagactgaccct

SEQ ID NO: 342280 - DNA, 30 bp, Artificial Sequence
  Synthetic oligonucleotide
gacctggtgggtgacttcccctttgaccct

SEQ ID NO: 342281 - DNA, 30 bp, Artificial Sequence
  Synthetic oligonucleotide
gtagacaaggccactacatacgcataccct

SEQ ID NO: 342282 - DNA, 30 bp, Artificial Sequence
  Synthetic oligonucleotide
gttcaatgctggcagaaacatggctaccct

SEQ ID NO: 342283 - DNA, 30 bp, Artificial Sequence
  Synthetic oligonucleotide
gcgcacacgccaaaccagaactggtaccct

SEQ ID NO: 342284 - DNA, 30 bp, Artificial Sequence
  Synthetic oligonucleotide
ctcatgcacctggtaaacctactgtaccct

SEQ ID NO: 342285 - DNA, 30 bp, Artificial Sequence
  Synthetic oligonucleotide
gtgacaaaccctgatactttagtttaccct

SEQ ID NO: 342286 - DNA, 30 bp, Artificial Sequence
  Synthetic oligonucleotide
atacacttggcaatactgttagcaacccct

SEQ ID NO: 342287 - DNA, 30 bp, Artificial Sequence
  Synthetic oligonucleotide
cgcgccttgaatcgtattactcccacccct

SEQ ID NO: 342288 - DNA, 30 bp, Artificial Sequence
  Synthetic oligonucleotide
aacggtagcacgaactgtcttagcacccct

SEQ ID NO: 342289 - DNA, 30 bp, Artificial Sequence
  Synthetic oligonucleotide
gggtagtatgcctgatttaatcttacccct

SEQ ID NO: 342290 - DNA, 30 bp, Artificial Sequence
  Synthetic oligonucleotide
ttagtcactagtttgagaagagaaccccct

SEQ ID NO: 342291 - DNA, 30 bp, Artificial Sequence
  Synthetic oligonucleotide
atagtcgtccgtgacaggttcttaccccct

SEQ ID NO: 342292 - DNA, 30 bp, Artificial Sequence
  Synthetic oligonucleotide
tagtcaattgggatccagaaaatgccccct

SEQ ID NO: 342293 - DNA, 30 bp, Artificial Sequence
  Synthetic oligonucleotide
gtgtgttccttgagtagtgttactccccct

SEQ ID NO: 342294 - DNA, 30 bp, Artificial Sequence
  Synthetic oligonucleotide
taatgggaagcgctgtacagagcagcccct

SEQ ID NO: 342295 - DNA, 30 bp, Artificial Sequence
  Synthetic oligonucleotide
ccctcaagtccatacaccaacctagcccct

SEQ ID NO: 342296 - DNA, 30 bp, Artificial Sequence
  Synthetic oligonucleotide
taaagcagaatctgttcgcattacgcccct

SEQ ID NO: 342297 - DNA, 30 bp, Artificial Sequence
  Synthetic oligonucleotide
ttcggttaatcacatttctggtaatcccct

SEQ ID NO: 342298 - DNA, 30 bp, Artificial Sequence
  Synthetic oligonucleotide
caatcattttgtgcgggcgccggatcccct

SEQ ID NO: 342299 - DNA, 30 bp, Artificial Sequence
  Synthetic oligonucleotide
tcggtgttgaggaggacgcgccagtcccct

SEQ ID NO: 342300 - DNA, 30 bp, Artificial Sequence
  Synthetic oligonucleotide
ggttagcgtattcggacataggtttcccct

SEQ ID NO: 342301 - DNA, 30 bp, Artificial Sequence
  Synthetic oligonucleotide
acaagggtcaatttgaggactttttcccct

SEQ ID NO: 342302 - DNA, 30 bp, Artificial Sequence
  Synthetic oligonucleotide
gacccgactaggggacgcgcccacagccct

SEQ ID NO: 342303 - DNA, 30 bp, Artificial Sequence
  Synthetic oligonucleotide
aacgaaatctaggaccccgtttacagccct

SEQ ID NO: 342304 - DNA, 30 bp, Artificial Sequence
  Synthetic oligonucleotide
gggaagggcacttcgccaacgctgcgccct

SEQ ID NO: 342305 - DNA, 30 bp, Artificial Sequence
  Synthetic oligonucleotide
ctcccgtcctacacagccattactcgccct

SEQ ID NO: 342306 - DNA, 30 bp, Artificial Sequence
  Synthetic oligonucleotide
cgctaatttatcatcggtatgggtcgccct

SEQ ID NO: 342307 - DNA, 30 bp, Artificial Sequence
  Synthetic oligonucleotide
aactgtgaattgtactggctccccggccct

SEQ ID NO: 342308 - DNA, 30 bp, Artificial Sequence
  Synthetic oligonucleotide
tctgtactaaagagagcacgaatgggccct

SEQ ID NO: 342309 - DNA, 30 bp, Artificial Sequence
  Synthetic oligonucleotide
agtgtgtgcctaccttttaaaactggccct

SEQ ID NO: 342310 - DNA, 30 bp, Artificial Sequence
  Synthetic oligonucleotide
gtacgtacgcagtagtctcgatctggccct

SEQ ID NO: 342311 - DNA, 30 bp, Artificial Sequence
  Synthetic oligonucleotide
gatgcatgagtctgtctgactagatgccct

SEQ ID NO: 342312 - DNA, 30 bp, Artificial Sequence
  Synthetic oligonucleotide
aacttcgtggacgatgctcatcgctgccct

SEQ ID NO: 342313 - DNA, 30 bp, Artificial Sequence
  Synthetic oligonucleotide
atgtgagattcatcgcaatatatctgccct

SEQ ID NO: 342314 - DNA, 30 bp, Artificial Sequence
  Synthetic oligonucleotide
taggagtaacgttgacgggatctctgccct

SEQ ID NO: 342315 - DNA, 30 bp, Artificial Sequence
  Synthetic oligonucleotide
gggcatcattcggcatatttctcaatccct

SEQ ID NO: 342316 - DNA, 30 bp, Artificial Sequence
  Synthetic oligonucleotide
aaccaatagtgtgcagtacatagaatccct

SEQ ID NO: 342317 - DNA, 30 bp, Artificial Sequence
  Synthetic oligonucleotide
cctccagacttcttcagctaccccatccct

SEQ ID NO: 342318 - DNA, 30 bp, Artificial Sequence
  Synthetic oligonucleotide
atatttgcatttgaggtctttcagatccct

SEQ ID NO: 342319 - DNA, 30 bp, Artificial Sequence
  Synthetic oligonucleotide
ggcttgcctaattagagctagtcgatccct

SEQ ID NO: 342320 - DNA, 30 bp, Artificial Sequence
  Synthetic oligonucleotide
ccggtagctccaagagacgccatgatccct

SEQ ID NO: 342321 - DNA, 30 bp, Artificial Sequence
  Synthetic oligonucleotide
ggtagaggtgaacgatcgggacctatccct

SEQ ID NO: 342322 - DNA, 30 bp, Artificial Sequence
  Synthetic oligonucleotide
acttcaggacctgcgtgagaagaactccct

SEQ ID NO: 342323 - DNA, 30 bp, Artificial Sequence
  Synthetic oligonucleotide
ctgtcaggaacggtaaggtgctcactccct

SEQ ID NO: 342324 - DNA, 30 bp, Artificial Sequence
  Synthetic oligonucleotide
gccagaagcggatctcccttgcgactccct

SEQ ID NO: 342325 - DNA, 30 bp, Artificial Sequence
  Synthetic oligonucleotide
cggaagactcgcacagccaaaaccctccct

SEQ ID NO: 342326 - DNA, 30 bp, Artificial Sequence
  Synthetic oligonucleotide
agcaaaggagagcagacgtcgtagctccct

SEQ ID NO: 342327 - DNA, 30 bp, Artificial Sequence
  Synthetic oligonucleotide
agcaccctagacgaacaattacgtctccct

SEQ ID NO: 342328 - DNA, 30 bp, Artificial Sequence
  Synthetic oligonucleotide
gcggaggtcaggcagcaaacccaagtccct

SEQ ID NO: 342329 - DNA, 30 bp, Artificial Sequence
  Synthetic oligonucleotide
cattcggttatcgcctgccacctcgtccct

SEQ ID NO: 342330 - DNA, 30 bp, Artificial Sequence
  Synthetic oligonucleotide
cgggtggttgcaggaacgctggtcgtccct

SEQ ID NO: 342331 - DNA, 30 bp, Artificial Sequence
  Synthetic oligonucleotide
tgaggttcccttactccaggtcaattccct

SEQ ID NO: 342332 - DNA, 30 bp, Artificial Sequence
  Synthetic oligonucleotide
ttttgcagggtgggttggatttcattccct

SEQ ID NO: 342333 - DNA, 30 bp, Artificial Sequence
  Synthetic oligonucleotide
tgatagtgcaaatttacataatacttccct

SEQ ID NO: 342334 - DNA, 30 bp, Artificial Sequence
  Synthetic oligonucleotide
tttatagggtcatcaatcatgttcttccct

SEQ ID NO: 342335 - DNA, 30 bp, Artificial Sequence
  Synthetic oligonucleotide
ctatcacaacccgagggtggcccgttccct

SEQ ID NO: 342336 - DNA, 30 bp, Artificial Sequence
  Synthetic oligonucleotide
gcgccatattctagctggaatggtttccct

SEQ ID NO: 342337 - DNA, 30 bp, Artificial Sequence
  Synthetic oligonucleotide
agctgacagtagtcactaaccggaaagcct

SEQ ID NO: 342338 - DNA, 30 bp, Artificial Sequence
  Synthetic oligonucleotide
tttcagggatctcgaaggtctaacaagcct

SEQ ID NO: 342339 - DNA, 30 bp, Artificial Sequence
  Synthetic oligonucleotide
gtgtaatctggtctatgtcctcacaagcct

SEQ ID NO: 342340 - DNA, 30 bp, Artificial Sequence
  Synthetic oligonucleotide
cgtatgttgcctactgtgggcgagaagcct

SEQ ID NO: 342341 - DNA, 30 bp, Artificial Sequence
  Synthetic oligonucleotide
tctcattcccgcacaggataacgccagcct

SEQ ID NO: 342342 - DNA, 30 bp, Artificial Sequence
  Synthetic oligonucleotide
tcttttggccggtaatgtgtgttgcagcct

SEQ ID NO: 342343 - DNA, 30 bp, Artificial Sequence
  Synthetic oligonucleotide
tggactacctttggttggctattagagcct

SEQ ID NO: 342344 - DNA, 30 bp, Artificial Sequence
  Synthetic oligonucleotide
aaatctccaagacacagtatccacgagcct

SEQ ID NO: 342345 - DNA, 30 bp, Artificial Sequence
  Synthetic oligonucleotide
agcgccttacggatgactaccaaggagcct

SEQ ID NO: 342346 - DNA, 30 bp, Artificial Sequence
  Synthetic oligonucleotide
atagagcgaccgcgtgtgtgtcaggagcct

SEQ ID NO: 342347 - DNA, 30 bp, Artificial Sequence
  Synthetic oligonucleotide
cccgccgcagttgaacttaaataggagcct

SEQ ID NO: 342348 - DNA, 30 bp, Artificial Sequence
  Synthetic oligonucleotide
tgttaacgaactaccagtggctcggagcct

SEQ ID NO: 342349 - DNA, 30 bp, Artificial Sequence
  Synthetic oligonucleotide
aggtatcgaccggtccagggaatggagcct

SEQ ID NO: 342350 - DNA, 30 bp, Artificial Sequence
  Synthetic oligonucleotide
tccgagaacgcacaccaacggtaatagcct

SEQ ID NO: 342351 - DNA, 30 bp, Artificial Sequence
  Synthetic oligonucleotide
agtatactcaacataggtagggcatagcct

SEQ ID NO: 342352 - DNA, 30 bp, Artificial Sequence
  Synthetic oligonucleotide
atcagactaatagctccgcttgtatagcct

SEQ ID NO: 342353 - DNA, 31 bp, Artificial Sequence
  Synthetic oligonucleotide
tgtctcggtcaagagccctcacaactagcct

SEQ ID NO: 342354 - DNA, 30 bp, Artificial Sequence
  Synthetic oligonucleotide
tggtattatactgctcgataccagtagcct

SEQ ID NO: 342355 - DNA, 30 bp, Artificial Sequence
  Synthetic oligonucleotide
caatgttctcctagcacaagtcagtagcct

SEQ ID NO: 342356 - DNA, 30 bp, Artificial Sequence
  Synthetic oligonucleotide
atgacttgacgttcccggccaaaaacgcct

SEQ ID NO: 342357 - DNA, 30 bp, Artificial Sequence
  Synthetic oligonucleotide
gtgaaggccaggacgcggaagcaaacgcct

SEQ ID NO: 342358 - DNA, 30 bp, Artificial Sequence
  Synthetic oligonucleotide
aagtggtttggcaaagtacagaccacgcct

SEQ ID NO: 342359 - DNA, 30 bp, Artificial Sequence
  Synthetic oligonucleotide
ttaaggacctgatcagagacccccacgcct

SEQ ID NO: 342360 - DNA, 30 bp, Artificial Sequence
  Synthetic oligonucleotide
tacggactcgggatgccacagtccacgcct

SEQ ID NO: 342361 - DNA, 30 bp, Artificial Sequence
  Synthetic oligonucleotide
acccgacctaccacatcatcgggcacgcct

SEQ ID NO: 342362 - DNA, 30 bp, Artificial Sequence
  Synthetic oligonucleotide
gcttgtaggagcatcatgatgaagacgcct

SEQ ID NO: 342363 - DNA, 30 bp, Artificial Sequence
  Synthetic oligonucleotide
taacggacggaaagttagactcgtacgcct

SEQ ID NO: 342364 - DNA, 30 bp, Artificial Sequence
  Synthetic oligonucleotide
atgatgcgactcctatgaaatggtacgcct

SEQ ID NO: 342365 - DNA, 30 bp, Artificial Sequence
  Synthetic oligonucleotide
ctagtgcggttaacagtcataattacgcct

SEQ ID NO: 342366 - DNA, 30 bp, Artificial Sequence
  Synthetic oligonucleotide
tccacagactggggcttcacgtcaccgcct

SEQ ID NO: 342367 - DNA, 30 bp, Artificial Sequence
  Synthetic oligonucleotide
caaaaggttaaagacgttacgggaccgcct

SEQ ID NO: 342368 - DNA, 30 bp, Artificial Sequence
  Synthetic oligonucleotide
accatgctgtgtggatcattattgccgcct

SEQ ID NO: 342369 - DNA, 30 bp, Artificial Sequence
  Synthetic oligonucleotide
gtgtcgacggttattcacgggaaagcgcct

SEQ ID NO: 342370 - DNA, 30 bp, Artificial Sequence
  Synthetic oligonucleotide
agtccggctgcactcgaacgcccagcgcct

SEQ ID NO: 342371 - DNA, 30 bp, Artificial Sequence
  Synthetic oligonucleotide
ttcagtctctggcgaagcggcaccgcgcct

SEQ ID NO: 342372 - DNA, 30 bp, Artificial Sequence
  Synthetic oligonucleotide
gcgtgcccggcaaaatggggaagggcgcct

SEQ ID NO: 342373 - DNA, 30 bp, Artificial Sequence
  Synthetic oligonucleotide
tcgttagccgtcaaacgatttgatgcgcct

SEQ ID NO: 342374 - DNA, 30 bp, Artificial Sequence
  Synthetic oligonucleotide
actctggggtgctcggtctagagtgcgcct

SEQ ID NO: 342375 - DNA, 30 bp, Artificial Sequence
  Synthetic oligonucleotide
agtaaggagaatcgagcagtaagatcgcct

SEQ ID NO: 342376 - DNA, 30 bp, Artificial Sequence
  Synthetic oligonucleotide
atctgggaggttaggcgcatgatctcgcct

SEQ ID NO: 342377 - DNA, 30 bp, Artificial Sequence
  Synthetic oligonucleotide
acgggaccgacgctgctgcgtgtctcgcct

SEQ ID NO: 342378 - DNA, 30 bp, Artificial Sequence
  Synthetic oligonucleotide
cgcataactggcgaaatgttgcagtcgcct

SEQ ID NO: 342379 - DNA, 30 bp, Artificial Sequence
  Synthetic oligonucleotide
gaactccgcgacataacccgcgagtcgcct

SEQ ID NO: 342380 - DNA, 30 bp, Artificial Sequence
  Synthetic oligonucleotide
caagccagctcattgtgtccagggtcgcct

SEQ ID NO: 342381 - DNA, 30 bp, Artificial Sequence
  Synthetic oligonucleotide
ggttgcctgtttgcgttcaaattgtcgcct

SEQ ID NO: 342382 - DNA, 30 bp, Artificial Sequence
  Synthetic oligonucleotide
gtcactgcatataaagttgggctttcgcct

SEQ ID NO: 342383 - DNA, 30 bp, Artificial Sequence
  Synthetic oligonucleotide
acacatggacccattaatctataaaggcct

SEQ ID NO: 342384 - DNA, 30 bp, Artificial Sequence
  Synthetic oligonucleotide
gctaaaaaaggcctgaaactgatcaggcct

SEQ ID NO: 342385 - DNA, 30 bp, Artificial Sequence
  Synthetic oligonucleotide
gtcagtggataaagatacaagactaggcct

SEQ ID NO: 342386 - DNA, 30 bp, Artificial Sequence
  Synthetic oligonucleotide
aactctgacggtacgttgctgactaggcct

SEQ ID NO: 342387 - DNA, 30 bp, Artificial Sequence
  Synthetic oligonucleotide
tcaatagtatccgccacatgaggtaggcct

SEQ ID NO: 342388 - DNA, 30 bp, Artificial Sequence
  Synthetic oligonucleotide
agtcgtacctcatggttggaaacacggcct

SEQ ID NO: 342389 - DNA, 30 bp, Artificial Sequence
  Synthetic oligonucleotide
tcgggacaactagggccccctaaccggcct

SEQ ID NO: 342390 - DNA, 30 bp, Artificial Sequence
  Synthetic oligonucleotide
tggggcgaatacagtgagcttacccggcct

SEQ ID NO: 342391 - DNA, 30 bp, Artificial Sequence
  Synthetic oligonucleotide
cgtccttggataggcgaccgagggcggcct

SEQ ID NO: 342392 - DNA, 30 bp, Artificial Sequence
  Synthetic oligonucleotide
ttcgtcggacctctcattaagaatcggcct

SEQ ID NO: 342393 - DNA, 30 bp, Artificial Sequence
  Synthetic oligonucleotide
tcgaacaccgtctgtcactgacctcggcct

SEQ ID NO: 342394 - DNA, 30 bp, Artificial Sequence
  Synthetic oligonucleotide
acaaaaggattactgaatcacgctcggcct

SEQ ID NO: 342395 - DNA, 30 bp, Artificial Sequence
  Synthetic oligonucleotide
tcgcgtgctgttccccttatcattcggcct

SEQ ID NO: 342396 - DNA, 30 bp, Artificial Sequence
  Synthetic oligonucleotide
tgtaggcggatacgccatccaaacgggcct

SEQ ID NO: 342397 - DNA, 30 bp, Artificial Sequence
  Synthetic oligonucleotide
agctattacgcgattttgcgttccgggcct

SEQ ID NO: 342398 - DNA, 30 bp, Artificial Sequence
  Synthetic oligonucleotide
aacgacggcgtggtgctgtgttccgggcct

SEQ ID NO: 342399 - DNA, 30 bp, Artificial Sequence
  Synthetic oligonucleotide
gtggaatatttggatcatctaagggggcct

SEQ ID NO: 342400 - DNA, 30 bp, Artificial Sequence
  Synthetic oligonucleotide
agcatcttgggcgaattctagtgggggcct

SEQ ID NO: 342401 - DNA, 30 bp, Artificial Sequence
  Synthetic oligonucleotide
cagttgaatctcttcaacatgtatgggcct

SEQ ID NO: 342402 - DNA, 30 bp, Artificial Sequence
  Synthetic oligonucleotide
ctttaacagtatcgcgcagattctgggcct

SEQ ID NO: 342403 - DNA, 30 bp, Artificial Sequence
  Synthetic oligonucleotide
gtggtaaccacatcctgctgtatgtggcct

SEQ ID NO: 342404 - DNA, 30 bp, Artificial Sequence
  Synthetic oligonucleotide
catgtgcaagagaagagattttattggcct

SEQ ID NO: 342405 - DNA, 30 bp, Artificial Sequence
  Synthetic oligonucleotide
tatcaaaccaacaatccggcgtccatgcct

SEQ ID NO: 342406 - DNA, 30 bp, Artificial Sequence
  Synthetic oligonucleotide
tttacgccaagcaggtaaaatcgcatgcct

SEQ ID NO: 342407 - DNA, 30 bp, Artificial Sequence
  Synthetic oligonucleotide
ttaaacgcttaaactaatgcatcgatgcct

SEQ ID NO: 342408 - DNA, 30 bp, Artificial Sequence
  Synthetic oligonucleotide
tctgtctagacgaactacatatggatgcct

SEQ ID NO: 342409 - DNA, 30 bp, Artificial Sequence
  Synthetic oligonucleotide
ctacatgcttgtctagctcgcactatgcct

SEQ ID NO: 342410 - DNA, 30 bp, Artificial Sequence
  Synthetic oligonucleotide
tgaggtcgcagtcgggcaaataccctgcct

SEQ ID NO: 342411 - DNA, 30 bp, Artificial Sequence
  Synthetic oligonucleotide
ggaagtggtccacacctggtcctcctgcct

SEQ ID NO: 342412 - DNA, 30 bp, Artificial Sequence
  Synthetic oligonucleotide
gcacaagtggggccgtgacggaatctgcct

SEQ ID NO: 342413 - DNA, 30 bp, Artificial Sequence
  Synthetic oligonucleotide
cagccggctagaatagttagacgtctgcct

SEQ ID NO: 342414 - DNA, 30 bp, Artificial Sequence
  Synthetic oligonucleotide
gtcgtgagagcggtcgtatatggagtgcct

SEQ ID NO: 342415 - DNA, 30 bp, Artificial Sequence
  Synthetic oligonucleotide
tccgtggtacgatggggattacaggtgcct

SEQ ID NO: 342416 - DNA, 30 bp, Artificial Sequence
  Synthetic oligonucleotide
gtaggtgaggacagctaaccacatgtgcct

SEQ ID NO: 342417 - DNA, 30 bp, Artificial Sequence
  Synthetic oligonucleotide
ggtgcaacgtcacgatgtcacttattgcct

SEQ ID NO: 342418 - DNA, 30 bp, Artificial Sequence
  Synthetic oligonucleotide
aattcacgaattaaacaatgtgacttgcct

SEQ ID NO: 342419 - DNA, 30 bp, Artificial Sequence
  Synthetic oligonucleotide
gtgcctcgcgtgcaggaactacgcttgcct

SEQ ID NO: 342420 - DNA, 31 bp, Artificial Sequence
  Synthetic oligonucleotide
gatgcaaatcgtggtacatagccggttgcct

SEQ ID NO: 342421 - DNA, 30 bp, Artificial Sequence
  Synthetic oligonucleotide
cctaataatgatgcagggtggctgttgcct

SEQ ID NO: 342422 - DNA, 30 bp, Artificial Sequence
  Synthetic oligonucleotide
actcctcgaatggcaccgcctacaaatcct

SEQ ID NO: 342423 - DNA, 30 bp, Artificial Sequence
  Synthetic oligonucleotide
ctctcaccaatccggcagtttggcaatcct

SEQ ID NO: 342424 - DNA, 30 bp, Artificial Sequence
  Synthetic oligonucleotide
caggttgatttcagtaaaccgtgcaatcct

SEQ ID NO: 342425 - DNA, 30 bp, Artificial Sequence
  Synthetic oligonucleotide
ttgaagtaggaatggacttgaccgaatcct

SEQ ID NO: 342426 - DNA, 30 bp, Artificial Sequence
  Synthetic oligonucleotide
ttcgggcgttgcctcagcctcgggaatcct

SEQ ID NO: 342427 - DNA, 30 bp, Artificial Sequence
  Synthetic oligonucleotide
gccggaagtcatcgcttgggtgtacatcct

SEQ ID NO: 342428 - DNA, 30 bp, Artificial Sequence
  Synthetic oligonucleotide
tgcgattttaactcacttttgacgcatcct

SEQ ID NO: 342429 - DNA, 30 bp, Artificial Sequence
  Synthetic oligonucleotide
cgttcgaaggagtccaactttcctcatcct

SEQ ID NO: 342430 - DNA, 30 bp, Artificial Sequence
  Synthetic oligonucleotide
gacagtaaactatggacaaattctcatcct

SEQ ID NO: 342431 - DNA, 30 bp, Artificial Sequence
  Synthetic oligonucleotide
taactggggagagatggctgtggagatcct

SEQ ID NO: 342432 - DNA, 30 bp, Artificial Sequence
  Synthetic oligonucleotide
agcgagactaatgcagccggatccgatcct

SEQ ID NO: 342433 - DNA, 30 bp, Artificial Sequence
  Synthetic oligonucleotide
ccaaagtttctttgcacggtttccgatcct

SEQ ID NO: 342434 - DNA, 30 bp, Artificial Sequence
  Synthetic oligonucleotide
gttggccgttattgagaaccggtcgatcct

SEQ ID NO: 342435 - DNA, 30 bp, Artificial Sequence
  Synthetic oligonucleotide
tctccagtcctccttgaaagataggatcct

SEQ ID NO: 342436 - DNA, 30 bp, Artificial Sequence
  Synthetic oligonucleotide
ggcgtagggtacggttgagcttaggatcct

SEQ ID NO: 342437 - DNA, 30 bp, Artificial Sequence
  Synthetic oligonucleotide
ctagttggaggctgatattacacggatcct

SEQ ID NO: 342438 - DNA, 30 bp, Artificial Sequence
  Synthetic oligonucleotide
gatgatagtgacaacacgcccgtggatcct

SEQ ID NO: 342439 - DNA, 30 bp, Artificial Sequence
  Synthetic oligonucleotide
gggtgcctatttctggcggtatctgatcct

SEQ ID NO: 342440 - DNA, 30 bp, Artificial Sequence
  Synthetic oligonucleotide
cacatatgaaacggggtgctcgcctatcct

SEQ ID NO: 342441 - DNA, 30 bp, Artificial Sequence
  Synthetic oligonucleotide
actcgtcacctcataccacctggctatcct

SEQ ID NO: 342442 - DNA, 30 bp, Artificial Sequence
  Synthetic oligonucleotide
ttattgacctgaggagagattggctatcct

SEQ ID NO: 342443 - DNA, 30 bp, Artificial Sequence
  Synthetic oligonucleotide
cggataaccggtatgtccaaggagtatcct

SEQ ID NO: 342444 - DNA, 30 bp, Artificial Sequence
  Synthetic oligonucleotide
cctcaagggccacttagtatgtgaactcct

SEQ ID NO: 342445 - DNA, 30 bp, Artificial Sequence
  Synthetic oligonucleotide
agcataggccatgagtgcccagcgactcct

SEQ ID NO: 342446 - DNA, 30 bp, Artificial Sequence
  Synthetic oligonucleotide
actcgatgtgtagttcggggggtgactcct

SEQ ID NO: 342447 - DNA, 30 bp, Artificial Sequence
  Synthetic oligonucleotide
aagccgggagcctgatagtataatactcct

SEQ ID NO: 342448 - DNA, 30 bp, Artificial Sequence
  Synthetic oligonucleotide
atccgagctaacgtgggacaagggcctcct

SEQ ID NO: 342449 - DNA, 30 bp, Artificial Sequence
  Synthetic oligonucleotide
ctgcgttgagttgacgttatcggagctcct

SEQ ID NO: 342450 - DNA, 30 bp, Artificial Sequence
  Synthetic oligonucleotide
tgttttctataatgaaggccactagctcct

SEQ ID NO: 342451 - DNA, 30 bp, Artificial Sequence
  Synthetic oligonucleotide
acatcgagcgctcttaagactatcgctcct

SEQ ID NO: 342452 - DNA, 30 bp, Artificial Sequence
  Synthetic oligonucleotide
catatattctatatatgactcggtgctcct

SEQ ID NO: 342453 - DNA, 30 bp, Artificial Sequence
  Synthetic oligonucleotide
caagccgacacgacgttctgcaaatctcct

SEQ ID NO: 342454 - DNA, 30 bp, Artificial Sequence
  Synthetic oligonucleotide
tcctgtacctatgtttagcaattatctcct

SEQ ID NO: 342455 - DNA, 30 bp, Artificial Sequence
  Synthetic oligonucleotide
gctaaataccagaccgttcgtctctctcct

SEQ ID NO: 342456 - DNA, 30 bp, Artificial Sequence
  Synthetic oligonucleotide
ggtgggcactggctccatagcccgtctcct

SEQ ID NO: 342457 - DNA, 30 bp, Artificial Sequence
  Synthetic oligonucleotide
ggcttggacgtagatcttatgtcgtctcct

SEQ ID NO: 342458 - DNA, 34 bp, Artificial Sequence
  Synthetic oligonucleotide
gactatatcctcggactacttcgaaacaagtcct

SEQ ID NO: 342459 - DNA, 30 bp, Artificial Sequence
  Synthetic oligonucleotide
aaagacatgtggtttcagtgacacagtcct

SEQ ID NO: 342460 - DNA, 30 bp, Artificial Sequence
  Synthetic oligonucleotide
gtgaatgtacatcagaccagggtcagtcct

SEQ ID NO: 342461 - DNA, 30 bp, Artificial Sequence
  Synthetic oligonucleotide
tggggaagtaagtcgcataccttgagtcct

SEQ ID NO: 342462 - DNA, 30 bp, Artificial Sequence
  Synthetic oligonucleotide
gttagtcagtggccgattcggtatagtcct

SEQ ID NO: 342463 - DNA, 30 bp, Artificial Sequence
  Synthetic oligonucleotide
gtaatgaacagcagacttaaaggtagtcct

SEQ ID NO: 342464 - DNA, 30 bp, Artificial Sequence
  Synthetic oligonucleotide
gcggggctttgggtgacacacatacgtcct

SEQ ID NO: 342465 - DNA, 30 bp, Artificial Sequence
  Synthetic oligonucleotide
ggcacactacgctcgatcatcaagcgtcct

SEQ ID NO: 342466 - DNA, 30 bp, Artificial Sequence
  Synthetic oligonucleotide
aagaagtgcggtcattttacacatcgtcct

SEQ ID NO: 342467 - DNA, 30 bp, Artificial Sequence
  Synthetic oligonucleotide
tgagcctgatcgaaacatcggggtcgtcct

SEQ ID NO: 342468 - DNA, 30 bp, Artificial Sequence
  Synthetic oligonucleotide
taatgcaggtcccttatttcggttcgtcct

SEQ ID NO: 342469 - DNA, 30 bp, Artificial Sequence
  Synthetic oligonucleotide
ccacggctggattttctggcaaaaggtcct

SEQ ID NO: 342470 - DNA, 30 bp, Artificial Sequence
  Synthetic oligonucleotide
agacgaaggcgtaagtacgaagaaggtcct

SEQ ID NO: 342471 - DNA, 30 bp, Artificial Sequence
  Synthetic oligonucleotide
attagttggggattgagccttacgggtcct

SEQ ID NO: 342472 - DNA, 30 bp, Artificial Sequence
  Synthetic oligonucleotide
gatattgatgttttccgcataatgggtcct

SEQ ID NO: 342473 - DNA, 30 bp, Artificial Sequence
  Synthetic oligonucleotide
gagcgaagggcccaacagtcttctggtcct

SEQ ID NO: 342474 - DNA, 30 bp, Artificial Sequence
  Synthetic oligonucleotide
ggacgcaaccaaatgccggtgccatgtcct

SEQ ID NO: 342475 - DNA, 30 bp, Artificial Sequence
  Synthetic oligonucleotide
tttcttagtgggaagcagaggagatgtcct

SEQ ID NO: 342476 - DNA, 30 bp, Artificial Sequence
  Synthetic oligonucleotide
aggccacttaatttactgcagggatgtcct

SEQ ID NO: 342477 - DNA, 30 bp, Artificial Sequence
  Synthetic oligonucleotide
ttcgagcagtatatgtactaaatatgtcct

SEQ ID NO: 342478 - DNA, 30 bp, Artificial Sequence
  Synthetic oligonucleotide
tacacccgaaacccccgggatctctgtcct

SEQ ID NO: 342479 - DNA, 30 bp, Artificial Sequence
  Synthetic oligonucleotide
atttaaccatgtccgtggcccttctgtcct

SEQ ID NO: 342480 - DNA, 31 bp, Artificial Sequence
  Synthetic oligonucleotide
tttagagacaaacccctgtcggtattgtcct

SEQ ID NO: 342481 - DNA, 30 bp, Artificial Sequence
  Synthetic oligonucleotide
ttaaagagggaaaccgaacacagtattcct

SEQ ID NO: 342482 - DNA, 30 bp, Artificial Sequence
  Synthetic oligonucleotide
cgtttagtcggtacatagtaatttattcct

SEQ ID NO: 342483 - DNA, 30 bp, Artificial Sequence
  Synthetic oligonucleotide
gttgagaggcattaacatattgggcttcct

SEQ ID NO: 342484 - DNA, 30 bp, Artificial Sequence
  Synthetic oligonucleotide
ctcgacttccttgcaaatacggacgttcct

SEQ ID NO: 342485 - DNA, 30 bp, Artificial Sequence
  Synthetic oligonucleotide
gtagtatggatgtaggccgttacggttcct

SEQ ID NO: 342486 - DNA, 30 bp, Artificial Sequence
  Synthetic oligonucleotide
tggaaggacactggacaccaactggttcct

SEQ ID NO: 342487 - DNA, 30 bp, Artificial Sequence
  Synthetic oligonucleotide
gaggattcggccatgaaagaggtctttcct

SEQ ID NO: 342488 - DNA, 30 bp, Artificial Sequence
  Synthetic oligonucleotide
aggcactgcacctggcgctgaaggtttcct

SEQ ID NO: 342489 - DNA, 30 bp, Artificial Sequence
  Synthetic oligonucleotide
ctagcataaattatttagataatgtttcct

SEQ ID NO: 342490 - DNA, 30 bp, Artificial Sequence
  Synthetic oligonucleotide
tcctctaatttggctcttattttgtttcct

SEQ ID NO: 342491 - DNA, 30 bp, Artificial Sequence
  Synthetic oligonucleotide
tcaaacaacacactgctccggaattttcct

SEQ ID NO: 342492 - DNA, 30 bp, Artificial Sequence
  Synthetic oligonucleotide
acccgtagcagggcagagatgtgaaaagct

SEQ ID NO: 342493 - DNA, 30 bp, Artificial Sequence
  Synthetic oligonucleotide
aagccactagtgcgcaccatagggaaagct

SEQ ID NO: 342494 - DNA, 30 bp, Artificial Sequence
  Synthetic oligonucleotide
ggatctgccgcaccctccgcgcataaagct

SEQ ID NO: 342495 - DNA, 30 bp, Artificial Sequence
  Synthetic oligonucleotide
ccaggaaggtcacggatcgggtaccaagct

SEQ ID NO: 342496 - DNA, 30 bp, Artificial Sequence
  Synthetic oligonucleotide
tctccacgggctggccttacacagcaagct

SEQ ID NO: 342497 - DNA, 30 bp, Artificial Sequence
  Synthetic oligonucleotide
caataagattttaataataatgggcaagct

SEQ ID NO: 342498 - DNA, 30 bp, Artificial Sequence
  Synthetic oligonucleotide
gtatctacaagggaggacccgtggcaagct

SEQ ID NO: 342499 - DNA, 30 bp, Artificial Sequence
  Synthetic oligonucleotide
tttacaacaaccatgaatggtcgtcaagct

SEQ ID NO: 342500 - DNA, 30 bp, Artificial Sequence
  Synthetic oligonucleotide
atgtcagagatctcgtgtggacaagaagct

SEQ ID NO: 342501 - DNA, 30 bp, Artificial Sequence
  Synthetic oligonucleotide
ggcagatattattgttgagggcaagaagct

SEQ ID NO: 342502 - DNA, 30 bp, Artificial Sequence
  Synthetic oligonucleotide
tgcacaaggttaaaacgtcttgacgaagct

SEQ ID NO: 342503 - DNA, 30 bp, Artificial Sequence
  Synthetic oligonucleotide
gcagaaggtgggagaaaagactacgaagct

SEQ ID NO: 342504 - DNA, 30 bp, Artificial Sequence
  Synthetic oligonucleotide
ctatgcaagtttcagaatatatccgaagct

SEQ ID NO: 342505 - DNA, 30 bp, Artificial Sequence
  Synthetic oligonucleotide
tgaacgttgatcgtgagcaattgggaagct

SEQ ID NO: 342506 - DNA, 30 bp, Artificial Sequence
  Synthetic oligonucleotide
ataacagagttcctcttgggtttggaagct

SEQ ID NO: 342507 - DNA, 30 bp, Artificial Sequence
  Synthetic oligonucleotide
ttgcaggcgccggaagagataaatgaagct

SEQ ID NO: 342508 - DNA, 30 bp, Artificial Sequence
  Synthetic oligonucleotide
gaaagtaaatgtctaggcaggtatgaagct

SEQ ID NO: 342509 - DNA, 30 bp, Artificial Sequence
  Synthetic oligonucleotide
cgcggctgtcttagatttgggtatgaagct

SEQ ID NO: 342510 - DNA, 30 bp, Artificial Sequence
  Synthetic oligonucleotide
ctttgctccagattcttggcccgtgaagct

SEQ ID NO: 342511 - DNA, 30 bp, Artificial Sequence
  Synthetic oligonucleotide
ttagcgccattatccgagggcggttaagct

SEQ ID NO: 342512 - DNA, 30 bp, Artificial Sequence
  Synthetic oligonucleotide
aggacaaacagggggatgtccgtttaagct

SEQ ID NO: 342513 - DNA, 30 bp, Artificial Sequence
  Synthetic oligonucleotide
tctgtaaaacggccctagtggataacagct

SEQ ID NO: 342514 - DNA, 30 bp, Artificial Sequence
  Synthetic oligonucleotide
tatgccaccgatgcccgttatctaacagct

SEQ ID NO: 342515 - DNA, 30 bp, Artificial Sequence
  Synthetic oligonucleotide
tgtctgttatcgcttaaagccgagacagct

SEQ ID NO: 342516 - DNA, 30 bp, Artificial Sequence
  Synthetic oligonucleotide
ttcttgaactaccgcttctagcggacagct

SEQ ID NO: 342517 - DNA, 30 bp, Artificial Sequence
  Synthetic oligonucleotide
cgtccttcacgagggttcagctatacagct

SEQ ID NO: 342518 - DNA, 30 bp, Artificial Sequence
  Synthetic oligonucleotide
ttactctgtacaacgggtataaagccagct

SEQ ID NO: 342519 - DNA, 30 bp, Artificial Sequence
  Synthetic oligonucleotide
ttaaggtatgttgacgttcgcgatccagct

SEQ ID NO: 342520 - DNA, 30 bp, Artificial Sequence
  Synthetic oligonucleotide
tcgcttgtgagcgcaagtccttatccagct

SEQ ID NO: 342521 - DNA, 30 bp, Artificial Sequence
  Synthetic oligonucleotide
ggcccccccgtggcaatctgtggtccagct

SEQ ID NO: 342522 - DNA, 30 bp, Artificial Sequence
  Synthetic oligonucleotide
acatcttatatgcgagggcgttgtccagct

SEQ ID NO: 342523 - DNA, 30 bp, Artificial Sequence
  Synthetic oligonucleotide
aaagggtctgtacgaagtgtcgttccagct

SEQ ID NO: 342524 - DNA, 30 bp, Artificial Sequence
  Synthetic oligonucleotide
cggtcgtgattcttaagagggctagcagct

SEQ ID NO: 342525 - DNA, 30 bp, Artificial Sequence
  Synthetic oligonucleotide
aaggggcctacgaataaatacgccgcagct

SEQ ID NO: 342526 - DNA, 30 bp, Artificial Sequence
  Synthetic oligonucleotide
ccctcccttaggaagggtaaaagcgcagct

SEQ ID NO: 342527 - DNA, 30 bp, Artificial Sequence
  Synthetic oligonucleotide
tcatgacagttcccaccgcaattcgcagct

SEQ ID NO: 342528 - DNA, 30 bp, Artificial Sequence
  Synthetic oligonucleotide
tgggcacaattgccttacctgtaggcagct

SEQ ID NO: 342529 - DNA, 30 bp, Artificial Sequence
  Synthetic oligonucleotide
tcatggttccatagatctgtcctggcagct

SEQ ID NO: 342530 - DNA, 30 bp, Artificial Sequence
  Synthetic oligonucleotide
aatttactcttggccgttcagggctcagct

SEQ ID NO: 342531 - DNA, 30 bp, Artificial Sequence
  Synthetic oligonucleotide
tgacccgggggtttgataatctagtcagct

SEQ ID NO: 342532 - DNA, 30 bp, Artificial Sequence
  Synthetic oligonucleotide
tcgtcaggaaggttgtcacttgattcagct

SEQ ID NO: 342533 - DNA, 30 bp, Artificial Sequence
  Synthetic oligonucleotide
gcccggagtttggcgaggtagtcaagagct

SEQ ID NO: 342534 - DNA, 30 bp, Artificial Sequence
  Synthetic oligonucleotide
taggcttcgaactcgagaggtcgcagagct

SEQ ID NO: 342535 - DNA, 30 bp, Artificial Sequence
  Synthetic oligonucleotide
cgtattacgagattcgcgacacagagagct

SEQ ID NO: 342536 - DNA, 30 bp, Artificial Sequence
  Synthetic oligonucleotide
ggtcagtcacggtttattaccgcgagagct

SEQ ID NO: 342537 - DNA, 30 bp, Artificial Sequence
  Synthetic oligonucleotide
ttcatggtcagtacaaagcagaatagagct

SEQ ID NO: 342538 - DNA, 30 bp, Artificial Sequence
  Synthetic oligonucleotide
ctgtgggactgcaacgtcaatcgtagagct

SEQ ID NO: 342539 - DNA, 30 bp, Artificial Sequence
  Synthetic oligonucleotide
gtgagcttcaagccactgggataccgagct

SEQ ID NO: 342540 - DNA, 30 bp, Artificial Sequence
  Synthetic oligonucleotide
ctgttcggtctgcaagtgcttctgcgagct

SEQ ID NO: 342541 - DNA, 30 bp, Artificial Sequence
  Synthetic oligonucleotide
gccttcaaactcacggtagctcatcgagct

SEQ ID NO: 342542 - DNA, 30 bp, Artificial Sequence
  Synthetic oligonucleotide
taatgtgtgattcatatcgtctatcgagct

SEQ ID NO: 342543 - DNA, 30 bp, Artificial Sequence
  Synthetic oligonucleotide
tcgattgatacttccttcaggtatcgagct

SEQ ID NO: 342544 - DNA, 30 bp, Artificial Sequence
  Synthetic oligonucleotide
taaaaacaacgccggtggcataaaggagct

SEQ ID NO: 342545 - DNA, 30 bp, Artificial Sequence
  Synthetic oligonucleotide
acggtgttctagagcttccagtaaggagct

SEQ ID NO: 342546 - DNA, 30 bp, Artificial Sequence
  Synthetic oligonucleotide
tatgctgacttggggcagtccagaggagct

SEQ ID NO: 342547 - DNA, 30 bp, Artificial Sequence
  Synthetic oligonucleotide
gggtacttctaaatgggtactagaggagct

SEQ ID NO: 342548 - DNA, 30 bp, Artificial Sequence
  Synthetic oligonucleotide
ttagggtcttcaggagtagaaaacggagct

SEQ ID NO: 342549 - DNA, 30 bp, Artificial Sequence
  Synthetic oligonucleotide
taggtaaacgcgcgtctggtttacggagct

SEQ ID NO: 342550 - DNA, 30 bp, Artificial Sequence
  Synthetic oligonucleotide
caagtcctggccgactgtaggatcggagct

SEQ ID NO: 342551 - DNA, 30 bp, Artificial Sequence
  Synthetic oligonucleotide
acaaactgtgaataatgacggaagggagct

SEQ ID NO: 342552 - DNA, 30 bp, Artificial Sequence
  Synthetic oligonucleotide
tatgcgaatgctgcgcgctcgctgggagct

SEQ ID NO: 342553 - DNA, 30 bp, Artificial Sequence
  Synthetic oligonucleotide
ttatcaagtagtatggaaaggcgtggagct

SEQ ID NO: 342554 - DNA, 31 bp, Artificial Sequence
  Synthetic oligonucleotide
ataggtcacccgtcatatgttcatctgagct

SEQ ID NO: 342555 - DNA, 27 bp, Artificial Sequence
  Synthetic oligonucleotide
gaatcgaaagtagaaagccgttgagct

SEQ ID NO: 342556 - DNA, 30 bp, Artificial Sequence
  Synthetic oligonucleotide
cgacagactgatctaggtttctaaatagct

SEQ ID NO: 342557 - DNA, 30 bp, Artificial Sequence
  Synthetic oligonucleotide
ccatctcgattggtggctaaattaatagct

SEQ ID NO: 342558 - DNA, 30 bp, Artificial Sequence
  Synthetic oligonucleotide
tattctacgcttgggtggtcaaacatagct

SEQ ID NO: 342559 - DNA, 29 bp, Artificial Sequence
  Synthetic oligonucleotide
caagttgagaaggcctcggacacatagct

SEQ ID NO: 342560 - DNA, 30 bp, Artificial Sequence
  Synthetic oligonucleotide
gaaatccaggagattgggaagaccatagct

SEQ ID NO: 342561 - DNA, 30 bp, Artificial Sequence
  Synthetic oligonucleotide
agatttagagcgtcgcgtctgatcatagct

SEQ ID NO: 342562 - DNA, 30 bp, Artificial Sequence
  Synthetic oligonucleotide
tcaaataggtccttggtgccaccgatagct

SEQ ID NO: 342563 - DNA, 30 bp, Artificial Sequence
  Synthetic oligonucleotide
ctggtgtcaccttggtactccgggatagct

SEQ ID NO: 342564 - DNA, 30 bp, Artificial Sequence
  Synthetic oligonucleotide
aaggccccaacattttaacgtgggatagct

SEQ ID NO: 342565 - DNA, 30 bp, Artificial Sequence
  Synthetic oligonucleotide
gacacctactttcgttctccaggtatagct

SEQ ID NO: 342566 - DNA, 30 bp, Artificial Sequence
  Synthetic oligonucleotide
ttatttaatgcaactagtagaaacctagct

SEQ ID NO: 342567 - DNA, 30 bp, Artificial Sequence
  Synthetic oligonucleotide
cctgcgggctccgttgtggattccctagct

SEQ ID NO: 342568 - DNA, 30 bp, Artificial Sequence
  Synthetic oligonucleotide
acgtgttgaatcagaggcagcttcctagct

SEQ ID NO: 342569 - DNA, 30 bp, Artificial Sequence
  Synthetic oligonucleotide
aaatgtgttacgagtggaggtcagctagct

SEQ ID NO: 342570 - DNA, 30 bp, Artificial Sequence
  Synthetic oligonucleotide
aacctggatggtctagccgtacggctagct

SEQ ID NO: 342571 - DNA, 30 bp, Artificial Sequence
  Synthetic oligonucleotide
gttactggtttaccgcactaattgctagct

SEQ ID NO: 342572 - DNA, 29 bp, Artificial Sequence
  Synthetic oligonucleotide
gggtaaatggctacatactttatctagct

SEQ ID NO: 342573 - DNA, 30 bp, Artificial Sequence
  Synthetic oligonucleotide
agccaaatatatgacaggaacgctctagct

SEQ ID NO: 342574 - DNA, 30 bp, Artificial Sequence
  Synthetic oligonucleotide
gtccaacgcgtggttcaaataagtctagct

SEQ ID NO: 342575 - DNA, 30 bp, Artificial Sequence
  Synthetic oligonucleotide
cttgaacatattcttcttgttcgtctagct

SEQ ID NO: 342576 - DNA, 30 bp, Artificial Sequence
  Synthetic oligonucleotide
gggaatgcagtcctaattggcgcagtagct

SEQ ID NO: 342577 - DNA, 30 bp, Artificial Sequence
  Synthetic oligonucleotide
cagacatcgggtagtaatatattagtagct

SEQ ID NO: 342578 - DNA, 30 bp, Artificial Sequence
  Synthetic oligonucleotide
gcttatttagggagacttcaatgcgtagct

SEQ ID NO: 342579 - DNA, 30 bp, Artificial Sequence
  Synthetic oligonucleotide
atctaagtctatgagccgacggtcgtagct

SEQ ID NO: 342580 - DNA, 30 bp, Artificial Sequence
  Synthetic oligonucleotide
tagcagagatcgcatgtaatttttgtagct

SEQ ID NO: 342581 - DNA, 30 bp, Artificial Sequence
  Synthetic oligonucleotide
acggcttcggcgcttcggcaagaattagct

SEQ ID NO: 342582 - DNA, 30 bp, Artificial Sequence
  Synthetic oligonucleotide
tacattcgtcagagcatggacacattagct

SEQ ID NO: 342583 - DNA, 30 bp, Artificial Sequence
  Synthetic oligonucleotide
gcccaggatactccacgtaggagattagct

SEQ ID NO: 342584 - DNA, 30 bp, Artificial Sequence
  Synthetic oligonucleotide
atgtaacttcttagcgtactgcgattagct

SEQ ID NO: 342585 - DNA, 29 bp, Artificial Sequence
  Synthetic oligonucleotide
gggcataaacacatccacttgtattagct

SEQ ID NO: 342586 - DNA, 30 bp, Artificial Sequence
  Synthetic oligonucleotide
cttcacgaaggatagggaaattccttagct

SEQ ID NO: 342587 - DNA, 30 bp, Artificial Sequence
  Synthetic oligonucleotide
gggggtagcgagcgctcccaggtcttagct

SEQ ID NO: 342588 - DNA, 30 bp, Artificial Sequence
  Synthetic oligonucleotide
cctttattccccgattttactgctttagct

SEQ ID NO: 342589 - DNA, 30 bp, Artificial Sequence
  Synthetic oligonucleotide
tggatccgaggtcgaggcaggaccaacgct

SEQ ID NO: 342590 - DNA, 31 bp, Artificial Sequence
  Synthetic oligonucleotide
tgtttaagtgatcctacacggttggaacgct

SEQ ID NO: 342591 - DNA, 30 bp, Artificial Sequence
  Synthetic oligonucleotide
ttgtggaaaaagaggctagtcctgaacgct

SEQ ID NO: 342592 - DNA, 30 bp, Artificial Sequence
  Synthetic oligonucleotide
atgtgaaagtattatgggaacggtaacgct

SEQ ID NO: 342593 - DNA, 30 bp, Artificial Sequence
  Synthetic oligonucleotide
tgagcggtgggccaagcatgaccacacgct

SEQ ID NO: 342594 - DNA, 30 bp, Artificial Sequence
  Synthetic oligonucleotide
agtaatatttcccccagcatgtgccacgct

SEQ ID NO: 342595 - DNA, 30 bp, Artificial Sequence
  Synthetic oligonucleotide
ggcgagcgtgcctagcgacagatccacgct

SEQ ID NO: 342596 - DNA, 30 bp, Artificial Sequence
  Synthetic oligonucleotide
ggcagtcccgatcatatcagtaaagacgct

SEQ ID NO: 342597 - DNA, 30 bp, Artificial Sequence
  Synthetic oligonucleotide
aggcgtatttttcgtccgcctcaagacgct

SEQ ID NO: 342598 - DNA, 30 bp, Artificial Sequence
  Synthetic oligonucleotide
caacagtttttcacaactgtataagacgct

SEQ ID NO: 342599 - DNA, 30 bp, Artificial Sequence
  Synthetic oligonucleotide
gaaacggtaaaggtagtacgatccgacgct

SEQ ID NO: 342600 - DNA, 30 bp, Artificial Sequence
  Synthetic oligonucleotide
aagacctcggccacacaagaagctgacgct

SEQ ID NO: 342601 - DNA, 30 bp, Artificial Sequence
  Synthetic oligonucleotide
gtgctcatctgcagatgatagaaatacgct

SEQ ID NO: 342602 - DNA, 30 bp, Artificial Sequence
  Synthetic oligonucleotide
cgtccgtactgtaaccaggctcaatacgct

SEQ ID NO: 342603 - DNA, 30 bp, Artificial Sequence
  Synthetic oligonucleotide
gcaaggtcccgaagggattatgaatacgct

SEQ ID NO: 342604 - DNA, 30 bp, Artificial Sequence
  Synthetic oligonucleotide
atacatggatccgcccacggcagatacgct

SEQ ID NO: 342605 - DNA, 30 bp, Artificial Sequence
  Synthetic oligonucleotide
actcggaaatgttcgtcttgttgctacgct

SEQ ID NO: 342606 - DNA, 30 bp, Artificial Sequence
  Synthetic oligonucleotide
cgtaatatgtgaatcggaatatagtacgct

SEQ ID NO: 342607 - DNA, 30 bp, Artificial Sequence
  Synthetic oligonucleotide
acagacctacccaggtataggtagtacgct

SEQ ID NO: 342608 - DNA, 30 bp, Artificial Sequence
  Synthetic oligonucleotide
aactccttgtagtcggcagtccataccgct

SEQ ID NO: 342609 - DNA, 30 bp, Artificial Sequence
  Synthetic oligonucleotide
ggggtccgtgctaatgttaagcgtaccgct

SEQ ID NO: 342610 - DNA, 30 bp, Artificial Sequence
  Synthetic oligonucleotide
cggaatcgcgtaactcgctcagagcccgct

SEQ ID NO: 342611 - DNA, 30 bp, Artificial Sequence
  Synthetic oligonucleotide
tggttcataatggatgattgccatcccgct

SEQ ID NO: 342612 - DNA, 30 bp, Artificial Sequence
  Synthetic oligonucleotide
actcaggcgccccccggaacgattcccgct

SEQ ID NO: 342613 - DNA, 30 bp, Artificial Sequence
  Synthetic oligonucleotide
taggtcaagggtacttgggactgagccgct

SEQ ID NO: 342614 - DNA, 30 bp, Artificial Sequence
  Synthetic oligonucleotide
gtgtaggattgccaaacgcgctgagccgct

SEQ ID NO: 342615 - DNA, 30 bp, Artificial Sequence
  Synthetic oligonucleotide
gtgattttcagagacttaggttgcgccgct

SEQ ID NO: 342616 - DNA, 30 bp, Artificial Sequence
  Synthetic oligonucleotide
acaagtcgacagaaatttaagggggccgct

SEQ ID NO: 342617 - DNA, 30 bp, Artificial Sequence
  Synthetic oligonucleotide
tacgcaattacagcttataccatggccgct

SEQ ID NO: 342618 - DNA, 30 bp, Artificial Sequence
  Synthetic oligonucleotide
cgagttaacgaggtgcaactagctgccgct

SEQ ID NO: 342619 - DNA, 30 bp, Artificial Sequence
  Synthetic oligonucleotide
tcagttttggatacttgggctttgtccgct

SEQ ID NO: 342620 - DNA, 30 bp, Artificial Sequence
  Synthetic oligonucleotide
tttgctctatagagttcgaggctaagcgct

SEQ ID NO: 342621 - DNA, 30 bp, Artificial Sequence
  Synthetic oligonucleotide
actttcgtcatttgatgtaataccagcgct

SEQ ID NO: 342622 - DNA, 30 bp, Artificial Sequence
  Synthetic oligonucleotide
tcgcttctaatcctacaagccatcagcgct

SEQ ID NO: 342623 - DNA, 30 bp, Artificial Sequence
  Synthetic oligonucleotide
tggagtgattcatagaagtctccgagcgct

SEQ ID NO: 342624 - DNA, 30 bp, Artificial Sequence
  Synthetic oligonucleotide
aagtggcataatatgtactaagtgagcgct

SEQ ID NO: 342625 - DNA, 30 bp, Artificial Sequence
  Synthetic oligonucleotide
actgcgtcggatcgtatggtgcctagcgct

SEQ ID NO: 342626 - DNA, 30 bp, Artificial Sequence
  Synthetic oligonucleotide
cccgcgggagtaaagtagcgaaaacgcgct

SEQ ID NO: 342627 - DNA, 30 bp, Artificial Sequence
  Synthetic oligonucleotide
tccacagtagatgcgttcttattacgcgct

SEQ ID NO: 342628 - DNA, 30 bp, Artificial Sequence
  Synthetic oligonucleotide
tttgaagcaaaagcggaatggttccgcgct

SEQ ID NO: 342629 - DNA, 30 bp, Artificial Sequence
  Synthetic oligonucleotide
agtatgaaagcgatctgcaggcttcgcgct

SEQ ID NO: 342630 - DNA, 30 bp, Artificial Sequence
  Synthetic oligonucleotide
agcgcggtaaagcgatttcaatacggcgct

SEQ ID NO: 342631 - DNA, 30 bp, Artificial Sequence
  Synthetic oligonucleotide
gtaagccttgatcacaagccagccggcgct

SEQ ID NO: 342632 - DNA, 30 bp, Artificial Sequence
  Synthetic oligonucleotide
acgaggtggtggagggccatttcgggcgct

SEQ ID NO: 342633 - DNA, 30 bp, Artificial Sequence
  Synthetic oligonucleotide
aatagggtacttatacgcgtcgatggcgct

SEQ ID NO: 342634 - DNA, 30 bp, Artificial Sequence
  Synthetic oligonucleotide
catggtttggtccgggggaggattggcgct

SEQ ID NO: 342635 - DNA, 30 bp, Artificial Sequence
  Synthetic oligonucleotide
ggggcactgtccgtataccaagagtgcgct

SEQ ID NO: 342636 - DNA, 30 bp, Artificial Sequence
  Synthetic oligonucleotide
ctatatgtcgatagcctataatagtgcgct

SEQ ID NO: 342637 - DNA, 30 bp, Artificial Sequence
  Synthetic oligonucleotide
gccaacactttagtctctgcgcgaatcgct

SEQ ID NO: 342638 - DNA, 30 bp, Artificial Sequence
  Synthetic oligonucleotide
ggaacgcacccgcgtatgcaggagatcgct

SEQ ID NO: 342639 - DNA, 30 bp, Artificial Sequence
  Synthetic oligonucleotide
cagcgacatatacgtcagtgcaggatcgct

SEQ ID NO: 342640 - DNA, 30 bp, Artificial Sequence
  Synthetic oligonucleotide
tcgcttagcaaactatcggctcggatcgct

SEQ ID NO: 342641 - DNA, 30 bp, Artificial Sequence
  Synthetic oligonucleotide
cagatgtatcgctaatgcccaggtatcgct

SEQ ID NO: 342642 - DNA, 30 bp, Artificial Sequence
  Synthetic oligonucleotide
agcggcaccgattgagtcgcacccctcgct

SEQ ID NO: 342643 - DNA, 30 bp, Artificial Sequence
  Synthetic oligonucleotide
accgtcgaatggatgtgctagtcagtcgct

SEQ ID NO: 342644 - DNA, 30 bp, Artificial Sequence
  Synthetic oligonucleotide
aagactcatcgagtgtcttaaggagtcgct

SEQ ID NO: 342645 - DNA, 30 bp, Artificial Sequence
  Synthetic oligonucleotide
gcatcaacgtcacctcaataattagtcgct

SEQ ID NO: 342646 - DNA, 30 bp, Artificial Sequence
  Synthetic oligonucleotide
atttggcgaaggcaccgcccgtccgtcgct

SEQ ID NO: 342647 - DNA, 30 bp, Artificial Sequence
  Synthetic oligonucleotide
caggccgatggtcagcttctcatcgtcgct

SEQ ID NO: 342648 - DNA, 30 bp, Artificial Sequence
  Synthetic oligonucleotide
ttataacatagttggtgaaagagggtcgct

SEQ ID NO: 342649 - DNA, 30 bp, Artificial Sequence
  Synthetic oligonucleotide
agggttaacattaaattactacgattcgct

SEQ ID NO: 342650 - DNA, 30 bp, Artificial Sequence
  Synthetic oligonucleotide
ctagcttggagaaaactcgcaaagttcgct

SEQ ID NO: 342651 - DNA, 30 bp, Artificial Sequence
  Synthetic oligonucleotide
atgcctgctcaatagtgggcgtcgttcgct

SEQ ID NO: 342652 - DNA, 30 bp, Artificial Sequence
  Synthetic oligonucleotide
cttcaccacccctcaactaatgaaaaggct

SEQ ID NO: 342653 - DNA, 30 bp, Artificial Sequence
  Synthetic oligonucleotide
gataataaacggcttcctcgagtaaaggct

SEQ ID NO: 342654 - DNA, 30 bp, Artificial Sequence
  Synthetic oligonucleotide
ccttaggctcacccactttcgttaaaggct

SEQ ID NO: 342655 - DNA, 30 bp, Artificial Sequence
  Synthetic oligonucleotide
ctaaccattggatgttaagactacaaggct

SEQ ID NO: 342656 - DNA, 30 bp, Artificial Sequence
  Synthetic oligonucleotide
cactcggccgtgtaatggctcgagaaggct

SEQ ID NO: 342657 - DNA, 30 bp, Artificial Sequence
  Synthetic oligonucleotide
agaaattgtacggcaggtcttatgcaggct

SEQ ID NO: 342658 - DNA, 30 bp, Artificial Sequence
  Synthetic oligonucleotide
gtgtggggcagcccaacaactcatcaggct

SEQ ID NO: 342659 - DNA, 30 bp, Artificial Sequence
  Synthetic oligonucleotide
cggcgcagagcgaacactgattatcaggct

SEQ ID NO: 342660 - DNA, 30 bp, Artificial Sequence
  Synthetic oligonucleotide
ggtcatatatacaaaatgccgactcaggct

SEQ ID NO: 342661 - DNA, 30 bp, Artificial Sequence
  Synthetic oligonucleotide
caaaagcaggtaaggatgtggactcaggct

SEQ ID NO: 342662 - DNA, 30 bp, Artificial Sequence
  Synthetic oligonucleotide
tgatcatatttccagtacaagcgagaggct

SEQ ID NO: 342663 - DNA, 30 bp, Artificial Sequence
  Synthetic oligonucleotide
cctaggctgtagatagtccgatcggaggct

SEQ ID NO: 342664 - DNA, 30 bp, Artificial Sequence
  Synthetic oligonucleotide
tcctttaggatacgcgcataaagggaggct

SEQ ID NO: 342665 - DNA, 30 bp, Artificial Sequence
  Synthetic oligonucleotide
ttcctaattcaagaagttttggatgaggct

SEQ ID NO: 342666 - DNA, 30 bp, Artificial Sequence
  Synthetic oligonucleotide
tacaattaaggtgcggcccgtcctgaggct

SEQ ID NO: 342667 - DNA, 30 bp, Artificial Sequence
  Synthetic oligonucleotide
ccatagatagggacaatgccttctgaggct

SEQ ID NO: 342668 - DNA, 30 bp, Artificial Sequence
  Synthetic oligonucleotide
gcggatccattgtaacgcctttgtgaggct

SEQ ID NO: 342669 - DNA, 30 bp, Artificial Sequence
  Synthetic oligonucleotide
tattaacacaatgtgctagctaaataggct

SEQ ID NO: 342670 - DNA, 30 bp, Artificial Sequence
  Synthetic oligonucleotide
tcagcacctacttttcttggagtataggct

SEQ ID NO: 342671 - DNA, 30 bp, Artificial Sequence
  Synthetic oligonucleotide
ttcaataagcgctcaaaatgtaggtaggct

SEQ ID NO: 342672 - DNA, 30 bp, Artificial Sequence
  Synthetic oligonucleotide
cacagttccgcggttcatcgttattaggct

SEQ ID NO: 342673 - DNA, 30 bp, Artificial Sequence
  Synthetic oligonucleotide
gacacccgtgaggaatgttaggcttaggct

SEQ ID NO: 342674 - DNA, 30 bp, Artificial Sequence
  Synthetic oligonucleotide
gctctcgtgcgacatcatgaacgaacggct

SEQ ID NO: 342675 - DNA, 30 bp, Artificial Sequence
  Synthetic oligonucleotide
gttgtgattggctttcgattaaccacggct

SEQ ID NO: 342676 - DNA, 30 bp, Artificial Sequence
  Synthetic oligonucleotide
tcgtgctgtctcagaaattcccgcacggct

SEQ ID NO: 342677 - DNA, 30 bp, Artificial Sequence
  Synthetic oligonucleotide
aagcaaatacgacatcaagatataccggct

SEQ ID NO: 342678 - DNA, 30 bp, Artificial Sequence
  Synthetic oligonucleotide
agtcccggaaaccttagaaaccacccggct

SEQ ID NO: 342679 - DNA, 30 bp, Artificial Sequence
  Synthetic oligonucleotide
ggcatccctggactgggaggcaagccggct

SEQ ID NO: 342680 - DNA, 30 bp, Artificial Sequence
  Synthetic oligonucleotide
gtagtgaattaagatctgcgttcgccggct

SEQ ID NO: 342681 - DNA, 30 bp, Artificial Sequence
  Synthetic oligonucleotide
aatgattgggtgcgtcttggagatccggct

SEQ ID NO: 342682 - DNA, 30 bp, Artificial Sequence
  Synthetic oligonucleotide
tgctcaatacatgatccataaggtccggct

SEQ ID NO: 342683 - DNA, 30 bp, Artificial Sequence
  Synthetic oligonucleotide
gttagacctgtggcctttcggtgtccggct

SEQ ID NO: 342684 - DNA, 30 bp, Artificial Sequence
  Synthetic oligonucleotide
ggttttataggaaaggatcagtcagcggct

SEQ ID NO: 342685 - DNA, 30 bp, Artificial Sequence
  Synthetic oligonucleotide
ctccaggtagtttcaacgctgggagcggct

SEQ ID NO: 342686 - DNA, 30 bp, Artificial Sequence
  Synthetic oligonucleotide
cacaaacccataaagtgtggcagcgcggct

SEQ ID NO: 342687 - DNA, 30 bp, Artificial Sequence
  Synthetic oligonucleotide
ggccaagcaaacagtcttatggttgcggct

SEQ ID NO: 342688 - DNA, 30 bp, Artificial Sequence
  Synthetic oligonucleotide
ttttaagaacgagagggtgtgcaatcggct

SEQ ID NO: 342689 - DNA, 30 bp, Artificial Sequence
  Synthetic oligonucleotide
ggttggtatagcactggcgggtcctcggct

SEQ ID NO: 342690 - DNA, 30 bp, Artificial Sequence
  Synthetic oligonucleotide
gtcttgttcgaatagcgttagatctcggct

SEQ ID NO: 342691 - DNA, 30 bp, Artificial Sequence
  Synthetic oligonucleotide
tggtgaataaactgttcggaggcgtcggct

SEQ ID NO: 342692 - DNA, 30 bp, Artificial Sequence
  Synthetic oligonucleotide
aattaggcttactaggttgcttggtcggct

SEQ ID NO: 342693 - DNA, 30 bp, Artificial Sequence
  Synthetic oligonucleotide
gacgaacatcggagaccgtccttgtcggct

SEQ ID NO: 342694 - DNA, 30 bp, Artificial Sequence
  Synthetic oligonucleotide
gttgcattgcaggcccgcactagttcggct

SEQ ID NO: 342695 - DNA, 30 bp, Artificial Sequence
  Synthetic oligonucleotide
ccttggacagcaacctcacgattaagggct

SEQ ID NO: 342696 - DNA, 30 bp, Artificial Sequence
  Synthetic oligonucleotide
tcttcagccggtgatttatatttcagggct

SEQ ID NO: 342697 - DNA, 30 bp, Artificial Sequence
  Synthetic oligonucleotide
cgtgggacaagtatttattctgcgagggct

SEQ ID NO: 342698 - DNA, 30 bp, Artificial Sequence
  Synthetic oligonucleotide
ggagtttttgtaagttgtcagagtagggct

SEQ ID NO: 342699 - DNA, 30 bp, Artificial Sequence
  Synthetic oligonucleotide
taatgtggagagcactccgttgaacgggct

SEQ ID NO: 342700 - DNA, 30 bp, Artificial Sequence
  Synthetic oligonucleotide
cggacgtagacaacatacgtcgcccgggct

SEQ ID NO: 342701 - DNA, 30 bp, Artificial Sequence
  Synthetic oligonucleotide
ttcgaacatgatctgagttgaaagcgggct

SEQ ID NO: 342702 - DNA, 30 bp, Artificial Sequence
  Synthetic oligonucleotide
ccaaaacttgattgttattgtacgcgggct

SEQ ID NO: 342703 - DNA, 30 bp, Artificial Sequence
  Synthetic oligonucleotide
tgacttattatggcaaagaacctgcgggct

SEQ ID NO: 342704 - DNA, 30 bp, Artificial Sequence
  Synthetic oligonucleotide
gaacgcacgcttcggcagaacttgcgggct

SEQ ID NO: 342705 - DNA, 30 bp, Artificial Sequence
  Synthetic oligonucleotide
gaaaccgcattaccgcctagttctcgggct

SEQ ID NO: 342706 - DNA, 30 bp, Artificial Sequence
  Synthetic oligonucleotide
gcgtgttatttcacaatcgtgctaggggct

SEQ ID NO: 342707 - DNA, 30 bp, Artificial Sequence
  Synthetic oligonucleotide
tcgagcacgagccaatcaggccacggggct

SEQ ID NO: 342708 - DNA, 30 bp, Artificial Sequence
  Synthetic oligonucleotide
ctgtacctataatgccgcaaacagggggct

SEQ ID NO: 342709 - DNA, 30 bp, Artificial Sequence
  Synthetic oligonucleotide
ggcgtggccgtcacccccatggctggggct

SEQ ID NO: 342710 - DNA, 30 bp, Artificial Sequence
  Synthetic oligonucleotide
gttagggagcgtggcggatttggtggggct

SEQ ID NO: 342711 - DNA, 30 bp, Artificial Sequence
  Synthetic oligonucleotide
gggtctacactggagttgttctaatgggct

SEQ ID NO: 342712 - DNA, 30 bp, Artificial Sequence
  Synthetic oligonucleotide
cgaagtaacgaccaggtaaggtaatgggct

SEQ ID NO: 342713 - DNA, 30 bp, Artificial Sequence
  Synthetic oligonucleotide
ttaggaagctctagcatggggcgatgggct

SEQ ID NO: 342714 - DNA, 30 bp, Artificial Sequence
  Synthetic oligonucleotide
attcacgccaccgtagtcacagtctgggct

SEQ ID NO: 342715 - DNA, 30 bp, Artificial Sequence
  Synthetic oligonucleotide
agacggtgtttgagggtcacaagaatggct

SEQ ID NO: 342716 - DNA, 30 bp, Artificial Sequence
  Synthetic oligonucleotide
agcaatttaacacgaaagtaaaccatggct

SEQ ID NO: 342717 - DNA, 30 bp, Artificial Sequence
  Synthetic oligonucleotide
gccttggacattgaataaacgcgcatggct

SEQ ID NO: 342718 - DNA, 30 bp, Artificial Sequence
  Synthetic oligonucleotide
tgagccaagccgagctcaagcgtcatggct

SEQ ID NO: 342719 - DNA, 30 bp, Artificial Sequence
  Synthetic oligonucleotide
aaacgtagctgttgcaattctcagatggct

SEQ ID NO: 342720 - DNA, 30 bp, Artificial Sequence
  Synthetic oligonucleotide
agacattctaaccacataaccgggatggct

SEQ ID NO: 342721 - DNA, 30 bp, Artificial Sequence
  Synthetic oligonucleotide
aagtatgaaagttgtgaattatctatggct

SEQ ID NO: 342722 - DNA, 30 bp, Artificial Sequence
  Synthetic oligonucleotide
gcgatgcaacaacgtggttctggtatggct

SEQ ID NO: 342723 - DNA, 30 bp, Artificial Sequence
  Synthetic oligonucleotide
ggaacgtatggtgtaaatttcacactggct

SEQ ID NO: 342724 - DNA, 30 bp, Artificial Sequence
  Synthetic oligonucleotide
aggttttcggcttagccttaaagactggct

SEQ ID NO: 342725 - DNA, 30 bp, Artificial Sequence
  Synthetic oligonucleotide
tagacatgcggctgggcatcggtcctggct

SEQ ID NO: 342726 - DNA, 30 bp, Artificial Sequence
  Synthetic oligonucleotide
atcgttaataaaacctttgtagagctggct

SEQ ID NO: 342727 - DNA, 30 bp, Artificial Sequence
  Synthetic oligonucleotide
attccgcaatggtgtgcgaaaaatctggct

SEQ ID NO: 342728 - DNA, 30 bp, Artificial Sequence
  Synthetic oligonucleotide
ctcgatcgtacctattgcagaattctggct

SEQ ID NO: 342729 - DNA, 30 bp, Artificial Sequence
  Synthetic oligonucleotide
gcttcaggatgccacccctgtattctggct

SEQ ID NO: 342730 - DNA, 30 bp, Artificial Sequence
  Synthetic oligonucleotide
gtggcaaaaaaagcgcacgcaatagtggct

SEQ ID NO: 342731 - DNA, 30 bp, Artificial Sequence
  Synthetic oligonucleotide
taagacaaatgtcggtgactatgcgtggct

SEQ ID NO: 342732 - DNA, 30 bp, Artificial Sequence
  Synthetic oligonucleotide
gtcctaggggaagttccgagacaggtggct

SEQ ID NO: 342733 - DNA, 30 bp, Artificial Sequence
  Synthetic oligonucleotide
tcgggtgcgtggtagaaaaagccggtggct

SEQ ID NO: 342734 - DNA, 30 bp, Artificial Sequence
  Synthetic oligonucleotide
gggaataggcacatctggcatattgtggct

SEQ ID NO: 342735 - DNA, 30 bp, Artificial Sequence
  Synthetic oligonucleotide
gattggcaagtaaggggataacgattggct

SEQ ID NO: 342736 - DNA, 30 bp, Artificial Sequence
  Synthetic oligonucleotide
actcgtgtacggctagccataaacttggct

SEQ ID NO: 342737 - DNA, 30 bp, Artificial Sequence
  Synthetic oligonucleotide
tggtcggtaggggggcatgtgatgttggct

SEQ ID NO: 342738 - DNA, 30 bp, Artificial Sequence
  Synthetic oligonucleotide
caagtgttaatataatgagggtaaaatgct

SEQ ID NO: 342739 - DNA, 30 bp, Artificial Sequence
  Synthetic oligonucleotide
ccggacttgcactggacgtaggcaaatgct

SEQ ID NO: 342740 - DNA, 30 bp, Artificial Sequence
  Synthetic oligonucleotide
gtgcgcttcgaagggctacacagcaatgct

SEQ ID NO: 342741 - DNA, 30 bp, Artificial Sequence
  Synthetic oligonucleotide
tgggagtgatgaggccaaggtttcaatgct

SEQ ID NO: 342742 - DNA, 30 bp, Artificial Sequence
  Synthetic oligonucleotide
gcaggctaccgtatcagccctaagaatgct

SEQ ID NO: 342743 - DNA, 30 bp, Artificial Sequence
  Synthetic oligonucleotide
tccgaagtcgcagattattccaaacatgct

SEQ ID NO: 342744 - DNA, 30 bp, Artificial Sequence
  Synthetic oligonucleotide
cgcggaagcaacatatgcggtacacatgct

SEQ ID NO: 342745 - DNA, 30 bp, Artificial Sequence
  Synthetic oligonucleotide
ttaagtcgaacagctagggtctcacatgct

SEQ ID NO: 342746 - DNA, 30 bp, Artificial Sequence
  Synthetic oligonucleotide
caaagatgggttaagatcctggaccatgct

SEQ ID NO: 342747 - DNA, 30 bp, Artificial Sequence
  Synthetic oligonucleotide
attccattccgcttaactcagtaccatgct

SEQ ID NO: 342748 - DNA, 30 bp, Artificial Sequence
  Synthetic oligonucleotide
ccaggctaacggccgcctaagaagcatgct

SEQ ID NO: 342749 - DNA, 30 bp, Artificial Sequence
  Synthetic oligonucleotide
atttagaactcagactcggttcagcatgct

SEQ ID NO: 342750 - DNA, 30 bp, Artificial Sequence
  Synthetic oligonucleotide
cacaggaaagatccgagaattgcgcatgct

SEQ ID NO: 342751 - DNA, 30 bp, Artificial Sequence
  Synthetic oligonucleotide
gacacccgcgagctgtacaatgttcatgct

SEQ ID NO: 342752 - DNA, 30 bp, Artificial Sequence
  Synthetic oligonucleotide
ataagattacaagtaggacagcaagatgct

SEQ ID NO: 342753 - DNA, 30 bp, Artificial Sequence
  Synthetic oligonucleotide
cctgcctatgctcatacactataagatgct

SEQ ID NO: 342754 - DNA, 30 bp, Artificial Sequence
  Synthetic oligonucleotide
agtgtttctcatcacagtgcgagagatgct

SEQ ID NO: 342755 - DNA, 30 bp, Artificial Sequence
  Synthetic oligonucleotide
tgtgggatgcgtgagattaaattcgatgct

SEQ ID NO: 342756 - DNA, 30 bp, Artificial Sequence
  Synthetic oligonucleotide
ccacgcgcctcggttggttaccgtgatgct

SEQ ID NO: 342757 - DNA, 30 bp, Artificial Sequence
  Synthetic oligonucleotide
gtcccgatgcgcagagatttcaaatatgct

SEQ ID NO: 342758 - DNA, 30 bp, Artificial Sequence
  Synthetic oligonucleotide
acgctaatggtagggcacggtaaatatgct

SEQ ID NO: 342759 - DNA, 30 bp, Artificial Sequence
  Synthetic oligonucleotide
atatattagctgccgtctcgataatatgct

SEQ ID NO: 342760 - DNA, 30 bp, Artificial Sequence
  Synthetic oligonucleotide
tcttgtagcgagcttgtgtactgatatgct

SEQ ID NO: 342761 - DNA, 30 bp, Artificial Sequence
  Synthetic oligonucleotide
gccatacaatctgaatttcaattatatgct

SEQ ID NO: 342762 - DNA, 30 bp, Artificial Sequence
  Synthetic oligonucleotide
cgacatgggcgttgacgcgcgtcctatgct

SEQ ID NO: 342763 - DNA, 30 bp, Artificial Sequence
  Synthetic oligonucleotide
ataataatgtatgtcaatcaccgctatgct

SEQ ID NO: 342764 - DNA, 30 bp, Artificial Sequence
  Synthetic oligonucleotide
tgcacgggagaccaagctaatctctatgct

SEQ ID NO: 342765 - DNA, 30 bp, Artificial Sequence
  Synthetic oligonucleotide
actggtccggaactacctcgcgagtatgct

SEQ ID NO: 342766 - DNA, 30 bp, Artificial Sequence
  Synthetic oligonucleotide
taagtgttcatagtggcaactcggtatgct

SEQ ID NO: 342767 - DNA, 30 bp, Artificial Sequence
  Synthetic oligonucleotide
acaaccaatgccgaaggaggctggtatgct

SEQ ID NO: 342768 - DNA, 30 bp, Artificial Sequence
  Synthetic oligonucleotide
ctggactgctctgcgttcgatctaactgct

SEQ ID NO: 342769 - DNA, 30 bp, Artificial Sequence
  Synthetic oligonucleotide
tgcgcccttctgtctcgactagggactgct

SEQ ID NO: 342770 - DNA, 30 bp, Artificial Sequence
  Synthetic oligonucleotide
gattatagtactgaggtacgaggtactgct

SEQ ID NO: 342771 - DNA, 30 bp, Artificial Sequence
  Synthetic oligonucleotide
gttaagtcgggaggcaggcaggaccctgct

SEQ ID NO: 342772 - DNA, 30 bp, Artificial Sequence
  Synthetic oligonucleotide
ggtggttttcaacttagcaagggccctgct

SEQ ID NO: 342773 - DNA, 30 bp, Artificial Sequence
  Synthetic oligonucleotide
tgaatgcgggctacctaatctggccctgct

SEQ ID NO: 342774 - DNA, 30 bp, Artificial Sequence
  Synthetic oligonucleotide
gaatcagccgcgggggttgtgaagcctgct

SEQ ID NO: 342775 - DNA, 30 bp, Artificial Sequence
  Synthetic oligonucleotide
tattgagaataacgccgtctcgggcctgct

SEQ ID NO: 342776 - DNA, 30 bp, Artificial Sequence
  Synthetic oligonucleotide
atttgggaggcccgaagttacgctcctgct

SEQ ID NO: 342777 - DNA, 30 bp, Artificial Sequence
  Synthetic oligonucleotide
tatcaccgggaaatatgtattcgtcctgct

SEQ ID NO: 342778 - DNA, 31 bp, Artificial Sequence
  Synthetic oligonucleotide
actaggatcgccacggttctgagtagctgct

SEQ ID NO: 342779 - DNA, 28 bp, Artificial Sequence
  Synthetic oligonucleotide
ccacgccattcgcagttcagcatctgct

SEQ ID NO: 342780 - DNA, 30 bp, Artificial Sequence
  Synthetic oligonucleotide
cttggtccggttattgagctaggatctgct

SEQ ID NO: 342781 - DNA, 30 bp, Artificial Sequence
  Synthetic oligonucleotide
acttttggtgattccgacgatgtatctgct

SEQ ID NO: 342782 - DNA, 30 bp, Artificial Sequence
  Synthetic oligonucleotide
tagttcgttaatcagtcccaacagtctgct

SEQ ID NO: 342783 - DNA, 30 bp, Artificial Sequence
  Synthetic oligonucleotide
tcatatctcgatgaacaagatgagtctgct

SEQ ID NO: 342784 - DNA, 30 bp, Artificial Sequence
  Synthetic oligonucleotide
agcaactcggatagttcgttctattctgct

SEQ ID NO: 342785 - DNA, 30 bp, Artificial Sequence
  Synthetic oligonucleotide
ctgataatgggtggtaaccttaaaagtgct

SEQ ID NO: 342786 - DNA, 30 bp, Artificial Sequence
  Synthetic oligonucleotide
ggggttcaatgtggtcaaatcacaagtgct

SEQ ID NO: 342787 - DNA, 30 bp, Artificial Sequence
  Synthetic oligonucleotide
gggttgcatacgcatcctcatacaagtgct

SEQ ID NO: 342788 - DNA, 30 bp, Artificial Sequence
  Synthetic oligonucleotide
cgtggtgttgtcacaagcttaggcagtgct

SEQ ID NO: 342789 - DNA, 30 bp, Artificial Sequence
  Synthetic oligonucleotide
tgggacaattttccagcacttctcagtgct

SEQ ID NO: 342790 - DNA, 30 bp, Artificial Sequence
  Synthetic oligonucleotide
aggtagactggttgagaattctatagtgct

SEQ ID NO: 342791 - DNA, 30 bp, Artificial Sequence
  Synthetic oligonucleotide
ggaacggctcactttaatgtcgttagtgct

SEQ ID NO: 342792 - DNA, 30 bp, Artificial Sequence
  Synthetic oligonucleotide
gtgggcaggtgtggttcatggctacgtgct

SEQ ID NO: 342793 - DNA, 30 bp, Artificial Sequence
  Synthetic oligonucleotide
ctcctatgaagggcctacctggcccgtgct

SEQ ID NO: 342794 - DNA, 30 bp, Artificial Sequence
  Synthetic oligonucleotide
ccagggtgtcagtccataaccgtccgtgct

SEQ ID NO: 342795 - DNA, 30 bp, Artificial Sequence
  Synthetic oligonucleotide
gaatcaataaaacttgttctctcgcgtgct

SEQ ID NO: 342796 - DNA, 30 bp, Artificial Sequence
  Synthetic oligonucleotide
gattgttaggctggcatgtggctgcgtgct

SEQ ID NO: 342797 - DNA, 30 bp, Artificial Sequence
  Synthetic oligonucleotide
tatgtgctgtaatctctagaaaatcgtgct

SEQ ID NO: 342798 - DNA, 30 bp, Artificial Sequence
  Synthetic oligonucleotide
ggatccacacccatgctgagtattcgtgct

SEQ ID NO: 342799 - DNA, 30 bp, Artificial Sequence
  Synthetic oligonucleotide
catctcgttgagtattatgaatcaggtgct

SEQ ID NO: 342800 - DNA, 30 bp, Artificial Sequence
  Synthetic oligonucleotide
ctcgagactaaacaaggagggtgaggtgct

SEQ ID NO: 342801 - DNA, 30 bp, Artificial Sequence
  Synthetic oligonucleotide
ttgggtatagttaagtctcccctcggtgct

SEQ ID NO: 342802 - DNA, 30 bp, Artificial Sequence
  Synthetic oligonucleotide
ctccaactagtagtctgttgagagggtgct

SEQ ID NO: 342803 - DNA, 30 bp, Artificial Sequence
  Synthetic oligonucleotide
ctaaactatgagaaaataaagtcgggtgct

SEQ ID NO: 342804 - DNA, 30 bp, Artificial Sequence
  Synthetic oligonucleotide
acgggacttcaagcacgactatctggtgct

SEQ ID NO: 342805 - DNA, 30 bp, Artificial Sequence
  Synthetic oligonucleotide
gcaacggtagtttgccatggtagtggtgct

SEQ ID NO: 342806 - DNA, 30 bp, Artificial Sequence
  Synthetic oligonucleotide
gcacatcttcgtgagcgtaaataatgtgct

SEQ ID NO: 342807 - DNA, 30 bp, Artificial Sequence
  Synthetic oligonucleotide
attgtctaacgttttgccatcgcatgtgct

SEQ ID NO: 342808 - DNA, 30 bp, Artificial Sequence
  Synthetic oligonucleotide
attaacacattttagtcgaaggtatgtgct

SEQ ID NO: 342809 - DNA, 31 bp, Artificial Sequence
  Synthetic oligonucleotide
accaggcaagggtcatcaatcacagtgtgct

SEQ ID NO: 342810 - DNA, 30 bp, Artificial Sequence
  Synthetic oligonucleotide
ttgcaatatgatatgtatgataggtgtgct

SEQ ID NO: 342811 - DNA, 30 bp, Artificial Sequence
  Synthetic oligonucleotide
caaagtccaagcagctaatcacggtgtgct

SEQ ID NO: 342812 - DNA, 30 bp, Artificial Sequence
  Synthetic oligonucleotide
cggagcaatccgacaattgcttcttgtgct

SEQ ID NO: 342813 - DNA, 30 bp, Artificial Sequence
  Synthetic oligonucleotide
gatgacggtggggaaaatctattttgtgct

SEQ ID NO: 342814 - DNA, 30 bp, Artificial Sequence
  Synthetic oligonucleotide
gtcgtgccgaggccacgggcacaaattgct

SEQ ID NO: 342815 - DNA, 30 bp, Artificial Sequence
  Synthetic oligonucleotide
gaattacccggcactaggatagcaattgct

SEQ ID NO: 342816 - DNA, 30 bp, Artificial Sequence
  Synthetic oligonucleotide
ttgattatagaggtttttcaatggattgct

SEQ ID NO: 342817 - DNA, 30 bp, Artificial Sequence
  Synthetic oligonucleotide
ttggctcacccaggcatagcggcacttgct

SEQ ID NO: 342818 - DNA, 30 bp, Artificial Sequence
  Synthetic oligonucleotide
tcgtaggtaagtgaacgtattgcgcttgct

SEQ ID NO: 342819 - DNA, 30 bp, Artificial Sequence
  Synthetic oligonucleotide
aggcactggtaccaggaatggtcgcttgct

SEQ ID NO: 342820 - DNA, 30 bp, Artificial Sequence
  Synthetic oligonucleotide
tagtcacttgacatgacaactttgcttgct

SEQ ID NO: 342821 - DNA, 30 bp, Artificial Sequence
  Synthetic oligonucleotide
ctattagaactacggcaaccctctcttgct

SEQ ID NO: 342822 - DNA, 30 bp, Artificial Sequence
  Synthetic oligonucleotide
catcccctctagtccctttttgaagttgct

SEQ ID NO: 342823 - DNA, 30 bp, Artificial Sequence
  Synthetic oligonucleotide
gcctccctgctctatcactaaatagttgct

SEQ ID NO: 342824 - DNA, 30 bp, Artificial Sequence
  Synthetic oligonucleotide
gtacagactgcacgtgtatctagggttgct

SEQ ID NO: 342825 - DNA, 30 bp, Artificial Sequence
  Synthetic oligonucleotide
tacaaatgcactttgggcctgggggttgct

SEQ ID NO: 342826 - DNA, 30 bp, Artificial Sequence
  Synthetic oligonucleotide
ttgcgagacgcgcatataagggaatttgct

SEQ ID NO: 342827 - DNA, 30 bp, Artificial Sequence
  Synthetic oligonucleotide
attatacgattttagtctgcttaatttgct

SEQ ID NO: 342828 - DNA, 30 bp, Artificial Sequence
  Synthetic oligonucleotide
ctgcagacgatcccgagatacctatttgct

SEQ ID NO: 342829 - DNA, 30 bp, Artificial Sequence
  Synthetic oligonucleotide
caagataattggtcaccttgcctatttgct

SEQ ID NO: 342830 - DNA, 30 bp, Artificial Sequence
  Synthetic oligonucleotide
agccctgatcggatcaaacataagtttgct

SEQ ID NO: 342831 - DNA, 30 bp, Artificial Sequence
  Synthetic oligonucleotide
gtatatgatggtttaatgccaaggtttgct

SEQ ID NO: 342832 - DNA, 30 bp, Artificial Sequence
  Synthetic oligonucleotide
cctaacattttttcagtgtacgtgtttgct

SEQ ID NO: 342833 - DNA, 30 bp, Artificial Sequence
  Synthetic oligonucleotide
gttacgactaatagatagatgtattttgct

SEQ ID NO: 342834 - DNA, 30 bp, Artificial Sequence
  Synthetic oligonucleotide
ggaaggggcgccctacgcatcaaaaaatct

SEQ ID NO: 342835 - DNA, 30 bp, Artificial Sequence
  Synthetic oligonucleotide
aaaggtttggatcgaatcacccaaaaatct

SEQ ID NO: 342836 - DNA, 30 bp, Artificial Sequence
  Synthetic oligonucleotide
aagcatcctagaatacaaactgcaaaatct

SEQ ID NO: 342837 - DNA, 30 bp, Artificial Sequence
  Synthetic oligonucleotide
gcttcgtaacaatggtggcggtacaaatct

SEQ ID NO: 342838 - DNA, 30 bp, Artificial Sequence
  Synthetic oligonucleotide
agctgtgaagtaagggaattaacgaaatct

SEQ ID NO: 342839 - DNA, 30 bp, Artificial Sequence
  Synthetic oligonucleotide
atacttaccttaggctggacgtcgaaatct

SEQ ID NO: 342840 - DNA, 30 bp, Artificial Sequence
  Synthetic oligonucleotide
tgaactcgagttcggagcgtcgtgaaatct

SEQ ID NO: 342841 - DNA, 30 bp, Artificial Sequence
  Synthetic oligonucleotide
caattggttaagtttaatacggaacaatct

SEQ ID NO: 342842 - DNA, 30 bp, Artificial Sequence
  Synthetic oligonucleotide
tagccgatgtaaggcaagccatgacaatct

SEQ ID NO: 342843 - DNA, 30 bp, Artificial Sequence
  Synthetic oligonucleotide
tgagtgttatattcaataacgtgccaatct

SEQ ID NO: 342844 - DNA, 30 bp, Artificial Sequence
  Synthetic oligonucleotide
gtataaagtccgagaataaaggtccaatct

SEQ ID NO: 342845 - DNA, 30 bp, Artificial Sequence
  Synthetic oligonucleotide
gcaagatggtctaacatagcaaagcaatct

SEQ ID NO: 342846 - DNA, 30 bp, Artificial Sequence
  Synthetic oligonucleotide
ttgacgataagactaacaagatggcaatct

SEQ ID NO: 342847 - DNA, 30 bp, Artificial Sequence
  Synthetic oligonucleotide
aaatggagccatagttaagtcaacgaatct

SEQ ID NO: 342848 - DNA, 30 bp, Artificial Sequence
  Synthetic oligonucleotide
ctggattcgattgttagaccccgcgaatct

SEQ ID NO: 342849 - DNA, 30 bp, Artificial Sequence
  Synthetic oligonucleotide
ttagagaggtcggcaacggatacggaatct

SEQ ID NO: 342850 - DNA, 30 bp, Artificial Sequence
  Synthetic oligonucleotide
ggaagcgctggcagagcaactgcggaatct

SEQ ID NO: 342851 - DNA, 30 bp, Artificial Sequence
  Synthetic oligonucleotide
tggggctaaatatcctgacaagttgaatct

SEQ ID NO: 342852 - DNA, 30 bp, Artificial Sequence
  Synthetic oligonucleotide
gttcgcgtagtggtcgatcggacataatct

SEQ ID NO: 342853 - DNA, 30 bp, Artificial Sequence
  Synthetic oligonucleotide
gattggagagctacagcggcgggataatct

SEQ ID NO: 342854 - DNA, 30 bp, Artificial Sequence
  Synthetic oligonucleotide
tgagatgctattataggataacgctaatct

SEQ ID NO: 342855 - DNA, 30 bp, Artificial Sequence
  Synthetic oligonucleotide
ccgtacgctccacccggtgggtcaacatct

SEQ ID NO: 342856 - DNA, 30 bp, Artificial Sequence
  Synthetic oligonucleotide
acttagtggttaattccggagggaacatct

SEQ ID NO: 342857 - DNA, 30 bp, Artificial Sequence
  Synthetic oligonucleotide
tcaagatgttgccgtctgccgataacatct

SEQ ID NO: 342858 - DNA, 30 bp, Artificial Sequence
  Synthetic oligonucleotide
gggttccatatcacaaggctcgtaacatct

SEQ ID NO: 342859 - DNA, 30 bp, Artificial Sequence
  Synthetic oligonucleotide
cagcatgataatatcgaaactaacacatct

SEQ ID NO: 342860 - DNA, 30 bp, Artificial Sequence
  Synthetic oligonucleotide
gtatagtgtggggggtaaggagtcacatct

SEQ ID NO: 342861 - DNA, 30 bp, Artificial Sequence
  Synthetic oligonucleotide
ttgaagtgaggaatttgagtgaggacatct

SEQ ID NO: 342862 - DNA, 31 bp, Artificial Sequence
  Synthetic oligonucleotide
gttgcaaacgtgctaccccatacggacatct

SEQ ID NO: 342863 - DNA, 30 bp, Artificial Sequence
  Synthetic oligonucleotide
gaagggatttgatcggccctagggacatct

SEQ ID NO: 342864 - DNA, 30 bp, Artificial Sequence
  Synthetic oligonucleotide
agtgttcgtggttgtcttacttatacatct

SEQ ID NO: 342865 - DNA, 30 bp, Artificial Sequence
  Synthetic oligonucleotide
atactgaatagaggtcgaggttctacatct

SEQ ID NO: 342866 - DNA, 30 bp, Artificial Sequence
  Synthetic oligonucleotide
tcaactgagcttctcggcaaaagaccatct

SEQ ID NO: 342867 - DNA, 30 bp, Artificial Sequence
  Synthetic oligonucleotide
gagctgtaccgtgttgaaaggcccccatct

SEQ ID NO: 342868 - DNA, 30 bp, Artificial Sequence
  Synthetic oligonucleotide
tactagtaatatagagtgggaaggccatct

SEQ ID NO: 342869 - DNA, 30 bp, Artificial Sequence
  Synthetic oligonucleotide
caagactttagtgctctactaatgccatct

SEQ ID NO: 342870 - DNA, 29 bp, Artificial Sequence
  Synthetic oligonucleotide
tggagttgggtgacatacattaagcatct

SEQ ID NO: 342871 - DNA, 30 bp, Artificial Sequence
  Synthetic oligonucleotide
attccgttgttcaagtagccgagcgcatct

SEQ ID NO: 342872 - DNA, 30 bp, Artificial Sequence
  Synthetic oligonucleotide
gaccaccttcgtccttcagagtttgcatct

SEQ ID NO: 342873 - DNA, 30 bp, Artificial Sequence
  Synthetic oligonucleotide
atgactaaaggtggtctgatgaactcatct

SEQ ID NO: 342874 - DNA, 30 bp, Artificial Sequence
  Synthetic oligonucleotide
ctcagatttggagttgtgttatactcatct

SEQ ID NO: 342875 - DNA, 30 bp, Artificial Sequence
  Synthetic oligonucleotide
aacaccggaattcccgacatcaggtcatct

SEQ ID NO: 342876 - DNA, 30 bp, Artificial Sequence
  Synthetic oligonucleotide
aaaagcactaaatccggtttacattcatct

SEQ ID NO: 342877 - DNA, 30 bp, Artificial Sequence
  Synthetic oligonucleotide
tgcgaacccgttgtctcagtgatttcatct

SEQ ID NO: 342878 - DNA, 30 bp, Artificial Sequence
  Synthetic oligonucleotide
cggcaacgtgcctatggcgtgttttcatct

SEQ ID NO: 342879 - DNA, 30 bp, Artificial Sequence
  Synthetic oligonucleotide
ttaatggtcggataaaccgaactaagatct

SEQ ID NO: 342880 - DNA, 30 bp, Artificial Sequence
  Synthetic oligonucleotide
gccagtgagcaaagattgctttgcagatct

SEQ ID NO: 342881 - DNA, 30 bp, Artificial Sequence
  Synthetic oligonucleotide
tttatcagggatggggtaaggcatagatct

SEQ ID NO: 342882 - DNA, 30 bp, Artificial Sequence
  Synthetic oligonucleotide
cgaaattcgagaagcggagacttacgatct

SEQ ID NO: 342883 - DNA, 30 bp, Artificial Sequence
  Synthetic oligonucleotide
gtgcaggtgttccgccaatggagccgatct

SEQ ID NO: 342884 - DNA, 30 bp, Artificial Sequence
  Synthetic oligonucleotide
ctgctcctaccaagtgcccggaatcgatct

SEQ ID NO: 342885 - DNA, 30 bp, Artificial Sequence
  Synthetic oligonucleotide
aagcattgccagtaagcggcagaaggatct

SEQ ID NO: 342886 - DNA, 30 bp, Artificial Sequence
  Synthetic oligonucleotide
ggatgaaatggcgcctcattgacaggatct

SEQ ID NO: 342887 - DNA, 30 bp, Artificial Sequence
  Synthetic oligonucleotide
tccccaaaggtgtatcacagctacggatct

SEQ ID NO: 342888 - DNA, 30 bp, Artificial Sequence
  Synthetic oligonucleotide
gaaagtcacttttaggatagtatcggatct

SEQ ID NO: 342889 - DNA, 30 bp, Artificial Sequence
  Synthetic oligonucleotide
ttaaagcagtggcatgatccacatggatct

SEQ ID NO: 342890 - DNA, 30 bp, Artificial Sequence
  Synthetic oligonucleotide
cagtcaattcaacgcgtcatgaaatgatct

SEQ ID NO: 342891 - DNA, 30 bp, Artificial Sequence
  Synthetic oligonucleotide
gggcgtatacacttatctaagcgatgatct

SEQ ID NO: 342892 - DNA, 30 bp, Artificial Sequence
  Synthetic oligonucleotide
acatcagttagcatcggcgcgcgatgatct

SEQ ID NO: 342893 - DNA, 30 bp, Artificial Sequence
  Synthetic oligonucleotide
atcagggcagagtctcctaatttatgatct

SEQ ID NO: 342894 - DNA, 30 bp, Artificial Sequence
  Synthetic oligonucleotide
gtactaagcaattcgacggtggtctgatct

SEQ ID NO: 342895 - DNA, 30 bp, Artificial Sequence
  Synthetic oligonucleotide
ctctaccaggtccagacacagttgtgatct

SEQ ID NO: 342896 - DNA, 30 bp, Artificial Sequence
  Synthetic oligonucleotide
aagcaggcgggtcttaccggtgcttgatct

SEQ ID NO: 342897 - DNA, 30 bp, Artificial Sequence
  Synthetic oligonucleotide
gtcgtagttgagtcatagatcggaatatct

SEQ ID NO: 342898 - DNA, 30 bp, Artificial Sequence
  Synthetic oligonucleotide
ttcaaggactgtgcttcacatagcatatct

SEQ ID NO: 342899 - DNA, 30 bp, Artificial Sequence
  Synthetic oligonucleotide
actttagcggtgagacggagtagcatatct

SEQ ID NO: 342900 - DNA, 30 bp, Artificial Sequence
  Synthetic oligonucleotide
tagggaacaggattgtgcatggagatatct

SEQ ID NO: 342901 - DNA, 30 bp, Artificial Sequence
  Synthetic oligonucleotide
cctggaagcgtgtcgaatacctggatatct

SEQ ID NO: 342902 - DNA, 30 bp, Artificial Sequence
  Synthetic oligonucleotide
taggttcatgataaagtgctgatgatatct

SEQ ID NO: 342903 - DNA, 30 bp, Artificial Sequence
  Synthetic oligonucleotide
gctattcatcggtaggattagtccctatct

SEQ ID NO: 342904 - DNA, 30 bp, Artificial Sequence
  Synthetic oligonucleotide
gccaagtgtcaggaattcacaatcctatct

SEQ ID NO: 342905 - DNA, 30 bp, Artificial Sequence
  Synthetic oligonucleotide
agcagggtttcgacccgccgggcgctatct

SEQ ID NO: 342906 - DNA, 30 bp, Artificial Sequence
  Synthetic oligonucleotide
atgttaaacttaaggtgtcattcgctatct

SEQ ID NO: 342907 - DNA, 30 bp, Artificial Sequence
  Synthetic oligonucleotide
cccaactatctccaccgaggctacgtatct

SEQ ID NO: 342908 - DNA, 30 bp, Artificial Sequence
  Synthetic oligonucleotide
tacggggaacgcctagtcaccagcgtatct

SEQ ID NO: 342909 - DNA, 30 bp, Artificial Sequence
  Synthetic oligonucleotide
aaatctaatcaacagcatggtcgcgtatct

SEQ ID NO: 342910 - DNA, 31 bp, Artificial Sequence
  Synthetic oligonucleotide
gtccagccctggatgctaggtacatgtatct

SEQ ID NO: 342911 - DNA, 30 bp, Artificial Sequence
  Synthetic oligonucleotide
aggcatctatagacgaagtcgaaattatct

SEQ ID NO: 342912 - DNA, 30 bp, Artificial Sequence
  Synthetic oligonucleotide
aggatagcttgaatttctcgaagattatct

SEQ ID NO: 342913 - DNA, 30 bp, Artificial Sequence
  Synthetic oligonucleotide
gttatgatgtggacctaggttaacttatct

SEQ ID NO: 342914 - DNA, 30 bp, Artificial Sequence
  Synthetic oligonucleotide
aaataccatgaagggaagaattcgttatct

SEQ ID NO: 342915 - DNA, 30 bp, Artificial Sequence
  Synthetic oligonucleotide
gcgatctcaaggagatgtaccttgttatct

SEQ ID NO: 342916 - DNA, 30 bp, Artificial Sequence
  Synthetic oligonucleotide
tacctaaccccgccaatagcctatttatct

SEQ ID NO: 342917 - DNA, 30 bp, Artificial Sequence
  Synthetic oligonucleotide
cttgtgaagctgggcatactgcctttatct

SEQ ID NO: 342918 - DNA, 31 bp, Artificial Sequence
  Synthetic oligonucleotide
aaccgttacggggcctcactgacgtttatct

SEQ ID NO: 342919 - DNA, 30 bp, Artificial Sequence
  Synthetic oligonucleotide
tggtcgttctagccacacttcggtttatct

SEQ ID NO: 342920 - DNA, 31 bp, Artificial Sequence
  Synthetic oligonucleotide
acctgatctcagaaagcataaagaaaactct

SEQ ID NO: 342921 - DNA, 30 bp, Artificial Sequence
  Synthetic oligonucleotide
gatcgggaagattggggctttggaaactct

SEQ ID NO: 342922 - DNA, 30 bp, Artificial Sequence
  Synthetic oligonucleotide
tcatctatctgacattgtgcgtgcaactct

SEQ ID NO: 342923 - DNA, 30 bp, Artificial Sequence
  Synthetic oligonucleotide
gtacgtttccgtctgacacgcctcaactct

SEQ ID NO: 342924 - DNA, 30 bp, Artificial Sequence
  Synthetic oligonucleotide
tactgttgcgtacaggtctatgagaactct

SEQ ID NO: 342925 - DNA, 30 bp, Artificial Sequence
  Synthetic oligonucleotide
ttccgggatgaaacgttcgggtagaactct

SEQ ID NO: 342926 - DNA, 30 bp, Artificial Sequence
  Synthetic oligonucleotide
gctgtcgagtagaaagcgggcacgaactct

SEQ ID NO: 342927 - DNA, 30 bp, Artificial Sequence
  Synthetic oligonucleotide
aaccgcataaacagcttcgggtggaactct

SEQ ID NO: 342928 - DNA, 30 bp, Artificial Sequence
  Synthetic oligonucleotide
taggcggtctattcgccggctgtgaactct

SEQ ID NO: 342929 - DNA, 30 bp, Artificial Sequence
  Synthetic oligonucleotide
aaagtagggcatgtgccatatgataactct

SEQ ID NO: 342930 - DNA, 30 bp, Artificial Sequence
  Synthetic oligonucleotide
acagccgagagcaaatgtcattctaactct

SEQ ID NO: 342931 - DNA, 30 bp, Artificial Sequence
  Synthetic oligonucleotide
ggctcaggcaaaacatgggccaaacactct

SEQ ID NO: 342932 - DNA, 30 bp, Artificial Sequence
  Synthetic oligonucleotide
taacacccacctggaaccaagatacactct

SEQ ID NO: 342933 - DNA, 31 bp, Artificial Sequence
  Synthetic oligonucleotide
atgcaggaagggagattagagaagccactct

SEQ ID NO: 342934 - DNA, 30 bp, Artificial Sequence
  Synthetic oligonucleotide
aagaggtatatagcaccgactgagcactct

SEQ ID NO: 342935 - DNA, 30 bp, Artificial Sequence
  Synthetic oligonucleotide
caaacgtggcggactgaaaaccggcactct

SEQ ID NO: 342936 - DNA, 30 bp, Artificial Sequence
  Synthetic oligonucleotide
gcgttagtcagaggcaattggggcgactct

SEQ ID NO: 342937 - DNA, 30 bp, Artificial Sequence
  Synthetic oligonucleotide
cgtaaaggtcacccttagcatccggactct

SEQ ID NO: 342938 - DNA, 30 bp, Artificial Sequence
  Synthetic oligonucleotide
agttgtacaggtttgaggaattcggactct

SEQ ID NO: 342939 - DNA, 30 bp, Artificial Sequence
  Synthetic oligonucleotide
cccgaggcttattggcaatgcgactactct

SEQ ID NO: 342940 - DNA, 30 bp, Artificial Sequence
  Synthetic oligonucleotide
ctaatttggatcccacggtgaccctactct

SEQ ID NO: 342941 - DNA, 30 bp, Artificial Sequence
  Synthetic oligonucleotide
ctgggcatagtctgttgctggcattactct

SEQ ID NO: 342942 - DNA, 30 bp, Artificial Sequence
  Synthetic oligonucleotide
tgagtaaatgcgggtacgaccttttactct

SEQ ID NO: 342943 - DNA, 30 bp, Artificial Sequence
  Synthetic oligonucleotide
ggtcgccatgctcggcgcaacacaacctct

SEQ ID NO: 342944 - DNA, 30 bp, Artificial Sequence
  Synthetic oligonucleotide
atcctacctaaaatcacaccacccacctct

SEQ ID NO: 342945 - DNA, 30 bp, Artificial Sequence
  Synthetic oligonucleotide
caatcactgtaccgtttagttcagacctct

SEQ ID NO: 342946 - DNA, 30 bp, Artificial Sequence
  Synthetic oligonucleotide
tgtgtggcgaaccccctaggcacgacctct

SEQ ID NO: 342947 - DNA, 30 bp, Artificial Sequence
  Synthetic oligonucleotide
agactggcatgccttatcgagcacccctct

SEQ ID NO: 342948 - DNA, 30 bp, Artificial Sequence
  Synthetic oligonucleotide
catctacgctgtttgagtctggacccctct

SEQ ID NO: 342949 - DNA, 30 bp, Artificial Sequence
  Synthetic oligonucleotide
aagtgtaaaagacacaatgaatccccctct

SEQ ID NO: 342950 - DNA, 30 bp, Artificial Sequence
  Synthetic oligonucleotide
cgccgcagtctctaggcgctggtgccctct

SEQ ID NO: 342951 - DNA, 30 bp, Artificial Sequence
  Synthetic oligonucleotide
tcgagtcgaatttaaatcttcaatccctct

SEQ ID NO: 342952 - DNA, 30 bp, Artificial Sequence
  Synthetic oligonucleotide
tcaatgagactgtactgataggatccctct

SEQ ID NO: 342953 - DNA, 30 bp, Artificial Sequence
  Synthetic oligonucleotide
cgcacctagtagtgattgttggtagcctct

SEQ ID NO: 342954 - DNA, 30 bp, Artificial Sequence
  Synthetic oligonucleotide
gaacctcagtatcgcggaattggcgcctct

SEQ ID NO: 342955 - DNA, 30 bp, Artificial Sequence
  Synthetic oligonucleotide
ctaggtacaagatcacctatttgcgcctct

SEQ ID NO: 342956 - DNA, 30 bp, Artificial Sequence
  Synthetic oligonucleotide
gacccgggcccgtaaccggatctcgcctct

SEQ ID NO: 342957 - DNA, 30 bp, Artificial Sequence
  Synthetic oligonucleotide
tggctggattagttgtttacagaggcctct

SEQ ID NO: 342958 - DNA, 30 bp, Artificial Sequence
  Synthetic oligonucleotide
cattatgtgagtaggatcgctgaggcctct

SEQ ID NO: 342959 - DNA, 30 bp, Artificial Sequence
  Synthetic oligonucleotide
aggattaacgtcccagtcctgtaggcctct

SEQ ID NO: 342960 - DNA, 30 bp, Artificial Sequence
  Synthetic oligonucleotide
ttatgctctagacccgtcttgtaggcctct

SEQ ID NO: 342961 - DNA, 30 bp, Artificial Sequence
  Synthetic oligonucleotide
tcagtatccacgacacagggaagggcctct

SEQ ID NO: 342962 - DNA, 30 bp, Artificial Sequence
  Synthetic oligonucleotide
actactcgagtatcgcattgatgggcctct

SEQ ID NO: 342963 - DNA, 30 bp, Artificial Sequence
  Synthetic oligonucleotide
aaggaatcacatgggttaattaatgcctct

SEQ ID NO: 342964 - DNA, 30 bp, Artificial Sequence
  Synthetic oligonucleotide
tggggtgcgctttatacgcgttatgcctct

SEQ ID NO: 342965 - DNA, 30 bp, Artificial Sequence
  Synthetic oligonucleotide
acgacgtctagcaaaggcgtgaaatcctct

SEQ ID NO: 342966 - DNA, 30 bp, Artificial Sequence
  Synthetic oligonucleotide
tgggcctgtagtgtcggtcctgtatcctct

SEQ ID NO: 342967 - DNA, 30 bp, Artificial Sequence
  Synthetic oligonucleotide
attcgccctcgagtgttagaatactcctct

SEQ ID NO: 342968 - DNA, 30 bp, Artificial Sequence
  Synthetic oligonucleotide
gaaccccgtaccagtgtacagtcctcctct

SEQ ID NO: 342969 - DNA, 30 bp, Artificial Sequence
  Synthetic oligonucleotide
atggtatcttagtgtatacacctctcctct

SEQ ID NO: 342970 - DNA, 30 bp, Artificial Sequence
  Synthetic oligonucleotide
tggtaaaggagttaactggcatagtcctct

SEQ ID NO: 342971 - DNA, 30 bp, Artificial Sequence
  Synthetic oligonucleotide
acctacgctctgcgcttttggccgtcctct

SEQ ID NO: 342972 - DNA, 30 bp, Artificial Sequence
  Synthetic oligonucleotide
ggcagactaatgcaacgttatagttcctct

SEQ ID NO: 342973 - DNA, 30 bp, Artificial Sequence
  Synthetic oligonucleotide
attactactgcgctcagcaaataaagctct

SEQ ID NO: 342974 - DNA, 30 bp, Artificial Sequence
  Synthetic oligonucleotide
cataacctttagcccgtcggataaagctct

SEQ ID NO: 342975 - DNA, 30 bp, Artificial Sequence
  Synthetic oligonucleotide
caggcggcatattctaccccgtgcagctct

SEQ ID NO: 342976 - DNA, 30 bp, Artificial Sequence
  Synthetic oligonucleotide
tgcaaatctcgtaattccagggttagctct

SEQ ID NO: 342977 - DNA, 30 bp, Artificial Sequence
  Synthetic oligonucleotide
ggctgaatttcttactttcggtttagctct

SEQ ID NO: 342978 - DNA, 30 bp, Artificial Sequence
  Synthetic oligonucleotide
tactgtggcagaaatatagggagccgctct

SEQ ID NO: 342979 - DNA, 30 bp, Artificial Sequence
  Synthetic oligonucleotide
caggtgtgtgtcaaaacttaacgtcgctct

SEQ ID NO: 342980 - DNA, 30 bp, Artificial Sequence
  Synthetic oligonucleotide
ctagaaatacttggctttattatcggctct

SEQ ID NO: 342981 - DNA, 30 bp, Artificial Sequence
  Synthetic oligonucleotide
agaggaactgtgaacaatttgaagggctct

SEQ ID NO: 342982 - DNA, 30 bp, Artificial Sequence
  Synthetic oligonucleotide
gggctctgtgtagtcgagcattggggctct

SEQ ID NO: 342983 - DNA, 30 bp, Artificial Sequence
  Synthetic oligonucleotide
ggatttgaaagcttattataacatggctct

SEQ ID NO: 342984 - DNA, 30 bp, Artificial Sequence
  Synthetic oligonucleotide
cagctccggcatagttatgtgtgtggctct

SEQ ID NO: 342985 - DNA, 30 bp, Artificial Sequence
  Synthetic oligonucleotide
aatgtaagtcgcaatcgttgacgatgctct

SEQ ID NO: 342986 - DNA, 30 bp, Artificial Sequence
  Synthetic oligonucleotide
tgagacaagagtcaagatatctactgctct

SEQ ID NO: 342987 - DNA, 30 bp, Artificial Sequence
  Synthetic oligonucleotide
atcgtcacacgtctttgtggaacctgctct

SEQ ID NO: 342988 - DNA, 30 bp, Artificial Sequence
  Synthetic oligonucleotide
gttcatagaactagatccgttatgtgctct

SEQ ID NO: 342989 - DNA, 30 bp, Artificial Sequence
  Synthetic oligonucleotide
gggtctggcgatttcatctttgattgctct

SEQ ID NO: 342990 - DNA, 30 bp, Artificial Sequence
  Synthetic oligonucleotide
gtactaggttgtgcgttacgacccatctct

SEQ ID NO: 342991 - DNA, 30 bp, Artificial Sequence
  Synthetic oligonucleotide
ccgtcgtactagtaaacacttctcatctct

SEQ ID NO: 342992 - DNA, 30 bp, Artificial Sequence
  Synthetic oligonucleotide
tcccaagttcataccctgacggtcatctct

SEQ ID NO: 342993 - DNA, 30 bp, Artificial Sequence
  Synthetic oligonucleotide
tgccctattcttcataaaaagtagatctct

SEQ ID NO: 342994 - DNA, 30 bp, Artificial Sequence
  Synthetic oligonucleotide
taatagtaagaaaagatacggagactctct

SEQ ID NO: 342995 - DNA, 30 bp, Artificial Sequence
  Synthetic oligonucleotide
ttaaagatcatatttgaccatttactctct

SEQ ID NO: 342996 - DNA, 30 bp, Artificial Sequence
  Synthetic oligonucleotide
tcgccatcggatcacgcaggacgcctctct

SEQ ID NO: 342997 - DNA, 30 bp, Artificial Sequence
  Synthetic oligonucleotide
tgtgtggcgagggagcggttcctagtctct

SEQ ID NO: 342998 - DNA, 30 bp, Artificial Sequence
  Synthetic oligonucleotide
tgtgccaaaagtaattccaaggtagtctct

SEQ ID NO: 342999 - DNA, 30 bp, Artificial Sequence
  Synthetic oligonucleotide
gcggcccaactagcgcaaacgtgcgtctct

SEQ ID NO: 343000 - DNA, 30 bp, Artificial Sequence
  Synthetic oligonucleotide
gaggtccttcccggaaggaggtcggtctct

SEQ ID NO: 343001 - DNA, 30 bp, Artificial Sequence
  Synthetic oligonucleotide
gaaatatattgtacttgccaatctgtctct

SEQ ID NO: 343002 - DNA, 30 bp, Artificial Sequence
  Synthetic oligonucleotide
gtgacagaattgtataagaacattgtctct

SEQ ID NO: 343003 - DNA, 30 bp, Artificial Sequence
  Synthetic oligonucleotide
ggtccctaacttcgacctttacttgtctct

SEQ ID NO: 343004 - DNA, 30 bp, Artificial Sequence
  Synthetic oligonucleotide
ggtacagacccggcgagacgcacattctct

SEQ ID NO: 343005 - DNA, 30 bp, Artificial Sequence
  Synthetic oligonucleotide
cctgttcaaggctctgagccttacttctct

SEQ ID NO: 343006 - DNA, 30 bp, Artificial Sequence
  Synthetic oligonucleotide
agacgtgcggggattcaaaattgcttctct

SEQ ID NO: 343007 - DNA, 30 bp, Artificial Sequence
  Synthetic oligonucleotide
tcacgcccaacaatcgggggaactttctct

SEQ ID NO: 343008 - DNA, 30 bp, Artificial Sequence
  Synthetic oligonucleotide
cccagcctgctaaaagtggcggccaagtct

SEQ ID NO: 343009 - DNA, 30 bp, Artificial Sequence
  Synthetic oligonucleotide
agaactgcataaaaacgatgatccaagtct

SEQ ID NO: 343010 - DNA, 30 bp, Artificial Sequence
  Synthetic oligonucleotide
ttgtttgctgcaacatcacatggcaagtct

SEQ ID NO: 343011 - DNA, 30 bp, Artificial Sequence
  Synthetic oligonucleotide
aacgattgtggtaagagtaatacgaagtct

SEQ ID NO: 343012 - DNA, 30 bp, Artificial Sequence
  Synthetic oligonucleotide
gtgccgagtaccccggggtaggggaagtct

SEQ ID NO: 343013 - DNA, 30 bp, Artificial Sequence
  Synthetic oligonucleotide
gagataattgtcgggtgatatctgaagtct

SEQ ID NO: 343014 - DNA, 30 bp, Artificial Sequence
  Synthetic oligonucleotide
ctgggtagacacacccatttctcacagtct

SEQ ID NO: 343015 - DNA, 30 bp, Artificial Sequence
  Synthetic oligonucleotide
tgagaactcgaatgtaagaccctccagtct

SEQ ID NO: 343016 - DNA, 30 bp, Artificial Sequence
  Synthetic oligonucleotide
gcagtactcgactttacagtgcagcagtct

SEQ ID NO: 343017 - DNA, 30 bp, Artificial Sequence
  Synthetic oligonucleotide
ataatcttgtggagagcagttaggcagtct

SEQ ID NO: 343018 - DNA, 30 bp, Artificial Sequence
  Synthetic oligonucleotide
gggcgagtgtctaatgtctgaatgcagtct

SEQ ID NO: 343019 - DNA, 29 bp, Artificial Sequence
  Synthetic oligonucleotide
tcagctctgtttagacattggtgcagtct

SEQ ID NO: 343020 - DNA, 30 bp, Artificial Sequence
  Synthetic oligonucleotide
gtaaatcgggttacaggttagtctcagtct

SEQ ID NO: 343021 - DNA, 30 bp, Artificial Sequence
  Synthetic oligonucleotide
ccatctatatccttctgtgtatttcagtct

SEQ ID NO: 343022 - DNA, 30 bp, Artificial Sequence
  Synthetic oligonucleotide
cccaacgatcaggttatgtaggcagagtct

SEQ ID NO: 343023 - DNA, 30 bp, Artificial Sequence
  Synthetic oligonucleotide
agttgggagtgactgctgggagacgagtct

SEQ ID NO: 343024 - DNA, 30 bp, Artificial Sequence
  Synthetic oligonucleotide
tgaactctagattacagcatccgggagtct

SEQ ID NO: 343025 - DNA, 30 bp, Artificial Sequence
  Synthetic oligonucleotide
gtacgtcaatatataatccgcactgagtct

SEQ ID NO: 343026 - DNA, 30 bp, Artificial Sequence
  Synthetic oligonucleotide
agcagtaagcttgtgagtgagcaatagtct

SEQ ID NO: 343027 - DNA, 30 bp, Artificial Sequence
  Synthetic oligonucleotide
gtatcgttcataggcatttcatcatagtct

SEQ ID NO: 343028 - DNA, 30 bp, Artificial Sequence
  Synthetic oligonucleotide
cctgcgaatatccaagggaaagactagtct

SEQ ID NO: 343029 - DNA, 30 bp, Artificial Sequence
  Synthetic oligonucleotide
ttccgtccctggtcgtagaggaagtagtct

SEQ ID NO: 343030 - DNA, 30 bp, Artificial Sequence
  Synthetic oligonucleotide
ggggtagagaatttcccacgtaggtagtct

SEQ ID NO: 343031 - DNA, 30 bp, Artificial Sequence
  Synthetic oligonucleotide
tctctgtttagctctgttgagaattagtct

SEQ ID NO: 343032 - DNA, 30 bp, Artificial Sequence
  Synthetic oligonucleotide
ttgcgcagtacaatatcaagctattagtct

SEQ ID NO: 343033 - DNA, 30 bp, Artificial Sequence
  Synthetic oligonucleotide
ctacggggtgtttgctggtggatttagtct

SEQ ID NO: 343034 - DNA, 30 bp, Artificial Sequence
  Synthetic oligonucleotide
aatctttcgaggaacacagacgtaacgtct

SEQ ID NO: 343035 - DNA, 30 bp, Artificial Sequence
  Synthetic oligonucleotide
aggggatacgtatgcaacgagttaacgtct

SEQ ID NO: 343036 - DNA, 30 bp, Artificial Sequence
  Synthetic oligonucleotide
aagacagctaggttcggcacatacacgtct

SEQ ID NO: 343037 - DNA, 30 bp, Artificial Sequence
  Synthetic oligonucleotide
aatccggcacatttcccaacgtggacgtct

SEQ ID NO: 343038 - DNA, 30 bp, Artificial Sequence
  Synthetic oligonucleotide
tgtaaacgaggctcgaaaggtttgacgtct

SEQ ID NO: 343039 - DNA, 30 bp, Artificial Sequence
  Synthetic oligonucleotide
tccgagcgggggacggacggccaagcgtct

SEQ ID NO: 343040 - DNA, 30 bp, Artificial Sequence
  Synthetic oligonucleotide
ccaatggcgatcattaagatatgagcgtct

SEQ ID NO: 343041 - DNA, 30 bp, Artificial Sequence
  Synthetic oligonucleotide
aaggtctataggggcgccaacagtgcgtct

SEQ ID NO: 343042 - DNA, 30 bp, Artificial Sequence
  Synthetic oligonucleotide
gcctggttgagattcagtacgtttgcgtct

SEQ ID NO: 343043 - DNA, 30 bp, Artificial Sequence
  Synthetic oligonucleotide
accagcttctgccaagataggaaatcgtct

SEQ ID NO: 343044 - DNA, 30 bp, Artificial Sequence
  Synthetic oligonucleotide
gaagacacaggaagacttgaacgatcgtct

SEQ ID NO: 343045 - DNA, 30 bp, Artificial Sequence
  Synthetic oligonucleotide
aatgctgacttcgacatcgtacagtcgtct

SEQ ID NO: 343046 - DNA, 30 bp, Artificial Sequence
  Synthetic oligonucleotide
gtgagctgttagaaaatacctaggtcgtct

SEQ ID NO: 343047 - DNA, 30 bp, Artificial Sequence
  Synthetic oligonucleotide
caacacggataggcacacgccttttcgtct

SEQ ID NO: 343048 - DNA, 30 bp, Artificial Sequence
  Synthetic oligonucleotide
cctatcggagacgatctttaaccaaggtct

SEQ ID NO: 343049 - DNA, 30 bp, Artificial Sequence
  Synthetic oligonucleotide
gcgtatagttagaattcaaattccaggtct

SEQ ID NO: 343050 - DNA, 30 bp, Artificial Sequence
  Synthetic oligonucleotide
cataactgtgtcttaagcatcaagaggtct

SEQ ID NO: 343051 - DNA, 30 bp, Artificial Sequence
  Synthetic oligonucleotide
aatgtacaaaccgctacgtttaagaggtct

SEQ ID NO: 343052 - DNA, 30 bp, Artificial Sequence
  Synthetic oligonucleotide
attcgagaggtgtgaacgtagccgaggtct

SEQ ID NO: 343053 - DNA, 30 bp, Artificial Sequence
  Synthetic oligonucleotide
ggtgggacctctagtaaatccgggaggtct

SEQ ID NO: 343054 - DNA, 30 bp, Artificial Sequence
  Synthetic oligonucleotide
tgaacgtacatgacaatagcatggaggtct

SEQ ID NO: 343055 - DNA, 30 bp, Artificial Sequence
  Synthetic oligonucleotide
atgtccgcaatcttctgtcccatgaggtct

SEQ ID NO: 343056 - DNA, 30 bp, Artificial Sequence
  Synthetic oligonucleotide
atctgccccattcggccaagagtgaggtct

SEQ ID NO: 343057 - DNA, 30 bp, Artificial Sequence
  Synthetic oligonucleotide
tttgttaccgttgttgggctcgtgaggtct

SEQ ID NO: 343058 - DNA, 30 bp, Artificial Sequence
  Synthetic oligonucleotide
aaagacctgacgagctagctcttgaggtct

SEQ ID NO: 343059 - DNA, 30 bp, Artificial Sequence
  Synthetic oligonucleotide
ctcatagcaatggcttcgctacataggtct

SEQ ID NO: 343060 - DNA, 30 bp, Artificial Sequence
  Synthetic oligonucleotide
tgatctgactacgtctgtaggactaggtct

SEQ ID NO: 343061 - DNA, 30 bp, Artificial Sequence
  Synthetic oligonucleotide
tgcccgatgggatgacacggcatacggtct

SEQ ID NO: 343062 - DNA, 30 bp, Artificial Sequence
  Synthetic oligonucleotide
gtgtaggagggttaaacgacgctacggtct

SEQ ID NO: 343063 - DNA, 30 bp, Artificial Sequence
  Synthetic oligonucleotide
cattatacgtgcagctcagtatagcggtct

SEQ ID NO: 343064 - DNA, 30 bp, Artificial Sequence
  Synthetic oligonucleotide
gttggcactaagcgctcaggggtgcggtct

SEQ ID NO: 343065 - DNA, 30 bp, Artificial Sequence
  Synthetic oligonucleotide
tacgcgcaacgattgactagtcctcggtct

SEQ ID NO: 343066 - DNA, 30 bp, Artificial Sequence
  Synthetic oligonucleotide
tacgagcatgcctgaacgcaacgtcggtct

SEQ ID NO: 343067 - DNA, 30 bp, Artificial Sequence
  Synthetic oligonucleotide
atcataggtcgcgtcaaatctcaagggtct

SEQ ID NO: 343068 - DNA, 30 bp, Artificial Sequence
  Synthetic oligonucleotide
gagaataacacgtcatccaccgcagggtct

SEQ ID NO: 343069 - DNA, 30 bp, Artificial Sequence
  Synthetic oligonucleotide
agtaggataggatatggtaacgcggggtct

SEQ ID NO: 343070 - DNA, 30 bp, Artificial Sequence
  Synthetic oligonucleotide
tgttcctgagttaaatctgttggggggtct

SEQ ID NO: 343071 - DNA, 30 bp, Artificial Sequence
  Synthetic oligonucleotide
taagagcgaacgttagagcccgctgggtct

SEQ ID NO: 343072 - DNA, 30 bp, Artificial Sequence
  Synthetic oligonucleotide
atgaataagcacgaccggttctctgggtct

SEQ ID NO: 343073 - DNA, 30 bp, Artificial Sequence
  Synthetic oligonucleotide
aggtcccacattagtcgggtgggctggtct

SEQ ID NO: 343074 - DNA, 30 bp, Artificial Sequence
  Synthetic oligonucleotide
gcagacgaacttgcccctggctagtggtct

SEQ ID NO: 343075 - DNA, 29 bp, Artificial Sequence
  Synthetic oligonucleotide
ggaagtcaggtccaaggactaggtggtct

SEQ ID NO: 343076 - DNA, 30 bp, Artificial Sequence
  Synthetic oligonucleotide
taagtgacgaactcacaaatcagaatgtct

SEQ ID NO: 343077 - DNA, 30 bp, Artificial Sequence
  Synthetic oligonucleotide
cgcggtttgtactggtagagtagaatgtct

SEQ ID NO: 343078 - DNA, 30 bp, Artificial Sequence
  Synthetic oligonucleotide
ctcgggaaaccgatgagttcgaacatgtct

SEQ ID NO: 343079 - DNA, 30 bp, Artificial Sequence
  Synthetic oligonucleotide
ctgaccgcgtgcgactaggtacccatgtct

SEQ ID NO: 343080 - DNA, 30 bp, Artificial Sequence
  Synthetic oligonucleotide
taaagtaactatgatgtaagtcccatgtct

SEQ ID NO: 343081 - DNA, 30 bp, Artificial Sequence
  Synthetic oligonucleotide
cttctaatgggcgtacaagaagtcatgtct

SEQ ID NO: 343082 - DNA, 30 bp, Artificial Sequence
  Synthetic oligonucleotide
ccctgggctgcacttaggactaagatgtct

SEQ ID NO: 343083 - DNA, 30 bp, Artificial Sequence
  Synthetic oligonucleotide
actctagtctaagctaaggcactgatgtct

SEQ ID NO: 343084 - DNA, 30 bp, Artificial Sequence
  Synthetic oligonucleotide
tggcaagataagcacggtgaaactatgtct

SEQ ID NO: 343085 - DNA, 30 bp, Artificial Sequence
  Synthetic oligonucleotide
gatgggcgaaagcaagctgatcctatgtct

SEQ ID NO: 343086 - DNA, 30 bp, Artificial Sequence
  Synthetic oligonucleotide
taccaaggaactcctgtaaccagtatgtct

SEQ ID NO: 343087 - DNA, 30 bp, Artificial Sequence
  Synthetic oligonucleotide
agcatcagaggggccgttggcggtatgtct

SEQ ID NO: 343088 - DNA, 30 bp, Artificial Sequence
  Synthetic oligonucleotide
tccgtctgagtcaaacagatactactgtct

SEQ ID NO: 343089 - DNA, 30 bp, Artificial Sequence
  Synthetic oligonucleotide
aggacaatgtgcttacgattcgtcctgtct

SEQ ID NO: 343090 - DNA, 30 bp, Artificial Sequence
  Synthetic oligonucleotide
agcaactgccgcgctgaccccagagtgtct

SEQ ID NO: 343091 - DNA, 30 bp, Artificial Sequence
  Synthetic oligonucleotide
acgagattgaaaagctcggcgcgagtgtct

SEQ ID NO: 343092 - DNA, 30 bp, Artificial Sequence
  Synthetic oligonucleotide
atgaaactggtaaaggctacaaatgtgtct

SEQ ID NO: 343093 - DNA, 30 bp, Artificial Sequence
  Synthetic oligonucleotide
aagctctgaccttatgttcgatgtgtgtct

SEQ ID NO: 343094 - DNA, 30 bp, Artificial Sequence
  Synthetic oligonucleotide
tggtgttgaagtagcatcctctttgtgtct

SEQ ID NO: 343095 - DNA, 30 bp, Artificial Sequence
  Synthetic oligonucleotide
gactgacgcttgccgtgaaggggattgtct

SEQ ID NO: 343096 - DNA, 30 bp, Artificial Sequence
  Synthetic oligonucleotide
aacgctacgctcaattgatagtagttgtct

SEQ ID NO: 343097 - DNA, 30 bp, Artificial Sequence
  Synthetic oligonucleotide
gggctctggttatcatccatacatttgtct

SEQ ID NO: 343098 - DNA, 30 bp, Artificial Sequence
  Synthetic oligonucleotide
tggagatttcctaacagcggagaaaattct

SEQ ID NO: 343099 - DNA, 30 bp, Artificial Sequence
  Synthetic oligonucleotide
cgagcctcatatgatactggtacaaattct

SEQ ID NO: 343100 - DNA, 30 bp, Artificial Sequence
  Synthetic oligonucleotide
ttgtgaattgtgagctgtgacagcaattct

SEQ ID NO: 343101 - DNA, 30 bp, Artificial Sequence
  Synthetic oligonucleotide
caatattgcaggttatcgacccagaattct

SEQ ID NO: 343102 - DNA, 30 bp, Artificial Sequence
  Synthetic oligonucleotide
gcgtaatggaaaggcctgggtcagaattct

SEQ ID NO: 343103 - DNA, 30 bp, Artificial Sequence
  Synthetic oligonucleotide
gacgtgaggtagtcaccggcaaataattct

SEQ ID NO: 343104 - DNA, 30 bp, Artificial Sequence
  Synthetic oligonucleotide
ggaccggccacattcaaagacttccattct

SEQ ID NO: 343105 - DNA, 30 bp, Artificial Sequence
  Synthetic oligonucleotide
tcgtgggtgttagcatgagcggcgcattct

SEQ ID NO: 343106 - DNA, 30 bp, Artificial Sequence
  Synthetic oligonucleotide
gccatgggcgctgagcagatgtcgcattct

SEQ ID NO: 343107 - DNA, 30 bp, Artificial Sequence
  Synthetic oligonucleotide
cttggctgcgcaaagccaagttcgcattct

SEQ ID NO: 343108 - DNA, 30 bp, Artificial Sequence
  Synthetic oligonucleotide
agaatgggccgacgccaccaaagcgattct

SEQ ID NO: 343109 - DNA, 30 bp, Artificial Sequence
  Synthetic oligonucleotide
taaatgccgggggttgtggtctcggattct

SEQ ID NO: 343110 - DNA, 30 bp, Artificial Sequence
  Synthetic oligonucleotide
gttatatcactatagtaagtctgatattct

SEQ ID NO: 343111 - DNA, 30 bp, Artificial Sequence
  Synthetic oligonucleotide
ctaaccactcggctgatgagcaactattct

SEQ ID NO: 343112 - DNA, 30 bp, Artificial Sequence
  Synthetic oligonucleotide
aattgatgtgaaatacagaactcctattct

SEQ ID NO: 343113 - DNA, 30 bp, Artificial Sequence
  Synthetic oligonucleotide
tagcaagtttaaaatcggctggtgtattct

SEQ ID NO: 343114 - DNA, 30 bp, Artificial Sequence
  Synthetic oligonucleotide
gtcgcccggcattaagacctcgaaacttct

SEQ ID NO: 343115 - DNA, 30 bp, Artificial Sequence
  Synthetic oligonucleotide
gtattggcaattcagtctttcgtaacttct

SEQ ID NO: 343116 - DNA, 30 bp, Artificial Sequence
  Synthetic oligonucleotide
agtgtactacgtaatgtttactgcacttct

SEQ ID NO: 343117 - DNA, 30 bp, Artificial Sequence
  Synthetic oligonucleotide
acttacaccagagggctctgagtcacttct

SEQ ID NO: 343118 - DNA, 30 bp, Artificial Sequence
  Synthetic oligonucleotide
ggccatgtagagaagcgaaaacatacttct

SEQ ID NO: 343119 - DNA, 30 bp, Artificial Sequence
  Synthetic oligonucleotide
ttgaggtggacaaaccatccagatacttct

SEQ ID NO: 343120 - DNA, 30 bp, Artificial Sequence
  Synthetic oligonucleotide
atgtatctctgatactcttaccaaccttct

SEQ ID NO: 343121 - DNA, 30 bp, Artificial Sequence
  Synthetic oligonucleotide
gaggcagcctcctggtacgtggaaccttct

SEQ ID NO: 343122 - DNA, 30 bp, Artificial Sequence
  Synthetic oligonucleotide
gactcgtatcggtcagggcagtacccttct

SEQ ID NO: 343123 - DNA, 30 bp, Artificial Sequence
  Synthetic oligonucleotide
atgtaagtcagcagaattacactcccttct

SEQ ID NO: 343124 - DNA, 30 bp, Artificial Sequence
  Synthetic oligonucleotide
ataccgaggaagtggcacatccagccttct

SEQ ID NO: 343125 - DNA, 30 bp, Artificial Sequence
  Synthetic oligonucleotide
tgaagagggatctcttgatccgatccttct

SEQ ID NO: 343126 - DNA, 30 bp, Artificial Sequence
  Synthetic oligonucleotide
tcattacgtctacacaaagcacaagcttct

SEQ ID NO: 343127 - DNA, 30 bp, Artificial Sequence
  Synthetic oligonucleotide
ctggtatagtccgagctccggcaagcttct

SEQ ID NO: 343128 - DNA, 30 bp, Artificial Sequence
  Synthetic oligonucleotide
atactaggtaaaaggtattttcaagcttct

SEQ ID NO: 343129 - DNA, 30 bp, Artificial Sequence
  Synthetic oligonucleotide
ccccactaaaaatggacgaacagagcttct

SEQ ID NO: 343130 - DNA, 30 bp, Artificial Sequence
  Synthetic oligonucleotide
tagggatagtacttgcgtgtttaatcttct

SEQ ID NO: 343131 - DNA, 30 bp, Artificial Sequence
  Synthetic oligonucleotide
tcgccggtattttactggaatttctcttct

SEQ ID NO: 343132 - DNA, 30 bp, Artificial Sequence
  Synthetic oligonucleotide
acagcccgtttagtgccggccataagttct

SEQ ID NO: 343133 - DNA, 30 bp, Artificial Sequence
  Synthetic oligonucleotide
taacgtgaaaagggttcataagtaagttct

SEQ ID NO: 343134 - DNA, 30 bp, Artificial Sequence
  Synthetic oligonucleotide
aacataagcccgagtacaataatcagttct

SEQ ID NO: 343135 - DNA, 30 bp, Artificial Sequence
  Synthetic oligonucleotide
gtagtgacatgacctcgtgggccgagttct

SEQ ID NO: 343136 - DNA, 30 bp, Artificial Sequence
  Synthetic oligonucleotide
taactagttgtcgtcaagtcagcgagttct

SEQ ID NO: 343137 - DNA, 30 bp, Artificial Sequence
  Synthetic oligonucleotide
tgcacggctatgagctcgcaatatagttct

SEQ ID NO: 343138 - DNA, 31 bp, Artificial Sequence
  Synthetic oligonucleotide
tctataacattaattacagttaagacgttct

SEQ ID NO: 343139 - DNA, 30 bp, Artificial Sequence
  Synthetic oligonucleotide
gtagagcttccgcaccgacgattccgttct

SEQ ID NO: 343140 - DNA, 30 bp, Artificial Sequence
  Synthetic oligonucleotide
tggtagtccaaggggaccttagttcgttct

SEQ ID NO: 343141 - DNA, 30 bp, Artificial Sequence
  Synthetic oligonucleotide
tgagtggacatcggcgcagttcaaggttct

SEQ ID NO: 343142 - DNA, 30 bp, Artificial Sequence
  Synthetic oligonucleotide
gcatatggtcagctcagtaaggcgggttct

SEQ ID NO: 343143 - DNA, 30 bp, Artificial Sequence
  Synthetic oligonucleotide
tcccacgatctaatctgaacggggggttct

SEQ ID NO: 343144 - DNA, 30 bp, Artificial Sequence
  Synthetic oligonucleotide
aacactggtgctcatgttcataatggttct

SEQ ID NO: 343145 - DNA, 30 bp, Artificial Sequence
  Synthetic oligonucleotide
ataaagccagtagactttcacgaatgttct

SEQ ID NO: 343146 - DNA, 30 bp, Artificial Sequence
  Synthetic oligonucleotide
cgtggcggtgctttcttcatcgcctgttct

SEQ ID NO: 343147 - DNA, 30 bp, Artificial Sequence
  Synthetic oligonucleotide
taattaatcacattgccgttatgctgttct

SEQ ID NO: 343148 - DNA, 30 bp, Artificial Sequence
  Synthetic oligonucleotide
ttgtttcgttaaaaacgggtacggtgttct

SEQ ID NO: 343149 - DNA, 30 bp, Artificial Sequence
  Synthetic oligonucleotide
gcctcttccggttcgacattactttgttct

SEQ ID NO: 343150 - DNA, 30 bp, Artificial Sequence
  Synthetic oligonucleotide
taggatcagcgcgtaaataattcaatttct

SEQ ID NO: 343151 - DNA, 40 bp, Artificial Sequence
  Synthetic oligonucleotide
tctttttaaatctaatatttgagccctcatttccatttct

SEQ ID NO: 343152 - DNA, 30 bp, Artificial Sequence
  Synthetic oligonucleotide
tgcgtccggtggaatgttgtgagcatttct

SEQ ID NO: 343153 - DNA, 30 bp, Artificial Sequence
  Synthetic oligonucleotide
gcctagttcagaagcgggccgcggatttct

SEQ ID NO: 343154 - DNA, 30 bp, Artificial Sequence
  Synthetic oligonucleotide
agctggtataagggcaatagagatatttct

SEQ ID NO: 343155 - DNA, 30 bp, Artificial Sequence
  Synthetic oligonucleotide
gctactaaactgtgtcgcgagtacctttct

SEQ ID NO: 343156 - DNA, 30 bp, Artificial Sequence
  Synthetic oligonucleotide
gcatgaggaatttgttatataaccctttct

SEQ ID NO: 343157 - DNA, 30 bp, Artificial Sequence
  Synthetic oligonucleotide
tcaggtgtgtcccggaggccagtcctttct

SEQ ID NO: 343158 - DNA, 30 bp, Artificial Sequence
  Synthetic oligonucleotide
tgctgatttctaatcagtaggttgctttct

SEQ ID NO: 343159 - DNA, 30 bp, Artificial Sequence
  Synthetic oligonucleotide
cgtcattaaggctcaatctcgacagtttct

SEQ ID NO: 343160 - DNA, 30 bp, Artificial Sequence
  Synthetic oligonucleotide
ggcaaaattatttcggtctagggagtttct

SEQ ID NO: 343161 - DNA, 30 bp, Artificial Sequence
  Synthetic oligonucleotide
tccagagactcgcaccaatgtcaattttct

SEQ ID NO: 343162 - DNA, 30 bp, Artificial Sequence
  Synthetic oligonucleotide
gggaagttgagtaccgcgggaacattttct

SEQ ID NO: 343163 - DNA, 30 bp, Artificial Sequence
  Synthetic oligonucleotide
gcgatggcatggatcgtacaagttttttct

SEQ ID NO: 343164 - DNA, 30 bp, Artificial Sequence
  Synthetic oligonucleotide
gtggcacgtcatatcatagatttgaaaagt

SEQ ID NO: 343165 - DNA, 30 bp, Artificial Sequence
  Synthetic oligonucleotide
agtggtgtttgaatagtgggagctaaaagt

SEQ ID NO: 343166 - DNA, 30 bp, Artificial Sequence
  Synthetic oligonucleotide
tttcgacccctgtaaggcttaaaacaaagt

SEQ ID NO: 343167 - DNA, 30 bp, Artificial Sequence
  Synthetic oligonucleotide
gggcaggcggtaatttatagtaaacaaagt

SEQ ID NO: 343168 - DNA, 30 bp, Artificial Sequence
  Synthetic oligonucleotide
gtgctttcggaggccgaggtcacacaaagt

SEQ ID NO: 343169 - DNA, 30 bp, Artificial Sequence
  Synthetic oligonucleotide
acaggcgtttggatagcttgtgtacaaagt

SEQ ID NO: 343170 - DNA, 30 bp, Artificial Sequence
  Synthetic oligonucleotide
atccgcgttgttttcgagcataagcaaagt

SEQ ID NO: 343171 - DNA, 30 bp, Artificial Sequence
  Synthetic oligonucleotide
tttcaagcactgctgcgcagctagcaaagt

SEQ ID NO: 343172 - DNA, 30 bp, Artificial Sequence
  Synthetic oligonucleotide
tgcaatgtggtcgtaacgacatttcaaagt

SEQ ID NO: 343173 - DNA, 30 bp, Artificial Sequence
  Synthetic oligonucleotide
atcaatgcgcatccattggtaaaagaaagt

SEQ ID NO: 343174 - DNA, 30 bp, Artificial Sequence
  Synthetic oligonucleotide
agcccactgagcgtgcagtctcaagaaagt

SEQ ID NO: 343175 - DNA, 30 bp, Artificial Sequence
  Synthetic oligonucleotide
tcgcgcatcctgcggagatattgagaaagt

SEQ ID NO: 343176 - DNA, 30 bp, Artificial Sequence
  Synthetic oligonucleotide
agttgtgagggaattactagagacgaaagt

SEQ ID NO: 343177 - DNA, 30 bp, Artificial Sequence
  Synthetic oligonucleotide
taaactgtgctaaagaggtcacgcgaaagt

SEQ ID NO: 343178 - DNA, 30 bp, Artificial Sequence
  Synthetic oligonucleotide
tttagaattgacagggggcggcgctaaagt

SEQ ID NO: 343179 - DNA, 30 bp, Artificial Sequence
  Synthetic oligonucleotide
atatctgatcagtgcggactgggctaaagt

SEQ ID NO: 343180 - DNA, 30 bp, Artificial Sequence
  Synthetic oligonucleotide
tgagagacaagcgtatcttagacgtaaagt

SEQ ID NO: 343181 - DNA, 30 bp, Artificial Sequence
  Synthetic oligonucleotide
tagcccagataactttattctatgtaaagt

SEQ ID NO: 343182 - DNA, 30 bp, Artificial Sequence
  Synthetic oligonucleotide
aaaatgggactaaaatttcgatcttaaagt

SEQ ID NO: 343183 - DNA, 30 bp, Artificial Sequence
  Synthetic oligonucleotide
tagagtgggagcctttcgcgttcttaaagt

SEQ ID NO: 343184 - DNA, 30 bp, Artificial Sequence
  Synthetic oligonucleotide
agttcgaagggttccaattggatcacaagt

SEQ ID NO: 343185 - DNA, 30 bp, Artificial Sequence
  Synthetic oligonucleotide
gtgagtgcaatctatgttggtacgacaagt

SEQ ID NO: 343186 - DNA, 30 bp, Artificial Sequence
  Synthetic oligonucleotide
gctcttttcgaagggtatatggcgacaagt

SEQ ID NO: 343187 - DNA, 30 bp, Artificial Sequence
  Synthetic oligonucleotide
ggactgttctgtaggagataggggacaagt

SEQ ID NO: 343188 - DNA, 30 bp, Artificial Sequence
  Synthetic oligonucleotide
gtatctataggtggcaggtgactgacaagt

SEQ ID NO: 343189 - DNA, 30 bp, Artificial Sequence
  Synthetic oligonucleotide
gttggggatttcccaaaagtcaatacaagt

SEQ ID NO: 343190 - DNA, 30 bp, Artificial Sequence
  Synthetic oligonucleotide
cgggagtgcatacattgatgggatacaagt

SEQ ID NO: 343191 - DNA, 30 bp, Artificial Sequence
  Synthetic oligonucleotide
gttgttgtttaagaaactgcctgtacaagt

SEQ ID NO: 343192 - DNA, 30 bp, Artificial Sequence
  Synthetic oligonucleotide
ccattttgggctcgctccagcgttacaagt

SEQ ID NO: 343193 - DNA, 30 bp, Artificial Sequence
  Synthetic oligonucleotide
taataaaggttgtgggaagtgaaaccaagt

SEQ ID NO: 343194 - DNA, 30 bp, Artificial Sequence
  Synthetic oligonucleotide
aagtctgcggggatgagctgctgaccaagt

SEQ ID NO: 343195 - DNA, 30 bp, Artificial Sequence
  Synthetic oligonucleotide
cggtcatagtctgtccagcaggccccaagt

SEQ ID NO: 343196 - DNA, 30 bp, Artificial Sequence
  Synthetic oligonucleotide
gcggttaaccttcaggatggggtcccaagt

SEQ ID NO: 343197 - DNA, 30 bp, Artificial Sequence
  Synthetic oligonucleotide
ttggttcgtgaatagtcacaccagccaagt

SEQ ID NO: 343198 - DNA, 30 bp, Artificial Sequence
  Synthetic oligonucleotide
gttggatagcatcgcggcttggtgccaagt

SEQ ID NO: 343199 - DNA, 30 bp, Artificial Sequence
  Synthetic oligonucleotide
taccatcggattgtcgcccgttgtccaagt

SEQ ID NO: 343200 - DNA, 30 bp, Artificial Sequence
  Synthetic oligonucleotide
taactggtgaacagattgcacgacgcaagt

SEQ ID NO: 343201 - DNA, 30 bp, Artificial Sequence
  Synthetic oligonucleotide
cgtatgtgatccgcagttggttacgcaagt

SEQ ID NO: 343202 - DNA, 30 bp, Artificial Sequence
  Synthetic oligonucleotide
tgcccaagcttgggcatctgattcgcaagt

SEQ ID NO: 343203 - DNA, 30 bp, Artificial Sequence
  Synthetic oligonucleotide
tttcggtgtgtaactctggattaggcaagt

SEQ ID NO: 343204 - DNA, 30 bp, Artificial Sequence
  Synthetic oligonucleotide
ccatggaaatcgccgcgaacttcatcaagt

SEQ ID NO: 343205 - DNA, 30 bp, Artificial Sequence
  Synthetic oligonucleotide
ccggttcgatcggttcacaactgatcaagt

SEQ ID NO: 343206 - DNA, 30 bp, Artificial Sequence
  Synthetic oligonucleotide
tacacagcagacaaggaaatcgtatcaagt

SEQ ID NO: 343207 - DNA, 30 bp, Artificial Sequence
  Synthetic oligonucleotide
gatacttgatgatcgaaacatcactcaagt

SEQ ID NO: 343208 - DNA, 30 bp, Artificial Sequence
  Synthetic oligonucleotide
caaatttacgtgtgttgcaacgactcaagt

SEQ ID NO: 343209 - DNA, 30 bp, Artificial Sequence
  Synthetic oligonucleotide
aattaaccgactactccagcttcctcaagt

SEQ ID NO: 343210 - DNA, 30 bp, Artificial Sequence
  Synthetic oligonucleotide
gaccactatcacttctaaaatgtctcaagt

SEQ ID NO: 343211 - DNA, 30 bp, Artificial Sequence
  Synthetic oligonucleotide
tttgtgggctagccatttatgccgtcaagt

SEQ ID NO: 343212 - DNA, 30 bp, Artificial Sequence
  Synthetic oligonucleotide
tggaatgttctcttcggtgcggcgtcaagt

SEQ ID NO: 343213 - DNA, 30 bp, Artificial Sequence
  Synthetic oligonucleotide
accttctccgcaatattgatgaggtcaagt

SEQ ID NO: 343214 - DNA, 30 bp, Artificial Sequence
  Synthetic oligonucleotide
tacctggcggggcggggagagctgtcaagt

SEQ ID NO: 343215 - DNA, 30 bp, Artificial Sequence
  Synthetic oligonucleotide
ctacgatacaggctctattggctgtcaagt

SEQ ID NO: 343216 - DNA, 30 bp, Artificial Sequence
  Synthetic oligonucleotide
tgacggcagcttaaacacaccaattcaagt

SEQ ID NO: 343217 - DNA, 30 bp, Artificial Sequence
  Synthetic oligonucleotide
ggacgtagcggatcattacgacattcaagt

SEQ ID NO: 343218 - DNA, 30 bp, Artificial Sequence
  Synthetic oligonucleotide
tcgggaggctgtccaagcggacattcaagt

SEQ ID NO: 343219 - DNA, 30 bp, Artificial Sequence
  Synthetic oligonucleotide
gcgggtccaagcgcgagatattgttcaagt

SEQ ID NO: 343220 - DNA, 30 bp, Artificial Sequence
  Synthetic oligonucleotide
ccactgacgccccgattgcatgtttcaagt

SEQ ID NO: 343221 - DNA, 30 bp, Artificial Sequence
  Synthetic oligonucleotide
gcataccggtagttattaagggaaagaagt

SEQ ID NO: 343222 - DNA, 30 bp, Artificial Sequence
  Synthetic oligonucleotide
gaattcacatgatccatgcttagaagaagt

SEQ ID NO: 343223 - DNA, 30 bp, Artificial Sequence
  Synthetic oligonucleotide
caccaaagacgatagccctggtacagaagt

SEQ ID NO: 343224 - DNA, 29 bp, Artificial Sequence
  Synthetic oligonucleotide
cataggaacaccggttttaactcagaagt

SEQ ID NO: 343225 - DNA, 30 bp, Artificial Sequence
  Synthetic oligonucleotide
taatagcctcggcccaacttggtgagaagt

SEQ ID NO: 343226 - DNA, 30 bp, Artificial Sequence
  Synthetic oligonucleotide
gagggataagcgcccgcatatggtagaagt

SEQ ID NO: 343227 - DNA, 30 bp, Artificial Sequence
  Synthetic oligonucleotide
actattctgttcctgcgaagagttagaagt

SEQ ID NO: 343228 - DNA, 30 bp, Artificial Sequence
  Synthetic oligonucleotide
cgtggcctggtctttcgtgccgatcgaagt

SEQ ID NO: 343229 - DNA, 30 bp, Artificial Sequence
  Synthetic oligonucleotide
ggacgcagttcataatgtcgaaatggaagt

SEQ ID NO: 343230 - DNA, 30 bp, Artificial Sequence
  Synthetic oligonucleotide
cctatttcttcgcccccggccaatggaagt

SEQ ID NO: 343231 - DNA, 30 bp, Artificial Sequence
  Synthetic oligonucleotide
ctagtaccgggtcgaagcatcggatgaagt

SEQ ID NO: 343232 - DNA, 30 bp, Artificial Sequence
  Synthetic oligonucleotide
ttgtgcatatacttggacgcgtcctgaagt

SEQ ID NO: 343233 - DNA, 30 bp, Artificial Sequence
  Synthetic oligonucleotide
tgccttaggtgccggatggttaagtgaagt

SEQ ID NO: 343234 - DNA, 30 bp, Artificial Sequence
  Synthetic oligonucleotide
accgccagaagagccgctgattagtgaagt

SEQ ID NO: 343235 - DNA, 30 bp, Artificial Sequence
  Synthetic oligonucleotide
cgccggctaagaatctccatcgcgtgaagt

SEQ ID NO: 343236 - DNA, 30 bp, Artificial Sequence
  Synthetic oligonucleotide
cattggacctaagtcgactaagtgtgaagt

SEQ ID NO: 343237 - DNA, 30 bp, Artificial Sequence
  Synthetic oligonucleotide
cagtaatataattttacctttttgtgaagt

SEQ ID NO: 343238 - DNA, 30 bp, Artificial Sequence
  Synthetic oligonucleotide
ttgcaacaacactttgacgcgcattgaagt

SEQ ID NO: 343239 - DNA, 30 bp, Artificial Sequence
  Synthetic oligonucleotide
cttataaacagggtcggcgttctttgaagt

SEQ ID NO: 343240 - DNA, 30 bp, Artificial Sequence
  Synthetic oligonucleotide
ggggaaagatcgctgaaccaagtttgaagt

SEQ ID NO: 343241 - DNA, 30 bp, Artificial Sequence
  Synthetic oligonucleotide
tgtggaatccagcgcgaagattacataagt

SEQ ID NO: 343242 - DNA, 30 bp, Artificial Sequence
  Synthetic oligonucleotide
agggctcctcagttacaccagcccataagt

SEQ ID NO: 343243 - DNA, 30 bp, Artificial Sequence
  Synthetic oligonucleotide
ttattgggataggtggcctgatgcataagt

SEQ ID NO: 343244 - DNA, 30 bp, Artificial Sequence
  Synthetic oligonucleotide
tgagagaccggtcttgaagttcagataagt

SEQ ID NO: 343245 - DNA, 30 bp, Artificial Sequence
  Synthetic oligonucleotide
atcaatgcgttttgttcttttaggataagt

SEQ ID NO: 343246 - DNA, 30 bp, Artificial Sequence
  Synthetic oligonucleotide
ggtacagagaggggcacttgcatgataagt

SEQ ID NO: 343247 - DNA, 30 bp, Artificial Sequence
  Synthetic oligonucleotide
acattcaactgtattatgccaactataagt

SEQ ID NO: 343248 - DNA, 30 bp, Artificial Sequence
  Synthetic oligonucleotide
acatgattctatttcggggttgttataagt

SEQ ID NO: 343249 - DNA, 30 bp, Artificial Sequence
  Synthetic oligonucleotide
cagaaaatagttcatactcacaaactaagt

SEQ ID NO: 343250 - DNA, 30 bp, Artificial Sequence
  Synthetic oligonucleotide
acaaactgtctatgtgctgtaccactaagt

SEQ ID NO: 343251 - DNA, 30 bp, Artificial Sequence
  Synthetic oligonucleotide
cggcgtgtactatgccgtgttcgactaagt

SEQ ID NO: 343252 - DNA, 30 bp, Artificial Sequence
  Synthetic oligonucleotide
gccgatcgcaatgttttgcgttgactaagt

SEQ ID NO: 343253 - DNA, 30 bp, Artificial Sequence
  Synthetic oligonucleotide
tgcttagggtccgcagacagggacctaagt

SEQ ID NO: 343254 - DNA, 30 bp, Artificial Sequence
  Synthetic oligonucleotide
agttaattcctgatgagattgcttctaagt

SEQ ID NO: 343255 - DNA, 29 bp, Artificial Sequence
  Synthetic oligonucleotide
ttgaatggaatacgtttaaaaacgtaagt

SEQ ID NO: 343256 - DNA, 30 bp, Artificial Sequence
  Synthetic oligonucleotide
gtgatggtagagctacggtaattcgtaagt

SEQ ID NO: 343257 - DNA, 30 bp, Artificial Sequence
  Synthetic oligonucleotide
gcgcttgcctcgctattcgggttcgtaagt

SEQ ID NO: 343258 - DNA, 30 bp, Artificial Sequence
  Synthetic oligonucleotide
ctagtatgagcagctattatatttgtaagt

SEQ ID NO: 343259 - DNA, 30 bp, Artificial Sequence
  Synthetic oligonucleotide
tagtagcggtaagcagtgtttcgattaagt

SEQ ID NO: 343260 - DNA, 30 bp, Artificial Sequence
  Synthetic oligonucleotide
aatggtgcatgatttaaggtgctcttaagt

SEQ ID NO: 343261 - DNA, 30 bp, Artificial Sequence
  Synthetic oligonucleotide
gggaaaactcatcggttatcccatttaagt

SEQ ID NO: 343262 - DNA, 30 bp, Artificial Sequence
  Synthetic oligonucleotide
atctgaaaatctaaggtgacgattttaagt

SEQ ID NO: 343263 - DNA, 30 bp, Artificial Sequence
  Synthetic oligonucleotide
gccaactggtctctacgaaggggaaacagt

SEQ ID NO: 343264 - DNA, 30 bp, Artificial Sequence
  Synthetic oligonucleotide
acttgcaacaagggcctataatgcaacagt

SEQ ID NO: 343265 - DNA, 30 bp, Artificial Sequence
  Synthetic oligonucleotide
ttgcagctgaagggcacatatcataacagt

SEQ ID NO: 343266 - DNA, 30 bp, Artificial Sequence
  Synthetic oligonucleotide
gctgtagtcgcttttcagggcattaacagt

SEQ ID NO: 343267 - DNA, 30 bp, Artificial Sequence
  Synthetic oligonucleotide
ggggcacgtggataagggccgcggcacagt

SEQ ID NO: 343268 - DNA, 30 bp, Artificial Sequence
  Synthetic oligonucleotide
cccgcgacggagggcgagagtgggcacagt

SEQ ID NO: 343269 - DNA, 30 bp, Artificial Sequence
  Synthetic oligonucleotide
gaacccgtaacatagtagtgttggcacagt

SEQ ID NO: 343270 - DNA, 30 bp, Artificial Sequence
  Synthetic oligonucleotide
tacaggacggagtgtttgtagaatcacagt

SEQ ID NO: 343271 - DNA, 30 bp, Artificial Sequence
  Synthetic oligonucleotide
acgtcgggtgacctttgggacaaagacagt

SEQ ID NO: 343272 - DNA, 30 bp, Artificial Sequence
  Synthetic oligonucleotide
aacgcatattccgtacagcactatgacagt

SEQ ID NO: 343273 - DNA, 30 bp, Artificial Sequence
  Synthetic oligonucleotide
ctgtttttgtacaagaccgcttctgacagt

SEQ ID NO: 343274 - DNA, 30 bp, Artificial Sequence
  Synthetic oligonucleotide
ggtatagggtccgttacaaacgcatacagt

SEQ ID NO: 343275 - DNA, 30 bp, Artificial Sequence
  Synthetic oligonucleotide
cactgtagacagggttcacgaccctacagt

SEQ ID NO: 343276 - DNA, 30 bp, Artificial Sequence
  Synthetic oligonucleotide
gcactctacagtctaaatgacaattacagt

SEQ ID NO: 343277 - DNA, 30 bp, Artificial Sequence
  Synthetic oligonucleotide
ggtaacgacgttatcgtcaggtcttacagt

SEQ ID NO: 343278 - DNA, 30 bp, Artificial Sequence
  Synthetic oligonucleotide
gtggttatgaaattataggctcaaaccagt

SEQ ID NO: 343279 - DNA, 30 bp, Artificial Sequence
  Synthetic oligonucleotide
tcagtaatgtaaacagtcgtttaaaccagt

SEQ ID NO: 343280 - DNA, 30 bp, Artificial Sequence
  Synthetic oligonucleotide
acaaatcgtccatcaagtccaggaaccagt

SEQ ID NO: 343281 - DNA, 30 bp, Artificial Sequence
  Synthetic oligonucleotide
gccgccagtgctgggtggtgttacaccagt

SEQ ID NO: 343282 - DNA, 30 bp, Artificial Sequence
  Synthetic oligonucleotide
ttgacattttcaatgcaggtaatgaccagt

SEQ ID NO: 343283 - DNA, 30 bp, Artificial Sequence
  Synthetic oligonucleotide
caactatggccagtcggcgataataccagt

SEQ ID NO: 343284 - DNA, 30 bp, Artificial Sequence
  Synthetic oligonucleotide
tagccttcatgatgtcgaggctataccagt

SEQ ID NO: 343285 - DNA, 30 bp, Artificial Sequence
  Synthetic oligonucleotide
acggaattgctgagggccgtaggtaccagt

SEQ ID NO: 343286 - DNA, 30 bp, Artificial Sequence
  Synthetic oligonucleotide
caactgtataatcgccagaataaacccagt

SEQ ID NO: 343287 - DNA, 30 bp, Artificial Sequence
  Synthetic oligonucleotide
aggctcacacgttatactcccatacccagt

SEQ ID NO: 343288 - DNA, 30 bp, Artificial Sequence
  Synthetic oligonucleotide
ggaacatgttgtatagacagcggtcccagt

SEQ ID NO: 343289 - DNA, 30 bp, Artificial Sequence
  Synthetic oligonucleotide
agtcttgagaagccaaaggagtcagccagt

SEQ ID NO: 343290 - DNA, 30 bp, Artificial Sequence
  Synthetic oligonucleotide
gaatatgaatctctgcccgttggagccagt

SEQ ID NO: 343291 - DNA, 30 bp, Artificial Sequence
  Synthetic oligonucleotide
atcatctcagaagtccaaatggcggccagt

SEQ ID NO: 343292 - DNA, 30 bp, Artificial Sequence
  Synthetic oligonucleotide
gggcgtttgcggggctatcctagggccagt

SEQ ID NO: 343293 - DNA, 30 bp, Artificial Sequence
  Synthetic oligonucleotide
agcaacgttcatgtccgtacttgggccagt

SEQ ID NO: 343294 - DNA, 30 bp, Artificial Sequence
  Synthetic oligonucleotide
catgatgcctcggccgggtcatctgccagt

SEQ ID NO: 343295 - DNA, 30 bp, Artificial Sequence
  Synthetic oligonucleotide
tcatcaatgttgtctcctgcaattgccagt

SEQ ID NO: 343296 - DNA, 30 bp, Artificial Sequence
  Synthetic oligonucleotide
caagatcccaggtcgtcattgtcctccagt

SEQ ID NO: 343297 - DNA, 30 bp, Artificial Sequence
  Synthetic oligonucleotide
atgtttgcataacgtctgatactctccagt

SEQ ID NO: 343298 - DNA, 31 bp, Artificial Sequence
  Synthetic oligonucleotide
gggcggggtctaaaataggcccctctccagt

SEQ ID NO: 343299 - DNA, 30 bp, Artificial Sequence
  Synthetic oligonucleotide
caagcgtaactgtccggacagctgtccagt

SEQ ID NO: 343300 - DNA, 30 bp, Artificial Sequence
  Synthetic oligonucleotide
atgctatgtaccgaaaagagaatttccagt

SEQ ID NO: 343301 - DNA, 30 bp, Artificial Sequence
  Synthetic oligonucleotide
aaccccgggaggcatcaaatgggaagcagt

SEQ ID NO: 343302 - DNA, 30 bp, Artificial Sequence
  Synthetic oligonucleotide
ctacgggcggacgcgtggcaggagagcagt

SEQ ID NO: 343303 - DNA, 30 bp, Artificial Sequence
  Synthetic oligonucleotide
taaatcagtggggtattgcccactagcagt

SEQ ID NO: 343304 - DNA, 30 bp, Artificial Sequence
  Synthetic oligonucleotide
gctacgataccctttgacgcgtctagcagt

SEQ ID NO: 343305 - DNA, 30 bp, Artificial Sequence
  Synthetic oligonucleotide
agtacttatgcgcacgatagtcttagcagt

SEQ ID NO: 343306 - DNA, 30 bp, Artificial Sequence
  Synthetic oligonucleotide
gaaagaagggagtttggggcacggcgcagt

SEQ ID NO: 343307 - DNA, 30 bp, Artificial Sequence
  Synthetic oligonucleotide
tctctctgaaccaacttcggaatgcgcagt

SEQ ID NO: 343308 - DNA, 30 bp, Artificial Sequence
  Synthetic oligonucleotide
gggcgccacggacacgtgagtgatcgcagt

SEQ ID NO: 343309 - DNA, 30 bp, Artificial Sequence
  Synthetic oligonucleotide
gaggatgtcacattgtgtattgtaggcagt

SEQ ID NO: 343310 - DNA, 30 bp, Artificial Sequence
  Synthetic oligonucleotide
ggtcggtctggtagcattatacagggcagt

SEQ ID NO: 343311 - DNA, 30 bp, Artificial Sequence
  Synthetic oligonucleotide
ggggggccggtgttcacgcgaaggggcagt

SEQ ID NO: 343312 - DNA, 30 bp, Artificial Sequence
  Synthetic oligonucleotide
tgactatccgcacccaatttcgcatgcagt

SEQ ID NO: 343313 - DNA, 30 bp, Artificial Sequence
  Synthetic oligonucleotide
ggttcataatgtaggttaaactcatgcagt

SEQ ID NO: 343314 - DNA, 30 bp, Artificial Sequence
  Synthetic oligonucleotide
gaacacgatgaactctgtggatagtgcagt

SEQ ID NO: 343315 - DNA, 30 bp, Artificial Sequence
  Synthetic oligonucleotide
gctctcagagcctatcttgtacgttgcagt

SEQ ID NO: 343316 - DNA, 30 bp, Artificial Sequence
  Synthetic oligonucleotide
cgacctagcatctgttctgctaaaatcagt

SEQ ID NO: 343317 - DNA, 30 bp, Artificial Sequence
  Synthetic oligonucleotide
agcttcgcaagactcccgaatgtcatcagt

SEQ ID NO: 343318 - DNA, 30 bp, Artificial Sequence
  Synthetic oligonucleotide
ctggttagaccccgctcgtgtgtcatcagt

SEQ ID NO: 343319 - DNA, 30 bp, Artificial Sequence
  Synthetic oligonucleotide
cttaagcccatgtgcgaactatctatcagt

SEQ ID NO: 343320 - DNA, 30 bp, Artificial Sequence
  Synthetic oligonucleotide
gaagcgagggttcaactactcagactcagt

SEQ ID NO: 343321 - DNA, 30 bp, Artificial Sequence
  Synthetic oligonucleotide
tcatcgaagatacatgatcgagtactcagt

SEQ ID NO: 343322 - DNA, 30 bp, Artificial Sequence
  Synthetic oligonucleotide
aactggaaaattagaaggtcaaacctcagt

SEQ ID NO: 343323 - DNA, 30 bp, Artificial Sequence
  Synthetic oligonucleotide
attgtaccgaactaataacaacctctcagt

SEQ ID NO: 343324 - DNA, 30 bp, Artificial Sequence
  Synthetic oligonucleotide
gtacaccggtacgagcagtatctagtcagt

SEQ ID NO: 343325 - DNA, 30 bp, Artificial Sequence
  Synthetic oligonucleotide
ctctcaggctaataaccactgagggtcagt

SEQ ID NO: 343326 - DNA, 30 bp, Artificial Sequence
  Synthetic oligonucleotide
tgggtggcttggatgggcttactggtcagt

SEQ ID NO: 343327 - DNA, 30 bp, Artificial Sequence
  Synthetic oligonucleotide
acgtctgtttttgaagaaatgcttgtcagt

SEQ ID NO: 343328 - DNA, 30 bp, Artificial Sequence
  Synthetic oligonucleotide
caagatcgtcaattactgcaggttgtcagt

SEQ ID NO: 343329 - DNA, 30 bp, Artificial Sequence
  Synthetic oligonucleotide
ttacgcggataagtttctcacaaattcagt

SEQ ID NO: 343330 - DNA, 30 bp, Artificial Sequence
  Synthetic oligonucleotide
aattgggggttttattataacatattcagt

SEQ ID NO: 343331 - DNA, 30 bp, Artificial Sequence
  Synthetic oligonucleotide
agcgttccttaactacggatcatattcagt

SEQ ID NO: 343332 - DNA, 30 bp, Artificial Sequence
  Synthetic oligonucleotide
taaggacctttgggctgacatgtcttcagt

SEQ ID NO: 343333 - DNA, 30 bp, Artificial Sequence
  Synthetic oligonucleotide
tgccgtgcgacggggttgtatttcttcagt

SEQ ID NO: 343334 - DNA, 30 bp, Artificial Sequence
  Synthetic oligonucleotide
agtcaggggaagagttggtgaaatttcagt

SEQ ID NO: 343335 - DNA, 30 bp, Artificial Sequence
  Synthetic oligonucleotide
tttggagtccacaactatcgcggaaagagt

SEQ ID NO: 343336 - DNA, 30 bp, Artificial Sequence
  Synthetic oligonucleotide
cgggaattttcttgtaaaagctccaagagt

SEQ ID NO: 343337 - DNA, 30 bp, Artificial Sequence
  Synthetic oligonucleotide
tattcatcgaacgcagaggggcaacagagt

SEQ ID NO: 343338 - DNA, 30 bp, Artificial Sequence
  Synthetic oligonucleotide
ttagtccggggaaaattgggagtacagagt

SEQ ID NO: 343339 - DNA, 30 bp, Artificial Sequence
  Synthetic oligonucleotide
atctggttggttactctcagactccagagt

SEQ ID NO: 343340 - DNA, 30 bp, Artificial Sequence
  Synthetic oligonucleotide
gtaagattcaggtggagaaaagcgcagagt

SEQ ID NO: 343341 - DNA, 30 bp, Artificial Sequence
  Synthetic oligonucleotide
ggggtgacgttgcaatcaggagtgcagagt

SEQ ID NO: 343342 - DNA, 30 bp, Artificial Sequence
  Synthetic oligonucleotide
tcctttcggccgtaggcgcccacagagagt

SEQ ID NO: 343343 - DNA, 30 bp, Artificial Sequence
  Synthetic oligonucleotide
ctggtaactacaaaagtggggtacgagagt

SEQ ID NO: 343344 - DNA, 30 bp, Artificial Sequence
  Synthetic oligonucleotide
ggcctgttgccatggccgcagaccgagagt

SEQ ID NO: 343345 - DNA, 30 bp, Artificial Sequence
  Synthetic oligonucleotide
atgaaatacacggaatcgtcgggcgagagt

SEQ ID NO: 343346 - DNA, 30 bp, Artificial Sequence
  Synthetic oligonucleotide
gccgactcaaagatctatatctaggagagt

SEQ ID NO: 343347 - DNA, 30 bp, Artificial Sequence
  Synthetic oligonucleotide
tgctcttcatgaacgttacgtagtgagagt

SEQ ID NO: 343348 - DNA, 30 bp, Artificial Sequence
  Synthetic oligonucleotide
aggctcgttaccatctctatggaatagagt

SEQ ID NO: 343349 - DNA, 30 bp, Artificial Sequence
  Synthetic oligonucleotide
ctgtctatgtaccggataatcacatagagt

SEQ ID NO: 343350 - DNA, 30 bp, Artificial Sequence
  Synthetic oligonucleotide
tcttacagggctacccgcggctattagagt

SEQ ID NO: 343351 - DNA, 30 bp, Artificial Sequence
  Synthetic oligonucleotide
gagtatccgttggatgccgccagttagagt

SEQ ID NO: 343352 - DNA, 30 bp, Artificial Sequence
  Synthetic oligonucleotide
aattcggtacccctttgagatagttagagt

SEQ ID NO: 343353 - DNA, 30 bp, Artificial Sequence
  Synthetic oligonucleotide
cgtagctgcaactgatgctcgtcaacgagt

SEQ ID NO: 343354 - DNA, 30 bp, Artificial Sequence
  Synthetic oligonucleotide
ccgttgtgtaaacgaccagtaagaacgagt

SEQ ID NO: 343355 - DNA, 30 bp, Artificial Sequence
  Synthetic oligonucleotide
ttatcgcttaagaatcaggaacggacgagt

SEQ ID NO: 343356 - DNA, 30 bp, Artificial Sequence
  Synthetic oligonucleotide
ttatcgtgaatcccaatagtgcatacgagt

SEQ ID NO: 343357 - DNA, 30 bp, Artificial Sequence
  Synthetic oligonucleotide
aatgaggttgtgaacttggtacggccgagt

SEQ ID NO: 343358 - DNA, 30 bp, Artificial Sequence
  Synthetic oligonucleotide
gtcataaggtggagcggtcccggtccgagt

SEQ ID NO: 343359 - DNA, 30 bp, Artificial Sequence
  Synthetic oligonucleotide
gacttgttattttttgctcttaaatcgagt

SEQ ID NO: 343360 - DNA, 30 bp, Artificial Sequence
  Synthetic oligonucleotide
atccttggacgctaggcaccaagatcgagt

SEQ ID NO: 343361 - DNA, 30 bp, Artificial Sequence
  Synthetic oligonucleotide
ttaggatgcatggtatcgtcgggctcgagt

SEQ ID NO: 343362 - DNA, 30 bp, Artificial Sequence
  Synthetic oligonucleotide
ctttgggaaataagggggtcccagtcgagt

SEQ ID NO: 343363 - DNA, 30 bp, Artificial Sequence
  Synthetic oligonucleotide
gatttggcatgtgtgtaaagtgcgtcgagt

SEQ ID NO: 343364 - DNA, 30 bp, Artificial Sequence
  Synthetic oligonucleotide
tctgtaagcagttatatgactgggtcgagt

SEQ ID NO: 343365 - DNA, 30 bp, Artificial Sequence
  Synthetic oligonucleotide
agtacttatgtggtgaaggcgtggtcgagt

SEQ ID NO: 343366 - DNA, 30 bp, Artificial Sequence
  Synthetic oligonucleotide
caaactatcaggacttggagggattcgagt

SEQ ID NO: 343367 - DNA, 30 bp, Artificial Sequence
  Synthetic oligonucleotide
tttaatcgaaagaagcagagggcaaggagt

SEQ ID NO: 343368 - DNA, 30 bp, Artificial Sequence
  Synthetic oligonucleotide
ctagcattctggacacctgcagtaaggagt

SEQ ID NO: 343369 - DNA, 30 bp, Artificial Sequence
  Synthetic oligonucleotide
ccacgttttgtggttttggtatgcaggagt

SEQ ID NO: 343370 - DNA, 30 bp, Artificial Sequence
  Synthetic oligonucleotide
accccgaacgctccacgcatagagaggagt

SEQ ID NO: 343371 - DNA, 30 bp, Artificial Sequence
  Synthetic oligonucleotide
tgccccactaaatactacagtctgaggagt

SEQ ID NO: 343372 - DNA, 30 bp, Artificial Sequence
  Synthetic oligonucleotide
agttctaaaggaaaaaacccggataggagt

SEQ ID NO: 343373 - DNA, 30 bp, Artificial Sequence
  Synthetic oligonucleotide
cgtattggtgggtcatccggcgaacggagt

SEQ ID NO: 343374 - DNA, 30 bp, Artificial Sequence
  Synthetic oligonucleotide
cgtaaggtcagatgacttacggcacggagt

SEQ ID NO: 343375 - DNA, 30 bp, Artificial Sequence
  Synthetic oligonucleotide
atcctacatcgtgtaaccccactccggagt

SEQ ID NO: 343376 - DNA, 30 bp, Artificial Sequence
  Synthetic oligonucleotide
agactcgcctctcacagttgagagcggagt

SEQ ID NO: 343377 - DNA, 30 bp, Artificial Sequence
  Synthetic oligonucleotide
attaatgggattcggttgcgccaggggagt

SEQ ID NO: 343378 - DNA, 30 bp, Artificial Sequence
  Synthetic oligonucleotide
attgtgagtaaaacaattaccacggggagt

SEQ ID NO: 343379 - DNA, 30 bp, Artificial Sequence
  Synthetic oligonucleotide
gataccccttgaatcacctgaagggggagt

SEQ ID NO: 343380 - DNA, 30 bp, Artificial Sequence
  Synthetic oligonucleotide
gacttcgtaacccattaccgccgggggagt

SEQ ID NO: 343381 - DNA, 30 bp, Artificial Sequence
  Synthetic oligonucleotide
ttggatcgcaactacagttatagtgggagt

SEQ ID NO: 343382 - DNA, 30 bp, Artificial Sequence
  Synthetic oligonucleotide
cacctccaacattaatattgcggtgggagt

SEQ ID NO: 343383 - DNA, 30 bp, Artificial Sequence
  Synthetic oligonucleotide
caacgcaacgacgaattctgagaatggagt

SEQ ID NO: 343384 - DNA, 30 bp, Artificial Sequence
  Synthetic oligonucleotide
actctaaatgctaactaagtattatggagt

SEQ ID NO: 343385 - DNA, 30 bp, Artificial Sequence
  Synthetic oligonucleotide
ggtgtgatgaaactcccatgaccctggagt

SEQ ID NO: 343386 - DNA, 30 bp, Artificial Sequence
  Synthetic oligonucleotide
accccatgtcgattctgtagtccgtggagt

SEQ ID NO: 343387 - DNA, 30 bp, Artificial Sequence
  Synthetic oligonucleotide
atgcgctgttgttttacggtgaggtggagt

SEQ ID NO: 343388 - DNA, 30 bp, Artificial Sequence
  Synthetic oligonucleotide
agacttaacaatagacgatgtagttggagt

SEQ ID NO: 343389 - DNA, 30 bp, Artificial Sequence
  Synthetic oligonucleotide
aggattaggtcgcgccctgctcacatgagt

SEQ ID NO: 343390 - DNA, 30 bp, Artificial Sequence
  Synthetic oligonucleotide
gtggaacctccggccccccagaagatgagt

SEQ ID NO: 343391 - DNA, 30 bp, Artificial Sequence
  Synthetic oligonucleotide
tccgcccgggtataggcctgtcatatgagt

SEQ ID NO: 343392 - DNA, 30 bp, Artificial Sequence
  Synthetic oligonucleotide
tgtatatatgaagacgagcgagctatgagt

SEQ ID NO: 343393 - DNA, 30 bp, Artificial Sequence
  Synthetic oligonucleotide
gacaccgcaccagagattcttagtatgagt

SEQ ID NO: 343394 - DNA, 30 bp, Artificial Sequence
  Synthetic oligonucleotide
gtttccgtacacctctaacaaaacctgagt

SEQ ID NO: 343395 - DNA, 30 bp, Artificial Sequence
  Synthetic oligonucleotide
aattttttaaacaccaagggaaacctgagt

SEQ ID NO: 343396 - DNA, 30 bp, Artificial Sequence
  Synthetic oligonucleotide
ctgatataaaataatatgtgggtcctgagt

SEQ ID NO: 343397 - DNA, 30 bp, Artificial Sequence
  Synthetic oligonucleotide
atgcacagtagggccggcattgcagtgagt

SEQ ID NO: 343398 - DNA, 30 bp, Artificial Sequence
  Synthetic oligonucleotide
gaactgatgcaccgcattgctaacgtgagt

SEQ ID NO: 343399 - DNA, 30 bp, Artificial Sequence
  Synthetic oligonucleotide
aataaagggcggagagaagattaggtgagt

SEQ ID NO: 343400 - DNA, 30 bp, Artificial Sequence
  Synthetic oligonucleotide
cttagagtcacatgagtacatcgggtgagt

SEQ ID NO: 343401 - DNA, 30 bp, Artificial Sequence
  Synthetic oligonucleotide
catataatgtgcacacctaaaagtgtgagt

SEQ ID NO: 343402 - DNA, 30 bp, Artificial Sequence
  Synthetic oligonucleotide
agaccccgggtcatcaatcaatgattgagt

SEQ ID NO: 343403 - DNA, 30 bp, Artificial Sequence
  Synthetic oligonucleotide
ttgaacgaactcttgtggtctctattgagt

SEQ ID NO: 343404 - DNA, 30 bp, Artificial Sequence
  Synthetic oligonucleotide
aataacgcggcggcacccaataagttgagt

SEQ ID NO: 343405 - DNA, 30 bp, Artificial Sequence
  Synthetic oligonucleotide
ataagttgcttaagctcaatcatgttgagt

SEQ ID NO: 343406 - DNA, 30 bp, Artificial Sequence
  Synthetic oligonucleotide
ttagatcttcacagattgccggtgttgagt

SEQ ID NO: 343407 - DNA, 30 bp, Artificial Sequence
  Synthetic oligonucleotide
gcttccgctggaatcgtgtggattttgagt

SEQ ID NO: 343408 - DNA, 30 bp, Artificial Sequence
  Synthetic oligonucleotide
taccctcggtgtgatgggacaccaaatagt

SEQ ID NO: 343409 - DNA, 30 bp, Artificial Sequence
  Synthetic oligonucleotide
cattagacatcaactgcgtgcataaatagt

SEQ ID NO: 343410 - DNA, 30 bp, Artificial Sequence
  Synthetic oligonucleotide
ggagctattgctataagtttcgacaatagt

SEQ ID NO: 343411 - DNA, 30 bp, Artificial Sequence
  Synthetic oligonucleotide
gtatttaaggagggattcaagactaatagt

SEQ ID NO: 343412 - DNA, 30 bp, Artificial Sequence
  Synthetic oligonucleotide
ctagaaaagggtgaacgttagtgtaatagt

SEQ ID NO: 343413 - DNA, 30 bp, Artificial Sequence
  Synthetic oligonucleotide
ttgtaactgagaaagacgatttgacatagt

SEQ ID NO: 343414 - DNA, 30 bp, Artificial Sequence
  Synthetic oligonucleotide
ggtgtcgccaacccaccagaacaccatagt

SEQ ID NO: 343415 - DNA, 30 bp, Artificial Sequence
  Synthetic oligonucleotide
ctccataaagatagtttcagtacgcatagt

SEQ ID NO: 343416 - DNA, 30 bp, Artificial Sequence
  Synthetic oligonucleotide
ataggacgcgacttacctaacctgcatagt

SEQ ID NO: 343417 - DNA, 30 bp, Artificial Sequence
  Synthetic oligonucleotide
atcacgtacgtttcaagtctctacgatagt

SEQ ID NO: 343418 - DNA, 30 bp, Artificial Sequence
  Synthetic oligonucleotide
caaatacacacaaatcccttaaatgatagt

SEQ ID NO: 343419 - DNA, 30 bp, Artificial Sequence
  Synthetic oligonucleotide
ttgacgacgattgatgtacatcatgatagt

SEQ ID NO: 343420 - DNA, 30 bp, Artificial Sequence
  Synthetic oligonucleotide
tagttaaatagcagcgtccagccatatagt

SEQ ID NO: 343421 - DNA, 30 bp, Artificial Sequence
  Synthetic oligonucleotide
tgcgcaggattcgtatctgtgagatatagt

SEQ ID NO: 343422 - DNA, 30 bp, Artificial Sequence
  Synthetic oligonucleotide
agttattggacgctcgttagaggatatagt

SEQ ID NO: 343423 - DNA, 30 bp, Artificial Sequence
  Synthetic oligonucleotide
ccagtaaggcgtcgcggtatcttgtatagt

SEQ ID NO: 343424 - DNA, 30 bp, Artificial Sequence
  Synthetic oligonucleotide
tgccaagttgctgtgacctgatattatagt

SEQ ID NO: 343425 - DNA, 30 bp, Artificial Sequence
  Synthetic oligonucleotide
gagtatggttccgctaaggagtgttatagt

SEQ ID NO: 343426 - DNA, 30 bp, Artificial Sequence
  Synthetic oligonucleotide
atagtacgagccatggttacctaaactagt

SEQ ID NO: 343427 - DNA, 30 bp, Artificial Sequence
  Synthetic oligonucleotide
cgccagccttcgcaggtcaataacactagt

SEQ ID NO: 343428 - DNA, 30 bp, Artificial Sequence
  Synthetic oligonucleotide
tgacacctcgctagtatggctcccactagt

SEQ ID NO: 343429 - DNA, 30 bp, Artificial Sequence
  Synthetic oligonucleotide
gagtgttcgaggtgtactctaatcactagt

SEQ ID NO: 343430 - DNA, 30 bp, Artificial Sequence
  Synthetic oligonucleotide
gctttcacacattgaatcgaagcgactagt

SEQ ID NO: 343431 - DNA, 30 bp, Artificial Sequence
  Synthetic oligonucleotide
gatctaaagctgtccaagcctattactagt

SEQ ID NO: 343432 - DNA, 30 bp, Artificial Sequence
  Synthetic oligonucleotide
ttgaagtgcaataatagttagagccctagt

SEQ ID NO: 343433 - DNA, 30 bp, Artificial Sequence
  Synthetic oligonucleotide
gggtgaggacatcttgatgtagagcctagt

SEQ ID NO: 343434 - DNA, 30 bp, Artificial Sequence
  Synthetic oligonucleotide
ggcctcatgcatcctcggactgggcctagt

SEQ ID NO: 343435 - DNA, 30 bp, Artificial Sequence
  Synthetic oligonucleotide
tttgcaccctacggtccaaagtggcctagt

SEQ ID NO: 343436 - DNA, 30 bp, Artificial Sequence
  Synthetic oligonucleotide
tttacaggatccaatcggcaacatcctagt

SEQ ID NO: 343437 - DNA, 30 bp, Artificial Sequence
  Synthetic oligonucleotide
tgtggcagctcagattttgtatatcctagt

SEQ ID NO: 343438 - DNA, 30 bp, Artificial Sequence
  Synthetic oligonucleotide
tggcagttgtttctagcacccagtcctagt

SEQ ID NO: 343439 - DNA, 30 bp, Artificial Sequence
  Synthetic oligonucleotide
ccaccgtcctctcgtcaaagttttcctagt

SEQ ID NO: 343440 - DNA, 30 bp, Artificial Sequence
  Synthetic oligonucleotide
tcatcaggaatagaactgcgtatcgctagt

SEQ ID NO: 343441 - DNA, 30 bp, Artificial Sequence
  Synthetic oligonucleotide
atcgtaggacatgtgtctggtcaggctagt

SEQ ID NO: 343442 - DNA, 30 bp, Artificial Sequence
  Synthetic oligonucleotide
attctcagcatttgaggaagcacggctagt

SEQ ID NO: 343443 - DNA, 30 bp, Artificial Sequence
  Synthetic oligonucleotide
gatagctagatagttcattatccatctagt

SEQ ID NO: 343444 - DNA, 30 bp, Artificial Sequence
  Synthetic oligonucleotide
acagaatgtgcatgctacgtaatctctagt

SEQ ID NO: 343445 - DNA, 28 bp, Artificial Sequence
  Synthetic oligonucleotide
gctcggtttggacgtaaggaagtctagt

SEQ ID NO: 343446 - DNA, 30 bp, Artificial Sequence
  Synthetic oligonucleotide
tatgtcttgacgagctcattaacgtctagt

SEQ ID NO: 343447 - DNA, 30 bp, Artificial Sequence
  Synthetic oligonucleotide
acattggttaggggttcgggcacaagtagt

SEQ ID NO: 343448 - DNA, 30 bp, Artificial Sequence
  Synthetic oligonucleotide
aatccctcggttggtgagcatcgaagtagt

SEQ ID NO: 343449 - DNA, 30 bp, Artificial Sequence
  Synthetic oligonucleotide
cattataacgaatattatggcctaagtagt

SEQ ID NO: 343450 - DNA, 30 bp, Artificial Sequence
  Synthetic oligonucleotide
taggccctcatagaagttatgtccagtagt

SEQ ID NO: 343451 - DNA, 30 bp, Artificial Sequence
  Synthetic oligonucleotide
tccttcattggaaacccttagggcagtagt

SEQ ID NO: 343452 - DNA, 30 bp, Artificial Sequence
  Synthetic oligonucleotide
ccaacggcattcaagtatagattcagtagt

SEQ ID NO: 343453 - DNA, 30 bp, Artificial Sequence
  Synthetic oligonucleotide
cataatttgtggtgttccccggaacgtagt

SEQ ID NO: 343454 - DNA, 30 bp, Artificial Sequence
  Synthetic oligonucleotide
gacagatctgtatctgactagggacgtagt

SEQ ID NO: 343455 - DNA, 30 bp, Artificial Sequence
  Synthetic oligonucleotide
gaaggcaggtatgggtctggtctacgtagt

SEQ ID NO: 343456 - DNA, 30 bp, Artificial Sequence
  Synthetic oligonucleotide
acaggggttaggcagatgcgggtccgtagt

SEQ ID NO: 343457 - DNA, 30 bp, Artificial Sequence
  Synthetic oligonucleotide
agtctttattatggcaggtaaaagcgtagt

SEQ ID NO: 343458 - DNA, 30 bp, Artificial Sequence
  Synthetic oligonucleotide
ggaagagctgcaacacggctcacgcgtagt

SEQ ID NO: 343459 - DNA, 30 bp, Artificial Sequence
  Synthetic oligonucleotide
ttttgcacggggcgaatgtatgggcgtagt

SEQ ID NO: 343460 - DNA, 30 bp, Artificial Sequence
  Synthetic oligonucleotide
gactattgaccccgcctgtatcttcgtagt

SEQ ID NO: 343461 - DNA, 30 bp, Artificial Sequence
  Synthetic oligonucleotide
acgacctctgagacgaatcttgttcgtagt

SEQ ID NO: 343462 - DNA, 30 bp, Artificial Sequence
  Synthetic oligonucleotide
cgctttttttaattcaagcgacaaggtagt

SEQ ID NO: 343463 - DNA, 30 bp, Artificial Sequence
  Synthetic oligonucleotide
gacttgattaggaactacgttgaaggtagt

SEQ ID NO: 343464 - DNA, 30 bp, Artificial Sequence
  Synthetic oligonucleotide
cgtttaaagattgtgttcatataaggtagt

SEQ ID NO: 343465 - DNA, 30 bp, Artificial Sequence
  Synthetic oligonucleotide
catttaacatcttgcaactagacaggtagt

SEQ ID NO: 343466 - DNA, 30 bp, Artificial Sequence
  Synthetic oligonucleotide
gaggggggggtaaggttgtgggtaggtagt

SEQ ID NO: 343467 - DNA, 30 bp, Artificial Sequence
  Synthetic oligonucleotide
tatgagactgaagttcgaagccccggtagt

SEQ ID NO: 343468 - DNA, 30 bp, Artificial Sequence
  Synthetic oligonucleotide
ttacagccacagtttcagtcgtccggtagt

SEQ ID NO: 343469 - DNA, 30 bp, Artificial Sequence
  Synthetic oligonucleotide
gaaaaacaaggccagtcgtagatgggtagt

SEQ ID NO: 343470 - DNA, 30 bp, Artificial Sequence
  Synthetic oligonucleotide
tgcttccagctttacgttaacctgggtagt

SEQ ID NO: 343471 - DNA, 30 bp, Artificial Sequence
  Synthetic oligonucleotide
ttacatagatggatacttattgtgggtagt

SEQ ID NO: 343472 - DNA, 30 bp, Artificial Sequence
  Synthetic oligonucleotide
acgtagtaacttgtattaattagtggtagt

SEQ ID NO: 343473 - DNA, 30 bp, Artificial Sequence
  Synthetic oligonucleotide
aatacacaaattgtcgtatgacgtggtagt

SEQ ID NO: 343474 - DNA, 30 bp, Artificial Sequence
  Synthetic oligonucleotide
caatggggacgcaggcattaaagatgtagt

SEQ ID NO: 343475 - DNA, 30 bp, Artificial Sequence
  Synthetic oligonucleotide
ggtaatgccgggggtatggaggtctgtagt

SEQ ID NO: 343476 - DNA, 30 bp, Artificial Sequence
  Synthetic oligonucleotide
gctatccctatggcactctcctagtgtagt

SEQ ID NO: 343477 - DNA, 30 bp, Artificial Sequence
  Synthetic oligonucleotide
gtgataagggaagcctcctgagcgtgtagt

SEQ ID NO: 343478 - DNA, 30 bp, Artificial Sequence
  Synthetic oligonucleotide
atctatgtactagctgtcgactcgtgtagt

SEQ ID NO: 343479 - DNA, 30 bp, Artificial Sequence
  Synthetic oligonucleotide
catctacatactaggattcggctttgtagt

SEQ ID NO: 343480 - DNA, 30 bp, Artificial Sequence
  Synthetic oligonucleotide
aggaccttggaccgtacaggggtttgtagt

SEQ ID NO: 343481 - DNA, 30 bp, Artificial Sequence
  Synthetic oligonucleotide
ctctggcccgagttgccgactccaattagt

SEQ ID NO: 343482 - DNA, 30 bp, Artificial Sequence
  Synthetic oligonucleotide
ctaagtagctatttgtctgggaacattagt

SEQ ID NO: 343483 - DNA, 30 bp, Artificial Sequence
  Synthetic oligonucleotide
cgctgtgttatgaactttaggaccattagt

SEQ ID NO: 343484 - DNA, 30 bp, Artificial Sequence
  Synthetic oligonucleotide
ctcgaagggggcaggtttatggggattagt

SEQ ID NO: 343485 - DNA, 30 bp, Artificial Sequence
  Synthetic oligonucleotide
ctcctaaatcgctcggcaggaattattagt

SEQ ID NO: 343486 - DNA, 30 bp, Artificial Sequence
  Synthetic oligonucleotide
gtggtgcaacagcggggccatgtacttagt

SEQ ID NO: 343487 - DNA, 30 bp, Artificial Sequence
  Synthetic oligonucleotide
atattagttagtggagcgtaatgccttagt

SEQ ID NO: 343488 - DNA, 30 bp, Artificial Sequence
  Synthetic oligonucleotide
gcagcgctacacggactcagcaggcttagt

SEQ ID NO: 343489 - DNA, 30 bp, Artificial Sequence
  Synthetic oligonucleotide
taactaaacggtacataccacgtgcttagt

SEQ ID NO: 343490 - DNA, 30 bp, Artificial Sequence
  Synthetic oligonucleotide
aggtaagatcggtgttgattaggtcttagt

SEQ ID NO: 343491 - DNA, 30 bp, Artificial Sequence
  Synthetic oligonucleotide
gcgacctaagactcagcgcccgttcttagt

SEQ ID NO: 343492 - DNA, 30 bp, Artificial Sequence
  Synthetic oligonucleotide
agacttcgtggtgttaagagatcagttagt

SEQ ID NO: 343493 - DNA, 30 bp, Artificial Sequence
  Synthetic oligonucleotide
cagagctaccccacatgctttggagttagt

SEQ ID NO: 343494 - DNA, 30 bp, Artificial Sequence
  Synthetic oligonucleotide
tttggtagatcaatccttggaacggttagt

SEQ ID NO: 343495 - DNA, 30 bp, Artificial Sequence
  Synthetic oligonucleotide
gctaggtatgaaaggggtagcagggttagt

SEQ ID NO: 343496 - DNA, 30 bp, Artificial Sequence
  Synthetic oligonucleotide
gaaacggtaaagttcacatcaggggttagt

SEQ ID NO: 343497 - DNA, 30 bp, Artificial Sequence
  Synthetic oligonucleotide
gtgttagatcactcaggtcctttggttagt

SEQ ID NO: 343498 - DNA, 30 bp, Artificial Sequence
  Synthetic oligonucleotide
gtagcatctagtccgagacaatcatttagt

SEQ ID NO: 343499 - DNA, 30 bp, Artificial Sequence
  Synthetic oligonucleotide
gttacaatgagactgttgatcgtatttagt

SEQ ID NO: 343500 - DNA, 30 bp, Artificial Sequence
  Synthetic oligonucleotide
gctaccgtcgttctattaccgtgctttagt

SEQ ID NO: 343501 - DNA, 29 bp, Artificial Sequence
  Synthetic oligonucleotide
ccggaagctggttatatagaccgtttagt

SEQ ID NO: 343502 - DNA, 30 bp, Artificial Sequence
  Synthetic oligonucleotide
ccctgtggcactcacctagaggtgtttagt

SEQ ID NO: 343503 - DNA, 30 bp, Artificial Sequence
  Synthetic oligonucleotide
aaggtcgaatggtacggtaggttgtttagt

SEQ ID NO: 343504 - DNA, 30 bp, Artificial Sequence
  Synthetic oligonucleotide
aagtagatcgttgtaagcctgatttttagt

SEQ ID NO: 343505 - DNA, 30 bp, Artificial Sequence
  Synthetic oligonucleotide
catcttggataacgaattttagcaaaacgt

SEQ ID NO: 343506 - DNA, 30 bp, Artificial Sequence
  Synthetic oligonucleotide
gctatcatggaactcgaaactgcaaaacgt

SEQ ID NO: 343507 - DNA, 30 bp, Artificial Sequence
  Synthetic oligonucleotide
acaaatcgcgcgtgaataggtataaaacgt

SEQ ID NO: 343508 - DNA, 30 bp, Artificial Sequence
  Synthetic oligonucleotide
ccaaacagaatgcaacgcgtttacaaacgt

SEQ ID NO: 343509 - DNA, 30 bp, Artificial Sequence
  Synthetic oligonucleotide
tgttcttgatcaaaaatatgtcgcaaacgt

SEQ ID NO: 343510 - DNA, 30 bp, Artificial Sequence
  Synthetic oligonucleotide
aacttcgtggcgagtcggatacaacaacgt

SEQ ID NO: 343511 - DNA, 30 bp, Artificial Sequence
  Synthetic oligonucleotide
ccaaagcgacgtgtgtatcccagacaacgt

SEQ ID NO: 343512 - DNA, 30 bp, Artificial Sequence
  Synthetic oligonucleotide
atcggcatggacgctatacacgcgcaacgt

SEQ ID NO: 343513 - DNA, 30 bp, Artificial Sequence
  Synthetic oligonucleotide
aacaattaagacagcgtatctacagaacgt

SEQ ID NO: 343514 - DNA, 30 bp, Artificial Sequence
  Synthetic oligonucleotide
ggtcaacggctatattacgaggacgaacgt

SEQ ID NO: 343515 - DNA, 31 bp, Artificial Sequence
  Synthetic oligonucleotide
acactgatatatcggcatatgagaataacgt

SEQ ID NO: 343516 - DNA, 30 bp, Artificial Sequence
  Synthetic oligonucleotide
gaatcaattattacaaataaggaataacgt

SEQ ID NO: 343517 - DNA, 30 bp, Artificial Sequence
  Synthetic oligonucleotide
cttaataactgatatggtaatcactaacgt

SEQ ID NO: 343518 - DNA, 30 bp, Artificial Sequence
  Synthetic oligonucleotide
tagggagcgtgtttttcaaatctgtaacgt

SEQ ID NO: 343519 - DNA, 30 bp, Artificial Sequence
  Synthetic oligonucleotide
taagccgcactctgaaagtcgatttaacgt

SEQ ID NO: 343520 - DNA, 30 bp, Artificial Sequence
  Synthetic oligonucleotide
ccagtctagacttagaaatccctaacacgt

SEQ ID NO: 343521 - DNA, 30 bp, Artificial Sequence
  Synthetic oligonucleotide
tctagccatttgctatcagaaatgacacgt

SEQ ID NO: 343522 - DNA, 30 bp, Artificial Sequence
  Synthetic oligonucleotide
ggagtagtattgtgggtcaatatgacacgt

SEQ ID NO: 343523 - DNA, 30 bp, Artificial Sequence
  Synthetic oligonucleotide
tatctctggagccgcctacttaatacacgt

SEQ ID NO: 343524 - DNA, 30 bp, Artificial Sequence
  Synthetic oligonucleotide
taagtaggcagcagctttactacaccacgt

SEQ ID NO: 343525 - DNA, 30 bp, Artificial Sequence
  Synthetic oligonucleotide
atgaacatataaaatatagcagggccacgt

SEQ ID NO: 343526 - DNA, 30 bp, Artificial Sequence
  Synthetic oligonucleotide
gtcctgtgcatatccggaccacaagcacgt

SEQ ID NO: 343527 - DNA, 30 bp, Artificial Sequence
  Synthetic oligonucleotide
gggttgcgcttaactcattatacggcacgt

SEQ ID NO: 343528 - DNA, 30 bp, Artificial Sequence
  Synthetic oligonucleotide
tttaatcgcatgagattcacgttggcacgt

SEQ ID NO: 343529 - DNA, 30 bp, Artificial Sequence
  Synthetic oligonucleotide
gtggattagcacgaagagacccgatcacgt

SEQ ID NO: 343530 - DNA, 30 bp, Artificial Sequence
  Synthetic oligonucleotide
acctcataggcgaagccctagctatcacgt

SEQ ID NO: 343531 - DNA, 30 bp, Artificial Sequence
  Synthetic oligonucleotide
acggtttccagcgaccaacgctagtcacgt

SEQ ID NO: 343532 - DNA, 30 bp, Artificial Sequence
  Synthetic oligonucleotide
tagaaaatcgctcttgtgctcacgtcacgt

SEQ ID NO: 343533 - DNA, 30 bp, Artificial Sequence
  Synthetic oligonucleotide
ggttttccgagctccagaaatacgtcacgt

SEQ ID NO: 343534 - DNA, 30 bp, Artificial Sequence
  Synthetic oligonucleotide
ctcagcgataggtgggttccggcgtcacgt

SEQ ID NO: 343535 - DNA, 30 bp, Artificial Sequence
  Synthetic oligonucleotide
ggatggagttctgttagtctgggttcacgt

SEQ ID NO: 343536 - DNA, 30 bp, Artificial Sequence
  Synthetic oligonucleotide
ctcaacagtgaacaaactcataaaagacgt

SEQ ID NO: 343537 - DNA, 30 bp, Artificial Sequence
  Synthetic oligonucleotide
acagtatatggctgccgtcgaccaagacgt

SEQ ID NO: 343538 - DNA, 30 bp, Artificial Sequence
  Synthetic oligonucleotide
gggaggatggcagaacaaacgttaagacgt

SEQ ID NO: 343539 - DNA, 30 bp, Artificial Sequence
  Synthetic oligonucleotide
gtcgtagccgctttgacgaccaacagacgt

SEQ ID NO: 343540 - DNA, 30 bp, Artificial Sequence
  Synthetic oligonucleotide
cggtggtttgtggggcagtagaacagacgt

SEQ ID NO: 343541 - DNA, 30 bp, Artificial Sequence
  Synthetic oligonucleotide
catggccacccccaatgctatggcagacgt

SEQ ID NO: 343542 - DNA, 30 bp, Artificial Sequence
  Synthetic oligonucleotide
ggcggacgggcgggcccatcggagagacgt

SEQ ID NO: 343543 - DNA, 30 bp, Artificial Sequence
  Synthetic oligonucleotide
gaaacatacgaataaagtttcaggagacgt

SEQ ID NO: 343544 - DNA, 30 bp, Artificial Sequence
  Synthetic oligonucleotide
atccatctaagctaagtcaacatgagacgt

SEQ ID NO: 343545 - DNA, 30 bp, Artificial Sequence
  Synthetic oligonucleotide
aaggtccagtcagagtttatcaatagacgt

SEQ ID NO: 343546 - DNA, 30 bp, Artificial Sequence
  Synthetic oligonucleotide
gggtagtcgtgaaacggttaaagtagacgt

SEQ ID NO: 343547 - DNA, 30 bp, Artificial Sequence
  Synthetic oligonucleotide
cgttagcacgccgtgctaagacgacgacgt

SEQ ID NO: 343548 - DNA, 30 bp, Artificial Sequence
  Synthetic oligonucleotide
gccacattaaagtaagattagttccgacgt

SEQ ID NO: 343549 - DNA, 30 bp, Artificial Sequence
  Synthetic oligonucleotide
gggaacaggtcttcgctctagaagcgacgt

SEQ ID NO: 343550 - DNA, 30 bp, Artificial Sequence
  Synthetic oligonucleotide
atttctggggttaagattaaagaatgacgt

SEQ ID NO: 343551 - DNA, 30 bp, Artificial Sequence
  Synthetic oligonucleotide
ccaacatattaggggtgaagcagatgacgt

SEQ ID NO: 343552 - DNA, 30 bp, Artificial Sequence
  Synthetic oligonucleotide
aacacagcgtttagtcgtagcgtatgacgt

SEQ ID NO: 343553 - DNA, 30 bp, Artificial Sequence
  Synthetic oligonucleotide
agatgttaaggcaaagtgccacactgacgt

SEQ ID NO: 343554 - DNA, 30 bp, Artificial Sequence
  Synthetic oligonucleotide
aatgctaatatgtgcacgtgaacctgacgt

SEQ ID NO: 343555 - DNA, 30 bp, Artificial Sequence
  Synthetic oligonucleotide
ttgaatgggtttctcatattccgctgacgt

SEQ ID NO: 343556 - DNA, 30 bp, Artificial Sequence
  Synthetic oligonucleotide
tacaccttgccggcgggaatgatctgacgt

SEQ ID NO: 343557 - DNA, 30 bp, Artificial Sequence
  Synthetic oligonucleotide
cactactcgcgcgcaggcggacccatacgt

SEQ ID NO: 343558 - DNA, 30 bp, Artificial Sequence
  Synthetic oligonucleotide
atctatgtaattctcggtctccccatacgt

SEQ ID NO: 343559 - DNA, 30 bp, Artificial Sequence
  Synthetic oligonucleotide
ataattactagcaatcatattggcatacgt

SEQ ID NO: 343560 - DNA, 30 bp, Artificial Sequence
  Synthetic oligonucleotide
caaacgttgtggcttcaaggtgcgatacgt

SEQ ID NO: 343561 - DNA, 30 bp, Artificial Sequence
  Synthetic oligonucleotide
tcggaacgccttagtccctccgggatacgt

SEQ ID NO: 343562 - DNA, 30 bp, Artificial Sequence
  Synthetic oligonucleotide
gagacgattttttatagaaactggatacgt

SEQ ID NO: 343563 - DNA, 30 bp, Artificial Sequence
  Synthetic oligonucleotide
gcagcgtaatctcacaaggtaatgatacgt

SEQ ID NO: 343564 - DNA, 30 bp, Artificial Sequence
  Synthetic oligonucleotide
aatcgaagaggtcgcggtcctgcactacgt

SEQ ID NO: 343565 - DNA, 30 bp, Artificial Sequence
  Synthetic oligonucleotide
ggatctgattaggaccggcccgtgctacgt

SEQ ID NO: 343566 - DNA, 30 bp, Artificial Sequence
  Synthetic oligonucleotide
agttcctagtggcttaggatcgttctacgt

SEQ ID NO: 343567 - DNA, 30 bp, Artificial Sequence
  Synthetic oligonucleotide
ccttactgccgcggcgaagggtcagtacgt

SEQ ID NO: 343568 - DNA, 30 bp, Artificial Sequence
  Synthetic oligonucleotide
ggaaccttgaaataaggttgaaccgtacgt

SEQ ID NO: 343569 - DNA, 30 bp, Artificial Sequence
  Synthetic oligonucleotide
cccttgaacccctacgttgccacggtacgt

SEQ ID NO: 343570 - DNA, 30 bp, Artificial Sequence
  Synthetic oligonucleotide
tatgactcccaatattgagtttatgtacgt

SEQ ID NO: 343571 - DNA, 30 bp, Artificial Sequence
  Synthetic oligonucleotide
cggaacttctgtgattgacagactgtacgt

SEQ ID NO: 343572 - DNA, 30 bp, Artificial Sequence
  Synthetic oligonucleotide
ccgtatattggaggaggttacaaattacgt

SEQ ID NO: 343573 - DNA, 30 bp, Artificial Sequence
  Synthetic oligonucleotide
aagcggatcggcctcatgttgaaattacgt

SEQ ID NO: 343574 - DNA, 30 bp, Artificial Sequence
  Synthetic oligonucleotide
ggcctagcgttaaactcgtaatagttacgt

SEQ ID NO: 343575 - DNA, 30 bp, Artificial Sequence
  Synthetic oligonucleotide
aattcgagatatgcatcctcccgtttacgt

SEQ ID NO: 343576 - DNA, 30 bp, Artificial Sequence
  Synthetic oligonucleotide
tggattaagagattgtactcaacaaaccgt

SEQ ID NO: 343577 - DNA, 30 bp, Artificial Sequence
  Synthetic oligonucleotide
tacatagtatagttgggatgtccaaaccgt

SEQ ID NO: 343578 - DNA, 30 bp, Artificial Sequence
  Synthetic oligonucleotide
gcggttaacggaccatgtaaacgaaaccgt

SEQ ID NO: 343579 - DNA, 30 bp, Artificial Sequence
  Synthetic oligonucleotide
atgtggtcgcaaataagtaaatgaaaccgt

SEQ ID NO: 343580 - DNA, 30 bp, Artificial Sequence
  Synthetic oligonucleotide
tacatggaattgatgacaccgtccaaccgt

SEQ ID NO: 343581 - DNA, 30 bp, Artificial Sequence
  Synthetic oligonucleotide
cagcctaattgaacagccacgtgtaaccgt

SEQ ID NO: 343582 - DNA, 30 bp, Artificial Sequence
  Synthetic oligonucleotide
tcagttattagggaacactatgaacaccgt

SEQ ID NO: 343583 - DNA, 30 bp, Artificial Sequence
  Synthetic oligonucleotide
ggtttgatccaacacgtgccgcgacaccgt

SEQ ID NO: 343584 - DNA, 30 bp, Artificial Sequence
  Synthetic oligonucleotide
gttgttacctacgttataggatcccaccgt

SEQ ID NO: 343585 - DNA, 30 bp, Artificial Sequence
  Synthetic oligonucleotide
actcgaccgcgatagtggatgccgcaccgt

SEQ ID NO: 343586 - DNA, 30 bp, Artificial Sequence
  Synthetic oligonucleotide
ctagtacgatacgcgcaaatccggcaccgt

SEQ ID NO: 343587 - DNA, 30 bp, Artificial Sequence
  Synthetic oligonucleotide
ggtaaaccgagggatacatcggatcaccgt

SEQ ID NO: 343588 - DNA, 30 bp, Artificial Sequence
  Synthetic oligonucleotide
atgagcggttagccgttcctccctcaccgt

SEQ ID NO: 343589 - DNA, 30 bp, Artificial Sequence
  Synthetic oligonucleotide
ggtggcataggggtctatccaatagaccgt

SEQ ID NO: 343590 - DNA, 30 bp, Artificial Sequence
  Synthetic oligonucleotide
acatgcagtaatgtagcttacgtcgaccgt

SEQ ID NO: 343591 - DNA, 30 bp, Artificial Sequence
  Synthetic oligonucleotide
gagccggtcgcctagctagcatcggaccgt

SEQ ID NO: 343592 - DNA, 30 bp, Artificial Sequence
  Synthetic oligonucleotide
aggtcgtgaggcttaaaggctgatgaccgt

SEQ ID NO: 343593 - DNA, 30 bp, Artificial Sequence
  Synthetic oligonucleotide
tgggggtgatacaggcggctggttgaccgt

SEQ ID NO: 343594 - DNA, 30 bp, Artificial Sequence
  Synthetic oligonucleotide
atggccgatttataccgcctagaataccgt

SEQ ID NO: 343595 - DNA, 30 bp, Artificial Sequence
  Synthetic oligonucleotide
gaatagtttttggtacgactagcataccgt

SEQ ID NO: 343596 - DNA, 30 bp, Artificial Sequence
  Synthetic oligonucleotide
cagggcggggacggaggtcggtgctaccgt

SEQ ID NO: 343597 - DNA, 30 bp, Artificial Sequence
  Synthetic oligonucleotide
tggggtatgttccaaatacgcaagtaccgt

SEQ ID NO: 343598 - DNA, 30 bp, Artificial Sequence
  Synthetic oligonucleotide
cgtgattggggacgccgtattttgtaccgt

SEQ ID NO: 343599 - DNA, 30 bp, Artificial Sequence
  Synthetic oligonucleotide
tcaattgagccatctggtgcagattaccgt

SEQ ID NO: 343600 - DNA, 30 bp, Artificial Sequence
  Synthetic oligonucleotide
atcacagccttgataggctctaacacccgt

SEQ ID NO: 343601 - DNA, 30 bp, Artificial Sequence
  Synthetic oligonucleotide
agaggtccatgcctatgttctaacacccgt

SEQ ID NO: 343602 - DNA, 30 bp, Artificial Sequence
  Synthetic oligonucleotide
aactggcagtaggaagtgcaacacacccgt

SEQ ID NO: 343603 - DNA, 30 bp, Artificial Sequence
  Synthetic oligonucleotide
gatagacaaaaagattttatactgacccgt

SEQ ID NO: 343604 - DNA, 30 bp, Artificial Sequence
  Synthetic oligonucleotide
tgtgtatggattgtcgggaagctaccccgt

SEQ ID NO: 343605 - DNA, 30 bp, Artificial Sequence
  Synthetic oligonucleotide
cgtggattcaacggcgacactagcccccgt

SEQ ID NO: 343606 - DNA, 28 bp, Artificial Sequence
  Synthetic oligonucleotide
ttggagttcggttcccagcttcccccgt

SEQ ID NO: 343607 - DNA, 30 bp, Artificial Sequence
  Synthetic oligonucleotide
taactataccgcaagtcagctttcccccgt

SEQ ID NO: 343608 - DNA, 30 bp, Artificial Sequence
  Synthetic oligonucleotide
gatagtacttatgtgtgcaactttccccgt

SEQ ID NO: 343609 - DNA, 30 bp, Artificial Sequence
  Synthetic oligonucleotide
cagagtctccttaaacagacttgtgcccgt

SEQ ID NO: 343610 - DNA, 30 bp, Artificial Sequence
  Synthetic oligonucleotide
tttcgagaaacgatacccgaggttgcccgt

SEQ ID NO: 343611 - DNA, 30 bp, Artificial Sequence
  Synthetic oligonucleotide
caaagcacacatatgcccagcacatcccgt

SEQ ID NO: 343612 - DNA, 30 bp, Artificial Sequence
  Synthetic oligonucleotide
cgccttttccgagcgaatgggatatcccgt

SEQ ID NO: 343613 - DNA, 30 bp, Artificial Sequence
  Synthetic oligonucleotide
gtatcgcggggccggaaagtgttatcccgt

SEQ ID NO: 343614 - DNA, 30 bp, Artificial Sequence
  Synthetic oligonucleotide
tcgtagagtagcctgtgtgttgggtcccgt

SEQ ID NO: 343615 - DNA, 30 bp, Artificial Sequence
  Synthetic oligonucleotide
taacggaatacaaaagtccagtggtcccgt

SEQ ID NO: 343616 - DNA, 30 bp, Artificial Sequence
  Synthetic oligonucleotide
cggcagatgcacacgtagaaatattcccgt

SEQ ID NO: 343617 - DNA, 30 bp, Artificial Sequence
  Synthetic oligonucleotide
gtcgcaaaaacgcctacgggatgaagccgt

SEQ ID NO: 343618 - DNA, 30 bp, Artificial Sequence
  Synthetic oligonucleotide
acttaatccagatctttggatataagccgt

SEQ ID NO: 343619 - DNA, 30 bp, Artificial Sequence
  Synthetic oligonucleotide
tagtcaatgccctgtatgacgatcagccgt

SEQ ID NO: 343620 - DNA, 30 bp, Artificial Sequence
  Synthetic oligonucleotide
gagaaaatcgccaggcaaccaaggcgccgt

SEQ ID NO: 343621 - DNA, 30 bp, Artificial Sequence
  Synthetic oligonucleotide
tgttctgaaaaagacacgtatcatcgccgt

SEQ ID NO: 343622 - DNA, 30 bp, Artificial Sequence
  Synthetic oligonucleotide
ggccaagttttattcatagtgagaggccgt

SEQ ID NO: 343623 - DNA, 30 bp, Artificial Sequence
  Synthetic oligonucleotide
ttgatttcctgaaattaatgttgaggccgt

SEQ ID NO: 343624 - DNA, 30 bp, Artificial Sequence
  Synthetic oligonucleotide
ccatgagttcagcacatagttatcggccgt

SEQ ID NO: 343625 - DNA, 30 bp, Artificial Sequence
  Synthetic oligonucleotide
gcgataggcccgatgcttctgaggggccgt

SEQ ID NO: 343626 - DNA, 30 bp, Artificial Sequence
  Synthetic oligonucleotide
tatgctgatagagttgttttttggggccgt

SEQ ID NO: 343627 - DNA, 31 bp, Artificial Sequence
  Synthetic oligonucleotide
atccgtggcatgcaaatgggaggtgggccgt

SEQ ID NO: 343628 - DNA, 30 bp, Artificial Sequence
  Synthetic oligonucleotide
tgttttaaccacctaaatagcgctggccgt

SEQ ID NO: 343629 - DNA, 30 bp, Artificial Sequence
  Synthetic oligonucleotide
agctagtctttgcagaatcgtggctgccgt

SEQ ID NO: 343630 - DNA, 30 bp, Artificial Sequence
  Synthetic oligonucleotide
cacgggcacaccaacgtacttgagtgccgt

SEQ ID NO: 343631 - DNA, 30 bp, Artificial Sequence
  Synthetic oligonucleotide
agtttgatccttacgggcaggtcaatccgt

SEQ ID NO: 343632 - DNA, 30 bp, Artificial Sequence
  Synthetic oligonucleotide
caaaattctgaattatatgagcagatccgt

SEQ ID NO: 343633 - DNA, 30 bp, Artificial Sequence
  Synthetic oligonucleotide
gaagagctgtttgtagcgttgtcactccgt

SEQ ID NO: 343634 - DNA, 30 bp, Artificial Sequence
  Synthetic oligonucleotide
gctgcatgtcgtaatgtgcctggactccgt

SEQ ID NO: 343635 - DNA, 30 bp, Artificial Sequence
  Synthetic oligonucleotide
gctcttaggagagacggcagtcagctccgt

SEQ ID NO: 343636 - DNA, 30 bp, Artificial Sequence
  Synthetic oligonucleotide
gctaatttcacaatcctgcgagcgctccgt

SEQ ID NO: 343637 - DNA, 30 bp, Artificial Sequence
  Synthetic oligonucleotide
aacccataggggctattaacgtctctccgt

SEQ ID NO: 343638 - DNA, 30 bp, Artificial Sequence
  Synthetic oligonucleotide
aaataagatttcctgccagatagagtccgt

SEQ ID NO: 343639 - DNA, 30 bp, Artificial Sequence
  Synthetic oligonucleotide
aattacgtaaggataaaacagaccgtccgt

SEQ ID NO: 343640 - DNA, 30 bp, Artificial Sequence
  Synthetic oligonucleotide
gggaggaagacgcccggtggacccgtccgt

SEQ ID NO: 343641 - DNA, 30 bp, Artificial Sequence
  Synthetic oligonucleotide
gatctaataatccaatgcagtatcgtccgt

SEQ ID NO: 343642 - DNA, 31 bp, Artificial Sequence
  Synthetic oligonucleotide
catctgataaggatgctcatcaagggtccgt

SEQ ID NO: 343643 - DNA, 30 bp, Artificial Sequence
  Synthetic oligonucleotide
caacacacatataaaagcgccatgttccgt

SEQ ID NO: 343644 - DNA, 30 bp, Artificial Sequence
  Synthetic oligonucleotide
gcagtgagcggtagcttgtcgcatttccgt

SEQ ID NO: 343645 - DNA, 30 bp, Artificial Sequence
  Synthetic oligonucleotide
tcgtatcatatagatagcacgactttccgt

SEQ ID NO: 343646 - DNA, 30 bp, Artificial Sequence
  Synthetic oligonucleotide
taaggacatctaaggctgtggcgtttccgt

SEQ ID NO: 343647 - DNA, 30 bp, Artificial Sequence
  Synthetic oligonucleotide
cgataagctattctggtagcgccaaagcgt

SEQ ID NO: 343648 - DNA, 30 bp, Artificial Sequence
  Synthetic oligonucleotide
agaaacgaagcgaactagctcaacaagcgt

SEQ ID NO: 343649 - DNA, 30 bp, Artificial Sequence
  Synthetic oligonucleotide
gggatgccgtccaagtggatcaccaagcgt

SEQ ID NO: 343650 - DNA, 30 bp, Artificial Sequence
  Synthetic oligonucleotide
aataggcagaaacctaaaccgcgtaagcgt

SEQ ID NO: 343651 - DNA, 30 bp, Artificial Sequence
  Synthetic oligonucleotide
cacctttccaactttcacgtcagacagcgt

SEQ ID NO: 343652 - DNA, 30 bp, Artificial Sequence
  Synthetic oligonucleotide
agtagttttaactgtttcggcttacagcgt

SEQ ID NO: 343653 - DNA, 30 bp, Artificial Sequence
  Synthetic oligonucleotide
atgtgtcgatagtattgaagatctcagcgt

SEQ ID NO: 343654 - DNA, 30 bp, Artificial Sequence
  Synthetic oligonucleotide
gcaccatcaggttaggaatttaaggagcgt

SEQ ID NO: 343655 - DNA, 30 bp, Artificial Sequence
  Synthetic oligonucleotide
tgaactacgtaaagttcattttgggagcgt

SEQ ID NO: 343656 - DNA, 30 bp, Artificial Sequence
  Synthetic oligonucleotide
gacgcatcccaactgacaaaagatgagcgt

SEQ ID NO: 343657 - DNA, 30 bp, Artificial Sequence
  Synthetic oligonucleotide
catatcggtaaatcgtgttggtatgagcgt

SEQ ID NO: 343658 - DNA, 30 bp, Artificial Sequence
  Synthetic oligonucleotide
gggctgagggcagaggctatgtttgagcgt

SEQ ID NO: 343659 - DNA, 30 bp, Artificial Sequence
  Synthetic oligonucleotide
ccggctaaacattagccgggttttgagcgt

SEQ ID NO: 343660 - DNA, 30 bp, Artificial Sequence
  Synthetic oligonucleotide
taatcagggcaattaattttcccatagcgt

SEQ ID NO: 343661 - DNA, 30 bp, Artificial Sequence
  Synthetic oligonucleotide
ttcccggccctttggcagcaatcatagcgt

SEQ ID NO: 343662 - DNA, 30 bp, Artificial Sequence
  Synthetic oligonucleotide
atgaataattgagacggtgcacgatagcgt

SEQ ID NO: 343663 - DNA, 30 bp, Artificial Sequence
  Synthetic oligonucleotide
ttcgtaggtgaatattatccatgatagcgt

SEQ ID NO: 343664 - DNA, 30 bp, Artificial Sequence
  Synthetic oligonucleotide
cataggggttagtggcagaggatatagcgt

SEQ ID NO: 343665 - DNA, 30 bp, Artificial Sequence
  Synthetic oligonucleotide
acaaatataagcgtaccacgtagctagcgt

SEQ ID NO: 343666 - DNA, 30 bp, Artificial Sequence
  Synthetic oligonucleotide
ggagcaatacgattagtgtatatctagcgt

SEQ ID NO: 343667 - DNA, 30 bp, Artificial Sequence
  Synthetic oligonucleotide
ggtctatagctgtaaacagatcattagcgt

SEQ ID NO: 343668 - DNA, 30 bp, Artificial Sequence
  Synthetic oligonucleotide
gtatatgaacatggtaccaacttaacgcgt

SEQ ID NO: 343669 - DNA, 30 bp, Artificial Sequence
  Synthetic oligonucleotide
gggtaattgaagacgacaccccacacgcgt

SEQ ID NO: 343670 - DNA, 30 bp, Artificial Sequence
  Synthetic oligonucleotide
ttgggaacacttgcgatcggacggacgcgt

SEQ ID NO: 343671 - DNA, 30 bp, Artificial Sequence
  Synthetic oligonucleotide
ctattacttcacggggtggtggctacgcgt

SEQ ID NO: 343672 - DNA, 30 bp, Artificial Sequence
  Synthetic oligonucleotide
acgggtagaacccgttagtcatgtacgcgt

SEQ ID NO: 343673 - DNA, 30 bp, Artificial Sequence
  Synthetic oligonucleotide
gatccaaactaaggacttacctgaccgcgt

SEQ ID NO: 343674 - DNA, 30 bp, Artificial Sequence
  Synthetic oligonucleotide
gaatcacgaagttataggaactgcccgcgt

SEQ ID NO: 343675 - DNA, 30 bp, Artificial Sequence
  Synthetic oligonucleotide
tagatctctgtatcaattactaggccgcgt

SEQ ID NO: 343676 - DNA, 30 bp, Artificial Sequence
  Synthetic oligonucleotide
tgacggcgcagtggcgtccaccaagcgcgt

SEQ ID NO: 343677 - DNA, 30 bp, Artificial Sequence
  Synthetic oligonucleotide
agcgttgatacgcgtagcgagatagcgcgt

SEQ ID NO: 343678 - DNA, 30 bp, Artificial Sequence
  Synthetic oligonucleotide
gcgagcggagggagtcttgtgctagcgcgt

SEQ ID NO: 343679 - DNA, 30 bp, Artificial Sequence
  Synthetic oligonucleotide
ttcgcgtcgtgtagtggctccgacgcgcgt

SEQ ID NO: 343680 - DNA, 30 bp, Artificial Sequence
  Synthetic oligonucleotide
tcgggcacgaagagccggtgagcggcgcgt

SEQ ID NO: 343681 - DNA, 30 bp, Artificial Sequence
  Synthetic oligonucleotide
ttccagcgagatctgtctatgatctcgcgt

SEQ ID NO: 343682 - DNA, 30 bp, Artificial Sequence
  Synthetic oligonucleotide
cgtatctcgtgccccaccttggtctcgcgt

SEQ ID NO: 343683 - DNA, 30 bp, Artificial Sequence
  Synthetic oligonucleotide
agacttgtcgcccggcccccacagtcgcgt

SEQ ID NO: 343684 - DNA, 30 bp, Artificial Sequence
  Synthetic oligonucleotide
gcgtagggttgaccggtataggcttcgcgt

SEQ ID NO: 343685 - DNA, 31 bp, Artificial Sequence
  Synthetic oligonucleotide
aacctccgaaagcacagttttcggttcgcgt

SEQ ID NO: 343686 - DNA, 31 bp, Artificial Sequence
  Synthetic oligonucleotide
gatttacaggaatcaagcctaaagaaggcgt

SEQ ID NO: 343687 - DNA, 30 bp, Artificial Sequence
  Synthetic oligonucleotide
cggagtctaacagtgattttgggcaggcgt

SEQ ID NO: 343688 - DNA, 30 bp, Artificial Sequence
  Synthetic oligonucleotide
gggctcgtgtagagacacccctataggcgt

SEQ ID NO: 343689 - DNA, 30 bp, Artificial Sequence
  Synthetic oligonucleotide
gtgtcttcaaggaggccatggtctaggcgt

SEQ ID NO: 343690 - DNA, 30 bp, Artificial Sequence
  Synthetic oligonucleotide
ggatccccggaacgtggtcattttaggcgt

SEQ ID NO: 343691 - DNA, 30 bp, Artificial Sequence
  Synthetic oligonucleotide
aaatcacaatagccccggatcagacggcgt

SEQ ID NO: 343692 - DNA, 30 bp, Artificial Sequence
  Synthetic oligonucleotide
atcgaataatttaccagtccgggccggcgt

SEQ ID NO: 343693 - DNA, 30 bp, Artificial Sequence
  Synthetic oligonucleotide
atagaccttagtccggcctgtctccggcgt

SEQ ID NO: 343694 - DNA, 30 bp, Artificial Sequence
  Synthetic oligonucleotide
tagatttggttaccgtgttacttccggcgt

SEQ ID NO: 343695 - DNA, 30 bp, Artificial Sequence
  Synthetic oligonucleotide
gcgagttgacctaactcttgcgagcggcgt

SEQ ID NO: 343696 - DNA, 30 bp, Artificial Sequence
  Synthetic oligonucleotide
cataatcacccgtcaggagactagcggcgt

SEQ ID NO: 343697 - DNA, 30 bp, Artificial Sequence
  Synthetic oligonucleotide
gtagcagatcgagaacgggcccggcggcgt

SEQ ID NO: 343698 - DNA, 30 bp, Artificial Sequence
  Synthetic oligonucleotide
catcacacggcgtgatcagagcatcggcgt

SEQ ID NO: 343699 - DNA, 30 bp, Artificial Sequence
  Synthetic oligonucleotide
tttggatggcttcaatcataacaagggcgt

SEQ ID NO: 343700 - DNA, 30 bp, Artificial Sequence
  Synthetic oligonucleotide
tactcaactaatcaattacagacagggcgt

SEQ ID NO: 343701 - DNA, 30 bp, Artificial Sequence
  Synthetic oligonucleotide
cagggacctcaagatagtcccggagggcgt

SEQ ID NO: 343702 - DNA, 30 bp, Artificial Sequence
  Synthetic oligonucleotide
ggtatcgaaggtccatgctgaatagggcgt

SEQ ID NO: 343703 - DNA, 30 bp, Artificial Sequence
  Synthetic oligonucleotide
gaatgtgctaatccagatgtatccgggcgt

SEQ ID NO: 343704 - DNA, 30 bp, Artificial Sequence
  Synthetic oligonucleotide
ttaagatacgggtttggctctaaggggcgt

SEQ ID NO: 343705 - DNA, 30 bp, Artificial Sequence
  Synthetic oligonucleotide
gtggaaggggcgatgagctcgacggggcgt

SEQ ID NO: 343706 - DNA, 30 bp, Artificial Sequence
  Synthetic oligonucleotide
tggcagaaacagcatctgcaaccggggcgt

SEQ ID NO: 343707 - DNA, 30 bp, Artificial Sequence
  Synthetic oligonucleotide
tatcgctttatctgcacagcgtgggggcgt

SEQ ID NO: 343708 - DNA, 30 bp, Artificial Sequence
  Synthetic oligonucleotide
ggttccgttgaggttggtcatctggggcgt

SEQ ID NO: 343709 - DNA, 30 bp, Artificial Sequence
  Synthetic oligonucleotide
cagtggtaccttagagcctgcaatgggcgt

SEQ ID NO: 343710 - DNA, 30 bp, Artificial Sequence
  Synthetic oligonucleotide
tcaccgactaggaccgcgggggttgggcgt

SEQ ID NO: 343711 - DNA, 30 bp, Artificial Sequence
  Synthetic oligonucleotide
agattattccaagtgcccaaaagatggcgt

SEQ ID NO: 343712 - DNA, 30 bp, Artificial Sequence
  Synthetic oligonucleotide
gaataggtcgagaaggatatgcgatggcgt

SEQ ID NO: 343713 - DNA, 30 bp, Artificial Sequence
  Synthetic oligonucleotide
gcctactttcggggtgctggacgctggcgt

SEQ ID NO: 343714 - DNA, 30 bp, Artificial Sequence
  Synthetic oligonucleotide
ctccatgactaattacgcatctgctggcgt

SEQ ID NO: 343715 - DNA, 30 bp, Artificial Sequence
  Synthetic oligonucleotide
cctaaactcaaaattgaaagggattggcgt

SEQ ID NO: 343716 - DNA, 30 bp, Artificial Sequence
  Synthetic oligonucleotide
ggttcactgggactgtgtgtaatttggcgt

SEQ ID NO: 343717 - DNA, 30 bp, Artificial Sequence
  Synthetic oligonucleotide
gccatggaatattgtcacgatcgaatgcgt

SEQ ID NO: 343718 - DNA, 30 bp, Artificial Sequence
  Synthetic oligonucleotide
tatggcaaataaacagtgtatgtaatgcgt

SEQ ID NO: 343719 - DNA, 30 bp, Artificial Sequence
  Synthetic oligonucleotide
gatgagatctgtgttcttgagcccatgcgt

SEQ ID NO: 343720 - DNA, 30 bp, Artificial Sequence
  Synthetic oligonucleotide
ggggggccgctgggtttaatcgagatgcgt

SEQ ID NO: 343721 - DNA, 30 bp, Artificial Sequence
  Synthetic oligonucleotide
tacgctacggggctttaatctatgatgcgt

SEQ ID NO: 343722 - DNA, 30 bp, Artificial Sequence
  Synthetic oligonucleotide
tcgcgaaaaccaattgggggtaatatgcgt

SEQ ID NO: 343723 - DNA, 30 bp, Artificial Sequence
  Synthetic oligonucleotide
cgaatactctgcaattactgatgtatgcgt

SEQ ID NO: 343724 - DNA, 30 bp, Artificial Sequence
  Synthetic oligonucleotide
gatctagtcaaagatcaatggctactgcgt

SEQ ID NO: 343725 - DNA, 30 bp, Artificial Sequence
  Synthetic oligonucleotide
cccgaagataatgtacttctctgcctgcgt

SEQ ID NO: 343726 - DNA, 30 bp, Artificial Sequence
  Synthetic oligonucleotide
gtaaggagaagatcaggggaatctctgcgt

SEQ ID NO: 343727 - DNA, 30 bp, Artificial Sequence
  Synthetic oligonucleotide
gagacaaggaactgccgccggaacgtgcgt

SEQ ID NO: 343728 - DNA, 30 bp, Artificial Sequence
  Synthetic oligonucleotide
acagcaccaggtggtatacaagacgtgcgt

SEQ ID NO: 343729 - DNA, 30 bp, Artificial Sequence
  Synthetic oligonucleotide
gagaggacagggctgcaaggatcggtgcgt

SEQ ID NO: 343730 - DNA, 30 bp, Artificial Sequence
  Synthetic oligonucleotide
gcctaagcatgcgtccaaagacgattgcgt

SEQ ID NO: 343731 - DNA, 30 bp, Artificial Sequence
  Synthetic oligonucleotide
atagacgagtaacagagcgccgtattgcgt

SEQ ID NO: 343732 - DNA, 30 bp, Artificial Sequence
  Synthetic oligonucleotide
gccaaattcgataagtgtaaggtattgcgt

SEQ ID NO: 343733 - DNA, 30 bp, Artificial Sequence
  Synthetic oligonucleotide
gtcttaaaaacttcgcttcctggtttgcgt

SEQ ID NO: 343734 - DNA, 30 bp, Artificial Sequence
  Synthetic oligonucleotide
aagatagccctttgtgaatgcagaaatcgt

SEQ ID NO: 343735 - DNA, 30 bp, Artificial Sequence
  Synthetic oligonucleotide
cgataagcccaaaccggcggctgaaatcgt

SEQ ID NO: 343736 - DNA, 30 bp, Artificial Sequence
  Synthetic oligonucleotide
tttgacggttggcgccgggaaggcaatcgt

SEQ ID NO: 343737 - DNA, 30 bp, Artificial Sequence
  Synthetic oligonucleotide
aatccttgactggtccactagcgtaatcgt

SEQ ID NO: 343738 - DNA, 30 bp, Artificial Sequence
  Synthetic oligonucleotide
tttgaaacccgtgaaaagtcagaacatcgt

SEQ ID NO: 343739 - DNA, 30 bp, Artificial Sequence
  Synthetic oligonucleotide
gtgggcactataactactatcctacatcgt

SEQ ID NO: 343740 - DNA, 30 bp, Artificial Sequence
  Synthetic oligonucleotide
aggcggcgcacaagtgcgctcgtgcatcgt

SEQ ID NO: 343741 - DNA, 29 bp, Artificial Sequence
  Synthetic oligonucleotide
gtttatactaggcgctaagtggtcatcgt

SEQ ID NO: 343742 - DNA, 30 bp, Artificial Sequence
  Synthetic oligonucleotide
gttcgccacaatacggccacaaaagatcgt

SEQ ID NO: 343743 - DNA, 30 bp, Artificial Sequence
  Synthetic oligonucleotide
gatagacacagggcgttatctcgagatcgt

SEQ ID NO: 343744 - DNA, 30 bp, Artificial Sequence
  Synthetic oligonucleotide
ggcgcttgatgtagtgtttagaacgatcgt

SEQ ID NO: 343745 - DNA, 30 bp, Artificial Sequence
  Synthetic oligonucleotide
tactgtaattaaatcaagcaacacgatcgt

SEQ ID NO: 343746 - DNA, 30 bp, Artificial Sequence
  Synthetic oligonucleotide
tggtttaatcaaactcttcgcgccgatcgt

SEQ ID NO: 343747 - DNA, 30 bp, Artificial Sequence
  Synthetic oligonucleotide
cgtcggctcagtcgcgatgcctgcgatcgt

SEQ ID NO: 343748 - DNA, 30 bp, Artificial Sequence
  Synthetic oligonucleotide
gagaagagctgctgtcagtgcgtcgatcgt

SEQ ID NO: 343749 - DNA, 30 bp, Artificial Sequence
  Synthetic oligonucleotide
tctgccccggcagtgaattgaaaggatcgt

SEQ ID NO: 343750 - DNA, 30 bp, Artificial Sequence
  Synthetic oligonucleotide
ttacttgacggtgcaaagcgtaaggatcgt

SEQ ID NO: 343751 - DNA, 30 bp, Artificial Sequence
  Synthetic oligonucleotide
tctgtatccctgaaggggatgcaggatcgt

SEQ ID NO: 343752 - DNA, 30 bp, Artificial Sequence
  Synthetic oligonucleotide
ggactgtagtgggattaatctgcatatcgt

SEQ ID NO: 343753 - DNA, 30 bp, Artificial Sequence
  Synthetic oligonucleotide
gttgcagagtacccgaggcaagtatatcgt

SEQ ID NO: 343754 - DNA, 30 bp, Artificial Sequence
  Synthetic oligonucleotide
tagtagtacatgtgttacgaaccgtatcgt

SEQ ID NO: 343755 - DNA, 30 bp, Artificial Sequence
  Synthetic oligonucleotide
aaagtgccatcggcttattgcgattatcgt

SEQ ID NO: 343756 - DNA, 30 bp, Artificial Sequence
  Synthetic oligonucleotide
tttagctggactttcactggtatttatcgt

SEQ ID NO: 343757 - DNA, 30 bp, Artificial Sequence
  Synthetic oligonucleotide
aaaacgcagtattgcacggtccgcactcgt

SEQ ID NO: 343758 - DNA, 30 bp, Artificial Sequence
  Synthetic oligonucleotide
catcagtgtctaaaacttattaatactcgt

SEQ ID NO: 343759 - DNA, 30 bp, Artificial Sequence
  Synthetic oligonucleotide
tgtggctacttacccagccgtcgtactcgt

SEQ ID NO: 343760 - DNA, 30 bp, Artificial Sequence
  Synthetic oligonucleotide
aaaatagtattaaccgtcagacaacctcgt

SEQ ID NO: 343761 - DNA, 30 bp, Artificial Sequence
  Synthetic oligonucleotide
gtttacatattacatatctaacgacctcgt

SEQ ID NO: 343762 - DNA, 30 bp, Artificial Sequence
  Synthetic oligonucleotide
caacacgcacgaagaacgcaaaagcctcgt

SEQ ID NO: 343763 - DNA, 30 bp, Artificial Sequence
  Synthetic oligonucleotide
tagatggggcagacgcactatacgcctcgt

SEQ ID NO: 343764 - DNA, 30 bp, Artificial Sequence
  Synthetic oligonucleotide
tgtgggatagttggggattgattagctcgt

SEQ ID NO: 343765 - DNA, 30 bp, Artificial Sequence
  Synthetic oligonucleotide
gttccgccgcaaagtaatggataggctcgt

SEQ ID NO: 343766 - DNA, 30 bp, Artificial Sequence
  Synthetic oligonucleotide
aacatcgcccgggcatggaacagggctcgt

SEQ ID NO: 343767 - DNA, 30 bp, Artificial Sequence
  Synthetic oligonucleotide
tttactctggtgacagtgatcctggctcgt

SEQ ID NO: 343768 - DNA, 30 bp, Artificial Sequence
  Synthetic oligonucleotide
tcataggggtccatacattatctggctcgt

SEQ ID NO: 343769 - DNA, 30 bp, Artificial Sequence
  Synthetic oligonucleotide
gtacaaactgactggaaataaccatctcgt

SEQ ID NO: 343770 - DNA, 30 bp, Artificial Sequence
  Synthetic oligonucleotide
gtgtgtggttctcaggacgccagatctcgt

SEQ ID NO: 343771 - DNA, 30 bp, Artificial Sequence
  Synthetic oligonucleotide
cactcagcacacaaaagagatatctctcgt

SEQ ID NO: 343772 - DNA, 30 bp, Artificial Sequence
  Synthetic oligonucleotide
aaagaacctttcacaacatcggtgtctcgt

SEQ ID NO: 343773 - DNA, 30 bp, Artificial Sequence
  Synthetic oligonucleotide
acccggtcatacctcgcatatccttctcgt

SEQ ID NO: 343774 - DNA, 30 bp, Artificial Sequence
  Synthetic oligonucleotide
aaaatctgcaaggactccaagcgttctcgt

SEQ ID NO: 343775 - DNA, 30 bp, Artificial Sequence
  Synthetic oligonucleotide
gattggacatggaggacggctctttctcgt

SEQ ID NO: 343776 - DNA, 30 bp, Artificial Sequence
  Synthetic oligonucleotide
ggcctgtccggtggaaagtgtttttctcgt

SEQ ID NO: 343777 - DNA, 30 bp, Artificial Sequence
  Synthetic oligonucleotide
tagcaaccacctgaaaggaactaaagtcgt

SEQ ID NO: 343778 - DNA, 30 bp, Artificial Sequence
  Synthetic oligonucleotide
ctttggaagttagtggttgagcacagtcgt

SEQ ID NO: 343779 - DNA, 30 bp, Artificial Sequence
  Synthetic oligonucleotide
gcaacatctgcatcagtttagttgagtcgt

SEQ ID NO: 343780 - DNA, 30 bp, Artificial Sequence
  Synthetic oligonucleotide
tgagtaagatcccgagccatgggtagtcgt

SEQ ID NO: 343781 - DNA, 30 bp, Artificial Sequence
  Synthetic oligonucleotide
tcaggtgttgggtctgcatggcgacgtcgt

SEQ ID NO: 343782 - DNA, 30 bp, Artificial Sequence
  Synthetic oligonucleotide
acaactggccgcggccagttaccgcgtcgt

SEQ ID NO: 343783 - DNA, 30 bp, Artificial Sequence
  Synthetic oligonucleotide
ggtagtcttgggatgactaacaaaggtcgt

SEQ ID NO: 343784 - DNA, 30 bp, Artificial Sequence
  Synthetic oligonucleotide
actactggagacgtatcggggtaaggtcgt

SEQ ID NO: 343785 - DNA, 30 bp, Artificial Sequence
  Synthetic oligonucleotide
atatcgactcggagggttatacgcggtcgt

SEQ ID NO: 343786 - DNA, 30 bp, Artificial Sequence
  Synthetic oligonucleotide
aggttggcgtaccattatcagcggggtcgt

SEQ ID NO: 343787 - DNA, 30 bp, Artificial Sequence
  Synthetic oligonucleotide
aaaccgttaagcatcatttcattgggtcgt

SEQ ID NO: 343788 - DNA, 30 bp, Artificial Sequence
  Synthetic oligonucleotide
tgcattccatcagagtggtgaagtggtcgt

SEQ ID NO: 343789 - DNA, 30 bp, Artificial Sequence
  Synthetic oligonucleotide
tgggttgggttcattagaagtcgtggtcgt

SEQ ID NO: 343790 - DNA, 30 bp, Artificial Sequence
  Synthetic oligonucleotide
cacgcagataagtggatgtattgtggtcgt

SEQ ID NO: 343791 - DNA, 30 bp, Artificial Sequence
  Synthetic oligonucleotide
actgggggatggggtggacctgttggtcgt

SEQ ID NO: 343792 - DNA, 30 bp, Artificial Sequence
  Synthetic oligonucleotide
atatgactacaagcttccgagtaatgtcgt

SEQ ID NO: 343793 - DNA, 30 bp, Artificial Sequence
  Synthetic oligonucleotide
cgcttgtgcaacctacccaagcgatgtcgt

SEQ ID NO: 343794 - DNA, 30 bp, Artificial Sequence
  Synthetic oligonucleotide
aagcaccgaatcgtgcggcactgatgtcgt

SEQ ID NO: 343795 - DNA, 30 bp, Artificial Sequence
  Synthetic oligonucleotide
gaaagcctgctctcgagtcactgatgtcgt

SEQ ID NO: 343796 - DNA, 30 bp, Artificial Sequence
  Synthetic oligonucleotide
gcgtgggcgggcggccgagttatatgtcgt

SEQ ID NO: 343797 - DNA, 30 bp, Artificial Sequence
  Synthetic oligonucleotide
aaaggttccgatcaacgttggaactgtcgt

SEQ ID NO: 343798 - DNA, 30 bp, Artificial Sequence
  Synthetic oligonucleotide
acaacggtgtccggcttagccgactgtcgt

SEQ ID NO: 343799 - DNA, 30 bp, Artificial Sequence
  Synthetic oligonucleotide
tagttgaataagagttatgtgtagtgtcgt

SEQ ID NO: 343800 - DNA, 30 bp, Artificial Sequence
  Synthetic oligonucleotide
tttagtgacgggcgtggcgcacggtgtcgt

SEQ ID NO: 343801 - DNA, 30 bp, Artificial Sequence
  Synthetic oligonucleotide
tcccttggctttatggtgaaagcttgtcgt

SEQ ID NO: 343802 - DNA, 30 bp, Artificial Sequence
  Synthetic oligonucleotide
attgatgatattgaattgtatttttgtcgt

SEQ ID NO: 343803 - DNA, 30 bp, Artificial Sequence
  Synthetic oligonucleotide
ctcgtccatggagtaaagatggcgattcgt

SEQ ID NO: 343804 - DNA, 30 bp, Artificial Sequence
  Synthetic oligonucleotide
tcctcatggcgcgtagcctagctgattcgt

SEQ ID NO: 343805 - DNA, 30 bp, Artificial Sequence
  Synthetic oligonucleotide
cccaggggcctccaaatagaagaccttcgt

SEQ ID NO: 343806 - DNA, 30 bp, Artificial Sequence
  Synthetic oligonucleotide
cgactgacaaccgtatacggggcgcttcgt

SEQ ID NO: 343807 - DNA, 30 bp, Artificial Sequence
  Synthetic oligonucleotide
aaaaaattggcgagcctcggcaaagttcgt

SEQ ID NO: 343808 - DNA, 30 bp, Artificial Sequence
  Synthetic oligonucleotide
atggggcaataatcacgtgcgaaagttcgt

SEQ ID NO: 343809 - DNA, 30 bp, Artificial Sequence
  Synthetic oligonucleotide
gcgataataggcagtcatgattcagttcgt

SEQ ID NO: 343810 - DNA, 30 bp, Artificial Sequence
  Synthetic oligonucleotide
gtgaagcaagggctttttcaaaccgttcgt

SEQ ID NO: 343811 - DNA, 30 bp, Artificial Sequence
  Synthetic oligonucleotide
tttcgatccggatcctaggaacgcgttcgt

SEQ ID NO: 343812 - DNA, 30 bp, Artificial Sequence
  Synthetic oligonucleotide
tgtgtcggtgcagcttagataatcgttcgt

SEQ ID NO: 343813 - DNA, 30 bp, Artificial Sequence
  Synthetic oligonucleotide
gtttgtgccttgctaagtgccagggttcgt

SEQ ID NO: 343814 - DNA, 30 bp, Artificial Sequence
  Synthetic oligonucleotide
gagggcgtttaccagttttgccaatttcgt

SEQ ID NO: 343815 - DNA, 30 bp, Artificial Sequence
  Synthetic oligonucleotide
attactcaattattgggcaaccgatttcgt

SEQ ID NO: 343816 - DNA, 30 bp, Artificial Sequence
  Synthetic oligonucleotide
tctaggtgaagtgttattttcctctttcgt

SEQ ID NO: 343817 - DNA, 30 bp, Artificial Sequence
  Synthetic oligonucleotide
ctacgctgagaggaacctatagtctttcgt

SEQ ID NO: 343818 - DNA, 30 bp, Artificial Sequence
  Synthetic oligonucleotide
acggttgtctcgaataggcgtggaaaaggt

SEQ ID NO: 343819 - DNA, 30 bp, Artificial Sequence
  Synthetic oligonucleotide
catggtacgcgtgatacttggctaaaaggt

SEQ ID NO: 343820 - DNA, 30 bp, Artificial Sequence
  Synthetic oligonucleotide
gctggtagcggatcggctggaaacaaaggt

SEQ ID NO: 343821 - DNA, 30 bp, Artificial Sequence
  Synthetic oligonucleotide
ttgaataaacgatggtcttatggcaaaggt

SEQ ID NO: 343822 - DNA, 30 bp, Artificial Sequence
  Synthetic oligonucleotide
taaatcgtagttatctcgtttatcaaaggt

SEQ ID NO: 343823 - DNA, 30 bp, Artificial Sequence
  Synthetic oligonucleotide
taggttgccactgcactatacaataaaggt

SEQ ID NO: 343824 - DNA, 30 bp, Artificial Sequence
  Synthetic oligonucleotide
gcatcctgcgaggggaatcaacttaaaggt

SEQ ID NO: 343825 - DNA, 30 bp, Artificial Sequence
  Synthetic oligonucleotide
tttgcgttgaagttcggctcacttaaaggt

SEQ ID NO: 343826 - DNA, 30 bp, Artificial Sequence
  Synthetic oligonucleotide
ggcgctgcgctcagtccggagcttaaaggt

SEQ ID NO: 343827 - DNA, 30 bp, Artificial Sequence
  Synthetic oligonucleotide
ttcggtccactaaacgccaactgacaaggt

SEQ ID NO: 343828 - DNA, 30 bp, Artificial Sequence
  Synthetic oligonucleotide
tacttggaaacagcttaacttctacaaggt

SEQ ID NO: 343829 - DNA, 30 bp, Artificial Sequence
  Synthetic oligonucleotide
tgatcagcatatcgaatttcattacaaggt

SEQ ID NO: 343830 - DNA, 30 bp, Artificial Sequence
  Synthetic oligonucleotide
caaatatccgcagtaagtggaacccaaggt

SEQ ID NO: 343831 - DNA, 30 bp, Artificial Sequence
  Synthetic oligonucleotide
ggatacgtcgaaggcaaaccctctcaaggt

SEQ ID NO: 343832 - DNA, 30 bp, Artificial Sequence
  Synthetic oligonucleotide
gttactggagacacataccactgtcaaggt

SEQ ID NO: 343833 - DNA, 30 bp, Artificial Sequence
  Synthetic oligonucleotide
cacgtttcgccacttctattatttcaaggt

SEQ ID NO: 343834 - DNA, 30 bp, Artificial Sequence
  Synthetic oligonucleotide
agatccgatagtacgttttggcatgaaggt

SEQ ID NO: 343835 - DNA, 30 bp, Artificial Sequence
  Synthetic oligonucleotide
ccatgaagaccgtgttggggccgtgaaggt

SEQ ID NO: 343836 - DNA, 30 bp, Artificial Sequence
  Synthetic oligonucleotide
gaagaaagcgttgggtaatattaataaggt

SEQ ID NO: 343837 - DNA, 30 bp, Artificial Sequence
  Synthetic oligonucleotide
ctctcccccccttaacgaattccataaggt

SEQ ID NO: 343838 - DNA, 30 bp, Artificial Sequence
  Synthetic oligonucleotide
gacagctaaatctaacgtatgagataaggt

SEQ ID NO: 343839 - DNA, 30 bp, Artificial Sequence
  Synthetic oligonucleotide
ctccggccacaaaattactcattataaggt

SEQ ID NO: 343840 - DNA, 30 bp, Artificial Sequence
  Synthetic oligonucleotide
tatgaagccgccgcgcttcggttctaaggt

SEQ ID NO: 343841 - DNA, 30 bp, Artificial Sequence
  Synthetic oligonucleotide
ctttccggtgatcgtcctatgttctaaggt

SEQ ID NO: 343842 - DNA, 30 bp, Artificial Sequence
  Synthetic oligonucleotide
tggctattatgtcatagacaggagtaaggt

SEQ ID NO: 343843 - DNA, 30 bp, Artificial Sequence
  Synthetic oligonucleotide
tggcctgttaaacatactatcgaaacaggt

SEQ ID NO: 343844 - DNA, 30 bp, Artificial Sequence
  Synthetic oligonucleotide
gacgatattcctgcagcggacggtacaggt

SEQ ID NO: 343845 - DNA, 30 bp, Artificial Sequence
  Synthetic oligonucleotide
ttacagcggtcggttaatcacggaccaggt

SEQ ID NO: 343846 - DNA, 30 bp, Artificial Sequence
  Synthetic oligonucleotide
cgcagggtacggtcgccagagttaccaggt

SEQ ID NO: 343847 - DNA, 30 bp, Artificial Sequence
  Synthetic oligonucleotide
cccagctgccaagcgagggctcacccaggt

SEQ ID NO: 343848 - DNA, 30 bp, Artificial Sequence
  Synthetic oligonucleotide
taattatagtttgtgcttacatagccaggt

SEQ ID NO: 343849 - DNA, 30 bp, Artificial Sequence
  Synthetic oligonucleotide
ccctggtctcattactcgtctacgccaggt

SEQ ID NO: 343850 - DNA, 30 bp, Artificial Sequence
  Synthetic oligonucleotide
cgggctattcgagctcagaatctgccaggt

SEQ ID NO: 343851 - DNA, 30 bp, Artificial Sequence
  Synthetic oligonucleotide
cccggtcgcactatgatatctactccaggt

SEQ ID NO: 343852 - DNA, 30 bp, Artificial Sequence
  Synthetic oligonucleotide
ggtgacaaagttcgcgagcctgaagcaggt

SEQ ID NO: 343853 - DNA, 30 bp, Artificial Sequence
  Synthetic oligonucleotide
gtcgccggccaacctcgacggcgcgcaggt

SEQ ID NO: 343854 - DNA, 30 bp, Artificial Sequence
  Synthetic oligonucleotide
tacggcgcgcgaggttgcttcgaggcaggt

SEQ ID NO: 343855 - DNA, 30 bp, Artificial Sequence
  Synthetic oligonucleotide
gtattgggcccgttctagtgatgtgcaggt

SEQ ID NO: 343856 - DNA, 30 bp, Artificial Sequence
  Synthetic oligonucleotide
cagagtatgattcgtgcataagttgcaggt

SEQ ID NO: 343857 - DNA, 30 bp, Artificial Sequence
  Synthetic oligonucleotide
cagataatagtgatgcgttgtgcatcaggt

SEQ ID NO: 343858 - DNA, 30 bp, Artificial Sequence
  Synthetic oligonucleotide
cgcaatgtagatatttttcagaactcaggt

SEQ ID NO: 343859 - DNA, 30 bp, Artificial Sequence
  Synthetic oligonucleotide
attgaggtggtgaccaatgccaagtcaggt

SEQ ID NO: 343860 - DNA, 30 bp, Artificial Sequence
  Synthetic oligonucleotide
attcgtggaccgcaagcttccctgtcaggt

SEQ ID NO: 343861 - DNA, 29 bp, Artificial Sequence
  Synthetic oligonucleotide
gtaaattccggatcctaatctgttcaggt

SEQ ID NO: 343862 - DNA, 30 bp, Artificial Sequence
  Synthetic oligonucleotide
gtacagatatctccttcagaccacagaggt

SEQ ID NO: 343863 - DNA, 30 bp, Artificial Sequence
  Synthetic oligonucleotide
tgaaaagcttagggctctgcccgcagaggt

SEQ ID NO: 343864 - DNA, 30 bp, Artificial Sequence
  Synthetic oligonucleotide
caaggcgcggcaagcagatcaggcagaggt

SEQ ID NO: 343865 - DNA, 30 bp, Artificial Sequence
  Synthetic oligonucleotide
ctagaggtgaaagggcaaaggttcagaggt

SEQ ID NO: 343866 - DNA, 30 bp, Artificial Sequence
  Synthetic oligonucleotide
actcgattaccgcagtactgcctgagaggt

SEQ ID NO: 343867 - DNA, 30 bp, Artificial Sequence
  Synthetic oligonucleotide
cattaaaaattcagcaagccctctagaggt

SEQ ID NO: 343868 - DNA, 30 bp, Artificial Sequence
  Synthetic oligonucleotide
ggttggatactagggagcataattagaggt

SEQ ID NO: 343869 - DNA, 30 bp, Artificial Sequence
  Synthetic oligonucleotide
gtgaaaagtttcaatttacgtcgacgaggt

SEQ ID NO: 343870 - DNA, 30 bp, Artificial Sequence
  Synthetic oligonucleotide
agacaaggtttatcggctaacctacgaggt

SEQ ID NO: 343871 - DNA, 30 bp, Artificial Sequence
  Synthetic oligonucleotide
aagcactcagatgttgttccgttacgaggt

SEQ ID NO: 343872 - DNA, 30 bp, Artificial Sequence
  Synthetic oligonucleotide
gcttcgttggactgacccgggatccgaggt

SEQ ID NO: 343873 - DNA, 30 bp, Artificial Sequence
  Synthetic oligonucleotide
agaacaaaggcccgctatgatcagcgaggt

SEQ ID NO: 343874 - DNA, 30 bp, Artificial Sequence
  Synthetic oligonucleotide
atctgtgagaacgtaggagattcaggaggt

SEQ ID NO: 343875 - DNA, 30 bp, Artificial Sequence
  Synthetic oligonucleotide
tcaagccttagtacggggtcccccggaggt

SEQ ID NO: 343876 - DNA, 30 bp, Artificial Sequence
  Synthetic oligonucleotide
agagtgataggagcggtataaattggaggt

SEQ ID NO: 343877 - DNA, 30 bp, Artificial Sequence
  Synthetic oligonucleotide
ttcaaagggactcggagtaaagttggaggt

SEQ ID NO: 343878 - DNA, 30 bp, Artificial Sequence
  Synthetic oligonucleotide
gcggatccgtcatgtgaacgcagatgaggt

SEQ ID NO: 343879 - DNA, 30 bp, Artificial Sequence
  Synthetic oligonucleotide
cagtgtcccgaagttatacaactatgaggt

SEQ ID NO: 343880 - DNA, 30 bp, Artificial Sequence
  Synthetic oligonucleotide
tctatagtcaagtggaagttcagctgaggt

SEQ ID NO: 343881 - DNA, 30 bp, Artificial Sequence
  Synthetic oligonucleotide
ccttctgggagaccacccggcgggtgaggt

SEQ ID NO: 343882 - DNA, 30 bp, Artificial Sequence
  Synthetic oligonucleotide
gggcgttactaattttcccaatggtgaggt

SEQ ID NO: 343883 - DNA, 30 bp, Artificial Sequence
  Synthetic oligonucleotide
gataccctgggcacattgttaatttgaggt

SEQ ID NO: 343884 - DNA, 30 bp, Artificial Sequence
  Synthetic oligonucleotide
gcttagctcggcgtgacaagaaaaataggt

SEQ ID NO: 343885 - DNA, 30 bp, Artificial Sequence
  Synthetic oligonucleotide
gtccaggagtgactcacaatttaaataggt

SEQ ID NO: 343886 - DNA, 30 bp, Artificial Sequence
  Synthetic oligonucleotide
ctaacgcttgcgtcaaaagaagcaataggt

SEQ ID NO: 343887 - DNA, 30 bp, Artificial Sequence
  Synthetic oligonucleotide
gcaagaacgtcgctaagaggcagaataggt

SEQ ID NO: 343888 - DNA, 30 bp, Artificial Sequence
  Synthetic oligonucleotide
gatcacgggcaagtatgtgcgtgaataggt

SEQ ID NO: 343889 - DNA, 30 bp, Artificial Sequence
  Synthetic oligonucleotide
gatgtagaggaaacgtgagagttaataggt

SEQ ID NO: 343890 - DNA, 30 bp, Artificial Sequence
  Synthetic oligonucleotide
atctcatcgaaaacctcaactgccataggt

SEQ ID NO: 343891 - DNA, 30 bp, Artificial Sequence
  Synthetic oligonucleotide
accggtatctctatagaggagctcataggt

SEQ ID NO: 343892 - DNA, 30 bp, Artificial Sequence
  Synthetic oligonucleotide
gaacggttacttcagatttgatcgataggt

SEQ ID NO: 343893 - DNA, 30 bp, Artificial Sequence
  Synthetic oligonucleotide
agcactcagtgaccggaagtttggataggt

SEQ ID NO: 343894 - DNA, 30 bp, Artificial Sequence
  Synthetic oligonucleotide
gggttaattcatcgcactggacatataggt

SEQ ID NO: 343895 - DNA, 30 bp, Artificial Sequence
  Synthetic oligonucleotide
tttggacgcgacatgaacagctctataggt

SEQ ID NO: 343896 - DNA, 30 bp, Artificial Sequence
  Synthetic oligonucleotide
ataggcttaaacatgaagaggggtataggt

SEQ ID NO: 343897 - DNA, 30 bp, Artificial Sequence
  Synthetic oligonucleotide
ttatatccaagcttaaaagcggttataggt

SEQ ID NO: 343898 - DNA, 30 bp, Artificial Sequence
  Synthetic oligonucleotide
ttgcaagaatgagacttcggcgcactaggt

SEQ ID NO: 343899 - DNA, 30 bp, Artificial Sequence
  Synthetic oligonucleotide
gctaagatttagtgtttatgaaccctaggt

SEQ ID NO: 343900 - DNA, 30 bp, Artificial Sequence
  Synthetic oligonucleotide
catcagttggatgtgtgggctaggctaggt

SEQ ID NO: 343901 - DNA, 30 bp, Artificial Sequence
  Synthetic oligonucleotide
ccaacggaatacacggggtatgtgctaggt

SEQ ID NO: 343902 - DNA, 30 bp, Artificial Sequence
  Synthetic oligonucleotide
gcaagcgtctataacaaatctggtctaggt

SEQ ID NO: 343903 - DNA, 30 bp, Artificial Sequence
  Synthetic oligonucleotide
tcctaacatgtcgcgcgactaggcgtaggt

SEQ ID NO: 343904 - DNA, 30 bp, Artificial Sequence
  Synthetic oligonucleotide
gcgcctggaacacccggcatagtggtaggt

SEQ ID NO: 343905 - DNA, 30 bp, Artificial Sequence
  Synthetic oligonucleotide
actgactccgacaactcgacagatgtaggt

SEQ ID NO: 343906 - DNA, 30 bp, Artificial Sequence
  Synthetic oligonucleotide
gttgtaatgatccaatctttgagcttaggt

SEQ ID NO: 343907 - DNA, 30 bp, Artificial Sequence
  Synthetic oligonucleotide
agaatcgccagccaatccatattcttaggt

SEQ ID NO: 343908 - DNA, 30 bp, Artificial Sequence
  Synthetic oligonucleotide
gtggcgcgtgttgaacggtttaagttaggt

SEQ ID NO: 343909 - DNA, 30 bp, Artificial Sequence
  Synthetic oligonucleotide
tgggatatggggtcttccagagctttaggt

SEQ ID NO: 343910 - DNA, 30 bp, Artificial Sequence
  Synthetic oligonucleotide
tttacgtcccagcctgggcgggctttaggt

SEQ ID NO: 343911 - DNA, 30 bp, Artificial Sequence
  Synthetic oligonucleotide
gtgcccccatggcggatcctgcgtttaggt

SEQ ID NO: 343912 - DNA, 30 bp, Artificial Sequence
  Synthetic oligonucleotide
agtgggtggacagtgtgacggaggaacggt

SEQ ID NO: 343913 - DNA, 30 bp, Artificial Sequence
  Synthetic oligonucleotide
gggttatgctatttagtataatggaacggt

SEQ ID NO: 343914 - DNA, 30 bp, Artificial Sequence
  Synthetic oligonucleotide
aacattaacgagcttgaatggtgtaacggt

SEQ ID NO: 343915 - DNA, 31 bp, Artificial Sequence
  Synthetic oligonucleotide
gagttcagggttaaccagtggggaacacggt

SEQ ID NO: 343916 - DNA, 29 bp, Artificial Sequence
  Synthetic oligonucleotide
aatgtatagcattccccatgatccacggt

SEQ ID NO: 343917 - DNA, 30 bp, Artificial Sequence
  Synthetic oligonucleotide
atacaattgggcacatcgtctaagcacggt

SEQ ID NO: 343918 - DNA, 30 bp, Artificial Sequence
  Synthetic oligonucleotide
cgaatgcggggccaggttcagcggcacggt

SEQ ID NO: 343919 - DNA, 30 bp, Artificial Sequence
  Synthetic oligonucleotide
ttgtatatgcgcgcgttagcggggcacggt

SEQ ID NO: 343920 - DNA, 30 bp, Artificial Sequence
  Synthetic oligonucleotide
tagcgttttatggtggaagctgtgcacggt

SEQ ID NO: 343921 - DNA, 30 bp, Artificial Sequence
  Synthetic oligonucleotide
ggacgttgtgggttttgagtaaaagacggt

SEQ ID NO: 343922 - DNA, 30 bp, Artificial Sequence
  Synthetic oligonucleotide
gatagaaatcgaatcagtgtaggagacggt

SEQ ID NO: 343923 - DNA, 30 bp, Artificial Sequence
  Synthetic oligonucleotide
cctggatacttatctatggggtgcgacggt

SEQ ID NO: 343924 - DNA, 30 bp, Artificial Sequence
  Synthetic oligonucleotide
ttacggcaggaatgcgccgtaagggacggt

SEQ ID NO: 343925 - DNA, 30 bp, Artificial Sequence
  Synthetic oligonucleotide
cagtgaggaagttaacaatctctggacggt

SEQ ID NO: 343926 - DNA, 30 bp, Artificial Sequence
  Synthetic oligonucleotide
ggttcccaaaggagaatacttctggacggt

SEQ ID NO: 343927 - DNA, 30 bp, Artificial Sequence
  Synthetic oligonucleotide
acgcacgactagcgtatatcgtatgacggt

SEQ ID NO: 343928 - DNA, 30 bp, Artificial Sequence
  Synthetic oligonucleotide
gcggatgatgtttacctcgtcattgacggt

SEQ ID NO: 343929 - DNA, 30 bp, Artificial Sequence
  Synthetic oligonucleotide
cgaccgtggttgccggtcgatgcatacggt

SEQ ID NO: 343930 - DNA, 30 bp, Artificial Sequence
  Synthetic oligonucleotide
tactccatcgaaggtcgcgtactatacggt

SEQ ID NO: 343931 - DNA, 30 bp, Artificial Sequence
  Synthetic oligonucleotide
accacacagtgggaacctactgtatacggt

SEQ ID NO: 343932 - DNA, 30 bp, Artificial Sequence
  Synthetic oligonucleotide
agtggtcaaggtccgttgcctttatacggt

SEQ ID NO: 343933 - DNA, 30 bp, Artificial Sequence
  Synthetic oligonucleotide
aaggcatttcgctgggggaagggctacggt

SEQ ID NO: 343934 - DNA, 30 bp, Artificial Sequence
  Synthetic oligonucleotide
gataatggagactgaggaacaacgtacggt

SEQ ID NO: 343935 - DNA, 30 bp, Artificial Sequence
  Synthetic oligonucleotide
tgtgtaacgaaccattaaaaactttacggt

SEQ ID NO: 343936 - DNA, 30 bp, Artificial Sequence
  Synthetic oligonucleotide
gtaacatgtgaggtcgctaagcgaaccggt

SEQ ID NO: 343937 - DNA, 30 bp, Artificial Sequence
  Synthetic oligonucleotide
atgtcttcatgtgtttttatcttcaccggt

SEQ ID NO: 343938 - DNA, 30 bp, Artificial Sequence
  Synthetic oligonucleotide
gttttgaaatcggaataaaccacgaccggt

SEQ ID NO: 343939 - DNA, 30 bp, Artificial Sequence
  Synthetic oligonucleotide
agggtctacctattcgagtgtcataccggt

SEQ ID NO: 343940 - DNA, 30 bp, Artificial Sequence
  Synthetic oligonucleotide
agatcgacgtagagacccgaagttaccggt

SEQ ID NO: 343941 - DNA, 30 bp, Artificial Sequence
  Synthetic oligonucleotide
cggataattggcctttctatgttacccggt

SEQ ID NO: 343942 - DNA, 30 bp, Artificial Sequence
  Synthetic oligonucleotide
atgctaagagtgtatctaataaggcccggt

SEQ ID NO: 343943 - DNA, 30 bp, Artificial Sequence
  Synthetic oligonucleotide
cgtatgtaagtggctcttgatttgcccggt

SEQ ID NO: 343944 - DNA, 30 bp, Artificial Sequence
  Synthetic oligonucleotide
ttagggtacgaacgaagatagagtcccggt

SEQ ID NO: 343945 - DNA, 30 bp, Artificial Sequence
  Synthetic oligonucleotide
tcgcattcagtcgccttttattgtcccggt

SEQ ID NO: 343946 - DNA, 30 bp, Artificial Sequence
  Synthetic oligonucleotide
agtgcccgctgtcgtaggacacgagccggt

SEQ ID NO: 343947 - DNA, 30 bp, Artificial Sequence
  Synthetic oligonucleotide
ctcgttaggaatgaaggcctcgtagccggt

SEQ ID NO: 343948 - DNA, 30 bp, Artificial Sequence
  Synthetic oligonucleotide
cgacccgtagcctttggatgcatcgccggt

SEQ ID NO: 343949 - DNA, 30 bp, Artificial Sequence
  Synthetic oligonucleotide
gcccgggggtaggaaacgtagttcgccggt

SEQ ID NO: 343950 - DNA, 30 bp, Artificial Sequence
  Synthetic oligonucleotide
agccttcccataagcatgcatgcggccggt

SEQ ID NO: 343951 - DNA, 30 bp, Artificial Sequence
  Synthetic oligonucleotide
aagacgcactataattgatcattatccggt

SEQ ID NO: 343952 - DNA, 30 bp, Artificial Sequence
  Synthetic oligonucleotide
acaggctcgagacattcaggctcctccggt

SEQ ID NO: 343953 - DNA, 30 bp, Artificial Sequence
  Synthetic oligonucleotide
ctaaccttctcacttactgtgacgtccggt

SEQ ID NO: 343954 - DNA, 30 bp, Artificial Sequence
  Synthetic oligonucleotide
gataggtccggatctagcgggtcaagcggt

SEQ ID NO: 343955 - DNA, 30 bp, Artificial Sequence
  Synthetic oligonucleotide
aagtaaaatgagctaacgctcataagcggt

SEQ ID NO: 343956 - DNA, 30 bp, Artificial Sequence
  Synthetic oligonucleotide
ccacctcaagcgtggtgtaacttaagcggt

SEQ ID NO: 343957 - DNA, 30 bp, Artificial Sequence
  Synthetic oligonucleotide
aggtacgcgatagccaccagtaacagcggt

SEQ ID NO: 343958 - DNA, 30 bp, Artificial Sequence
  Synthetic oligonucleotide
ggtatagacgagcgaaacatggacagcggt

SEQ ID NO: 343959 - DNA, 30 bp, Artificial Sequence
  Synthetic oligonucleotide
acagcgagtaccagacctacctagagcggt

SEQ ID NO: 343960 - DNA, 30 bp, Artificial Sequence
  Synthetic oligonucleotide
cggacttgtttcgtgcacacaaggagcggt

SEQ ID NO: 343961 - DNA, 30 bp, Artificial Sequence
  Synthetic oligonucleotide
tcactcattgaggggggcgcgggtagcggt

SEQ ID NO: 343962 - DNA, 30 bp, Artificial Sequence
  Synthetic oligonucleotide
cagttctcaaaacagccatagtttagcggt

SEQ ID NO: 343963 - DNA, 30 bp, Artificial Sequence
  Synthetic oligonucleotide
ctcccgtctggcaaactggcttaacgcggt

SEQ ID NO: 343964 - DNA, 30 bp, Artificial Sequence
  Synthetic oligonucleotide
caacaagccaaagggatttaataccgcggt

SEQ ID NO: 343965 - DNA, 30 bp, Artificial Sequence
  Synthetic oligonucleotide
actatgcgttaggggacaaaaccccgcggt

SEQ ID NO: 343966 - DNA, 30 bp, Artificial Sequence
  Synthetic oligonucleotide
tgcgcgaagaggaatactatcttccgcggt

SEQ ID NO: 343967 - DNA, 30 bp, Artificial Sequence
  Synthetic oligonucleotide
ggggtgttggaatatgtgtgtttgcgcggt

SEQ ID NO: 343968 - DNA, 30 bp, Artificial Sequence
  Synthetic oligonucleotide
cgtatattatattaataaggttctcgcggt

SEQ ID NO: 343969 - DNA, 30 bp, Artificial Sequence
  Synthetic oligonucleotide
catattaggagcggatctgataggggcggt

SEQ ID NO: 343970 - DNA, 30 bp, Artificial Sequence
  Synthetic oligonucleotide
gaaggatggctctcggaattgcgtggcggt

SEQ ID NO: 343971 - DNA, 30 bp, Artificial Sequence
  Synthetic oligonucleotide
aactcggtagccctttggagaggatgcggt

SEQ ID NO: 343972 - DNA, 30 bp, Artificial Sequence
  Synthetic oligonucleotide
agggtcctggacttacagagtgtatgcggt

SEQ ID NO: 343973 - DNA, 30 bp, Artificial Sequence
  Synthetic oligonucleotide
attcaccgttttcacgtccatacctgcggt

SEQ ID NO: 343974 - DNA, 30 bp, Artificial Sequence
  Synthetic oligonucleotide
ttgggatgcttacgttgatatctctgcggt

SEQ ID NO: 343975 - DNA, 30 bp, Artificial Sequence
  Synthetic oligonucleotide
gttgtacacaatttggcatcagcgtgcggt

SEQ ID NO: 343976 - DNA, 30 bp, Artificial Sequence
  Synthetic oligonucleotide
ttcactttagtggaccccgtagaaatcggt

SEQ ID NO: 343977 - DNA, 30 bp, Artificial Sequence
  Synthetic oligonucleotide
caacccgatagaacttatttctcgatcggt

SEQ ID NO: 343978 - DNA, 30 bp, Artificial Sequence
  Synthetic oligonucleotide
ggtgccggctgccggcagcattggatcggt

SEQ ID NO: 343979 - DNA, 30 bp, Artificial Sequence
  Synthetic oligonucleotide
gacactatagatgtccgtaatgatatcggt

SEQ ID NO: 343980 - DNA, 30 bp, Artificial Sequence
  Synthetic oligonucleotide
tttcatagttcccccacagaaaccctcggt

SEQ ID NO: 343981 - DNA, 30 bp, Artificial Sequence
  Synthetic oligonucleotide
gctaaagtgagcatcacggcttccctcggt

SEQ ID NO: 343982 - DNA, 30 bp, Artificial Sequence
  Synthetic oligonucleotide
tactaaagcgtgacaagctgcatcctcggt

SEQ ID NO: 343983 - DNA, 30 bp, Artificial Sequence
  Synthetic oligonucleotide
ggaagcgaaacgaaagaccaccggctcggt

SEQ ID NO: 343984 - DNA, 30 bp, Artificial Sequence
  Synthetic oligonucleotide
gtctttcatgtcaggaggtgagatctcggt

SEQ ID NO: 343985 - DNA, 30 bp, Artificial Sequence
  Synthetic oligonucleotide
ggaatacgcgccgaagatgaaggtctcggt

SEQ ID NO: 343986 - DNA, 30 bp, Artificial Sequence
  Synthetic oligonucleotide
aacttctaactgaatcacggtggagtcggt

SEQ ID NO: 343987 - DNA, 30 bp, Artificial Sequence
  Synthetic oligonucleotide
gttcgttgagggagtaaggatgtagtcggt

SEQ ID NO: 343988 - DNA, 30 bp, Artificial Sequence
  Synthetic oligonucleotide
catagaggacagtaacatatatacgtcggt

SEQ ID NO: 343989 - DNA, 30 bp, Artificial Sequence
  Synthetic oligonucleotide
agatttccaagtaatctatttagggtcggt

SEQ ID NO: 343990 - DNA, 30 bp, Artificial Sequence
  Synthetic oligonucleotide
cagaaaagtgtaggcgagtatctggtcggt

SEQ ID NO: 343991 - DNA, 30 bp, Artificial Sequence
  Synthetic oligonucleotide
attcacgactttcgttatgtatgtgtcggt

SEQ ID NO: 343992 - DNA, 30 bp, Artificial Sequence
  Synthetic oligonucleotide
ggtcgtttatcttctaagcgaggcttcggt

SEQ ID NO: 343993 - DNA, 30 bp, Artificial Sequence
  Synthetic oligonucleotide
ggtgttgcggtgtgcctaaggcggttcggt

SEQ ID NO: 343994 - DNA, 30 bp, Artificial Sequence
  Synthetic oligonucleotide
aacacttctgcccccggcttatggttcggt

SEQ ID NO: 343995 - DNA, 31 bp, Artificial Sequence
  Synthetic oligonucleotide
catacatgaattttagtctcacgatttcggt

SEQ ID NO: 343996 - DNA, 30 bp, Artificial Sequence
  Synthetic oligonucleotide
aatgtggtagtacgtgagctataaaagggt

SEQ ID NO: 343997 - DNA, 30 bp, Artificial Sequence
  Synthetic oligonucleotide
gttggctggcagtaaatagggcgaaagggt

SEQ ID NO: 343998 - DNA, 30 bp, Artificial Sequence
  Synthetic oligonucleotide
attccagtgcgggtcctgaagaacaagggt

SEQ ID NO: 343999 - DNA, 30 bp, Artificial Sequence
  Synthetic oligonucleotide
ggtcagagaccttggaacttcaggaagggt

SEQ ID NO: 344000 - DNA, 30 bp, Artificial Sequence
  Synthetic oligonucleotide
ttcatacccgagttggacacagataagggt

SEQ ID NO: 344001 - DNA, 30 bp, Artificial Sequence
  Synthetic oligonucleotide
ttttcgagtggccagaagttcttacagggt

SEQ ID NO: 344002 - DNA, 30 bp, Artificial Sequence
  Synthetic oligonucleotide
ttgttcgggatcggaaagtttcgccagggt

SEQ ID NO: 344003 - DNA, 30 bp, Artificial Sequence
  Synthetic oligonucleotide
gaatctacaaagcaagcgagggtccagggt

SEQ ID NO: 344004 - DNA, 29 bp, Artificial Sequence
  Synthetic oligonucleotide
tataaggagtccaggatctgcggcagggt

SEQ ID NO: 344005 - DNA, 30 bp, Artificial Sequence
  Synthetic oligonucleotide
cggttctaccatgcgcacaggcttcagggt

SEQ ID NO: 344006 - DNA, 30 bp, Artificial Sequence
  Synthetic oligonucleotide
agtcggttattattgtcgagtaacgagggt

SEQ ID NO: 344007 - DNA, 30 bp, Artificial Sequence
  Synthetic oligonucleotide
agttgttcgacatgaatccacagggagggt

SEQ ID NO: 344008 - DNA, 30 bp, Artificial Sequence
  Synthetic oligonucleotide
acattcgagtgggacttatacgctgagggt

SEQ ID NO: 344009 - DNA, 30 bp, Artificial Sequence
  Synthetic oligonucleotide
atgcacaattccgcactcttcaactagggt

SEQ ID NO: 344010 - DNA, 30 bp, Artificial Sequence
  Synthetic oligonucleotide
acagtccatgcgttcgatttgtcctagggt

SEQ ID NO: 344011 - DNA, 30 bp, Artificial Sequence
  Synthetic oligonucleotide
gcctggggtagaagtggataatattagggt

SEQ ID NO: 344012 - DNA, 30 bp, Artificial Sequence
  Synthetic oligonucleotide
acaaaccggcaaagaatgtatcgaacgggt

SEQ ID NO: 344013 - DNA, 30 bp, Artificial Sequence
  Synthetic oligonucleotide
tctttactgaggtaacagagggtaacgggt

SEQ ID NO: 344014 - DNA, 30 bp, Artificial Sequence
  Synthetic oligonucleotide
ggaaccacttgcatccgtcatcacacgggt

SEQ ID NO: 344015 - DNA, 30 bp, Artificial Sequence
  Synthetic oligonucleotide
ctagcattgtacccagcgactcagacgggt

SEQ ID NO: 344016 - DNA, 30 bp, Artificial Sequence
  Synthetic oligonucleotide
gcctcgaacggcgtattccttgagacgggt

SEQ ID NO: 344017 - DNA, 30 bp, Artificial Sequence
  Synthetic oligonucleotide
cagtggggcatttccgtttagcaaccgggt

SEQ ID NO: 344018 - DNA, 30 bp, Artificial Sequence
  Synthetic oligonucleotide
agtttccaaaccaataaccggcgcccgggt

SEQ ID NO: 344019 - DNA, 30 bp, Artificial Sequence
  Synthetic oligonucleotide
ttgggcgatattattaggtggcgcccgggt

SEQ ID NO: 344020 - DNA, 30 bp, Artificial Sequence
  Synthetic oligonucleotide
tcgttgcaaagtgcacaagcttcgccgggt

SEQ ID NO: 344021 - DNA, 30 bp, Artificial Sequence
  Synthetic oligonucleotide
caggtttgatggcgcagtgttgtgccgggt

SEQ ID NO: 344022 - DNA, 30 bp, Artificial Sequence
  Synthetic oligonucleotide
tctcgcgagaccagtctaagggatccgggt

SEQ ID NO: 344023 - DNA, 30 bp, Artificial Sequence
  Synthetic oligonucleotide
ctgttattaagtgcgcgttccgctccgggt

SEQ ID NO: 344024 - DNA, 30 bp, Artificial Sequence
  Synthetic oligonucleotide
accttaacttaactcgtatattaagcgggt

SEQ ID NO: 344025 - DNA, 30 bp, Artificial Sequence
  Synthetic oligonucleotide
atacgactagctctcggaacttcagcgggt

SEQ ID NO: 344026 - DNA, 30 bp, Artificial Sequence
  Synthetic oligonucleotide
tacgtaactagcgaccaatacggagcgggt

SEQ ID NO: 344027 - DNA, 30 bp, Artificial Sequence
  Synthetic oligonucleotide
cggcagtaaaaataaccgcccagggcgggt

SEQ ID NO: 344028 - DNA, 30 bp, Artificial Sequence
  Synthetic oligonucleotide
caaggcagggaatgtctggctgatgcgggt

SEQ ID NO: 344029 - DNA, 30 bp, Artificial Sequence
  Synthetic oligonucleotide
ctcggaatttatagtatctgttgtgcgggt

SEQ ID NO: 344030 - DNA, 30 bp, Artificial Sequence
  Synthetic oligonucleotide
tcgttgaatatcttgatcctagaatcgggt

SEQ ID NO: 344031 - DNA, 30 bp, Artificial Sequence
  Synthetic oligonucleotide
aatgccaaacagaggtccgacatatcgggt

SEQ ID NO: 344032 - DNA, 30 bp, Artificial Sequence
  Synthetic oligonucleotide
tttcgcgggtctgcttattagtagtcgggt

SEQ ID NO: 344033 - DNA, 30 bp, Artificial Sequence
  Synthetic oligonucleotide
ctaagaaaatgggggacgtatgggtcgggt

SEQ ID NO: 344034 - DNA, 30 bp, Artificial Sequence
  Synthetic oligonucleotide
agcgttgaagtggttttgctctaaaggggt

SEQ ID NO: 344035 - DNA, 30 bp, Artificial Sequence
  Synthetic oligonucleotide
agtcaggatcttcaatctacagtcaggggt

SEQ ID NO: 344036 - DNA, 30 bp, Artificial Sequence
  Synthetic oligonucleotide
aatactacgctcgacgccagagagaggggt

SEQ ID NO: 344037 - DNA, 30 bp, Artificial Sequence
  Synthetic oligonucleotide
tgcgggttacgtttgcaggggccgaggggt

SEQ ID NO: 344038 - DNA, 30 bp, Artificial Sequence
  Synthetic oligonucleotide
aatgtctttcagataaacgaggtgaggggt

SEQ ID NO: 344039 - DNA, 30 bp, Artificial Sequence
  Synthetic oligonucleotide
aacttagaggcattctagacagttaggggt

SEQ ID NO: 344040 - DNA, 30 bp, Artificial Sequence
  Synthetic oligonucleotide
tgttaaattttataggacgtgacacggggt

SEQ ID NO: 344041 - DNA, 31 bp, Artificial Sequence
  Synthetic oligonucleotide
caaactgacttgctgtgtggcagaccggggt

SEQ ID NO: 344042 - DNA, 30 bp, Artificial Sequence
  Synthetic oligonucleotide
cttaatcctaaaatcatgcgtcgccggggt

SEQ ID NO: 344043 - DNA, 30 bp, Artificial Sequence
  Synthetic oligonucleotide
attcacaggcgctaatactacatccggggt

SEQ ID NO: 344044 - DNA, 30 bp, Artificial Sequence
  Synthetic oligonucleotide
tccctcactcttttacacaaaacgcggggt

SEQ ID NO: 344045 - DNA, 30 bp, Artificial Sequence
  Synthetic oligonucleotide
ggcaaaccgtctagcgtatatggtcggggt

SEQ ID NO: 344046 - DNA, 30 bp, Artificial Sequence
  Synthetic oligonucleotide
ctgattattggccggctgggagttcggggt

SEQ ID NO: 344047 - DNA, 30 bp, Artificial Sequence
  Synthetic oligonucleotide
gaaacacccggaaaagttgggagagggggt

SEQ ID NO: 344048 - DNA, 30 bp, Artificial Sequence
  Synthetic oligonucleotide
ttagtgtaacttctcgacacaatagggggt

SEQ ID NO: 344049 - DNA, 30 bp, Artificial Sequence
  Synthetic oligonucleotide
catagcccgcacttcaaacttagcgggggt

SEQ ID NO: 344050 - DNA, 30 bp, Artificial Sequence
  Synthetic oligonucleotide
aattattgagtaggtcccagccgcgggggt

SEQ ID NO: 344051 - DNA, 30 bp, Artificial Sequence
  Synthetic oligonucleotide
tacaatggaatggagaaccgtctcgggggt

SEQ ID NO: 344052 - DNA, 30 bp, Artificial Sequence
  Synthetic oligonucleotide
agcggatttgacctatctatcttcgggggt

SEQ ID NO: 344053 - DNA, 30 bp, Artificial Sequence
  Synthetic oligonucleotide
accaattaggaccacggaaacgcggggggt

SEQ ID NO: 344054 - DNA, 30 bp, Artificial Sequence
  Synthetic oligonucleotide
ggcgtttttttgatccttgaatcggggggt

SEQ ID NO: 344055 - DNA, 30 bp, Artificial Sequence
  Synthetic oligonucleotide
tacgcaggttgtagcgagcggtcggggggt

SEQ ID NO: 344056 - DNA, 30 bp, Artificial Sequence
  Synthetic oligonucleotide
agctcccaggtgatagtattttcggggggt

SEQ ID NO: 344057 - DNA, 30 bp, Artificial Sequence
  Synthetic oligonucleotide
aaacttgaaacgtaggacgactgggggggt

SEQ ID NO: 344058 - DNA, 30 bp, Artificial Sequence
  Synthetic oligonucleotide
atatcggagagcccgcggcacaaatggggt

SEQ ID NO: 344059 - DNA, 30 bp, Artificial Sequence
  Synthetic oligonucleotide
tgttctcctcagggtcacgaacaatggggt

SEQ ID NO: 344060 - DNA, 30 bp, Artificial Sequence
  Synthetic oligonucleotide
atcctcctggaagtgttgaaactatggggt

SEQ ID NO: 344061 - DNA, 30 bp, Artificial Sequence
  Synthetic oligonucleotide
gctgtttagagccgggttcgactatggggt

SEQ ID NO: 344062 - DNA, 30 bp, Artificial Sequence
  Synthetic oligonucleotide
cggagtcgctaaggggtctttccctggggt

SEQ ID NO: 344063 - DNA, 30 bp, Artificial Sequence
  Synthetic oligonucleotide
catgacatctagtaaatgaattagtggggt

SEQ ID NO: 344064 - DNA, 30 bp, Artificial Sequence
  Synthetic oligonucleotide
gcggttcgtaacccggaacacacgtggggt

SEQ ID NO: 344065 - DNA, 30 bp, Artificial Sequence
  Synthetic oligonucleotide
cctatttcaacggctcgaccaatgtggggt

SEQ ID NO: 344066 - DNA, 30 bp, Artificial Sequence
  Synthetic oligonucleotide
gggggcatcgcccatcagggtgcttggggt

SEQ ID NO: 344067 - DNA, 30 bp, Artificial Sequence
  Synthetic oligonucleotide
cattaaagcaacaaccaatttaaaatgggt

SEQ ID NO: 344068 - DNA, 30 bp, Artificial Sequence
  Synthetic oligonucleotide
tcaggatcctaattagtacagcaaatgggt

SEQ ID NO: 344069 - DNA, 31 bp, Artificial Sequence
  Synthetic oligonucleotide
gctctggccggtataaagtaggataatgggt

SEQ ID NO: 344070 - DNA, 30 bp, Artificial Sequence
  Synthetic oligonucleotide
cactattgctcaaaaggacgtttcatgggt

SEQ ID NO: 344071 - DNA, 30 bp, Artificial Sequence
  Synthetic oligonucleotide
tcccggggcatcaagtagagctggatgggt

SEQ ID NO: 344072 - DNA, 30 bp, Artificial Sequence
  Synthetic oligonucleotide
ctaaaccaaacagtgcggatctggatgggt

SEQ ID NO: 344073 - DNA, 30 bp, Artificial Sequence
  Synthetic oligonucleotide
gtgcggacggtttcatatgctgaactgggt

SEQ ID NO: 344074 - DNA, 30 bp, Artificial Sequence
  Synthetic oligonucleotide
tatatgggcagagtaggcaccccactgggt

SEQ ID NO: 344075 - DNA, 30 bp, Artificial Sequence
  Synthetic oligonucleotide
acatatatagggggcctagaaatcctgggt

SEQ ID NO: 344076 - DNA, 30 bp, Artificial Sequence
  Synthetic oligonucleotide
gcgtttgctcggatcacattcatcctgggt

SEQ ID NO: 344077 - DNA, 30 bp, Artificial Sequence
  Synthetic oligonucleotide
gtatgaatctgtcgctgaattaagctgggt

SEQ ID NO: 344078 - DNA, 30 bp, Artificial Sequence
  Synthetic oligonucleotide
cctgggtaatatctaaagtcacagctgggt

SEQ ID NO: 344079 - DNA, 30 bp, Artificial Sequence
  Synthetic oligonucleotide
ttaaacgaatgagcagtcttgtttctgggt

SEQ ID NO: 344080 - DNA, 30 bp, Artificial Sequence
  Synthetic oligonucleotide
gcgcactcgaaaatcaggtgggacgtgggt

SEQ ID NO: 344081 - DNA, 30 bp, Artificial Sequence
  Synthetic oligonucleotide
attatcatcccacgtgaactaacggtgggt

SEQ ID NO: 344082 - DNA, 30 bp, Artificial Sequence
  Synthetic oligonucleotide
tggtaaagtattgaatgtacgccggtgggt

SEQ ID NO: 344083 - DNA, 29 bp, Artificial Sequence
  Synthetic oligonucleotide
ctggattgtctctctttttgggggtgggt

SEQ ID NO: 344084 - DNA, 30 bp, Artificial Sequence
  Synthetic oligonucleotide
ggcccgcaagtaagcagggtccttgtgggt

SEQ ID NO: 344085 - DNA, 30 bp, Artificial Sequence
  Synthetic oligonucleotide
cagctgacggcagagattagtatattgggt

SEQ ID NO: 344086 - DNA, 30 bp, Artificial Sequence
  Synthetic oligonucleotide
gctgggcctataggaaatgagttattgggt

SEQ ID NO: 344087 - DNA, 30 bp, Artificial Sequence
  Synthetic oligonucleotide
acgtctaaaatcaatgagggcttcttgggt

SEQ ID NO: 344088 - DNA, 30 bp, Artificial Sequence
  Synthetic oligonucleotide
acgactttcttgagagtccttttcttgggt

SEQ ID NO: 344089 - DNA, 30 bp, Artificial Sequence
  Synthetic oligonucleotide
tatgctttttcgccaccaggtgagttgggt

SEQ ID NO: 344090 - DNA, 30 bp, Artificial Sequence
  Synthetic oligonucleotide
ggaggaatttgcctgacgtcaataaatggt

SEQ ID NO: 344091 - DNA, 30 bp, Artificial Sequence
  Synthetic oligonucleotide
caaactcgatgaaacaggaagaagaatggt

SEQ ID NO: 344092 - DNA, 30 bp, Artificial Sequence
  Synthetic oligonucleotide
cacccaattcccagtataatcccgaatggt

SEQ ID NO: 344093 - DNA, 30 bp, Artificial Sequence
  Synthetic oligonucleotide
tctattccacgtcacagtcgcgtgaatggt

SEQ ID NO: 344094 - DNA, 30 bp, Artificial Sequence
  Synthetic oligonucleotide
aaagagaaaccatctcaggggtctaatggt

SEQ ID NO: 344095 - DNA, 30 bp, Artificial Sequence
  Synthetic oligonucleotide
tggttacagtacatgtggtactgtaatggt

SEQ ID NO: 344096 - DNA, 30 bp, Artificial Sequence
  Synthetic oligonucleotide
atcataaaactatgagttgtgatacatggt

SEQ ID NO: 344097 - DNA, 30 bp, Artificial Sequence
  Synthetic oligonucleotide
tttgtgaacgatctaggaaaaccccatggt

SEQ ID NO: 344098 - DNA, 30 bp, Artificial Sequence
  Synthetic oligonucleotide
aacagctcatcgccaatcccggatcatggt

SEQ ID NO: 344099 - DNA, 30 bp, Artificial Sequence
  Synthetic oligonucleotide
aggtctcaataagctctacgattagatggt

SEQ ID NO: 344100 - DNA, 30 bp, Artificial Sequence
  Synthetic oligonucleotide
cctacattctatgcaacagaccacgatggt

SEQ ID NO: 344101 - DNA, 30 bp, Artificial Sequence
  Synthetic oligonucleotide
gtttcgtcattaggccctatccacgatggt

SEQ ID NO: 344102 - DNA, 30 bp, Artificial Sequence
  Synthetic oligonucleotide
aaaggtcgtagccgggctttctcggatggt

SEQ ID NO: 344103 - DNA, 30 bp, Artificial Sequence
  Synthetic oligonucleotide
cggggggcctaggccaaccgaaatgatggt

SEQ ID NO: 344104 - DNA, 30 bp, Artificial Sequence
  Synthetic oligonucleotide
ccggatcaagggccttacttatgatatggt

SEQ ID NO: 344105 - DNA, 30 bp, Artificial Sequence
  Synthetic oligonucleotide
caaagtaatcgtgcagtttggttatatggt

SEQ ID NO: 344106 - DNA, 30 bp, Artificial Sequence
  Synthetic oligonucleotide
cgcagtgaggtatcaaccacagtctatggt

SEQ ID NO: 344107 - DNA, 30 bp, Artificial Sequence
  Synthetic oligonucleotide
gtccggcaaagacttcgcacaacttatggt

SEQ ID NO: 344108 - DNA, 30 bp, Artificial Sequence
  Synthetic oligonucleotide
ggtccttctaattagaactttccttatggt

SEQ ID NO: 344109 - DNA, 30 bp, Artificial Sequence
  Synthetic oligonucleotide
cgtcctgggcaacagggtatgagttatggt

SEQ ID NO: 344110 - DNA, 30 bp, Artificial Sequence
  Synthetic oligonucleotide
ctgaattgtgtagcaatcaatcgttatggt

SEQ ID NO: 344111 - DNA, 30 bp, Artificial Sequence
  Synthetic oligonucleotide
atactgttggcgcgaattggtcgttatggt

SEQ ID NO: 344112 - DNA, 30 bp, Artificial Sequence
  Synthetic oligonucleotide
acaactgctgcacaccagtagggttatggt

SEQ ID NO: 344113 - DNA, 30 bp, Artificial Sequence
  Synthetic oligonucleotide
tgataatgaaagctcaaaatcatttatggt

SEQ ID NO: 344114 - DNA, 30 bp, Artificial Sequence
  Synthetic oligonucleotide
atccacagctaggaattgtgtttttatggt

SEQ ID NO: 344115 - DNA, 30 bp, Artificial Sequence
  Synthetic oligonucleotide
aacgctgcggcagttctcatcgcaactggt

SEQ ID NO: 344116 - DNA, 30 bp, Artificial Sequence
  Synthetic oligonucleotide
gatggtagcccggggaccgtgataactggt

SEQ ID NO: 344117 - DNA, 30 bp, Artificial Sequence
  Synthetic oligonucleotide
actaacagggcctctcccagctccactggt

SEQ ID NO: 344118 - DNA, 30 bp, Artificial Sequence
  Synthetic oligonucleotide
agcatcttctatgctgggatcatcactggt

SEQ ID NO: 344119 - DNA, 30 bp, Artificial Sequence
  Synthetic oligonucleotide
aaagaagaatattatattcttcagactggt

SEQ ID NO: 344120 - DNA, 30 bp, Artificial Sequence
  Synthetic oligonucleotide
ctcgcggcaacggtctgctaactgactggt

SEQ ID NO: 344121 - DNA, 30 bp, Artificial Sequence
  Synthetic oligonucleotide
gataacagttgcaagtgaatccatactggt

SEQ ID NO: 344122 - DNA, 30 bp, Artificial Sequence
  Synthetic oligonucleotide
ttttcggaagattggttcaagaggcctggt

SEQ ID NO: 344123 - DNA, 30 bp, Artificial Sequence
  Synthetic oligonucleotide
aatccctgggggggtactctggggcctggt

SEQ ID NO: 344124 - DNA, 30 bp, Artificial Sequence
  Synthetic oligonucleotide
gataatcataagcgataggtttaagctggt

SEQ ID NO: 344125 - DNA, 30 bp, Artificial Sequence
  Synthetic oligonucleotide
ctatcgcgtagaaagctccgcgtagctggt

SEQ ID NO: 344126 - DNA, 30 bp, Artificial Sequence
  Synthetic oligonucleotide
ttgaatttctgaggtggatccaccgctggt

SEQ ID NO: 344127 - DNA, 30 bp, Artificial Sequence
  Synthetic oligonucleotide
gacgtaccaatagtatctagtcactctggt

SEQ ID NO: 344128 - DNA, 30 bp, Artificial Sequence
  Synthetic oligonucleotide
ctcaatgcttggtgggtcgatagctctggt

SEQ ID NO: 344129 - DNA, 30 bp, Artificial Sequence
  Synthetic oligonucleotide
agtcggcggaagtcaaggctaaagtctggt

SEQ ID NO: 344130 - DNA, 30 bp, Artificial Sequence
  Synthetic oligonucleotide
gcgtttcccattgagtcgttaaggtctggt

SEQ ID NO: 344131 - DNA, 30 bp, Artificial Sequence
  Synthetic oligonucleotide
cccaacacaaggcgtcttgatcggtctggt

SEQ ID NO: 344132 - DNA, 30 bp, Artificial Sequence
  Synthetic oligonucleotide
gatgacgctaccccaggttacgggtctggt

SEQ ID NO: 344133 - DNA, 30 bp, Artificial Sequence
  Synthetic oligonucleotide
acgagcacacagtcgtcaaatctgtctggt

SEQ ID NO: 344134 - DNA, 30 bp, Artificial Sequence
  Synthetic oligonucleotide
cggactcaatgtcgcatccgtgattctggt

SEQ ID NO: 344135 - DNA, 30 bp, Artificial Sequence
  Synthetic oligonucleotide
cgtgcattgggcgtgtttccgtattctggt

SEQ ID NO: 344136 - DNA, 30 bp, Artificial Sequence
  Synthetic oligonucleotide
cggtgatatggtcagtgaaattgttctggt

SEQ ID NO: 344137 - DNA, 30 bp, Artificial Sequence
  Synthetic oligonucleotide
tgcgagggtctcgggctttaaacaagtggt

SEQ ID NO: 344138 - DNA, 30 bp, Artificial Sequence
  Synthetic oligonucleotide
cctatctgtcttcgcgctagtgtaagtggt

SEQ ID NO: 344139 - DNA, 30 bp, Artificial Sequence
  Synthetic oligonucleotide
agcggtattgcacttctgtatatcagtggt

SEQ ID NO: 344140 - DNA, 30 bp, Artificial Sequence
  Synthetic oligonucleotide
gatcgaatataggaagctggtcagagtggt

SEQ ID NO: 344141 - DNA, 30 bp, Artificial Sequence
  Synthetic oligonucleotide
aatctgtcgcagcgtatagagcgtagtggt

SEQ ID NO: 344142 - DNA, 30 bp, Artificial Sequence
  Synthetic oligonucleotide
gtgaccatcttattgacctgacttagtggt

SEQ ID NO: 344143 - DNA, 30 bp, Artificial Sequence
  Synthetic oligonucleotide
ccttgactagcaagcgcccccggacgtggt

SEQ ID NO: 344144 - DNA, 30 bp, Artificial Sequence
  Synthetic oligonucleotide
atcaataggtaatgttatcctgaccgtggt

SEQ ID NO: 344145 - DNA, 30 bp, Artificial Sequence
  Synthetic oligonucleotide
ctcggggtctatgtggtacgtccccgtggt

SEQ ID NO: 344146 - DNA, 30 bp, Artificial Sequence
  Synthetic oligonucleotide
gttctgtggttcagctccgagatccgtggt

SEQ ID NO: 344147 - DNA, 30 bp, Artificial Sequence
  Synthetic oligonucleotide
agcaccacggccaagtcgatcatgcgtggt

SEQ ID NO: 344148 - DNA, 30 bp, Artificial Sequence
  Synthetic oligonucleotide
ctccattattagtggcgggaaaatcgtggt

SEQ ID NO: 344149 - DNA, 30 bp, Artificial Sequence
  Synthetic oligonucleotide
atgatcgacaccggcaatgcgccaggtggt

SEQ ID NO: 344150 - DNA, 30 bp, Artificial Sequence
  Synthetic oligonucleotide
gctgtatttggcatactacacgtcggtggt

SEQ ID NO: 344151 - DNA, 30 bp, Artificial Sequence
  Synthetic oligonucleotide
aggacagagggactattcacggcgggtggt

SEQ ID NO: 344152 - DNA, 30 bp, Artificial Sequence
  Synthetic oligonucleotide
ggggtaaagcttggatgagggggtggtggt

SEQ ID NO: 344153 - DNA, 31 bp, Artificial Sequence
  Synthetic oligonucleotide
aagttgtaagttggttgcggtctaatgtggt

SEQ ID NO: 344154 - DNA, 30 bp, Artificial Sequence
  Synthetic oligonucleotide
gcttcccgtgggggatggagttggtgtggt

SEQ ID NO: 344155 - DNA, 30 bp, Artificial Sequence
  Synthetic oligonucleotide
atataagatgtgataggggcattaattggt

SEQ ID NO: 344156 - DNA, 30 bp, Artificial Sequence
  Synthetic oligonucleotide
cggtaattctacccatggccctagattggt

SEQ ID NO: 344157 - DNA, 30 bp, Artificial Sequence
  Synthetic oligonucleotide
cctcgtaacgtagtggaaacgtagattggt

SEQ ID NO: 344158 - DNA, 30 bp, Artificial Sequence
  Synthetic oligonucleotide
aacctcgccactaatgaagtcacgattggt

SEQ ID NO: 344159 - DNA, 30 bp, Artificial Sequence
  Synthetic oligonucleotide
ggttttgggttaataactgggccgattggt

SEQ ID NO: 344160 - DNA, 30 bp, Artificial Sequence
  Synthetic oligonucleotide
cttatagaatttccagtacactcgattggt

SEQ ID NO: 344161 - DNA, 30 bp, Artificial Sequence
  Synthetic oligonucleotide
tgcaccgttagtccaactagtgctattggt

SEQ ID NO: 344162 - DNA, 30 bp, Artificial Sequence
  Synthetic oligonucleotide
gttgtcaaacaatgcccaactccacttggt

SEQ ID NO: 344163 - DNA, 30 bp, Artificial Sequence
  Synthetic oligonucleotide
agtatggcaacgcgcggctgtctccttggt

SEQ ID NO: 344164 - DNA, 30 bp, Artificial Sequence
  Synthetic oligonucleotide
ctaaaacctatagacaggcgcaagcttggt

SEQ ID NO: 344165 - DNA, 30 bp, Artificial Sequence
  Synthetic oligonucleotide
catgtggcccatgggttttgataagttggt

SEQ ID NO: 344166 - DNA, 30 bp, Artificial Sequence
  Synthetic oligonucleotide
gcaatctattaactcaaacgcccagttggt

SEQ ID NO: 344167 - DNA, 30 bp, Artificial Sequence
  Synthetic oligonucleotide
aatagcgtcccagtcctgtttgcagttggt

SEQ ID NO: 344168 - DNA, 30 bp, Artificial Sequence
  Synthetic oligonucleotide
gtcggggtgacttctttggcagccgttggt

SEQ ID NO: 344169 - DNA, 30 bp, Artificial Sequence
  Synthetic oligonucleotide
gaataagggcgggcgctcgtccgcgttggt

SEQ ID NO: 344170 - DNA, 30 bp, Artificial Sequence
  Synthetic oligonucleotide
cgtgtgctgtacctatggctctgcgttggt

SEQ ID NO: 344171 - DNA, 30 bp, Artificial Sequence
  Synthetic oligonucleotide
cgccttgaaggccttttctcgtgggttggt

SEQ ID NO: 344172 - DNA, 30 bp, Artificial Sequence
  Synthetic oligonucleotide
gagaatctagggtctcggacaatggttggt

SEQ ID NO: 344173 - DNA, 30 bp, Artificial Sequence
  Synthetic oligonucleotide
aagacgaagactgcgtcaatatctgttggt

SEQ ID NO: 344174 - DNA, 30 bp, Artificial Sequence
  Synthetic oligonucleotide
cggttagtgaagtacgcatcccgtgttggt

SEQ ID NO: 344175 - DNA, 30 bp, Artificial Sequence
  Synthetic oligonucleotide
acggacattatgtttcgggaatgatttggt

SEQ ID NO: 344176 - DNA, 30 bp, Artificial Sequence
  Synthetic oligonucleotide
ttggatacaccagtcgtagtatgctttggt

SEQ ID NO: 344177 - DNA, 30 bp, Artificial Sequence
  Synthetic oligonucleotide
gatgccgccatatgtagctcactctttggt

SEQ ID NO: 344178 - DNA, 30 bp, Artificial Sequence
  Synthetic oligonucleotide
attgatctattcctaacttattcgtttggt

SEQ ID NO: 344179 - DNA, 29 bp, Artificial Sequence
  Synthetic oligonucleotide
ggcgtgtcacagttaacggatggtttggt

SEQ ID NO: 344180 - DNA, 30 bp, Artificial Sequence
  Synthetic oligonucleotide
cacatattgatacgtgcggacagaaaatgt

SEQ ID NO: 344181 - DNA, 30 bp, Artificial Sequence
  Synthetic oligonucleotide
gtaatcggcgtcgtatctggggccaaatgt

SEQ ID NO: 344182 - DNA, 30 bp, Artificial Sequence
  Synthetic oligonucleotide
ctatacgattgcaagcaagcccagaaatgt

SEQ ID NO: 344183 - DNA, 30 bp, Artificial Sequence
  Synthetic oligonucleotide
atggtgtacttggagccatgctcacaatgt

SEQ ID NO: 344184 - DNA, 30 bp, Artificial Sequence
  Synthetic oligonucleotide
agaagcgtacgtgctgttcccagccaatgt

SEQ ID NO: 344185 - DNA, 30 bp, Artificial Sequence
  Synthetic oligonucleotide
cagtaggattatcatacccggaatcaatgt

SEQ ID NO: 344186 - DNA, 30 bp, Artificial Sequence
  Synthetic oligonucleotide
gggggagctatcttgaggggcagtgaatgt

SEQ ID NO: 344187 - DNA, 30 bp, Artificial Sequence
  Synthetic oligonucleotide
gacttcattgatggtgatgttatataatgt

SEQ ID NO: 344188 - DNA, 30 bp, Artificial Sequence
  Synthetic oligonucleotide
taccttgctctaagctagagacactaatgt

SEQ ID NO: 344189 - DNA, 30 bp, Artificial Sequence
  Synthetic oligonucleotide
ctgtccgatttgtgaaggtttgactaatgt

SEQ ID NO: 344190 - DNA, 30 bp, Artificial Sequence
  Synthetic oligonucleotide
atccgtaatggagaacagttctactaatgt

SEQ ID NO: 344191 - DNA, 30 bp, Artificial Sequence
  Synthetic oligonucleotide
tcggccgacattcatagagtaacttaatgt

SEQ ID NO: 344192 - DNA, 30 bp, Artificial Sequence
  Synthetic oligonucleotide
gtagcgacagctcggcgtctcgtcacatgt

SEQ ID NO: 344193 - DNA, 30 bp, Artificial Sequence
  Synthetic oligonucleotide
atcatggaagccggctacggtgtaccatgt

SEQ ID NO: 344194 - DNA, 30 bp, Artificial Sequence
  Synthetic oligonucleotide
gatggcctaaatagcgacatggacccatgt

SEQ ID NO: 344195 - DNA, 30 bp, Artificial Sequence
  Synthetic oligonucleotide
aaaatcgtcgccgagctatgcatcccatgt

SEQ ID NO: 344196 - DNA, 30 bp, Artificial Sequence
  Synthetic oligonucleotide
gcatgtggccttactaagccatcgccatgt

SEQ ID NO: 344197 - DNA, 30 bp, Artificial Sequence
  Synthetic oligonucleotide
gctcaggccggaggcgtgtcatcgccatgt

SEQ ID NO: 344198 - DNA, 30 bp, Artificial Sequence
  Synthetic oligonucleotide
cgtccccagacccgttggtgccggccatgt

SEQ ID NO: 344199 - DNA, 30 bp, Artificial Sequence
  Synthetic oligonucleotide
gatacgccgcgtgtgtctaaactgccatgt

SEQ ID NO: 344200 - DNA, 30 bp, Artificial Sequence
  Synthetic oligonucleotide
cgaagccttttacaatatctacacgcatgt

SEQ ID NO: 344201 - DNA, 30 bp, Artificial Sequence
  Synthetic oligonucleotide
caagttgcattgtagccggctatcgcatgt

SEQ ID NO: 344202 - DNA, 30 bp, Artificial Sequence
  Synthetic oligonucleotide
catattagaagagtggtataattggcatgt

SEQ ID NO: 344203 - DNA, 30 bp, Artificial Sequence
  Synthetic oligonucleotide
caaagcactgcaaacaacatttatgcatgt

SEQ ID NO: 344204 - DNA, 30 bp, Artificial Sequence
  Synthetic oligonucleotide
gcacatgggagggtcgtaaactaatcatgt

SEQ ID NO: 344205 - DNA, 30 bp, Artificial Sequence
  Synthetic oligonucleotide
acactgccaatatattgagcggcctcatgt

SEQ ID NO: 344206 - DNA, 30 bp, Artificial Sequence
  Synthetic oligonucleotide
cgggaaacgggacgatcaagtacgtcatgt

SEQ ID NO: 344207 - DNA, 30 bp, Artificial Sequence
  Synthetic oligonucleotide
agagttcgcaagtcacgctaacggtcatgt

SEQ ID NO: 344208 - DNA, 30 bp, Artificial Sequence
  Synthetic oligonucleotide
ctgtgaggtaaaacgacctatttgtcatgt

SEQ ID NO: 344209 - DNA, 30 bp, Artificial Sequence
  Synthetic oligonucleotide
tccgtcgatgcgaaacatcgcggttcatgt

SEQ ID NO: 344210 - DNA, 30 bp, Artificial Sequence
  Synthetic oligonucleotide
gcgagcattagtttcaagaactaaagatgt

SEQ ID NO: 344211 - DNA, 30 bp, Artificial Sequence
  Synthetic oligonucleotide
ccgttttatattaaccgtgcgtcaagatgt

SEQ ID NO: 344212 - DNA, 30 bp, Artificial Sequence
  Synthetic oligonucleotide
gaaggtttgtgtataaaactcaccagatgt

SEQ ID NO: 344213 - DNA, 30 bp, Artificial Sequence
  Synthetic oligonucleotide
cgctgcaatttggtactaagagagagatgt

SEQ ID NO: 344214 - DNA, 30 bp, Artificial Sequence
  Synthetic oligonucleotide
tcgtctcatgctggatcagagcggagatgt

SEQ ID NO: 344215 - DNA, 30 bp, Artificial Sequence
  Synthetic oligonucleotide
agccaattccaacaggggttttggagatgt

SEQ ID NO: 344216 - DNA, 30 bp, Artificial Sequence
  Synthetic oligonucleotide
tcaataatggggatgcttcactgtagatgt

SEQ ID NO: 344217 - DNA, 30 bp, Artificial Sequence
  Synthetic oligonucleotide
agctccagtgcgttagccaggccacgatgt

SEQ ID NO: 344218 - DNA, 30 bp, Artificial Sequence
  Synthetic oligonucleotide
gctcacgggttttagactgactcacgatgt

SEQ ID NO: 344219 - DNA, 30 bp, Artificial Sequence
  Synthetic oligonucleotide
ttatcggtgcccgtagcatatgtacgatgt

SEQ ID NO: 344220 - DNA, 30 bp, Artificial Sequence
  Synthetic oligonucleotide
ctttggtacaacgcgttctaagtccgatgt

SEQ ID NO: 344221 - DNA, 30 bp, Artificial Sequence
  Synthetic oligonucleotide
agcattttgtattcacctcggaagcgatgt

SEQ ID NO: 344222 - DNA, 30 bp, Artificial Sequence
  Synthetic oligonucleotide
ctagggaaagaggcaattttatctcgatgt

SEQ ID NO: 344223 - DNA, 30 bp, Artificial Sequence
  Synthetic oligonucleotide
cttttaggggtggctcactataacggatgt

SEQ ID NO: 344224 - DNA, 30 bp, Artificial Sequence
  Synthetic oligonucleotide
gcccatgtttcaaagatcgtaatcggatgt

SEQ ID NO: 344225 - DNA, 30 bp, Artificial Sequence
  Synthetic oligonucleotide
ttattctgcgcattagacctctagggatgt

SEQ ID NO: 344226 - DNA, 30 bp, Artificial Sequence
  Synthetic oligonucleotide
agatctctagcggtttcttataggggatgt

SEQ ID NO: 344227 - DNA, 30 bp, Artificial Sequence
  Synthetic oligonucleotide
cgtgtgcctagaggcgtatctctgggatgt

SEQ ID NO: 344228 - DNA, 30 bp, Artificial Sequence
  Synthetic oligonucleotide
tgagctccgtcgggtatgttcaatggatgt

SEQ ID NO: 344229 - DNA, 30 bp, Artificial Sequence
  Synthetic oligonucleotide
cacgccgcacaagtctttgcggctggatgt

SEQ ID NO: 344230 - DNA, 30 bp, Artificial Sequence
  Synthetic oligonucleotide
gacatggggcgatgccagatcggtggatgt

SEQ ID NO: 344231 - DNA, 30 bp, Artificial Sequence
  Synthetic oligonucleotide
actcagaaaacgtgggaggaagtatgatgt

SEQ ID NO: 344232 - DNA, 30 bp, Artificial Sequence
  Synthetic oligonucleotide
ttgccagtgacgtcgtagtggttctgatgt

SEQ ID NO: 344233 - DNA, 30 bp, Artificial Sequence
  Synthetic oligonucleotide
acggatcctgtacgttcgtgaacgtgatgt

SEQ ID NO: 344234 - DNA, 30 bp, Artificial Sequence
  Synthetic oligonucleotide
tcttagtaattggggccagagtaaatatgt

SEQ ID NO: 344235 - DNA, 30 bp, Artificial Sequence
  Synthetic oligonucleotide
agttaccacgtaatcgctgatacaatatgt

SEQ ID NO: 344236 - DNA, 30 bp, Artificial Sequence
  Synthetic oligonucleotide
ataacgggggactattcgtaacgaatatgt

SEQ ID NO: 344237 - DNA, 30 bp, Artificial Sequence
  Synthetic oligonucleotide
cgcgagtgctacagttgtcgtgccatatgt

SEQ ID NO: 344238 - DNA, 30 bp, Artificial Sequence
  Synthetic oligonucleotide
aaggacggatgtcgtctatttaagatatgt

SEQ ID NO: 344239 - DNA, 30 bp, Artificial Sequence
  Synthetic oligonucleotide
tcgcgaatgcttacacagcggttgatatgt

SEQ ID NO: 344240 - DNA, 30 bp, Artificial Sequence
  Synthetic oligonucleotide
atagtgtttggggcgttgatgcgactatgt

SEQ ID NO: 344241 - DNA, 30 bp, Artificial Sequence
  Synthetic oligonucleotide
gtagtgggattaccaacggtgggactatgt

SEQ ID NO: 344242 - DNA, 30 bp, Artificial Sequence
  Synthetic oligonucleotide
aggttatcgtgccctattaagtgactatgt

SEQ ID NO: 344243 - DNA, 30 bp, Artificial Sequence
  Synthetic oligonucleotide
caggtggcgtcggggcacagggccctatgt

SEQ ID NO: 344244 - DNA, 30 bp, Artificial Sequence
  Synthetic oligonucleotide
acatagcaccgacccgatagtaagctatgt

SEQ ID NO: 344245 - DNA, 30 bp, Artificial Sequence
  Synthetic oligonucleotide
tatctacagggatgcagaagagggctatgt

SEQ ID NO: 344246 - DNA, 30 bp, Artificial Sequence
  Synthetic oligonucleotide
tcatcagaagcccgcactctgcatctatgt

SEQ ID NO: 344247 - DNA, 30 bp, Artificial Sequence
  Synthetic oligonucleotide
cggaatgataatccgttattataagtatgt

SEQ ID NO: 344248 - DNA, 30 bp, Artificial Sequence
  Synthetic oligonucleotide
ctcggaagattggctacctggagagtatgt

SEQ ID NO: 344249 - DNA, 30 bp, Artificial Sequence
  Synthetic oligonucleotide
gcaattatataaaagggtaggtacgtatgt

SEQ ID NO: 344250 - DNA, 30 bp, Artificial Sequence
  Synthetic oligonucleotide
ggagtgttgtcaaaacggtacgtcgtatgt

SEQ ID NO: 344251 - DNA, 30 bp, Artificial Sequence
  Synthetic oligonucleotide
gactttaagcgcggtaaagacgcgttatgt

SEQ ID NO: 344252 - DNA, 30 bp, Artificial Sequence
  Synthetic oligonucleotide
gaaggccagaattttatcacataaaactgt

SEQ ID NO: 344253 - DNA, 30 bp, Artificial Sequence
  Synthetic oligonucleotide
ataggagctgtctagtgtgtcggaaactgt

SEQ ID NO: 344254 - DNA, 30 bp, Artificial Sequence
  Synthetic oligonucleotide
tggttatattgggatcccagtcacaactgt

SEQ ID NO: 344255 - DNA, 30 bp, Artificial Sequence
  Synthetic oligonucleotide
tatgccctaaacgtataattaatgaactgt

SEQ ID NO: 344256 - DNA, 29 bp, Artificial Sequence
  Synthetic oligonucleotide
tgaggttccgctcctgagtggctaactgt

SEQ ID NO: 344257 - DNA, 30 bp, Artificial Sequence
  Synthetic oligonucleotide
tggattgaaacggtctgcttttgacactgt

SEQ ID NO: 344258 - DNA, 30 bp, Artificial Sequence
  Synthetic oligonucleotide
gatctgtcttgccggaacagcgtgcactgt

SEQ ID NO: 344259 - DNA, 30 bp, Artificial Sequence
  Synthetic oligonucleotide
gtagaggaggttgaatgatgcttgcactgt

SEQ ID NO: 344260 - DNA, 30 bp, Artificial Sequence
  Synthetic oligonucleotide
ttctcgtaactaagagcgtaaccagactgt

SEQ ID NO: 344261 - DNA, 30 bp, Artificial Sequence
  Synthetic oligonucleotide
actggcaagcgttacgccattgcagactgt

SEQ ID NO: 344262 - DNA, 30 bp, Artificial Sequence
  Synthetic oligonucleotide
attatgcgaacgcgagcggggtcagactgt

SEQ ID NO: 344263 - DNA, 31 bp, Artificial Sequence
  Synthetic oligonucleotide
gcaaggaggccgaaacggtcaacgagactgt

SEQ ID NO: 344264 - DNA, 30 bp, Artificial Sequence
  Synthetic oligonucleotide
gtgggctggtatgtgctgaacaacgactgt

SEQ ID NO: 344265 - DNA, 30 bp, Artificial Sequence
  Synthetic oligonucleotide
ggtcccgtagtctcatggctgcaggactgt

SEQ ID NO: 344266 - DNA, 30 bp, Artificial Sequence
  Synthetic oligonucleotide
catactatccctaattcagggtaggactgt

SEQ ID NO: 344267 - DNA, 30 bp, Artificial Sequence
  Synthetic oligonucleotide
acttcgaaccgatgggcgacatatgactgt

SEQ ID NO: 344268 - DNA, 30 bp, Artificial Sequence
  Synthetic oligonucleotide
ccggtcactagccaaacaggcccctactgt

SEQ ID NO: 344269 - DNA, 30 bp, Artificial Sequence
  Synthetic oligonucleotide
gataaataaactaagcggtgctggtactgt

SEQ ID NO: 344270 - DNA, 30 bp, Artificial Sequence
  Synthetic oligonucleotide
tacgtactgtgtgcggatcgtgattactgt

SEQ ID NO: 344271 - DNA, 30 bp, Artificial Sequence
  Synthetic oligonucleotide
agtgtgtggaaacgcagacatgaaacctgt

SEQ ID NO: 344272 - DNA, 30 bp, Artificial Sequence
  Synthetic oligonucleotide
agttttccaaaacttggactgggaacctgt

SEQ ID NO: 344273 - DNA, 30 bp, Artificial Sequence
  Synthetic oligonucleotide
ccgggtgggacattggggcgactaacctgt

SEQ ID NO: 344274 - DNA, 30 bp, Artificial Sequence
  Synthetic oligonucleotide
taaaaggtaacccggaaacatgtaacctgt

SEQ ID NO: 344275 - DNA, 30 bp, Artificial Sequence
  Synthetic oligonucleotide
tgtacgaactgacgcatgggcaagacctgt

SEQ ID NO: 344276 - DNA, 30 bp, Artificial Sequence
  Synthetic oligonucleotide
ccattaaggacccatccagtcatgacctgt

SEQ ID NO: 344277 - DNA, 30 bp, Artificial Sequence
  Synthetic oligonucleotide
caaacagtaactcgcttcgccaatacctgt

SEQ ID NO: 344278 - DNA, 30 bp, Artificial Sequence
  Synthetic oligonucleotide
cgcttagtctcgcaataagtccaaccctgt

SEQ ID NO: 344279 - DNA, 30 bp, Artificial Sequence
  Synthetic oligonucleotide
ggcaccatgtttgaaatggaagtcccctgt

SEQ ID NO: 344280 - DNA, 30 bp, Artificial Sequence
  Synthetic oligonucleotide
tgatactaaataatcatcggttggccctgt

SEQ ID NO: 344281 - DNA, 30 bp, Artificial Sequence
  Synthetic oligonucleotide
agatgtttcaaagatgcctcatgagcctgt

SEQ ID NO: 344282 - DNA, 30 bp, Artificial Sequence
  Synthetic oligonucleotide
tggtgaggacgagccgcacggtgagcctgt

SEQ ID NO: 344283 - DNA, 30 bp, Artificial Sequence
  Synthetic oligonucleotide
tgcttgagtgatggtcctaaggacgcctgt

SEQ ID NO: 344284 - DNA, 30 bp, Artificial Sequence
  Synthetic oligonucleotide
cggtacaggcgcgattccgagaccgcctgt

SEQ ID NO: 344285 - DNA, 30 bp, Artificial Sequence
  Synthetic oligonucleotide
ggttaatgactatcgcgagtaatcgcctgt

SEQ ID NO: 344286 - DNA, 30 bp, Artificial Sequence
  Synthetic oligonucleotide
tgagaacataaagaggccttatactcctgt

SEQ ID NO: 344287 - DNA, 30 bp, Artificial Sequence
  Synthetic oligonucleotide
tcggggttgcctaactcgcgcggctcctgt

SEQ ID NO: 344288 - DNA, 30 bp, Artificial Sequence
  Synthetic oligonucleotide
ggccgcaacgctgaatagatcttgtcctgt

SEQ ID NO: 344289 - DNA, 30 bp, Artificial Sequence
  Synthetic oligonucleotide
tcggcatacgagttgagggatagcagctgt

SEQ ID NO: 344290 - DNA, 31 bp, Artificial Sequence
  Synthetic oligonucleotide
agggatttggcgatcgggaagaacccgctgt

SEQ ID NO: 344291 - DNA, 30 bp, Artificial Sequence
  Synthetic oligonucleotide
gttcttaatacgtgcccgatcgcgcgctgt

SEQ ID NO: 344292 - DNA, 30 bp, Artificial Sequence
  Synthetic oligonucleotide
gacaaatgcgtgttacaatcggctcgctgt

SEQ ID NO: 344293 - DNA, 30 bp, Artificial Sequence
  Synthetic oligonucleotide
ttaataccagtttaaacaatcagaggctgt

SEQ ID NO: 344294 - DNA, 30 bp, Artificial Sequence
  Synthetic oligonucleotide
taatggcaaccttgttcgtcatgaggctgt

SEQ ID NO: 344295 - DNA, 30 bp, Artificial Sequence
  Synthetic oligonucleotide
cgggggaggatctatctggtcggcggctgt

SEQ ID NO: 344296 - DNA, 30 bp, Artificial Sequence
  Synthetic oligonucleotide
tgcagacatagttactattcgcagggctgt

SEQ ID NO: 344297 - DNA, 30 bp, Artificial Sequence
  Synthetic oligonucleotide
aagcatttaagttctatgagcaatggctgt

SEQ ID NO: 344298 - DNA, 30 bp, Artificial Sequence
  Synthetic oligonucleotide
ggttgtaaaaaatggatccgtcatggctgt

SEQ ID NO: 344299 - DNA, 30 bp, Artificial Sequence
  Synthetic oligonucleotide
atttcagcctattgatctcggcctggctgt

SEQ ID NO: 344300 - DNA, 30 bp, Artificial Sequence
  Synthetic oligonucleotide
cgacaagatctgtactaaaaggctggctgt

SEQ ID NO: 344301 - DNA, 30 bp, Artificial Sequence
  Synthetic oligonucleotide
gcaactctggggctaaccaccagtggctgt

SEQ ID NO: 344302 - DNA, 30 bp, Artificial Sequence
  Synthetic oligonucleotide
ggttaaccatattcattatgcgtatgctgt

SEQ ID NO: 344303 - DNA, 30 bp, Artificial Sequence
  Synthetic oligonucleotide
aagggacggaattatcttgcagcgtgctgt

SEQ ID NO: 344304 - DNA, 30 bp, Artificial Sequence
  Synthetic oligonucleotide
taatacaggcgcgtttaatagcggtgctgt

SEQ ID NO: 344305 - DNA, 30 bp, Artificial Sequence
  Synthetic oligonucleotide
gctaacaacctaatcaacgtatggtgctgt

SEQ ID NO: 344306 - DNA, 30 bp, Artificial Sequence
  Synthetic oligonucleotide
cctttctccgggttctaattatattgctgt

SEQ ID NO: 344307 - DNA, 30 bp, Artificial Sequence
  Synthetic oligonucleotide
gcgctacactagggcaataccggttgctgt

SEQ ID NO: 344308 - DNA, 30 bp, Artificial Sequence
  Synthetic oligonucleotide
gttcgcaattccgtcacggttccgatctgt

SEQ ID NO: 344309 - DNA, 30 bp, Artificial Sequence
  Synthetic oligonucleotide
ctcgcccagaaggcagttctcttgatctgt

SEQ ID NO: 344310 - DNA, 30 bp, Artificial Sequence
  Synthetic oligonucleotide
ttgaagtgtagttcgggatggttgatctgt

SEQ ID NO: 344311 - DNA, 30 bp, Artificial Sequence
  Synthetic oligonucleotide
tcggtcctgcaagtaagggtcaatatctgt

SEQ ID NO: 344312 - DNA, 30 bp, Artificial Sequence
  Synthetic oligonucleotide
tctgtcgtcagaacttcaaatgctatctgt

SEQ ID NO: 344313 - DNA, 30 bp, Artificial Sequence
  Synthetic oligonucleotide
gctcacggagactcagcgatggtactctgt

SEQ ID NO: 344314 - DNA, 30 bp, Artificial Sequence
  Synthetic oligonucleotide
gtacaataactctaggacccggtcctctgt

SEQ ID NO: 344315 - DNA, 30 bp, Artificial Sequence
  Synthetic oligonucleotide
gcattggttgaggattttagatgtctctgt

SEQ ID NO: 344316 - DNA, 30 bp, Artificial Sequence
  Synthetic oligonucleotide
agtttaacattaatatcggccgcagtctgt

SEQ ID NO: 344317 - DNA, 30 bp, Artificial Sequence
  Synthetic oligonucleotide
gattgcattgtcgtgtggacgcgagtctgt

SEQ ID NO: 344318 - DNA, 30 bp, Artificial Sequence
  Synthetic oligonucleotide
aggtttattcagaacgaaaaattagtctgt

SEQ ID NO: 344319 - DNA, 30 bp, Artificial Sequence
  Synthetic oligonucleotide
ccgtgaatttaacagatatgaagggtctgt

SEQ ID NO: 344320 - DNA, 30 bp, Artificial Sequence
  Synthetic oligonucleotide
tgaagcagagacggcaactgccgtgtctgt

SEQ ID NO: 344321 - DNA, 30 bp, Artificial Sequence
  Synthetic oligonucleotide
gatcatccgagtggtgatacttgtgtctgt

SEQ ID NO: 344322 - DNA, 30 bp, Artificial Sequence
  Synthetic oligonucleotide
atggatctaagtagctccatttttgtctgt

SEQ ID NO: 344323 - DNA, 30 bp, Artificial Sequence
  Synthetic oligonucleotide
gcaatgctgttacgtaattcgaaattctgt

SEQ ID NO: 344324 - DNA, 30 bp, Artificial Sequence
  Synthetic oligonucleotide
aagccgcttaagcgtgacctgcccttctgt

SEQ ID NO: 344325 - DNA, 30 bp, Artificial Sequence
  Synthetic oligonucleotide
caggtggcgaaggcggtacttgcgttctgt

SEQ ID NO: 344326 - DNA, 30 bp, Artificial Sequence
  Synthetic oligonucleotide
tatcacccactgggtgtaacccatttctgt

SEQ ID NO: 344327 - DNA, 30 bp, Artificial Sequence
  Synthetic oligonucleotide
gcaggggtccttggagctcgtggcaagtgt

SEQ ID NO: 344328 - DNA, 31 bp, Artificial Sequence
  Synthetic oligonucleotide
aggcctattttgttagactaggaagaagtgt

SEQ ID NO: 344329 - DNA, 30 bp, Artificial Sequence
  Synthetic oligonucleotide
gtaaaggtgcgggtacccgagcataagtgt

SEQ ID NO: 344330 - DNA, 30 bp, Artificial Sequence
  Synthetic oligonucleotide
caacgttattgttgttgcccgagtaagtgt

SEQ ID NO: 344331 - DNA, 30 bp, Artificial Sequence
  Synthetic oligonucleotide
attcattcccgcccagttggggttaagtgt

SEQ ID NO: 344332 - DNA, 30 bp, Artificial Sequence
  Synthetic oligonucleotide
ttcggcatagcaccttaagtccaacagtgt

SEQ ID NO: 344333 - DNA, 30 bp, Artificial Sequence
  Synthetic oligonucleotide
gtcagaccgcgtggatatgtccaacagtgt

SEQ ID NO: 344334 - DNA, 31 bp, Artificial Sequence
  Synthetic oligonucleotide
gatttgaacaatatcgtaataggaacagtgt

SEQ ID NO: 344335 - DNA, 30 bp, Artificial Sequence
  Synthetic oligonucleotide
gaagaagtttcttcgaagccaacacagtgt

SEQ ID NO: 344336 - DNA, 30 bp, Artificial Sequence
  Synthetic oligonucleotide
tagaagaccacttgtgacctgtggcagtgt

SEQ ID NO: 344337 - DNA, 30 bp, Artificial Sequence
  Synthetic oligonucleotide
tccatatactattatgaggatagtcagtgt

SEQ ID NO: 344338 - DNA, 30 bp, Artificial Sequence
  Synthetic oligonucleotide
aaattaatttacctacgttgccaggagtgt

SEQ ID NO: 344339 - DNA, 30 bp, Artificial Sequence
  Synthetic oligonucleotide
acaagtttgtggatccacgtaggggagtgt

SEQ ID NO: 344340 - DNA, 30 bp, Artificial Sequence
  Synthetic oligonucleotide
tcacggtcaactaggatgggtcctgagtgt

SEQ ID NO: 344341 - DNA, 30 bp, Artificial Sequence
  Synthetic oligonucleotide
caagactttagcgtcaagtcgtttgagtgt

SEQ ID NO: 344342 - DNA, 30 bp, Artificial Sequence
  Synthetic oligonucleotide
tgagcatcgattacttggtcgcaatagtgt

SEQ ID NO: 344343 - DNA, 30 bp, Artificial Sequence
  Synthetic oligonucleotide
gcttcaagtcagagatactttggatagtgt

SEQ ID NO: 344344 - DNA, 30 bp, Artificial Sequence
  Synthetic oligonucleotide
acctcatggtgccatcaatggtgctagtgt

SEQ ID NO: 344345 - DNA, 30 bp, Artificial Sequence
  Synthetic oligonucleotide
gatatggacgttctgccagcgctctagtgt

SEQ ID NO: 344346 - DNA, 30 bp, Artificial Sequence
  Synthetic oligonucleotide
cgtaagggatcaatataatactagtagtgt

SEQ ID NO: 344347 - DNA, 30 bp, Artificial Sequence
  Synthetic oligonucleotide
acgacctagtattttttgaagttgtagtgt

SEQ ID NO: 344348 - DNA, 30 bp, Artificial Sequence
  Synthetic oligonucleotide
caaatgctcactccctacgttttgtagtgt

SEQ ID NO: 344349 - DNA, 30 bp, Artificial Sequence
  Synthetic oligonucleotide
gtgtcgggcaaatgacgtccgtattagtgt

SEQ ID NO: 344350 - DNA, 30 bp, Artificial Sequence
  Synthetic oligonucleotide
agcatgggggatatttttccacgaacgtgt

SEQ ID NO: 344351 - DNA, 30 bp, Artificial Sequence
  Synthetic oligonucleotide
tagtattgtggagcgtcgcgtcgaacgtgt

SEQ ID NO: 344352 - DNA, 30 bp, Artificial Sequence
  Synthetic oligonucleotide
aagagaatgacttgcacaattctaacgtgt

SEQ ID NO: 344353 - DNA, 30 bp, Artificial Sequence
  Synthetic oligonucleotide
cttcggcttacggccgatatgggaccgtgt

SEQ ID NO: 344354 - DNA, 31 bp, Artificial Sequence
  Synthetic oligonucleotide
taaaggcagtgttgggtcagacagcccgtgt

SEQ ID NO: 344355 - DNA, 30 bp, Artificial Sequence
  Synthetic oligonucleotide
tagtctggcttgatatgttcgagcccgtgt

SEQ ID NO: 344356 - DNA, 30 bp, Artificial Sequence
  Synthetic oligonucleotide
caacgatccattagaggggtctatccgtgt

SEQ ID NO: 344357 - DNA, 30 bp, Artificial Sequence
  Synthetic oligonucleotide
aagcatgataatacacagcgtccggcgtgt

SEQ ID NO: 344358 - DNA, 30 bp, Artificial Sequence
  Synthetic oligonucleotide
gtggcccatagtacctttatttcggcgtgt

SEQ ID NO: 344359 - DNA, 30 bp, Artificial Sequence
  Synthetic oligonucleotide
cagttctgcgattcaatatttaaatcgtgt

SEQ ID NO: 344360 - DNA, 30 bp, Artificial Sequence
  Synthetic oligonucleotide
cctaagtaagaagttcttgtggaatcgtgt

SEQ ID NO: 344361 - DNA, 30 bp, Artificial Sequence
  Synthetic oligonucleotide
aggtcgtctcacccggccggattgtcgtgt

SEQ ID NO: 344362 - DNA, 30 bp, Artificial Sequence
  Synthetic oligonucleotide
gcgtcttttcattcgcgccgacattcgtgt

SEQ ID NO: 344363 - DNA, 30 bp, Artificial Sequence
  Synthetic oligonucleotide
ggtttccaacgacaggtaccttgttcgtgt

SEQ ID NO: 344364 - DNA, 31 bp, Artificial Sequence
  Synthetic oligonucleotide
gaacctgtcctaatggatctaggaaaggtgt

SEQ ID NO: 344365 - DNA, 30 bp, Artificial Sequence
  Synthetic oligonucleotide
tgttacagaacatcagatttgataaggtgt

SEQ ID NO: 344366 - DNA, 30 bp, Artificial Sequence
  Synthetic oligonucleotide
gccactgaccgaaatactctgttaaggtgt

SEQ ID NO: 344367 - DNA, 30 bp, Artificial Sequence
  Synthetic oligonucleotide
gtgtaaccgggcagcgactgtttaaggtgt

SEQ ID NO: 344368 - DNA, 30 bp, Artificial Sequence
  Synthetic oligonucleotide
gcttgatctaagtggtggggcccgaggtgt

SEQ ID NO: 344369 - DNA, 30 bp, Artificial Sequence
  Synthetic oligonucleotide
caggtgacagctggtgcccggcggaggtgt

SEQ ID NO: 344370 - DNA, 30 bp, Artificial Sequence
  Synthetic oligonucleotide
gttgattacatgccaactccgactaggtgt

SEQ ID NO: 344371 - DNA, 30 bp, Artificial Sequence
  Synthetic oligonucleotide
tcttaaaggttcggttgctcaggtaggtgt

SEQ ID NO: 344372 - DNA, 30 bp, Artificial Sequence
  Synthetic oligonucleotide
tactccaaccgattaatcagtaatcggtgt

SEQ ID NO: 344373 - DNA, 30 bp, Artificial Sequence
  Synthetic oligonucleotide
attagggtacggccatgcgttgctcggtgt

SEQ ID NO: 344374 - DNA, 30 bp, Artificial Sequence
  Synthetic oligonucleotide
caactcagcgatcgaaccgagccagggtgt

SEQ ID NO: 344375 - DNA, 30 bp, Artificial Sequence
  Synthetic oligonucleotide
tctgaccgcgcgctttcaacggcagggtgt

SEQ ID NO: 344376 - DNA, 30 bp, Artificial Sequence
  Synthetic oligonucleotide
taattcatcaggataatgcgctcagggtgt

SEQ ID NO: 344377 - DNA, 30 bp, Artificial Sequence
  Synthetic oligonucleotide
tcttgttaagccgtgacaagtatagggtgt

SEQ ID NO: 344378 - DNA, 30 bp, Artificial Sequence
  Synthetic oligonucleotide
ttcggcattctcacagtaccgtaggggtgt

SEQ ID NO: 344379 - DNA, 30 bp, Artificial Sequence
  Synthetic oligonucleotide
gaaggatccacgtacacaccaccggggtgt

SEQ ID NO: 344380 - DNA, 30 bp, Artificial Sequence
  Synthetic oligonucleotide
acaaacgctcgggtagccaattgggggtgt

SEQ ID NO: 344381 - DNA, 30 bp, Artificial Sequence
  Synthetic oligonucleotide
gccgggaatctgttatcccggttggggtgt

SEQ ID NO: 344382 - DNA, 30 bp, Artificial Sequence
  Synthetic oligonucleotide
tactaaacgcactaatcttctcatgggtgt

SEQ ID NO: 344383 - DNA, 30 bp, Artificial Sequence
  Synthetic oligonucleotide
gacgcagcctgaaacagaggacaatggtgt

SEQ ID NO: 344384 - DNA, 30 bp, Artificial Sequence
  Synthetic oligonucleotide
tggaatgaatatgaatgcaattcatggtgt

SEQ ID NO: 344385 - DNA, 30 bp, Artificial Sequence
  Synthetic oligonucleotide
gtgctggaaacctagaagattgcctggtgt

SEQ ID NO: 344386 - DNA, 30 bp, Artificial Sequence
  Synthetic oligonucleotide
aggaaaagttgacaccttcgattctggtgt

SEQ ID NO: 344387 - DNA, 30 bp, Artificial Sequence
  Synthetic oligonucleotide
tacgggccatatccatattttgagtggtgt

SEQ ID NO: 344388 - DNA, 30 bp, Artificial Sequence
  Synthetic oligonucleotide
agcggcattacagggagtggctagtggtgt

SEQ ID NO: 344389 - DNA, 30 bp, Artificial Sequence
  Synthetic oligonucleotide
aatcaggaagcgcgaaaaccaacttggtgt

SEQ ID NO: 344390 - DNA, 30 bp, Artificial Sequence
  Synthetic oligonucleotide
ccaagccactattcattagcgggttggtgt

SEQ ID NO: 344391 - DNA, 30 bp, Artificial Sequence
  Synthetic oligonucleotide
tgcaacaggcgtatttcataactttggtgt

SEQ ID NO: 344392 - DNA, 30 bp, Artificial Sequence
  Synthetic oligonucleotide
tatcataaagaccagataaaggtttggtgt

SEQ ID NO: 344393 - DNA, 30 bp, Artificial Sequence
  Synthetic oligonucleotide
tcgctatccagtggcaacactgtttggtgt

SEQ ID NO: 344394 - DNA, 30 bp, Artificial Sequence
  Synthetic oligonucleotide
tgtgagcgatttacgctgcctccaatgtgt

SEQ ID NO: 344395 - DNA, 30 bp, Artificial Sequence
  Synthetic oligonucleotide
atctgagcatcgtaaactagcctaatgtgt

SEQ ID NO: 344396 - DNA, 30 bp, Artificial Sequence
  Synthetic oligonucleotide
tctcggggcgtccaacagtgaaccatgtgt

SEQ ID NO: 344397 - DNA, 30 bp, Artificial Sequence
  Synthetic oligonucleotide
gtacgctcttatcgcagggcaagcatgtgt

SEQ ID NO: 344398 - DNA, 30 bp, Artificial Sequence
  Synthetic oligonucleotide
ttagccgctaacgcccacgaagtgatgtgt

SEQ ID NO: 344399 - DNA, 30 bp, Artificial Sequence
  Synthetic oligonucleotide
agaaaatcctaagtaggcactcctatgtgt

SEQ ID NO: 344400 - DNA, 30 bp, Artificial Sequence
  Synthetic oligonucleotide
gttgagcttgtctgtcaaacaggtatgtgt

SEQ ID NO: 344401 - DNA, 30 bp, Artificial Sequence
  Synthetic oligonucleotide
cgaaaacgctgggctgtctcaggcctgtgt

SEQ ID NO: 344402 - DNA, 30 bp, Artificial Sequence
  Synthetic oligonucleotide
cgaaagtcactgtagacgtcgatagtgtgt

SEQ ID NO: 344403 - DNA, 30 bp, Artificial Sequence
  Synthetic oligonucleotide
gtacgagcctatcggggcattccggtgtgt

SEQ ID NO: 344404 - DNA, 30 bp, Artificial Sequence
  Synthetic oligonucleotide
tcaatgcatgaataccgatttgatgtgtgt

SEQ ID NO: 344405 - DNA, 30 bp, Artificial Sequence
  Synthetic oligonucleotide
catacatgctttagcaaatccgttgtgtgt

SEQ ID NO: 344406 - DNA, 30 bp, Artificial Sequence
  Synthetic oligonucleotide
cggccatgttgactagcccggcaattgtgt

SEQ ID NO: 344407 - DNA, 30 bp, Artificial Sequence
  Synthetic oligonucleotide
gcacactatatggtcagagtgccattgtgt

SEQ ID NO: 344408 - DNA, 30 bp, Artificial Sequence
  Synthetic oligonucleotide
gtttgctaagctaaggtcatttggttgtgt

SEQ ID NO: 344409 - DNA, 30 bp, Artificial Sequence
  Synthetic oligonucleotide
catacttcgcagcgcatttttctgttgtgt

SEQ ID NO: 344410 - DNA, 30 bp, Artificial Sequence
  Synthetic oligonucleotide
gtacccactgtaggtgctaccgtgttgtgt

SEQ ID NO: 344411 - DNA, 30 bp, Artificial Sequence
  Synthetic oligonucleotide
tacgcaaccgttcttcgtaattgtttgtgt

SEQ ID NO: 344412 - DNA, 30 bp, Artificial Sequence
  Synthetic oligonucleotide
cgacacaacgcgtattgccagacaaattgt

SEQ ID NO: 344413 - DNA, 30 bp, Artificial Sequence
  Synthetic oligonucleotide
ggggtccggcatatagatacggcaaattgt

SEQ ID NO: 344414 - DNA, 30 bp, Artificial Sequence
  Synthetic oligonucleotide
gttactccataggattatcattctaattgt

SEQ ID NO: 344415 - DNA, 30 bp, Artificial Sequence
  Synthetic oligonucleotide
accgggatacgctctccgcacagtaattgt

SEQ ID NO: 344416 - DNA, 30 bp, Artificial Sequence
  Synthetic oligonucleotide
cagatgaactccgggacggagagacattgt

SEQ ID NO: 344417 - DNA, 30 bp, Artificial Sequence
  Synthetic oligonucleotide
agtacttgcgggttacacaggtgacattgt

SEQ ID NO: 344418 - DNA, 30 bp, Artificial Sequence
  Synthetic oligonucleotide
aggttcggtacaccaattgtcgaccattgt

SEQ ID NO: 344419 - DNA, 30 bp, Artificial Sequence
  Synthetic oligonucleotide
aagcgctgaagtgtgaacatttaccattgt

SEQ ID NO: 344420 - DNA, 30 bp, Artificial Sequence
  Synthetic oligonucleotide
agtttgttaaacacaaactttgacgattgt

SEQ ID NO: 344421 - DNA, 30 bp, Artificial Sequence
  Synthetic oligonucleotide
taaaaggactacgtatgccaagtcgattgt

SEQ ID NO: 344422 - DNA, 30 bp, Artificial Sequence
  Synthetic oligonucleotide
tgaggggagtctcctgcctccgaggattgt

SEQ ID NO: 344423 - DNA, 30 bp, Artificial Sequence
  Synthetic oligonucleotide
gatgtagccgtcgcacttcgcgaggattgt

SEQ ID NO: 344424 - DNA, 30 bp, Artificial Sequence
  Synthetic oligonucleotide
aggaccctatcgttcgtaataggggattgt

SEQ ID NO: 344425 - DNA, 30 bp, Artificial Sequence
  Synthetic oligonucleotide
ctctttatctcctccaacaattctgattgt

SEQ ID NO: 344426 - DNA, 30 bp, Artificial Sequence
  Synthetic oligonucleotide
tagttacgcgaacaacctcaatgatattgt

SEQ ID NO: 344427 - DNA, 30 bp, Artificial Sequence
  Synthetic oligonucleotide
gcatgcagaaaattgatctattgatattgt

SEQ ID NO: 344428 - DNA, 30 bp, Artificial Sequence
  Synthetic oligonucleotide
cgtttatcaccgtgcgaacccccttattgt

SEQ ID NO: 344429 - DNA, 30 bp, Artificial Sequence
  Synthetic oligonucleotide
tcgtaccctactcctttggcggcttattgt

SEQ ID NO: 344430 - DNA, 30 bp, Artificial Sequence
  Synthetic oligonucleotide
tgatgtcccactatgaggcggggttattgt

SEQ ID NO: 344431 - DNA, 30 bp, Artificial Sequence
  Synthetic oligonucleotide
gaattgtgtgcgtcagatggttacacttgt

SEQ ID NO: 344432 - DNA, 30 bp, Artificial Sequence
  Synthetic oligonucleotide
ataatcgaagatagtattattccgacttgt

SEQ ID NO: 344433 - DNA, 30 bp, Artificial Sequence
  Synthetic oligonucleotide
cgggtgactaagactagcaacgcgacttgt

SEQ ID NO: 344434 - DNA, 30 bp, Artificial Sequence
  Synthetic oligonucleotide
tggaagctgcgggaaccacgcatcccttgt

SEQ ID NO: 344435 - DNA, 30 bp, Artificial Sequence
  Synthetic oligonucleotide
ttaaccatctgcgtgccacgccagccttgt

SEQ ID NO: 344436 - DNA, 30 bp, Artificial Sequence
  Synthetic oligonucleotide
tggatgaacgtgcatatgtgtgggccttgt

SEQ ID NO: 344437 - DNA, 30 bp, Artificial Sequence
  Synthetic oligonucleotide
gtcaaataaatgccacagcgatggccttgt

SEQ ID NO: 344438 - DNA, 30 bp, Artificial Sequence
  Synthetic oligonucleotide
tgttattttgagtgtatacgcgtgccttgt

SEQ ID NO: 344439 - DNA, 30 bp, Artificial Sequence
  Synthetic oligonucleotide
gggggggcactcacattgcacattccttgt

SEQ ID NO: 344440 - DNA, 30 bp, Artificial Sequence
  Synthetic oligonucleotide
agtgtagaataggctaaccataaagcttgt

SEQ ID NO: 344441 - DNA, 30 bp, Artificial Sequence
  Synthetic oligonucleotide
agcgcttgctttaaaatcgtgtcagcttgt

SEQ ID NO: 344442 - DNA, 30 bp, Artificial Sequence
  Synthetic oligonucleotide
aagtcagggatagtgcgtacgcgagcttgt

SEQ ID NO: 344443 - DNA, 30 bp, Artificial Sequence
  Synthetic oligonucleotide
tctgcattagtagacgcgtggttagcttgt

SEQ ID NO: 344444 - DNA, 30 bp, Artificial Sequence
  Synthetic oligonucleotide
cgaatagtccttgattgctgaaccgcttgt

SEQ ID NO: 344445 - DNA, 30 bp, Artificial Sequence
  Synthetic oligonucleotide
ccatcccagctcggctagttcgccgcttgt

SEQ ID NO: 344446 - DNA, 31 bp, Artificial Sequence
  Synthetic oligonucleotide
gaaagcaacttctgagcgtagggaggcttgt

SEQ ID NO: 344447 - DNA, 30 bp, Artificial Sequence
  Synthetic oligonucleotide
tgatttaaccggtataatcgtttatcttgt

SEQ ID NO: 344448 - DNA, 30 bp, Artificial Sequence
  Synthetic oligonucleotide
gtgttagcctgatgcagaaaaggttcttgt

SEQ ID NO: 344449 - DNA, 30 bp, Artificial Sequence
  Synthetic oligonucleotide
ggacgcctgagggcccgagggttaagttgt

SEQ ID NO: 344450 - DNA, 30 bp, Artificial Sequence
  Synthetic oligonucleotide
gccgcagcgccggacggtacaaacagttgt

SEQ ID NO: 344451 - DNA, 30 bp, Artificial Sequence
  Synthetic oligonucleotide
agtctactcggtccttaaaaatacagttgt

SEQ ID NO: 344452 - DNA, 30 bp, Artificial Sequence
  Synthetic oligonucleotide
tctgttgaagtatcccgcgattggagttgt

SEQ ID NO: 344453 - DNA, 30 bp, Artificial Sequence
  Synthetic oligonucleotide
gatcagtggaatgcccgtcctttgagttgt

SEQ ID NO: 344454 - DNA, 30 bp, Artificial Sequence
  Synthetic oligonucleotide
ccaagaacaaacgagttactatatagttgt

SEQ ID NO: 344455 - DNA, 30 bp, Artificial Sequence
  Synthetic oligonucleotide
cttatgcgtgggcttcgaagggcacgttgt

SEQ ID NO: 344456 - DNA, 30 bp, Artificial Sequence
  Synthetic oligonucleotide
ttggaataagtataagtgtacgtccgttgt

SEQ ID NO: 344457 - DNA, 30 bp, Artificial Sequence
  Synthetic oligonucleotide
gggcgtctgggagcgggtgttacaggttgt

SEQ ID NO: 344458 - DNA, 30 bp, Artificial Sequence
  Synthetic oligonucleotide
ttaacccccatgtagtcacgaagcggttgt

SEQ ID NO: 344459 - DNA, 30 bp, Artificial Sequence
  Synthetic oligonucleotide
cggtagtagaggacgtcttataggggttgt

SEQ ID NO: 344460 - DNA, 30 bp, Artificial Sequence
  Synthetic oligonucleotide
gtcgtcatgataatgcaacttcctggttgt

SEQ ID NO: 344461 - DNA, 30 bp, Artificial Sequence
  Synthetic oligonucleotide
cggagcgtatatcctacgagcgctggttgt

SEQ ID NO: 344462 - DNA, 30 bp, Artificial Sequence
  Synthetic oligonucleotide
ggttgtatgcccctaaagccggtatgttgt

SEQ ID NO: 344463 - DNA, 30 bp, Artificial Sequence
  Synthetic oligonucleotide
taacgacttggacctcagtagaattgttgt

SEQ ID NO: 344464 - DNA, 31 bp, Artificial Sequence
  Synthetic oligonucleotide
agaccgcaaggcataacccgttgattgttgt

SEQ ID NO: 344465 - DNA, 30 bp, Artificial Sequence
  Synthetic oligonucleotide
ggtgacctcccccttcggcactattgttgt

SEQ ID NO: 344466 - DNA, 30 bp, Artificial Sequence
  Synthetic oligonucleotide
catagggggggggtagagatcacttgttgt

SEQ ID NO: 344467 - DNA, 30 bp, Artificial Sequence
  Synthetic oligonucleotide
ttgccacgtcgagggtgatctagttgttgt

SEQ ID NO: 344468 - DNA, 30 bp, Artificial Sequence
  Synthetic oligonucleotide
gtatccgtgaagaacatgaagctttgttgt

SEQ ID NO: 344469 - DNA, 30 bp, Artificial Sequence
  Synthetic oligonucleotide
gtacaatatgacataaacgtcttttgttgt

SEQ ID NO: 344470 - DNA, 30 bp, Artificial Sequence
  Synthetic oligonucleotide
ggtacacaaaagtgcacagatcacatttgt

SEQ ID NO: 344471 - DNA, 30 bp, Artificial Sequence
  Synthetic oligonucleotide
tacagtgtgaatattcccacagggatttgt

SEQ ID NO: 344472 - DNA, 30 bp, Artificial Sequence
  Synthetic oligonucleotide
tgggacctctagtcggtcatgtcactttgt

SEQ ID NO: 344473 - DNA, 30 bp, Artificial Sequence
  Synthetic oligonucleotide
ttgacatcagccctaccccatcggctttgt

SEQ ID NO: 344474 - DNA, 30 bp, Artificial Sequence
  Synthetic oligonucleotide
gcatgttcgttgtagcaataaactctttgt

SEQ ID NO: 344475 - DNA, 30 bp, Artificial Sequence
  Synthetic oligonucleotide
ctctacccatccctagtaaacactctttgt

SEQ ID NO: 344476 - DNA, 30 bp, Artificial Sequence
  Synthetic oligonucleotide
gatgtacttcaatccacatcacttctttgt

SEQ ID NO: 344477 - DNA, 30 bp, Artificial Sequence
  Synthetic oligonucleotide
gggggtgtgggaattaacatgtttctttgt

SEQ ID NO: 344478 - DNA, 30 bp, Artificial Sequence
  Synthetic oligonucleotide
cagtttcacgaggctcggtcattagtttgt

SEQ ID NO: 344479 - DNA, 30 bp, Artificial Sequence
  Synthetic oligonucleotide
ttccttgctggcgacataaccttagtttgt

SEQ ID NO: 344480 - DNA, 30 bp, Artificial Sequence
  Synthetic oligonucleotide
gcatcgaggtaagttactgtccgcgtttgt

SEQ ID NO: 344481 - DNA, 30 bp, Artificial Sequence
  Synthetic oligonucleotide
gattaacgggtggcatggggaggcgtttgt

SEQ ID NO: 344482 - DNA, 30 bp, Artificial Sequence
  Synthetic oligonucleotide
aatgataggattttttcgaagctggtttgt

SEQ ID NO: 344483 - DNA, 30 bp, Artificial Sequence
  Synthetic oligonucleotide
tccgggttgaaggagaagtgagtggtttgt

SEQ ID NO: 344484 - DNA, 30 bp, Artificial Sequence
  Synthetic oligonucleotide
taacggtcattcaaagaacacactgtttgt

SEQ ID NO: 344485 - DNA, 30 bp, Artificial Sequence
  Synthetic oligonucleotide
cttcgtccacaggttggtataagtgtttgt

SEQ ID NO: 344486 - DNA, 30 bp, Artificial Sequence
  Synthetic oligonucleotide
aacatgtaggcatatgaatgacgtgtttgt

SEQ ID NO: 344487 - DNA, 30 bp, Artificial Sequence
  Synthetic oligonucleotide
aaagtgataatcgcggatacttgtgtttgt

SEQ ID NO: 344488 - DNA, 30 bp, Artificial Sequence
  Synthetic oligonucleotide
tgacggttcgatgttagcgtgcttgtttgt

SEQ ID NO: 344489 - DNA, 30 bp, Artificial Sequence
  Synthetic oligonucleotide
gctgttggacgcaagggagcataattttgt

SEQ ID NO: 344490 - DNA, 30 bp, Artificial Sequence
  Synthetic oligonucleotide
atctgacgaatagtcacacattgattttgt

SEQ ID NO: 344491 - DNA, 30 bp, Artificial Sequence
  Synthetic oligonucleotide
tggtgcactcatgtagcaggaaacttttgt

SEQ ID NO: 344492 - DNA, 29 bp, Artificial Sequence
  Synthetic oligonucleotide
gccctttccctcgctttctccccttttgt

SEQ ID NO: 344493 - DNA, 30 bp, Artificial Sequence
  Synthetic oligonucleotide
tccaaactggcttgttggttgagcttttgt

SEQ ID NO: 344494 - DNA, 30 bp, Artificial Sequence
  Synthetic oligonucleotide
attgggcaaccatttagaattgtcttttgt

SEQ ID NO: 344495 - DNA, 30 bp, Artificial Sequence
  Synthetic oligonucleotide
gcaacaaaggtgtcgttgtgatcgttttgt

SEQ ID NO: 344496 - DNA, 30 bp, Artificial Sequence
  Synthetic oligonucleotide
gcgacccagtacctttttaggcggttttgt

SEQ ID NO: 344497 - DNA, 30 bp, Artificial Sequence
  Synthetic oligonucleotide
gtcgataaaagtgctcgttttatgttttgt

SEQ ID NO: 344498 - DNA, 30 bp, Artificial Sequence
  Synthetic oligonucleotide
accgccaaaacatcgcgaccagtgttttgt

SEQ ID NO: 344499 - DNA, 30 bp, Artificial Sequence
  Synthetic oligonucleotide
cgcaatcaccaatcggaagatgatttttgt

SEQ ID NO: 344500 - DNA, 30 bp, Artificial Sequence
  Synthetic oligonucleotide
atagacccaagtcagcccagctctttttgt

SEQ ID NO: 344501 - DNA, 30 bp, Artificial Sequence
  Synthetic oligonucleotide
tgattggatggggggtgagctattttttgt

SEQ ID NO: 344502 - DNA, 30 bp, Artificial Sequence
  Synthetic oligonucleotide
gagcgaatgttccgtatgccataaaaaatt

SEQ ID NO: 344503 - DNA, 30 bp, Artificial Sequence
  Synthetic oligonucleotide
cgctatgttagcgcctaaaactaaaaaatt

SEQ ID NO: 344504 - DNA, 30 bp, Artificial Sequence
  Synthetic oligonucleotide
ttttatcaggagtttccaattgcaaaaatt

SEQ ID NO: 344505 - DNA, 30 bp, Artificial Sequence
  Synthetic oligonucleotide
ccgtgtcttagaaagacgaacgtaaaaatt

SEQ ID NO: 344506 - DNA, 30 bp, Artificial Sequence
  Synthetic oligonucleotide
cacgatgtcattcagggtcgtagcaaaatt

SEQ ID NO: 344507 - DNA, 30 bp, Artificial Sequence
  Synthetic oligonucleotide
tgcaagtatatcttgtagaaggcgaaaatt

SEQ ID NO: 344508 - DNA, 30 bp, Artificial Sequence
  Synthetic oligonucleotide
agtcatcggcccaaatgcaccgggaaaatt

SEQ ID NO: 344509 - DNA, 30 bp, Artificial Sequence
  Synthetic oligonucleotide
tatcataaatctccacagtaatggaaaatt

SEQ ID NO: 344510 - DNA, 30 bp, Artificial Sequence
  Synthetic oligonucleotide
aaggcgcttccatgaacaattttgaaaatt

SEQ ID NO: 344511 - DNA, 30 bp, Artificial Sequence
  Synthetic oligonucleotide
gaagcataggctccaagtagtaataaaatt

SEQ ID NO: 344512 - DNA, 30 bp, Artificial Sequence
  Synthetic oligonucleotide
tcgggaggacttcccagtcaagataaaatt

SEQ ID NO: 344513 - DNA, 30 bp, Artificial Sequence
  Synthetic oligonucleotide
gcttcaatcacttcttctccttctaaaatt

SEQ ID NO: 344514 - DNA, 30 bp, Artificial Sequence
  Synthetic oligonucleotide
ccggggagaggttcgcgccaagaacaaatt

SEQ ID NO: 344515 - DNA, 30 bp, Artificial Sequence
  Synthetic oligonucleotide
tagctgtagcaggaggtacatagacaaatt

SEQ ID NO: 344516 - DNA, 30 bp, Artificial Sequence
  Synthetic oligonucleotide
ccccgtcaatatgggaagtaatgacaaatt

SEQ ID NO: 344517 - DNA, 30 bp, Artificial Sequence
  Synthetic oligonucleotide
tacggtaataagcctataactatacaaatt

SEQ ID NO: 344518 - DNA, 30 bp, Artificial Sequence
  Synthetic oligonucleotide
aacgctgtccgcgagcatgcgaaccaaatt

SEQ ID NO: 344519 - DNA, 30 bp, Artificial Sequence
  Synthetic oligonucleotide
gtaaagataggcacgtctggagaccaaatt

SEQ ID NO: 344520 - DNA, 30 bp, Artificial Sequence
  Synthetic oligonucleotide
ccattatattggtctactttaacccaaatt

SEQ ID NO: 344521 - DNA, 30 bp, Artificial Sequence
  Synthetic oligonucleotide
gcatacagtcagccagccgcaatccaaatt

SEQ ID NO: 344522 - DNA, 30 bp, Artificial Sequence
  Synthetic oligonucleotide
ctttaaatcattgcagagctaaggcaaatt

SEQ ID NO: 344523 - DNA, 30 bp, Artificial Sequence
  Synthetic oligonucleotide
tacacaagattatgttaatgcgctcaaatt

SEQ ID NO: 344524 - DNA, 30 bp, Artificial Sequence
  Synthetic oligonucleotide
agatataatcgggattagaccgaagaaatt

SEQ ID NO: 344525 - DNA, 30 bp, Artificial Sequence
  Synthetic oligonucleotide
cgtcaccgctcaggggtgatcgaagaaatt

SEQ ID NO: 344526 - DNA, 30 bp, Artificial Sequence
  Synthetic oligonucleotide
ctacgtgccggtatctactactaagaaatt

SEQ ID NO: 344527 - DNA, 30 bp, Artificial Sequence
  Synthetic oligonucleotide
tacagctccacctcgcagctgagagaaatt

SEQ ID NO: 344528 - DNA, 30 bp, Artificial Sequence
  Synthetic oligonucleotide
tgtcttagatggcgaagagccggagaaatt

SEQ ID NO: 344529 - DNA, 30 bp, Artificial Sequence
  Synthetic oligonucleotide
atctgcagcggctgatcgtagatagaaatt

SEQ ID NO: 344530 - DNA, 30 bp, Artificial Sequence
  Synthetic oligonucleotide
ttgtaagagccttggattgtgtacgaaatt

SEQ ID NO: 344531 - DNA, 30 bp, Artificial Sequence
  Synthetic oligonucleotide
attagcttccataggtagaataccgaaatt

SEQ ID NO: 344532 - DNA, 30 bp, Artificial Sequence
  Synthetic oligonucleotide
gtgcagtggcccggccttatgcaggaaatt

SEQ ID NO: 344533 - DNA, 30 bp, Artificial Sequence
  Synthetic oligonucleotide
caagttacaagcgccagttgagatgaaatt

SEQ ID NO: 344534 - DNA, 30 bp, Artificial Sequence
  Synthetic oligonucleotide
accgcagtcggcgttcagtctactgaaatt

SEQ ID NO: 344535 - DNA, 30 bp, Artificial Sequence
  Synthetic oligonucleotide
atccatccgagtttctcaattactgaaatt

SEQ ID NO: 344536 - DNA, 30 bp, Artificial Sequence
  Synthetic oligonucleotide
ggagtctaaagtggcccgcgctctgaaatt

SEQ ID NO: 344537 - DNA, 30 bp, Artificial Sequence
  Synthetic oligonucleotide
catcagactcgggtggacaccagtgaaatt

SEQ ID NO: 344538 - DNA, 30 bp, Artificial Sequence
  Synthetic oligonucleotide
gggatcttagcgttgtaccaacaataaatt

SEQ ID NO: 344539 - DNA, 30 bp, Artificial Sequence
  Synthetic oligonucleotide
gcagacatattctgcgcgctaccataaatt

SEQ ID NO: 344540 - DNA, 30 bp, Artificial Sequence
  Synthetic oligonucleotide
agagaatggggtcccacgcaactataaatt

SEQ ID NO: 344541 - DNA, 30 bp, Artificial Sequence
  Synthetic oligonucleotide
tagattagggcgattcagacggcctaaatt

SEQ ID NO: 344542 - DNA, 30 bp, Artificial Sequence
  Synthetic oligonucleotide
atggaaaggccaactctccccttctaaatt

SEQ ID NO: 344543 - DNA, 30 bp, Artificial Sequence
  Synthetic oligonucleotide
gcaactggattaaattggacgaggtaaatt

SEQ ID NO: 344544 - DNA, 30 bp, Artificial Sequence
  Synthetic oligonucleotide
caaatgtgttgaatatataaaatgtaaatt

SEQ ID NO: 344545 - DNA, 30 bp, Artificial Sequence
  Synthetic oligonucleotide
tctgtatcccagtgattgtattcttaaatt

SEQ ID NO: 344546 - DNA, 30 bp, Artificial Sequence
  Synthetic oligonucleotide
ggcgagacgtttcacgctcccgtttaaatt

SEQ ID NO: 344547 - DNA, 30 bp, Artificial Sequence
  Synthetic oligonucleotide
agacgcggaggcgtaattaccgtaacaatt

SEQ ID NO: 344548 - DNA, 30 bp, Artificial Sequence
  Synthetic oligonucleotide
gaacagctgttcaaagcgtagcccacaatt

SEQ ID NO: 344549 - DNA, 30 bp, Artificial Sequence
  Synthetic oligonucleotide
tgcgagctctagcccaagttagccacaatt

SEQ ID NO: 344550 - DNA, 30 bp, Artificial Sequence
  Synthetic oligonucleotide
ataacacggagcgtgcacgctatcacaatt

SEQ ID NO: 344551 - DNA, 30 bp, Artificial Sequence
  Synthetic oligonucleotide
cacagtattctgcaactttacacgacaatt

SEQ ID NO: 344552 - DNA, 30 bp, Artificial Sequence
  Synthetic oligonucleotide
ccaaggcttagggccgtatgacgtacaatt

SEQ ID NO: 344553 - DNA, 30 bp, Artificial Sequence
  Synthetic oligonucleotide
gcgagtcgactatgtggccagcgtacaatt

SEQ ID NO: 344554 - DNA, 29 bp, Artificial Sequence
  Synthetic oligonucleotide
aaagatggagttgttagcctctaccaatt

SEQ ID NO: 344555 - DNA, 30 bp, Artificial Sequence
  Synthetic oligonucleotide
gtctcgacgcacggcgtaccggccccaatt

SEQ ID NO: 344556 - DNA, 30 bp, Artificial Sequence
  Synthetic oligonucleotide
gcccaaacacatgaccactggcagccaatt

SEQ ID NO: 344557 - DNA, 30 bp, Artificial Sequence
  Synthetic oligonucleotide
gtggaaatttatgaacccagtcggccaatt

SEQ ID NO: 344558 - DNA, 30 bp, Artificial Sequence
  Synthetic oligonucleotide
gcgttgagtcatgctagctcccatccaatt

SEQ ID NO: 344559 - DNA, 30 bp, Artificial Sequence
  Synthetic oligonucleotide
acgacatcatcggatcgcgattttccaatt

SEQ ID NO: 344560 - DNA, 30 bp, Artificial Sequence
  Synthetic oligonucleotide
gttcagtcataatcactgctcgaagcaatt

SEQ ID NO: 344561 - DNA, 30 bp, Artificial Sequence
  Synthetic oligonucleotide
tctgggaacctcatacggaggcgagcaatt

SEQ ID NO: 344562 - DNA, 30 bp, Artificial Sequence
  Synthetic oligonucleotide
gactccgggatgttctgctaagccgcaatt

SEQ ID NO: 344563 - DNA, 30 bp, Artificial Sequence
  Synthetic oligonucleotide
gattgcttagcgttcgaccgaggcgcaatt

SEQ ID NO: 344564 - DNA, 30 bp, Artificial Sequence
  Synthetic oligonucleotide
tacctgaatgatgactattttcaggcaatt

SEQ ID NO: 344565 - DNA, 30 bp, Artificial Sequence
  Synthetic oligonucleotide
tgtgtgaactcagacagctggtatgcaatt

SEQ ID NO: 344566 - DNA, 30 bp, Artificial Sequence
  Synthetic oligonucleotide
tagataacctcgagagacgtacttgcaatt

SEQ ID NO: 344567 - DNA, 30 bp, Artificial Sequence
  Synthetic oligonucleotide
tgatggcttctggtcaacgcaaaatcaatt

SEQ ID NO: 344568 - DNA, 30 bp, Artificial Sequence
  Synthetic oligonucleotide
cgttatcgacgtacagatatctactcaatt

SEQ ID NO: 344569 - DNA, 30 bp, Artificial Sequence
  Synthetic oligonucleotide
cggaaatgtgttacggagtacacctcaatt

SEQ ID NO: 344570 - DNA, 30 bp, Artificial Sequence
  Synthetic oligonucleotide
aatagatggtagaaagtatccttctcaatt

SEQ ID NO: 344571 - DNA, 30 bp, Artificial Sequence
  Synthetic oligonucleotide
cctggtgcattgaacatttgcgcgtcaatt

SEQ ID NO: 344572 - DNA, 30 bp, Artificial Sequence
  Synthetic oligonucleotide
gttcaagttacccgagacaagaggtcaatt

SEQ ID NO: 344573 - DNA, 30 bp, Artificial Sequence
  Synthetic oligonucleotide
ttgcttagtatgacttgggtgacttcaatt

SEQ ID NO: 344574 - DNA, 30 bp, Artificial Sequence
  Synthetic oligonucleotide
tctactcaggcgaggaggccaatttcaatt

SEQ ID NO: 344575 - DNA, 30 bp, Artificial Sequence
  Synthetic oligonucleotide
cttcaagggcgaatcctcagggtttcaatt

SEQ ID NO: 344576 - DNA, 30 bp, Artificial Sequence
  Synthetic oligonucleotide
tacagattccttcgggagttagcaagaatt

SEQ ID NO: 344577 - DNA, 30 bp, Artificial Sequence
  Synthetic oligonucleotide
tcatattgctactcaaatcgacgaagaatt

SEQ ID NO: 344578 - DNA, 30 bp, Artificial Sequence
  Synthetic oligonucleotide
acaggcgttggtcctttgcggcacagaatt

SEQ ID NO: 344579 - DNA, 30 bp, Artificial Sequence
  Synthetic oligonucleotide
atgcagctgcctacatatttagacagaatt

SEQ ID NO: 344580 - DNA, 30 bp, Artificial Sequence
  Synthetic oligonucleotide
agttggctatggggcaccgtaaagagaatt

SEQ ID NO: 344581 - DNA, 30 bp, Artificial Sequence
  Synthetic oligonucleotide
aacttttggaatgtaaataggaagagaatt

SEQ ID NO: 344582 - DNA, 31 bp, Artificial Sequence
  Synthetic oligonucleotide
tgaaaggtgatatgagaacaatcggagaatt

SEQ ID NO: 344583 - DNA, 30 bp, Artificial Sequence
  Synthetic oligonucleotide
ccggcctggatgagctttatcgtgagaatt

SEQ ID NO: 344584 - DNA, 30 bp, Artificial Sequence
  Synthetic oligonucleotide
cagttccagtaccgcaggcgatgacgaatt

SEQ ID NO: 344585 - DNA, 30 bp, Artificial Sequence
  Synthetic oligonucleotide
gaagtaggacaatatattggtctccgaatt

SEQ ID NO: 344586 - DNA, 30 bp, Artificial Sequence
  Synthetic oligonucleotide
tgtgagccaggcgtgcttacgaagcgaatt

SEQ ID NO: 344587 - DNA, 30 bp, Artificial Sequence
  Synthetic oligonucleotide
aggcatgagtgcgtgaatattaagcgaatt

SEQ ID NO: 344588 - DNA, 30 bp, Artificial Sequence
  Synthetic oligonucleotide
ctgtccaaagtaacaccggtgacgcgaatt

SEQ ID NO: 344589 - DNA, 30 bp, Artificial Sequence
  Synthetic oligonucleotide
aatgcatcggatgaaaatagcttgcgaatt

SEQ ID NO: 344590 - DNA, 30 bp, Artificial Sequence
  Synthetic oligonucleotide
agaacaggcctattaggcgtacctcgaatt

SEQ ID NO: 344591 - DNA, 30 bp, Artificial Sequence
  Synthetic oligonucleotide
aagacatttgaagctactatatctcgaatt

SEQ ID NO: 344592 - DNA, 30 bp, Artificial Sequence
  Synthetic oligonucleotide
cggctaaattaattgttatccattcgaatt

SEQ ID NO: 344593 - DNA, 30 bp, Artificial Sequence
  Synthetic oligonucleotide
aagataattagagtatgcttcacaggaatt

SEQ ID NO: 344594 - DNA, 30 bp, Artificial Sequence
  Synthetic oligonucleotide
gcttccgttagttccacgaatacaggaatt

SEQ ID NO: 344595 - DNA, 30 bp, Artificial Sequence
  Synthetic oligonucleotide
gggattacgtagaagtactcgataggaatt

SEQ ID NO: 344596 - DNA, 30 bp, Artificial Sequence
  Synthetic oligonucleotide
gaattagacgaaaccgtttctgtaggaatt

SEQ ID NO: 344597 - DNA, 30 bp, Artificial Sequence
  Synthetic oligonucleotide
ctgagcgcgtgatctttaaattacggaatt

SEQ ID NO: 344598 - DNA, 30 bp, Artificial Sequence
  Synthetic oligonucleotide
tggatgtcatcagttctgaggcccggaatt

SEQ ID NO: 344599 - DNA, 30 bp, Artificial Sequence
  Synthetic oligonucleotide
ccgtagcacaaccagaggcccctcggaatt

SEQ ID NO: 344600 - DNA, 30 bp, Artificial Sequence
  Synthetic oligonucleotide
tccgtccgggaaattggatccgtcggaatt

SEQ ID NO: 344601 - DNA, 30 bp, Artificial Sequence
  Synthetic oligonucleotide
ggtgcttaagccgttgttatgttcggaatt

SEQ ID NO: 344602 - DNA, 30 bp, Artificial Sequence
  Synthetic oligonucleotide
gaccaggtagcccaataggcccggggaatt

SEQ ID NO: 344603 - DNA, 30 bp, Artificial Sequence
  Synthetic oligonucleotide
aacaaagaggatgcaacccgggggggaatt

SEQ ID NO: 344604 - DNA, 30 bp, Artificial Sequence
  Synthetic oligonucleotide
ttattcgccggcaacacttcaatgggaatt

SEQ ID NO: 344605 - DNA, 30 bp, Artificial Sequence
  Synthetic oligonucleotide
gcttgaattactactggagaataatgaatt

SEQ ID NO: 344606 - DNA, 30 bp, Artificial Sequence
  Synthetic oligonucleotide
caggctagctcacctttcgactcatgaatt

SEQ ID NO: 344607 - DNA, 30 bp, Artificial Sequence
  Synthetic oligonucleotide
gtgaaaattttatgaatgcgtccctgaatt

SEQ ID NO: 344608 - DNA, 30 bp, Artificial Sequence
  Synthetic oligonucleotide
gtacttggtgtacctctcgatggctgaatt

SEQ ID NO: 344609 - DNA, 30 bp, Artificial Sequence
  Synthetic oligonucleotide
ttgtaaaacgagaggcgcaccaagtgaatt

SEQ ID NO: 344610 - DNA, 30 bp, Artificial Sequence
  Synthetic oligonucleotide
tctagttagtcggattgtcatttgtgaatt

SEQ ID NO: 344611 - DNA, 30 bp, Artificial Sequence
  Synthetic oligonucleotide
caataacaatgttaacagtgcaaaataatt

SEQ ID NO: 344612 - DNA, 30 bp, Artificial Sequence
  Synthetic oligonucleotide
tttggcttactcaactatcactcaataatt

SEQ ID NO: 344613 - DNA, 30 bp, Artificial Sequence
  Synthetic oligonucleotide
tctcagaaattttttacggcaagaataatt

SEQ ID NO: 344614 - DNA, 30 bp, Artificial Sequence
  Synthetic oligonucleotide
tgaatttgggtgagcgtatgggacataatt

SEQ ID NO: 344615 - DNA, 30 bp, Artificial Sequence
  Synthetic oligonucleotide
atagtacttaagtaaggacggtgcataatt

SEQ ID NO: 344616 - DNA, 29 bp, Artificial Sequence
  Synthetic oligonucleotide
gtactggtgtatgtgttcgtaagataatt

SEQ ID NO: 344617 - DNA, 30 bp, Artificial Sequence
  Synthetic oligonucleotide
tacgaagcgattaatggctcgtctataatt

SEQ ID NO: 344618 - DNA, 30 bp, Artificial Sequence
  Synthetic oligonucleotide
aagactagttgtcttgtcactggactaatt

SEQ ID NO: 344619 - DNA, 30 bp, Artificial Sequence
  Synthetic oligonucleotide
ggagataccaccttagaagttatactaatt

SEQ ID NO: 344620 - DNA, 30 bp, Artificial Sequence
  Synthetic oligonucleotide
tgttagataatgggacggagattcctaatt

SEQ ID NO: 344621 - DNA, 30 bp, Artificial Sequence
  Synthetic oligonucleotide
tctgtgtaatgaccgctcaccgcgctaatt

SEQ ID NO: 344622 - DNA, 30 bp, Artificial Sequence
  Synthetic oligonucleotide
agtagggcgcggaacgcgggtcatctaatt

SEQ ID NO: 344623 - DNA, 30 bp, Artificial Sequence
  Synthetic oligonucleotide
cagtcagcagttatgcgggtttgtctaatt

SEQ ID NO: 344624 - DNA, 30 bp, Artificial Sequence
  Synthetic oligonucleotide
caaatctcggatattcgcgttacagtaatt

SEQ ID NO: 344625 - DNA, 30 bp, Artificial Sequence
  Synthetic oligonucleotide
gtagggagttactagctaagatcagtaatt

SEQ ID NO: 344626 - DNA, 30 bp, Artificial Sequence
  Synthetic oligonucleotide
gattctgcagacaaagaggataccgtaatt

SEQ ID NO: 344627 - DNA, 30 bp, Artificial Sequence
  Synthetic oligonucleotide
tgattagagccaatacaaggattcgtaatt

SEQ ID NO: 344628 - DNA, 30 bp, Artificial Sequence
  Synthetic oligonucleotide
gcatccacgacggcaggtccgtctgtaatt

SEQ ID NO: 344629 - DNA, 30 bp, Artificial Sequence
  Synthetic oligonucleotide
caagcgcccaattcaggctcgtttgtaatt

SEQ ID NO: 344630 - DNA, 30 bp, Artificial Sequence
  Synthetic oligonucleotide
gaagcctttgcgctgtaggctaaattaatt

SEQ ID NO: 344631 - DNA, 30 bp, Artificial Sequence
  Synthetic oligonucleotide
agtactactcgatgactcggtcaattaatt

SEQ ID NO: 344632 - DNA, 30 bp, Artificial Sequence
  Synthetic oligonucleotide
tccgctgattcgccctcgagcaacttaatt

SEQ ID NO: 344633 - DNA, 30 bp, Artificial Sequence
  Synthetic oligonucleotide
tcacggtcgtcggagtacgccggcttaatt

SEQ ID NO: 344634 - DNA, 30 bp, Artificial Sequence
  Synthetic oligonucleotide
gtattgcaaaccgttggagacgggttaatt

SEQ ID NO: 344635 - DNA, 30 bp, Artificial Sequence
  Synthetic oligonucleotide
tgattattaaggccaatgtgcactttaatt

SEQ ID NO: 344636 - DNA, 30 bp, Artificial Sequence
  Synthetic oligonucleotide
ttatgaacgatgatcttaaatggtttaatt

SEQ ID NO: 344637 - DNA, 30 bp, Artificial Sequence
  Synthetic oligonucleotide
cgcattcgtgcgttttgtgcgaaaaacatt

SEQ ID NO: 344638 - DNA, 30 bp, Artificial Sequence
  Synthetic oligonucleotide
aatccaaacgcacattgaggagcaaacatt

SEQ ID NO: 344639 - DNA, 30 bp, Artificial Sequence
  Synthetic oligonucleotide
ggccggcagttagcgacaattctcaacatt

SEQ ID NO: 344640 - DNA, 30 bp, Artificial Sequence
  Synthetic oligonucleotide
ttctcaattaaaggaattctgcagaacatt

SEQ ID NO: 344641 - DNA, 30 bp, Artificial Sequence
  Synthetic oligonucleotide
aaactatatacaaatgggataccgaacatt

SEQ ID NO: 344642 - DNA, 30 bp, Artificial Sequence
  Synthetic oligonucleotide
ctggtcctgtggggagttaaatggaacatt

SEQ ID NO: 344643 - DNA, 30 bp, Artificial Sequence
  Synthetic oligonucleotide
cgcacagaataggccattacatgacacatt

SEQ ID NO: 344644 - DNA, 30 bp, Artificial Sequence
  Synthetic oligonucleotide
caggcagcggaattatagacgccccacatt

SEQ ID NO: 344645 - DNA, 30 bp, Artificial Sequence
  Synthetic oligonucleotide
cggtatcaacgttgcgtgtgggagcacatt

SEQ ID NO: 344646 - DNA, 30 bp, Artificial Sequence
  Synthetic oligonucleotide
aggccctaaggtgatagggtcccgcacatt

SEQ ID NO: 344647 - DNA, 30 bp, Artificial Sequence
  Synthetic oligonucleotide
tccaagcgccatagaaataacgggcacatt

SEQ ID NO: 344648 - DNA, 30 bp, Artificial Sequence
  Synthetic oligonucleotide
aaagacgcaccggcttcgtctattcacatt

SEQ ID NO: 344649 - DNA, 30 bp, Artificial Sequence
  Synthetic oligonucleotide
ctttctcagtatgagcgaggcggagacatt

SEQ ID NO: 344650 - DNA, 30 bp, Artificial Sequence
  Synthetic oligonucleotide
atttggatgcccgtaaaacgggtagacatt

SEQ ID NO: 344651 - DNA, 30 bp, Artificial Sequence
  Synthetic oligonucleotide
cgaggtttcataacattggtacacgacatt

SEQ ID NO: 344652 - DNA, 30 bp, Artificial Sequence
  Synthetic oligonucleotide
tttgggaacgttcaatggaagtaggacatt

SEQ ID NO: 344653 - DNA, 30 bp, Artificial Sequence
  Synthetic oligonucleotide
agcaaatccttttccgctttggtggacatt

SEQ ID NO: 344654 - DNA, 30 bp, Artificial Sequence
  Synthetic oligonucleotide
gggttacacataagagactgacgtgacatt

SEQ ID NO: 344655 - DNA, 30 bp, Artificial Sequence
  Synthetic oligonucleotide
atctgagtcaccagaaactgtgaatacatt

SEQ ID NO: 344656 - DNA, 30 bp, Artificial Sequence
  Synthetic oligonucleotide
gcatcaaacgttatcggtgcaagatacatt

SEQ ID NO: 344657 - DNA, 30 bp, Artificial Sequence
  Synthetic oligonucleotide
ttgcatgttggaggtttcatgggctacatt

SEQ ID NO: 344658 - DNA, 30 bp, Artificial Sequence
  Synthetic oligonucleotide
tcacataaaagaagtacaaataagtacatt

SEQ ID NO: 344659 - DNA, 30 bp, Artificial Sequence
  Synthetic oligonucleotide
atgtattgcaataggacaaattggtacatt

SEQ ID NO: 344660 - DNA, 30 bp, Artificial Sequence
  Synthetic oligonucleotide
atactaccctattagcatgcgctgtacatt

SEQ ID NO: 344661 - DNA, 30 bp, Artificial Sequence
  Synthetic oligonucleotide
gacttttcgcgccgacatgtcggttacatt

SEQ ID NO: 344662 - DNA, 30 bp, Artificial Sequence
  Synthetic oligonucleotide
ctaggatggccctgcacttctcccaccatt

SEQ ID NO: 344663 - DNA, 30 bp, Artificial Sequence
  Synthetic oligonucleotide
gtcaaccatcgtctggtaacgccgaccatt

SEQ ID NO: 344664 - DNA, 30 bp, Artificial Sequence
  Synthetic oligonucleotide
gttcctgactctcagacatccggacccatt

SEQ ID NO: 344665 - DNA, 30 bp, Artificial Sequence
  Synthetic oligonucleotide
cgacccaaaatttgagagccctaccccatt

SEQ ID NO: 344666 - DNA, 30 bp, Artificial Sequence
  Synthetic oligonucleotide
aagatgagtagattggaatatccccccatt

SEQ ID NO: 344667 - DNA, 30 bp, Artificial Sequence
  Synthetic oligonucleotide
gccaacttggcaaccccatggaggcccatt

SEQ ID NO: 344668 - DNA, 30 bp, Artificial Sequence
  Synthetic oligonucleotide
agtgtattagcgcagaccgatcggcccatt

SEQ ID NO: 344669 - DNA, 30 bp, Artificial Sequence
  Synthetic oligonucleotide
ggcgcccggccagaggattccaatcccatt

SEQ ID NO: 344670 - DNA, 30 bp, Artificial Sequence
  Synthetic oligonucleotide
cacgaccatagaaacaccggctcagccatt

SEQ ID NO: 344671 - DNA, 30 bp, Artificial Sequence
  Synthetic oligonucleotide
aggatcggatttttgattcccctagccatt

SEQ ID NO: 344672 - DNA, 30 bp, Artificial Sequence
  Synthetic oligonucleotide
gcactgtaggtcaaatcatccagcgccatt

SEQ ID NO: 344673 - DNA, 30 bp, Artificial Sequence
  Synthetic oligonucleotide
aagaaacactggtgcagttcgatctccatt

SEQ ID NO: 344674 - DNA, 30 bp, Artificial Sequence
  Synthetic oligonucleotide
aagactgttcaagggtggttgatctccatt

SEQ ID NO: 344675 - DNA, 30 bp, Artificial Sequence
  Synthetic oligonucleotide
cagccccgatcgagtagaatagtgtccatt

SEQ ID NO: 344676 - DNA, 30 bp, Artificial Sequence
  Synthetic oligonucleotide
gtactttaggccatctaagatagaagcatt

SEQ ID NO: 344677 - DNA, 30 bp, Artificial Sequence
  Synthetic oligonucleotide
atgttgacgtctgtccgctcatgcagcatt

SEQ ID NO: 344678 - DNA, 30 bp, Artificial Sequence
  Synthetic oligonucleotide
tctgtgccaccgaggctttacccgagcatt

SEQ ID NO: 344679 - DNA, 30 bp, Artificial Sequence
  Synthetic oligonucleotide
tgaattattgttggactaggctggagcatt

SEQ ID NO: 344680 - DNA, 30 bp, Artificial Sequence
  Synthetic oligonucleotide
aaggtttgttcttgtatggtgttgagcatt

SEQ ID NO: 344681 - DNA, 30 bp, Artificial Sequence
  Synthetic oligonucleotide
actaggtaattaaacggcagtagtagcatt

SEQ ID NO: 344682 - DNA, 30 bp, Artificial Sequence
  Synthetic oligonucleotide
aaaaatgatgtgactgagatccttagcatt

SEQ ID NO: 344683 - DNA, 30 bp, Artificial Sequence
  Synthetic oligonucleotide
gagtatagatgcccgacattagaacgcatt

SEQ ID NO: 344684 - DNA, 30 bp, Artificial Sequence
  Synthetic oligonucleotide
tgacaacactccatctgtctggaacgcatt

SEQ ID NO: 344685 - DNA, 30 bp, Artificial Sequence
  Synthetic oligonucleotide
ttcggatatggttgtgctagtttacgcatt

SEQ ID NO: 344686 - DNA, 30 bp, Artificial Sequence
  Synthetic oligonucleotide
ctgccactttatatcaccaagaaccgcatt

SEQ ID NO: 344687 - DNA, 30 bp, Artificial Sequence
  Synthetic oligonucleotide
ggatcggttcttctaccagaaaggcgcatt

SEQ ID NO: 344688 - DNA, 30 bp, Artificial Sequence
  Synthetic oligonucleotide
ggagtcttcaagatgggtaacgatcgcatt

SEQ ID NO: 344689 - DNA, 30 bp, Artificial Sequence
  Synthetic oligonucleotide
ctaatatcgacggcaactacaactcgcatt

SEQ ID NO: 344690 - DNA, 30 bp, Artificial Sequence
  Synthetic oligonucleotide
agtggagggtaccctacttaagttcgcatt

SEQ ID NO: 344691 - DNA, 30 bp, Artificial Sequence
  Synthetic oligonucleotide
gaagtttgagtagggtgcactaaaggcatt

SEQ ID NO: 344692 - DNA, 30 bp, Artificial Sequence
  Synthetic oligonucleotide
tggatcggtctttgttctaaacgcggcatt

SEQ ID NO: 344693 - DNA, 30 bp, Artificial Sequence
  Synthetic oligonucleotide
ctctagaccacgcgccttgataagggcatt

SEQ ID NO: 344694 - DNA, 30 bp, Artificial Sequence
  Synthetic oligonucleotide
ggagtggcccgtgacatgggatagggcatt

SEQ ID NO: 344695 - DNA, 30 bp, Artificial Sequence
  Synthetic oligonucleotide
tgcgaagtcgacaatatttagtggggcatt

SEQ ID NO: 344696 - DNA, 30 bp, Artificial Sequence
  Synthetic oligonucleotide
aaccttcatcttagcagaaagaatggcatt

SEQ ID NO: 344697 - DNA, 30 bp, Artificial Sequence
  Synthetic oligonucleotide
acatggatctggagatgaagtggatgcatt

SEQ ID NO: 344698 - DNA, 30 bp, Artificial Sequence
  Synthetic oligonucleotide
tcatttggggtgatctagtaatgatgcatt

SEQ ID NO: 344699 - DNA, 30 bp, Artificial Sequence
  Synthetic oligonucleotide
cccacagaaaatactgaaaaactctgcatt

SEQ ID NO: 344700 - DNA, 30 bp, Artificial Sequence
  Synthetic oligonucleotide
ggaaggcacctagttgtatattagtgcatt

SEQ ID NO: 344701 - DNA, 30 bp, Artificial Sequence
  Synthetic oligonucleotide
taatgatgctgtgattagtgcacgtgcatt

SEQ ID NO: 344702 - DNA, 30 bp, Artificial Sequence
  Synthetic oligonucleotide
caagtatcattagagtaaaccttgtgcatt

SEQ ID NO: 344703 - DNA, 30 bp, Artificial Sequence
  Synthetic oligonucleotide
ctgaagtccagtataagcttgtcttgcatt

SEQ ID NO: 344704 - DNA, 30 bp, Artificial Sequence
  Synthetic oligonucleotide
gcgaatacataagagactctaatttgcatt

SEQ ID NO: 344705 - DNA, 30 bp, Artificial Sequence
  Synthetic oligonucleotide
gaagatagggctggaggccccctttgcatt

SEQ ID NO: 344706 - DNA, 30 bp, Artificial Sequence
  Synthetic oligonucleotide
aaggcggggatttcacactactcaatcatt

SEQ ID NO: 344707 - DNA, 30 bp, Artificial Sequence
  Synthetic oligonucleotide
acctcatctccacatgtgacccgcatcatt

SEQ ID NO: 344708 - DNA, 30 bp, Artificial Sequence
  Synthetic oligonucleotide
gcagagttcgttaaccggaagctcatcatt

SEQ ID NO: 344709 - DNA, 30 bp, Artificial Sequence
  Synthetic oligonucleotide
cattcggttgcaatatttcgggcgatcatt

SEQ ID NO: 344710 - DNA, 30 bp, Artificial Sequence
  Synthetic oligonucleotide
tggggatagcggggcggtggagatatcatt

SEQ ID NO: 344711 - DNA, 30 bp, Artificial Sequence
  Synthetic oligonucleotide
ttccgttttaggacccattataaactcatt

SEQ ID NO: 344712 - DNA, 30 bp, Artificial Sequence
  Synthetic oligonucleotide
agatgccagccgccgccattaagactcatt

SEQ ID NO: 344713 - DNA, 30 bp, Artificial Sequence
  Synthetic oligonucleotide
acctaagctggagtatatatggccctcatt

SEQ ID NO: 344714 - DNA, 30 bp, Artificial Sequence
  Synthetic oligonucleotide
ttggttgaactacaactagtattcctcatt

SEQ ID NO: 344715 - DNA, 30 bp, Artificial Sequence
  Synthetic oligonucleotide
atcataagtccctagcaggtagggctcatt

SEQ ID NO: 344716 - DNA, 30 bp, Artificial Sequence
  Synthetic oligonucleotide
tggttccgcgtacaatacgagcatctcatt

SEQ ID NO: 344717 - DNA, 30 bp, Artificial Sequence
  Synthetic oligonucleotide
catcgtgggaaatactcattgggtctcatt

SEQ ID NO: 344718 - DNA, 30 bp, Artificial Sequence
  Synthetic oligonucleotide
gtttgactgccgactagggccaacgtcatt

SEQ ID NO: 344719 - DNA, 30 bp, Artificial Sequence
  Synthetic oligonucleotide
aataactactgtttctgaggacccgtcatt

SEQ ID NO: 344720 - DNA, 30 bp, Artificial Sequence
  Synthetic oligonucleotide
gagaagcgctgttcgcgtctaaaggtcatt

SEQ ID NO: 344721 - DNA, 30 bp, Artificial Sequence
  Synthetic oligonucleotide
gcagcgtccaggaacttccagcgggtcatt

SEQ ID NO: 344722 - DNA, 30 bp, Artificial Sequence
  Synthetic oligonucleotide
ggtataagaggatccgatgacagtgtcatt

SEQ ID NO: 344723 - DNA, 30 bp, Artificial Sequence
  Synthetic oligonucleotide
cttgctgcaggttcccccaatggtgtcatt

SEQ ID NO: 344724 - DNA, 30 bp, Artificial Sequence
  Synthetic oligonucleotide
tcccagtccttcgagaaggtgctcttcatt

SEQ ID NO: 344725 - DNA, 30 bp, Artificial Sequence
  Synthetic oligonucleotide
atgaagattcggattaatggagtcttcatt

SEQ ID NO: 344726 - DNA, 30 bp, Artificial Sequence
  Synthetic oligonucleotide
tgtatagggggataaatggcccagttcatt

SEQ ID NO: 344727 - DNA, 30 bp, Artificial Sequence
  Synthetic oligonucleotide
ggaagatatttcgatctctccctgttcatt

SEQ ID NO: 344728 - DNA, 30 bp, Artificial Sequence
  Synthetic oligonucleotide
taccggatctcgaagttctaaaatttcatt

SEQ ID NO: 344729 - DNA, 30 bp, Artificial Sequence
  Synthetic oligonucleotide
gccgaaggtcctaaacgaagttatttcatt

SEQ ID NO: 344730 - DNA, 30 bp, Artificial Sequence
  Synthetic oligonucleotide
tgtttgcaaccgtgcagtagggctttcatt

SEQ ID NO: 344731 - DNA, 30 bp, Artificial Sequence
  Synthetic oligonucleotide
gataggacctcgccttgaagtcgtttcatt

SEQ ID NO: 344732 - DNA, 30 bp, Artificial Sequence
  Synthetic oligonucleotide
ctggagcgaatcgatcgaagccacaagatt

SEQ ID NO: 344733 - DNA, 30 bp, Artificial Sequence
  Synthetic oligonucleotide
gacgcacgtaataaacgctgagacaagatt

SEQ ID NO: 344734 - DNA, 30 bp, Artificial Sequence
  Synthetic oligonucleotide
cagcattcagcgacagatcttgataagatt

SEQ ID NO: 344735 - DNA, 30 bp, Artificial Sequence
  Synthetic oligonucleotide
attcgaaaaaacaaaataattattaagatt

SEQ ID NO: 344736 - DNA, 30 bp, Artificial Sequence
  Synthetic oligonucleotide
tcctcgttggcctgggaggtcgttaagatt

SEQ ID NO: 344737 - DNA, 30 bp, Artificial Sequence
  Synthetic oligonucleotide
gtggctccataataaacattacaacagatt

SEQ ID NO: 344738 - DNA, 30 bp, Artificial Sequence
  Synthetic oligonucleotide
actgcaggtcgcaagttacttgcgcagatt

SEQ ID NO: 344739 - DNA, 30 bp, Artificial Sequence
  Synthetic oligonucleotide
ttacccgtcccagctcctttggttcagatt

SEQ ID NO: 344740 - DNA, 30 bp, Artificial Sequence
  Synthetic oligonucleotide
ctatccattgactgaccagcatttcagatt

SEQ ID NO: 344741 - DNA, 30 bp, Artificial Sequence
  Synthetic oligonucleotide
tagcgcccctcatcgagacgaacagagatt

SEQ ID NO: 344742 - DNA, 30 bp, Artificial Sequence
  Synthetic oligonucleotide
taaatcaacaggagttggccaatagagatt

SEQ ID NO: 344743 - DNA, 30 bp, Artificial Sequence
  Synthetic oligonucleotide
tacggcggcggtcccgcgaagttagagatt

SEQ ID NO: 344744 - DNA, 30 bp, Artificial Sequence
  Synthetic oligonucleotide
actggtgaacttgtcataaagcccgagatt

SEQ ID NO: 344745 - DNA, 30 bp, Artificial Sequence
  Synthetic oligonucleotide
caatatgtggctgtcacggcaggcgagatt

SEQ ID NO: 344746 - DNA, 30 bp, Artificial Sequence
  Synthetic oligonucleotide
ttctggtagctaattcatgggtgcgagatt

SEQ ID NO: 344747 - DNA, 30 bp, Artificial Sequence
  Synthetic oligonucleotide
ccatgagagatagacatgactttcgagatt

SEQ ID NO: 344748 - DNA, 30 bp, Artificial Sequence
  Synthetic oligonucleotide
ggagtggccgggacgactgctacggagatt

SEQ ID NO: 344749 - DNA, 30 bp, Artificial Sequence
  Synthetic oligonucleotide
gacctacgtaacaggctaagagcggagatt

SEQ ID NO: 344750 - DNA, 30 bp, Artificial Sequence
  Synthetic oligonucleotide
tagacagaattgtcatatcaggctgagatt

SEQ ID NO: 344751 - DNA, 30 bp, Artificial Sequence
  Synthetic oligonucleotide
tttaaaaggatggacaagaaggaatagatt

SEQ ID NO: 344752 - DNA, 30 bp, Artificial Sequence
  Synthetic oligonucleotide
ctgtgcacggcgttactccagcgatagatt

SEQ ID NO: 344753 - DNA, 30 bp, Artificial Sequence
  Synthetic oligonucleotide
gtgtcatctgatgttcacgtccaaacgatt

SEQ ID NO: 344754 - DNA, 30 bp, Artificial Sequence
  Synthetic oligonucleotide
tcaggtagagccgacgcgcacaccacgatt

SEQ ID NO: 344755 - DNA, 30 bp, Artificial Sequence
  Synthetic oligonucleotide
aattactaaggaacgtttcatgcgacgatt

SEQ ID NO: 344756 - DNA, 30 bp, Artificial Sequence
  Synthetic oligonucleotide
taataggacagtcctggcgaacggacgatt

SEQ ID NO: 344757 - DNA, 30 bp, Artificial Sequence
  Synthetic oligonucleotide
ggtaccgcgacgggtttcacataaccgatt

SEQ ID NO: 344758 - DNA, 30 bp, Artificial Sequence
  Synthetic oligonucleotide
tagaagactgctgtgtacaatccaccgatt

SEQ ID NO: 344759 - DNA, 30 bp, Artificial Sequence
  Synthetic oligonucleotide
catcagcagattcggagggtatcgccgatt

SEQ ID NO: 344760 - DNA, 30 bp, Artificial Sequence
  Synthetic oligonucleotide
aatggactggtgcgaaagattgatccgatt

SEQ ID NO: 344761 - DNA, 30 bp, Artificial Sequence
  Synthetic oligonucleotide
gcataatgtcggactaacaattttccgatt

SEQ ID NO: 344762 - DNA, 30 bp, Artificial Sequence
  Synthetic oligonucleotide
taggggtcatttcccgttcttacagcgatt

SEQ ID NO: 344763 - DNA, 30 bp, Artificial Sequence
  Synthetic oligonucleotide
aagttgtggtgagaataggtcccagcgatt

SEQ ID NO: 344764 - DNA, 30 bp, Artificial Sequence
  Synthetic oligonucleotide
agagggccgttcaattggcgacacgcgatt

SEQ ID NO: 344765 - DNA, 30 bp, Artificial Sequence
  Synthetic oligonucleotide
aatggagagtgttcgcctaggggcgcgatt

SEQ ID NO: 344766 - DNA, 30 bp, Artificial Sequence
  Synthetic oligonucleotide
atagagtgtgtagatcatgtcgaggcgatt

SEQ ID NO: 344767 - DNA, 30 bp, Artificial Sequence
  Synthetic oligonucleotide
aagacataaggcttgccttccgtggcgatt

SEQ ID NO: 344768 - DNA, 30 bp, Artificial Sequence
  Synthetic oligonucleotide
gggaccggagcaaaaaagcgatctgcgatt

SEQ ID NO: 344769 - DNA, 30 bp, Artificial Sequence
  Synthetic oligonucleotide
agttccggtccacgtatccgacgatcgatt

SEQ ID NO: 344770 - DNA, 30 bp, Artificial Sequence
  Synthetic oligonucleotide
acatatggcggtgctggatagcagtcgatt

SEQ ID NO: 344771 - DNA, 30 bp, Artificial Sequence
  Synthetic oligonucleotide
aagtagtgactcaaccatgcaaattcgatt

SEQ ID NO: 344772 - DNA, 30 bp, Artificial Sequence
  Synthetic oligonucleotide
agaaataagacttgtaagaaactttcgatt

SEQ ID NO: 344773 - DNA, 30 bp, Artificial Sequence
  Synthetic oligonucleotide
cccttccctgcgaaagcaccaagaaggatt

SEQ ID NO: 344774 - DNA, 30 bp, Artificial Sequence
  Synthetic oligonucleotide
tacgcctaagctaagtgtttaggaaggatt

SEQ ID NO: 344775 - DNA, 30 bp, Artificial Sequence
  Synthetic oligonucleotide
aaatccagaatggactgtttaataaggatt

SEQ ID NO: 344776 - DNA, 30 bp, Artificial Sequence
  Synthetic oligonucleotide
cacctcgagagaaggatagttcacaggatt

SEQ ID NO: 344777 - DNA, 30 bp, Artificial Sequence
  Synthetic oligonucleotide
cattatagaaggtcgcacacaagcaggatt

SEQ ID NO: 344778 - DNA, 30 bp, Artificial Sequence
  Synthetic oligonucleotide
ggccttataacgaaatctcctcagaggatt

SEQ ID NO: 344779 - DNA, 30 bp, Artificial Sequence
  Synthetic oligonucleotide
cgagggacctatagtgcaagggagaggatt

SEQ ID NO: 344780 - DNA, 30 bp, Artificial Sequence
  Synthetic oligonucleotide
agctactcgtgtaccactctgaataggatt

SEQ ID NO: 344781 - DNA, 30 bp, Artificial Sequence
  Synthetic oligonucleotide
ccccacgtagcgttaaactgcggtaggatt

SEQ ID NO: 344782 - DNA, 30 bp, Artificial Sequence
  Synthetic oligonucleotide
aggaatactaaattaacgtatttacggatt

SEQ ID NO: 344783 - DNA, 30 bp, Artificial Sequence
  Synthetic oligonucleotide
cacaccatagctgttttctgacaccggatt

SEQ ID NO: 344784 - DNA, 30 bp, Artificial Sequence
  Synthetic oligonucleotide
aaatcctcaaatggactcgcctcccggatt

SEQ ID NO: 344785 - DNA, 30 bp, Artificial Sequence
  Synthetic oligonucleotide
ctgattcgatgggcttagccacctcggatt

SEQ ID NO: 344786 - DNA, 30 bp, Artificial Sequence
  Synthetic oligonucleotide
gttataggaccgggccgataacttcggatt

SEQ ID NO: 344787 - DNA, 30 bp, Artificial Sequence
  Synthetic oligonucleotide
gggcgctatgggcatcagataaacgggatt

SEQ ID NO: 344788 - DNA, 30 bp, Artificial Sequence
  Synthetic oligonucleotide
agcacgcccagcaaaggcggctgcgggatt

SEQ ID NO: 344789 - DNA, 30 bp, Artificial Sequence
  Synthetic oligonucleotide
ataaatgcagaatcgatctatttcgggatt

SEQ ID NO: 344790 - DNA, 30 bp, Artificial Sequence
  Synthetic oligonucleotide
acggttatgcccctaattcgtcaggggatt

SEQ ID NO: 344791 - DNA, 30 bp, Artificial Sequence
  Synthetic oligonucleotide
gcctgggtaccggcgaacggtccggggatt

SEQ ID NO: 344792 - DNA, 30 bp, Artificial Sequence
  Synthetic oligonucleotide
tgatacgttagggtttgtggtagggggatt

SEQ ID NO: 344793 - DNA, 30 bp, Artificial Sequence
  Synthetic oligonucleotide
gagatgctggtgcaggcgggctgggggatt

SEQ ID NO: 344794 - DNA, 30 bp, Artificial Sequence
  Synthetic oligonucleotide
aattgaaaacgagcggcgtccaatgggatt

SEQ ID NO: 344795 - DNA, 30 bp, Artificial Sequence
  Synthetic oligonucleotide
gagcattagcataaataggagtatgggatt

SEQ ID NO: 344796 - DNA, 30 bp, Artificial Sequence
  Synthetic oligonucleotide
catcagtagttctgtgactcgtctgggatt

SEQ ID NO: 344797 - DNA, 30 bp, Artificial Sequence
  Synthetic oligonucleotide
tcgaacgcgggttggaattgagcctggatt

SEQ ID NO: 344798 - DNA, 30 bp, Artificial Sequence
  Synthetic oligonucleotide
ccagttgactagctaaagatattgtggatt

SEQ ID NO: 344799 - DNA, 30 bp, Artificial Sequence
  Synthetic oligonucleotide
gacacacgaccaatcgtcggtgcttggatt

SEQ ID NO: 344800 - DNA, 30 bp, Artificial Sequence
  Synthetic oligonucleotide
tcacgaatactgccagttagggcaatgatt

SEQ ID NO: 344801 - DNA, 30 bp, Artificial Sequence
  Synthetic oligonucleotide
caactgctgggtcacggaggttcaatgatt

SEQ ID NO: 344802 - DNA, 30 bp, Artificial Sequence
  Synthetic oligonucleotide
gatacacgtaaacttcgctctgtaatgatt

SEQ ID NO: 344803 - DNA, 30 bp, Artificial Sequence
  Synthetic oligonucleotide
gctatgtaagggctcagaaactagatgatt

SEQ ID NO: 344804 - DNA, 30 bp, Artificial Sequence
  Synthetic oligonucleotide
taagcccgttcaaaaacgtgttagatgatt

SEQ ID NO: 344805 - DNA, 30 bp, Artificial Sequence
  Synthetic oligonucleotide
acctgtctcgttgtggatacatctatgatt

SEQ ID NO: 344806 - DNA, 30 bp, Artificial Sequence
  Synthetic oligonucleotide
tcccagggcggcccggattcattactgatt

SEQ ID NO: 344807 - DNA, 30 bp, Artificial Sequence
  Synthetic oligonucleotide
acccataggatatgatagtacttcctgatt

SEQ ID NO: 344808 - DNA, 30 bp, Artificial Sequence
  Synthetic oligonucleotide
gggatgtttgaaaaggtggcgccgctgatt

SEQ ID NO: 344809 - DNA, 30 bp, Artificial Sequence
  Synthetic oligonucleotide
cgcaaaccacacaacatttaatcgctgatt

SEQ ID NO: 344810 - DNA, 30 bp, Artificial Sequence
  Synthetic oligonucleotide
gattcttccccatcaaaagccgttctgatt

SEQ ID NO: 344811 - DNA, 30 bp, Artificial Sequence
  Synthetic oligonucleotide
tagtctcctgataggaagcataacgtgatt

SEQ ID NO: 344812 - DNA, 30 bp, Artificial Sequence
  Synthetic oligonucleotide
cgatcttacaataaagcgtagagcgtgatt

SEQ ID NO: 344813 - DNA, 30 bp, Artificial Sequence
  Synthetic oligonucleotide
gtgcagcttgaccgcgttgactgcgtgatt

SEQ ID NO: 344814 - DNA, 30 bp, Artificial Sequence
  Synthetic oligonucleotide
gcacactggtgttggtgttgcatcgtgatt

SEQ ID NO: 344815 - DNA, 30 bp, Artificial Sequence
  Synthetic oligonucleotide
ggcctccctgttaaagtgcgtgtcgtgatt

SEQ ID NO: 344816 - DNA, 30 bp, Artificial Sequence
  Synthetic oligonucleotide
cactaagcgttctctgcaaagtatgtgatt

SEQ ID NO: 344817 - DNA, 30 bp, Artificial Sequence
  Synthetic oligonucleotide
agtgttcattgtcagtcaaaatgtgtgatt

SEQ ID NO: 344818 - DNA, 30 bp, Artificial Sequence
  Synthetic oligonucleotide
tgtccctcagaaatgctgtaagtattgatt

SEQ ID NO: 344819 - DNA, 30 bp, Artificial Sequence
  Synthetic oligonucleotide
atctgggagtgatatttaacacatttgatt

SEQ ID NO: 344820 - DNA, 30 bp, Artificial Sequence
  Synthetic oligonucleotide
cccgatctcgtggatttagcgcttttgatt

SEQ ID NO: 344821 - DNA, 30 bp, Artificial Sequence
  Synthetic oligonucleotide
taaacaggatcgaaccgcgaagttttgatt

SEQ ID NO: 344822 - DNA, 30 bp, Artificial Sequence
  Synthetic oligonucleotide
gtgtgcaatacgttagtgacagttttgatt

SEQ ID NO: 344823 - DNA, 30 bp, Artificial Sequence
  Synthetic oligonucleotide
gtattgcgaatgtaaaagctgccaaatatt

SEQ ID NO: 344824 - DNA, 30 bp, Artificial Sequence
  Synthetic oligonucleotide
gtaaaaattcacaaaagacacgacaatatt

SEQ ID NO: 344825 - DNA, 30 bp, Artificial Sequence
  Synthetic oligonucleotide
tcttttggtgagaagccaagggtacatatt

SEQ ID NO: 344826 - DNA, 30 bp, Artificial Sequence
  Synthetic oligonucleotide
aacgtaacattcaaagccgcaacccatatt

SEQ ID NO: 344827 - DNA, 30 bp, Artificial Sequence
  Synthetic oligonucleotide
acaccttatgagtaccgcgttgcccatatt

SEQ ID NO: 344828 - DNA, 30 bp, Artificial Sequence
  Synthetic oligonucleotide
ctagaacgtgcaaagcgtttgtcccatatt

SEQ ID NO: 344829 - DNA, 30 bp, Artificial Sequence
  Synthetic oligonucleotide
ggacatgggtggatggagacggtccatatt

SEQ ID NO: 344830 - DNA, 30 bp, Artificial Sequence
  Synthetic oligonucleotide
gtacaagttgggtacaaggtggcgcatatt

SEQ ID NO: 344831 - DNA, 30 bp, Artificial Sequence
  Synthetic oligonucleotide
atgaaggcgcatagtggctatttgcatatt

SEQ ID NO: 344832 - DNA, 30 bp, Artificial Sequence
  Synthetic oligonucleotide
catcagttatactacgattatcatcatatt

SEQ ID NO: 344833 - DNA, 30 bp, Artificial Sequence
  Synthetic oligonucleotide
gtatctggagtacctcccggtgaagatatt

SEQ ID NO: 344834 - DNA, 30 bp, Artificial Sequence
  Synthetic oligonucleotide
gcatatagccttatctgaactcccgatatt

SEQ ID NO: 344835 - DNA, 30 bp, Artificial Sequence
  Synthetic oligonucleotide
aggggatctttaaccgtcatgtccgatatt

SEQ ID NO: 344836 - DNA, 30 bp, Artificial Sequence
  Synthetic oligonucleotide
gcataagatacgccttacaattgcgatatt

SEQ ID NO: 344837 - DNA, 30 bp, Artificial Sequence
  Synthetic oligonucleotide
cacacaaataactcccaggccaaggatatt

SEQ ID NO: 344838 - DNA, 30 bp, Artificial Sequence
  Synthetic oligonucleotide
agcacctaagtactgggacgcgcggatatt

SEQ ID NO: 344839 - DNA, 30 bp, Artificial Sequence
  Synthetic oligonucleotide
ccgtgttgtggcgataataggactgatatt

SEQ ID NO: 344840 - DNA, 30 bp, Artificial Sequence
  Synthetic oligonucleotide
ctcccacggagcggtcacattagatatatt

SEQ ID NO: 344841 - DNA, 30 bp, Artificial Sequence
  Synthetic oligonucleotide
cccgagtccaaaagtacgaacaactatatt

SEQ ID NO: 344842 - DNA, 30 bp, Artificial Sequence
  Synthetic oligonucleotide
cggtaactatcaggcggaagccagtatatt

SEQ ID NO: 344843 - DNA, 30 bp, Artificial Sequence
  Synthetic oligonucleotide
taaggtatgctcccgccactatagtatatt

SEQ ID NO: 344844 - DNA, 30 bp, Artificial Sequence
  Synthetic oligonucleotide
taaatgctagttgtgatttggtcgtatatt

SEQ ID NO: 344845 - DNA, 30 bp, Artificial Sequence
  Synthetic oligonucleotide
atgcgctctgagacccccgcatggtatatt

SEQ ID NO: 344846 - DNA, 30 bp, Artificial Sequence
  Synthetic oligonucleotide
tcttacgggtacagagatcctgtgtatatt

SEQ ID NO: 344847 - DNA, 30 bp, Artificial Sequence
  Synthetic oligonucleotide
aatctggggcgcataaattcggattatatt

SEQ ID NO: 344848 - DNA, 30 bp, Artificial Sequence
  Synthetic oligonucleotide
tgggtgcgaggtgaccgcgaccgttatatt

SEQ ID NO: 344849 - DNA, 30 bp, Artificial Sequence
  Synthetic oligonucleotide
tatttatcgaggtcggttaaaggcactatt

SEQ ID NO: 344850 - DNA, 30 bp, Artificial Sequence
  Synthetic oligonucleotide
acgcatctacggcgaaacgacaggactatt

SEQ ID NO: 344851 - DNA, 30 bp, Artificial Sequence
  Synthetic oligonucleotide
atctgccgttgtgctagtcatgttactatt

SEQ ID NO: 344852 - DNA, 30 bp, Artificial Sequence
  Synthetic oligonucleotide
ccggcaggccattatgacagatttactatt

SEQ ID NO: 344853 - DNA, 30 bp, Artificial Sequence
  Synthetic oligonucleotide
ggaccacatttttgggtcatgcaacctatt

SEQ ID NO: 344854 - DNA, 30 bp, Artificial Sequence
  Synthetic oligonucleotide
aggccagtggtgtttcaatgggtccctatt

SEQ ID NO: 344855 - DNA, 30 bp, Artificial Sequence
  Synthetic oligonucleotide
agggcttccagttacggtctctagcctatt

SEQ ID NO: 344856 - DNA, 30 bp, Artificial Sequence
  Synthetic oligonucleotide
atatagtgggcgtaaagcgactcgcctatt

SEQ ID NO: 344857 - DNA, 30 bp, Artificial Sequence
  Synthetic oligonucleotide
tataaacatatccaggcattaattcctatt

SEQ ID NO: 344858 - DNA, 30 bp, Artificial Sequence
  Synthetic oligonucleotide
cctgtaacccgtgtgggagaacaagctatt

SEQ ID NO: 344859 - DNA, 30 bp, Artificial Sequence
  Synthetic oligonucleotide
gatgagctggccacatttccggaagctatt

SEQ ID NO: 344860 - DNA, 30 bp, Artificial Sequence
  Synthetic oligonucleotide
gcgttatatcaactgaaggtctcagctatt

SEQ ID NO: 344861 - DNA, 30 bp, Artificial Sequence
  Synthetic oligonucleotide
gaagttctcttaacaggtgaaaaggctatt

SEQ ID NO: 344862 - DNA, 30 bp, Artificial Sequence
  Synthetic oligonucleotide
ttaggaatcgattagagtgtggaatctatt

SEQ ID NO: 344863 - DNA, 30 bp, Artificial Sequence
  Synthetic oligonucleotide
tgtcgccgatgctagcacacgtcatctatt

SEQ ID NO: 344864 - DNA, 30 bp, Artificial Sequence
  Synthetic oligonucleotide
agtaatcatgacttttaagcacgctctatt

SEQ ID NO: 344865 - DNA, 30 bp, Artificial Sequence
  Synthetic oligonucleotide
gcttctcgcaggtacgcgtggacgtctatt

SEQ ID NO: 344866 - DNA, 30 bp, Artificial Sequence
  Synthetic oligonucleotide
gttgtaagatggatattaatgatgtctatt

SEQ ID NO: 344867 - DNA, 30 bp, Artificial Sequence
  Synthetic oligonucleotide
acggggatcaaagattctttgtattctatt

SEQ ID NO: 344868 - DNA, 30 bp, Artificial Sequence
  Synthetic oligonucleotide
atgtaagacccggagcgttcgacaagtatt

SEQ ID NO: 344869 - DNA, 30 bp, Artificial Sequence
  Synthetic oligonucleotide
tatcagagatagaaagagttcagaagtatt

SEQ ID NO: 344870 - DNA, 30 bp, Artificial Sequence
  Synthetic oligonucleotide
cgctatgcattatccctaatgtgaagtatt

SEQ ID NO: 344871 - DNA, 30 bp, Artificial Sequence
  Synthetic oligonucleotide
cgctacccatttaaagcgtgagtaagtatt

SEQ ID NO: 344872 - DNA, 31 bp, Artificial Sequence
  Synthetic oligonucleotide
cttaactagtgtatcgcgtatattaagtatt

SEQ ID NO: 344873 - DNA, 30 bp, Artificial Sequence
  Synthetic oligonucleotide
gcataatcgacgtaaataccgttaagtatt

SEQ ID NO: 344874 - DNA, 30 bp, Artificial Sequence
  Synthetic oligonucleotide
gttttacacaacgcgcagagtggcagtatt

SEQ ID NO: 344875 - DNA, 30 bp, Artificial Sequence
  Synthetic oligonucleotide
actcagtaatacgcagttagttagagtatt

SEQ ID NO: 344876 - DNA, 30 bp, Artificial Sequence
  Synthetic oligonucleotide
tgaggaaatcggagttcattatcgagtatt

SEQ ID NO: 344877 - DNA, 30 bp, Artificial Sequence
  Synthetic oligonucleotide
ggcgcttgataataaagtggtctgagtatt

SEQ ID NO: 344878 - DNA, 30 bp, Artificial Sequence
  Synthetic oligonucleotide
ggttagcatatagagagtcagttgagtatt

SEQ ID NO: 344879 - DNA, 30 bp, Artificial Sequence
  Synthetic oligonucleotide
agtgataaagggtcgttgcgacctagtatt

SEQ ID NO: 344880 - DNA, 30 bp, Artificial Sequence
  Synthetic oligonucleotide
acgggttcgttaagtccaacggttagtatt

SEQ ID NO: 344881 - DNA, 30 bp, Artificial Sequence
  Synthetic oligonucleotide
gagtgctggtaacctcagaatgaacgtatt

SEQ ID NO: 344882 - DNA, 30 bp, Artificial Sequence
  Synthetic oligonucleotide
gtcctgctagaccactcagtgatacgtatt

SEQ ID NO: 344883 - DNA, 30 bp, Artificial Sequence
  Synthetic oligonucleotide
ctcacacgggggtgacacactaaccgtatt

SEQ ID NO: 344884 - DNA, 30 bp, Artificial Sequence
  Synthetic oligonucleotide
ccctagcgttaatatccacaggtccgtatt

SEQ ID NO: 344885 - DNA, 30 bp, Artificial Sequence
  Synthetic oligonucleotide
gaagatccgcctcggcatgctttccgtatt

SEQ ID NO: 344886 - DNA, 30 bp, Artificial Sequence
  Synthetic oligonucleotide
ccacgtttttgctgggtaatcccgcgtatt

SEQ ID NO: 344887 - DNA, 30 bp, Artificial Sequence
  Synthetic oligonucleotide
aattattcgcgcataacccgagggcgtatt

SEQ ID NO: 344888 - DNA, 30 bp, Artificial Sequence
  Synthetic oligonucleotide
cgcacaatccggctgtgccctgggcgtatt

SEQ ID NO: 344889 - DNA, 30 bp, Artificial Sequence
  Synthetic oligonucleotide
gcagcatggacccgttttgagagaggtatt

SEQ ID NO: 344890 - DNA, 30 bp, Artificial Sequence
  Synthetic oligonucleotide
taatcgtactattgctgagcccacggtatt

SEQ ID NO: 344891 - DNA, 30 bp, Artificial Sequence
  Synthetic oligonucleotide
actatctacgggtatctcgcaatgggtatt

SEQ ID NO: 344892 - DNA, 30 bp, Artificial Sequence
  Synthetic oligonucleotide
gtatgaagctcattcagagagctgggtatt

SEQ ID NO: 344893 - DNA, 30 bp, Artificial Sequence
  Synthetic oligonucleotide
ctacgtcgttcaaagcatatgtatggtatt

SEQ ID NO: 344894 - DNA, 30 bp, Artificial Sequence
  Synthetic oligonucleotide
tacttggacaaagcggtggaggaatgtatt

SEQ ID NO: 344895 - DNA, 30 bp, Artificial Sequence
  Synthetic oligonucleotide
ccgtcatgtagggctcacttaggatgtatt

SEQ ID NO: 344896 - DNA, 30 bp, Artificial Sequence
  Synthetic oligonucleotide
tcactaataggaaacgccttctgatgtatt

SEQ ID NO: 344897 - DNA, 30 bp, Artificial Sequence
  Synthetic oligonucleotide
agcacccctattcgcgatggttgatgtatt

SEQ ID NO: 344898 - DNA, 30 bp, Artificial Sequence
  Synthetic oligonucleotide
cataggtaagtgtacacttagttctgtatt

SEQ ID NO: 344899 - DNA, 30 bp, Artificial Sequence
  Synthetic oligonucleotide
tgtaaaaccaatatggttgcaaagtgtatt

SEQ ID NO: 344900 - DNA, 30 bp, Artificial Sequence
  Synthetic oligonucleotide
ggctttattagggcgacataaacgtgtatt

SEQ ID NO: 344901 - DNA, 30 bp, Artificial Sequence
  Synthetic oligonucleotide
gggtacagcttggacccggaaccgtgtatt

SEQ ID NO: 344902 - DNA, 30 bp, Artificial Sequence
  Synthetic oligonucleotide
gcaaatagttattggaccctgctttgtatt

SEQ ID NO: 344903 - DNA, 30 bp, Artificial Sequence
  Synthetic oligonucleotide
accagtgatggtggcaagcagttttgtatt

SEQ ID NO: 344904 - DNA, 30 bp, Artificial Sequence
  Synthetic oligonucleotide
gggtactgggcgacttcttgggtaattatt

SEQ ID NO: 344905 - DNA, 30 bp, Artificial Sequence
  Synthetic oligonucleotide
tactcgacccgcgtgggttgggtcattatt

SEQ ID NO: 344906 - DNA, 30 bp, Artificial Sequence
  Synthetic oligonucleotide
atgagcaattcgcattcgcttgagattatt

SEQ ID NO: 344907 - DNA, 30 bp, Artificial Sequence
  Synthetic oligonucleotide
caactgacctttgcctagggggggcttatt

SEQ ID NO: 344908 - DNA, 30 bp, Artificial Sequence
  Synthetic oligonucleotide
atgtggaaggtcatgggggtaaatcttatt

SEQ ID NO: 344909 - DNA, 30 bp, Artificial Sequence
  Synthetic oligonucleotide
gaggtatcgagttctatggcacgtcttatt

SEQ ID NO: 344910 - DNA, 30 bp, Artificial Sequence
  Synthetic oligonucleotide
gccaccacaaatgcctcgaactgtcttatt

SEQ ID NO: 344911 - DNA, 30 bp, Artificial Sequence
  Synthetic oligonucleotide
cagtaacgccaggactactatcgcgttatt

SEQ ID NO: 344912 - DNA, 30 bp, Artificial Sequence
  Synthetic oligonucleotide
tctaagcgaagccctaaaatttgcgttatt

SEQ ID NO: 344913 - DNA, 30 bp, Artificial Sequence
  Synthetic oligonucleotide
tctcagtacctggatgcgggaccggttatt

SEQ ID NO: 344914 - DNA, 28 bp, Artificial Sequence
  Synthetic oligonucleotide
cgatgctatggatagagtattggttatt

SEQ ID NO: 344915 - DNA, 30 bp, Artificial Sequence
  Synthetic oligonucleotide
gacaaaagcaacatctctaatttggttatt

SEQ ID NO: 344916 - DNA, 30 bp, Artificial Sequence
  Synthetic oligonucleotide
gaagctcactcaggagataagcatgttatt

SEQ ID NO: 344917 - DNA, 30 bp, Artificial Sequence
  Synthetic oligonucleotide
taggggtcatcttacgatcaatcatttatt

SEQ ID NO: 344918 - DNA, 30 bp, Artificial Sequence
  Synthetic oligonucleotide
ttcgttaacaaaatggggggaagatttatt

SEQ ID NO: 344919 - DNA, 30 bp, Artificial Sequence
  Synthetic oligonucleotide
attcattgctgcctccaggtaagatttatt

SEQ ID NO: 344920 - DNA, 30 bp, Artificial Sequence
  Synthetic oligonucleotide
tttaggacgcatatggcgaatgcctttatt

SEQ ID NO: 344921 - DNA, 30 bp, Artificial Sequence
  Synthetic oligonucleotide
gatgctgctagcgtctaccgttcgtttatt

SEQ ID NO: 344922 - DNA, 30 bp, Artificial Sequence
  Synthetic oligonucleotide
aggtgcgcgtcttcagtcggctattttatt

SEQ ID NO: 344923 - DNA, 30 bp, Artificial Sequence
  Synthetic oligonucleotide
agtttcgtgttccaccttttggaaaaactt

SEQ ID NO: 344924 - DNA, 30 bp, Artificial Sequence
  Synthetic oligonucleotide
ccaagtgtgtgacatcaagcggcaaaactt

SEQ ID NO: 344925 - DNA, 30 bp, Artificial Sequence
  Synthetic oligonucleotide
ctaagattccgtacatatacggtaaaactt

SEQ ID NO: 344926 - DNA, 30 bp, Artificial Sequence
  Synthetic oligonucleotide
aaatgtagaagtttcatatgggtcaaactt

SEQ ID NO: 344927 - DNA, 30 bp, Artificial Sequence
  Synthetic oligonucleotide
tgtgactaggcgcgtcatgtacctaaactt

SEQ ID NO: 344928 - DNA, 30 bp, Artificial Sequence
  Synthetic oligonucleotide
aattctagatgcaggcactaggctaaactt

SEQ ID NO: 344929 - DNA, 30 bp, Artificial Sequence
  Synthetic oligonucleotide
ggattgccatgcctaatgttggctaaactt

SEQ ID NO: 344930 - DNA, 31 bp, Artificial Sequence
  Synthetic oligonucleotide
aaactcgtgcccttggtagccctttaaactt

SEQ ID NO: 344931 - DNA, 30 bp, Artificial Sequence
  Synthetic oligonucleotide
agctgatgtatgccagccggggcccaactt

SEQ ID NO: 344932 - DNA, 30 bp, Artificial Sequence
  Synthetic oligonucleotide
gcccatccttgagcaacagcccggcaactt

SEQ ID NO: 344933 - DNA, 30 bp, Artificial Sequence
  Synthetic oligonucleotide
gaacatgtaatagaggaattggtagaactt

SEQ ID NO: 344934 - DNA, 30 bp, Artificial Sequence
  Synthetic oligonucleotide
ggggttgttgtagttcttagtcaggaactt

SEQ ID NO: 344935 - DNA, 30 bp, Artificial Sequence
  Synthetic oligonucleotide
taactcattcataagggtcatggggaactt

SEQ ID NO: 344936 - DNA, 30 bp, Artificial Sequence
  Synthetic oligonucleotide
ggtagtatatacgaaccttttgatgaactt

SEQ ID NO: 344937 - DNA, 30 bp, Artificial Sequence
  Synthetic oligonucleotide
gagcaggaactactacggccaagtgaactt

SEQ ID NO: 344938 - DNA, 30 bp, Artificial Sequence
  Synthetic oligonucleotide
tgagccctatgataggcagatgaataactt

SEQ ID NO: 344939 - DNA, 30 bp, Artificial Sequence
  Synthetic oligonucleotide
tctccaagacacggtaacccggtataactt

SEQ ID NO: 344940 - DNA, 30 bp, Artificial Sequence
  Synthetic oligonucleotide
caataacaagtggatatggcgttataactt

SEQ ID NO: 344941 - DNA, 30 bp, Artificial Sequence
  Synthetic oligonucleotide
agccgaaaggtcatgtgtaggccctaactt

SEQ ID NO: 344942 - DNA, 30 bp, Artificial Sequence
  Synthetic oligonucleotide
tgatgagagtgcggactcgacgcgtaactt

SEQ ID NO: 344943 - DNA, 30 bp, Artificial Sequence
  Synthetic oligonucleotide
tctggaaagagtagtactacatgaacactt

SEQ ID NO: 344944 - DNA, 30 bp, Artificial Sequence
  Synthetic oligonucleotide
tggaatgtttatggaaggcttatcacactt

SEQ ID NO: 344945 - DNA, 30 bp, Artificial Sequence
  Synthetic oligonucleotide
acttcttcgaactgggaagctgcgacactt

SEQ ID NO: 344946 - DNA, 30 bp, Artificial Sequence
  Synthetic oligonucleotide
gtatgtactaagcagggcggtgcaccactt

SEQ ID NO: 344947 - DNA, 30 bp, Artificial Sequence
  Synthetic oligonucleotide
attaggaggccaaatacaattgtaccactt

SEQ ID NO: 344948 - DNA, 30 bp, Artificial Sequence
  Synthetic oligonucleotide
ttagcatagggcccgcactcgaccccactt

SEQ ID NO: 344949 - DNA, 29 bp, Artificial Sequence
  Synthetic oligonucleotide
cgctctcatacgcggattgtatgccactt

SEQ ID NO: 344950 - DNA, 30 bp, Artificial Sequence
  Synthetic oligonucleotide
cagccggacaagcgcgacgtgttgccactt

SEQ ID NO: 344951 - DNA, 30 bp, Artificial Sequence
  Synthetic oligonucleotide
gaatacataagcggatctgggatagcactt

SEQ ID NO: 344952 - DNA, 30 bp, Artificial Sequence
  Synthetic oligonucleotide
gcgcctgcgaccgaccaggtattagcactt

SEQ ID NO: 344953 - DNA, 29 bp, Artificial Sequence
  Synthetic oligonucleotide
cttggctgcgtcctgtgagatacgcactt

SEQ ID NO: 344954 - DNA, 30 bp, Artificial Sequence
  Synthetic oligonucleotide
ggacttacgtttgggagatttcccgcactt

SEQ ID NO: 344955 - DNA, 30 bp, Artificial Sequence
  Synthetic oligonucleotide
ggcatttatgtgttcgcatagcgcgcactt

SEQ ID NO: 344956 - DNA, 30 bp, Artificial Sequence
  Synthetic oligonucleotide
taaaggcgtcgtgttgggatataggcactt

SEQ ID NO: 344957 - DNA, 30 bp, Artificial Sequence
  Synthetic oligonucleotide
tcctatgtccacaaatccagattggcactt

SEQ ID NO: 344958 - DNA, 30 bp, Artificial Sequence
  Synthetic oligonucleotide
cctggagattggacgtatcctctctcactt

SEQ ID NO: 344959 - DNA, 30 bp, Artificial Sequence
  Synthetic oligonucleotide
aaatcgtggccctccgattggtagtcactt

SEQ ID NO: 344960 - DNA, 30 bp, Artificial Sequence
  Synthetic oligonucleotide
tatcgtactccccgctaaccgtcgtcactt

SEQ ID NO: 344961 - DNA, 30 bp, Artificial Sequence
  Synthetic oligonucleotide
atacagtttgggacatatttctattcactt

SEQ ID NO: 344962 - DNA, 28 bp, Artificial Sequence
  Synthetic oligonucleotide
aggtacgaaagtcacccactccagactt

SEQ ID NO: 344963 - DNA, 30 bp, Artificial Sequence
  Synthetic oligonucleotide
aaccgcggaaccggcgtatagcagagactt

SEQ ID NO: 344964 - DNA, 30 bp, Artificial Sequence
  Synthetic oligonucleotide
ggaagcgtttgtaaaggcccataacgactt

SEQ ID NO: 344965 - DNA, 30 bp, Artificial Sequence
  Synthetic oligonucleotide
ataaaggccagcattcatgaaggacgactt

SEQ ID NO: 344966 - DNA, 30 bp, Artificial Sequence
  Synthetic oligonucleotide
ttagcagctaagtaaacaacgctacgactt

SEQ ID NO: 344967 - DNA, 30 bp, Artificial Sequence
  Synthetic oligonucleotide
gtgaaacagtatagatctatggcccgactt

SEQ ID NO: 344968 - DNA, 30 bp, Artificial Sequence
  Synthetic oligonucleotide
ttcgtgcaaccgcctgattgccgccgactt

SEQ ID NO: 344969 - DNA, 30 bp, Artificial Sequence
  Synthetic oligonucleotide
tggcccaatcttatatcaatattgcgactt

SEQ ID NO: 344970 - DNA, 30 bp, Artificial Sequence
  Synthetic oligonucleotide
cgagcacaggagagatctccaagaggactt

SEQ ID NO: 344971 - DNA, 30 bp, Artificial Sequence
  Synthetic oligonucleotide
taggagaatttcaggcatagacacggactt

SEQ ID NO: 344972 - DNA, 30 bp, Artificial Sequence
  Synthetic oligonucleotide
gaaagaggcacacacgggtatagcggactt

SEQ ID NO: 344973 - DNA, 30 bp, Artificial Sequence
  Synthetic oligonucleotide
cacccacaacaacttaaatgcggcggactt

SEQ ID NO: 344974 - DNA, 30 bp, Artificial Sequence
  Synthetic oligonucleotide
tttacaggcctgagtgcacttggcggactt

SEQ ID NO: 344975 - DNA, 30 bp, Artificial Sequence
  Synthetic oligonucleotide
agtggtaccttgtcacgtaggaagggactt

SEQ ID NO: 344976 - DNA, 30 bp, Artificial Sequence
  Synthetic oligonucleotide
tccccaggataatatttttgttagggactt

SEQ ID NO: 344977 - DNA, 30 bp, Artificial Sequence
  Synthetic oligonucleotide
gttcatcgggattagtttaactcgggactt

SEQ ID NO: 344978 - DNA, 30 bp, Artificial Sequence
  Synthetic oligonucleotide
ggaccacaatctaacacaaccgatggactt

SEQ ID NO: 344979 - DNA, 30 bp, Artificial Sequence
  Synthetic oligonucleotide
tttagtacctaggtcgcttcatatggactt

SEQ ID NO: 344980 - DNA, 30 bp, Artificial Sequence
  Synthetic oligonucleotide
attagtaaaatgagatatgcgtctggactt

SEQ ID NO: 344981 - DNA, 30 bp, Artificial Sequence
  Synthetic oligonucleotide
aggaataaatcttcgtgtgcccttggactt

SEQ ID NO: 344982 - DNA, 30 bp, Artificial Sequence
  Synthetic oligonucleotide
agacaccagcttgtactactttcatgactt

SEQ ID NO: 344983 - DNA, 30 bp, Artificial Sequence
  Synthetic oligonucleotide
ctccttagcgcctactttcaattctgactt

SEQ ID NO: 344984 - DNA, 30 bp, Artificial Sequence
  Synthetic oligonucleotide
ctaaggactatctctcagattgcgtgactt

SEQ ID NO: 344985 - DNA, 30 bp, Artificial Sequence
  Synthetic oligonucleotide
agatacggcttaccaggacgcacttgactt

SEQ ID NO: 344986 - DNA, 30 bp, Artificial Sequence
  Synthetic oligonucleotide
ctggtgcctatgtaagacgacgcttgactt

SEQ ID NO: 344987 - DNA, 30 bp, Artificial Sequence
  Synthetic oligonucleotide
ttgtcggtcttgggaacgcaatcttgactt

SEQ ID NO: 344988 - DNA, 30 bp, Artificial Sequence
  Synthetic oligonucleotide
aatgctgcgatgtgctcatacctttgactt

SEQ ID NO: 344989 - DNA, 30 bp, Artificial Sequence
  Synthetic oligonucleotide
gagctgccaaagcatcatgaactaatactt

SEQ ID NO: 344990 - DNA, 30 bp, Artificial Sequence
  Synthetic oligonucleotide
ctatttctcgggcaggcttctcgcatactt

SEQ ID NO: 344991 - DNA, 30 bp, Artificial Sequence
  Synthetic oligonucleotide
ggatacttccaccggctctcctgcatactt

SEQ ID NO: 344992 - DNA, 30 bp, Artificial Sequence
  Synthetic oligonucleotide
catgcacgtagcacaccgaaatggatactt

SEQ ID NO: 344993 - DNA, 30 bp, Artificial Sequence
  Synthetic oligonucleotide
acgcgattatacaatttctagttgatactt

SEQ ID NO: 344994 - DNA, 30 bp, Artificial Sequence
  Synthetic oligonucleotide
agggtcgcacacaggatattttatatactt

SEQ ID NO: 344995 - DNA, 30 bp, Artificial Sequence
  Synthetic oligonucleotide
aaacggaattgccctacgcacgcactactt

SEQ ID NO: 344996 - DNA, 30 bp, Artificial Sequence
  Synthetic oligonucleotide
ggccataattatactcatggctcactactt

SEQ ID NO: 344997 - DNA, 30 bp, Artificial Sequence
  Synthetic oligonucleotide
ttatttgtgatggctattggtgtactactt

SEQ ID NO: 344998 - DNA, 30 bp, Artificial Sequence
  Synthetic oligonucleotide
agtgctcctggcattgttgtagatctactt

SEQ ID NO: 344999 - DNA, 30 bp, Artificial Sequence
  Synthetic oligonucleotide
ccagtggaatacaatagcaaaactctactt

SEQ ID NO: 345000 - DNA, 30 bp, Artificial Sequence
  Synthetic oligonucleotide
gtgagatggccctatagcgaacctctactt

SEQ ID NO: 345001 - DNA, 30 bp, Artificial Sequence
  Synthetic oligonucleotide
ggatgaaaagtcatgtaaacgaaagtactt

SEQ ID NO: 345002 - DNA, 30 bp, Artificial Sequence
  Synthetic oligonucleotide
cgatacttggtagccggacgctaagtactt

SEQ ID NO: 345003 - DNA, 30 bp, Artificial Sequence
  Synthetic oligonucleotide
tcgaagactactcaagcccgcacagtactt

SEQ ID NO: 345004 - DNA, 30 bp, Artificial Sequence
  Synthetic oligonucleotide
cggggaactgtgaccccgatgcaggtactt

SEQ ID NO: 345005 - DNA, 30 bp, Artificial Sequence
  Synthetic oligonucleotide
cacgctcagcggcgctgattaagtgtactt

SEQ ID NO: 345006 - DNA, 30 bp, Artificial Sequence
  Synthetic oligonucleotide
caaaaagctgttggatccggaattgtactt

SEQ ID NO: 345007 - DNA, 30 bp, Artificial Sequence
  Synthetic oligonucleotide
tgtttattatgaaaataccgggaattactt

SEQ ID NO: 345008 - DNA, 30 bp, Artificial Sequence
  Synthetic oligonucleotide
cggatataatgagatgttttaagattactt

SEQ ID NO: 345009 - DNA, 30 bp, Artificial Sequence
  Synthetic oligonucleotide
cctaataatactgggccgttgcacttactt

SEQ ID NO: 345010 - DNA, 30 bp, Artificial Sequence
  Synthetic oligonucleotide
tatcgtctccgattggcacagacgttactt

SEQ ID NO: 345011 - DNA, 30 bp, Artificial Sequence
  Synthetic oligonucleotide
tattacacgaagtcccctcattcgttactt

SEQ ID NO: 345012 - DNA, 30 bp, Artificial Sequence
  Synthetic oligonucleotide
cgaattagacccacgcttcgattgttactt

SEQ ID NO: 345013 - DNA, 30 bp, Artificial Sequence
  Synthetic oligonucleotide
agaaggccaatcacaagacgttctttactt

SEQ ID NO: 345014 - DNA, 30 bp, Artificial Sequence
  Synthetic oligonucleotide
acaagggctgattacctattagaaaacctt

SEQ ID NO: 345015 - DNA, 30 bp, Artificial Sequence
  Synthetic oligonucleotide
gcggatgttgaatgaatcgttataaacctt

SEQ ID NO: 345016 - DNA, 30 bp, Artificial Sequence
  Synthetic oligonucleotide
gtgttggcctcggcagcacttcacaacctt

SEQ ID NO: 345017 - DNA, 30 bp, Artificial Sequence
  Synthetic oligonucleotide
gtgcctgatcctaatccatgaaccaacctt

SEQ ID NO: 345018 - DNA, 30 bp, Artificial Sequence
  Synthetic oligonucleotide
tactccgatcaattctacgagagcaacctt

SEQ ID NO: 345019 - DNA, 30 bp, Artificial Sequence
  Synthetic oligonucleotide
tcctaacagataaaggcactactcaacctt

SEQ ID NO: 345020 - DNA, 30 bp, Artificial Sequence
  Synthetic oligonucleotide
gggggtattttacgcgcggcacttaacctt

SEQ ID NO: 345021 - DNA, 30 bp, Artificial Sequence
  Synthetic oligonucleotide
tcccggggccacggaattcgagttaacctt

SEQ ID NO: 345022 - DNA, 30 bp, Artificial Sequence
  Synthetic oligonucleotide
agtgctttggtgcgtaataaatttaacctt

SEQ ID NO: 345023 - DNA, 30 bp, Artificial Sequence
  Synthetic oligonucleotide
gcctctccactgagcattgtcggacacctt

SEQ ID NO: 345024 - DNA, 30 bp, Artificial Sequence
  Synthetic oligonucleotide
tcctatactggaatgttgactaagcacctt

SEQ ID NO: 345025 - DNA, 30 bp, Artificial Sequence
  Synthetic oligonucleotide
attcgtaatctcggtcaggtcaatcacctt

SEQ ID NO: 345026 - DNA, 30 bp, Artificial Sequence
  Synthetic oligonucleotide
cacgacaacatatggttataaaaagacctt

SEQ ID NO: 345027 - DNA, 30 bp, Artificial Sequence
  Synthetic oligonucleotide
tccagagacagcagccggccccgggacctt

SEQ ID NO: 345028 - DNA, 30 bp, Artificial Sequence
  Synthetic oligonucleotide
tgagtatagtaaaccctatggtgggacctt

SEQ ID NO: 345029 - DNA, 30 bp, Artificial Sequence
  Synthetic oligonucleotide
ggcacactgaagcaggtacctatggacctt

SEQ ID NO: 345030 - DNA, 30 bp, Artificial Sequence
  Synthetic oligonucleotide
ctgtgaacccttacgcttccacatgacctt

SEQ ID NO: 345031 - DNA, 30 bp, Artificial Sequence
  Synthetic oligonucleotide
gttcaggtgtggattggttgttgtgacctt

SEQ ID NO: 345032 - DNA, 30 bp, Artificial Sequence
  Synthetic oligonucleotide
tcaactctccagatggttaactcgtacctt

SEQ ID NO: 345033 - DNA, 30 bp, Artificial Sequence
  Synthetic oligonucleotide
ttacccacgttatacgatttttgaaccctt

SEQ ID NO: 345034 - DNA, 30 bp, Artificial Sequence
  Synthetic oligonucleotide
ttaacgggaacgcgctgcacactaaccctt

SEQ ID NO: 345035 - DNA, 30 bp, Artificial Sequence
  Synthetic oligonucleotide
acctatatagctcaagaatttgtaaccctt

SEQ ID NO: 345036 - DNA, 30 bp, Artificial Sequence
  Synthetic oligonucleotide
cttcgtaatccatgacttagtttaaccctt

SEQ ID NO: 345037 - DNA, 30 bp, Artificial Sequence
  Synthetic oligonucleotide
agcacgcgcaaaactgggcgttcgaccctt

SEQ ID NO: 345038 - DNA, 30 bp, Artificial Sequence
  Synthetic oligonucleotide
taaacaaaggacgaaatggagtataccctt

SEQ ID NO: 345039 - DNA, 30 bp, Artificial Sequence
  Synthetic oligonucleotide
cccgaattacattgacaggtggaacccctt

SEQ ID NO: 345040 - DNA, 30 bp, Artificial Sequence
  Synthetic oligonucleotide
aggtaggagtgggcggtgcaagtagccctt

SEQ ID NO: 345041 - DNA, 30 bp, Artificial Sequence
  Synthetic oligonucleotide
tgcgtgctggttattgagactagcgccctt

SEQ ID NO: 345042 - DNA, 30 bp, Artificial Sequence
  Synthetic oligonucleotide
taacgaaggatgcgcagttactctgccctt

SEQ ID NO: 345043 - DNA, 30 bp, Artificial Sequence
  Synthetic oligonucleotide
gactgcgtcggcttataggagtcaagcctt

SEQ ID NO: 345044 - DNA, 30 bp, Artificial Sequence
  Synthetic oligonucleotide
ttctggataaggtgggaggggggacgcctt

SEQ ID NO: 345045 - DNA, 30 bp, Artificial Sequence
  Synthetic oligonucleotide
gatcgttgtaggctcgcctgcggtcgcctt

SEQ ID NO: 345046 - DNA, 30 bp, Artificial Sequence
  Synthetic oligonucleotide
agcttcgatcaggtatcataagaaggcctt

SEQ ID NO: 345047 - DNA, 30 bp, Artificial Sequence
  Synthetic oligonucleotide
ttgtcgttgtgggttcatggaacaggcctt

SEQ ID NO: 345048 - DNA, 30 bp, Artificial Sequence
  Synthetic oligonucleotide
cggcagcggacataatcgagttcgggcctt

SEQ ID NO: 345049 - DNA, 30 bp, Artificial Sequence
  Synthetic oligonucleotide
cagccaactacgaatgcggtcatgtgcctt

SEQ ID NO: 345050 - DNA, 30 bp, Artificial Sequence
  Synthetic oligonucleotide
ttacaaaatctgataacaatatacatcctt

SEQ ID NO: 345051 - DNA, 30 bp, Artificial Sequence
  Synthetic oligonucleotide
acatccatgtttcatagtagtgagatcctt

SEQ ID NO: 345052 - DNA, 30 bp, Artificial Sequence
  Synthetic oligonucleotide
gcgacattatagttggcattgtagatcctt

SEQ ID NO: 345053 - DNA, 30 bp, Artificial Sequence
  Synthetic oligonucleotide
cccgcctcaactctataaattccgatcctt

SEQ ID NO: 345054 - DNA, 30 bp, Artificial Sequence
  Synthetic oligonucleotide
taacaataacggggccgtctaaccctcctt

SEQ ID NO: 345055 - DNA, 30 bp, Artificial Sequence
  Synthetic oligonucleotide
atatcgttgcatgtctcagcgtgcctcctt

SEQ ID NO: 345056 - DNA, 30 bp, Artificial Sequence
  Synthetic oligonucleotide
caggcgcagtacgtgcgagacgagctcctt

SEQ ID NO: 345057 - DNA, 30 bp, Artificial Sequence
  Synthetic oligonucleotide
tgcctcacacgcataataaatcttctcctt

SEQ ID NO: 345058 - DNA, 30 bp, Artificial Sequence
  Synthetic oligonucleotide
gcgctaacagtgttagtctaaggagtcctt

SEQ ID NO: 345059 - DNA, 30 bp, Artificial Sequence
  Synthetic oligonucleotide
tagagctgaatcttcccgagcaaattcctt

SEQ ID NO: 345060 - DNA, 30 bp, Artificial Sequence
  Synthetic oligonucleotide
agaccatcagcgcacttgtagtccttcctt

SEQ ID NO: 345061 - DNA, 28 bp, Artificial Sequence
  Synthetic oligonucleotide
ttaggtaccggtagtaactaggttcctt

SEQ ID NO: 345062 - DNA, 30 bp, Artificial Sequence
  Synthetic oligonucleotide
ggaaaccaacaaaaatcacgggggttcctt

SEQ ID NO: 345063 - DNA, 30 bp, Artificial Sequence
  Synthetic oligonucleotide
ctaactccccaaagtaaggtaaatttcctt

SEQ ID NO: 345064 - DNA, 30 bp, Artificial Sequence
  Synthetic oligonucleotide
attaacgtactgtattttaggggtttcctt

SEQ ID NO: 345065 - DNA, 30 bp, Artificial Sequence
  Synthetic oligonucleotide
gtggtaacttcagaaccggacaaaaagctt

SEQ ID NO: 345066 - DNA, 30 bp, Artificial Sequence
  Synthetic oligonucleotide
agatgaccaccagacttatgacaaaagctt

SEQ ID NO: 345067 - DNA, 30 bp, Artificial Sequence
  Synthetic oligonucleotide
tagcgtactgcaaaacgcaggccaaagctt

SEQ ID NO: 345068 - DNA, 30 bp, Artificial Sequence
  Synthetic oligonucleotide
ctaatttcggcacatgcttggtcaaagctt

SEQ ID NO: 345069 - DNA, 31 bp, Artificial Sequence
  Synthetic oligonucleotide
ctttgtaggatagtaaaaaggtagaaagctt

SEQ ID NO: 345070 - DNA, 30 bp, Artificial Sequence
  Synthetic oligonucleotide
cgcacctaaagtgtggttaaaataaagctt

SEQ ID NO: 345071 - DNA, 30 bp, Artificial Sequence
  Synthetic oligonucleotide
agagtaaagatcgagcaagccttaaagctt

SEQ ID NO: 345072 - DNA, 30 bp, Artificial Sequence
  Synthetic oligonucleotide
caaataacccagcgatacacatgcaagctt

SEQ ID NO: 345073 - DNA, 30 bp, Artificial Sequence
  Synthetic oligonucleotide
ttagatcgcccagctgaactgaataagctt

SEQ ID NO: 345074 - DNA, 30 bp, Artificial Sequence
  Synthetic oligonucleotide
gtgaactcgtagcctaacgggcaacagctt

SEQ ID NO: 345075 - DNA, 30 bp, Artificial Sequence
  Synthetic oligonucleotide
atgttggccagcacttagctcagacagctt

SEQ ID NO: 345076 - DNA, 30 bp, Artificial Sequence
  Synthetic oligonucleotide
tgcctaaatgagggcctattcttacagctt

SEQ ID NO: 345077 - DNA, 30 bp, Artificial Sequence
  Synthetic oligonucleotide
ttacttgctatccctagtaacaggcagctt

SEQ ID NO: 345078 - DNA, 30 bp, Artificial Sequence
  Synthetic oligonucleotide
tggaccgtctatccaagaaacttgcagctt

SEQ ID NO: 345079 - DNA, 30 bp, Artificial Sequence
  Synthetic oligonucleotide
gccctcgagtagccgacgaaagctcagctt

SEQ ID NO: 345080 - DNA, 30 bp, Artificial Sequence
  Synthetic oligonucleotide
gccaatcatgagggagaaacggcagagctt

SEQ ID NO: 345081 - DNA, 30 bp, Artificial Sequence
  Synthetic oligonucleotide
accaacctcgtgaaagatagcgtagagctt

SEQ ID NO: 345082 - DNA, 30 bp, Artificial Sequence
  Synthetic oligonucleotide
gctcggtggttctatatagatatcgagctt

SEQ ID NO: 345083 - DNA, 30 bp, Artificial Sequence
  Synthetic oligonucleotide
acggagagttatagtttccgctaggagctt

SEQ ID NO: 345084 - DNA, 30 bp, Artificial Sequence
  Synthetic oligonucleotide
tggcaaaagtgctcaaatgagttggagctt

SEQ ID NO: 345085 - DNA, 30 bp, Artificial Sequence
  Synthetic oligonucleotide
gcagtcgtcttagggttttgtttggagctt

SEQ ID NO: 345086 - DNA, 30 bp, Artificial Sequence
  Synthetic oligonucleotide
gttagattcatgctacgtgtaggtgagctt

SEQ ID NO: 345087 - DNA, 30 bp, Artificial Sequence
  Synthetic oligonucleotide
ctgattggatcataactaagcggtgagctt

SEQ ID NO: 345088 - DNA, 30 bp, Artificial Sequence
  Synthetic oligonucleotide
agggatgcacgactacgcgctacatagctt

SEQ ID NO: 345089 - DNA, 30 bp, Artificial Sequence
  Synthetic oligonucleotide
tcaatcttgggttaggtattctactagctt

SEQ ID NO: 345090 - DNA, 30 bp, Artificial Sequence
  Synthetic oligonucleotide
tccgcgaaaggaacctaaattacctagctt

SEQ ID NO: 345091 - DNA, 30 bp, Artificial Sequence
  Synthetic oligonucleotide
cgtagagcccgatgcggtaaggggtagctt

SEQ ID NO: 345092 - DNA, 30 bp, Artificial Sequence
  Synthetic oligonucleotide
agatggggccacgtttgttactggtagctt

SEQ ID NO: 345093 - DNA, 30 bp, Artificial Sequence
  Synthetic oligonucleotide
tctataatttaagtctggagaaattagctt

SEQ ID NO: 345094 - DNA, 30 bp, Artificial Sequence
  Synthetic oligonucleotide
tgtaattcttcatgtaaagttaattagctt

SEQ ID NO: 345095 - DNA, 30 bp, Artificial Sequence
  Synthetic oligonucleotide
ttaatgatgggagtgatgttagattagctt

SEQ ID NO: 345096 - DNA, 30 bp, Artificial Sequence
  Synthetic oligonucleotide
tctcctgtcgattatctcgcccgttagctt

SEQ ID NO: 345097 - DNA, 30 bp, Artificial Sequence
  Synthetic oligonucleotide
ggagatgactcgagctccggccgaacgctt

SEQ ID NO: 345098 - DNA, 30 bp, Artificial Sequence
  Synthetic oligonucleotide
gcaagtctttaaatttagtagcgaacgctt

SEQ ID NO: 345099 - DNA, 30 bp, Artificial Sequence
  Synthetic oligonucleotide
taaagtcttccccgttatgcttgaacgctt

SEQ ID NO: 345100 - DNA, 30 bp, Artificial Sequence
  Synthetic oligonucleotide
tctggactggccattcacacaagcacgctt

SEQ ID NO: 345101 - DNA, 30 bp, Artificial Sequence
  Synthetic oligonucleotide
acctaattgtttccaccctttggcacgctt

SEQ ID NO: 345102 - DNA, 30 bp, Artificial Sequence
  Synthetic oligonucleotide
gagggaaccatacggcaacaagtcacgctt

SEQ ID NO: 345103 - DNA, 30 bp, Artificial Sequence
  Synthetic oligonucleotide
ctgtgtctaagcttgatattacctacgctt

SEQ ID NO: 345104 - DNA, 30 bp, Artificial Sequence
  Synthetic oligonucleotide
aggtatgatgcgtttttatatagtacgctt

SEQ ID NO: 345105 - DNA, 30 bp, Artificial Sequence
  Synthetic oligonucleotide
agacatacggagtgctacggcggtacgctt

SEQ ID NO: 345106 - DNA, 30 bp, Artificial Sequence
  Synthetic oligonucleotide
tggaatataggaccttgagctgttacgctt

SEQ ID NO: 345107 - DNA, 30 bp, Artificial Sequence
  Synthetic oligonucleotide
agcgcgttttgttttgcggatacgccgctt

SEQ ID NO: 345108 - DNA, 30 bp, Artificial Sequence
  Synthetic oligonucleotide
ggagcttcaagtttctaggagtaagcgctt

SEQ ID NO: 345109 - DNA, 30 bp, Artificial Sequence
  Synthetic oligonucleotide
acgttattggacacaagtcccacagcgctt

SEQ ID NO: 345110 - DNA, 30 bp, Artificial Sequence
  Synthetic oligonucleotide
ccgtcgatgattgccacctgagcagcgctt

SEQ ID NO: 345111 - DNA, 30 bp, Artificial Sequence
  Synthetic oligonucleotide
gcatgagataattggttcggcgtagcgctt

SEQ ID NO: 345112 - DNA, 30 bp, Artificial Sequence
  Synthetic oligonucleotide
cgttccatgctatgtagtcggtacgcgctt

SEQ ID NO: 345113 - DNA, 30 bp, Artificial Sequence
  Synthetic oligonucleotide
gcaacgatggcccataatccagccgcgctt

SEQ ID NO: 345114 - DNA, 30 bp, Artificial Sequence
  Synthetic oligonucleotide
ggtgtcaacagattatactcggcggcgctt

SEQ ID NO: 345115 - DNA, 30 bp, Artificial Sequence
  Synthetic oligonucleotide
cggtgtcccgttgggacttaagatgcgctt

SEQ ID NO: 345116 - DNA, 30 bp, Artificial Sequence
  Synthetic oligonucleotide
taaatagcgaagagctatatcactgcgctt

SEQ ID NO: 345117 - DNA, 30 bp, Artificial Sequence
  Synthetic oligonucleotide
tgggtcaacattgacaacaaagtctcgctt

SEQ ID NO: 345118 - DNA, 30 bp, Artificial Sequence
  Synthetic oligonucleotide
ggaactaagcccgactcataatcgtcgctt

SEQ ID NO: 345119 - DNA, 30 bp, Artificial Sequence
  Synthetic oligonucleotide
gtggtatctgagattgaaaaccggtcgctt

SEQ ID NO: 345120 - DNA, 30 bp, Artificial Sequence
  Synthetic oligonucleotide
acctccttcccatctacagggtacaggctt

SEQ ID NO: 345121 - DNA, 30 bp, Artificial Sequence
  Synthetic oligonucleotide
gatggccgggttggccattccgttaggctt

SEQ ID NO: 345122 - DNA, 30 bp, Artificial Sequence
  Synthetic oligonucleotide
ttgatcagcccgggtgacctaacacggctt

SEQ ID NO: 345123 - DNA, 30 bp, Artificial Sequence
  Synthetic oligonucleotide
tcccggtctaattttcaactcacacggctt

SEQ ID NO: 345124 - DNA, 30 bp, Artificial Sequence
  Synthetic oligonucleotide
atttgataaggcgggaagatatcacggctt

SEQ ID NO: 345125 - DNA, 30 bp, Artificial Sequence
  Synthetic oligonucleotide
ttataatatcggccaacgggggtccggctt

SEQ ID NO: 345126 - DNA, 30 bp, Artificial Sequence
  Synthetic oligonucleotide
catctcgtagggatctgacggggtcggctt

SEQ ID NO: 345127 - DNA, 30 bp, Artificial Sequence
  Synthetic oligonucleotide
caagagcatattgagtccccggttcggctt

SEQ ID NO: 345128 - DNA, 30 bp, Artificial Sequence
  Synthetic oligonucleotide
cgaatcggcagacgggatacttttcggctt

SEQ ID NO: 345129 - DNA, 30 bp, Artificial Sequence
  Synthetic oligonucleotide
ttgctaaagccgcccgatggataagggctt

SEQ ID NO: 345130 - DNA, 30 bp, Artificial Sequence
  Synthetic oligonucleotide
gctgaagcaggaaacccttcaacagggctt

SEQ ID NO: 345131 - DNA, 30 bp, Artificial Sequence
  Synthetic oligonucleotide
ccagagcattacagtgacctgtgagggctt

SEQ ID NO: 345132 - DNA, 30 bp, Artificial Sequence
  Synthetic oligonucleotide
gactgcagaaatggctggccgaacgggctt

SEQ ID NO: 345133 - DNA, 30 bp, Artificial Sequence
  Synthetic oligonucleotide
ggacgtggtcaccgtggtaggggcgggctt

SEQ ID NO: 345134 - DNA, 30 bp, Artificial Sequence
  Synthetic oligonucleotide
tcgactcaaggagattcctacctcgggctt

SEQ ID NO: 345135 - DNA, 30 bp, Artificial Sequence
  Synthetic oligonucleotide
gccggggcccggaaggcgtgttaggggctt

SEQ ID NO: 345136 - DNA, 30 bp, Artificial Sequence
  Synthetic oligonucleotide
tcgaggatatgggagaatcagacggggctt

SEQ ID NO: 345137 - DNA, 30 bp, Artificial Sequence
  Synthetic oligonucleotide
aaagtagggacgccgctgcggacggggctt

SEQ ID NO: 345138 - DNA, 30 bp, Artificial Sequence
  Synthetic oligonucleotide
ggtggcacttccagacttgaactggggctt

SEQ ID NO: 345139 - DNA, 30 bp, Artificial Sequence
  Synthetic oligonucleotide
ctgagcctgccgtttgcatgtgatgggctt

SEQ ID NO: 345140 - DNA, 30 bp, Artificial Sequence
  Synthetic oligonucleotide
gaacgttgaggctatttgccatgtgggctt

SEQ ID NO: 345141 - DNA, 30 bp, Artificial Sequence
  Synthetic oligonucleotide
gctgatagttcaagaattgaacaatggctt

SEQ ID NO: 345142 - DNA, 30 bp, Artificial Sequence
  Synthetic oligonucleotide
caggaagggctagatcagacatcatggctt

SEQ ID NO: 345143 - DNA, 30 bp, Artificial Sequence
  Synthetic oligonucleotide
cagcatataccattagaggtagtctggctt

SEQ ID NO: 345144 - DNA, 30 bp, Artificial Sequence
  Synthetic oligonucleotide
ctatgcataatgctgtgatttgggtggctt

SEQ ID NO: 345145 - DNA, 29 bp, Artificial Sequence
  Synthetic oligonucleotide
gagataatgccagaggtaatccttggctt

SEQ ID NO: 345146 - DNA, 30 bp, Artificial Sequence
  Synthetic oligonucleotide
gtcgtgggcacagtctggctaatcatgctt

SEQ ID NO: 345147 - DNA, 30 bp, Artificial Sequence
  Synthetic oligonucleotide
gtctcctaggcgtccggaagatcgatgctt

SEQ ID NO: 345148 - DNA, 30 bp, Artificial Sequence
  Synthetic oligonucleotide
ccgggtgggtagaccattgaactgatgctt

SEQ ID NO: 345149 - DNA, 30 bp, Artificial Sequence
  Synthetic oligonucleotide
taagggtacagtaataaacggctgatgctt

SEQ ID NO: 345150 - DNA, 30 bp, Artificial Sequence
  Synthetic oligonucleotide
gcatgcaagaacgaactattaaatatgctt

SEQ ID NO: 345151 - DNA, 30 bp, Artificial Sequence
  Synthetic oligonucleotide
tggagttcatacacttgcagaactatgctt

SEQ ID NO: 345152 - DNA, 30 bp, Artificial Sequence
  Synthetic oligonucleotide
agattggcctgattgttctgtgttatgctt

SEQ ID NO: 345153 - DNA, 30 bp, Artificial Sequence
  Synthetic oligonucleotide
caccgatagcatccagggctgttcctgctt

SEQ ID NO: 345154 - DNA, 30 bp, Artificial Sequence
  Synthetic oligonucleotide
gactttccaagggccgtcggcaagctgctt

SEQ ID NO: 345155 - DNA, 30 bp, Artificial Sequence
  Synthetic oligonucleotide
gtagaggagtgggaggcagggccgctgctt

SEQ ID NO: 345156 - DNA, 30 bp, Artificial Sequence
  Synthetic oligonucleotide
tacccgccaactgatactcgatatctgctt

SEQ ID NO: 345157 - DNA, 30 bp, Artificial Sequence
  Synthetic oligonucleotide
ctacgcatgctcccgataggatatctgctt

SEQ ID NO: 345158 - DNA, 30 bp, Artificial Sequence
  Synthetic oligonucleotide
ccctggtcgacactagaatatctagtgctt

SEQ ID NO: 345159 - DNA, 30 bp, Artificial Sequence
  Synthetic oligonucleotide
ggttgagccacaataaactagcgcgtgctt

SEQ ID NO: 345160 - DNA, 30 bp, Artificial Sequence
  Synthetic oligonucleotide
taaaagaatgccttatgagcctgcgtgctt

SEQ ID NO: 345161 - DNA, 30 bp, Artificial Sequence
  Synthetic oligonucleotide
gaccgttgaggctctctgacggtggtgctt

SEQ ID NO: 345162 - DNA, 30 bp, Artificial Sequence
  Synthetic oligonucleotide
atgtaatggttcgacccaactattgtgctt

SEQ ID NO: 345163 - DNA, 30 bp, Artificial Sequence
  Synthetic oligonucleotide
tgtgggtctggaatgaaacgcctgttgctt

SEQ ID NO: 345164 - DNA, 30 bp, Artificial Sequence
  Synthetic oligonucleotide
cacagatatgtattggaacttggtttgctt

SEQ ID NO: 345165 - DNA, 30 bp, Artificial Sequence
  Synthetic oligonucleotide
ctgggcaagaatccctctcgacaaaatctt

SEQ ID NO: 345166 - DNA, 30 bp, Artificial Sequence
  Synthetic oligonucleotide
aaaatagagcattcaacgtcataaaatctt

SEQ ID NO: 345167 - DNA, 30 bp, Artificial Sequence
  Synthetic oligonucleotide
aagacttcgtaaccaggttaagcaaatctt

SEQ ID NO: 345168 - DNA, 30 bp, Artificial Sequence
  Synthetic oligonucleotide
ctatgttaagaacttgttattatcaatctt

SEQ ID NO: 345169 - DNA, 30 bp, Artificial Sequence
  Synthetic oligonucleotide
agtgtaaaggcatccgagagtcttaatctt

SEQ ID NO: 345170 - DNA, 30 bp, Artificial Sequence
  Synthetic oligonucleotide
ctatttggtgggggttattagttccatctt

SEQ ID NO: 345171 - DNA, 30 bp, Artificial Sequence
  Synthetic oligonucleotide
ccatacttactgtgacgaagcacgcatctt

SEQ ID NO: 345172 - DNA, 30 bp, Artificial Sequence
  Synthetic oligonucleotide
tgtcgaaccggccccacgtaggggcatctt

SEQ ID NO: 345173 - DNA, 30 bp, Artificial Sequence
  Synthetic oligonucleotide
agacagacggtgctagaggttttgcatctt

SEQ ID NO: 345174 - DNA, 30 bp, Artificial Sequence
  Synthetic oligonucleotide
ttagtagccgtggggcctgctgctcatctt

SEQ ID NO: 345175 - DNA, 30 bp, Artificial Sequence
  Synthetic oligonucleotide
gcacgccgcctgagccgaatttgtcatctt

SEQ ID NO: 345176 - DNA, 30 bp, Artificial Sequence
  Synthetic oligonucleotide
actgagcaagtgtggtatttacaagatctt

SEQ ID NO: 345177 - DNA, 30 bp, Artificial Sequence
  Synthetic oligonucleotide
agagatcgggaataccgctagtgagatctt

SEQ ID NO: 345178 - DNA, 30 bp, Artificial Sequence
  Synthetic oligonucleotide
agccgctaggcagtgacaaggttagatctt

SEQ ID NO: 345179 - DNA, 30 bp, Artificial Sequence
  Synthetic oligonucleotide
gacgaagggggataaattggcgaggatctt

SEQ ID NO: 345180 - DNA, 30 bp, Artificial Sequence
  Synthetic oligonucleotide
ctctcatacgcgcttctgagtatggatctt

SEQ ID NO: 345181 - DNA, 30 bp, Artificial Sequence
  Synthetic oligonucleotide
cttaattcaatcagaaatattctggatctt

SEQ ID NO: 345182 - DNA, 30 bp, Artificial Sequence
  Synthetic oligonucleotide
tacgtaaacaagtttccacctactgatctt

SEQ ID NO: 345183 - DNA, 30 bp, Artificial Sequence
  Synthetic oligonucleotide
ataggctagatggtgattgtaggtgatctt

SEQ ID NO: 345184 - DNA, 30 bp, Artificial Sequence
  Synthetic oligonucleotide
tcgacttggatagttcaggtatcgtatctt

SEQ ID NO: 345185 - DNA, 30 bp, Artificial Sequence
  Synthetic oligonucleotide
ggctctaatggatcattcaaaaattatctt

SEQ ID NO: 345186 - DNA, 30 bp, Artificial Sequence
  Synthetic oligonucleotide
aaatgcgaattggttagtactacttatctt

SEQ ID NO: 345187 - DNA, 30 bp, Artificial Sequence
  Synthetic oligonucleotide
gcctaagagtgagattatgggtcttatctt

SEQ ID NO: 345188 - DNA, 30 bp, Artificial Sequence
  Synthetic oligonucleotide
gaaactgtgtgtggttatcgggaaactctt

SEQ ID NO: 345189 - DNA, 30 bp, Artificial Sequence
  Synthetic oligonucleotide
cagttacaagatacgggctgataaactctt

SEQ ID NO: 345190 - DNA, 30 bp, Artificial Sequence
  Synthetic oligonucleotide
acaattggtcgaatcgcggtcggaactctt

SEQ ID NO: 345191 - DNA, 30 bp, Artificial Sequence
  Synthetic oligonucleotide
tggtcggcagtttgttactcttgaactctt

SEQ ID NO: 345192 - DNA, 30 bp, Artificial Sequence
  Synthetic oligonucleotide
agcggtaactagcaaatgtttaatactctt

SEQ ID NO: 345193 - DNA, 30 bp, Artificial Sequence
  Synthetic oligonucleotide
ggtgctgagtaaatcagttttgctactctt

SEQ ID NO: 345194 - DNA, 30 bp, Artificial Sequence
  Synthetic oligonucleotide
ccgtcatcttcaaaccgaataaaacctctt

SEQ ID NO: 345195 - DNA, 30 bp, Artificial Sequence
  Synthetic oligonucleotide
ccgtcgcgttcgtccgctctataacctctt

SEQ ID NO: 345196 - DNA, 30 bp, Artificial Sequence
  Synthetic oligonucleotide
actgtgtgggcatacccacgaccacctctt

SEQ ID NO: 345197 - DNA, 30 bp, Artificial Sequence
  Synthetic oligonucleotide
gcagggcttaaactcctgggtccacctctt

SEQ ID NO: 345198 - DNA, 30 bp, Artificial Sequence
  Synthetic oligonucleotide
atgaagtcacacccgtgagctacccctctt

SEQ ID NO: 345199 - DNA, 30 bp, Artificial Sequence
  Synthetic oligonucleotide
tacaacaatggattccgactcctccctctt

SEQ ID NO: 345200 - DNA, 30 bp, Artificial Sequence
  Synthetic oligonucleotide
aaacgaaacgacgcttgttagggtcctctt

SEQ ID NO: 345201 - DNA, 30 bp, Artificial Sequence
  Synthetic oligonucleotide
aacaacacacgcctgcagcattgagctctt

SEQ ID NO: 345202 - DNA, 30 bp, Artificial Sequence
  Synthetic oligonucleotide
tattattgcctccgtgacccaaacgctctt

SEQ ID NO: 345203 - DNA, 30 bp, Artificial Sequence
  Synthetic oligonucleotide
tcggatccgagcaaaccgcataaatctctt

SEQ ID NO: 345204 - DNA, 30 bp, Artificial Sequence
  Synthetic oligonucleotide
ctattcaagacatcagagtgtccatctctt

SEQ ID NO: 345205 - DNA, 30 bp, Artificial Sequence
  Synthetic oligonucleotide
ttacagtgaaatagtggtccgcgatctctt

SEQ ID NO: 345206 - DNA, 30 bp, Artificial Sequence
  Synthetic oligonucleotide
attgtgaccggagttataacgggatctctt

SEQ ID NO: 345207 - DNA, 30 bp, Artificial Sequence
  Synthetic oligonucleotide
gaacctttacagccaattctagtatctctt

SEQ ID NO: 345208 - DNA, 30 bp, Artificial Sequence
  Synthetic oligonucleotide
gcaacaggtggtataagagagtcctctctt

SEQ ID NO: 345209 - DNA, 30 bp, Artificial Sequence
  Synthetic oligonucleotide
ggaggtagaaatttctaccatatctctctt

SEQ ID NO: 345210 - DNA, 30 bp, Artificial Sequence
  Synthetic oligonucleotide
gattgaattaaccgtcattcgtcttctctt

SEQ ID NO: 345211 - DNA, 30 bp, Artificial Sequence
  Synthetic oligonucleotide
tcgtgataatcggtctgtgtacgttctctt

SEQ ID NO: 345212 - DNA, 30 bp, Artificial Sequence
  Synthetic oligonucleotide
gtagtggttgattgagactgtcccagtctt

SEQ ID NO: 345213 - DNA, 30 bp, Artificial Sequence
  Synthetic oligonucleotide
atagtatagttatctggtgggcagagtctt

SEQ ID NO: 345214 - DNA, 30 bp, Artificial Sequence
  Synthetic oligonucleotide
ccctcggtaggcttagcccaaacgagtctt

SEQ ID NO: 345215 - DNA, 30 bp, Artificial Sequence
  Synthetic oligonucleotide
accagagagtgcgtggctctgcgtagtctt

SEQ ID NO: 345216 - DNA, 30 bp, Artificial Sequence
  Synthetic oligonucleotide
cccgtgagagtgctccggcccacacgtctt

SEQ ID NO: 345217 - DNA, 30 bp, Artificial Sequence
  Synthetic oligonucleotide
tgatggtctggaaatctctgggtccgtctt

SEQ ID NO: 345218 - DNA, 30 bp, Artificial Sequence
  Synthetic oligonucleotide
atgattagtatttataagaacttccgtctt

SEQ ID NO: 345219 - DNA, 30 bp, Artificial Sequence
  Synthetic oligonucleotide
ttcaaaactttggagacgataacgcgtctt

SEQ ID NO: 345220 - DNA, 30 bp, Artificial Sequence
  Synthetic oligonucleotide
atgctatcaggagcataactttggcgtctt

SEQ ID NO: 345221 - DNA, 30 bp, Artificial Sequence
  Synthetic oligonucleotide
ttgtcgataatatagtcgggagatcgtctt

SEQ ID NO: 345222 - DNA, 30 bp, Artificial Sequence
  Synthetic oligonucleotide
gaggatgatccggaaccacttgaaggtctt

SEQ ID NO: 345223 - DNA, 30 bp, Artificial Sequence
  Synthetic oligonucleotide
tacgggtttcaacaaacacgaagtggtctt

SEQ ID NO: 345224 - DNA, 30 bp, Artificial Sequence
  Synthetic oligonucleotide
cgctgctgagaggccaatagggactgtctt

SEQ ID NO: 345225 - DNA, 30 bp, Artificial Sequence
  Synthetic oligonucleotide
atctcacgatgattcgataattactgtctt

SEQ ID NO: 345226 - DNA, 30 bp, Artificial Sequence
  Synthetic oligonucleotide
ggttcccctaggaaacacaatatctgtctt

SEQ ID NO: 345227 - DNA, 30 bp, Artificial Sequence
  Synthetic oligonucleotide
tcgcggaaaaaaaacctaccggcgtgtctt

SEQ ID NO: 345228 - DNA, 30 bp, Artificial Sequence
  Synthetic oligonucleotide
ctcgttataatagtgacgacgccttgtctt

SEQ ID NO: 345229 - DNA, 30 bp, Artificial Sequence
  Synthetic oligonucleotide
gccggtgccgctttactgtaacgttgtctt

SEQ ID NO: 345230 - DNA, 30 bp, Artificial Sequence
  Synthetic oligonucleotide
tcgcatctagctttagataggctaattctt

SEQ ID NO: 345231 - DNA, 30 bp, Artificial Sequence
  Synthetic oligonucleotide
gggcgagcagcatactacagtgtaattctt

SEQ ID NO: 345232 - DNA, 30 bp, Artificial Sequence
  Synthetic oligonucleotide
atcttggagcggtttgggctctcgattctt

SEQ ID NO: 345233 - DNA, 30 bp, Artificial Sequence
  Synthetic oligonucleotide
gatgtgcagccaaaaaggtcaaatattctt

SEQ ID NO: 345234 - DNA, 30 bp, Artificial Sequence
  Synthetic oligonucleotide
agtcgagtaccctggagctgtcgtattctt

SEQ ID NO: 345235 - DNA, 30 bp, Artificial Sequence
  Synthetic oligonucleotide
cgaactgcaacgaagtacatcggtattctt

SEQ ID NO: 345236 - DNA, 30 bp, Artificial Sequence
  Synthetic oligonucleotide
gcctcaccgtgaaatattcggggacttctt

SEQ ID NO: 345237 - DNA, 30 bp, Artificial Sequence
  Synthetic oligonucleotide
aggtcttcactgtagtaacgcttccttctt

SEQ ID NO: 345238 - DNA, 30 bp, Artificial Sequence
  Synthetic oligonucleotide
ttccccggtttgtcaggatgaaagcttctt

SEQ ID NO: 345239 - DNA, 30 bp, Artificial Sequence
  Synthetic oligonucleotide
tgaccgtctgaggatgactctctgcttctt

SEQ ID NO: 345240 - DNA, 30 bp, Artificial Sequence
  Synthetic oligonucleotide
atatgtaaggagcacctttgttatcttctt

SEQ ID NO: 345241 - DNA, 30 bp, Artificial Sequence
  Synthetic oligonucleotide
cctcgattggatgttgtaggcccagttctt

SEQ ID NO: 345242 - DNA, 30 bp, Artificial Sequence
  Synthetic oligonucleotide
atgtgacaaattcagcagacgtcagttctt

SEQ ID NO: 345243 - DNA, 30 bp, Artificial Sequence
  Synthetic oligonucleotide
gtgtggcatcaacaacgggaaagagttctt

SEQ ID NO: 345244 - DNA, 30 bp, Artificial Sequence
  Synthetic oligonucleotide
gaaacgatgttacatacacccgccgttctt

SEQ ID NO: 345245 - DNA, 30 bp, Artificial Sequence
  Synthetic oligonucleotide
attggggttggtaacgggcccaatgttctt

SEQ ID NO: 345246 - DNA, 30 bp, Artificial Sequence
  Synthetic oligonucleotide
ccccaagaatatcttgaacgagctgttctt

SEQ ID NO: 345247 - DNA, 30 bp, Artificial Sequence
  Synthetic oligonucleotide
aggctagcctccataacgaattctgttctt

SEQ ID NO: 345248 - DNA, 30 bp, Artificial Sequence
  Synthetic oligonucleotide
tcccgtggccgtccatcggtttaatttctt

SEQ ID NO: 345249 - DNA, 30 bp, Artificial Sequence
  Synthetic oligonucleotide
caacctcgggctaaggaatcctcaaaagtt

SEQ ID NO: 345250 - DNA, 30 bp, Artificial Sequence
  Synthetic oligonucleotide
atgtgattatcccgtcagacgtgaaaagtt

SEQ ID NO: 345251 - DNA, 30 bp, Artificial Sequence
  Synthetic oligonucleotide
atggttgcgcacgcgttcgcggacaaagtt

SEQ ID NO: 345252 - DNA, 30 bp, Artificial Sequence
  Synthetic oligonucleotide
taacagtagccagattagacgtacaaagtt

SEQ ID NO: 345253 - DNA, 30 bp, Artificial Sequence
  Synthetic oligonucleotide
cagtatgtgcaggtacccatgggcaaagtt

SEQ ID NO: 345254 - DNA, 30 bp, Artificial Sequence
  Synthetic oligonucleotide
cacgttgacgtcagacccggtctgaaagtt

SEQ ID NO: 345255 - DNA, 30 bp, Artificial Sequence
  Synthetic oligonucleotide
tgactacaatcacggtccctcagacaagtt

SEQ ID NO: 345256 - DNA, 30 bp, Artificial Sequence
  Synthetic oligonucleotide
ggcaatatctcaacgccgttttgacaagtt

SEQ ID NO: 345257 - DNA, 30 bp, Artificial Sequence
  Synthetic oligonucleotide
aacagcttatatacaggttatatacaagtt

SEQ ID NO: 345258 - DNA, 30 bp, Artificial Sequence
  Synthetic oligonucleotide
gaatccgggactctgccattattccaagtt

SEQ ID NO: 345259 - DNA, 30 bp, Artificial Sequence
  Synthetic oligonucleotide
gcaattgtcgcgttacattagttccaagtt

SEQ ID NO: 345260 - DNA, 30 bp, Artificial Sequence
  Synthetic oligonucleotide
gccttgaggtcaaatgatttagagcaagtt

SEQ ID NO: 345261 - DNA, 30 bp, Artificial Sequence
  Synthetic oligonucleotide
gacgacaaacgcctactgcgcagtcaagtt

SEQ ID NO: 345262 - DNA, 30 bp, Artificial Sequence
  Synthetic oligonucleotide
ccccaattgcatacaaaaacaacagaagtt

SEQ ID NO: 345263 - DNA, 30 bp, Artificial Sequence
  Synthetic oligonucleotide
gtagggcggcgtatctttaatctagaagtt

SEQ ID NO: 345264 - DNA, 30 bp, Artificial Sequence
  Synthetic oligonucleotide
gcgaagtcataaatctttttgtgcgaagtt

SEQ ID NO: 345265 - DNA, 30 bp, Artificial Sequence
  Synthetic oligonucleotide
ctatccagttcagccatcccgaatgaagtt

SEQ ID NO: 345266 - DNA, 30 bp, Artificial Sequence
  Synthetic oligonucleotide
ggttctttcatcgagatatgccatgaagtt

SEQ ID NO: 345267 - DNA, 31 bp, Artificial Sequence
  Synthetic oligonucleotide
atgtccaagcaatttcggccaatctgaagtt

SEQ ID NO: 345268 - DNA, 30 bp, Artificial Sequence
  Synthetic oligonucleotide
ggaaggtgcctcaggaaattgacataagtt

SEQ ID NO: 345269 - DNA, 30 bp, Artificial Sequence
  Synthetic oligonucleotide
accagtaggtgttagtcacccccataagtt

SEQ ID NO: 345270 - DNA, 30 bp, Artificial Sequence
  Synthetic oligonucleotide
tgtagcatcgccggtgcatagtcgtaagtt

SEQ ID NO: 345271 - DNA, 30 bp, Artificial Sequence
  Synthetic oligonucleotide
ccgatcgtggaaaattaaagtacttaagtt

SEQ ID NO: 345272 - DNA, 30 bp, Artificial Sequence
  Synthetic oligonucleotide
gctagactcatgactcatcctgcttaagtt

SEQ ID NO: 345273 - DNA, 30 bp, Artificial Sequence
  Synthetic oligonucleotide
gcttgtgcccctaggaatgtgacaacagtt

SEQ ID NO: 345274 - DNA, 30 bp, Artificial Sequence
  Synthetic oligonucleotide
tagcgtgcaaggcaaccttttcgcacagtt

SEQ ID NO: 345275 - DNA, 30 bp, Artificial Sequence
  Synthetic oligonucleotide
ggtagataatcggatggcgtaggcacagtt

SEQ ID NO: 345276 - DNA, 30 bp, Artificial Sequence
  Synthetic oligonucleotide
tttagtgggactttagcaatcagtacagtt

SEQ ID NO: 345277 - DNA, 30 bp, Artificial Sequence
  Synthetic oligonucleotide
tgcccgcgcatatatcgtgtgaaaccagtt

SEQ ID NO: 345278 - DNA, 30 bp, Artificial Sequence
  Synthetic oligonucleotide
gaactatcctagtcgcgagatgcaccagtt

SEQ ID NO: 345279 - DNA, 30 bp, Artificial Sequence
  Synthetic oligonucleotide
attttacgtgatacgctgagctcaccagtt

SEQ ID NO: 345280 - DNA, 30 bp, Artificial Sequence
  Synthetic oligonucleotide
gttgaagggtcataatctatagtaccagtt

SEQ ID NO: 345281 - DNA, 30 bp, Artificial Sequence
  Synthetic oligonucleotide
caagcaggggttgcacacccgtacccagtt

SEQ ID NO: 345282 - DNA, 30 bp, Artificial Sequence
  Synthetic oligonucleotide
ctgtgctagatttacggctagttcccagtt

SEQ ID NO: 345283 - DNA, 30 bp, Artificial Sequence
  Synthetic oligonucleotide
taaagcagtagagggcgcgtcaatccagtt

SEQ ID NO: 345284 - DNA, 30 bp, Artificial Sequence
  Synthetic oligonucleotide
aagtgatgggtagtctccacaaccgcagtt

SEQ ID NO: 345285 - DNA, 30 bp, Artificial Sequence
  Synthetic oligonucleotide
gggttgagggctcgagccttagaggcagtt

SEQ ID NO: 345286 - DNA, 30 bp, Artificial Sequence
  Synthetic oligonucleotide
tctcgtctcgcggctcaggatgatgcagtt

SEQ ID NO: 345287 - DNA, 30 bp, Artificial Sequence
  Synthetic oligonucleotide
taaagagcgcggaatactgcacgatcagtt

SEQ ID NO: 345288 - DNA, 30 bp, Artificial Sequence
  Synthetic oligonucleotide
tctggccttagagggaattagttatcagtt

SEQ ID NO: 345289 - DNA, 30 bp, Artificial Sequence
  Synthetic oligonucleotide
tcgaatcccttgatgcggaacgactcagtt

SEQ ID NO: 345290 - DNA, 30 bp, Artificial Sequence
  Synthetic oligonucleotide
acgcacgctttaacaggtagctcctcagtt

SEQ ID NO: 345291 - DNA, 30 bp, Artificial Sequence
  Synthetic oligonucleotide
acggtgtagttctacactcgcggctcagtt

SEQ ID NO: 345292 - DNA, 30 bp, Artificial Sequence
  Synthetic oligonucleotide
tatattaatggcttgcaatatatctcagtt

SEQ ID NO: 345293 - DNA, 30 bp, Artificial Sequence
  Synthetic oligonucleotide
ctaaggtaagttcagggttcatagtcagtt

SEQ ID NO: 345294 - DNA, 30 bp, Artificial Sequence
  Synthetic oligonucleotide
atgactgatttatgtgacagcgggtcagtt

SEQ ID NO: 345295 - DNA, 30 bp, Artificial Sequence
  Synthetic oligonucleotide
ggcccgtaaaacgccggtcctacaagagtt

SEQ ID NO: 345296 - DNA, 30 bp, Artificial Sequence
  Synthetic oligonucleotide
ggggagaggaaggtgggtacatcaagagtt

SEQ ID NO: 345297 - DNA, 30 bp, Artificial Sequence
  Synthetic oligonucleotide
gtccaggggtacaatacaggcagaagagtt

SEQ ID NO: 345298 - DNA, 30 bp, Artificial Sequence
  Synthetic oligonucleotide
cattgagtgggcgcgcccggcataagagtt

SEQ ID NO: 345299 - DNA, 30 bp, Artificial Sequence
  Synthetic oligonucleotide
tttgccgggtcacaccacgaggtaagagtt

SEQ ID NO: 345300 - DNA, 30 bp, Artificial Sequence
  Synthetic oligonucleotide
gcataaaacgtgcgcggctggggcagagtt

SEQ ID NO: 345301 - DNA, 30 bp, Artificial Sequence
  Synthetic oligonucleotide
ataagcacgcatcggactagggggagagtt

SEQ ID NO: 345302 - DNA, 30 bp, Artificial Sequence
  Synthetic oligonucleotide
tttggcggagtgggaagggaattgagagtt

SEQ ID NO: 345303 - DNA, 30 bp, Artificial Sequence
  Synthetic oligonucleotide
agtcaaagtggcccgtctagtacccgagtt

SEQ ID NO: 345304 - DNA, 30 bp, Artificial Sequence
  Synthetic oligonucleotide
cagttcgataccactttaccatgccgagtt

SEQ ID NO: 345305 - DNA, 30 bp, Artificial Sequence
  Synthetic oligonucleotide
acaacactggttccacttttggaaggagtt

SEQ ID NO: 345306 - DNA, 30 bp, Artificial Sequence
  Synthetic oligonucleotide
actcccgggacttaagagctctaaggagtt

SEQ ID NO: 345307 - DNA, 27 bp, Artificial Sequence
  Synthetic oligonucleotide
ggggtggcactccggttgagaggagtt

SEQ ID NO: 345308 - DNA, 30 bp, Artificial Sequence
  Synthetic oligonucleotide
taatcatgaaattctggggctgggggagtt

SEQ ID NO: 345309 - DNA, 30 bp, Artificial Sequence
  Synthetic oligonucleotide
ctttaagcacccaaataggccactggagtt

SEQ ID NO: 345310 - DNA, 30 bp, Artificial Sequence
  Synthetic oligonucleotide
gggaggattcaccgtgcgccgagtggagtt

SEQ ID NO: 345311 - DNA, 30 bp, Artificial Sequence
  Synthetic oligonucleotide
gtataagaatgtctactgcagggtggagtt

SEQ ID NO: 345312 - DNA, 30 bp, Artificial Sequence
  Synthetic oligonucleotide
agaaaggaacgcgcttattcttgtggagtt

SEQ ID NO: 345313 - DNA, 30 bp, Artificial Sequence
  Synthetic oligonucleotide
attcttcgcggctgagtgaaaacatgagtt

SEQ ID NO: 345314 - DNA, 30 bp, Artificial Sequence
  Synthetic oligonucleotide
gcccttcagttctagtagtatatatgagtt

SEQ ID NO: 345315 - DNA, 30 bp, Artificial Sequence
  Synthetic oligonucleotide
gacaattattacgtgcacagggcgtgagtt

SEQ ID NO: 345316 - DNA, 30 bp, Artificial Sequence
  Synthetic oligonucleotide
cacgtagcaggccctagacgtcggtgagtt

SEQ ID NO: 345317 - DNA, 30 bp, Artificial Sequence
  Synthetic oligonucleotide
gaatgcgcgcttcgcgagttgtggtgagtt

SEQ ID NO: 345318 - DNA, 30 bp, Artificial Sequence
  Synthetic oligonucleotide
tttgctttctatcaatttaaactgtgagtt

SEQ ID NO: 345319 - DNA, 30 bp, Artificial Sequence
  Synthetic oligonucleotide
ataagggcactggtagctatccattgagtt

SEQ ID NO: 345320 - DNA, 30 bp, Artificial Sequence
  Synthetic oligonucleotide
tacaatatacctttcgccttcgcttgagtt

SEQ ID NO: 345321 - DNA, 30 bp, Artificial Sequence
  Synthetic oligonucleotide
gacgcatcgattgctcacgcataaatagtt

SEQ ID NO: 345322 - DNA, 30 bp, Artificial Sequence
  Synthetic oligonucleotide
gtaccgtcgggctagcactgttcaatagtt

SEQ ID NO: 345323 - DNA, 30 bp, Artificial Sequence
  Synthetic oligonucleotide
cgcgggtcgggttttaacaacggaatagtt

SEQ ID NO: 345324 - DNA, 30 bp, Artificial Sequence
  Synthetic oligonucleotide
acgcgtttaggtaaatctttacgcatagtt

SEQ ID NO: 345325 - DNA, 30 bp, Artificial Sequence
  Synthetic oligonucleotide
aatacgtgcgtttccggcctgccgatagtt

SEQ ID NO: 345326 - DNA, 30 bp, Artificial Sequence
  Synthetic oligonucleotide
gataaagtaacaaggcaacgagggatagtt

SEQ ID NO: 345327 - DNA, 30 bp, Artificial Sequence
  Synthetic oligonucleotide
ctcagtggcaggtactcgcttattatagtt

SEQ ID NO: 345328 - DNA, 30 bp, Artificial Sequence
  Synthetic oligonucleotide
caacttgtatgaaaacgatggatactagtt

SEQ ID NO: 345329 - DNA, 30 bp, Artificial Sequence
  Synthetic oligonucleotide
cacggtttgctcgatcagctggacctagtt

SEQ ID NO: 345330 - DNA, 30 bp, Artificial Sequence
  Synthetic oligonucleotide
gttctaacaaacaagggcgactgcctagtt

SEQ ID NO: 345331 - DNA, 30 bp, Artificial Sequence
  Synthetic oligonucleotide
tttcaaaataccatagtgcggaaagtagtt

SEQ ID NO: 345332 - DNA, 30 bp, Artificial Sequence
  Synthetic oligonucleotide
agggatagtttgccccgtttataagtagtt

SEQ ID NO: 345333 - DNA, 30 bp, Artificial Sequence
  Synthetic oligonucleotide
caatcacgtatcttgttcgttacagtagtt

SEQ ID NO: 345334 - DNA, 30 bp, Artificial Sequence
  Synthetic oligonucleotide
gcctattatatatcgaagcaagcggtagtt

SEQ ID NO: 345335 - DNA, 30 bp, Artificial Sequence
  Synthetic oligonucleotide
tctaagtcaacacggttaaacctggtagtt

SEQ ID NO: 345336 - DNA, 30 bp, Artificial Sequence
  Synthetic oligonucleotide
tagggttttggaagcaagttcgatgtagtt

SEQ ID NO: 345337 - DNA, 30 bp, Artificial Sequence
  Synthetic oligonucleotide
cggctgtctttgtaaacctgtggtgtagtt

SEQ ID NO: 345338 - DNA, 30 bp, Artificial Sequence
  Synthetic oligonucleotide
ttgcctccggataatcagtatacattagtt

SEQ ID NO: 345339 - DNA, 30 bp, Artificial Sequence
  Synthetic oligonucleotide
accaggagaggccgacgcgcctcattagtt

SEQ ID NO: 345340 - DNA, 30 bp, Artificial Sequence
  Synthetic oligonucleotide
tagaaccgaactatgatgatttcattagtt

SEQ ID NO: 345341 - DNA, 30 bp, Artificial Sequence
  Synthetic oligonucleotide
taatactagggttcccacggtcgattagtt

SEQ ID NO: 345342 - DNA, 30 bp, Artificial Sequence
  Synthetic oligonucleotide
gctcagacatcattgaggattatattagtt

SEQ ID NO: 345343 - DNA, 30 bp, Artificial Sequence
  Synthetic oligonucleotide
gtggtctttgtattatgactggtattagtt

SEQ ID NO: 345344 - DNA, 30 bp, Artificial Sequence
  Synthetic oligonucleotide
aaggtagattgttggtggtagttattagtt

SEQ ID NO: 345345 - DNA, 30 bp, Artificial Sequence
  Synthetic oligonucleotide
ggggataattaacatctgcctaccttagtt

SEQ ID NO: 345346 - DNA, 30 bp, Artificial Sequence
  Synthetic oligonucleotide
gacgatcatggaacggtggaccggttagtt

SEQ ID NO: 345347 - DNA, 30 bp, Artificial Sequence
  Synthetic oligonucleotide
cagaccaaacctggctaccaagggttagtt

SEQ ID NO: 345348 - DNA, 30 bp, Artificial Sequence
  Synthetic oligonucleotide
acagctacatgtgtgacatcactgttagtt

SEQ ID NO: 345349 - DNA, 30 bp, Artificial Sequence
  Synthetic oligonucleotide
catgtaaaaccggggaacgcccgaaacgtt

SEQ ID NO: 345350 - DNA, 30 bp, Artificial Sequence
  Synthetic oligonucleotide
acgatgatggttgaatgatagtcgaacgtt

SEQ ID NO: 345351 - DNA, 30 bp, Artificial Sequence
  Synthetic oligonucleotide
tgaatttgcctgtatatacttttgaacgtt

SEQ ID NO: 345352 - DNA, 30 bp, Artificial Sequence
  Synthetic oligonucleotide
gatcggtcagtgcaagcgtaaagtaacgtt

SEQ ID NO: 345353 - DNA, 30 bp, Artificial Sequence
  Synthetic oligonucleotide
aaaccctggcttgggcaataacgtaacgtt

SEQ ID NO: 345354 - DNA, 30 bp, Artificial Sequence
  Synthetic oligonucleotide
tgcccgtgagagagaatttgacagcacgtt

SEQ ID NO: 345355 - DNA, 30 bp, Artificial Sequence
  Synthetic oligonucleotide
tgttaaagacataggctacagttgcacgtt

SEQ ID NO: 345356 - DNA, 30 bp, Artificial Sequence
  Synthetic oligonucleotide
ataaacgggacgaaaacatgtagtcacgtt

SEQ ID NO: 345357 - DNA, 30 bp, Artificial Sequence
  Synthetic oligonucleotide
tgggtgcgattatgtcaaggtattcacgtt

SEQ ID NO: 345358 - DNA, 30 bp, Artificial Sequence
  Synthetic oligonucleotide
gacggaggactagccatcgttattcacgtt

SEQ ID NO: 345359 - DNA, 30 bp, Artificial Sequence
  Synthetic oligonucleotide
ggactgccattggagtaactggaagacgtt

SEQ ID NO: 345360 - DNA, 30 bp, Artificial Sequence
  Synthetic oligonucleotide
gcagacgccttcgacccaaactcagacgtt

SEQ ID NO: 345361 - DNA, 30 bp, Artificial Sequence
  Synthetic oligonucleotide
ccagaccaccgaggctcgccttcagacgtt

SEQ ID NO: 345362 - DNA, 30 bp, Artificial Sequence
  Synthetic oligonucleotide
agggagaaaaggggtacgatttcagacgtt

SEQ ID NO: 345363 - DNA, 30 bp, Artificial Sequence
  Synthetic oligonucleotide
ttctcttggtatcgcgaggaaaaggacgtt

SEQ ID NO: 345364 - DNA, 30 bp, Artificial Sequence
  Synthetic oligonucleotide
aaaaattcgaggtgcataggcccggacgtt

SEQ ID NO: 345365 - DNA, 30 bp, Artificial Sequence
  Synthetic oligonucleotide
ccttccattaaacgtacgatgcatgacgtt

SEQ ID NO: 345366 - DNA, 30 bp, Artificial Sequence
  Synthetic oligonucleotide
gcagagattggaacgagtacgcctgacgtt

SEQ ID NO: 345367 - DNA, 30 bp, Artificial Sequence
  Synthetic oligonucleotide
agtagtgtcattatcgttaaccgtgacgtt

SEQ ID NO: 345368 - DNA, 30 bp, Artificial Sequence
  Synthetic oligonucleotide
caaggacgtatatagggcacttgtgacgtt

SEQ ID NO: 345369 - DNA, 30 bp, Artificial Sequence
  Synthetic oligonucleotide
ctgtctctagccgacaaggctgttgacgtt

SEQ ID NO: 345370 - DNA, 30 bp, Artificial Sequence
  Synthetic oligonucleotide
taacttctccttgttcggcgtgttgacgtt

SEQ ID NO: 345371 - DNA, 30 bp, Artificial Sequence
  Synthetic oligonucleotide
atccgatccacaatcccaactaaatacgtt

SEQ ID NO: 345372 - DNA, 30 bp, Artificial Sequence
  Synthetic oligonucleotide
cgcataaatcgcatagggctgggatacgtt

SEQ ID NO: 345373 - DNA, 30 bp, Artificial Sequence
  Synthetic oligonucleotide
gctaaattccttgttgacttgggctacgtt

SEQ ID NO: 345374 - DNA, 30 bp, Artificial Sequence
  Synthetic oligonucleotide
cctgacaccctggtgcaggcgcattacgtt

SEQ ID NO: 345375 - DNA, 30 bp, Artificial Sequence
  Synthetic oligonucleotide
tgcaaaggtcatgaggttatgcgttacgtt

SEQ ID NO: 345376 - DNA, 30 bp, Artificial Sequence
  Synthetic oligonucleotide
tcagaagtgaaaacttcccgcgaaaccgtt

SEQ ID NO: 345377 - DNA, 30 bp, Artificial Sequence
  Synthetic oligonucleotide
agtgttcattcgcaccgtgcacagaccgtt

SEQ ID NO: 345378 - DNA, 30 bp, Artificial Sequence
  Synthetic oligonucleotide
gtgtaattatagaaaacactttcgaccgtt

SEQ ID NO: 345379 - DNA, 30 bp, Artificial Sequence
  Synthetic oligonucleotide
tgcgtatgcgggcagatatcgcggaccgtt

SEQ ID NO: 345380 - DNA, 30 bp, Artificial Sequence
  Synthetic oligonucleotide
gtaggggtttgcttgccaaaaaataccgtt

SEQ ID NO: 345381 - DNA, 30 bp, Artificial Sequence
  Synthetic oligonucleotide
gcaacagtcattaggatcgctatacccgtt

SEQ ID NO: 345382 - DNA, 30 bp, Artificial Sequence
  Synthetic oligonucleotide
tacctagatagggagggtgataggcccgtt

SEQ ID NO: 345383 - DNA, 30 bp, Artificial Sequence
  Synthetic oligonucleotide
ggaatcgtcgagtcttaccatggggccgtt

SEQ ID NO: 345384 - DNA, 30 bp, Artificial Sequence
  Synthetic oligonucleotide
ggcggtgcaacgaggactgtcttatccgtt

SEQ ID NO: 345385 - DNA, 30 bp, Artificial Sequence
  Synthetic oligonucleotide
tcggcgccacggacgtaggataactccgtt

SEQ ID NO: 345386 - DNA, 30 bp, Artificial Sequence
  Synthetic oligonucleotide
aacccatagctctacttagatgactccgtt

SEQ ID NO: 345387 - DNA, 30 bp, Artificial Sequence
  Synthetic oligonucleotide
atcgggttatagtaacactttgcctccgtt

SEQ ID NO: 345388 - DNA, 27 bp, Artificial Sequence
  Synthetic oligonucleotide
agtccaatgcgcgtgacagattccgtt

SEQ ID NO: 345389 - DNA, 30 bp, Artificial Sequence
  Synthetic oligonucleotide
tgctagctagtagactacccacgttccgtt

SEQ ID NO: 345390 - DNA, 30 bp, Artificial Sequence
  Synthetic oligonucleotide
tggttccaggtaggactacgcttttccgtt

SEQ ID NO: 345391 - DNA, 30 bp, Artificial Sequence
  Synthetic oligonucleotide
gcagcagtggacttaatttgctcgagcgtt

SEQ ID NO: 345392 - DNA, 30 bp, Artificial Sequence
  Synthetic oligonucleotide
gtgggtaggagttagccaggttgacgcgtt

SEQ ID NO: 345393 - DNA, 30 bp, Artificial Sequence
  Synthetic oligonucleotide
tgctgctcaagcatgttcgtatcccgcgtt

SEQ ID NO: 345394 - DNA, 30 bp, Artificial Sequence
  Synthetic oligonucleotide
gatcggggaggatagtcgatttatcgcgtt

SEQ ID NO: 345395 - DNA, 30 bp, Artificial Sequence
  Synthetic oligonucleotide
caggttcaataagcaggctccactcgcgtt

SEQ ID NO: 345396 - DNA, 30 bp, Artificial Sequence
  Synthetic oligonucleotide
gatcatggtcgtttacacggacgaggcgtt

SEQ ID NO: 345397 - DNA, 30 bp, Artificial Sequence
  Synthetic oligonucleotide
aagctcataactggcttacacgtaggcgtt

SEQ ID NO: 345398 - DNA, 30 bp, Artificial Sequence
  Synthetic oligonucleotide
ccgctagggaaaatcggtctatggggcgtt

SEQ ID NO: 345399 - DNA, 30 bp, Artificial Sequence
  Synthetic oligonucleotide
ccaagtgcgtgtggccgcagttctggcgtt

SEQ ID NO: 345400 - DNA, 30 bp, Artificial Sequence
  Synthetic oligonucleotide
taatagtactatatgcagtaatgtggcgtt

SEQ ID NO: 345401 - DNA, 30 bp, Artificial Sequence
  Synthetic oligonucleotide
tccgcaaccagcgacgtgtcgattggcgtt

SEQ ID NO: 345402 - DNA, 30 bp, Artificial Sequence
  Synthetic oligonucleotide
gacactaccacatgaatccaatttggcgtt

SEQ ID NO: 345403 - DNA, 30 bp, Artificial Sequence
  Synthetic oligonucleotide
gggctcttggagccgtgccatcgatgcgtt

SEQ ID NO: 345404 - DNA, 30 bp, Artificial Sequence
  Synthetic oligonucleotide
ttaagcccagtatgaccagtaacctgcgtt

SEQ ID NO: 345405 - DNA, 30 bp, Artificial Sequence
  Synthetic oligonucleotide
tattgcttttacacaatccggctctgcgtt

SEQ ID NO: 345406 - DNA, 30 bp, Artificial Sequence
  Synthetic oligonucleotide
cgcaatcttttacttgatgaatattgcgtt

SEQ ID NO: 345407 - DNA, 30 bp, Artificial Sequence
  Synthetic oligonucleotide
aaaaccttactagcgcgttgtggttgcgtt

SEQ ID NO: 345408 - DNA, 30 bp, Artificial Sequence
  Synthetic oligonucleotide
atcgaattgggcttggatccgtaaatcgtt

SEQ ID NO: 345409 - DNA, 30 bp, Artificial Sequence
  Synthetic oligonucleotide
gaggtggtactataaaaggggggaatcgtt

SEQ ID NO: 345410 - DNA, 30 bp, Artificial Sequence
  Synthetic oligonucleotide
gcgtttcgatacaatcggatgctaatcgtt

SEQ ID NO: 345411 - DNA, 30 bp, Artificial Sequence
  Synthetic oligonucleotide
ggcataaattatacttggtgtaggatcgtt

SEQ ID NO: 345412 - DNA, 30 bp, Artificial Sequence
  Synthetic oligonucleotide
tctgcggcgctaggtgcgacctggatcgtt

SEQ ID NO: 345413 - DNA, 30 bp, Artificial Sequence
  Synthetic oligonucleotide
gattctgctcggatgtcattccttatcgtt

SEQ ID NO: 345414 - DNA, 30 bp, Artificial Sequence
  Synthetic oligonucleotide
tcagtcacaggtgccgccgaaacactcgtt

SEQ ID NO: 345415 - DNA, 30 bp, Artificial Sequence
  Synthetic oligonucleotide
ctcaacttatgttgttgcatcagcctcgtt

SEQ ID NO: 345416 - DNA, 30 bp, Artificial Sequence
  Synthetic oligonucleotide
tgttgatgcttagtcagtcggagcctcgtt

SEQ ID NO: 345417 - DNA, 30 bp, Artificial Sequence
  Synthetic oligonucleotide
aacccagactgatgaggacggaggctcgtt

SEQ ID NO: 345418 - DNA, 30 bp, Artificial Sequence
  Synthetic oligonucleotide
actggaggtttacgatatcctctgctcgtt

SEQ ID NO: 345419 - DNA, 30 bp, Artificial Sequence
  Synthetic oligonucleotide
gtgcgagcagtcgggggacatcgagtcgtt

SEQ ID NO: 345420 - DNA, 30 bp, Artificial Sequence
  Synthetic oligonucleotide
tacagcggatcaggtcttaaacgcgtcgtt

SEQ ID NO: 345421 - DNA, 30 bp, Artificial Sequence
  Synthetic oligonucleotide
tctgctttccaaatagactcacaggtcgtt

SEQ ID NO: 345422 - DNA, 30 bp, Artificial Sequence
  Synthetic oligonucleotide
aaaacatgaccaagagagttgcaggtcgtt

SEQ ID NO: 345423 - DNA, 30 bp, Artificial Sequence
  Synthetic oligonucleotide
tcacctgtggcccgttaggcaaatgtcgtt

SEQ ID NO: 345424 - DNA, 30 bp, Artificial Sequence
  Synthetic oligonucleotide
gtgtcgaaggtacgacctttgtgtgtcgtt

SEQ ID NO: 345425 - DNA, 30 bp, Artificial Sequence
  Synthetic oligonucleotide
ataagtcagtccactcaaacagttgtcgtt

SEQ ID NO: 345426 - DNA, 30 bp, Artificial Sequence
  Synthetic oligonucleotide
ttcaaactaggagattgatagtgattcgtt

SEQ ID NO: 345427 - DNA, 30 bp, Artificial Sequence
  Synthetic oligonucleotide
gtagcttaagatctagacacgtgattcgtt

SEQ ID NO: 345428 - DNA, 30 bp, Artificial Sequence
  Synthetic oligonucleotide
ctagattgtatcacgaatcgtttattcgtt

SEQ ID NO: 345429 - DNA, 30 bp, Artificial Sequence
  Synthetic oligonucleotide
tgctatcgccacagtggtcaaatcttcgtt

SEQ ID NO: 345430 - DNA, 30 bp, Artificial Sequence
  Synthetic oligonucleotide
gggcaggtaagcgaatgctaccagttcgtt

SEQ ID NO: 345431 - DNA, 30 bp, Artificial Sequence
  Synthetic oligonucleotide
aggcgctcaaatcagtactcatagttcgtt

SEQ ID NO: 345432 - DNA, 30 bp, Artificial Sequence
  Synthetic oligonucleotide
ttagttctagcctttcctcggactttcgtt

SEQ ID NO: 345433 - DNA, 30 bp, Artificial Sequence
  Synthetic oligonucleotide
gttccagggtttgtgcctttgtgtttcgtt

SEQ ID NO: 345434 - DNA, 30 bp, Artificial Sequence
  Synthetic oligonucleotide
ttcgaactggactaagatgattgtttcgtt

SEQ ID NO: 345435 - DNA, 30 bp, Artificial Sequence
  Synthetic oligonucleotide
gcgtgagttacgcgtggcagtgcaaaggtt

SEQ ID NO: 345436 - DNA, 30 bp, Artificial Sequence
  Synthetic oligonucleotide
agacgactttgctcgccagggtcaaaggtt

SEQ ID NO: 345437 - DNA, 30 bp, Artificial Sequence
  Synthetic oligonucleotide
catacctacgttatatcagtatgaaaggtt

SEQ ID NO: 345438 - DNA, 30 bp, Artificial Sequence
  Synthetic oligonucleotide
agaagcgtacccatttcaataataaaggtt

SEQ ID NO: 345439 - DNA, 30 bp, Artificial Sequence
  Synthetic oligonucleotide
cagggggcgtgaaaaacgcagctaaaggtt

SEQ ID NO: 345440 - DNA, 30 bp, Artificial Sequence
  Synthetic oligonucleotide
tgtgccttttgcggctcaaggctaaaggtt

SEQ ID NO: 345441 - DNA, 30 bp, Artificial Sequence
  Synthetic oligonucleotide
ctcagcatagagtataaagtggtgaaggtt

SEQ ID NO: 345442 - DNA, 30 bp, Artificial Sequence
  Synthetic oligonucleotide
aacctggagttatcaatcgattctaaggtt

SEQ ID NO: 345443 - DNA, 30 bp, Artificial Sequence
  Synthetic oligonucleotide
gacatagcagtccctcgatggaccgaggtt

SEQ ID NO: 345444 - DNA, 30 bp, Artificial Sequence
  Synthetic oligonucleotide
acgcaagtttttgttggcagaccggaggtt

SEQ ID NO: 345445 - DNA, 30 bp, Artificial Sequence
  Synthetic oligonucleotide
ccgcgttggagaaggtgtcatcatgaggtt

SEQ ID NO: 345446 - DNA, 30 bp, Artificial Sequence
  Synthetic oligonucleotide
gattttgaaaaatcacagcatcctgaggtt

SEQ ID NO: 345447 - DNA, 30 bp, Artificial Sequence
  Synthetic oligonucleotide
gctaaccggttagcgagaacgagctaggtt

SEQ ID NO: 345448 - DNA, 30 bp, Artificial Sequence
  Synthetic oligonucleotide
gaaataagcaacgcaaacatatagtaggtt

SEQ ID NO: 345449 - DNA, 30 bp, Artificial Sequence
  Synthetic oligonucleotide
caagtggacgaaggaacttaggtttaggtt

SEQ ID NO: 345450 - DNA, 30 bp, Artificial Sequence
  Synthetic oligonucleotide
gaatacaaggtaggagccggtttaacggtt

SEQ ID NO: 345451 - DNA, 30 bp, Artificial Sequence
  Synthetic oligonucleotide
tgattagagctattttcaccccccacggtt

SEQ ID NO: 345452 - DNA, 30 bp, Artificial Sequence
  Synthetic oligonucleotide
cagcggccgctacggtagatatggacggtt

SEQ ID NO: 345453 - DNA, 30 bp, Artificial Sequence
  Synthetic oligonucleotide
ccgtgaaaattattctacgtcatgacggtt

SEQ ID NO: 345454 - DNA, 30 bp, Artificial Sequence
  Synthetic oligonucleotide
gtgtagtgcacgtttggtccaattacggtt

SEQ ID NO: 345455 - DNA, 30 bp, Artificial Sequence
  Synthetic oligonucleotide
caatgaacaagaatggtccattcaccggtt

SEQ ID NO: 345456 - DNA, 30 bp, Artificial Sequence
  Synthetic oligonucleotide
ttaaagagggcggttgtgcacaacccggtt

SEQ ID NO: 345457 - DNA, 30 bp, Artificial Sequence
  Synthetic oligonucleotide
ccagggagaaggcttatgaatctcccggtt

SEQ ID NO: 345458 - DNA, 30 bp, Artificial Sequence
  Synthetic oligonucleotide
cctctcatctcgatttaaggacagccggtt

SEQ ID NO: 345459 - DNA, 30 bp, Artificial Sequence
  Synthetic oligonucleotide
gtgagtcacttataggtatgtcttccggtt

SEQ ID NO: 345460 - DNA, 30 bp, Artificial Sequence
  Synthetic oligonucleotide
ggtacctcacttaacgctaaagttccggtt

SEQ ID NO: 345461 - DNA, 30 bp, Artificial Sequence
  Synthetic oligonucleotide
tgtgtcgccaaggcagcaagaatagcggtt

SEQ ID NO: 345462 - DNA, 30 bp, Artificial Sequence
  Synthetic oligonucleotide
tagacggtctttcgaacgaatctcgcggtt

SEQ ID NO: 345463 - DNA, 30 bp, Artificial Sequence
  Synthetic oligonucleotide
ccgttgcaggtctgagcttgaacggcggtt

SEQ ID NO: 345464 - DNA, 30 bp, Artificial Sequence
  Synthetic oligonucleotide
gcaaggtgagcgcggggtaacgctgcggtt

SEQ ID NO: 345465 - DNA, 30 bp, Artificial Sequence
  Synthetic oligonucleotide
gcctcccttctgggcgattctcactcggtt

SEQ ID NO: 345466 - DNA, 30 bp, Artificial Sequence
  Synthetic oligonucleotide
ctgggcctaggtgtggagttgatctcggtt

SEQ ID NO: 345467 - DNA, 30 bp, Artificial Sequence
  Synthetic oligonucleotide
tacgtagaacggcctaagcaatagtcggtt

SEQ ID NO: 345468 - DNA, 30 bp, Artificial Sequence
  Synthetic oligonucleotide
aatcaaaaactaggttctaaggattcggtt

SEQ ID NO: 345469 - DNA, 30 bp, Artificial Sequence
  Synthetic oligonucleotide
gcgcaattagagggcgtcctcggttcggtt

SEQ ID NO: 345470 - DNA, 30 bp, Artificial Sequence
  Synthetic oligonucleotide
caccattggagggtagtgcccttaagggtt

SEQ ID NO: 345471 - DNA, 30 bp, Artificial Sequence
  Synthetic oligonucleotide
cagttcggtgccatgccggcctggagggtt

SEQ ID NO: 345472 - DNA, 30 bp, Artificial Sequence
  Synthetic oligonucleotide
gccttcttcacaggacgaactgttagggtt

SEQ ID NO: 345473 - DNA, 30 bp, Artificial Sequence
  Synthetic oligonucleotide
atcctagcgggattatgccgaaaacgggtt

SEQ ID NO: 345474 - DNA, 30 bp, Artificial Sequence
  Synthetic oligonucleotide
cctgataggggcccaactgacggacgggtt

SEQ ID NO: 345475 - DNA, 30 bp, Artificial Sequence
  Synthetic oligonucleotide
tacagggtacagaatatatttggacgggtt

SEQ ID NO: 345476 - DNA, 30 bp, Artificial Sequence
  Synthetic oligonucleotide
cggagctttgatatataggccatacgggtt

SEQ ID NO: 345477 - DNA, 30 bp, Artificial Sequence
  Synthetic oligonucleotide
tccgcttaaggaacagtaattacccgggtt

SEQ ID NO: 345478 - DNA, 30 bp, Artificial Sequence
  Synthetic oligonucleotide
cgaacgccgatcagaaagtcgcgccgggtt

SEQ ID NO: 345479 - DNA, 30 bp, Artificial Sequence
  Synthetic oligonucleotide
gaataacaccaaacctgtatctagcgggtt

SEQ ID NO: 345480 - DNA, 30 bp, Artificial Sequence
  Synthetic oligonucleotide
atgtccagtggggatggtagaattcgggtt

SEQ ID NO: 345481 - DNA, 30 bp, Artificial Sequence
  Synthetic oligonucleotide
taaaaggtcacgtagggccgagttcgggtt

SEQ ID NO: 345482 - DNA, 30 bp, Artificial Sequence
  Synthetic oligonucleotide
acccgtagtccgactcgcagaggaggggtt

SEQ ID NO: 345483 - DNA, 30 bp, Artificial Sequence
  Synthetic oligonucleotide
cggactcgggcagaggagtggggcggggtt

SEQ ID NO: 345484 - DNA, 30 bp, Artificial Sequence
  Synthetic oligonucleotide
tacgggttcatctacgtgccggggggggtt

SEQ ID NO: 345485 - DNA, 30 bp, Artificial Sequence
  Synthetic oligonucleotide
gttggtcttgacaatggatacgtgggggtt

SEQ ID NO: 345486 - DNA, 30 bp, Artificial Sequence
  Synthetic oligonucleotide
gataacagcgctgggaggtatgatggggtt

SEQ ID NO: 345487 - DNA, 30 bp, Artificial Sequence
  Synthetic oligonucleotide
aatgcgtgagcccaattgtcatatggggtt

SEQ ID NO: 345488 - DNA, 30 bp, Artificial Sequence
  Synthetic oligonucleotide
aacatgtcggagatgagatcagctggggtt

SEQ ID NO: 345489 - DNA, 30 bp, Artificial Sequence
  Synthetic oligonucleotide
atcagctgtatagtacaaggaattggggtt

SEQ ID NO: 345490 - DNA, 30 bp, Artificial Sequence
  Synthetic oligonucleotide
ttatactatgtagggacagatcttggggtt

SEQ ID NO: 345491 - DNA, 30 bp, Artificial Sequence
  Synthetic oligonucleotide
cttttgcacctatctggcattgcatgggtt

SEQ ID NO: 345492 - DNA, 30 bp, Artificial Sequence
  Synthetic oligonucleotide
ctctcggagatatatgctctgctttgggtt

SEQ ID NO: 345493 - DNA, 30 bp, Artificial Sequence
  Synthetic oligonucleotide
tggaatacacgtagagatgtaaaaatggtt

SEQ ID NO: 345494 - DNA, 30 bp, Artificial Sequence
  Synthetic oligonucleotide
acggatctatgatgttagtaaacaatggtt

SEQ ID NO: 345495 - DNA, 30 bp, Artificial Sequence
  Synthetic oligonucleotide
caccggctcagtacgattggcccaatggtt

SEQ ID NO: 345496 - DNA, 30 bp, Artificial Sequence
  Synthetic oligonucleotide
agtgttcgtctccaaccggcttcaatggtt

SEQ ID NO: 345497 - DNA, 30 bp, Artificial Sequence
  Synthetic oligonucleotide
gacaattttgcatgaatatggtgaatggtt

SEQ ID NO: 345498 - DNA, 30 bp, Artificial Sequence
  Synthetic oligonucleotide
ggtcctctctggaaccatcgcataatggtt

SEQ ID NO: 345499 - DNA, 30 bp, Artificial Sequence
  Synthetic oligonucleotide
agggtacgtgctcaaaccccaaagatggtt

SEQ ID NO: 345500 - DNA, 30 bp, Artificial Sequence
  Synthetic oligonucleotide
aatagggggtgtagccatgaatcgatggtt

SEQ ID NO: 345501 - DNA, 30 bp, Artificial Sequence
  Synthetic oligonucleotide
gcgggttaaagcgtcgcgtgatatatggtt

SEQ ID NO: 345502 - DNA, 30 bp, Artificial Sequence
  Synthetic oligonucleotide
ctcttatacgaggcctgggactatatggtt

SEQ ID NO: 345503 - DNA, 30 bp, Artificial Sequence
  Synthetic oligonucleotide
gattatgacagcgtattaaacatactggtt

SEQ ID NO: 345504 - DNA, 30 bp, Artificial Sequence
  Synthetic oligonucleotide
atgttaccagtcgtaacaacgctactggtt

SEQ ID NO: 345505 - DNA, 30 bp, Artificial Sequence
  Synthetic oligonucleotide
tcatactatgccctcggtcaatccctggtt

SEQ ID NO: 345506 - DNA, 30 bp, Artificial Sequence
  Synthetic oligonucleotide
gtactcgacgataagcagccgtaagtggtt

SEQ ID NO: 345507 - DNA, 30 bp, Artificial Sequence
  Synthetic oligonucleotide
ttgaagggagtgcttgaacggcgggtggtt

SEQ ID NO: 345508 - DNA, 30 bp, Artificial Sequence
  Synthetic oligonucleotide
tggaggtttgattgtagtttcttattggtt

SEQ ID NO: 345509 - DNA, 30 bp, Artificial Sequence
  Synthetic oligonucleotide
gaatcacggcacctgagcagtaacttggtt

SEQ ID NO: 345510 - DNA, 30 bp, Artificial Sequence
  Synthetic oligonucleotide
agcggatgtgtcagttttgatatgttggtt

SEQ ID NO: 345511 - DNA, 30 bp, Artificial Sequence
  Synthetic oligonucleotide
tacgccccattgactgttgtgttgttggtt

SEQ ID NO: 345512 - DNA, 30 bp, Artificial Sequence
  Synthetic oligonucleotide
tagtaggaagcgtggcatcggaatttggtt

SEQ ID NO: 345513 - DNA, 30 bp, Artificial Sequence
  Synthetic oligonucleotide
gcaaaccgtagacgggtattcattttggtt

SEQ ID NO: 345514 - DNA, 30 bp, Artificial Sequence
  Synthetic oligonucleotide
gtaatggggagggaaatagggcttttggtt

SEQ ID NO: 345515 - DNA, 30 bp, Artificial Sequence
  Synthetic oligonucleotide
atcccgtcgcgctagcactgagacaatgtt

SEQ ID NO: 345516 - DNA, 30 bp, Artificial Sequence
  Synthetic oligonucleotide
ggcgacggggacaccgtcaggagcaatgtt

SEQ ID NO: 345517 - DNA, 30 bp, Artificial Sequence
  Synthetic oligonucleotide
tcggggcacggtaggtagcttgtcaatgtt

SEQ ID NO: 345518 - DNA, 30 bp, Artificial Sequence
  Synthetic oligonucleotide
tgcaaaaggtatgtgaagagcttcaatgtt

SEQ ID NO: 345519 - DNA, 30 bp, Artificial Sequence
  Synthetic oligonucleotide
agccgggccattacatccgaatagaatgtt

SEQ ID NO: 345520 - DNA, 30 bp, Artificial Sequence
  Synthetic oligonucleotide
taactcctgccacccactgggggtaatgtt

SEQ ID NO: 345521 - DNA, 30 bp, Artificial Sequence
  Synthetic oligonucleotide
gcggggtctgggccgctccaatcacatgtt

SEQ ID NO: 345522 - DNA, 30 bp, Artificial Sequence
  Synthetic oligonucleotide
cacgttaccacggggcaccgctaccatgtt

SEQ ID NO: 345523 - DNA, 30 bp, Artificial Sequence
  Synthetic oligonucleotide
ttaaggtcagcccctaactatgggcatgtt

SEQ ID NO: 345524 - DNA, 30 bp, Artificial Sequence
  Synthetic oligonucleotide
acaatcatagcaacatcgaagatgcatgtt

SEQ ID NO: 345525 - DNA, 30 bp, Artificial Sequence
  Synthetic oligonucleotide
aatgggccagctgtacgcatgctgcatgtt

SEQ ID NO: 345526 - DNA, 30 bp, Artificial Sequence
  Synthetic oligonucleotide
ccagtacctgaggtctatttagaagatgtt

SEQ ID NO: 345527 - DNA, 30 bp, Artificial Sequence
  Synthetic oligonucleotide
acggttgtgcgaatagggatcctagatgtt

SEQ ID NO: 345528 - DNA, 30 bp, Artificial Sequence
  Synthetic oligonucleotide
agtcagggatactaatattgcttggatgtt

SEQ ID NO: 345529 - DNA, 30 bp, Artificial Sequence
  Synthetic oligonucleotide
gacgattggttacaagttcagaatgatgtt

SEQ ID NO: 345530 - DNA, 30 bp, Artificial Sequence
  Synthetic oligonucleotide
ttgaatacgtgattatgcaatcatgatgtt

SEQ ID NO: 345531 - DNA, 30 bp, Artificial Sequence
  Synthetic oligonucleotide
tttaggtcaaaggagagccagacatatgtt

SEQ ID NO: 345532 - DNA, 30 bp, Artificial Sequence
  Synthetic oligonucleotide
gcatggatcaagaaatgatagacatatgtt

SEQ ID NO: 345533 - DNA, 30 bp, Artificial Sequence
  Synthetic oligonucleotide
tatgacttggcaatagccggctcatatgtt

SEQ ID NO: 345534 - DNA, 30 bp, Artificial Sequence
  Synthetic oligonucleotide
cattgcacttgcaccgattagtcctatgtt

SEQ ID NO: 345535 - DNA, 30 bp, Artificial Sequence
  Synthetic oligonucleotide
ggctggacccactactatggcgtctatgtt

SEQ ID NO: 345536 - DNA, 30 bp, Artificial Sequence
  Synthetic oligonucleotide
cacacattgagtgccttgacggcgtatgtt

SEQ ID NO: 345537 - DNA, 30 bp, Artificial Sequence
  Synthetic oligonucleotide
atggattcagcgttgtgggattcgtatgtt

SEQ ID NO: 345538 - DNA, 30 bp, Artificial Sequence
  Synthetic oligonucleotide
ctctacttgataagtcctgaggggtatgtt

SEQ ID NO: 345539 - DNA, 30 bp, Artificial Sequence
  Synthetic oligonucleotide
gtcaagggattccgcaaagcggggtatgtt

SEQ ID NO: 345540 - DNA, 30 bp, Artificial Sequence
  Synthetic oligonucleotide
ggatcgtgcttgactactctcacttatgtt

SEQ ID NO: 345541 - DNA, 30 bp, Artificial Sequence
  Synthetic oligonucleotide
atattgcggagctccgagttccaaactgtt

SEQ ID NO: 345542 - DNA, 30 bp, Artificial Sequence
  Synthetic oligonucleotide
cactgctgatagccgctggggttaactgtt

SEQ ID NO: 345543 - DNA, 30 bp, Artificial Sequence
  Synthetic oligonucleotide
agagcacatgatcatgcaccgttcactgtt

SEQ ID NO: 345544 - DNA, 30 bp, Artificial Sequence
  Synthetic oligonucleotide
gtaaccaatgctatgcgaaaaaaacctgtt

SEQ ID NO: 345545 - DNA, 30 bp, Artificial Sequence
  Synthetic oligonucleotide
gtgtatccagaaataataaaaacacctgtt

SEQ ID NO: 345546 - DNA, 30 bp, Artificial Sequence
  Synthetic oligonucleotide
cggcacgtatcagtggacacccgccctgtt

SEQ ID NO: 345547 - DNA, 30 bp, Artificial Sequence
  Synthetic oligonucleotide
ttcccgaaaaccttgttagggggccctgtt

SEQ ID NO: 345548 - DNA, 30 bp, Artificial Sequence
  Synthetic oligonucleotide
caccaagattatgcgggaaggaagcctgtt

SEQ ID NO: 345549 - DNA, 30 bp, Artificial Sequence
  Synthetic oligonucleotide
ttgcggattgaccggtgcttcggtcctgtt

SEQ ID NO: 345550 - DNA, 30 bp, Artificial Sequence
  Synthetic oligonucleotide
gggctatagcagtgtcagcactcatctgtt

SEQ ID NO: 345551 - DNA, 30 bp, Artificial Sequence
  Synthetic oligonucleotide
ggggaatatgactacaccggcatatctgtt

SEQ ID NO: 345552 - DNA, 30 bp, Artificial Sequence
  Synthetic oligonucleotide
cactcaagattaatctacatcagctctgtt

SEQ ID NO: 345553 - DNA, 30 bp, Artificial Sequence
  Synthetic oligonucleotide
ttattgcgagtgcctacccgtaaaagtgtt

SEQ ID NO: 345554 - DNA, 30 bp, Artificial Sequence
  Synthetic oligonucleotide
cgtccaccgttcggatagggttaaagtgtt

SEQ ID NO: 345555 - DNA, 30 bp, Artificial Sequence
  Synthetic oligonucleotide
atcacgggactatttcaaacaggaagtgtt

SEQ ID NO: 345556 - DNA, 30 bp, Artificial Sequence
  Synthetic oligonucleotide
tggggtaaaacccaacacgtatgaagtgtt

SEQ ID NO: 345557 - DNA, 30 bp, Artificial Sequence
  Synthetic oligonucleotide
cagatggactactgtacagatttaagtgtt

SEQ ID NO: 345558 - DNA, 30 bp, Artificial Sequence
  Synthetic oligonucleotide
agtcacggccgatgttaatctttaagtgtt

SEQ ID NO: 345559 - DNA, 30 bp, Artificial Sequence
  Synthetic oligonucleotide
cgtcggagtaacattaatataaccagtgtt

SEQ ID NO: 345560 - DNA, 30 bp, Artificial Sequence
  Synthetic oligonucleotide
gaaggacgtactgcaacggcacagagtgtt

SEQ ID NO: 345561 - DNA, 30 bp, Artificial Sequence
  Synthetic oligonucleotide
ctgtggaactgatacattgggggtagtgtt

SEQ ID NO: 345562 - DNA, 30 bp, Artificial Sequence
  Synthetic oligonucleotide
atgccagcgaccgttgcgtcgaaacgtgtt

SEQ ID NO: 345563 - DNA, 30 bp, Artificial Sequence
  Synthetic oligonucleotide
gcgtcgtagttacgcgttcgtgaacgtgtt

SEQ ID NO: 345564 - DNA, 30 bp, Artificial Sequence
  Synthetic oligonucleotide
gttgacggtgcgtggattattgaccgtgtt

SEQ ID NO: 345565 - DNA, 30 bp, Artificial Sequence
  Synthetic oligonucleotide
acccggtatctgtagagtctgtcccgtgtt

SEQ ID NO: 345566 - DNA, 30 bp, Artificial Sequence
  Synthetic oligonucleotide
ctggcgctgtgaaccaaggaaccgcgtgtt

SEQ ID NO: 345567 - DNA, 30 bp, Artificial Sequence
  Synthetic oligonucleotide
ccccaggcttaggtccctctgcatcgtgtt

SEQ ID NO: 345568 - DNA, 30 bp, Artificial Sequence
  Synthetic oligonucleotide
ccggggcgtttttggatccctgatcgtgtt

SEQ ID NO: 345569 - DNA, 30 bp, Artificial Sequence
  Synthetic oligonucleotide
catctatattattatcttatgtatcgtgtt

SEQ ID NO: 345570 - DNA, 30 bp, Artificial Sequence
  Synthetic oligonucleotide
ggggtgattgctacaaatccatgcggtgtt

SEQ ID NO: 345571 - DNA, 30 bp, Artificial Sequence
  Synthetic oligonucleotide
cttgtacaattgctatgccgctagggtgtt

SEQ ID NO: 345572 - DNA, 30 bp, Artificial Sequence
  Synthetic oligonucleotide
aggttttgtccaaaaagcaatttgggtgtt

SEQ ID NO: 345573 - DNA, 30 bp, Artificial Sequence
  Synthetic oligonucleotide
cgcgatgtacagactgtgccgtttggtgtt

SEQ ID NO: 345574 - DNA, 30 bp, Artificial Sequence
  Synthetic oligonucleotide
actacagcctaaggggtgaagttctgtgtt

SEQ ID NO: 345575 - DNA, 30 bp, Artificial Sequence
  Synthetic oligonucleotide
gcttttgagggaatcgcgggaaattgtgtt

SEQ ID NO: 345576 - DNA, 30 bp, Artificial Sequence
  Synthetic oligonucleotide
aagggaagtgggtaccacgttggttgtgtt

SEQ ID NO: 345577 - DNA, 30 bp, Artificial Sequence
  Synthetic oligonucleotide
ggcaaatgcgccggggtctgcgaaattgtt

SEQ ID NO: 345578 - DNA, 30 bp, Artificial Sequence
  Synthetic oligonucleotide
ttaaggggggtgaggggataccgcattgtt

SEQ ID NO: 345579 - DNA, 30 bp, Artificial Sequence
  Synthetic oligonucleotide
ggcacaataggcccaggacgagatattgtt

SEQ ID NO: 345580 - DNA, 30 bp, Artificial Sequence
  Synthetic oligonucleotide
tctatcggagcacctgaggcaactattgtt

SEQ ID NO: 345581 - DNA, 30 bp, Artificial Sequence
  Synthetic oligonucleotide
tgaagattgttgagaaaacactctattgtt

SEQ ID NO: 345582 - DNA, 30 bp, Artificial Sequence
  Synthetic oligonucleotide
ccctcggtacagaaaagtatttctattgtt

SEQ ID NO: 345583 - DNA, 30 bp, Artificial Sequence
  Synthetic oligonucleotide
tgggagtcgaatcctgaccttcttattgtt

SEQ ID NO: 345584 - DNA, 30 bp, Artificial Sequence
  Synthetic oligonucleotide
gtaatcgaacgttggattcaagtacttgtt

SEQ ID NO: 345585 - DNA, 30 bp, Artificial Sequence
  Synthetic oligonucleotide
ggtactcgcgtgcccattgcgtgccttgtt

SEQ ID NO: 345586 - DNA, 30 bp, Artificial Sequence
  Synthetic oligonucleotide
gaggggatcgtaagcagtgggtcgcttgtt

SEQ ID NO: 345587 - DNA, 30 bp, Artificial Sequence
  Synthetic oligonucleotide
caccgattgaatagactagcttctcttgtt

SEQ ID NO: 345588 - DNA, 30 bp, Artificial Sequence
  Synthetic oligonucleotide
agttcggagagtggccgtaggtgtcttgtt

SEQ ID NO: 345589 - DNA, 30 bp, Artificial Sequence
  Synthetic oligonucleotide
gaaggtgtaaagtctgggtccccagttgtt

SEQ ID NO: 345590 - DNA, 30 bp, Artificial Sequence
  Synthetic oligonucleotide
cttcgtgcggacctaatcacagacgttgtt

SEQ ID NO: 345591 - DNA, 30 bp, Artificial Sequence
  Synthetic oligonucleotide
gcttctgttcgtaaatgattcccggttgtt

SEQ ID NO: 345592 - DNA, 30 bp, Artificial Sequence
  Synthetic oligonucleotide
gtcggttaccgtttgatgtcacatgttgtt

SEQ ID NO: 345593 - DNA, 30 bp, Artificial Sequence
  Synthetic oligonucleotide
ccaggactgcaacggtctggatagtttgtt

SEQ ID NO: 345594 - DNA, 30 bp, Artificial Sequence
  Synthetic oligonucleotide
ggccattgtgaagagcgccggcggtttgtt

SEQ ID NO: 345595 - DNA, 30 bp, Artificial Sequence
  Synthetic oligonucleotide
ctgattgatgagactgccggcttgtttgtt

SEQ ID NO: 345596 - DNA, 30 bp, Artificial Sequence
  Synthetic oligonucleotide
gtacttgccacagagcttgacgattttgtt

SEQ ID NO: 345597 - DNA, 30 bp, Artificial Sequence
  Synthetic oligonucleotide
attcctgtcttgcgtcacgcttattttgtt

SEQ ID NO: 345598 - DNA, 30 bp, Artificial Sequence
  Synthetic oligonucleotide
ggacgtcgggtggagttgttgtacaaattt

SEQ ID NO: 345599 - DNA, 30 bp, Artificial Sequence
  Synthetic oligonucleotide
gtgagctcgggttgttaggcgggcaaattt

SEQ ID NO: 345600 - DNA, 30 bp, Artificial Sequence
  Synthetic oligonucleotide
gcggttgggaacttcgccattgcgaaattt

SEQ ID NO: 345601 - DNA, 30 bp, Artificial Sequence
  Synthetic oligonucleotide
aaagtgttactggttggggtcaataaattt

SEQ ID NO: 345602 - DNA, 30 bp, Artificial Sequence
  Synthetic oligonucleotide
atagcatatgacatcggataaacacaattt

SEQ ID NO: 345603 - DNA, 30 bp, Artificial Sequence
  Synthetic oligonucleotide
taatggtttatgggattggggcgacaattt

SEQ ID NO: 345604 - DNA, 30 bp, Artificial Sequence
  Synthetic oligonucleotide
attccggaccacatagattaagtacaattt

SEQ ID NO: 345605 - DNA, 29 bp, Artificial Sequence
  Synthetic oligonucleotide
ttgagacgttccagacacccgaccaattt

SEQ ID NO: 345606 - DNA, 30 bp, Artificial Sequence
  Synthetic oligonucleotide
tacccctaggaaataatggacgtccaattt

SEQ ID NO: 345607 - DNA, 30 bp, Artificial Sequence
  Synthetic oligonucleotide
ggctgagctcaagctcgcttggggcaattt

SEQ ID NO: 345608 - DNA, 30 bp, Artificial Sequence
  Synthetic oligonucleotide
cacataggagaaggtcttctaatgcaattt

SEQ ID NO: 345609 - DNA, 30 bp, Artificial Sequence
  Synthetic oligonucleotide
acgcgtccaattgacttactaaatcaattt

SEQ ID NO: 345610 - DNA, 30 bp, Artificial Sequence
  Synthetic oligonucleotide
atggttctctgactctaacggcatcaattt

SEQ ID NO: 345611 - DNA, 30 bp, Artificial Sequence
  Synthetic oligonucleotide
agtaaggaggcatccttcgggtttcaattt

SEQ ID NO: 345612 - DNA, 30 bp, Artificial Sequence
  Synthetic oligonucleotide
actgctgcggacatgcaccttcaggaattt

SEQ ID NO: 345613 - DNA, 30 bp, Artificial Sequence
  Synthetic oligonucleotide
tccaggtaagtctaagtagtttcggaattt

SEQ ID NO: 345614 - DNA, 30 bp, Artificial Sequence
  Synthetic oligonucleotide
taaaacagcgtaaaggtgaaaaatgaattt

SEQ ID NO: 345615 - DNA, 30 bp, Artificial Sequence
  Synthetic oligonucleotide
ggaaagctaataataaggggctgataattt

SEQ ID NO: 345616 - DNA, 30 bp, Artificial Sequence
  Synthetic oligonucleotide
ttaagtgcgtccaagggccagctataattt

SEQ ID NO: 345617 - DNA, 30 bp, Artificial Sequence
  Synthetic oligonucleotide
gacggagaaggtacgtggtaccagtaattt

SEQ ID NO: 345618 - DNA, 30 bp, Artificial Sequence
  Synthetic oligonucleotide
cctaaaatggtttgaagagataggtaattt

SEQ ID NO: 345619 - DNA, 30 bp, Artificial Sequence
  Synthetic oligonucleotide
gatcaatcggatcgcaaggggtggtaattt

SEQ ID NO: 345620 - DNA, 30 bp, Artificial Sequence
  Synthetic oligonucleotide
gcataacgatactcagggttttattaattt

SEQ ID NO: 345621 - DNA, 30 bp, Artificial Sequence
  Synthetic oligonucleotide
ttcttgagaatcacatatcataaaacattt

SEQ ID NO: 345622 - DNA, 30 bp, Artificial Sequence
  Synthetic oligonucleotide
ctgacagatgggagacagtctaaaacattt

SEQ ID NO: 345623 - DNA, 30 bp, Artificial Sequence
  Synthetic oligonucleotide
accacccggtctacacatcaagaaacattt

SEQ ID NO: 345624 - DNA, 30 bp, Artificial Sequence
  Synthetic oligonucleotide
tctagaaaggtccttatgtcctcaacattt

SEQ ID NO: 345625 - DNA, 30 bp, Artificial Sequence
  Synthetic oligonucleotide
gtgcgagaatcaataattgttagaacattt

SEQ ID NO: 345626 - DNA, 30 bp, Artificial Sequence
  Synthetic oligonucleotide
catgtccaagccgaaaactgctgaacattt

SEQ ID NO: 345627 - DNA, 30 bp, Artificial Sequence
  Synthetic oligonucleotide
gtagggcgcatggtgttgaaaaacacattt

SEQ ID NO: 345628 - DNA, 30 bp, Artificial Sequence
  Synthetic oligonucleotide
tcatcagtcattggttgattagccacattt

SEQ ID NO: 345629 - DNA, 30 bp, Artificial Sequence
  Synthetic oligonucleotide
aaaaaagcagcatgaatgtatacgacattt

SEQ ID NO: 345630 - DNA, 30 bp, Artificial Sequence
  Synthetic oligonucleotide
agtacccgccgtgttcggaatgtgacattt

SEQ ID NO: 345631 - DNA, 30 bp, Artificial Sequence
  Synthetic oligonucleotide
gtgctaattggtaccttccctgatacattt

SEQ ID NO: 345632 - DNA, 30 bp, Artificial Sequence
  Synthetic oligonucleotide
atccgattggatttacgagtaggtacattt

SEQ ID NO: 345633 - DNA, 30 bp, Artificial Sequence
  Synthetic oligonucleotide
tgctagtgacttcaatagtgcggtacattt

SEQ ID NO: 345634 - DNA, 30 bp, Artificial Sequence
  Synthetic oligonucleotide
tacacatgcagtgaccggtctccaccattt

SEQ ID NO: 345635 - DNA, 30 bp, Artificial Sequence
  Synthetic oligonucleotide
tattactattatcaagacaaggacccattt

SEQ ID NO: 345636 - DNA, 30 bp, Artificial Sequence
  Synthetic oligonucleotide
gcgcagtcctctggagccccggcgccattt

SEQ ID NO: 345637 - DNA, 30 bp, Artificial Sequence
  Synthetic oligonucleotide
tctcgggctggcgaaccagggcgtccattt

SEQ ID NO: 345638 - DNA, 30 bp, Artificial Sequence
  Synthetic oligonucleotide
tatgccttaaagctgtgaattcgagcattt

SEQ ID NO: 345639 - DNA, 30 bp, Artificial Sequence
  Synthetic oligonucleotide
tatgtcaggtaaatactcagcagcgcattt

SEQ ID NO: 345640 - DNA, 30 bp, Artificial Sequence
  Synthetic oligonucleotide
taacacaggcgtttgatttcactcgcattt

SEQ ID NO: 345641 - DNA, 30 bp, Artificial Sequence
  Synthetic oligonucleotide
tggtacgtttcctagtgcgatctcgcattt

SEQ ID NO: 345642 - DNA, 30 bp, Artificial Sequence
  Synthetic oligonucleotide
tgggttagcactgatcgtacgtgggcattt

SEQ ID NO: 345643 - DNA, 30 bp, Artificial Sequence
  Synthetic oligonucleotide
gggcctctgtaactatgatttgttgcattt

SEQ ID NO: 345644 - DNA, 30 bp, Artificial Sequence
  Synthetic oligonucleotide
ttgtctttgaaattcaattgcaaatcattt

SEQ ID NO: 345645 - DNA, 30 bp, Artificial Sequence
  Synthetic oligonucleotide
taaatgggacggtagcttgacggatcattt

SEQ ID NO: 345646 - DNA, 30 bp, Artificial Sequence
  Synthetic oligonucleotide
taactcagtaccgatggtcacatatcattt

SEQ ID NO: 345647 - DNA, 30 bp, Artificial Sequence
  Synthetic oligonucleotide
gttgtgggcacataacatggatcctcattt

SEQ ID NO: 345648 - DNA, 30 bp, Artificial Sequence
  Synthetic oligonucleotide
agacgtccgagtacctaagctcagtcattt

SEQ ID NO: 345649 - DNA, 30 bp, Artificial Sequence
  Synthetic oligonucleotide
ggcgctgtaaaagctaagtctaggtcattt

SEQ ID NO: 345650 - DNA, 30 bp, Artificial Sequence
  Synthetic oligonucleotide
gaatgccgccttgcgtacattcattcattt

SEQ ID NO: 345651 - DNA, 30 bp, Artificial Sequence
  Synthetic oligonucleotide
agacaaaggagactactttaacgttcattt

SEQ ID NO: 345652 - DNA, 30 bp, Artificial Sequence
  Synthetic oligonucleotide
gttccctaattcctataatcagtttcattt

SEQ ID NO: 345653 - DNA, 30 bp, Artificial Sequence
  Synthetic oligonucleotide
agtgtctcaacgtaggcgaaggtttcattt

SEQ ID NO: 345654 - DNA, 30 bp, Artificial Sequence
  Synthetic oligonucleotide
atagtagatagtttcccatgtaaaagattt

SEQ ID NO: 345655 - DNA, 30 bp, Artificial Sequence
  Synthetic oligonucleotide
tgaaagccgagccaatatgtcgtaagattt

SEQ ID NO: 345656 - DNA, 30 bp, Artificial Sequence
  Synthetic oligonucleotide
attaagttctttgaattgtgggacagattt

SEQ ID NO: 345657 - DNA, 30 bp, Artificial Sequence
  Synthetic oligonucleotide
caaccctggaggacgaaaaggaagagattt

SEQ ID NO: 345658 - DNA, 30 bp, Artificial Sequence
  Synthetic oligonucleotide
tgagagtcttcaattgcgtgtcggagattt

SEQ ID NO: 345659 - DNA, 30 bp, Artificial Sequence
  Synthetic oligonucleotide
ctttaaggagaaaggttcgtttatagattt

SEQ ID NO: 345660 - DNA, 30 bp, Artificial Sequence
  Synthetic oligonucleotide
acacaagacctttggcacatgcctagattt

SEQ ID NO: 345661 - DNA, 30 bp, Artificial Sequence
  Synthetic oligonucleotide
aggaaccggctctcaagttaatctagattt

SEQ ID NO: 345662 - DNA, 31 bp, Artificial Sequence
  Synthetic oligonucleotide
tcattaccattccggactatgatcccgattt

SEQ ID NO: 345663 - DNA, 30 bp, Artificial Sequence
  Synthetic oligonucleotide
cctccgtcattgacaaggttcactcgattt

SEQ ID NO: 345664 - DNA, 30 bp, Artificial Sequence
  Synthetic oligonucleotide
actcgctgtgcttgaggtttccgtcgattt

SEQ ID NO: 345665 - DNA, 29 bp, Artificial Sequence
  Synthetic oligonucleotide
cagattgtgagccatcttaatacggattt

SEQ ID NO: 345666 - DNA, 30 bp, Artificial Sequence
  Synthetic oligonucleotide
gactgtgtcgtttttgtgatctccggattt

SEQ ID NO: 345667 - DNA, 30 bp, Artificial Sequence
  Synthetic oligonucleotide
gcttttcgtgatggtcattccttcggattt

SEQ ID NO: 345668 - DNA, 30 bp, Artificial Sequence
  Synthetic oligonucleotide
tgtggatattacgtggttcctgttggattt

SEQ ID NO: 345669 - DNA, 30 bp, Artificial Sequence
  Synthetic oligonucleotide
tgaggtatcgcatactattctaaatgattt

SEQ ID NO: 345670 - DNA, 30 bp, Artificial Sequence
  Synthetic oligonucleotide
ataactcgtaagagtacatgacgatgattt

SEQ ID NO: 345671 - DNA, 30 bp, Artificial Sequence
  Synthetic oligonucleotide
ttttgggcgaaagagtctacggactgattt

SEQ ID NO: 345672 - DNA, 30 bp, Artificial Sequence
  Synthetic oligonucleotide
acattatttgaagaagctgagccctgattt

SEQ ID NO: 345673 - DNA, 30 bp, Artificial Sequence
  Synthetic oligonucleotide
ataaccgaaaatattccggtagcctgattt

SEQ ID NO: 345674 - DNA, 30 bp, Artificial Sequence
  Synthetic oligonucleotide
gtcgcatcgttttacttgatgtcctgattt

SEQ ID NO: 345675 - DNA, 30 bp, Artificial Sequence
  Synthetic oligonucleotide
taaatcaccaacaataggataatctgattt

SEQ ID NO: 345676 - DNA, 30 bp, Artificial Sequence
  Synthetic oligonucleotide
tatgattacccttataccccaatgtgattt

SEQ ID NO: 345677 - DNA, 30 bp, Artificial Sequence
  Synthetic oligonucleotide
gcaaaaaacacgaaatagactctgtgattt

SEQ ID NO: 345678 - DNA, 30 bp, Artificial Sequence
  Synthetic oligonucleotide
tagaagtcggatgcttaggcattttgattt

SEQ ID NO: 345679 - DNA, 30 bp, Artificial Sequence
  Synthetic oligonucleotide
caccaataagcgaacaactttgacatattt

SEQ ID NO: 345680 - DNA, 30 bp, Artificial Sequence
  Synthetic oligonucleotide
gcagatatggaaatcgtaatgggcatattt

SEQ ID NO: 345681 - DNA, 30 bp, Artificial Sequence
  Synthetic oligonucleotide
ggaaggccggaagagttattccggatattt

SEQ ID NO: 345682 - DNA, 30 bp, Artificial Sequence
  Synthetic oligonucleotide
gttggcttgatcatgcggccgcatatattt

SEQ ID NO: 345683 - DNA, 30 bp, Artificial Sequence
  Synthetic oligonucleotide
acaagaacctgcacgggcacagatatattt

SEQ ID NO: 345684 - DNA, 30 bp, Artificial Sequence
  Synthetic oligonucleotide
cgctttacggaatggactagtgctatattt

SEQ ID NO: 345685 - DNA, 30 bp, Artificial Sequence
  Synthetic oligonucleotide
acgggccttcccgagggttaaggactattt

SEQ ID NO: 345686 - DNA, 30 bp, Artificial Sequence
  Synthetic oligonucleotide
cgagaaattggttcatcctgaagcctattt

SEQ ID NO: 345687 - DNA, 30 bp, Artificial Sequence
  Synthetic oligonucleotide
agcgagatgcagccacagaagaagctattt

SEQ ID NO: 345688 - DNA, 30 bp, Artificial Sequence
  Synthetic oligonucleotide
taacggcagcccagatgttcttggctattt

SEQ ID NO: 345689 - DNA, 30 bp, Artificial Sequence
  Synthetic oligonucleotide
gaccctcaacttggctattctcgtctattt

SEQ ID NO: 345690 - DNA, 30 bp, Artificial Sequence
  Synthetic oligonucleotide
attggaagtcgggtctctattattctattt

SEQ ID NO: 345691 - DNA, 30 bp, Artificial Sequence
  Synthetic oligonucleotide
tactggagaggcggagtctgcctagtattt

SEQ ID NO: 345692 - DNA, 30 bp, Artificial Sequence
  Synthetic oligonucleotide
cgtatgtatactttaggattgttagtattt

SEQ ID NO: 345693 - DNA, 30 bp, Artificial Sequence
  Synthetic oligonucleotide
ataagtgtcggtcagaccggacacgtattt

SEQ ID NO: 345694 - DNA, 30 bp, Artificial Sequence
  Synthetic oligonucleotide
catatatgacgaaacagtgaggatgtattt

SEQ ID NO: 345695 - DNA, 30 bp, Artificial Sequence
  Synthetic oligonucleotide
gggcgtatacctaacatggatagtgtattt

SEQ ID NO: 345696 - DNA, 30 bp, Artificial Sequence
  Synthetic oligonucleotide
ttaaaaagcatcctgcgcggaagattattt

SEQ ID NO: 345697 - DNA, 30 bp, Artificial Sequence
  Synthetic oligonucleotide
aggcatagtcgtccatagaatctattattt

SEQ ID NO: 345698 - DNA, 30 bp, Artificial Sequence
  Synthetic oligonucleotide
cagtgatctaagtccacggatttcttattt

SEQ ID NO: 345699 - DNA, 30 bp, Artificial Sequence
  Synthetic oligonucleotide
agtcatgcgtctggaagggggcagttattt

SEQ ID NO: 345700 - DNA, 30 bp, Artificial Sequence
  Synthetic oligonucleotide
ccagaaagcgtcgtaatgacaacgttattt

SEQ ID NO: 345701 - DNA, 30 bp, Artificial Sequence
  Synthetic oligonucleotide
tggaacgtctcggccggagtcagtttattt

SEQ ID NO: 345702 - DNA, 30 bp, Artificial Sequence
  Synthetic oligonucleotide
cggacaccgggagcttggaataaaaacttt

SEQ ID NO: 345703 - DNA, 30 bp, Artificial Sequence
  Synthetic oligonucleotide
acagccatgaataaaagttaagtaaacttt

SEQ ID NO: 345704 - DNA, 30 bp, Artificial Sequence
  Synthetic oligonucleotide
tccgggtcagtgtaaaaaacagacaacttt

SEQ ID NO: 345705 - DNA, 30 bp, Artificial Sequence
  Synthetic oligonucleotide
agcgagccgttctccctcggtatgaacttt

SEQ ID NO: 345706 - DNA, 30 bp, Artificial Sequence
  Synthetic oligonucleotide
taaatgtccgcgataggacccaataacttt

SEQ ID NO: 345707 - DNA, 30 bp, Artificial Sequence
  Synthetic oligonucleotide
ggtggccacggattactgcgccgacacttt

SEQ ID NO: 345708 - DNA, 30 bp, Artificial Sequence
  Synthetic oligonucleotide
gcgctgaagaggacctattaaaaccacttt

SEQ ID NO: 345709 - DNA, 30 bp, Artificial Sequence
  Synthetic oligonucleotide
gcccccatcgcttcagcacgtacccacttt

SEQ ID NO: 345710 - DNA, 30 bp, Artificial Sequence
  Synthetic oligonucleotide
gcggtcacgcgcggggatcgcccccacttt

SEQ ID NO: 345711 - DNA, 30 bp, Artificial Sequence
  Synthetic oligonucleotide
atcatatagttaagttactcgatccacttt

SEQ ID NO: 345712 - DNA, 30 bp, Artificial Sequence
  Synthetic oligonucleotide
agaagtggaggacccagcgaacagcacttt

SEQ ID NO: 345713 - DNA, 30 bp, Artificial Sequence
  Synthetic oligonucleotide
atactgaggcctaataaaggtcatcacttt

SEQ ID NO: 345714 - DNA, 30 bp, Artificial Sequence
  Synthetic oligonucleotide
agtacatcattcctgtaagaaagtcacttt

SEQ ID NO: 345715 - DNA, 30 bp, Artificial Sequence
  Synthetic oligonucleotide
gcggttccagaatactatagcggtcacttt

SEQ ID NO: 345716 - DNA, 30 bp, Artificial Sequence
  Synthetic oligonucleotide
attgacaattagggttataaggcggacttt

SEQ ID NO: 345717 - DNA, 30 bp, Artificial Sequence
  Synthetic oligonucleotide
aggacggatttttagtcaattggggacttt

SEQ ID NO: 345718 - DNA, 30 bp, Artificial Sequence
  Synthetic oligonucleotide
ggacggggtaaactcgccaaactggacttt

SEQ ID NO: 345719 - DNA, 30 bp, Artificial Sequence
  Synthetic oligonucleotide
tacgagcggagttacagatctgcatacttt

SEQ ID NO: 345720 - DNA, 30 bp, Artificial Sequence
  Synthetic oligonucleotide
tgtaattattgcgtcagccattgatacttt

SEQ ID NO: 345721 - DNA, 30 bp, Artificial Sequence
  Synthetic oligonucleotide
aggtctttaaaaagtatgagccactacttt

SEQ ID NO: 345722 - DNA, 30 bp, Artificial Sequence
  Synthetic oligonucleotide
tccaataccgctccgtactcactctacttt

SEQ ID NO: 345723 - DNA, 30 bp, Artificial Sequence
  Synthetic oligonucleotide
cttagcggctgctaaggataactgtacttt

SEQ ID NO: 345724 - DNA, 30 bp, Artificial Sequence
  Synthetic oligonucleotide
ggcagggagagactgggcctgctttacttt

SEQ ID NO: 345725 - DNA, 30 bp, Artificial Sequence
  Synthetic oligonucleotide
atcataacatacagataccgggcaaccttt

SEQ ID NO: 345726 - DNA, 30 bp, Artificial Sequence
  Synthetic oligonucleotide
catcattgggataaatccgattcaaccttt

SEQ ID NO: 345727 - DNA, 30 bp, Artificial Sequence
  Synthetic oligonucleotide
ctgaagagatccaaatctgcctacaccttt

SEQ ID NO: 345728 - DNA, 30 bp, Artificial Sequence
  Synthetic oligonucleotide
gattcaagaggtccaggaacttccaccttt

SEQ ID NO: 345729 - DNA, 30 bp, Artificial Sequence
  Synthetic oligonucleotide
tttacggaatggtattacggcttgcccttt

SEQ ID NO: 345730 - DNA, 30 bp, Artificial Sequence
  Synthetic oligonucleotide
ggtgttggatttttcaggagtggggccttt

SEQ ID NO: 345731 - DNA, 30 bp, Artificial Sequence
  Synthetic oligonucleotide
aagggcccgctttttacgaaaatggccttt

SEQ ID NO: 345732 - DNA, 31 bp, Artificial Sequence
  Synthetic oligonucleotide
atcaacgtcgaagttaagcgatggatccttt

SEQ ID NO: 345733 - DNA, 30 bp, Artificial Sequence
  Synthetic oligonucleotide
cgactcgattaatttcggtgttagtccttt

SEQ ID NO: 345734 - DNA, 30 bp, Artificial Sequence
  Synthetic oligonucleotide
ctaggcaccgcgttaggagagtgaagcttt

SEQ ID NO: 345735 - DNA, 31 bp, Artificial Sequence
  Synthetic oligonucleotide
tgctgggttccatttaggttgttgaagcttt

SEQ ID NO: 345736 - DNA, 30 bp, Artificial Sequence
  Synthetic oligonucleotide
atagaataactccctataacgctaagcttt

SEQ ID NO: 345737 - DNA, 30 bp, Artificial Sequence
  Synthetic oligonucleotide
gacggtcggctcgtcggcccgaacagcttt

SEQ ID NO: 345738 - DNA, 30 bp, Artificial Sequence
  Synthetic oligonucleotide
tgatttgggtctacctatatctagagcttt

SEQ ID NO: 345739 - DNA, 30 bp, Artificial Sequence
  Synthetic oligonucleotide
atggacatggttgtgacagaggggagcttt

SEQ ID NO: 345740 - DNA, 30 bp, Artificial Sequence
  Synthetic oligonucleotide
gtctccctggccacaggggaatggagcttt

SEQ ID NO: 345741 - DNA, 30 bp, Artificial Sequence
  Synthetic oligonucleotide
cttgccgtttgtcaggtgttttggagcttt

SEQ ID NO: 345742 - DNA, 30 bp, Artificial Sequence
  Synthetic oligonucleotide
atcgaaagtatatggacctccttgagcttt

SEQ ID NO: 345743 - DNA, 30 bp, Artificial Sequence
  Synthetic oligonucleotide
ctttcgtgcttctaaggaatgcatagcttt

SEQ ID NO: 345744 - DNA, 30 bp, Artificial Sequence
  Synthetic oligonucleotide
gcgatgaatatcgccacccaaactagcttt

SEQ ID NO: 345745 - DNA, 30 bp, Artificial Sequence
  Synthetic oligonucleotide
ttaagacaggcctccgagggaagtagcttt

SEQ ID NO: 345746 - DNA, 30 bp, Artificial Sequence
  Synthetic oligonucleotide
tcacggacttgacaattgttaattagcttt

SEQ ID NO: 345747 - DNA, 30 bp, Artificial Sequence
  Synthetic oligonucleotide
tgcagtctgtaagcggagccagttagcttt

SEQ ID NO: 345748 - DNA, 30 bp, Artificial Sequence
  Synthetic oligonucleotide
gaccgacgtatctcccgtatcaaacgcttt

SEQ ID NO: 345749 - DNA, 30 bp, Artificial Sequence
  Synthetic oligonucleotide
tcgggcaacctggtttaaacgtaacgcttt

SEQ ID NO: 345750 - DNA, 30 bp, Artificial Sequence
  Synthetic oligonucleotide
gcatagcaacacttagctctggcacgcttt

SEQ ID NO: 345751 - DNA, 30 bp, Artificial Sequence
  Synthetic oligonucleotide
aaccatcgatgtggaagcggcatccgcttt

SEQ ID NO: 345752 - DNA, 30 bp, Artificial Sequence
  Synthetic oligonucleotide
agataccacttttacgaagtattccgcttt

SEQ ID NO: 345753 - DNA, 30 bp, Artificial Sequence
  Synthetic oligonucleotide
gggcgagaggcacttacttcgccgcgcttt

SEQ ID NO: 345754 - DNA, 30 bp, Artificial Sequence
  Synthetic oligonucleotide
tggtggaactcggttggatccaaaggcttt

SEQ ID NO: 345755 - DNA, 30 bp, Artificial Sequence
  Synthetic oligonucleotide
aacgttgctggaattgagatccaaggcttt

SEQ ID NO: 345756 - DNA, 30 bp, Artificial Sequence
  Synthetic oligonucleotide
agagcgtgccggagttggcggagaggcttt

SEQ ID NO: 345757 - DNA, 30 bp, Artificial Sequence
  Synthetic oligonucleotide
tggcaactggtaccagccagcttcggcttt

SEQ ID NO: 345758 - DNA, 30 bp, Artificial Sequence
  Synthetic oligonucleotide
tgagatatgtctgccaaaaccaatggcttt

SEQ ID NO: 345759 - DNA, 30 bp, Artificial Sequence
  Synthetic oligonucleotide
agcacctccaagccgccacccgctggcttt

SEQ ID NO: 345760 - DNA, 30 bp, Artificial Sequence
  Synthetic oligonucleotide
ctatacagtatgcgacgatatattggcttt

SEQ ID NO: 345761 - DNA, 30 bp, Artificial Sequence
  Synthetic oligonucleotide
ggtaagggcgctaaccaaaagttctgcttt

SEQ ID NO: 345762 - DNA, 30 bp, Artificial Sequence
  Synthetic oligonucleotide
cctaagctatagttactcacctcgtgcttt

SEQ ID NO: 345763 - DNA, 30 bp, Artificial Sequence
  Synthetic oligonucleotide
aacaggggcgatcgctacaaaaattgcttt

SEQ ID NO: 345764 - DNA, 30 bp, Artificial Sequence
  Synthetic oligonucleotide
tcatgggacccggactacggttattgcttt

SEQ ID NO: 345765 - DNA, 30 bp, Artificial Sequence
  Synthetic oligonucleotide
tggaggcgtgaataggaatatatttgcttt

SEQ ID NO: 345766 - DNA, 30 bp, Artificial Sequence
  Synthetic oligonucleotide
gttataacagtgccagaaacgtccatcttt

SEQ ID NO: 345767 - DNA, 30 bp, Artificial Sequence
  Synthetic oligonucleotide
acctatatattgaattcaacacgtatcttt

SEQ ID NO: 345768 - DNA, 30 bp, Artificial Sequence
  Synthetic oligonucleotide
gttgaggttggtagggttgccattatcttt

SEQ ID NO: 345769 - DNA, 30 bp, Artificial Sequence
  Synthetic oligonucleotide
aggatacaccatgataaggtgcttatcttt

SEQ ID NO: 345770 - DNA, 30 bp, Artificial Sequence
  Synthetic oligonucleotide
gaaggaaccaggtgtcagtatggactcttt

SEQ ID NO: 345771 - DNA, 30 bp, Artificial Sequence
  Synthetic oligonucleotide
accatgggcgacggcgtaagattactcttt

SEQ ID NO: 345772 - DNA, 30 bp, Artificial Sequence
  Synthetic oligonucleotide
ttctgtcagacagtgagagatactctcttt

SEQ ID NO: 345773 - DNA, 30 bp, Artificial Sequence
  Synthetic oligonucleotide
tcacggcgatgggtgtacaggcgtctcttt

SEQ ID NO: 345774 - DNA, 30 bp, Artificial Sequence
  Synthetic oligonucleotide
agctgaggacacggccaacagctcgtcttt

SEQ ID NO: 345775 - DNA, 30 bp, Artificial Sequence
  Synthetic oligonucleotide
cctaatagcattggagaataccaattcttt

SEQ ID NO: 345776 - DNA, 30 bp, Artificial Sequence
  Synthetic oligonucleotide
tgaaaaagtaggtatccctgtagattcttt

SEQ ID NO: 345777 - DNA, 30 bp, Artificial Sequence
  Synthetic oligonucleotide
aacggggattcgcgttaaccaggattcttt

SEQ ID NO: 345778 - DNA, 30 bp, Artificial Sequence
  Synthetic oligonucleotide
actatcggccgaaagccagcgggcttcttt

SEQ ID NO: 345779 - DNA, 30 bp, Artificial Sequence
  Synthetic oligonucleotide
atcatgaattaatcttaatggtagttcttt

SEQ ID NO: 345780 - DNA, 30 bp, Artificial Sequence
  Synthetic oligonucleotide
ggggcccaggcagaccatgtgaatttcttt

SEQ ID NO: 345781 - DNA, 30 bp, Artificial Sequence
  Synthetic oligonucleotide
ttgcgggatgattcgaaactccatttcttt

SEQ ID NO: 345782 - DNA, 30 bp, Artificial Sequence
  Synthetic oligonucleotide
gtgagaagagaaggtggtattaaaaagttt

SEQ ID NO: 345783 - DNA, 30 bp, Artificial Sequence
  Synthetic oligonucleotide
gatcaacatcacatgtcactaacaaagttt

SEQ ID NO: 345784 - DNA, 30 bp, Artificial Sequence
  Synthetic oligonucleotide
gcaagtgccgttacggttgaggtcaagttt

SEQ ID NO: 345785 - DNA, 30 bp, Artificial Sequence
  Synthetic oligonucleotide
tgacacggacatgattgtctcatgaagttt

SEQ ID NO: 345786 - DNA, 30 bp, Artificial Sequence
  Synthetic oligonucleotide
gtttcctcgcggattggaaaggataagttt

SEQ ID NO: 345787 - DNA, 30 bp, Artificial Sequence
  Synthetic oligonucleotide
ggggtaagtacgtagaagaaccttaagttt

SEQ ID NO: 345788 - DNA, 30 bp, Artificial Sequence
  Synthetic oligonucleotide
atctagtttcccgtgggcatacagcagttt

SEQ ID NO: 345789 - DNA, 30 bp, Artificial Sequence
  Synthetic oligonucleotide
accgtacgacgactttgaaaaaggcagttt

SEQ ID NO: 345790 - DNA, 30 bp, Artificial Sequence
  Synthetic oligonucleotide
ggttggtactaccgcaaatccaggcagttt

SEQ ID NO: 345791 - DNA, 30 bp, Artificial Sequence
  Synthetic oligonucleotide
tgaatgatctgaggtgtaaaggtgcagttt

SEQ ID NO: 345792 - DNA, 30 bp, Artificial Sequence
  Synthetic oligonucleotide
gacactgacggcccatgaggggcagagttt

SEQ ID NO: 345793 - DNA, 30 bp, Artificial Sequence
  Synthetic oligonucleotide
aatatgatcgacctgcacctccatgagttt

SEQ ID NO: 345794 - DNA, 30 bp, Artificial Sequence
  Synthetic oligonucleotide
ctttaaatgacggaccctccgaaatagttt

SEQ ID NO: 345795 - DNA, 30 bp, Artificial Sequence
  Synthetic oligonucleotide
actagcaaaaactactagatacaatagttt

SEQ ID NO: 345796 - DNA, 30 bp, Artificial Sequence
  Synthetic oligonucleotide
cggacccgtgacacctctctgccatagttt

SEQ ID NO: 345797 - DNA, 30 bp, Artificial Sequence
  Synthetic oligonucleotide
gcaaaacgcataggtacgcctggctagttt

SEQ ID NO: 345798 - DNA, 30 bp, Artificial Sequence
  Synthetic oligonucleotide
gttaaccggcgcttaattgatgagtagttt

SEQ ID NO: 345799 - DNA, 30 bp, Artificial Sequence
  Synthetic oligonucleotide
ggtttaagctaaaacgctaacatgtagttt

SEQ ID NO: 345800 - DNA, 30 bp, Artificial Sequence
  Synthetic oligonucleotide
acagttatgcgttgtatgcctcgttagttt

SEQ ID NO: 345801 - DNA, 30 bp, Artificial Sequence
  Synthetic oligonucleotide
cccacaaggactatctgggttacaacgttt

SEQ ID NO: 345802 - DNA, 30 bp, Artificial Sequence
  Synthetic oligonucleotide
atagcgattaatcggcgggacaacacgttt

SEQ ID NO: 345803 - DNA, 30 bp, Artificial Sequence
  Synthetic oligonucleotide
aaggatttagaaagcttaccagcgacgttt

SEQ ID NO: 345804 - DNA, 30 bp, Artificial Sequence
  Synthetic oligonucleotide
taaacgggtccttgccatgtcgtgacgttt

SEQ ID NO: 345805 - DNA, 30 bp, Artificial Sequence
  Synthetic oligonucleotide
ggaagaaaggttccgaacatttttacgttt

SEQ ID NO: 345806 - DNA, 30 bp, Artificial Sequence
  Synthetic oligonucleotide
catcctggtatgttacactttataccgttt

SEQ ID NO: 345807 - DNA, 30 bp, Artificial Sequence
  Synthetic oligonucleotide
ctgtcaaactggaccgaggcagacccgttt

SEQ ID NO: 345808 - DNA, 30 bp, Artificial Sequence
  Synthetic oligonucleotide
atctcagctcgacgaatgtgcttcccgttt

SEQ ID NO: 345809 - DNA, 30 bp, Artificial Sequence
  Synthetic oligonucleotide
ggacctggttgtggtgagtaacagccgttt

SEQ ID NO: 345810 - DNA, 30 bp, Artificial Sequence
  Synthetic oligonucleotide
gggaggcacaggaaggtatgctggccgttt

SEQ ID NO: 345811 - DNA, 30 bp, Artificial Sequence
  Synthetic oligonucleotide
cggaacctctttttcaccgctagtccgttt

SEQ ID NO: 345812 - DNA, 30 bp, Artificial Sequence
  Synthetic oligonucleotide
tccgcgcattaccatggagtgaccgcgttt

SEQ ID NO: 345813 - DNA, 30 bp, Artificial Sequence
  Synthetic oligonucleotide
aacacggttgaaggttgtaaccgcgcgttt

SEQ ID NO: 345814 - DNA, 30 bp, Artificial Sequence
  Synthetic oligonucleotide
atcccgcgatgacacgtacgttaggcgttt

SEQ ID NO: 345815 - DNA, 30 bp, Artificial Sequence
  Synthetic oligonucleotide
cgctattaggaacaagttgcccatgcgttt

SEQ ID NO: 345816 - DNA, 30 bp, Artificial Sequence
  Synthetic oligonucleotide
tcggcgctagcagccttatcagctgcgttt

SEQ ID NO: 345817 - DNA, 30 bp, Artificial Sequence
  Synthetic oligonucleotide
tcaaatttagggttcacatccggtgcgttt

SEQ ID NO: 345818 - DNA, 30 bp, Artificial Sequence
  Synthetic oligonucleotide
atctcgcagagcaagccgagacttgcgttt

SEQ ID NO: 345819 - DNA, 30 bp, Artificial Sequence
  Synthetic oligonucleotide
tagataccgaatgaacgcaattttgcgttt

SEQ ID NO: 345820 - DNA, 30 bp, Artificial Sequence
  Synthetic oligonucleotide
atcgcggtaaatgtcttaaattaatcgttt

SEQ ID NO: 345821 - DNA, 30 bp, Artificial Sequence
  Synthetic oligonucleotide
acctgaatatacctgtcatccatatcgttt

SEQ ID NO: 345822 - DNA, 30 bp, Artificial Sequence
  Synthetic oligonucleotide
gtcggtgcctgccttggcaaagtctcgttt

SEQ ID NO: 345823 - DNA, 30 bp, Artificial Sequence
  Synthetic oligonucleotide
agcattttcggccattggaaattttcgttt

SEQ ID NO: 345824 - DNA, 30 bp, Artificial Sequence
  Synthetic oligonucleotide
gaaagtgagtccaaacctgaaataaggttt

SEQ ID NO: 345825 - DNA, 30 bp, Artificial Sequence
  Synthetic oligonucleotide
cgttgtcgggatgtaaggcccctaaggttt

SEQ ID NO: 345826 - DNA, 30 bp, Artificial Sequence
  Synthetic oligonucleotide
tgaccaaacttgttggacagagtaaggttt

SEQ ID NO: 345827 - DNA, 30 bp, Artificial Sequence
  Synthetic oligonucleotide
caaacacgtgcacgggtttggagcaggttt

SEQ ID NO: 345828 - DNA, 30 bp, Artificial Sequence
  Synthetic oligonucleotide
tctttcgggcctataagcaccatcaggttt

SEQ ID NO: 345829 - DNA, 30 bp, Artificial Sequence
  Synthetic oligonucleotide
cgttgtcttaagtatcttattccgaggttt

SEQ ID NO: 345830 - DNA, 30 bp, Artificial Sequence
  Synthetic oligonucleotide
aaagcgcgcctataaacaaaatcgaggttt

SEQ ID NO: 345831 - DNA, 30 bp, Artificial Sequence
  Synthetic oligonucleotide
ctctcaagcatcgcgggagggatgaggttt

SEQ ID NO: 345832 - DNA, 30 bp, Artificial Sequence
  Synthetic oligonucleotide
ctattgagctcatcgtgacgcttgaggttt

SEQ ID NO: 345833 - DNA, 30 bp, Artificial Sequence
  Synthetic oligonucleotide
atctgaatttgtaacaaatctaataggttt

SEQ ID NO: 345834 - DNA, 30 bp, Artificial Sequence
  Synthetic oligonucleotide
atacgaatcgtcttgggggctgctaggttt

SEQ ID NO: 345835 - DNA, 30 bp, Artificial Sequence
  Synthetic oligonucleotide
tgagtggcgcaaggcggaaatggtaggttt

SEQ ID NO: 345836 - DNA, 30 bp, Artificial Sequence
  Synthetic oligonucleotide
ccgtccgctaaagatcatttctttaggttt

SEQ ID NO: 345837 - DNA, 30 bp, Artificial Sequence
  Synthetic oligonucleotide
cttggtaaacgtgtctctcatggacggttt

SEQ ID NO: 345838 - DNA, 30 bp, Artificial Sequence
  Synthetic oligonucleotide
ctgtgctctatagacaataaacaccggttt

SEQ ID NO: 345839 - DNA, 30 bp, Artificial Sequence
  Synthetic oligonucleotide
attcggcatacgctaaagaaattgcggttt

SEQ ID NO: 345840 - DNA, 30 bp, Artificial Sequence
  Synthetic oligonucleotide
cgctacaccattcgtagtatgcctcggttt

SEQ ID NO: 345841 - DNA, 30 bp, Artificial Sequence
  Synthetic oligonucleotide
gtaaggcaaccccagtatgtccaggggttt

SEQ ID NO: 345842 - DNA, 30 bp, Artificial Sequence
  Synthetic oligonucleotide
gggaatagaattttatgcggcccggggttt

SEQ ID NO: 345843 - DNA, 29 bp, Artificial Sequence
  Synthetic oligonucleotide
cactgaatacgaagcttatgtcggggttt

SEQ ID NO: 345844 - DNA, 30 bp, Artificial Sequence
  Synthetic oligonucleotide
ggatgcatattttcaagattcctggggttt

SEQ ID NO: 345845 - DNA, 30 bp, Artificial Sequence
  Synthetic oligonucleotide
gtgcgtctttgatcagcgtagctggggttt

SEQ ID NO: 345846 - DNA, 30 bp, Artificial Sequence
  Synthetic oligonucleotide
ctcgcttccacactcttctttcctgggttt

SEQ ID NO: 345847 - DNA, 30 bp, Artificial Sequence
  Synthetic oligonucleotide
ctgtaaacgttttagagtgggagtgggttt

SEQ ID NO: 345848 - DNA, 30 bp, Artificial Sequence
  Synthetic oligonucleotide
tcgctacccagcaagaccaacgttgggttt

SEQ ID NO: 345849 - DNA, 30 bp, Artificial Sequence
  Synthetic oligonucleotide
caatctgatgtcgcaatacgggttgggttt

SEQ ID NO: 345850 - DNA, 30 bp, Artificial Sequence
  Synthetic oligonucleotide
gttagtaagttggagacatcacaatggttt

SEQ ID NO: 345851 - DNA, 30 bp, Artificial Sequence
  Synthetic oligonucleotide
cgtttaaacgataaaagccagacatggttt

SEQ ID NO: 345852 - DNA, 30 bp, Artificial Sequence
  Synthetic oligonucleotide
cccatattttggacttaatgcgtatggttt

SEQ ID NO: 345853 - DNA, 30 bp, Artificial Sequence
  Synthetic oligonucleotide
gggtcgacgatggccaaccgtttatggttt

SEQ ID NO: 345854 - DNA, 30 bp, Artificial Sequence
  Synthetic oligonucleotide
actcgatctcggagggctgggaattggttt

SEQ ID NO: 345855 - DNA, 30 bp, Artificial Sequence
  Synthetic oligonucleotide
aaagacggaagcccgcacaattattggttt

SEQ ID NO: 345856 - DNA, 30 bp, Artificial Sequence
  Synthetic oligonucleotide
gtcccgtacccaggtatgagggcttggttt

SEQ ID NO: 345857 - DNA, 30 bp, Artificial Sequence
  Synthetic oligonucleotide
ggcggctgagcctgggtatccatttggttt

SEQ ID NO: 345858 - DNA, 30 bp, Artificial Sequence
  Synthetic oligonucleotide
cgctatagtatgatttgttacctttggttt

SEQ ID NO: 345859 - DNA, 30 bp, Artificial Sequence
  Synthetic oligonucleotide
agcggccaaatttggatccaaaaaatgttt

SEQ ID NO: 345860 - DNA, 30 bp, Artificial Sequence
  Synthetic oligonucleotide
atggggaaactgctcggtcttcaaatgttt

SEQ ID NO: 345861 - DNA, 30 bp, Artificial Sequence
  Synthetic oligonucleotide
gacggggcttctgtctagttgagaatgttt

SEQ ID NO: 345862 - DNA, 30 bp, Artificial Sequence
  Synthetic oligonucleotide
ggtacgaagggtcctgtacctataatgttt

SEQ ID NO: 345863 - DNA, 30 bp, Artificial Sequence
  Synthetic oligonucleotide
caggccactggctttaaacttctaatgttt

SEQ ID NO: 345864 - DNA, 30 bp, Artificial Sequence
  Synthetic oligonucleotide
tatcaagtacgcatgtccttcggcatgttt

SEQ ID NO: 345865 - DNA, 30 bp, Artificial Sequence
  Synthetic oligonucleotide
gaaacaccgaatctatttggagagatgttt

SEQ ID NO: 345866 - DNA, 30 bp, Artificial Sequence
  Synthetic oligonucleotide
ttcatttcacgcgacttcgtgtttatgttt

SEQ ID NO: 345867 - DNA, 30 bp, Artificial Sequence
  Synthetic oligonucleotide
acaatgcaccagcgtggttttttactgttt

SEQ ID NO: 345868 - DNA, 30 bp, Artificial Sequence
  Synthetic oligonucleotide
cgctggaagatatcgtagaagcacctgttt

SEQ ID NO: 345869 - DNA, 30 bp, Artificial Sequence
  Synthetic oligonucleotide
gcgatgcagcaggaggcggggtacctgttt

SEQ ID NO: 345870 - DNA, 30 bp, Artificial Sequence
  Synthetic oligonucleotide
aggagcgtgctgactgcttatgccctgttt

SEQ ID NO: 345871 - DNA, 30 bp, Artificial Sequence
  Synthetic oligonucleotide
gaaatcagtcatttaatagagaagctgttt

SEQ ID NO: 345872 - DNA, 30 bp, Artificial Sequence
  Synthetic oligonucleotide
agcaaactcttaattttgaaacaagtgttt

SEQ ID NO: 345873 - DNA, 30 bp, Artificial Sequence
  Synthetic oligonucleotide
tcccacggtacgagaataccaacagtgttt

SEQ ID NO: 345874 - DNA, 30 bp, Artificial Sequence
  Synthetic oligonucleotide
taaactggtcggcggcagggaccagtgttt

SEQ ID NO: 345875 - DNA, 30 bp, Artificial Sequence
  Synthetic oligonucleotide
aaacgcgaagtaaaatacatcgcagtgttt

SEQ ID NO: 345876 - DNA, 30 bp, Artificial Sequence
  Synthetic oligonucleotide
ctaatggattcaagcatgtttggagtgttt

SEQ ID NO: 345877 - DNA, 30 bp, Artificial Sequence
  Synthetic oligonucleotide
aacgggtcttattgagcaccattagtgttt

SEQ ID NO: 345878 - DNA, 30 bp, Artificial Sequence
  Synthetic oligonucleotide
tcttgactaaccgaaaaagcaaacgtgttt

SEQ ID NO: 345879 - DNA, 30 bp, Artificial Sequence
  Synthetic oligonucleotide
gcaagtcacatttaacaggtccgcgtgttt

SEQ ID NO: 345880 - DNA, 30 bp, Artificial Sequence
  Synthetic oligonucleotide
agaaagacaaatgcagaatcgtccttgttt

SEQ ID NO: 345881 - DNA, 30 bp, Artificial Sequence
  Synthetic oligonucleotide
aggtagacgcggtcgatcacgaagttgttt

SEQ ID NO: 345882 - DNA, 30 bp, Artificial Sequence
  Synthetic oligonucleotide
gctggaaacttgccagcggactagttgttt

SEQ ID NO: 345883 - DNA, 30 bp, Artificial Sequence
  Synthetic oligonucleotide
tgaggacctgcaacgtggacagcgttgttt

SEQ ID NO: 345884 - DNA, 30 bp, Artificial Sequence
  Synthetic oligonucleotide
ggaacagtgagtgtagaaacaaatttgttt

SEQ ID NO: 345885 - DNA, 30 bp, Artificial Sequence
  Synthetic oligonucleotide
gacacacggacatgcgcttattgtttgttt

SEQ ID NO: 345886 - DNA, 30 bp, Artificial Sequence
  Synthetic oligonucleotide
tcatgattacgtatttaagggtttttgttt

SEQ ID NO: 345887 - DNA, 30 bp, Artificial Sequence
  Synthetic oligonucleotide
taagcagccctaatatgtttagaaaatttt

SEQ ID NO: 345888 - DNA, 30 bp, Artificial Sequence
  Synthetic oligonucleotide
tccgctctcagcaatcgtgcttaaaatttt

SEQ ID NO: 345889 - DNA, 30 bp, Artificial Sequence
  Synthetic oligonucleotide
catcatagcgggcttacgaagcccaatttt

SEQ ID NO: 345890 - DNA, 30 bp, Artificial Sequence
  Synthetic oligonucleotide
aaccgatgaatgcggtgtggccagaatttt

SEQ ID NO: 345891 - DNA, 30 bp, Artificial Sequence
  Synthetic oligonucleotide
tgccggaccgttcagcccagggtgaatttt

SEQ ID NO: 345892 - DNA, 30 bp, Artificial Sequence
  Synthetic oligonucleotide
gcggctcacggaaacataggcactaatttt

SEQ ID NO: 345893 - DNA, 30 bp, Artificial Sequence
  Synthetic oligonucleotide
gttacttggcgccatacattgcctaatttt

SEQ ID NO: 345894 - DNA, 30 bp, Artificial Sequence
  Synthetic oligonucleotide
atatccagtgattgtgagcgatctaatttt

SEQ ID NO: 345895 - DNA, 30 bp, Artificial Sequence
  Synthetic oligonucleotide
ggcaattcgcagaacttacgatgacatttt

SEQ ID NO: 345896 - DNA, 30 bp, Artificial Sequence
  Synthetic oligonucleotide
ttatgagactattagcgaatatggcatttt

SEQ ID NO: 345897 - DNA, 30 bp, Artificial Sequence
  Synthetic oligonucleotide
catgtcggcgagtggctgtcatctcatttt

SEQ ID NO: 345898 - DNA, 30 bp, Artificial Sequence
  Synthetic oligonucleotide
tctgtcctttcatgcaaatttcaagatttt

SEQ ID NO: 345899 - DNA, 30 bp, Artificial Sequence
  Synthetic oligonucleotide
tcggcaacaggacttgacatgccagatttt

SEQ ID NO: 345900 - DNA, 30 bp, Artificial Sequence
  Synthetic oligonucleotide
taagttctgatctcagtctgcaccgatttt

SEQ ID NO: 345901 - DNA, 30 bp, Artificial Sequence
  Synthetic oligonucleotide
cgcttgaaagtggcttctggcggcgatttt

SEQ ID NO: 345902 - DNA, 30 bp, Artificial Sequence
  Synthetic oligonucleotide
aggtacacaatttcgcagtatgatgatttt

SEQ ID NO: 345903 - DNA, 30 bp, Artificial Sequence
  Synthetic oligonucleotide
ctggggtaaatagacatatccacatatttt

SEQ ID NO: 345904 - DNA, 30 bp, Artificial Sequence
  Synthetic oligonucleotide
ggaacctttctccatctcgtcgactatttt

SEQ ID NO: 345905 - DNA, 30 bp, Artificial Sequence
  Synthetic oligonucleotide
acgtattctttaaggtccaggacctatttt

SEQ ID NO: 345906 - DNA, 30 bp, Artificial Sequence
  Synthetic oligonucleotide
tagcgacactggtcgttgcggccgtatttt

SEQ ID NO: 345907 - DNA, 30 bp, Artificial Sequence
  Synthetic oligonucleotide
aatggcatgttgatgtaatacaattatttt

SEQ ID NO: 345908 - DNA, 30 bp, Artificial Sequence
  Synthetic oligonucleotide
tcttaatctgatcctcctatgtgttatttt

SEQ ID NO: 345909 - DNA, 30 bp, Artificial Sequence
  Synthetic oligonucleotide
atgcgacatgcacgccgtacttcaactttt

SEQ ID NO: 345910 - DNA, 30 bp, Artificial Sequence
  Synthetic oligonucleotide
cggaagaaattgacgaccatgtggactttt

SEQ ID NO: 345911 - DNA, 30 bp, Artificial Sequence
  Synthetic oligonucleotide
ttaggggcaaatcccacctgaactactttt

SEQ ID NO: 345912 - DNA, 30 bp, Artificial Sequence
  Synthetic oligonucleotide
agctagtatagctgccacatgcaacctttt

SEQ ID NO: 345913 - DNA, 30 bp, Artificial Sequence
  Synthetic oligonucleotide
gcctatctatgatctaccagcacacctttt

SEQ ID NO: 345914 - DNA, 30 bp, Artificial Sequence
  Synthetic oligonucleotide
ttacaacattataaagcctagttacctttt

SEQ ID NO: 345915 - DNA, 30 bp, Artificial Sequence
  Synthetic oligonucleotide
cattcgaaaatatcagatatgtcccctttt

SEQ ID NO: 345916 - DNA, 30 bp, Artificial Sequence
  Synthetic oligonucleotide
tctagggaatgccctgagccagcgcctttt

SEQ ID NO: 345917 - DNA, 30 bp, Artificial Sequence
  Synthetic oligonucleotide
acttctaacccggttattgtgaaagctttt

SEQ ID NO: 345918 - DNA, 30 bp, Artificial Sequence
  Synthetic oligonucleotide
tcgtaagttaagtacccatctatagctttt

SEQ ID NO: 345919 - DNA, 30 bp, Artificial Sequence
  Synthetic oligonucleotide
acgtagcctttgtagagccaactagctttt

SEQ ID NO: 345920 - DNA, 30 bp, Artificial Sequence
  Synthetic oligonucleotide
ccgacccaaccttggggttaaggcgctttt

SEQ ID NO: 345921 - DNA, 29 bp, Artificial Sequence
  Synthetic oligonucleotide
gagtatggcaatttcttacgtcggctttt

SEQ ID NO: 345922 - DNA, 30 bp, Artificial Sequence
  Synthetic oligonucleotide
ggccgtgcccatgaagtaatgggggctttt

SEQ ID NO: 345923 - DNA, 30 bp, Artificial Sequence
  Synthetic oligonucleotide
ttaggagttgtgcagtcggacgtggctttt

SEQ ID NO: 345924 - DNA, 30 bp, Artificial Sequence
  Synthetic oligonucleotide
tggtcggagggcgaaaaattttatgctttt

SEQ ID NO: 345925 - DNA, 30 bp, Artificial Sequence
  Synthetic oligonucleotide
gaacaacaatcggggaatgatagatctttt

SEQ ID NO: 345926 - DNA, 30 bp, Artificial Sequence
  Synthetic oligonucleotide
ataattcggatccaaaggaggtgctctttt

SEQ ID NO: 345927 - DNA, 30 bp, Artificial Sequence
  Synthetic oligonucleotide
ttcactagcacatctaatctcctctctttt

SEQ ID NO: 345928 - DNA, 30 bp, Artificial Sequence
  Synthetic oligonucleotide
ggattgatgcaaagtatgggccaccgtttt

SEQ ID NO: 345929 - DNA, 30 bp, Artificial Sequence
  Synthetic oligonucleotide
tgggtgcagctaggagcgatattccgtttt

SEQ ID NO: 345930 - DNA, 30 bp, Artificial Sequence
  Synthetic oligonucleotide
cctttgtcatatcgagtacccaggcgtttt

SEQ ID NO: 345931 - DNA, 30 bp, Artificial Sequence
  Synthetic oligonucleotide
gtacattggggaggtttgccacggcgtttt

SEQ ID NO: 345932 - DNA, 30 bp, Artificial Sequence
  Synthetic oligonucleotide
cccaagtaattacacgggtgatatcgtttt

SEQ ID NO: 345933 - DNA, 30 bp, Artificial Sequence
  Synthetic oligonucleotide
gtaagcgcaggcacgcgaaaccctcgtttt

SEQ ID NO: 345934 - DNA, 30 bp, Artificial Sequence
  Synthetic oligonucleotide
gtattatatgcagggacctagcttcgtttt

SEQ ID NO: 345935 - DNA, 30 bp, Artificial Sequence
  Synthetic oligonucleotide
ggatcggctagtacagttatagttcgtttt

SEQ ID NO: 345936 - DNA, 30 bp, Artificial Sequence
  Synthetic oligonucleotide
agacgaagcgtctacatgttttttcgtttt

SEQ ID NO: 345937 - DNA, 30 bp, Artificial Sequence
  Synthetic oligonucleotide
aattctcgcgactgaagatcgccaggtttt

SEQ ID NO: 345938 - DNA, 30 bp, Artificial Sequence
  Synthetic oligonucleotide
cctactactcgagagtatactccaggtttt

SEQ ID NO: 345939 - DNA, 30 bp, Artificial Sequence
  Synthetic oligonucleotide
ccgactggtgggagaccagatgcaggtttt

SEQ ID NO: 345940 - DNA, 30 bp, Artificial Sequence
  Synthetic oligonucleotide
tatacgtgtttacactgagggtcaggtttt

SEQ ID NO: 345941 - DNA, 30 bp, Artificial Sequence
  Synthetic oligonucleotide
gtggcgcgttcagtagaggttctaggtttt

SEQ ID NO: 345942 - DNA, 30 bp, Artificial Sequence
  Synthetic oligonucleotide
tgaggataacaggtgacacaagtaggtttt

SEQ ID NO: 345943 - DNA, 30 bp, Artificial Sequence
  Synthetic oligonucleotide
ggcggtatataaatgtcctacgggggtttt

SEQ ID NO: 345944 - DNA, 30 bp, Artificial Sequence
  Synthetic oligonucleotide
attatgctgaacactgtccggactggtttt

SEQ ID NO: 345945 - DNA, 30 bp, Artificial Sequence
  Synthetic oligonucleotide
atctacaacaacgacatcacaggtggtttt

SEQ ID NO: 345946 - DNA, 30 bp, Artificial Sequence
  Synthetic oligonucleotide
cagcaccttaggttatcggtaaaatgtttt

SEQ ID NO: 345947 - DNA, 30 bp, Artificial Sequence
  Synthetic oligonucleotide
agatagttcgcgggggagttaatctgtttt

SEQ ID NO: 345948 - DNA, 30 bp, Artificial Sequence
  Synthetic oligonucleotide
aaaccccaaaacatccgctaccagtgtttt

SEQ ID NO: 345949 - DNA, 30 bp, Artificial Sequence
  Synthetic oligonucleotide
cgtaggcgcgatttcagaccatggtgtttt

SEQ ID NO: 345950 - DNA, 30 bp, Artificial Sequence
  Synthetic oligonucleotide
gagggctcgttggtatagaaggtgtgtttt

SEQ ID NO: 345951 - DNA, 30 bp, Artificial Sequence
  Synthetic oligonucleotide
gtcacaaaggaatgcgtagcatattgtttt

SEQ ID NO: 345952 - DNA, 30 bp, Artificial Sequence
  Synthetic oligonucleotide
gaaaatagaactcgctcggccagttgtttt

SEQ ID NO: 345953 - DNA, 30 bp, Artificial Sequence
  Synthetic oligonucleotide
tctcgctagggttttgtggggttttgtttt

SEQ ID NO: 345954 - DNA, 30 bp, Artificial Sequence
  Synthetic oligonucleotide
tgaatgaatgacgtttgcgtggcaattttt

SEQ ID NO: 345955 - DNA, 30 bp, Artificial Sequence
  Synthetic oligonucleotide
cggctcgacattgaagaaattcacattttt

SEQ ID NO: 345956 - DNA, 30 bp, Artificial Sequence
  Synthetic oligonucleotide
catgtgcaaatgtggcgggatgtcattttt

SEQ ID NO: 345957 - DNA, 30 bp, Artificial Sequence
  Synthetic oligonucleotide
ggtaagtgcacttcgaaagcgtggattttt

SEQ ID NO: 345958 - DNA, 30 bp, Artificial Sequence
  Synthetic oligonucleotide
caatgcgtcgtgttatagtctatgattttt

SEQ ID NO: 345959 - DNA, 30 bp, Artificial Sequence
  Synthetic oligonucleotide
agaaaaggctacgcgaactataatattttt

SEQ ID NO: 345960 - DNA, 30 bp, Artificial Sequence
  Synthetic oligonucleotide
gtggggggcttaaaacgggttagtattttt

SEQ ID NO: 345961 - DNA, 30 bp, Artificial Sequence
  Synthetic oligonucleotide
agaaacgtcgcgtatttgcatattattttt

SEQ ID NO: 345962 - DNA, 30 bp, Artificial Sequence
  Synthetic oligonucleotide
cgctctgagagctgaagtgggcgacttttt

SEQ ID NO: 345963 - DNA, 30 bp, Artificial Sequence
  Synthetic oligonucleotide
aattgagcgtattacgcggggtaccttttt

SEQ ID NO: 345964 - DNA, 30 bp, Artificial Sequence
  Synthetic oligonucleotide
gatccatagaacaggacttatccgcttttt

SEQ ID NO: 345965 - DNA, 30 bp, Artificial Sequence
  Synthetic oligonucleotide
actcacgccgctgtaggtggacttcttttt

SEQ ID NO: 345966 - DNA, 30 bp, Artificial Sequence
  Synthetic oligonucleotide
acccatatttgtgaatatagaaacgttttt

SEQ ID NO: 345967 - DNA, 30 bp, Artificial Sequence
  Synthetic oligonucleotide
ggtgaggttcggaccggaagcgctgttttt

SEQ ID NO: 345968 - DNA, 30 bp, Artificial Sequence
  Synthetic oligonucleotide
caatacagcgttaaataccggtgtgttttt

SEQ ID NO: 345969 - DNA, 30 bp, Artificial Sequence
  Synthetic oligonucleotide
ggaatatatgcatgcatatgcacctttttt

SEQ ID NO: 345970 - DNA, 30 bp, Artificial Sequence
  Synthetic oligonucleotide
gggcgcgcgcaaggttgtaatctctttttt

SEQ ID NO: 345971 - DNA, 30 bp, Artificial Sequence
  Synthetic oligonucleotide
tagacgagacgaccggtgcgatattttttt

SEQ ID NO: 345972 - DNA, 30 bp, Artificial Sequence
  Synthetic oligonucleotide
gaccgtggtatctagcgtactaaaaaaaaa

SEQ ID NO: 345973 - DNA, 30 bp, Artificial Sequence
  Synthetic oligonucleotide
ctccactagttaggcgttcactaaaaaaaa

SEQ ID NO: 345974 - DNA, 30 bp, Artificial Sequence
  Synthetic oligonucleotide
agtgcatgttgaatcagtttgcgaaaaaaa

SEQ ID NO: 345975 - DNA, 30 bp, Artificial Sequence
  Synthetic oligonucleotide
ggtcgctataaaacaatatccggcaaaaaa

SEQ ID NO: 345976 - DNA, 30 bp, Artificial Sequence
  Synthetic oligonucleotide
tcgataagcactgcacgatgtcagaaaaaa

SEQ ID NO: 345977 - DNA, 30 bp, Artificial Sequence
  Synthetic oligonucleotide
caacaagtccttaggtcaccttctaaaaaa

SEQ ID NO: 345978 - DNA, 30 bp, Artificial Sequence
  Synthetic oligonucleotide
cagcacgggaaagaaagggtttctaaaaaa

SEQ ID NO: 345979 - DNA, 30 bp, Artificial Sequence
  Synthetic oligonucleotide
tcggcccctcgtgtagcatcatttaaaaaa

SEQ ID NO: 345980 - DNA, 30 bp, Artificial Sequence
  Synthetic oligonucleotide
caagtttggtgtgcccgtatggaacaaaaa

SEQ ID NO: 345981 - DNA, 30 bp, Artificial Sequence
  Synthetic oligonucleotide
cgtgcaaggacacgcggggttgaacaaaaa

SEQ ID NO: 345982 - DNA, 30 bp, Artificial Sequence
  Synthetic oligonucleotide
tattcaattccctctaccgcgtaacaaaaa

SEQ ID NO: 345983 - DNA, 30 bp, Artificial Sequence
  Synthetic oligonucleotide
aacagcgcttgacatgcacgagcacaaaaa

SEQ ID NO: 345984 - DNA, 30 bp, Artificial Sequence
  Synthetic oligonucleotide
gtcgctgcgttggatggagatggacaaaaa

SEQ ID NO: 345985 - DNA, 30 bp, Artificial Sequence
  Synthetic oligonucleotide
gttgactgtagtctttctaggctacaaaaa

SEQ ID NO: 345986 - DNA, 30 bp, Artificial Sequence
  Synthetic oligonucleotide
aattgtgtggcccgggacataaagcaaaaa

SEQ ID NO: 345987 - DNA, 30 bp, Artificial Sequence
  Synthetic oligonucleotide
accatgagcctcgccttggttgcgcaaaaa

SEQ ID NO: 345988 - DNA, 30 bp, Artificial Sequence
  Synthetic oligonucleotide
ggcaccaagtgcggaaacatgcggcaaaaa

SEQ ID NO: 345989 - DNA, 30 bp, Artificial Sequence
  Synthetic oligonucleotide
tgtgctttgtccatgaagttgtggcaaaaa

SEQ ID NO: 345990 - DNA, 30 bp, Artificial Sequence
  Synthetic oligonucleotide
ccggtgggtagcatgtgccgcatgcaaaaa

SEQ ID NO: 345991 - DNA, 30 bp, Artificial Sequence
  Synthetic oligonucleotide
acggcacccttgacacggttggtgcaaaaa

SEQ ID NO: 345992 - DNA, 30 bp, Artificial Sequence
  Synthetic oligonucleotide
gagaggctaaatgaaacataaaatcaaaaa

SEQ ID NO: 345993 - DNA, 30 bp, Artificial Sequence
  Synthetic oligonucleotide
ttgacgttggagctcatgctttatcaaaaa

SEQ ID NO: 345994 - DNA, 30 bp, Artificial Sequence
  Synthetic oligonucleotide
agttcacgttgcgcacgtctacgtcaaaaa

SEQ ID NO: 345995 - DNA, 30 bp, Artificial Sequence
  Synthetic oligonucleotide
ctcgtccaatcacgggtcaccaaagaaaaa

SEQ ID NO: 345996 - DNA, 30 bp, Artificial Sequence
  Synthetic oligonucleotide
tggtatatgagccttcttatggcagaaaaa

SEQ ID NO: 345997 - DNA, 30 bp, Artificial Sequence
  Synthetic oligonucleotide
ccagaaccccgtctaatttaaatcgaaaaa

SEQ ID NO: 345998 - DNA, 30 bp, Artificial Sequence
  Synthetic oligonucleotide
ctgagtgtcaattagcgttagtaggaaaaa

SEQ ID NO: 345999 - DNA, 30 bp, Artificial Sequence
  Synthetic oligonucleotide
catcagggccgtgagctattttaggaaaaa

SEQ ID NO: 346000 - DNA, 30 bp, Artificial Sequence
  Synthetic oligonucleotide
gagtggatgttgcctgaagataaataaaaa

SEQ ID NO: 346001 - DNA, 30 bp, Artificial Sequence
  Synthetic oligonucleotide
ggtttcagaggctataaaatccaataaaaa

SEQ ID NO: 346002 - DNA, 30 bp, Artificial Sequence
  Synthetic oligonucleotide
cacatatagcatactgagtcaatataaaaa

SEQ ID NO: 346003 - DNA, 30 bp, Artificial Sequence
  Synthetic oligonucleotide
gtcggcctctcatcgattccgatataaaaa

SEQ ID NO: 346004 - DNA, 30 bp, Artificial Sequence
  Synthetic oligonucleotide
tgaagcgataatacctgatcagtataaaaa

SEQ ID NO: 346005 - DNA, 30 bp, Artificial Sequence
  Synthetic oligonucleotide
tgctttagaagtcggtcggccgcctaaaaa

SEQ ID NO: 346006 - DNA, 30 bp, Artificial Sequence
  Synthetic oligonucleotide
aacacgcagcaggccggactgggctaaaaa

SEQ ID NO: 346007 - DNA, 30 bp, Artificial Sequence
  Synthetic oligonucleotide
ttgtcttggacaccctagtaggagtaaaaa

SEQ ID NO: 346008 - DNA, 30 bp, Artificial Sequence
  Synthetic oligonucleotide
ggtaatgcggacatgggttcaatgtaaaaa

SEQ ID NO: 346009 - DNA, 30 bp, Artificial Sequence
  Synthetic oligonucleotide
acctgcctgcctaggccacttggttaaaaa

SEQ ID NO: 346010 - DNA, 30 bp, Artificial Sequence
  Synthetic oligonucleotide
taaacgcgggcaatactgaacttttaaaaa

SEQ ID NO: 346011 - DNA, 30 bp, Artificial Sequence
  Synthetic oligonucleotide
gaggggtttacccagcgggaaaaaacaaaa

SEQ ID NO: 346012 - DNA, 30 bp, Artificial Sequence
  Synthetic oligonucleotide
agcacgagtacttcagtgtactaaacaaaa

SEQ ID NO: 346013 - DNA, 30 bp, Artificial Sequence
  Synthetic oligonucleotide
ggcgctctattatcggaagccacaacaaaa

SEQ ID NO: 346014 - DNA, 30 bp, Artificial Sequence
  Synthetic oligonucleotide
atgcagaccatatagatgtaggcaacaaaa

SEQ ID NO: 346015 - DNA, 30 bp, Artificial Sequence
  Synthetic oligonucleotide
taaaaacattgtctcagtatacagacaaaa

SEQ ID NO: 346016 - DNA, 30 bp, Artificial Sequence
  Synthetic oligonucleotide
gctggagagaccgataatctgactacaaaa

SEQ ID NO: 346017 - DNA, 30 bp, Artificial Sequence
  Synthetic oligonucleotide
ggttgcagggtcggttccgggattacaaaa

SEQ ID NO: 346018 - DNA, 30 bp, Artificial Sequence
  Synthetic oligonucleotide
aagcattctgaaacccaaatagttacaaaa

SEQ ID NO: 346019 - DNA, 30 bp, Artificial Sequence
  Synthetic oligonucleotide
tttcgcataaatctatcctctaaaccaaaa

SEQ ID NO: 346020 - DNA, 30 bp, Artificial Sequence
  Synthetic oligonucleotide
gattaaaggtgaagttgcccaggaccaaaa

SEQ ID NO: 346021 - DNA, 30 bp, Artificial Sequence
  Synthetic oligonucleotide
acattcactcgttttccagcactaccaaaa

SEQ ID NO: 346022 - DNA, 30 bp, Artificial Sequence
  Synthetic oligonucleotide
cttaacaagggagcgtttgcacacccaaaa

SEQ ID NO: 346023 - DNA, 30 bp, Artificial Sequence
  Synthetic oligonucleotide
gagagggtattctggattaagtacccaaaa

SEQ ID NO: 346024 - DNA, 30 bp, Artificial Sequence
  Synthetic oligonucleotide
cgattagacagtaagcaacataagccaaaa

SEQ ID NO: 346025 - DNA, 30 bp, Artificial Sequence
  Synthetic oligonucleotide
tcctgtaaaacacgaacactagagccaaaa

SEQ ID NO: 346026 - DNA, 30 bp, Artificial Sequence
  Synthetic oligonucleotide
ggtaagtacctgtacgccatgtcgccaaaa

SEQ ID NO: 346027 - DNA, 30 bp, Artificial Sequence
  Synthetic oligonucleotide
accagcgtcaataggctatcggtgccaaaa

SEQ ID NO: 346028 - DNA, 30 bp, Artificial Sequence
  Synthetic oligonucleotide
cttagcgattaaggatgacgaaatccaaaa

SEQ ID NO: 346029 - DNA, 30 bp, Artificial Sequence
  Synthetic oligonucleotide
attgaggggacagttaagacggttccaaaa

SEQ ID NO: 346030 - DNA, 30 bp, Artificial Sequence
  Synthetic oligonucleotide
ctgggacggttcatatgtccggtagcaaaa

SEQ ID NO: 346031 - DNA, 30 bp, Artificial Sequence
  Synthetic oligonucleotide
gtcaatgaccgaaatggatatgtagcaaaa

SEQ ID NO: 346032 - DNA, 30 bp, Artificial Sequence
  Synthetic oligonucleotide
gcgctgtgaaggagcgctgcgaacgcaaaa

SEQ ID NO: 346033 - DNA, 30 bp, Artificial Sequence
  Synthetic oligonucleotide
tggatcacctgatgtcagcttgtcgcaaaa

SEQ ID NO: 346034 - DNA, 30 bp, Artificial Sequence
  Synthetic oligonucleotide
cccgttgtgttatcagcaggtgtggcaaaa

SEQ ID NO: 346035 - DNA, 30 bp, Artificial Sequence
  Synthetic oligonucleotide
cttagcaggaactgttgttgagctgcaaaa

SEQ ID NO: 346036 - DNA, 30 bp, Artificial Sequence
  Synthetic oligonucleotide
aaatagtggtttactaaggtatgtgcaaaa

SEQ ID NO: 346037 - DNA, 30 bp, Artificial Sequence
  Synthetic oligonucleotide
ggtggatcctgagttgtcggaacatcaaaa

SEQ ID NO: 346038 - DNA, 30 bp, Artificial Sequence
  Synthetic oligonucleotide
cttcgtgtcgattgattatatttatcaaaa

SEQ ID NO: 346039 - DNA, 30 bp, Artificial Sequence
  Synthetic oligonucleotide
aaatatctcacgtaatgggtcaactcaaaa

SEQ ID NO: 346040 - DNA, 30 bp, Artificial Sequence
  Synthetic oligonucleotide
ctcgtcgatcatagagagtccgtctcaaaa

SEQ ID NO: 346041 - DNA, 30 bp, Artificial Sequence
  Synthetic oligonucleotide
gaaacatttgtataccacggcctgtcaaaa

SEQ ID NO: 346042 - DNA, 30 bp, Artificial Sequence
  Synthetic oligonucleotide
cgggtatcccccttgaatatccgttcaaaa

SEQ ID NO: 346043 - DNA, 30 bp, Artificial Sequence
  Synthetic oligonucleotide
gctggccaaccgaatttttctatttcaaaa

SEQ ID NO: 346044 - DNA, 30 bp, Artificial Sequence
  Synthetic oligonucleotide
gtgcaaataagtggtcaacgcctttcaaaa

SEQ ID NO: 346045 - DNA, 30 bp, Artificial Sequence
  Synthetic oligonucleotide
cgtgcctactagtaaaagcttgcaagaaaa

SEQ ID NO: 346046 - DNA, 30 bp, Artificial Sequence
  Synthetic oligonucleotide
agactacgtcttcatccctaatcaagaaaa

SEQ ID NO: 346047 - DNA, 30 bp, Artificial Sequence
  Synthetic oligonucleotide
aatctattgcaccacttgtggctaagaaaa

SEQ ID NO: 346048 - DNA, 30 bp, Artificial Sequence
  Synthetic oligonucleotide
tatggatcacgcggggtctggaacagaaaa

SEQ ID NO: 346049 - DNA, 30 bp, Artificial Sequence
  Synthetic oligonucleotide
gcggggccagccgggagttgaagcagaaaa

SEQ ID NO: 346050 - DNA, 30 bp, Artificial Sequence
  Synthetic oligonucleotide
aaccaaagtacgcaaggagtttggagaaaa

SEQ ID NO: 346051 - DNA, 30 bp, Artificial Sequence
  Synthetic oligonucleotide
cgttatcgtctcgatcctagtaatagaaaa

SEQ ID NO: 346052 - DNA, 30 bp, Artificial Sequence
  Synthetic oligonucleotide
tggcccccgcccccaagcagctttagaaaa

SEQ ID NO: 346053 - DNA, 30 bp, Artificial Sequence
  Synthetic oligonucleotide
agctgttttaataaacttgggtaacgaaaa

SEQ ID NO: 346054 - DNA, 30 bp, Artificial Sequence
  Synthetic oligonucleotide
cccaacaggagtgtctctagcacacgaaaa

SEQ ID NO: 346055 - DNA, 30 bp, Artificial Sequence
  Synthetic oligonucleotide
gataaatgactcactatacgcattcgaaaa

SEQ ID NO: 346056 - DNA, 30 bp, Artificial Sequence
  Synthetic oligonucleotide
tagtccgtaggacgcctaggcaaaggaaaa

SEQ ID NO: 346057 - DNA, 30 bp, Artificial Sequence
  Synthetic oligonucleotide
taggaagcatggagtggttccacaggaaaa

SEQ ID NO: 346058 - DNA, 30 bp, Artificial Sequence
  Synthetic oligonucleotide
atcaacggttgacatcgcggggcaggaaaa

SEQ ID NO: 346059 - DNA, 30 bp, Artificial Sequence
  Synthetic oligonucleotide
catcctgtggtgagacaggttctaggaaaa

SEQ ID NO: 346060 - DNA, 30 bp, Artificial Sequence
  Synthetic oligonucleotide
atgcatttctacgctagattccacggaaaa

SEQ ID NO: 346061 - DNA, 30 bp, Artificial Sequence
  Synthetic oligonucleotide
cacgttttggggctaacttgccggggaaaa

SEQ ID NO: 346062 - DNA, 30 bp, Artificial Sequence
  Synthetic oligonucleotide
aatttgaaggtcggtaccgggcggggaaaa

SEQ ID NO: 346063 - DNA, 30 bp, Artificial Sequence
  Synthetic oligonucleotide
ctcagtacgtatacatcgccttggggaaaa

SEQ ID NO: 346064 - DNA, 30 bp, Artificial Sequence
  Synthetic oligonucleotide
gtcacatattccccatgcagttatggaaaa

SEQ ID NO: 346065 - DNA, 30 bp, Artificial Sequence
  Synthetic oligonucleotide
acatttataatgtcaccttcatctggaaaa

SEQ ID NO: 346066 - DNA, 30 bp, Artificial Sequence
  Synthetic oligonucleotide
ttgagtcgtgtcatgttttgttgtggaaaa

SEQ ID NO: 346067 - DNA, 30 bp, Artificial Sequence
  Synthetic oligonucleotide
atcaggaacagaagctgaccacgatgaaaa

SEQ ID NO: 346068 - DNA, 30 bp, Artificial Sequence
  Synthetic oligonucleotide
gtgttgctgtgtcggactttcggctgaaaa

SEQ ID NO: 346069 - DNA, 30 bp, Artificial Sequence
  Synthetic oligonucleotide
taacgtgcccgggctctcgtaaagtgaaaa

SEQ ID NO: 346070 - DNA, 30 bp, Artificial Sequence
  Synthetic oligonucleotide
gataaggcactaagttttgttccgtgaaaa

SEQ ID NO: 346071 - DNA, 30 bp, Artificial Sequence
  Synthetic oligonucleotide
gctccagctctgagtgatgtacgaataaaa

SEQ ID NO: 346072 - DNA, 30 bp, Artificial Sequence
  Synthetic oligonucleotide
atagcattcagggacgtatataacataaaa

SEQ ID NO: 346073 - DNA, 30 bp, Artificial Sequence
  Synthetic oligonucleotide
gtcatggaccttgtgtcattgcgcataaaa

SEQ ID NO: 346074 - DNA, 30 bp, Artificial Sequence
  Synthetic oligonucleotide
cttacggcttgggaaggtacaatcataaaa

SEQ ID NO: 346075 - DNA, 30 bp, Artificial Sequence
  Synthetic oligonucleotide
ggagattcgcgtgagacctgtctcataaaa

SEQ ID NO: 346076 - DNA, 30 bp, Artificial Sequence
  Synthetic oligonucleotide
accgcttgatagggccggatcgtcataaaa

SEQ ID NO: 346077 - DNA, 30 bp, Artificial Sequence
  Synthetic oligonucleotide
caatcgatttccagcaaagataagataaaa

SEQ ID NO: 346078 - DNA, 30 bp, Artificial Sequence
  Synthetic oligonucleotide
gacgtagaaaagcttttgtatgcgataaaa

SEQ ID NO: 346079 - DNA, 30 bp, Artificial Sequence
  Synthetic oligonucleotide
ttattcagcattcgtacaaattcgataaaa

SEQ ID NO: 346080 - DNA, 30 bp, Artificial Sequence
  Synthetic oligonucleotide
ggactgagtacactcgcaagatggataaaa

SEQ ID NO: 346081 - DNA, 30 bp, Artificial Sequence
  Synthetic oligonucleotide
aaacttcacgtgggactggtgatgataaaa

SEQ ID NO: 346082 - DNA, 30 bp, Artificial Sequence
  Synthetic oligonucleotide
ttaatgaggtgctcgtacagtatgataaaa

SEQ ID NO: 346083 - DNA, 30 bp, Artificial Sequence
  Synthetic oligonucleotide
tagggacatctgtttaaatcgtctataaaa

SEQ ID NO: 346084 - DNA, 30 bp, Artificial Sequence
  Synthetic oligonucleotide
gaatgataagcaccatgccgttcactaaaa

SEQ ID NO: 346085 - DNA, 29 bp, Artificial Sequence
  Synthetic oligonucleotide
gttcgcgcggaactacaatccagctaaaa

SEQ ID NO: 346086 - DNA, 30 bp, Artificial Sequence
  Synthetic oligonucleotide
cccggagcatcaaactctgcatcgctaaaa

SEQ ID NO: 346087 - DNA, 30 bp, Artificial Sequence
  Synthetic oligonucleotide
gatagtgtcgcgtgactagccatgctaaaa

SEQ ID NO: 346088 - DNA, 30 bp, Artificial Sequence
  Synthetic oligonucleotide
tggatgacgaaatatattaatcatctaaaa

SEQ ID NO: 346089 - DNA, 30 bp, Artificial Sequence
  Synthetic oligonucleotide
gcgctaaaatgaccctccctttatctaaaa

SEQ ID NO: 346090 - DNA, 30 bp, Artificial Sequence
  Synthetic oligonucleotide
acatatcaagtcagtttaggatctctaaaa

SEQ ID NO: 346091 - DNA, 30 bp, Artificial Sequence
  Synthetic oligonucleotide
gggacgggtcatcttcccaacggtctaaaa

SEQ ID NO: 346092 - DNA, 30 bp, Artificial Sequence
  Synthetic oligonucleotide
atgctaaagggtcgactattacttctaaaa

SEQ ID NO: 346093 - DNA, 30 bp, Artificial Sequence
  Synthetic oligonucleotide
ggtggtgcccgtgcaatacagatagtaaaa

SEQ ID NO: 346094 - DNA, 30 bp, Artificial Sequence
  Synthetic oligonucleotide
tactatcggcggcaacggcaattagtaaaa

SEQ ID NO: 346095 - DNA, 30 bp, Artificial Sequence
  Synthetic oligonucleotide
ctataaggtaacatctcgcgtaacgtaaaa

SEQ ID NO: 346096 - DNA, 30 bp, Artificial Sequence
  Synthetic oligonucleotide
aatgttccgtggtcaggccgatacgtaaaa

SEQ ID NO: 346097 - DNA, 30 bp, Artificial Sequence
  Synthetic oligonucleotide
ttgcgatgatgaacgggcgaacccgtaaaa

SEQ ID NO: 346098 - DNA, 30 bp, Artificial Sequence
  Synthetic oligonucleotide
tctcacagtagtgtcttgtgtaaggtaaaa

SEQ ID NO: 346099 - DNA, 30 bp, Artificial Sequence
  Synthetic oligonucleotide
tatagacatcccactatgtttgcggtaaaa

SEQ ID NO: 346100 - DNA, 30 bp, Artificial Sequence
  Synthetic oligonucleotide
ttaatttctggtgtatagcggtgggtaaaa

SEQ ID NO: 346101 - DNA, 30 bp, Artificial Sequence
  Synthetic oligonucleotide
actatgatcgatggtggtttcctggtaaaa

SEQ ID NO: 346102 - DNA, 30 bp, Artificial Sequence
  Synthetic oligonucleotide
aggccatccggttattgcagcgctgtaaaa

SEQ ID NO: 346103 - DNA, 30 bp, Artificial Sequence
  Synthetic oligonucleotide
accaggggcggccggcttgaggctgtaaaa

SEQ ID NO: 346104 - DNA, 30 bp, Artificial Sequence
  Synthetic oligonucleotide
tcacagctactgatgatacttagtgtaaaa

SEQ ID NO: 346105 - DNA, 30 bp, Artificial Sequence
  Synthetic oligonucleotide
gaagggtaaaatagcgcacgtggtgtaaaa

SEQ ID NO: 346106 - DNA, 30 bp, Artificial Sequence
  Synthetic oligonucleotide
cggagagtctcagcggtgtatattgtaaaa

SEQ ID NO: 346107 - DNA, 30 bp, Artificial Sequence
  Synthetic oligonucleotide
gccactaaatactcaaaggttattgtaaaa

SEQ ID NO: 346108 - DNA, 30 bp, Artificial Sequence
  Synthetic oligonucleotide
catacagtggacaacttaagcaaattaaaa

SEQ ID NO: 346109 - DNA, 30 bp, Artificial Sequence
  Synthetic oligonucleotide
tcaagagattcctcggtaagacgattaaaa

SEQ ID NO: 346110 - DNA, 30 bp, Artificial Sequence
  Synthetic oligonucleotide
ttttgcgaggtgcaacagaaggtattaaaa

SEQ ID NO: 346111 - DNA, 30 bp, Artificial Sequence
  Synthetic oligonucleotide
taacgggaccagtctttcaatttattaaaa

SEQ ID NO: 346112 - DNA, 30 bp, Artificial Sequence
  Synthetic oligonucleotide
tggaactcggtcgggagtggccgcttaaaa

SEQ ID NO: 346113 - DNA, 30 bp, Artificial Sequence
  Synthetic oligonucleotide
aagtcgaatagcatcgtcgcagagttaaaa

SEQ ID NO: 346114 - DNA, 30 bp, Artificial Sequence
  Synthetic oligonucleotide
ctacgagtcatttagtcgcctaggttaaaa

SEQ ID NO: 346115 - DNA, 30 bp, Artificial Sequence
  Synthetic oligonucleotide
gcgtatgttaaaaatcactggatgttaaaa

SEQ ID NO: 346116 - DNA, 30 bp, Artificial Sequence
  Synthetic oligonucleotide
atagctcttcaggtagccactctgttaaaa

SEQ ID NO: 346117 - DNA, 30 bp, Artificial Sequence
  Synthetic oligonucleotide
cttgcagacactctaaggttttgtttaaaa

SEQ ID NO: 346118 - DNA, 30 bp, Artificial Sequence
  Synthetic oligonucleotide
gtcatgggcaaagaagtgaacattttaaaa

SEQ ID NO: 346119 - DNA, 30 bp, Artificial Sequence
  Synthetic oligonucleotide
atcatagtcacactgcatgagaacaacaaa

SEQ ID NO: 346120 - DNA, 30 bp, Artificial Sequence
  Synthetic oligonucleotide
tgggacgctgggtcgcaatttggcaacaaa

SEQ ID NO: 346121 - DNA, 30 bp, Artificial Sequence
  Synthetic oligonucleotide
gtttgtcgacaaggtgctcctgtcaacaaa

SEQ ID NO: 346122 - DNA, 30 bp, Artificial Sequence
  Synthetic oligonucleotide
ttgccaatccgcgatgtcttagagaacaaa

SEQ ID NO: 346123 - DNA, 30 bp, Artificial Sequence
  Synthetic oligonucleotide
gaaaggcagctttacagcggagcgaacaaa

SEQ ID NO: 346124 - DNA, 30 bp, Artificial Sequence
  Synthetic oligonucleotide
cagcccttcttaatatgcaatgtgaacaaa

SEQ ID NO: 346125 - DNA, 30 bp, Artificial Sequence
  Synthetic oligonucleotide
cagcatttcatcacattggattaacacaaa

SEQ ID NO: 346126 - DNA, 30 bp, Artificial Sequence
  Synthetic oligonucleotide
gcactgagacgactcgtttgagcacacaaa

SEQ ID NO: 346127 - DNA, 30 bp, Artificial Sequence
  Synthetic oligonucleotide
aaaatataggtgcatacaccgcgacacaaa

SEQ ID NO: 346128 - DNA, 30 bp, Artificial Sequence
  Synthetic oligonucleotide
cgagccacaaaattttataatttacacaaa

SEQ ID NO: 346129 - DNA, 30 bp, Artificial Sequence
  Synthetic oligonucleotide
gccctccgtccgaaaccacgctaccacaaa

SEQ ID NO: 346130 - DNA, 30 bp, Artificial Sequence
  Synthetic oligonucleotide
tatcgctgtgttaggacaccaacccacaaa

SEQ ID NO: 346131 - DNA, 30 bp, Artificial Sequence
  Synthetic oligonucleotide
gcaatagcgagctagtagtggccccacaaa

SEQ ID NO: 346132 - DNA, 30 bp, Artificial Sequence
  Synthetic oligonucleotide
aagccgaatatttatgccttctatcacaaa

SEQ ID NO: 346133 - DNA, 30 bp, Artificial Sequence
  Synthetic oligonucleotide
gatagttccgtacgtgaggcgcctcacaaa

SEQ ID NO: 346134 - DNA, 30 bp, Artificial Sequence
  Synthetic oligonucleotide
tttgtgacgagctcgaatgagtgtcacaaa

SEQ ID NO: 346135 - DNA, 30 bp, Artificial Sequence
  Synthetic oligonucleotide
accaactagtaatgattttcaggagacaaa

SEQ ID NO: 346136 - DNA, 30 bp, Artificial Sequence
  Synthetic oligonucleotide
cattcgaagcacatcttgatatacgacaaa

SEQ ID NO: 346137 - DNA, 30 bp, Artificial Sequence
  Synthetic oligonucleotide
ttgaccactggctgtttcgcttccgacaaa

SEQ ID NO: 346138 - DNA, 30 bp, Artificial Sequence
  Synthetic oligonucleotide
gagcccactggggtgggaactcaggacaaa

SEQ ID NO: 346139 - DNA, 30 bp, Artificial Sequence
  Synthetic oligonucleotide
tacttcgccgtgtggcatacggcggacaaa

SEQ ID NO: 346140 - DNA, 30 bp, Artificial Sequence
  Synthetic oligonucleotide
attctgccggacctcggacggtgggacaaa

SEQ ID NO: 346141 - DNA, 30 bp, Artificial Sequence
  Synthetic oligonucleotide
tttagtcttctgcgtgatcaactggacaaa

SEQ ID NO: 346142 - DNA, 30 bp, Artificial Sequence
  Synthetic oligonucleotide
gagaggcgcataatcaaataaaactacaaa

SEQ ID NO: 346143 - DNA, 30 bp, Artificial Sequence
  Synthetic oligonucleotide
agtttaacgaaagcatcggcaaagtacaaa

SEQ ID NO: 346144 - DNA, 30 bp, Artificial Sequence
  Synthetic oligonucleotide
gttggactgccaacttgtaatgtgtacaaa

SEQ ID NO: 346145 - DNA, 30 bp, Artificial Sequence
  Synthetic oligonucleotide
atcagtaatacacccacaggcttgtacaaa

SEQ ID NO: 346146 - DNA, 30 bp, Artificial Sequence
  Synthetic oligonucleotide
aaatttacccaatctagaactgaaaccaaa

SEQ ID NO: 346147 - DNA, 30 bp, Artificial Sequence
  Synthetic oligonucleotide
agatttggcgaatttaatttctaaaccaaa

SEQ ID NO: 346148 - DNA, 30 bp, Artificial Sequence
  Synthetic oligonucleotide
cgcatataatttttttacttttcaaccaaa

SEQ ID NO: 346149 - DNA, 30 bp, Artificial Sequence
  Synthetic oligonucleotide
ttattgcggtcaagatcgacagcgaccaaa

SEQ ID NO: 346150 - DNA, 30 bp, Artificial Sequence
  Synthetic oligonucleotide
agccctgcacgattatctttggcgaccaaa

SEQ ID NO: 346151 - DNA, 30 bp, Artificial Sequence
  Synthetic oligonucleotide
tggggtcctcttcgggcgactagtaccaaa

SEQ ID NO: 346152 - DNA, 30 bp, Artificial Sequence
  Synthetic oligonucleotide
gttacgacatgattttcataccgtaccaaa

SEQ ID NO: 346153 - DNA, 30 bp, Artificial Sequence
  Synthetic oligonucleotide
tgatatacgcgtgctgatatacttaccaaa

SEQ ID NO: 346154 - DNA, 30 bp, Artificial Sequence
  Synthetic oligonucleotide
gggccctaaagtgtggtcgcagtccccaaa

SEQ ID NO: 346155 - DNA, 30 bp, Artificial Sequence
  Synthetic oligonucleotide
gtcatctccggcgtggcagcattccccaaa

SEQ ID NO: 346156 - DNA, 30 bp, Artificial Sequence
  Synthetic oligonucleotide
gacgattctccgtcataaggctagcccaaa

SEQ ID NO: 346157 - DNA, 30 bp, Artificial Sequence
  Synthetic oligonucleotide
ccaagggatgacagttctcaacttcccaaa

SEQ ID NO: 346158 - DNA, 30 bp, Artificial Sequence
  Synthetic oligonucleotide
tgatcacgggcttcgcccttctgcgccaaa

SEQ ID NO: 346159 - DNA, 30 bp, Artificial Sequence
  Synthetic oligonucleotide
agtgggggtatgttacatacggtcgccaaa

SEQ ID NO: 346160 - DNA, 30 bp, Artificial Sequence
  Synthetic oligonucleotide
agtattgtttgcattcaacaccaggccaaa

SEQ ID NO: 346161 - DNA, 30 bp, Artificial Sequence
  Synthetic oligonucleotide
tgtgactatgccaaggttcccccggccaaa

SEQ ID NO: 346162 - DNA, 30 bp, Artificial Sequence
  Synthetic oligonucleotide
gttcatggtttcaggctattgttggccaaa

SEQ ID NO: 346163 - DNA, 30 bp, Artificial Sequence
  Synthetic oligonucleotide
gctcagacgtggaaaatgaggatatccaaa

SEQ ID NO: 346164 - DNA, 30 bp, Artificial Sequence
  Synthetic oligonucleotide
tggtatctactaatagagcatgagtccaaa

SEQ ID NO: 346165 - DNA, 30 bp, Artificial Sequence
  Synthetic oligonucleotide
ccccctaacacccggacatcaggttccaaa

SEQ ID NO: 346166 - DNA, 30 bp, Artificial Sequence
  Synthetic oligonucleotide
ttgctggtctggtatatcgaccaaagcaaa

SEQ ID NO: 346167 - DNA, 30 bp, Artificial Sequence
  Synthetic oligonucleotide
ccgtgctatccgcaatgggccggcagcaaa

SEQ ID NO: 346168 - DNA, 30 bp, Artificial Sequence
  Synthetic oligonucleotide
agcgagcgctggtccgtaatgccgagcaaa

SEQ ID NO: 346169 - DNA, 30 bp, Artificial Sequence
  Synthetic oligonucleotide
gaaatgttacagcactgtaggtcgagcaaa

SEQ ID NO: 346170 - DNA, 30 bp, Artificial Sequence
  Synthetic oligonucleotide
ctctgcgggtggattcaggaagggagcaaa

SEQ ID NO: 346171 - DNA, 30 bp, Artificial Sequence
  Synthetic oligonucleotide
ttaactagatactcaggtacttggagcaaa

SEQ ID NO: 346172 - DNA, 30 bp, Artificial Sequence
  Synthetic oligonucleotide
aaccagttgacactgcttgtcttgagcaaa

SEQ ID NO: 346173 - DNA, 30 bp, Artificial Sequence
  Synthetic oligonucleotide
gatagaagatcgccgcatgatagtagcaaa

SEQ ID NO: 346174 - DNA, 30 bp, Artificial Sequence
  Synthetic oligonucleotide
agttgcaaaagcactcgacgcctacgcaaa

SEQ ID NO: 346175 - DNA, 30 bp, Artificial Sequence
  Synthetic oligonucleotide
ccgcggaagttgtcaaattttcagcgcaaa

SEQ ID NO: 346176 - DNA, 30 bp, Artificial Sequence
  Synthetic oligonucleotide
tcttcagccgaagccccgtatgcgcgcaaa

SEQ ID NO: 346177 - DNA, 30 bp, Artificial Sequence
  Synthetic oligonucleotide
tcttaattgtccgcgtgttatgctcgcaaa

SEQ ID NO: 346178 - DNA, 30 bp, Artificial Sequence
  Synthetic oligonucleotide
tatctattttgtgatcagagcggtcgcaaa

SEQ ID NO: 346179 - DNA, 30 bp, Artificial Sequence
  Synthetic oligonucleotide
atcgttgaagcatgatgcgggacaggcaaa

SEQ ID NO: 346180 - DNA, 30 bp, Artificial Sequence
  Synthetic oligonucleotide
atactcccactgtccttggacctaggcaaa

SEQ ID NO: 346181 - DNA, 30 bp, Artificial Sequence
  Synthetic oligonucleotide
gagaacccgttaacctggttgctaggcaaa

SEQ ID NO: 346182 - DNA, 30 bp, Artificial Sequence
  Synthetic oligonucleotide
ttccagctaggcagacgtagattaggcaaa

SEQ ID NO: 346183 - DNA, 30 bp, Artificial Sequence
  Synthetic oligonucleotide
gcataaaagccgcataaagactgcggcaaa

SEQ ID NO: 346184 - DNA, 30 bp, Artificial Sequence
  Synthetic oligonucleotide
ggcgctcggtattcactatatatcggcaaa

SEQ ID NO: 346185 - DNA, 30 bp, Artificial Sequence
  Synthetic oligonucleotide
ctccaggctcccctgctaactatcggcaaa

SEQ ID NO: 346186 - DNA, 30 bp, Artificial Sequence
  Synthetic oligonucleotide
gggggtacattatcatatacacctggcaaa

SEQ ID NO: 346187 - DNA, 30 bp, Artificial Sequence
  Synthetic oligonucleotide
atagtaggcagcgaaccaaaatgtggcaaa

SEQ ID NO: 346188 - DNA, 30 bp, Artificial Sequence
  Synthetic oligonucleotide
gctatcttaaagtttcggcgcaaatgcaaa

SEQ ID NO: 346189 - DNA, 30 bp, Artificial Sequence
  Synthetic oligonucleotide
acgttgcccatctcacgtcgcgcctgcaaa

SEQ ID NO: 346190 - DNA, 30 bp, Artificial Sequence
  Synthetic oligonucleotide
tattaagggcggctgagcttgcggtgcaaa

SEQ ID NO: 346191 - DNA, 30 bp, Artificial Sequence
  Synthetic oligonucleotide
gatgagagtaggggcccctttttgtgcaaa

SEQ ID NO: 346192 - DNA, 30 bp, Artificial Sequence
  Synthetic oligonucleotide
ggatgcgatcagttttctaaacattgcaaa

SEQ ID NO: 346193 - DNA, 30 bp, Artificial Sequence
  Synthetic oligonucleotide
tcaaagaatatgcagatggtacattgcaaa

SEQ ID NO: 346194 - DNA, 30 bp, Artificial Sequence
  Synthetic oligonucleotide
tggaactgttgtttgcaggagacttgcaaa

SEQ ID NO: 346195 - DNA, 30 bp, Artificial Sequence
  Synthetic oligonucleotide
atgtcttgactgccgtattttgcttgcaaa

SEQ ID NO: 346196 - DNA, 29 bp, Artificial Sequence
  Synthetic oligonucleotide
tagcctgcaacgaccatacgctaatcaaa

SEQ ID NO: 346197 - DNA, 30 bp, Artificial Sequence
  Synthetic oligonucleotide
tgttaatgcgcacagtgataagtaatcaaa

SEQ ID NO: 346198 - DNA, 30 bp, Artificial Sequence
  Synthetic oligonucleotide
gcctgggaatgaaacatagtttgcatcaaa

SEQ ID NO: 346199 - DNA, 30 bp, Artificial Sequence
  Synthetic oligonucleotide
gtcgcacctcactgtgaattgacgatcaaa

SEQ ID NO: 346200 - DNA, 30 bp, Artificial Sequence
  Synthetic oligonucleotide
ggttttggatattatatgtgcgcgatcaaa

SEQ ID NO: 346201 - DNA, 30 bp, Artificial Sequence
  Synthetic oligonucleotide
gtgtccagatcttgtctttatcggatcaaa

SEQ ID NO: 346202 - DNA, 30 bp, Artificial Sequence
  Synthetic oligonucleotide
cgaccgtcgccttactagctatctatcaaa

SEQ ID NO: 346203 - DNA, 30 bp, Artificial Sequence
  Synthetic oligonucleotide
cgggcacttgttaccttatgctctatcaaa

SEQ ID NO: 346204 - DNA, 30 bp, Artificial Sequence
  Synthetic oligonucleotide
gcgtttcaatgagggcgaagtcgactcaaa

SEQ ID NO: 346205 - DNA, 30 bp, Artificial Sequence
  Synthetic oligonucleotide
cacattagtggacgtcacgacgtactcaaa

SEQ ID NO: 346206 - DNA, 30 bp, Artificial Sequence
  Synthetic oligonucleotide
acgtccttatcaacacttacctggctcaaa

SEQ ID NO: 346207 - DNA, 30 bp, Artificial Sequence
  Synthetic oligonucleotide
cgcgtagcggggacaacggcttgtctcaaa

SEQ ID NO: 346208 - DNA, 30 bp, Artificial Sequence
  Synthetic oligonucleotide
cccctcctcctatattgggacaaggtcaaa

SEQ ID NO: 346209 - DNA, 30 bp, Artificial Sequence
  Synthetic oligonucleotide
tctatcgatatgttctcggggaaggtcaaa

SEQ ID NO: 346210 - DNA, 30 bp, Artificial Sequence
  Synthetic oligonucleotide
ttgtttgagggggcatgcggatatgtcaaa

SEQ ID NO: 346211 - DNA, 30 bp, Artificial Sequence
  Synthetic oligonucleotide
gggttatttcaatcattgagtattgtcaaa

SEQ ID NO: 346212 - DNA, 30 bp, Artificial Sequence
  Synthetic oligonucleotide
cccaagagtatcgggccctagaaattcaaa

SEQ ID NO: 346213 - DNA, 30 bp, Artificial Sequence
  Synthetic oligonucleotide
aaacaaggaggtgtccttcaagaattcaaa

SEQ ID NO: 346214 - DNA, 30 bp, Artificial Sequence
  Synthetic oligonucleotide
gcacaggtaaaagtcctatggatattcaaa

SEQ ID NO: 346215 - DNA, 30 bp, Artificial Sequence
  Synthetic oligonucleotide
catagggtaccgctttatttactattcaaa

SEQ ID NO: 346216 - DNA, 30 bp, Artificial Sequence
  Synthetic oligonucleotide
ctggtgcatgtcgctattccgcgcttcaaa

SEQ ID NO: 346217 - DNA, 29 bp, Artificial Sequence
  Synthetic oligonucleotide
atcgtgcttggttcgagaagaagttcaaa

SEQ ID NO: 346218 - DNA, 30 bp, Artificial Sequence
  Synthetic oligonucleotide
cggttcatgcttccaggtgctgcgttcaaa

SEQ ID NO: 346219 - DNA, 30 bp, Artificial Sequence
  Synthetic oligonucleotide
aaagtaaatcggtgtacgccaactttcaaa

SEQ ID NO: 346220 - DNA, 30 bp, Artificial Sequence
  Synthetic oligonucleotide
tcgtgcttattgcctgcggggggtttcaaa

SEQ ID NO: 346221 - DNA, 30 bp, Artificial Sequence
  Synthetic oligonucleotide
ccttaactagtagtacccttcattttcaaa

SEQ ID NO: 346222 - DNA, 30 bp, Artificial Sequence
  Synthetic oligonucleotide
aagggcgggataacaaggcacgcaaagaaa

SEQ ID NO: 346223 - DNA, 30 bp, Artificial Sequence
  Synthetic oligonucleotide
tgggtcctgctcggcgcggccagaaagaaa

SEQ ID NO: 346224 - DNA, 30 bp, Artificial Sequence
  Synthetic oligonucleotide
gcatggaccgataacatctgtcccaagaaa

SEQ ID NO: 346225 - DNA, 30 bp, Artificial Sequence
  Synthetic oligonucleotide
catctatattagaagtttgcaatcaagaaa

SEQ ID NO: 346226 - DNA, 30 bp, Artificial Sequence
  Synthetic oligonucleotide
tctcatgctgggaggttgtaaatgaagaaa

SEQ ID NO: 346227 - DNA, 30 bp, Artificial Sequence
  Synthetic oligonucleotide
ggtgtgtgttctctgttaaaatgtaagaaa

SEQ ID NO: 346228 - DNA, 30 bp, Artificial Sequence
  Synthetic oligonucleotide
agaacaggctacttttgggattgtaagaaa

SEQ ID NO: 346229 - DNA, 30 bp, Artificial Sequence
  Synthetic oligonucleotide
aaaactctaaactcgatttgtgcacagaaa

SEQ ID NO: 346230 - DNA, 30 bp, Artificial Sequence
  Synthetic oligonucleotide
cggggcctctctcccacctacggacagaaa

SEQ ID NO: 346231 - DNA, 30 bp, Artificial Sequence
  Synthetic oligonucleotide
atggaatggtcatcataactcggccagaaa

SEQ ID NO: 346232 - DNA, 30 bp, Artificial Sequence
  Synthetic oligonucleotide
aaatatcagagtttctccacactccagaaa

SEQ ID NO: 346233 - DNA, 30 bp, Artificial Sequence
  Synthetic oligonucleotide
gcaatgattacgcacggcccttagcagaaa

SEQ ID NO: 346234 - DNA, 30 bp, Artificial Sequence
  Synthetic oligonucleotide
atcgattgtcctacgtgcctttagcagaaa

SEQ ID NO: 346235 - DNA, 30 bp, Artificial Sequence
  Synthetic oligonucleotide
attaatacgttcaagtcactagcgcagaaa

SEQ ID NO: 346236 - DNA, 30 bp, Artificial Sequence
  Synthetic oligonucleotide
gatggtcagtgatctcgcaatgcgcagaaa

SEQ ID NO: 346237 - DNA, 30 bp, Artificial Sequence
  Synthetic oligonucleotide
caaaggatgcaattggggtattcgcagaaa

SEQ ID NO: 346238 - DNA, 30 bp, Artificial Sequence
  Synthetic oligonucleotide
caacatcattcctatggatatatgcagaaa

SEQ ID NO: 346239 - DNA, 30 bp, Artificial Sequence
  Synthetic oligonucleotide
tgaattagggcaatactttcatttcagaaa

SEQ ID NO: 346240 - DNA, 30 bp, Artificial Sequence
  Synthetic oligonucleotide
cgcgccaagttaggcggtttcgcagagaaa

SEQ ID NO: 346241 - DNA, 30 bp, Artificial Sequence
  Synthetic oligonucleotide
tctccatctccaactgctagagtagagaaa

SEQ ID NO: 346242 - DNA, 30 bp, Artificial Sequence
  Synthetic oligonucleotide
taaaaaataaggcacaaagcgtccgagaaa

SEQ ID NO: 346243 - DNA, 30 bp, Artificial Sequence
  Synthetic oligonucleotide
taatgcagcctggagtttgcacgcgagaaa

SEQ ID NO: 346244 - DNA, 30 bp, Artificial Sequence
  Synthetic oligonucleotide
actaacgtgttcgccaggctctgggagaaa

SEQ ID NO: 346245 - DNA, 30 bp, Artificial Sequence
  Synthetic oligonucleotide
cagcactcacgtctcttgatagtggagaaa

SEQ ID NO: 346246 - DNA, 30 bp, Artificial Sequence
  Synthetic oligonucleotide
tatggttaggtcagaacacatcgtgagaaa

SEQ ID NO: 346247 - DNA, 31 bp, Artificial Sequence
  Synthetic oligonucleotide
cggtttagactagtgattcacttgtgagaaa

SEQ ID NO: 346248 - DNA, 30 bp, Artificial Sequence
  Synthetic oligonucleotide
tgtaggcggccaatgtgagcttgtgagaaa

SEQ ID NO: 346249 - DNA, 30 bp, Artificial Sequence
  Synthetic oligonucleotide
taacttaccgtgctctaagtacttgagaaa

SEQ ID NO: 346250 - DNA, 30 bp, Artificial Sequence
  Synthetic oligonucleotide
cagtcatctgtaaatctatcgagatagaaa

SEQ ID NO: 346251 - DNA, 30 bp, Artificial Sequence
  Synthetic oligonucleotide
gaagggactgatcgtgtttatctatagaaa

SEQ ID NO: 346252 - DNA, 31 bp, Artificial Sequence
  Synthetic oligonucleotide
agctctggcttgaaccatgattgtatagaaa

SEQ ID NO: 346253 - DNA, 30 bp, Artificial Sequence
  Synthetic oligonucleotide
actcctcacctacataaggcccactagaaa

SEQ ID NO: 346254 - DNA, 30 bp, Artificial Sequence
  Synthetic oligonucleotide
gaatgtatcggagcttgcgcgtactagaaa

SEQ ID NO: 346255 - DNA, 30 bp, Artificial Sequence
  Synthetic oligonucleotide
atccccaacgggttcgctgacacctagaaa

SEQ ID NO: 346256 - DNA, 30 bp, Artificial Sequence
  Synthetic oligonucleotide
attagtgattcctcgaccaatcgctagaaa

SEQ ID NO: 346257 - DNA, 30 bp, Artificial Sequence
  Synthetic oligonucleotide
agaaatcataggcggggcttctgctagaaa

SEQ ID NO: 346258 - DNA, 30 bp, Artificial Sequence
  Synthetic oligonucleotide
gggggcagactatgggtgccctagtagaaa

SEQ ID NO: 346259 - DNA, 30 bp, Artificial Sequence
  Synthetic oligonucleotide
gccctttttatccatacagaagattagaaa

SEQ ID NO: 346260 - DNA, 30 bp, Artificial Sequence
  Synthetic oligonucleotide
cggggaattagccgctcgtatacttagaaa

SEQ ID NO: 346261 - DNA, 30 bp, Artificial Sequence
  Synthetic oligonucleotide
cgtttaggggatgagaattaacgttagaaa

SEQ ID NO: 346262 - DNA, 30 bp, Artificial Sequence
  Synthetic oligonucleotide
ctcacctaaattattggtgcactttagaaa

SEQ ID NO: 346263 - DNA, 30 bp, Artificial Sequence
  Synthetic oligonucleotide
ttgacacgggcatgcattacggcaacgaaa

SEQ ID NO: 346264 - DNA, 30 bp, Artificial Sequence
  Synthetic oligonucleotide
tccttatgcagtcattgacgctcaacgaaa

SEQ ID NO: 346265 - DNA, 30 bp, Artificial Sequence
  Synthetic oligonucleotide
tgtttaaatctgccaaataaaaacacgaaa

SEQ ID NO: 346266 - DNA, 30 bp, Artificial Sequence
  Synthetic oligonucleotide
aaacttcactaagagacgaccggcacgaaa

SEQ ID NO: 346267 - DNA, 30 bp, Artificial Sequence
  Synthetic oligonucleotide
tctcccaccttgctctactcctgcacgaaa

SEQ ID NO: 346268 - DNA, 30 bp, Artificial Sequence
  Synthetic oligonucleotide
cgacaggtgccgttgatttcgaagacgaaa

SEQ ID NO: 346269 - DNA, 30 bp, Artificial Sequence
  Synthetic oligonucleotide
agcgtcgaagggaaagcccctacgacgaaa

SEQ ID NO: 346270 - DNA, 30 bp, Artificial Sequence
  Synthetic oligonucleotide
tctatctcctgccgagcagtactgacgaaa

SEQ ID NO: 346271 - DNA, 30 bp, Artificial Sequence
  Synthetic oligonucleotide
gttggtgaggcgttgccattaagtacgaaa

SEQ ID NO: 346272 - DNA, 30 bp, Artificial Sequence
  Synthetic oligonucleotide
gctccacggtctgaaaaattggcaccgaaa

SEQ ID NO: 346273 - DNA, 30 bp, Artificial Sequence
  Synthetic oligonucleotide
agacgtgggagttcaggttatcgaccgaaa

SEQ ID NO: 346274 - DNA, 30 bp, Artificial Sequence
  Synthetic oligonucleotide
ctttctggcaaggatgcgtggttaccgaaa

SEQ ID NO: 346275 - DNA, 30 bp, Artificial Sequence
  Synthetic oligonucleotide
taagcgccacagtcagccagccatccgaaa

SEQ ID NO: 346276 - DNA, 30 bp, Artificial Sequence
  Synthetic oligonucleotide
atgttacatcaagtgctccacactccgaaa

SEQ ID NO: 346277 - DNA, 30 bp, Artificial Sequence
  Synthetic oligonucleotide
tgagttgcatgagaaggcacgtttccgaaa

SEQ ID NO: 346278 - DNA, 30 bp, Artificial Sequence
  Synthetic oligonucleotide
aagatcattcctcgtaagaacacagcgaaa

SEQ ID NO: 346279 - DNA, 30 bp, Artificial Sequence
  Synthetic oligonucleotide
caccttgagtctaacttaattaacgcgaaa

SEQ ID NO: 346280 - DNA, 30 bp, Artificial Sequence
  Synthetic oligonucleotide
aaatgccaacttaatagtgatcacgcgaaa

SEQ ID NO: 346281 - DNA, 30 bp, Artificial Sequence
  Synthetic oligonucleotide
gacaccaattgttggctctataccgcgaaa

SEQ ID NO: 346282 - DNA, 30 bp, Artificial Sequence
  Synthetic oligonucleotide
ttgttgcctgcaaaatctgtacccgcgaaa

SEQ ID NO: 346283 - DNA, 30 bp, Artificial Sequence
  Synthetic oligonucleotide
ctctagcgacataacgtatgccctgcgaaa

SEQ ID NO: 346284 - DNA, 30 bp, Artificial Sequence
  Synthetic oligonucleotide
ttagatccccgatgacgggatcgtgcgaaa

SEQ ID NO: 346285 - DNA, 30 bp, Artificial Sequence
  Synthetic oligonucleotide
tggcggcaaatgcccgcagctgttgcgaaa

SEQ ID NO: 346286 - DNA, 30 bp, Artificial Sequence
  Synthetic oligonucleotide
gtgccggactcccttaaatcgtttgcgaaa

SEQ ID NO: 346287 - DNA, 30 bp, Artificial Sequence
  Synthetic oligonucleotide
agcaacgcaaaatttagattgcaatcgaaa

SEQ ID NO: 346288 - DNA, 30 bp, Artificial Sequence
  Synthetic oligonucleotide
cttagtctttgagtgttgtaaagatcgaaa

SEQ ID NO: 346289 - DNA, 30 bp, Artificial Sequence
  Synthetic oligonucleotide
gattggagactacaaaagggaatatcgaaa

SEQ ID NO: 346290 - DNA, 30 bp, Artificial Sequence
  Synthetic oligonucleotide
ctacacgttcctatactcgccatatcgaaa

SEQ ID NO: 346291 - DNA, 30 bp, Artificial Sequence
  Synthetic oligonucleotide
gagcctcgcaacgaaggttcggtctcgaaa

SEQ ID NO: 346292 - DNA, 30 bp, Artificial Sequence
  Synthetic oligonucleotide
ttgtaactgtatatcggccgaacttcgaaa

SEQ ID NO: 346293 - DNA, 30 bp, Artificial Sequence
  Synthetic oligonucleotide
acttcgattaactgccattcactaaggaaa

SEQ ID NO: 346294 - DNA, 30 bp, Artificial Sequence
  Synthetic oligonucleotide
aatgcgctggttagctagcgggacaggaaa

SEQ ID NO: 346295 - DNA, 30 bp, Artificial Sequence
  Synthetic oligonucleotide
caataacggccctatccacccgccaggaaa

SEQ ID NO: 346296 - DNA, 30 bp, Artificial Sequence
  Synthetic oligonucleotide
tggcttattaagtttgcagggtataggaaa

SEQ ID NO: 346297 - DNA, 30 bp, Artificial Sequence
  Synthetic oligonucleotide
agtaatagtatacgacgggaacgtaggaaa

SEQ ID NO: 346298 - DNA, 30 bp, Artificial Sequence
  Synthetic oligonucleotide
ccacagatccaccgtggcagcatccggaaa

SEQ ID NO: 346299 - DNA, 30 bp, Artificial Sequence
  Synthetic oligonucleotide
tgtaagtgtatggcttggtcgcagcggaaa

SEQ ID NO: 346300 - DNA, 30 bp, Artificial Sequence
  Synthetic oligonucleotide
ttctacgcaggttgcgtagtagagcggaaa

SEQ ID NO: 346301 - DNA, 30 bp, Artificial Sequence
  Synthetic oligonucleotide
ggcaaattgttgctcgaaacatcgcggaaa

SEQ ID NO: 346302 - DNA, 30 bp, Artificial Sequence
  Synthetic oligonucleotide
taattatagtgcgcgatcatggggcggaaa

SEQ ID NO: 346303 - DNA, 30 bp, Artificial Sequence
  Synthetic oligonucleotide
gtgagagtactctgaaatacctatcggaaa

SEQ ID NO: 346304 - DNA, 30 bp, Artificial Sequence
  Synthetic oligonucleotide
tgagagaatcgtctggcgtggcgtcggaaa

SEQ ID NO: 346305 - DNA, 30 bp, Artificial Sequence
  Synthetic oligonucleotide
gtataagttttggtggaagactttcggaaa

SEQ ID NO: 346306 - DNA, 30 bp, Artificial Sequence
  Synthetic oligonucleotide
catttgcctatacgtttcgaaagcgggaaa

SEQ ID NO: 346307 - DNA, 30 bp, Artificial Sequence
  Synthetic oligonucleotide
cagtgtcaactattgtcgtgacaggggaaa

SEQ ID NO: 346308 - DNA, 30 bp, Artificial Sequence
  Synthetic oligonucleotide
gctttcgactctataggaaaacctgggaaa

SEQ ID NO: 346309 - DNA, 30 bp, Artificial Sequence
  Synthetic oligonucleotide
ccccatagtcaaagctcgtcccctgggaaa

SEQ ID NO: 346310 - DNA, 30 bp, Artificial Sequence
  Synthetic oligonucleotide
tagtctctgatgctggacgagcgtgggaaa

SEQ ID NO: 346311 - DNA, 30 bp, Artificial Sequence
  Synthetic oligonucleotide
gatagtttccacgaagcgataattgggaaa

SEQ ID NO: 346312 - DNA, 30 bp, Artificial Sequence
  Synthetic oligonucleotide
tgtcgataaagacagtattttaaatggaaa

SEQ ID NO: 346313 - DNA, 30 bp, Artificial Sequence
  Synthetic oligonucleotide
ataatggaccgtaattggttccaatggaaa

SEQ ID NO: 346314 - DNA, 30 bp, Artificial Sequence
  Synthetic oligonucleotide
taacccagtaccggtctttaagcatggaaa

SEQ ID NO: 346315 - DNA, 30 bp, Artificial Sequence
  Synthetic oligonucleotide
gtcatggtagcatgatttacatcatggaaa

SEQ ID NO: 346316 - DNA, 30 bp, Artificial Sequence
  Synthetic oligonucleotide
ccactcggatggcgactttggggatggaaa

SEQ ID NO: 346317 - DNA, 30 bp, Artificial Sequence
  Synthetic oligonucleotide
cttccgcaaaacagggactacgtatggaaa

SEQ ID NO: 346318 - DNA, 30 bp, Artificial Sequence
  Synthetic oligonucleotide
tacgggagaatacggggtccccggtggaaa

SEQ ID NO: 346319 - DNA, 30 bp, Artificial Sequence
  Synthetic oligonucleotide
atgattctgcatgtaaacggatggtggaaa

SEQ ID NO: 346320 - DNA, 30 bp, Artificial Sequence
  Synthetic oligonucleotide
tatgttgtcataggtggcgttttgtggaaa

SEQ ID NO: 346321 - DNA, 30 bp, Artificial Sequence
  Synthetic oligonucleotide
gaattgcctaagtttggtaaaggttggaaa

SEQ ID NO: 346322 - DNA, 30 bp, Artificial Sequence
  Synthetic oligonucleotide
tttataggaacgttagctgaaggttggaaa

SEQ ID NO: 346323 - DNA, 30 bp, Artificial Sequence
  Synthetic oligonucleotide
aactaccgactcgtctatcggttttggaaa

SEQ ID NO: 346324 - DNA, 30 bp, Artificial Sequence
  Synthetic oligonucleotide
catacactagctcattagggtttttggaaa

SEQ ID NO: 346325 - DNA, 30 bp, Artificial Sequence
  Synthetic oligonucleotide
atagtcatattatcaacgcagtcaatgaaa

SEQ ID NO: 346326 - DNA, 30 bp, Artificial Sequence
  Synthetic oligonucleotide
aattccatcccagaaacttgaggaatgaaa

SEQ ID NO: 346327 - DNA, 30 bp, Artificial Sequence
  Synthetic oligonucleotide
gcggcctcgtcctgccaacgcgccatgaaa

SEQ ID NO: 346328 - DNA, 30 bp, Artificial Sequence
  Synthetic oligonucleotide
gggtctaaagcgccttaagagctcatgaaa

SEQ ID NO: 346329 - DNA, 30 bp, Artificial Sequence
  Synthetic oligonucleotide
gaaaaccgaagcagctggccgtcgatgaaa

SEQ ID NO: 346330 - DNA, 30 bp, Artificial Sequence
  Synthetic oligonucleotide
tcaatcatgggggagtgacttactatgaaa

SEQ ID NO: 346331 - DNA, 30 bp, Artificial Sequence
  Synthetic oligonucleotide
tgttgggaaacaatccgatcctgtatgaaa

SEQ ID NO: 346332 - DNA, 30 bp, Artificial Sequence
  Synthetic oligonucleotide
ctagtcccaaccagtatgaccattatgaaa

SEQ ID NO: 346333 - DNA, 30 bp, Artificial Sequence
  Synthetic oligonucleotide
cgtgccgaactttatctgaaggttatgaaa

SEQ ID NO: 346334 - DNA, 30 bp, Artificial Sequence
  Synthetic oligonucleotide
cgccttgacgtagatagaggcaaactgaaa

SEQ ID NO: 346335 - DNA, 30 bp, Artificial Sequence
  Synthetic oligonucleotide
tacattatatatatggtctgccgcctgaaa

SEQ ID NO: 346336 - DNA, 30 bp, Artificial Sequence
  Synthetic oligonucleotide
atatggacctccagttagcgttagctgaaa

SEQ ID NO: 346337 - DNA, 30 bp, Artificial Sequence
  Synthetic oligonucleotide
agccagggcacagggccccgccggctgaaa

SEQ ID NO: 346338 - DNA, 30 bp, Artificial Sequence
  Synthetic oligonucleotide
gactgggaattcggaacataggggctgaaa

SEQ ID NO: 346339 - DNA, 30 bp, Artificial Sequence
  Synthetic oligonucleotide
cttggtctagacctaaggaccgtagtgaaa

SEQ ID NO: 346340 - DNA, 30 bp, Artificial Sequence
  Synthetic oligonucleotide
aatttaccgggttgtccctgcgacgtgaaa

SEQ ID NO: 346341 - DNA, 30 bp, Artificial Sequence
  Synthetic oligonucleotide
ggtattgataacccgatcgtgcaggtgaaa

SEQ ID NO: 346342 - DNA, 30 bp, Artificial Sequence
  Synthetic oligonucleotide
atgtatatggacggagacatggaggtgaaa

SEQ ID NO: 346343 - DNA, 30 bp, Artificial Sequence
  Synthetic oligonucleotide
cttgctaacgttgagataaaagcggtgaaa

SEQ ID NO: 346344 - DNA, 30 bp, Artificial Sequence
  Synthetic oligonucleotide
ggccggccctacaagtagttaactgtgaaa

SEQ ID NO: 346345 - DNA, 30 bp, Artificial Sequence
  Synthetic oligonucleotide
gagggttgctgcatgggaaccagtgtgaaa

SEQ ID NO: 346346 - DNA, 30 bp, Artificial Sequence
  Synthetic oligonucleotide
taatactactgatcttagacacgtgtgaaa

SEQ ID NO: 346347 - DNA, 30 bp, Artificial Sequence
  Synthetic oligonucleotide
tacttcaggatagaggacccacaattgaaa

SEQ ID NO: 346348 - DNA, 30 bp, Artificial Sequence
  Synthetic oligonucleotide
gtcgcggtggcgggtctctaaagattgaaa

SEQ ID NO: 346349 - DNA, 30 bp, Artificial Sequence
  Synthetic oligonucleotide
ctgtcaacagccagaagacgcgtattgaaa

SEQ ID NO: 346350 - DNA, 30 bp, Artificial Sequence
  Synthetic oligonucleotide
aataacatgttaaagacacttaacttgaaa

SEQ ID NO: 346351 - DNA, 30 bp, Artificial Sequence
  Synthetic oligonucleotide
tcctcaaacattcttgttgaggggttgaaa

SEQ ID NO: 346352 - DNA, 30 bp, Artificial Sequence
  Synthetic oligonucleotide
agtgcccaatgctggagctgacatttgaaa

SEQ ID NO: 346353 - DNA, 30 bp, Artificial Sequence
  Synthetic oligonucleotide
ccgcaccctctggagcagcggcctttgaaa

SEQ ID NO: 346354 - DNA, 30 bp, Artificial Sequence
  Synthetic oligonucleotide
ggcacaaaaggcaccggtagggctttgaaa

SEQ ID NO: 346355 - DNA, 30 bp, Artificial Sequence
  Synthetic oligonucleotide
ccgtcacatcctccccggtatgttttgaaa

SEQ ID NO: 346356 - DNA, 30 bp, Artificial Sequence
  Synthetic oligonucleotide
ttatgcaagtcggcacctacgacaaataaa

SEQ ID NO: 346357 - DNA, 30 bp, Artificial Sequence
  Synthetic oligonucleotide
gggtgaagccgatgcttgcagccaaataaa

SEQ ID NO: 346358 - DNA, 30 bp, Artificial Sequence
  Synthetic oligonucleotide
gaccagagacctttaaattcatgaaataaa

SEQ ID NO: 346359 - DNA, 30 bp, Artificial Sequence
  Synthetic oligonucleotide
gaagcttccgcgctcgggtaactaaataaa

SEQ ID NO: 346360 - DNA, 30 bp, Artificial Sequence
  Synthetic oligonucleotide
ttcttatcgagtgtacataacgtaaataaa

SEQ ID NO: 346361 - DNA, 30 bp, Artificial Sequence
  Synthetic oligonucleotide
aacgttctctgtgggagcttagacaataaa

SEQ ID NO: 346362 - DNA, 30 bp, Artificial Sequence
  Synthetic oligonucleotide
gctgaagttatctatcggggtagcaataaa

SEQ ID NO: 346363 - DNA, 30 bp, Artificial Sequence
  Synthetic oligonucleotide
aacagttctggctgtaggcactagaataaa

SEQ ID NO: 346364 - DNA, 30 bp, Artificial Sequence
  Synthetic oligonucleotide
tgtagtatcatgatgagcggcaggaataaa

SEQ ID NO: 346365 - DNA, 30 bp, Artificial Sequence
  Synthetic oligonucleotide
tactgcccgcatacataaacggggaataaa

SEQ ID NO: 346366 - DNA, 30 bp, Artificial Sequence
  Synthetic oligonucleotide
taggtaccagttcatgatatggggaataaa

SEQ ID NO: 346367 - DNA, 30 bp, Artificial Sequence
  Synthetic oligonucleotide
aaccttgaaggtagctccatgtgtaataaa

SEQ ID NO: 346368 - DNA, 30 bp, Artificial Sequence
  Synthetic oligonucleotide
gtcgagtaaaacccctcctctaaccataaa

SEQ ID NO: 346369 - DNA, 30 bp, Artificial Sequence
  Synthetic oligonucleotide
gtgctgtaaaaaacgcttgttacccataaa

SEQ ID NO: 346370 - DNA, 30 bp, Artificial Sequence
  Synthetic oligonucleotide
gttgtattcaaatttagggccagccataaa

SEQ ID NO: 346371 - DNA, 30 bp, Artificial Sequence
  Synthetic oligonucleotide
tgcatcataggcacaagggcgttccataaa

SEQ ID NO: 346372 - DNA, 30 bp, Artificial Sequence
  Synthetic oligonucleotide
gataagccttcgtgccgatcagatcataaa

SEQ ID NO: 346373 - DNA, 30 bp, Artificial Sequence
  Synthetic oligonucleotide
ttggataaaagtatatcaatctatcataaa

SEQ ID NO: 346374 - DNA, 30 bp, Artificial Sequence
  Synthetic oligonucleotide
ctgaaaccttgcacgctaagagctcataaa

SEQ ID NO: 346375 - DNA, 30 bp, Artificial Sequence
  Synthetic oligonucleotide
tattattcagacccagttgcgaaagataaa

SEQ ID NO: 346376 - DNA, 30 bp, Artificial Sequence
  Synthetic oligonucleotide
taaatcaaatgtttgactgggaaagataaa

SEQ ID NO: 346377 - DNA, 30 bp, Artificial Sequence
  Synthetic oligonucleotide
atttgttcgcggcggctacatagagataaa

SEQ ID NO: 346378 - DNA, 30 bp, Artificial Sequence
  Synthetic oligonucleotide
ctgaaagtatggaccataaagcacgataaa

SEQ ID NO: 346379 - DNA, 30 bp, Artificial Sequence
  Synthetic oligonucleotide
gttgcgtaatggggcattcctagcgataaa

SEQ ID NO: 346380 - DNA, 30 bp, Artificial Sequence
  Synthetic oligonucleotide
aggtgttgctgtttaggtcttctcgataaa

SEQ ID NO: 346381 - DNA, 30 bp, Artificial Sequence
  Synthetic oligonucleotide
tggaggccttctaataaactgcctgataaa

SEQ ID NO: 346382 - DNA, 30 bp, Artificial Sequence
  Synthetic oligonucleotide
aatcctcgaacgtacaggtatagtgataaa

SEQ ID NO: 346383 - DNA, 30 bp, Artificial Sequence
  Synthetic oligonucleotide
aactattacgcagtcgcgagacttgataaa

SEQ ID NO: 346384 - DNA, 30 bp, Artificial Sequence
  Synthetic oligonucleotide
tctatagccaggtggtcaagataatataaa

SEQ ID NO: 346385 - DNA, 30 bp, Artificial Sequence
  Synthetic oligonucleotide
ttcacttcgcatgatgatccggactataaa

SEQ ID NO: 346386 - DNA, 30 bp, Artificial Sequence
  Synthetic oligonucleotide
actcatacgtactaggttgccttctataaa

SEQ ID NO: 346387 - DNA, 30 bp, Artificial Sequence
  Synthetic oligonucleotide
aacttgccttgcgtatttagagagtataaa

SEQ ID NO: 346388 - DNA, 30 bp, Artificial Sequence
  Synthetic oligonucleotide
cgagcgttctgcacggagaacggttataaa

SEQ ID NO: 346389 - DNA, 30 bp, Artificial Sequence
  Synthetic oligonucleotide
tggtggcttgtactgtactattctactaaa

SEQ ID NO: 346390 - DNA, 30 bp, Artificial Sequence
  Synthetic oligonucleotide
tccagccgtcaatttggaacaagtactaaa

SEQ ID NO: 346391 - DNA, 30 bp, Artificial Sequence
  Synthetic oligonucleotide
gcgattagggcaagccaaattagtactaaa

SEQ ID NO: 346392 - DNA, 30 bp, Artificial Sequence
  Synthetic oligonucleotide
cccggcaagtcggagtgatggtttactaaa

SEQ ID NO: 346393 - DNA, 30 bp, Artificial Sequence
  Synthetic oligonucleotide
acgtttaagctgaagctttgctgccctaaa

SEQ ID NO: 346394 - DNA, 30 bp, Artificial Sequence
  Synthetic oligonucleotide
tctttcacagaggcgtccacacagcctaaa

SEQ ID NO: 346395 - DNA, 30 bp, Artificial Sequence
  Synthetic oligonucleotide
aagttcgcctcgatattaaatacgcctaaa

SEQ ID NO: 346396 - DNA, 30 bp, Artificial Sequence
  Synthetic oligonucleotide
gagaattagttaggaaatagggctcctaaa

SEQ ID NO: 346397 - DNA, 30 bp, Artificial Sequence
  Synthetic oligonucleotide
aacaacagtgagttagagtagattcctaaa

SEQ ID NO: 346398 - DNA, 30 bp, Artificial Sequence
  Synthetic oligonucleotide
caagtcccagaagcaccgcgatttcctaaa

SEQ ID NO: 346399 - DNA, 30 bp, Artificial Sequence
  Synthetic oligonucleotide
tcctcatgtttgtctctgcaagtagctaaa

SEQ ID NO: 346400 - DNA, 30 bp, Artificial Sequence
  Synthetic oligonucleotide
cacggcagcccccgcacggcggtcgctaaa

SEQ ID NO: 346401 - DNA, 30 bp, Artificial Sequence
  Synthetic oligonucleotide
tacacatgtctaaggaagcacttcgctaaa

SEQ ID NO: 346402 - DNA, 30 bp, Artificial Sequence
  Synthetic oligonucleotide
ctctgtaagcgtaagccttgtaaggctaaa

SEQ ID NO: 346403 - DNA, 30 bp, Artificial Sequence
  Synthetic oligonucleotide
agtcgagactctttccagctgagggctaaa

SEQ ID NO: 346404 - DNA, 30 bp, Artificial Sequence
  Synthetic oligonucleotide
tgtattcaagtgtgaacaccagtggctaaa

SEQ ID NO: 346405 - DNA, 30 bp, Artificial Sequence
  Synthetic oligonucleotide
ctcccttgtaccatgtatatgcatgctaaa

SEQ ID NO: 346406 - DNA, 30 bp, Artificial Sequence
  Synthetic oligonucleotide
gcggatctcagcccaccctatatctctaaa

SEQ ID NO: 346407 - DNA, 30 bp, Artificial Sequence
  Synthetic oligonucleotide
aactgcctgtcacgaagcaacaggtctaaa

SEQ ID NO: 346408 - DNA, 30 bp, Artificial Sequence
  Synthetic oligonucleotide
actaacacttcttttgtctgactgtctaaa

SEQ ID NO: 346409 - DNA, 30 bp, Artificial Sequence
  Synthetic oligonucleotide
tatggagctgtcagggaacgttattctaaa

SEQ ID NO: 346410 - DNA, 30 bp, Artificial Sequence
  Synthetic oligonucleotide
gagcatcgtgtcattgatcagggttctaaa

SEQ ID NO: 346411 - DNA, 30 bp, Artificial Sequence
  Synthetic oligonucleotide
tgcgatctcagtcgatgaagtggttctaaa

SEQ ID NO: 346412 - DNA, 30 bp, Artificial Sequence
  Synthetic oligonucleotide
gttagagtacgatggaacagcttttctaaa

SEQ ID NO: 346413 - DNA, 30 bp, Artificial Sequence
  Synthetic oligonucleotide
gcacacggttagggcgaatgcttttctaaa

SEQ ID NO: 346414 - DNA, 30 bp, Artificial Sequence
  Synthetic oligonucleotide
ggtttacgggcaaagctttagtaaagtaaa

SEQ ID NO: 346415 - DNA, 30 bp, Artificial Sequence
  Synthetic oligonucleotide
tagggcattaagggcgtgttcggaagtaaa

SEQ ID NO: 346416 - DNA, 30 bp, Artificial Sequence
  Synthetic oligonucleotide
gatttaccacacccgtaatcgaccagtaaa

SEQ ID NO: 346417 - DNA, 30 bp, Artificial Sequence
  Synthetic oligonucleotide
acgagtatccacatattagttggcagtaaa

SEQ ID NO: 346418 - DNA, 30 bp, Artificial Sequence
  Synthetic oligonucleotide
acggaccgagaaccggtaccgaagagtaaa

SEQ ID NO: 346419 - DNA, 30 bp, Artificial Sequence
  Synthetic oligonucleotide
ccactcgacaatccatcgcagtcgagtaaa

SEQ ID NO: 346420 - DNA, 30 bp, Artificial Sequence
  Synthetic oligonucleotide
gctaggaagtgggagttcgtttcgagtaaa

SEQ ID NO: 346421 - DNA, 30 bp, Artificial Sequence
  Synthetic oligonucleotide
actacaaactcagcccgggccgctagtaaa

SEQ ID NO: 346422 - DNA, 30 bp, Artificial Sequence
  Synthetic oligonucleotide
cactataggacctgcgtttcaattagtaaa

SEQ ID NO: 346423 - DNA, 30 bp, Artificial Sequence
  Synthetic oligonucleotide
agtcatgtcgcccgaccgcagcttagtaaa

SEQ ID NO: 346424 - DNA, 30 bp, Artificial Sequence
  Synthetic oligonucleotide
attaataaacgggctccgtttccccgtaaa

SEQ ID NO: 346425 - DNA, 30 bp, Artificial Sequence
  Synthetic oligonucleotide
ctaccttgacttcgagagataagccgtaaa

SEQ ID NO: 346426 - DNA, 30 bp, Artificial Sequence
  Synthetic oligonucleotide
agcaacccctatgtgatataccgccgtaaa

SEQ ID NO: 346427 - DNA, 30 bp, Artificial Sequence
  Synthetic oligonucleotide
ccacggaaacaggcctttcgccgccgtaaa

SEQ ID NO: 346428 - DNA, 30 bp, Artificial Sequence
  Synthetic oligonucleotide
ggcgagggttgcaaatggttgggccgtaaa

SEQ ID NO: 346429 - DNA, 30 bp, Artificial Sequence
  Synthetic oligonucleotide
cagaggtcttttaccgcgcctgtccgtaaa

SEQ ID NO: 346430 - DNA, 30 bp, Artificial Sequence
  Synthetic oligonucleotide
gggaaggacgaaggttcgaggcagcgtaaa

SEQ ID NO: 346431 - DNA, 30 bp, Artificial Sequence
  Synthetic oligonucleotide
gtggcaccggcgggtgatacggatcgtaaa

SEQ ID NO: 346432 - DNA, 30 bp, Artificial Sequence
  Synthetic oligonucleotide
ttcattgttatcaccccgatgcttcgtaaa

SEQ ID NO: 346433 - DNA, 31 bp, Artificial Sequence
  Synthetic oligonucleotide
agtgggcccaatgcatattccgtaaggtaaa

SEQ ID NO: 346434 - DNA, 30 bp, Artificial Sequence
  Synthetic oligonucleotide
gattaaccgctaagttcatctggaggtaaa

SEQ ID NO: 346435 - DNA, 30 bp, Artificial Sequence
  Synthetic oligonucleotide
gtaagagcctgcgagtggcagcccggtaaa

SEQ ID NO: 346436 - DNA, 30 bp, Artificial Sequence
  Synthetic oligonucleotide
cagggcctggatgacctattagccggtaaa

SEQ ID NO: 346437 - DNA, 30 bp, Artificial Sequence
  Synthetic oligonucleotide
ggacggcgtcgttcgtcgggtcgcggtaaa

SEQ ID NO: 346438 - DNA, 30 bp, Artificial Sequence
  Synthetic oligonucleotide
agtaagatctttcgtgagcttcagggtaaa

SEQ ID NO: 346439 - DNA, 30 bp, Artificial Sequence
  Synthetic oligonucleotide
tagggctgatttaaaagtcccttgggtaaa

SEQ ID NO: 346440 - DNA, 30 bp, Artificial Sequence
  Synthetic oligonucleotide
tacacaaaatgcttctcgagcattggtaaa

SEQ ID NO: 346441 - DNA, 30 bp, Artificial Sequence
  Synthetic oligonucleotide
ttgaacctcatgattagccaacttggtaaa

SEQ ID NO: 346442 - DNA, 30 bp, Artificial Sequence
  Synthetic oligonucleotide
aataattgtcgctgtctttgccaatgtaaa

SEQ ID NO: 346443 - DNA, 30 bp, Artificial Sequence
  Synthetic oligonucleotide
gggcatgttataacgctcaatgcatgtaaa

SEQ ID NO: 346444 - DNA, 30 bp, Artificial Sequence
  Synthetic oligonucleotide
cattatgcagaaactggatagctatgtaaa

SEQ ID NO: 346445 - DNA, 30 bp, Artificial Sequence
  Synthetic oligonucleotide
aatttacatccgagcacgcttaactgtaaa

SEQ ID NO: 346446 - DNA, 30 bp, Artificial Sequence
  Synthetic oligonucleotide
tgagggctcagaaagacgacagggtgtaaa

SEQ ID NO: 346447 - DNA, 30 bp, Artificial Sequence
  Synthetic oligonucleotide
tgagtaatcgggcaaacccaccattgtaaa

SEQ ID NO: 346448 - DNA, 30 bp, Artificial Sequence
  Synthetic oligonucleotide
atagtcttgccagggcgaagttgttgtaaa

SEQ ID NO: 346449 - DNA, 30 bp, Artificial Sequence
  Synthetic oligonucleotide
taatatcatcgccggacacatatttgtaaa

SEQ ID NO: 346450 - DNA, 30 bp, Artificial Sequence
  Synthetic oligonucleotide
ttacggatcacctcgttcagcctttgtaaa

SEQ ID NO: 346451 - DNA, 30 bp, Artificial Sequence
  Synthetic oligonucleotide
aagtaacctgaggccagaagtaaaattaaa

SEQ ID NO: 346452 - DNA, 30 bp, Artificial Sequence
  Synthetic oligonucleotide
tatcaaaggcacaccccctgcgtaattaaa

SEQ ID NO: 346453 - DNA, 30 bp, Artificial Sequence
  Synthetic oligonucleotide
atgtcagattttttaacaaagcacattaaa

SEQ ID NO: 346454 - DNA, 30 bp, Artificial Sequence
  Synthetic oligonucleotide
cccgatttagtaagtctcttaagcattaaa

SEQ ID NO: 346455 - DNA, 30 bp, Artificial Sequence
  Synthetic oligonucleotide
ccttgctacctgggacaccagagcattaaa

SEQ ID NO: 346456 - DNA, 30 bp, Artificial Sequence
  Synthetic oligonucleotide
atggagcgatatgcggcataacggattaaa

SEQ ID NO: 346457 - DNA, 30 bp, Artificial Sequence
  Synthetic oligonucleotide
caatcatagtatagtcgatttagtattaaa

SEQ ID NO: 346458 - DNA, 30 bp, Artificial Sequence
  Synthetic oligonucleotide
cctaaaaaacacgctgaccccggtattaaa

SEQ ID NO: 346459 - DNA, 30 bp, Artificial Sequence
  Synthetic oligonucleotide
ttaatggtctctacgctcacctcacttaaa

SEQ ID NO: 346460 - DNA, 30 bp, Artificial Sequence
  Synthetic oligonucleotide
ttgagtatgagcggagcgaaataccttaaa

SEQ ID NO: 346461 - DNA, 30 bp, Artificial Sequence
  Synthetic oligonucleotide
ggatgggtagagttctcaaaatcgcttaaa

SEQ ID NO: 346462 - DNA, 30 bp, Artificial Sequence
  Synthetic oligonucleotide
gaaattgaaagaacaaatgagtcgcttaaa

SEQ ID NO: 346463 - DNA, 30 bp, Artificial Sequence
  Synthetic oligonucleotide
tatcacaattcggtctatattaggcttaaa

SEQ ID NO: 346464 - DNA, 30 bp, Artificial Sequence
  Synthetic oligonucleotide
actctgcatggtcagtataacccagttaaa

SEQ ID NO: 346465 - DNA, 30 bp, Artificial Sequence
  Synthetic oligonucleotide
agttgtgtatatgtaccaaggagagttaaa

SEQ ID NO: 346466 - DNA, 30 bp, Artificial Sequence
  Synthetic oligonucleotide
ggtgctgacttaccgcagcgctgagttaaa

SEQ ID NO: 346467 - DNA, 30 bp, Artificial Sequence
  Synthetic oligonucleotide
tctaagattaaggcatcgctgatagttaaa

SEQ ID NO: 346468 - DNA, 30 bp, Artificial Sequence
  Synthetic oligonucleotide
gtaccccaggagaatgcgaggctagttaaa

SEQ ID NO: 346469 - DNA, 30 bp, Artificial Sequence
  Synthetic oligonucleotide
gcggcccagattacgacgtatctagttaaa

SEQ ID NO: 346470 - DNA, 30 bp, Artificial Sequence
  Synthetic oligonucleotide
cattgtaaatttatcgtgccatacgttaaa

SEQ ID NO: 346471 - DNA, 30 bp, Artificial Sequence
  Synthetic oligonucleotide
atgggcattaacggaccgtgcttggttaaa

SEQ ID NO: 346472 - DNA, 30 bp, Artificial Sequence
  Synthetic oligonucleotide
aatagtcattaaccaatgtaacctgttaaa

SEQ ID NO: 346473 - DNA, 30 bp, Artificial Sequence
  Synthetic oligonucleotide
taggtgcagatctttcgggatcctgttaaa

SEQ ID NO: 346474 - DNA, 30 bp, Artificial Sequence
  Synthetic oligonucleotide
gaaccactggggtttatgttgagtgttaaa

SEQ ID NO: 346475 - DNA, 30 bp, Artificial Sequence
  Synthetic oligonucleotide
agaaacgcgcgtcatctgcgccgctttaaa

SEQ ID NO: 346476 - DNA, 30 bp, Artificial Sequence
  Synthetic oligonucleotide
ccaggcgcgttgtacccacgctgctttaaa

SEQ ID NO: 346477 - DNA, 30 bp, Artificial Sequence
  Synthetic oligonucleotide
atccaggcatgtcttgataagcagtttaaa

SEQ ID NO: 346478 - DNA, 30 bp, Artificial Sequence
  Synthetic oligonucleotide
ttacatctttttataatctagcagtttaaa

SEQ ID NO: 346479 - DNA, 30 bp, Artificial Sequence
  Synthetic oligonucleotide
ccagcccacctgtgccgtactccgtttaaa

SEQ ID NO: 346480 - DNA, 30 bp, Artificial Sequence
  Synthetic oligonucleotide
gctatcggatgttcggacgtcgattttaaa

SEQ ID NO: 346481 - DNA, 30 bp, Artificial Sequence
  Synthetic oligonucleotide
ccgagtcggcctgaatgtggtcgttttaaa

SEQ ID NO: 346482 - DNA, 30 bp, Artificial Sequence
  Synthetic oligonucleotide
ccgggatcgtctgagtacgtactttttaaa

SEQ ID NO: 346483 - DNA, 30 bp, Artificial Sequence
  Synthetic oligonucleotide
gttcttacaactacttagcggtgaaaacaa

SEQ ID NO: 346484 - DNA, 30 bp, Artificial Sequence
  Synthetic oligonucleotide
gctgtttaggccttacagctcgccaaacaa

SEQ ID NO: 346485 - DNA, 30 bp, Artificial Sequence
  Synthetic oligonucleotide
gcagtaaatgatccctcatactccaaacaa

SEQ ID NO: 346486 - DNA, 30 bp, Artificial Sequence
  Synthetic oligonucleotide
atttcagcaataggctaggacccgaaacaa

SEQ ID NO: 346487 - DNA, 30 bp, Artificial Sequence
  Synthetic oligonucleotide
attgttgcacggtaccatctggcgaaacaa

SEQ ID NO: 346488 - DNA, 30 bp, Artificial Sequence
  Synthetic oligonucleotide
tggcttcaggttcataacgccatgaaacaa

SEQ ID NO: 346489 - DNA, 30 bp, Artificial Sequence
  Synthetic oligonucleotide
cttagttaaaaggttttcaaagctaaacaa

SEQ ID NO: 346490 - DNA, 30 bp, Artificial Sequence
  Synthetic oligonucleotide
atcacggctcgtgtctcgtgttgtaaacaa

SEQ ID NO: 346491 - DNA, 30 bp, Artificial Sequence
  Synthetic oligonucleotide
ggacgacacacgggttgggaatttaaacaa

SEQ ID NO: 346492 - DNA, 29 bp, Artificial Sequence
  Synthetic oligonucleotide
aagccagcagtggtagtccaccagaacaa

SEQ ID NO: 346493 - DNA, 30 bp, Artificial Sequence
  Synthetic oligonucleotide
cataccgcgcgaccttgaattgccgaacaa

SEQ ID NO: 346494 - DNA, 30 bp, Artificial Sequence
  Synthetic oligonucleotide
actcagcctaatgtaccgctaggcgaacaa

SEQ ID NO: 346495 - DNA, 30 bp, Artificial Sequence
  Synthetic oligonucleotide
tgactccggagaggggatttctttgaacaa

SEQ ID NO: 346496 - DNA, 30 bp, Artificial Sequence
  Synthetic oligonucleotide
aggtttgattatatcggaatgcgataacaa

SEQ ID NO: 346497 - DNA, 31 bp, Artificial Sequence
  Synthetic oligonucleotide
gttgccaccaaacccggatgtagtataacaa

SEQ ID NO: 346498 - DNA, 30 bp, Artificial Sequence
  Synthetic oligonucleotide
gttgcattggcgattctgaccgtataacaa

SEQ ID NO: 346499 - DNA, 30 bp, Artificial Sequence
  Synthetic oligonucleotide
gatacgtgtctctgcaagcggtgctaacaa

SEQ ID NO: 346500 - DNA, 30 bp, Artificial Sequence
  Synthetic oligonucleotide
ttcggcgcccaaccacatatgaggtaacaa

SEQ ID NO: 346501 - DNA, 30 bp, Artificial Sequence
  Synthetic oligonucleotide
caccgcaggatccagtatacggattaacaa

SEQ ID NO: 346502 - DNA, 30 bp, Artificial Sequence
  Synthetic oligonucleotide
cgaatttatgttaaagacaatagttaacaa

SEQ ID NO: 346503 - DNA, 30 bp, Artificial Sequence
  Synthetic oligonucleotide
cacgcacttcgtctggttttctgttaacaa

SEQ ID NO: 346504 - DNA, 30 bp, Artificial Sequence
  Synthetic oligonucleotide
gctaatagagcttacatcctataaacacaa

SEQ ID NO: 346505 - DNA, 30 bp, Artificial Sequence
  Synthetic oligonucleotide
ccaccttagataataggcttcagaacacaa

SEQ ID NO: 346506 - DNA, 30 bp, Artificial Sequence
  Synthetic oligonucleotide
gctacgccagccaaattccggttaacacaa

SEQ ID NO: 346507 - DNA, 30 bp, Artificial Sequence
  Synthetic oligonucleotide
ccgcacgggttcacttattatcagacacaa

SEQ ID NO: 346508 - DNA, 30 bp, Artificial Sequence
  Synthetic oligonucleotide
gagcattgctggcaggaccgctcgacacaa

SEQ ID NO: 346509 - DNA, 30 bp, Artificial Sequence
  Synthetic oligonucleotide
taagtgctcgcatgtgcgtactggacacaa

SEQ ID NO: 346510 - DNA, 30 bp, Artificial Sequence
  Synthetic oligonucleotide
agtgctatgtcgtgtcaatagttgacacaa

SEQ ID NO: 346511 - DNA, 30 bp, Artificial Sequence
  Synthetic oligonucleotide
ggccctgttgtatcgctaatgggtacacaa

SEQ ID NO: 346512 - DNA, 30 bp, Artificial Sequence
  Synthetic oligonucleotide
actttgtaaaacaaggtgttgaacccacaa

SEQ ID NO: 346513 - DNA, 30 bp, Artificial Sequence
  Synthetic oligonucleotide
caactgggaagaagcactgtaaagccacaa

SEQ ID NO: 346514 - DNA, 30 bp, Artificial Sequence
  Synthetic oligonucleotide
gcccaaaccggtttctagcgtgagccacaa

SEQ ID NO: 346515 - DNA, 29 bp, Artificial Sequence
  Synthetic oligonucleotide
caagaacggcctccccttggcaagcacaa

SEQ ID NO: 346516 - DNA, 30 bp, Artificial Sequence
  Synthetic oligonucleotide
atatgacatgcataggggagggcagcacaa

SEQ ID NO: 346517 - DNA, 30 bp, Artificial Sequence
  Synthetic oligonucleotide
caaatacatgcactgactgtaggcgcacaa

SEQ ID NO: 346518 - DNA, 30 bp, Artificial Sequence
  Synthetic oligonucleotide
gtccgggagcccctcttcacctgcgcacaa

SEQ ID NO: 346519 - DNA, 30 bp, Artificial Sequence
  Synthetic oligonucleotide
agacaatcttgtaccaatgtatgggcacaa

SEQ ID NO: 346520 - DNA, 30 bp, Artificial Sequence
  Synthetic oligonucleotide
cttcagttgcgtgctcttatccctgcacaa

SEQ ID NO: 346521 - DNA, 30 bp, Artificial Sequence
  Synthetic oligonucleotide
tgccccatgggtatggactatgcatcacaa

SEQ ID NO: 346522 - DNA, 30 bp, Artificial Sequence
  Synthetic oligonucleotide
tggatcttccaaagttccatgtcatcacaa

SEQ ID NO: 346523 - DNA, 30 bp, Artificial Sequence
  Synthetic oligonucleotide
gatgcaggagtggcgaccaggtggtcacaa

SEQ ID NO: 346524 - DNA, 30 bp, Artificial Sequence
  Synthetic oligonucleotide
tccagcgtgaatgatgcgtaactgtcacaa

SEQ ID NO: 346525 - DNA, 30 bp, Artificial Sequence
  Synthetic oligonucleotide
gagtacctcgtcctctatctcaattcacaa

SEQ ID NO: 346526 - DNA, 30 bp, Artificial Sequence
  Synthetic oligonucleotide
tgctaagcatccggtacttgaagttcacaa

SEQ ID NO: 346527 - DNA, 30 bp, Artificial Sequence
  Synthetic oligonucleotide
taccctagcaagcatgtttcacgttcacaa

SEQ ID NO: 346528 - DNA, 30 bp, Artificial Sequence
  Synthetic oligonucleotide
aagtgaagcgcactggaactgtgttcacaa

SEQ ID NO: 346529 - DNA, 30 bp, Artificial Sequence
  Synthetic oligonucleotide
tgtgagggagatcattggtccgtttcacaa

SEQ ID NO: 346530 - DNA, 30 bp, Artificial Sequence
  Synthetic oligonucleotide
gacgtctaggttactatttttaaaagacaa

SEQ ID NO: 346531 - DNA, 30 bp, Artificial Sequence
  Synthetic oligonucleotide
aacccggacaaattatacatcgaaagacaa

SEQ ID NO: 346532 - DNA, 30 bp, Artificial Sequence
  Synthetic oligonucleotide
atcagtgggcccgggggtccgtcaagacaa

SEQ ID NO: 346533 - DNA, 30 bp, Artificial Sequence
  Synthetic oligonucleotide
aaataagatatatgaaattagtgcagacaa

SEQ ID NO: 346534 - DNA, 30 bp, Artificial Sequence
  Synthetic oligonucleotide
gaaatctcagtggggaactcgtgcagacaa

SEQ ID NO: 346535 - DNA, 30 bp, Artificial Sequence
  Synthetic oligonucleotide
gcgtccaacaattccgcagtactgagacaa

SEQ ID NO: 346536 - DNA, 30 bp, Artificial Sequence
  Synthetic oligonucleotide
aagtacgctaatccttctggaacccgacaa

SEQ ID NO: 346537 - DNA, 30 bp, Artificial Sequence
  Synthetic oligonucleotide
gggctgttcggggggaataagaagcgacaa

SEQ ID NO: 346538 - DNA, 30 bp, Artificial Sequence
  Synthetic oligonucleotide
agaagttcgataaacgcgccagcgcgacaa

SEQ ID NO: 346539 - DNA, 30 bp, Artificial Sequence
  Synthetic oligonucleotide
aaacattctaacagtcttctggcgcgacaa

SEQ ID NO: 346540 - DNA, 30 bp, Artificial Sequence
  Synthetic oligonucleotide
atttggaatatggaagctataagtcgacaa

SEQ ID NO: 346541 - DNA, 30 bp, Artificial Sequence
  Synthetic oligonucleotide
ggatggtaacctgtcccagggaaaggacaa

SEQ ID NO: 346542 - DNA, 30 bp, Artificial Sequence
  Synthetic oligonucleotide
gagggacaagcgacccggggaccaggacaa

SEQ ID NO: 346543 - DNA, 30 bp, Artificial Sequence
  Synthetic oligonucleotide
gttgactcgcgcgtagattgctgaggacaa

SEQ ID NO: 346544 - DNA, 30 bp, Artificial Sequence
  Synthetic oligonucleotide
gtttaggcggatcctctgcagtgaggacaa

SEQ ID NO: 346545 - DNA, 30 bp, Artificial Sequence
  Synthetic oligonucleotide
actttcatataacttgggtggataggacaa

SEQ ID NO: 346546 - DNA, 30 bp, Artificial Sequence
  Synthetic oligonucleotide
tagacctcaatggatcgtaataacggacaa

SEQ ID NO: 346547 - DNA, 30 bp, Artificial Sequence
  Synthetic oligonucleotide
atacacgcacggggtcaattatagggacaa

SEQ ID NO: 346548 - DNA, 30 bp, Artificial Sequence
  Synthetic oligonucleotide
tgctgtcttagaaccgcgcaggggggacaa

SEQ ID NO: 346549 - DNA, 30 bp, Artificial Sequence
  Synthetic oligonucleotide
aacatcccagcctggttcttgctgggacaa

SEQ ID NO: 346550 - DNA, 30 bp, Artificial Sequence
  Synthetic oligonucleotide
ggtgctgtggcccgagggactctgggacaa

SEQ ID NO: 346551 - DNA, 30 bp, Artificial Sequence
  Synthetic oligonucleotide
cgggatagttgttccacataatatggacaa

SEQ ID NO: 346552 - DNA, 30 bp, Artificial Sequence
  Synthetic oligonucleotide
tcttaatagctacgcatgtgatatggacaa

SEQ ID NO: 346553 - DNA, 30 bp, Artificial Sequence
  Synthetic oligonucleotide
ccattacagtgctacacggactatggacaa

SEQ ID NO: 346554 - DNA, 30 bp, Artificial Sequence
  Synthetic oligonucleotide
tgaggactgcagtcgttttttggtggacaa

SEQ ID NO: 346555 - DNA, 30 bp, Artificial Sequence
  Synthetic oligonucleotide
tacgcgcgagatgttacttccacatgacaa

SEQ ID NO: 346556 - DNA, 30 bp, Artificial Sequence
  Synthetic oligonucleotide
aaggtcgtttataagatgtaagcatgacaa

SEQ ID NO: 346557 - DNA, 30 bp, Artificial Sequence
  Synthetic oligonucleotide
aagctagtctcacagatgtagctatgacaa

SEQ ID NO: 346558 - DNA, 30 bp, Artificial Sequence
  Synthetic oligonucleotide
tgcctacagcactgcgaacgcaaaatacaa

SEQ ID NO: 346559 - DNA, 30 bp, Artificial Sequence
  Synthetic oligonucleotide
gatcttcagaccctcagtgagcgaatacaa

SEQ ID NO: 346560 - DNA, 30 bp, Artificial Sequence
  Synthetic oligonucleotide
cgtaataacactggccgctgcggaatacaa

SEQ ID NO: 346561 - DNA, 30 bp, Artificial Sequence
  Synthetic oligonucleotide
tagtacgagaaggatagacatctaatacaa

SEQ ID NO: 346562 - DNA, 30 bp, Artificial Sequence
  Synthetic oligonucleotide
ctagctctaagtgtccgtcctggcatacaa

SEQ ID NO: 346563 - DNA, 30 bp, Artificial Sequence
  Synthetic oligonucleotide
tgtttcgacaccaacccgtggcagatacaa

SEQ ID NO: 346564 - DNA, 30 bp, Artificial Sequence
  Synthetic oligonucleotide
gttttatatgcctcccaaagccatatacaa

SEQ ID NO: 346565 - DNA, 30 bp, Artificial Sequence
  Synthetic oligonucleotide
cctagtaatcattcgcgagagtctatacaa

SEQ ID NO: 346566 - DNA, 30 bp, Artificial Sequence
  Synthetic oligonucleotide
gttgtcgttgtgaaattgttcggactacaa

SEQ ID NO: 346567 - DNA, 30 bp, Artificial Sequence
  Synthetic oligonucleotide
gtcagcgtacgagcgatagtctccctacaa

SEQ ID NO: 346568 - DNA, 30 bp, Artificial Sequence
  Synthetic oligonucleotide
cctaactgatcctatgcaaacttcctacaa

SEQ ID NO: 346569 - DNA, 30 bp, Artificial Sequence
  Synthetic oligonucleotide
tatcacaacttgacagttatcatgctacaa

SEQ ID NO: 346570 - DNA, 30 bp, Artificial Sequence
  Synthetic oligonucleotide
ggcatagtgggataggtacgtggtctacaa

SEQ ID NO: 346571 - DNA, 30 bp, Artificial Sequence
  Synthetic oligonucleotide
tcctgggcatgataatcgtctgttctacaa

SEQ ID NO: 346572 - DNA, 30 bp, Artificial Sequence
  Synthetic oligonucleotide
aaacagtctcctgagcgaatttaagtacaa

SEQ ID NO: 346573 - DNA, 30 bp, Artificial Sequence
  Synthetic oligonucleotide
agatgcttagttgcatttgcccaggtacaa

SEQ ID NO: 346574 - DNA, 30 bp, Artificial Sequence
  Synthetic oligonucleotide
ttacttaccgtcattgagtatttggtacaa

SEQ ID NO: 346575 - DNA, 30 bp, Artificial Sequence
  Synthetic oligonucleotide
gcagaggccgatgcattatttagtgtacaa

SEQ ID NO: 346576 - DNA, 30 bp, Artificial Sequence
  Synthetic oligonucleotide
gggagactggcactcatgacgcgtgtacaa

SEQ ID NO: 346577 - DNA, 30 bp, Artificial Sequence
  Synthetic oligonucleotide
tatctttagacatatgagtctattgtacaa

SEQ ID NO: 346578 - DNA, 30 bp, Artificial Sequence
  Synthetic oligonucleotide
ccagtttccttatgtcttggtccattacaa

SEQ ID NO: 346579 - DNA, 30 bp, Artificial Sequence
  Synthetic oligonucleotide
cggaagattgtatattcgctcagcttacaa

SEQ ID NO: 346580 - DNA, 30 bp, Artificial Sequence
  Synthetic oligonucleotide
gtttgggcgtccagcacatgctcgttacaa

SEQ ID NO: 346581 - DNA, 30 bp, Artificial Sequence
  Synthetic oligonucleotide
atgattcctacgttaagcgataggttacaa

SEQ ID NO: 346582 - DNA, 30 bp, Artificial Sequence
  Synthetic oligonucleotide
aattagactactaggaagccctctttacaa

SEQ ID NO: 346583 - DNA, 30 bp, Artificial Sequence
  Synthetic oligonucleotide
cgtatcgagacgtttagtgcaggtttacaa

SEQ ID NO: 346584 - DNA, 30 bp, Artificial Sequence
  Synthetic oligonucleotide
gaattggtgtgcgtggcgttccttttacaa

SEQ ID NO: 346585 - DNA, 30 bp, Artificial Sequence
  Synthetic oligonucleotide
cctacgcacttcgcgttgagcgttttacaa

SEQ ID NO: 346586 - DNA, 30 bp, Artificial Sequence
  Synthetic oligonucleotide
gggaacggatgggcagcggaagaaaaccaa

SEQ ID NO: 346587 - DNA, 30 bp, Artificial Sequence
  Synthetic oligonucleotide
gctagagtacaggtagttcctgtgaaccaa

SEQ ID NO: 346588 - DNA, 30 bp, Artificial Sequence
  Synthetic oligonucleotide
caaaacggacgcactcttacatataaccaa

SEQ ID NO: 346589 - DNA, 28 bp, Artificial Sequence
  Synthetic oligonucleotide
tgtatgaagaatgacagacacacaccaa

SEQ ID NO: 346590 - DNA, 30 bp, Artificial Sequence
  Synthetic oligonucleotide
gcatggttcctacgtcagtgattacaccaa

SEQ ID NO: 346591 - DNA, 30 bp, Artificial Sequence
  Synthetic oligonucleotide
aaatacgttagaggttatgcattccaccaa

SEQ ID NO: 346592 - DNA, 30 bp, Artificial Sequence
  Synthetic oligonucleotide
aagcagttgccacggtgcactccgcaccaa

SEQ ID NO: 346593 - DNA, 30 bp, Artificial Sequence
  Synthetic oligonucleotide
agaacacttttgtgtgtaatattgcaccaa

SEQ ID NO: 346594 - DNA, 30 bp, Artificial Sequence
  Synthetic oligonucleotide
cgatccgtctcgggagagggtagtcaccaa

SEQ ID NO: 346595 - DNA, 30 bp, Artificial Sequence
  Synthetic oligonucleotide
ggattcgcgtccaggtgactccgtcaccaa

SEQ ID NO: 346596 - DNA, 30 bp, Artificial Sequence
  Synthetic oligonucleotide
atgaatttaaagattaaatgatttcaccaa

SEQ ID NO: 346597 - DNA, 30 bp, Artificial Sequence
  Synthetic oligonucleotide
caagcgtgtcccgtgattttagtagaccaa

SEQ ID NO: 346598 - DNA, 30 bp, Artificial Sequence
  Synthetic oligonucleotide
gatcgaccatagtcgtcagtcttggaccaa

SEQ ID NO: 346599 - DNA, 30 bp, Artificial Sequence
  Synthetic oligonucleotide
atcgggcttcgattacatacggctgaccaa

SEQ ID NO: 346600 - DNA, 30 bp, Artificial Sequence
  Synthetic oligonucleotide
ggccggcacctgattggtgagattgaccaa

SEQ ID NO: 346601 - DNA, 30 bp, Artificial Sequence
  Synthetic oligonucleotide
accagtttcacagtttttaacgcataccaa

SEQ ID NO: 346602 - DNA, 30 bp, Artificial Sequence
  Synthetic oligonucleotide
cgccggtatgcgagtccctccacctaccaa

SEQ ID NO: 346603 - DNA, 30 bp, Artificial Sequence
  Synthetic oligonucleotide
ttttaagggcaagcgcgctccgtctaccaa

SEQ ID NO: 346604 - DNA, 30 bp, Artificial Sequence
  Synthetic oligonucleotide
cccccttaaagattccccaaaccgtaccaa

SEQ ID NO: 346605 - DNA, 30 bp, Artificial Sequence
  Synthetic oligonucleotide
gtcttgccatggagtagtgtaaattaccaa

SEQ ID NO: 346606 - DNA, 30 bp, Artificial Sequence
  Synthetic oligonucleotide
atctggtagcggtaagtcctccgaacccaa

SEQ ID NO: 346607 - DNA, 30 bp, Artificial Sequence
  Synthetic oligonucleotide
tcacgaatattaggttagccgctcacccaa

SEQ ID NO: 346608 - DNA, 30 bp, Artificial Sequence
  Synthetic oligonucleotide
gtcagttggctctctgaaccatagacccaa

SEQ ID NO: 346609 - DNA, 30 bp, Artificial Sequence
  Synthetic oligonucleotide
cagagaacttactcgtagtcacctacccaa

SEQ ID NO: 346610 - DNA, 30 bp, Artificial Sequence
  Synthetic oligonucleotide
tggaactccgtttgcccggcgcttacccaa

SEQ ID NO: 346611 - DNA, 30 bp, Artificial Sequence
  Synthetic oligonucleotide
gggcgttccaagggagaccacgaaccccaa

SEQ ID NO: 346612 - DNA, 30 bp, Artificial Sequence
  Synthetic oligonucleotide
gttgcggcatcagttcgttaggtaccccaa

SEQ ID NO: 346613 - DNA, 30 bp, Artificial Sequence
  Synthetic oligonucleotide
ccactcgtgatctgtactgtgatcccccaa

SEQ ID NO: 346614 - DNA, 30 bp, Artificial Sequence
  Synthetic oligonucleotide
tcgtctgcatttgttaagaatgtcccccaa

SEQ ID NO: 346615 - DNA, 30 bp, Artificial Sequence
  Synthetic oligonucleotide
tcgccagttgagtcgcagcgtgttccccaa

SEQ ID NO: 346616 - DNA, 30 bp, Artificial Sequence
  Synthetic oligonucleotide
atccctacagttcgtccggtctgagcccaa

SEQ ID NO: 346617 - DNA, 30 bp, Artificial Sequence
  Synthetic oligonucleotide
aagggtcaccgttgtccatatgtagcccaa

SEQ ID NO: 346618 - DNA, 30 bp, Artificial Sequence
  Synthetic oligonucleotide
taggggtcagacaatccgtgttccgcccaa

SEQ ID NO: 346619 - DNA, 30 bp, Artificial Sequence
  Synthetic oligonucleotide
gactatgcttgtgtttaggtataggcccaa

SEQ ID NO: 346620 - DNA, 30 bp, Artificial Sequence
  Synthetic oligonucleotide
ttctgagtactctgctatagcttggcccaa

SEQ ID NO: 346621 - DNA, 30 bp, Artificial Sequence
  Synthetic oligonucleotide
aaaatacataggtgaatcaacggtgcccaa

SEQ ID NO: 346622 - DNA, 30 bp, Artificial Sequence
  Synthetic oligonucleotide
actgaattgtgctctagattgtaatcccaa

SEQ ID NO: 346623 - DNA, 30 bp, Artificial Sequence
  Synthetic oligonucleotide
cacgtcctgctttcatcggtcgtatcccaa

SEQ ID NO: 346624 - DNA, 30 bp, Artificial Sequence
  Synthetic oligonucleotide
agctcgggtattccgtttcgccagtcccaa

SEQ ID NO: 346625 - DNA, 30 bp, Artificial Sequence
  Synthetic oligonucleotide
gggaattaaggctgtggtgcggagtcccaa

SEQ ID NO: 346626 - DNA, 30 bp, Artificial Sequence
  Synthetic oligonucleotide
tacttcggtgggcagggagtttcttcccaa

SEQ ID NO: 346627 - DNA, 30 bp, Artificial Sequence
  Synthetic oligonucleotide
gtagaaggccgcatgtcaatccaaagccaa

SEQ ID NO: 346628 - DNA, 30 bp, Artificial Sequence
  Synthetic oligonucleotide
tgcaaagttttgaggccacgcgcaagccaa

SEQ ID NO: 346629 - DNA, 30 bp, Artificial Sequence
  Synthetic oligonucleotide
agctgctccattccgaccaatctcagccaa

SEQ ID NO: 346630 - DNA, 30 bp, Artificial Sequence
  Synthetic oligonucleotide
gagggctgcgcttccaaacggtagagccaa

SEQ ID NO: 346631 - DNA, 30 bp, Artificial Sequence
  Synthetic oligonucleotide
atccttcgaggtcatagggagaggagccaa

SEQ ID NO: 346632 - DNA, 30 bp, Artificial Sequence
  Synthetic oligonucleotide
tgagacgtcgccatgacaccgcatagccaa

SEQ ID NO: 346633 - DNA, 30 bp, Artificial Sequence
  Synthetic oligonucleotide
agttggtgaggctgcagtccaggtagccaa

SEQ ID NO: 346634 - DNA, 30 bp, Artificial Sequence
  Synthetic oligonucleotide
gtgcagtgtgttcggtattctattagccaa

SEQ ID NO: 346635 - DNA, 30 bp, Artificial Sequence
  Synthetic oligonucleotide
ctgctctagctgtgtggccagtaacgccaa

SEQ ID NO: 346636 - DNA, 30 bp, Artificial Sequence
  Synthetic oligonucleotide
gttctaggatgcattcaactaggacgccaa

SEQ ID NO: 346637 - DNA, 30 bp, Artificial Sequence
  Synthetic oligonucleotide
gttcagtgccaacctggcaacagccgccaa

SEQ ID NO: 346638 - DNA, 30 bp, Artificial Sequence
  Synthetic oligonucleotide
ggggtctcgtgaggttatctcctccgccaa

SEQ ID NO: 346639 - DNA, 30 bp, Artificial Sequence
  Synthetic oligonucleotide
ttagtaaactatagcgcgttcttccgccaa

SEQ ID NO: 346640 - DNA, 30 bp, Artificial Sequence
  Synthetic oligonucleotide
agcagcgagggtaaccgggtctcgcgccaa

SEQ ID NO: 346641 - DNA, 30 bp, Artificial Sequence
  Synthetic oligonucleotide
gctccggatgtaaagctattggtgcgccaa

SEQ ID NO: 346642 - DNA, 30 bp, Artificial Sequence
  Synthetic oligonucleotide
atattggacggccatgtacgttgaggccaa

SEQ ID NO: 346643 - DNA, 30 bp, Artificial Sequence
  Synthetic oligonucleotide
taggattttcaaggcccatcgcagggccaa

SEQ ID NO: 346644 - DNA, 30 bp, Artificial Sequence
  Synthetic oligonucleotide
ttggtgtaaaatactgggcagtagggccaa

SEQ ID NO: 346645 - DNA, 30 bp, Artificial Sequence
  Synthetic oligonucleotide
tccaaactccccagaagagtatggggccaa

SEQ ID NO: 346646 - DNA, 30 bp, Artificial Sequence
  Synthetic oligonucleotide
taactacctactatgaacgaggatggccaa

SEQ ID NO: 346647 - DNA, 30 bp, Artificial Sequence
  Synthetic oligonucleotide
actccagcgtcagtggaaggcgcctgccaa

SEQ ID NO: 346648 - DNA, 30 bp, Artificial Sequence
  Synthetic oligonucleotide
ctggctatggcgtcggttctggcctgccaa

SEQ ID NO: 346649 - DNA, 30 bp, Artificial Sequence
  Synthetic oligonucleotide
tcatagtcggtcccgcccggcgagtgccaa

SEQ ID NO: 346650 - DNA, 30 bp, Artificial Sequence
  Synthetic oligonucleotide
atgcagcccgccgattatcgtcattgccaa

SEQ ID NO: 346651 - DNA, 30 bp, Artificial Sequence
  Synthetic oligonucleotide
caaagacgcgggcatggttcatcttgccaa

SEQ ID NO: 346652 - DNA, 30 bp, Artificial Sequence
  Synthetic oligonucleotide
gctctttgatctaagtacagaaaaatccaa

SEQ ID NO: 346653 - DNA, 30 bp, Artificial Sequence
  Synthetic oligonucleotide
ttgtcaggtacgtaacgtctttcaatccaa

SEQ ID NO: 346654 - DNA, 30 bp, Artificial Sequence
  Synthetic oligonucleotide
gttcagttgcttaacgaaatgagcatccaa

SEQ ID NO: 346655 - DNA, 30 bp, Artificial Sequence
  Synthetic oligonucleotide
acttgaaaatgcttattacaatgcatccaa

SEQ ID NO: 346656 - DNA, 30 bp, Artificial Sequence
  Synthetic oligonucleotide
ggatagtctattgtaaactcaaagatccaa

SEQ ID NO: 346657 - DNA, 30 bp, Artificial Sequence
  Synthetic oligonucleotide
tccgggaatgagcagtagcaatcgatccaa

SEQ ID NO: 346658 - DNA, 30 bp, Artificial Sequence
  Synthetic oligonucleotide
aggcagttttcgtatatagtcatgatccaa

SEQ ID NO: 346659 - DNA, 30 bp, Artificial Sequence
  Synthetic oligonucleotide
cgcatgaaaagccaccttagggctatccaa

SEQ ID NO: 346660 - DNA, 30 bp, Artificial Sequence
  Synthetic oligonucleotide
ccagacgagtcacagttaatctgtatccaa

SEQ ID NO: 346661 - DNA, 31 bp, Artificial Sequence
  Synthetic oligonucleotide
ggagtgctatagctagcttcatacgctccaa

SEQ ID NO: 346662 - DNA, 30 bp, Artificial Sequence
  Synthetic oligonucleotide
ttaccatagctctctgaaatctatctccaa

SEQ ID NO: 346663 - DNA, 30 bp, Artificial Sequence
  Synthetic oligonucleotide
cttaaaattaaagattggtactttctccaa

SEQ ID NO: 346664 - DNA, 30 bp, Artificial Sequence
  Synthetic oligonucleotide
atcggtagcccgcaagtcccccaagtccaa

SEQ ID NO: 346665 - DNA, 30 bp, Artificial Sequence
  Synthetic oligonucleotide
atcattgggacctccgcataaggagtccaa

SEQ ID NO: 346666 - DNA, 30 bp, Artificial Sequence
  Synthetic oligonucleotide
gacgttcagacgcgtgtggctgtagtccaa

SEQ ID NO: 346667 - DNA, 30 bp, Artificial Sequence
  Synthetic oligonucleotide
acgtgccggttagatatttggctcgtccaa

SEQ ID NO: 346668 - DNA, 30 bp, Artificial Sequence
  Synthetic oligonucleotide
gtacggcctggagcttaactataggtccaa

SEQ ID NO: 346669 - DNA, 30 bp, Artificial Sequence
  Synthetic oligonucleotide
tgtgtgttcaattggggatacgcggtccaa

SEQ ID NO: 346670 - DNA, 30 bp, Artificial Sequence
  Synthetic oligonucleotide
tacggcgggtcactgtacttcatggtccaa

SEQ ID NO: 346671 - DNA, 30 bp, Artificial Sequence
  Synthetic oligonucleotide
agaggaccgtcgtgctttgtgatggtccaa

SEQ ID NO: 346672 - DNA, 30 bp, Artificial Sequence
  Synthetic oligonucleotide
gagaggattttgtgtgcattgcaattccaa

SEQ ID NO: 346673 - DNA, 30 bp, Artificial Sequence
  Synthetic oligonucleotide
tcacggtaggtaacgagccttacattccaa

SEQ ID NO: 346674 - DNA, 30 bp, Artificial Sequence
  Synthetic oligonucleotide
ttagtctgaagtataacgaattggttccaa

SEQ ID NO: 346675 - DNA, 30 bp, Artificial Sequence
  Synthetic oligonucleotide
atgattaataggcacattttagtgttccaa

SEQ ID NO: 346676 - DNA, 30 bp, Artificial Sequence
  Synthetic oligonucleotide
ctcactgggttcttcgccccagctttccaa

SEQ ID NO: 346677 - DNA, 30 bp, Artificial Sequence
  Synthetic oligonucleotide
taaacggtggttattatactatttttccaa

SEQ ID NO: 346678 - DNA, 30 bp, Artificial Sequence
  Synthetic oligonucleotide
tatttactagtgctttcgtgatcaaagcaa

SEQ ID NO: 346679 - DNA, 30 bp, Artificial Sequence
  Synthetic oligonucleotide
ctactggggcatcatacgtcaggaaagcaa

SEQ ID NO: 346680 - DNA, 30 bp, Artificial Sequence
  Synthetic oligonucleotide
aaactattaattaaggtatacgtaaagcaa

SEQ ID NO: 346681 - DNA, 30 bp, Artificial Sequence
  Synthetic oligonucleotide
gagagctgcgcggaagcatgaaacaagcaa

SEQ ID NO: 346682 - DNA, 30 bp, Artificial Sequence
  Synthetic oligonucleotide
cgaactcgagagcctgatctattcaagcaa

SEQ ID NO: 346683 - DNA, 30 bp, Artificial Sequence
  Synthetic oligonucleotide
atcagctccgggcagaattgtcataagcaa

SEQ ID NO: 346684 - DNA, 30 bp, Artificial Sequence
  Synthetic oligonucleotide
acccccgcgatatgtgctgctattaagcaa

SEQ ID NO: 346685 - DNA, 30 bp, Artificial Sequence
  Synthetic oligonucleotide
tcacagatagacaacagccatgcacagcaa

SEQ ID NO: 346686 - DNA, 30 bp, Artificial Sequence
  Synthetic oligonucleotide
atccagttagaccacggttatggccagcaa

SEQ ID NO: 346687 - DNA, 30 bp, Artificial Sequence
  Synthetic oligonucleotide
tgacgccgcaaagccaaatgtcagcagcaa

SEQ ID NO: 346688 - DNA, 30 bp, Artificial Sequence
  Synthetic oligonucleotide
ggatagcgagcacaagtagttgcagagcaa

SEQ ID NO: 346689 - DNA, 30 bp, Artificial Sequence
  Synthetic oligonucleotide
cgcatctttcctctggaataacgagagcaa

SEQ ID NO: 346690 - DNA, 30 bp, Artificial Sequence
  Synthetic oligonucleotide
cggcgggatgcgttttcacggggcgagcaa

SEQ ID NO: 346691 - DNA, 30 bp, Artificial Sequence
  Synthetic oligonucleotide
aacatattgaccgggatgaggggggagcaa

SEQ ID NO: 346692 - DNA, 30 bp, Artificial Sequence
  Synthetic oligonucleotide
tgaaaaatttaggtgctgtcgttggagcaa

SEQ ID NO: 346693 - DNA, 30 bp, Artificial Sequence
  Synthetic oligonucleotide
attccggtggtcagctgtgccaatgagcaa

SEQ ID NO: 346694 - DNA, 30 bp, Artificial Sequence
  Synthetic oligonucleotide
gcaaggggtctggagcggcggccgtagcaa

SEQ ID NO: 346695 - DNA, 30 bp, Artificial Sequence
  Synthetic oligonucleotide
cacgacctcttagtaaacgacatgtagcaa

SEQ ID NO: 346696 - DNA, 30 bp, Artificial Sequence
  Synthetic oligonucleotide
gaccatattgagatcccgccttcttagcaa

SEQ ID NO: 346697 - DNA, 30 bp, Artificial Sequence
  Synthetic oligonucleotide
attcagaacaattctggattgatttagcaa

SEQ ID NO: 346698 - DNA, 30 bp, Artificial Sequence
  Synthetic oligonucleotide
agtttgtgagcaactttgcaccaaacgcaa

SEQ ID NO: 346699 - DNA, 30 bp, Artificial Sequence
  Synthetic oligonucleotide
aaggctacaaatttgcttggccacacgcaa

SEQ ID NO: 346700 - DNA, 30 bp, Artificial Sequence
  Synthetic oligonucleotide
cccccaacggacggcgactcgcacacgcaa

SEQ ID NO: 346701 - DNA, 30 bp, Artificial Sequence
  Synthetic oligonucleotide
gagctaagtggtttcaggatgcacacgcaa

SEQ ID NO: 346702 - DNA, 30 bp, Artificial Sequence
  Synthetic oligonucleotide
cgttgaaagcgtttacgcctatcgacgcaa

SEQ ID NO: 346703 - DNA, 30 bp, Artificial Sequence
  Synthetic oligonucleotide
tatggtggtgtacatttttaaactacgcaa

SEQ ID NO: 346704 - DNA, 30 bp, Artificial Sequence
  Synthetic oligonucleotide
acaaaaagtggcggaggttgttgtacgcaa

SEQ ID NO: 346705 - DNA, 30 bp, Artificial Sequence
  Synthetic oligonucleotide
agaaacgccgcaggaccactctgaccgcaa

SEQ ID NO: 346706 - DNA, 30 bp, Artificial Sequence
  Synthetic oligonucleotide
ccgtaaatctctggatccgatcagccgcaa

SEQ ID NO: 346707 - DNA, 30 bp, Artificial Sequence
  Synthetic oligonucleotide
ccattaacagggattcaggatatgccgcaa

SEQ ID NO: 346708 - DNA, 30 bp, Artificial Sequence
  Synthetic oligonucleotide
cagacatatgtggtccctaattttccgcaa

SEQ ID NO: 346709 - DNA, 30 bp, Artificial Sequence
  Synthetic oligonucleotide
cattccgggcacctgtactggaccgcgcaa

SEQ ID NO: 346710 - DNA, 30 bp, Artificial Sequence
  Synthetic oligonucleotide
taattattgcagcggcagagtcaatcgcaa

SEQ ID NO: 346711 - DNA, 30 bp, Artificial Sequence
  Synthetic oligonucleotide
tagattaggatatgcccacgtgcatcgcaa

SEQ ID NO: 346712 - DNA, 30 bp, Artificial Sequence
  Synthetic oligonucleotide
acgcctcggattggggactcatcatcgcaa

SEQ ID NO: 346713 - DNA, 30 bp, Artificial Sequence
  Synthetic oligonucleotide
gaatagagaagtgttcaaacgccctcgcaa

SEQ ID NO: 346714 - DNA, 30 bp, Artificial Sequence
  Synthetic oligonucleotide
gtaaattcgagaattggggctcgctcgcaa

SEQ ID NO: 346715 - DNA, 31 bp, Artificial Sequence
  Synthetic oligonucleotide
taatatagccattattagctgattctcgcaa

SEQ ID NO: 346716 - DNA, 30 bp, Artificial Sequence
  Synthetic oligonucleotide
ggtcgctatcgattgaattctcagtcgcaa

SEQ ID NO: 346717 - DNA, 30 bp, Artificial Sequence
  Synthetic oligonucleotide
ggggctgcatgcctcggcttagcttcgcaa

SEQ ID NO: 346718 - DNA, 30 bp, Artificial Sequence
  Synthetic oligonucleotide
gtattggcaaagatcgtggtatcttcgcaa

SEQ ID NO: 346719 - DNA, 30 bp, Artificial Sequence
  Synthetic oligonucleotide
gaaatcgtgaataaccgaatctcttcgcaa

SEQ ID NO: 346720 - DNA, 30 bp, Artificial Sequence
  Synthetic oligonucleotide
taatgaagcacgagcatctcgagttcgcaa

SEQ ID NO: 346721 - DNA, 30 bp, Artificial Sequence
  Synthetic oligonucleotide
cgcatgcacctagcgacgaccagaaggcaa

SEQ ID NO: 346722 - DNA, 30 bp, Artificial Sequence
  Synthetic oligonucleotide
tggggccatccgaaatggaacggaaggcaa

SEQ ID NO: 346723 - DNA, 30 bp, Artificial Sequence
  Synthetic oligonucleotide
tacgaatcacggtggaacattgacaggcaa

SEQ ID NO: 346724 - DNA, 30 bp, Artificial Sequence
  Synthetic oligonucleotide
aattgggagtagactcgttgcaccaggcaa

SEQ ID NO: 346725 - DNA, 30 bp, Artificial Sequence
  Synthetic oligonucleotide
gattcttatcgtgggatacaacgcaggcaa

SEQ ID NO: 346726 - DNA, 30 bp, Artificial Sequence
  Synthetic oligonucleotide
tgggcttaacaaactgcccgcgtcaggcaa

SEQ ID NO: 346727 - DNA, 30 bp, Artificial Sequence
  Synthetic oligonucleotide
agttaccccttggcggtggtcgcgaggcaa

SEQ ID NO: 346728 - DNA, 30 bp, Artificial Sequence
  Synthetic oligonucleotide
cgcgggagcttgtgttcactaaggaggcaa

SEQ ID NO: 346729 - DNA, 30 bp, Artificial Sequence
  Synthetic oligonucleotide
aagtacgtggggtaaatctcgttgaggcaa

SEQ ID NO: 346730 - DNA, 29 bp, Artificial Sequence
  Synthetic oligonucleotide
gctttttggcgttcgcccgggttaggcaa

SEQ ID NO: 346731 - DNA, 30 bp, Artificial Sequence
  Synthetic oligonucleotide
tggcagacgccgtgaaacaggcaacggcaa

SEQ ID NO: 346732 - DNA, 30 bp, Artificial Sequence
  Synthetic oligonucleotide
tgctacatagtagatggcgtcccacggcaa

SEQ ID NO: 346733 - DNA, 30 bp, Artificial Sequence
  Synthetic oligonucleotide
gaaaggatcttgatttaatggtgacggcaa

SEQ ID NO: 346734 - DNA, 30 bp, Artificial Sequence
  Synthetic oligonucleotide
gatcgttgaaatagtctggtcttccggcaa

SEQ ID NO: 346735 - DNA, 30 bp, Artificial Sequence
  Synthetic oligonucleotide
actttcatccagcatcgatataggcggcaa

SEQ ID NO: 346736 - DNA, 30 bp, Artificial Sequence
  Synthetic oligonucleotide
ttagtagcctatgcatagtagtatcggcaa

SEQ ID NO: 346737 - DNA, 30 bp, Artificial Sequence
  Synthetic oligonucleotide
caattgagcggagtagggtatcttcggcaa

SEQ ID NO: 346738 - DNA, 30 bp, Artificial Sequence
  Synthetic oligonucleotide
gcgtaaagcccgtgggcatggacagggcaa

SEQ ID NO: 346739 - DNA, 29 bp, Artificial Sequence
  Synthetic oligonucleotide
cgcttcaagagttatcactactcgggcaa

SEQ ID NO: 346740 - DNA, 30 bp, Artificial Sequence
  Synthetic oligonucleotide
tcaccaaatgtctaggggcgtattgggcaa

SEQ ID NO: 346741 - DNA, 30 bp, Artificial Sequence
  Synthetic oligonucleotide
tgacaagattcggcatcggtttaatggcaa

SEQ ID NO: 346742 - DNA, 30 bp, Artificial Sequence
  Synthetic oligonucleotide
gtcacatttgcatcataatcttgatggcaa

SEQ ID NO: 346743 - DNA, 30 bp, Artificial Sequence
  Synthetic oligonucleotide
aaacagtatctctccataatttactggcaa

SEQ ID NO: 346744 - DNA, 30 bp, Artificial Sequence
  Synthetic oligonucleotide
gtttgaggacgcggatttttgacctggcaa

SEQ ID NO: 346745 - DNA, 30 bp, Artificial Sequence
  Synthetic oligonucleotide
ctatactaacctgccaagaaacagtggcaa

SEQ ID NO: 346746 - DNA, 30 bp, Artificial Sequence
  Synthetic oligonucleotide
ggcattctatgagcgtgcaagctgtggcaa

SEQ ID NO: 346747 - DNA, 30 bp, Artificial Sequence
  Synthetic oligonucleotide
tagtgcagtgattaggtaatgtattggcaa

SEQ ID NO: 346748 - DNA, 30 bp, Artificial Sequence
  Synthetic oligonucleotide
gcgagctaatacctaatacgtacttggcaa

SEQ ID NO: 346749 - DNA, 30 bp, Artificial Sequence
  Synthetic oligonucleotide
ttggtatagtatagttgtgcttaaatgcaa

SEQ ID NO: 346750 - DNA, 30 bp, Artificial Sequence
  Synthetic oligonucleotide
tatgctaacgtgtatgaagggttcatgcaa

SEQ ID NO: 346751 - DNA, 30 bp, Artificial Sequence
  Synthetic oligonucleotide
tgaatctgacatcattcgtacaagatgcaa

SEQ ID NO: 346752 - DNA, 30 bp, Artificial Sequence
  Synthetic oligonucleotide
ttcacctaggacaatgataatgtgatgcaa

SEQ ID NO: 346753 - DNA, 30 bp, Artificial Sequence
  Synthetic oligonucleotide
accagcatttctcacggtactgatatgcaa

SEQ ID NO: 346754 - DNA, 30 bp, Artificial Sequence
  Synthetic oligonucleotide
gctccgttgccgtgacatgtgtgtatgcaa

SEQ ID NO: 346755 - DNA, 30 bp, Artificial Sequence
  Synthetic oligonucleotide
agttaccttacagtggcagtgaaactgcaa

SEQ ID NO: 346756 - DNA, 30 bp, Artificial Sequence
  Synthetic oligonucleotide
aaggggacttgcgcccagtgctaactgcaa

SEQ ID NO: 346757 - DNA, 31 bp, Artificial Sequence
  Synthetic oligonucleotide
accctgttgtacgagaactgtcgcactgcaa

SEQ ID NO: 346758 - DNA, 30 bp, Artificial Sequence
  Synthetic oligonucleotide
accttgttgggggcacaacgtaacctgcaa

SEQ ID NO: 346759 - DNA, 30 bp, Artificial Sequence
  Synthetic oligonucleotide
atgcgcgcgtggacgcagataagcctgcaa

SEQ ID NO: 346760 - DNA, 30 bp, Artificial Sequence
  Synthetic oligonucleotide
gtcattcttgtcggaacgcgtttgctgcaa

SEQ ID NO: 346761 - DNA, 30 bp, Artificial Sequence
  Synthetic oligonucleotide
tatattgcaccagagaagtgtaaagtgcaa

SEQ ID NO: 346762 - DNA, 30 bp, Artificial Sequence
  Synthetic oligonucleotide
gacctctcattagcgcagggatgagtgcaa

SEQ ID NO: 346763 - DNA, 30 bp, Artificial Sequence
  Synthetic oligonucleotide
tactgagcgttcgacactaggtatgtgcaa

SEQ ID NO: 346764 - DNA, 30 bp, Artificial Sequence
  Synthetic oligonucleotide
tatcccactctttcgataagaagtgtgcaa

SEQ ID NO: 346765 - DNA, 30 bp, Artificial Sequence
  Synthetic oligonucleotide
taatacatggctgcactccggtaattgcaa

SEQ ID NO: 346766 - DNA, 30 bp, Artificial Sequence
  Synthetic oligonucleotide
tgtgcgggtatttactcaagatcattgcaa

SEQ ID NO: 346767 - DNA, 30 bp, Artificial Sequence
  Synthetic oligonucleotide
gaggcctggcatgtttaaaacgtattgcaa

SEQ ID NO: 346768 - DNA, 30 bp, Artificial Sequence
  Synthetic oligonucleotide
cactaagtcacgagttgccggtacttgcaa

SEQ ID NO: 346769 - DNA, 30 bp, Artificial Sequence
  Synthetic oligonucleotide
ggatatgctgttataacttttcccttgcaa

SEQ ID NO: 346770 - DNA, 30 bp, Artificial Sequence
  Synthetic oligonucleotide
tgaccgagggattattctggggtcttgcaa

SEQ ID NO: 346771 - DNA, 30 bp, Artificial Sequence
  Synthetic oligonucleotide
tatagctaacatacggttttcgcgttgcaa

SEQ ID NO: 346772 - DNA, 30 bp, Artificial Sequence
  Synthetic oligonucleotide
aatataacccacagagtgtgatcgttgcaa

SEQ ID NO: 346773 - DNA, 30 bp, Artificial Sequence
  Synthetic oligonucleotide
gatgtaaacatacgttcaataaggttgcaa

SEQ ID NO: 346774 - DNA, 30 bp, Artificial Sequence
  Synthetic oligonucleotide
aatgatgaatgctgagccgcgtcaaatcaa

SEQ ID NO: 346775 - DNA, 30 bp, Artificial Sequence
  Synthetic oligonucleotide
cacgtgtggtacgcgcttattgtaaatcaa

SEQ ID NO: 346776 - DNA, 30 bp, Artificial Sequence
  Synthetic oligonucleotide
taatgggcgaattacttacgccccaatcaa

SEQ ID NO: 346777 - DNA, 30 bp, Artificial Sequence
  Synthetic oligonucleotide
taagaggcggaacacgtccccggcaatcaa

SEQ ID NO: 346778 - DNA, 30 bp, Artificial Sequence
  Synthetic oligonucleotide
ctaaagtctcattcgagggcggcgaatcaa

SEQ ID NO: 346779 - DNA, 30 bp, Artificial Sequence
  Synthetic oligonucleotide
tgtatcggataagttacattgaggaatcaa

SEQ ID NO: 346780 - DNA, 30 bp, Artificial Sequence
  Synthetic oligonucleotide
gtggatgaaacataagtgattcggaatcaa

SEQ ID NO: 346781 - DNA, 30 bp, Artificial Sequence
  Synthetic oligonucleotide
gtaatcaattgctgactgtcattgaatcaa

SEQ ID NO: 346782 - DNA, 30 bp, Artificial Sequence
  Synthetic oligonucleotide
caccacttgcagccgcgacccgctaatcaa

SEQ ID NO: 346783 - DNA, 30 bp, Artificial Sequence
  Synthetic oligonucleotide
ctgcactttgttcatcatgaagttaatcaa

SEQ ID NO: 346784 - DNA, 30 bp, Artificial Sequence
  Synthetic oligonucleotide
ttatgctaacatagtaatctcgttaatcaa

SEQ ID NO: 346785 - DNA, 30 bp, Artificial Sequence
  Synthetic oligonucleotide
aatactcctgcgtggtcggaaaaacatcaa

SEQ ID NO: 346786 - DNA, 30 bp, Artificial Sequence
  Synthetic oligonucleotide
tagtggagttaatacgttgcaatacatcaa

SEQ ID NO: 346787 - DNA, 30 bp, Artificial Sequence
  Synthetic oligonucleotide
attactcggacagcaaccgcacggcatcaa

SEQ ID NO: 346788 - DNA, 30 bp, Artificial Sequence
  Synthetic oligonucleotide
taaaagatcatagctcatctgagtcatcaa

SEQ ID NO: 346789 - DNA, 30 bp, Artificial Sequence
  Synthetic oligonucleotide
gcgtatctctcattaccgtagtcagatcaa

SEQ ID NO: 346790 - DNA, 30 bp, Artificial Sequence
  Synthetic oligonucleotide
tagttgctagtagtatacaaagacgatcaa

SEQ ID NO: 346791 - DNA, 30 bp, Artificial Sequence
  Synthetic oligonucleotide
agtcggatcttggggtcacacagcgatcaa

SEQ ID NO: 346792 - DNA, 30 bp, Artificial Sequence
  Synthetic oligonucleotide
tcaagtggtaccaaccgtttcctcgatcaa

SEQ ID NO: 346793 - DNA, 30 bp, Artificial Sequence
  Synthetic oligonucleotide
aagagtttagttggcagcgaaacggatcaa

SEQ ID NO: 346794 - DNA, 30 bp, Artificial Sequence
  Synthetic oligonucleotide
atacgtagacagggtccacgaggggatcaa

SEQ ID NO: 346795 - DNA, 30 bp, Artificial Sequence
  Synthetic oligonucleotide
atgaatgcgtctgctattgtagatgatcaa

SEQ ID NO: 346796 - DNA, 30 bp, Artificial Sequence
  Synthetic oligonucleotide
gcaattgtaaatgttattcggtttgatcaa

SEQ ID NO: 346797 - DNA, 30 bp, Artificial Sequence
  Synthetic oligonucleotide
gctttaagcctaaaagccatcaaatatcaa

SEQ ID NO: 346798 - DNA, 30 bp, Artificial Sequence
  Synthetic oligonucleotide
ttaatcgtcaatatcctggcacgatatcaa

SEQ ID NO: 346799 - DNA, 30 bp, Artificial Sequence
  Synthetic oligonucleotide
ctatgatgcttattgtaaaaaatctatcaa

SEQ ID NO: 346800 - DNA, 30 bp, Artificial Sequence
  Synthetic oligonucleotide
ctaacatagtgtttcggctcggtctatcaa

SEQ ID NO: 346801 - DNA, 30 bp, Artificial Sequence
  Synthetic oligonucleotide
tccaatggcttcattccactatagtatcaa

SEQ ID NO: 346802 - DNA, 30 bp, Artificial Sequence
  Synthetic oligonucleotide
gcagcgctaggaacactgtaagcgtatcaa

SEQ ID NO: 346803 - DNA, 31 bp, Artificial Sequence
  Synthetic oligonucleotide
tgaactgcgaaacctggcaagacattatcaa

SEQ ID NO: 346804 - DNA, 30 bp, Artificial Sequence
  Synthetic oligonucleotide
ctcgagcgccacggaaagtttttttatcaa

SEQ ID NO: 346805 - DNA, 25 bp, Artificial Sequence
  Synthetic oligonucleotide
aacggtacgttttattgaaactcaa

SEQ ID NO: 346806 - DNA, 30 bp, Artificial Sequence
  Synthetic oligonucleotide
actcggattcggtaaagggttaccactcaa

SEQ ID NO: 346807 - DNA, 30 bp, Artificial Sequence
  Synthetic oligonucleotide
agcgcccaccaccccaagtttaccactcaa

SEQ ID NO: 346808 - DNA, 30 bp, Artificial Sequence
  Synthetic oligonucleotide
cgtctctttaggcgggccaacggcactcaa

SEQ ID NO: 346809 - DNA, 30 bp, Artificial Sequence
  Synthetic oligonucleotide
atccgccatcgctcctcgagtatcactcaa

SEQ ID NO: 346810 - DNA, 30 bp, Artificial Sequence
  Synthetic oligonucleotide
aattagtggtgctgtaggtgtctcactcaa

SEQ ID NO: 346811 - DNA, 30 bp, Artificial Sequence
  Synthetic oligonucleotide
tgcttgatggttcaataatctatgactcaa

SEQ ID NO: 346812 - DNA, 30 bp, Artificial Sequence
  Synthetic oligonucleotide
cgtgtatcgcttccaagaagtcaccctcaa

SEQ ID NO: 346813 - DNA, 30 bp, Artificial Sequence
  Synthetic oligonucleotide
tctaactggttggccgggacagagcctcaa

SEQ ID NO: 346814 - DNA, 30 bp, Artificial Sequence
  Synthetic oligonucleotide
ttgacgctaaggtgtcaggagtatcctcaa

SEQ ID NO: 346815 - DNA, 30 bp, Artificial Sequence
  Synthetic oligonucleotide
atctatgcatgcttttcaagggaggctcaa

SEQ ID NO: 346816 - DNA, 30 bp, Artificial Sequence
  Synthetic oligonucleotide
tccaggttatgcaacaggagcggggctcaa

SEQ ID NO: 346817 - DNA, 30 bp, Artificial Sequence
  Synthetic oligonucleotide
caatgaatctgaccataaggaacatctcaa

SEQ ID NO: 346818 - DNA, 30 bp, Artificial Sequence
  Synthetic oligonucleotide
ccaagatctgaatctaccgtaagatctcaa

SEQ ID NO: 346819 - DNA, 30 bp, Artificial Sequence
  Synthetic oligonucleotide
aaacccaaggtaagtctagcctgatctcaa

SEQ ID NO: 346820 - DNA, 30 bp, Artificial Sequence
  Synthetic oligonucleotide
gtatagtatgagtgttaacgggactctcaa

SEQ ID NO: 346821 - DNA, 30 bp, Artificial Sequence
  Synthetic oligonucleotide
cttgttgcatgccatcagaaccagtctcaa

SEQ ID NO: 346822 - DNA, 30 bp, Artificial Sequence
  Synthetic oligonucleotide
agatcagtataagcagaaggatagtctcaa

SEQ ID NO: 346823 - DNA, 30 bp, Artificial Sequence
  Synthetic oligonucleotide
ggcccagagactgtgagacgcgggtctcaa

SEQ ID NO: 346824 - DNA, 30 bp, Artificial Sequence
  Synthetic oligonucleotide
cgtgtgatcaaacaagcagttatgtctcaa

SEQ ID NO: 346825 - DNA, 30 bp, Artificial Sequence
  Synthetic oligonucleotide
acgtacgcgttttttctgtcggattctcaa

SEQ ID NO: 346826 - DNA, 30 bp, Artificial Sequence
  Synthetic oligonucleotide
ctcaggcgcttgatggggtaaccttctcaa

SEQ ID NO: 346827 - DNA, 30 bp, Artificial Sequence
  Synthetic oligonucleotide
gccgtacctcgcgtttcaggtctacgtcaa

SEQ ID NO: 346828 - DNA, 30 bp, Artificial Sequence
  Synthetic oligonucleotide
ggtgtgaaataattggagtacgcccgtcaa

SEQ ID NO: 346829 - DNA, 30 bp, Artificial Sequence
  Synthetic oligonucleotide
tcttcgagggataaggtgtgacgccgtcaa

SEQ ID NO: 346830 - DNA, 30 bp, Artificial Sequence
  Synthetic oligonucleotide
agcgttggttggcgttagggaatccgtcaa

SEQ ID NO: 346831 - DNA, 30 bp, Artificial Sequence
  Synthetic oligonucleotide
tgagaaataggatataggtggctccgtcaa

SEQ ID NO: 346832 - DNA, 30 bp, Artificial Sequence
  Synthetic oligonucleotide
atccaattaaagatcataaatctccgtcaa

SEQ ID NO: 346833 - DNA, 30 bp, Artificial Sequence
  Synthetic oligonucleotide
gcgggtacgggcaactcagaggtccgtcaa

SEQ ID NO: 346834 - DNA, 30 bp, Artificial Sequence
  Synthetic oligonucleotide
attcaacaagtatatgtggcttcgcgtcaa

SEQ ID NO: 346835 - DNA, 30 bp, Artificial Sequence
  Synthetic oligonucleotide
agcgcgtgcaacaatgccttaaaaggtcaa

SEQ ID NO: 346836 - DNA, 30 bp, Artificial Sequence
  Synthetic oligonucleotide
ggcgtctgaggagtaggccgcgcaggtcaa

SEQ ID NO: 346837 - DNA, 30 bp, Artificial Sequence
  Synthetic oligonucleotide
caatatcggccgggtgggccacgaggtcaa

SEQ ID NO: 346838 - DNA, 29 bp, Artificial Sequence
  Synthetic oligonucleotide
atgtacgtgtctttattgtacgaggtcaa

SEQ ID NO: 346839 - DNA, 30 bp, Artificial Sequence
  Synthetic oligonucleotide
cacaccgtaagcgtttttttggagggtcaa

SEQ ID NO: 346840 - DNA, 30 bp, Artificial Sequence
  Synthetic oligonucleotide
cccctcgaaccctaccaaatatggggtcaa

SEQ ID NO: 346841 - DNA, 30 bp, Artificial Sequence
  Synthetic oligonucleotide
ctgtgatattagctacagtcattgggtcaa

SEQ ID NO: 346842 - DNA, 30 bp, Artificial Sequence
  Synthetic oligonucleotide
atgtgtagttagagtgcggcccatggtcaa

SEQ ID NO: 346843 - DNA, 30 bp, Artificial Sequence
  Synthetic oligonucleotide
gggaagtgagatcctgggggttatggtcaa

SEQ ID NO: 346844 - DNA, 30 bp, Artificial Sequence
  Synthetic oligonucleotide
tcctcttacaaattcgtttaccttggtcaa

SEQ ID NO: 346845 - DNA, 30 bp, Artificial Sequence
  Synthetic oligonucleotide
ctttcctttggggattctgtaaaatgtcaa

SEQ ID NO: 346846 - DNA, 30 bp, Artificial Sequence
  Synthetic oligonucleotide
aagtcgcaaatgttgcgctctcaatgtcaa

SEQ ID NO: 346847 - DNA, 30 bp, Artificial Sequence
  Synthetic oligonucleotide
acaaaattttatgttactttcgaatgtcaa

SEQ ID NO: 346848 - DNA, 30 bp, Artificial Sequence
  Synthetic oligonucleotide
tggccatcgcgtcattcggttaactgtcaa

SEQ ID NO: 346849 - DNA, 30 bp, Artificial Sequence
  Synthetic oligonucleotide
caggtatcaggcggcgcatgcgggtgtcaa

SEQ ID NO: 346850 - DNA, 30 bp, Artificial Sequence
  Synthetic oligonucleotide
atatcaggtagcgacgtgatgccttgtcaa

SEQ ID NO: 346851 - DNA, 30 bp, Artificial Sequence
  Synthetic oligonucleotide
gctaaaggccgaccgctagtgtcttgtcaa

SEQ ID NO: 346852 - DNA, 30 bp, Artificial Sequence
  Synthetic oligonucleotide
cggctcgcatagtatgtccagggttgtcaa

SEQ ID NO: 346853 - DNA, 30 bp, Artificial Sequence
  Synthetic oligonucleotide
ctgcgggaagctgcgttgatttaaattcaa

SEQ ID NO: 346854 - DNA, 30 bp, Artificial Sequence
  Synthetic oligonucleotide
tacatgaattagagaaggccaagaattcaa

SEQ ID NO: 346855 - DNA, 30 bp, Artificial Sequence
  Synthetic oligonucleotide
gatcgcaagcggcgtacccgtcgaattcaa

SEQ ID NO: 346856 - DNA, 30 bp, Artificial Sequence
  Synthetic oligonucleotide
cgatttccccctagagataatctaattcaa

SEQ ID NO: 346857 - DNA, 30 bp, Artificial Sequence
  Synthetic oligonucleotide
tagtgtcgttgataaggatgacacattcaa

SEQ ID NO: 346858 - DNA, 30 bp, Artificial Sequence
  Synthetic oligonucleotide
ttgtatattataaattaacaagacattcaa

SEQ ID NO: 346859 - DNA, 30 bp, Artificial Sequence
  Synthetic oligonucleotide
caaataatgtttgccacccaacagattcaa

SEQ ID NO: 346860 - DNA, 30 bp, Artificial Sequence
  Synthetic oligonucleotide
gacataacgctaccttgtgaagcgattcaa

SEQ ID NO: 346861 - DNA, 30 bp, Artificial Sequence
  Synthetic oligonucleotide
aaaagattcaaagggaacgtacggattcaa

SEQ ID NO: 346862 - DNA, 30 bp, Artificial Sequence
  Synthetic oligonucleotide
tcaatttgggcgtatagatatatacttcaa

SEQ ID NO: 346863 - DNA, 30 bp, Artificial Sequence
  Synthetic oligonucleotide
aacatttacgggggtaagacacagcttcaa

SEQ ID NO: 346864 - DNA, 30 bp, Artificial Sequence
  Synthetic oligonucleotide
cggttaagacgctcacgcgtcgcgcttcaa

SEQ ID NO: 346865 - DNA, 30 bp, Artificial Sequence
  Synthetic oligonucleotide
accgttatgtaccatgagatatggcttcaa

SEQ ID NO: 346866 - DNA, 30 bp, Artificial Sequence
  Synthetic oligonucleotide
gcggatgaaagtctacacgctaatcttcaa

SEQ ID NO: 346867 - DNA, 30 bp, Artificial Sequence
  Synthetic oligonucleotide
ataagctatgagctaaccatggatcttcaa

SEQ ID NO: 346868 - DNA, 30 bp, Artificial Sequence
  Synthetic oligonucleotide
agctttgaccgaatccttacacgagttcaa

SEQ ID NO: 346869 - DNA, 30 bp, Artificial Sequence
  Synthetic oligonucleotide
ccgtcattgaaactgccagcgttcgttcaa

SEQ ID NO: 346870 - DNA, 30 bp, Artificial Sequence
  Synthetic oligonucleotide
ttagcgtaaagcactgcatatcaggttcaa

SEQ ID NO: 346871 - DNA, 30 bp, Artificial Sequence
  Synthetic oligonucleotide
gatactgtcccaacgctcctcacggttcaa

SEQ ID NO: 346872 - DNA, 30 bp, Artificial Sequence
  Synthetic oligonucleotide
ctcggcttctaggcatgaaaatgggttcaa

SEQ ID NO: 346873 - DNA, 31 bp, Artificial Sequence
  Synthetic oligonucleotide
tacatcatctaggtgatgtaaggtggttcaa

SEQ ID NO: 346874 - DNA, 30 bp, Artificial Sequence
  Synthetic oligonucleotide
gcgctcacattgcaaggacgcgatgttcaa

SEQ ID NO: 346875 - DNA, 30 bp, Artificial Sequence
  Synthetic oligonucleotide
cgttgatacaaatcagggtctgctgttcaa

SEQ ID NO: 346876 - DNA, 30 bp, Artificial Sequence
  Synthetic oligonucleotide
tgctcctgtcccgagtcaggggcatttcaa

SEQ ID NO: 346877 - DNA, 30 bp, Artificial Sequence
  Synthetic oligonucleotide
tcagttaacataaggtaaggggactttcaa

SEQ ID NO: 346878 - DNA, 30 bp, Artificial Sequence
  Synthetic oligonucleotide
caggcttttctcgtgtggctactctttcaa

SEQ ID NO: 346879 - DNA, 30 bp, Artificial Sequence
  Synthetic oligonucleotide
ggcagtcgctttgtcgagcgatcgtttcaa

SEQ ID NO: 346880 - DNA, 30 bp, Artificial Sequence
  Synthetic oligonucleotide
ctcggcctcttatggcgactggggtttcaa

SEQ ID NO: 346881 - DNA, 30 bp, Artificial Sequence
  Synthetic oligonucleotide
tctcctgaaacggttcccatactgtttcaa

SEQ ID NO: 346882 - DNA, 30 bp, Artificial Sequence
  Synthetic oligonucleotide
aaatactaatagaaatggcctgattttcaa

SEQ ID NO: 346883 - DNA, 30 bp, Artificial Sequence
  Synthetic oligonucleotide
aacgcaagaagtgaaaaacaagtttttcaa

SEQ ID NO: 346884 - DNA, 30 bp, Artificial Sequence
  Synthetic oligonucleotide
ctaaaggaagaatccgcctccgtttttcaa

SEQ ID NO: 346885 - DNA, 30 bp, Artificial Sequence
  Synthetic oligonucleotide
actttcgttcgtaaaacgcaataaaaagaa

SEQ ID NO: 346886 - DNA, 30 bp, Artificial Sequence
  Synthetic oligonucleotide
atctggtttatacaatacgagacaaaagaa

SEQ ID NO: 346887 - DNA, 30 bp, Artificial Sequence
  Synthetic oligonucleotide
ttatagaatttggtaatgacagcaaaagaa

SEQ ID NO: 346888 - DNA, 30 bp, Artificial Sequence
  Synthetic oligonucleotide
gagtatgagacgggcagattacgaaaagaa

SEQ ID NO: 346889 - DNA, 30 bp, Artificial Sequence
  Synthetic oligonucleotide
tatcagcatcgcggcttaacccacaaagaa

SEQ ID NO: 346890 - DNA, 30 bp, Artificial Sequence
  Synthetic oligonucleotide
ttatctcggaggtcgcatatggccaaagaa

SEQ ID NO: 346891 - DNA, 30 bp, Artificial Sequence
  Synthetic oligonucleotide
gcctatacctccaacccgcggagcaaagaa

SEQ ID NO: 346892 - DNA, 30 bp, Artificial Sequence
  Synthetic oligonucleotide
aatcagtgattttacactaaggagaaagaa

SEQ ID NO: 346893 - DNA, 30 bp, Artificial Sequence
  Synthetic oligonucleotide
gggggcatgagattagtctctaataaagaa

SEQ ID NO: 346894 - DNA, 30 bp, Artificial Sequence
  Synthetic oligonucleotide
tcactctcatgataacaagaaactaaagaa

SEQ ID NO: 346895 - DNA, 30 bp, Artificial Sequence
  Synthetic oligonucleotide
ctttattcatatatcccagaggcacaagaa

SEQ ID NO: 346896 - DNA, 30 bp, Artificial Sequence
  Synthetic oligonucleotide
atgacgaccggaagggagtcgtcacaagaa

SEQ ID NO: 346897 - DNA, 30 bp, Artificial Sequence
  Synthetic oligonucleotide
caagacttcatacgtagcacgtgccaagaa

SEQ ID NO: 346898 - DNA, 30 bp, Artificial Sequence
  Synthetic oligonucleotide
agcatgcttagggatcttcacaatcaagaa

SEQ ID NO: 346899 - DNA, 30 bp, Artificial Sequence
  Synthetic oligonucleotide
tggaaaattccgcgtcagcgacttcaagaa

SEQ ID NO: 346900 - DNA, 30 bp, Artificial Sequence
  Synthetic oligonucleotide
cgagttcttcctcagtacgtggttcaagaa

SEQ ID NO: 346901 - DNA, 30 bp, Artificial Sequence
  Synthetic oligonucleotide
gagtgaaactgctctcacctctttcaagaa

SEQ ID NO: 346902 - DNA, 30 bp, Artificial Sequence
  Synthetic oligonucleotide
ttatacattaacgtattcgtaatagaagaa

SEQ ID NO: 346903 - DNA, 30 bp, Artificial Sequence
  Synthetic oligonucleotide
ataacggcattgttcactaacgtcgaagaa

SEQ ID NO: 346904 - DNA, 30 bp, Artificial Sequence
  Synthetic oligonucleotide
gtatcctgtagtgtaggatttggggaagaa

SEQ ID NO: 346905 - DNA, 30 bp, Artificial Sequence
  Synthetic oligonucleotide
gcccacgaagacccaatgtctgtggaagaa

SEQ ID NO: 346906 - DNA, 30 bp, Artificial Sequence
  Synthetic oligonucleotide
acactccaaagttgtattgtcttggaagaa

SEQ ID NO: 346907 - DNA, 30 bp, Artificial Sequence
  Synthetic oligonucleotide
cctactcagttgcaaattacagttgaagaa

SEQ ID NO: 346908 - DNA, 30 bp, Artificial Sequence
  Synthetic oligonucleotide
gtaacgtcgatatgtcatgcctaataagaa

SEQ ID NO: 346909 - DNA, 30 bp, Artificial Sequence
  Synthetic oligonucleotide
cagcagccatcggcggtagcctcataagaa

SEQ ID NO: 346910 - DNA, 30 bp, Artificial Sequence
  Synthetic oligonucleotide
gaggacggatcaacccggcaagtataagaa

SEQ ID NO: 346911 - DNA, 30 bp, Artificial Sequence
  Synthetic oligonucleotide
gctagattagcaggtcctatattgtaagaa

SEQ ID NO: 346912 - DNA, 30 bp, Artificial Sequence
  Synthetic oligonucleotide
aactaggttctctgacgtaggcattaagaa

SEQ ID NO: 346913 - DNA, 28 bp, Artificial Sequence
  Synthetic oligonucleotide
tacgttcggaaggctggcatcttaagaa

SEQ ID NO: 346914 - DNA, 30 bp, Artificial Sequence
  Synthetic oligonucleotide
ggccatcctgcttgaagatgaggttaagaa

SEQ ID NO: 346915 - DNA, 30 bp, Artificial Sequence
  Synthetic oligonucleotide
gtttttgtccatgccctacaactttaagaa

SEQ ID NO: 346916 - DNA, 30 bp, Artificial Sequence
  Synthetic oligonucleotide
tggagcactctcgtttcgggattttaagaa

SEQ ID NO: 346917 - DNA, 30 bp, Artificial Sequence
  Synthetic oligonucleotide
atcaaagatcgggagtagttggaaacagaa

SEQ ID NO: 346918 - DNA, 30 bp, Artificial Sequence
  Synthetic oligonucleotide
gagtcaccaagatatgcgcagagaacagaa

SEQ ID NO: 346919 - DNA, 30 bp, Artificial Sequence
  Synthetic oligonucleotide
gcgatcccgcagattagctaactcacagaa

SEQ ID NO: 346920 - DNA, 30 bp, Artificial Sequence
  Synthetic oligonucleotide
tctattcacttgctaagtgaagcgacagaa

SEQ ID NO: 346921 - DNA, 30 bp, Artificial Sequence
  Synthetic oligonucleotide
tggggaggtattttgaagttaacggcagaa

SEQ ID NO: 346922 - DNA, 30 bp, Artificial Sequence
  Synthetic oligonucleotide
gaattcgacaaggggcctccggtggcagaa

SEQ ID NO: 346923 - DNA, 30 bp, Artificial Sequence
  Synthetic oligonucleotide
ttggggcgacacacgtttgcggtggcagaa

SEQ ID NO: 346924 - DNA, 30 bp, Artificial Sequence
  Synthetic oligonucleotide
tagtactccggggtactccggttggcagaa

SEQ ID NO: 346925 - DNA, 30 bp, Artificial Sequence
  Synthetic oligonucleotide
gtcgcttcccgacagatcgaagatgcagaa

SEQ ID NO: 346926 - DNA, 30 bp, Artificial Sequence
  Synthetic oligonucleotide
ccataaggtctagatagggtcgctgcagaa

SEQ ID NO: 346927 - DNA, 30 bp, Artificial Sequence
  Synthetic oligonucleotide
aattagagttcgcaacatagtagtgcagaa

SEQ ID NO: 346928 - DNA, 30 bp, Artificial Sequence
  Synthetic oligonucleotide
cacacttcttggaaacttcattaatcagaa

SEQ ID NO: 346929 - DNA, 30 bp, Artificial Sequence
  Synthetic oligonucleotide
ccatatctgcaattccaggttttatcagaa

SEQ ID NO: 346930 - DNA, 30 bp, Artificial Sequence
  Synthetic oligonucleotide
tttggattctggtaccggtaaggctcagaa

SEQ ID NO: 346931 - DNA, 30 bp, Artificial Sequence
  Synthetic oligonucleotide
ctggttgaaccccgaatttttgggtcagaa

SEQ ID NO: 346932 - DNA, 30 bp, Artificial Sequence
  Synthetic oligonucleotide
cctctttagcgccgtgagtagttgtcagaa

SEQ ID NO: 346933 - DNA, 30 bp, Artificial Sequence
  Synthetic oligonucleotide
ggatcagttagacattcttagtattcagaa

SEQ ID NO: 346934 - DNA, 30 bp, Artificial Sequence
  Synthetic oligonucleotide
ttctagagctatctgctcgaggaaagagaa

SEQ ID NO: 346935 - DNA, 30 bp, Artificial Sequence
  Synthetic oligonucleotide
gatatcatcaccttctgagtgaccagagaa

SEQ ID NO: 346936 - DNA, 30 bp, Artificial Sequence
  Synthetic oligonucleotide
gcattttaaaaaacagagcaatgcagagaa

SEQ ID NO: 346937 - DNA, 30 bp, Artificial Sequence
  Synthetic oligonucleotide
tgcaatgcgggcgcagacgactgcagagaa

SEQ ID NO: 346938 - DNA, 30 bp, Artificial Sequence
  Synthetic oligonucleotide
atgattcgcttttactggtgaggtagagaa

SEQ ID NO: 346939 - DNA, 30 bp, Artificial Sequence
  Synthetic oligonucleotide
agttacgagagtacccactagtttagagaa

SEQ ID NO: 346940 - DNA, 30 bp, Artificial Sequence
  Synthetic oligonucleotide
atccactgctagaacacctcgtttagagaa

SEQ ID NO: 346941 - DNA, 30 bp, Artificial Sequence
  Synthetic oligonucleotide
actgatgcgtacagatacctgtttagagaa

SEQ ID NO: 346942 - DNA, 30 bp, Artificial Sequence
  Synthetic oligonucleotide
acgcatatctgtcctcacggaccacgagaa

SEQ ID NO: 346943 - DNA, 30 bp, Artificial Sequence
  Synthetic oligonucleotide
gttctgtgagggagccttgcacgacgagaa

SEQ ID NO: 346944 - DNA, 30 bp, Artificial Sequence
  Synthetic oligonucleotide
cacatatcgcgaattcgcagaatccgagaa

SEQ ID NO: 346945 - DNA, 30 bp, Artificial Sequence
  Synthetic oligonucleotide
tcagctgcaaaatcgcgcccagcaggagaa

SEQ ID NO: 346946 - DNA, 30 bp, Artificial Sequence
  Synthetic oligonucleotide
tttagcgttagcgtgtaagttgccggagaa

SEQ ID NO: 346947 - DNA, 30 bp, Artificial Sequence
  Synthetic oligonucleotide
cataaagacttcacttctgcgttcggagaa

SEQ ID NO: 346948 - DNA, 30 bp, Artificial Sequence
  Synthetic oligonucleotide
aaggttcaccagaaacggttcttatgagaa

SEQ ID NO: 346949 - DNA, 30 bp, Artificial Sequence
  Synthetic oligonucleotide
tgtataatctgaccggagttattctgagaa

SEQ ID NO: 346950 - DNA, 30 bp, Artificial Sequence
  Synthetic oligonucleotide
atgcgctaatcgttgagggcacggtgagaa

SEQ ID NO: 346951 - DNA, 30 bp, Artificial Sequence
  Synthetic oligonucleotide
ttcaaaacaattggaaagggatattgagaa

SEQ ID NO: 346952 - DNA, 30 bp, Artificial Sequence
  Synthetic oligonucleotide
catctatgaactacgcggaaccgttgagaa

SEQ ID NO: 346953 - DNA, 30 bp, Artificial Sequence
  Synthetic oligonucleotide
tctctaatcatatataggtacgtttgagaa

SEQ ID NO: 346954 - DNA, 30 bp, Artificial Sequence
  Synthetic oligonucleotide
gcagccaacgactacgcctaacaaatagaa

SEQ ID NO: 346955 - DNA, 30 bp, Artificial Sequence
  Synthetic oligonucleotide
aatgtgcactttatagatggtataatagaa

SEQ ID NO: 346956 - DNA, 30 bp, Artificial Sequence
  Synthetic oligonucleotide
ggagtggtggtaagttccaattagatagaa

SEQ ID NO: 346957 - DNA, 30 bp, Artificial Sequence
  Synthetic oligonucleotide
cgactacggggggtacaatccgtgatagaa

SEQ ID NO: 346958 - DNA, 30 bp, Artificial Sequence
  Synthetic oligonucleotide
cttcaaggaaaagacacaaagcatatagaa

SEQ ID NO: 346959 - DNA, 30 bp, Artificial Sequence
  Synthetic oligonucleotide
acaccgaggtagggcagtactactatagaa

SEQ ID NO: 346960 - DNA, 30 bp, Artificial Sequence
  Synthetic oligonucleotide
agcaaataggaattttcatagggtatagaa

SEQ ID NO: 346961 - DNA, 30 bp, Artificial Sequence
  Synthetic oligonucleotide
ttcgtaggcctacccatgcacccactagaa

SEQ ID NO: 346962 - DNA, 30 bp, Artificial Sequence
  Synthetic oligonucleotide
agttccgttgagaggcggtacggactagaa

SEQ ID NO: 346963 - DNA, 30 bp, Artificial Sequence
  Synthetic oligonucleotide
taaagccatgggctactaagctgactagaa

SEQ ID NO: 346964 - DNA, 30 bp, Artificial Sequence
  Synthetic oligonucleotide
ggctgacttgcgttcgacaaggacctagaa

SEQ ID NO: 346965 - DNA, 30 bp, Artificial Sequence
  Synthetic oligonucleotide
gggacacgtgcccgaaggtgcggcctagaa

SEQ ID NO: 346966 - DNA, 30 bp, Artificial Sequence
  Synthetic oligonucleotide
ctggggttcggcgttagccaaaggctagaa

SEQ ID NO: 346967 - DNA, 30 bp, Artificial Sequence
  Synthetic oligonucleotide
tactaatcgtactcaactatgaacgtagaa

SEQ ID NO: 346968 - DNA, 30 bp, Artificial Sequence
  Synthetic oligonucleotide
gggattaggccggttagaagctgcgtagaa

SEQ ID NO: 346969 - DNA, 30 bp, Artificial Sequence
  Synthetic oligonucleotide
tataaggacacgacgggttagtcggtagaa

SEQ ID NO: 346970 - DNA, 30 bp, Artificial Sequence
  Synthetic oligonucleotide
tctggagattctccctgcaaacgggtagaa

SEQ ID NO: 346971 - DNA, 30 bp, Artificial Sequence
  Synthetic oligonucleotide
ggagtcaactcccgtaacctcggggtagaa

SEQ ID NO: 346972 - DNA, 30 bp, Artificial Sequence
  Synthetic oligonucleotide
atggttcgacaactgattagatgattagaa

SEQ ID NO: 346973 - DNA, 30 bp, Artificial Sequence
  Synthetic oligonucleotide
atcattgggaccattgtccatatattagaa

SEQ ID NO: 346974 - DNA, 30 bp, Artificial Sequence
  Synthetic oligonucleotide
cgtgttggaattataaaacgtcacttagaa

SEQ ID NO: 346975 - DNA, 30 bp, Artificial Sequence
  Synthetic oligonucleotide
tcgaccgaaatacacttgggaggcttagaa

SEQ ID NO: 346976 - DNA, 30 bp, Artificial Sequence
  Synthetic oligonucleotide
cttcttacgtcggtaccaatcgctttagaa

SEQ ID NO: 346977 - DNA, 30 bp, Artificial Sequence
  Synthetic oligonucleotide
ttagtctattctggagggtgaagaaacgaa

SEQ ID NO: 346978 - DNA, 30 bp, Artificial Sequence
  Synthetic oligonucleotide
gcatgatactgtaaggaacgccccaacgaa

SEQ ID NO: 346979 - DNA, 30 bp, Artificial Sequence
  Synthetic oligonucleotide
gtattagactagttatagcggcgcaacgaa

SEQ ID NO: 346980 - DNA, 30 bp, Artificial Sequence
  Synthetic oligonucleotide
cccattcagaagggttaaggtgtcaacgaa

SEQ ID NO: 346981 - DNA, 30 bp, Artificial Sequence
  Synthetic oligonucleotide
aagcaagacgatgccccgctttctaacgaa

SEQ ID NO: 346982 - DNA, 30 bp, Artificial Sequence
  Synthetic oligonucleotide
cgaaaggggatttgatccggtcgtaacgaa

SEQ ID NO: 346983 - DNA, 30 bp, Artificial Sequence
  Synthetic oligonucleotide
gggttgttttagtcattactacttaacgaa

SEQ ID NO: 346984 - DNA, 30 bp, Artificial Sequence
  Synthetic oligonucleotide
gaccgtcatgcacgtgaggccaaacacgaa

SEQ ID NO: 346985 - DNA, 30 bp, Artificial Sequence
  Synthetic oligonucleotide
ccggatttatttaggacggccacacacgaa

SEQ ID NO: 346986 - DNA, 30 bp, Artificial Sequence
  Synthetic oligonucleotide
gctttgcacgttaatgtatatgcacacgaa

SEQ ID NO: 346987 - DNA, 30 bp, Artificial Sequence
  Synthetic oligonucleotide
catgcctggatacagtgttatctccacgaa

SEQ ID NO: 346988 - DNA, 30 bp, Artificial Sequence
  Synthetic oligonucleotide
gttatcctgccgtcgcggccaaagcacgaa

SEQ ID NO: 346989 - DNA, 30 bp, Artificial Sequence
  Synthetic oligonucleotide
tttaccaggagccgggagattgatcacgaa

SEQ ID NO: 346990 - DNA, 30 bp, Artificial Sequence
  Synthetic oligonucleotide
atcctagctaggagggtcacttgagacgaa

SEQ ID NO: 346991 - DNA, 30 bp, Artificial Sequence
  Synthetic oligonucleotide
gatcttacaaacaaatagatcggggacgaa

SEQ ID NO: 346992 - DNA, 30 bp, Artificial Sequence
  Synthetic oligonucleotide
ctaaactcagtaaatattggcaatgacgaa

SEQ ID NO: 346993 - DNA, 30 bp, Artificial Sequence
  Synthetic oligonucleotide
cgctggatgaagtcagaaagtattgacgaa

SEQ ID NO: 346994 - DNA, 30 bp, Artificial Sequence
  Synthetic oligonucleotide
gggaatgcaaggctgtacatcgaatacgaa

SEQ ID NO: 346995 - DNA, 30 bp, Artificial Sequence
  Synthetic oligonucleotide
gtgttcgtaacaagagactgactatacgaa

SEQ ID NO: 346996 - DNA, 30 bp, Artificial Sequence
  Synthetic oligonucleotide
agacgtaaatgcgtgtcagccccctacgaa

SEQ ID NO: 346997 - DNA, 30 bp, Artificial Sequence
  Synthetic oligonucleotide
ggctcacgatgcaccgcgcgtacgtacgaa

SEQ ID NO: 346998 - DNA, 30 bp, Artificial Sequence
  Synthetic oligonucleotide
cgtcggtatttgtaagcctgagcttacgaa

SEQ ID NO: 346999 - DNA, 30 bp, Artificial Sequence
  Synthetic oligonucleotide
ggaaattccatatccaagcacgcaaccgaa

SEQ ID NO: 347000 - DNA, 30 bp, Artificial Sequence
  Synthetic oligonucleotide
gtccggtgtatttgacatcgcgacaccgaa

SEQ ID NO: 347001 - DNA, 30 bp, Artificial Sequence
  Synthetic oligonucleotide
ggcttgtggcaaatatcatgtggacccgaa

SEQ ID NO: 347002 - DNA, 30 bp, Artificial Sequence
  Synthetic oligonucleotide
attactccgtgtgcatgaaatatcgccgaa

SEQ ID NO: 347003 - DNA, 30 bp, Artificial Sequence
  Synthetic oligonucleotide
aatagggccccaaccaagtttcaggccgaa

SEQ ID NO: 347004 - DNA, 30 bp, Artificial Sequence
  Synthetic oligonucleotide
ccgcattcttttaactatatagctgccgaa

SEQ ID NO: 347005 - DNA, 30 bp, Artificial Sequence
  Synthetic oligonucleotide
ttgtcggagtaagtaatcgacagtgccgaa

SEQ ID NO: 347006 - DNA, 30 bp, Artificial Sequence
  Synthetic oligonucleotide
ttcgttagtaatttagatagttaatccgaa

SEQ ID NO: 347007 - DNA, 30 bp, Artificial Sequence
  Synthetic oligonucleotide
ggaggggattctactctcgggacatccgaa

SEQ ID NO: 347008 - DNA, 30 bp, Artificial Sequence
  Synthetic oligonucleotide
taccgcgaaagtaaggcaaaggcatccgaa

SEQ ID NO: 347009 - DNA, 30 bp, Artificial Sequence
  Synthetic oligonucleotide
gctcgctcaaacccgaggatttcatccgaa

SEQ ID NO: 347010 - DNA, 30 bp, Artificial Sequence
  Synthetic oligonucleotide
gacgcaagaggcggtgtttccttatccgaa

SEQ ID NO: 347011 - DNA, 30 bp, Artificial Sequence
  Synthetic oligonucleotide
cagtactcatcgcacaccgggaggtccgaa

SEQ ID NO: 347012 - DNA, 30 bp, Artificial Sequence
  Synthetic oligonucleotide
gcagtgtcaattgataagaaatcttccgaa

SEQ ID NO: 347013 - DNA, 30 bp, Artificial Sequence
  Synthetic oligonucleotide
cattggacttatttgacacgtaaaagcgaa

SEQ ID NO: 347014 - DNA, 30 bp, Artificial Sequence
  Synthetic oligonucleotide
ttaggacgtaaaccgattggaccaagcgaa

SEQ ID NO: 347015 - DNA, 30 bp, Artificial Sequence
  Synthetic oligonucleotide
tctcaatgaatcgcaaattcattaagcgaa

SEQ ID NO: 347016 - DNA, 30 bp, Artificial Sequence
  Synthetic oligonucleotide
tggccatcgagatgaccgcaaggcagcgaa

SEQ ID NO: 347017 - DNA, 30 bp, Artificial Sequence
  Synthetic oligonucleotide
attacggaccggagatctgagtgcagcgaa

SEQ ID NO: 347018 - DNA, 30 bp, Artificial Sequence
  Synthetic oligonucleotide
gcattcatcattagggtcgaaacgagcgaa

SEQ ID NO: 347019 - DNA, 30 bp, Artificial Sequence
  Synthetic oligonucleotide
cttactagccccacgacctgcaggagcgaa

SEQ ID NO: 347020 - DNA, 30 bp, Artificial Sequence
  Synthetic oligonucleotide
aacgtcgcccatagtagacaatggagcgaa

SEQ ID NO: 347021 - DNA, 30 bp, Artificial Sequence
  Synthetic oligonucleotide
aaagcggagaagatatcagagtatagcgaa

SEQ ID NO: 347022 - DNA, 30 bp, Artificial Sequence
  Synthetic oligonucleotide
ttaagttccgtcgatcgcgtatctagcgaa

SEQ ID NO: 347023 - DNA, 30 bp, Artificial Sequence
  Synthetic oligonucleotide
tcgcaacaatacgcgttatcgagtagcgaa

SEQ ID NO: 347024 - DNA, 30 bp, Artificial Sequence
  Synthetic oligonucleotide
acaaatctcgtaaactctgatgttagcgaa

SEQ ID NO: 347025 - DNA, 30 bp, Artificial Sequence
  Synthetic oligonucleotide
caataggtgaagcagaggtattgacgcgaa

SEQ ID NO: 347026 - DNA, 30 bp, Artificial Sequence
  Synthetic oligonucleotide
gggtaggaagctctttgtcggacccgcgaa

SEQ ID NO: 347027 - DNA, 30 bp, Artificial Sequence
  Synthetic oligonucleotide
aagtcattgtatgtggactcaaagcgcgaa

SEQ ID NO: 347028 - DNA, 30 bp, Artificial Sequence
  Synthetic oligonucleotide
gttggtagaccgcagtcccgtgcgcgcgaa

SEQ ID NO: 347029 - DNA, 30 bp, Artificial Sequence
  Synthetic oligonucleotide
ttgggcaccttggccacagaccgtcgcgaa

SEQ ID NO: 347030 - DNA, 30 bp, Artificial Sequence
  Synthetic oligonucleotide
ccgcaaacgggggggacgtagtaaggcgaa

SEQ ID NO: 347031 - DNA, 30 bp, Artificial Sequence
  Synthetic oligonucleotide
tgacgtccagtgctggtaaggaccggcgaa

SEQ ID NO: 347032 - DNA, 30 bp, Artificial Sequence
  Synthetic oligonucleotide
acttgtgggatagcgtattaaacgggcgaa

SEQ ID NO: 347033 - DNA, 30 bp, Artificial Sequence
  Synthetic oligonucleotide
ctcatcgactcctctgatgaaccgggcgaa

SEQ ID NO: 347034 - DNA, 30 bp, Artificial Sequence
  Synthetic oligonucleotide
ttaatagatctctgatcctccgggggcgaa

SEQ ID NO: 347035 - DNA, 30 bp, Artificial Sequence
  Synthetic oligonucleotide
tggcccaagttgtttctgccactgggcgaa

SEQ ID NO: 347036 - DNA, 30 bp, Artificial Sequence
  Synthetic oligonucleotide
aagaattatttctcgcgactcgatggcgaa

SEQ ID NO: 347037 - DNA, 30 bp, Artificial Sequence
  Synthetic oligonucleotide
aaagactgccgggcagcaaatggctgcgaa

SEQ ID NO: 347038 - DNA, 30 bp, Artificial Sequence
  Synthetic oligonucleotide
gtacggtcactgtgctggacttagtgcgaa

SEQ ID NO: 347039 - DNA, 30 bp, Artificial Sequence
  Synthetic oligonucleotide
agtttgcgggtttctgattagcgaatcgaa

SEQ ID NO: 347040 - DNA, 30 bp, Artificial Sequence
  Synthetic oligonucleotide
gtgtccagtaaaagtataacggacatcgaa

SEQ ID NO: 347041 - DNA, 30 bp, Artificial Sequence
  Synthetic oligonucleotide
gcagtgcactatctatcgtggaggatcgaa

SEQ ID NO: 347042 - DNA, 30 bp, Artificial Sequence
  Synthetic oligonucleotide
ggatgtgcagtttatgaggaggggatcgaa

SEQ ID NO: 347043 - DNA, 30 bp, Artificial Sequence
  Synthetic oligonucleotide
ttaatacttgccggccccacatctatcgaa

SEQ ID NO: 347044 - DNA, 30 bp, Artificial Sequence
  Synthetic oligonucleotide
gtcgaagcgagcgaaacggaccgtatcgaa

SEQ ID NO: 347045 - DNA, 30 bp, Artificial Sequence
  Synthetic oligonucleotide
accttatcggctggaggtttaggactcgaa

SEQ ID NO: 347046 - DNA, 30 bp, Artificial Sequence
  Synthetic oligonucleotide
tcaagcgagtcaatggagccggtactcgaa

SEQ ID NO: 347047 - DNA, 30 bp, Artificial Sequence
  Synthetic oligonucleotide
ggtcgtgcacttcgtttcccaaagctcgaa

SEQ ID NO: 347048 - DNA, 30 bp, Artificial Sequence
  Synthetic oligonucleotide
aaaagacgttcttacaacgcacggctcgaa

SEQ ID NO: 347049 - DNA, 30 bp, Artificial Sequence
  Synthetic oligonucleotide
cttaagtttactctattttgagtgctcgaa

SEQ ID NO: 347050 - DNA, 30 bp, Artificial Sequence
  Synthetic oligonucleotide
aaacacagcaacgggatcacccgagtcgaa

SEQ ID NO: 347051 - DNA, 30 bp, Artificial Sequence
  Synthetic oligonucleotide
gtaaagcaacatttgtaatttaacgtcgaa

SEQ ID NO: 347052 - DNA, 30 bp, Artificial Sequence
  Synthetic oligonucleotide
accctgtttctagtggaacgaggggtcgaa

SEQ ID NO: 347053 - DNA, 30 bp, Artificial Sequence
  Synthetic oligonucleotide
tattggggagtctgatactccggggtcgaa

SEQ ID NO: 347054 - DNA, 30 bp, Artificial Sequence
  Synthetic oligonucleotide
atgattctgagagatcaaggacatgtcgaa

SEQ ID NO: 347055 - DNA, 30 bp, Artificial Sequence
  Synthetic oligonucleotide
accaccgagaagtcacactcctaattcgaa

SEQ ID NO: 347056 - DNA, 31 bp, Artificial Sequence
  Synthetic oligonucleotide
atgccgttactatctcacctggacattcgaa

SEQ ID NO: 347057 - DNA, 30 bp, Artificial Sequence
  Synthetic oligonucleotide
gtgcttgagagtattttagtcagattcgaa

SEQ ID NO: 347058 - DNA, 30 bp, Artificial Sequence
  Synthetic oligonucleotide
gtgttatagtgactcacatctcgattcgaa

SEQ ID NO: 347059 - DNA, 30 bp, Artificial Sequence
  Synthetic oligonucleotide
ttcaaacataaataaactatgtccttcgaa

SEQ ID NO: 347060 - DNA, 30 bp, Artificial Sequence
  Synthetic oligonucleotide
ctctcgaggtactgatgagactgtttcgaa

SEQ ID NO: 347061 - DNA, 30 bp, Artificial Sequence
  Synthetic oligonucleotide
aagaaacgttccttgggccaacgaaaggaa

SEQ ID NO: 347062 - DNA, 30 bp, Artificial Sequence
  Synthetic oligonucleotide
gagctgacgacgtactcaaaccccaaggaa

SEQ ID NO: 347063 - DNA, 30 bp, Artificial Sequence
  Synthetic oligonucleotide
tatgcctgacccgtcttgcgcctgaaggaa

SEQ ID NO: 347064 - DNA, 30 bp, Artificial Sequence
  Synthetic oligonucleotide
cgcatttccgaaccaggttaaactaaggaa

SEQ ID NO: 347065 - DNA, 30 bp, Artificial Sequence
  Synthetic oligonucleotide
aaaagtcattggaaaagtcagttacaggaa

SEQ ID NO: 347066 - DNA, 30 bp, Artificial Sequence
  Synthetic oligonucleotide
ccggacattaacacgggctacggccaggaa

SEQ ID NO: 347067 - DNA, 30 bp, Artificial Sequence
  Synthetic oligonucleotide
gtgcatgaaaaccgtcaagacgatcaggaa

SEQ ID NO: 347068 - DNA, 30 bp, Artificial Sequence
  Synthetic oligonucleotide
aaccccatgatacattatgatgatcaggaa

SEQ ID NO: 347069 - DNA, 30 bp, Artificial Sequence
  Synthetic oligonucleotide
tgatcacggatgcagaaagcatcagaggaa

SEQ ID NO: 347070 - DNA, 30 bp, Artificial Sequence
  Synthetic oligonucleotide
cccggtctacagctattagtggtagaggaa

SEQ ID NO: 347071 - DNA, 30 bp, Artificial Sequence
  Synthetic oligonucleotide
gcatgtgaaattaagacctggcgcgaggaa

SEQ ID NO: 347072 - DNA, 30 bp, Artificial Sequence
  Synthetic oligonucleotide
tccggagttgtccaaagcacgtgggaggaa

SEQ ID NO: 347073 - DNA, 30 bp, Artificial Sequence
  Synthetic oligonucleotide
ggcacgtagtaggtcccgacaatggaggaa

SEQ ID NO: 347074 - DNA, 30 bp, Artificial Sequence
  Synthetic oligonucleotide
gtggcatcggcctgagtcggtcctgaggaa

SEQ ID NO: 347075 - DNA, 30 bp, Artificial Sequence
  Synthetic oligonucleotide
tcgcctccattcgcctcagctagataggaa

SEQ ID NO: 347076 - DNA, 30 bp, Artificial Sequence
  Synthetic oligonucleotide
caatagtccaatattgggggctgataggaa

SEQ ID NO: 347077 - DNA, 30 bp, Artificial Sequence
  Synthetic oligonucleotide
accgcttactgcggcaattaaacctaggaa

SEQ ID NO: 347078 - DNA, 30 bp, Artificial Sequence
  Synthetic oligonucleotide
ggctagatgcacggctaaccgccctaggaa

SEQ ID NO: 347079 - DNA, 30 bp, Artificial Sequence
  Synthetic oligonucleotide
tctcgtccgcgctgtgggaacggctaggaa

SEQ ID NO: 347080 - DNA, 30 bp, Artificial Sequence
  Synthetic oligonucleotide
tcggtagctaaaggttaactatgctaggaa

SEQ ID NO: 347081 - DNA, 30 bp, Artificial Sequence
  Synthetic oligonucleotide
ctagagaggtaatcgggtctctggtaggaa

SEQ ID NO: 347082 - DNA, 30 bp, Artificial Sequence
  Synthetic oligonucleotide
ttgatgtgtccgcccactgcagattaggaa

SEQ ID NO: 347083 - DNA, 30 bp, Artificial Sequence
  Synthetic oligonucleotide
ggtgagattcatgctcgaccaacaacggaa

SEQ ID NO: 347084 - DNA, 30 bp, Artificial Sequence
  Synthetic oligonucleotide
gactaccatatcgtgcaatcgcgaacggaa

SEQ ID NO: 347085 - DNA, 30 bp, Artificial Sequence
  Synthetic oligonucleotide
gcaagttaacaattgctgtatttaacggaa

SEQ ID NO: 347086 - DNA, 30 bp, Artificial Sequence
  Synthetic oligonucleotide
atttcactaaaacgaactccgttcacggaa

SEQ ID NO: 347087 - DNA, 30 bp, Artificial Sequence
  Synthetic oligonucleotide
ctatcctgggaccagttcgcgtagacggaa

SEQ ID NO: 347088 - DNA, 30 bp, Artificial Sequence
  Synthetic oligonucleotide
agtttctagttatgaaggcagtggacggaa

SEQ ID NO: 347089 - DNA, 30 bp, Artificial Sequence
  Synthetic oligonucleotide
cccaaaacatgtgggtcgcggcatacggaa

SEQ ID NO: 347090 - DNA, 30 bp, Artificial Sequence
  Synthetic oligonucleotide
tatgctaggcacggctcgttttatacggaa

SEQ ID NO: 347091 - DNA, 30 bp, Artificial Sequence
  Synthetic oligonucleotide
ttaagagctcgggtgtgaggccgtacggaa

SEQ ID NO: 347092 - DNA, 30 bp, Artificial Sequence
  Synthetic oligonucleotide
taagcccgttcaatccgtgcggttacggaa

SEQ ID NO: 347093 - DNA, 30 bp, Artificial Sequence
  Synthetic oligonucleotide
taattcccatccggttgataacgcccggaa

SEQ ID NO: 347094 - DNA, 30 bp, Artificial Sequence
  Synthetic oligonucleotide
agtcgtttatgatctcaagtatggccggaa

SEQ ID NO: 347095 - DNA, 30 bp, Artificial Sequence
  Synthetic oligonucleotide
aattaggctgaactaagaggaaaagcggaa

SEQ ID NO: 347096 - DNA, 30 bp, Artificial Sequence
  Synthetic oligonucleotide
gagtgcagaaagatccaatttaaagcggaa

SEQ ID NO: 347097 - DNA, 30 bp, Artificial Sequence
  Synthetic oligonucleotide
acctggtgaaatttcaaaagcagagcggaa

SEQ ID NO: 347098 - DNA, 30 bp, Artificial Sequence
  Synthetic oligonucleotide
ctgggcgcgaggtttgcacggatagcggaa

SEQ ID NO: 347099 - DNA, 30 bp, Artificial Sequence
  Synthetic oligonucleotide
tagatccgtcactcatctgtaatcgcggaa

SEQ ID NO: 347100 - DNA, 30 bp, Artificial Sequence
  Synthetic oligonucleotide
agtaaggtcaactatttgagctaggcggaa

SEQ ID NO: 347101 - DNA, 30 bp, Artificial Sequence
  Synthetic oligonucleotide
acctagacggctcagatttagtatgcggaa

SEQ ID NO: 347102 - DNA, 30 bp, Artificial Sequence
  Synthetic oligonucleotide
gtaggcgtagctaatcttacgagatcggaa

SEQ ID NO: 347103 - DNA, 30 bp, Artificial Sequence
  Synthetic oligonucleotide
ttcattggtaataaatcagtccactcggaa

SEQ ID NO: 347104 - DNA, 30 bp, Artificial Sequence
  Synthetic oligonucleotide
tgcacggaggggtttaactttcactcggaa

SEQ ID NO: 347105 - DNA, 30 bp, Artificial Sequence
  Synthetic oligonucleotide
agaaggtaacgtggtccttcctactcggaa

SEQ ID NO: 347106 - DNA, 30 bp, Artificial Sequence
  Synthetic oligonucleotide
ggcgttgctcacgagatgatcctgtcggaa

SEQ ID NO: 347107 - DNA, 30 bp, Artificial Sequence
  Synthetic oligonucleotide
ttatacggcaacataacacgtaattcggaa

SEQ ID NO: 347108 - DNA, 30 bp, Artificial Sequence
  Synthetic oligonucleotide
agcagttggagatgctgaccttcttcggaa

SEQ ID NO: 347109 - DNA, 30 bp, Artificial Sequence
  Synthetic oligonucleotide
gaaattcgaaccgagttggtaagttcggaa

SEQ ID NO: 347110 - DNA, 30 bp, Artificial Sequence
  Synthetic oligonucleotide
acctatcggatgctgcctaacagttcggaa

SEQ ID NO: 347111 - DNA, 30 bp, Artificial Sequence
  Synthetic oligonucleotide
ctgcggtcatattgtaagcattaaagggaa

SEQ ID NO: 347112 - DNA, 30 bp, Artificial Sequence
  Synthetic oligonucleotide
gaacggagcgtaaccggggcggtcagggaa

SEQ ID NO: 347113 - DNA, 30 bp, Artificial Sequence
  Synthetic oligonucleotide
tgaagctactttaataacaagttcagggaa

SEQ ID NO: 347114 - DNA, 30 bp, Artificial Sequence
  Synthetic oligonucleotide
tcgactacgcccgtccgcttaacgagggaa

SEQ ID NO: 347115 - DNA, 30 bp, Artificial Sequence
  Synthetic oligonucleotide
gctcttcatcgtgctccagtcacgagggaa

SEQ ID NO: 347116 - DNA, 30 bp, Artificial Sequence
  Synthetic oligonucleotide
cactagaaggcctttattgactcgagggaa

SEQ ID NO: 347117 - DNA, 30 bp, Artificial Sequence
  Synthetic oligonucleotide
tatgacgattgattgtcacggtctagggaa

SEQ ID NO: 347118 - DNA, 30 bp, Artificial Sequence
  Synthetic oligonucleotide
gaggcctattaaaagttggactaacgggaa

SEQ ID NO: 347119 - DNA, 30 bp, Artificial Sequence
  Synthetic oligonucleotide
atgaaagtcgtcctagatgacgcacgggaa

SEQ ID NO: 347120 - DNA, 30 bp, Artificial Sequence
  Synthetic oligonucleotide
tctgtaacaggtcaagaaactatacgggaa

SEQ ID NO: 347121 - DNA, 30 bp, Artificial Sequence
  Synthetic oligonucleotide
ttcgtgttgatatgaatggaataccgggaa

SEQ ID NO: 347122 - DNA, 30 bp, Artificial Sequence
  Synthetic oligonucleotide
gcgggcgcccagtgagcatggtcgcgggaa

SEQ ID NO: 347123 - DNA, 30 bp, Artificial Sequence
  Synthetic oligonucleotide
gaaaattcgttattcaggcacgggcgggaa

SEQ ID NO: 347124 - DNA, 30 bp, Artificial Sequence
  Synthetic oligonucleotide
cagaccgagacttaaagcgttatgcgggaa

SEQ ID NO: 347125 - DNA, 31 bp, Artificial Sequence
  Synthetic oligonucleotide
taaaggatgccaagccatatatctgcgggaa

SEQ ID NO: 347126 - DNA, 30 bp, Artificial Sequence
  Synthetic oligonucleotide
cagcttaaatcgaggattcaccgtcgggaa

SEQ ID NO: 347127 - DNA, 30 bp, Artificial Sequence
  Synthetic oligonucleotide
ctacgaccgctgcgctaaaatcgtcgggaa

SEQ ID NO: 347128 - DNA, 30 bp, Artificial Sequence
  Synthetic oligonucleotide
ctatggtgtctgcctccgcctcgtcgggaa

SEQ ID NO: 347129 - DNA, 30 bp, Artificial Sequence
  Synthetic oligonucleotide
cccgatcccacatcctctaagggtcgggaa

SEQ ID NO: 347130 - DNA, 30 bp, Artificial Sequence
  Synthetic oligonucleotide
cacacaattttttaattatagacaggggaa

SEQ ID NO: 347131 - DNA, 30 bp, Artificial Sequence
  Synthetic oligonucleotide
aggacacgggatgtagtatctagaggggaa

SEQ ID NO: 347132 - DNA, 30 bp, Artificial Sequence
  Synthetic oligonucleotide
tgtccggtacattcaaaagtggccggggaa

SEQ ID NO: 347133 - DNA, 30 bp, Artificial Sequence
  Synthetic oligonucleotide
ttggtattgtctcgaaggacctccggggaa

SEQ ID NO: 347134 - DNA, 30 bp, Artificial Sequence
  Synthetic oligonucleotide
aataggtgtaaatttatgcggtggggggaa

SEQ ID NO: 347135 - DNA, 30 bp, Artificial Sequence
  Synthetic oligonucleotide
agaaattgcgtcacgcttcattaatgggaa

SEQ ID NO: 347136 - DNA, 30 bp, Artificial Sequence
  Synthetic oligonucleotide
tatgcaggtgtacaattgaaaccatgggaa

SEQ ID NO: 347137 - DNA, 30 bp, Artificial Sequence
  Synthetic oligonucleotide
cgaacttccgatgtaacgagcccatgggaa

SEQ ID NO: 347138 - DNA, 30 bp, Artificial Sequence
  Synthetic oligonucleotide
ccaccgcctagacaaagttgatcatgggaa

SEQ ID NO: 347139 - DNA, 30 bp, Artificial Sequence
  Synthetic oligonucleotide
agacgtatcacgccaaggacttcatgggaa

SEQ ID NO: 347140 - DNA, 30 bp, Artificial Sequence
  Synthetic oligonucleotide
ttagttggcaagtcgcaggtctgatgggaa

SEQ ID NO: 347141 - DNA, 30 bp, Artificial Sequence
  Synthetic oligonucleotide
gcttaatcaaaaacccggcaccagtgggaa

SEQ ID NO: 347142 - DNA, 30 bp, Artificial Sequence
  Synthetic oligonucleotide
ttaaatgtaatagcttgttggcagtgggaa

SEQ ID NO: 347143 - DNA, 30 bp, Artificial Sequence
  Synthetic oligonucleotide
gccgctgcgattacctagttagggtgggaa

SEQ ID NO: 347144 - DNA, 30 bp, Artificial Sequence
  Synthetic oligonucleotide
gctgaccacgaagatttgtgcccttgggaa

SEQ ID NO: 347145 - DNA, 30 bp, Artificial Sequence
  Synthetic oligonucleotide
ggggctcacttccctgcctcatcttgggaa

SEQ ID NO: 347146 - DNA, 30 bp, Artificial Sequence
  Synthetic oligonucleotide
catatgtatttagggctgggttcttgggaa

SEQ ID NO: 347147 - DNA, 30 bp, Artificial Sequence
  Synthetic oligonucleotide
accagtacgctacgccgcatcgtttgggaa

SEQ ID NO: 347148 - DNA, 30 bp, Artificial Sequence
  Synthetic oligonucleotide
gacaattcggtaaaattccgcttttgggaa

SEQ ID NO: 347149 - DNA, 30 bp, Artificial Sequence
  Synthetic oligonucleotide
agcttgagcctgagttgggtaacaatggaa

SEQ ID NO: 347150 - DNA, 30 bp, Artificial Sequence
  Synthetic oligonucleotide
aacatatggagctgatttgagggaatggaa

SEQ ID NO: 347151 - DNA, 30 bp, Artificial Sequence
  Synthetic oligonucleotide
gctagcacccattgtgctggtataatggaa

SEQ ID NO: 347152 - DNA, 30 bp, Artificial Sequence
  Synthetic oligonucleotide
tattatagcatccgttactggcacatggaa

SEQ ID NO: 347153 - DNA, 30 bp, Artificial Sequence
  Synthetic oligonucleotide
agaattattagtctcgaagggggcatggaa

SEQ ID NO: 347154 - DNA, 30 bp, Artificial Sequence
  Synthetic oligonucleotide
aaatcgtacaactagataggtagtatggaa

SEQ ID NO: 347155 - DNA, 30 bp, Artificial Sequence
  Synthetic oligonucleotide
cactggtcaggaaatggaatcggtatggaa

SEQ ID NO: 347156 - DNA, 30 bp, Artificial Sequence
  Synthetic oligonucleotide
gctgactgtcaaaatcctggtgtactggaa

SEQ ID NO: 347157 - DNA, 30 bp, Artificial Sequence
  Synthetic oligonucleotide
tgctaagaggtggaaatagaaatcctggaa

SEQ ID NO: 347158 - DNA, 30 bp, Artificial Sequence
  Synthetic oligonucleotide
acccttcgaaccaactttggcaagctggaa

SEQ ID NO: 347159 - DNA, 30 bp, Artificial Sequence
  Synthetic oligonucleotide
ttgactattcggtttcggggttagctggaa

SEQ ID NO: 347160 - DNA, 30 bp, Artificial Sequence
  Synthetic oligonucleotide
cggtgacataagcttgaagtggtgctggaa

SEQ ID NO: 347161 - DNA, 30 bp, Artificial Sequence
  Synthetic oligonucleotide
tcattagtagaaatcatatcattgctggaa

SEQ ID NO: 347162 - DNA, 30 bp, Artificial Sequence
  Synthetic oligonucleotide
ggctcatctaacagtctggaacaagtggaa

SEQ ID NO: 347163 - DNA, 30 bp, Artificial Sequence
  Synthetic oligonucleotide
gcagacactggtttcagccctacagtggaa

SEQ ID NO: 347164 - DNA, 30 bp, Artificial Sequence
  Synthetic oligonucleotide
taccctgcaggctatagatgcctagtggaa

SEQ ID NO: 347165 - DNA, 30 bp, Artificial Sequence
  Synthetic oligonucleotide
atccttttgggtctggtggaaaccgtggaa

SEQ ID NO: 347166 - DNA, 30 bp, Artificial Sequence
  Synthetic oligonucleotide
aagccatgcgacattattatagtcgtggaa

SEQ ID NO: 347167 - DNA, 30 bp, Artificial Sequence
  Synthetic oligonucleotide
aaaactggaagccgctaatcacgggtggaa

SEQ ID NO: 347168 - DNA, 30 bp, Artificial Sequence
  Synthetic oligonucleotide
ttgctgcacctgctcaatttgcctgtggaa

SEQ ID NO: 347169 - DNA, 30 bp, Artificial Sequence
  Synthetic oligonucleotide
gtggcaaatattagatgcgtacgtgtggaa

SEQ ID NO: 347170 - DNA, 30 bp, Artificial Sequence
  Synthetic oligonucleotide
ggcacattgcttaatcaaattcgattggaa

SEQ ID NO: 347171 - DNA, 30 bp, Artificial Sequence
  Synthetic oligonucleotide
gaaaaccggcggcgtgtaaatggattggaa

SEQ ID NO: 347172 - DNA, 30 bp, Artificial Sequence
  Synthetic oligonucleotide
cggattcgttggccggtgccatccttggaa

SEQ ID NO: 347173 - DNA, 30 bp, Artificial Sequence
  Synthetic oligonucleotide
aggaagtcggattttccacctcgcttggaa

SEQ ID NO: 347174 - DNA, 30 bp, Artificial Sequence
  Synthetic oligonucleotide
gccatcctggactaaatggcacgtttggaa

SEQ ID NO: 347175 - DNA, 30 bp, Artificial Sequence
  Synthetic oligonucleotide
ttcgaagcgcttgtcatactgcttttggaa

SEQ ID NO: 347176 - DNA, 30 bp, Artificial Sequence
  Synthetic oligonucleotide
aagaggtagctgagacagttagttttggaa

SEQ ID NO: 347177 - DNA, 30 bp, Artificial Sequence
  Synthetic oligonucleotide
agtggacccatatttcgttcggaaaatgaa

SEQ ID NO: 347178 - DNA, 30 bp, Artificial Sequence
  Synthetic oligonucleotide
taattgttcatcaaagagcgcggaaatgaa

SEQ ID NO: 347179 - DNA, 30 bp, Artificial Sequence
  Synthetic oligonucleotide
ttaaggtacttcaacggcagtggaaatgaa

SEQ ID NO: 347180 - DNA, 30 bp, Artificial Sequence
  Synthetic oligonucleotide
tgtctaatgagacggctttttccgaatgaa

SEQ ID NO: 347181 - DNA, 30 bp, Artificial Sequence
  Synthetic oligonucleotide
cgaacaattgttagaatcgattataatgaa

SEQ ID NO: 347182 - DNA, 30 bp, Artificial Sequence
  Synthetic oligonucleotide
ttctattgggtagggcgctcctgtaatgaa

SEQ ID NO: 347183 - DNA, 30 bp, Artificial Sequence
  Synthetic oligonucleotide
ctaaacaataacttcatgctttttaatgaa

SEQ ID NO: 347184 - DNA, 30 bp, Artificial Sequence
  Synthetic oligonucleotide
tatgttcattttcggagtaaatgccatgaa

SEQ ID NO: 347185 - DNA, 30 bp, Artificial Sequence
  Synthetic oligonucleotide
acgtaggtcttcgctatccaaatccatgaa

SEQ ID NO: 347186 - DNA, 30 bp, Artificial Sequence
  Synthetic oligonucleotide
cggcgatgtactttcacattcgtccatgaa

SEQ ID NO: 347187 - DNA, 30 bp, Artificial Sequence
  Synthetic oligonucleotide
ctaatttgccacgtcggcgacccgcatgaa

SEQ ID NO: 347188 - DNA, 30 bp, Artificial Sequence
  Synthetic oligonucleotide
gaacttagctacgacagcgctaaagatgaa

SEQ ID NO: 347189 - DNA, 30 bp, Artificial Sequence
  Synthetic oligonucleotide
taagtgtacggcctgctaccgtcagatgaa

SEQ ID NO: 347190 - DNA, 30 bp, Artificial Sequence
  Synthetic oligonucleotide
ctacacacatagacgtatagccgagatgaa

SEQ ID NO: 347191 - DNA, 30 bp, Artificial Sequence
  Synthetic oligonucleotide
tagcgcaaattacaggctataggagatgaa

SEQ ID NO: 347192 - DNA, 30 bp, Artificial Sequence
  Synthetic oligonucleotide
ctcatgttaactaaacagttcttcgatgaa

SEQ ID NO: 347193 - DNA, 30 bp, Artificial Sequence
  Synthetic oligonucleotide
gctggcaacgggactagatgcagggatgaa

SEQ ID NO: 347194 - DNA, 30 bp, Artificial Sequence
  Synthetic oligonucleotide
ccttgagaacggaaacgctactgggatgaa

SEQ ID NO: 347195 - DNA, 30 bp, Artificial Sequence
  Synthetic oligonucleotide
tttagtacttagctctcagatcatgatgaa

SEQ ID NO: 347196 - DNA, 30 bp, Artificial Sequence
  Synthetic oligonucleotide
cggagcgccgtcctagctcagctatatgaa

SEQ ID NO: 347197 - DNA, 30 bp, Artificial Sequence
  Synthetic oligonucleotide
atcgcgtctacactcgtcgccgtatatgaa

SEQ ID NO: 347198 - DNA, 30 bp, Artificial Sequence
  Synthetic oligonucleotide
actgtcacaggggatacactgaactatgaa

SEQ ID NO: 347199 - DNA, 30 bp, Artificial Sequence
  Synthetic oligonucleotide
cacacgcggtattacggaaacggctatgaa

SEQ ID NO: 347200 - DNA, 30 bp, Artificial Sequence
  Synthetic oligonucleotide
tactggtagttaccactcttaaagtatgaa

SEQ ID NO: 347201 - DNA, 30 bp, Artificial Sequence
  Synthetic oligonucleotide
gcgcagccttggtgtggtcaacagtatgaa

SEQ ID NO: 347202 - DNA, 30 bp, Artificial Sequence
  Synthetic oligonucleotide
gcaatagagtacatagttccgctgtatgaa

SEQ ID NO: 347203 - DNA, 30 bp, Artificial Sequence
  Synthetic oligonucleotide
gcatattttaagtttcagtaattgtatgaa

SEQ ID NO: 347204 - DNA, 30 bp, Artificial Sequence
  Synthetic oligonucleotide
tctaggtaatggaatcaaaatccttatgaa

SEQ ID NO: 347205 - DNA, 29 bp, Artificial Sequence
  Synthetic oligonucleotide
ctgtaggtgcgaagggcagggcttatgaa

SEQ ID NO: 347206 - DNA, 30 bp, Artificial Sequence
  Synthetic oligonucleotide
ctcgccttagtgtcatacaccagttatgaa

SEQ ID NO: 347207 - DNA, 30 bp, Artificial Sequence
  Synthetic oligonucleotide
attagatggctgacttgaggagcaactgaa

SEQ ID NO: 347208 - DNA, 30 bp, Artificial Sequence
  Synthetic oligonucleotide
ctgtccgaggagccgcaaattcacactgaa

SEQ ID NO: 347209 - DNA, 30 bp, Artificial Sequence
  Synthetic oligonucleotide
gcccaaacccccccaaggcggcgcactgaa

SEQ ID NO: 347210 - DNA, 30 bp, Artificial Sequence
  Synthetic oligonucleotide
ctggcagtcggttccaataaacagactgaa

SEQ ID NO: 347211 - DNA, 30 bp, Artificial Sequence
  Synthetic oligonucleotide
agctttactgggagatttgctatacctgaa

SEQ ID NO: 347212 - DNA, 30 bp, Artificial Sequence
  Synthetic oligonucleotide
actcaggagttatgcaggtaactccctgaa

SEQ ID NO: 347213 - DNA, 30 bp, Artificial Sequence
  Synthetic oligonucleotide
taccatataatgactgtgcctgccgctgaa

SEQ ID NO: 347214 - DNA, 30 bp, Artificial Sequence
  Synthetic oligonucleotide
ataggcgtcagaaagatgaggtaggctgaa

SEQ ID NO: 347215 - DNA, 30 bp, Artificial Sequence
  Synthetic oligonucleotide
aactggggtcacccttggtgagggtctgaa

SEQ ID NO: 347216 - DNA, 30 bp, Artificial Sequence
  Synthetic oligonucleotide
tgcaccgggcctaatactcacgattctgaa

SEQ ID NO: 347217 - DNA, 30 bp, Artificial Sequence
  Synthetic oligonucleotide
agatttggtgtctgtagggttcaaagtgaa

SEQ ID NO: 347218 - DNA, 30 bp, Artificial Sequence
  Synthetic oligonucleotide
gagaactgaccgaaaaggtcggaaagtgaa

SEQ ID NO: 347219 - DNA, 30 bp, Artificial Sequence
  Synthetic oligonucleotide
catagattttgacggagcctaacaagtgaa

SEQ ID NO: 347220 - DNA, 30 bp, Artificial Sequence
  Synthetic oligonucleotide
tgtttgtaagatcaagctggtcccagtgaa

SEQ ID NO: 347221 - DNA, 30 bp, Artificial Sequence
  Synthetic oligonucleotide
gaactcaaactgcacgtcgcgcggagtgaa

SEQ ID NO: 347222 - DNA, 30 bp, Artificial Sequence
  Synthetic oligonucleotide
ttgattcgcatggcttgcgaggggagtgaa

SEQ ID NO: 347223 - DNA, 30 bp, Artificial Sequence
  Synthetic oligonucleotide
cccatctagaagcgagaatcactgagtgaa

SEQ ID NO: 347224 - DNA, 30 bp, Artificial Sequence
  Synthetic oligonucleotide
tggtctcattacatggatgataaccgtgaa

SEQ ID NO: 347225 - DNA, 30 bp, Artificial Sequence
  Synthetic oligonucleotide
ttctagaattactaaatacgtaatcgtgaa

SEQ ID NO: 347226 - DNA, 30 bp, Artificial Sequence
  Synthetic oligonucleotide
ataaaaagctgagctccgtatactcgtgaa

SEQ ID NO: 347227 - DNA, 30 bp, Artificial Sequence
  Synthetic oligonucleotide
gcgcgtatctgcttttacccaccaggtgaa

SEQ ID NO: 347228 - DNA, 30 bp, Artificial Sequence
  Synthetic oligonucleotide
aaagaatacaccccatatggcataggtgaa

SEQ ID NO: 347229 - DNA, 30 bp, Artificial Sequence
  Synthetic oligonucleotide
gacaaaacctattctagctcgtagggtgaa

SEQ ID NO: 347230 - DNA, 30 bp, Artificial Sequence
  Synthetic oligonucleotide
ttaccttaatggtagcagagccggggtgaa

SEQ ID NO: 347231 - DNA, 30 bp, Artificial Sequence
  Synthetic oligonucleotide
tccggtccgcggcatttgccagaatgtgaa

SEQ ID NO: 347232 - DNA, 30 bp, Artificial Sequence
  Synthetic oligonucleotide
atacgagttcgaggcagaagttaatgtgaa

SEQ ID NO: 347233 - DNA, 30 bp, Artificial Sequence
  Synthetic oligonucleotide
ctgagtacaaagatacggggggcctgtgaa

SEQ ID NO: 347234 - DNA, 30 bp, Artificial Sequence
  Synthetic oligonucleotide
tgttgctcgttgagacggggctgctgtgaa

SEQ ID NO: 347235 - DNA, 30 bp, Artificial Sequence
  Synthetic oligonucleotide
tccccctttaatgcatcagggtagtgtgaa

SEQ ID NO: 347236 - DNA, 30 bp, Artificial Sequence
  Synthetic oligonucleotide
tcttaaaggtgagcaccatatcggtgtgaa

SEQ ID NO: 347237 - DNA, 30 bp, Artificial Sequence
  Synthetic oligonucleotide
ggagatcgggcggcctgtggcgtgtgtgaa

SEQ ID NO: 347238 - DNA, 30 bp, Artificial Sequence
  Synthetic oligonucleotide
ctctgtgagtgttgtgcggtaaattgtgaa

SEQ ID NO: 347239 - DNA, 30 bp, Artificial Sequence
  Synthetic oligonucleotide
ccgtcaagttcatctcttcaggattgtgaa

SEQ ID NO: 347240 - DNA, 31 bp, Artificial Sequence
  Synthetic oligonucleotide
ccataggagacctttcctataaacaattgaa

SEQ ID NO: 347241 - DNA, 30 bp, Artificial Sequence
  Synthetic oligonucleotide
gttcgattagcgcgtcgtctagcaattgaa

SEQ ID NO: 347242 - DNA, 30 bp, Artificial Sequence
  Synthetic oligonucleotide
agggcttgtaataggtccacaataattgaa

SEQ ID NO: 347243 - DNA, 30 bp, Artificial Sequence
  Synthetic oligonucleotide
acaggaacctatttggacccctccattgaa

SEQ ID NO: 347244 - DNA, 26 bp, Artificial Sequence
  Synthetic oligonucleotide
gggcagctactaatccgcaccttgaa

SEQ ID NO: 347245 - DNA, 30 bp, Artificial Sequence
  Synthetic oligonucleotide
tagggacgcaccgaagtttataagcttgaa

SEQ ID NO: 347246 - DNA, 30 bp, Artificial Sequence
  Synthetic oligonucleotide
cgtagggtagttggaacctgaacgcttgaa

SEQ ID NO: 347247 - DNA, 30 bp, Artificial Sequence
  Synthetic oligonucleotide
aggtggcctagatttaatcaatggcttgaa

SEQ ID NO: 347248 - DNA, 30 bp, Artificial Sequence
  Synthetic oligonucleotide
tttcgcgaccacaggtgtcaattgcttgaa

SEQ ID NO: 347249 - DNA, 30 bp, Artificial Sequence
  Synthetic oligonucleotide
cgaatgctaattattgccgctacagttgaa

SEQ ID NO: 347250 - DNA, 30 bp, Artificial Sequence
  Synthetic oligonucleotide
gagttcggtccagcacacgcgcaggttgaa

SEQ ID NO: 347251 - DNA, 30 bp, Artificial Sequence
  Synthetic oligonucleotide
tgtagccgtccaaggaagttccgggttgaa

SEQ ID NO: 347252 - DNA, 30 bp, Artificial Sequence
  Synthetic oligonucleotide
ctttgaccggaatcattatgacgtgttgaa

SEQ ID NO: 347253 - DNA, 30 bp, Artificial Sequence
  Synthetic oligonucleotide
ataggtagtatctgataacgatgtgttgaa

SEQ ID NO: 347254 - DNA, 30 bp, Artificial Sequence
  Synthetic oligonucleotide
tattgacaatgaggtaaggggtcctttgaa

SEQ ID NO: 347255 - DNA, 30 bp, Artificial Sequence
  Synthetic oligonucleotide
cttaatggatatcgagcacggtgctttgaa

SEQ ID NO: 347256 - DNA, 30 bp, Artificial Sequence
  Synthetic oligonucleotide
ttcaccgaacgtttgttatatctctttgaa

SEQ ID NO: 347257 - DNA, 30 bp, Artificial Sequence
  Synthetic oligonucleotide
caacatgaaagtacgatcagtcagtttgaa

SEQ ID NO: 347258 - DNA, 30 bp, Artificial Sequence
  Synthetic oligonucleotide
ggcagggctcctacgtttactagttttgaa

SEQ ID NO: 347259 - DNA, 30 bp, Artificial Sequence
  Synthetic oligonucleotide
cggcacagcatgacatataagctttttgaa

SEQ ID NO: 347260 - DNA, 30 bp, Artificial Sequence
  Synthetic oligonucleotide
ccaggtagacgccgccgccaaacaaaataa

SEQ ID NO: 347261 - DNA, 30 bp, Artificial Sequence
  Synthetic oligonucleotide
ggttgggggcgccgtacgtgttcaaaataa

SEQ ID NO: 347262 - DNA, 30 bp, Artificial Sequence
  Synthetic oligonucleotide
agaattccctacacacttaatagaaaataa

SEQ ID NO: 347263 - DNA, 30 bp, Artificial Sequence
  Synthetic oligonucleotide
tagcatccaacttggccgtaccgaaaataa

SEQ ID NO: 347264 - DNA, 30 bp, Artificial Sequence
  Synthetic oligonucleotide
gttcagtgaacttggcagttctgaaaataa

SEQ ID NO: 347265 - DNA, 30 bp, Artificial Sequence
  Synthetic oligonucleotide
cgcccgtcgtcgaagcacgttataaaataa

SEQ ID NO: 347266 - DNA, 30 bp, Artificial Sequence
  Synthetic oligonucleotide
tgggtctctgggaatctaagcgtaaaataa

SEQ ID NO: 347267 - DNA, 30 bp, Artificial Sequence
  Synthetic oligonucleotide
acccagtagtgcgaactacgattaaaataa

SEQ ID NO: 347268 - DNA, 30 bp, Artificial Sequence
  Synthetic oligonucleotide
atctagctgtgtttcgcacgagacaaataa

SEQ ID NO: 347269 - DNA, 30 bp, Artificial Sequence
  Synthetic oligonucleotide
cttttagcagaagtcggaaggcccaaataa

SEQ ID NO: 347270 - DNA, 30 bp, Artificial Sequence
  Synthetic oligonucleotide
ggctgtacaggcaccgacgagagcaaataa

SEQ ID NO: 347271 - DNA, 30 bp, Artificial Sequence
  Synthetic oligonucleotide
gttcgtaatgtaatcgatggaggcaaataa

SEQ ID NO: 347272 - DNA, 30 bp, Artificial Sequence
  Synthetic oligonucleotide
aaaggagcaatgtcaggtgagctcaaataa

SEQ ID NO: 347273 - DNA, 30 bp, Artificial Sequence
  Synthetic oligonucleotide
aatcggaccctgcacaataaagtcaaataa

SEQ ID NO: 347274 - DNA, 30 bp, Artificial Sequence
  Synthetic oligonucleotide
atagttcgtatcccggatccagcgaaataa

SEQ ID NO: 347275 - DNA, 30 bp, Artificial Sequence
  Synthetic oligonucleotide
gtataatcgtagggccgaagaaggaaataa

SEQ ID NO: 347276 - DNA, 30 bp, Artificial Sequence
  Synthetic oligonucleotide
ggtaatttgtggcgcaatgttatgaaataa

SEQ ID NO: 347277 - DNA, 30 bp, Artificial Sequence
  Synthetic oligonucleotide
caaagtttgcaggcaagatcactgaaataa

SEQ ID NO: 347278 - DNA, 30 bp, Artificial Sequence
  Synthetic oligonucleotide
gtgtgcaggagcttctgggatactaaataa

SEQ ID NO: 347279 - DNA, 30 bp, Artificial Sequence
  Synthetic oligonucleotide
ctacatgccggtcagttcagatttaaataa

SEQ ID NO: 347280 - DNA, 30 bp, Artificial Sequence
  Synthetic oligonucleotide
aatgacagtgtatttagtatgtttaaataa

SEQ ID NO: 347281 - DNA, 30 bp, Artificial Sequence
  Synthetic oligonucleotide
agccacacgggtccccgggaaaaacaataa

SEQ ID NO: 347282 - DNA, 30 bp, Artificial Sequence
  Synthetic oligonucleotide
ttgggctaataagatcgtataggacaataa

SEQ ID NO: 347283 - DNA, 30 bp, Artificial Sequence
  Synthetic oligonucleotide
acagctactaatggatgctatcgccaataa

SEQ ID NO: 347284 - DNA, 30 bp, Artificial Sequence
  Synthetic oligonucleotide
gcgcctggaaatcgcctttgatgccaataa

SEQ ID NO: 347285 - DNA, 30 bp, Artificial Sequence
  Synthetic oligonucleotide
acgatacgctcattcagagggttccaataa

SEQ ID NO: 347286 - DNA, 30 bp, Artificial Sequence
  Synthetic oligonucleotide
acatcgctgctggaaggtgccttgcaataa

SEQ ID NO: 347287 - DNA, 30 bp, Artificial Sequence
  Synthetic oligonucleotide
agctgttccgttattgatagaagtcaataa

SEQ ID NO: 347288 - DNA, 30 bp, Artificial Sequence
  Synthetic oligonucleotide
gagccggattgtgggagccggagtcaataa

SEQ ID NO: 347289 - DNA, 30 bp, Artificial Sequence
  Synthetic oligonucleotide
tcggggatgttgaatccttaccttcaataa

SEQ ID NO: 347290 - DNA, 30 bp, Artificial Sequence
  Synthetic oligonucleotide
gcgggtttacggcccattacagaagaataa

SEQ ID NO: 347291 - DNA, 30 bp, Artificial Sequence
  Synthetic oligonucleotide
catgtacatcgagcacttccttcagaataa

SEQ ID NO: 347292 - DNA, 30 bp, Artificial Sequence
  Synthetic oligonucleotide
atggtgttttacatgccatagcgagaataa

SEQ ID NO: 347293 - DNA, 30 bp, Artificial Sequence
  Synthetic oligonucleotide
attgaataagggagggactgagcggaataa

SEQ ID NO: 347294 - DNA, 30 bp, Artificial Sequence
  Synthetic oligonucleotide
gtatttcgcattaactaggtaagggaataa

SEQ ID NO: 347295 - DNA, 30 bp, Artificial Sequence
  Synthetic oligonucleotide
aatgagaaaaaagtgaaccttaatgaataa

SEQ ID NO: 347296 - DNA, 30 bp, Artificial Sequence
  Synthetic oligonucleotide
cccttcgcggggtggcagtatattgaataa

SEQ ID NO: 347297 - DNA, 30 bp, Artificial Sequence
  Synthetic oligonucleotide
ttaaacgggcgtgaaggccgtgttgaataa

SEQ ID NO: 347298 - DNA, 30 bp, Artificial Sequence
  Synthetic oligonucleotide
tctacatatgcaacgagacaactataataa

SEQ ID NO: 347299 - DNA, 30 bp, Artificial Sequence
  Synthetic oligonucleotide
accattagtgggcgcttatgcgtataataa

SEQ ID NO: 347300 - DNA, 30 bp, Artificial Sequence
  Synthetic oligonucleotide
cctcaggacctaggctataattactaataa

SEQ ID NO: 347301 - DNA, 30 bp, Artificial Sequence
  Synthetic oligonucleotide
tgactgcaacgaagaagagcttgctaataa

SEQ ID NO: 347302 - DNA, 30 bp, Artificial Sequence
  Synthetic oligonucleotide
aagcccacagcgggatatggtcattaataa

SEQ ID NO: 347303 - DNA, 30 bp, Artificial Sequence
  Synthetic oligonucleotide
caccggggctgtaatgtggatccttaataa

SEQ ID NO: 347304 - DNA, 30 bp, Artificial Sequence
  Synthetic oligonucleotide
tagtgtgtgatctaattcctaagaacataa

SEQ ID NO: 347305 - DNA, 30 bp, Artificial Sequence
  Synthetic oligonucleotide
ctctgtgggttagggtctcacagaacataa

SEQ ID NO: 347306 - DNA, 30 bp, Artificial Sequence
  Synthetic oligonucleotide
gaccggaggacccttgtagtgaacacataa

SEQ ID NO: 347307 - DNA, 30 bp, Artificial Sequence
  Synthetic oligonucleotide
gtagatgcctatggaccttagcacacataa

SEQ ID NO: 347308 - DNA, 30 bp, Artificial Sequence
  Synthetic oligonucleotide
gcagctaccagggtgctaaggaccacataa

SEQ ID NO: 347309 - DNA, 30 bp, Artificial Sequence
  Synthetic oligonucleotide
cagtgtaatttcaaagtttgaagtacataa

SEQ ID NO: 347310 - DNA, 30 bp, Artificial Sequence
  Synthetic oligonucleotide
atctgtaatacaattgaacggacgccataa

SEQ ID NO: 347311 - DNA, 30 bp, Artificial Sequence
  Synthetic oligonucleotide
tgccgggcgacagttgaggtctggccataa

SEQ ID NO: 347312 - DNA, 30 bp, Artificial Sequence
  Synthetic oligonucleotide
tttaattcaataggtgggtatccagcataa

SEQ ID NO: 347313 - DNA, 30 bp, Artificial Sequence
  Synthetic oligonucleotide
tttattagatctagaccctaatcagcataa

SEQ ID NO: 347314 - DNA, 30 bp, Artificial Sequence
  Synthetic oligonucleotide
atggagcttgccggtgcggaagaggcataa

SEQ ID NO: 347315 - DNA, 30 bp, Artificial Sequence
  Synthetic oligonucleotide
gtgtgggcttcgtaaagtacggcggcataa

SEQ ID NO: 347316 - DNA, 30 bp, Artificial Sequence
  Synthetic oligonucleotide
gatgcgaaactcgtgcatagatatgcataa

SEQ ID NO: 347317 - DNA, 29 bp, Artificial Sequence
  Synthetic oligonucleotide
tgactaggaaaacgttacttactgcataa

SEQ ID NO: 347318 - DNA, 30 bp, Artificial Sequence
  Synthetic oligonucleotide
tgttgtgtggcaggagaggcacaatcataa

SEQ ID NO: 347319 - DNA, 30 bp, Artificial Sequence
  Synthetic oligonucleotide
ctgtgtattctaatcacgatgacatcataa

SEQ ID NO: 347320 - DNA, 30 bp, Artificial Sequence
  Synthetic oligonucleotide
aatcaacatggttgctttgatagatcataa

SEQ ID NO: 347321 - DNA, 30 bp, Artificial Sequence
  Synthetic oligonucleotide
ccttaaatttactccgcgctccgatcataa

SEQ ID NO: 347322 - DNA, 30 bp, Artificial Sequence
  Synthetic oligonucleotide
agatttcgccattacatagggcactcataa

SEQ ID NO: 347323 - DNA, 30 bp, Artificial Sequence
  Synthetic oligonucleotide
catgtaacttggagtgtctcgtactcataa

SEQ ID NO: 347324 - DNA, 30 bp, Artificial Sequence
  Synthetic oligonucleotide
aactcaaatttagaaggtggcatgtcataa

SEQ ID NO: 347325 - DNA, 30 bp, Artificial Sequence
  Synthetic oligonucleotide
tgttcagtgtccttaccacaatcttcataa

SEQ ID NO: 347326 - DNA, 30 bp, Artificial Sequence
  Synthetic oligonucleotide
acctgcgaataggatctcttatcttcataa

SEQ ID NO: 347327 - DNA, 30 bp, Artificial Sequence
  Synthetic oligonucleotide
attactacagaggtcactaaaggttcataa

SEQ ID NO: 347328 - DNA, 30 bp, Artificial Sequence
  Synthetic oligonucleotide
tatatatgggtgtcccttgtaggttcataa

SEQ ID NO: 347329 - DNA, 30 bp, Artificial Sequence
  Synthetic oligonucleotide
aaccgactgtccacatgtatgatttcataa

SEQ ID NO: 347330 - DNA, 30 bp, Artificial Sequence
  Synthetic oligonucleotide
ggacatctagacgagctaacggcaagataa

SEQ ID NO: 347331 - DNA, 30 bp, Artificial Sequence
  Synthetic oligonucleotide
tggtgccagagacggtcttgacgaagataa

SEQ ID NO: 347332 - DNA, 30 bp, Artificial Sequence
  Synthetic oligonucleotide
aacggtggtctcgcctatctacgaagataa

SEQ ID NO: 347333 - DNA, 30 bp, Artificial Sequence
  Synthetic oligonucleotide
agattcctacagcgctcgcccaacagataa

SEQ ID NO: 347334 - DNA, 30 bp, Artificial Sequence
  Synthetic oligonucleotide
tgtgtcaggggtcggccagcacacagataa

SEQ ID NO: 347335 - DNA, 30 bp, Artificial Sequence
  Synthetic oligonucleotide
caaacgtttgacgcacagctgcacagataa

SEQ ID NO: 347336 - DNA, 30 bp, Artificial Sequence
  Synthetic oligonucleotide
ggcgcttgagaagcaccattaaccagataa

SEQ ID NO: 347337 - DNA, 30 bp, Artificial Sequence
  Synthetic oligonucleotide
gttatgaaccctttacacaagggcagataa

SEQ ID NO: 347338 - DNA, 30 bp, Artificial Sequence
  Synthetic oligonucleotide
ccaccgccacagcaacattcgttcagataa

SEQ ID NO: 347339 - DNA, 30 bp, Artificial Sequence
  Synthetic oligonucleotide
tattaaatagaaagtactgatgtgagataa

SEQ ID NO: 347340 - DNA, 30 bp, Artificial Sequence
  Synthetic oligonucleotide
cgatcgggaatcagctttttggatagataa

SEQ ID NO: 347341 - DNA, 30 bp, Artificial Sequence
  Synthetic oligonucleotide
acgcttaacgatctatttttatatagataa

SEQ ID NO: 347342 - DNA, 30 bp, Artificial Sequence
  Synthetic oligonucleotide
gatgtgaggatttgtctcaaaatacgataa

SEQ ID NO: 347343 - DNA, 30 bp, Artificial Sequence
  Synthetic oligonucleotide
ttcgttactccgacttcattgctgcgataa

SEQ ID NO: 347344 - DNA, 30 bp, Artificial Sequence
  Synthetic oligonucleotide
tacgggcatttgcaattaggtctgcgataa

SEQ ID NO: 347345 - DNA, 30 bp, Artificial Sequence
  Synthetic oligonucleotide
cggaactcgagtttcccacatactcgataa

SEQ ID NO: 347346 - DNA, 30 bp, Artificial Sequence
  Synthetic oligonucleotide
ccagggcgcggtcggtgcggcattcgataa

SEQ ID NO: 347347 - DNA, 30 bp, Artificial Sequence
  Synthetic oligonucleotide
tcccttaataagcaactggcacaaggataa

SEQ ID NO: 347348 - DNA, 30 bp, Artificial Sequence
  Synthetic oligonucleotide
atgatcggcacaataactgccgtaggataa

SEQ ID NO: 347349 - DNA, 30 bp, Artificial Sequence
  Synthetic oligonucleotide
cgggcaagctgaagcagcgcttagggataa

SEQ ID NO: 347350 - DNA, 30 bp, Artificial Sequence
  Synthetic oligonucleotide
gatattgccgtgtaacctggtgcgggataa

SEQ ID NO: 347351 - DNA, 30 bp, Artificial Sequence
  Synthetic oligonucleotide
attcagtccagcagtccgggtcggggataa

SEQ ID NO: 347352 - DNA, 30 bp, Artificial Sequence
  Synthetic oligonucleotide
gaagccctcaggctcgaggacactggataa

SEQ ID NO: 347353 - DNA, 30 bp, Artificial Sequence
  Synthetic oligonucleotide
ggtgcatactctcttattcgtcaatgataa

SEQ ID NO: 347354 - DNA, 30 bp, Artificial Sequence
  Synthetic oligonucleotide
ttttagggtggaagctctttgacatgataa

SEQ ID NO: 347355 - DNA, 30 bp, Artificial Sequence
  Synthetic oligonucleotide
gcgcatgcataagtaagcataagatgataa

SEQ ID NO: 347356 - DNA, 30 bp, Artificial Sequence
  Synthetic oligonucleotide
gtttagttgcggttttaggggccctgataa

SEQ ID NO: 347357 - DNA, 30 bp, Artificial Sequence
  Synthetic oligonucleotide
aataagcactcatgttgatcgaagtgataa

SEQ ID NO: 347358 - DNA, 30 bp, Artificial Sequence
  Synthetic oligonucleotide
ggcctgctacggatgttattcacgtgataa

SEQ ID NO: 347359 - DNA, 30 bp, Artificial Sequence
  Synthetic oligonucleotide
ggtaattgagaatagtcctatccgtgataa

SEQ ID NO: 347360 - DNA, 30 bp, Artificial Sequence
  Synthetic oligonucleotide
tgctgtgttacctcatatactgattgataa

SEQ ID NO: 347361 - DNA, 30 bp, Artificial Sequence
  Synthetic oligonucleotide
ggacagtggggtcacgttatgacaatataa

SEQ ID NO: 347362 - DNA, 30 bp, Artificial Sequence
  Synthetic oligonucleotide
ctgtccgtcctttttattgtgtcaatataa

SEQ ID NO: 347363 - DNA, 30 bp, Artificial Sequence
  Synthetic oligonucleotide
tgggtacctcattgaaacatttcaatataa

SEQ ID NO: 347364 - DNA, 30 bp, Artificial Sequence
  Synthetic oligonucleotide
ggggatttcgagctttcgatttcaatataa

SEQ ID NO: 347365 - DNA, 30 bp, Artificial Sequence
  Synthetic oligonucleotide
gtatcgcacaagaaaggctgttgaatataa

SEQ ID NO: 347366 - DNA, 30 bp, Artificial Sequence
  Synthetic oligonucleotide
ttggtcctatgacggactgaactcatataa

SEQ ID NO: 347367 - DNA, 30 bp, Artificial Sequence
  Synthetic oligonucleotide
ccagctggggatacgtaggccgcgatataa

SEQ ID NO: 347368 - DNA, 30 bp, Artificial Sequence
  Synthetic oligonucleotide
gcgagacctgtacgtccatgcatgatataa

SEQ ID NO: 347369 - DNA, 30 bp, Artificial Sequence
  Synthetic oligonucleotide
agcagatacggcctaatcgtagatatataa

SEQ ID NO: 347370 - DNA, 30 bp, Artificial Sequence
  Synthetic oligonucleotide
gcagtcgacctcaagtcgtaggatatataa

SEQ ID NO: 347371 - DNA, 30 bp, Artificial Sequence
  Synthetic oligonucleotide
cctgacggaggctctcgcgggtgtatataa

SEQ ID NO: 347372 - DNA, 30 bp, Artificial Sequence
  Synthetic oligonucleotide
gatgaggagatgcccatacgctttatataa

SEQ ID NO: 347373 - DNA, 30 bp, Artificial Sequence
  Synthetic oligonucleotide
gtcatgacctaatcttatatgcaactataa

SEQ ID NO: 347374 - DNA, 30 bp, Artificial Sequence
  Synthetic oligonucleotide
aggcggcctaaaggatgtcagatactataa

SEQ ID NO: 347375 - DNA, 30 bp, Artificial Sequence
  Synthetic oligonucleotide
tttaagggtagggacgaaatgatactataa

SEQ ID NO: 347376 - DNA, 30 bp, Artificial Sequence
  Synthetic oligonucleotide
ctttccctaacaacatgtcttgtactataa

SEQ ID NO: 347377 - DNA, 30 bp, Artificial Sequence
  Synthetic oligonucleotide
actggcaaatattccctatgtttactataa

SEQ ID NO: 347378 - DNA, 30 bp, Artificial Sequence
  Synthetic oligonucleotide
ctcataacgctcgagcaagtcgacctataa

SEQ ID NO: 347379 - DNA, 30 bp, Artificial Sequence
  Synthetic oligonucleotide
gtgcgcctattattacggttcgttctataa

SEQ ID NO: 347380 - DNA, 30 bp, Artificial Sequence
  Synthetic oligonucleotide
gagggcgttaacgagcctgaaatagtataa

SEQ ID NO: 347381 - DNA, 30 bp, Artificial Sequence
  Synthetic oligonucleotide
tgcctagccagatatcagtaaatagtataa

SEQ ID NO: 347382 - DNA, 30 bp, Artificial Sequence
  Synthetic oligonucleotide
gttgcctaagagcgtgtgcggtacgtataa

SEQ ID NO: 347383 - DNA, 30 bp, Artificial Sequence
  Synthetic oligonucleotide
ggtgacgtgcgcttcggtatctaggtataa

SEQ ID NO: 347384 - DNA, 30 bp, Artificial Sequence
  Synthetic oligonucleotide
gtgttttagaaagccgtatggggtgtataa

SEQ ID NO: 347385 - DNA, 30 bp, Artificial Sequence
  Synthetic oligonucleotide
ggggaaattatgacgacacaacaattataa

SEQ ID NO: 347386 - DNA, 30 bp, Artificial Sequence
  Synthetic oligonucleotide
accctgggagagaacatccttctattataa

SEQ ID NO: 347387 - DNA, 30 bp, Artificial Sequence
  Synthetic oligonucleotide
agttatcactcaagacactgacgcttataa

SEQ ID NO: 347388 - DNA, 30 bp, Artificial Sequence
  Synthetic oligonucleotide
cagcgttcgcggtcaactcgtcgcttataa

SEQ ID NO: 347389 - DNA, 30 bp, Artificial Sequence
  Synthetic oligonucleotide
agaatcgttagggtgggacagcggttataa

SEQ ID NO: 347390 - DNA, 30 bp, Artificial Sequence
  Synthetic oligonucleotide
gtgacttgtcagagcgcgagtgggttataa

SEQ ID NO: 347391 - DNA, 30 bp, Artificial Sequence
  Synthetic oligonucleotide
taaaagaagctagaacttttgcatttataa

SEQ ID NO: 347392 - DNA, 30 bp, Artificial Sequence
  Synthetic oligonucleotide
aagttgatgaacgttaccgtagttttataa

SEQ ID NO: 347393 - DNA, 30 bp, Artificial Sequence
  Synthetic oligonucleotide
tggaatcttgtgtgactattggttttataa

SEQ ID NO: 347394 - DNA, 30 bp, Artificial Sequence
  Synthetic oligonucleotide
ggtgaaaagcgaattggcgattttttataa

SEQ ID NO: 347395 - DNA, 30 bp, Artificial Sequence
  Synthetic oligonucleotide
gcggcttatcgggtatatatggccaactaa

SEQ ID NO: 347396 - DNA, 30 bp, Artificial Sequence
  Synthetic oligonucleotide
cctgtcgtagcttgacggaagcagaactaa

SEQ ID NO: 347397 - DNA, 30 bp, Artificial Sequence
  Synthetic oligonucleotide
tcttcggcgatagggtgtattccgaactaa

SEQ ID NO: 347398 - DNA, 30 bp, Artificial Sequence
  Synthetic oligonucleotide
cttgcatttagaagctcgggagggaactaa

SEQ ID NO: 347399 - DNA, 30 bp, Artificial Sequence
  Synthetic oligonucleotide
aaccgataatccactatggtggtgaactaa

SEQ ID NO: 347400 - DNA, 31 bp, Artificial Sequence
  Synthetic oligonucleotide
tggtattctaatgccccccataaataactaa

SEQ ID NO: 347401 - DNA, 30 bp, Artificial Sequence
  Synthetic oligonucleotide
gcccactcacaataagaggctattaactaa

SEQ ID NO: 347402 - DNA, 30 bp, Artificial Sequence
  Synthetic oligonucleotide
gcggactacattgacgcaggtcaacactaa

SEQ ID NO: 347403 - DNA, 30 bp, Artificial Sequence
  Synthetic oligonucleotide
gaactaataggcgtgcgagctaaccactaa

SEQ ID NO: 347404 - DNA, 30 bp, Artificial Sequence
  Synthetic oligonucleotide
tttgtggtctggataagtcaggaccactaa

SEQ ID NO: 347405 - DNA, 30 bp, Artificial Sequence
  Synthetic oligonucleotide
cttttgtgaatcccgcaaaggaagcactaa

SEQ ID NO: 347406 - DNA, 30 bp, Artificial Sequence
  Synthetic oligonucleotide
caaccacgccagcgttgctcgcagcactaa

SEQ ID NO: 347407 - DNA, 30 bp, Artificial Sequence
  Synthetic oligonucleotide
ggactaatcagtaccagacacttgcactaa

SEQ ID NO: 347408 - DNA, 29 bp, Artificial Sequence
  Synthetic oligonucleotide
cagagtggttcattattcaccgtcactaa

SEQ ID NO: 347409 - DNA, 30 bp, Artificial Sequence
  Synthetic oligonucleotide
ttcccactaacgttaatgaaagttcactaa

SEQ ID NO: 347410 - DNA, 30 bp, Artificial Sequence
  Synthetic oligonucleotide
gtgactctagtggggatcgcttgcgactaa

SEQ ID NO: 347411 - DNA, 30 bp, Artificial Sequence
  Synthetic oligonucleotide
aggatatcgtatgggtgtcctcaatactaa

SEQ ID NO: 347412 - DNA, 30 bp, Artificial Sequence
  Synthetic oligonucleotide
ttatgtattgcggcaacctggtaatactaa

SEQ ID NO: 347413 - DNA, 30 bp, Artificial Sequence
  Synthetic oligonucleotide
catgacgtgttaggaatgccaggatactaa

SEQ ID NO: 347414 - DNA, 30 bp, Artificial Sequence
  Synthetic oligonucleotide
ggagggttttatatagtatcagtatactaa

SEQ ID NO: 347415 - DNA, 30 bp, Artificial Sequence
  Synthetic oligonucleotide
gcgccatataccaccggttgggtatactaa

SEQ ID NO: 347416 - DNA, 30 bp, Artificial Sequence
  Synthetic oligonucleotide
gatgcagaaattgtcgacggcacctactaa

SEQ ID NO: 347417 - DNA, 30 bp, Artificial Sequence
  Synthetic oligonucleotide
acagggatagtctcgtcagcatcctactaa

SEQ ID NO: 347418 - DNA, 30 bp, Artificial Sequence
  Synthetic oligonucleotide
tggcagtagggttagttcgctcattactaa

SEQ ID NO: 347419 - DNA, 30 bp, Artificial Sequence
  Synthetic oligonucleotide
tatattggcggaggtgaaatcccttactaa

SEQ ID NO: 347420 - DNA, 30 bp, Artificial Sequence
  Synthetic oligonucleotide
acactgtacacttcgtctaagctttactaa

SEQ ID NO: 347421 - DNA, 30 bp, Artificial Sequence
  Synthetic oligonucleotide
taaaataaagtcaatcgggccggaacctaa

SEQ ID NO: 347422 - DNA, 30 bp, Artificial Sequence
  Synthetic oligonucleotide
gatagcgagtgcgttctctgcaccacctaa

SEQ ID NO: 347423 - DNA, 30 bp, Artificial Sequence
  Synthetic oligonucleotide
ccttgtcgctgtcatagattagtcacctaa

SEQ ID NO: 347424 - DNA, 30 bp, Artificial Sequence
  Synthetic oligonucleotide
agagtcgcggtctcatatggggggacctaa

SEQ ID NO: 347425 - DNA, 30 bp, Artificial Sequence
  Synthetic oligonucleotide
acgtttatccgtgtggacgggtggacctaa

SEQ ID NO: 347426 - DNA, 30 bp, Artificial Sequence
  Synthetic oligonucleotide
cccataaataatttgatatggtatacctaa

SEQ ID NO: 347427 - DNA, 30 bp, Artificial Sequence
  Synthetic oligonucleotide
gtatagctgggtctcgaattcggtacctaa

SEQ ID NO: 347428 - DNA, 30 bp, Artificial Sequence
  Synthetic oligonucleotide
atagagctcaggctctgttggagaccctaa

SEQ ID NO: 347429 - DNA, 30 bp, Artificial Sequence
  Synthetic oligonucleotide
accgctatcaccagttagtactccccctaa

SEQ ID NO: 347430 - DNA, 30 bp, Artificial Sequence
  Synthetic oligonucleotide
agccggttcccttactcgtactcgccctaa

SEQ ID NO: 347431 - DNA, 30 bp, Artificial Sequence
  Synthetic oligonucleotide
ttcagggtgccttaacaacgaagtccctaa

SEQ ID NO: 347432 - DNA, 30 bp, Artificial Sequence
  Synthetic oligonucleotide
ccactcgaatataatagcgtaaaagcctaa

SEQ ID NO: 347433 - DNA, 30 bp, Artificial Sequence
  Synthetic oligonucleotide
cccaaaactgtctctgtacaggtcgcctaa

SEQ ID NO: 347434 - DNA, 30 bp, Artificial Sequence
  Synthetic oligonucleotide
aagcaactccgggaattttatgtcgcctaa

SEQ ID NO: 347435 - DNA, 30 bp, Artificial Sequence
  Synthetic oligonucleotide
aggcgatccggctgagtacccgaggcctaa

SEQ ID NO: 347436 - DNA, 30 bp, Artificial Sequence
  Synthetic oligonucleotide
atccgcgcagtacggtttcgaaatgcctaa

SEQ ID NO: 347437 - DNA, 30 bp, Artificial Sequence
  Synthetic oligonucleotide
ggctaattagtccttcgaactaatgcctaa

SEQ ID NO: 347438 - DNA, 30 bp, Artificial Sequence
  Synthetic oligonucleotide
cgcgtaggggtcccgtccggatgtgcctaa

SEQ ID NO: 347439 - DNA, 30 bp, Artificial Sequence
  Synthetic oligonucleotide
cattcgggaggcaggcgaacttttgcctaa

SEQ ID NO: 347440 - DNA, 29 bp, Artificial Sequence
  Synthetic oligonucleotide
atgtgtgatttgcaatcatagaatcctaa

SEQ ID NO: 347441 - DNA, 30 bp, Artificial Sequence
  Synthetic oligonucleotide
taggcagcgaagcagttctcaacatcctaa

SEQ ID NO: 347442 - DNA, 30 bp, Artificial Sequence
  Synthetic oligonucleotide
gaaagcacaagccgtacgctccgatcctaa

SEQ ID NO: 347443 - DNA, 30 bp, Artificial Sequence
  Synthetic oligonucleotide
tataattatccaaaagataccgcgtcctaa

SEQ ID NO: 347444 - DNA, 30 bp, Artificial Sequence
  Synthetic oligonucleotide
cgcgttatacacaaagcatgtgcttcctaa

SEQ ID NO: 347445 - DNA, 30 bp, Artificial Sequence
  Synthetic oligonucleotide
cacggatatcggcatatccagatttcctaa

SEQ ID NO: 347446 - DNA, 30 bp, Artificial Sequence
  Synthetic oligonucleotide
cgatttgccatattaatgagcaaaagctaa

SEQ ID NO: 347447 - DNA, 30 bp, Artificial Sequence
  Synthetic oligonucleotide
atccattgtaaacataagtgaaacagctaa

SEQ ID NO: 347448 - DNA, 30 bp, Artificial Sequence
  Synthetic oligonucleotide
atagccgaaaaggttcccggttgcagctaa

SEQ ID NO: 347449 - DNA, 30 bp, Artificial Sequence
  Synthetic oligonucleotide
tcaaatccagagaggggagctctcagctaa

SEQ ID NO: 347450 - DNA, 30 bp, Artificial Sequence
  Synthetic oligonucleotide
cttataaagagcgctagactgaagagctaa

SEQ ID NO: 347451 - DNA, 30 bp, Artificial Sequence
  Synthetic oligonucleotide
tatatcgcgacggaagttctataacgctaa

SEQ ID NO: 347452 - DNA, 30 bp, Artificial Sequence
  Synthetic oligonucleotide
tcgatatgtaatttttctggcacacgctaa

SEQ ID NO: 347453 - DNA, 30 bp, Artificial Sequence
  Synthetic oligonucleotide
taaatgaccaaatacggaattggacgctaa

SEQ ID NO: 347454 - DNA, 30 bp, Artificial Sequence
  Synthetic oligonucleotide
agtggccggtgggtacagaggcgccgctaa

SEQ ID NO: 347455 - DNA, 30 bp, Artificial Sequence
  Synthetic oligonucleotide
agcaaaacgcgatattgtcgacagcgctaa

SEQ ID NO: 347456 - DNA, 30 bp, Artificial Sequence
  Synthetic oligonucleotide
gcgttacgttccttgctgtcctagcgctaa

SEQ ID NO: 347457 - DNA, 30 bp, Artificial Sequence
  Synthetic oligonucleotide
tgaaaagatggcagcacagaccggcgctaa

SEQ ID NO: 347458 - DNA, 30 bp, Artificial Sequence
  Synthetic oligonucleotide
cctaagccaatgggtctcaccattcgctaa

SEQ ID NO: 347459 - DNA, 30 bp, Artificial Sequence
  Synthetic oligonucleotide
gtccccacggacgcttgccgctaaggctaa

SEQ ID NO: 347460 - DNA, 30 bp, Artificial Sequence
  Synthetic oligonucleotide
agtatccggttgactgacaacgcaggctaa

SEQ ID NO: 347461 - DNA, 30 bp, Artificial Sequence
  Synthetic oligonucleotide
acccgtactgctttataaacgctaggctaa

SEQ ID NO: 347462 - DNA, 30 bp, Artificial Sequence
  Synthetic oligonucleotide
gaatggagattgcccgaaattacgggctaa

SEQ ID NO: 347463 - DNA, 30 bp, Artificial Sequence
  Synthetic oligonucleotide
gggagaattttttgaagacattcgggctaa

SEQ ID NO: 347464 - DNA, 30 bp, Artificial Sequence
  Synthetic oligonucleotide
tcggccgctaattggcgaagtgatggctaa

SEQ ID NO: 347465 - DNA, 30 bp, Artificial Sequence
  Synthetic oligonucleotide
gtcgtttggattcgcaggatcgaatgctaa

SEQ ID NO: 347466 - DNA, 30 bp, Artificial Sequence
  Synthetic oligonucleotide
accccgcgtgacaggtcgctactatgctaa

SEQ ID NO: 347467 - DNA, 30 bp, Artificial Sequence
  Synthetic oligonucleotide
gcacatattcgaatacttgcaatctgctaa

SEQ ID NO: 347468 - DNA, 30 bp, Artificial Sequence
  Synthetic oligonucleotide
ctacaagacggccgcaaagcctattgctaa

SEQ ID NO: 347469 - DNA, 30 bp, Artificial Sequence
  Synthetic oligonucleotide
gcaagtgatgttgaggtaatcagttgctaa

SEQ ID NO: 347470 - DNA, 30 bp, Artificial Sequence
  Synthetic oligonucleotide
tgagttattctattcgcatcgaaaatctaa

SEQ ID NO: 347471 - DNA, 30 bp, Artificial Sequence
  Synthetic oligonucleotide
ggaataaaggtatggaaatgttaaatctaa

SEQ ID NO: 347472 - DNA, 30 bp, Artificial Sequence
  Synthetic oligonucleotide
cagcgcgcggtatctgaagcaggaatctaa

SEQ ID NO: 347473 - DNA, 30 bp, Artificial Sequence
  Synthetic oligonucleotide
ctcgatctgctgagtggcagaatcatctaa

SEQ ID NO: 347474 - DNA, 30 bp, Artificial Sequence
  Synthetic oligonucleotide
cttagctcgtttggtaacaggactatctaa

SEQ ID NO: 347475 - DNA, 30 bp, Artificial Sequence
  Synthetic oligonucleotide
gtaaagtccgatgtccaactgggtatctaa

SEQ ID NO: 347476 - DNA, 30 bp, Artificial Sequence
  Synthetic oligonucleotide
accggagccttaaaacgctggattatctaa

SEQ ID NO: 347477 - DNA, 30 bp, Artificial Sequence
  Synthetic oligonucleotide
cttactttatgtattccttgtccactctaa

SEQ ID NO: 347478 - DNA, 30 bp, Artificial Sequence
  Synthetic oligonucleotide
tgacttttatgggtgaattcactactctaa

SEQ ID NO: 347479 - DNA, 30 bp, Artificial Sequence
  Synthetic oligonucleotide
gcgttatcgtgttgctggagcccgctctaa

SEQ ID NO: 347480 - DNA, 30 bp, Artificial Sequence
  Synthetic oligonucleotide
ctccttcctctaacgaggactgatctctaa

SEQ ID NO: 347481 - DNA, 30 bp, Artificial Sequence
  Synthetic oligonucleotide
cactctggaaaggctcgagatgaagtctaa

SEQ ID NO: 347482 - DNA, 30 bp, Artificial Sequence
  Synthetic oligonucleotide
tcagtgtatgtggtaccaactccagtctaa

SEQ ID NO: 347483 - DNA, 30 bp, Artificial Sequence
  Synthetic oligonucleotide
ttctggattgcgttttgcaggaaggtctaa

SEQ ID NO: 347484 - DNA, 30 bp, Artificial Sequence
  Synthetic oligonucleotide
tattcggttagaactcgggcatcggtctaa

SEQ ID NO: 347485 - DNA, 30 bp, Artificial Sequence
  Synthetic oligonucleotide
aaattgtggataagactacctcgggtctaa

SEQ ID NO: 347486 - DNA, 30 bp, Artificial Sequence
  Synthetic oligonucleotide
gtagccgtttaatcacagtttggggtctaa

SEQ ID NO: 347487 - DNA, 30 bp, Artificial Sequence
  Synthetic oligonucleotide
agtagctaagcggacctatagaatgtctaa

SEQ ID NO: 347488 - DNA, 30 bp, Artificial Sequence
  Synthetic oligonucleotide
atccacccctttaacagaattcgtgtctaa

SEQ ID NO: 347489 - DNA, 30 bp, Artificial Sequence
  Synthetic oligonucleotide
caggctcgcgaatgtatgagcttattctaa

SEQ ID NO: 347490 - DNA, 30 bp, Artificial Sequence
  Synthetic oligonucleotide
tcgccgcaatacctatcaaataccttctaa

SEQ ID NO: 347491 - DNA, 30 bp, Artificial Sequence
  Synthetic oligonucleotide
catgcaacaatagtcgattgcatgttctaa

SEQ ID NO: 347492 - DNA, 30 bp, Artificial Sequence
  Synthetic oligonucleotide
tttactttaatgttaggaacctctttctaa

SEQ ID NO: 347493 - DNA, 30 bp, Artificial Sequence
  Synthetic oligonucleotide
ggaggcggccggaatggtgtagttttctaa

SEQ ID NO: 347494 - DNA, 30 bp, Artificial Sequence
  Synthetic oligonucleotide
caaagcgaagcttggtacacggcaaagtaa

SEQ ID NO: 347495 - DNA, 30 bp, Artificial Sequence
  Synthetic oligonucleotide
accaaatagctgcttggttacatgaagtaa

SEQ ID NO: 347496 - DNA, 30 bp, Artificial Sequence
  Synthetic oligonucleotide
ctattaagtctaaagtatggcggtaagtaa

SEQ ID NO: 347497 - DNA, 30 bp, Artificial Sequence
  Synthetic oligonucleotide
aactcctgtgaccccgtgcctccacagtaa

SEQ ID NO: 347498 - DNA, 30 bp, Artificial Sequence
  Synthetic oligonucleotide
agcaataggtaatgactatgtctacagtaa

SEQ ID NO: 347499 - DNA, 30 bp, Artificial Sequence
  Synthetic oligonucleotide
caagtattgcagtacgtgtgcgtccagtaa

SEQ ID NO: 347500 - DNA, 30 bp, Artificial Sequence
  Synthetic oligonucleotide
ataaaagacgtgtatggccgaccgcagtaa

SEQ ID NO: 347501 - DNA, 30 bp, Artificial Sequence
  Synthetic oligonucleotide
gcaattcaaatggaaagcatgtcgcagtaa

SEQ ID NO: 347502 - DNA, 30 bp, Artificial Sequence
  Synthetic oligonucleotide
gggaatcatattgacaacgctcggcagtaa

SEQ ID NO: 347503 - DNA, 30 bp, Artificial Sequence
  Synthetic oligonucleotide
ggggcgtctctgctcaatcatggtcagtaa

SEQ ID NO: 347504 - DNA, 30 bp, Artificial Sequence
  Synthetic oligonucleotide
atttgataggttcatggtggcattcagtaa

SEQ ID NO: 347505 - DNA, 30 bp, Artificial Sequence
  Synthetic oligonucleotide
atgtttatccgttatcctgggcaagagtaa

SEQ ID NO: 347506 - DNA, 30 bp, Artificial Sequence
  Synthetic oligonucleotide
cgcaacagattacgaaaaggcgaggagtaa

SEQ ID NO: 347507 - DNA, 30 bp, Artificial Sequence
  Synthetic oligonucleotide
taggtactattcacgacagcagcggagtaa

SEQ ID NO: 347508 - DNA, 30 bp, Artificial Sequence
  Synthetic oligonucleotide
actacattctccttggttggttcggagtaa

SEQ ID NO: 347509 - DNA, 30 bp, Artificial Sequence
  Synthetic oligonucleotide
ttacaagcgtctgtcgacggataatagtaa

SEQ ID NO: 347510 - DNA, 30 bp, Artificial Sequence
  Synthetic oligonucleotide
aggacatccggttcaagatcactatagtaa

SEQ ID NO: 347511 - DNA, 30 bp, Artificial Sequence
  Synthetic oligonucleotide
cacgcagtctatgctacggtccactagtaa

SEQ ID NO: 347512 - DNA, 30 bp, Artificial Sequence
  Synthetic oligonucleotide
cgttgagttttgcggactagacgctagtaa

SEQ ID NO: 347513 - DNA, 30 bp, Artificial Sequence
  Synthetic oligonucleotide
cagccagccatgtacgcgtgaacgtagtaa

SEQ ID NO: 347514 - DNA, 30 bp, Artificial Sequence
  Synthetic oligonucleotide
atttcgatggtgcacgaccagcattagtaa

SEQ ID NO: 347515 - DNA, 30 bp, Artificial Sequence
  Synthetic oligonucleotide
tccagtactggaatagcgattcaaacgtaa

SEQ ID NO: 347516 - DNA, 30 bp, Artificial Sequence
  Synthetic oligonucleotide
agaccgggcgtataattcagctgaacgtaa

SEQ ID NO: 347517 - DNA, 30 bp, Artificial Sequence
  Synthetic oligonucleotide
gggggacatcggaatgatagggtaacgtaa

SEQ ID NO: 347518 - DNA, 30 bp, Artificial Sequence
  Synthetic oligonucleotide
aatagcgggagtcaatgcaaactcacgtaa

SEQ ID NO: 347519 - DNA, 30 bp, Artificial Sequence
  Synthetic oligonucleotide
atcatgtgagatccgggacatttgacgtaa

SEQ ID NO: 347520 - DNA, 30 bp, Artificial Sequence
  Synthetic oligonucleotide
cagatccgacatgattgcaagggtacgtaa

SEQ ID NO: 347521 - DNA, 30 bp, Artificial Sequence
  Synthetic oligonucleotide
tgcttgggaggtgtcggtacgtttacgtaa

SEQ ID NO: 347522 - DNA, 29 bp, Artificial Sequence
  Synthetic oligonucleotide
tagggagatgtgtattaacagacccgtaa

SEQ ID NO: 347523 - DNA, 30 bp, Artificial Sequence
  Synthetic oligonucleotide
gccactcttatgtaatccgtaccgccgtaa

SEQ ID NO: 347524 - DNA, 30 bp, Artificial Sequence
  Synthetic oligonucleotide
ttcgagtaaaatcttatggaagcgccgtaa

SEQ ID NO: 347525 - DNA, 30 bp, Artificial Sequence
  Synthetic oligonucleotide
aagtattcacacggcggtgttgctccgtaa

SEQ ID NO: 347526 - DNA, 30 bp, Artificial Sequence
  Synthetic oligonucleotide
taaccccatgaagaaatttctcaagcgtaa

SEQ ID NO: 347527 - DNA, 30 bp, Artificial Sequence
  Synthetic oligonucleotide
attgcttcaattcggtgtacaacagcgtaa

SEQ ID NO: 347528 - DNA, 30 bp, Artificial Sequence
  Synthetic oligonucleotide
tacatgcagagagaaacgcagctcgcgtaa

SEQ ID NO: 347529 - DNA, 30 bp, Artificial Sequence
  Synthetic oligonucleotide
ataaagcgaattggcccacgtggggcgtaa

SEQ ID NO: 347530 - DNA, 30 bp, Artificial Sequence
  Synthetic oligonucleotide
agtcctgttttactgactatttcatcgtaa

SEQ ID NO: 347531 - DNA, 30 bp, Artificial Sequence
  Synthetic oligonucleotide
gatatgcgacgtcggctgttagtatcgtaa

SEQ ID NO: 347532 - DNA, 30 bp, Artificial Sequence
  Synthetic oligonucleotide
taggatgctattcgttcttctggctcgtaa

SEQ ID NO: 347533 - DNA, 30 bp, Artificial Sequence
  Synthetic oligonucleotide
ctaaaccgtcgtccattgggagcgtcgtaa

SEQ ID NO: 347534 - DNA, 30 bp, Artificial Sequence
  Synthetic oligonucleotide
tatacattgaggatttactccaggtcgtaa

SEQ ID NO: 347535 - DNA, 30 bp, Artificial Sequence
  Synthetic oligonucleotide
acgtttgcgagttgaaacttgaggtcgtaa

SEQ ID NO: 347536 - DNA, 30 bp, Artificial Sequence
  Synthetic oligonucleotide
ttaattaaagcaggctagtaggattcgtaa

SEQ ID NO: 347537 - DNA, 30 bp, Artificial Sequence
  Synthetic oligonucleotide
gagaggtagggtcgaaataccacttcgtaa

SEQ ID NO: 347538 - DNA, 30 bp, Artificial Sequence
  Synthetic oligonucleotide
gaatacaaggccatggtaagactttcgtaa

SEQ ID NO: 347539 - DNA, 30 bp, Artificial Sequence
  Synthetic oligonucleotide
tacaccactactagtggatacacaaggtaa

SEQ ID NO: 347540 - DNA, 31 bp, Artificial Sequence
  Synthetic oligonucleotide
atattaaaccctagtgaaggttacaaggtaa

SEQ ID NO: 347541 - DNA, 30 bp, Artificial Sequence
  Synthetic oligonucleotide
gcatagcattattagaatcacgcaaggtaa

SEQ ID NO: 347542 - DNA, 30 bp, Artificial Sequence
  Synthetic oligonucleotide
ctgcgagcgcaactaagcaccggaaggtaa

SEQ ID NO: 347543 - DNA, 30 bp, Artificial Sequence
  Synthetic oligonucleotide
gctaaggttagacatttgaagaacaggtaa

SEQ ID NO: 347544 - DNA, 30 bp, Artificial Sequence
  Synthetic oligonucleotide
tgcattagatgagcgaagcatctcaggtaa

SEQ ID NO: 347545 - DNA, 30 bp, Artificial Sequence
  Synthetic oligonucleotide
tcttaggctatttatgccatcaggaggtaa

SEQ ID NO: 347546 - DNA, 30 bp, Artificial Sequence
  Synthetic oligonucleotide
tccaagtgatgcactaatcttaaacggtaa

SEQ ID NO: 347547 - DNA, 30 bp, Artificial Sequence
  Synthetic oligonucleotide
gaaaattgattgctccatgtgatacggtaa

SEQ ID NO: 347548 - DNA, 30 bp, Artificial Sequence
  Synthetic oligonucleotide
ttactgagcagcgcttcgtcgccgcggtaa

SEQ ID NO: 347549 - DNA, 30 bp, Artificial Sequence
  Synthetic oligonucleotide
ccacaccaggcgcgttcacggcggcggtaa

SEQ ID NO: 347550 - DNA, 30 bp, Artificial Sequence
  Synthetic oligonucleotide
ttttgcgggccggtcataatgatgcggtaa

SEQ ID NO: 347551 - DNA, 30 bp, Artificial Sequence
  Synthetic oligonucleotide
ttcggaaagaataggggctgtttgcggtaa

SEQ ID NO: 347552 - DNA, 30 bp, Artificial Sequence
  Synthetic oligonucleotide
gggttgtccggacagagggtagttcggtaa

SEQ ID NO: 347553 - DNA, 30 bp, Artificial Sequence
  Synthetic oligonucleotide
ccaaggcctggcgatcggtccccagggtaa

SEQ ID NO: 347554 - DNA, 30 bp, Artificial Sequence
  Synthetic oligonucleotide
ccgcattgcaaggcagggtcggcagggtaa

SEQ ID NO: 347555 - DNA, 30 bp, Artificial Sequence
  Synthetic oligonucleotide
ggaactaacaatcacttttaaggagggtaa

SEQ ID NO: 347556 - DNA, 30 bp, Artificial Sequence
  Synthetic oligonucleotide
tccgaactggaggggtcttggaacgggtaa

SEQ ID NO: 347557 - DNA, 30 bp, Artificial Sequence
  Synthetic oligonucleotide
agtggtaatacgttctcttggaccgggtaa

SEQ ID NO: 347558 - DNA, 30 bp, Artificial Sequence
  Synthetic oligonucleotide
gatcccattagaacgagtagtgccgggtaa

SEQ ID NO: 347559 - DNA, 30 bp, Artificial Sequence
  Synthetic oligonucleotide
aaaaaaccggtaaagcagggtagcgggtaa

SEQ ID NO: 347560 - DNA, 30 bp, Artificial Sequence
  Synthetic oligonucleotide
gtactatataacaacgggacccgcgggtaa

SEQ ID NO: 347561 - DNA, 30 bp, Artificial Sequence
  Synthetic oligonucleotide
agctctttatagtgggcatagggcgggtaa

SEQ ID NO: 347562 - DNA, 30 bp, Artificial Sequence
  Synthetic oligonucleotide
gggtgccaatttaaatagtagggcgggtaa

SEQ ID NO: 347563 - DNA, 30 bp, Artificial Sequence
  Synthetic oligonucleotide
atgtaacgttaggtacacataacggggtaa

SEQ ID NO: 347564 - DNA, 30 bp, Artificial Sequence
  Synthetic oligonucleotide
gcagcccatgtaattttaagcacggggtaa

SEQ ID NO: 347565 - DNA, 30 bp, Artificial Sequence
  Synthetic oligonucleotide
gagtctggtataggactttgggcggggtaa

SEQ ID NO: 347566 - DNA, 30 bp, Artificial Sequence
  Synthetic oligonucleotide
cccgataaatgcagtaaattaggggggtaa

SEQ ID NO: 347567 - DNA, 30 bp, Artificial Sequence
  Synthetic oligonucleotide
tgcaataaggggggcacgaaccgtgggtaa

SEQ ID NO: 347568 - DNA, 30 bp, Artificial Sequence
  Synthetic oligonucleotide
gggacaagttgcgcggcacgcttatggtaa

SEQ ID NO: 347569 - DNA, 30 bp, Artificial Sequence
  Synthetic oligonucleotide
actcatcagtcgaaatcagattgctggtaa

SEQ ID NO: 347570 - DNA, 30 bp, Artificial Sequence
  Synthetic oligonucleotide
tattgcatagttctacgtcgggggtggtaa

SEQ ID NO: 347571 - DNA, 30 bp, Artificial Sequence
  Synthetic oligonucleotide
acccggaagttgtctataacacattggtaa

SEQ ID NO: 347572 - DNA, 30 bp, Artificial Sequence
  Synthetic oligonucleotide
gcctttggccgctcttatcgacaaatgtaa

SEQ ID NO: 347573 - DNA, 30 bp, Artificial Sequence
  Synthetic oligonucleotide
acagataccttgcgtgaagtctaaatgtaa

SEQ ID NO: 347574 - DNA, 30 bp, Artificial Sequence
  Synthetic oligonucleotide
catctcttagctcttctgtggccaatgtaa

SEQ ID NO: 347575 - DNA, 30 bp, Artificial Sequence
  Synthetic oligonucleotide
tttactcgtaggatcttggacagcatgtaa

SEQ ID NO: 347576 - DNA, 30 bp, Artificial Sequence
  Synthetic oligonucleotide
gtgggtgtttgtgcatgtgagatcatgtaa

SEQ ID NO: 347577 - DNA, 30 bp, Artificial Sequence
  Synthetic oligonucleotide
gtctgctctccttcacggaccgggatgtaa

SEQ ID NO: 347578 - DNA, 30 bp, Artificial Sequence
  Synthetic oligonucleotide
gtgagcttaggacactttcgacgtatgtaa

SEQ ID NO: 347579 - DNA, 30 bp, Artificial Sequence
  Synthetic oligonucleotide
tacttgcgggagaaggagcatggtatgtaa

SEQ ID NO: 347580 - DNA, 30 bp, Artificial Sequence
  Synthetic oligonucleotide
gccacgccgcctaaactgtagtgtatgtaa

SEQ ID NO: 347581 - DNA, 30 bp, Artificial Sequence
  Synthetic oligonucleotide
cggggatgggttgcatagtttattatgtaa

SEQ ID NO: 347582 - DNA, 30 bp, Artificial Sequence
  Synthetic oligonucleotide
atcccgtgatgggattgcgtgcaactgtaa

SEQ ID NO: 347583 - DNA, 30 bp, Artificial Sequence
  Synthetic oligonucleotide
gacacgctttaaccagggagtagcctgtaa

SEQ ID NO: 347584 - DNA, 30 bp, Artificial Sequence
  Synthetic oligonucleotide
gctagataaacgagaatctaaacgctgtaa

SEQ ID NO: 347585 - DNA, 30 bp, Artificial Sequence
  Synthetic oligonucleotide
tggaatgggtggctctcgtccgggctgtaa

SEQ ID NO: 347586 - DNA, 30 bp, Artificial Sequence
  Synthetic oligonucleotide
cacagccattcacagtccaagaaagtgtaa

SEQ ID NO: 347587 - DNA, 30 bp, Artificial Sequence
  Synthetic oligonucleotide
tgtaatgcggctcggtatttcgaagtgtaa

SEQ ID NO: 347588 - DNA, 30 bp, Artificial Sequence
  Synthetic oligonucleotide
ggacccgggcgttgaacacatagagtgtaa

SEQ ID NO: 347589 - DNA, 29 bp, Artificial Sequence
  Synthetic oligonucleotide
ttcctaatactgggatacgcatagtgtaa

SEQ ID NO: 347590 - DNA, 30 bp, Artificial Sequence
  Synthetic oligonucleotide
gctattttaggggaatcgcaccgcgtgtaa

SEQ ID NO: 347591 - DNA, 30 bp, Artificial Sequence
  Synthetic oligonucleotide
gtattccggtcacactagactggcgtgtaa

SEQ ID NO: 347592 - DNA, 30 bp, Artificial Sequence
  Synthetic oligonucleotide
agtacgcaacagcattataggctcgtgtaa

SEQ ID NO: 347593 - DNA, 30 bp, Artificial Sequence
  Synthetic oligonucleotide
tgcaagccagattcagaaggtttcgtgtaa

SEQ ID NO: 347594 - DNA, 30 bp, Artificial Sequence
  Synthetic oligonucleotide
acctgatatattacttatagttcggtgtaa

SEQ ID NO: 347595 - DNA, 30 bp, Artificial Sequence
  Synthetic oligonucleotide
ctgtacggatgagcgctcgggctggtgtaa

SEQ ID NO: 347596 - DNA, 30 bp, Artificial Sequence
  Synthetic oligonucleotide
atagatcatggatggtaggttagtgtgtaa

SEQ ID NO: 347597 - DNA, 30 bp, Artificial Sequence
  Synthetic oligonucleotide
catagtctttgccgccaggctacattgtaa

SEQ ID NO: 347598 - DNA, 30 bp, Artificial Sequence
  Synthetic oligonucleotide
tcaagcgggtatcacttcacccgattgtaa

SEQ ID NO: 347599 - DNA, 30 bp, Artificial Sequence
  Synthetic oligonucleotide
ggcggccattaaagctcggttcgattgtaa

SEQ ID NO: 347600 - DNA, 30 bp, Artificial Sequence
  Synthetic oligonucleotide
gatcccactgcctctgcggccatattgtaa

SEQ ID NO: 347601 - DNA, 30 bp, Artificial Sequence
  Synthetic oligonucleotide
atgagtgcatacaattgtcaactattgtaa

SEQ ID NO: 347602 - DNA, 30 bp, Artificial Sequence
  Synthetic oligonucleotide
ccctataccgcgtgaggatagtcgttgtaa

SEQ ID NO: 347603 - DNA, 30 bp, Artificial Sequence
  Synthetic oligonucleotide
cgtatcttgatgcagtaatcatatttgtaa

SEQ ID NO: 347604 - DNA, 30 bp, Artificial Sequence
  Synthetic oligonucleotide
ttctacgccgacttaacatatggtttgtaa

SEQ ID NO: 347605 - DNA, 30 bp, Artificial Sequence
  Synthetic oligonucleotide
ctatgaaagcatatatcggtaattttgtaa

SEQ ID NO: 347606 - DNA, 30 bp, Artificial Sequence
  Synthetic oligonucleotide
ctaatgtcagcgttagatttgcttttgtaa

SEQ ID NO: 347607 - DNA, 30 bp, Artificial Sequence
  Synthetic oligonucleotide
ctatcaggacaaagacggtcttttttgtaa

SEQ ID NO: 347608 - DNA, 30 bp, Artificial Sequence
  Synthetic oligonucleotide
tggaattccaccggcagtacggaaaattaa

SEQ ID NO: 347609 - DNA, 30 bp, Artificial Sequence
  Synthetic oligonucleotide
ggaatacacaacagcggatgcagaaattaa

SEQ ID NO: 347610 - DNA, 30 bp, Artificial Sequence
  Synthetic oligonucleotide
cttaactcaggtggacgttagagcaattaa

SEQ ID NO: 347611 - DNA, 30 bp, Artificial Sequence
  Synthetic oligonucleotide
gataccccgcctcgtctcgctctcaattaa

SEQ ID NO: 347612 - DNA, 30 bp, Artificial Sequence
  Synthetic oligonucleotide
gcctcggctatcgatttgtatactaattaa

SEQ ID NO: 347613 - DNA, 30 bp, Artificial Sequence
  Synthetic oligonucleotide
gcgttagccctatttctgggtactaattaa

SEQ ID NO: 347614 - DNA, 30 bp, Artificial Sequence
  Synthetic oligonucleotide
atgtcaggctccatgagcctttgtaattaa

SEQ ID NO: 347615 - DNA, 30 bp, Artificial Sequence
  Synthetic oligonucleotide
gaccagcgctactaaatgacaccacattaa

SEQ ID NO: 347616 - DNA, 30 bp, Artificial Sequence
  Synthetic oligonucleotide
tgccctaatgctggggcacatgcacattaa

SEQ ID NO: 347617 - DNA, 30 bp, Artificial Sequence
  Synthetic oligonucleotide
gcgatgtatatttagtccaaaggacattaa

SEQ ID NO: 347618 - DNA, 30 bp, Artificial Sequence
  Synthetic oligonucleotide
gccggcacgctctggaacgggtaccattaa

SEQ ID NO: 347619 - DNA, 30 bp, Artificial Sequence
  Synthetic oligonucleotide
tacatgaaatctgtaatactccgccattaa

SEQ ID NO: 347620 - DNA, 30 bp, Artificial Sequence
  Synthetic oligonucleotide
gaataggtagaaatcaaggccggccattaa

SEQ ID NO: 347621 - DNA, 30 bp, Artificial Sequence
  Synthetic oligonucleotide
taccactagaatctgataacgatccattaa

SEQ ID NO: 347622 - DNA, 30 bp, Artificial Sequence
  Synthetic oligonucleotide
caattggtccgcgaggtaggagcgcattaa

SEQ ID NO: 347623 - DNA, 30 bp, Artificial Sequence
  Synthetic oligonucleotide
acggttatatagacgcaagtctcgcattaa

SEQ ID NO: 347624 - DNA, 30 bp, Artificial Sequence
  Synthetic oligonucleotide
gtggctcttaacattacaggacggcattaa

SEQ ID NO: 347625 - DNA, 30 bp, Artificial Sequence
  Synthetic oligonucleotide
tcctagatagacatctgcactatgcattaa

SEQ ID NO: 347626 - DNA, 30 bp, Artificial Sequence
  Synthetic oligonucleotide
ccacgcgagataatttctaacactcattaa

SEQ ID NO: 347627 - DNA, 30 bp, Artificial Sequence
  Synthetic oligonucleotide
aaagggctcgcaccacacacataagattaa

SEQ ID NO: 347628 - DNA, 30 bp, Artificial Sequence
  Synthetic oligonucleotide
atcactgggttgcttaccaagccagattaa

SEQ ID NO: 347629 - DNA, 30 bp, Artificial Sequence
  Synthetic oligonucleotide
aatagaggtgcttataaatctagagattaa

SEQ ID NO: 347630 - DNA, 30 bp, Artificial Sequence
  Synthetic oligonucleotide
atgctagagatatcgtacttttgcgattaa

SEQ ID NO: 347631 - DNA, 30 bp, Artificial Sequence
  Synthetic oligonucleotide
tgcctcgagttttagtcaagtgtcgattaa

SEQ ID NO: 347632 - DNA, 30 bp, Artificial Sequence
  Synthetic oligonucleotide
tgggcgttcttgcctcgtatcgcggattaa

SEQ ID NO: 347633 - DNA, 30 bp, Artificial Sequence
  Synthetic oligonucleotide
ggtggtttaaaaagagcttctgcggattaa

SEQ ID NO: 347634 - DNA, 30 bp, Artificial Sequence
  Synthetic oligonucleotide
gattccgtggttgcggctacttatgattaa

SEQ ID NO: 347635 - DNA, 30 bp, Artificial Sequence
  Synthetic oligonucleotide
tactttaaaatacggttaagttatgattaa

SEQ ID NO: 347636 - DNA, 30 bp, Artificial Sequence
  Synthetic oligonucleotide
gcggcacaaaactagcaatcaagctattaa

SEQ ID NO: 347637 - DNA, 30 bp, Artificial Sequence
  Synthetic oligonucleotide
ttctgcgtaatcatagcaacgagctattaa

SEQ ID NO: 347638 - DNA, 30 bp, Artificial Sequence
  Synthetic oligonucleotide
tctcattcgggcggtttatttaagtattaa

SEQ ID NO: 347639 - DNA, 30 bp, Artificial Sequence
  Synthetic oligonucleotide
ggcgaaggccgcccgttactcaggtattaa

SEQ ID NO: 347640 - DNA, 30 bp, Artificial Sequence
  Synthetic oligonucleotide
aagccagcgtagaatgctttttggtattaa

SEQ ID NO: 347641 - DNA, 30 bp, Artificial Sequence
  Synthetic oligonucleotide
ggttatacctccgattctacactgtattaa

SEQ ID NO: 347642 - DNA, 30 bp, Artificial Sequence
  Synthetic oligonucleotide
aaatcaggaaattgttacgcgatttattaa

SEQ ID NO: 347643 - DNA, 30 bp, Artificial Sequence
  Synthetic oligonucleotide
taacccattgagctggtaagagacacttaa

SEQ ID NO: 347644 - DNA, 30 bp, Artificial Sequence
  Synthetic oligonucleotide
aagatatctggaataccggtctacacttaa

SEQ ID NO: 347645 - DNA, 30 bp, Artificial Sequence
  Synthetic oligonucleotide
cgtgtgtacatagctctagtcgtcacttaa

SEQ ID NO: 347646 - DNA, 30 bp, Artificial Sequence
  Synthetic oligonucleotide
gcatagtattggttaatcgtccagacttaa

SEQ ID NO: 347647 - DNA, 30 bp, Artificial Sequence
  Synthetic oligonucleotide
ccagcctcaaacacgtaactggtgacttaa

SEQ ID NO: 347648 - DNA, 30 bp, Artificial Sequence
  Synthetic oligonucleotide
tgacagtctagggccctaatgttgacttaa

SEQ ID NO: 347649 - DNA, 30 bp, Artificial Sequence
  Synthetic oligonucleotide
acggaaatatttcctccgtgcagtacttaa

SEQ ID NO: 347650 - DNA, 30 bp, Artificial Sequence
  Synthetic oligonucleotide
agacagattcggtatgcgagaggtacttaa

SEQ ID NO: 347651 - DNA, 30 bp, Artificial Sequence
  Synthetic oligonucleotide
accaaatgcttaccacctgggggtacttaa

SEQ ID NO: 347652 - DNA, 30 bp, Artificial Sequence
  Synthetic oligonucleotide
cacgacgcgccgcagaaagcacgaccttaa

SEQ ID NO: 347653 - DNA, 30 bp, Artificial Sequence
  Synthetic oligonucleotide
cctgaagtattgcttcgcaggcgaccttaa

SEQ ID NO: 347654 - DNA, 30 bp, Artificial Sequence
  Synthetic oligonucleotide
gacctatttacgtgccaacagttaccttaa

SEQ ID NO: 347655 - DNA, 30 bp, Artificial Sequence
  Synthetic oligonucleotide
atgcggttgtgaaaaaccgtaagcccttaa

SEQ ID NO: 347656 - DNA, 30 bp, Artificial Sequence
  Synthetic oligonucleotide
cataacactggctttatagcggagccttaa

SEQ ID NO: 347657 - DNA, 30 bp, Artificial Sequence
  Synthetic oligonucleotide
aaacaaactttttgggactgggcagcttaa

SEQ ID NO: 347658 - DNA, 30 bp, Artificial Sequence
  Synthetic oligonucleotide
gaaggagtgtgagaagcccgttaggcttaa

SEQ ID NO: 347659 - DNA, 30 bp, Artificial Sequence
  Synthetic oligonucleotide
tgacttctccatctcaatcatgcggcttaa

SEQ ID NO: 347660 - DNA, 30 bp, Artificial Sequence
  Synthetic oligonucleotide
tatccggagcatacttctaagtatgcttaa

SEQ ID NO: 347661 - DNA, 30 bp, Artificial Sequence
  Synthetic oligonucleotide
gggcacgacgtgtaatgggtcgctgcttaa

SEQ ID NO: 347662 - DNA, 30 bp, Artificial Sequence
  Synthetic oligonucleotide
agtcgtaactataccggttgtcaatcttaa

SEQ ID NO: 347663 - DNA, 30 bp, Artificial Sequence
  Synthetic oligonucleotide
gcagaatcaacgttgtatgacgtatcttaa

SEQ ID NO: 347664 - DNA, 30 bp, Artificial Sequence
  Synthetic oligonucleotide
aaatgtacggtacgagtatcgccctcttaa

SEQ ID NO: 347665 - DNA, 30 bp, Artificial Sequence
  Synthetic oligonucleotide
ggtcgggaataagtgctaatcaagtcttaa

SEQ ID NO: 347666 - DNA, 30 bp, Artificial Sequence
  Synthetic oligonucleotide
tactggagtgagttattcgtccagtcttaa

SEQ ID NO: 347667 - DNA, 30 bp, Artificial Sequence
  Synthetic oligonucleotide
gcagatatgggagacatcgcaccgtcttaa

SEQ ID NO: 347668 - DNA, 30 bp, Artificial Sequence
  Synthetic oligonucleotide
aagggtcgttctaaaattgcttggtcttaa

SEQ ID NO: 347669 - DNA, 30 bp, Artificial Sequence
  Synthetic oligonucleotide
taataggatcttgaaagaagtctgtcttaa

SEQ ID NO: 347670 - DNA, 30 bp, Artificial Sequence
  Synthetic oligonucleotide
gcattgtcgcacgggcatgacgattcttaa

SEQ ID NO: 347671 - DNA, 30 bp, Artificial Sequence
  Synthetic oligonucleotide
cgggtcagcttgcatacaagacgttcttaa

SEQ ID NO: 347672 - DNA, 30 bp, Artificial Sequence
  Synthetic oligonucleotide
aggggctcattcaaattccaatcaagttaa

SEQ ID NO: 347673 - DNA, 30 bp, Artificial Sequence
  Synthetic oligonucleotide
gagagcgctttatcagggagagacagttaa

SEQ ID NO: 347674 - DNA, 30 bp, Artificial Sequence
  Synthetic oligonucleotide
tggttctcgtccctcgtatgagtcagttaa

SEQ ID NO: 347675 - DNA, 30 bp, Artificial Sequence
  Synthetic oligonucleotide
agtatttcatcatctaccagagagagttaa

SEQ ID NO: 347676 - DNA, 30 bp, Artificial Sequence
  Synthetic oligonucleotide
gcaagtcgttattccatactgacgagttaa

SEQ ID NO: 347677 - DNA, 30 bp, Artificial Sequence
  Synthetic oligonucleotide
ctgatcgctggtatgatcccctggagttaa

SEQ ID NO: 347678 - DNA, 30 bp, Artificial Sequence
  Synthetic oligonucleotide
tagtcgtcgaggtttatcgttctgagttaa

SEQ ID NO: 347679 - DNA, 30 bp, Artificial Sequence
  Synthetic oligonucleotide
aatacgtcacgatcagttcctaatagttaa

SEQ ID NO: 347680 - DNA, 30 bp, Artificial Sequence
  Synthetic oligonucleotide
ctctctagacacatcttcattcctagttaa

SEQ ID NO: 347681 - DNA, 30 bp, Artificial Sequence
  Synthetic oligonucleotide
gtaatggacattatacgacgcattagttaa

SEQ ID NO: 347682 - DNA, 30 bp, Artificial Sequence
  Synthetic oligonucleotide
ctcgactgatcgcgtgctgagattagttaa

SEQ ID NO: 347683 - DNA, 30 bp, Artificial Sequence
  Synthetic oligonucleotide
gcccgcacgttgtatctgcttccacgttaa

SEQ ID NO: 347684 - DNA, 30 bp, Artificial Sequence
  Synthetic oligonucleotide
agtagatccgtgaaacacatatcccgttaa

SEQ ID NO: 347685 - DNA, 30 bp, Artificial Sequence
  Synthetic oligonucleotide
tctcgaaaacaatctgtccgctcccgttaa

SEQ ID NO: 347686 - DNA, 30 bp, Artificial Sequence
  Synthetic oligonucleotide
ctctcccttcaatagcataacgagcgttaa

SEQ ID NO: 347687 - DNA, 30 bp, Artificial Sequence
  Synthetic oligonucleotide
ctcgttcgggtcaatgtcttagggcgttaa

SEQ ID NO: 347688 - DNA, 30 bp, Artificial Sequence
  Synthetic oligonucleotide
gcagtagccatatggcgctaaatgcgttaa

SEQ ID NO: 347689 - DNA, 30 bp, Artificial Sequence
  Synthetic oligonucleotide
ggttcgcgccccttagagaatcaaggttaa

SEQ ID NO: 347690 - DNA, 30 bp, Artificial Sequence
  Synthetic oligonucleotide
tgcctatatcattggattaggggaggttaa

SEQ ID NO: 347691 - DNA, 30 bp, Artificial Sequence
  Synthetic oligonucleotide
gagttcattgaaggatgcccgtgaggttaa

SEQ ID NO: 347692 - DNA, 30 bp, Artificial Sequence
  Synthetic oligonucleotide
aactggcggactgcatggtcattaggttaa

SEQ ID NO: 347693 - DNA, 30 bp, Artificial Sequence
  Synthetic oligonucleotide
aacaacagcaattcaaaagcaagcggttaa

SEQ ID NO: 347694 - DNA, 30 bp, Artificial Sequence
  Synthetic oligonucleotide
gtaagtaatatgcccgggctcgtcggttaa

SEQ ID NO: 347695 - DNA, 30 bp, Artificial Sequence
  Synthetic oligonucleotide
agtccagtacataaaacgcgtttcggttaa

SEQ ID NO: 347696 - DNA, 30 bp, Artificial Sequence
  Synthetic oligonucleotide
tgtcggtcacgaccgctacaagagggttaa

SEQ ID NO: 347697 - DNA, 30 bp, Artificial Sequence
  Synthetic oligonucleotide
gtcaaagcgttgtagatacactagggttaa

SEQ ID NO: 347698 - DNA, 30 bp, Artificial Sequence
  Synthetic oligonucleotide
gatgattcagtctattgagctcggggttaa

SEQ ID NO: 347699 - DNA, 30 bp, Artificial Sequence
  Synthetic oligonucleotide
cagatggactagaggtccaccatgggttaa

SEQ ID NO: 347700 - DNA, 30 bp, Artificial Sequence
  Synthetic oligonucleotide
cggactgaagttaccaatgctctgggttaa

SEQ ID NO: 347701 - DNA, 30 bp, Artificial Sequence
  Synthetic oligonucleotide
tccggtacagagataatcaatgtgggttaa

SEQ ID NO: 347702 - DNA, 30 bp, Artificial Sequence
  Synthetic oligonucleotide
accaaatcaatgtaactggataatggttaa

SEQ ID NO: 347703 - DNA, 30 bp, Artificial Sequence
  Synthetic oligonucleotide
ccgccctgaggagatttggatactggttaa

SEQ ID NO: 347704 - DNA, 30 bp, Artificial Sequence
  Synthetic oligonucleotide
tcaacattatggcggctatgtatgtgttaa

SEQ ID NO: 347705 - DNA, 30 bp, Artificial Sequence
  Synthetic oligonucleotide
ttgtaaatggtacgacacacgctgtgttaa

SEQ ID NO: 347706 - DNA, 30 bp, Artificial Sequence
  Synthetic oligonucleotide
cgcctaaagaggtcggacactgtgtgttaa

SEQ ID NO: 347707 - DNA, 30 bp, Artificial Sequence
  Synthetic oligonucleotide
tgatcttcagaagggcacaggttgtgttaa

SEQ ID NO: 347708 - DNA, 31 bp, Artificial Sequence
  Synthetic oligonucleotide
acctcgcaccaagagtcgtgcgtcttgttaa

SEQ ID NO: 347709 - DNA, 30 bp, Artificial Sequence
  Synthetic oligonucleotide
tataagagagtcacatctgcccaaatttaa

SEQ ID NO: 347710 - DNA, 30 bp, Artificial Sequence
  Synthetic oligonucleotide
aaatgactactacaacttacataaatttaa

SEQ ID NO: 347711 - DNA, 30 bp, Artificial Sequence
  Synthetic oligonucleotide
caatgatcatagttggatacagtaatttaa

SEQ ID NO: 347712 - DNA, 30 bp, Artificial Sequence
  Synthetic oligonucleotide
gttccacgtataaagcattgccacatttaa

SEQ ID NO: 347713 - DNA, 30 bp, Artificial Sequence
  Synthetic oligonucleotide
tatgtaccgacgcggaaacaacgcatttaa

SEQ ID NO: 347714 - DNA, 30 bp, Artificial Sequence
  Synthetic oligonucleotide
gccagcgtactgtactttgtcggcatttaa

SEQ ID NO: 347715 - DNA, 30 bp, Artificial Sequence
  Synthetic oligonucleotide
aactcattgataggaatgtcttagatttaa

SEQ ID NO: 347716 - DNA, 30 bp, Artificial Sequence
  Synthetic oligonucleotide
gataattaaaacaaaagcaactggatttaa

SEQ ID NO: 347717 - DNA, 30 bp, Artificial Sequence
  Synthetic oligonucleotide
ctgggctcaggccagggaacgcatatttaa

SEQ ID NO: 347718 - DNA, 30 bp, Artificial Sequence
  Synthetic oligonucleotide
aacgggggcttatagacggccgctatttaa

SEQ ID NO: 347719 - DNA, 30 bp, Artificial Sequence
  Synthetic oligonucleotide
gtcctttcgtatgcttggttttgcctttaa

SEQ ID NO: 347720 - DNA, 30 bp, Artificial Sequence
  Synthetic oligonucleotide
atggggaggggttaccagctgcggctttaa

SEQ ID NO: 347721 - DNA, 30 bp, Artificial Sequence
  Synthetic oligonucleotide
agagcgtaataagactttctgcggctttaa

SEQ ID NO: 347722 - DNA, 30 bp, Artificial Sequence
  Synthetic oligonucleotide
tacttacctttatcgggaaaccatctttaa

SEQ ID NO: 347723 - DNA, 30 bp, Artificial Sequence
  Synthetic oligonucleotide
ctaactatccttgctcgagatcatctttaa

SEQ ID NO: 347724 - DNA, 30 bp, Artificial Sequence
  Synthetic oligonucleotide
gtcgcatcgtgatccgatgggcctctttaa

SEQ ID NO: 347725 - DNA, 30 bp, Artificial Sequence
  Synthetic oligonucleotide
cttactgtacgggagactatgtctctttaa

SEQ ID NO: 347726 - DNA, 30 bp, Artificial Sequence
  Synthetic oligonucleotide
tacaagaatctccgatgcgagtgtctttaa

SEQ ID NO: 347727 - DNA, 30 bp, Artificial Sequence
  Synthetic oligonucleotide
gacgagcagcacagataataaattctttaa

SEQ ID NO: 347728 - DNA, 30 bp, Artificial Sequence
  Synthetic oligonucleotide
gtgaaggccgcgagccccgaacttctttaa

SEQ ID NO: 347729 - DNA, 30 bp, Artificial Sequence
  Synthetic oligonucleotide
gcacttcatgaaggaagcaggccagtttaa

SEQ ID NO: 347730 - DNA, 30 bp, Artificial Sequence
  Synthetic oligonucleotide
ctttatttgagggatcatctggcagtttaa

SEQ ID NO: 347731 - DNA, 30 bp, Artificial Sequence
  Synthetic oligonucleotide
accatgttatggctgcactaatgagtttaa

SEQ ID NO: 347732 - DNA, 30 bp, Artificial Sequence
  Synthetic oligonucleotide
aaattatgctacgtagtccgtggcgtttaa

SEQ ID NO: 347733 - DNA, 30 bp, Artificial Sequence
  Synthetic oligonucleotide
gaaatgcacggctccaggctatgcgtttaa

SEQ ID NO: 347734 - DNA, 30 bp, Artificial Sequence
  Synthetic oligonucleotide
cttgcctggtgctataatctaacggtttaa

SEQ ID NO: 347735 - DNA, 30 bp, Artificial Sequence
  Synthetic oligonucleotide
aagagcacgggttctcgtacagcggtttaa

SEQ ID NO: 347736 - DNA, 30 bp, Artificial Sequence
  Synthetic oligonucleotide
catagttaggcgtataagcaattggtttaa

SEQ ID NO: 347737 - DNA, 30 bp, Artificial Sequence
  Synthetic oligonucleotide
tgaaatgctgggatcgcttcagctgtttaa

SEQ ID NO: 347738 - DNA, 30 bp, Artificial Sequence
  Synthetic oligonucleotide
tggctaaaccaattaggaaaatgtgtttaa

SEQ ID NO: 347739 - DNA, 30 bp, Artificial Sequence
  Synthetic oligonucleotide
gccagatcgtcgcaagatcgaaaattttaa

SEQ ID NO: 347740 - DNA, 30 bp, Artificial Sequence
  Synthetic oligonucleotide
ttgacattactccctcttggggcattttaa

SEQ ID NO: 347741 - DNA, 30 bp, Artificial Sequence
  Synthetic oligonucleotide
gcaatggagtgtacggctatatcattttaa

SEQ ID NO: 347742 - DNA, 30 bp, Artificial Sequence
  Synthetic oligonucleotide
gacagttcgggcatgaggtagagattttaa

SEQ ID NO: 347743 - DNA, 30 bp, Artificial Sequence
  Synthetic oligonucleotide
tagtcggactctgaggggtagggcttttaa

SEQ ID NO: 347744 - DNA, 30 bp, Artificial Sequence
  Synthetic oligonucleotide
ttaggacagtcggtcggaatggagttttaa

SEQ ID NO: 347745 - DNA, 30 bp, Artificial Sequence
  Synthetic oligonucleotide
gtggatctcgagagacccggttggttttaa

SEQ ID NO: 347746 - DNA, 30 bp, Artificial Sequence
  Synthetic oligonucleotide
ccgcctgccagttttgcaccgctgttttaa

SEQ ID NO: 347747 - DNA, 30 bp, Artificial Sequence
  Synthetic oligonucleotide
cccgctgttatcctctactatactttttaa

SEQ ID NO: 347748 - DNA, 31 bp, Artificial Sequence
  Synthetic oligonucleotide
ctatgacgagccgtcatctgcccttttttaa

SEQ ID NO: 347749 - DNA, 30 bp, Artificial Sequence
  Synthetic oligonucleotide
aatacaaggggctctcaagaaaagaaaaca

SEQ ID NO: 347750 - DNA, 30 bp, Artificial Sequence
  Synthetic oligonucleotide
tccgtgtggccagaattccccgagaaaaca

SEQ ID NO: 347751 - DNA, 30 bp, Artificial Sequence
  Synthetic oligonucleotide
agcacagtcagcgtattggttgataaaaca

SEQ ID NO: 347752 - DNA, 30 bp, Artificial Sequence
  Synthetic oligonucleotide
aaccggtatctcgggggctacactaaaaca

SEQ ID NO: 347753 - DNA, 30 bp, Artificial Sequence
  Synthetic oligonucleotide
agtgctttcgtatagtcctggggagaaaca

SEQ ID NO: 347754 - DNA, 30 bp, Artificial Sequence
  Synthetic oligonucleotide
tgtctaggactccgccgattgctagaaaca

SEQ ID NO: 347755 - DNA, 30 bp, Artificial Sequence
  Synthetic oligonucleotide
tagcggtgacagttgcacagttacgaaaca

SEQ ID NO: 347756 - DNA, 30 bp, Artificial Sequence
  Synthetic oligonucleotide
gtatgtacagtcggtaaatatacggaaaca

SEQ ID NO: 347757 - DNA, 30 bp, Artificial Sequence
  Synthetic oligonucleotide
atcgcacgaggcattgcgagtggggaaaca

SEQ ID NO: 347758 - DNA, 30 bp, Artificial Sequence
  Synthetic oligonucleotide
atctgggtaactaatttactatgctaaaca

SEQ ID NO: 347759 - DNA, 30 bp, Artificial Sequence
  Synthetic oligonucleotide
cctggtcgcagacggtcaacacggtaaaca

SEQ ID NO: 347760 - DNA, 30 bp, Artificial Sequence
  Synthetic oligonucleotide
gaggttcacatccacggtatgatgtaaaca

SEQ ID NO: 347761 - DNA, 30 bp, Artificial Sequence
  Synthetic oligonucleotide
ctttagtagcgtatgtgaatcagttaaaca

SEQ ID NO: 347762 - DNA, 30 bp, Artificial Sequence
  Synthetic oligonucleotide
gagcgacgactcaatagccgcaaaacaaca

SEQ ID NO: 347763 - DNA, 30 bp, Artificial Sequence
  Synthetic oligonucleotide
tgtacatgtcttcagtacaggtagacaaca

SEQ ID NO: 347764 - DNA, 30 bp, Artificial Sequence
  Synthetic oligonucleotide
tagttgcttcaccgagtgtaaacgacaaca

SEQ ID NO: 347765 - DNA, 30 bp, Artificial Sequence
  Synthetic oligonucleotide
tagtctagccatcttcgttacacaccaaca

SEQ ID NO: 347766 - DNA, 30 bp, Artificial Sequence
  Synthetic oligonucleotide
ttccaagggccgatgccgatggacccaaca

SEQ ID NO: 347767 - DNA, 30 bp, Artificial Sequence
  Synthetic oligonucleotide
cgggaatccagtcgggcttctggcccaaca

SEQ ID NO: 347768 - DNA, 30 bp, Artificial Sequence
  Synthetic oligonucleotide
cttctcagatattcatggctgaatccaaca

SEQ ID NO: 347769 - DNA, 30 bp, Artificial Sequence
  Synthetic oligonucleotide
gtggacttggtcgtattacgcgcagcaaca

SEQ ID NO: 347770 - DNA, 30 bp, Artificial Sequence
  Synthetic oligonucleotide
ctactgacgcaatgtgtagtaatagcaaca

SEQ ID NO: 347771 - DNA, 30 bp, Artificial Sequence
  Synthetic oligonucleotide
cccaacttgattaatggtcaatccgcaaca

SEQ ID NO: 347772 - DNA, 30 bp, Artificial Sequence
  Synthetic oligonucleotide
cgagtacgagcctgcgcatgcagcgcaaca

SEQ ID NO: 347773 - DNA, 30 bp, Artificial Sequence
  Synthetic oligonucleotide
ctgtaattgatacacagacgtatcgcaaca

SEQ ID NO: 347774 - DNA, 30 bp, Artificial Sequence
  Synthetic oligonucleotide
agataaagaaacgtgattacgttcgcaaca

SEQ ID NO: 347775 - DNA, 30 bp, Artificial Sequence
  Synthetic oligonucleotide
taaaatatacgattaccccagttggcaaca

SEQ ID NO: 347776 - DNA, 30 bp, Artificial Sequence
  Synthetic oligonucleotide
cagcaaggcagtatgtctggaattgcaaca

SEQ ID NO: 347777 - DNA, 30 bp, Artificial Sequence
  Synthetic oligonucleotide
atttcaaacaaaaatgttgtgacatcaaca

SEQ ID NO: 347778 - DNA, 30 bp, Artificial Sequence
  Synthetic oligonucleotide
cttcgaagtcccttccgttttatctcaaca

SEQ ID NO: 347779 - DNA, 30 bp, Artificial Sequence
  Synthetic oligonucleotide
actcattaggattcagcttttacgtcaaca

SEQ ID NO: 347780 - DNA, 30 bp, Artificial Sequence
  Synthetic oligonucleotide
tcgcatagtcgatgcagtagacattcaaca

SEQ ID NO: 347781 - DNA, 30 bp, Artificial Sequence
  Synthetic oligonucleotide
aaaagtgccggcgatcctagcacttcaaca

SEQ ID NO: 347782 - DNA, 30 bp, Artificial Sequence
  Synthetic oligonucleotide
cccccaagttaactagatcggacttcaaca

SEQ ID NO: 347783 - DNA, 30 bp, Artificial Sequence
  Synthetic oligonucleotide
acaatgagacacttactgaggatttcaaca

SEQ ID NO: 347784 - DNA, 30 bp, Artificial Sequence
  Synthetic oligonucleotide
gaacatcgttccttcagctaaaaaagaaca

SEQ ID NO: 347785 - DNA, 30 bp, Artificial Sequence
  Synthetic oligonucleotide
tctagttaatttgttactactgtaagaaca

SEQ ID NO: 347786 - DNA, 30 bp, Artificial Sequence
  Synthetic oligonucleotide
ctgtgagatatttatggctcacacagaaca

SEQ ID NO: 347787 - DNA, 30 bp, Artificial Sequence
  Synthetic oligonucleotide
cgggtccggccgggcgaaacggccagaaca

SEQ ID NO: 347788 - DNA, 30 bp, Artificial Sequence
  Synthetic oligonucleotide
ctcgtgctataccaaaagcacgagagaaca

SEQ ID NO: 347789 - DNA, 30 bp, Artificial Sequence
  Synthetic oligonucleotide
attgatgcacatgccatcttagcgagaaca

SEQ ID NO: 347790 - DNA, 30 bp, Artificial Sequence
  Synthetic oligonucleotide
atacagggcttagccagcgcgctgagaaca

SEQ ID NO: 347791 - DNA, 30 bp, Artificial Sequence
  Synthetic oligonucleotide
acgagatagtgacatcatcgctttagaaca

SEQ ID NO: 347792 - DNA, 30 bp, Artificial Sequence
  Synthetic oligonucleotide
aacttacggccgggaactggtatacgaaca

SEQ ID NO: 347793 - DNA, 30 bp, Artificial Sequence
  Synthetic oligonucleotide
actgtaatcttaggtgaggactagcgaaca

SEQ ID NO: 347794 - DNA, 30 bp, Artificial Sequence
  Synthetic oligonucleotide
gtatcttcaacaaaaccgtgttatcgaaca

SEQ ID NO: 347795 - DNA, 30 bp, Artificial Sequence
  Synthetic oligonucleotide
tccaagaccctaattccggattgaggaaca

SEQ ID NO: 347796 - DNA, 30 bp, Artificial Sequence
  Synthetic oligonucleotide
ttcttgcagataatggctcaacagggaaca

SEQ ID NO: 347797 - DNA, 30 bp, Artificial Sequence
  Synthetic oligonucleotide
cgtaagcagttagaaagctcggctggaaca

SEQ ID NO: 347798 - DNA, 30 bp, Artificial Sequence
  Synthetic oligonucleotide
gagtatggccggagaaccccttctggaaca

SEQ ID NO: 347799 - DNA, 30 bp, Artificial Sequence
  Synthetic oligonucleotide
ccccacagacgcaactcgaatattggaaca

SEQ ID NO: 347800 - DNA, 30 bp, Artificial Sequence
  Synthetic oligonucleotide
tcctttataggaatgctcccgacatgaaca

SEQ ID NO: 347801 - DNA, 30 bp, Artificial Sequence
  Synthetic oligonucleotide
aagctctaaaaagtgagtgttacatgaaca

SEQ ID NO: 347802 - DNA, 30 bp, Artificial Sequence
  Synthetic oligonucleotide
tatgtgctccgtggctgcaaatgctgaaca

SEQ ID NO: 347803 - DNA, 30 bp, Artificial Sequence
  Synthetic oligonucleotide
aaattcggccgggtaaatgctaagtgaaca

SEQ ID NO: 347804 - DNA, 30 bp, Artificial Sequence
  Synthetic oligonucleotide
aggtggctcgcttcggactgttagtgaaca

SEQ ID NO: 347805 - DNA, 30 bp, Artificial Sequence
  Synthetic oligonucleotide
gctttgattacattctttgtaaggtgaaca

SEQ ID NO: 347806 - DNA, 30 bp, Artificial Sequence
  Synthetic oligonucleotide
agataggctgtttacaaggacaggtgaaca

SEQ ID NO: 347807 - DNA, 30 bp, Artificial Sequence
  Synthetic oligonucleotide
ctgagcctgtctagttgtctcgtgtgaaca

SEQ ID NO: 347808 - DNA, 30 bp, Artificial Sequence
  Synthetic oligonucleotide
gcgccctaatcgagaggtacggaaataaca

SEQ ID NO: 347809 - DNA, 30 bp, Artificial Sequence
  Synthetic oligonucleotide
ccgattgtgactattgttctatcaataaca

SEQ ID NO: 347810 - DNA, 30 bp, Artificial Sequence
  Synthetic oligonucleotide
tgagcggtcattagggccccggtaataaca

SEQ ID NO: 347811 - DNA, 30 bp, Artificial Sequence
  Synthetic oligonucleotide
ttcgggacgttgaagcagaatttaataaca

SEQ ID NO: 347812 - DNA, 29 bp, Artificial Sequence
  Synthetic oligonucleotide
ttaccgcttccatgtatccacacataaca

SEQ ID NO: 347813 - DNA, 30 bp, Artificial Sequence
  Synthetic oligonucleotide
aatctggattatggacggagctagataaca

SEQ ID NO: 347814 - DNA, 30 bp, Artificial Sequence
  Synthetic oligonucleotide
ggccggtgtaaaaagtatcttagtataaca

SEQ ID NO: 347815 - DNA, 30 bp, Artificial Sequence
  Synthetic oligonucleotide
gttattcgacaagggcccttgtaactaaca

SEQ ID NO: 347816 - DNA, 30 bp, Artificial Sequence
  Synthetic oligonucleotide
gattgtgggaaatcaagtagtacactaaca

SEQ ID NO: 347817 - DNA, 30 bp, Artificial Sequence
  Synthetic oligonucleotide
tgtccgacgagggcgatcccatgactaaca

SEQ ID NO: 347818 - DNA, 30 bp, Artificial Sequence
  Synthetic oligonucleotide
cagttactctgggtctatgaacacctaaca

SEQ ID NO: 347819 - DNA, 30 bp, Artificial Sequence
  Synthetic oligonucleotide
cctgggtcaggcgcttctgtcgccctaaca

SEQ ID NO: 347820 - DNA, 30 bp, Artificial Sequence
  Synthetic oligonucleotide
cagcgttcggcgccccgggctcggctaaca

SEQ ID NO: 347821 - DNA, 30 bp, Artificial Sequence
  Synthetic oligonucleotide
attaattgattacttcgattagttctaaca

SEQ ID NO: 347822 - DNA, 30 bp, Artificial Sequence
  Synthetic oligonucleotide
aagctctaagtatgtcacggtgcagtaaca

SEQ ID NO: 347823 - DNA, 30 bp, Artificial Sequence
  Synthetic oligonucleotide
ttcctttcatgctgtcaggcgtgagtaaca

SEQ ID NO: 347824 - DNA, 30 bp, Artificial Sequence
  Synthetic oligonucleotide
gccaccactggaacccgatagcccgtaaca

SEQ ID NO: 347825 - DNA, 30 bp, Artificial Sequence
  Synthetic oligonucleotide
cacgcaatgggatcggcgcgcgtcgtaaca

SEQ ID NO: 347826 - DNA, 30 bp, Artificial Sequence
  Synthetic oligonucleotide
agtggtgtaggtgccccaggacatgtaaca

SEQ ID NO: 347827 - DNA, 30 bp, Artificial Sequence
  Synthetic oligonucleotide
tagtaacctaagggcgcatccattgtaaca

SEQ ID NO: 347828 - DNA, 30 bp, Artificial Sequence
  Synthetic oligonucleotide
accttagatattctcggaatagaattaaca

SEQ ID NO: 347829 - DNA, 30 bp, Artificial Sequence
  Synthetic oligonucleotide
atgctatggatgacgagggttgcattaaca

SEQ ID NO: 347830 - DNA, 30 bp, Artificial Sequence
  Synthetic oligonucleotide
agcagtttcatggtgtcgctgcgattaaca

SEQ ID NO: 347831 - DNA, 30 bp, Artificial Sequence
  Synthetic oligonucleotide
gctgtgtctcaccgtgtctaaggattaaca

SEQ ID NO: 347832 - DNA, 30 bp, Artificial Sequence
  Synthetic oligonucleotide
gttggccctaggcggtcagtcgtattaaca

SEQ ID NO: 347833 - DNA, 30 bp, Artificial Sequence
  Synthetic oligonucleotide
gcaagcggttcattttgtgataagttaaca

SEQ ID NO: 347834 - DNA, 30 bp, Artificial Sequence
  Synthetic oligonucleotide
ataggttagctggtgtgcttcgcgttaaca

SEQ ID NO: 347835 - DNA, 30 bp, Artificial Sequence
  Synthetic oligonucleotide
taatcatttattatgggtccgaggttaaca

SEQ ID NO: 347836 - DNA, 30 bp, Artificial Sequence
  Synthetic oligonucleotide
atccttaattatataggctatcatttaaca

SEQ ID NO: 347837 - DNA, 30 bp, Artificial Sequence
  Synthetic oligonucleotide
cgaaattgacgagtgcataagtatttaaca

SEQ ID NO: 347838 - DNA, 30 bp, Artificial Sequence
  Synthetic oligonucleotide
acacactaaagtctgaaggtaggtttaaca

SEQ ID NO: 347839 - DNA, 30 bp, Artificial Sequence
  Synthetic oligonucleotide
aagctcttaaatgtaagaggtggtttaaca

SEQ ID NO: 347840 - DNA, 30 bp, Artificial Sequence
  Synthetic oligonucleotide
ggatagcgcgctaggtttatctgtttaaca

SEQ ID NO: 347841 - DNA, 30 bp, Artificial Sequence
  Synthetic oligonucleotide
ttctgattgaacgggttcgccattttaaca

SEQ ID NO: 347842 - DNA, 30 bp, Artificial Sequence
  Synthetic oligonucleotide
gaatcaagggcaatttacaagaacaacaca

SEQ ID NO: 347843 - DNA, 30 bp, Artificial Sequence
  Synthetic oligonucleotide
atttgtatcgatctctggattggcaacaca

SEQ ID NO: 347844 - DNA, 30 bp, Artificial Sequence
  Synthetic oligonucleotide
aaacttgtttgggcgtgtgtgcagaacaca

SEQ ID NO: 347845 - DNA, 30 bp, Artificial Sequence
  Synthetic oligonucleotide
ttaaaataccttaatcaaactctgaacaca

SEQ ID NO: 347846 - DNA, 30 bp, Artificial Sequence
  Synthetic oligonucleotide
agggtacgcgagatatgtggagataacaca

SEQ ID NO: 347847 - DNA, 30 bp, Artificial Sequence
  Synthetic oligonucleotide
cttacggactattggaaatgaccccacaca

SEQ ID NO: 347848 - DNA, 30 bp, Artificial Sequence
  Synthetic oligonucleotide
gagaagcgttagtatacgaaaagccacaca

SEQ ID NO: 347849 - DNA, 30 bp, Artificial Sequence
  Synthetic oligonucleotide
aaggactggcgtgccccagcatggcacaca

SEQ ID NO: 347850 - DNA, 30 bp, Artificial Sequence
  Synthetic oligonucleotide
ctctgcggcgctatggggtgaatgcacaca

SEQ ID NO: 347851 - DNA, 30 bp, Artificial Sequence
  Synthetic oligonucleotide
aaatgaatacgtcgtcactatatgcacaca

SEQ ID NO: 347852 - DNA, 30 bp, Artificial Sequence
  Synthetic oligonucleotide
gaccgaaggtgatatatacgacatcacaca

SEQ ID NO: 347853 - DNA, 30 bp, Artificial Sequence
  Synthetic oligonucleotide
agctccgatacatgagcactatgtcacaca

SEQ ID NO: 347854 - DNA, 31 bp, Artificial Sequence
  Synthetic oligonucleotide
cttggataggcacataatggaggttcacaca

SEQ ID NO: 347855 - DNA, 30 bp, Artificial Sequence
  Synthetic oligonucleotide
ccgcgtaggtcactaagcgtgttagacaca

SEQ ID NO: 347856 - DNA, 30 bp, Artificial Sequence
  Synthetic oligonucleotide
tcttaagtattgggattcctgtccgacaca

SEQ ID NO: 347857 - DNA, 30 bp, Artificial Sequence
  Synthetic oligonucleotide
gaggtaatagtcaaacgtcgtgcggacaca

SEQ ID NO: 347858 - DNA, 30 bp, Artificial Sequence
  Synthetic oligonucleotide
gacggtgtgctgccaagcgaatcggacaca

SEQ ID NO: 347859 - DNA, 30 bp, Artificial Sequence
  Synthetic oligonucleotide
ctccgcactatcctaatagagagggacaca

SEQ ID NO: 347860 - DNA, 30 bp, Artificial Sequence
  Synthetic oligonucleotide
gagcctctgacttcggttagcgtggacaca

SEQ ID NO: 347861 - DNA, 30 bp, Artificial Sequence
  Synthetic oligonucleotide
cgaatgttcgccatgacgcaatgatacaca

SEQ ID NO: 347862 - DNA, 30 bp, Artificial Sequence
  Synthetic oligonucleotide
gggttaacgttcacctgtgactcctacaca

SEQ ID NO: 347863 - DNA, 30 bp, Artificial Sequence
  Synthetic oligonucleotide
gcattgtccatcagtgaaccttagtacaca

SEQ ID NO: 347864 - DNA, 30 bp, Artificial Sequence
  Synthetic oligonucleotide
tgggctgatcgttcatcacggtcttacaca

SEQ ID NO: 347865 - DNA, 30 bp, Artificial Sequence
  Synthetic oligonucleotide
gagcacgggcatctgtttgtcagttacaca

SEQ ID NO: 347866 - DNA, 30 bp, Artificial Sequence
  Synthetic oligonucleotide
tacttcagaaccgggtctatgtgaaccaca

SEQ ID NO: 347867 - DNA, 30 bp, Artificial Sequence
  Synthetic oligonucleotide
gtcattggttacccgttcaactacaccaca

SEQ ID NO: 347868 - DNA, 30 bp, Artificial Sequence
  Synthetic oligonucleotide
agtatgaatgggcctagtctaatcaccaca

SEQ ID NO: 347869 - DNA, 30 bp, Artificial Sequence
  Synthetic oligonucleotide
gattacgacaggtggggtccgaataccaca

SEQ ID NO: 347870 - DNA, 30 bp, Artificial Sequence
  Synthetic oligonucleotide
gcccatccagtgaatgatcaagttaccaca

SEQ ID NO: 347871 - DNA, 30 bp, Artificial Sequence
  Synthetic oligonucleotide
ataatattgctatgtggtgataaacccaca

SEQ ID NO: 347872 - DNA, 30 bp, Artificial Sequence
  Synthetic oligonucleotide
tgtcggttgctgaatgtccaatcacccaca

SEQ ID NO: 347873 - DNA, 30 bp, Artificial Sequence
  Synthetic oligonucleotide
cttgttttttttctatgtcattcgcccaca

SEQ ID NO: 347874 - DNA, 30 bp, Artificial Sequence
  Synthetic oligonucleotide
aggtcgagtcacctcgcccccgggcccaca

SEQ ID NO: 347875 - DNA, 30 bp, Artificial Sequence
  Synthetic oligonucleotide
ggtcgtgtgggaaaatatgtggggcccaca

SEQ ID NO: 347876 - DNA, 30 bp, Artificial Sequence
  Synthetic oligonucleotide
acccccgtgcataggcatgttgctcccaca

SEQ ID NO: 347877 - DNA, 30 bp, Artificial Sequence
  Synthetic oligonucleotide
gtggtctgcaagcttcaacgttttcccaca

SEQ ID NO: 347878 - DNA, 30 bp, Artificial Sequence
  Synthetic oligonucleotide
tgtacctgttcaaacgcgtccaaagccaca

SEQ ID NO: 347879 - DNA, 30 bp, Artificial Sequence
  Synthetic oligonucleotide
ccaaagtccgtgatgtcatttctagccaca

SEQ ID NO: 347880 - DNA, 30 bp, Artificial Sequence
  Synthetic oligonucleotide
gtgttatggtgcaaaaccagaaacgccaca

SEQ ID NO: 347881 - DNA, 30 bp, Artificial Sequence
  Synthetic oligonucleotide
acggtttatctgaatagcatttgcgccaca

SEQ ID NO: 347882 - DNA, 30 bp, Artificial Sequence
  Synthetic oligonucleotide
gtgtgtctgcgcagtggtaacatcgccaca

SEQ ID NO: 347883 - DNA, 30 bp, Artificial Sequence
  Synthetic oligonucleotide
gagattggtcagggcactggttaggccaca

SEQ ID NO: 347884 - DNA, 30 bp, Artificial Sequence
  Synthetic oligonucleotide
taagcagagggcacaccaccgatggccaca

SEQ ID NO: 347885 - DNA, 30 bp, Artificial Sequence
  Synthetic oligonucleotide
acaccacaggggcttatagccctggccaca

SEQ ID NO: 347886 - DNA, 30 bp, Artificial Sequence
  Synthetic oligonucleotide
cgggtcccggtcgatgttagctgtgccaca

SEQ ID NO: 347887 - DNA, 30 bp, Artificial Sequence
  Synthetic oligonucleotide
gcacatggcccggatcatgtaattgccaca

SEQ ID NO: 347888 - DNA, 30 bp, Artificial Sequence
  Synthetic oligonucleotide
ataatcggtctgacggcggtatttgccaca

SEQ ID NO: 347889 - DNA, 30 bp, Artificial Sequence
  Synthetic oligonucleotide
gtggttggaaccggccttcgaaaatccaca

SEQ ID NO: 347890 - DNA, 30 bp, Artificial Sequence
  Synthetic oligonucleotide
aatacaatttgcaatgtacggagatccaca

SEQ ID NO: 347891 - DNA, 30 bp, Artificial Sequence
  Synthetic oligonucleotide
actacactccctgctctacaagcgtccaca

SEQ ID NO: 347892 - DNA, 30 bp, Artificial Sequence
  Synthetic oligonucleotide
gcggtattaagagttttttcctcgtccaca

SEQ ID NO: 347893 - DNA, 30 bp, Artificial Sequence
  Synthetic oligonucleotide
agaagcagccacgattgcagtaggtccaca

SEQ ID NO: 347894 - DNA, 30 bp, Artificial Sequence
  Synthetic oligonucleotide
ttagctcccggtcttgcctcaacttccaca

SEQ ID NO: 347895 - DNA, 30 bp, Artificial Sequence
  Synthetic oligonucleotide
ggcgattcctgtagtaccggtatttccaca

SEQ ID NO: 347896 - DNA, 30 bp, Artificial Sequence
  Synthetic oligonucleotide
cgaacaggcagggatgcagaagtttccaca

SEQ ID NO: 347897 - DNA, 30 bp, Artificial Sequence
  Synthetic oligonucleotide
ggctggagactagcccacgagttttccaca

SEQ ID NO: 347898 - DNA, 30 bp, Artificial Sequence
  Synthetic oligonucleotide
aaaatgacacaaatgaggacgcaaagcaca

SEQ ID NO: 347899 - DNA, 30 bp, Artificial Sequence
  Synthetic oligonucleotide
ggacacgtgttctgacagggacgaagcaca

SEQ ID NO: 347900 - DNA, 30 bp, Artificial Sequence
  Synthetic oligonucleotide
gtacgcaagcgatggtggtgtatcagcaca

SEQ ID NO: 347901 - DNA, 30 bp, Artificial Sequence
  Synthetic oligonucleotide
ggacgccttctaacccgcaatgatagcaca

SEQ ID NO: 347902 - DNA, 30 bp, Artificial Sequence
  Synthetic oligonucleotide
cctccacactgggaaacattaattagcaca

SEQ ID NO: 347903 - DNA, 30 bp, Artificial Sequence
  Synthetic oligonucleotide
cgattgctccaaatttgattctttagcaca

SEQ ID NO: 347904 - DNA, 30 bp, Artificial Sequence
  Synthetic oligonucleotide
cattggtaaaggttcactctgacccgcaca

SEQ ID NO: 347905 - DNA, 30 bp, Artificial Sequence
  Synthetic oligonucleotide
caatcgtaaatctaaacagattcccgcaca

SEQ ID NO: 347906 - DNA, 30 bp, Artificial Sequence
  Synthetic oligonucleotide
gggtccgattcagaatcgctaccgcgcaca

SEQ ID NO: 347907 - DNA, 30 bp, Artificial Sequence
  Synthetic oligonucleotide
tagaaattcggaatatgacgatgtcgcaca

SEQ ID NO: 347908 - DNA, 30 bp, Artificial Sequence
  Synthetic oligonucleotide
aagcattagttctacactgtcccaggcaca

SEQ ID NO: 347909 - DNA, 30 bp, Artificial Sequence
  Synthetic oligonucleotide
gaaagtttttgtgcgaggaaggcaggcaca

SEQ ID NO: 347910 - DNA, 30 bp, Artificial Sequence
  Synthetic oligonucleotide
ccaattttaaatcggtatcactcaggcaca

SEQ ID NO: 347911 - DNA, 30 bp, Artificial Sequence
  Synthetic oligonucleotide
accgatttgcctgactaagactgaggcaca

SEQ ID NO: 347912 - DNA, 30 bp, Artificial Sequence
  Synthetic oligonucleotide
ttagtcggggcgctcatgttggtaggcaca

SEQ ID NO: 347913 - DNA, 30 bp, Artificial Sequence
  Synthetic oligonucleotide
gagtccaggaacagcccgtattagggcaca

SEQ ID NO: 347914 - DNA, 30 bp, Artificial Sequence
  Synthetic oligonucleotide
ggttgcctagacaggtgcaatgggggcaca

SEQ ID NO: 347915 - DNA, 30 bp, Artificial Sequence
  Synthetic oligonucleotide
gagcagcttagaaccccagtcatgggcaca

SEQ ID NO: 347916 - DNA, 30 bp, Artificial Sequence
  Synthetic oligonucleotide
ttcggtcaacgggatgcagagttgggcaca

SEQ ID NO: 347917 - DNA, 30 bp, Artificial Sequence
  Synthetic oligonucleotide
gtgatgtgctcagctcgcaagcatggcaca

SEQ ID NO: 347918 - DNA, 30 bp, Artificial Sequence
  Synthetic oligonucleotide
taggagtggtacggattagagcatggcaca

SEQ ID NO: 347919 - DNA, 30 bp, Artificial Sequence
  Synthetic oligonucleotide
cgagtgtccggtacgttacgtattggcaca

SEQ ID NO: 347920 - DNA, 30 bp, Artificial Sequence
  Synthetic oligonucleotide
tttaaatgatatctggaagatagatgcaca

SEQ ID NO: 347921 - DNA, 30 bp, Artificial Sequence
  Synthetic oligonucleotide
cacagatgtatcgaactgttctgatgcaca

SEQ ID NO: 347922 - DNA, 30 bp, Artificial Sequence
  Synthetic oligonucleotide
tgggatcgtagagtgttcgatctatgcaca

SEQ ID NO: 347923 - DNA, 30 bp, Artificial Sequence
  Synthetic oligonucleotide
ggcgccattgcactgggtcgtaggtgcaca

SEQ ID NO: 347924 - DNA, 30 bp, Artificial Sequence
  Synthetic oligonucleotide
aacccagggatttcgctcaacttgtgcaca

SEQ ID NO: 347925 - DNA, 30 bp, Artificial Sequence
  Synthetic oligonucleotide
tttgagcgcatggagacccctgtttgcaca

SEQ ID NO: 347926 - DNA, 30 bp, Artificial Sequence
  Synthetic oligonucleotide
gcgaattgcgccactttgtggggaatcaca

SEQ ID NO: 347927 - DNA, 30 bp, Artificial Sequence
  Synthetic oligonucleotide
ttctatcagtcccgagatggtaagatcaca

SEQ ID NO: 347928 - DNA, 30 bp, Artificial Sequence
  Synthetic oligonucleotide
cgcgtcataacattgacgcagacgatcaca

SEQ ID NO: 347929 - DNA, 30 bp, Artificial Sequence
  Synthetic oligonucleotide
atttggaaccgtttatctaataggatcaca

SEQ ID NO: 347930 - DNA, 30 bp, Artificial Sequence
  Synthetic oligonucleotide
ttgggatcttgttgaactatatggatcaca

SEQ ID NO: 347931 - DNA, 30 bp, Artificial Sequence
  Synthetic oligonucleotide
gagctacaaggtcggacggccaatatcaca

SEQ ID NO: 347932 - DNA, 31 bp, Artificial Sequence
  Synthetic oligonucleotide
gtggtgtgaaaactaacgttattttatcaca

SEQ ID NO: 347933 - DNA, 30 bp, Artificial Sequence
  Synthetic oligonucleotide
acagtagatctttatgcttgaaaactcaca

SEQ ID NO: 347934 - DNA, 30 bp, Artificial Sequence
  Synthetic oligonucleotide
gtgctcaagcaatacgtggctaacctcaca

SEQ ID NO: 347935 - DNA, 30 bp, Artificial Sequence
  Synthetic oligonucleotide
atccgcttgcgcctattgtatgtgctcaca

SEQ ID NO: 347936 - DNA, 30 bp, Artificial Sequence
  Synthetic oligonucleotide
tgatatgacctccgcgtcaataatctcaca

SEQ ID NO: 347937 - DNA, 30 bp, Artificial Sequence
  Synthetic oligonucleotide
aagaaacagtgctgacctggggatctcaca

SEQ ID NO: 347938 - DNA, 30 bp, Artificial Sequence
  Synthetic oligonucleotide
tacaagcgggatgtcgtgaatagtctcaca

SEQ ID NO: 347939 - DNA, 30 bp, Artificial Sequence
  Synthetic oligonucleotide
ctacggtttacctcactcggaaaagtcaca

SEQ ID NO: 347940 - DNA, 30 bp, Artificial Sequence
  Synthetic oligonucleotide
ttgggacctatccatggacgtaaagtcaca

SEQ ID NO: 347941 - DNA, 30 bp, Artificial Sequence
  Synthetic oligonucleotide
ggaatgtcggaacgtgcgacgacagtcaca

SEQ ID NO: 347942 - DNA, 30 bp, Artificial Sequence
  Synthetic oligonucleotide
aattcgccccgaataaaaaaattagtcaca

SEQ ID NO: 347943 - DNA, 30 bp, Artificial Sequence
  Synthetic oligonucleotide
cccgaaaagggtcgatacttccacgtcaca

SEQ ID NO: 347944 - DNA, 30 bp, Artificial Sequence
  Synthetic oligonucleotide
aatagatggtcaagtaattacctcgtcaca

SEQ ID NO: 347945 - DNA, 30 bp, Artificial Sequence
  Synthetic oligonucleotide
ctgcttgcatcacatttcagacaggtcaca

SEQ ID NO: 347946 - DNA, 30 bp, Artificial Sequence
  Synthetic oligonucleotide
tccctcgggcgactatccgcgggggtcaca

SEQ ID NO: 347947 - DNA, 30 bp, Artificial Sequence
  Synthetic oligonucleotide
ggagggtcaatagtacattatttggtcaca

SEQ ID NO: 347948 - DNA, 30 bp, Artificial Sequence
  Synthetic oligonucleotide
aaaagcacaacacctgtgtaggatgtcaca

SEQ ID NO: 347949 - DNA, 30 bp, Artificial Sequence
  Synthetic oligonucleotide
agttcagagtcgcgcgaaagcgctgtcaca

SEQ ID NO: 347950 - DNA, 30 bp, Artificial Sequence
  Synthetic oligonucleotide
ttgggtggcatccgcctcactattgtcaca

SEQ ID NO: 347951 - DNA, 30 bp, Artificial Sequence
  Synthetic oligonucleotide
atcagccgacctgatattacaacattcaca

SEQ ID NO: 347952 - DNA, 30 bp, Artificial Sequence
  Synthetic oligonucleotide
tgctatttccgggttcggatctccttcaca

SEQ ID NO: 347953 - DNA, 30 bp, Artificial Sequence
  Synthetic oligonucleotide
catgttggaccgctacggctgcggttcaca

SEQ ID NO: 347954 - DNA, 30 bp, Artificial Sequence
  Synthetic oligonucleotide
tgagatgctttaagctaattgctgttcaca

SEQ ID NO: 347955 - DNA, 30 bp, Artificial Sequence
  Synthetic oligonucleotide
tagcattcaagtcgattcctatatttcaca

SEQ ID NO: 347956 - DNA, 30 bp, Artificial Sequence
  Synthetic oligonucleotide
tgaatgttggtttttcctataccaaagaca

SEQ ID NO: 347957 - DNA, 30 bp, Artificial Sequence
  Synthetic oligonucleotide
acgatttggtcgccgcgctgaggaaagaca

SEQ ID NO: 347958 - DNA, 30 bp, Artificial Sequence
  Synthetic oligonucleotide
tgtagcccagagacggccagcttaaagaca

SEQ ID NO: 347959 - DNA, 30 bp, Artificial Sequence
  Synthetic oligonucleotide
aaggcgacgaccgctatgtataccaagaca

SEQ ID NO: 347960 - DNA, 30 bp, Artificial Sequence
  Synthetic oligonucleotide
ggtgatgttgatcaagggtggttcaagaca

SEQ ID NO: 347961 - DNA, 30 bp, Artificial Sequence
  Synthetic oligonucleotide
tacttacaccggccgccgtataggaagaca

SEQ ID NO: 347962 - DNA, 30 bp, Artificial Sequence
  Synthetic oligonucleotide
gtaccgttgcagcatcactcacgacagaca

SEQ ID NO: 347963 - DNA, 30 bp, Artificial Sequence
  Synthetic oligonucleotide
gtagcgcgactagactggttttgccagaca

SEQ ID NO: 347964 - DNA, 30 bp, Artificial Sequence
  Synthetic oligonucleotide
agagttcacactgtagtcagcaatcagaca

SEQ ID NO: 347965 - DNA, 30 bp, Artificial Sequence
  Synthetic oligonucleotide
gtcccctttataggccttgtggaagagaca

SEQ ID NO: 347966 - DNA, 30 bp, Artificial Sequence
  Synthetic oligonucleotide
tatcccggcaaacttttgatcggagagaca

SEQ ID NO: 347967 - DNA, 30 bp, Artificial Sequence
  Synthetic oligonucleotide
tttggtctcatcgccgacacggacgagaca

SEQ ID NO: 347968 - DNA, 30 bp, Artificial Sequence
  Synthetic oligonucleotide
gggtctcggtttcccattacccgcgagaca

SEQ ID NO: 347969 - DNA, 30 bp, Artificial Sequence
  Synthetic oligonucleotide
cccacatttctgggaaatctttttgagaca

SEQ ID NO: 347970 - DNA, 30 bp, Artificial Sequence
  Synthetic oligonucleotide
acatggttctagggccgctgtcaatagaca

SEQ ID NO: 347971 - DNA, 30 bp, Artificial Sequence
  Synthetic oligonucleotide
caatagaagcatgcctttttaagatagaca

SEQ ID NO: 347972 - DNA, 30 bp, Artificial Sequence
  Synthetic oligonucleotide
agtactcgtgaagtatttaaactatagaca

SEQ ID NO: 347973 - DNA, 30 bp, Artificial Sequence
  Synthetic oligonucleotide
tacataccatctgcggctctgctatagaca

SEQ ID NO: 347974 - DNA, 30 bp, Artificial Sequence
  Synthetic oligonucleotide
atacttcgcatacccgagcgtaactagaca

SEQ ID NO: 347975 - DNA, 30 bp, Artificial Sequence
  Synthetic oligonucleotide
ggctttcgagacatccaacgacactagaca

SEQ ID NO: 347976 - DNA, 30 bp, Artificial Sequence
  Synthetic oligonucleotide
tattgtgcacctcatcctcgaacgtagaca

SEQ ID NO: 347977 - DNA, 30 bp, Artificial Sequence
  Synthetic oligonucleotide
ttgcacagcaaatcgtacgagaggtagaca

SEQ ID NO: 347978 - DNA, 30 bp, Artificial Sequence
  Synthetic oligonucleotide
atttggcacgctacataccgtgggtagaca

SEQ ID NO: 347979 - DNA, 30 bp, Artificial Sequence
  Synthetic oligonucleotide
ggggtatctcgttgttccaagagttagaca

SEQ ID NO: 347980 - DNA, 30 bp, Artificial Sequence
  Synthetic oligonucleotide
taatcctctttacgtgcggaactttagaca

SEQ ID NO: 347981 - DNA, 30 bp, Artificial Sequence
  Synthetic oligonucleotide
ttcgccatctggagggcctctgcaacgaca

SEQ ID NO: 347982 - DNA, 30 bp, Artificial Sequence
  Synthetic oligonucleotide
ctctagcagattagtcctcagagaacgaca

SEQ ID NO: 347983 - DNA, 30 bp, Artificial Sequence
  Synthetic oligonucleotide
gcacagggtgctatcgtactttgaacgaca

SEQ ID NO: 347984 - DNA, 30 bp, Artificial Sequence
  Synthetic oligonucleotide
ctacgattatatggggagattataacgaca

SEQ ID NO: 347985 - DNA, 30 bp, Artificial Sequence
  Synthetic oligonucleotide
tatgtgaccctcaaactctttcacacgaca

SEQ ID NO: 347986 - DNA, 30 bp, Artificial Sequence
  Synthetic oligonucleotide
ttcatctgtagacagtagacatacacgaca

SEQ ID NO: 347987 - DNA, 30 bp, Artificial Sequence
  Synthetic oligonucleotide
tagtcatttgactatacgacgcccacgaca

SEQ ID NO: 347988 - DNA, 30 bp, Artificial Sequence
  Synthetic oligonucleotide
attataccataccggcggacaaagacgaca

SEQ ID NO: 347989 - DNA, 30 bp, Artificial Sequence
  Synthetic oligonucleotide
tccgtatgtttgcaaaagtaggctacgaca

SEQ ID NO: 347990 - DNA, 30 bp, Artificial Sequence
  Synthetic oligonucleotide
tagagcagctaatggggatctggtacgaca

SEQ ID NO: 347991 - DNA, 30 bp, Artificial Sequence
  Synthetic oligonucleotide
ataataggatgtgagcggttctgtacgaca

SEQ ID NO: 347992 - DNA, 30 bp, Artificial Sequence
  Synthetic oligonucleotide
tatatgcaagatgctcaatggaaaccgaca

SEQ ID NO: 347993 - DNA, 27 bp, Artificial Sequence
  Synthetic oligonucleotide
tattaaagccgtcatcttgacccgaca

SEQ ID NO: 347994 - DNA, 30 bp, Artificial Sequence
  Synthetic oligonucleotide
ctaactgaaatacgcttaacgcagccgaca

SEQ ID NO: 347995 - DNA, 30 bp, Artificial Sequence
  Synthetic oligonucleotide
atagtgatggagatcgaaagtattccgaca

SEQ ID NO: 347996 - DNA, 30 bp, Artificial Sequence
  Synthetic oligonucleotide
cacagggtcccgggtggcgtggttccgaca

SEQ ID NO: 347997 - DNA, 30 bp, Artificial Sequence
  Synthetic oligonucleotide
gatcgggatggtcacgtaggtcaagcgaca

SEQ ID NO: 347998 - DNA, 30 bp, Artificial Sequence
  Synthetic oligonucleotide
ttattggtcgcgaatcaaagtcgtgcgaca

SEQ ID NO: 347999 - DNA, 30 bp, Artificial Sequence
  Synthetic oligonucleotide
gcgtacctctgcgagagtgctttctcgaca

SEQ ID NO: 348000 - DNA, 30 bp, Artificial Sequence
  Synthetic oligonucleotide
ctcgtccttctgcggacgcctaagtcgaca

SEQ ID NO: 348001 - DNA, 30 bp, Artificial Sequence
  Synthetic oligonucleotide
ggtccataacgttgcgtgccgctgtcgaca

SEQ ID NO: 348002 - DNA, 30 bp, Artificial Sequence
  Synthetic oligonucleotide
tcttggcatgtctggttaacgaattcgaca

SEQ ID NO: 348003 - DNA, 30 bp, Artificial Sequence
  Synthetic oligonucleotide
actaggcatatgacgggggttgtttcgaca

SEQ ID NO: 348004 - DNA, 30 bp, Artificial Sequence
  Synthetic oligonucleotide
tacggccaggaatcttttgagcaaaggaca

SEQ ID NO: 348005 - DNA, 30 bp, Artificial Sequence
  Synthetic oligonucleotide
tgtagattacggagcggaaatgagaggaca

SEQ ID NO: 348006 - DNA, 30 bp, Artificial Sequence
  Synthetic oligonucleotide
gtagggagacttttctattccacgaggaca

SEQ ID NO: 348007 - DNA, 30 bp, Artificial Sequence
  Synthetic oligonucleotide
attatgcccttgtagccaattctgaggaca

SEQ ID NO: 348008 - DNA, 30 bp, Artificial Sequence
  Synthetic oligonucleotide
ggtatcaacacactagtccttcataggaca

SEQ ID NO: 348009 - DNA, 30 bp, Artificial Sequence
  Synthetic oligonucleotide
cgaatggattagtatacgctgtataggaca

SEQ ID NO: 348010 - DNA, 30 bp, Artificial Sequence
  Synthetic oligonucleotide
aaagctatctgactggtagatcctaggaca

SEQ ID NO: 348011 - DNA, 30 bp, Artificial Sequence
  Synthetic oligonucleotide
tgaattgtcggtacttctgacggtaggaca

SEQ ID NO: 348012 - DNA, 30 bp, Artificial Sequence
  Synthetic oligonucleotide
tctccgggaactggcattttgattaggaca

SEQ ID NO: 348013 - DNA, 30 bp, Artificial Sequence
  Synthetic oligonucleotide
tagcgaggtgacgagaaaagtcgacggaca

SEQ ID NO: 348014 - DNA, 30 bp, Artificial Sequence
  Synthetic oligonucleotide
gctatagcatggctaccacgcgtacggaca

SEQ ID NO: 348015 - DNA, 30 bp, Artificial Sequence
  Synthetic oligonucleotide
gttcatgtcagggcctttcgctgccggaca

SEQ ID NO: 348016 - DNA, 30 bp, Artificial Sequence
  Synthetic oligonucleotide
atctctacagtctcaacacgtaagcggaca

SEQ ID NO: 348017 - DNA, 30 bp, Artificial Sequence
  Synthetic oligonucleotide
atattttcttcatcacgtaaaaatcggaca

SEQ ID NO: 348018 - DNA, 30 bp, Artificial Sequence
  Synthetic oligonucleotide
tcgagccgcgctacgatgctgactcggaca

SEQ ID NO: 348019 - DNA, 30 bp, Artificial Sequence
  Synthetic oligonucleotide
atctaatccaccacgcttacgcgtcggaca

SEQ ID NO: 348020 - DNA, 30 bp, Artificial Sequence
  Synthetic oligonucleotide
cttgcagggtcttggtgcggtgaagggaca

SEQ ID NO: 348021 - DNA, 30 bp, Artificial Sequence
  Synthetic oligonucleotide
ccaggcttgtcggcggctgccacagggaca

SEQ ID NO: 348022 - DNA, 30 bp, Artificial Sequence
  Synthetic oligonucleotide
tggtagtacgcgatcatgagacgagggaca

SEQ ID NO: 348023 - DNA, 30 bp, Artificial Sequence
  Synthetic oligonucleotide
agccacacgcatttctttactatagggaca

SEQ ID NO: 348024 - DNA, 30 bp, Artificial Sequence
  Synthetic oligonucleotide
tggcgatttgatgttcgcacgcaatggaca

SEQ ID NO: 348025 - DNA, 30 bp, Artificial Sequence
  Synthetic oligonucleotide
cgctcctcgaagaggcgcacaggatggaca

SEQ ID NO: 348026 - DNA, 30 bp, Artificial Sequence
  Synthetic oligonucleotide
gaagcaagcagaaaatactcgggatggaca

SEQ ID NO: 348027 - DNA, 30 bp, Artificial Sequence
  Synthetic oligonucleotide
tactatcaccttctggttgttatatggaca

SEQ ID NO: 348028 - DNA, 30 bp, Artificial Sequence
  Synthetic oligonucleotide
cactaggctagtgtacgaataggctggaca

SEQ ID NO: 348029 - DNA, 30 bp, Artificial Sequence
  Synthetic oligonucleotide
aagcttgccatttccgaatctatctggaca

SEQ ID NO: 348030 - DNA, 30 bp, Artificial Sequence
  Synthetic oligonucleotide
gattgaattggaatgcaagtcttctggaca

SEQ ID NO: 348031 - DNA, 30 bp, Artificial Sequence
  Synthetic oligonucleotide
ctcaggatagggactggaattacgtggaca

SEQ ID NO: 348032 - DNA, 30 bp, Artificial Sequence
  Synthetic oligonucleotide
ctaagggcaacactattgctccgaatgaca

SEQ ID NO: 348033 - DNA, 30 bp, Artificial Sequence
  Synthetic oligonucleotide
atgtattgttcacatatcacactcatgaca

SEQ ID NO: 348034 - DNA, 30 bp, Artificial Sequence
  Synthetic oligonucleotide
agtcaagtcatcctcgtagcaccgatgaca

SEQ ID NO: 348035 - DNA, 30 bp, Artificial Sequence
  Synthetic oligonucleotide
ccattcctcgaaccgcgaacggtgatgaca

SEQ ID NO: 348036 - DNA, 30 bp, Artificial Sequence
  Synthetic oligonucleotide
gtcagcttaccactatcgctatgactgaca

SEQ ID NO: 348037 - DNA, 30 bp, Artificial Sequence
  Synthetic oligonucleotide
agctctgcgcctctataattcgtactgaca

SEQ ID NO: 348038 - DNA, 30 bp, Artificial Sequence
  Synthetic oligonucleotide
atgcggatctcgatatttacggctctgaca

SEQ ID NO: 348039 - DNA, 30 bp, Artificial Sequence
  Synthetic oligonucleotide
gaaacgtcaatacataccgtacttctgaca

SEQ ID NO: 348040 - DNA, 30 bp, Artificial Sequence
  Synthetic oligonucleotide
cgctcggtaagggctggacgctgagtgaca

SEQ ID NO: 348041 - DNA, 30 bp, Artificial Sequence
  Synthetic oligonucleotide
tgtcattctggcagggacacgtccgtgaca

SEQ ID NO: 348042 - DNA, 30 bp, Artificial Sequence
  Synthetic oligonucleotide
gagaatggagtgacctcaggaagcgtgaca

SEQ ID NO: 348043 - DNA, 30 bp, Artificial Sequence
  Synthetic oligonucleotide
cccatctatcatccattggaatgggtgaca

SEQ ID NO: 348044 - DNA, 30 bp, Artificial Sequence
  Synthetic oligonucleotide
gacgactactacggacgacccgctgtgaca

SEQ ID NO: 348045 - DNA, 30 bp, Artificial Sequence
  Synthetic oligonucleotide
gcttgttttataatcagcccacgattgaca

SEQ ID NO: 348046 - DNA, 30 bp, Artificial Sequence
  Synthetic oligonucleotide
ggactctcgccatgggtcgccctattgaca

SEQ ID NO: 348047 - DNA, 30 bp, Artificial Sequence
  Synthetic oligonucleotide
atgacgtattcgcatgttaaccgcttgaca

SEQ ID NO: 348048 - DNA, 30 bp, Artificial Sequence
  Synthetic oligonucleotide
cagcagccatgggttcgggggcagttgaca

SEQ ID NO: 348049 - DNA, 30 bp, Artificial Sequence
  Synthetic oligonucleotide
gaaacgcagggcatgatgacagggttgaca

SEQ ID NO: 348050 - DNA, 30 bp, Artificial Sequence
  Synthetic oligonucleotide
aagaaattgattcaaatggtaactttgaca

SEQ ID NO: 348051 - DNA, 30 bp, Artificial Sequence
  Synthetic oligonucleotide
gttagtctggaggcactgatctgaaataca

SEQ ID NO: 348052 - DNA, 30 bp, Artificial Sequence
  Synthetic oligonucleotide
tcactatatatatggcgtactctaaataca

SEQ ID NO: 348053 - DNA, 30 bp, Artificial Sequence
  Synthetic oligonucleotide
cgcctagggctgtcttaactgttaaataca

SEQ ID NO: 348054 - DNA, 30 bp, Artificial Sequence
  Synthetic oligonucleotide
gtatactcggcgactatacaccacaataca

SEQ ID NO: 348055 - DNA, 30 bp, Artificial Sequence
  Synthetic oligonucleotide
tgttgctgattgcaatttcgatcgaataca

SEQ ID NO: 348056 - DNA, 30 bp, Artificial Sequence
  Synthetic oligonucleotide
aatgacgcgcctaatcaatggtgacataca

SEQ ID NO: 348057 - DNA, 30 bp, Artificial Sequence
  Synthetic oligonucleotide
gcgttaaatacggtgtaacggaaccataca

SEQ ID NO: 348058 - DNA, 30 bp, Artificial Sequence
  Synthetic oligonucleotide
gcagggagtgggggcatatcagcccataca

SEQ ID NO: 348059 - DNA, 30 bp, Artificial Sequence
  Synthetic oligonucleotide
aggagcacctatgaccatgggttccataca

SEQ ID NO: 348060 - DNA, 30 bp, Artificial Sequence
  Synthetic oligonucleotide
aagttacttgtgccatagcggacagataca

SEQ ID NO: 348061 - DNA, 30 bp, Artificial Sequence
  Synthetic oligonucleotide
gtactcgaagcatgttactgcggagataca

SEQ ID NO: 348062 - DNA, 30 bp, Artificial Sequence
  Synthetic oligonucleotide
aatcggtataagggagcaccaccggataca

SEQ ID NO: 348063 - DNA, 30 bp, Artificial Sequence
  Synthetic oligonucleotide
caatgaaaaggatcccatcggaatgataca

SEQ ID NO: 348064 - DNA, 30 bp, Artificial Sequence
  Synthetic oligonucleotide
ttaaaacctcactgcctcgaccctgataca

SEQ ID NO: 348065 - DNA, 30 bp, Artificial Sequence
  Synthetic oligonucleotide
aatgacggactttactcaatgtgtgataca

SEQ ID NO: 348066 - DNA, 30 bp, Artificial Sequence
  Synthetic oligonucleotide
cccgtagggtataacaagtgtttatataca

SEQ ID NO: 348067 - DNA, 30 bp, Artificial Sequence
  Synthetic oligonucleotide
cgccaataactgacgaatgcagtgtataca

SEQ ID NO: 348068 - DNA, 30 bp, Artificial Sequence
  Synthetic oligonucleotide
ttgttgtggagggctagtcccgcttataca

SEQ ID NO: 348069 - DNA, 30 bp, Artificial Sequence
  Synthetic oligonucleotide
tagtattcgttctagggcgccgtttataca

SEQ ID NO: 348070 - DNA, 30 bp, Artificial Sequence
  Synthetic oligonucleotide
aaccgcgcgagtgacaactcccgaactaca

SEQ ID NO: 348071 - DNA, 30 bp, Artificial Sequence
  Synthetic oligonucleotide
gcagcctttaggacacttagggtaactaca

SEQ ID NO: 348072 - DNA, 30 bp, Artificial Sequence
  Synthetic oligonucleotide
gagcccttaaagatccttaagaccactaca

SEQ ID NO: 348073 - DNA, 30 bp, Artificial Sequence
  Synthetic oligonucleotide
gccttcgtgagggcgccgtgatttactaca

SEQ ID NO: 348074 - DNA, 30 bp, Artificial Sequence
  Synthetic oligonucleotide
ccttttaccaacaatttaagtgagcctaca

SEQ ID NO: 348075 - DNA, 30 bp, Artificial Sequence
  Synthetic oligonucleotide
ttaagtctgctatcccgatctgtgcctaca

SEQ ID NO: 348076 - DNA, 30 bp, Artificial Sequence
  Synthetic oligonucleotide
tccaggccgcacagacaatggtctcctaca

SEQ ID NO: 348077 - DNA, 30 bp, Artificial Sequence
  Synthetic oligonucleotide
acgcagtagtctgaacccgaaaccgctaca

SEQ ID NO: 348078 - DNA, 30 bp, Artificial Sequence
  Synthetic oligonucleotide
acaccattgtaggagctcggttcggctaca

SEQ ID NO: 348079 - DNA, 30 bp, Artificial Sequence
  Synthetic oligonucleotide
tcgttcgtaacagcgatgctacgtgctaca

SEQ ID NO: 348080 - DNA, 30 bp, Artificial Sequence
  Synthetic oligonucleotide
tttcgctcgaaagaaagcatctttgctaca

SEQ ID NO: 348081 - DNA, 30 bp, Artificial Sequence
  Synthetic oligonucleotide
gaatggtcaaatatccaatgataatctaca

SEQ ID NO: 348082 - DNA, 30 bp, Artificial Sequence
  Synthetic oligonucleotide
gcgtcggatagtaacaagtaacgctctaca

SEQ ID NO: 348083 - DNA, 30 bp, Artificial Sequence
  Synthetic oligonucleotide
catgacctgttgcacaaggagaagtctaca

SEQ ID NO: 348084 - DNA, 30 bp, Artificial Sequence
  Synthetic oligonucleotide
cttgttcgccatcaagagtagtagtctaca

SEQ ID NO: 348085 - DNA, 30 bp, Artificial Sequence
  Synthetic oligonucleotide
tgggcttatatgtcttttgtacggtctaca

SEQ ID NO: 348086 - DNA, 30 bp, Artificial Sequence
  Synthetic oligonucleotide
gagtccttgtatggcggtgacacaagtaca

SEQ ID NO: 348087 - DNA, 30 bp, Artificial Sequence
  Synthetic oligonucleotide
cgactcttgaagcgggacagcgccagtaca

SEQ ID NO: 348088 - DNA, 30 bp, Artificial Sequence
  Synthetic oligonucleotide
tttggttaacagagaaatcaggccagtaca

SEQ ID NO: 348089 - DNA, 30 bp, Artificial Sequence
  Synthetic oligonucleotide
tgctgttttacactaacaataggcagtaca

SEQ ID NO: 348090 - DNA, 30 bp, Artificial Sequence
  Synthetic oligonucleotide
aaccaggagtaactttcgcgcagtagtaca

SEQ ID NO: 348091 - DNA, 30 bp, Artificial Sequence
  Synthetic oligonucleotide
cgaagtttaaccttaatcacatgtagtaca

SEQ ID NO: 348092 - DNA, 30 bp, Artificial Sequence
  Synthetic oligonucleotide
tccacgatcaacgtggattccacacgtaca

SEQ ID NO: 348093 - DNA, 30 bp, Artificial Sequence
  Synthetic oligonucleotide
aagttctacttgcacaaattgtgacgtaca

SEQ ID NO: 348094 - DNA, 30 bp, Artificial Sequence
  Synthetic oligonucleotide
aagtcaaaacgcggctaactaaaccgtaca

SEQ ID NO: 348095 - DNA, 30 bp, Artificial Sequence
  Synthetic oligonucleotide
catttcggaactaaccagttaagccgtaca

SEQ ID NO: 348096 - DNA, 30 bp, Artificial Sequence
  Synthetic oligonucleotide
agccgaaacatgcgagttgtaatccgtaca

SEQ ID NO: 348097 - DNA, 30 bp, Artificial Sequence
  Synthetic oligonucleotide
cgcgcctgaaaacgggtccgcaagcgtaca

SEQ ID NO: 348098 - DNA, 30 bp, Artificial Sequence
  Synthetic oligonucleotide
taagcgccgcacgcgtcaaggtatcgtaca

SEQ ID NO: 348099 - DNA, 30 bp, Artificial Sequence
  Synthetic oligonucleotide
catacctgggtcactgggttccctcgtaca

SEQ ID NO: 348100 - DNA, 30 bp, Artificial Sequence
  Synthetic oligonucleotide
tcggggctgcgtaaccggttcagtcgtaca

SEQ ID NO: 348101 - DNA, 30 bp, Artificial Sequence
  Synthetic oligonucleotide
gagtgatacgtggatactggccgtcgtaca

SEQ ID NO: 348102 - DNA, 30 bp, Artificial Sequence
  Synthetic oligonucleotide
tagcgtgctcccatagaactaggaggtaca

SEQ ID NO: 348103 - DNA, 30 bp, Artificial Sequence
  Synthetic oligonucleotide
tttataagcaatagagcacgaacgggtaca

SEQ ID NO: 348104 - DNA, 30 bp, Artificial Sequence
  Synthetic oligonucleotide
ttgaaaaacttggcgttatgtatgggtaca

SEQ ID NO: 348105 - DNA, 30 bp, Artificial Sequence
  Synthetic oligonucleotide
atattctttttgggagtaaggctgggtaca

SEQ ID NO: 348106 - DNA, 30 bp, Artificial Sequence
  Synthetic oligonucleotide
ttggtgtggggggggtttttattgggtaca

SEQ ID NO: 348107 - DNA, 30 bp, Artificial Sequence
  Synthetic oligonucleotide
cgtatgccaactaacggataatgtggtaca

SEQ ID NO: 348108 - DNA, 30 bp, Artificial Sequence
  Synthetic oligonucleotide
gatacgaagatgacgggagtagttggtaca

SEQ ID NO: 348109 - DNA, 30 bp, Artificial Sequence
  Synthetic oligonucleotide
ctctccccggcttaacaaactgtatgtaca

SEQ ID NO: 348110 - DNA, 30 bp, Artificial Sequence
  Synthetic oligonucleotide
ttaataattgcaattgcggtggactgtaca

SEQ ID NO: 348111 - DNA, 30 bp, Artificial Sequence
  Synthetic oligonucleotide
tttacccgtactgtgatattaggctgtaca

SEQ ID NO: 348112 - DNA, 30 bp, Artificial Sequence
  Synthetic oligonucleotide
agggctcagggtgtaacggggcagtgtaca

SEQ ID NO: 348113 - DNA, 30 bp, Artificial Sequence
  Synthetic oligonucleotide
ggagttcttcactggaacataaggtgtaca

SEQ ID NO: 348114 - DNA, 30 bp, Artificial Sequence
  Synthetic oligonucleotide
gcccagtctgtgccgaaggtgcggtgtaca

SEQ ID NO: 348115 - DNA, 30 bp, Artificial Sequence
  Synthetic oligonucleotide
agcctggtgccgttgtatcaggtgtgtaca

SEQ ID NO: 348116 - DNA, 30 bp, Artificial Sequence
  Synthetic oligonucleotide
ctctgagcttggtgagactgatattgtaca

SEQ ID NO: 348117 - DNA, 30 bp, Artificial Sequence
  Synthetic oligonucleotide
gtatgattcgattgcgtcgttccttgtaca

SEQ ID NO: 348118 - DNA, 30 bp, Artificial Sequence
  Synthetic oligonucleotide
agataacaagtacgcggggtaaaaattaca

SEQ ID NO: 348119 - DNA, 30 bp, Artificial Sequence
  Synthetic oligonucleotide
caagcccaaatcgggcagttgataattaca

SEQ ID NO: 348120 - DNA, 30 bp, Artificial Sequence
  Synthetic oligonucleotide
taacagtgactgtaatgtcgagacattaca

SEQ ID NO: 348121 - DNA, 30 bp, Artificial Sequence
  Synthetic oligonucleotide
ctcctcaattcaggccatagactcattaca

SEQ ID NO: 348122 - DNA, 30 bp, Artificial Sequence
  Synthetic oligonucleotide
aattgctgaggcgtgggtacgttcattaca

SEQ ID NO: 348123 - DNA, 30 bp, Artificial Sequence
  Synthetic oligonucleotide
gaggctcttgaggaccagcgaaagattaca

SEQ ID NO: 348124 - DNA, 30 bp, Artificial Sequence
  Synthetic oligonucleotide
aatatcagttggtctaattacaagattaca

SEQ ID NO: 348125 - DNA, 30 bp, Artificial Sequence
  Synthetic oligonucleotide
cgccatcaactaggtaagcgcaggattaca

SEQ ID NO: 348126 - DNA, 30 bp, Artificial Sequence
  Synthetic oligonucleotide
ggaagtaatccgttctcttgtgggattaca

SEQ ID NO: 348127 - DNA, 30 bp, Artificial Sequence
  Synthetic oligonucleotide
ctgccgctgtcacaaatttgagctattaca

SEQ ID NO: 348128 - DNA, 30 bp, Artificial Sequence
  Synthetic oligonucleotide
actaggtagccacgatttgtagaacttaca

SEQ ID NO: 348129 - DNA, 30 bp, Artificial Sequence
  Synthetic oligonucleotide
acagagttatgatggtgatggttacttaca

SEQ ID NO: 348130 - DNA, 30 bp, Artificial Sequence
  Synthetic oligonucleotide
gatagttaaaagcgtctacgcgcccttaca

SEQ ID NO: 348131 - DNA, 30 bp, Artificial Sequence
  Synthetic oligonucleotide
ttccgccgagtattatttcgtagccttaca

SEQ ID NO: 348132 - DNA, 30 bp, Artificial Sequence
  Synthetic oligonucleotide
gggtttgcctagtgggaccgcatccttaca

SEQ ID NO: 348133 - DNA, 30 bp, Artificial Sequence
  Synthetic oligonucleotide
tctcacataatgacacctgtgtacgttaca

SEQ ID NO: 348134 - DNA, 30 bp, Artificial Sequence
  Synthetic oligonucleotide
gggcattctaagtagggactagccgttaca

SEQ ID NO: 348135 - DNA, 30 bp, Artificial Sequence
  Synthetic oligonucleotide
cgtatgcattatgcaaacatttcggttaca

SEQ ID NO: 348136 - DNA, 30 bp, Artificial Sequence
  Synthetic oligonucleotide
cttaatccggagggtgccccctgtgttaca

SEQ ID NO: 348137 - DNA, 30 bp, Artificial Sequence
  Synthetic oligonucleotide
tgggcagaccaggcaagttacacatttaca

SEQ ID NO: 348138 - DNA, 30 bp, Artificial Sequence
  Synthetic oligonucleotide
ccatgatttcagagactcgtaatctttaca

SEQ ID NO: 348139 - DNA, 30 bp, Artificial Sequence
  Synthetic oligonucleotide
aaaagcgaaactcgtcagtgtacgtttaca

SEQ ID NO: 348140 - DNA, 30 bp, Artificial Sequence
  Synthetic oligonucleotide
gcaccaatacatcgttattattggtttaca

SEQ ID NO: 348141 - DNA, 30 bp, Artificial Sequence
  Synthetic oligonucleotide
ttcttcatcaatattgtaagctattttaca

SEQ ID NO: 348142 - DNA, 30 bp, Artificial Sequence
  Synthetic oligonucleotide
atcccggcgatgctcatttaggtttttaca

SEQ ID NO: 348143 - DNA, 30 bp, Artificial Sequence
  Synthetic oligonucleotide
aaagtaagcgcatgtcaaagtttttttaca

SEQ ID NO: 348144 - DNA, 30 bp, Artificial Sequence
  Synthetic oligonucleotide
ctccggggctttcgacccagagcaaaacca

SEQ ID NO: 348145 - DNA, 30 bp, Artificial Sequence
  Synthetic oligonucleotide
atgctgcggataaccccacgctgaaaacca

SEQ ID NO: 348146 - DNA, 30 bp, Artificial Sequence
  Synthetic oligonucleotide
tgtttggctttaggaaaaatggcgaaacca

SEQ ID NO: 348147 - DNA, 30 bp, Artificial Sequence
  Synthetic oligonucleotide
actatagggtattctgacggcaggaaacca

SEQ ID NO: 348148 - DNA, 30 bp, Artificial Sequence
  Synthetic oligonucleotide
ttcccgcatttaacgagtatttctaaacca

SEQ ID NO: 348149 - DNA, 30 bp, Artificial Sequence
  Synthetic oligonucleotide
gatatccaaacacgctggtatgaacaacca

SEQ ID NO: 348150 - DNA, 30 bp, Artificial Sequence
  Synthetic oligonucleotide
attttgctcgaatcatcatctagacaacca

SEQ ID NO: 348151 - DNA, 30 bp, Artificial Sequence
  Synthetic oligonucleotide
agtcgttgatgaacagtagcgggacaacca

SEQ ID NO: 348152 - DNA, 30 bp, Artificial Sequence
  Synthetic oligonucleotide
agttaaacgacagcatcaaccatacaacca

SEQ ID NO: 348153 - DNA, 30 bp, Artificial Sequence
  Synthetic oligonucleotide
gcattggaccctggaaaacatttacaacca

SEQ ID NO: 348154 - DNA, 30 bp, Artificial Sequence
  Synthetic oligonucleotide
tgaagagttaaaaactttcgttggcaacca

SEQ ID NO: 348155 - DNA, 30 bp, Artificial Sequence
  Synthetic oligonucleotide
aaacctcggcattcatcagccttgcaacca

SEQ ID NO: 348156 - DNA, 30 bp, Artificial Sequence
  Synthetic oligonucleotide
atgattcgaactccggcgctgcctcaacca

SEQ ID NO: 348157 - DNA, 30 bp, Artificial Sequence
  Synthetic oligonucleotide
gtctcgcacgtaccgtaactttttcaacca

SEQ ID NO: 348158 - DNA, 30 bp, Artificial Sequence
  Synthetic oligonucleotide
aatagtttcaacctcacaactccagaacca

SEQ ID NO: 348159 - DNA, 30 bp, Artificial Sequence
  Synthetic oligonucleotide
cgtacgctggaacagaaacctatagaacca

SEQ ID NO: 348160 - DNA, 31 bp, Artificial Sequence
  Synthetic oligonucleotide
gaagcatcgtgatacgggattattagaacca

SEQ ID NO: 348161 - DNA, 30 bp, Artificial Sequence
  Synthetic oligonucleotide
gtgttgactctcaaaccacgctgcgaacca

SEQ ID NO: 348162 - DNA, 30 bp, Artificial Sequence
  Synthetic oligonucleotide
gggaatgggattacggtggggtgggaacca

SEQ ID NO: 348163 - DNA, 30 bp, Artificial Sequence
  Synthetic oligonucleotide
gatgtcctgggaaaacgcacaattgaacca

SEQ ID NO: 348164 - DNA, 30 bp, Artificial Sequence
  Synthetic oligonucleotide
tataagccataaaagaacggagcataacca

SEQ ID NO: 348165 - DNA, 30 bp, Artificial Sequence
  Synthetic oligonucleotide
ttccggctcctgggagctaacagataacca

SEQ ID NO: 348166 - DNA, 30 bp, Artificial Sequence
  Synthetic oligonucleotide
taaaacatgatcgggtctcctggataacca

SEQ ID NO: 348167 - DNA, 30 bp, Artificial Sequence
  Synthetic oligonucleotide
tttcctcccagccaatctcacaattaacca

SEQ ID NO: 348168 - DNA, 30 bp, Artificial Sequence
  Synthetic oligonucleotide
atcacacggaacgtctaattcaattaacca

SEQ ID NO: 348169 - DNA, 30 bp, Artificial Sequence
  Synthetic oligonucleotide
gcgacctgcaggtagccagtaggcacacca

SEQ ID NO: 348170 - DNA, 30 bp, Artificial Sequence
  Synthetic oligonucleotide
ctattagatcaaatcgcgttaatcacacca

SEQ ID NO: 348171 - DNA, 30 bp, Artificial Sequence
  Synthetic oligonucleotide
aaactgcatgtgcgcctcgcatcgacacca

SEQ ID NO: 348172 - DNA, 30 bp, Artificial Sequence
  Synthetic oligonucleotide
ccacgaaccgaaaaggaaatggtgacacca

SEQ ID NO: 348173 - DNA, 30 bp, Artificial Sequence
  Synthetic oligonucleotide
aatcgtttagcatgtcataagcgtacacca

SEQ ID NO: 348174 - DNA, 30 bp, Artificial Sequence
  Synthetic oligonucleotide
aatcatcaatgcaacacaagcggtacacca

SEQ ID NO: 348175 - DNA, 30 bp, Artificial Sequence
  Synthetic oligonucleotide
tagggtatactaaattgaggagcaccacca

SEQ ID NO: 348176 - DNA, 30 bp, Artificial Sequence
  Synthetic oligonucleotide
atgcggcggctccagttataacgcccacca

SEQ ID NO: 348177 - DNA, 30 bp, Artificial Sequence
  Synthetic oligonucleotide
aacccatgatgaatacgggcgatcccacca

SEQ ID NO: 348178 - DNA, 30 bp, Artificial Sequence
  Synthetic oligonucleotide
atggggtttttacacaattacgagccacca

SEQ ID NO: 348179 - DNA, 30 bp, Artificial Sequence
  Synthetic oligonucleotide
gcgaataaggaaacaattttggagccacca

SEQ ID NO: 348180 - DNA, 30 bp, Artificial Sequence
  Synthetic oligonucleotide
ttcacacgtgtacgcgatccctggccacca

SEQ ID NO: 348181 - DNA, 30 bp, Artificial Sequence
  Synthetic oligonucleotide
cggtcgttagtataggtcgtgctgccacca

SEQ ID NO: 348182 - DNA, 30 bp, Artificial Sequence
  Synthetic oligonucleotide
tagaatgccatggcagtagtcaaagcacca

SEQ ID NO: 348183 - DNA, 30 bp, Artificial Sequence
  Synthetic oligonucleotide
caatggttcgttggggttatttaagcacca

SEQ ID NO: 348184 - DNA, 30 bp, Artificial Sequence
  Synthetic oligonucleotide
gctccgcgattcctgtttctcagagcacca

SEQ ID NO: 348185 - DNA, 30 bp, Artificial Sequence
  Synthetic oligonucleotide
aattaagatgggaagttgcctggcgcacca

SEQ ID NO: 348186 - DNA, 30 bp, Artificial Sequence
  Synthetic oligonucleotide
ctcggctttgatttcgactgcctcgcacca

SEQ ID NO: 348187 - DNA, 30 bp, Artificial Sequence
  Synthetic oligonucleotide
atacgttcgatctacgttgtagatgcacca

SEQ ID NO: 348188 - DNA, 30 bp, Artificial Sequence
  Synthetic oligonucleotide
tctataaatatcgacagatgttgatcacca

SEQ ID NO: 348189 - DNA, 30 bp, Artificial Sequence
  Synthetic oligonucleotide
ggaatatccatcggccttcgaccctcacca

SEQ ID NO: 348190 - DNA, 30 bp, Artificial Sequence
  Synthetic oligonucleotide
agtgaaatactgagcaatataagctcacca

SEQ ID NO: 348191 - DNA, 30 bp, Artificial Sequence
  Synthetic oligonucleotide
cctcttggcaggatgctggattagtcacca

SEQ ID NO: 348192 - DNA, 30 bp, Artificial Sequence
  Synthetic oligonucleotide
ctcaatcgcttgcgttatggaacaagacca

SEQ ID NO: 348193 - DNA, 30 bp, Artificial Sequence
  Synthetic oligonucleotide
atgcttgatgctcaagggcagaccagacca

SEQ ID NO: 348194 - DNA, 30 bp, Artificial Sequence
  Synthetic oligonucleotide
cttcgtggagatcaccctgacaagagacca

SEQ ID NO: 348195 - DNA, 30 bp, Artificial Sequence
  Synthetic oligonucleotide
atggtgaagctttctgggagctcgagacca

SEQ ID NO: 348196 - DNA, 30 bp, Artificial Sequence
  Synthetic oligonucleotide
actggagcgtttacgggtgaagaacgacca

SEQ ID NO: 348197 - DNA, 30 bp, Artificial Sequence
  Synthetic oligonucleotide
ctgctgtattagcctgatttcccgcgacca

SEQ ID NO: 348198 - DNA, 30 bp, Artificial Sequence
  Synthetic oligonucleotide
agcaatgtacgttgactatagctgcgacca

SEQ ID NO: 348199 - DNA, 30 bp, Artificial Sequence
  Synthetic oligonucleotide
agaaaccacggtgacgttcatcccggacca

SEQ ID NO: 348200 - DNA, 30 bp, Artificial Sequence
  Synthetic oligonucleotide
agcttttatacataggttatatagggacca

SEQ ID NO: 348201 - DNA, 30 bp, Artificial Sequence
  Synthetic oligonucleotide
atctccgccaattgtccatttgtgggacca

SEQ ID NO: 348202 - DNA, 30 bp, Artificial Sequence
  Synthetic oligonucleotide
gatttcatcatacctattcaaagatgacca

SEQ ID NO: 348203 - DNA, 30 bp, Artificial Sequence
  Synthetic oligonucleotide
cttcaagtggactaacgtcgatgctgacca

SEQ ID NO: 348204 - DNA, 30 bp, Artificial Sequence
  Synthetic oligonucleotide
gttaccagcagaatgacaccagcgtgacca

SEQ ID NO: 348205 - DNA, 30 bp, Artificial Sequence
  Synthetic oligonucleotide
gagtccagtataaactaagaagggtgacca

SEQ ID NO: 348206 - DNA, 30 bp, Artificial Sequence
  Synthetic oligonucleotide
cggtcggctcgctgagggtaaagcatacca

SEQ ID NO: 348207 - DNA, 30 bp, Artificial Sequence
  Synthetic oligonucleotide
tatatgggtaacaggccagcaatcatacca

SEQ ID NO: 348208 - DNA, 30 bp, Artificial Sequence
  Synthetic oligonucleotide
atatggatggggtctaggcacctcatacca

SEQ ID NO: 348209 - DNA, 30 bp, Artificial Sequence
  Synthetic oligonucleotide
tacgaggcagagctttgcaaaagtatacca

SEQ ID NO: 348210 - DNA, 30 bp, Artificial Sequence
  Synthetic oligonucleotide
gcgacgatttatgggattgcccgtatacca

SEQ ID NO: 348211 - DNA, 30 bp, Artificial Sequence
  Synthetic oligonucleotide
cccgtgctaacaactactattagcctacca

SEQ ID NO: 348212 - DNA, 30 bp, Artificial Sequence
  Synthetic oligonucleotide
agtacttcccgctagcgccttgtgctacca

SEQ ID NO: 348213 - DNA, 30 bp, Artificial Sequence
  Synthetic oligonucleotide
atctaatatcacgaatggtatcccgtacca

SEQ ID NO: 348214 - DNA, 30 bp, Artificial Sequence
  Synthetic oligonucleotide
gactgaggtacttttgaccgttccgtacca

SEQ ID NO: 348215 - DNA, 30 bp, Artificial Sequence
  Synthetic oligonucleotide
gccactagcggtgtctctacttgcgtacca

SEQ ID NO: 348216 - DNA, 30 bp, Artificial Sequence
  Synthetic oligonucleotide
gagggtcttgggggaacgctagccttacca

SEQ ID NO: 348217 - DNA, 30 bp, Artificial Sequence
  Synthetic oligonucleotide
ataatattcaaagaaaaatgcccgttacca

SEQ ID NO: 348218 - DNA, 30 bp, Artificial Sequence
  Synthetic oligonucleotide
aactgagcactataaactagtactttacca

SEQ ID NO: 348219 - DNA, 30 bp, Artificial Sequence
  Synthetic oligonucleotide
taaatacgaagtcgtaaagcacctttacca

SEQ ID NO: 348220 - DNA, 30 bp, Artificial Sequence
  Synthetic oligonucleotide
ttggggtacggacatggctacgaaaaccca

SEQ ID NO: 348221 - DNA, 30 bp, Artificial Sequence
  Synthetic oligonucleotide
tacattttcaaggagagtcagacaaaccca

SEQ ID NO: 348222 - DNA, 30 bp, Artificial Sequence
  Synthetic oligonucleotide
cttggggctcgagccagcgatgcaaaccca

SEQ ID NO: 348223 - DNA, 30 bp, Artificial Sequence
  Synthetic oligonucleotide
gatagagttggatttcaacatcgaaaccca

SEQ ID NO: 348224 - DNA, 30 bp, Artificial Sequence
  Synthetic oligonucleotide
agaatgggattataaatgaccaccaaccca

SEQ ID NO: 348225 - DNA, 30 bp, Artificial Sequence
  Synthetic oligonucleotide
cgcccgaattcgggtgattctaccaaccca

SEQ ID NO: 348226 - DNA, 30 bp, Artificial Sequence
  Synthetic oligonucleotide
cttaatgacaagaccattaggatgaaccca

SEQ ID NO: 348227 - DNA, 30 bp, Artificial Sequence
  Synthetic oligonucleotide
cgatttgtgccgcgccacctcgtgaaccca

SEQ ID NO: 348228 - DNA, 30 bp, Artificial Sequence
  Synthetic oligonucleotide
aatagagcagcaaagtgcgtttataaccca

SEQ ID NO: 348229 - DNA, 30 bp, Artificial Sequence
  Synthetic oligonucleotide
tcccccagcatacgagatggacgtaaccca

SEQ ID NO: 348230 - DNA, 30 bp, Artificial Sequence
  Synthetic oligonucleotide
tcatcaatgtaggaggttccggtacaccca

SEQ ID NO: 348231 - DNA, 30 bp, Artificial Sequence
  Synthetic oligonucleotide
gactgtcgttatggtgtaacattacaccca

SEQ ID NO: 348232 - DNA, 30 bp, Artificial Sequence
  Synthetic oligonucleotide
ggaactgtcccccgatcccgtcgccaccca

SEQ ID NO: 348233 - DNA, 30 bp, Artificial Sequence
  Synthetic oligonucleotide
ataatggtagtacattaggaaggccaccca

SEQ ID NO: 348234 - DNA, 30 bp, Artificial Sequence
  Synthetic oligonucleotide
gccactaatccattcgcttgagtggaccca

SEQ ID NO: 348235 - DNA, 30 bp, Artificial Sequence
  Synthetic oligonucleotide
catgaatatttatacttgccacatgaccca

SEQ ID NO: 348236 - DNA, 30 bp, Artificial Sequence
  Synthetic oligonucleotide
cggaatgtacaatccattggtcctgaccca

SEQ ID NO: 348237 - DNA, 30 bp, Artificial Sequence
  Synthetic oligonucleotide
cacacgattggggtcctagtccttgaccca

SEQ ID NO: 348238 - DNA, 30 bp, Artificial Sequence
  Synthetic oligonucleotide
acaattccgttgctttcccaacactaccca

SEQ ID NO: 348239 - DNA, 28 bp, Artificial Sequence
  Synthetic oligonucleotide
ggtcatgggtgaaattagcaattaccca

SEQ ID NO: 348240 - DNA, 30 bp, Artificial Sequence
  Synthetic oligonucleotide
cagatccgagtgcagaagattgattaccca

SEQ ID NO: 348241 - DNA, 30 bp, Artificial Sequence
  Synthetic oligonucleotide
ttcacgatcctccaacgagcgggttaccca

SEQ ID NO: 348242 - DNA, 30 bp, Artificial Sequence
  Synthetic oligonucleotide
ctggagattcttgacgttcctttttaccca

SEQ ID NO: 348243 - DNA, 30 bp, Artificial Sequence
  Synthetic oligonucleotide
tatctgcagtcatatctgcgtttttaccca

SEQ ID NO: 348244 - DNA, 30 bp, Artificial Sequence
  Synthetic oligonucleotide
acgtaccctcaactgttagggcaaacccca

SEQ ID NO: 348245 - DNA, 30 bp, Artificial Sequence
  Synthetic oligonucleotide
gatgcagtactacactcgaatgaaacccca

SEQ ID NO: 348246 - DNA, 30 bp, Artificial Sequence
  Synthetic oligonucleotide
tacccatcaacttccagcgatcagacccca

SEQ ID NO: 348247 - DNA, 30 bp, Artificial Sequence
  Synthetic oligonucleotide
cgtgatttcgttgcttacatcataccccca

SEQ ID NO: 348248 - DNA, 30 bp, Artificial Sequence
  Synthetic oligonucleotide
cttaaatttaacaaatgacggaggccccca

SEQ ID NO: 348249 - DNA, 30 bp, Artificial Sequence
  Synthetic oligonucleotide
accgtttccaccagatatgtcagtccccca

SEQ ID NO: 348250 - DNA, 30 bp, Artificial Sequence
  Synthetic oligonucleotide
aatagatacgatgccgctgaaagagcccca

SEQ ID NO: 348251 - DNA, 30 bp, Artificial Sequence
  Synthetic oligonucleotide
aagaagccttgagtcgtggacggagcccca

SEQ ID NO: 348252 - DNA, 30 bp, Artificial Sequence
  Synthetic oligonucleotide
gtgtagaactgtgctaatagtggtgcccca

SEQ ID NO: 348253 - DNA, 30 bp, Artificial Sequence
  Synthetic oligonucleotide
cttcagtgatagcgggtggagccctcccca

SEQ ID NO: 348254 - DNA, 30 bp, Artificial Sequence
  Synthetic oligonucleotide
acgtaaatccgggggtcgcggcattcccca

SEQ ID NO: 348255 - DNA, 30 bp, Artificial Sequence
  Synthetic oligonucleotide
gatagctttcggcactcaacactttcccca

SEQ ID NO: 348256 - DNA, 30 bp, Artificial Sequence
  Synthetic oligonucleotide
gatgcttgtacaacgctacttaaaagccca

SEQ ID NO: 348257 - DNA, 30 bp, Artificial Sequence
  Synthetic oligonucleotide
ccggtgctgatctcgtgtatttgaagccca

SEQ ID NO: 348258 - DNA, 30 bp, Artificial Sequence
  Synthetic oligonucleotide
atccacacgcttccaaaagtcgtaagccca

SEQ ID NO: 348259 - DNA, 30 bp, Artificial Sequence
  Synthetic oligonucleotide
tccaaagcacgctggcgctcgaagagccca

SEQ ID NO: 348260 - DNA, 30 bp, Artificial Sequence
  Synthetic oligonucleotide
agtagataagtatttcgattccggagccca

SEQ ID NO: 348261 - DNA, 30 bp, Artificial Sequence
  Synthetic oligonucleotide
gcttgcagtatggagccaattgggagccca

SEQ ID NO: 348262 - DNA, 30 bp, Artificial Sequence
  Synthetic oligonucleotide
tatgagaccttcgcaatgcaatggagccca

SEQ ID NO: 348263 - DNA, 30 bp, Artificial Sequence
  Synthetic oligonucleotide
caagtggtcgttgctaggagcactagccca

SEQ ID NO: 348264 - DNA, 30 bp, Artificial Sequence
  Synthetic oligonucleotide
tagtggcagacctttggcttgggacgccca

SEQ ID NO: 348265 - DNA, 30 bp, Artificial Sequence
  Synthetic oligonucleotide
gcaaactgttgtactcaagatccccgccca

SEQ ID NO: 348266 - DNA, 30 bp, Artificial Sequence
  Synthetic oligonucleotide
tactgacgaataaggcgacgtgatcgccca

SEQ ID NO: 348267 - DNA, 30 bp, Artificial Sequence
  Synthetic oligonucleotide
caaaagcatgacacaagtcacgttcgccca

SEQ ID NO: 348268 - DNA, 30 bp, Artificial Sequence
  Synthetic oligonucleotide
attatggattggttacttggagacggccca

SEQ ID NO: 348269 - DNA, 30 bp, Artificial Sequence
  Synthetic oligonucleotide
ggaagacatgcggagattcgttagggccca

SEQ ID NO: 348270 - DNA, 30 bp, Artificial Sequence
  Synthetic oligonucleotide
catgggcgggtctgaaaaggcacgggccca

SEQ ID NO: 348271 - DNA, 30 bp, Artificial Sequence
  Synthetic oligonucleotide
tagaggatgagtgtccggtacatgggccca

SEQ ID NO: 348272 - DNA, 30 bp, Artificial Sequence
  Synthetic oligonucleotide
gtttcactgagttacttcgtgatgggccca

SEQ ID NO: 348273 - DNA, 30 bp, Artificial Sequence
  Synthetic oligonucleotide
gtaagcacaatctcaatcttgatgggccca

SEQ ID NO: 348274 - DNA, 30 bp, Artificial Sequence
  Synthetic oligonucleotide
ggaatacgaggtccatgtcgacttggccca

SEQ ID NO: 348275 - DNA, 30 bp, Artificial Sequence
  Synthetic oligonucleotide
tcacatgcatgaggctcaatacactgccca

SEQ ID NO: 348276 - DNA, 30 bp, Artificial Sequence
  Synthetic oligonucleotide
tagcagagcaagtgtataatttactgccca

SEQ ID NO: 348277 - DNA, 30 bp, Artificial Sequence
  Synthetic oligonucleotide
acctggcacagtatcgcttatggctgccca

SEQ ID NO: 348278 - DNA, 30 bp, Artificial Sequence
  Synthetic oligonucleotide
gggagaatcctagcactcttgcagtgccca

SEQ ID NO: 348279 - DNA, 30 bp, Artificial Sequence
  Synthetic oligonucleotide
aggtatcactttgttcgtcagctgtgccca

SEQ ID NO: 348280 - DNA, 30 bp, Artificial Sequence
  Synthetic oligonucleotide
atcggttatcgccagtactattcaatccca

SEQ ID NO: 348281 - DNA, 30 bp, Artificial Sequence
  Synthetic oligonucleotide
gccatctcaccagggtccaaacgaatccca

SEQ ID NO: 348282 - DNA, 30 bp, Artificial Sequence
  Synthetic oligonucleotide
gtacacttataactagtctttcccatccca

SEQ ID NO: 348283 - DNA, 30 bp, Artificial Sequence
  Synthetic oligonucleotide
gcttggcgttcctttccagataggatccca

SEQ ID NO: 348284 - DNA, 30 bp, Artificial Sequence
  Synthetic oligonucleotide
gagatcctggaggcatgaccgcctatccca

SEQ ID NO: 348285 - DNA, 30 bp, Artificial Sequence
  Synthetic oligonucleotide
accaagcgctatcagtgataatcactccca

SEQ ID NO: 348286 - DNA, 30 bp, Artificial Sequence
  Synthetic oligonucleotide
aaccttctcggacatctacagcacctccca

SEQ ID NO: 348287 - DNA, 30 bp, Artificial Sequence
  Synthetic oligonucleotide
tcaggatgcaggagcgatgcggccctccca

SEQ ID NO: 348288 - DNA, 30 bp, Artificial Sequence
  Synthetic oligonucleotide
gtgaactatgaacctacctggagcctccca

SEQ ID NO: 348289 - DNA, 30 bp, Artificial Sequence
  Synthetic oligonucleotide
aacatatcttgaatcagcatcgcgctccca

SEQ ID NO: 348290 - DNA, 30 bp, Artificial Sequence
  Synthetic oligonucleotide
tcgatagtcgcacatggtcggcggctccca

SEQ ID NO: 348291 - DNA, 30 bp, Artificial Sequence
  Synthetic oligonucleotide
attcttggagttgttcaaggaatgctccca

SEQ ID NO: 348292 - DNA, 30 bp, Artificial Sequence
  Synthetic oligonucleotide
accatcatggcatgtttaaacgtgctccca

SEQ ID NO: 348293 - DNA, 30 bp, Artificial Sequence
  Synthetic oligonucleotide
ggatacaatttactcacaacgcttctccca

SEQ ID NO: 348294 - DNA, 30 bp, Artificial Sequence
  Synthetic oligonucleotide
aattgaattggtacattatcttaggtccca

SEQ ID NO: 348295 - DNA, 30 bp, Artificial Sequence
  Synthetic oligonucleotide
gggttgagacagaggggtcatcttgtccca

SEQ ID NO: 348296 - DNA, 30 bp, Artificial Sequence
  Synthetic oligonucleotide
gcacattgataatccttttatcttgtccca

SEQ ID NO: 348297 - DNA, 30 bp, Artificial Sequence
  Synthetic oligonucleotide
ttgtggatgatagaatttcggcaattccca

SEQ ID NO: 348298 - DNA, 30 bp, Artificial Sequence
  Synthetic oligonucleotide
cacaattttagtcgtcgctctatattccca

SEQ ID NO: 348299 - DNA, 30 bp, Artificial Sequence
  Synthetic oligonucleotide
caaatgagaggagattgagcgaacttccca

SEQ ID NO: 348300 - DNA, 30 bp, Artificial Sequence
  Synthetic oligonucleotide
agggttatataccgatacccttccttccca

SEQ ID NO: 348301 - DNA, 30 bp, Artificial Sequence
  Synthetic oligonucleotide
atattcatccgtcccgatccagtcttccca

SEQ ID NO: 348302 - DNA, 30 bp, Artificial Sequence
  Synthetic oligonucleotide
tgcacgtctgctggatattatgagttccca

SEQ ID NO: 348303 - DNA, 30 bp, Artificial Sequence
  Synthetic oligonucleotide
ctattgtcattgcgaatgtttgtgttccca

SEQ ID NO: 348304 - DNA, 30 bp, Artificial Sequence
  Synthetic oligonucleotide
cccgcggcaggcccgcgtcaattgttccca

SEQ ID NO: 348305 - DNA, 31 bp, Artificial Sequence
  Synthetic oligonucleotide
ccaggaatgtctatacgttcatgatttccca

SEQ ID NO: 348306 - DNA, 30 bp, Artificial Sequence
  Synthetic oligonucleotide
acagtcttttgattaacttattctttccca

SEQ ID NO: 348307 - DNA, 30 bp, Artificial Sequence
  Synthetic oligonucleotide
aaaaagggtactgaaggcgagggtttccca

SEQ ID NO: 348308 - DNA, 30 bp, Artificial Sequence
  Synthetic oligonucleotide
ttcccattagtcagggacgcgcttttccca

SEQ ID NO: 348309 - DNA, 30 bp, Artificial Sequence
  Synthetic oligonucleotide
atagtggtacaggtgactgtataaaagcca

SEQ ID NO: 348310 - DNA, 30 bp, Artificial Sequence
  Synthetic oligonucleotide
gttctgccgtactagtcaatcgcaaagcca

SEQ ID NO: 348311 - DNA, 30 bp, Artificial Sequence
  Synthetic oligonucleotide
tctgtaacaatatcataggtggcaaagcca

SEQ ID NO: 348312 - DNA, 30 bp, Artificial Sequence
  Synthetic oligonucleotide
cattctgcgtctgctcagaacgccaagcca

SEQ ID NO: 348313 - DNA, 30 bp, Artificial Sequence
  Synthetic oligonucleotide
gagtgttaggtaagttttagtggcaagcca

SEQ ID NO: 348314 - DNA, 30 bp, Artificial Sequence
  Synthetic oligonucleotide
agcactagtagaagtgaagataagaagcca

SEQ ID NO: 348315 - DNA, 30 bp, Artificial Sequence
  Synthetic oligonucleotide
cgatatcgtggattctgttccgagaagcca

SEQ ID NO: 348316 - DNA, 30 bp, Artificial Sequence
  Synthetic oligonucleotide
ggttaggtacatgacgaggatttgaagcca

SEQ ID NO: 348317 - DNA, 30 bp, Artificial Sequence
  Synthetic oligonucleotide
cgatagtctgacgccatagctcataagcca

SEQ ID NO: 348318 - DNA, 30 bp, Artificial Sequence
  Synthetic oligonucleotide
tgcctgcgtcattcaagacatattaagcca

SEQ ID NO: 348319 - DNA, 30 bp, Artificial Sequence
  Synthetic oligonucleotide
ccactcggtcattgcagcggtaagcagcca

SEQ ID NO: 348320 - DNA, 30 bp, Artificial Sequence
  Synthetic oligonucleotide
gtctctgggacacataaggtatatcagcca

SEQ ID NO: 348321 - DNA, 30 bp, Artificial Sequence
  Synthetic oligonucleotide
tatactcggcagctcctaggacgagagcca

SEQ ID NO: 348322 - DNA, 30 bp, Artificial Sequence
  Synthetic oligonucleotide
atcatgagagctttcatgttacgagagcca

SEQ ID NO: 348323 - DNA, 30 bp, Artificial Sequence
  Synthetic oligonucleotide
gccaatggaaaataacaatcgggagagcca

SEQ ID NO: 348324 - DNA, 30 bp, Artificial Sequence
  Synthetic oligonucleotide
taatcccagcactcttacggcatagagcca

SEQ ID NO: 348325 - DNA, 30 bp, Artificial Sequence
  Synthetic oligonucleotide
aggtagctaaacaggcgcttgttagagcca

SEQ ID NO: 348326 - DNA, 30 bp, Artificial Sequence
  Synthetic oligonucleotide
atatcagcacaggccatggccaccgagcca

SEQ ID NO: 348327 - DNA, 27 bp, Artificial Sequence
  Synthetic oligonucleotide
ggagatattgaccgcaccaaggagcca

SEQ ID NO: 348328 - DNA, 30 bp, Artificial Sequence
  Synthetic oligonucleotide
gagaaagaccgcggacacgatatggagcca

SEQ ID NO: 348329 - DNA, 30 bp, Artificial Sequence
  Synthetic oligonucleotide
gcgccttggcgcaatatttggcatgagcca

SEQ ID NO: 348330 - DNA, 30 bp, Artificial Sequence
  Synthetic oligonucleotide
gcagcaccacagcgagacagtgttgagcca

SEQ ID NO: 348331 - DNA, 30 bp, Artificial Sequence
  Synthetic oligonucleotide
agtcttggaaggacacttgcgaaatagcca

SEQ ID NO: 348332 - DNA, 30 bp, Artificial Sequence
  Synthetic oligonucleotide
agtaacattgcaatgctgcctaaatagcca

SEQ ID NO: 348333 - DNA, 30 bp, Artificial Sequence
  Synthetic oligonucleotide
aatatcagctctaggagtcagccctagcca

SEQ ID NO: 348334 - DNA, 30 bp, Artificial Sequence
  Synthetic oligonucleotide
gagtaatagatgtctgggctcgcctagcca

SEQ ID NO: 348335 - DNA, 30 bp, Artificial Sequence
  Synthetic oligonucleotide
catagccaggatgatctatttgcctagcca

SEQ ID NO: 348336 - DNA, 30 bp, Artificial Sequence
  Synthetic oligonucleotide
tttcaggttactgttcatttccagtagcca

SEQ ID NO: 348337 - DNA, 30 bp, Artificial Sequence
  Synthetic oligonucleotide
attcccgagtacaacgccctccggtagcca

SEQ ID NO: 348338 - DNA, 30 bp, Artificial Sequence
  Synthetic oligonucleotide
ggtcagtcccagaaaggctaggggtagcca

SEQ ID NO: 348339 - DNA, 30 bp, Artificial Sequence
  Synthetic oligonucleotide
taacggtgtggaacaattggtatttagcca

SEQ ID NO: 348340 - DNA, 30 bp, Artificial Sequence
  Synthetic oligonucleotide
agagttgacttaagggcatggaaaacgcca

SEQ ID NO: 348341 - DNA, 30 bp, Artificial Sequence
  Synthetic oligonucleotide
aagagggtaaggcggcacggggcaacgcca

SEQ ID NO: 348342 - DNA, 30 bp, Artificial Sequence
  Synthetic oligonucleotide
tcgtcaaaattcgtcgcgcaccacacgcca

SEQ ID NO: 348343 - DNA, 30 bp, Artificial Sequence
  Synthetic oligonucleotide
cctccagcggccgcgagctcatacacgcca

SEQ ID NO: 348344 - DNA, 30 bp, Artificial Sequence
  Synthetic oligonucleotide
ggtagaagagcataaccccctcccacgcca

SEQ ID NO: 348345 - DNA, 30 bp, Artificial Sequence
  Synthetic oligonucleotide
cggccggattaggctcatattgccacgcca

SEQ ID NO: 348346 - DNA, 30 bp, Artificial Sequence
  Synthetic oligonucleotide
tcacagcgtactcaacagggctccacgcca

SEQ ID NO: 348347 - DNA, 30 bp, Artificial Sequence
  Synthetic oligonucleotide
tacgtaggcaaagtgcgctcgaagacgcca

SEQ ID NO: 348348 - DNA, 30 bp, Artificial Sequence
  Synthetic oligonucleotide
gggggcgcgcttccctggtaatacccgcca

SEQ ID NO: 348349 - DNA, 30 bp, Artificial Sequence
  Synthetic oligonucleotide
gcctggatgaatatgttcgcagcgccgcca

SEQ ID NO: 348350 - DNA, 30 bp, Artificial Sequence
  Synthetic oligonucleotide
tccacgcaggatgcacgattagatccgcca

SEQ ID NO: 348351 - DNA, 30 bp, Artificial Sequence
  Synthetic oligonucleotide
tcatttacaggagtctagagtagtccgcca

SEQ ID NO: 348352 - DNA, 30 bp, Artificial Sequence
  Synthetic oligonucleotide
acccctctcaatttacgagcaatcgcgcca

SEQ ID NO: 348353 - DNA, 31 bp, Artificial Sequence
  Synthetic oligonucleotide
gtacgggtaaatttcgcaaacccttgcgcca

SEQ ID NO: 348354 - DNA, 30 bp, Artificial Sequence
  Synthetic oligonucleotide
aattgtcacggctaataggggtactcgcca

SEQ ID NO: 348355 - DNA, 30 bp, Artificial Sequence
  Synthetic oligonucleotide
taattctatcttcgacagatatgctcgcca

SEQ ID NO: 348356 - DNA, 30 bp, Artificial Sequence
  Synthetic oligonucleotide
tactgacaaattaatgcgatggtgtcgcca

SEQ ID NO: 348357 - DNA, 30 bp, Artificial Sequence
  Synthetic oligonucleotide
tgcaatattcaagttctagagaattcgcca

SEQ ID NO: 348358 - DNA, 30 bp, Artificial Sequence
  Synthetic oligonucleotide
cagtgtagagcaagtgtagtgaattcgcca

SEQ ID NO: 348359 - DNA, 30 bp, Artificial Sequence
  Synthetic oligonucleotide
caggaccatgcaatatggctcagttcgcca

SEQ ID NO: 348360 - DNA, 30 bp, Artificial Sequence
  Synthetic oligonucleotide
aaccccattagagacctatgtgaaaggcca

SEQ ID NO: 348361 - DNA, 30 bp, Artificial Sequence
  Synthetic oligonucleotide
acggggaacccaagtttgggtaccaggcca

SEQ ID NO: 348362 - DNA, 30 bp, Artificial Sequence
  Synthetic oligonucleotide
aaaggcatcgggatgagcacctagaggcca

SEQ ID NO: 348363 - DNA, 30 bp, Artificial Sequence
  Synthetic oligonucleotide
ctagctctaaatataagtaggacgaggcca

SEQ ID NO: 348364 - DNA, 30 bp, Artificial Sequence
  Synthetic oligonucleotide
ttgccctttgttgtgtgctaatgtaggcca

SEQ ID NO: 348365 - DNA, 28 bp, Artificial Sequence
  Synthetic oligonucleotide
ctcaacgtgtatgatctaagaccggcca

SEQ ID NO: 348366 - DNA, 30 bp, Artificial Sequence
  Synthetic oligonucleotide
gggtttcccggtaacgacttcgttcggcca

SEQ ID NO: 348367 - DNA, 30 bp, Artificial Sequence
  Synthetic oligonucleotide
aaaccccgaagtgtccaacgccgagggcca

SEQ ID NO: 348368 - DNA, 30 bp, Artificial Sequence
  Synthetic oligonucleotide
tttggcaagtgcctgagctcagtagggcca

SEQ ID NO: 348369 - DNA, 30 bp, Artificial Sequence
  Synthetic oligonucleotide
tcttcctgattagcgtgaaactacgggcca

SEQ ID NO: 348370 - DNA, 30 bp, Artificial Sequence
  Synthetic oligonucleotide
gaagacgtaaacatttgtgagtatgggcca

SEQ ID NO: 348371 - DNA, 30 bp, Artificial Sequence
  Synthetic oligonucleotide
agcatccgagcctggttggagcctgggcca

SEQ ID NO: 348372 - DNA, 30 bp, Artificial Sequence
  Synthetic oligonucleotide
taactggacgcgtacagatgccttgggcca

SEQ ID NO: 348373 - DNA, 30 bp, Artificial Sequence
  Synthetic oligonucleotide
attgcgaccaggtggcgcggcgcatggcca

SEQ ID NO: 348374 - DNA, 30 bp, Artificial Sequence
  Synthetic oligonucleotide
tgaaactgagactggatcccttcatggcca

SEQ ID NO: 348375 - DNA, 30 bp, Artificial Sequence
  Synthetic oligonucleotide
taaagattttatagtatggctccctggcca

SEQ ID NO: 348376 - DNA, 30 bp, Artificial Sequence
  Synthetic oligonucleotide
gcatccaagaggtcatccttccgctggcca

SEQ ID NO: 348377 - DNA, 30 bp, Artificial Sequence
  Synthetic oligonucleotide
cacacgatggcggtgagtgtggtctggcca

SEQ ID NO: 348378 - DNA, 30 bp, Artificial Sequence
  Synthetic oligonucleotide
tatctggtcggaacccttggtatgtggcca

SEQ ID NO: 348379 - DNA, 30 bp, Artificial Sequence
  Synthetic oligonucleotide
cacgctgatcacgaacggcagttaatgcca

SEQ ID NO: 348380 - DNA, 30 bp, Artificial Sequence
  Synthetic oligonucleotide
ctcatctctagagagacccgacccatgcca

SEQ ID NO: 348381 - DNA, 30 bp, Artificial Sequence
  Synthetic oligonucleotide
tcgttcgtccgtccctgttctgtcatgcca

SEQ ID NO: 348382 - DNA, 30 bp, Artificial Sequence
  Synthetic oligonucleotide
ggttcagctgtagtttagcgaccgatgcca

SEQ ID NO: 348383 - DNA, 30 bp, Artificial Sequence
  Synthetic oligonucleotide
ctaccacaaacatgcatttggccgatgcca

SEQ ID NO: 348384 - DNA, 30 bp, Artificial Sequence
  Synthetic oligonucleotide
aaattggcaatgcagaatctagggatgcca

SEQ ID NO: 348385 - DNA, 30 bp, Artificial Sequence
  Synthetic oligonucleotide
agtcacgacgacgcaacaatcaatatgcca

SEQ ID NO: 348386 - DNA, 30 bp, Artificial Sequence
  Synthetic oligonucleotide
cgcgtagtacctgtgtaggagtctatgcca

SEQ ID NO: 348387 - DNA, 30 bp, Artificial Sequence
  Synthetic oligonucleotide
gtccacaagccatcgcaatggggtatgcca

SEQ ID NO: 348388 - DNA, 30 bp, Artificial Sequence
  Synthetic oligonucleotide
gtgttaattcgttaaggggggtgtatgcca

SEQ ID NO: 348389 - DNA, 30 bp, Artificial Sequence
  Synthetic oligonucleotide
gaagtttgtatgcaaaagttggttatgcca

SEQ ID NO: 348390 - DNA, 30 bp, Artificial Sequence
  Synthetic oligonucleotide
catagtctggatgcagttaaaaaactgcca

SEQ ID NO: 348391 - DNA, 30 bp, Artificial Sequence
  Synthetic oligonucleotide
ttctactattcgcggttcctacgactgcca

SEQ ID NO: 348392 - DNA, 30 bp, Artificial Sequence
  Synthetic oligonucleotide
atggtatccgcttcgaacgaaatactgcca

SEQ ID NO: 348393 - DNA, 30 bp, Artificial Sequence
  Synthetic oligonucleotide
tgaactaatagcctgttagcgttactgcca

SEQ ID NO: 348394 - DNA, 30 bp, Artificial Sequence
  Synthetic oligonucleotide
tcagggctctagacattatcatacctgcca

SEQ ID NO: 348395 - DNA, 30 bp, Artificial Sequence
  Synthetic oligonucleotide
caacttacttcacacggaatggcgctgcca

SEQ ID NO: 348396 - DNA, 30 bp, Artificial Sequence
  Synthetic oligonucleotide
gcatctagctcaagaggataggggctgcca

SEQ ID NO: 348397 - DNA, 30 bp, Artificial Sequence
  Synthetic oligonucleotide
tgatgcatcgccgaagaaaatcctctgcca

SEQ ID NO: 348398 - DNA, 30 bp, Artificial Sequence
  Synthetic oligonucleotide
gatacgtatcaccgaagtgtgcacgtgcca

SEQ ID NO: 348399 - DNA, 30 bp, Artificial Sequence
  Synthetic oligonucleotide
aagctcttctgtggggagcattccgtgcca

SEQ ID NO: 348400 - DNA, 30 bp, Artificial Sequence
  Synthetic oligonucleotide
gtgggaaattgcatcaggccacatgtgcca

SEQ ID NO: 348401 - DNA, 30 bp, Artificial Sequence
  Synthetic oligonucleotide
atttgtccagttaaattagttagtgtgcca

SEQ ID NO: 348402 - DNA, 30 bp, Artificial Sequence
  Synthetic oligonucleotide
tgtcatcaatactgtggactctttgtgcca

SEQ ID NO: 348403 - DNA, 30 bp, Artificial Sequence
  Synthetic oligonucleotide
actaggttcaccttcattgtgtcattgcca

SEQ ID NO: 348404 - DNA, 30 bp, Artificial Sequence
  Synthetic oligonucleotide
tcgcagcaaaacgatacatgaaccttgcca

SEQ ID NO: 348405 - DNA, 30 bp, Artificial Sequence
  Synthetic oligonucleotide
caccaagtttggaatgaagctcggttgcca

SEQ ID NO: 348406 - DNA, 30 bp, Artificial Sequence
  Synthetic oligonucleotide
agtaatggtccaacatttttggtgttgcca

SEQ ID NO: 348407 - DNA, 30 bp, Artificial Sequence
  Synthetic oligonucleotide
ttcgtcgcgagcgcgacttcttacaatcca

SEQ ID NO: 348408 - DNA, 30 bp, Artificial Sequence
  Synthetic oligonucleotide
gtatggtaatcgaatccatacagcaatcca

SEQ ID NO: 348409 - DNA, 30 bp, Artificial Sequence
  Synthetic oligonucleotide
agtacggcgttttcatctgaacagaatcca

SEQ ID NO: 348410 - DNA, 30 bp, Artificial Sequence
  Synthetic oligonucleotide
tcctcacaattatcacgcaagtagaatcca

SEQ ID NO: 348411 - DNA, 30 bp, Artificial Sequence
  Synthetic oligonucleotide
ctacgactcattgacgtttaggcgaatcca

SEQ ID NO: 348412 - DNA, 30 bp, Artificial Sequence
  Synthetic oligonucleotide
ctctcgatcttagtaaagcatgggaatcca

SEQ ID NO: 348413 - DNA, 30 bp, Artificial Sequence
  Synthetic oligonucleotide
tatcttggaggtatagtagacaataatcca

SEQ ID NO: 348414 - DNA, 30 bp, Artificial Sequence
  Synthetic oligonucleotide
aatttagaagttatctgctaagttaatcca

SEQ ID NO: 348415 - DNA, 30 bp, Artificial Sequence
  Synthetic oligonucleotide
aagcgtatatagaactcatggttacatcca

SEQ ID NO: 348416 - DNA, 30 bp, Artificial Sequence
  Synthetic oligonucleotide
ccacaaacatttaccgcaaagagccatcca

SEQ ID NO: 348417 - DNA, 30 bp, Artificial Sequence
  Synthetic oligonucleotide
gtatgcttaccagccagaattctccatcca

SEQ ID NO: 348418 - DNA, 30 bp, Artificial Sequence
  Synthetic oligonucleotide
tgatccatacagaacgttctatcgcatcca

SEQ ID NO: 348419 - DNA, 30 bp, Artificial Sequence
  Synthetic oligonucleotide
gaaaggtgaggtacaagacacgggcatcca

SEQ ID NO: 348420 - DNA, 30 bp, Artificial Sequence
  Synthetic oligonucleotide
gaaccaaccaagcttggaacgtggcatcca

SEQ ID NO: 348421 - DNA, 30 bp, Artificial Sequence
  Synthetic oligonucleotide
gacacctcggcgcatcccgacgtgcatcca

SEQ ID NO: 348422 - DNA, 30 bp, Artificial Sequence
  Synthetic oligonucleotide
attatgtattaaagttccctgaacgatcca

SEQ ID NO: 348423 - DNA, 30 bp, Artificial Sequence
  Synthetic oligonucleotide
cacccggatgcaaacccccacgacgatcca

SEQ ID NO: 348424 - DNA, 30 bp, Artificial Sequence
  Synthetic oligonucleotide
agtcggtggcaccgccgcgaacccgatcca

SEQ ID NO: 348425 - DNA, 30 bp, Artificial Sequence
  Synthetic oligonucleotide
gaaagctcgacgggttgaatttgcgatcca

SEQ ID NO: 348426 - DNA, 30 bp, Artificial Sequence
  Synthetic oligonucleotide
aatagccgctggctcgaccataaggatcca

SEQ ID NO: 348427 - DNA, 30 bp, Artificial Sequence
  Synthetic oligonucleotide
cggttcacggcgtaggactagtcggatcca

SEQ ID NO: 348428 - DNA, 30 bp, Artificial Sequence
  Synthetic oligonucleotide
ctcgtgagacacgatgttctaccatatcca

SEQ ID NO: 348429 - DNA, 30 bp, Artificial Sequence
  Synthetic oligonucleotide
cttaacttcggatgcgttccggcatatcca

SEQ ID NO: 348430 - DNA, 30 bp, Artificial Sequence
  Synthetic oligonucleotide
ttattgtgactttagtgcgcacgatatcca

SEQ ID NO: 348431 - DNA, 30 bp, Artificial Sequence
  Synthetic oligonucleotide
catggaaaattgcttgtttggacttatcca

SEQ ID NO: 348432 - DNA, 30 bp, Artificial Sequence
  Synthetic oligonucleotide
ttgttctcgcccgtccccccacgaactcca

SEQ ID NO: 348433 - DNA, 30 bp, Artificial Sequence
  Synthetic oligonucleotide
gcccttgtgctgcactgtgcctgaactcca

SEQ ID NO: 348434 - DNA, 30 bp, Artificial Sequence
  Synthetic oligonucleotide
gtataaagcactgtctacacggtaactcca

SEQ ID NO: 348435 - DNA, 30 bp, Artificial Sequence
  Synthetic oligonucleotide
cagaaatacttctccgcttggttaactcca

SEQ ID NO: 348436 - DNA, 30 bp, Artificial Sequence
  Synthetic oligonucleotide
gccgtgagtatagagtggtgcaacactcca

SEQ ID NO: 348437 - DNA, 30 bp, Artificial Sequence
  Synthetic oligonucleotide
aagtttagcacgtcgctccagcccactcca

SEQ ID NO: 348438 - DNA, 30 bp, Artificial Sequence
  Synthetic oligonucleotide
agtggaacatgagtggggattgccactcca

SEQ ID NO: 348439 - DNA, 30 bp, Artificial Sequence
  Synthetic oligonucleotide
atggtcacctcctaaagcggacgcactcca

SEQ ID NO: 348440 - DNA, 30 bp, Artificial Sequence
  Synthetic oligonucleotide
ctagcaggagtaatagagaacggcactcca

SEQ ID NO: 348441 - DNA, 30 bp, Artificial Sequence
  Synthetic oligonucleotide
ggattcgaccgatgcggtggtaatactcca

SEQ ID NO: 348442 - DNA, 30 bp, Artificial Sequence
  Synthetic oligonucleotide
aaccagtttcgaactgcaaaaggtactcca

SEQ ID NO: 348443 - DNA, 30 bp, Artificial Sequence
  Synthetic oligonucleotide
atcccggggaataagatagtccgacctcca

SEQ ID NO: 348444 - DNA, 30 bp, Artificial Sequence
  Synthetic oligonucleotide
ccaggtaaagcagtacctatcatacctcca

SEQ ID NO: 348445 - DNA, 30 bp, Artificial Sequence
  Synthetic oligonucleotide
gcggacttcaggttacggtgggtacctcca

SEQ ID NO: 348446 - DNA, 30 bp, Artificial Sequence
  Synthetic oligonucleotide
aagctcctgcgttcagacacaatccctcca

SEQ ID NO: 348447 - DNA, 30 bp, Artificial Sequence
  Synthetic oligonucleotide
gcgatttctcatctcataaggttccctcca

SEQ ID NO: 348448 - DNA, 30 bp, Artificial Sequence
  Synthetic oligonucleotide
atatactgtagtcaagcctgttagcctcca

SEQ ID NO: 348449 - DNA, 30 bp, Artificial Sequence
  Synthetic oligonucleotide
ccctctagacgccccttcatctggcctcca

SEQ ID NO: 348450 - DNA, 30 bp, Artificial Sequence
  Synthetic oligonucleotide
tggattatccgatacgtttaagatcctcca

SEQ ID NO: 348451 - DNA, 30 bp, Artificial Sequence
  Synthetic oligonucleotide
gtcctagtgatgggctctcccttagctcca

SEQ ID NO: 348452 - DNA, 30 bp, Artificial Sequence
  Synthetic oligonucleotide
ctatgcatacgtaccgctacgcgcgctcca

SEQ ID NO: 348453 - DNA, 30 bp, Artificial Sequence
  Synthetic oligonucleotide
acttcggtcaacatgtgacctgtggctcca

SEQ ID NO: 348454 - DNA, 30 bp, Artificial Sequence
  Synthetic oligonucleotide
gtttgtcgtcacaattgagggcctgctcca

SEQ ID NO: 348455 - DNA, 30 bp, Artificial Sequence
  Synthetic oligonucleotide
aagcaggcttagcacacgcagattgctcca

SEQ ID NO: 348456 - DNA, 30 bp, Artificial Sequence
  Synthetic oligonucleotide
ccaggcgctaaatcatggggcaagtctcca

SEQ ID NO: 348457 - DNA, 30 bp, Artificial Sequence
  Synthetic oligonucleotide
tgcctgttatcagggtctgaagaaagtcca

SEQ ID NO: 348458 - DNA, 30 bp, Artificial Sequence
  Synthetic oligonucleotide
tattacgtttcggtttctatcaggagtcca

SEQ ID NO: 348459 - DNA, 30 bp, Artificial Sequence
  Synthetic oligonucleotide
ttgacagggataccggttagagggagtcca

SEQ ID NO: 348460 - DNA, 30 bp, Artificial Sequence
  Synthetic oligonucleotide
ctaacgtttaataggggatcggggagtcca

SEQ ID NO: 348461 - DNA, 30 bp, Artificial Sequence
  Synthetic oligonucleotide
gtgcaattgtaacgcatttctattagtcca

SEQ ID NO: 348462 - DNA, 30 bp, Artificial Sequence
  Synthetic oligonucleotide
ccagtgtaagtcttgcgcgccagacgtcca

SEQ ID NO: 348463 - DNA, 30 bp, Artificial Sequence
  Synthetic oligonucleotide
agtaattctgctttcccccttctacgtcca

SEQ ID NO: 348464 - DNA, 30 bp, Artificial Sequence
  Synthetic oligonucleotide
gttagtctggcgtcctggacggctcgtcca

SEQ ID NO: 348465 - DNA, 30 bp, Artificial Sequence
  Synthetic oligonucleotide
gtcaggttggaccaaagtgtcgttcgtcca

SEQ ID NO: 348466 - DNA, 30 bp, Artificial Sequence
  Synthetic oligonucleotide
taagcagcttctgagttactggaaggtcca

SEQ ID NO: 348467 - DNA, 30 bp, Artificial Sequence
  Synthetic oligonucleotide
gaatgatcgttaatagtatttaacggtcca

SEQ ID NO: 348468 - DNA, 30 bp, Artificial Sequence
  Synthetic oligonucleotide
gcatcatagtcagaatgcgcgtgcggtcca

SEQ ID NO: 348469 - DNA, 30 bp, Artificial Sequence
  Synthetic oligonucleotide
tatgctggggtgcgtcgtctaacgggtcca

SEQ ID NO: 348470 - DNA, 30 bp, Artificial Sequence
  Synthetic oligonucleotide
tggatattgagaaccaacttgccgggtcca

SEQ ID NO: 348471 - DNA, 30 bp, Artificial Sequence
  Synthetic oligonucleotide
tcaaaacctgggaacttgtccaatggtcca

SEQ ID NO: 348472 - DNA, 30 bp, Artificial Sequence
  Synthetic oligonucleotide
ctgtactggttgtaaatgacacctggtcca

SEQ ID NO: 348473 - DNA, 30 bp, Artificial Sequence
  Synthetic oligonucleotide
ccgtaaaaaccgctctttgttattggtcca

SEQ ID NO: 348474 - DNA, 30 bp, Artificial Sequence
  Synthetic oligonucleotide
tgagcagcagatccggtatggccgtgtcca

SEQ ID NO: 348475 - DNA, 30 bp, Artificial Sequence
  Synthetic oligonucleotide
ttgggcaaacgtcggcagatcttgtgtcca

SEQ ID NO: 348476 - DNA, 30 bp, Artificial Sequence
  Synthetic oligonucleotide
aagttaactgaggaaggacaactttgtcca

SEQ ID NO: 348477 - DNA, 30 bp, Artificial Sequence
  Synthetic oligonucleotide
gaggagaccgaccctacaatttaaattcca

SEQ ID NO: 348478 - DNA, 30 bp, Artificial Sequence
  Synthetic oligonucleotide
ttatgcccgtcgtaacaagcatgcattcca

SEQ ID NO: 348479 - DNA, 30 bp, Artificial Sequence
  Synthetic oligonucleotide
catttaatgaccctaatagtagtcattcca

SEQ ID NO: 348480 - DNA, 30 bp, Artificial Sequence
  Synthetic oligonucleotide
gcccgacactggcaggtgcccatgattcca

SEQ ID NO: 348481 - DNA, 30 bp, Artificial Sequence
  Synthetic oligonucleotide
gacctagggaaggctatggggttgattcca

SEQ ID NO: 348482 - DNA, 30 bp, Artificial Sequence
  Synthetic oligonucleotide
ggtaccttcatatccgcatgaaaacttcca

SEQ ID NO: 348483 - DNA, 30 bp, Artificial Sequence
  Synthetic oligonucleotide
cgttttttcctcagactgtttcatcttcca

SEQ ID NO: 348484 - DNA, 30 bp, Artificial Sequence
  Synthetic oligonucleotide
ttaaatggcgagaatattggggaagttcca

SEQ ID NO: 348485 - DNA, 30 bp, Artificial Sequence
  Synthetic oligonucleotide
cctgtaaatcggacgggggcaatagttcca

SEQ ID NO: 348486 - DNA, 30 bp, Artificial Sequence
  Synthetic oligonucleotide
ctcaattgaaaccaactaaagctagttcca

SEQ ID NO: 348487 - DNA, 30 bp, Artificial Sequence
  Synthetic oligonucleotide
gcagtttagacaaaaaagaatttagttcca

SEQ ID NO: 348488 - DNA, 30 bp, Artificial Sequence
  Synthetic oligonucleotide
ggggctacctccaaacttcaccaggttcca

SEQ ID NO: 348489 - DNA, 30 bp, Artificial Sequence
  Synthetic oligonucleotide
cggtgcccaattgggtcggcgagggttcca

SEQ ID NO: 348490 - DNA, 30 bp, Artificial Sequence
  Synthetic oligonucleotide
gccgggtattttgggagaaactgggttcca

SEQ ID NO: 348491 - DNA, 30 bp, Artificial Sequence
  Synthetic oligonucleotide
aagctaaggcgaaaaccgcgttgggttcca

SEQ ID NO: 348492 - DNA, 30 bp, Artificial Sequence
  Synthetic oligonucleotide
cgaatggcttcgtgagaatgaatggttcca

SEQ ID NO: 348493 - DNA, 30 bp, Artificial Sequence
  Synthetic oligonucleotide
catgaccttcctgaactgtccctggttcca

SEQ ID NO: 348494 - DNA, 30 bp, Artificial Sequence
  Synthetic oligonucleotide
tggtatcggcttcgggccaattgtgttcca

SEQ ID NO: 348495 - DNA, 30 bp, Artificial Sequence
  Synthetic oligonucleotide
tttcccacggttttaccacggctatttcca

SEQ ID NO: 348496 - DNA, 30 bp, Artificial Sequence
  Synthetic oligonucleotide
atacactgacggtggagggaaacgtttcca

SEQ ID NO: 348497 - DNA, 30 bp, Artificial Sequence
  Synthetic oligonucleotide
gggatcataagcgaccgtcgtctgtttcca

SEQ ID NO: 348498 - DNA, 30 bp, Artificial Sequence
  Synthetic oligonucleotide
tatgatttctgagggcgcggacattttcca

SEQ ID NO: 348499 - DNA, 30 bp, Artificial Sequence
  Synthetic oligonucleotide
ctagacaccttagcccggtttcattttcca

SEQ ID NO: 348500 - DNA, 30 bp, Artificial Sequence
  Synthetic oligonucleotide
agctttaaagcgcgagatacggtttttcca

SEQ ID NO: 348501 - DNA, 30 bp, Artificial Sequence
  Synthetic oligonucleotide
cggaattatctcgaatgtgaggcaaaagca

SEQ ID NO: 348502 - DNA, 30 bp, Artificial Sequence
  Synthetic oligonucleotide
gttgagtttccggccctattaggaaaagca

SEQ ID NO: 348503 - DNA, 30 bp, Artificial Sequence
  Synthetic oligonucleotide
aaactcctgtcgaagaggtccttaaaagca

SEQ ID NO: 348504 - DNA, 30 bp, Artificial Sequence
  Synthetic oligonucleotide
ccaaagatcccacgtatcgctagcaaagca

SEQ ID NO: 348505 - DNA, 30 bp, Artificial Sequence
  Synthetic oligonucleotide
gcatgctaacctcaaatctcgggcaaagca

SEQ ID NO: 348506 - DNA, 30 bp, Artificial Sequence
  Synthetic oligonucleotide
ggaatgattagttgcatctagactaaagca

SEQ ID NO: 348507 - DNA, 30 bp, Artificial Sequence
  Synthetic oligonucleotide
aagttacgctaatgctgcgcaagtaaagca

SEQ ID NO: 348508 - DNA, 30 bp, Artificial Sequence
  Synthetic oligonucleotide
cctgctcgccgagagactctccttaaagca

SEQ ID NO: 348509 - DNA, 30 bp, Artificial Sequence
  Synthetic oligonucleotide
tggacgtttcccgaatcattggtgcaagca

SEQ ID NO: 348510 - DNA, 30 bp, Artificial Sequence
  Synthetic oligonucleotide
atttcaaggaccatcgtagctgtgcaagca

SEQ ID NO: 348511 - DNA, 30 bp, Artificial Sequence
  Synthetic oligonucleotide
ctcctatggtaatcgtaagcgcatcaagca

SEQ ID NO: 348512 - DNA, 30 bp, Artificial Sequence
  Synthetic oligonucleotide
tgggcttagaagatttagttgatagaagca

SEQ ID NO: 348513 - DNA, 30 bp, Artificial Sequence
  Synthetic oligonucleotide
gtgtttaagcagttgtttggacacgaagca

SEQ ID NO: 348514 - DNA, 30 bp, Artificial Sequence
  Synthetic oligonucleotide
cagaccttgccccagggtgtgtgcgaagca

SEQ ID NO: 348515 - DNA, 30 bp, Artificial Sequence
  Synthetic oligonucleotide
ctgaagcgttggtatggtcctctcgaagca

SEQ ID NO: 348516 - DNA, 30 bp, Artificial Sequence
  Synthetic oligonucleotide
taagttatgaaagtgcaagacgcggaagca

SEQ ID NO: 348517 - DNA, 30 bp, Artificial Sequence
  Synthetic oligonucleotide
gctagacagcggctggttatgcgggaagca

SEQ ID NO: 348518 - DNA, 30 bp, Artificial Sequence
  Synthetic oligonucleotide
cctcaacaggtcgcttcaccgtgggaagca

SEQ ID NO: 348519 - DNA, 30 bp, Artificial Sequence
  Synthetic oligonucleotide
tgcagtattcaaaaagagccttgtgaagca

SEQ ID NO: 348520 - DNA, 30 bp, Artificial Sequence
  Synthetic oligonucleotide
acgtcgaccagttgcctggctcactaagca

SEQ ID NO: 348521 - DNA, 30 bp, Artificial Sequence
  Synthetic oligonucleotide
ccaccaagagaatttgataatatctaagca

SEQ ID NO: 348522 - DNA, 30 bp, Artificial Sequence
  Synthetic oligonucleotide
tagccacacgcatcgatggacacgtaagca

SEQ ID NO: 348523 - DNA, 30 bp, Artificial Sequence
  Synthetic oligonucleotide
tgtatgccccgcccacgtgacatgtaagca

SEQ ID NO: 348524 - DNA, 30 bp, Artificial Sequence
  Synthetic oligonucleotide
ggttccatgagtactacgccaaattaagca

SEQ ID NO: 348525 - DNA, 30 bp, Artificial Sequence
  Synthetic oligonucleotide
ctcacaaatacaggccgacgcgaaacagca

SEQ ID NO: 348526 - DNA, 30 bp, Artificial Sequence
  Synthetic oligonucleotide
tcatgtacataccacggaccctgaacagca

SEQ ID NO: 348527 - DNA, 30 bp, Artificial Sequence
  Synthetic oligonucleotide
ttacgttcttagcgggcacagctcacagca

SEQ ID NO: 348528 - DNA, 30 bp, Artificial Sequence
  Synthetic oligonucleotide
acgctgtaggcggtacctgtcgtcacagca

SEQ ID NO: 348529 - DNA, 30 bp, Artificial Sequence
  Synthetic oligonucleotide
tacaaagtcagaatgttcaagcagacagca

SEQ ID NO: 348530 - DNA, 30 bp, Artificial Sequence
  Synthetic oligonucleotide
cttttcgtcaaggaacgttatgagacagca

SEQ ID NO: 348531 - DNA, 30 bp, Artificial Sequence
  Synthetic oligonucleotide
actaccacataaaagagaagcatgacagca

SEQ ID NO: 348532 - DNA, 30 bp, Artificial Sequence
  Synthetic oligonucleotide
acgtacccttagggcacacgcgctacagca

SEQ ID NO: 348533 - DNA, 30 bp, Artificial Sequence
  Synthetic oligonucleotide
acttttgaatctagacccttcggtacagca

SEQ ID NO: 348534 - DNA, 30 bp, Artificial Sequence
  Synthetic oligonucleotide
cgttgtaacgctcgtcctgcgggtacagca

SEQ ID NO: 348535 - DNA, 30 bp, Artificial Sequence
  Synthetic oligonucleotide
agagttagcttccctttgccacttacagca

SEQ ID NO: 348536 - DNA, 30 bp, Artificial Sequence
  Synthetic oligonucleotide
gcgtaggaaggcacttggactagcccagca

SEQ ID NO: 348537 - DNA, 30 bp, Artificial Sequence
  Synthetic oligonucleotide
acttttggtctcggggatggccgcccagca

SEQ ID NO: 348538 - DNA, 30 bp, Artificial Sequence
  Synthetic oligonucleotide
tctctactataactatatatgtcgccagca

SEQ ID NO: 348539 - DNA, 30 bp, Artificial Sequence
  Synthetic oligonucleotide
gaggattgatcgctgcgcccttgtccagca

SEQ ID NO: 348540 - DNA, 30 bp, Artificial Sequence
  Synthetic oligonucleotide
ggataaaatcggatctgagcgtcagcagca

SEQ ID NO: 348541 - DNA, 30 bp, Artificial Sequence
  Synthetic oligonucleotide
actctgaacccagcgctaatttgagcagca

SEQ ID NO: 348542 - DNA, 30 bp, Artificial Sequence
  Synthetic oligonucleotide
tacttttaccggagactatcgttagcagca

SEQ ID NO: 348543 - DNA, 30 bp, Artificial Sequence
  Synthetic oligonucleotide
tcaatgcaaggattgttaacatccgcagca

SEQ ID NO: 348544 - DNA, 30 bp, Artificial Sequence
  Synthetic oligonucleotide
tgccatttctcgatagatacttatgcagca

SEQ ID NO: 348545 - DNA, 30 bp, Artificial Sequence
  Synthetic oligonucleotide
tctacggttcatgggagatgtggtgcagca

SEQ ID NO: 348546 - DNA, 30 bp, Artificial Sequence
  Synthetic oligonucleotide
ttggtgtcaactatatagtgaattgcagca

SEQ ID NO: 348547 - DNA, 31 bp, Artificial Sequence
  Synthetic oligonucleotide
ccttacgtcgggcagtagcgatggatcagca

SEQ ID NO: 348548 - DNA, 30 bp, Artificial Sequence
  Synthetic oligonucleotide
tggtctactgtcgtgccttctgtatcagca

SEQ ID NO: 348549 - DNA, 30 bp, Artificial Sequence
  Synthetic oligonucleotide
gaagcgcatcgatttgcaaatcactcagca

SEQ ID NO: 348550 - DNA, 30 bp, Artificial Sequence
  Synthetic oligonucleotide
gattgttgattagtttaagagaggtcagca

SEQ ID NO: 348551 - DNA, 30 bp, Artificial Sequence
  Synthetic oligonucleotide
cagcagtcgtgcgaatacttcgattcagca

SEQ ID NO: 348552 - DNA, 30 bp, Artificial Sequence
  Synthetic oligonucleotide
agtaacggttccttgcgaaacgcttcagca

SEQ ID NO: 348553 - DNA, 30 bp, Artificial Sequence
  Synthetic oligonucleotide
gtttaatagcactcatcaccaggcagagca

SEQ ID NO: 348554 - DNA, 30 bp, Artificial Sequence
  Synthetic oligonucleotide
tcccggtgtgggagcataagactcagagca

SEQ ID NO: 348555 - DNA, 30 bp, Artificial Sequence
  Synthetic oligonucleotide
taataatcccagattgtggaagggagagca

SEQ ID NO: 348556 - DNA, 30 bp, Artificial Sequence
  Synthetic oligonucleotide
acccgactggaatttgaaacagggagagca

SEQ ID NO: 348557 - DNA, 30 bp, Artificial Sequence
  Synthetic oligonucleotide
tcaaatacaaccgaagcaattgatagagca

SEQ ID NO: 348558 - DNA, 30 bp, Artificial Sequence
  Synthetic oligonucleotide
aattttagttaggagcgagatgttagagca

SEQ ID NO: 348559 - DNA, 30 bp, Artificial Sequence
  Synthetic oligonucleotide
gcgatgtcacctataatcacaggacgagca

SEQ ID NO: 348560 - DNA, 30 bp, Artificial Sequence
  Synthetic oligonucleotide
cgcccacgagggttattctgaacccgagca

SEQ ID NO: 348561 - DNA, 30 bp, Artificial Sequence
  Synthetic oligonucleotide
gttgtccaggtccatcacgggatccgagca

SEQ ID NO: 348562 - DNA, 30 bp, Artificial Sequence
  Synthetic oligonucleotide
ggtagccatttattgatctagcaaggagca

SEQ ID NO: 348563 - DNA, 30 bp, Artificial Sequence
  Synthetic oligonucleotide
actctcggataccaaactgaagccggagca

SEQ ID NO: 348564 - DNA, 30 bp, Artificial Sequence
  Synthetic oligonucleotide
ttaaagtaggtgtgtgtgcaaacgggagca

SEQ ID NO: 348565 - DNA, 30 bp, Artificial Sequence
  Synthetic oligonucleotide
ggtatgaggagactacaccgtacgggagca

SEQ ID NO: 348566 - DNA, 30 bp, Artificial Sequence
  Synthetic oligonucleotide
cacgacgtgaaaaatcagtaacggggagca

SEQ ID NO: 348567 - DNA, 30 bp, Artificial Sequence
  Synthetic oligonucleotide
aattcccatgacaattaatgaagtggagca

SEQ ID NO: 348568 - DNA, 30 bp, Artificial Sequence
  Synthetic oligonucleotide
accaaacagacgtagcgcaggaagtgagca

SEQ ID NO: 348569 - DNA, 30 bp, Artificial Sequence
  Synthetic oligonucleotide
tatagtataaggtacattctggtgtgagca

SEQ ID NO: 348570 - DNA, 30 bp, Artificial Sequence
  Synthetic oligonucleotide
tttccacgtgatatgacttaagattgagca

SEQ ID NO: 348571 - DNA, 30 bp, Artificial Sequence
  Synthetic oligonucleotide
ggccgataacattctctttcagcaatagca

SEQ ID NO: 348572 - DNA, 30 bp, Artificial Sequence
  Synthetic oligonucleotide
ctatatggtgaaaatgtcgcagacatagca

SEQ ID NO: 348573 - DNA, 30 bp, Artificial Sequence
  Synthetic oligonucleotide
aagcttacaagctactgaaagtagatagca

SEQ ID NO: 348574 - DNA, 30 bp, Artificial Sequence
  Synthetic oligonucleotide
acatgagccacacctgtattctgtatagca

SEQ ID NO: 348575 - DNA, 30 bp, Artificial Sequence
  Synthetic oligonucleotide
atgaagggctcacccctgcatagactagca

SEQ ID NO: 348576 - DNA, 30 bp, Artificial Sequence
  Synthetic oligonucleotide
cgtgtcggtttgttaggctgcatgctagca

SEQ ID NO: 348577 - DNA, 30 bp, Artificial Sequence
  Synthetic oligonucleotide
taccagcctaatgcaggctagggtctagca

SEQ ID NO: 348578 - DNA, 30 bp, Artificial Sequence
  Synthetic oligonucleotide
taggcctaaataatatggtatattctagca

SEQ ID NO: 348579 - DNA, 30 bp, Artificial Sequence
  Synthetic oligonucleotide
ttatccaagctgatcttaccaggagtagca

SEQ ID NO: 348580 - DNA, 30 bp, Artificial Sequence
  Synthetic oligonucleotide
gtcacaaagcagcttcttgcgggagtagca

SEQ ID NO: 348581 - DNA, 30 bp, Artificial Sequence
  Synthetic oligonucleotide
ctcgtaaaaaaattcgatatggacgtagca

SEQ ID NO: 348582 - DNA, 31 bp, Artificial Sequence
  Synthetic oligonucleotide
cgtcaatttggcatgtttcaagcccgtagca

SEQ ID NO: 348583 - DNA, 30 bp, Artificial Sequence
  Synthetic oligonucleotide
tatatgctatacgttacagacgaattagca

SEQ ID NO: 348584 - DNA, 30 bp, Artificial Sequence
  Synthetic oligonucleotide
atgtaatcctatcgggtatctgccttagca

SEQ ID NO: 348585 - DNA, 30 bp, Artificial Sequence
  Synthetic oligonucleotide
aattcgataatatcgattcgccatttagca

SEQ ID NO: 348586 - DNA, 30 bp, Artificial Sequence
  Synthetic oligonucleotide
aaaatagttcattttgatgtgcttttagca

SEQ ID NO: 348587 - DNA, 30 bp, Artificial Sequence
  Synthetic oligonucleotide
acccaccgtttgaccgtccaaaaaaacgca

SEQ ID NO: 348588 - DNA, 30 bp, Artificial Sequence
  Synthetic oligonucleotide
gtgtcgggaatgacgacagcctcaaacgca

SEQ ID NO: 348589 - DNA, 30 bp, Artificial Sequence
  Synthetic oligonucleotide
agtacacgtgatctgggtctggtaaacgca

SEQ ID NO: 348590 - DNA, 30 bp, Artificial Sequence
  Synthetic oligonucleotide
agtcgagctgccatttgtaatgcgaacgca

SEQ ID NO: 348591 - DNA, 30 bp, Artificial Sequence
  Synthetic oligonucleotide
agaagcgtgaagaccatactctctaacgca

SEQ ID NO: 348592 - DNA, 30 bp, Artificial Sequence
  Synthetic oligonucleotide
tgcgtctctttctgcgaagtatttaacgca

SEQ ID NO: 348593 - DNA, 30 bp, Artificial Sequence
  Synthetic oligonucleotide
tacgtacagttgactcaatcgcgacacgca

SEQ ID NO: 348594 - DNA, 30 bp, Artificial Sequence
  Synthetic oligonucleotide
aacaaacttcggtttcagccgctgcacgca

SEQ ID NO: 348595 - DNA, 30 bp, Artificial Sequence
  Synthetic oligonucleotide
cagtgttagtccaacgtgctggctcacgca

SEQ ID NO: 348596 - DNA, 30 bp, Artificial Sequence
  Synthetic oligonucleotide
gcatgatcataagtctccggaaaagacgca

SEQ ID NO: 348597 - DNA, 30 bp, Artificial Sequence
  Synthetic oligonucleotide
gtaccgaccatggcgagtccctaagacgca

SEQ ID NO: 348598 - DNA, 30 bp, Artificial Sequence
  Synthetic oligonucleotide
aaacttgctctgacaaagggggcagacgca

SEQ ID NO: 348599 - DNA, 31 bp, Artificial Sequence
  Synthetic oligonucleotide
gaagcagcgtatcacccagccaagagacgca

SEQ ID NO: 348600 - DNA, 30 bp, Artificial Sequence
  Synthetic oligonucleotide
caggggagcagtgtctagggactagacgca

SEQ ID NO: 348601 - DNA, 29 bp, Artificial Sequence
  Synthetic oligonucleotide
tcgcccaattcgtcagagttctcgacgca

SEQ ID NO: 348602 - DNA, 30 bp, Artificial Sequence
  Synthetic oligonucleotide
cgtgcatctatggaagatactaaggacgca

SEQ ID NO: 348603 - DNA, 30 bp, Artificial Sequence
  Synthetic oligonucleotide
ggatcctaacagatatgattcatggacgca

SEQ ID NO: 348604 - DNA, 30 bp, Artificial Sequence
  Synthetic oligonucleotide
tcacaggctgtaggagtaaaacatgacgca

SEQ ID NO: 348605 - DNA, 30 bp, Artificial Sequence
  Synthetic oligonucleotide
ccgcgcccagaaatgaagccgccatacgca

SEQ ID NO: 348606 - DNA, 30 bp, Artificial Sequence
  Synthetic oligonucleotide
gcctgacgtatctgccgaaggtcatacgca

SEQ ID NO: 348607 - DNA, 30 bp, Artificial Sequence
  Synthetic oligonucleotide
aattgcggcaaaacgttctccagatacgca

SEQ ID NO: 348608 - DNA, 30 bp, Artificial Sequence
  Synthetic oligonucleotide
ggatgtttcgaaatagcctccctgtacgca

SEQ ID NO: 348609 - DNA, 30 bp, Artificial Sequence
  Synthetic oligonucleotide
atgcaattgttcttttggggctattacgca

SEQ ID NO: 348610 - DNA, 30 bp, Artificial Sequence
  Synthetic oligonucleotide
gaacaccttgccaagggtatcaaaaccgca

SEQ ID NO: 348611 - DNA, 30 bp, Artificial Sequence
  Synthetic oligonucleotide
aacaatctaacttggatgacctaaaccgca

SEQ ID NO: 348612 - DNA, 30 bp, Artificial Sequence
  Synthetic oligonucleotide
ttgttgaagaataataatgcaacgaccgca

SEQ ID NO: 348613 - DNA, 30 bp, Artificial Sequence
  Synthetic oligonucleotide
ggcctggagagcccttcttggcggaccgca

SEQ ID NO: 348614 - DNA, 30 bp, Artificial Sequence
  Synthetic oligonucleotide
cagtcaggggcatccctgcaaggtaccgca

SEQ ID NO: 348615 - DNA, 30 bp, Artificial Sequence
  Synthetic oligonucleotide
gaaaccgccaaaaagctctatgaacccgca

SEQ ID NO: 348616 - DNA, 30 bp, Artificial Sequence
  Synthetic oligonucleotide
taagcactgcggggaaaaagacaccccgca

SEQ ID NO: 348617 - DNA, 30 bp, Artificial Sequence
  Synthetic oligonucleotide
catgcgggcatgatgggggacgtggccgca

SEQ ID NO: 348618 - DNA, 30 bp, Artificial Sequence
  Synthetic oligonucleotide
atatttgctagttgatgtctaggtgccgca

SEQ ID NO: 348619 - DNA, 30 bp, Artificial Sequence
  Synthetic oligonucleotide
caaagcagtatcccaatgccaattgccgca

SEQ ID NO: 348620 - DNA, 30 bp, Artificial Sequence
  Synthetic oligonucleotide
gattataaaggaaaggggcaacaatccgca

SEQ ID NO: 348621 - DNA, 30 bp, Artificial Sequence
  Synthetic oligonucleotide
tccggtcccagcggacaacgggaatccgca

SEQ ID NO: 348622 - DNA, 30 bp, Artificial Sequence
  Synthetic oligonucleotide
attctctgacgttcagacacattctccgca

SEQ ID NO: 348623 - DNA, 30 bp, Artificial Sequence
  Synthetic oligonucleotide
gaaactctggttcagggggcacattccgca

SEQ ID NO: 348624 - DNA, 30 bp, Artificial Sequence
  Synthetic oligonucleotide
catcagcgtataggtctataggcttccgca

SEQ ID NO: 348625 - DNA, 30 bp, Artificial Sequence
  Synthetic oligonucleotide
gcaggttaatcgcgatcatcgttcagcgca

SEQ ID NO: 348626 - DNA, 30 bp, Artificial Sequence
  Synthetic oligonucleotide
aggatacgtgcggcgcggcatcggagcgca

SEQ ID NO: 348627 - DNA, 30 bp, Artificial Sequence
  Synthetic oligonucleotide
attcgccactagccggaactgagtagcgca

SEQ ID NO: 348628 - DNA, 30 bp, Artificial Sequence
  Synthetic oligonucleotide
ggctatgttctgagcattggttaccgcgca

SEQ ID NO: 348629 - DNA, 30 bp, Artificial Sequence
  Synthetic oligonucleotide
tttgttcggagcggcaaagacgtccgcgca

SEQ ID NO: 348630 - DNA, 30 bp, Artificial Sequence
  Synthetic oligonucleotide
ccagttatctggctcaagatacctggcgca

SEQ ID NO: 348631 - DNA, 30 bp, Artificial Sequence
  Synthetic oligonucleotide
acacacgtgtctaaaaacgtagctggcgca

SEQ ID NO: 348632 - DNA, 30 bp, Artificial Sequence
  Synthetic oligonucleotide
gccatatgtttcccaaaggaatctggcgca

SEQ ID NO: 348633 - DNA, 30 bp, Artificial Sequence
  Synthetic oligonucleotide
aactattgtcgacttttggtacgtggcgca

SEQ ID NO: 348634 - DNA, 30 bp, Artificial Sequence
  Synthetic oligonucleotide
cacagttttcctggagatgtaggtggcgca

SEQ ID NO: 348635 - DNA, 30 bp, Artificial Sequence
  Synthetic oligonucleotide
acgttagggactcaactcccctttggcgca

SEQ ID NO: 348636 - DNA, 30 bp, Artificial Sequence
  Synthetic oligonucleotide
ttgggactttcggtcggcctgtttggcgca

SEQ ID NO: 348637 - DNA, 30 bp, Artificial Sequence
  Synthetic oligonucleotide
attaaaattggtgtcggtaagtaatgcgca

SEQ ID NO: 348638 - DNA, 30 bp, Artificial Sequence
  Synthetic oligonucleotide
gaaacagcccaaccatggtagtaatgcgca

SEQ ID NO: 348639 - DNA, 31 bp, Artificial Sequence
  Synthetic oligonucleotide
ccgaagcgcaccggatgcagttttatgcgca

SEQ ID NO: 348640 - DNA, 30 bp, Artificial Sequence
  Synthetic oligonucleotide
gtactcgttattaggttttgcgcctgcgca

SEQ ID NO: 348641 - DNA, 30 bp, Artificial Sequence
  Synthetic oligonucleotide
cactataagggcggggcgcatagctgcgca

SEQ ID NO: 348642 - DNA, 30 bp, Artificial Sequence
  Synthetic oligonucleotide
agctgtgcccgggtactgaaattctgcgca

SEQ ID NO: 348643 - DNA, 30 bp, Artificial Sequence
  Synthetic oligonucleotide
acattgtcaagaaattaaattgattgcgca

SEQ ID NO: 348644 - DNA, 30 bp, Artificial Sequence
  Synthetic oligonucleotide
gcgtgtcagtcgttggtgtcaagaatcgca

SEQ ID NO: 348645 - DNA, 30 bp, Artificial Sequence
  Synthetic oligonucleotide
gtcagggtagcctttcccgttataatcgca

SEQ ID NO: 348646 - DNA, 30 bp, Artificial Sequence
  Synthetic oligonucleotide
tcgtctttcatgtgttcagataacatcgca

SEQ ID NO: 348647 - DNA, 30 bp, Artificial Sequence
  Synthetic oligonucleotide
cattgactggagacaacgccgtacatcgca

SEQ ID NO: 348648 - DNA, 30 bp, Artificial Sequence
  Synthetic oligonucleotide
ccaggaccctccctagagtgggagatcgca

SEQ ID NO: 348649 - DNA, 30 bp, Artificial Sequence
  Synthetic oligonucleotide
ttgggatagttcgaccaccgtaggatcgca

SEQ ID NO: 348650 - DNA, 30 bp, Artificial Sequence
  Synthetic oligonucleotide
cccggcgggattcaatgcctcgtgatcgca

SEQ ID NO: 348651 - DNA, 30 bp, Artificial Sequence
  Synthetic oligonucleotide
acgcggattctagagcgttcaaatatcgca

SEQ ID NO: 348652 - DNA, 30 bp, Artificial Sequence
  Synthetic oligonucleotide
cgtgaatagggacgcagtttatatatcgca

SEQ ID NO: 348653 - DNA, 30 bp, Artificial Sequence
  Synthetic oligonucleotide
gatttgtgggatagtgtaggctatatcgca

SEQ ID NO: 348654 - DNA, 30 bp, Artificial Sequence
  Synthetic oligonucleotide
tgtattccccgggatatacgccctatcgca

SEQ ID NO: 348655 - DNA, 30 bp, Artificial Sequence
  Synthetic oligonucleotide
ctgctgtccaagcattgaagtattatcgca

SEQ ID NO: 348656 - DNA, 30 bp, Artificial Sequence
  Synthetic oligonucleotide
caaggaacgtagcgttaatggccactcgca

SEQ ID NO: 348657 - DNA, 30 bp, Artificial Sequence
  Synthetic oligonucleotide
gggcctcgcaacccaggatatagcctcgca

SEQ ID NO: 348658 - DNA, 30 bp, Artificial Sequence
  Synthetic oligonucleotide
gctatctatggaccactttcgttcctcgca

SEQ ID NO: 348659 - DNA, 30 bp, Artificial Sequence
  Synthetic oligonucleotide
gcagcacgtcttttaaggggtcggctcgca

SEQ ID NO: 348660 - DNA, 30 bp, Artificial Sequence
  Synthetic oligonucleotide
tagccggcggagcggaggctcgtagtcgca

SEQ ID NO: 348661 - DNA, 30 bp, Artificial Sequence
  Synthetic oligonucleotide
cctcgcctaaatggggactctcgggtcgca

SEQ ID NO: 348662 - DNA, 30 bp, Artificial Sequence
  Synthetic oligonucleotide
gcagtttgagctggacgtcccatggtcgca

SEQ ID NO: 348663 - DNA, 30 bp, Artificial Sequence
  Synthetic oligonucleotide
atgccgagacccgattgtactcttgtcgca

SEQ ID NO: 348664 - DNA, 30 bp, Artificial Sequence
  Synthetic oligonucleotide
aattgaccagcgcgtattcacacattcgca

SEQ ID NO: 348665 - DNA, 30 bp, Artificial Sequence
  Synthetic oligonucleotide
ccgtcttagtatgttggccagggattcgca

SEQ ID NO: 348666 - DNA, 29 bp, Artificial Sequence
  Synthetic oligonucleotide
cgataacgaagtgtcttaggaacttcgca

SEQ ID NO: 348667 - DNA, 30 bp, Artificial Sequence
  Synthetic oligonucleotide
gacctcgtgtctccttgttatgacttcgca

SEQ ID NO: 348668 - DNA, 30 bp, Artificial Sequence
  Synthetic oligonucleotide
gggttggcgtcagatgatggctacttcgca

SEQ ID NO: 348669 - DNA, 30 bp, Artificial Sequence
  Synthetic oligonucleotide
gggagggtattcacatttctgcagttcgca

SEQ ID NO: 348670 - DNA, 30 bp, Artificial Sequence
  Synthetic oligonucleotide
tcgtagcgataacgagcagtgtcgttcgca

SEQ ID NO: 348671 - DNA, 30 bp, Artificial Sequence
  Synthetic oligonucleotide
aggatgtcacgccatgaaccccggttcgca

SEQ ID NO: 348672 - DNA, 30 bp, Artificial Sequence
  Synthetic oligonucleotide
ggaactagcctgtgacagaaatggttcgca

SEQ ID NO: 348673 - DNA, 30 bp, Artificial Sequence
  Synthetic oligonucleotide
ttgagaccttaattcgatagttggttcgca

SEQ ID NO: 348674 - DNA, 30 bp, Artificial Sequence
  Synthetic oligonucleotide
ctaaccgaactagttgtgttgcttttcgca

SEQ ID NO: 348675 - DNA, 30 bp, Artificial Sequence
  Synthetic oligonucleotide
atgctggttgattcggatgcgtaaaaggca

SEQ ID NO: 348676 - DNA, 30 bp, Artificial Sequence
  Synthetic oligonucleotide
aggggaccttttaaactagttccaaaggca

SEQ ID NO: 348677 - DNA, 30 bp, Artificial Sequence
  Synthetic oligonucleotide
tacctcttgggattagcatttcgaaaggca

SEQ ID NO: 348678 - DNA, 30 bp, Artificial Sequence
  Synthetic oligonucleotide
aaacggggtgagaatgccgccggaaaggca

SEQ ID NO: 348679 - DNA, 30 bp, Artificial Sequence
  Synthetic oligonucleotide
tgcatccgtataagggtctgtgccaaggca

SEQ ID NO: 348680 - DNA, 30 bp, Artificial Sequence
  Synthetic oligonucleotide
gcatagtggcaaatcgggtaccggaaggca

SEQ ID NO: 348681 - DNA, 30 bp, Artificial Sequence
  Synthetic oligonucleotide
gttattgaaaagcactatcatgggaaggca

SEQ ID NO: 348682 - DNA, 30 bp, Artificial Sequence
  Synthetic oligonucleotide
tacgctgctgatattactatctataaggca

SEQ ID NO: 348683 - DNA, 30 bp, Artificial Sequence
  Synthetic oligonucleotide
atgacagtataaattggttaacgtaaggca

SEQ ID NO: 348684 - DNA, 30 bp, Artificial Sequence
  Synthetic oligonucleotide
gatttaccggtcttccgtcgatgtaaggca

SEQ ID NO: 348685 - DNA, 30 bp, Artificial Sequence
  Synthetic oligonucleotide
atgcaatcaattagagaacgaccacaggca

SEQ ID NO: 348686 - DNA, 30 bp, Artificial Sequence
  Synthetic oligonucleotide
gatagtggtacgctaggtagcggccaggca

SEQ ID NO: 348687 - DNA, 30 bp, Artificial Sequence
  Synthetic oligonucleotide
tgtatctttagggttgtgagtcggcaggca

SEQ ID NO: 348688 - DNA, 30 bp, Artificial Sequence
  Synthetic oligonucleotide
gcgagcaattaaacttcgttttatcaggca

SEQ ID NO: 348689 - DNA, 30 bp, Artificial Sequence
  Synthetic oligonucleotide
gtgtattgatgtgttggttatattcaggca

SEQ ID NO: 348690 - DNA, 30 bp, Artificial Sequence
  Synthetic oligonucleotide
gtgaagatctccagcggtcacagagaggca

SEQ ID NO: 348691 - DNA, 30 bp, Artificial Sequence
  Synthetic oligonucleotide
atgtgaacaatcgcctattgtttagaggca

SEQ ID NO: 348692 - DNA, 30 bp, Artificial Sequence
  Synthetic oligonucleotide
attgaacacgtctagaacggagacgaggca

SEQ ID NO: 348693 - DNA, 30 bp, Artificial Sequence
  Synthetic oligonucleotide
aagcgttttgggatgacacacctcgaggca

SEQ ID NO: 348694 - DNA, 30 bp, Artificial Sequence
  Synthetic oligonucleotide
cggttcacaggtcgcggtatattcgaggca

SEQ ID NO: 348695 - DNA, 30 bp, Artificial Sequence
  Synthetic oligonucleotide
gattacgtagcaatacagtcactggaggca

SEQ ID NO: 348696 - DNA, 30 bp, Artificial Sequence
  Synthetic oligonucleotide
tcaatcgcactaagcgatcgatatgaggca

SEQ ID NO: 348697 - DNA, 30 bp, Artificial Sequence
  Synthetic oligonucleotide
cataatagtcggattatcttgcgtgaggca

SEQ ID NO: 348698 - DNA, 30 bp, Artificial Sequence
  Synthetic oligonucleotide
ggacatgtggcctggcgtgcgcttgaggca

SEQ ID NO: 348699 - DNA, 30 bp, Artificial Sequence
  Synthetic oligonucleotide
ctcgctagcgcactcaatactcaataggca

SEQ ID NO: 348700 - DNA, 30 bp, Artificial Sequence
  Synthetic oligonucleotide
aacgattcctacttccagaggagataggca

SEQ ID NO: 348701 - DNA, 30 bp, Artificial Sequence
  Synthetic oligonucleotide
aataggcgggaggaggcctggggataggca

SEQ ID NO: 348702 - DNA, 30 bp, Artificial Sequence
  Synthetic oligonucleotide
atgttccgcgtggcttaaaactcgtaggca

SEQ ID NO: 348703 - DNA, 30 bp, Artificial Sequence
  Synthetic oligonucleotide
ccaatcgcctcttttatacataggtaggca

SEQ ID NO: 348704 - DNA, 30 bp, Artificial Sequence
  Synthetic oligonucleotide
aaccgcggagaactaaatgtttggtaggca

SEQ ID NO: 348705 - DNA, 30 bp, Artificial Sequence
  Synthetic oligonucleotide
aactggctctagcttgagttcaattaggca

SEQ ID NO: 348706 - DNA, 30 bp, Artificial Sequence
  Synthetic oligonucleotide
acagcctttgacatagtctagccttaggca

SEQ ID NO: 348707 - DNA, 30 bp, Artificial Sequence
  Synthetic oligonucleotide
agattggccttaaaaggcctgatttaggca

SEQ ID NO: 348708 - DNA, 30 bp, Artificial Sequence
  Synthetic oligonucleotide
gactatttgtttagaaaggcactttaggca

SEQ ID NO: 348709 - DNA, 30 bp, Artificial Sequence
  Synthetic oligonucleotide
gcgattccgctatttcattttcgaacggca

SEQ ID NO: 348710 - DNA, 30 bp, Artificial Sequence
  Synthetic oligonucleotide
cgcggttaacatattccgggagacacggca

SEQ ID NO: 348711 - DNA, 30 bp, Artificial Sequence
  Synthetic oligonucleotide
cataggacatctactttctaggacacggca

SEQ ID NO: 348712 - DNA, 30 bp, Artificial Sequence
  Synthetic oligonucleotide
aacatagcatttgagatggcggacacggca

SEQ ID NO: 348713 - DNA, 30 bp, Artificial Sequence
  Synthetic oligonucleotide
gttacgactacgtgaaatcccgatacggca

SEQ ID NO: 348714 - DNA, 30 bp, Artificial Sequence
  Synthetic oligonucleotide
ttggaagggacccgggctcggtctacggca

SEQ ID NO: 348715 - DNA, 30 bp, Artificial Sequence
  Synthetic oligonucleotide
atcaacagtcactggatgtagcgtacggca

SEQ ID NO: 348716 - DNA, 30 bp, Artificial Sequence
  Synthetic oligonucleotide
tggtcctcctatgaggtcctctaaccggca

SEQ ID NO: 348717 - DNA, 30 bp, Artificial Sequence
  Synthetic oligonucleotide
ctcagggctgtacagctggggcgaccggca

SEQ ID NO: 348718 - DNA, 30 bp, Artificial Sequence
  Synthetic oligonucleotide
tagaacgtttatgtgtctcggtccccggca

SEQ ID NO: 348719 - DNA, 30 bp, Artificial Sequence
  Synthetic oligonucleotide
atacgagggtgctggttcatctgcccggca

SEQ ID NO: 348720 - DNA, 30 bp, Artificial Sequence
  Synthetic oligonucleotide
cgttgccccacccgcggccgaatcccggca

SEQ ID NO: 348721 - DNA, 30 bp, Artificial Sequence
  Synthetic oligonucleotide
tgtcctccgagactaacctagatgccggca

SEQ ID NO: 348722 - DNA, 30 bp, Artificial Sequence
  Synthetic oligonucleotide
ttgaactgggcgagtggctactatccggca

SEQ ID NO: 348723 - DNA, 30 bp, Artificial Sequence
  Synthetic oligonucleotide
ggtctatacgaaaggtcaggcagagcggca

SEQ ID NO: 348724 - DNA, 30 bp, Artificial Sequence
  Synthetic oligonucleotide
acatgttgaggattagtaggacgagcggca

SEQ ID NO: 348725 - DNA, 30 bp, Artificial Sequence
  Synthetic oligonucleotide
ctatataacggttgaaacgacttagcggca

SEQ ID NO: 348726 - DNA, 30 bp, Artificial Sequence
  Synthetic oligonucleotide
ataattacgatgcgtttggttagcgcggca

SEQ ID NO: 348727 - DNA, 30 bp, Artificial Sequence
  Synthetic oligonucleotide
aatgccggtcgatgagttactgcatcggca

SEQ ID NO: 348728 - DNA, 30 bp, Artificial Sequence
  Synthetic oligonucleotide
ctggattctcagagcgagctgcgatcggca

SEQ ID NO: 348729 - DNA, 30 bp, Artificial Sequence
  Synthetic oligonucleotide
ttcactacacccatgactagttagtcggca

SEQ ID NO: 348730 - DNA, 30 bp, Artificial Sequence
  Synthetic oligonucleotide
ggatggactaaaaatgctcatgggtcggca

SEQ ID NO: 348731 - DNA, 30 bp, Artificial Sequence
  Synthetic oligonucleotide
atcgactgcgccattgggttcaattcggca

SEQ ID NO: 348732 - DNA, 30 bp, Artificial Sequence
  Synthetic oligonucleotide
tagggcctctcgcccatcatgtattcggca

SEQ ID NO: 348733 - DNA, 30 bp, Artificial Sequence
  Synthetic oligonucleotide
agtgcggagcctcgcgctaaggcttcggca

SEQ ID NO: 348734 - DNA, 30 bp, Artificial Sequence
  Synthetic oligonucleotide
ccaggttacaggaaaaggctctaaagggca

SEQ ID NO: 348735 - DNA, 30 bp, Artificial Sequence
  Synthetic oligonucleotide
ctagagtttgttgttattgacttgagggca

SEQ ID NO: 348736 - DNA, 30 bp, Artificial Sequence
  Synthetic oligonucleotide
tactacggtgcagtcgtgcctagacgggca

SEQ ID NO: 348737 - DNA, 30 bp, Artificial Sequence
  Synthetic oligonucleotide
actttaaatccagttgggggccgccgggca

SEQ ID NO: 348738 - DNA, 30 bp, Artificial Sequence
  Synthetic oligonucleotide
gatctgatactctcctggctcgggcgggca

SEQ ID NO: 348739 - DNA, 30 bp, Artificial Sequence
  Synthetic oligonucleotide
taatagctcctatgctattgtatgcgggca

SEQ ID NO: 348740 - DNA, 30 bp, Artificial Sequence
  Synthetic oligonucleotide
ttgataatttaatacgatataattcgggca

SEQ ID NO: 348741 - DNA, 30 bp, Artificial Sequence
  Synthetic oligonucleotide
tcgtgaggaaatattagtatgattcgggca

SEQ ID NO: 348742 - DNA, 30 bp, Artificial Sequence
  Synthetic oligonucleotide
cagtggggagggcctaactcggcaggggca

SEQ ID NO: 348743 - DNA, 30 bp, Artificial Sequence
  Synthetic oligonucleotide
ttctcttaatagtacacctgatcaggggca

SEQ ID NO: 348744 - DNA, 30 bp, Artificial Sequence
  Synthetic oligonucleotide
aaacgtatagtgaatacagccggaggggca

SEQ ID NO: 348745 - DNA, 30 bp, Artificial Sequence
  Synthetic oligonucleotide
ggcttccctacggactctcagtacggggca

SEQ ID NO: 348746 - DNA, 30 bp, Artificial Sequence
  Synthetic oligonucleotide
ctgctgtaataagtgtcccctttcggggca

SEQ ID NO: 348747 - DNA, 30 bp, Artificial Sequence
  Synthetic oligonucleotide
catctcctaaggtatggtgaaaggggggca

SEQ ID NO: 348748 - DNA, 30 bp, Artificial Sequence
  Synthetic oligonucleotide
caaagcgccatcctatagaaaatgggggca

SEQ ID NO: 348749 - DNA, 30 bp, Artificial Sequence
  Synthetic oligonucleotide
gtaaacggtcaccgagcctacttgggggca

SEQ ID NO: 348750 - DNA, 30 bp, Artificial Sequence
  Synthetic oligonucleotide
ccccacagccgggtgtgattcaatggggca

SEQ ID NO: 348751 - DNA, 30 bp, Artificial Sequence
  Synthetic oligonucleotide
cgctgctgtaagaaacgagacgttggggca

SEQ ID NO: 348752 - DNA, 30 bp, Artificial Sequence
  Synthetic oligonucleotide
gcgcgccagttccatcttccgtttggggca

SEQ ID NO: 348753 - DNA, 30 bp, Artificial Sequence
  Synthetic oligonucleotide
gcgggcatatcgctccgtagggcatgggca

SEQ ID NO: 348754 - DNA, 30 bp, Artificial Sequence
  Synthetic oligonucleotide
gtccggtcgttgtcccgacttgcatgggca

SEQ ID NO: 348755 - DNA, 30 bp, Artificial Sequence
  Synthetic oligonucleotide
gggaatcgctttggagggaggagatgggca

SEQ ID NO: 348756 - DNA, 30 bp, Artificial Sequence
  Synthetic oligonucleotide
cacttatttgtcaaaggagaaatatgggca

SEQ ID NO: 348757 - DNA, 30 bp, Artificial Sequence
  Synthetic oligonucleotide
caccacacgacgtttgggcgacactgggca

SEQ ID NO: 348758 - DNA, 30 bp, Artificial Sequence
  Synthetic oligonucleotide
gctcctaccggtcaaaatgactgctgggca

SEQ ID NO: 348759 - DNA, 30 bp, Artificial Sequence
  Synthetic oligonucleotide
tttgcgccccacggtttaccgcagtgggca

SEQ ID NO: 348760 - DNA, 30 bp, Artificial Sequence
  Synthetic oligonucleotide
gcggggctcgcctacttaacttagtgggca

SEQ ID NO: 348761 - DNA, 30 bp, Artificial Sequence
  Synthetic oligonucleotide
gggataataggacgtccagctgcgtgggca

SEQ ID NO: 348762 - DNA, 30 bp, Artificial Sequence
  Synthetic oligonucleotide
tccaagacgtgaaaataggtaaggtgggca

SEQ ID NO: 348763 - DNA, 30 bp, Artificial Sequence
  Synthetic oligonucleotide
taactaaccttcacgcctgcagggtgggca

SEQ ID NO: 348764 - DNA, 30 bp, Artificial Sequence
  Synthetic oligonucleotide
gagctagtggtcccgcgggataattgggca

SEQ ID NO: 348765 - DNA, 30 bp, Artificial Sequence
  Synthetic oligonucleotide
tatgacagctacaaacgggttcattgggca

SEQ ID NO: 348766 - DNA, 30 bp, Artificial Sequence
  Synthetic oligonucleotide
cgacgggttcctgggcacgttgcttgggca

SEQ ID NO: 348767 - DNA, 30 bp, Artificial Sequence
  Synthetic oligonucleotide
tgatccaagcgtggtggggactgcatggca

SEQ ID NO: 348768 - DNA, 30 bp, Artificial Sequence
  Synthetic oligonucleotide
gcgctatatgtaagacgcgacgtcatggca

SEQ ID NO: 348769 - DNA, 30 bp, Artificial Sequence
  Synthetic oligonucleotide
tggtagttattcctgggaaagccgatggca

SEQ ID NO: 348770 - DNA, 30 bp, Artificial Sequence
  Synthetic oligonucleotide
gacgatgcaaatgtcagaccgcggatggca

SEQ ID NO: 348771 - DNA, 30 bp, Artificial Sequence
  Synthetic oligonucleotide
tttgctggaggcacagcgaaggctatggca

SEQ ID NO: 348772 - DNA, 30 bp, Artificial Sequence
  Synthetic oligonucleotide
gataaacttacagcaattgattgtatggca

SEQ ID NO: 348773 - DNA, 30 bp, Artificial Sequence
  Synthetic oligonucleotide
aggatcctctcccaccaggccaaactggca

SEQ ID NO: 348774 - DNA, 30 bp, Artificial Sequence
  Synthetic oligonucleotide
tggtcacattgcaggactaggcccctggca

SEQ ID NO: 348775 - DNA, 30 bp, Artificial Sequence
  Synthetic oligonucleotide
agtctcaatttgggtagtacatgcctggca

SEQ ID NO: 348776 - DNA, 30 bp, Artificial Sequence
  Synthetic oligonucleotide
aaaagaccctgcctctattggatcctggca

SEQ ID NO: 348777 - DNA, 30 bp, Artificial Sequence
  Synthetic oligonucleotide
ctacatgtacgtcatagcttgaggctggca

SEQ ID NO: 348778 - DNA, 30 bp, Artificial Sequence
  Synthetic oligonucleotide
atattcataagtaaatggggctatctggca

SEQ ID NO: 348779 - DNA, 30 bp, Artificial Sequence
  Synthetic oligonucleotide
aaactagcatggaccatccgacacgtggca

SEQ ID NO: 348780 - DNA, 30 bp, Artificial Sequence
  Synthetic oligonucleotide
gacatgggggtgtttctaccaaccgtggca

SEQ ID NO: 348781 - DNA, 30 bp, Artificial Sequence
  Synthetic oligonucleotide
gatgttaatatcgggttaataaccgtggca

SEQ ID NO: 348782 - DNA, 30 bp, Artificial Sequence
  Synthetic oligonucleotide
tatgaatcggtgtgccgcaaaaaggtggca

SEQ ID NO: 348783 - DNA, 30 bp, Artificial Sequence
  Synthetic oligonucleotide
tagaccgtgttttaaccgtgtcgggtggca

SEQ ID NO: 348784 - DNA, 30 bp, Artificial Sequence
  Synthetic oligonucleotide
gctttaacatatctagctgtaatggtggca

SEQ ID NO: 348785 - DNA, 30 bp, Artificial Sequence
  Synthetic oligonucleotide
actatttactagtcccaggcaaatgtggca

SEQ ID NO: 348786 - DNA, 30 bp, Artificial Sequence
  Synthetic oligonucleotide
gaagcacaaacttctaagctggatgtggca

SEQ ID NO: 348787 - DNA, 30 bp, Artificial Sequence
  Synthetic oligonucleotide
agagaaattaccgcagagcagattgtggca

SEQ ID NO: 348788 - DNA, 30 bp, Artificial Sequence
  Synthetic oligonucleotide
actcgggaggtcacagatcagacattggca

SEQ ID NO: 348789 - DNA, 30 bp, Artificial Sequence
  Synthetic oligonucleotide
acatacggatcgctgcttttgatattggca

SEQ ID NO: 348790 - DNA, 30 bp, Artificial Sequence
  Synthetic oligonucleotide
catgcccgccactctgatgcgtacttggca

SEQ ID NO: 348791 - DNA, 30 bp, Artificial Sequence
  Synthetic oligonucleotide
aagtgttatcgatagggcttttacttggca

SEQ ID NO: 348792 - DNA, 30 bp, Artificial Sequence
  Synthetic oligonucleotide
gcccgtagcttcgtcggttgtctgttggca

SEQ ID NO: 348793 - DNA, 30 bp, Artificial Sequence
  Synthetic oligonucleotide
catatataatagcgtaaatactttttggca

SEQ ID NO: 348794 - DNA, 30 bp, Artificial Sequence
  Synthetic oligonucleotide
taccaggtcctaatttaaaatcaaaatgca

SEQ ID NO: 348795 - DNA, 30 bp, Artificial Sequence
  Synthetic oligonucleotide
aagtctcggcgcatccaaaatatcaatgca

SEQ ID NO: 348796 - DNA, 30 bp, Artificial Sequence
  Synthetic oligonucleotide
agttctctgtgagcaccagtcgtcaatgca

SEQ ID NO: 348797 - DNA, 30 bp, Artificial Sequence
  Synthetic oligonucleotide
cgacattctgcagccttggttgtcaatgca

SEQ ID NO: 348798 - DNA, 30 bp, Artificial Sequence
  Synthetic oligonucleotide
ctaaaccaggggcggagcgtttcgaatgca

SEQ ID NO: 348799 - DNA, 30 bp, Artificial Sequence
  Synthetic oligonucleotide
tatatgcagggtgcatccccgaggaatgca

SEQ ID NO: 348800 - DNA, 30 bp, Artificial Sequence
  Synthetic oligonucleotide
ctcacattaagagttggcaattggaatgca

SEQ ID NO: 348801 - DNA, 30 bp, Artificial Sequence
  Synthetic oligonucleotide
tttaagatcagccaccgcctccataatgca

SEQ ID NO: 348802 - DNA, 30 bp, Artificial Sequence
  Synthetic oligonucleotide
tatcttgtctccaaacgtctacaacatgca

SEQ ID NO: 348803 - DNA, 30 bp, Artificial Sequence
  Synthetic oligonucleotide
aaaatacccagggagaatgtcacccatgca

SEQ ID NO: 348804 - DNA, 30 bp, Artificial Sequence
  Synthetic oligonucleotide
tggccctcacaatatcgcgattagcatgca

SEQ ID NO: 348805 - DNA, 30 bp, Artificial Sequence
  Synthetic oligonucleotide
attcggtaggtccgggctaatgggcatgca

SEQ ID NO: 348806 - DNA, 30 bp, Artificial Sequence
  Synthetic oligonucleotide
agatttgaaattggaacatgtgtagatgca

SEQ ID NO: 348807 - DNA, 30 bp, Artificial Sequence
  Synthetic oligonucleotide
acttggtaaaagcctcacacgaacgatgca

SEQ ID NO: 348808 - DNA, 30 bp, Artificial Sequence
  Synthetic oligonucleotide
gtttaaacctttatagtccaggacgatgca

SEQ ID NO: 348809 - DNA, 30 bp, Artificial Sequence
  Synthetic oligonucleotide
gctgatacgtcgactacacgcgccgatgca

SEQ ID NO: 348810 - DNA, 30 bp, Artificial Sequence
  Synthetic oligonucleotide
gtctccgctggtgcttaaagaggcgatgca

SEQ ID NO: 348811 - DNA, 30 bp, Artificial Sequence
  Synthetic oligonucleotide
gtagctgattcaatcggcgggtcggatgca

SEQ ID NO: 348812 - DNA, 30 bp, Artificial Sequence
  Synthetic oligonucleotide
acactccggattaccgggctcatggatgca

SEQ ID NO: 348813 - DNA, 30 bp, Artificial Sequence
  Synthetic oligonucleotide
caagttcatgcttgcggttgcgtggatgca

SEQ ID NO: 348814 - DNA, 30 bp, Artificial Sequence
  Synthetic oligonucleotide
ccccaaacctttcttacagtttgtgatgca

SEQ ID NO: 348815 - DNA, 30 bp, Artificial Sequence
  Synthetic oligonucleotide
gaacttatcattggcgttagggaatatgca

SEQ ID NO: 348816 - DNA, 30 bp, Artificial Sequence
  Synthetic oligonucleotide
agatattttccgctcaaagtttaatatgca

SEQ ID NO: 348817 - DNA, 30 bp, Artificial Sequence
  Synthetic oligonucleotide
tcttcgccgcatagttccatgaactatgca

SEQ ID NO: 348818 - DNA, 31 bp, Artificial Sequence
  Synthetic oligonucleotide
gtaaaggtctagccctgcaggtacctatgca

SEQ ID NO: 348819 - DNA, 30 bp, Artificial Sequence
  Synthetic oligonucleotide
tattactaagcgtggggaaatggctatgca

SEQ ID NO: 348820 - DNA, 30 bp, Artificial Sequence
  Synthetic oligonucleotide
gctgacgcgtcaggcccgtacatctatgca

SEQ ID NO: 348821 - DNA, 30 bp, Artificial Sequence
  Synthetic oligonucleotide
tgcagccatgcacataatagcttctatgca

SEQ ID NO: 348822 - DNA, 30 bp, Artificial Sequence
  Synthetic oligonucleotide
gaaagatgcggggctgtaagcgagtatgca

SEQ ID NO: 348823 - DNA, 31 bp, Artificial Sequence
  Synthetic oligonucleotide
ggtagaatgctttgttggcctctggtatgca

SEQ ID NO: 348824 - DNA, 30 bp, Artificial Sequence
  Synthetic oligonucleotide
cgctcgagacactcccgaacgctgtatgca

SEQ ID NO: 348825 - DNA, 30 bp, Artificial Sequence
  Synthetic oligonucleotide
ttaccctcatctatagcacggcgttatgca

SEQ ID NO: 348826 - DNA, 30 bp, Artificial Sequence
  Synthetic oligonucleotide
atgagtacgtttaatgggattagaactgca

SEQ ID NO: 348827 - DNA, 30 bp, Artificial Sequence
  Synthetic oligonucleotide
gggctggggttctcgttatccataactgca

SEQ ID NO: 348828 - DNA, 30 bp, Artificial Sequence
  Synthetic oligonucleotide
ctctaacgctttttacaatatgtaactgca

SEQ ID NO: 348829 - DNA, 30 bp, Artificial Sequence
  Synthetic oligonucleotide
agtcgccaaccgcctcacccaaccactgca

SEQ ID NO: 348830 - DNA, 30 bp, Artificial Sequence
  Synthetic oligonucleotide
aatctccgcccagacggactcatcactgca

SEQ ID NO: 348831 - DNA, 30 bp, Artificial Sequence
  Synthetic oligonucleotide
agacccgttttgctggaaacggtcactgca

SEQ ID NO: 348832 - DNA, 30 bp, Artificial Sequence
  Synthetic oligonucleotide
taaaagcgcatggggtatgtttggactgca

SEQ ID NO: 348833 - DNA, 30 bp, Artificial Sequence
  Synthetic oligonucleotide
ttctgaattgagtaattagcacaacctgca

SEQ ID NO: 348834 - DNA, 30 bp, Artificial Sequence
  Synthetic oligonucleotide
tacttcttctgtcctctctcgacccctgca

SEQ ID NO: 348835 - DNA, 30 bp, Artificial Sequence
  Synthetic oligonucleotide
aagcgatatggcaacaaaatgtatcctgca

SEQ ID NO: 348836 - DNA, 30 bp, Artificial Sequence
  Synthetic oligonucleotide
ccgctgtagttttgcgtctgcaaagctgca

SEQ ID NO: 348837 - DNA, 30 bp, Artificial Sequence
  Synthetic oligonucleotide
ttatatgccaagcgaagtgctcaggctgca

SEQ ID NO: 348838 - DNA, 30 bp, Artificial Sequence
  Synthetic oligonucleotide
atgcccttacctcttgatcaaacatctgca

SEQ ID NO: 348839 - DNA, 30 bp, Artificial Sequence
  Synthetic oligonucleotide
cgggtgggaaacttaatgttattatctgca

SEQ ID NO: 348840 - DNA, 30 bp, Artificial Sequence
  Synthetic oligonucleotide
aggagaggtcaagcgctggagcattctgca

SEQ ID NO: 348841 - DNA, 30 bp, Artificial Sequence
  Synthetic oligonucleotide
gtggctgaaaaaacgatctcacgcagtgca

SEQ ID NO: 348842 - DNA, 30 bp, Artificial Sequence
  Synthetic oligonucleotide
ttatctatttgagcatgggaacatagtgca

SEQ ID NO: 348843 - DNA, 30 bp, Artificial Sequence
  Synthetic oligonucleotide
gctgctgaacaccaagtttgaggtagtgca

SEQ ID NO: 348844 - DNA, 30 bp, Artificial Sequence
  Synthetic oligonucleotide
tctttattcaccataggcggtcttagtgca

SEQ ID NO: 348845 - DNA, 30 bp, Artificial Sequence
  Synthetic oligonucleotide
tgactgggcatcgcgtcgataccccgtgca

SEQ ID NO: 348846 - DNA, 30 bp, Artificial Sequence
  Synthetic oligonucleotide
tgagtgtatgtaacccgtatgggccgtgca

SEQ ID NO: 348847 - DNA, 30 bp, Artificial Sequence
  Synthetic oligonucleotide
cattcatcaatttttgaatttgcgcgtgca

SEQ ID NO: 348848 - DNA, 30 bp, Artificial Sequence
  Synthetic oligonucleotide
accgtatggcttataaggataactcgtgca

SEQ ID NO: 348849 - DNA, 30 bp, Artificial Sequence
  Synthetic oligonucleotide
agcttaacgtgcggcccgtacgaaggtgca

SEQ ID NO: 348850 - DNA, 30 bp, Artificial Sequence
  Synthetic oligonucleotide
agttggaaggcctaaagtagtccaggtgca

SEQ ID NO: 348851 - DNA, 30 bp, Artificial Sequence
  Synthetic oligonucleotide
acagcaaccattggttacaaggcaggtgca

SEQ ID NO: 348852 - DNA, 30 bp, Artificial Sequence
  Synthetic oligonucleotide
gaggcatgacagcggttgaggataggtgca

SEQ ID NO: 348853 - DNA, 30 bp, Artificial Sequence
  Synthetic oligonucleotide
ccttgatgtcccgtaggggttaagggtgca

SEQ ID NO: 348854 - DNA, 30 bp, Artificial Sequence
  Synthetic oligonucleotide
cccggcatgacttaatttgagatgggtgca

SEQ ID NO: 348855 - DNA, 30 bp, Artificial Sequence
  Synthetic oligonucleotide
aatctccatttatgtgtcgtcactggtgca

SEQ ID NO: 348856 - DNA, 30 bp, Artificial Sequence
  Synthetic oligonucleotide
gagagattggatggagcccacaaatgtgca

SEQ ID NO: 348857 - DNA, 30 bp, Artificial Sequence
  Synthetic oligonucleotide
gcagtcttttactttattcaagtgtgtgca

SEQ ID NO: 348858 - DNA, 30 bp, Artificial Sequence
  Synthetic oligonucleotide
atctcgcacatctgggtctaatcttgtgca

SEQ ID NO: 348859 - DNA, 30 bp, Artificial Sequence
  Synthetic oligonucleotide
aatgacattctcaagggaacgtcaattgca

SEQ ID NO: 348860 - DNA, 30 bp, Artificial Sequence
  Synthetic oligonucleotide
ttcgatgcaaaggttaaacacgtcattgca

SEQ ID NO: 348861 - DNA, 30 bp, Artificial Sequence
  Synthetic oligonucleotide
catcggttttcagtcgaaaaggcgattgca

SEQ ID NO: 348862 - DNA, 30 bp, Artificial Sequence
  Synthetic oligonucleotide
tgaaatgtcgtactgtgctcgatgattgca

SEQ ID NO: 348863 - DNA, 30 bp, Artificial Sequence
  Synthetic oligonucleotide
aaaataatacagaccgtataatatattgca

SEQ ID NO: 348864 - DNA, 30 bp, Artificial Sequence
  Synthetic oligonucleotide
tattgctgtagtttttgtatccaacttgca

SEQ ID NO: 348865 - DNA, 30 bp, Artificial Sequence
  Synthetic oligonucleotide
cggcatctttgcctctagcagctacttgca

SEQ ID NO: 348866 - DNA, 30 bp, Artificial Sequence
  Synthetic oligonucleotide
taaaagtaaccaaactggtgattacttgca

SEQ ID NO: 348867 - DNA, 30 bp, Artificial Sequence
  Synthetic oligonucleotide
tgaaccaggatagttaggcatgaccttgca

SEQ ID NO: 348868 - DNA, 30 bp, Artificial Sequence
  Synthetic oligonucleotide
gcgtgcgtaccttaattatctttccttgca

SEQ ID NO: 348869 - DNA, 30 bp, Artificial Sequence
  Synthetic oligonucleotide
gcaagcaacgaagttgacagcagtcttgca

SEQ ID NO: 348870 - DNA, 30 bp, Artificial Sequence
  Synthetic oligonucleotide
tgtagatgttaactaaaggtccttcttgca

SEQ ID NO: 348871 - DNA, 30 bp, Artificial Sequence
  Synthetic oligonucleotide
acagcgtctcagcattcttttggagttgca

SEQ ID NO: 348872 - DNA, 30 bp, Artificial Sequence
  Synthetic oligonucleotide
taatgatggggccacggggtgaccgttgca

SEQ ID NO: 348873 - DNA, 30 bp, Artificial Sequence
  Synthetic oligonucleotide
gaggttagacaaaaatctcatcgcgttgca

SEQ ID NO: 348874 - DNA, 30 bp, Artificial Sequence
  Synthetic oligonucleotide
ggcttgacctgtgtttgtactgtcgttgca

SEQ ID NO: 348875 - DNA, 30 bp, Artificial Sequence
  Synthetic oligonucleotide
agaaattaaagactagttatgtcggttgca

SEQ ID NO: 348876 - DNA, 30 bp, Artificial Sequence
  Synthetic oligonucleotide
cctagggcatacgctgaaggcagggttgca

SEQ ID NO: 348877 - DNA, 30 bp, Artificial Sequence
  Synthetic oligonucleotide
ttggctgtgttcgtggcatatcgggttgca

SEQ ID NO: 348878 - DNA, 30 bp, Artificial Sequence
  Synthetic oligonucleotide
cttagggactccgggtcttatactgttgca

SEQ ID NO: 348879 - DNA, 30 bp, Artificial Sequence
  Synthetic oligonucleotide
caggccgtttgcacggcttcggctgttgca

SEQ ID NO: 348880 - DNA, 30 bp, Artificial Sequence
  Synthetic oligonucleotide
tgaatctttaagtgaccgtgaggctttgca

SEQ ID NO: 348881 - DNA, 30 bp, Artificial Sequence
  Synthetic oligonucleotide
tcccgaatatgtccctggataatgtttgca

SEQ ID NO: 348882 - DNA, 30 bp, Artificial Sequence
  Synthetic oligonucleotide
tagacacacatgtactagtcttgttttgca

SEQ ID NO: 348883 - DNA, 30 bp, Artificial Sequence
  Synthetic oligonucleotide
actagaatagtcccaagtcggatttttgca

SEQ ID NO: 348884 - DNA, 30 bp, Artificial Sequence
  Synthetic oligonucleotide
aagatttcatgggcaagaggcccaaaatca

SEQ ID NO: 348885 - DNA, 30 bp, Artificial Sequence
  Synthetic oligonucleotide
agcaagaactcgcagcgttaacgaaaatca

SEQ ID NO: 348886 - DNA, 30 bp, Artificial Sequence
  Synthetic oligonucleotide
gctgggccgctggaagtggaacgcaaatca

SEQ ID NO: 348887 - DNA, 30 bp, Artificial Sequence
  Synthetic oligonucleotide
aagagtgttgaactctttaatcgcaaatca

SEQ ID NO: 348888 - DNA, 30 bp, Artificial Sequence
  Synthetic oligonucleotide
cccaatcggacaactttgaatctcaaatca

SEQ ID NO: 348889 - DNA, 30 bp, Artificial Sequence
  Synthetic oligonucleotide
gactgtcagggaatgatggtagtcaaatca

SEQ ID NO: 348890 - DNA, 30 bp, Artificial Sequence
  Synthetic oligonucleotide
tggttgacgacatgtcgatcagagaaatca

SEQ ID NO: 348891 - DNA, 30 bp, Artificial Sequence
  Synthetic oligonucleotide
tatggaaccctatgaacatcccataaatca

SEQ ID NO: 348892 - DNA, 30 bp, Artificial Sequence
  Synthetic oligonucleotide
accccaaagttaatcggtctttataaatca

SEQ ID NO: 348893 - DNA, 30 bp, Artificial Sequence
  Synthetic oligonucleotide
cacggacaatcgttgtcctggtcacaatca

SEQ ID NO: 348894 - DNA, 30 bp, Artificial Sequence
  Synthetic oligonucleotide
agatagttatcttgggcggtctgacaatca

SEQ ID NO: 348895 - DNA, 30 bp, Artificial Sequence
  Synthetic oligonucleotide
ctataggaccgtaggtagtcaactcaatca

SEQ ID NO: 348896 - DNA, 30 bp, Artificial Sequence
  Synthetic oligonucleotide
aatgatatacgtatcgtattggctcaatca

SEQ ID NO: 348897 - DNA, 30 bp, Artificial Sequence
  Synthetic oligonucleotide
ctgcgatttttcaggcgaccgaaggaatca

SEQ ID NO: 348898 - DNA, 30 bp, Artificial Sequence
  Synthetic oligonucleotide
tcgatatttgataggccatgtcaggaatca

SEQ ID NO: 348899 - DNA, 30 bp, Artificial Sequence
  Synthetic oligonucleotide
cctggagggctacccgtagacccggaatca

SEQ ID NO: 348900 - DNA, 30 bp, Artificial Sequence
  Synthetic oligonucleotide
aaactatagctgcctgctcgggaataatca

SEQ ID NO: 348901 - DNA, 30 bp, Artificial Sequence
  Synthetic oligonucleotide
tgggttatgcatttatacattgtataatca

SEQ ID NO: 348902 - DNA, 30 bp, Artificial Sequence
  Synthetic oligonucleotide
cttagtcggatgaaatttgtgtcctaatca

SEQ ID NO: 348903 - DNA, 30 bp, Artificial Sequence
  Synthetic oligonucleotide
ttgccaggagagatctttggttcctaatca

SEQ ID NO: 348904 - DNA, 30 bp, Artificial Sequence
  Synthetic oligonucleotide
aataactactcgaacctaatcttctaatca

SEQ ID NO: 348905 - DNA, 31 bp, Artificial Sequence
  Synthetic oligonucleotide
tcgaattcagaaacggagaatgtagtaatca

SEQ ID NO: 348906 - DNA, 30 bp, Artificial Sequence
  Synthetic oligonucleotide
gcctaaatctgccccttcgagtattaatca

SEQ ID NO: 348907 - DNA, 30 bp, Artificial Sequence
  Synthetic oligonucleotide
aagtgccggatatgcgaccgcgcttaatca

SEQ ID NO: 348908 - DNA, 30 bp, Artificial Sequence
  Synthetic oligonucleotide
ataaatcggttctgtaggctccgttaatca

SEQ ID NO: 348909 - DNA, 30 bp, Artificial Sequence
  Synthetic oligonucleotide
taatatcgcctgtttgctgcgaaaacatca

SEQ ID NO: 348910 - DNA, 30 bp, Artificial Sequence
  Synthetic oligonucleotide
gttcggacattgtctgatgcgataacatca

SEQ ID NO: 348911 - DNA, 30 bp, Artificial Sequence
  Synthetic oligonucleotide
ggatcaattattagcaaaaaattaacatca

SEQ ID NO: 348912 - DNA, 30 bp, Artificial Sequence
  Synthetic oligonucleotide
gctggtgtaagacttcgttgtaacacatca

SEQ ID NO: 348913 - DNA, 30 bp, Artificial Sequence
  Synthetic oligonucleotide
tccatgtccatagcaaggccgtacacatca

SEQ ID NO: 348914 - DNA, 30 bp, Artificial Sequence
  Synthetic oligonucleotide
cccgatgttgcaaacgatttacccacatca

SEQ ID NO: 348915 - DNA, 30 bp, Artificial Sequence
  Synthetic oligonucleotide
ctcgacgttcgaccggcaagaatcacatca

SEQ ID NO: 348916 - DNA, 30 bp, Artificial Sequence
  Synthetic oligonucleotide
aacctaaaagcttggcacccccagacatca

SEQ ID NO: 348917 - DNA, 30 bp, Artificial Sequence
  Synthetic oligonucleotide
ctctcatatgttttggtactgtagacatca

SEQ ID NO: 348918 - DNA, 30 bp, Artificial Sequence
  Synthetic oligonucleotide
gcgtgattgccagttcagtttcggacatca

SEQ ID NO: 348919 - DNA, 30 bp, Artificial Sequence
  Synthetic oligonucleotide
ggtaccttggggccgattgcactgacatca

SEQ ID NO: 348920 - DNA, 30 bp, Artificial Sequence
  Synthetic oligonucleotide
actacccggtgtgtgcccgcatccccatca

SEQ ID NO: 348921 - DNA, 30 bp, Artificial Sequence
  Synthetic oligonucleotide
ttgtcaatgccgggcaaaggagtgccatca

SEQ ID NO: 348922 - DNA, 30 bp, Artificial Sequence
  Synthetic oligonucleotide
aaatgcgcgtggcaggaagtcttgccatca

SEQ ID NO: 348923 - DNA, 30 bp, Artificial Sequence
  Synthetic oligonucleotide
cgaacaaatggtcagtcctttcgtccatca

SEQ ID NO: 348924 - DNA, 30 bp, Artificial Sequence
  Synthetic oligonucleotide
tgatatacctcaattggttgataagcatca

SEQ ID NO: 348925 - DNA, 30 bp, Artificial Sequence
  Synthetic oligonucleotide
cgtacgggtaaattaatttggctagcatca

SEQ ID NO: 348926 - DNA, 30 bp, Artificial Sequence
  Synthetic oligonucleotide
cgtgcagaagactatgtttacgccgcatca

SEQ ID NO: 348927 - DNA, 30 bp, Artificial Sequence
  Synthetic oligonucleotide
tcctgatcccatcagattagtcaggcatca

SEQ ID NO: 348928 - DNA, 30 bp, Artificial Sequence
  Synthetic oligonucleotide
gtgtctaacttgtcaataattaatgcatca

SEQ ID NO: 348929 - DNA, 30 bp, Artificial Sequence
  Synthetic oligonucleotide
ctggtcaaacggcataggaaccctgcatca

SEQ ID NO: 348930 - DNA, 30 bp, Artificial Sequence
  Synthetic oligonucleotide
tgcctgttggatggaagcgcaacatcatca

SEQ ID NO: 348931 - DNA, 30 bp, Artificial Sequence
  Synthetic oligonucleotide
gattgagtaacaacttgacagtcatcatca

SEQ ID NO: 348932 - DNA, 30 bp, Artificial Sequence
  Synthetic oligonucleotide
ccgaaggtcaaatttttttaaccctcatca

SEQ ID NO: 348933 - DNA, 30 bp, Artificial Sequence
  Synthetic oligonucleotide
cttattgtgtattttgcaagtttgtcatca

SEQ ID NO: 348934 - DNA, 30 bp, Artificial Sequence
  Synthetic oligonucleotide
ctagtccccggttgtgttcccagttcatca

SEQ ID NO: 348935 - DNA, 30 bp, Artificial Sequence
  Synthetic oligonucleotide
acgtgtcgtatcgtttcagctaaaagatca

SEQ ID NO: 348936 - DNA, 30 bp, Artificial Sequence
  Synthetic oligonucleotide
ttggcagcagttaaacggaggaacagatca

SEQ ID NO: 348937 - DNA, 30 bp, Artificial Sequence
  Synthetic oligonucleotide
agtggatagggcatagtcagccgcagatca

SEQ ID NO: 348938 - DNA, 30 bp, Artificial Sequence
  Synthetic oligonucleotide
gactgatgtgatcagaagggaatcagatca

SEQ ID NO: 348939 - DNA, 30 bp, Artificial Sequence
  Synthetic oligonucleotide
cgcccagcaagataatttggcgagagatca

SEQ ID NO: 348940 - DNA, 30 bp, Artificial Sequence
  Synthetic oligonucleotide
acacgcatggttggattagtttggagatca

SEQ ID NO: 348941 - DNA, 30 bp, Artificial Sequence
  Synthetic oligonucleotide
ttcctagcgttgacagaacggttacgatca

SEQ ID NO: 348942 - DNA, 30 bp, Artificial Sequence
  Synthetic oligonucleotide
caggtaaatttattgctcgtctggcgatca

SEQ ID NO: 348943 - DNA, 30 bp, Artificial Sequence
  Synthetic oligonucleotide
aacatacaccgttgcggagattggcgatca

SEQ ID NO: 348944 - DNA, 30 bp, Artificial Sequence
  Synthetic oligonucleotide
gacgaaccttatgtaattagctatcgatca

SEQ ID NO: 348945 - DNA, 30 bp, Artificial Sequence
  Synthetic oligonucleotide
ttcgtgactaacaactcaccagaaggatca

SEQ ID NO: 348946 - DNA, 30 bp, Artificial Sequence
  Synthetic oligonucleotide
tggctgggaagcggggtgaggacaggatca

SEQ ID NO: 348947 - DNA, 30 bp, Artificial Sequence
  Synthetic oligonucleotide
tttcgaagcggtcacaatacggcaggatca

SEQ ID NO: 348948 - DNA, 30 bp, Artificial Sequence
  Synthetic oligonucleotide
tattttagaattctacgagccagaggatca

SEQ ID NO: 348949 - DNA, 30 bp, Artificial Sequence
  Synthetic oligonucleotide
ctgacaacgcagaagatttgttccggatca

SEQ ID NO: 348950 - DNA, 30 bp, Artificial Sequence
  Synthetic oligonucleotide
cgtcctctcaaacgattaccgctcggatca

SEQ ID NO: 348951 - DNA, 30 bp, Artificial Sequence
  Synthetic oligonucleotide
agttacggccgtctgaaaggtccgggatca

SEQ ID NO: 348952 - DNA, 30 bp, Artificial Sequence
  Synthetic oligonucleotide
aataatggggtggtattccgttcgggatca

SEQ ID NO: 348953 - DNA, 30 bp, Artificial Sequence
  Synthetic oligonucleotide
cgttttaatgacatttatacggggggatca

SEQ ID NO: 348954 - DNA, 30 bp, Artificial Sequence
  Synthetic oligonucleotide
cttcattacgaattattttgaactggatca

SEQ ID NO: 348955 - DNA, 30 bp, Artificial Sequence
  Synthetic oligonucleotide
gcaatactatggtgaaggaatccatgatca

SEQ ID NO: 348956 - DNA, 30 bp, Artificial Sequence
  Synthetic oligonucleotide
gtgaaagggttatttggcactctctgatca

SEQ ID NO: 348957 - DNA, 30 bp, Artificial Sequence
  Synthetic oligonucleotide
aacgtttgatatgtcgaatcgttctgatca

SEQ ID NO: 348958 - DNA, 30 bp, Artificial Sequence
  Synthetic oligonucleotide
ccccttataaggcactacggcaggtgatca

SEQ ID NO: 348959 - DNA, 30 bp, Artificial Sequence
  Synthetic oligonucleotide
ctcgccttacccagttaggataattgatca

SEQ ID NO: 348960 - DNA, 30 bp, Artificial Sequence
  Synthetic oligonucleotide
accctcgttggcgaagctgagggttgatca

SEQ ID NO: 348961 - DNA, 30 bp, Artificial Sequence
  Synthetic oligonucleotide
agtgtattcaaggtcttggctttaatatca

SEQ ID NO: 348962 - DNA, 30 bp, Artificial Sequence
  Synthetic oligonucleotide
gagactcataataacgttgtccacatatca

SEQ ID NO: 348963 - DNA, 30 bp, Artificial Sequence
  Synthetic oligonucleotide
cggagccgtcacctgtcaaaatcgatatca

SEQ ID NO: 348964 - DNA, 30 bp, Artificial Sequence
  Synthetic oligonucleotide
tgtgttcataagctgaaattgtatatatca

SEQ ID NO: 348965 - DNA, 30 bp, Artificial Sequence
  Synthetic oligonucleotide
agtcccagctcttaatagatttgtatatca

SEQ ID NO: 348966 - DNA, 30 bp, Artificial Sequence
  Synthetic oligonucleotide
acagcttatgtgcccataaggtttatatca

SEQ ID NO: 348967 - DNA, 30 bp, Artificial Sequence
  Synthetic oligonucleotide
tatttataggaacgtcatccaaaactatca

SEQ ID NO: 348968 - DNA, 30 bp, Artificial Sequence
  Synthetic oligonucleotide
cgcatataactgccaccaatgaccctatca

SEQ ID NO: 348969 - DNA, 30 bp, Artificial Sequence
  Synthetic oligonucleotide
gcagacagtgaaacgtcggctcgcctatca

SEQ ID NO: 348970 - DNA, 30 bp, Artificial Sequence
  Synthetic oligonucleotide
gcatgaagtgggactacctttctcctatca

SEQ ID NO: 348971 - DNA, 30 bp, Artificial Sequence
  Synthetic oligonucleotide
aagaattagtttaccacagtatggctatca

SEQ ID NO: 348972 - DNA, 30 bp, Artificial Sequence
  Synthetic oligonucleotide
ccctagatcattcccgggtatcctctatca

SEQ ID NO: 348973 - DNA, 30 bp, Artificial Sequence
  Synthetic oligonucleotide
ccaactaagcctatacatcatcgtctatca

SEQ ID NO: 348974 - DNA, 30 bp, Artificial Sequence
  Synthetic oligonucleotide
tatcttatagaagtaccagtgaccgtatca

SEQ ID NO: 348975 - DNA, 30 bp, Artificial Sequence
  Synthetic oligonucleotide
atagaatataacagagttataagcgtatca

SEQ ID NO: 348976 - DNA, 30 bp, Artificial Sequence
  Synthetic oligonucleotide
agaccgtccagattgcttcaacgcgtatca

SEQ ID NO: 348977 - DNA, 30 bp, Artificial Sequence
  Synthetic oligonucleotide
tgctcaggggtgttcccgctagaggtatca

SEQ ID NO: 348978 - DNA, 30 bp, Artificial Sequence
  Synthetic oligonucleotide
atgatattcagaaccccgcctggggtatca

SEQ ID NO: 348979 - DNA, 30 bp, Artificial Sequence
  Synthetic oligonucleotide
tggtatagtgtgggatgtttagtggtatca

SEQ ID NO: 348980 - DNA, 30 bp, Artificial Sequence
  Synthetic oligonucleotide
aaataccagaacgattcttggcgtgtatca

SEQ ID NO: 348981 - DNA, 30 bp, Artificial Sequence
  Synthetic oligonucleotide
ttgcatcagggagcccataggaaattatca

SEQ ID NO: 348982 - DNA, 30 bp, Artificial Sequence
  Synthetic oligonucleotide
tgcgtaaatgtcgcagtgaccgaattatca

SEQ ID NO: 348983 - DNA, 30 bp, Artificial Sequence
  Synthetic oligonucleotide
ccgtaagttactgcacgatgcacattatca

SEQ ID NO: 348984 - DNA, 30 bp, Artificial Sequence
  Synthetic oligonucleotide
actgccgaaatacgtaacatattattatca

SEQ ID NO: 348985 - DNA, 30 bp, Artificial Sequence
  Synthetic oligonucleotide
atgtgcttatagtgcatagggtacttatca

SEQ ID NO: 348986 - DNA, 30 bp, Artificial Sequence
  Synthetic oligonucleotide
tattaaagtgccagtattatgagcttatca

SEQ ID NO: 348987 - DNA, 30 bp, Artificial Sequence
  Synthetic oligonucleotide
caagggaaggtctgtcttgtagggttatca

SEQ ID NO: 348988 - DNA, 30 bp, Artificial Sequence
  Synthetic oligonucleotide
aaaattacactaactcgtaaccatttatca

SEQ ID NO: 348989 - DNA, 30 bp, Artificial Sequence
  Synthetic oligonucleotide
taccagctttagaaaacgggggtaaactca

SEQ ID NO: 348990 - DNA, 30 bp, Artificial Sequence
  Synthetic oligonucleotide
tatgatctacccgccgtcggtttcaactca

SEQ ID NO: 348991 - DNA, 30 bp, Artificial Sequence
  Synthetic oligonucleotide
acccgcggcttgaggcatgccacgaactca

SEQ ID NO: 348992 - DNA, 30 bp, Artificial Sequence
  Synthetic oligonucleotide
gcgaacgtgtgtgcattggataataactca

SEQ ID NO: 348993 - DNA, 30 bp, Artificial Sequence
  Synthetic oligonucleotide
aataggtggtacgagctcactcataactca

SEQ ID NO: 348994 - DNA, 30 bp, Artificial Sequence
  Synthetic oligonucleotide
gcacagtggctgggtgtacgatataactca

SEQ ID NO: 348995 - DNA, 30 bp, Artificial Sequence
  Synthetic oligonucleotide
tagtgaggtccgcttgcgaattctaactca

SEQ ID NO: 348996 - DNA, 30 bp, Artificial Sequence
  Synthetic oligonucleotide
aagaacttccagggacctggtgcacactca

SEQ ID NO: 348997 - DNA, 30 bp, Artificial Sequence
  Synthetic oligonucleotide
ctggcacttggggcatccagtagacactca

SEQ ID NO: 348998 - DNA, 30 bp, Artificial Sequence
  Synthetic oligonucleotide
ctgatagtccggcaattgcctctccactca

SEQ ID NO: 348999 - DNA, 30 bp, Artificial Sequence
  Synthetic oligonucleotide
gacgagtcactgctgctgcttcggcactca

SEQ ID NO: 349000 - DNA, 30 bp, Artificial Sequence
  Synthetic oligonucleotide
gtagaccggtctcggtctagagggcactca

SEQ ID NO: 349001 - DNA, 30 bp, Artificial Sequence
  Synthetic oligonucleotide
caatctgtatcagcgaaactctaagactca

SEQ ID NO: 349002 - DNA, 30 bp, Artificial Sequence
  Synthetic oligonucleotide
gcgcggaagtaattaattatagcagactca

SEQ ID NO: 349003 - DNA, 30 bp, Artificial Sequence
  Synthetic oligonucleotide
gaacaggattactaagatcctggagactca

SEQ ID NO: 349004 - DNA, 30 bp, Artificial Sequence
  Synthetic oligonucleotide
atttgggattcaagttcaacagacgactca

SEQ ID NO: 349005 - DNA, 30 bp, Artificial Sequence
  Synthetic oligonucleotide
ttaagaaaattggaattatcgcgcgactca

SEQ ID NO: 349006 - DNA, 30 bp, Artificial Sequence
  Synthetic oligonucleotide
ttatccggtattggaagttacacggactca

SEQ ID NO: 349007 - DNA, 30 bp, Artificial Sequence
  Synthetic oligonucleotide
gagataacgacgcgctcattgcctgactca

SEQ ID NO: 349008 - DNA, 30 bp, Artificial Sequence
  Synthetic oligonucleotide
tgttagattgcatcagaccgggctgactca

SEQ ID NO: 349009 - DNA, 30 bp, Artificial Sequence
  Synthetic oligonucleotide
cggagagtaggtaatggtttccactactca

SEQ ID NO: 349010 - DNA, 30 bp, Artificial Sequence
  Synthetic oligonucleotide
gtggaaacgttgagctctaccatgtactca

SEQ ID NO: 349011 - DNA, 30 bp, Artificial Sequence
  Synthetic oligonucleotide
attcagaagctggaatgcagtatgtactca

SEQ ID NO: 349012 - DNA, 30 bp, Artificial Sequence
  Synthetic oligonucleotide
atgaatcattgcattatcctattgtactca

SEQ ID NO: 349013 - DNA, 30 bp, Artificial Sequence
  Synthetic oligonucleotide
gctatgaataggtgaagtttatcaacctca

SEQ ID NO: 349014 - DNA, 30 bp, Artificial Sequence
  Synthetic oligonucleotide
taaggcagggctcgacgggcttgaacctca

SEQ ID NO: 349015 - DNA, 30 bp, Artificial Sequence
  Synthetic oligonucleotide
cagcacgtcagagaatgccgtgtaacctca

SEQ ID NO: 349016 - DNA, 30 bp, Artificial Sequence
  Synthetic oligonucleotide
gaagtacgtagaaatgtagatcgcacctca

SEQ ID NO: 349017 - DNA, 30 bp, Artificial Sequence
  Synthetic oligonucleotide
ggccaacgtacgcaccagtcaatcacctca

SEQ ID NO: 349018 - DNA, 30 bp, Artificial Sequence
  Synthetic oligonucleotide
ttagcctgggcctccacttgtgtcacctca

SEQ ID NO: 349019 - DNA, 30 bp, Artificial Sequence
  Synthetic oligonucleotide
agtatcaatctaaccactgacacgacctca

SEQ ID NO: 349020 - DNA, 30 bp, Artificial Sequence
  Synthetic oligonucleotide
gcatcttgcacgttggaattttcgacctca

SEQ ID NO: 349021 - DNA, 30 bp, Artificial Sequence
  Synthetic oligonucleotide
aacaacttcacatgaggacgaatgacctca

SEQ ID NO: 349022 - DNA, 30 bp, Artificial Sequence
  Synthetic oligonucleotide
taaattagccagttttacacttctacctca

SEQ ID NO: 349023 - DNA, 30 bp, Artificial Sequence
  Synthetic oligonucleotide
cactaaggtctttggaggatccttacctca

SEQ ID NO: 349024 - DNA, 30 bp, Artificial Sequence
  Synthetic oligonucleotide
atagaaaaagacagtagtgggttaccctca

SEQ ID NO: 349025 - DNA, 30 bp, Artificial Sequence
  Synthetic oligonucleotide
agagagaaacatgagtgacggcttccctca

SEQ ID NO: 349026 - DNA, 30 bp, Artificial Sequence
  Synthetic oligonucleotide
gacatggcattctcacgtcgcaacgcctca

SEQ ID NO: 349027 - DNA, 29 bp, Artificial Sequence
  Synthetic oligonucleotide
ggaattagacgatgacggcttacgcctca

SEQ ID NO: 349028 - DNA, 30 bp, Artificial Sequence
  Synthetic oligonucleotide
ttcccataaccgaagcacacaccggcctca

SEQ ID NO: 349029 - DNA, 30 bp, Artificial Sequence
  Synthetic oligonucleotide
tttgataaacgggcctaaggcagggcctca

SEQ ID NO: 349030 - DNA, 30 bp, Artificial Sequence
  Synthetic oligonucleotide
ggagaccctggttcatagagtaaatcctca

SEQ ID NO: 349031 - DNA, 30 bp, Artificial Sequence
  Synthetic oligonucleotide
gggagcatacgtcgttgtttggcatcctca

SEQ ID NO: 349032 - DNA, 30 bp, Artificial Sequence
  Synthetic oligonucleotide
cgcctgactgggtttgaggcttactcctca

SEQ ID NO: 349033 - DNA, 30 bp, Artificial Sequence
  Synthetic oligonucleotide
aacttagattcagctatattcctctcctca

SEQ ID NO: 349034 - DNA, 30 bp, Artificial Sequence
  Synthetic oligonucleotide
caactgctcgatggctggaagcagtcctca

SEQ ID NO: 349035 - DNA, 30 bp, Artificial Sequence
  Synthetic oligonucleotide
aagaaggacgtggtaaataatttgtcctca

SEQ ID NO: 349036 - DNA, 30 bp, Artificial Sequence
  Synthetic oligonucleotide
gttatggttcttactgctctggaaagctca

SEQ ID NO: 349037 - DNA, 30 bp, Artificial Sequence
  Synthetic oligonucleotide
acttacggcgtagtgtatccgtcaagctca

SEQ ID NO: 349038 - DNA, 30 bp, Artificial Sequence
  Synthetic oligonucleotide
aaacggctgacgagattgaatgtaagctca

SEQ ID NO: 349039 - DNA, 30 bp, Artificial Sequence
  Synthetic oligonucleotide
aacctcttaccagggtgaacacacagctca

SEQ ID NO: 349040 - DNA, 30 bp, Artificial Sequence
  Synthetic oligonucleotide
gtgctcctcagcacatcgattcgcagctca

SEQ ID NO: 349041 - DNA, 30 bp, Artificial Sequence
  Synthetic oligonucleotide
ggtgctcagcttggagcgtttacgagctca

SEQ ID NO: 349042 - DNA, 30 bp, Artificial Sequence
  Synthetic oligonucleotide
cggggtccgtgttgtgttttctcgagctca

SEQ ID NO: 349043 - DNA, 30 bp, Artificial Sequence
  Synthetic oligonucleotide
aataggtagccgtcgtcttatttacgctca

SEQ ID NO: 349044 - DNA, 30 bp, Artificial Sequence
  Synthetic oligonucleotide
tgatacaatccgttagcttttgagcgctca

SEQ ID NO: 349045 - DNA, 30 bp, Artificial Sequence
  Synthetic oligonucleotide
ttcgccttgcgtccctgagcaaaaggctca

SEQ ID NO: 349046 - DNA, 30 bp, Artificial Sequence
  Synthetic oligonucleotide
gtaaataattggactagatgacccggctca

SEQ ID NO: 349047 - DNA, 30 bp, Artificial Sequence
  Synthetic oligonucleotide
ctgttgcgcggagaccgatggatcggctca

SEQ ID NO: 349048 - DNA, 30 bp, Artificial Sequence
  Synthetic oligonucleotide
tcttctctggttttggtgagtgagggctca

SEQ ID NO: 349049 - DNA, 30 bp, Artificial Sequence
  Synthetic oligonucleotide
gtcagcccatgagatgaaaaatatggctca

SEQ ID NO: 349050 - DNA, 30 bp, Artificial Sequence
  Synthetic oligonucleotide
gccacagagtaaattttacagtaatgctca

SEQ ID NO: 349051 - DNA, 30 bp, Artificial Sequence
  Synthetic oligonucleotide
ctaatccggaacccacttacttcatgctca

SEQ ID NO: 349052 - DNA, 30 bp, Artificial Sequence
  Synthetic oligonucleotide
gaatgacggaacagcttcgtcagatgctca

SEQ ID NO: 349053 - DNA, 30 bp, Artificial Sequence
  Synthetic oligonucleotide
aagccgcgttaactcgcgcaatgctgctca

SEQ ID NO: 349054 - DNA, 30 bp, Artificial Sequence
  Synthetic oligonucleotide
atgatttggactgctggagccatctgctca

SEQ ID NO: 349055 - DNA, 30 bp, Artificial Sequence
  Synthetic oligonucleotide
accggatgctcgagagctgcctattgctca

SEQ ID NO: 349056 - DNA, 30 bp, Artificial Sequence
  Synthetic oligonucleotide
ggatacgaaacaaagagcatttcttgctca

SEQ ID NO: 349057 - DNA, 30 bp, Artificial Sequence
  Synthetic oligonucleotide
ttatactgggcaagccctccgttttgctca

SEQ ID NO: 349058 - DNA, 30 bp, Artificial Sequence
  Synthetic oligonucleotide
tattccaatgacaaggtttgatgaatctca

SEQ ID NO: 349059 - DNA, 30 bp, Artificial Sequence
  Synthetic oligonucleotide
gtgggctctatttacgttagaagcatctca

SEQ ID NO: 349060 - DNA, 30 bp, Artificial Sequence
  Synthetic oligonucleotide
gtatctcctatacgaggaatcgagatctca

SEQ ID NO: 349061 - DNA, 30 bp, Artificial Sequence
  Synthetic oligonucleotide
aatgggagaaaatggaagcggcctatctca

SEQ ID NO: 349062 - DNA, 30 bp, Artificial Sequence
  Synthetic oligonucleotide
tattagtgcatgaaacaacaaatcctctca

SEQ ID NO: 349063 - DNA, 30 bp, Artificial Sequence
  Synthetic oligonucleotide
atattgcgtggtgcttaggacccgctctca

SEQ ID NO: 349064 - DNA, 30 bp, Artificial Sequence
  Synthetic oligonucleotide
ggcaacggctagggtgtttcaatgctctca

SEQ ID NO: 349065 - DNA, 30 bp, Artificial Sequence
  Synthetic oligonucleotide
cgagactgcaggattccgtgcgatctctca

SEQ ID NO: 349066 - DNA, 30 bp, Artificial Sequence
  Synthetic oligonucleotide
taaatcaaaccaatgtagctccaagtctca

SEQ ID NO: 349067 - DNA, 30 bp, Artificial Sequence
  Synthetic oligonucleotide
tttatcgaggcaaggttagatgacgtctca

SEQ ID NO: 349068 - DNA, 30 bp, Artificial Sequence
  Synthetic oligonucleotide
taacagcaaccttcataatgtttcgtctca

SEQ ID NO: 349069 - DNA, 30 bp, Artificial Sequence
  Synthetic oligonucleotide
actcgaagagtccagttggtcaaggtctca

SEQ ID NO: 349070 - DNA, 30 bp, Artificial Sequence
  Synthetic oligonucleotide
acgcgtaaatgaaccaggcatgaggtctca

SEQ ID NO: 349071 - DNA, 30 bp, Artificial Sequence
  Synthetic oligonucleotide
taggtattatttacgaacattaatgtctca

SEQ ID NO: 349072 - DNA, 30 bp, Artificial Sequence
  Synthetic oligonucleotide
tgtctttagaatggaagatagggtgtctca

SEQ ID NO: 349073 - DNA, 30 bp, Artificial Sequence
  Synthetic oligonucleotide
atgagtacgttggcattggcaattgtctca

SEQ ID NO: 349074 - DNA, 30 bp, Artificial Sequence
  Synthetic oligonucleotide
gtaaatccgtacgaaggaccccgcttctca

SEQ ID NO: 349075 - DNA, 30 bp, Artificial Sequence
  Synthetic oligonucleotide
taattccaggtgtcctgatagttcttctca

SEQ ID NO: 349076 - DNA, 30 bp, Artificial Sequence
  Synthetic oligonucleotide
aaatctcgttcgcccttcaatcagttctca

SEQ ID NO: 349077 - DNA, 30 bp, Artificial Sequence
  Synthetic oligonucleotide
ggagctaatacatgcacccgttagttctca

SEQ ID NO: 349078 - DNA, 30 bp, Artificial Sequence
  Synthetic oligonucleotide
gcatgcacgtcatagctgatgtctttctca

SEQ ID NO: 349079 - DNA, 30 bp, Artificial Sequence
  Synthetic oligonucleotide
tcgggacacttacgctctttctgtttctca

SEQ ID NO: 349080 - DNA, 30 bp, Artificial Sequence
  Synthetic oligonucleotide
gtggctggctagctcttggcgtgtttctca

SEQ ID NO: 349081 - DNA, 30 bp, Artificial Sequence
  Synthetic oligonucleotide
ggattccaacggcaacgagggtttttctca

SEQ ID NO: 349082 - DNA, 30 bp, Artificial Sequence
  Synthetic oligonucleotide
cgcgacgctctcagacgggactcaaagtca

SEQ ID NO: 349083 - DNA, 30 bp, Artificial Sequence
  Synthetic oligonucleotide
gtttgccccggtacttataggttcaagtca

SEQ ID NO: 349084 - DNA, 30 bp, Artificial Sequence
  Synthetic oligonucleotide
aggtaattattactaccggtgaagaagtca

SEQ ID NO: 349085 - DNA, 30 bp, Artificial Sequence
  Synthetic oligonucleotide
atggtgtgaagctcccggatggcgaagtca

SEQ ID NO: 349086 - DNA, 30 bp, Artificial Sequence
  Synthetic oligonucleotide
aattcacacgaactggggtgccgtaagtca

SEQ ID NO: 349087 - DNA, 30 bp, Artificial Sequence
  Synthetic oligonucleotide
aaccgacttaggcatttgccccaacagtca

SEQ ID NO: 349088 - DNA, 30 bp, Artificial Sequence
  Synthetic oligonucleotide
atggtctttctaaggggctagatacagtca

SEQ ID NO: 349089 - DNA, 30 bp, Artificial Sequence
  Synthetic oligonucleotide
cgacagctagctccaggtacacgccagtca

SEQ ID NO: 349090 - DNA, 30 bp, Artificial Sequence
  Synthetic oligonucleotide
ctacgcttcatgggtccattaaatcagtca

SEQ ID NO: 349091 - DNA, 30 bp, Artificial Sequence
  Synthetic oligonucleotide
ttcttagttaagtcggttttaaacgagtca

SEQ ID NO: 349092 - DNA, 30 bp, Artificial Sequence
  Synthetic oligonucleotide
tctaaacatggagttttggggtcggagtca

SEQ ID NO: 349093 - DNA, 30 bp, Artificial Sequence
  Synthetic oligonucleotide
caggatttcagtaacatattcagtgagtca

SEQ ID NO: 349094 - DNA, 30 bp, Artificial Sequence
  Synthetic oligonucleotide
tctatttgctcggaattacatagatagtca

SEQ ID NO: 349095 - DNA, 30 bp, Artificial Sequence
  Synthetic oligonucleotide
taggaattcaaactcacacgttggtagtca

SEQ ID NO: 349096 - DNA, 30 bp, Artificial Sequence
  Synthetic oligonucleotide
ctgatggttgaaccggtacggttgtagtca

SEQ ID NO: 349097 - DNA, 30 bp, Artificial Sequence
  Synthetic oligonucleotide
acctaacgcataagggtgatcgtttagtca

SEQ ID NO: 349098 - DNA, 30 bp, Artificial Sequence
  Synthetic oligonucleotide
tgtcgtatgtgctttatccaacaaacgtca

SEQ ID NO: 349099 - DNA, 30 bp, Artificial Sequence
  Synthetic oligonucleotide
atattatcggcgacagctttatcaacgtca

SEQ ID NO: 349100 - DNA, 30 bp, Artificial Sequence
  Synthetic oligonucleotide
ttagctattaacgctgttgccttaacgtca

SEQ ID NO: 349101 - DNA, 30 bp, Artificial Sequence
  Synthetic oligonucleotide
catttgaggagacaacgggggaccacgtca

SEQ ID NO: 349102 - DNA, 30 bp, Artificial Sequence
  Synthetic oligonucleotide
cagcatgagggcagggccgctcccacgtca

SEQ ID NO: 349103 - DNA, 30 bp, Artificial Sequence
  Synthetic oligonucleotide
tgtgatgaacgttttcagtcagatacgtca

SEQ ID NO: 349104 - DNA, 30 bp, Artificial Sequence
  Synthetic oligonucleotide
agtttgacccgaatattgacgtatacgtca

SEQ ID NO: 349105 - DNA, 30 bp, Artificial Sequence
  Synthetic oligonucleotide
ctgcataagtgatgcttaggatctacgtca

SEQ ID NO: 349106 - DNA, 30 bp, Artificial Sequence
  Synthetic oligonucleotide
cgatttcctcgtcgttgcggcataccgtca

SEQ ID NO: 349107 - DNA, 30 bp, Artificial Sequence
  Synthetic oligonucleotide
ttctacgcttatattcgagtacccccgtca

SEQ ID NO: 349108 - DNA, 30 bp, Artificial Sequence
  Synthetic oligonucleotide
aattactgtcggattcacccaactccgtca

SEQ ID NO: 349109 - DNA, 30 bp, Artificial Sequence
  Synthetic oligonucleotide
gcacgagaatgacgtggtgggaaagcgtca

SEQ ID NO: 349110 - DNA, 30 bp, Artificial Sequence
  Synthetic oligonucleotide
tgctgaataagaatttgcttcgcagcgtca

SEQ ID NO: 349111 - DNA, 30 bp, Artificial Sequence
  Synthetic oligonucleotide
tctaggtctcacctaaactagtgcgcgtca

SEQ ID NO: 349112 - DNA, 30 bp, Artificial Sequence
  Synthetic oligonucleotide
gctgggctgggtgcggtttttggggcgtca

SEQ ID NO: 349113 - DNA, 30 bp, Artificial Sequence
  Synthetic oligonucleotide
agaccgcaggtgcttaccgagtatgcgtca

SEQ ID NO: 349114 - DNA, 30 bp, Artificial Sequence
  Synthetic oligonucleotide
ctctgaccgtttgaggtgagcgctgcgtca

SEQ ID NO: 349115 - DNA, 30 bp, Artificial Sequence
  Synthetic oligonucleotide
ccatcatggaatatttcctacggatcgtca

SEQ ID NO: 349116 - DNA, 30 bp, Artificial Sequence
  Synthetic oligonucleotide
cgccagtttgtagtgcgaccgttatcgtca

SEQ ID NO: 349117 - DNA, 30 bp, Artificial Sequence
  Synthetic oligonucleotide
agcccaaaagtgcggcgttgggtctcgtca

SEQ ID NO: 349118 - DNA, 30 bp, Artificial Sequence
  Synthetic oligonucleotide
acgcggtgcaggagattcttttattcgtca

SEQ ID NO: 349119 - DNA, 30 bp, Artificial Sequence
  Synthetic oligonucleotide
tttggccatgattattatgcaggttcgtca

SEQ ID NO: 349120 - DNA, 30 bp, Artificial Sequence
  Synthetic oligonucleotide
gaagagagctcctaggacacgttttcgtca

SEQ ID NO: 349121 - DNA, 30 bp, Artificial Sequence
  Synthetic oligonucleotide
tagagctctgatggtcgccaaggaaggtca

SEQ ID NO: 349122 - DNA, 30 bp, Artificial Sequence
  Synthetic oligonucleotide
cccttctgcgtcgttgggtcatgaaggtca

SEQ ID NO: 349123 - DNA, 30 bp, Artificial Sequence
  Synthetic oligonucleotide
ttcttgtcacgtctaaggccgtgaaggtca

SEQ ID NO: 349124 - DNA, 30 bp, Artificial Sequence
  Synthetic oligonucleotide
ttcggtattcagaagagcaattgcaggtca

SEQ ID NO: 349125 - DNA, 30 bp, Artificial Sequence
  Synthetic oligonucleotide
tactccaccggttggtcgggacagaggtca

SEQ ID NO: 349126 - DNA, 30 bp, Artificial Sequence
  Synthetic oligonucleotide
tgtggatcatttttggttcgatagaggtca

SEQ ID NO: 349127 - DNA, 30 bp, Artificial Sequence
  Synthetic oligonucleotide
tgcgtagccgccttaaaggtatgacggtca

SEQ ID NO: 349128 - DNA, 30 bp, Artificial Sequence
  Synthetic oligonucleotide
ttggtctggtaacttcctaaaacccggtca

SEQ ID NO: 349129 - DNA, 30 bp, Artificial Sequence
  Synthetic oligonucleotide
aacgcatgcttctgcacatccgtccggtca

SEQ ID NO: 349130 - DNA, 30 bp, Artificial Sequence
  Synthetic oligonucleotide
ctaggccagatttaccacgcgttccggtca

SEQ ID NO: 349131 - DNA, 30 bp, Artificial Sequence
  Synthetic oligonucleotide
ccagcatagtacttcatagagaatcggtca

SEQ ID NO: 349132 - DNA, 30 bp, Artificial Sequence
  Synthetic oligonucleotide
accgggagcggtcatgactcacaagggtca

SEQ ID NO: 349133 - DNA, 30 bp, Artificial Sequence
  Synthetic oligonucleotide
aatggagattcggacctttcggaagggtca

SEQ ID NO: 349134 - DNA, 30 bp, Artificial Sequence
  Synthetic oligonucleotide
ggctagacctccccttcatcggcagggtca

SEQ ID NO: 349135 - DNA, 30 bp, Artificial Sequence
  Synthetic oligonucleotide
tcatgcacgttgtattttacacgagggtca

SEQ ID NO: 349136 - DNA, 30 bp, Artificial Sequence
  Synthetic oligonucleotide
cgatattcgcgcagataacttcgagggtca

SEQ ID NO: 349137 - DNA, 30 bp, Artificial Sequence
  Synthetic oligonucleotide
ccttcgacaaatcaggcacagtgagggtca

SEQ ID NO: 349138 - DNA, 30 bp, Artificial Sequence
  Synthetic oligonucleotide
gcccacctcagactttgtatcaccgggtca

SEQ ID NO: 349139 - DNA, 30 bp, Artificial Sequence
  Synthetic oligonucleotide
cgccaaacggttaatgttaagaccgggtca

SEQ ID NO: 349140 - DNA, 30 bp, Artificial Sequence
  Synthetic oligonucleotide
ctttgagttccagagaaattgacggggtca

SEQ ID NO: 349141 - DNA, 30 bp, Artificial Sequence
  Synthetic oligonucleotide
gacgggtaacaggggcaagataagtggtca

SEQ ID NO: 349142 - DNA, 30 bp, Artificial Sequence
  Synthetic oligonucleotide
gtccgctgcaataaagcatcccgaatgtca

SEQ ID NO: 349143 - DNA, 30 bp, Artificial Sequence
  Synthetic oligonucleotide
tctgtcttaaatgagacaaatttaatgtca

SEQ ID NO: 349144 - DNA, 30 bp, Artificial Sequence
  Synthetic oligonucleotide
cggttagttcttttggaagtaaacatgtca

SEQ ID NO: 349145 - DNA, 30 bp, Artificial Sequence
  Synthetic oligonucleotide
acatcagcaaacatgttgaaaggcatgtca

SEQ ID NO: 349146 - DNA, 30 bp, Artificial Sequence
  Synthetic oligonucleotide
ccatgtcatcactagccagccatcatgtca

SEQ ID NO: 349147 - DNA, 30 bp, Artificial Sequence
  Synthetic oligonucleotide
cccatgttgtactcttcgctgagcctgtca

SEQ ID NO: 349148 - DNA, 30 bp, Artificial Sequence
  Synthetic oligonucleotide
cttaacatcctgtcttcatgactcctgtca

SEQ ID NO: 349149 - DNA, 30 bp, Artificial Sequence
  Synthetic oligonucleotide
aggagcagtgtagtccctgactttctgtca

SEQ ID NO: 349150 - DNA, 30 bp, Artificial Sequence
  Synthetic oligonucleotide
acagtcaattccagccatcgcaaggtgtca

SEQ ID NO: 349151 - DNA, 30 bp, Artificial Sequence
  Synthetic oligonucleotide
ccgatggagagcctcccacatcaggtgtca

SEQ ID NO: 349152 - DNA, 30 bp, Artificial Sequence
  Synthetic oligonucleotide
agtgggatgacgagatggtccccggtgtca

SEQ ID NO: 349153 - DNA, 30 bp, Artificial Sequence
  Synthetic oligonucleotide
tcgtcgtgtgctaatatcaggcgggtgtca

SEQ ID NO: 349154 - DNA, 30 bp, Artificial Sequence
  Synthetic oligonucleotide
tacatagtgttgtcaagagcctatgtgtca

SEQ ID NO: 349155 - DNA, 30 bp, Artificial Sequence
  Synthetic oligonucleotide
tagaccgtcacagaatgttagggtgtgtca

SEQ ID NO: 349156 - DNA, 30 bp, Artificial Sequence
  Synthetic oligonucleotide
ttgcccatgcctcgagttataattgtgtca

SEQ ID NO: 349157 - DNA, 30 bp, Artificial Sequence
  Synthetic oligonucleotide
gaatgtcaaggacggggaatttttgtgtca

SEQ ID NO: 349158 - DNA, 30 bp, Artificial Sequence
  Synthetic oligonucleotide
agacaggccctcccgataaccgaattgtca

SEQ ID NO: 349159 - DNA, 30 bp, Artificial Sequence
  Synthetic oligonucleotide
ggggtcgaatttagatactattaattgtca

SEQ ID NO: 349160 - DNA, 30 bp, Artificial Sequence
  Synthetic oligonucleotide
gggtatttcctataagcaactagattgtca

SEQ ID NO: 349161 - DNA, 30 bp, Artificial Sequence
  Synthetic oligonucleotide
ggatgcagctacgattcccaagacttgtca

SEQ ID NO: 349162 - DNA, 30 bp, Artificial Sequence
  Synthetic oligonucleotide
tatgtacaatgcgatgctaggaccttgtca

SEQ ID NO: 349163 - DNA, 30 bp, Artificial Sequence
  Synthetic oligonucleotide
gcagagagacaactcaaatgaaagttgtca

SEQ ID NO: 349164 - DNA, 30 bp, Artificial Sequence
  Synthetic oligonucleotide
tatgagacacaccctctcaagtggttgtca

SEQ ID NO: 349165 - DNA, 30 bp, Artificial Sequence
  Synthetic oligonucleotide
gcgcagcttgcaaccatgtaagttttgtca

SEQ ID NO: 349166 - DNA, 30 bp, Artificial Sequence
  Synthetic oligonucleotide
atgtatttagccggtcgaggcaaaaattca

SEQ ID NO: 349167 - DNA, 30 bp, Artificial Sequence
  Synthetic oligonucleotide
ttgaaaagccttgcgctgttgccaaattca

SEQ ID NO: 349168 - DNA, 30 bp, Artificial Sequence
  Synthetic oligonucleotide
aaatgcactgctggacaactaggaaattca

SEQ ID NO: 349169 - DNA, 30 bp, Artificial Sequence
  Synthetic oligonucleotide
gctttattccaagagaaatgcctaaattca

SEQ ID NO: 349170 - DNA, 30 bp, Artificial Sequence
  Synthetic oligonucleotide
aagtacgctagtcccggcttgggcaattca

SEQ ID NO: 349171 - DNA, 30 bp, Artificial Sequence
  Synthetic oligonucleotide
gtgaaccgattgaactttaaatcgaattca

SEQ ID NO: 349172 - DNA, 28 bp, Artificial Sequence
  Synthetic oligonucleotide
tagtcgattatgtgtctcgcggaattca

SEQ ID NO: 349173 - DNA, 30 bp, Artificial Sequence
  Synthetic oligonucleotide
gcggtttcgcccaaattgcgggaacattca

SEQ ID NO: 349174 - DNA, 30 bp, Artificial Sequence
  Synthetic oligonucleotide
aaaagtacgccttgtacttggcgccattca

SEQ ID NO: 349175 - DNA, 30 bp, Artificial Sequence
  Synthetic oligonucleotide
tacaaacatcgcgcgctgccattccattca

SEQ ID NO: 349176 - DNA, 30 bp, Artificial Sequence
  Synthetic oligonucleotide
aagttaattcctgtgtattctcggcattca

SEQ ID NO: 349177 - DNA, 30 bp, Artificial Sequence
  Synthetic oligonucleotide
aggttcgttcgtgtgctcacttctcattca

SEQ ID NO: 349178 - DNA, 30 bp, Artificial Sequence
  Synthetic oligonucleotide
ggtacataggtctttcgcgctagagattca

SEQ ID NO: 349179 - DNA, 30 bp, Artificial Sequence
  Synthetic oligonucleotide
aaagaacatgggtgatcacagcgagattca

SEQ ID NO: 349180 - DNA, 30 bp, Artificial Sequence
  Synthetic oligonucleotide
acccaagtgatggtggatagatgagattca

SEQ ID NO: 349181 - DNA, 30 bp, Artificial Sequence
  Synthetic oligonucleotide
gccaactcaggctcattcctgacggattca

SEQ ID NO: 349182 - DNA, 30 bp, Artificial Sequence
  Synthetic oligonucleotide
gcaagcgccgacgtgttacggtgggattca

SEQ ID NO: 349183 - DNA, 30 bp, Artificial Sequence
  Synthetic oligonucleotide
actacctcgggagtaacacacaaatattca

SEQ ID NO: 349184 - DNA, 30 bp, Artificial Sequence
  Synthetic oligonucleotide
ggccaccggtatatccaaatagtctattca

SEQ ID NO: 349185 - DNA, 30 bp, Artificial Sequence
  Synthetic oligonucleotide
actctccaaaagggcagttctgagtattca

SEQ ID NO: 349186 - DNA, 30 bp, Artificial Sequence
  Synthetic oligonucleotide
aaagaatgacgtagatagccctagtattca

SEQ ID NO: 349187 - DNA, 30 bp, Artificial Sequence
  Synthetic oligonucleotide
cttgaggattatctaatttagaggtattca

SEQ ID NO: 349188 - DNA, 30 bp, Artificial Sequence
  Synthetic oligonucleotide
aaattgggaccgtatcatttagcaacttca

SEQ ID NO: 349189 - DNA, 30 bp, Artificial Sequence
  Synthetic oligonucleotide
aatgggttccgtggcgtatccttaacttca

SEQ ID NO: 349190 - DNA, 30 bp, Artificial Sequence
  Synthetic oligonucleotide
cacttattcttgacgctatactacacttca

SEQ ID NO: 349191 - DNA, 30 bp, Artificial Sequence
  Synthetic oligonucleotide
gacactgagtttaccgcatatagcacttca

SEQ ID NO: 349192 - DNA, 30 bp, Artificial Sequence
  Synthetic oligonucleotide
ctggtattcgcccgtgggaattgcacttca

SEQ ID NO: 349193 - DNA, 30 bp, Artificial Sequence
  Synthetic oligonucleotide
tgttaccaagaaacccttaatgagacttca

SEQ ID NO: 349194 - DNA, 30 bp, Artificial Sequence
  Synthetic oligonucleotide
caatgtgctctatatcagctttagacttca

SEQ ID NO: 349195 - DNA, 30 bp, Artificial Sequence
  Synthetic oligonucleotide
tgaacttacttgcgttacgagtatacttca

SEQ ID NO: 349196 - DNA, 30 bp, Artificial Sequence
  Synthetic oligonucleotide
gtcagccgccgtactgggtctattacttca

SEQ ID NO: 349197 - DNA, 30 bp, Artificial Sequence
  Synthetic oligonucleotide
gatgggggttcgattcatcattccccttca

SEQ ID NO: 349198 - DNA, 30 bp, Artificial Sequence
  Synthetic oligonucleotide
atcgtcgataatgcgtcttcttagccttca

SEQ ID NO: 349199 - DNA, 30 bp, Artificial Sequence
  Synthetic oligonucleotide
cctccgtgtaggggagaagttcatccttca

SEQ ID NO: 349200 - DNA, 30 bp, Artificial Sequence
  Synthetic oligonucleotide
tcttggattctactgaaagaagtagcttca

SEQ ID NO: 349201 - DNA, 30 bp, Artificial Sequence
  Synthetic oligonucleotide
gcgttcgagtaagttagtccgcacgcttca

SEQ ID NO: 349202 - DNA, 30 bp, Artificial Sequence
  Synthetic oligonucleotide
aaacgctcagatagcggatttagtgcttca

SEQ ID NO: 349203 - DNA, 30 bp, Artificial Sequence
  Synthetic oligonucleotide
ggatagttattcgaaaaaacatttgcttca

SEQ ID NO: 349204 - DNA, 30 bp, Artificial Sequence
  Synthetic oligonucleotide
taagaggatggaacacggttagcgtcttca

SEQ ID NO: 349205 - DNA, 30 bp, Artificial Sequence
  Synthetic oligonucleotide
gcgtcctagcacgtttgtagcgtttcttca

SEQ ID NO: 349206 - DNA, 30 bp, Artificial Sequence
  Synthetic oligonucleotide
ggaacctatacaattagaacattaagttca

SEQ ID NO: 349207 - DNA, 30 bp, Artificial Sequence
  Synthetic oligonucleotide
cagagcgaaacgcagtaagtacacagttca

SEQ ID NO: 349208 - DNA, 30 bp, Artificial Sequence
  Synthetic oligonucleotide
aagccacaagtctgtgataatcccagttca

SEQ ID NO: 349209 - DNA, 30 bp, Artificial Sequence
  Synthetic oligonucleotide
agcccggcgtatttaacgcgtatgagttca

SEQ ID NO: 349210 - DNA, 30 bp, Artificial Sequence
  Synthetic oligonucleotide
attgagcattgaagacattatactagttca

SEQ ID NO: 349211 - DNA, 30 bp, Artificial Sequence
  Synthetic oligonucleotide
agggatcgcccccgtgacaacagtagttca

SEQ ID NO: 349212 - DNA, 31 bp, Artificial Sequence
  Synthetic oligonucleotide
gtaagacgcgttgcatcgaccgagtagttca

SEQ ID NO: 349213 - DNA, 30 bp, Artificial Sequence
  Synthetic oligonucleotide
gtaggtataggtacctgatagtgtagttca

SEQ ID NO: 349214 - DNA, 30 bp, Artificial Sequence
  Synthetic oligonucleotide
ggtaacggtcgtgaatttataacacgttca

SEQ ID NO: 349215 - DNA, 31 bp, Artificial Sequence
  Synthetic oligonucleotide
cagatcagcactgtctttgtgaccacgttca

SEQ ID NO: 349216 - DNA, 30 bp, Artificial Sequence
  Synthetic oligonucleotide
accctgggcttcatattcggtatccgttca

SEQ ID NO: 349217 - DNA, 30 bp, Artificial Sequence
  Synthetic oligonucleotide
acacagacaaagtgtcacgcgtagcgttca

SEQ ID NO: 349218 - DNA, 30 bp, Artificial Sequence
  Synthetic oligonucleotide
tatcgcttgcacagttccactgatcgttca

SEQ ID NO: 349219 - DNA, 30 bp, Artificial Sequence
  Synthetic oligonucleotide
taggcacgccagcgctcactatatcgttca

SEQ ID NO: 349220 - DNA, 30 bp, Artificial Sequence
  Synthetic oligonucleotide
gggaatcttagttcggcagtacgaggttca

SEQ ID NO: 349221 - DNA, 30 bp, Artificial Sequence
  Synthetic oligonucleotide
aaatccattaaagtcatctatggcggttca

SEQ ID NO: 349222 - DNA, 30 bp, Artificial Sequence
  Synthetic oligonucleotide
cattggggagtttaacgatgcatcggttca

SEQ ID NO: 349223 - DNA, 30 bp, Artificial Sequence
  Synthetic oligonucleotide
caccctaccacccccacggatctcggttca

SEQ ID NO: 349224 - DNA, 30 bp, Artificial Sequence
  Synthetic oligonucleotide
caatatgccgagtacataaaattcggttca

SEQ ID NO: 349225 - DNA, 30 bp, Artificial Sequence
  Synthetic oligonucleotide
tcaacagacgtgtgtgcctgcaagggttca

SEQ ID NO: 349226 - DNA, 30 bp, Artificial Sequence
  Synthetic oligonucleotide
tgtaatatggcgcgcgattgcaagggttca

SEQ ID NO: 349227 - DNA, 30 bp, Artificial Sequence
  Synthetic oligonucleotide
actagcactgctttttttcggccgggttca

SEQ ID NO: 349228 - DNA, 30 bp, Artificial Sequence
  Synthetic oligonucleotide
tgcatagcttgtgcatctaatattggttca

SEQ ID NO: 349229 - DNA, 30 bp, Artificial Sequence
  Synthetic oligonucleotide
taccaggctctcgagggcgttgaatgttca

SEQ ID NO: 349230 - DNA, 30 bp, Artificial Sequence
  Synthetic oligonucleotide
agtgtccctaaacataggttaggctgttca

SEQ ID NO: 349231 - DNA, 30 bp, Artificial Sequence
  Synthetic oligonucleotide
tgtgcgaatgaaaaccaagaattctgttca

SEQ ID NO: 349232 - DNA, 30 bp, Artificial Sequence
  Synthetic oligonucleotide
atgggtgggatgtaattattaaggtgttca

SEQ ID NO: 349233 - DNA, 30 bp, Artificial Sequence
  Synthetic oligonucleotide
cagcgcatgccattcaataaatggtgttca

SEQ ID NO: 349234 - DNA, 30 bp, Artificial Sequence
  Synthetic oligonucleotide
caagggttggaacaaataccctggtgttca

SEQ ID NO: 349235 - DNA, 30 bp, Artificial Sequence
  Synthetic oligonucleotide
tggattattggtggggaataaaattgttca

SEQ ID NO: 349236 - DNA, 30 bp, Artificial Sequence
  Synthetic oligonucleotide
tcttatcacctattagattctgattgttca

SEQ ID NO: 349237 - DNA, 30 bp, Artificial Sequence
  Synthetic oligonucleotide
cgcaaacgagtttcagccgggtattgttca

SEQ ID NO: 349238 - DNA, 30 bp, Artificial Sequence
  Synthetic oligonucleotide
aagcgtttgttattgcctagtgcttgttca

SEQ ID NO: 349239 - DNA, 30 bp, Artificial Sequence
  Synthetic oligonucleotide
caggttcggattgatattattcgttgttca

SEQ ID NO: 349240 - DNA, 30 bp, Artificial Sequence
  Synthetic oligonucleotide
ttgttagtatctcggcgacacgtttgttca

SEQ ID NO: 349241 - DNA, 30 bp, Artificial Sequence
  Synthetic oligonucleotide
cttgtgccgtaattaaaagtttgaatttca

SEQ ID NO: 349242 - DNA, 30 bp, Artificial Sequence
  Synthetic oligonucleotide
ggtgaatacacctaccactagacgatttca

SEQ ID NO: 349243 - DNA, 30 bp, Artificial Sequence
  Synthetic oligonucleotide
tggacccccctggttgtgtcgcggatttca

SEQ ID NO: 349244 - DNA, 30 bp, Artificial Sequence
  Synthetic oligonucleotide
ctcgtgtccccttacagatgctcactttca

SEQ ID NO: 349245 - DNA, 30 bp, Artificial Sequence
  Synthetic oligonucleotide
cactttgagtgtgtctagaagatactttca

SEQ ID NO: 349246 - DNA, 30 bp, Artificial Sequence
  Synthetic oligonucleotide
atggattatctcttaatcgaaagcctttca

SEQ ID NO: 349247 - DNA, 29 bp, Artificial Sequence
  Synthetic oligonucleotide
ggttgattatcagtctagtgttcctttca

SEQ ID NO: 349248 - DNA, 30 bp, Artificial Sequence
  Synthetic oligonucleotide
tgtgtattcctctgtgttatacggctttca

SEQ ID NO: 349249 - DNA, 30 bp, Artificial Sequence
  Synthetic oligonucleotide
tgtataatgccaccaggggataatctttca

SEQ ID NO: 349250 - DNA, 30 bp, Artificial Sequence
  Synthetic oligonucleotide
gattgcacaagaaatcctacatgtctttca

SEQ ID NO: 349251 - DNA, 30 bp, Artificial Sequence
  Synthetic oligonucleotide
ttcaagtttgtggggactcctggagtttca

SEQ ID NO: 349252 - DNA, 30 bp, Artificial Sequence
  Synthetic oligonucleotide
tagagtcctataggtagtcccaccgtttca

SEQ ID NO: 349253 - DNA, 30 bp, Artificial Sequence
  Synthetic oligonucleotide
agaaggtgtttatgtcgcttgcccgtttca

SEQ ID NO: 349254 - DNA, 30 bp, Artificial Sequence
  Synthetic oligonucleotide
agcatcgttagttctgcaccgatcgtttca

SEQ ID NO: 349255 - DNA, 30 bp, Artificial Sequence
  Synthetic oligonucleotide
gcgcagtccgacaaaggtatgaaggtttca

SEQ ID NO: 349256 - DNA, 31 bp, Artificial Sequence
  Synthetic oligonucleotide
tacatctcagtttgccgcgcaagctgtttca

SEQ ID NO: 349257 - DNA, 30 bp, Artificial Sequence
  Synthetic oligonucleotide
cccaactaagtgcaggtgtcgattgtttca

SEQ ID NO: 349258 - DNA, 30 bp, Artificial Sequence
  Synthetic oligonucleotide
cgagagaattatagttacccgccattttca

SEQ ID NO: 349259 - DNA, 30 bp, Artificial Sequence
  Synthetic oligonucleotide
gcagtgaactatagggtgatacgattttca

SEQ ID NO: 349260 - DNA, 30 bp, Artificial Sequence
  Synthetic oligonucleotide
acgcgcggtccgccgacagtatgattttca

SEQ ID NO: 349261 - DNA, 30 bp, Artificial Sequence
  Synthetic oligonucleotide
tgtggaacacatatgaaaactatcttttca

SEQ ID NO: 349262 - DNA, 30 bp, Artificial Sequence
  Synthetic oligonucleotide
gaacatataagctagtcaaaggtcttttca

SEQ ID NO: 349263 - DNA, 30 bp, Artificial Sequence
  Synthetic oligonucleotide
cagttcggagagttcatctttgtcttttca

SEQ ID NO: 349264 - DNA, 30 bp, Artificial Sequence
  Synthetic oligonucleotide
gtcttcgttggccacaatctgacgttttca

SEQ ID NO: 349265 - DNA, 30 bp, Artificial Sequence
  Synthetic oligonucleotide
atcactaaggtggcacttcctcggttttca

SEQ ID NO: 349266 - DNA, 30 bp, Artificial Sequence
  Synthetic oligonucleotide
aggcgcgaataccccggggttgatttttca

SEQ ID NO: 349267 - DNA, 30 bp, Artificial Sequence
  Synthetic oligonucleotide
agttccgtggaatgttgttggcgtttttca

SEQ ID NO: 349268 - DNA, 30 bp, Artificial Sequence
  Synthetic oligonucleotide
gacaaatctcccctctatacgtgtttttca

SEQ ID NO: 349269 - DNA, 30 bp, Artificial Sequence
  Synthetic oligonucleotide
tgatcacgtccgttggtcaaactaaaaaga

SEQ ID NO: 349270 - DNA, 30 bp, Artificial Sequence
  Synthetic oligonucleotide
catgtgaccttagtcccgagtaacaaaaga

SEQ ID NO: 349271 - DNA, 30 bp, Artificial Sequence
  Synthetic oligonucleotide
tatatactgttggggataaagcacaaaaga

SEQ ID NO: 349272 - DNA, 30 bp, Artificial Sequence
  Synthetic oligonucleotide
ggttgtaaggtaccttgctaagccaaaaga

SEQ ID NO: 349273 - DNA, 30 bp, Artificial Sequence
  Synthetic oligonucleotide
ctgattgttgtcgtcacacgtgagaaaaga

SEQ ID NO: 349274 - DNA, 30 bp, Artificial Sequence
  Synthetic oligonucleotide
ttgtagcatccctcatcagtgcggaaaaga

SEQ ID NO: 349275 - DNA, 30 bp, Artificial Sequence
  Synthetic oligonucleotide
tgagaggtatcttactgtcgtaataaaaga

SEQ ID NO: 349276 - DNA, 30 bp, Artificial Sequence
  Synthetic oligonucleotide
aaatgcttaatgtctagtcaacataaaaga

SEQ ID NO: 349277 - DNA, 30 bp, Artificial Sequence
  Synthetic oligonucleotide
aagtatagactatagtcctggattaaaaga

SEQ ID NO: 349278 - DNA, 30 bp, Artificial Sequence
  Synthetic oligonucleotide
acatctcaactgctgcatagtccacaaaga

SEQ ID NO: 349279 - DNA, 30 bp, Artificial Sequence
  Synthetic oligonucleotide
tcgaatcgtcgcttcgtcgcaagacaaaga

SEQ ID NO: 349280 - DNA, 31 bp, Artificial Sequence
  Synthetic oligonucleotide
tgtattgtccagacaaacgttacgccaaaga

SEQ ID NO: 349281 - DNA, 30 bp, Artificial Sequence
  Synthetic oligonucleotide
tagttacatctctataaccagggccaaaga

SEQ ID NO: 349282 - DNA, 30 bp, Artificial Sequence
  Synthetic oligonucleotide
tcctgaatcttcgcatggaattcgcaaaga

SEQ ID NO: 349283 - DNA, 30 bp, Artificial Sequence
  Synthetic oligonucleotide
ctggttcaagtcgattttaagtggcaaaga

SEQ ID NO: 349284 - DNA, 30 bp, Artificial Sequence
  Synthetic oligonucleotide
ttccccgcgaacaaaattggcttgcaaaga

SEQ ID NO: 349285 - DNA, 30 bp, Artificial Sequence
  Synthetic oligonucleotide
taaggttgggttgattagtttgatcaaaga

SEQ ID NO: 349286 - DNA, 30 bp, Artificial Sequence
  Synthetic oligonucleotide
acccggtcataatagtatccagttcaaaga

SEQ ID NO: 349287 - DNA, 30 bp, Artificial Sequence
  Synthetic oligonucleotide
gtgggttcgaaggctcgaacctttcaaaga

SEQ ID NO: 349288 - DNA, 30 bp, Artificial Sequence
  Synthetic oligonucleotide
tattgcacgaggtttaatccagaagaaaga

SEQ ID NO: 349289 - DNA, 30 bp, Artificial Sequence
  Synthetic oligonucleotide
tatgatgtttttacttttccccacgaaaga

SEQ ID NO: 349290 - DNA, 30 bp, Artificial Sequence
  Synthetic oligonucleotide
aagcgcaaaactgtttgtctgatcgaaaga

SEQ ID NO: 349291 - DNA, 30 bp, Artificial Sequence
  Synthetic oligonucleotide
aatgttaacgaattacatctagcggaaaga

SEQ ID NO: 349292 - DNA, 30 bp, Artificial Sequence
  Synthetic oligonucleotide
cagggttctggattacggagttcggaaaga

SEQ ID NO: 349293 - DNA, 30 bp, Artificial Sequence
  Synthetic oligonucleotide
gggatgaaagcgcatgcctgcgcataaaga

SEQ ID NO: 349294 - DNA, 30 bp, Artificial Sequence
  Synthetic oligonucleotide
ctcgcttccaccaggtatcgggcataaaga

SEQ ID NO: 349295 - DNA, 30 bp, Artificial Sequence
  Synthetic oligonucleotide
gaaaccactacgagtgaagaaagataaaga

SEQ ID NO: 349296 - DNA, 30 bp, Artificial Sequence
  Synthetic oligonucleotide
ttcatgaaaccaagacttagattataaaga

SEQ ID NO: 349297 - DNA, 30 bp, Artificial Sequence
  Synthetic oligonucleotide
ggactagtcaatgtacgcatctgctaaaga

SEQ ID NO: 349298 - DNA, 30 bp, Artificial Sequence
  Synthetic oligonucleotide
acgtcgtttaccgtgtctccacagtaaaga

SEQ ID NO: 349299 - DNA, 30 bp, Artificial Sequence
  Synthetic oligonucleotide
ccgcgtattccccagggaatctagtaaaga

SEQ ID NO: 349300 - DNA, 30 bp, Artificial Sequence
  Synthetic oligonucleotide
ttggcgcccttcgctccatctatgtaaaga

SEQ ID NO: 349301 - DNA, 30 bp, Artificial Sequence
  Synthetic oligonucleotide
gagtggctagttgaggcgttaggaacaaga

SEQ ID NO: 349302 - DNA, 30 bp, Artificial Sequence
  Synthetic oligonucleotide
gtctcctgcggtaggtctgtcataacaaga

SEQ ID NO: 349303 - DNA, 30 bp, Artificial Sequence
  Synthetic oligonucleotide
gaagtgttatgttataggggagacacaaga

SEQ ID NO: 349304 - DNA, 30 bp, Artificial Sequence
  Synthetic oligonucleotide
acccacgcagtcatgacggacttcacaaga

SEQ ID NO: 349305 - DNA, 30 bp, Artificial Sequence
  Synthetic oligonucleotide
acagatataatccgatctgtaaggacaaga

SEQ ID NO: 349306 - DNA, 30 bp, Artificial Sequence
  Synthetic oligonucleotide
tgccgttgagtggagtgtatactgacaaga

SEQ ID NO: 349307 - DNA, 30 bp, Artificial Sequence
  Synthetic oligonucleotide
gaagtgaatcagggaaatctttatacaaga

SEQ ID NO: 349308 - DNA, 30 bp, Artificial Sequence
  Synthetic oligonucleotide
agtttgcagactgcgtgagtttgtacaaga

SEQ ID NO: 349309 - DNA, 30 bp, Artificial Sequence
  Synthetic oligonucleotide
ggttctcaagcacagtgcacagtcccaaga

SEQ ID NO: 349310 - DNA, 30 bp, Artificial Sequence
  Synthetic oligonucleotide
ataatggcttaggtaatataggaagcaaga

SEQ ID NO: 349311 - DNA, 30 bp, Artificial Sequence
  Synthetic oligonucleotide
acaggtcggcggtagggcatgggagcaaga

SEQ ID NO: 349312 - DNA, 30 bp, Artificial Sequence
  Synthetic oligonucleotide
gctcggttaatcgaattcaacgacgcaaga

SEQ ID NO: 349313 - DNA, 30 bp, Artificial Sequence
  Synthetic oligonucleotide
gacgggaaccacctttgtaagaccgcaaga

SEQ ID NO: 349314 - DNA, 30 bp, Artificial Sequence
  Synthetic oligonucleotide
atctgtaaggccgtccccaatctcgcaaga

SEQ ID NO: 349315 - DNA, 30 bp, Artificial Sequence
  Synthetic oligonucleotide
atccggcttgttcattaaaaaaaggcaaga

SEQ ID NO: 349316 - DNA, 30 bp, Artificial Sequence
  Synthetic oligonucleotide
ggtaatgtgtcgaggtcttacagggcaaga

SEQ ID NO: 349317 - DNA, 30 bp, Artificial Sequence
  Synthetic oligonucleotide
caaagccgattgtactcagtaaatgcaaga

SEQ ID NO: 349318 - DNA, 30 bp, Artificial Sequence
  Synthetic oligonucleotide
ctgaacggtatacacaaaattgtctcaaga

SEQ ID NO: 349319 - DNA, 30 bp, Artificial Sequence
  Synthetic oligonucleotide
ctgatttgtccgcttcggacactgtcaaga

SEQ ID NO: 349320 - DNA, 30 bp, Artificial Sequence
  Synthetic oligonucleotide
tacttgggagcaaagttgaatagttcaaga

SEQ ID NO: 349321 - DNA, 30 bp, Artificial Sequence
  Synthetic oligonucleotide
ggattatcgtggtgtccagcctcaagaaga

SEQ ID NO: 349322 - DNA, 30 bp, Artificial Sequence
  Synthetic oligonucleotide
aataaggcttaagtcggtgctcccagaaga

SEQ ID NO: 349323 - DNA, 30 bp, Artificial Sequence
  Synthetic oligonucleotide
ggactccgctttgtgcctaagggcagaaga

SEQ ID NO: 349324 - DNA, 30 bp, Artificial Sequence
  Synthetic oligonucleotide
aactaaagcagcctcccaggtcttagaaga

SEQ ID NO: 349325 - DNA, 30 bp, Artificial Sequence
  Synthetic oligonucleotide
caccaccgtggttagactaactcacgaaga

SEQ ID NO: 349326 - DNA, 30 bp, Artificial Sequence
  Synthetic oligonucleotide
aacattatgctgacttaagcacgccgaaga

SEQ ID NO: 349327 - DNA, 30 bp, Artificial Sequence
  Synthetic oligonucleotide
ggagtgcgtacgctgtccttgacgcgaaga

SEQ ID NO: 349328 - DNA, 30 bp, Artificial Sequence
  Synthetic oligonucleotide
cctcggcccgacgacgctgtgccgcgaaga

SEQ ID NO: 349329 - DNA, 30 bp, Artificial Sequence
  Synthetic oligonucleotide
agaggttcaaactccgtcttgaatcgaaga

SEQ ID NO: 349330 - DNA, 30 bp, Artificial Sequence
  Synthetic oligonucleotide
atacctgtgtcggtacatcaggatcgaaga

SEQ ID NO: 349331 - DNA, 30 bp, Artificial Sequence
  Synthetic oligonucleotide
attcgaatagcatgggtcggatctcgaaga

SEQ ID NO: 349332 - DNA, 31 bp, Artificial Sequence
  Synthetic oligonucleotide
gcaggacagtcgacaattaccacgtcgaaga

SEQ ID NO: 349333 - DNA, 30 bp, Artificial Sequence
  Synthetic oligonucleotide
tagtttgaggttgccgatgcgttaggaaga

SEQ ID NO: 349334 - DNA, 30 bp, Artificial Sequence
  Synthetic oligonucleotide
ctcccttaaacgcgggagcatgtcggaaga

SEQ ID NO: 349335 - DNA, 30 bp, Artificial Sequence
  Synthetic oligonucleotide
acgctcatttaacctgggcttttcggaaga

SEQ ID NO: 349336 - DNA, 30 bp, Artificial Sequence
  Synthetic oligonucleotide
gtctctcttattcactagcgagagggaaga

SEQ ID NO: 349337 - DNA, 30 bp, Artificial Sequence
  Synthetic oligonucleotide
ggtccgtaaatatacccaatggcgggaaga

SEQ ID NO: 349338 - DNA, 30 bp, Artificial Sequence
  Synthetic oligonucleotide
gcaaaacgcctctatctggctcggggaaga

SEQ ID NO: 349339 - DNA, 30 bp, Artificial Sequence
  Synthetic oligonucleotide
aaacggccgttttgcacctagggtggaaga

SEQ ID NO: 349340 - DNA, 30 bp, Artificial Sequence
  Synthetic oligonucleotide
ctcgaacatggctgtttgacccttggaaga

SEQ ID NO: 349341 - DNA, 30 bp, Artificial Sequence
  Synthetic oligonucleotide
cgccgctccaccgacgtcgctggatgaaga

SEQ ID NO: 349342 - DNA, 30 bp, Artificial Sequence
  Synthetic oligonucleotide
atgagcattcttttctacgaggtatgaaga

SEQ ID NO: 349343 - DNA, 30 bp, Artificial Sequence
  Synthetic oligonucleotide
gcaaataatgggatggtagaaacgtgaaga

SEQ ID NO: 349344 - DNA, 30 bp, Artificial Sequence
  Synthetic oligonucleotide
gcttctataatgtgtagcaggacgtgaaga

SEQ ID NO: 349345 - DNA, 30 bp, Artificial Sequence
  Synthetic oligonucleotide
agttactaggatatgaccggtccgtgaaga

SEQ ID NO: 349346 - DNA, 30 bp, Artificial Sequence
  Synthetic oligonucleotide
tgttcggtttgtgtggaattgttttgaaga

SEQ ID NO: 349347 - DNA, 30 bp, Artificial Sequence
  Synthetic oligonucleotide
gggttactgcaatcgtaggcggcaataaga

SEQ ID NO: 349348 - DNA, 30 bp, Artificial Sequence
  Synthetic oligonucleotide
tggtgggaacatggattaccctcaataaga

SEQ ID NO: 349349 - DNA, 30 bp, Artificial Sequence
  Synthetic oligonucleotide
tttgcgggctgagtaagattccgaataaga

SEQ ID NO: 349350 - DNA, 30 bp, Artificial Sequence
  Synthetic oligonucleotide
taagccttcacgacgatggaattcataaga

SEQ ID NO: 349351 - DNA, 30 bp, Artificial Sequence
  Synthetic oligonucleotide
cggccgctgtgggtgttttagaacctaaga

SEQ ID NO: 349352 - DNA, 30 bp, Artificial Sequence
  Synthetic oligonucleotide
tgcatttctctcgctctcggtagcctaaga

SEQ ID NO: 349353 - DNA, 30 bp, Artificial Sequence
  Synthetic oligonucleotide
aaattgagcccacaggcattgatcctaaga

SEQ ID NO: 349354 - DNA, 30 bp, Artificial Sequence
  Synthetic oligonucleotide
caagggacggatggctaggaacggctaaga

SEQ ID NO: 349355 - DNA, 30 bp, Artificial Sequence
  Synthetic oligonucleotide
aggattccttatgctcgacggttgctaaga

SEQ ID NO: 349356 - DNA, 30 bp, Artificial Sequence
  Synthetic oligonucleotide
taaactatcgcccgaattagatttctaaga

SEQ ID NO: 349357 - DNA, 30 bp, Artificial Sequence
  Synthetic oligonucleotide
ataatgcattataactattcaacagtaaga

SEQ ID NO: 349358 - DNA, 30 bp, Artificial Sequence
  Synthetic oligonucleotide
agttattaatcgatgacgcaacgagtaaga

SEQ ID NO: 349359 - DNA, 30 bp, Artificial Sequence
  Synthetic oligonucleotide
agggtcacccgcgtaagttctcgagtaaga

SEQ ID NO: 349360 - DNA, 30 bp, Artificial Sequence
  Synthetic oligonucleotide
cgcctcacttagagggggcctaacgtaaga

SEQ ID NO: 349361 - DNA, 30 bp, Artificial Sequence
  Synthetic oligonucleotide
ctcaatttaagacaattacgttaggtaaga

SEQ ID NO: 349362 - DNA, 30 bp, Artificial Sequence
  Synthetic oligonucleotide
gaggctttgtagacaccaattagggtaaga

SEQ ID NO: 349363 - DNA, 30 bp, Artificial Sequence
  Synthetic oligonucleotide
cttggattgtcttgctttccatgggtaaga

SEQ ID NO: 349364 - DNA, 31 bp, Artificial Sequence
  Synthetic oligonucleotide
gcgtctttatgagaacgagatgatggtaaga

SEQ ID NO: 349365 - DNA, 30 bp, Artificial Sequence
  Synthetic oligonucleotide
actcccccttaaatggctatgctggtaaga

SEQ ID NO: 349366 - DNA, 30 bp, Artificial Sequence
  Synthetic oligonucleotide
gcccttatgatgatgtcttagtatgtaaga

SEQ ID NO: 349367 - DNA, 30 bp, Artificial Sequence
  Synthetic oligonucleotide
ggtcaatcagctctactcccgcctgtaaga

SEQ ID NO: 349368 - DNA, 30 bp, Artificial Sequence
  Synthetic oligonucleotide
tcctaggggttcgtgcaaactgaattaaga

SEQ ID NO: 349369 - DNA, 30 bp, Artificial Sequence
  Synthetic oligonucleotide
cctgaacgcctgtggcatcggtaattaaga

SEQ ID NO: 349370 - DNA, 30 bp, Artificial Sequence
  Synthetic oligonucleotide
gcaggggatagcctggattacttattaaga

SEQ ID NO: 349371 - DNA, 30 bp, Artificial Sequence
  Synthetic oligonucleotide
gtccaccttgccggcactacaatgttaaga

SEQ ID NO: 349372 - DNA, 30 bp, Artificial Sequence
  Synthetic oligonucleotide
tggagtgttgttagtcggatagatttaaga

SEQ ID NO: 349373 - DNA, 30 bp, Artificial Sequence
  Synthetic oligonucleotide
gggggtgacgcactggtgaaggatttaaga

SEQ ID NO: 349374 - DNA, 30 bp, Artificial Sequence
  Synthetic oligonucleotide
tcactatatgggagctagttagctttaaga

SEQ ID NO: 349375 - DNA, 30 bp, Artificial Sequence
  Synthetic oligonucleotide
aagtcatggtgcgatggcaggtgtttaaga

SEQ ID NO: 349376 - DNA, 30 bp, Artificial Sequence
  Synthetic oligonucleotide
ggtaagaagcttcattatgtacacaacaga

SEQ ID NO: 349377 - DNA, 30 bp, Artificial Sequence
  Synthetic oligonucleotide
atatgagggtcgcggacgcaatgcaacaga

SEQ ID NO: 349378 - DNA, 30 bp, Artificial Sequence
  Synthetic oligonucleotide
atggctcgtagattagttgcggggaacaga

SEQ ID NO: 349379 - DNA, 30 bp, Artificial Sequence
  Synthetic oligonucleotide
aaccatgatacgagcctcgtgttgaacaga

SEQ ID NO: 349380 - DNA, 30 bp, Artificial Sequence
  Synthetic oligonucleotide
atgtataatggctggcagatttgtaacaga

SEQ ID NO: 349381 - DNA, 30 bp, Artificial Sequence
  Synthetic oligonucleotide
cctatcttattcgtggtactacaacacaga

SEQ ID NO: 349382 - DNA, 30 bp, Artificial Sequence
  Synthetic oligonucleotide
gttatacgggtgcaccggctcagacacaga

SEQ ID NO: 349383 - DNA, 30 bp, Artificial Sequence
  Synthetic oligonucleotide
ctcacaattttttaactgacgaagcacaga

SEQ ID NO: 349384 - DNA, 30 bp, Artificial Sequence
  Synthetic oligonucleotide
cgatgctagcacggtgctgtcatgcacaga

SEQ ID NO: 349385 - DNA, 30 bp, Artificial Sequence
  Synthetic oligonucleotide
cagaaggaattaggcatattccatcacaga

SEQ ID NO: 349386 - DNA, 30 bp, Artificial Sequence
  Synthetic oligonucleotide
atatgcgtgggggcaacgtctcatcacaga

SEQ ID NO: 349387 - DNA, 30 bp, Artificial Sequence
  Synthetic oligonucleotide
gcaattattctggttggacggccggacaga

SEQ ID NO: 349388 - DNA, 30 bp, Artificial Sequence
  Synthetic oligonucleotide
acagataattgtgtgatctggccggacaga

SEQ ID NO: 349389 - DNA, 30 bp, Artificial Sequence
  Synthetic oligonucleotide
atcgagtgagtgtttggtcacttggacaga

SEQ ID NO: 349390 - DNA, 30 bp, Artificial Sequence
  Synthetic oligonucleotide
gaatattcaggggattagttgagtgacaga

SEQ ID NO: 349391 - DNA, 30 bp, Artificial Sequence
  Synthetic oligonucleotide
aacagcgctctggcgggtttagttgacaga

SEQ ID NO: 349392 - DNA, 30 bp, Artificial Sequence
  Synthetic oligonucleotide
tggccaagccattgtcaggtgcgctacaga

SEQ ID NO: 349393 - DNA, 30 bp, Artificial Sequence
  Synthetic oligonucleotide
gatggggggtctcggaggggtgtctacaga

SEQ ID NO: 349394 - DNA, 30 bp, Artificial Sequence
  Synthetic oligonucleotide
tgatcggagctagacacgtagtagtacaga

SEQ ID NO: 349395 - DNA, 30 bp, Artificial Sequence
  Synthetic oligonucleotide
gtggtcaatacccaacaagtcttgtacaga

SEQ ID NO: 349396 - DNA, 30 bp, Artificial Sequence
  Synthetic oligonucleotide
ggaacgttggcgttcccggacagttacaga

SEQ ID NO: 349397 - DNA, 30 bp, Artificial Sequence
  Synthetic oligonucleotide
tgcgagctcacaacgtttcttagttacaga

SEQ ID NO: 349398 - DNA, 30 bp, Artificial Sequence
  Synthetic oligonucleotide
cagtttacttccaatgcgttatgttacaga

SEQ ID NO: 349399 - DNA, 30 bp, Artificial Sequence
  Synthetic oligonucleotide
cagactggtaccaaaaccgttggaaccaga

SEQ ID NO: 349400 - DNA, 30 bp, Artificial Sequence
  Synthetic oligonucleotide
tccatatgcatccatataggatgaaccaga

SEQ ID NO: 349401 - DNA, 30 bp, Artificial Sequence
  Synthetic oligonucleotide
ttcctaggcgcaagcaggcctgtaaccaga

SEQ ID NO: 349402 - DNA, 30 bp, Artificial Sequence
  Synthetic oligonucleotide
acgtatattctagctagcatattcaccaga

SEQ ID NO: 349403 - DNA, 30 bp, Artificial Sequence
  Synthetic oligonucleotide
agaccactgtatctggttgtacagaccaga

SEQ ID NO: 349404 - DNA, 30 bp, Artificial Sequence
  Synthetic oligonucleotide
attcttcgctaggagggtcgtcagaccaga

SEQ ID NO: 349405 - DNA, 30 bp, Artificial Sequence
  Synthetic oligonucleotide
agcacgtgtgcgtttttgataatgaccaga

SEQ ID NO: 349406 - DNA, 30 bp, Artificial Sequence
  Synthetic oligonucleotide
atccttagggcaagtctaaaatttaccaga

SEQ ID NO: 349407 - DNA, 30 bp, Artificial Sequence
  Synthetic oligonucleotide
gttttcggaataacttattggaaacccaga

SEQ ID NO: 349408 - DNA, 30 bp, Artificial Sequence
  Synthetic oligonucleotide
gcaccgggcgatagatttcgctaacccaga

SEQ ID NO: 349409 - DNA, 30 bp, Artificial Sequence
  Synthetic oligonucleotide
tacatctgcaacacgtaccagaaccccaga

SEQ ID NO: 349410 - DNA, 30 bp, Artificial Sequence
  Synthetic oligonucleotide
cacgcgggaaccagcgctggtaaccccaga

SEQ ID NO: 349411 - DNA, 30 bp, Artificial Sequence
  Synthetic oligonucleotide
tcctacaagttctattgggttcagcccaga

SEQ ID NO: 349412 - DNA, 30 bp, Artificial Sequence
  Synthetic oligonucleotide
accaactgccgtttagtgggaggtcccaga

SEQ ID NO: 349413 - DNA, 30 bp, Artificial Sequence
  Synthetic oligonucleotide
ggtgttatatcactgggtagtctagccaga

SEQ ID NO: 349414 - DNA, 30 bp, Artificial Sequence
  Synthetic oligonucleotide
caacgagccaggcccagggagttcgccaga

SEQ ID NO: 349415 - DNA, 30 bp, Artificial Sequence
  Synthetic oligonucleotide
tttgggggtttgatcgccccacaggccaga

SEQ ID NO: 349416 - DNA, 30 bp, Artificial Sequence
  Synthetic oligonucleotide
gagtctttgtcgttttatcgctctgccaga

SEQ ID NO: 349417 - DNA, 30 bp, Artificial Sequence
  Synthetic oligonucleotide
gtaaacggcttggatgtatgtgggtccaga

SEQ ID NO: 349418 - DNA, 30 bp, Artificial Sequence
  Synthetic oligonucleotide
gtgtggtcctccgttaatcaacgttccaga

SEQ ID NO: 349419 - DNA, 30 bp, Artificial Sequence
  Synthetic oligonucleotide
ggaggggcgctgccagggatcatttccaga

SEQ ID NO: 349420 - DNA, 30 bp, Artificial Sequence
  Synthetic oligonucleotide
aaacactttagaaccgaccgccgaagcaga

SEQ ID NO: 349421 - DNA, 30 bp, Artificial Sequence
  Synthetic oligonucleotide
taaaaatttatacgtttaaaatagagcaga

SEQ ID NO: 349422 - DNA, 30 bp, Artificial Sequence
  Synthetic oligonucleotide
aaggtttagaattatagctgttagagcaga

SEQ ID NO: 349423 - DNA, 30 bp, Artificial Sequence
  Synthetic oligonucleotide
acacgaattgaaatccgctaaagtagcaga

SEQ ID NO: 349424 - DNA, 30 bp, Artificial Sequence
  Synthetic oligonucleotide
tatcgtattttgatcccaaaaacacgcaga

SEQ ID NO: 349425 - DNA, 30 bp, Artificial Sequence
  Synthetic oligonucleotide
tccgtttagtaaggtattggcctccgcaga

SEQ ID NO: 349426 - DNA, 30 bp, Artificial Sequence
  Synthetic oligonucleotide
agctaaattgggaactgtgatgtccgcaga

SEQ ID NO: 349427 - DNA, 30 bp, Artificial Sequence
  Synthetic oligonucleotide
ttgggttctaacggacgcgttctgcgcaga

SEQ ID NO: 349428 - DNA, 30 bp, Artificial Sequence
  Synthetic oligonucleotide
tcggtgagttaaacaatatgttttcgcaga

SEQ ID NO: 349429 - DNA, 30 bp, Artificial Sequence
  Synthetic oligonucleotide
tacagataccaattatcctgtcacggcaga

SEQ ID NO: 349430 - DNA, 30 bp, Artificial Sequence
  Synthetic oligonucleotide
attacgttgtgtatcatttagttcggcaga

SEQ ID NO: 349431 - DNA, 30 bp, Artificial Sequence
  Synthetic oligonucleotide
tgttggctgttttgcagttcgccgggcaga

SEQ ID NO: 349432 - DNA, 30 bp, Artificial Sequence
  Synthetic oligonucleotide
tgcgtataagcatttacacggtcgggcaga

SEQ ID NO: 349433 - DNA, 30 bp, Artificial Sequence
  Synthetic oligonucleotide
gaactggttgttgttaacctcctgggcaga

SEQ ID NO: 349434 - DNA, 30 bp, Artificial Sequence
  Synthetic oligonucleotide
gtttcacggttatagaggcgattgggcaga

SEQ ID NO: 349435 - DNA, 30 bp, Artificial Sequence
  Synthetic oligonucleotide
agctcgtttcatgttgttacatctggcaga

SEQ ID NO: 349436 - DNA, 30 bp, Artificial Sequence
  Synthetic oligonucleotide
taagaattagccatactgttccactgcaga

SEQ ID NO: 349437 - DNA, 30 bp, Artificial Sequence
  Synthetic oligonucleotide
agacaccatctccaccgggcatgctgcaga

SEQ ID NO: 349438 - DNA, 30 bp, Artificial Sequence
  Synthetic oligonucleotide
aacgggatgcttaagatttcattctgcaga

SEQ ID NO: 349439 - DNA, 30 bp, Artificial Sequence
  Synthetic oligonucleotide
tgttacggcggtatgctaattaagtgcaga

SEQ ID NO: 349440 - DNA, 30 bp, Artificial Sequence
  Synthetic oligonucleotide
tagctggggcgtttacatgcaacgtgcaga

SEQ ID NO: 349441 - DNA, 30 bp, Artificial Sequence
  Synthetic oligonucleotide
ccgggccaaaagtttgacgctgggtgcaga

SEQ ID NO: 349442 - DNA, 30 bp, Artificial Sequence
  Synthetic oligonucleotide
ctatcgcccactacttatagacgttgcaga

SEQ ID NO: 349443 - DNA, 30 bp, Artificial Sequence
  Synthetic oligonucleotide
tgtatatagtaaaagtagtctaaaatcaga

SEQ ID NO: 349444 - DNA, 30 bp, Artificial Sequence
  Synthetic oligonucleotide
atcgaggtttgatgggagtcgcccatcaga

SEQ ID NO: 349445 - DNA, 30 bp, Artificial Sequence
  Synthetic oligonucleotide
taatctatcggcggggaagcatccatcaga

SEQ ID NO: 349446 - DNA, 30 bp, Artificial Sequence
  Synthetic oligonucleotide
gaatatgtcctttctgtgtgagagatcaga

SEQ ID NO: 349447 - DNA, 30 bp, Artificial Sequence
  Synthetic oligonucleotide
ctccctaacgtgtctcgtaaatcgatcaga

SEQ ID NO: 349448 - DNA, 31 bp, Artificial Sequence
  Synthetic oligonucleotide
tttgatggggtattttaacattaggatcaga

SEQ ID NO: 349449 - DNA, 30 bp, Artificial Sequence
  Synthetic oligonucleotide
aaagttgtatcttaccatggtgacctcaga

SEQ ID NO: 349450 - DNA, 30 bp, Artificial Sequence
  Synthetic oligonucleotide
agcgtcgaccaggtagaattgcatctcaga

SEQ ID NO: 349451 - DNA, 30 bp, Artificial Sequence
  Synthetic oligonucleotide
aaacacctaggttgtcatttgcttctcaga

SEQ ID NO: 349452 - DNA, 30 bp, Artificial Sequence
  Synthetic oligonucleotide
tatgactgtgtagcatagcattaagtcaga

SEQ ID NO: 349453 - DNA, 30 bp, Artificial Sequence
  Synthetic oligonucleotide
aattctcctcacagaaattacgtcgtcaga

SEQ ID NO: 349454 - DNA, 30 bp, Artificial Sequence
  Synthetic oligonucleotide
tggggagagtcaccccaccgttgtgtcaga

SEQ ID NO: 349455 - DNA, 30 bp, Artificial Sequence
  Synthetic oligonucleotide
tatctacggaatgcctcgcatgcattcaga

SEQ ID NO: 349456 - DNA, 30 bp, Artificial Sequence
  Synthetic oligonucleotide
acggaggcgacgttattcgcatcattcaga

SEQ ID NO: 349457 - DNA, 30 bp, Artificial Sequence
  Synthetic oligonucleotide
ttttattacattaaagggaaaatattcaga

SEQ ID NO: 349458 - DNA, 30 bp, Artificial Sequence
  Synthetic oligonucleotide
taccctgtgagcattggaattaacttcaga

SEQ ID NO: 349459 - DNA, 30 bp, Artificial Sequence
  Synthetic oligonucleotide
caacattcacgcaggtctagccatttcaga

SEQ ID NO: 349460 - DNA, 30 bp, Artificial Sequence
  Synthetic oligonucleotide
attggtacgtatcgtggagtgagtttcaga

SEQ ID NO: 349461 - DNA, 30 bp, Artificial Sequence
  Synthetic oligonucleotide
ccaaagtcccgttgatatttggtaaagaga

SEQ ID NO: 349462 - DNA, 30 bp, Artificial Sequence
  Synthetic oligonucleotide
atcactgtgtttgggcatttaggcaagaga

SEQ ID NO: 349463 - DNA, 30 bp, Artificial Sequence
  Synthetic oligonucleotide
ttctaacctttttcgtcactagataagaga

SEQ ID NO: 349464 - DNA, 30 bp, Artificial Sequence
  Synthetic oligonucleotide
cataccccgcggcaacaactcttacagaga

SEQ ID NO: 349465 - DNA, 30 bp, Artificial Sequence
  Synthetic oligonucleotide
ttgtcggagctccgtatatggttacagaga

SEQ ID NO: 349466 - DNA, 30 bp, Artificial Sequence
  Synthetic oligonucleotide
catgggatttatacctaaggttagcagaga

SEQ ID NO: 349467 - DNA, 30 bp, Artificial Sequence
  Synthetic oligonucleotide
aataaagggcataggaaggcgtcgcagaga

SEQ ID NO: 349468 - DNA, 30 bp, Artificial Sequence
  Synthetic oligonucleotide
cctttgctattccacggtcgcatcgagaga

SEQ ID NO: 349469 - DNA, 29 bp, Artificial Sequence
  Synthetic oligonucleotide
attactcggcgcgacaggtataatagaga

SEQ ID NO: 349470 - DNA, 30 bp, Artificial Sequence
  Synthetic oligonucleotide
gctagggggccgccactagacgcatagaga

SEQ ID NO: 349471 - DNA, 30 bp, Artificial Sequence
  Synthetic oligonucleotide
cggagcgcctttaagatagccgcatagaga

SEQ ID NO: 349472 - DNA, 30 bp, Artificial Sequence
  Synthetic oligonucleotide
gggtcgcatcccagtttggatgcatagaga

SEQ ID NO: 349473 - DNA, 30 bp, Artificial Sequence
  Synthetic oligonucleotide
ttgttggaggttcgtgtcggagcctagaga

SEQ ID NO: 349474 - DNA, 30 bp, Artificial Sequence
  Synthetic oligonucleotide
gtagccgctgaatttccgaacggctagaga

SEQ ID NO: 349475 - DNA, 30 bp, Artificial Sequence
  Synthetic oligonucleotide
gagtaacccggcagagaggtatagtagaga

SEQ ID NO: 349476 - DNA, 30 bp, Artificial Sequence
  Synthetic oligonucleotide
atatagatatacgaaatatcatcgtagaga

SEQ ID NO: 349477 - DNA, 30 bp, Artificial Sequence
  Synthetic oligonucleotide
gagggccctggtgtccggaggccgacgaga

SEQ ID NO: 349478 - DNA, 30 bp, Artificial Sequence
  Synthetic oligonucleotide
cgcatgcggtggcctactcaatcgacgaga

SEQ ID NO: 349479 - DNA, 30 bp, Artificial Sequence
  Synthetic oligonucleotide
tgccgggggctctccgtagaacatacgaga

SEQ ID NO: 349480 - DNA, 30 bp, Artificial Sequence
  Synthetic oligonucleotide
tgcccatatgtcctgttctgacatacgaga

SEQ ID NO: 349481 - DNA, 30 bp, Artificial Sequence
  Synthetic oligonucleotide
actatatacttccccgcacgactaccgaga

SEQ ID NO: 349482 - DNA, 30 bp, Artificial Sequence
  Synthetic oligonucleotide
gctatgaattttgtgaccattctcccgaga

SEQ ID NO: 349483 - DNA, 30 bp, Artificial Sequence
  Synthetic oligonucleotide
ggggacgcgcatttttctggtgtcccgaga

SEQ ID NO: 349484 - DNA, 30 bp, Artificial Sequence
  Synthetic oligonucleotide
tatgctctggcattggcagtcgagccgaga

SEQ ID NO: 349485 - DNA, 30 bp, Artificial Sequence
  Synthetic oligonucleotide
ttggttgcacacgaagttttaaatccgaga

SEQ ID NO: 349486 - DNA, 30 bp, Artificial Sequence
  Synthetic oligonucleotide
ctctgcagtctttcatgttgccctccgaga

SEQ ID NO: 349487 - DNA, 30 bp, Artificial Sequence
  Synthetic oligonucleotide
gctttaggatatcctcatacagctccgaga

SEQ ID NO: 349488 - DNA, 30 bp, Artificial Sequence
  Synthetic oligonucleotide
agacgtctagccgactcacggtacgcgaga

SEQ ID NO: 349489 - DNA, 30 bp, Artificial Sequence
  Synthetic oligonucleotide
tgtgtcggtaaagtggtagtgccggcgaga

SEQ ID NO: 349490 - DNA, 30 bp, Artificial Sequence
  Synthetic oligonucleotide
tgtagagtacgcatcagggagagatcgaga

SEQ ID NO: 349491 - DNA, 30 bp, Artificial Sequence
  Synthetic oligonucleotide
atgggttcgatcatgtgcggcacctcgaga

SEQ ID NO: 349492 - DNA, 30 bp, Artificial Sequence
  Synthetic oligonucleotide
aaccttacacattatattagggtctcgaga

SEQ ID NO: 349493 - DNA, 30 bp, Artificial Sequence
  Synthetic oligonucleotide
tgcaggtctagtacagtaaaaccgtcgaga

SEQ ID NO: 349494 - DNA, 30 bp, Artificial Sequence
  Synthetic oligonucleotide
cactcttttatgatctattgacggaggaga

SEQ ID NO: 349495 - DNA, 30 bp, Artificial Sequence
  Synthetic oligonucleotide
gacacatgcctatttcacaatactaggaga

SEQ ID NO: 349496 - DNA, 30 bp, Artificial Sequence
  Synthetic oligonucleotide
cactttatctggtaccggtgtcctaggaga

SEQ ID NO: 349497 - DNA, 30 bp, Artificial Sequence
  Synthetic oligonucleotide
tgttattaatgggttatactccttaggaga

SEQ ID NO: 349498 - DNA, 30 bp, Artificial Sequence
  Synthetic oligonucleotide
gtccaaacacataaacatgttggacggaga

SEQ ID NO: 349499 - DNA, 30 bp, Artificial Sequence
  Synthetic oligonucleotide
ttcaaacatccacccaccacaacgcggaga

SEQ ID NO: 349500 - DNA, 30 bp, Artificial Sequence
  Synthetic oligonucleotide
gttatgcagacttggctcaattcgcggaga

SEQ ID NO: 349501 - DNA, 30 bp, Artificial Sequence
  Synthetic oligonucleotide
ccgtctatttctacgacctggtggcggaga

SEQ ID NO: 349502 - DNA, 30 bp, Artificial Sequence
  Synthetic oligonucleotide
ctcactctagaatagttgacattagggaga

SEQ ID NO: 349503 - DNA, 30 bp, Artificial Sequence
  Synthetic oligonucleotide
ccgtatattgcaacagttctgatggggaga

SEQ ID NO: 349504 - DNA, 30 bp, Artificial Sequence
  Synthetic oligonucleotide
tctatcaaacaagtatgcgaccatgggaga

SEQ ID NO: 349505 - DNA, 30 bp, Artificial Sequence
  Synthetic oligonucleotide
gcatatccgcaggggtatggccctgggaga

SEQ ID NO: 349506 - DNA, 30 bp, Artificial Sequence
  Synthetic oligonucleotide
ttgcaaaaaaatgtttgctcgtctgggaga

SEQ ID NO: 349507 - DNA, 31 bp, Artificial Sequence
  Synthetic oligonucleotide
actgacagtaacgctctagcagtgtgggaga

SEQ ID NO: 349508 - DNA, 30 bp, Artificial Sequence
  Synthetic oligonucleotide
tatggatatgcagatcgataccactggaga

SEQ ID NO: 349509 - DNA, 30 bp, Artificial Sequence
  Synthetic oligonucleotide
tacgcctatcgttcatgcgtagactggaga

SEQ ID NO: 349510 - DNA, 30 bp, Artificial Sequence
  Synthetic oligonucleotide
agaagcgctcagaaatggacatactggaga

SEQ ID NO: 349511 - DNA, 30 bp, Artificial Sequence
  Synthetic oligonucleotide
gataggggtgctgatgcgctgacctggaga

SEQ ID NO: 349512 - DNA, 30 bp, Artificial Sequence
  Synthetic oligonucleotide
tatctttaaaggtttgctcttgcctggaga

SEQ ID NO: 349513 - DNA, 30 bp, Artificial Sequence
  Synthetic oligonucleotide
gctcctgctagcacttagtattgctggaga

SEQ ID NO: 349514 - DNA, 30 bp, Artificial Sequence
  Synthetic oligonucleotide
gaatacgtattctccactcgcgtctggaga

SEQ ID NO: 349515 - DNA, 30 bp, Artificial Sequence
  Synthetic oligonucleotide
agtctcgttgtggatttatacaagtggaga

SEQ ID NO: 349516 - DNA, 30 bp, Artificial Sequence
  Synthetic oligonucleotide
atcgactttgtagtcgtgaacaggtggaga

SEQ ID NO: 349517 - DNA, 30 bp, Artificial Sequence
  Synthetic oligonucleotide
aatacatcgaaatgcgtcaaaatgtggaga

SEQ ID NO: 349518 - DNA, 30 bp, Artificial Sequence
  Synthetic oligonucleotide
tgtgcctcctcctgcctatacgtgtggaga

SEQ ID NO: 349519 - DNA, 30 bp, Artificial Sequence
  Synthetic oligonucleotide
ttcatcagcaacaattttaggttgtggaga

SEQ ID NO: 349520 - DNA, 30 bp, Artificial Sequence
  Synthetic oligonucleotide
aatagtggtggcatttccccatattggaga

SEQ ID NO: 349521 - DNA, 30 bp, Artificial Sequence
  Synthetic oligonucleotide
tctactaggcgtttcgagctaggttggaga

SEQ ID NO: 349522 - DNA, 30 bp, Artificial Sequence
  Synthetic oligonucleotide
aataggtgatcggatgtcctaataatgaga

SEQ ID NO: 349523 - DNA, 30 bp, Artificial Sequence
  Synthetic oligonucleotide
cgtatgcgatttagcgggatgcacatgaga

SEQ ID NO: 349524 - DNA, 30 bp, Artificial Sequence
  Synthetic oligonucleotide
ttcgtcgggcatgtcctggcactcatgaga

SEQ ID NO: 349525 - DNA, 30 bp, Artificial Sequence
  Synthetic oligonucleotide
ggtatcgaaccgaattaggcacagatgaga

SEQ ID NO: 349526 - DNA, 30 bp, Artificial Sequence
  Synthetic oligonucleotide
tcaactcataggatatacaccgcgatgaga

SEQ ID NO: 349527 - DNA, 30 bp, Artificial Sequence
  Synthetic oligonucleotide
gctttccatcaatgcaatgttcgtatgaga

SEQ ID NO: 349528 - DNA, 30 bp, Artificial Sequence
  Synthetic oligonucleotide
ctgagttttatctaacgagcgggtatgaga

SEQ ID NO: 349529 - DNA, 30 bp, Artificial Sequence
  Synthetic oligonucleotide
taaacgaatcctccaaggtcaattatgaga

SEQ ID NO: 349530 - DNA, 30 bp, Artificial Sequence
  Synthetic oligonucleotide
agggatcagaggcctcacatgcttatgaga

SEQ ID NO: 349531 - DNA, 30 bp, Artificial Sequence
  Synthetic oligonucleotide
ttgcccggttataaaagaagataactgaga

SEQ ID NO: 349532 - DNA, 30 bp, Artificial Sequence
  Synthetic oligonucleotide
ctccggttgagaggatcagggtggctgaga

SEQ ID NO: 349533 - DNA, 30 bp, Artificial Sequence
  Synthetic oligonucleotide
tggacccattggatccaagtatatctgaga

SEQ ID NO: 349534 - DNA, 30 bp, Artificial Sequence
  Synthetic oligonucleotide
cgcttactagggttttagccgcacgtgaga

SEQ ID NO: 349535 - DNA, 30 bp, Artificial Sequence
  Synthetic oligonucleotide
aggtcgcgaacccgtcggagtaaggtgaga

SEQ ID NO: 349536 - DNA, 30 bp, Artificial Sequence
  Synthetic oligonucleotide
tatcaagggtaaccttgatcggtggtgaga

SEQ ID NO: 349537 - DNA, 30 bp, Artificial Sequence
  Synthetic oligonucleotide
ccaactcgagtaaggggtgcgtttgtgaga

SEQ ID NO: 349538 - DNA, 30 bp, Artificial Sequence
  Synthetic oligonucleotide
tcctacggggtaatgatggaagcattgaga

SEQ ID NO: 349539 - DNA, 30 bp, Artificial Sequence
  Synthetic oligonucleotide
actctcggtagtcttatgttttgattgaga

SEQ ID NO: 349540 - DNA, 30 bp, Artificial Sequence
  Synthetic oligonucleotide
aatattatctgaggccgcattgacttgaga

SEQ ID NO: 349541 - DNA, 30 bp, Artificial Sequence
  Synthetic oligonucleotide
acatcttggagagcgctaaactacttgaga

SEQ ID NO: 349542 - DNA, 30 bp, Artificial Sequence
  Synthetic oligonucleotide
taggcataccatcgtgaatccatcttgaga

SEQ ID NO: 349543 - DNA, 30 bp, Artificial Sequence
  Synthetic oligonucleotide
ccgtaagttatttgttgcaattagttgaga

SEQ ID NO: 349544 - DNA, 30 bp, Artificial Sequence
  Synthetic oligonucleotide
ggggccgtgcgtatctactttactttgaga

SEQ ID NO: 349545 - DNA, 30 bp, Artificial Sequence
  Synthetic oligonucleotide
ggttagcacttgcttaggaggtttttgaga

SEQ ID NO: 349546 - DNA, 30 bp, Artificial Sequence
  Synthetic oligonucleotide
ggccggattggtgaaacccaaaaaaataga

SEQ ID NO: 349547 - DNA, 30 bp, Artificial Sequence
  Synthetic oligonucleotide
tagagcgaagcgccttgggagcaaaataga

SEQ ID NO: 349548 - DNA, 30 bp, Artificial Sequence
  Synthetic oligonucleotide
gtattgctgtgtccattggtaaacaataga

SEQ ID NO: 349549 - DNA, 30 bp, Artificial Sequence
  Synthetic oligonucleotide
agtaccatctaggtaacggcttacaataga

SEQ ID NO: 349550 - DNA, 30 bp, Artificial Sequence
  Synthetic oligonucleotide
cgctggaattccgaggaactagagaataga

SEQ ID NO: 349551 - DNA, 30 bp, Artificial Sequence
  Synthetic oligonucleotide
tgcttctgggggatgtatttatggaataga

SEQ ID NO: 349552 - DNA, 30 bp, Artificial Sequence
  Synthetic oligonucleotide
tgtctaatctattgaggaatggtgaataga

SEQ ID NO: 349553 - DNA, 30 bp, Artificial Sequence
  Synthetic oligonucleotide
tagcgatacgtcattatgggtcataataga

SEQ ID NO: 349554 - DNA, 30 bp, Artificial Sequence
  Synthetic oligonucleotide
gaccataatgctccaccctaacgtaataga

SEQ ID NO: 349555 - DNA, 30 bp, Artificial Sequence
  Synthetic oligonucleotide
aatacttagcaacatttaccctttaataga

SEQ ID NO: 349556 - DNA, 30 bp, Artificial Sequence
  Synthetic oligonucleotide
gtggaaggcctgggcaagtccggccataga

SEQ ID NO: 349557 - DNA, 30 bp, Artificial Sequence
  Synthetic oligonucleotide
agacgaggactagtgcttatgcaagataga

SEQ ID NO: 349558 - DNA, 30 bp, Artificial Sequence
  Synthetic oligonucleotide
tagccgtacctgagcggcactgaagataga

SEQ ID NO: 349559 - DNA, 30 bp, Artificial Sequence
  Synthetic oligonucleotide
atccctaatacaagataatctcgagataga

SEQ ID NO: 349560 - DNA, 30 bp, Artificial Sequence
  Synthetic oligonucleotide
gctctacatgcgaggggatttttagataga

SEQ ID NO: 349561 - DNA, 30 bp, Artificial Sequence
  Synthetic oligonucleotide
tatgccaatcatatttggcacggggataga

SEQ ID NO: 349562 - DNA, 30 bp, Artificial Sequence
  Synthetic oligonucleotide
taacagactggctggttcttaattgataga

SEQ ID NO: 349563 - DNA, 30 bp, Artificial Sequence
  Synthetic oligonucleotide
agaccggagtatgtgtatggttaatataga

SEQ ID NO: 349564 - DNA, 30 bp, Artificial Sequence
  Synthetic oligonucleotide
tggaaaatgtttggacctgttcactataga

SEQ ID NO: 349565 - DNA, 30 bp, Artificial Sequence
  Synthetic oligonucleotide
ttggaggttgttacgccatgtgtctataga

SEQ ID NO: 349566 - DNA, 30 bp, Artificial Sequence
  Synthetic oligonucleotide
caactcgagcataaactgagattgtataga

SEQ ID NO: 349567 - DNA, 30 bp, Artificial Sequence
  Synthetic oligonucleotide
gacgtacgcacacacagatgtcgttataga

SEQ ID NO: 349568 - DNA, 30 bp, Artificial Sequence
  Synthetic oligonucleotide
ggatattcttatgcttaagggggttataga

SEQ ID NO: 349569 - DNA, 30 bp, Artificial Sequence
  Synthetic oligonucleotide
gaatggatgtgttacggttatggttataga

SEQ ID NO: 349570 - DNA, 30 bp, Artificial Sequence
  Synthetic oligonucleotide
ccgtgctgatgggcggcctaaatttataga

SEQ ID NO: 349571 - DNA, 30 bp, Artificial Sequence
  Synthetic oligonucleotide
tagttggtacccctgtaagagcgaactaga

SEQ ID NO: 349572 - DNA, 30 bp, Artificial Sequence
  Synthetic oligonucleotide
actggtgcctttttgaatccgtgcactaga

SEQ ID NO: 349573 - DNA, 30 bp, Artificial Sequence
  Synthetic oligonucleotide
tataaaactcgcacaatggactggactaga

SEQ ID NO: 349574 - DNA, 30 bp, Artificial Sequence
  Synthetic oligonucleotide
tagagtaatcccaagtgtggcgatactaga

SEQ ID NO: 349575 - DNA, 30 bp, Artificial Sequence
  Synthetic oligonucleotide
gccatcctcccgaagtcgcaccgacctaga

SEQ ID NO: 349576 - DNA, 30 bp, Artificial Sequence
  Synthetic oligonucleotide
cgttgtattttagatggcctgcgccctaga

SEQ ID NO: 349577 - DNA, 30 bp, Artificial Sequence
  Synthetic oligonucleotide
gaagtattgagtcagtccgtgtcgcctaga

SEQ ID NO: 349578 - DNA, 30 bp, Artificial Sequence
  Synthetic oligonucleotide
cacatgttagacgcaaagactgggcctaga

SEQ ID NO: 349579 - DNA, 30 bp, Artificial Sequence
  Synthetic oligonucleotide
atgtcgacttctgagatgtagtggcctaga

SEQ ID NO: 349580 - DNA, 30 bp, Artificial Sequence
  Synthetic oligonucleotide
catccacgtggcatcgtttgtgtgcctaga

SEQ ID NO: 349581 - DNA, 30 bp, Artificial Sequence
  Synthetic oligonucleotide
atccagaggtaatgcacagagagtcctaga

SEQ ID NO: 349582 - DNA, 30 bp, Artificial Sequence
  Synthetic oligonucleotide
tgctatgtaacgtgcagggattgagctaga

SEQ ID NO: 349583 - DNA, 30 bp, Artificial Sequence
  Synthetic oligonucleotide
gctccggatcgttacttattcgccgctaga

SEQ ID NO: 349584 - DNA, 30 bp, Artificial Sequence
  Synthetic oligonucleotide
acccgtgcttgcaccctttaagaggctaga

SEQ ID NO: 349585 - DNA, 30 bp, Artificial Sequence
  Synthetic oligonucleotide
caattgtcgcactctatttcaccggctaga

SEQ ID NO: 349586 - DNA, 30 bp, Artificial Sequence
  Synthetic oligonucleotide
gcttcacaaccgattttgatgcgggctaga

SEQ ID NO: 349587 - DNA, 30 bp, Artificial Sequence
  Synthetic oligonucleotide
cggttcggctaaccaattgcgatggctaga

SEQ ID NO: 349588 - DNA, 30 bp, Artificial Sequence
  Synthetic oligonucleotide
tgagcattgacatgtaagagctctgctaga

SEQ ID NO: 349589 - DNA, 30 bp, Artificial Sequence
  Synthetic oligonucleotide
tggtgtccacgaaaattcttgattgctaga

SEQ ID NO: 349590 - DNA, 30 bp, Artificial Sequence
  Synthetic oligonucleotide
gggagccgtgttgggcgagcatcatctaga

SEQ ID NO: 349591 - DNA, 30 bp, Artificial Sequence
  Synthetic oligonucleotide
gacaggccagctaaatatcttctatctaga

SEQ ID NO: 349592 - DNA, 30 bp, Artificial Sequence
  Synthetic oligonucleotide
gcaacattgtttttggagggtacctctaga

SEQ ID NO: 349593 - DNA, 30 bp, Artificial Sequence
  Synthetic oligonucleotide
aaataataaatagtaattgaagtctctaga

SEQ ID NO: 349594 - DNA, 30 bp, Artificial Sequence
  Synthetic oligonucleotide
agaatctacgagcagcaccgtttctctaga

SEQ ID NO: 349595 - DNA, 30 bp, Artificial Sequence
  Synthetic oligonucleotide
gcccaacgaattgggccttagaagtctaga

SEQ ID NO: 349596 - DNA, 30 bp, Artificial Sequence
  Synthetic oligonucleotide
ctatgacgttgagagagatccgtgtctaga

SEQ ID NO: 349597 - DNA, 30 bp, Artificial Sequence
  Synthetic oligonucleotide
aacctacaatattctggaccatcaagtaga

SEQ ID NO: 349598 - DNA, 30 bp, Artificial Sequence
  Synthetic oligonucleotide
ttacacggcaatttggctttgcgaagtaga

SEQ ID NO: 349599 - DNA, 30 bp, Artificial Sequence
  Synthetic oligonucleotide
aaagctcagttacctgcggatgcgagtaga

SEQ ID NO: 349600 - DNA, 29 bp, Artificial Sequence
  Synthetic oligonucleotide
ggctcacggattcacggctctggagtaga

SEQ ID NO: 349601 - DNA, 29 bp, Artificial Sequence
  Synthetic oligonucleotide
atggggaacttctagatatagctagtaga

SEQ ID NO: 349602 - DNA, 29 bp, Artificial Sequence
  Synthetic oligonucleotide
gtgccgaggagcaagatccgcgtagtaga

SEQ ID NO: 349603 - DNA, 30 bp, Artificial Sequence
  Synthetic oligonucleotide
tgcgattgagcgttccttatacttagtaga

SEQ ID NO: 349604 - DNA, 30 bp, Artificial Sequence
  Synthetic oligonucleotide
agccgtttagaacctaggccgatacgtaga

SEQ ID NO: 349605 - DNA, 30 bp, Artificial Sequence
  Synthetic oligonucleotide
gaggtaagaatagcagggacgctccgtaga

SEQ ID NO: 349606 - DNA, 30 bp, Artificial Sequence
  Synthetic oligonucleotide
ccttagattgcgctcacacccaagcgtaga

SEQ ID NO: 349607 - DNA, 30 bp, Artificial Sequence
  Synthetic oligonucleotide
ctacgcggccataacccagttcggcgtaga

SEQ ID NO: 349608 - DNA, 30 bp, Artificial Sequence
  Synthetic oligonucleotide
aattgcaggagtattggtggtcttcgtaga

SEQ ID NO: 349609 - DNA, 30 bp, Artificial Sequence
  Synthetic oligonucleotide
atcatgcagttgtcctccgcgaacggtaga

SEQ ID NO: 349610 - DNA, 30 bp, Artificial Sequence
  Synthetic oligonucleotide
gagaggagatgattatatacagtcggtaga

SEQ ID NO: 349611 - DNA, 30 bp, Artificial Sequence
  Synthetic oligonucleotide
acttggatatctagtgacgggcttggtaga

SEQ ID NO: 349612 - DNA, 30 bp, Artificial Sequence
  Synthetic oligonucleotide
attgtcacagaggctagttttgcctgtaga

SEQ ID NO: 349613 - DNA, 30 bp, Artificial Sequence
  Synthetic oligonucleotide
cgacagatgctaagtacaaaatcttgtaga

SEQ ID NO: 349614 - DNA, 30 bp, Artificial Sequence
  Synthetic oligonucleotide
ccctagtaaacgctgctgacactaattaga

SEQ ID NO: 349615 - DNA, 31 bp, Artificial Sequence
  Synthetic oligonucleotide
tctgtaaccccaagtggccacgttaattaga

SEQ ID NO: 349616 - DNA, 30 bp, Artificial Sequence
  Synthetic oligonucleotide
gcagtatctgtgcaggaaagttcgattaga

SEQ ID NO: 349617 - DNA, 30 bp, Artificial Sequence
  Synthetic oligonucleotide
agtcattatctgggcctccggtggattaga

SEQ ID NO: 349618 - DNA, 30 bp, Artificial Sequence
  Synthetic oligonucleotide
tccggggaactgcgtttggcatttattaga

SEQ ID NO: 349619 - DNA, 30 bp, Artificial Sequence
  Synthetic oligonucleotide
atctagtaatcataagtatctgcacttaga

SEQ ID NO: 349620 - DNA, 30 bp, Artificial Sequence
  Synthetic oligonucleotide
cagcgatttgctcgcactgtcagacttaga

SEQ ID NO: 349621 - DNA, 30 bp, Artificial Sequence
  Synthetic oligonucleotide
gttgcccaaattgattattaagagcttaga

SEQ ID NO: 349622 - DNA, 30 bp, Artificial Sequence
  Synthetic oligonucleotide
attctatcgacacccactagcgtgcttaga

SEQ ID NO: 349623 - DNA, 30 bp, Artificial Sequence
  Synthetic oligonucleotide
tacctggaagtacacaccggggatcttaga

SEQ ID NO: 349624 - DNA, 30 bp, Artificial Sequence
  Synthetic oligonucleotide
actgtctgacaagtgatctggggtcttaga

SEQ ID NO: 349625 - DNA, 30 bp, Artificial Sequence
  Synthetic oligonucleotide
ggtatggatcgtgctaaaaattgtcttaga

SEQ ID NO: 349626 - DNA, 30 bp, Artificial Sequence
  Synthetic oligonucleotide
agtttggtatctgttgaaggccgagttaga

SEQ ID NO: 349627 - DNA, 30 bp, Artificial Sequence
  Synthetic oligonucleotide
ttgtcgaacattcttacagaagtagttaga

SEQ ID NO: 349628 - DNA, 30 bp, Artificial Sequence
  Synthetic oligonucleotide
gtgagagccactctgggcatccacgttaga

SEQ ID NO: 349629 - DNA, 30 bp, Artificial Sequence
  Synthetic oligonucleotide
ttgaaagaattgttcgaagaaccggttaga

SEQ ID NO: 349630 - DNA, 30 bp, Artificial Sequence
  Synthetic oligonucleotide
gttcggggacgaattcgaatagcggttaga

SEQ ID NO: 349631 - DNA, 30 bp, Artificial Sequence
  Synthetic oligonucleotide
cgcccattccgtggtcatgccagggttaga

SEQ ID NO: 349632 - DNA, 30 bp, Artificial Sequence
  Synthetic oligonucleotide
cgaagcccgccaggcaaggtttatgttaga

SEQ ID NO: 349633 - DNA, 30 bp, Artificial Sequence
  Synthetic oligonucleotide
atcataaacagtatcgttggcactgttaga

SEQ ID NO: 349634 - DNA, 30 bp, Artificial Sequence
  Synthetic oligonucleotide
atgacagaaccccccaacgagggtgttaga

SEQ ID NO: 349635 - DNA, 30 bp, Artificial Sequence
  Synthetic oligonucleotide
gcgtgctcaggaccaaattctcaatttaga

SEQ ID NO: 349636 - DNA, 30 bp, Artificial Sequence
  Synthetic oligonucleotide
cagcttgaccgacaacaactggaatttaga

SEQ ID NO: 349637 - DNA, 30 bp, Artificial Sequence
  Synthetic oligonucleotide
ctttgtcaaacgagtatagcatcatttaga

SEQ ID NO: 349638 - DNA, 30 bp, Artificial Sequence
  Synthetic oligonucleotide
aattagtaatcgaaagatttttgatttaga

SEQ ID NO: 349639 - DNA, 30 bp, Artificial Sequence
  Synthetic oligonucleotide
ccggtcgctacgccggggaagtcctttaga

SEQ ID NO: 349640 - DNA, 30 bp, Artificial Sequence
  Synthetic oligonucleotide
ttcgacatggatgaggatgtaaggtttaga

SEQ ID NO: 349641 - DNA, 31 bp, Artificial Sequence
  Synthetic oligonucleotide
gtgcagtccgcggttgtaaacggtgtttaga

SEQ ID NO: 349642 - DNA, 30 bp, Artificial Sequence
  Synthetic oligonucleotide
agaattaagaagctgcgttcggtgtttaga

SEQ ID NO: 349643 - DNA, 30 bp, Artificial Sequence
  Synthetic oligonucleotide
cataaggctggagagacgattgcttttaga

SEQ ID NO: 349644 - DNA, 30 bp, Artificial Sequence
  Synthetic oligonucleotide
aatgcgggggcgattaatggattttttaga

SEQ ID NO: 349645 - DNA, 30 bp, Artificial Sequence
  Synthetic oligonucleotide
cgtaaattaggctagcgcaaaacaaaacga

SEQ ID NO: 349646 - DNA, 30 bp, Artificial Sequence
  Synthetic oligonucleotide
gagaactgaaaatctattcatgacaaacga

SEQ ID NO: 349647 - DNA, 30 bp, Artificial Sequence
  Synthetic oligonucleotide
agagaataccgcaacaccgggtgcaaacga

SEQ ID NO: 349648 - DNA, 30 bp, Artificial Sequence
  Synthetic oligonucleotide
acgaccgccgaattgttgatgcagaaacga

SEQ ID NO: 349649 - DNA, 31 bp, Artificial Sequence
  Synthetic oligonucleotide
cacatcacacgatcttgatttggtgaaacga

SEQ ID NO: 349650 - DNA, 30 bp, Artificial Sequence
  Synthetic oligonucleotide
ctcttaaataccagactcatgaataaacga

SEQ ID NO: 349651 - DNA, 30 bp, Artificial Sequence
  Synthetic oligonucleotide
atagctctattgtgagcttaccataaacga

SEQ ID NO: 349652 - DNA, 30 bp, Artificial Sequence
  Synthetic oligonucleotide
acgggccccactagccgtatggttaaacga

SEQ ID NO: 349653 - DNA, 30 bp, Artificial Sequence
  Synthetic oligonucleotide
ttatgttccacacatgatgcaacccaacga

SEQ ID NO: 349654 - DNA, 30 bp, Artificial Sequence
  Synthetic oligonucleotide
tatatcggcaatgcggtgattgtccaacga

SEQ ID NO: 349655 - DNA, 30 bp, Artificial Sequence
  Synthetic oligonucleotide
ctaattgccacatgtgctactatgcaacga

SEQ ID NO: 349656 - DNA, 30 bp, Artificial Sequence
  Synthetic oligonucleotide
ggtctatattattgcccgaaaggtcaacga

SEQ ID NO: 349657 - DNA, 30 bp, Artificial Sequence
  Synthetic oligonucleotide
gataacgtgagcgacgatcctggggaacga

SEQ ID NO: 349658 - DNA, 30 bp, Artificial Sequence
  Synthetic oligonucleotide
gcctagtatcaataactcgtacttgaacga

SEQ ID NO: 349659 - DNA, 30 bp, Artificial Sequence
  Synthetic oligonucleotide
agtgtttattccattaaccactttgaacga

SEQ ID NO: 349660 - DNA, 30 bp, Artificial Sequence
  Synthetic oligonucleotide
tgctcgcaatgaagttctcgttttgaacga

SEQ ID NO: 349661 - DNA, 30 bp, Artificial Sequence
  Synthetic oligonucleotide
aagcaataccgtgtcttatgaggttaacga

SEQ ID NO: 349662 - DNA, 30 bp, Artificial Sequence
  Synthetic oligonucleotide
tatatatggacagcctcaaggccaacacga

SEQ ID NO: 349663 - DNA, 30 bp, Artificial Sequence
  Synthetic oligonucleotide
ctcgaggttcggatggacgtgggaacacga

SEQ ID NO: 349664 - DNA, 30 bp, Artificial Sequence
  Synthetic oligonucleotide
acatcacgttatcgcgtttcgataacacga

SEQ ID NO: 349665 - DNA, 30 bp, Artificial Sequence
  Synthetic oligonucleotide
tcatctgtcgactcgaactttgtcacacga

SEQ ID NO: 349666 - DNA, 30 bp, Artificial Sequence
  Synthetic oligonucleotide
tgaagagttgtctgacagacagggacacga

SEQ ID NO: 349667 - DNA, 30 bp, Artificial Sequence
  Synthetic oligonucleotide
gaatacaggggtataattacggggacacga

SEQ ID NO: 349668 - DNA, 31 bp, Artificial Sequence
  Synthetic oligonucleotide
tcagtttcacccgtataggtgtgtgacacga

SEQ ID NO: 349669 - DNA, 30 bp, Artificial Sequence
  Synthetic oligonucleotide
gtagtactttgtccattaacagctacacga

SEQ ID NO: 349670 - DNA, 31 bp, Artificial Sequence
  Synthetic oligonucleotide
ttagaacttggtacagctgctaagtacacga

SEQ ID NO: 349671 - DNA, 30 bp, Artificial Sequence
  Synthetic oligonucleotide
aaccccggccacgacaatattcgtacacga

SEQ ID NO: 349672 - DNA, 30 bp, Artificial Sequence
  Synthetic oligonucleotide
catacatacatacttgtatgcagaccacga

SEQ ID NO: 349673 - DNA, 30 bp, Artificial Sequence
  Synthetic oligonucleotide
ttaaggagttattatgagatgcggccacga

SEQ ID NO: 349674 - DNA, 30 bp, Artificial Sequence
  Synthetic oligonucleotide
agaaatagagggcactccggttggccacga

SEQ ID NO: 349675 - DNA, 30 bp, Artificial Sequence
  Synthetic oligonucleotide
tatgttgaacgttgccgaatattgccacga

SEQ ID NO: 349676 - DNA, 30 bp, Artificial Sequence
  Synthetic oligonucleotide
cagaatgtcgtggataactggcttccacga

SEQ ID NO: 349677 - DNA, 30 bp, Artificial Sequence
  Synthetic oligonucleotide
ccaatgcgtcggtccatctggtttccacga

SEQ ID NO: 349678 - DNA, 30 bp, Artificial Sequence
  Synthetic oligonucleotide
cactgagccactgtgtccagtcacgcacga

SEQ ID NO: 349679 - DNA, 30 bp, Artificial Sequence
  Synthetic oligonucleotide
ttgcacaacgtcaaggttagaggcgcacga

SEQ ID NO: 349680 - DNA, 30 bp, Artificial Sequence
  Synthetic oligonucleotide
gtttcgcgtttgtaggaggccaatgcacga

SEQ ID NO: 349681 - DNA, 30 bp, Artificial Sequence
  Synthetic oligonucleotide
gagttacctggtacgtagagcaatgcacga

SEQ ID NO: 349682 - DNA, 30 bp, Artificial Sequence
  Synthetic oligonucleotide
cttattgctttaccacaggcatatgcacga

SEQ ID NO: 349683 - DNA, 30 bp, Artificial Sequence
  Synthetic oligonucleotide
caccgtagtagatttaacggtggtgcacga

SEQ ID NO: 349684 - DNA, 30 bp, Artificial Sequence
  Synthetic oligonucleotide
tgcgaaattttaacgccgggagttgcacga

SEQ ID NO: 349685 - DNA, 30 bp, Artificial Sequence
  Synthetic oligonucleotide
taggagtgatcggtagagactggatcacga

SEQ ID NO: 349686 - DNA, 30 bp, Artificial Sequence
  Synthetic oligonucleotide
actccgtgcgtgcacagcggttgatcacga

SEQ ID NO: 349687 - DNA, 30 bp, Artificial Sequence
  Synthetic oligonucleotide
taatgtatcgcccaagttttaacctcacga

SEQ ID NO: 349688 - DNA, 30 bp, Artificial Sequence
  Synthetic oligonucleotide
gggccattgggattttaccgtttttcacga

SEQ ID NO: 349689 - DNA, 30 bp, Artificial Sequence
  Synthetic oligonucleotide
cccctgaattctggtttgaccacaagacga

SEQ ID NO: 349690 - DNA, 30 bp, Artificial Sequence
  Synthetic oligonucleotide
ttgtacctgacaaggggtcctggaagacga

SEQ ID NO: 349691 - DNA, 30 bp, Artificial Sequence
  Synthetic oligonucleotide
tttgcatgagtactcacggctgtaagacga

SEQ ID NO: 349692 - DNA, 30 bp, Artificial Sequence
  Synthetic oligonucleotide
aaccgtgtctacgaaggtcgcgccagacga

SEQ ID NO: 349693 - DNA, 30 bp, Artificial Sequence
  Synthetic oligonucleotide
actccctgatgtccgtctatatgcagacga

SEQ ID NO: 349694 - DNA, 30 bp, Artificial Sequence
  Synthetic oligonucleotide
cggcccagcacagatctttcggtgagacga

SEQ ID NO: 349695 - DNA, 30 bp, Artificial Sequence
  Synthetic oligonucleotide
tgccgactgaggtgattacggaatagacga

SEQ ID NO: 349696 - DNA, 30 bp, Artificial Sequence
  Synthetic oligonucleotide
aatgtagtagtttttccctctcgtagacga

SEQ ID NO: 349697 - DNA, 31 bp, Artificial Sequence
  Synthetic oligonucleotide
gtcccattagcgggactggatacttagacga

SEQ ID NO: 349698 - DNA, 30 bp, Artificial Sequence
  Synthetic oligonucleotide
gggtcagctcccgatccccacttacgacga

SEQ ID NO: 349699 - DNA, 30 bp, Artificial Sequence
  Synthetic oligonucleotide
gactcaacctatagaggaacctagcgacga

SEQ ID NO: 349700 - DNA, 30 bp, Artificial Sequence
  Synthetic oligonucleotide
tcttgctcccagacgggcgcctagcgacga

SEQ ID NO: 349701 - DNA, 30 bp, Artificial Sequence
  Synthetic oligonucleotide
tgctgaggaagccgcggcggacggcgacga

SEQ ID NO: 349702 - DNA, 30 bp, Artificial Sequence
  Synthetic oligonucleotide
gtaggctcgtcgcaaatttcgatgggacga

SEQ ID NO: 349703 - DNA, 30 bp, Artificial Sequence
  Synthetic oligonucleotide
acggtacaacccaagtgcgctccctgacga

SEQ ID NO: 349704 - DNA, 30 bp, Artificial Sequence
  Synthetic oligonucleotide
aaaatgatgggcgttacgcgccgctgacga

SEQ ID NO: 349705 - DNA, 30 bp, Artificial Sequence
  Synthetic oligonucleotide
ttctagtatgtaactctaacactaatacga

SEQ ID NO: 349706 - DNA, 30 bp, Artificial Sequence
  Synthetic oligonucleotide
gaacatcgtggaattaaagttgccatacga

SEQ ID NO: 349707 - DNA, 30 bp, Artificial Sequence
  Synthetic oligonucleotide
ctatagataataattgccttatggatacga

SEQ ID NO: 349708 - DNA, 30 bp, Artificial Sequence
  Synthetic oligonucleotide
aaagccattatgaaccgtctcctgatacga

SEQ ID NO: 349709 - DNA, 30 bp, Artificial Sequence
  Synthetic oligonucleotide
cgacattggcgctctgcttctgatatacga

SEQ ID NO: 349710 - DNA, 30 bp, Artificial Sequence
  Synthetic oligonucleotide
atggcgtttcgcctccggcatggtatacga

SEQ ID NO: 349711 - DNA, 30 bp, Artificial Sequence
  Synthetic oligonucleotide
ccccaaaacatatgacccccggttatacga

SEQ ID NO: 349712 - DNA, 30 bp, Artificial Sequence
  Synthetic oligonucleotide
gcgatccgaaactaaggtcatgcactacga

SEQ ID NO: 349713 - DNA, 30 bp, Artificial Sequence
  Synthetic oligonucleotide
ggagactataagcaagtcgaaagactacga

SEQ ID NO: 349714 - DNA, 30 bp, Artificial Sequence
  Synthetic oligonucleotide
tgcgctcatgaactgagaccatgactacga

SEQ ID NO: 349715 - DNA, 30 bp, Artificial Sequence
  Synthetic oligonucleotide
ctttcgtacattggtgtggctgtactacga

SEQ ID NO: 349716 - DNA, 30 bp, Artificial Sequence
  Synthetic oligonucleotide
tgtgtaggagagtttccgcgcaacctacga

SEQ ID NO: 349717 - DNA, 30 bp, Artificial Sequence
  Synthetic oligonucleotide
agttataggcgaagtaacttgcgcctacga

SEQ ID NO: 349718 - DNA, 30 bp, Artificial Sequence
  Synthetic oligonucleotide
ctcggttgagagatagtgaaatcgctacga

SEQ ID NO: 349719 - DNA, 30 bp, Artificial Sequence
  Synthetic oligonucleotide
aacgcccggttgtccgcccttagagtacga

SEQ ID NO: 349720 - DNA, 30 bp, Artificial Sequence
  Synthetic oligonucleotide
tattaatctgatacacgcgctaccgtacga

SEQ ID NO: 349721 - DNA, 30 bp, Artificial Sequence
  Synthetic oligonucleotide
cattacctatactctgatgtagtcgtacga

SEQ ID NO: 349722 - DNA, 30 bp, Artificial Sequence
  Synthetic oligonucleotide
tctgcggctcaaagccgtagtgcggtacga

SEQ ID NO: 349723 - DNA, 30 bp, Artificial Sequence
  Synthetic oligonucleotide
tgttccatttgcggccgaatcacgttacga

SEQ ID NO: 349724 - DNA, 30 bp, Artificial Sequence
  Synthetic oligonucleotide
atggcgttttaggctgcgagatggttacga

SEQ ID NO: 349725 - DNA, 30 bp, Artificial Sequence
  Synthetic oligonucleotide
gccacgctatctcctaatagtttgttacga

SEQ ID NO: 349726 - DNA, 30 bp, Artificial Sequence
  Synthetic oligonucleotide
ggtgttcgcacgtatatgacggttttacga

SEQ ID NO: 349727 - DNA, 30 bp, Artificial Sequence
  Synthetic oligonucleotide
ggcagaggctccgcatttctgtaaaaccga

SEQ ID NO: 349728 - DNA, 30 bp, Artificial Sequence
  Synthetic oligonucleotide
gtacttagttacaagggtcacgggaaccga

SEQ ID NO: 349729 - DNA, 30 bp, Artificial Sequence
  Synthetic oligonucleotide
tcatcttggtttggagcgagggtgaaccga

SEQ ID NO: 349730 - DNA, 30 bp, Artificial Sequence
  Synthetic oligonucleotide
gtaggtagggataagacaaaatataaccga

SEQ ID NO: 349731 - DNA, 30 bp, Artificial Sequence
  Synthetic oligonucleotide
tgtgggtccttcggactagagcgtaaccga

SEQ ID NO: 349732 - DNA, 30 bp, Artificial Sequence
  Synthetic oligonucleotide
aatcccgttagcggcagaggtcgtaaccga

SEQ ID NO: 349733 - DNA, 30 bp, Artificial Sequence
  Synthetic oligonucleotide
ccaattgacctggtaagccaaattaaccga

SEQ ID NO: 349734 - DNA, 30 bp, Artificial Sequence
  Synthetic oligonucleotide
actgtcactgccagatgcacagttaaccga

SEQ ID NO: 349735 - DNA, 30 bp, Artificial Sequence
  Synthetic oligonucleotide
gcagacgccaagcgttcggcgaaacaccga

SEQ ID NO: 349736 - DNA, 30 bp, Artificial Sequence
  Synthetic oligonucleotide
tgagcagcgttagcatgcccttaacaccga

SEQ ID NO: 349737 - DNA, 30 bp, Artificial Sequence
  Synthetic oligonucleotide
tagtaatagtaacagcctgagacacaccga

SEQ ID NO: 349738 - DNA, 30 bp, Artificial Sequence
  Synthetic oligonucleotide
aaatgttactaaattagcgtgtcacaccga

SEQ ID NO: 349739 - DNA, 30 bp, Artificial Sequence
  Synthetic oligonucleotide
actatgcggcaccttagagcaggccaccga

SEQ ID NO: 349740 - DNA, 30 bp, Artificial Sequence
  Synthetic oligonucleotide
cttgaagcgcacctatagcggtgccaccga

SEQ ID NO: 349741 - DNA, 30 bp, Artificial Sequence
  Synthetic oligonucleotide
caccactcgcccgacgcgcctctccaccga

SEQ ID NO: 349742 - DNA, 30 bp, Artificial Sequence
  Synthetic oligonucleotide
gaaaccgtgcgcaggtaaaaagcgcaccga

SEQ ID NO: 349743 - DNA, 30 bp, Artificial Sequence
  Synthetic oligonucleotide
agcatgtgtttccggcccacctcgcaccga

SEQ ID NO: 349744 - DNA, 30 bp, Artificial Sequence
  Synthetic oligonucleotide
tcggcgaccttcaacattcaagggcaccga

SEQ ID NO: 349745 - DNA, 30 bp, Artificial Sequence
  Synthetic oligonucleotide
taagtcggagcaccaagtgaataagaccga

SEQ ID NO: 349746 - DNA, 30 bp, Artificial Sequence
  Synthetic oligonucleotide
tcgctgaaagcgtcaagacgcgacgaccga

SEQ ID NO: 349747 - DNA, 30 bp, Artificial Sequence
  Synthetic oligonucleotide
ggggttacggttaggatacggtacgaccga

SEQ ID NO: 349748 - DNA, 30 bp, Artificial Sequence
  Synthetic oligonucleotide
gatgttgagatccttcctcgggccgaccga

SEQ ID NO: 349749 - DNA, 30 bp, Artificial Sequence
  Synthetic oligonucleotide
taggacaatgaggggctactcgtcgaccga

SEQ ID NO: 349750 - DNA, 30 bp, Artificial Sequence
  Synthetic oligonucleotide
tgaaaatgcgacgcccccattaaataccga

SEQ ID NO: 349751 - DNA, 30 bp, Artificial Sequence
  Synthetic oligonucleotide
gaaatgtgtgatggcaatggtccctaccga

SEQ ID NO: 349752 - DNA, 30 bp, Artificial Sequence
  Synthetic oligonucleotide
gaccttcctcaaattcgacctgcctaccga

SEQ ID NO: 349753 - DNA, 30 bp, Artificial Sequence
  Synthetic oligonucleotide
gtaccatggccgacctgtgattcgtaccga

SEQ ID NO: 349754 - DNA, 30 bp, Artificial Sequence
  Synthetic oligonucleotide
gggcggtcgtgttagcgggtagggtaccga

SEQ ID NO: 349755 - DNA, 30 bp, Artificial Sequence
  Synthetic oligonucleotide
gtaatttacgtaatgatctgctattaccga

SEQ ID NO: 349756 - DNA, 30 bp, Artificial Sequence
  Synthetic oligonucleotide
gtggtgatgtttgggcctattgtaacccga

SEQ ID NO: 349757 - DNA, 30 bp, Artificial Sequence
  Synthetic oligonucleotide
gacgtaaatcccagtccgatacgcacccga

SEQ ID NO: 349758 - DNA, 30 bp, Artificial Sequence
  Synthetic oligonucleotide
tgaatagcatcgtcagtggaggagacccga

SEQ ID NO: 349759 - DNA, 30 bp, Artificial Sequence
  Synthetic oligonucleotide
gaactaacagttgagtggaaagcgacccga

SEQ ID NO: 349760 - DNA, 30 bp, Artificial Sequence
  Synthetic oligonucleotide
tcagatcccgctaggggacaagcaccccga

SEQ ID NO: 349761 - DNA, 30 bp, Artificial Sequence
  Synthetic oligonucleotide
tggaggagtcttaaagaggaagacccccga

SEQ ID NO: 349762 - DNA, 30 bp, Artificial Sequence
  Synthetic oligonucleotide
tagaatatgaagtacttgagggccccccga

SEQ ID NO: 349763 - DNA, 30 bp, Artificial Sequence
  Synthetic oligonucleotide
gattacggcttgacgggcgcccgcccccga

SEQ ID NO: 349764 - DNA, 30 bp, Artificial Sequence
  Synthetic oligonucleotide
cagaataccaactttagatattgtccccga

SEQ ID NO: 349765 - DNA, 30 bp, Artificial Sequence
  Synthetic oligonucleotide
gcgtgtttattccaattacgttccgcccga

SEQ ID NO: 349766 - DNA, 30 bp, Artificial Sequence
  Synthetic oligonucleotide
ccctctcataggcaggtgccgtcggcccga

SEQ ID NO: 349767 - DNA, 30 bp, Artificial Sequence
  Synthetic oligonucleotide
aattcgatcgcttagtataattgggcccga

SEQ ID NO: 349768 - DNA, 30 bp, Artificial Sequence
  Synthetic oligonucleotide
gaccgtacctctctgcgctgcatggcccga

SEQ ID NO: 349769 - DNA, 30 bp, Artificial Sequence
  Synthetic oligonucleotide
agagggtcagtttgaagcggcttggcccga

SEQ ID NO: 349770 - DNA, 30 bp, Artificial Sequence
  Synthetic oligonucleotide
ttacgcgatacggcgtcatcccgtgcccga

SEQ ID NO: 349771 - DNA, 30 bp, Artificial Sequence
  Synthetic oligonucleotide
gcttaggctgcttatagacgaggatcccga

SEQ ID NO: 349772 - DNA, 30 bp, Artificial Sequence
  Synthetic oligonucleotide
atcatagctagcctggctgtactatcccga

SEQ ID NO: 349773 - DNA, 30 bp, Artificial Sequence
  Synthetic oligonucleotide
tggtttcggtaccattctaagtcctcccga

SEQ ID NO: 349774 - DNA, 30 bp, Artificial Sequence
  Synthetic oligonucleotide
tttagacgagtcaccttagactcgtcccga

SEQ ID NO: 349775 - DNA, 30 bp, Artificial Sequence
  Synthetic oligonucleotide
caccgttcgtcgctgctattctcgtcccga

SEQ ID NO: 349776 - DNA, 30 bp, Artificial Sequence
  Synthetic oligonucleotide
tatatgataaagggtatcagcgtgtcccga

SEQ ID NO: 349777 - DNA, 30 bp, Artificial Sequence
  Synthetic oligonucleotide
acaaaattcggtcccctgtttttgtcccga

SEQ ID NO: 349778 - DNA, 30 bp, Artificial Sequence
  Synthetic oligonucleotide
tataacgacgcgtctctatcagtaagccga

SEQ ID NO: 349779 - DNA, 30 bp, Artificial Sequence
  Synthetic oligonucleotide
aagatcccaacagctgcacgattaagccga

SEQ ID NO: 349780 - DNA, 30 bp, Artificial Sequence
  Synthetic oligonucleotide
accgtcgttcggagcgtaagcctcagccga

SEQ ID NO: 349781 - DNA, 30 bp, Artificial Sequence
  Synthetic oligonucleotide
gtggcgtatccaggattgaatggtagccga

SEQ ID NO: 349782 - DNA, 30 bp, Artificial Sequence
  Synthetic oligonucleotide
gctaagagcaaggagcaatactttagccga

SEQ ID NO: 349783 - DNA, 30 bp, Artificial Sequence
  Synthetic oligonucleotide
cagccgcggcttcagagcaacgaacgccga

SEQ ID NO: 349784 - DNA, 30 bp, Artificial Sequence
  Synthetic oligonucleotide
aggattcgatcgacgcacgacacgcgccga

SEQ ID NO: 349785 - DNA, 30 bp, Artificial Sequence
  Synthetic oligonucleotide
tatgcccatggcgccccacacgacggccga

SEQ ID NO: 349786 - DNA, 30 bp, Artificial Sequence
  Synthetic oligonucleotide
agaacccggataactggcctcttcggccga

SEQ ID NO: 349787 - DNA, 30 bp, Artificial Sequence
  Synthetic oligonucleotide
gtcaatgtctgaaccggaatcactggccga

SEQ ID NO: 349788 - DNA, 30 bp, Artificial Sequence
  Synthetic oligonucleotide
tctcatcccagactctaggagtactgccga

SEQ ID NO: 349789 - DNA, 30 bp, Artificial Sequence
  Synthetic oligonucleotide
gagaaagcaacgcctcagcgttactgccga

SEQ ID NO: 349790 - DNA, 30 bp, Artificial Sequence
  Synthetic oligonucleotide
agttctctgaaggaacagtaatgctgccga

SEQ ID NO: 349791 - DNA, 30 bp, Artificial Sequence
  Synthetic oligonucleotide
ccacttaatgtacgaggtggcttctgccga

SEQ ID NO: 349792 - DNA, 30 bp, Artificial Sequence
  Synthetic oligonucleotide
ctcgatgaattattcagtaaagtgtgccga

SEQ ID NO: 349793 - DNA, 30 bp, Artificial Sequence
  Synthetic oligonucleotide
atgccgaccttccggggccgggattgccga

SEQ ID NO: 349794 - DNA, 30 bp, Artificial Sequence
  Synthetic oligonucleotide
agttttgtagggtaattctctagttgccga

SEQ ID NO: 349795 - DNA, 30 bp, Artificial Sequence
  Synthetic oligonucleotide
tgacatgtgtgggactaagcgctttgccga

SEQ ID NO: 349796 - DNA, 30 bp, Artificial Sequence
  Synthetic oligonucleotide
ttcaggactcgtgaggttggagtaatccga

SEQ ID NO: 349797 - DNA, 30 bp, Artificial Sequence
  Synthetic oligonucleotide
aaactttaaagtgtgactacggtaatccga

SEQ ID NO: 349798 - DNA, 30 bp, Artificial Sequence
  Synthetic oligonucleotide
gagcaatcctccttcactggcttaatccga

SEQ ID NO: 349799 - DNA, 30 bp, Artificial Sequence
  Synthetic oligonucleotide
aagactatcgcgcttggtttcgacatccga

SEQ ID NO: 349800 - DNA, 30 bp, Artificial Sequence
  Synthetic oligonucleotide
tagaaatgaattgtagaggcgcgcatccga

SEQ ID NO: 349801 - DNA, 30 bp, Artificial Sequence
  Synthetic oligonucleotide
gaaggaaattgcctctgatgcgatatccga

SEQ ID NO: 349802 - DNA, 30 bp, Artificial Sequence
  Synthetic oligonucleotide
tcggcccttgtccgggagttagcactccga

SEQ ID NO: 349803 - DNA, 30 bp, Artificial Sequence
  Synthetic oligonucleotide
ttcatcggtatgcgcataagcagactccga

SEQ ID NO: 349804 - DNA, 30 bp, Artificial Sequence
  Synthetic oligonucleotide
cggtgtagggaacgttgccctttgctccga

SEQ ID NO: 349805 - DNA, 30 bp, Artificial Sequence
  Synthetic oligonucleotide
gcatcaccgccatggtagtacagagtccga

SEQ ID NO: 349806 - DNA, 30 bp, Artificial Sequence
  Synthetic oligonucleotide
atcctactgtaacggtgggcgtacgtccga

SEQ ID NO: 349807 - DNA, 30 bp, Artificial Sequence
  Synthetic oligonucleotide
cagttaaatcgggactgttagtcggtccga

SEQ ID NO: 349808 - DNA, 30 bp, Artificial Sequence
  Synthetic oligonucleotide
cacaaccccggggccaatcgaagggtccga

SEQ ID NO: 349809 - DNA, 30 bp, Artificial Sequence
  Synthetic oligonucleotide
ttgactacaatgggctcagcgctggtccga

SEQ ID NO: 349810 - DNA, 30 bp, Artificial Sequence
  Synthetic oligonucleotide
tcgtaacggtcctgtagagtctatgtccga

SEQ ID NO: 349811 - DNA, 30 bp, Artificial Sequence
  Synthetic oligonucleotide
gttggcactagtaagcgctctggtgtccga

SEQ ID NO: 349812 - DNA, 30 bp, Artificial Sequence
  Synthetic oligonucleotide
cccattcagcccaaggactaggttgtccga

SEQ ID NO: 349813 - DNA, 30 bp, Artificial Sequence
  Synthetic oligonucleotide
cctatctgggttgagttcagatttgtccga

SEQ ID NO: 349814 - DNA, 30 bp, Artificial Sequence
  Synthetic oligonucleotide
acctgttgaagttacgggcagcaattccga

SEQ ID NO: 349815 - DNA, 30 bp, Artificial Sequence
  Synthetic oligonucleotide
acagtttcctcggctattccgcacttccga

SEQ ID NO: 349816 - DNA, 30 bp, Artificial Sequence
  Synthetic oligonucleotide
ggtagcaacgggacttaaatagttttccga

SEQ ID NO: 349817 - DNA, 30 bp, Artificial Sequence
  Synthetic oligonucleotide
aaccgtccatttacaacatttgttttccga

SEQ ID NO: 349818 - DNA, 30 bp, Artificial Sequence
  Synthetic oligonucleotide
gtggaatccgcctagacgggaacccagcga

SEQ ID NO: 349819 - DNA, 30 bp, Artificial Sequence
  Synthetic oligonucleotide
tgaattttagaattagacgtgcaggagcga

SEQ ID NO: 349820 - DNA, 30 bp, Artificial Sequence
  Synthetic oligonucleotide
ttgaaattttggacccatgacacggagcga

SEQ ID NO: 349821 - DNA, 30 bp, Artificial Sequence
  Synthetic oligonucleotide
aattcgagtcacccgggtgtttcggagcga

SEQ ID NO: 349822 - DNA, 30 bp, Artificial Sequence
  Synthetic oligonucleotide
tacttcgcaagagccctggttagggagcga

SEQ ID NO: 349823 - DNA, 30 bp, Artificial Sequence
  Synthetic oligonucleotide
tagtcaacggcccatcatataactgagcga

SEQ ID NO: 349824 - DNA, 30 bp, Artificial Sequence
  Synthetic oligonucleotide
gggttattgatgcattcaatagaatagcga

SEQ ID NO: 349825 - DNA, 30 bp, Artificial Sequence
  Synthetic oligonucleotide
atgtaaagttagcaatcctatggatagcga

SEQ ID NO: 349826 - DNA, 30 bp, Artificial Sequence
  Synthetic oligonucleotide
cacatttgctcaagcggtatgaagtagcga

SEQ ID NO: 349827 - DNA, 30 bp, Artificial Sequence
  Synthetic oligonucleotide
atgggcacagctgggatctcatattagcga

SEQ ID NO: 349828 - DNA, 30 bp, Artificial Sequence
  Synthetic oligonucleotide
cgtttggtatcgttctaccggacttagcga

SEQ ID NO: 349829 - DNA, 30 bp, Artificial Sequence
  Synthetic oligonucleotide
aggtattctccgcagaacagcggttagcga

SEQ ID NO: 349830 - DNA, 30 bp, Artificial Sequence
  Synthetic oligonucleotide
ccattttcaatgttcgttggagtttagcga

SEQ ID NO: 349831 - DNA, 30 bp, Artificial Sequence
  Synthetic oligonucleotide
atcatggaagtgtacggacattgaacgcga

SEQ ID NO: 349832 - DNA, 30 bp, Artificial Sequence
  Synthetic oligonucleotide
ggcagcagatggtataaccggctaacgcga

SEQ ID NO: 349833 - DNA, 30 bp, Artificial Sequence
  Synthetic oligonucleotide
agcccatgcttgtccttcgtggtcacgcga

SEQ ID NO: 349834 - DNA, 30 bp, Artificial Sequence
  Synthetic oligonucleotide
gcgtttgagagtgtgcgacacgcgacgcga

SEQ ID NO: 349835 - DNA, 30 bp, Artificial Sequence
  Synthetic oligonucleotide
gcttttgacgtatgtgacggatcgacgcga

SEQ ID NO: 349836 - DNA, 30 bp, Artificial Sequence
  Synthetic oligonucleotide
agacgcttacaacggagtttgaggacgcga

SEQ ID NO: 349837 - DNA, 30 bp, Artificial Sequence
  Synthetic oligonucleotide
cgaatatgttcttaataggtggccccgcga

SEQ ID NO: 349838 - DNA, 30 bp, Artificial Sequence
  Synthetic oligonucleotide
agtagacttagcgagctggatcagccgcga

SEQ ID NO: 349839 - DNA, 30 bp, Artificial Sequence
  Synthetic oligonucleotide
cgcggagcaccccagatccaggggccgcga

SEQ ID NO: 349840 - DNA, 30 bp, Artificial Sequence
  Synthetic oligonucleotide
tgtaccgtcgatcgaaatactcgtgcgcga

SEQ ID NO: 349841 - DNA, 30 bp, Artificial Sequence
  Synthetic oligonucleotide
atattagggcaggctataaggaaatcgcga

SEQ ID NO: 349842 - DNA, 30 bp, Artificial Sequence
  Synthetic oligonucleotide
tagaataggccgtgtagtggaatatcgcga

SEQ ID NO: 349843 - DNA, 30 bp, Artificial Sequence
  Synthetic oligonucleotide
acttctatgtacaaaataatcatctcgcga

SEQ ID NO: 349844 - DNA, 30 bp, Artificial Sequence
  Synthetic oligonucleotide
tgatggaaaggtggtctatttgagtcgcga

SEQ ID NO: 349845 - DNA, 30 bp, Artificial Sequence
  Synthetic oligonucleotide
tgggagcggacaggccttttcggttcgcga

SEQ ID NO: 349846 - DNA, 30 bp, Artificial Sequence
  Synthetic oligonucleotide
gttttgggtcgggtacaagaaaaaaggcga

SEQ ID NO: 349847 - DNA, 30 bp, Artificial Sequence
  Synthetic oligonucleotide
atcttactacgtgactgccctcgaaggcga

SEQ ID NO: 349848 - DNA, 30 bp, Artificial Sequence
  Synthetic oligonucleotide
gtcaaggactaggaggctcttttaaggcga

SEQ ID NO: 349849 - DNA, 30 bp, Artificial Sequence
  Synthetic oligonucleotide
cctgccgggcgttctacttagtacaggcga

SEQ ID NO: 349850 - DNA, 30 bp, Artificial Sequence
  Synthetic oligonucleotide
cagcctgaacggagcaaagtaaggaggcga

SEQ ID NO: 349851 - DNA, 30 bp, Artificial Sequence
  Synthetic oligonucleotide
aaatcggcaatcgcgtgccgatttaggcga

SEQ ID NO: 349852 - DNA, 30 bp, Artificial Sequence
  Synthetic oligonucleotide
tctctatcttcggtatgagattttaggcga

SEQ ID NO: 349853 - DNA, 30 bp, Artificial Sequence
  Synthetic oligonucleotide
gttaaatcggtcgcaccttttaaacggcga

SEQ ID NO: 349854 - DNA, 30 bp, Artificial Sequence
  Synthetic oligonucleotide
atcagtgaaatggtgtttgcgcaccggcga

SEQ ID NO: 349855 - DNA, 30 bp, Artificial Sequence
  Synthetic oligonucleotide
tccggtaaaggcccggcaactgtgcggcga

SEQ ID NO: 349856 - DNA, 30 bp, Artificial Sequence
  Synthetic oligonucleotide
gcggttcgtgctacactagtgtatcggcga

SEQ ID NO: 349857 - DNA, 30 bp, Artificial Sequence
  Synthetic oligonucleotide
aaaacgaaattttacaagggacccgggcga

SEQ ID NO: 349858 - DNA, 30 bp, Artificial Sequence
  Synthetic oligonucleotide
ttactgcgttcataccggttactcgggcga

SEQ ID NO: 349859 - DNA, 30 bp, Artificial Sequence
  Synthetic oligonucleotide
cagcgttcattccccgtcacgtttgggcga

SEQ ID NO: 349860 - DNA, 30 bp, Artificial Sequence
  Synthetic oligonucleotide
gtatgccagccgcgcacagcgtactggcga

SEQ ID NO: 349861 - DNA, 30 bp, Artificial Sequence
  Synthetic oligonucleotide
attggcattcgtcccaaaaatcggtggcga

SEQ ID NO: 349862 - DNA, 30 bp, Artificial Sequence
  Synthetic oligonucleotide
tgctcgttggtctatagcatggcttggcga

SEQ ID NO: 349863 - DNA, 30 bp, Artificial Sequence
  Synthetic oligonucleotide
tgtgtatatcacattgctcgaatttggcga

SEQ ID NO: 349864 - DNA, 30 bp, Artificial Sequence
  Synthetic oligonucleotide
agctcctgtaaaagcgtttatgtttggcga

SEQ ID NO: 349865 - DNA, 30 bp, Artificial Sequence
  Synthetic oligonucleotide
agcaatcgtattgatattttcacaatgcga

SEQ ID NO: 349866 - DNA, 30 bp, Artificial Sequence
  Synthetic oligonucleotide
tacgtctggaagttatctattggcatgcga

SEQ ID NO: 349867 - DNA, 30 bp, Artificial Sequence
  Synthetic oligonucleotide
ccgtctacatggtcaaatgcggggatgcga

SEQ ID NO: 349868 - DNA, 30 bp, Artificial Sequence
  Synthetic oligonucleotide
attcatacctaaaatgttgaatggatgcga

SEQ ID NO: 349869 - DNA, 30 bp, Artificial Sequence
  Synthetic oligonucleotide
gactcacttttgctcgtaagcgatatgcga

SEQ ID NO: 349870 - DNA, 30 bp, Artificial Sequence
  Synthetic oligonucleotide
agttccttgaattatagggaggctatgcga

SEQ ID NO: 349871 - DNA, 30 bp, Artificial Sequence
  Synthetic oligonucleotide
gcacgaacgcgtcgttttgggtaactgcga

SEQ ID NO: 349872 - DNA, 30 bp, Artificial Sequence
  Synthetic oligonucleotide
gctctgtttttttgggctgaaaatctgcga

SEQ ID NO: 349873 - DNA, 30 bp, Artificial Sequence
  Synthetic oligonucleotide
accttgcagactctcatgtgtactctgcga

SEQ ID NO: 349874 - DNA, 30 bp, Artificial Sequence
  Synthetic oligonucleotide
gaatcgttgggcttgtaagatcacgtgcga

SEQ ID NO: 349875 - DNA, 30 bp, Artificial Sequence
  Synthetic oligonucleotide
taaatctcattgagtcgtcatgtcgtgcga

SEQ ID NO: 349876 - DNA, 30 bp, Artificial Sequence
  Synthetic oligonucleotide
actgtgttcccctttaattaaccggtgcga

SEQ ID NO: 349877 - DNA, 30 bp, Artificial Sequence
  Synthetic oligonucleotide
cctcagctccccggtgtttgcatattgcga

SEQ ID NO: 349878 - DNA, 30 bp, Artificial Sequence
  Synthetic oligonucleotide
agctacaagaggacagcctgtcacttgcga

SEQ ID NO: 349879 - DNA, 30 bp, Artificial Sequence
  Synthetic oligonucleotide
ctgcagatatggagcagtacaaccttgcga

SEQ ID NO: 349880 - DNA, 30 bp, Artificial Sequence
  Synthetic oligonucleotide
ttcgcgaggcgattcaatccgccgttgcga

SEQ ID NO: 349881 - DNA, 30 bp, Artificial Sequence
  Synthetic oligonucleotide
agtagaggattggccgattcggggttgcga

SEQ ID NO: 349882 - DNA, 30 bp, Artificial Sequence
  Synthetic oligonucleotide
aaaaggaggctctgcgagaaaaatttgcga

SEQ ID NO: 349883 - DNA, 30 bp, Artificial Sequence
  Synthetic oligonucleotide
tgcagagaacgtgtctttaggttaaatcga

SEQ ID NO: 349884 - DNA, 30 bp, Artificial Sequence
  Synthetic oligonucleotide
ctgtagggtctgatggatacaaacaatcga

SEQ ID NO: 349885 - DNA, 30 bp, Artificial Sequence
  Synthetic oligonucleotide
gggaacaaccagggccgtctactcaatcga

SEQ ID NO: 349886 - DNA, 30 bp, Artificial Sequence
  Synthetic oligonucleotide
aagctctaagtagcatgtgataagaatcga

SEQ ID NO: 349887 - DNA, 30 bp, Artificial Sequence
  Synthetic oligonucleotide
agcattaaggagagtccttagctgaatcga

SEQ ID NO: 349888 - DNA, 30 bp, Artificial Sequence
  Synthetic oligonucleotide
ttatacgggttaaccccgccccctaatcga

SEQ ID NO: 349889 - DNA, 30 bp, Artificial Sequence
  Synthetic oligonucleotide
ttcgtttagcattctcggtcatctaatcga

SEQ ID NO: 349890 - DNA, 30 bp, Artificial Sequence
  Synthetic oligonucleotide
tagcgtgatcactattgcttaagtaatcga

SEQ ID NO: 349891 - DNA, 30 bp, Artificial Sequence
  Synthetic oligonucleotide
tattaagggccgaaggagggtcttaatcga

SEQ ID NO: 349892 - DNA, 30 bp, Artificial Sequence
  Synthetic oligonucleotide
ctggtgaaaatactgggagcaaaacatcga

SEQ ID NO: 349893 - DNA, 30 bp, Artificial Sequence
  Synthetic oligonucleotide
gttgctgtattactttaagagattcatcga

SEQ ID NO: 349894 - DNA, 30 bp, Artificial Sequence
  Synthetic oligonucleotide
tcacacagcccgcatgtactgccagatcga

SEQ ID NO: 349895 - DNA, 30 bp, Artificial Sequence
  Synthetic oligonucleotide
gctcaatcggccgtgggggtggacgatcga

SEQ ID NO: 349896 - DNA, 29 bp, Artificial Sequence
  Synthetic oligonucleotide
aacccaaaaggaaacatcctgtcgatcga

SEQ ID NO: 349897 - DNA, 30 bp, Artificial Sequence
  Synthetic oligonucleotide
aattatggcctcgcgccaccacgggatcga

SEQ ID NO: 349898 - DNA, 30 bp, Artificial Sequence
  Synthetic oligonucleotide
gtacgctttagttcgttcccgtgggatcga

SEQ ID NO: 349899 - DNA, 30 bp, Artificial Sequence
  Synthetic oligonucleotide
gccgcgtacgtgtggctcctagcatatcga

SEQ ID NO: 349900 - DNA, 30 bp, Artificial Sequence
  Synthetic oligonucleotide
ccataagttaggcccccgttgctatatcga

SEQ ID NO: 349901 - DNA, 30 bp, Artificial Sequence
  Synthetic oligonucleotide
ctgactgtagtcagttaagatgcctatcga

SEQ ID NO: 349902 - DNA, 30 bp, Artificial Sequence
  Synthetic oligonucleotide
tacgtcagccgtctgggtatagcgtatcga

SEQ ID NO: 349903 - DNA, 30 bp, Artificial Sequence
  Synthetic oligonucleotide
tgagtggcaggaccgcttctcctgtatcga

SEQ ID NO: 349904 - DNA, 30 bp, Artificial Sequence
  Synthetic oligonucleotide
ttgtggtccaagttgggttaaccaactcga

SEQ ID NO: 349905 - DNA, 30 bp, Artificial Sequence
  Synthetic oligonucleotide
tgttctggcgggcattgagggtcaactcga

SEQ ID NO: 349906 - DNA, 30 bp, Artificial Sequence
  Synthetic oligonucleotide
cccgaggaacttgcaggttaaaagactcga

SEQ ID NO: 349907 - DNA, 30 bp, Artificial Sequence
  Synthetic oligonucleotide
gagtctcgatacacacatcgcgggactcga

SEQ ID NO: 349908 - DNA, 30 bp, Artificial Sequence
  Synthetic oligonucleotide
acgatgactgacttagtacggtctactcga

SEQ ID NO: 349909 - DNA, 30 bp, Artificial Sequence
  Synthetic oligonucleotide
aacagagtattaaaggtgcgagttactcga

SEQ ID NO: 349910 - DNA, 30 bp, Artificial Sequence
  Synthetic oligonucleotide
tctcctttttacgaatgcgataaacctcga

SEQ ID NO: 349911 - DNA, 30 bp, Artificial Sequence
  Synthetic oligonucleotide
gagattactacgaatggtgggctacctcga

SEQ ID NO: 349912 - DNA, 30 bp, Artificial Sequence
  Synthetic oligonucleotide
cttgtctaccgtatataatgaacgcctcga

SEQ ID NO: 349913 - DNA, 30 bp, Artificial Sequence
  Synthetic oligonucleotide
tcgagagacctcatgcggaggcatcctcga

SEQ ID NO: 349914 - DNA, 30 bp, Artificial Sequence
  Synthetic oligonucleotide
ggttaagtgggcgactaaccgggcgctcga

SEQ ID NO: 349915 - DNA, 31 bp, Artificial Sequence
  Synthetic oligonucleotide
ttcaattaaacggagttcggtcgcggctcga

SEQ ID NO: 349916 - DNA, 30 bp, Artificial Sequence
  Synthetic oligonucleotide
acgataagtctcgctgcgtttagggctcga

SEQ ID NO: 349917 - DNA, 30 bp, Artificial Sequence
  Synthetic oligonucleotide
ctgtggtattaggtttctttatgggctcga

SEQ ID NO: 349918 - DNA, 30 bp, Artificial Sequence
  Synthetic oligonucleotide
tgtggggatgtttaatactgtactgctcga

SEQ ID NO: 349919 - DNA, 30 bp, Artificial Sequence
  Synthetic oligonucleotide
taaaacatttagccgtggcagacctctcga

SEQ ID NO: 349920 - DNA, 30 bp, Artificial Sequence
  Synthetic oligonucleotide
taaattgtatgcgcggtcctggggtctcga

SEQ ID NO: 349921 - DNA, 30 bp, Artificial Sequence
  Synthetic oligonucleotide
gtgacgttcgcactcgtgttgtggtctcga

SEQ ID NO: 349922 - DNA, 30 bp, Artificial Sequence
  Synthetic oligonucleotide
agcgtgccaggcaagcgtcataaaagtcga

SEQ ID NO: 349923 - DNA, 30 bp, Artificial Sequence
  Synthetic oligonucleotide
tgtgtgccgttctcacatagctaaagtcga

SEQ ID NO: 349924 - DNA, 30 bp, Artificial Sequence
  Synthetic oligonucleotide
gataatttgtttagttagggcataagtcga

SEQ ID NO: 349925 - DNA, 30 bp, Artificial Sequence
  Synthetic oligonucleotide
tagggcagcgtataacgtcttgacagtcga

SEQ ID NO: 349926 - DNA, 30 bp, Artificial Sequence
  Synthetic oligonucleotide
agcatattattctcatgatgtatcagtcga

SEQ ID NO: 349927 - DNA, 30 bp, Artificial Sequence
  Synthetic oligonucleotide
accctgatggaggagagcatttcgagtcga

SEQ ID NO: 349928 - DNA, 30 bp, Artificial Sequence
  Synthetic oligonucleotide
ggaatcgatgaagcaacgtttgggagtcga

SEQ ID NO: 349929 - DNA, 30 bp, Artificial Sequence
  Synthetic oligonucleotide
ttatacagagacaggtgctgatcacgtcga

SEQ ID NO: 349930 - DNA, 30 bp, Artificial Sequence
  Synthetic oligonucleotide
gggcagcactagtttgggtcgcgccgtcga

SEQ ID NO: 349931 - DNA, 30 bp, Artificial Sequence
  Synthetic oligonucleotide
tagctacacaaattaaaggcatacggtcga

SEQ ID NO: 349932 - DNA, 30 bp, Artificial Sequence
  Synthetic oligonucleotide
atcagcaccggatatgacagtaccggtcga

SEQ ID NO: 349933 - DNA, 30 bp, Artificial Sequence
  Synthetic oligonucleotide
cacatgtacgactacagtatcatgggtcga

SEQ ID NO: 349934 - DNA, 30 bp, Artificial Sequence
  Synthetic oligonucleotide
gacttaattacgccaagtatagtgggtcga

SEQ ID NO: 349935 - DNA, 30 bp, Artificial Sequence
  Synthetic oligonucleotide
ctccatatggcggccatagggaatggtcga

SEQ ID NO: 349936 - DNA, 30 bp, Artificial Sequence
  Synthetic oligonucleotide
gatctgccactcaggtttcgccttggtcga

SEQ ID NO: 349937 - DNA, 30 bp, Artificial Sequence
  Synthetic oligonucleotide
cgcacccagccattctggaccccgtgtcga

SEQ ID NO: 349938 - DNA, 30 bp, Artificial Sequence
  Synthetic oligonucleotide
aaatcttcccgaacgactctcacttgtcga

SEQ ID NO: 349939 - DNA, 30 bp, Artificial Sequence
  Synthetic oligonucleotide
tagtgtcgagactcggcaaatacttgtcga

SEQ ID NO: 349940 - DNA, 30 bp, Artificial Sequence
  Synthetic oligonucleotide
cgatgagggtgcttatctgaaatttgtcga

SEQ ID NO: 349941 - DNA, 30 bp, Artificial Sequence
  Synthetic oligonucleotide
aagcacgcctggatttcgtatctttgtcga

SEQ ID NO: 349942 - DNA, 30 bp, Artificial Sequence
  Synthetic oligonucleotide
aaagtggcgtctggactttagtaaattcga

SEQ ID NO: 349943 - DNA, 30 bp, Artificial Sequence
  Synthetic oligonucleotide
taggaattatgtaatcgacgcataattcga

SEQ ID NO: 349944 - DNA, 30 bp, Artificial Sequence
  Synthetic oligonucleotide
cttcattgtctgttgaccagatacattcga

SEQ ID NO: 349945 - DNA, 30 bp, Artificial Sequence
  Synthetic oligonucleotide
tgtctcgctagagcatgaatctagattcga

SEQ ID NO: 349946 - DNA, 30 bp, Artificial Sequence
  Synthetic oligonucleotide
gatcagacctgtggcgcctcggggattcga

SEQ ID NO: 349947 - DNA, 30 bp, Artificial Sequence
  Synthetic oligonucleotide
ccgggttccgactggccaggctgtattcga

SEQ ID NO: 349948 - DNA, 30 bp, Artificial Sequence
  Synthetic oligonucleotide
aaagtgccaatactgagatgtaaacttcga

SEQ ID NO: 349949 - DNA, 30 bp, Artificial Sequence
  Synthetic oligonucleotide
gagggccacgtgatgtcccctcgacttcga

SEQ ID NO: 349950 - DNA, 30 bp, Artificial Sequence
  Synthetic oligonucleotide
tgaagggtcttgctgacccttaaccttcga

SEQ ID NO: 349951 - DNA, 30 bp, Artificial Sequence
  Synthetic oligonucleotide
gtgacatatagtattaaacaaagccttcga

SEQ ID NO: 349952 - DNA, 31 bp, Artificial Sequence
  Synthetic oligonucleotide
attgttggatcggctctaaccacggcttcga

SEQ ID NO: 349953 - DNA, 30 bp, Artificial Sequence
  Synthetic oligonucleotide
tcaagtggacggcggccggcattgcttcga

SEQ ID NO: 349954 - DNA, 30 bp, Artificial Sequence
  Synthetic oligonucleotide
gaccctggaaaattcacgaagggtcttcga

SEQ ID NO: 349955 - DNA, 30 bp, Artificial Sequence
  Synthetic oligonucleotide
ctaagcgaacactgtactacaaaagttcga

SEQ ID NO: 349956 - DNA, 30 bp, Artificial Sequence
  Synthetic oligonucleotide
tcacggcggaacctcccgcctttagttcga

SEQ ID NO: 349957 - DNA, 30 bp, Artificial Sequence
  Synthetic oligonucleotide
atgggtacttctatgtccctaaacgttcga

SEQ ID NO: 349958 - DNA, 30 bp, Artificial Sequence
  Synthetic oligonucleotide
taaacgctggcgagaaactttaacgttcga

SEQ ID NO: 349959 - DNA, 30 bp, Artificial Sequence
  Synthetic oligonucleotide
tacccgactagcgtcgatccaagcgttcga

SEQ ID NO: 349960 - DNA, 30 bp, Artificial Sequence
  Synthetic oligonucleotide
gattactggccagggagtaggggcgttcga

SEQ ID NO: 349961 - DNA, 30 bp, Artificial Sequence
  Synthetic oligonucleotide
actttagaagaatagggtccctgggttcga

SEQ ID NO: 349962 - DNA, 30 bp, Artificial Sequence
  Synthetic oligonucleotide
atcagtatgaagaagtgcacttcatttcga

SEQ ID NO: 349963 - DNA, 30 bp, Artificial Sequence
  Synthetic oligonucleotide
ttgttgttagtgttaacgtatgtctttcga

SEQ ID NO: 349964 - DNA, 30 bp, Artificial Sequence
  Synthetic oligonucleotide
ctcgcgggtatatttagccgttggtttcga

SEQ ID NO: 349965 - DNA, 30 bp, Artificial Sequence
  Synthetic oligonucleotide
gctaagttccccccctgcaggacttttcga

SEQ ID NO: 349966 - DNA, 30 bp, Artificial Sequence
  Synthetic oligonucleotide
tccatgacctgcgcaatgctgagttttcga

SEQ ID NO: 349967 - DNA, 30 bp, Artificial Sequence
  Synthetic oligonucleotide
gttcgctcaaggtcggatatggtttttcga

SEQ ID NO: 349968 - DNA, 30 bp, Artificial Sequence
  Synthetic oligonucleotide
ccgccgcgcgggcgggaccttcaaaaagga

SEQ ID NO: 349969 - DNA, 30 bp, Artificial Sequence
  Synthetic oligonucleotide
tgtaattgggcatgcaagacaccaaaagga

SEQ ID NO: 349970 - DNA, 30 bp, Artificial Sequence
  Synthetic oligonucleotide
cagatcccggaatagtgccccttaaaagga

SEQ ID NO: 349971 - DNA, 30 bp, Artificial Sequence
  Synthetic oligonucleotide
cagattcggaattaccaccatgagaaagga

SEQ ID NO: 349972 - DNA, 29 bp, Artificial Sequence
  Synthetic oligonucleotide
tacaaaggcgtctggctttctagaaagga

SEQ ID NO: 349973 - DNA, 30 bp, Artificial Sequence
  Synthetic oligonucleotide
cccaaccccgataggggccttaggaaagga

SEQ ID NO: 349974 - DNA, 30 bp, Artificial Sequence
  Synthetic oligonucleotide
tacgctcgaacacttcccgctgggaaagga

SEQ ID NO: 349975 - DNA, 30 bp, Artificial Sequence
  Synthetic oligonucleotide
aagatgtgattccgcagtccgtggaaagga

SEQ ID NO: 349976 - DNA, 30 bp, Artificial Sequence
  Synthetic oligonucleotide
ggattgtcaatgaggcggtatcttaaagga

SEQ ID NO: 349977 - DNA, 30 bp, Artificial Sequence
  Synthetic oligonucleotide
tagtattcaccgtagtatccagtacaagga

SEQ ID NO: 349978 - DNA, 30 bp, Artificial Sequence
  Synthetic oligonucleotide
agtcacttggtagactcaagtgtacaagga

SEQ ID NO: 349979 - DNA, 30 bp, Artificial Sequence
  Synthetic oligonucleotide
cggcctggtgtcagtggacaccgccaagga

SEQ ID NO: 349980 - DNA, 30 bp, Artificial Sequence
  Synthetic oligonucleotide
ctaaccacgatggggcacgatttccaagga

SEQ ID NO: 349981 - DNA, 30 bp, Artificial Sequence
  Synthetic oligonucleotide
tcctgaatgaacaatgtgttggagcaagga

SEQ ID NO: 349982 - DNA, 30 bp, Artificial Sequence
  Synthetic oligonucleotide
tcgttccacgccaggtcctggaggcaagga

SEQ ID NO: 349983 - DNA, 30 bp, Artificial Sequence
  Synthetic oligonucleotide
agacggcaaccccgaggtccctatcaagga

SEQ ID NO: 349984 - DNA, 30 bp, Artificial Sequence
  Synthetic oligonucleotide
tatgcaactcagtaacccgtggctcaagga

SEQ ID NO: 349985 - DNA, 30 bp, Artificial Sequence
  Synthetic oligonucleotide
aagtccgtaagcggttaccgtgttcaagga

SEQ ID NO: 349986 - DNA, 30 bp, Artificial Sequence
  Synthetic oligonucleotide
ggtcatgtaatagtttgacgaagagaagga

SEQ ID NO: 349987 - DNA, 30 bp, Artificial Sequence
  Synthetic oligonucleotide
taagtcccacaacacgtactgtatgaagga

SEQ ID NO: 349988 - DNA, 30 bp, Artificial Sequence
  Synthetic oligonucleotide
ggtcgttctactaactggatcagtgaagga

SEQ ID NO: 349989 - DNA, 30 bp, Artificial Sequence
  Synthetic oligonucleotide
tagaccttagccgttataagctcataagga

SEQ ID NO: 349990 - DNA, 30 bp, Artificial Sequence
  Synthetic oligonucleotide
atcctactatctattcatccaagctaagga

SEQ ID NO: 349991 - DNA, 30 bp, Artificial Sequence
  Synthetic oligonucleotide
gaacataatctgtgggagtatcgctaagga

SEQ ID NO: 349992 - DNA, 30 bp, Artificial Sequence
  Synthetic oligonucleotide
cgacttcggccgtggtaagcgctttaagga

SEQ ID NO: 349993 - DNA, 30 bp, Artificial Sequence
  Synthetic oligonucleotide
aaagctaagtttattcgtcggctttaagga

SEQ ID NO: 349994 - DNA, 30 bp, Artificial Sequence
  Synthetic oligonucleotide
gaatacaacagcagcgcaacggaaacagga

SEQ ID NO: 349995 - DNA, 30 bp, Artificial Sequence
  Synthetic oligonucleotide
gaaattaacggccgacctcgcgcaacagga

SEQ ID NO: 349996 - DNA, 30 bp, Artificial Sequence
  Synthetic oligonucleotide
gccggacgcacagtattgtgttacacagga

SEQ ID NO: 349997 - DNA, 30 bp, Artificial Sequence
  Synthetic oligonucleotide
accgaacacggaggacgcctggccacagga

SEQ ID NO: 349998 - DNA, 30 bp, Artificial Sequence
  Synthetic oligonucleotide
gaatacacatctttcgtggctcgcacagga

SEQ ID NO: 349999 - DNA, 30 bp, Artificial Sequence
  Synthetic oligonucleotide
agtacgcaactggctcttaaagggacagga

SEQ ID NO: 350000 - DNA, 30 bp, Artificial Sequence
  Synthetic oligonucleotide
ggggttccgatgccatcctcgaatacagga

SEQ ID NO: 350001 - DNA, 30 bp, Artificial Sequence
  Synthetic oligonucleotide
tcaaacatagcgtctggctgttgtacagga

SEQ ID NO: 350002 - DNA, 30 bp, Artificial Sequence
  Synthetic oligonucleotide
cagggtaaactaatttgcgtaagaccagga

SEQ ID NO: 350003 - DNA, 30 bp, Artificial Sequence
  Synthetic oligonucleotide
cctaaatatgcctcgggggccccgccagga

SEQ ID NO: 350004 - DNA, 30 bp, Artificial Sequence
  Synthetic oligonucleotide
tggactgttcttatattgaagagtccagga

SEQ ID NO: 350005 - DNA, 30 bp, Artificial Sequence
  Synthetic oligonucleotide
agttgatgccgatctgattggctagcagga

SEQ ID NO: 350006 - DNA, 30 bp, Artificial Sequence
  Synthetic oligonucleotide
agtttggcggagtcgatagcggtagcagga

SEQ ID NO: 350007 - DNA, 30 bp, Artificial Sequence
  Synthetic oligonucleotide
tcaagttgatatgggcccgggaaggcagga

SEQ ID NO: 350008 - DNA, 30 bp, Artificial Sequence
  Synthetic oligonucleotide
tcgagggtcacaccaaccgttggggcagga

SEQ ID NO: 350009 - DNA, 30 bp, Artificial Sequence
  Synthetic oligonucleotide
tcgcggtcatagaccgcttaccgtgcagga

SEQ ID NO: 350010 - DNA, 30 bp, Artificial Sequence
  Synthetic oligonucleotide
gtagggcatctaagaaagcatccatcagga

SEQ ID NO: 350011 - DNA, 30 bp, Artificial Sequence
  Synthetic oligonucleotide
catatagtttgctagttgaatagatcagga

SEQ ID NO: 350012 - DNA, 30 bp, Artificial Sequence
  Synthetic oligonucleotide
ttcggtcaggaacaattaccctcctcagga

SEQ ID NO: 350013 - DNA, 30 bp, Artificial Sequence
  Synthetic oligonucleotide
ggatatacccagtacttgtctgcgtcagga

SEQ ID NO: 350014 - DNA, 30 bp, Artificial Sequence
  Synthetic oligonucleotide
ctccgcgcaaattgttctcagcggtcagga

SEQ ID NO: 350015 - DNA, 30 bp, Artificial Sequence
  Synthetic oligonucleotide
accattgaggccggtgtttgagggtcagga

SEQ ID NO: 350016 - DNA, 30 bp, Artificial Sequence
  Synthetic oligonucleotide
ctgaatgacatgggtaccctgtcttcagga

SEQ ID NO: 350017 - DNA, 30 bp, Artificial Sequence
  Synthetic oligonucleotide
tgtctggaggagaaggtcctcctaagagga

SEQ ID NO: 350018 - DNA, 30 bp, Artificial Sequence
  Synthetic oligonucleotide
tcccacgttacagatacccggtatagagga

SEQ ID NO: 350019 - DNA, 30 bp, Artificial Sequence
  Synthetic oligonucleotide
tctcgaatcatcaatatagatggacgagga

SEQ ID NO: 350020 - DNA, 30 bp, Artificial Sequence
  Synthetic oligonucleotide
gaaagcgatgcgacattcttcacccgagga

SEQ ID NO: 350021 - DNA, 30 bp, Artificial Sequence
  Synthetic oligonucleotide
cttaaatagatgctccaatgaccccgagga

SEQ ID NO: 350022 - DNA, 30 bp, Artificial Sequence
  Synthetic oligonucleotide
ttctatcttcggtacgcctaagtccgagga

SEQ ID NO: 350023 - DNA, 30 bp, Artificial Sequence
  Synthetic oligonucleotide
agcgcagatcctgtctcgtcagtccgagga

SEQ ID NO: 350024 - DNA, 30 bp, Artificial Sequence
  Synthetic oligonucleotide
gcgtatgagttctgatgtagatatcgagga

SEQ ID NO: 350025 - DNA, 30 bp, Artificial Sequence
  Synthetic oligonucleotide
tcccagttgttgtgtatcgcctctcgagga

SEQ ID NO: 350026 - DNA, 30 bp, Artificial Sequence
  Synthetic oligonucleotide
agtcatggatgacccgcggcggaaggagga

SEQ ID NO: 350027 - DNA, 30 bp, Artificial Sequence
  Synthetic oligonucleotide
gccctctagaaagtttagggttgcggagga

SEQ ID NO: 350028 - DNA, 30 bp, Artificial Sequence
  Synthetic oligonucleotide
ggtagactgcataggcattgattcggagga

SEQ ID NO: 350029 - DNA, 30 bp, Artificial Sequence
  Synthetic oligonucleotide
tcgctcgcttacacccttaatgggggagga

SEQ ID NO: 350030 - DNA, 30 bp, Artificial Sequence
  Synthetic oligonucleotide
gacgttaaagatgcagtttgggaatgagga

SEQ ID NO: 350031 - DNA, 30 bp, Artificial Sequence
  Synthetic oligonucleotide
gcagaccgactattcggtcatgcatgagga

SEQ ID NO: 350032 - DNA, 30 bp, Artificial Sequence
  Synthetic oligonucleotide
gtaacggctattccttagcaacgctgagga

SEQ ID NO: 350033 - DNA, 30 bp, Artificial Sequence
  Synthetic oligonucleotide
gcggccccatccccgaggacttggtgagga

SEQ ID NO: 350034 - DNA, 30 bp, Artificial Sequence
  Synthetic oligonucleotide
taaaggaattcgaacatatgcctttgagga

SEQ ID NO: 350035 - DNA, 30 bp, Artificial Sequence
  Synthetic oligonucleotide
ttaaatcatatccttgcccaaggaatagga

SEQ ID NO: 350036 - DNA, 30 bp, Artificial Sequence
  Synthetic oligonucleotide
ataaggggtttgcttgtaactggaatagga

SEQ ID NO: 350037 - DNA, 30 bp, Artificial Sequence
  Synthetic oligonucleotide
aaactcggtagaatcagcacgataatagga

SEQ ID NO: 350038 - DNA, 30 bp, Artificial Sequence
  Synthetic oligonucleotide
tgtgaatacagtgcgaccatgaacatagga

SEQ ID NO: 350039 - DNA, 30 bp, Artificial Sequence
  Synthetic oligonucleotide
tcttagcgttagaagttctttcgcatagga

SEQ ID NO: 350040 - DNA, 30 bp, Artificial Sequence
  Synthetic oligonucleotide
cttcagtttcaggtgcataatatgatagga

SEQ ID NO: 350041 - DNA, 30 bp, Artificial Sequence
  Synthetic oligonucleotide
aattacattgagtcaagcccgattatagga

SEQ ID NO: 350042 - DNA, 30 bp, Artificial Sequence
  Synthetic oligonucleotide
ttagtaatgtatgagtcatttaagctagga

SEQ ID NO: 350043 - DNA, 30 bp, Artificial Sequence
  Synthetic oligonucleotide
tcgacagagatcctggccagatagctagga

SEQ ID NO: 350044 - DNA, 30 bp, Artificial Sequence
  Synthetic oligonucleotide
gccccggctacccaatagcgatagctagga

SEQ ID NO: 350045 - DNA, 30 bp, Artificial Sequence
  Synthetic oligonucleotide
aatgcgttcgattctcacgagacgctagga

SEQ ID NO: 350046 - DNA, 30 bp, Artificial Sequence
  Synthetic oligonucleotide
atcatttagatgaataatacgtcagtagga

SEQ ID NO: 350047 - DNA, 30 bp, Artificial Sequence
  Synthetic oligonucleotide
cagccgactgggcgcgccacgcaggtagga

SEQ ID NO: 350048 - DNA, 30 bp, Artificial Sequence
  Synthetic oligonucleotide
gcctattgaggtacgacaagctaggtagga

SEQ ID NO: 350049 - DNA, 30 bp, Artificial Sequence
  Synthetic oligonucleotide
tgatatgtaggagtttcttattcggtagga

SEQ ID NO: 350050 - DNA, 30 bp, Artificial Sequence
  Synthetic oligonucleotide
gttatagggtaggatgtgagagtggtagga

SEQ ID NO: 350051 - DNA, 30 bp, Artificial Sequence
  Synthetic oligonucleotide
gggcatctacatgggtagtgagatgtagga

SEQ ID NO: 350052 - DNA, 30 bp, Artificial Sequence
  Synthetic oligonucleotide
aataccccttggggtcacaactatgtagga

SEQ ID NO: 350053 - DNA, 30 bp, Artificial Sequence
  Synthetic oligonucleotide
gagccaccggggttaccgcgcagtgtagga

SEQ ID NO: 350054 - DNA, 29 bp, Artificial Sequence
  Synthetic oligonucleotide
ggttgagaataagtatcctcaaattagga

SEQ ID NO: 350055 - DNA, 30 bp, Artificial Sequence
  Synthetic oligonucleotide
tggttttagtggggcccgttgaaattagga

SEQ ID NO: 350056 - DNA, 30 bp, Artificial Sequence
  Synthetic oligonucleotide
agaattcaatccgatggagtaccattagga

SEQ ID NO: 350057 - DNA, 30 bp, Artificial Sequence
  Synthetic oligonucleotide
cccattatcacaatttagtctgtattagga

SEQ ID NO: 350058 - DNA, 30 bp, Artificial Sequence
  Synthetic oligonucleotide
tcctttaggatcacaatatcagagttagga

SEQ ID NO: 350059 - DNA, 30 bp, Artificial Sequence
  Synthetic oligonucleotide
aaaaactctgtctgcttgataagtttagga

SEQ ID NO: 350060 - DNA, 30 bp, Artificial Sequence
  Synthetic oligonucleotide
aggaatagtgcacgtcatatttcaaacgga

SEQ ID NO: 350061 - DNA, 30 bp, Artificial Sequence
  Synthetic oligonucleotide
gccacggagtatgtatgctcttgaaacgga

SEQ ID NO: 350062 - DNA, 30 bp, Artificial Sequence
  Synthetic oligonucleotide
caataggccgaggactaatttcacaacgga

SEQ ID NO: 350063 - DNA, 30 bp, Artificial Sequence
  Synthetic oligonucleotide
attggtaatccctttggaccatctaacgga

SEQ ID NO: 350064 - DNA, 30 bp, Artificial Sequence
  Synthetic oligonucleotide
cccacgctaaatccttgtatgtgtaacgga

SEQ ID NO: 350065 - DNA, 30 bp, Artificial Sequence
  Synthetic oligonucleotide
acccattcatttcaaattttatagcacgga

SEQ ID NO: 350066 - DNA, 30 bp, Artificial Sequence
  Synthetic oligonucleotide
aatactctatatagtgcacatacgcacgga

SEQ ID NO: 350067 - DNA, 30 bp, Artificial Sequence
  Synthetic oligonucleotide
cgcgcacgctattatgctaattcgcacgga

SEQ ID NO: 350068 - DNA, 30 bp, Artificial Sequence
  Synthetic oligonucleotide
cactgccaagaccgtggataactgcacgga

SEQ ID NO: 350069 - DNA, 30 bp, Artificial Sequence
  Synthetic oligonucleotide
tctaagttgtactttagtctgtgtcacgga

SEQ ID NO: 350070 - DNA, 30 bp, Artificial Sequence
  Synthetic oligonucleotide
tagagtcagcgctatttccccattcacgga

SEQ ID NO: 350071 - DNA, 30 bp, Artificial Sequence
  Synthetic oligonucleotide
gcgcgccgacacctcaggcactttcacgga

SEQ ID NO: 350072 - DNA, 30 bp, Artificial Sequence
  Synthetic oligonucleotide
attggtgtcaaaagttcagctggagacgga

SEQ ID NO: 350073 - DNA, 30 bp, Artificial Sequence
  Synthetic oligonucleotide
ccccttagcttcgcgatttaaaccgacgga

SEQ ID NO: 350074 - DNA, 30 bp, Artificial Sequence
  Synthetic oligonucleotide
atttaacacgcggttatcaccgccgacgga

SEQ ID NO: 350075 - DNA, 30 bp, Artificial Sequence
  Synthetic oligonucleotide
gttctttgttcgcagactggagaggacgga

SEQ ID NO: 350076 - DNA, 30 bp, Artificial Sequence
  Synthetic oligonucleotide
aattcatgcaactgtgggcacggggacgga

SEQ ID NO: 350077 - DNA, 30 bp, Artificial Sequence
  Synthetic oligonucleotide
acaggtgttcgttcgcggcagagatacgga

SEQ ID NO: 350078 - DNA, 30 bp, Artificial Sequence
  Synthetic oligonucleotide
aaacggagcgatgtttcttcgctctacgga

SEQ ID NO: 350079 - DNA, 30 bp, Artificial Sequence
  Synthetic oligonucleotide
tcgtactaactagtcgctcaagggtacgga

SEQ ID NO: 350080 - DNA, 30 bp, Artificial Sequence
  Synthetic oligonucleotide
atcggatatacatattagcgtaattacgga

SEQ ID NO: 350081 - DNA, 30 bp, Artificial Sequence
  Synthetic oligonucleotide
aaggcacagttagatctttttatcaccgga

SEQ ID NO: 350082 - DNA, 30 bp, Artificial Sequence
  Synthetic oligonucleotide
cccgctttgccaaacgcactccttaccgga

SEQ ID NO: 350083 - DNA, 30 bp, Artificial Sequence
  Synthetic oligonucleotide
tagagtggtaacaacatatgaaaccccgga

SEQ ID NO: 350084 - DNA, 30 bp, Artificial Sequence
  Synthetic oligonucleotide
aacatcgtgtccattgatcatccccccgga

SEQ ID NO: 350085 - DNA, 30 bp, Artificial Sequence
  Synthetic oligonucleotide
aggtaggcaattccctaatctgtccccgga

SEQ ID NO: 350086 - DNA, 30 bp, Artificial Sequence
  Synthetic oligonucleotide
cgcgatagatggtctactattttccccgga

SEQ ID NO: 350087 - DNA, 30 bp, Artificial Sequence
  Synthetic oligonucleotide
agtgatggaatttttaatctccatcccgga

SEQ ID NO: 350088 - DNA, 30 bp, Artificial Sequence
  Synthetic oligonucleotide
gtgcggccgccgatatgtgccactcccgga

SEQ ID NO: 350089 - DNA, 30 bp, Artificial Sequence
  Synthetic oligonucleotide
ataacgaagccgctagagttttgtcccgga

SEQ ID NO: 350090 - DNA, 30 bp, Artificial Sequence
  Synthetic oligonucleotide
cagactatcctcgcggagtctcttcccgga

SEQ ID NO: 350091 - DNA, 30 bp, Artificial Sequence
  Synthetic oligonucleotide
tttgctaacgagttttgacatatagccgga

SEQ ID NO: 350092 - DNA, 30 bp, Artificial Sequence
  Synthetic oligonucleotide
attattgggggttaggtccagggcgccgga

SEQ ID NO: 350093 - DNA, 30 bp, Artificial Sequence
  Synthetic oligonucleotide
atggattgtgaatctagcgtctaggccgga

SEQ ID NO: 350094 - DNA, 30 bp, Artificial Sequence
  Synthetic oligonucleotide
ccgcctaatgcaggcaccccaagggccgga

SEQ ID NO: 350095 - DNA, 30 bp, Artificial Sequence
  Synthetic oligonucleotide
gtgttcaatactaaagtgtgtatggccgga

SEQ ID NO: 350096 - DNA, 30 bp, Artificial Sequence
  Synthetic oligonucleotide
gaggggcaatatatcatgcacgtggccgga

SEQ ID NO: 350097 - DNA, 30 bp, Artificial Sequence
  Synthetic oligonucleotide
atcagcggaggctttttcctaccgtccgga

SEQ ID NO: 350098 - DNA, 30 bp, Artificial Sequence
  Synthetic oligonucleotide
caaaggtgatggcttgcggttttgtccgga

SEQ ID NO: 350099 - DNA, 30 bp, Artificial Sequence
  Synthetic oligonucleotide
gattgtgcgcggaagagcgggccttccgga

SEQ ID NO: 350100 - DNA, 30 bp, Artificial Sequence
  Synthetic oligonucleotide
gcttcacgagaacatgaattgttttccgga

SEQ ID NO: 350101 - DNA, 30 bp, Artificial Sequence
  Synthetic oligonucleotide
gggaagctcgctcactggcttgcgagcgga

SEQ ID NO: 350102 - DNA, 30 bp, Artificial Sequence
  Synthetic oligonucleotide
ttgacctgggcagatcgacagcatagcgga

SEQ ID NO: 350103 - DNA, 30 bp, Artificial Sequence
  Synthetic oligonucleotide
tcggatttatgcttgtcaaggactagcgga

SEQ ID NO: 350104 - DNA, 30 bp, Artificial Sequence
  Synthetic oligonucleotide
gtaagtgcggaacgccgcgctccacgcgga

SEQ ID NO: 350105 - DNA, 30 bp, Artificial Sequence
  Synthetic oligonucleotide
cgcattctacacggttataatccccgcgga

SEQ ID NO: 350106 - DNA, 30 bp, Artificial Sequence
  Synthetic oligonucleotide
accgccaacatagaggactggacgcgcgga

SEQ ID NO: 350107 - DNA, 30 bp, Artificial Sequence
  Synthetic oligonucleotide
agctagttaaggcgcgtgcaaaatcgcgga

SEQ ID NO: 350108 - DNA, 30 bp, Artificial Sequence
  Synthetic oligonucleotide
agagctcccgttgtgatcttgattcgcgga

SEQ ID NO: 350109 - DNA, 30 bp, Artificial Sequence
  Synthetic oligonucleotide
agacggaaacgggggtctaagtttcgcgga

SEQ ID NO: 350110 - DNA, 30 bp, Artificial Sequence
  Synthetic oligonucleotide
ggcgtctggcattcagccaaatgaggcgga

SEQ ID NO: 350111 - DNA, 30 bp, Artificial Sequence
  Synthetic oligonucleotide
agcaaagctaaacctcagttacccggcgga

SEQ ID NO: 350112 - DNA, 30 bp, Artificial Sequence
  Synthetic oligonucleotide
taatctaacgaataggttcatctcggcgga

SEQ ID NO: 350113 - DNA, 30 bp, Artificial Sequence
  Synthetic oligonucleotide
gtggaccgcgacacggacgcacaatgcgga

SEQ ID NO: 350114 - DNA, 30 bp, Artificial Sequence
  Synthetic oligonucleotide
gcggctgcctgagggattcaccaatgcgga

SEQ ID NO: 350115 - DNA, 30 bp, Artificial Sequence
  Synthetic oligonucleotide
gtccttaggaaacccccttgcccatgcgga

SEQ ID NO: 350116 - DNA, 30 bp, Artificial Sequence
  Synthetic oligonucleotide
gtagggcccggcgcgtggggcgggtgcgga

SEQ ID NO: 350117 - DNA, 30 bp, Artificial Sequence
  Synthetic oligonucleotide
cccggtaccagggaggagcccgattgcgga

SEQ ID NO: 350118 - DNA, 30 bp, Artificial Sequence
  Synthetic oligonucleotide
agatggcaaaacttttagtgaccttgcgga

SEQ ID NO: 350119 - DNA, 30 bp, Artificial Sequence
  Synthetic oligonucleotide
cacgtaacgcgcttcggatatcgttgcgga

SEQ ID NO: 350120 - DNA, 30 bp, Artificial Sequence
  Synthetic oligonucleotide
tcaatacaagggcgttttcatggttgcgga

SEQ ID NO: 350121 - DNA, 30 bp, Artificial Sequence
  Synthetic oligonucleotide
aacatggctcctcgctaacacatttgcgga

SEQ ID NO: 350122 - DNA, 30 bp, Artificial Sequence
  Synthetic oligonucleotide
gatcaccaaagcttgtcagttcggatcgga

SEQ ID NO: 350123 - DNA, 30 bp, Artificial Sequence
  Synthetic oligonucleotide
atagggacgtgtgcaaaccgccctatcgga

SEQ ID NO: 350124 - DNA, 30 bp, Artificial Sequence
  Synthetic oligonucleotide
gcaatctggatgacttagggctgactcgga

SEQ ID NO: 350125 - DNA, 30 bp, Artificial Sequence
  Synthetic oligonucleotide
taatcaattattgacgcctcccgcctcgga

SEQ ID NO: 350126 - DNA, 30 bp, Artificial Sequence
  Synthetic oligonucleotide
ttggtctgccatgaggacatgcgcctcgga

SEQ ID NO: 350127 - DNA, 30 bp, Artificial Sequence
  Synthetic oligonucleotide
tgggtaccactgatttaggcctagctcgga

SEQ ID NO: 350128 - DNA, 30 bp, Artificial Sequence
  Synthetic oligonucleotide
atcttggtagtagatcctaaggatctcgga

SEQ ID NO: 350129 - DNA, 30 bp, Artificial Sequence
  Synthetic oligonucleotide
atacaatgttttgcctttacagcggtcgga

SEQ ID NO: 350130 - DNA, 30 bp, Artificial Sequence
  Synthetic oligonucleotide
ccagtgtaaagatcagtatagtgggtcgga

SEQ ID NO: 350131 - DNA, 30 bp, Artificial Sequence
  Synthetic oligonucleotide
tctaattgtccgaatgacggggatgtcgga

SEQ ID NO: 350132 - DNA, 30 bp, Artificial Sequence
  Synthetic oligonucleotide
ggactaccggcagtggggctgtctgtcgga

SEQ ID NO: 350133 - DNA, 30 bp, Artificial Sequence
  Synthetic oligonucleotide
agtgctgccctaggttcgaaactgttcgga

SEQ ID NO: 350134 - DNA, 30 bp, Artificial Sequence
  Synthetic oligonucleotide
ggatctggccatgacgattgtgatttcgga

SEQ ID NO: 350135 - DNA, 30 bp, Artificial Sequence
  Synthetic oligonucleotide
gtactggggaaagttctaagaagtttcgga

SEQ ID NO: 350136 - DNA, 30 bp, Artificial Sequence
  Synthetic oligonucleotide
gggatagccatacgcggtaactcaaaggga

SEQ ID NO: 350137 - DNA, 30 bp, Artificial Sequence
  Synthetic oligonucleotide
attgatcctgtatccgaacgctgaaaggga

SEQ ID NO: 350138 - DNA, 30 bp, Artificial Sequence
  Synthetic oligonucleotide
tgggtttttgtaagtcgtgagatgaaggga

SEQ ID NO: 350139 - DNA, 30 bp, Artificial Sequence
  Synthetic oligonucleotide
tgattaatgcggcctccagaaaataaggga

SEQ ID NO: 350140 - DNA, 30 bp, Artificial Sequence
  Synthetic oligonucleotide
ataaactatgatttgtcaagcagtaaggga

SEQ ID NO: 350141 - DNA, 30 bp, Artificial Sequence
  Synthetic oligonucleotide
cggtcacgccattcggcagctgttaaggga

SEQ ID NO: 350142 - DNA, 30 bp, Artificial Sequence
  Synthetic oligonucleotide
ttgccatctcctgactttctaccccaggga

SEQ ID NO: 350143 - DNA, 30 bp, Artificial Sequence
  Synthetic oligonucleotide
taatggaagaggcccgttataggccaggga

SEQ ID NO: 350144 - DNA, 30 bp, Artificial Sequence
  Synthetic oligonucleotide
cacatcggtcttcttacgagatggcaggga

SEQ ID NO: 350145 - DNA, 30 bp, Artificial Sequence
  Synthetic oligonucleotide
tccgagatggccgcgccctattatcaggga

SEQ ID NO: 350146 - DNA, 30 bp, Artificial Sequence
  Synthetic oligonucleotide
agtccaggtcgatgtagagcacctcaggga

SEQ ID NO: 350147 - DNA, 30 bp, Artificial Sequence
  Synthetic oligonucleotide
tgcagcgctacatttacagtacgtcaggga

SEQ ID NO: 350148 - DNA, 30 bp, Artificial Sequence
  Synthetic oligonucleotide
acgtagaccttcgtaggaatcgttcaggga

SEQ ID NO: 350149 - DNA, 30 bp, Artificial Sequence
  Synthetic oligonucleotide
aataatatgagacacgtagcggcggaggga

SEQ ID NO: 350150 - DNA, 30 bp, Artificial Sequence
  Synthetic oligonucleotide
tcccgcattgtattgtttttgcgggaggga

SEQ ID NO: 350151 - DNA, 30 bp, Artificial Sequence
  Synthetic oligonucleotide
tcgacccgccggggtggcggcactgaggga

SEQ ID NO: 350152 - DNA, 30 bp, Artificial Sequence
  Synthetic oligonucleotide
tgcgagtatcagccaaaggggatctaggga

SEQ ID NO: 350153 - DNA, 30 bp, Artificial Sequence
  Synthetic oligonucleotide
gtcgttccagctactagttggaaaacggga

SEQ ID NO: 350154 - DNA, 30 bp, Artificial Sequence
  Synthetic oligonucleotide
tttggtagtagtctagactcgagcacggga

SEQ ID NO: 350155 - DNA, 30 bp, Artificial Sequence
  Synthetic oligonucleotide
aacagaaagaatccacgtggtagcacggga

SEQ ID NO: 350156 - DNA, 30 bp, Artificial Sequence
  Synthetic oligonucleotide
attcagaaataactgatcacgttcacggga

SEQ ID NO: 350157 - DNA, 30 bp, Artificial Sequence
  Synthetic oligonucleotide
aaatctagcaataagatttgggagacggga

SEQ ID NO: 350158 - DNA, 30 bp, Artificial Sequence
  Synthetic oligonucleotide
gcttgaccatataagctgggatagacggga

SEQ ID NO: 350159 - DNA, 30 bp, Artificial Sequence
  Synthetic oligonucleotide
cgggtggatgcggagaatccattgacggga

SEQ ID NO: 350160 - DNA, 30 bp, Artificial Sequence
  Synthetic oligonucleotide
gcattcgctgggggcagggccgatacggga

SEQ ID NO: 350161 - DNA, 30 bp, Artificial Sequence
  Synthetic oligonucleotide
cagtccggcgtccttggtgtacctacggga

SEQ ID NO: 350162 - DNA, 30 bp, Artificial Sequence
  Synthetic oligonucleotide
aaagaagcgttcaagaatcgttctacggga

SEQ ID NO: 350163 - DNA, 30 bp, Artificial Sequence
  Synthetic oligonucleotide
aactaaccatcaagggttgttcgtacggga

SEQ ID NO: 350164 - DNA, 30 bp, Artificial Sequence
  Synthetic oligonucleotide
ttgacatcctttttcatccattacccggga

SEQ ID NO: 350165 - DNA, 30 bp, Artificial Sequence
  Synthetic oligonucleotide
ttacatggtggactcctttacggcccggga

SEQ ID NO: 350166 - DNA, 30 bp, Artificial Sequence
  Synthetic oligonucleotide
acatcgcggaaccttacgtttatcccggga

SEQ ID NO: 350167 - DNA, 30 bp, Artificial Sequence
  Synthetic oligonucleotide
cgtgtaagcttgcaggtatcaccgccggga

SEQ ID NO: 350168 - DNA, 30 bp, Artificial Sequence
  Synthetic oligonucleotide
aggcgatacttcatcacttttttgccggga

SEQ ID NO: 350169 - DNA, 30 bp, Artificial Sequence
  Synthetic oligonucleotide
ataggattggaccgggccgaacatccggga

SEQ ID NO: 350170 - DNA, 30 bp, Artificial Sequence
  Synthetic oligonucleotide
ttgcgattagatcactaattaagtccggga

SEQ ID NO: 350171 - DNA, 30 bp, Artificial Sequence
  Synthetic oligonucleotide
ggctggttaatagcataggaaggtccggga

SEQ ID NO: 350172 - DNA, 30 bp, Artificial Sequence
  Synthetic oligonucleotide
gtcaatcgttaggccaggataggtccggga

SEQ ID NO: 350173 - DNA, 30 bp, Artificial Sequence
  Synthetic oligonucleotide
cgttctcactaggcgcgcaagcttccggga

SEQ ID NO: 350174 - DNA, 30 bp, Artificial Sequence
  Synthetic oligonucleotide
ccagctggaagctctcgaacctttccggga

SEQ ID NO: 350175 - DNA, 30 bp, Artificial Sequence
  Synthetic oligonucleotide
gggggggggcgtgggacttgttgcgcggga

SEQ ID NO: 350176 - DNA, 30 bp, Artificial Sequence
  Synthetic oligonucleotide
attctgcgtgtacgctatcgtatcgcggga

SEQ ID NO: 350177 - DNA, 30 bp, Artificial Sequence
  Synthetic oligonucleotide
tataactgggatgaatagacaagggcggga

SEQ ID NO: 350178 - DNA, 30 bp, Artificial Sequence
  Synthetic oligonucleotide
ttcgaattagacgttgaggccactgcggga

SEQ ID NO: 350179 - DNA, 30 bp, Artificial Sequence
  Synthetic oligonucleotide
gaaacaagtgagttgccaccatcatcggga

SEQ ID NO: 350180 - DNA, 30 bp, Artificial Sequence
  Synthetic oligonucleotide
catccaagaccgtcttaagcatgatcggga

SEQ ID NO: 350181 - DNA, 30 bp, Artificial Sequence
  Synthetic oligonucleotide
tgtaaactatccatacacggcctctcggga

SEQ ID NO: 350182 - DNA, 30 bp, Artificial Sequence
  Synthetic oligonucleotide
tttggggatcatgataaggattcgtcggga

SEQ ID NO: 350183 - DNA, 30 bp, Artificial Sequence
  Synthetic oligonucleotide
tggttaaagctctcacgttagctttcggga

SEQ ID NO: 350184 - DNA, 30 bp, Artificial Sequence
  Synthetic oligonucleotide
gcctgccacgcgccgctagttttttcggga

SEQ ID NO: 350185 - DNA, 30 bp, Artificial Sequence
  Synthetic oligonucleotide
ttattccaattttactatcgggcaagggga

SEQ ID NO: 350186 - DNA, 30 bp, Artificial Sequence
  Synthetic oligonucleotide
gcaatcagtcatctctaagaacgaagggga

SEQ ID NO: 350187 - DNA, 30 bp, Artificial Sequence
  Synthetic oligonucleotide
gtacccagtgcgttgagacgagtcagggga

SEQ ID NO: 350188 - DNA, 30 bp, Artificial Sequence
  Synthetic oligonucleotide
tgtaaggatgcgaccagtctacgtagggga

SEQ ID NO: 350189 - DNA, 30 bp, Artificial Sequence
  Synthetic oligonucleotide
ggtggctcgggcttacgaggtcgtagggga

SEQ ID NO: 350190 - DNA, 30 bp, Artificial Sequence
  Synthetic oligonucleotide
tagaatctggaaccacccgctatacgggga

SEQ ID NO: 350191 - DNA, 30 bp, Artificial Sequence
  Synthetic oligonucleotide
gacgattgccttagcccgatcagccgggga

SEQ ID NO: 350192 - DNA, 30 bp, Artificial Sequence
  Synthetic oligonucleotide
ttgcggggttaagcctgaaatttccgggga

SEQ ID NO: 350193 - DNA, 30 bp, Artificial Sequence
  Synthetic oligonucleotide
gatcaccactggaacggcttccaaggggga

SEQ ID NO: 350194 - DNA, 30 bp, Artificial Sequence
  Synthetic oligonucleotide
tattagggcaaattaatggtttcgggggga

SEQ ID NO: 350195 - DNA, 40 bp, Artificial Sequence
  Synthetic oligonucleotide
aagataatatattcatggtatggtcggggatcggggggga

SEQ ID NO: 350196 - DNA, 30 bp, Artificial Sequence
  Synthetic oligonucleotide
tggctttcagctccgccccagcatggggga

SEQ ID NO: 350197 - DNA, 30 bp, Artificial Sequence
  Synthetic oligonucleotide
aaagtggcaacattccgcagcgttggggga

SEQ ID NO: 350198 - DNA, 30 bp, Artificial Sequence
  Synthetic oligonucleotide
ttttgattaaaaccgctgtctctatgggga

SEQ ID NO: 350199 - DNA, 30 bp, Artificial Sequence
  Synthetic oligonucleotide
tgggtattgtcccgactgggatgctgggga

SEQ ID NO: 350200 - DNA, 30 bp, Artificial Sequence
  Synthetic oligonucleotide
ggtcactgttataactgtggtctctgggga

SEQ ID NO: 350201 - DNA, 30 bp, Artificial Sequence
  Synthetic oligonucleotide
tatctatcacgtcagatatgtaagtgggga

SEQ ID NO: 350202 - DNA, 30 bp, Artificial Sequence
  Synthetic oligonucleotide
atctgtgaacggtcctgctctacgtgggga

SEQ ID NO: 350203 - DNA, 30 bp, Artificial Sequence
  Synthetic oligonucleotide
ccaaactagtagtaactattgacttgggga

SEQ ID NO: 350204 - DNA, 30 bp, Artificial Sequence
  Synthetic oligonucleotide
aagactttattggagctataagtttgggga

SEQ ID NO: 350205 - DNA, 30 bp, Artificial Sequence
  Synthetic oligonucleotide
ataatagatcgattatcttcctcaatggga

SEQ ID NO: 350206 - DNA, 30 bp, Artificial Sequence
  Synthetic oligonucleotide
tcacagaataccctgcatctctccatggga

SEQ ID NO: 350207 - DNA, 30 bp, Artificial Sequence
  Synthetic oligonucleotide
atactggtgcacgctcgtaattgcatggga

SEQ ID NO: 350208 - DNA, 30 bp, Artificial Sequence
  Synthetic oligonucleotide
gtgtcactcacagatagatatttcatggga

SEQ ID NO: 350209 - DNA, 30 bp, Artificial Sequence
  Synthetic oligonucleotide
gtttaggacagtatatggaggacgatggga

SEQ ID NO: 350210 - DNA, 30 bp, Artificial Sequence
  Synthetic oligonucleotide
attcgtagtcgctagaagcggatgatggga

SEQ ID NO: 350211 - DNA, 30 bp, Artificial Sequence
  Synthetic oligonucleotide
ccggtggatacggctagtgcggtgatggga

SEQ ID NO: 350212 - DNA, 30 bp, Artificial Sequence
  Synthetic oligonucleotide
tacgttcgctgaggtataactagtatggga

SEQ ID NO: 350213 - DNA, 30 bp, Artificial Sequence
  Synthetic oligonucleotide
ggacgttaaaacaaatttagaaaactggga

SEQ ID NO: 350214 - DNA, 30 bp, Artificial Sequence
  Synthetic oligonucleotide
aagttttcattggttgggcccctcctggga

SEQ ID NO: 350215 - DNA, 30 bp, Artificial Sequence
  Synthetic oligonucleotide
attagcctgtcataggctaaatggctggga

SEQ ID NO: 350216 - DNA, 30 bp, Artificial Sequence
  Synthetic oligonucleotide
ggaaatttgattcgcgtcggctggctggga

SEQ ID NO: 350217 - DNA, 30 bp, Artificial Sequence
  Synthetic oligonucleotide
cagttggtgttttagcgagacctgctggga

SEQ ID NO: 350218 - DNA, 30 bp, Artificial Sequence
  Synthetic oligonucleotide
acggcggggccggacctcccagccgtggga

SEQ ID NO: 350219 - DNA, 30 bp, Artificial Sequence
  Synthetic oligonucleotide
tgtcattcactgggcatttttactgtggga

SEQ ID NO: 350220 - DNA, 30 bp, Artificial Sequence
  Synthetic oligonucleotide
attataggccacgtctgtcaagcattggga

SEQ ID NO: 350221 - DNA, 31 bp, Artificial Sequence
  Synthetic oligonucleotide
gtgctttagatggatgctgggggcattggga

SEQ ID NO: 350222 - DNA, 30 bp, Artificial Sequence
  Synthetic oligonucleotide
tgggtctataactagaggctactgttggga

SEQ ID NO: 350223 - DNA, 30 bp, Artificial Sequence
  Synthetic oligonucleotide
tggagattgcccggagcaatcttgttggga

SEQ ID NO: 350224 - DNA, 30 bp, Artificial Sequence
  Synthetic oligonucleotide
tgccgtggtacgatagcaccatatttggga

SEQ ID NO: 350225 - DNA, 30 bp, Artificial Sequence
  Synthetic oligonucleotide
tcaggaagtggagtaacgggatatttggga

SEQ ID NO: 350226 - DNA, 30 bp, Artificial Sequence
  Synthetic oligonucleotide
ggtctgagggcaccgccacggattttggga

SEQ ID NO: 350227 - DNA, 30 bp, Artificial Sequence
  Synthetic oligonucleotide
ttagtttgatcaacgttcttccttttggga

SEQ ID NO: 350228 - DNA, 30 bp, Artificial Sequence
  Synthetic oligonucleotide
tcctctagttccacgcgaaaggttttggga

SEQ ID NO: 350229 - DNA, 30 bp, Artificial Sequence
  Synthetic oligonucleotide
tgattctggtgacaactacctcgcaatgga

SEQ ID NO: 350230 - DNA, 30 bp, Artificial Sequence
  Synthetic oligonucleotide
tatgataggggtcatcaaagtcgcaatgga

SEQ ID NO: 350231 - DNA, 30 bp, Artificial Sequence
  Synthetic oligonucleotide
atttgacctcggtctcgttcaggcaatgga

SEQ ID NO: 350232 - DNA, 30 bp, Artificial Sequence
  Synthetic oligonucleotide
ttccgctggtcacaggtttcattcaatgga

SEQ ID NO: 350233 - DNA, 30 bp, Artificial Sequence
  Synthetic oligonucleotide
gaagcacgatttggattagacttcaatgga

SEQ ID NO: 350234 - DNA, 30 bp, Artificial Sequence
  Synthetic oligonucleotide
tacgtatatcttatcaagactgagaatgga

SEQ ID NO: 350235 - DNA, 30 bp, Artificial Sequence
  Synthetic oligonucleotide
gcgacctgtcgcggcaacgttcggaatgga

SEQ ID NO: 350236 - DNA, 30 bp, Artificial Sequence
  Synthetic oligonucleotide
cacctcatgtatgatcttacggataatgga

SEQ ID NO: 350237 - DNA, 30 bp, Artificial Sequence
  Synthetic oligonucleotide
caaagtaatgagctcgtgttaggtaatgga

SEQ ID NO: 350238 - DNA, 30 bp, Artificial Sequence
  Synthetic oligonucleotide
cgcacgcatgccagggcaaagcaacatgga

SEQ ID NO: 350239 - DNA, 30 bp, Artificial Sequence
  Synthetic oligonucleotide
ccacaaaaacctcgggggttagaacatgga

SEQ ID NO: 350240 - DNA, 30 bp, Artificial Sequence
  Synthetic oligonucleotide
taatcccaattcgataccaacagacatgga

SEQ ID NO: 350241 - DNA, 30 bp, Artificial Sequence
  Synthetic oligonucleotide
gctgagttggtaagcaacgacatccatgga

SEQ ID NO: 350242 - DNA, 30 bp, Artificial Sequence
  Synthetic oligonucleotide
actgcccgtgtttaccacggggggcatgga

SEQ ID NO: 350243 - DNA, 30 bp, Artificial Sequence
  Synthetic oligonucleotide
tgtgacaagaaactagtgccatggcatgga

SEQ ID NO: 350244 - DNA, 30 bp, Artificial Sequence
  Synthetic oligonucleotide
atagacatttaatgtcctcagcgagatgga

SEQ ID NO: 350245 - DNA, 30 bp, Artificial Sequence
  Synthetic oligonucleotide
atattctgtggcggggctatttgagatgga

SEQ ID NO: 350246 - DNA, 30 bp, Artificial Sequence
  Synthetic oligonucleotide
ttaacttgggcgtatgtttgtcgcgatgga

SEQ ID NO: 350247 - DNA, 30 bp, Artificial Sequence
  Synthetic oligonucleotide
ggatcttatgtttacccgaacatcgatgga

SEQ ID NO: 350248 - DNA, 30 bp, Artificial Sequence
  Synthetic oligonucleotide
gccaagttcgcgtcttcgataatggatgga

SEQ ID NO: 350249 - DNA, 30 bp, Artificial Sequence
  Synthetic oligonucleotide
ggagtgccttttatggttggggtggatgga

SEQ ID NO: 350250 - DNA, 30 bp, Artificial Sequence
  Synthetic oligonucleotide
ccgaacggacgggggcttttacatgatgga

SEQ ID NO: 350251 - DNA, 30 bp, Artificial Sequence
  Synthetic oligonucleotide
ctcaccacaattgtggaaataattgatgga

SEQ ID NO: 350252 - DNA, 30 bp, Artificial Sequence
  Synthetic oligonucleotide
ggttaagtatcgcacgggttccactatgga

SEQ ID NO: 350253 - DNA, 30 bp, Artificial Sequence
  Synthetic oligonucleotide
ggacagaagctagttctgtttgcgtatgga

SEQ ID NO: 350254 - DNA, 30 bp, Artificial Sequence
  Synthetic oligonucleotide
gcattctgagtctgctccatgaggtatgga

SEQ ID NO: 350255 - DNA, 30 bp, Artificial Sequence
  Synthetic oligonucleotide
ggtcccgggagatttatgtttctgtatgga

SEQ ID NO: 350256 - DNA, 30 bp, Artificial Sequence
  Synthetic oligonucleotide
gcaatcaactatcggtatattccttatgga

SEQ ID NO: 350257 - DNA, 30 bp, Artificial Sequence
  Synthetic oligonucleotide
ctaaactcatatatataaatggtttatgga

SEQ ID NO: 350258 - DNA, 30 bp, Artificial Sequence
  Synthetic oligonucleotide
cccggcaaggggctccatataccaactgga

SEQ ID NO: 350259 - DNA, 30 bp, Artificial Sequence
  Synthetic oligonucleotide
tttacggcatggccggaaggactaactgga

SEQ ID NO: 350260 - DNA, 30 bp, Artificial Sequence
  Synthetic oligonucleotide
caggcatgtcgctactcagcgctaactgga

SEQ ID NO: 350261 - DNA, 30 bp, Artificial Sequence
  Synthetic oligonucleotide
ccgggattggtcaaattccagttcactgga

SEQ ID NO: 350262 - DNA, 30 bp, Artificial Sequence
  Synthetic oligonucleotide
gacttcgtctagattgaggctgcgactgga

SEQ ID NO: 350263 - DNA, 30 bp, Artificial Sequence
  Synthetic oligonucleotide
tttcctggatagggggatatgtcgactgga

SEQ ID NO: 350264 - DNA, 30 bp, Artificial Sequence
  Synthetic oligonucleotide
tgggttaagggatgggcgggtcggactgga

SEQ ID NO: 350265 - DNA, 30 bp, Artificial Sequence
  Synthetic oligonucleotide
cctcagacaactataaaatattttactgga

SEQ ID NO: 350266 - DNA, 30 bp, Artificial Sequence
  Synthetic oligonucleotide
tgagtatgagaatctgtctaagggcctgga

SEQ ID NO: 350267 - DNA, 30 bp, Artificial Sequence
  Synthetic oligonucleotide
ccctactcgctactatgtctgatgcctgga

SEQ ID NO: 350268 - DNA, 30 bp, Artificial Sequence
  Synthetic oligonucleotide
gagattcatcactacgtaccgtctcctgga

SEQ ID NO: 350269 - DNA, 30 bp, Artificial Sequence
  Synthetic oligonucleotide
cgtttgagttacatctacggttgtcctgga

SEQ ID NO: 350270 - DNA, 30 bp, Artificial Sequence
  Synthetic oligonucleotide
cagatgcaagtgtctacgcgagtggctgga

SEQ ID NO: 350271 - DNA, 30 bp, Artificial Sequence
  Synthetic oligonucleotide
cacctctaggaattcttgtgcgactctgga

SEQ ID NO: 350272 - DNA, 30 bp, Artificial Sequence
  Synthetic oligonucleotide
aatcgtgagactcactatcgcgcgtctgga

SEQ ID NO: 350273 - DNA, 30 bp, Artificial Sequence
  Synthetic oligonucleotide
ggcgtccaaaaataagtgcgtctttctgga

SEQ ID NO: 350274 - DNA, 30 bp, Artificial Sequence
  Synthetic oligonucleotide
ttagtatgagcaggaagtacgcaaagtgga

SEQ ID NO: 350275 - DNA, 30 bp, Artificial Sequence
  Synthetic oligonucleotide
ggcacccgtggaataacccacggaagtgga

SEQ ID NO: 350276 - DNA, 30 bp, Artificial Sequence
  Synthetic oligonucleotide
actgatcatgacgacccagacggaagtgga

SEQ ID NO: 350277 - DNA, 30 bp, Artificial Sequence
  Synthetic oligonucleotide
aacaacgaggggactaccatgttgagtgga

SEQ ID NO: 350278 - DNA, 30 bp, Artificial Sequence
  Synthetic oligonucleotide
taagagccttcggtggatggttgtagtgga

SEQ ID NO: 350279 - DNA, 30 bp, Artificial Sequence
  Synthetic oligonucleotide
agctatcgccatgccaacgagaaacgtgga

SEQ ID NO: 350280 - DNA, 30 bp, Artificial Sequence
  Synthetic oligonucleotide
gtgttacgcacacggaacaatatccgtgga

SEQ ID NO: 350281 - DNA, 30 bp, Artificial Sequence
  Synthetic oligonucleotide
aatgacggaatgctatgtacatcgcgtgga

SEQ ID NO: 350282 - DNA, 30 bp, Artificial Sequence
  Synthetic oligonucleotide
aagagacacgtgcgaccacagtacggtgga

SEQ ID NO: 350283 - DNA, 30 bp, Artificial Sequence
  Synthetic oligonucleotide
acaaatgtccttgatgtggattggggtgga

SEQ ID NO: 350284 - DNA, 31 bp, Artificial Sequence
  Synthetic oligonucleotide
gagtaagtcctgaaggtaggagctgggtgga

SEQ ID NO: 350285 - DNA, 30 bp, Artificial Sequence
  Synthetic oligonucleotide
taatccatcgcagctgtaagaaaatgtgga

SEQ ID NO: 350286 - DNA, 30 bp, Artificial Sequence
  Synthetic oligonucleotide
aaagaatcagggagaacgtattgatgtgga

SEQ ID NO: 350287 - DNA, 30 bp, Artificial Sequence
  Synthetic oligonucleotide
ctggcaattataagatccggaaattgtgga

SEQ ID NO: 350288 - DNA, 30 bp, Artificial Sequence
  Synthetic oligonucleotide
tgacagtctttgctcactgaggaaattgga

SEQ ID NO: 350289 - DNA, 30 bp, Artificial Sequence
  Synthetic oligonucleotide
cggaggagcgaaaccggtagtggaattgga

SEQ ID NO: 350290 - DNA, 30 bp, Artificial Sequence
  Synthetic oligonucleotide
tttagtagcggccattccgcgataattgga

SEQ ID NO: 350291 - DNA, 30 bp, Artificial Sequence
  Synthetic oligonucleotide
gctcggcatgacaatacgactataattgga

SEQ ID NO: 350292 - DNA, 30 bp, Artificial Sequence
  Synthetic oligonucleotide
ggctggggaggcagctgctgacgcattgga

SEQ ID NO: 350293 - DNA, 30 bp, Artificial Sequence
  Synthetic oligonucleotide
tggatccgcggctcaaacgggcgcattgga

SEQ ID NO: 350294 - DNA, 30 bp, Artificial Sequence
  Synthetic oligonucleotide
gttgcgttgtaaggactaatcggcattgga

SEQ ID NO: 350295 - DNA, 30 bp, Artificial Sequence
  Synthetic oligonucleotide
ttgcacggcgggctcaaatagaggattgga

SEQ ID NO: 350296 - DNA, 30 bp, Artificial Sequence
  Synthetic oligonucleotide
gtgaatggagcctttaaaccagctattgga

SEQ ID NO: 350297 - DNA, 30 bp, Artificial Sequence
  Synthetic oligonucleotide
gtgttactctccagtgactggcttattgga

SEQ ID NO: 350298 - DNA, 30 bp, Artificial Sequence
  Synthetic oligonucleotide
ataggatccgttaggaatgagatacttgga

SEQ ID NO: 350299 - DNA, 30 bp, Artificial Sequence
  Synthetic oligonucleotide
cttgttagagaatatgtcataaagcttgga

SEQ ID NO: 350300 - DNA, 30 bp, Artificial Sequence
  Synthetic oligonucleotide
gtgaccgggcggacgtgtttccagcttgga

SEQ ID NO: 350301 - DNA, 30 bp, Artificial Sequence
  Synthetic oligonucleotide
gattgggtatccttggtattggttcttgga

SEQ ID NO: 350302 - DNA, 30 bp, Artificial Sequence
  Synthetic oligonucleotide
aatgagtcacctatgcacggaggagttgga

SEQ ID NO: 350303 - DNA, 30 bp, Artificial Sequence
  Synthetic oligonucleotide
actcagattccaaaatatccgtgagttgga

SEQ ID NO: 350304 - DNA, 30 bp, Artificial Sequence
  Synthetic oligonucleotide
tgccaccaataatacctatattaggttgga

SEQ ID NO: 350305 - DNA, 30 bp, Artificial Sequence
  Synthetic oligonucleotide
agcgaggcatcgaacctcaattcggttgga

SEQ ID NO: 350306 - DNA, 30 bp, Artificial Sequence
  Synthetic oligonucleotide
ctatagacctaatgtctgtaaaatgttgga

SEQ ID NO: 350307 - DNA, 30 bp, Artificial Sequence
  Synthetic oligonucleotide
aatgtaatatttcaatagatacgatttgga

SEQ ID NO: 350308 - DNA, 30 bp, Artificial Sequence
  Synthetic oligonucleotide
cacctagagttgatcaaatagcgatttgga

SEQ ID NO: 350309 - DNA, 30 bp, Artificial Sequence
  Synthetic oligonucleotide
atcaaaaacacggggactcaaggatttgga

SEQ ID NO: 350310 - DNA, 30 bp, Artificial Sequence
  Synthetic oligonucleotide
tgattctctacactgaagtgtggatttgga

SEQ ID NO: 350311 - DNA, 30 bp, Artificial Sequence
  Synthetic oligonucleotide
ctataaggcgtcccaacgatattatttgga

SEQ ID NO: 350312 - DNA, 30 bp, Artificial Sequence
  Synthetic oligonucleotide
ttgctagcaatgaagtcaccgtactttgga

SEQ ID NO: 350313 - DNA, 30 bp, Artificial Sequence
  Synthetic oligonucleotide
tagcatttcaatgtagatttctcctttgga

SEQ ID NO: 350314 - DNA, 30 bp, Artificial Sequence
  Synthetic oligonucleotide
acccgaggccggattaagcagggctttgga

SEQ ID NO: 350315 - DNA, 30 bp, Artificial Sequence
  Synthetic oligonucleotide
gaaaacggacttgtgctagaagtctttgga

SEQ ID NO: 350316 - DNA, 30 bp, Artificial Sequence
  Synthetic oligonucleotide
aatggtcggagttggatagatttgtttgga

SEQ ID NO: 350317 - DNA, 30 bp, Artificial Sequence
  Synthetic oligonucleotide
tacttagaaacaacaattatcatttttgga

SEQ ID NO: 350318 - DNA, 30 bp, Artificial Sequence
  Synthetic oligonucleotide
gcttggtacaggtccgactgacaaaaatga

SEQ ID NO: 350319 - DNA, 30 bp, Artificial Sequence
  Synthetic oligonucleotide
tgacgtgctgtccgaaatcaaacaaaatga

SEQ ID NO: 350320 - DNA, 30 bp, Artificial Sequence
  Synthetic oligonucleotide
gtttgaacgtgcagacaattaacaaaatga

SEQ ID NO: 350321 - DNA, 30 bp, Artificial Sequence
  Synthetic oligonucleotide
gcattagggcgttttttggtcgcaaaatga

SEQ ID NO: 350322 - DNA, 30 bp, Artificial Sequence
  Synthetic oligonucleotide
attctgacaggcctacggtgaagaaaatga

SEQ ID NO: 350323 - DNA, 30 bp, Artificial Sequence
  Synthetic oligonucleotide
tggaacaccgtagggattgtcagaaaatga

SEQ ID NO: 350324 - DNA, 30 bp, Artificial Sequence
  Synthetic oligonucleotide
gatcgcagaaaacgtgactggctaaaatga

SEQ ID NO: 350325 - DNA, 30 bp, Artificial Sequence
  Synthetic oligonucleotide
atcgaaggttgacgaaaaatgcacaaatga

SEQ ID NO: 350326 - DNA, 31 bp, Artificial Sequence
  Synthetic oligonucleotide
atacttactagaaaatgcggttcccaaatga

SEQ ID NO: 350327 - DNA, 30 bp, Artificial Sequence
  Synthetic oligonucleotide
tgcgtaccaattttattgtgaatcaaatga

SEQ ID NO: 350328 - DNA, 30 bp, Artificial Sequence
  Synthetic oligonucleotide
aaagctcccccagtctgtcattcgaaatga

SEQ ID NO: 350329 - DNA, 30 bp, Artificial Sequence
  Synthetic oligonucleotide
gatgtcgtgtaggtaagctgcaataaatga

SEQ ID NO: 350330 - DNA, 30 bp, Artificial Sequence
  Synthetic oligonucleotide
ttgcggcattatacgtgtgtcggacaatga

SEQ ID NO: 350331 - DNA, 30 bp, Artificial Sequence
  Synthetic oligonucleotide
cgcacatgtctatactctggatgacaatga

SEQ ID NO: 350332 - DNA, 30 bp, Artificial Sequence
  Synthetic oligonucleotide
cgtacacattgcgcgacggtcgtacaatga

SEQ ID NO: 350333 - DNA, 30 bp, Artificial Sequence
  Synthetic oligonucleotide
tatgtcattcgtagcagtctgttacaatga

SEQ ID NO: 350334 - DNA, 30 bp, Artificial Sequence
  Synthetic oligonucleotide
ttggggccatggacataccgcgagcaatga

SEQ ID NO: 350335 - DNA, 30 bp, Artificial Sequence
  Synthetic oligonucleotide
aaagttcgagcattgcgtgtctagcaatga

SEQ ID NO: 350336 - DNA, 30 bp, Artificial Sequence
  Synthetic oligonucleotide
gattgtgccctaacaacccgtgggcaatga

SEQ ID NO: 350337 - DNA, 31 bp, Artificial Sequence
  Synthetic oligonucleotide
tcttttttcgatagatacaaagcttcaatga

SEQ ID NO: 350338 - DNA, 30 bp, Artificial Sequence
  Synthetic oligonucleotide
tatcgttatcctattgcgcttcaagaatga

SEQ ID NO: 350339 - DNA, 30 bp, Artificial Sequence
  Synthetic oligonucleotide
gccattaacgcctaagggcgttgagaatga

SEQ ID NO: 350340 - DNA, 30 bp, Artificial Sequence
  Synthetic oligonucleotide
ttgaatgggaggtcgcggactgaggaatga

SEQ ID NO: 350341 - DNA, 30 bp, Artificial Sequence
  Synthetic oligonucleotide
gttgcacaacgcaaatcgtgtgatgaatga

SEQ ID NO: 350342 - DNA, 30 bp, Artificial Sequence
  Synthetic oligonucleotide
ctcagacttgtatctcgacgccgtgaatga

SEQ ID NO: 350343 - DNA, 30 bp, Artificial Sequence
  Synthetic oligonucleotide
cagtagattctaggcatctagtgataatga

SEQ ID NO: 350344 - DNA, 30 bp, Artificial Sequence
  Synthetic oligonucleotide
acgcaacatactcctaaaaggtagtaatga

SEQ ID NO: 350345 - DNA, 30 bp, Artificial Sequence
  Synthetic oligonucleotide
catcatatttttccgagcaaacggtaatga

SEQ ID NO: 350346 - DNA, 30 bp, Artificial Sequence
  Synthetic oligonucleotide
gggaacccaggccttcggttcgcaacatga

SEQ ID NO: 350347 - DNA, 30 bp, Artificial Sequence
  Synthetic oligonucleotide
atagcagtaagtctgagtaggcgaacatga

SEQ ID NO: 350348 - DNA, 30 bp, Artificial Sequence
  Synthetic oligonucleotide
tgtctgcgagttgcactatggatcacatga

SEQ ID NO: 350349 - DNA, 30 bp, Artificial Sequence
  Synthetic oligonucleotide
cgttgttgtcatggtcgctgattcacatga

SEQ ID NO: 350350 - DNA, 30 bp, Artificial Sequence
  Synthetic oligonucleotide
gcccgggagccgatattgaggtatacatga

SEQ ID NO: 350351 - DNA, 30 bp, Artificial Sequence
  Synthetic oligonucleotide
ttattattccagggaagtcacactacatga

SEQ ID NO: 350352 - DNA, 30 bp, Artificial Sequence
  Synthetic oligonucleotide
atgtttcggttgtgaaagctagaaccatga

SEQ ID NO: 350353 - DNA, 30 bp, Artificial Sequence
  Synthetic oligonucleotide
ccctgatgtagccatcgcttaggaccatga

SEQ ID NO: 350354 - DNA, 30 bp, Artificial Sequence
  Synthetic oligonucleotide
ctgtatttactactttcagaagacccatga

SEQ ID NO: 350355 - DNA, 30 bp, Artificial Sequence
  Synthetic oligonucleotide
taataggttattaggactagatacccatga

SEQ ID NO: 350356 - DNA, 30 bp, Artificial Sequence
  Synthetic oligonucleotide
caagcgcaaatggtctctgtacgcccatga

SEQ ID NO: 350357 - DNA, 30 bp, Artificial Sequence
  Synthetic oligonucleotide
atgttactcgccaacgttcttgaagcatga

SEQ ID NO: 350358 - DNA, 30 bp, Artificial Sequence
  Synthetic oligonucleotide
gtcaagatcagcgttcaagcccgcgcatga

SEQ ID NO: 350359 - DNA, 30 bp, Artificial Sequence
  Synthetic oligonucleotide
tcagtatagtgatatttgttcggcgcatga

SEQ ID NO: 350360 - DNA, 30 bp, Artificial Sequence
  Synthetic oligonucleotide
caatcactcgtctaagaacattaggcatga

SEQ ID NO: 350361 - DNA, 30 bp, Artificial Sequence
  Synthetic oligonucleotide
aaacatcttgcaacactttagcatgcatga

SEQ ID NO: 350362 - DNA, 30 bp, Artificial Sequence
  Synthetic oligonucleotide
acacagtaagggcaatatgactaatcatga

SEQ ID NO: 350363 - DNA, 30 bp, Artificial Sequence
  Synthetic oligonucleotide
ttacagtggcctgtgggttaaacttcatga

SEQ ID NO: 350364 - DNA, 30 bp, Artificial Sequence
  Synthetic oligonucleotide
tagccccccccccttggaccgggaagatga

SEQ ID NO: 350365 - DNA, 30 bp, Artificial Sequence
  Synthetic oligonucleotide
ttattttaggagactaattgttgaagatga

SEQ ID NO: 350366 - DNA, 30 bp, Artificial Sequence
  Synthetic oligonucleotide
tgagtgccgcctgagatcaccttaagatga

SEQ ID NO: 350367 - DNA, 30 bp, Artificial Sequence
  Synthetic oligonucleotide
agcgacatactggtacttgcgcacagatga

SEQ ID NO: 350368 - DNA, 30 bp, Artificial Sequence
  Synthetic oligonucleotide
taggtggttggcatgccgggactgagatga

SEQ ID NO: 350369 - DNA, 30 bp, Artificial Sequence
  Synthetic oligonucleotide
cacgccggttggagtatggaccatagatga

SEQ ID NO: 350370 - DNA, 30 bp, Artificial Sequence
  Synthetic oligonucleotide
tgactagcagataccggggctcatagatga

SEQ ID NO: 350371 - DNA, 30 bp, Artificial Sequence
  Synthetic oligonucleotide
cccatttcgaggtcccaatagtgtagatga

SEQ ID NO: 350372 - DNA, 30 bp, Artificial Sequence
  Synthetic oligonucleotide
gatcctttctgtcgttttgagattagatga

SEQ ID NO: 350373 - DNA, 30 bp, Artificial Sequence
  Synthetic oligonucleotide
gcgggcatggataatggtcatattagatga

SEQ ID NO: 350374 - DNA, 30 bp, Artificial Sequence
  Synthetic oligonucleotide
agcggaggctctttgtgatcggcccgatga

SEQ ID NO: 350375 - DNA, 30 bp, Artificial Sequence
  Synthetic oligonucleotide
acaccttcggtgactcccacacgccgatga

SEQ ID NO: 350376 - DNA, 30 bp, Artificial Sequence
  Synthetic oligonucleotide
tacgttgcttgcggggtatggatccgatga

SEQ ID NO: 350377 - DNA, 30 bp, Artificial Sequence
  Synthetic oligonucleotide
cgtagtacgtcaatcggggggttccgatga

SEQ ID NO: 350378 - DNA, 30 bp, Artificial Sequence
  Synthetic oligonucleotide
gtaaaaaattttgaaaataaaacgcgatga

SEQ ID NO: 350379 - DNA, 30 bp, Artificial Sequence
  Synthetic oligonucleotide
agggtccgacaagaggaaacaccgcgatga

SEQ ID NO: 350380 - DNA, 30 bp, Artificial Sequence
  Synthetic oligonucleotide
gatcccggttaatgcgtgtcagctcgatga

SEQ ID NO: 350381 - DNA, 30 bp, Artificial Sequence
  Synthetic oligonucleotide
atagaatgcagtatacctgatagaggatga

SEQ ID NO: 350382 - DNA, 30 bp, Artificial Sequence
  Synthetic oligonucleotide
catggttatgaaaattaattattaggatga

SEQ ID NO: 350383 - DNA, 30 bp, Artificial Sequence
  Synthetic oligonucleotide
ctcgcacatttatttaatgcgagcggatga

SEQ ID NO: 350384 - DNA, 30 bp, Artificial Sequence
  Synthetic oligonucleotide
agagcgtgagcaacagcggaagtcggatga

SEQ ID NO: 350385 - DNA, 30 bp, Artificial Sequence
  Synthetic oligonucleotide
gggccctcattaaggttccacgtgggatga

SEQ ID NO: 350386 - DNA, 30 bp, Artificial Sequence
  Synthetic oligonucleotide
ggagtatgctgagcagtatcttatggatga

SEQ ID NO: 350387 - DNA, 30 bp, Artificial Sequence
  Synthetic oligonucleotide
ggtcttgataaaacgcaaatttctggatga

SEQ ID NO: 350388 - DNA, 30 bp, Artificial Sequence
  Synthetic oligonucleotide
tgttgggcggatattggtggctgtggatga

SEQ ID NO: 350389 - DNA, 30 bp, Artificial Sequence
  Synthetic oligonucleotide
ttggagacctatcaccgccagcaatgatga

SEQ ID NO: 350390 - DNA, 30 bp, Artificial Sequence
  Synthetic oligonucleotide
aaattgccagatatcgagaaaggatgatga

SEQ ID NO: 350391 - DNA, 31 bp, Artificial Sequence
  Synthetic oligonucleotide
cattgacattcgtgtacgaacatgctgatga

SEQ ID NO: 350392 - DNA, 30 bp, Artificial Sequence
  Synthetic oligonucleotide
gccccgaaagtcctacacataggttgatga

SEQ ID NO: 350393 - DNA, 30 bp, Artificial Sequence
  Synthetic oligonucleotide
aatcagtggaaagctgacagcgtttgatga

SEQ ID NO: 350394 - DNA, 30 bp, Artificial Sequence
  Synthetic oligonucleotide
caaacacctccggatttatagtgaatatga

SEQ ID NO: 350395 - DNA, 30 bp, Artificial Sequence
  Synthetic oligonucleotide
agacttgtactaagggactagtacatatga

SEQ ID NO: 350396 - DNA, 30 bp, Artificial Sequence
  Synthetic oligonucleotide
attgtgggttgcgtagcggcaccgatatga

SEQ ID NO: 350397 - DNA, 30 bp, Artificial Sequence
  Synthetic oligonucleotide
tttaacaactagtgcccttctcatatatga

SEQ ID NO: 350398 - DNA, 30 bp, Artificial Sequence
  Synthetic oligonucleotide
gacttagttagttacgtgaagtatatatga

SEQ ID NO: 350399 - DNA, 30 bp, Artificial Sequence
  Synthetic oligonucleotide
atgttcagtgggatttaagcatctatatga

SEQ ID NO: 350400 - DNA, 30 bp, Artificial Sequence
  Synthetic oligonucleotide
cttactgtgcgggtctgggcgggtatatga

SEQ ID NO: 350401 - DNA, 30 bp, Artificial Sequence
  Synthetic oligonucleotide
gagttttgaattacggtactctttatatga

SEQ ID NO: 350402 - DNA, 30 bp, Artificial Sequence
  Synthetic oligonucleotide
ggtgtaaacagacattggttgtgactatga

SEQ ID NO: 350403 - DNA, 30 bp, Artificial Sequence
  Synthetic oligonucleotide
gtaagttcaaatgggcgtctgtagctatga

SEQ ID NO: 350404 - DNA, 30 bp, Artificial Sequence
  Synthetic oligonucleotide
atcgatactgtcatctcatcctcgctatga

SEQ ID NO: 350405 - DNA, 30 bp, Artificial Sequence
  Synthetic oligonucleotide
atgaatgggccctaattattgggtctatga

SEQ ID NO: 350406 - DNA, 30 bp, Artificial Sequence
  Synthetic oligonucleotide
cgggaatgtcgcttgcacagcgttctatga

SEQ ID NO: 350407 - DNA, 30 bp, Artificial Sequence
  Synthetic oligonucleotide
aaatggttttcaatcggacacacagtatga

SEQ ID NO: 350408 - DNA, 30 bp, Artificial Sequence
  Synthetic oligonucleotide
tggtatttctttacgacaaaacgagtatga

SEQ ID NO: 350409 - DNA, 30 bp, Artificial Sequence
  Synthetic oligonucleotide
taggatcctggtgagcccgcgaacgtatga

SEQ ID NO: 350410 - DNA, 30 bp, Artificial Sequence
  Synthetic oligonucleotide
cggtattcgttagattttttacccgtatga

SEQ ID NO: 350411 - DNA, 30 bp, Artificial Sequence
  Synthetic oligonucleotide
ggcagcgctatcgcatacacttccgtatga

SEQ ID NO: 350412 - DNA, 30 bp, Artificial Sequence
  Synthetic oligonucleotide
actctccgtactctaaagttaacggtatga

SEQ ID NO: 350413 - DNA, 30 bp, Artificial Sequence
  Synthetic oligonucleotide
attcgttagcatcaggcactcagggtatga

SEQ ID NO: 350414 - DNA, 30 bp, Artificial Sequence
  Synthetic oligonucleotide
ttaaacgaaaagatagaggccctggtatga

SEQ ID NO: 350415 - DNA, 30 bp, Artificial Sequence
  Synthetic oligonucleotide
gctgtgaaaagtattcgggactatgtatga

SEQ ID NO: 350416 - DNA, 30 bp, Artificial Sequence
  Synthetic oligonucleotide
agctgatggcccggaaagcgggctgtatga

SEQ ID NO: 350417 - DNA, 30 bp, Artificial Sequence
  Synthetic oligonucleotide
atgtttatgagaaaagtcggttgtgtatga

SEQ ID NO: 350418 - DNA, 30 bp, Artificial Sequence
  Synthetic oligonucleotide
tatgcacaattcttgataaagattgtatga

SEQ ID NO: 350419 - DNA, 30 bp, Artificial Sequence
  Synthetic oligonucleotide
ctcggctaagttcccgaaaatgtattatga

SEQ ID NO: 350420 - DNA, 30 bp, Artificial Sequence
  Synthetic oligonucleotide
tcataagatactacagacacgcgcttatga

SEQ ID NO: 350421 - DNA, 30 bp, Artificial Sequence
  Synthetic oligonucleotide
acagtgtaggggaacttgtatttcttatga

SEQ ID NO: 350422 - DNA, 30 bp, Artificial Sequence
  Synthetic oligonucleotide
ccggcgtgtgagaacattttttcgttatga

SEQ ID NO: 350423 - DNA, 30 bp, Artificial Sequence
  Synthetic oligonucleotide
ctacgttctggaccaatggtcgtgttatga

SEQ ID NO: 350424 - DNA, 30 bp, Artificial Sequence
  Synthetic oligonucleotide
aagtacgggttcaaacgcaataatttatga

SEQ ID NO: 350425 - DNA, 30 bp, Artificial Sequence
  Synthetic oligonucleotide
gatggcgggacttgaagttagggtttatga

SEQ ID NO: 350426 - DNA, 30 bp, Artificial Sequence
  Synthetic oligonucleotide
actatgaaataaacgccagggattttatga

SEQ ID NO: 350427 - DNA, 30 bp, Artificial Sequence
  Synthetic oligonucleotide
tttgggctaaattcgactggacttttatga

SEQ ID NO: 350428 - DNA, 30 bp, Artificial Sequence
  Synthetic oligonucleotide
agtaacctggatcactcgccagttttatga

SEQ ID NO: 350429 - DNA, 30 bp, Artificial Sequence
  Synthetic oligonucleotide
ctttggcgtcagtaaccccgttaaaactga

SEQ ID NO: 350430 - DNA, 30 bp, Artificial Sequence
  Synthetic oligonucleotide
gacattctatccccctcatgaccaaactga

SEQ ID NO: 350431 - DNA, 30 bp, Artificial Sequence
  Synthetic oligonucleotide
ctccctgagaagacggtgaacataaactga

SEQ ID NO: 350432 - DNA, 30 bp, Artificial Sequence
  Synthetic oligonucleotide
cagtaccttcagaaacgggacataaactga

SEQ ID NO: 350433 - DNA, 30 bp, Artificial Sequence
  Synthetic oligonucleotide
gtaacacccgaaagccaacctaacaactga

SEQ ID NO: 350434 - DNA, 30 bp, Artificial Sequence
  Synthetic oligonucleotide
acttggcgatcccgcgggaggcccaactga

SEQ ID NO: 350435 - DNA, 30 bp, Artificial Sequence
  Synthetic oligonucleotide
ccctctgcttcgaaccttattaggaactga

SEQ ID NO: 350436 - DNA, 30 bp, Artificial Sequence
  Synthetic oligonucleotide
cagcgtggttaattgtttgaatctaactga

SEQ ID NO: 350437 - DNA, 30 bp, Artificial Sequence
  Synthetic oligonucleotide
atctcgtcaaacaacctagggtctaactga

SEQ ID NO: 350438 - DNA, 30 bp, Artificial Sequence
  Synthetic oligonucleotide
agtagcatcggtctggcgctagttaactga

SEQ ID NO: 350439 - DNA, 30 bp, Artificial Sequence
  Synthetic oligonucleotide
aaccagacactgcactcctgggttaactga

SEQ ID NO: 350440 - DNA, 30 bp, Artificial Sequence
  Synthetic oligonucleotide
ctcgaaggaacagttggatagaaccactga

SEQ ID NO: 350441 - DNA, 30 bp, Artificial Sequence
  Synthetic oligonucleotide
taataagcttcaaagacggaatttcactga

SEQ ID NO: 350442 - DNA, 30 bp, Artificial Sequence
  Synthetic oligonucleotide
ttgacagctatgcgatacataacagactga

SEQ ID NO: 350443 - DNA, 30 bp, Artificial Sequence
  Synthetic oligonucleotide
gccaggactgcagcatgacattgagactga

SEQ ID NO: 350444 - DNA, 30 bp, Artificial Sequence
  Synthetic oligonucleotide
agagcctttactgtgagggcattagactga

SEQ ID NO: 350445 - DNA, 30 bp, Artificial Sequence
  Synthetic oligonucleotide
agctgggggtacacaatcggatacgactga

SEQ ID NO: 350446 - DNA, 30 bp, Artificial Sequence
  Synthetic oligonucleotide
gcactaccagaggtttgtatgcccgactga

SEQ ID NO: 350447 - DNA, 30 bp, Artificial Sequence
  Synthetic oligonucleotide
gaccggatgtaataatatgaacgggactga

SEQ ID NO: 350448 - DNA, 30 bp, Artificial Sequence
  Synthetic oligonucleotide
ggttaatggttgttacacatgattgactga

SEQ ID NO: 350449 - DNA, 30 bp, Artificial Sequence
  Synthetic oligonucleotide
gctgtctctcaacttcagtctaaatactga

SEQ ID NO: 350450 - DNA, 30 bp, Artificial Sequence
  Synthetic oligonucleotide
aataagtgggcctatccataagtatactga

SEQ ID NO: 350451 - DNA, 30 bp, Artificial Sequence
  Synthetic oligonucleotide
cagaacatagggatgtcacgccgctactga

SEQ ID NO: 350452 - DNA, 30 bp, Artificial Sequence
  Synthetic oligonucleotide
ttgtccaactcataatcgacgggctactga

SEQ ID NO: 350453 - DNA, 30 bp, Artificial Sequence
  Synthetic oligonucleotide
tcttgcagccgcacaaaggcaaggtactga

SEQ ID NO: 350454 - DNA, 30 bp, Artificial Sequence
  Synthetic oligonucleotide
atttcagctgttgtaggaagagggtactga

SEQ ID NO: 350455 - DNA, 30 bp, Artificial Sequence
  Synthetic oligonucleotide
ccggttgagttaggtgatcacgcaacctga

SEQ ID NO: 350456 - DNA, 30 bp, Artificial Sequence
  Synthetic oligonucleotide
ttggcccgaacttaatgcccgataacctga

SEQ ID NO: 350457 - DNA, 30 bp, Artificial Sequence
  Synthetic oligonucleotide
atgattaacgaccttagttacgtaacctga

SEQ ID NO: 350458 - DNA, 30 bp, Artificial Sequence
  Synthetic oligonucleotide
taagggaagtcacaatacatacggacctga

SEQ ID NO: 350459 - DNA, 30 bp, Artificial Sequence
  Synthetic oligonucleotide
aacgcatatgggcggcgtagtcctacctga

SEQ ID NO: 350460 - DNA, 30 bp, Artificial Sequence
  Synthetic oligonucleotide
gttgaatgctaggtctagaaaggaccctga

SEQ ID NO: 350461 - DNA, 30 bp, Artificial Sequence
  Synthetic oligonucleotide
agtaggcctcccttttatgtcggaccctga

SEQ ID NO: 350462 - DNA, 30 bp, Artificial Sequence
  Synthetic oligonucleotide
ggtcgaggaatttggatccgccagccctga

SEQ ID NO: 350463 - DNA, 30 bp, Artificial Sequence
  Synthetic oligonucleotide
ggggtaattgcacgtgctggctaagcctga

SEQ ID NO: 350464 - DNA, 30 bp, Artificial Sequence
  Synthetic oligonucleotide
tccaactctataccgtgagtttgggcctga

SEQ ID NO: 350465 - DNA, 30 bp, Artificial Sequence
  Synthetic oligonucleotide
tgcaagcaatagtggcaatggctggcctga

SEQ ID NO: 350466 - DNA, 30 bp, Artificial Sequence
  Synthetic oligonucleotide
caaataccgtcaatattttaatgtgcctga

SEQ ID NO: 350467 - DNA, 30 bp, Artificial Sequence
  Synthetic oligonucleotide
atagagtgtagcgagaggtgagaatcctga

SEQ ID NO: 350468 - DNA, 30 bp, Artificial Sequence
  Synthetic oligonucleotide
tctcgggaggtgcaacactgaggatcctga

SEQ ID NO: 350469 - DNA, 29 bp, Artificial Sequence
  Synthetic oligonucleotide
catcgctcggtttacccggtacgtcctga

SEQ ID NO: 350470 - DNA, 30 bp, Artificial Sequence
  Synthetic oligonucleotide
ttcgaactaagccgtgacattaggtcctga

SEQ ID NO: 350471 - DNA, 30 bp, Artificial Sequence
  Synthetic oligonucleotide
aaagcgctttggcaatctgtcctgtcctga

SEQ ID NO: 350472 - DNA, 30 bp, Artificial Sequence
  Synthetic oligonucleotide
tcaaacgtgatctataaacactccagctga

SEQ ID NO: 350473 - DNA, 30 bp, Artificial Sequence
  Synthetic oligonucleotide
acgcaactgttataccgtcccaatagctga

SEQ ID NO: 350474 - DNA, 30 bp, Artificial Sequence
  Synthetic oligonucleotide
caacctacgcactgtcatcctattagctga

SEQ ID NO: 350475 - DNA, 30 bp, Artificial Sequence
  Synthetic oligonucleotide
ccaacctactggccagcaaccatccgctga

SEQ ID NO: 350476 - DNA, 30 bp, Artificial Sequence
  Synthetic oligonucleotide
aacctaaccgctgatcaaggcgggcgctga

SEQ ID NO: 350477 - DNA, 30 bp, Artificial Sequence
  Synthetic oligonucleotide
ctctaaggtaagcagatgttcatgcgctga

SEQ ID NO: 350478 - DNA, 30 bp, Artificial Sequence
  Synthetic oligonucleotide
ggtcaaataataaccttgcatagtcgctga

SEQ ID NO: 350479 - DNA, 30 bp, Artificial Sequence
  Synthetic oligonucleotide
gacgtgcacaggcgggacatggttcgctga

SEQ ID NO: 350480 - DNA, 30 bp, Artificial Sequence
  Synthetic oligonucleotide
attaagtgacctctggcccaatgaggctga

SEQ ID NO: 350481 - DNA, 30 bp, Artificial Sequence
  Synthetic oligonucleotide
ttttgcacatagggtgggccttctggctga

SEQ ID NO: 350482 - DNA, 30 bp, Artificial Sequence
  Synthetic oligonucleotide
gtcaacgtcgtggttctgaaacaatgctga

SEQ ID NO: 350483 - DNA, 29 bp, Artificial Sequence
  Synthetic oligonucleotide
attatcatgtatacaccgggacatgctga

SEQ ID NO: 350484 - DNA, 30 bp, Artificial Sequence
  Synthetic oligonucleotide
ctatacacctagagaatgtggttatgctga

SEQ ID NO: 350485 - DNA, 30 bp, Artificial Sequence
  Synthetic oligonucleotide
gcccggcacgacttgaaagctatgtgctga

SEQ ID NO: 350486 - DNA, 30 bp, Artificial Sequence
  Synthetic oligonucleotide
atattatgcatggagactcaaccttgctga

SEQ ID NO: 350487 - DNA, 30 bp, Artificial Sequence
  Synthetic oligonucleotide
tatagcggtacacggcggaaaacaatctga

SEQ ID NO: 350488 - DNA, 30 bp, Artificial Sequence
  Synthetic oligonucleotide
ggtgcccaaaacattgtgtcaggaatctga

SEQ ID NO: 350489 - DNA, 30 bp, Artificial Sequence
  Synthetic oligonucleotide
ccttgtgggcaacaatcgagacccatctga

SEQ ID NO: 350490 - DNA, 30 bp, Artificial Sequence
  Synthetic oligonucleotide
tcgtaactcctccgcgctccggccatctga

SEQ ID NO: 350491 - DNA, 30 bp, Artificial Sequence
  Synthetic oligonucleotide
accttttaccttttctactactgcatctga

SEQ ID NO: 350492 - DNA, 30 bp, Artificial Sequence
  Synthetic oligonucleotide
aatccagatttaccttcgtgccatatctga

SEQ ID NO: 350493 - DNA, 30 bp, Artificial Sequence
  Synthetic oligonucleotide
atgcggggtaggtaatacgtgcgcctctga

SEQ ID NO: 350494 - DNA, 30 bp, Artificial Sequence
  Synthetic oligonucleotide
gcaccatctcacgagataaagtatctctga

SEQ ID NO: 350495 - DNA, 30 bp, Artificial Sequence
  Synthetic oligonucleotide
atctcttatgcagggttacggcctctctga

SEQ ID NO: 350496 - DNA, 30 bp, Artificial Sequence
  Synthetic oligonucleotide
tgcaggcggaggagtataggctaagtctga

SEQ ID NO: 350497 - DNA, 30 bp, Artificial Sequence
  Synthetic oligonucleotide
acctcgtaagctaaacaggagacagtctga

SEQ ID NO: 350498 - DNA, 30 bp, Artificial Sequence
  Synthetic oligonucleotide
agatgacaagcaagtcagaaagcagtctga

SEQ ID NO: 350499 - DNA, 32 bp, Artificial Sequence
  Synthetic oligonucleotide
gactgtgaagtctctggcgggggtcagtctga

SEQ ID NO: 350500 - DNA, 30 bp, Artificial Sequence
  Synthetic oligonucleotide
tacatgattgaagggctctaaggcgtctga

SEQ ID NO: 350501 - DNA, 29 bp, Artificial Sequence
  Synthetic oligonucleotide
tctctctaaatgtactagcacgggtctga

SEQ ID NO: 350502 - DNA, 30 bp, Artificial Sequence
  Synthetic oligonucleotide
cagtgaacgtagaagttcatcggtgtctga

SEQ ID NO: 350503 - DNA, 30 bp, Artificial Sequence
  Synthetic oligonucleotide
cataacttagatgctcacagtccattctga

SEQ ID NO: 350504 - DNA, 30 bp, Artificial Sequence
  Synthetic oligonucleotide
gtaatctcggctgttagtttacacttctga

SEQ ID NO: 350505 - DNA, 30 bp, Artificial Sequence
  Synthetic oligonucleotide
ttttaacaccggaacggggattacttctga

SEQ ID NO: 350506 - DNA, 30 bp, Artificial Sequence
  Synthetic oligonucleotide
agtagccggtaaattcgacacaagttctga

SEQ ID NO: 350507 - DNA, 30 bp, Artificial Sequence
  Synthetic oligonucleotide
actgttagcaagcagcaccgcgggttctga

SEQ ID NO: 350508 - DNA, 30 bp, Artificial Sequence
  Synthetic oligonucleotide
gcgttaatgtccgcggcgccccctttctga

SEQ ID NO: 350509 - DNA, 30 bp, Artificial Sequence
  Synthetic oligonucleotide
gcatgaagagcttgtctatgagctttctga

SEQ ID NO: 350510 - DNA, 30 bp, Artificial Sequence
  Synthetic oligonucleotide
acgcattcgaattatgatcttagtttctga

SEQ ID NO: 350511 - DNA, 30 bp, Artificial Sequence
  Synthetic oligonucleotide
aaagatagtaaattattatataaaaagtga

SEQ ID NO: 350512 - DNA, 30 bp, Artificial Sequence
  Synthetic oligonucleotide
agcctggatcgtcccgagtgttgaaagtga

SEQ ID NO: 350513 - DNA, 30 bp, Artificial Sequence
  Synthetic oligonucleotide
cattatatgagcgccggccggcccaagtga

SEQ ID NO: 350514 - DNA, 30 bp, Artificial Sequence
  Synthetic oligonucleotide
aaagcgaggggaggcctgccggagaagtga

SEQ ID NO: 350515 - DNA, 30 bp, Artificial Sequence
  Synthetic oligonucleotide
ctactgtgccaaatggtacccacgaagtga

SEQ ID NO: 350516 - DNA, 30 bp, Artificial Sequence
  Synthetic oligonucleotide
ttgatgaaggccgcaatttgaatgaagtga

SEQ ID NO: 350517 - DNA, 30 bp, Artificial Sequence
  Synthetic oligonucleotide
ggttcacgtgttctacaactattgaagtga

SEQ ID NO: 350518 - DNA, 30 bp, Artificial Sequence
  Synthetic oligonucleotide
atatccggtcccaggtagaggagtaagtga

SEQ ID NO: 350519 - DNA, 30 bp, Artificial Sequence
  Synthetic oligonucleotide
tttaggggtaggtacgagcctcgacagtga

SEQ ID NO: 350520 - DNA, 30 bp, Artificial Sequence
  Synthetic oligonucleotide
atcaattggtttacagcgtcagatcagtga

SEQ ID NO: 350521 - DNA, 30 bp, Artificial Sequence
  Synthetic oligonucleotide
gcacaccactccggaggattgtctcagtga

SEQ ID NO: 350522 - DNA, 30 bp, Artificial Sequence
  Synthetic oligonucleotide
tctttatgcggggaggctcttgtcgagtga

SEQ ID NO: 350523 - DNA, 30 bp, Artificial Sequence
  Synthetic oligonucleotide
gtacgcacagaactcagagtccaatagtga

SEQ ID NO: 350524 - DNA, 30 bp, Artificial Sequence
  Synthetic oligonucleotide
gatgcgagattacgcagaggtacatagtga

SEQ ID NO: 350525 - DNA, 30 bp, Artificial Sequence
  Synthetic oligonucleotide
cctcgaatgtgaaccggaaacttatagtga

SEQ ID NO: 350526 - DNA, 30 bp, Artificial Sequence
  Synthetic oligonucleotide
catttctgcactgcctcaaatttatagtga

SEQ ID NO: 350527 - DNA, 30 bp, Artificial Sequence
  Synthetic oligonucleotide
ttaatgggcctaagtcttcgtggctagtga

SEQ ID NO: 350528 - DNA, 30 bp, Artificial Sequence
  Synthetic oligonucleotide
acccacaggtatcaatcctggatgtagtga

SEQ ID NO: 350529 - DNA, 30 bp, Artificial Sequence
  Synthetic oligonucleotide
tgcaactcaggatatgcctgctattagtga

SEQ ID NO: 350530 - DNA, 30 bp, Artificial Sequence
  Synthetic oligonucleotide
tcaacatccgcgcaacgactaatttagtga

SEQ ID NO: 350531 - DNA, 30 bp, Artificial Sequence
  Synthetic oligonucleotide
attgagcttccaacctcggtccaaacgtga

SEQ ID NO: 350532 - DNA, 30 bp, Artificial Sequence
  Synthetic oligonucleotide
cgctgcgtagggctccgtcgcaacacgtga

SEQ ID NO: 350533 - DNA, 30 bp, Artificial Sequence
  Synthetic oligonucleotide
ctctacaccagatcaggtctcaacacgtga

SEQ ID NO: 350534 - DNA, 29 bp, Artificial Sequence
  Synthetic oligonucleotide
caagaaccgaatacgtcagcctcacgtga

SEQ ID NO: 350535 - DNA, 30 bp, Artificial Sequence
  Synthetic oligonucleotide
actttatatgcggtggcctcagcgacgtga

SEQ ID NO: 350536 - DNA, 30 bp, Artificial Sequence
  Synthetic oligonucleotide
tgatttccactacgactggttacaccgtga

SEQ ID NO: 350537 - DNA, 30 bp, Artificial Sequence
  Synthetic oligonucleotide
gcattctcttcgtgcgagcgtttaccgtga

SEQ ID NO: 350538 - DNA, 30 bp, Artificial Sequence
  Synthetic oligonucleotide
catataaagcattggtcggcattcccgtga

SEQ ID NO: 350539 - DNA, 30 bp, Artificial Sequence
  Synthetic oligonucleotide
caggtgggccctgcgatcttgaagccgtga

SEQ ID NO: 350540 - DNA, 30 bp, Artificial Sequence
  Synthetic oligonucleotide
gcacgggacgatttgagcaaccgtccgtga

SEQ ID NO: 350541 - DNA, 30 bp, Artificial Sequence
  Synthetic oligonucleotide
tgcagggcggtagccactgtgggagcgtga

SEQ ID NO: 350542 - DNA, 30 bp, Artificial Sequence
  Synthetic oligonucleotide
ctttcgtatgtatatgaggggtgagcgtga

SEQ ID NO: 350543 - DNA, 30 bp, Artificial Sequence
  Synthetic oligonucleotide
tctgttctggatatgctagtatcggcgtga

SEQ ID NO: 350544 - DNA, 30 bp, Artificial Sequence
  Synthetic oligonucleotide
ggagatgtaaatatttcccaaatatcgtga

SEQ ID NO: 350545 - DNA, 30 bp, Artificial Sequence
  Synthetic oligonucleotide
aagccgttcaaggtttaaagtctatcgtga

SEQ ID NO: 350546 - DNA, 30 bp, Artificial Sequence
  Synthetic oligonucleotide
atcaaaaaaacacctccgtcatcctcgtga

SEQ ID NO: 350547 - DNA, 30 bp, Artificial Sequence
  Synthetic oligonucleotide
tttgaagcgattttaggaagctcctcgtga

SEQ ID NO: 350548 - DNA, 30 bp, Artificial Sequence
  Synthetic oligonucleotide
atagtgagaaaagtggacatcccgtcgtga

SEQ ID NO: 350549 - DNA, 30 bp, Artificial Sequence
  Synthetic oligonucleotide
gacggacacaacggtgtggacgggtcgtga

SEQ ID NO: 350550 - DNA, 30 bp, Artificial Sequence
  Synthetic oligonucleotide
aagattgcatgcaaggcgtagaattcgtga

SEQ ID NO: 350551 - DNA, 30 bp, Artificial Sequence
  Synthetic oligonucleotide
tacaaagttcaggggctttaatgaaggtga

SEQ ID NO: 350552 - DNA, 30 bp, Artificial Sequence
  Synthetic oligonucleotide
ggattacttcgtcgccgtcggcgtaggtga

SEQ ID NO: 350553 - DNA, 30 bp, Artificial Sequence
  Synthetic oligonucleotide
tcagtcggttgggacatttatatacggtga

SEQ ID NO: 350554 - DNA, 30 bp, Artificial Sequence
  Synthetic oligonucleotide
ctcgtgtcgctgtccgtatttgtacggtga

SEQ ID NO: 350555 - DNA, 30 bp, Artificial Sequence
  Synthetic oligonucleotide
cggcttcatgggttttatcaagaccggtga

SEQ ID NO: 350556 - DNA, 30 bp, Artificial Sequence
  Synthetic oligonucleotide
agataagcattacggtccttttaccggtga

SEQ ID NO: 350557 - DNA, 30 bp, Artificial Sequence
  Synthetic oligonucleotide
ctaacttagacacacgaaacaatccggtga

SEQ ID NO: 350558 - DNA, 30 bp, Artificial Sequence
  Synthetic oligonucleotide
cagttcggtgggccatattccacgcggtga

SEQ ID NO: 350559 - DNA, 30 bp, Artificial Sequence
  Synthetic oligonucleotide
ggtccccaccgctgaatggctccgcggtga

SEQ ID NO: 350560 - DNA, 30 bp, Artificial Sequence
  Synthetic oligonucleotide
accctaacatcactaagaaacaggcggtga

SEQ ID NO: 350561 - DNA, 30 bp, Artificial Sequence
  Synthetic oligonucleotide
actcaaaatggtttgtggccattagggtga

SEQ ID NO: 350562 - DNA, 30 bp, Artificial Sequence
  Synthetic oligonucleotide
tccgagcgtggagccagtgcaagcgggtga

SEQ ID NO: 350563 - DNA, 30 bp, Artificial Sequence
  Synthetic oligonucleotide
gatttgatactccatacgcaaaaggggtga

SEQ ID NO: 350564 - DNA, 30 bp, Artificial Sequence
  Synthetic oligonucleotide
ggtagcgcaaagaaccaccgagaggggtga

SEQ ID NO: 350565 - DNA, 30 bp, Artificial Sequence
  Synthetic oligonucleotide
gaaggctcagcgcgctattttagggggtga

SEQ ID NO: 350566 - DNA, 30 bp, Artificial Sequence
  Synthetic oligonucleotide
ctgttcccttaccatgtgttactggggtga

SEQ ID NO: 350567 - DNA, 30 bp, Artificial Sequence
  Synthetic oligonucleotide
cactcaggtacgttaatcgaaaatgggtga

SEQ ID NO: 350568 - DNA, 30 bp, Artificial Sequence
  Synthetic oligonucleotide
agggggtcacccaagagctgtcctgggtga

SEQ ID NO: 350569 - DNA, 30 bp, Artificial Sequence
  Synthetic oligonucleotide
tgggcccatggataacctggttctgggtga

SEQ ID NO: 350570 - DNA, 30 bp, Artificial Sequence
  Synthetic oligonucleotide
tggctctcctgtggattacaatcatggtga

SEQ ID NO: 350571 - DNA, 30 bp, Artificial Sequence
  Synthetic oligonucleotide
ggatttgggaatgcgttgacgggctggtga

SEQ ID NO: 350572 - DNA, 30 bp, Artificial Sequence
  Synthetic oligonucleotide
gttcggttaggtggcccttctcggtggtga

SEQ ID NO: 350573 - DNA, 30 bp, Artificial Sequence
  Synthetic oligonucleotide
aagttgatcaaccttcgatgctattggtga

SEQ ID NO: 350574 - DNA, 30 bp, Artificial Sequence
  Synthetic oligonucleotide
gtgtgccaggtcaaacaccttcgttggtga

SEQ ID NO: 350575 - DNA, 30 bp, Artificial Sequence
  Synthetic oligonucleotide
tcggccttgaccattccttgcggttggtga

SEQ ID NO: 350576 - DNA, 30 bp, Artificial Sequence
  Synthetic oligonucleotide
gtatacgagttggtacccccttgttggtga

SEQ ID NO: 350577 - DNA, 30 bp, Artificial Sequence
  Synthetic oligonucleotide
gcagacacaatgaaagatcaattaatgtga

SEQ ID NO: 350578 - DNA, 30 bp, Artificial Sequence
  Synthetic oligonucleotide
ggtcacacagctagtcacttgcggatgtga

SEQ ID NO: 350579 - DNA, 30 bp, Artificial Sequence
  Synthetic oligonucleotide
aaccaccgtagcgcggtagtcaatatgtga

SEQ ID NO: 350580 - DNA, 30 bp, Artificial Sequence
  Synthetic oligonucleotide
ccaacaatgcatcttggccatgcactgtga

SEQ ID NO: 350581 - DNA, 30 bp, Artificial Sequence
  Synthetic oligonucleotide
ttttgcatttacgaataaggcggactgtga

SEQ ID NO: 350582 - DNA, 30 bp, Artificial Sequence
  Synthetic oligonucleotide
ttgacgcgattagtgacttataagctgtga

SEQ ID NO: 350583 - DNA, 30 bp, Artificial Sequence
  Synthetic oligonucleotide
accagctacggtccaaaagggattctgtga

SEQ ID NO: 350584 - DNA, 30 bp, Artificial Sequence
  Synthetic oligonucleotide
attaaggggtgaactgctggaacagtgtga

SEQ ID NO: 350585 - DNA, 30 bp, Artificial Sequence
  Synthetic oligonucleotide
gcacaccggacgaaagtaatggccgtgtga

SEQ ID NO: 350586 - DNA, 30 bp, Artificial Sequence
  Synthetic oligonucleotide
tctctagggtagaggcattagcgcgtgtga

SEQ ID NO: 350587 - DNA, 30 bp, Artificial Sequence
  Synthetic oligonucleotide
agtcagcaggcatggacgctgctcgtgtga

SEQ ID NO: 350588 - DNA, 30 bp, Artificial Sequence
  Synthetic oligonucleotide
ccgaagaacggcgtacgtgcaccggtgtga

SEQ ID NO: 350589 - DNA, 30 bp, Artificial Sequence
  Synthetic oligonucleotide
ggtactgggaagtcactatcggcggtgtga

SEQ ID NO: 350590 - DNA, 30 bp, Artificial Sequence
  Synthetic oligonucleotide
tatatcatactcagtggttgagcattgtga

SEQ ID NO: 350591 - DNA, 30 bp, Artificial Sequence
  Synthetic oligonucleotide
tagaacatctcgataactcattccttgtga

SEQ ID NO: 350592 - DNA, 30 bp, Artificial Sequence
  Synthetic oligonucleotide
accagatgatctgtagtgaggtcgttgtga

SEQ ID NO: 350593 - DNA, 30 bp, Artificial Sequence
  Synthetic oligonucleotide
ttcttacgtatgttgagcagttatttgtga

SEQ ID NO: 350594 - DNA, 30 bp, Artificial Sequence
  Synthetic oligonucleotide
caaggtcggttcttcctgagtcttttgtga

SEQ ID NO: 350595 - DNA, 30 bp, Artificial Sequence
  Synthetic oligonucleotide
gtgacgagggtccattatgttcaaaattga

SEQ ID NO: 350596 - DNA, 30 bp, Artificial Sequence
  Synthetic oligonucleotide
cagtacctatcggccggggcgccaaattga

SEQ ID NO: 350597 - DNA, 30 bp, Artificial Sequence
  Synthetic oligonucleotide
tcttgtgaaccgacttttcgagcaaattga

SEQ ID NO: 350598 - DNA, 30 bp, Artificial Sequence
  Synthetic oligonucleotide
gttctgtagagcccatagggatcgaattga

SEQ ID NO: 350599 - DNA, 30 bp, Artificial Sequence
  Synthetic oligonucleotide
acacgggggaacggtaaatttatgaattga

SEQ ID NO: 350600 - DNA, 30 bp, Artificial Sequence
  Synthetic oligonucleotide
gcgaaatgcctataggacgccagtaattga

SEQ ID NO: 350601 - DNA, 30 bp, Artificial Sequence
  Synthetic oligonucleotide
aatcaagttttatgcatatgcattaattga

SEQ ID NO: 350602 - DNA, 30 bp, Artificial Sequence
  Synthetic oligonucleotide
cagcacgtgtggtgacgcgcggttaattga

SEQ ID NO: 350603 - DNA, 30 bp, Artificial Sequence
  Synthetic oligonucleotide
ggttccccgctgctcgagggcacacattga

SEQ ID NO: 350604 - DNA, 30 bp, Artificial Sequence
  Synthetic oligonucleotide
atttccctgtccgggggagggccacattga

SEQ ID NO: 350605 - DNA, 30 bp, Artificial Sequence
  Synthetic oligonucleotide
cgcatcacctcgacgcccctatcacattga

SEQ ID NO: 350606 - DNA, 30 bp, Artificial Sequence
  Synthetic oligonucleotide
accgagcgcacatcacgtagacgacattga

SEQ ID NO: 350607 - DNA, 30 bp, Artificial Sequence
  Synthetic oligonucleotide
catagggtgatccctcaaccgccccattga

SEQ ID NO: 350608 - DNA, 30 bp, Artificial Sequence
  Synthetic oligonucleotide
aacagctttaataatggacttgcccattga

SEQ ID NO: 350609 - DNA, 30 bp, Artificial Sequence
  Synthetic oligonucleotide
ggcgctcgatgtgggattctacgccattga

SEQ ID NO: 350610 - DNA, 30 bp, Artificial Sequence
  Synthetic oligonucleotide
gagcgactaagagcatcccttggccattga

SEQ ID NO: 350611 - DNA, 30 bp, Artificial Sequence
  Synthetic oligonucleotide
tgtagctggagtacccgcaaggtgcattga

SEQ ID NO: 350612 - DNA, 30 bp, Artificial Sequence
  Synthetic oligonucleotide
tggcgggtctttctattcgatcctcattga

SEQ ID NO: 350613 - DNA, 30 bp, Artificial Sequence
  Synthetic oligonucleotide
ctataaccagaaaccgacaagcttcattga

SEQ ID NO: 350614 - DNA, 30 bp, Artificial Sequence
  Synthetic oligonucleotide
caaaaagtctgcttaaccttgtcggattga

SEQ ID NO: 350615 - DNA, 30 bp, Artificial Sequence
  Synthetic oligonucleotide
atggatatcaccataactcgattggattga

SEQ ID NO: 350616 - DNA, 30 bp, Artificial Sequence
  Synthetic oligonucleotide
catgggctatcttaagagagctactattga

SEQ ID NO: 350617 - DNA, 30 bp, Artificial Sequence
  Synthetic oligonucleotide
gatcgcagctaacagaattactgctattga

SEQ ID NO: 350618 - DNA, 30 bp, Artificial Sequence
  Synthetic oligonucleotide
gaaatgtgacggaagcggaaaaagtattga

SEQ ID NO: 350619 - DNA, 30 bp, Artificial Sequence
  Synthetic oligonucleotide
tacgtcgactatcgacattctctgtattga

SEQ ID NO: 350620 - DNA, 29 bp, Artificial Sequence
  Synthetic oligonucleotide
atgaggtgccgcgctattttacttattga

SEQ ID NO: 350621 - DNA, 30 bp, Artificial Sequence
  Synthetic oligonucleotide
ggcgcgtcaggacattccacgtgttattga

SEQ ID NO: 350622 - DNA, 29 bp, Artificial Sequence
  Synthetic oligonucleotide
cgtttgcccgcgcgccgtgtatttattga

SEQ ID NO: 350623 - DNA, 31 bp, Artificial Sequence
  Synthetic oligonucleotide
gtagccccttaggggttcttttcaaacttga

SEQ ID NO: 350624 - DNA, 30 bp, Artificial Sequence
  Synthetic oligonucleotide
aagtataaacgatcgatacagtcaacttga

SEQ ID NO: 350625 - DNA, 30 bp, Artificial Sequence
  Synthetic oligonucleotide
tgccttccagggtgggacaaggagacttga

SEQ ID NO: 350626 - DNA, 30 bp, Artificial Sequence
  Synthetic oligonucleotide
aaaagacggattttcctgcagccgacttga

SEQ ID NO: 350627 - DNA, 30 bp, Artificial Sequence
  Synthetic oligonucleotide
aaccgtttaaagtgtcggaatgcgacttga

SEQ ID NO: 350628 - DNA, 30 bp, Artificial Sequence
  Synthetic oligonucleotide
tcactcgtctagagtggtatttcgacttga

SEQ ID NO: 350629 - DNA, 30 bp, Artificial Sequence
  Synthetic oligonucleotide
ttaaagcgacatcaatgaatcaggacttga

SEQ ID NO: 350630 - DNA, 30 bp, Artificial Sequence
  Synthetic oligonucleotide
gggaagttttcaagatgaaatgggacttga

SEQ ID NO: 350631 - DNA, 30 bp, Artificial Sequence
  Synthetic oligonucleotide
caggttatgagaaccgcagtgtggacttga

SEQ ID NO: 350632 - DNA, 30 bp, Artificial Sequence
  Synthetic oligonucleotide
attcagacctcggccaacggtcatacttga

SEQ ID NO: 350633 - DNA, 30 bp, Artificial Sequence
  Synthetic oligonucleotide
aaaagcttgcctgccaaaggccttacttga

SEQ ID NO: 350634 - DNA, 30 bp, Artificial Sequence
  Synthetic oligonucleotide
ctcttaatgctcagatgcggggaaccttga

SEQ ID NO: 350635 - DNA, 30 bp, Artificial Sequence
  Synthetic oligonucleotide
gctcatatgttaggcgttactacaccttga

SEQ ID NO: 350636 - DNA, 30 bp, Artificial Sequence
  Synthetic oligonucleotide
catcacggtcagacttgtacagggccttga

SEQ ID NO: 350637 - DNA, 30 bp, Artificial Sequence
  Synthetic oligonucleotide
cccaagcgcggaaccccgaccctggcttga

SEQ ID NO: 350638 - DNA, 30 bp, Artificial Sequence
  Synthetic oligonucleotide
ccttttttgggcagatacttatgtgcttga

SEQ ID NO: 350639 - DNA, 30 bp, Artificial Sequence
  Synthetic oligonucleotide
agtatttgggatggggttccggtatcttga

SEQ ID NO: 350640 - DNA, 30 bp, Artificial Sequence
  Synthetic oligonucleotide
cataacctagttgccggagttacctcttga

SEQ ID NO: 350641 - DNA, 30 bp, Artificial Sequence
  Synthetic oligonucleotide
cagcgacccacgtgtggtcgcgggtcttga

SEQ ID NO: 350642 - DNA, 30 bp, Artificial Sequence
  Synthetic oligonucleotide
taaatacaggggatttcggtggtgtcttga

SEQ ID NO: 350643 - DNA, 30 bp, Artificial Sequence
  Synthetic oligonucleotide
atagtgatatgtatcctctgcttgtcttga

SEQ ID NO: 350644 - DNA, 30 bp, Artificial Sequence
  Synthetic oligonucleotide
gaggacagggcctcttcccatgattcttga

SEQ ID NO: 350645 - DNA, 30 bp, Artificial Sequence
  Synthetic oligonucleotide
caactaagtcctgtttcatggggttcttga

SEQ ID NO: 350646 - DNA, 30 bp, Artificial Sequence
  Synthetic oligonucleotide
cgtgtccgatccgggcacatactttcttga

SEQ ID NO: 350647 - DNA, 30 bp, Artificial Sequence
  Synthetic oligonucleotide
gttcaacatggggctcggcgaacaagttga

SEQ ID NO: 350648 - DNA, 30 bp, Artificial Sequence
  Synthetic oligonucleotide
tcagtcgtgaagtgttcgtcgccgagttga

SEQ ID NO: 350649 - DNA, 30 bp, Artificial Sequence
  Synthetic oligonucleotide
agtgtgtaacgggtctctgaccggagttga

SEQ ID NO: 350650 - DNA, 30 bp, Artificial Sequence
  Synthetic oligonucleotide
tattaagaacgggtgtatatgctgagttga

SEQ ID NO: 350651 - DNA, 30 bp, Artificial Sequence
  Synthetic oligonucleotide
ccagttatttatgcctatttccatagttga

SEQ ID NO: 350652 - DNA, 30 bp, Artificial Sequence
  Synthetic oligonucleotide
cgctgggggatgccgttaacgccacgttga

SEQ ID NO: 350653 - DNA, 30 bp, Artificial Sequence
  Synthetic oligonucleotide
gcaggaactttagcaggccccaagcgttga

SEQ ID NO: 350654 - DNA, 30 bp, Artificial Sequence
  Synthetic oligonucleotide
caaaattaggcccagcggtggcctcgttga

SEQ ID NO: 350655 - DNA, 30 bp, Artificial Sequence
  Synthetic oligonucleotide
gggattagttgtcggaaaggagctcgttga

SEQ ID NO: 350656 - DNA, 30 bp, Artificial Sequence
  Synthetic oligonucleotide
agagaacagtctcgccagcccagtcgttga

SEQ ID NO: 350657 - DNA, 30 bp, Artificial Sequence
  Synthetic oligonucleotide
cacgtatacaggtttgggacgcgaggttga

SEQ ID NO: 350658 - DNA, 30 bp, Artificial Sequence
  Synthetic oligonucleotide
gggtgataataccaccagagacacggttga

SEQ ID NO: 350659 - DNA, 30 bp, Artificial Sequence
  Synthetic oligonucleotide
ttcagacaaacgctaagtccttccggttga

SEQ ID NO: 350660 - DNA, 30 bp, Artificial Sequence
  Synthetic oligonucleotide
cgtcatcttggatcgttaaactggggttga

SEQ ID NO: 350661 - DNA, 30 bp, Artificial Sequence
  Synthetic oligonucleotide
gtccggttgaccatatatgtattgggttga

SEQ ID NO: 350662 - DNA, 30 bp, Artificial Sequence
  Synthetic oligonucleotide
tggccctgtaagttcttgagaactggttga

SEQ ID NO: 350663 - DNA, 30 bp, Artificial Sequence
  Synthetic oligonucleotide
aacgtacacgcgagtatatcagctggttga

SEQ ID NO: 350664 - DNA, 30 bp, Artificial Sequence
  Synthetic oligonucleotide
aactatatgggggttatgctaaaatgttga

SEQ ID NO: 350665 - DNA, 30 bp, Artificial Sequence
  Synthetic oligonucleotide
caaagcccttcgtagcgaccggcatgttga

SEQ ID NO: 350666 - DNA, 30 bp, Artificial Sequence
  Synthetic oligonucleotide
tagacagccctcggttatgtatgatgttga

SEQ ID NO: 350667 - DNA, 30 bp, Artificial Sequence
  Synthetic oligonucleotide
actcaggagcaaggttggcgcatatgttga

SEQ ID NO: 350668 - DNA, 30 bp, Artificial Sequence
  Synthetic oligonucleotide
ccccagcggttatgcatgttcttatgttga

SEQ ID NO: 350669 - DNA, 30 bp, Artificial Sequence
  Synthetic oligonucleotide
ccttatcctaagttgcgtatgtagtgttga

SEQ ID NO: 350670 - DNA, 30 bp, Artificial Sequence
  Synthetic oligonucleotide
cacgttatgcgactcagtagtaaaatttga

SEQ ID NO: 350671 - DNA, 30 bp, Artificial Sequence
  Synthetic oligonucleotide
ccattgggagtttacgggttcacaatttga

SEQ ID NO: 350672 - DNA, 30 bp, Artificial Sequence
  Synthetic oligonucleotide
tcgatgatcttagtgagaaatccaatttga

SEQ ID NO: 350673 - DNA, 30 bp, Artificial Sequence
  Synthetic oligonucleotide
agaatcgcactcagagggtattgaatttga

SEQ ID NO: 350674 - DNA, 30 bp, Artificial Sequence
  Synthetic oligonucleotide
gtggttgatgaagatccatatacgatttga

SEQ ID NO: 350675 - DNA, 30 bp, Artificial Sequence
  Synthetic oligonucleotide
ggccctatagatgtcggaacttcgatttga

SEQ ID NO: 350676 - DNA, 30 bp, Artificial Sequence
  Synthetic oligonucleotide
ctgggcgtgcactgtccatgttggatttga

SEQ ID NO: 350677 - DNA, 30 bp, Artificial Sequence
  Synthetic oligonucleotide
ttcgaagtactgtttactattctgatttga

SEQ ID NO: 350678 - DNA, 30 bp, Artificial Sequence
  Synthetic oligonucleotide
tagttgtctcttcctcggaccaaactttga

SEQ ID NO: 350679 - DNA, 29 bp, Artificial Sequence
  Synthetic oligonucleotide
taccagagcatttcgggcatcaactttga

SEQ ID NO: 350680 - DNA, 30 bp, Artificial Sequence
  Synthetic oligonucleotide
atgcggacgagttaggagtaagcactttga

SEQ ID NO: 350681 - DNA, 30 bp, Artificial Sequence
  Synthetic oligonucleotide
gaaaacaaatcacttaactagttactttga

SEQ ID NO: 350682 - DNA, 30 bp, Artificial Sequence
  Synthetic oligonucleotide
taatcttagactctcgactgtggcctttga

SEQ ID NO: 350683 - DNA, 30 bp, Artificial Sequence
  Synthetic oligonucleotide
tactcgcggttcaatgtccggcctctttga

SEQ ID NO: 350684 - DNA, 30 bp, Artificial Sequence
  Synthetic oligonucleotide
tctgttgactcatctcggtattttctttga

SEQ ID NO: 350685 - DNA, 30 bp, Artificial Sequence
  Synthetic oligonucleotide
ccactggactttaggcagatgtgagtttga

SEQ ID NO: 350686 - DNA, 30 bp, Artificial Sequence
  Synthetic oligonucleotide
gtaacggactcggcctggcttctagtttga

SEQ ID NO: 350687 - DNA, 30 bp, Artificial Sequence
  Synthetic oligonucleotide
agtcctgggctcgttcaggaacccgtttga

SEQ ID NO: 350688 - DNA, 30 bp, Artificial Sequence
  Synthetic oligonucleotide
ttcatgaagtgaagcacttacctcgtttga

SEQ ID NO: 350689 - DNA, 30 bp, Artificial Sequence
  Synthetic oligonucleotide
cccatcgtgagttaagtagaagtcgtttga

SEQ ID NO: 350690 - DNA, 30 bp, Artificial Sequence
  Synthetic oligonucleotide
gaaaatagcggagttcataagaatgtttga

SEQ ID NO: 350691 - DNA, 30 bp, Artificial Sequence
  Synthetic oligonucleotide
gtcaggttgtcgaggaaatagtatgtttga

SEQ ID NO: 350692 - DNA, 29 bp, Artificial Sequence
  Synthetic oligonucleotide
atgagggtctagccgtcattcgtgtttga

SEQ ID NO: 350693 - DNA, 30 bp, Artificial Sequence
  Synthetic oligonucleotide
ggctggttgggttgcggaaatcttgtttga

SEQ ID NO: 350694 - DNA, 30 bp, Artificial Sequence
  Synthetic oligonucleotide
aggatgttttctgttaatcgatttgtttga

SEQ ID NO: 350695 - DNA, 30 bp, Artificial Sequence
  Synthetic oligonucleotide
tacgggttacccgaatgacgcaagttttga

SEQ ID NO: 350696 - DNA, 30 bp, Artificial Sequence
  Synthetic oligonucleotide
tacatagcacccgtctgggaggcgttttga

SEQ ID NO: 350697 - DNA, 30 bp, Artificial Sequence
  Synthetic oligonucleotide
tggaactggaaggggcaggaaccaaaaata

SEQ ID NO: 350698 - DNA, 30 bp, Artificial Sequence
  Synthetic oligonucleotide
acaacgcaagtggctgtaagttcaaaaata

SEQ ID NO: 350699 - DNA, 30 bp, Artificial Sequence
  Synthetic oligonucleotide
gcttaaaaaggtctgttggtttcaaaaata

SEQ ID NO: 350700 - DNA, 30 bp, Artificial Sequence
  Synthetic oligonucleotide
cgaggctcgtccgtgtctactcgaaaaata

SEQ ID NO: 350701 - DNA, 30 bp, Artificial Sequence
  Synthetic oligonucleotide
tcctgatcacctgtccaagctttcaaaata

SEQ ID NO: 350702 - DNA, 30 bp, Artificial Sequence
  Synthetic oligonucleotide
attaggaccggctactgcctgcggaaaata

SEQ ID NO: 350703 - DNA, 30 bp, Artificial Sequence
  Synthetic oligonucleotide
cacctccctgccccttgtttgcataaaata

SEQ ID NO: 350704 - DNA, 30 bp, Artificial Sequence
  Synthetic oligonucleotide
agatggcagggaccgcagtacgctaaaata

SEQ ID NO: 350705 - DNA, 30 bp, Artificial Sequence
  Synthetic oligonucleotide
tcgctaacgacgtgtttgtaccgacaaata

SEQ ID NO: 350706 - DNA, 30 bp, Artificial Sequence
  Synthetic oligonucleotide
ttggaccccccggaaaaactgtaccaaata

SEQ ID NO: 350707 - DNA, 30 bp, Artificial Sequence
  Synthetic oligonucleotide
gtgcccctacagaaaccctgtacgcaaata

SEQ ID NO: 350708 - DNA, 30 bp, Artificial Sequence
  Synthetic oligonucleotide
tacagccgagcgcagcggaattcgcaaata

SEQ ID NO: 350709 - DNA, 30 bp, Artificial Sequence
  Synthetic oligonucleotide
agtcttatagtattaccagtcaatcaaata

SEQ ID NO: 350710 - DNA, 30 bp, Artificial Sequence
  Synthetic oligonucleotide
cattagagagatgatgcggattatcaaata

SEQ ID NO: 350711 - DNA, 30 bp, Artificial Sequence
  Synthetic oligonucleotide
ttatagccttgggcccgtgcgactcaaata

SEQ ID NO: 350712 - DNA, 30 bp, Artificial Sequence
  Synthetic oligonucleotide
gttatgtaaggatcagcacgtcctcaaata

SEQ ID NO: 350713 - DNA, 30 bp, Artificial Sequence
  Synthetic oligonucleotide
tgcagaaactatcctaggttaggtcaaata

SEQ ID NO: 350714 - DNA, 30 bp, Artificial Sequence
  Synthetic oligonucleotide
tagaaattctggctttctaggggtcaaata

SEQ ID NO: 350715 - DNA, 30 bp, Artificial Sequence
  Synthetic oligonucleotide
ccgaggaacatgaattaggccgttcaaata

SEQ ID NO: 350716 - DNA, 30 bp, Artificial Sequence
  Synthetic oligonucleotide
gaaaacatcagacagaagttccaagaaata

SEQ ID NO: 350717 - DNA, 30 bp, Artificial Sequence
  Synthetic oligonucleotide
atggtcggattcctattgttattcgaaata

SEQ ID NO: 350718 - DNA, 30 bp, Artificial Sequence
  Synthetic oligonucleotide
attgattagcagcactaaagtagggaaata

SEQ ID NO: 350719 - DNA, 30 bp, Artificial Sequence
  Synthetic oligonucleotide
aattacagtcattgataaattggggaaata

SEQ ID NO: 350720 - DNA, 30 bp, Artificial Sequence
  Synthetic oligonucleotide
tctgctgtcagtagtgagctatctgaaata

SEQ ID NO: 350721 - DNA, 30 bp, Artificial Sequence
  Synthetic oligonucleotide
ctattattgcgcctgataataattgaaata

SEQ ID NO: 350722 - DNA, 30 bp, Artificial Sequence
  Synthetic oligonucleotide
ccggactctctaaatccggatgcataaata

SEQ ID NO: 350723 - DNA, 30 bp, Artificial Sequence
  Synthetic oligonucleotide
gatacgggcggtctgtgccaccgataaata

SEQ ID NO: 350724 - DNA, 30 bp, Artificial Sequence
  Synthetic oligonucleotide
gtgttaataatcattacggaaggataaata

SEQ ID NO: 350725 - DNA, 30 bp, Artificial Sequence
  Synthetic oligonucleotide
ttgggccgcttcaggtgcaaatgctaaata

SEQ ID NO: 350726 - DNA, 30 bp, Artificial Sequence
  Synthetic oligonucleotide
ccggctgctaagatttgcttgtgctaaata

SEQ ID NO: 350727 - DNA, 30 bp, Artificial Sequence
  Synthetic oligonucleotide
gtctagttcccgttacacccccagtaaata

SEQ ID NO: 350728 - DNA, 30 bp, Artificial Sequence
  Synthetic oligonucleotide
tttctgaagccggtctagcaagagtaaata

SEQ ID NO: 350729 - DNA, 30 bp, Artificial Sequence
  Synthetic oligonucleotide
atctatcgctatcaaatttgaacgtaaata

SEQ ID NO: 350730 - DNA, 30 bp, Artificial Sequence
  Synthetic oligonucleotide
ggcattctatcggctttgagactgtaaata

SEQ ID NO: 350731 - DNA, 30 bp, Artificial Sequence
  Synthetic oligonucleotide
tgcatcctcttcaaattccggtaaacaata

SEQ ID NO: 350732 - DNA, 30 bp, Artificial Sequence
  Synthetic oligonucleotide
ggtcgccatggggccgttttaataacaata

SEQ ID NO: 350733 - DNA, 28 bp, Artificial Sequence
  Synthetic oligonucleotide
accggagcgatccgatattctaacaata

SEQ ID NO: 350734 - DNA, 30 bp, Artificial Sequence
  Synthetic oligonucleotide
cgcgtggaagctgcacgcgcaaacacaata

SEQ ID NO: 350735 - DNA, 30 bp, Artificial Sequence
  Synthetic oligonucleotide
acgccgccctatgttccgcacacgacaata

SEQ ID NO: 350736 - DNA, 30 bp, Artificial Sequence
  Synthetic oligonucleotide
tccgcttgggagacaggatatgcgacaata

SEQ ID NO: 350737 - DNA, 30 bp, Artificial Sequence
  Synthetic oligonucleotide
aaagtatggtacaaatatagtgggacaata

SEQ ID NO: 350738 - DNA, 30 bp, Artificial Sequence
  Synthetic oligonucleotide
aagcacccagtataccatgttcgtacaata

SEQ ID NO: 350739 - DNA, 29 bp, Artificial Sequence
  Synthetic oligonucleotide
tagcacgccagttagcatcactaccaata

SEQ ID NO: 350740 - DNA, 30 bp, Artificial Sequence
  Synthetic oligonucleotide
ttctggaccccgggagggtatgacccaata

SEQ ID NO: 350741 - DNA, 30 bp, Artificial Sequence
  Synthetic oligonucleotide
tgcactatgctggtgagtcctaagccaata

SEQ ID NO: 350742 - DNA, 30 bp, Artificial Sequence
  Synthetic oligonucleotide
caatgcggtcgttcaataactacagcaata

SEQ ID NO: 350743 - DNA, 31 bp, Artificial Sequence
  Synthetic oligonucleotide
taatccacaggtaacatctgcggccgcaata

SEQ ID NO: 350744 - DNA, 30 bp, Artificial Sequence
  Synthetic oligonucleotide
cgcgtccactctctagggcctcgcgcaata

SEQ ID NO: 350745 - DNA, 30 bp, Artificial Sequence
  Synthetic oligonucleotide
catcattatcttgtaaaaacgctcgcaata

SEQ ID NO: 350746 - DNA, 30 bp, Artificial Sequence
  Synthetic oligonucleotide
cacctagttgtatgatattggggggcaata

SEQ ID NO: 350747 - DNA, 30 bp, Artificial Sequence
  Synthetic oligonucleotide
tatacccgtaaccatactagcaatgcaata

SEQ ID NO: 350748 - DNA, 30 bp, Artificial Sequence
  Synthetic oligonucleotide
aaacagtggtgatgggagagaagtgcaata

SEQ ID NO: 350749 - DNA, 30 bp, Artificial Sequence
  Synthetic oligonucleotide
agcgactcctggggaaacttatttgcaata

SEQ ID NO: 350750 - DNA, 30 bp, Artificial Sequence
  Synthetic oligonucleotide
tcgaggttggactaccaagtctttgcaata

SEQ ID NO: 350751 - DNA, 30 bp, Artificial Sequence
  Synthetic oligonucleotide
tggaaggtcggcaaggtcagaaaatcaata

SEQ ID NO: 350752 - DNA, 30 bp, Artificial Sequence
  Synthetic oligonucleotide
ggcgggctagggggggcactttgatcaata

SEQ ID NO: 350753 - DNA, 30 bp, Artificial Sequence
  Synthetic oligonucleotide
gcggagtctgggcatcctttttcctcaata

SEQ ID NO: 350754 - DNA, 30 bp, Artificial Sequence
  Synthetic oligonucleotide
gatgccggaaggtcacctagctgctcaata

SEQ ID NO: 350755 - DNA, 30 bp, Artificial Sequence
  Synthetic oligonucleotide
tatacaaagttattggtacacatctcaata

SEQ ID NO: 350756 - DNA, 30 bp, Artificial Sequence
  Synthetic oligonucleotide
tacaactattagtgtgataatgtctcaata

SEQ ID NO: 350757 - DNA, 30 bp, Artificial Sequence
  Synthetic oligonucleotide
acacaagtgttactggcagctatgtcaata

SEQ ID NO: 350758 - DNA, 30 bp, Artificial Sequence
  Synthetic oligonucleotide
ggccgtagaccaggttgtaatgattcaata

SEQ ID NO: 350759 - DNA, 30 bp, Artificial Sequence
  Synthetic oligonucleotide
aggtataagactcgcctagcgggttcaata

SEQ ID NO: 350760 - DNA, 30 bp, Artificial Sequence
  Synthetic oligonucleotide
tggcagagtaaacagccagatgtttcaata

SEQ ID NO: 350761 - DNA, 30 bp, Artificial Sequence
  Synthetic oligonucleotide
taacttcatagggcagtttcaaggagaata

SEQ ID NO: 350762 - DNA, 30 bp, Artificial Sequence
  Synthetic oligonucleotide
agatattgtggacagccactcaggagaata

SEQ ID NO: 350763 - DNA, 30 bp, Artificial Sequence
  Synthetic oligonucleotide
gcagagccattgttcatcggttggagaata

SEQ ID NO: 350764 - DNA, 30 bp, Artificial Sequence
  Synthetic oligonucleotide
cattacccacaagtagcatatctgagaata

SEQ ID NO: 350765 - DNA, 30 bp, Artificial Sequence
  Synthetic oligonucleotide
ggtcgtgagtccgcagcctatgctagaata

SEQ ID NO: 350766 - DNA, 30 bp, Artificial Sequence
  Synthetic oligonucleotide
cgttcaattagaagttctgaactacgaata

SEQ ID NO: 350767 - DNA, 30 bp, Artificial Sequence
  Synthetic oligonucleotide
gaacgcgttgaaccggtatgggtccgaata

SEQ ID NO: 350768 - DNA, 30 bp, Artificial Sequence
  Synthetic oligonucleotide
tctaatacggtttagcattacgagcgaata

SEQ ID NO: 350769 - DNA, 30 bp, Artificial Sequence
  Synthetic oligonucleotide
aaccgggcacatacgctttcgcttcgaata

SEQ ID NO: 350770 - DNA, 30 bp, Artificial Sequence
  Synthetic oligonucleotide
cattgataggcgcgtgcgctgtaaggaata

SEQ ID NO: 350771 - DNA, 30 bp, Artificial Sequence
  Synthetic oligonucleotide
tcaaaaatagttgtcgccgtttaaggaata

SEQ ID NO: 350772 - DNA, 30 bp, Artificial Sequence
  Synthetic oligonucleotide
gctggtctcgcttgtgtggtcttaggaata

SEQ ID NO: 350773 - DNA, 30 bp, Artificial Sequence
  Synthetic oligonucleotide
gcgcttataatatcgctactaaagggaata

SEQ ID NO: 350774 - DNA, 30 bp, Artificial Sequence
  Synthetic oligonucleotide
acaatcatagttgatgttcgatggggaata

SEQ ID NO: 350775 - DNA, 30 bp, Artificial Sequence
  Synthetic oligonucleotide
gtaaaagtgtctacggtctttttgggaata

SEQ ID NO: 350776 - DNA, 30 bp, Artificial Sequence
  Synthetic oligonucleotide
tcattacccgtttatcaggaccttggaata

SEQ ID NO: 350777 - DNA, 31 bp, Artificial Sequence
  Synthetic oligonucleotide
atcacgtggaggtattcatggtccatgaata

SEQ ID NO: 350778 - DNA, 30 bp, Artificial Sequence
  Synthetic oligonucleotide
gactccgcagtcagagcagtcggatgaata

SEQ ID NO: 350779 - DNA, 30 bp, Artificial Sequence
  Synthetic oligonucleotide
tgtggccacagaagttttaaattgtgaata

SEQ ID NO: 350780 - DNA, 30 bp, Artificial Sequence
  Synthetic oligonucleotide
ccccgaaatatcgtggtaatatgttgaata

SEQ ID NO: 350781 - DNA, 30 bp, Artificial Sequence
  Synthetic oligonucleotide
aactatgggcatgggaaccgggtttgaata

SEQ ID NO: 350782 - DNA, 30 bp, Artificial Sequence
  Synthetic oligonucleotide
gagaaggtcttcagcctagcaggaataata

SEQ ID NO: 350783 - DNA, 30 bp, Artificial Sequence
  Synthetic oligonucleotide
tgttaagcacaggtctatcgatgaataata

SEQ ID NO: 350784 - DNA, 30 bp, Artificial Sequence
  Synthetic oligonucleotide
atactaggttggtcactagacttaataata

SEQ ID NO: 350785 - DNA, 30 bp, Artificial Sequence
  Synthetic oligonucleotide
aaatggtaccacggccgtgatagcataata

SEQ ID NO: 350786 - DNA, 30 bp, Artificial Sequence
  Synthetic oligonucleotide
cgtccgttagccgacgaaagcaagataata

SEQ ID NO: 350787 - DNA, 30 bp, Artificial Sequence
  Synthetic oligonucleotide
gaattccaacatgtaggcttggggataata

SEQ ID NO: 350788 - DNA, 30 bp, Artificial Sequence
  Synthetic oligonucleotide
gtggttttatgcttgtcatgcgaactaata

SEQ ID NO: 350789 - DNA, 30 bp, Artificial Sequence
  Synthetic oligonucleotide
gggctcttatttcagagtttaacactaata

SEQ ID NO: 350790 - DNA, 30 bp, Artificial Sequence
  Synthetic oligonucleotide
tctatgtggatatctcaacatcgactaata

SEQ ID NO: 350791 - DNA, 30 bp, Artificial Sequence
  Synthetic oligonucleotide
cggggttgccggacaacgggctacctaata

SEQ ID NO: 350792 - DNA, 30 bp, Artificial Sequence
  Synthetic oligonucleotide
ttgcgtgtttgcgatatttaagagctaata

SEQ ID NO: 350793 - DNA, 30 bp, Artificial Sequence
  Synthetic oligonucleotide
ccgctcggttttgacagaaaaacagtaata

SEQ ID NO: 350794 - DNA, 30 bp, Artificial Sequence
  Synthetic oligonucleotide
agatacggttattacttagcaatagtaata

SEQ ID NO: 350795 - DNA, 30 bp, Artificial Sequence
  Synthetic oligonucleotide
aatgcttcctaggcaagaagcaacgtaata

SEQ ID NO: 350796 - DNA, 30 bp, Artificial Sequence
  Synthetic oligonucleotide
ggaggctaataaaggcagcttaacgtaata

SEQ ID NO: 350797 - DNA, 30 bp, Artificial Sequence
  Synthetic oligonucleotide
atcaagtatctcctacgcgggtgcgtaata

SEQ ID NO: 350798 - DNA, 30 bp, Artificial Sequence
  Synthetic oligonucleotide
tccgtggaatgatggtgtttttgcgtaata

SEQ ID NO: 350799 - DNA, 30 bp, Artificial Sequence
  Synthetic oligonucleotide
tagtggtcaggcggaccttaggtcgtaata

SEQ ID NO: 350800 - DNA, 30 bp, Artificial Sequence
  Synthetic oligonucleotide
tgatattatcctgtaactggtccggtaata

SEQ ID NO: 350801 - DNA, 30 bp, Artificial Sequence
  Synthetic oligonucleotide
tgaactctcacgatgaagagatcggtaata

SEQ ID NO: 350802 - DNA, 30 bp, Artificial Sequence
  Synthetic oligonucleotide
gcctgggaagagacggtacggtcggtaata

SEQ ID NO: 350803 - DNA, 30 bp, Artificial Sequence
  Synthetic oligonucleotide
aacagcgtcgcccagctattcagggtaata

SEQ ID NO: 350804 - DNA, 30 bp, Artificial Sequence
  Synthetic oligonucleotide
ttagcaattggaattcaagagatggtaata

SEQ ID NO: 350805 - DNA, 30 bp, Artificial Sequence
  Synthetic oligonucleotide
ccttcaaccatgggcgtatctatggtaata

SEQ ID NO: 350806 - DNA, 30 bp, Artificial Sequence
  Synthetic oligonucleotide
ccattttttccagggtcggacttggtaata

SEQ ID NO: 350807 - DNA, 30 bp, Artificial Sequence
  Synthetic oligonucleotide
ctgcctcaaggtgcgagaggctctgtaata

SEQ ID NO: 350808 - DNA, 30 bp, Artificial Sequence
  Synthetic oligonucleotide
tggacatgttggattggtatcattgtaata

SEQ ID NO: 350809 - DNA, 30 bp, Artificial Sequence
  Synthetic oligonucleotide
ctgcagacatgtacagctcagcttgtaata

SEQ ID NO: 350810 - DNA, 30 bp, Artificial Sequence
  Synthetic oligonucleotide
ctgcacgcgcagactcggaactttgtaata

SEQ ID NO: 350811 - DNA, 30 bp, Artificial Sequence
  Synthetic oligonucleotide
tggcttcatcaacgaatgggtaaattaata

SEQ ID NO: 350812 - DNA, 30 bp, Artificial Sequence
  Synthetic oligonucleotide
tgtcgtatcgtttttgctggaccattaata

SEQ ID NO: 350813 - DNA, 30 bp, Artificial Sequence
  Synthetic oligonucleotide
ttatgcggaaaaatcgcctcgttattaata

SEQ ID NO: 350814 - DNA, 30 bp, Artificial Sequence
  Synthetic oligonucleotide
gtctacactcatttaagcactcggttaata

SEQ ID NO: 350815 - DNA, 30 bp, Artificial Sequence
  Synthetic oligonucleotide
acccggattgcgaaccaggcccatttaata

SEQ ID NO: 350816 - DNA, 30 bp, Artificial Sequence
  Synthetic oligonucleotide
ttgttgagtgatcgcccggatggtttaata

SEQ ID NO: 350817 - DNA, 30 bp, Artificial Sequence
  Synthetic oligonucleotide
aaaagtgaggagtaccctgagtttttaata

SEQ ID NO: 350818 - DNA, 30 bp, Artificial Sequence
  Synthetic oligonucleotide
gaaaagagcacattttggtggtttttaata

SEQ ID NO: 350819 - DNA, 30 bp, Artificial Sequence
  Synthetic oligonucleotide
acacagctatcgctgaaggagcaaaacata

SEQ ID NO: 350820 - DNA, 31 bp, Artificial Sequence
  Synthetic oligonucleotide
tccacgattgactgtagttgaagcaaacata

SEQ ID NO: 350821 - DNA, 30 bp, Artificial Sequence
  Synthetic oligonucleotide
cacatgaaagcgttctcgcttaacaacata

SEQ ID NO: 350822 - DNA, 30 bp, Artificial Sequence
  Synthetic oligonucleotide
tactgaccctcgaggatgagcgacaacata

SEQ ID NO: 350823 - DNA, 30 bp, Artificial Sequence
  Synthetic oligonucleotide
gctgtaattagactactacaagccaacata

SEQ ID NO: 350824 - DNA, 30 bp, Artificial Sequence
  Synthetic oligonucleotide
gcttatgatcagctcgggagacataacata

SEQ ID NO: 350825 - DNA, 30 bp, Artificial Sequence
  Synthetic oligonucleotide
cgtatctagaatttatgccagtgtaacata

SEQ ID NO: 350826 - DNA, 30 bp, Artificial Sequence
  Synthetic oligonucleotide
caactcctgccctaccccataacacacata

SEQ ID NO: 350827 - DNA, 30 bp, Artificial Sequence
  Synthetic oligonucleotide
ttgaatagacactcctggctagcacacata

SEQ ID NO: 350828 - DNA, 30 bp, Artificial Sequence
  Synthetic oligonucleotide
attaaatacgattatgtatccggacacata

SEQ ID NO: 350829 - DNA, 30 bp, Artificial Sequence
  Synthetic oligonucleotide
ataggtaactgctaatgaagtgcccacata

SEQ ID NO: 350830 - DNA, 30 bp, Artificial Sequence
  Synthetic oligonucleotide
taaactgttattattcgggccagccacata

SEQ ID NO: 350831 - DNA, 30 bp, Artificial Sequence
  Synthetic oligonucleotide
aaaaagctcttaggtgtttacgtccacata

SEQ ID NO: 350832 - DNA, 30 bp, Artificial Sequence
  Synthetic oligonucleotide
tggctgcggcaccgaaatccatagcacata

SEQ ID NO: 350833 - DNA, 30 bp, Artificial Sequence
  Synthetic oligonucleotide
gaaagactagaaagacacaacatgcacata

SEQ ID NO: 350834 - DNA, 30 bp, Artificial Sequence
  Synthetic oligonucleotide
aaatgggtttaaggttatgcacatcacata

SEQ ID NO: 350835 - DNA, 30 bp, Artificial Sequence
  Synthetic oligonucleotide
aagtaccaccacctccagttctgtcacata

SEQ ID NO: 350836 - DNA, 30 bp, Artificial Sequence
  Synthetic oligonucleotide
aggtgaatctgttaatgacggtgagacata

SEQ ID NO: 350837 - DNA, 30 bp, Artificial Sequence
  Synthetic oligonucleotide
tcgtgacacgagcagcatctataggacata

SEQ ID NO: 350838 - DNA, 30 bp, Artificial Sequence
  Synthetic oligonucleotide
taaccacgaatgtgatcgccccgggacata

SEQ ID NO: 350839 - DNA, 30 bp, Artificial Sequence
  Synthetic oligonucleotide
attgcattgcaacatagagatattgacata

SEQ ID NO: 350840 - DNA, 30 bp, Artificial Sequence
  Synthetic oligonucleotide
cggggtactcagtggtatgatattgacata

SEQ ID NO: 350841 - DNA, 30 bp, Artificial Sequence
  Synthetic oligonucleotide
agtcagaaatctggtcatttcatatacata

SEQ ID NO: 350842 - DNA, 30 bp, Artificial Sequence
  Synthetic oligonucleotide
caagtagattggaccaaggcgttatacata

SEQ ID NO: 350843 - DNA, 31 bp, Artificial Sequence
  Synthetic oligonucleotide
gaaactagtgaagaacgcaggtgagtacata

SEQ ID NO: 350844 - DNA, 30 bp, Artificial Sequence
  Synthetic oligonucleotide
gtgaacctacgttacactggcgggtacata

SEQ ID NO: 350845 - DNA, 30 bp, Artificial Sequence
  Synthetic oligonucleotide
catgagtgtgtcagaggtaatgtgtacata

SEQ ID NO: 350846 - DNA, 30 bp, Artificial Sequence
  Synthetic oligonucleotide
gctgacctgcctacctccgattcttacata

SEQ ID NO: 350847 - DNA, 30 bp, Artificial Sequence
  Synthetic oligonucleotide
aaaaaataagactctaaaaggttttacata

SEQ ID NO: 350848 - DNA, 30 bp, Artificial Sequence
  Synthetic oligonucleotide
ctggccgtttcggataaccgacaaaccata

SEQ ID NO: 350849 - DNA, 30 bp, Artificial Sequence
  Synthetic oligonucleotide
actcaaactgctgcacggtagccaaccata

SEQ ID NO: 350850 - DNA, 30 bp, Artificial Sequence
  Synthetic oligonucleotide
tctcttgcttagggatcataaatgaccata

SEQ ID NO: 350851 - DNA, 30 bp, Artificial Sequence
  Synthetic oligonucleotide
aggatgtaggattcatctttgattaccata

SEQ ID NO: 350852 - DNA, 30 bp, Artificial Sequence
  Synthetic oligonucleotide
agatggctgagtggcgtgttcgcccccata

SEQ ID NO: 350853 - DNA, 30 bp, Artificial Sequence
  Synthetic oligonucleotide
gagctctgtggcatgatccgagctcccata

SEQ ID NO: 350854 - DNA, 30 bp, Artificial Sequence
  Synthetic oligonucleotide
tccaccgtaagggacaacttatctcccata

SEQ ID NO: 350855 - DNA, 30 bp, Artificial Sequence
  Synthetic oligonucleotide
tcattgccgtcttccggaggaaaagccata

SEQ ID NO: 350856 - DNA, 30 bp, Artificial Sequence
  Synthetic oligonucleotide
attttttacaaacccccccaaccagccata

SEQ ID NO: 350857 - DNA, 30 bp, Artificial Sequence
  Synthetic oligonucleotide
gaatcactgatacgttaacctaccgccata

SEQ ID NO: 350858 - DNA, 30 bp, Artificial Sequence
  Synthetic oligonucleotide
taacaggcatttgggcgcggcctcgccata

SEQ ID NO: 350859 - DNA, 30 bp, Artificial Sequence
  Synthetic oligonucleotide
aattgggaaatatctagtgtatcggccata

SEQ ID NO: 350860 - DNA, 30 bp, Artificial Sequence
  Synthetic oligonucleotide
ggggttgagcgagcacttgaatgtgccata

SEQ ID NO: 350861 - DNA, 30 bp, Artificial Sequence
  Synthetic oligonucleotide
agtggtacccccatcaggattgttgccata

SEQ ID NO: 350862 - DNA, 30 bp, Artificial Sequence
  Synthetic oligonucleotide
acagatcctttagtccctacataatccata

SEQ ID NO: 350863 - DNA, 30 bp, Artificial Sequence
  Synthetic oligonucleotide
cacggggtagtaaataccatataatccata

SEQ ID NO: 350864 - DNA, 30 bp, Artificial Sequence
  Synthetic oligonucleotide
gcaaaaaaagcgcggtactttagctccata

SEQ ID NO: 350865 - DNA, 30 bp, Artificial Sequence
  Synthetic oligonucleotide
attacggtgcttcgtctggaattgtccata

SEQ ID NO: 350866 - DNA, 30 bp, Artificial Sequence
  Synthetic oligonucleotide
taacagcagtaacatacgggtcattccata

SEQ ID NO: 350867 - DNA, 30 bp, Artificial Sequence
  Synthetic oligonucleotide
gaaggagcagcacatcagctcataagcata

SEQ ID NO: 350868 - DNA, 30 bp, Artificial Sequence
  Synthetic oligonucleotide
gttcataggatcgcgatctggcacagcata

SEQ ID NO: 350869 - DNA, 30 bp, Artificial Sequence
  Synthetic oligonucleotide
gaagcaggatgcgcgagcgaagtgagcata

SEQ ID NO: 350870 - DNA, 30 bp, Artificial Sequence
  Synthetic oligonucleotide
ctaccttaaaggttagacagggtgagcata

SEQ ID NO: 350871 - DNA, 30 bp, Artificial Sequence
  Synthetic oligonucleotide
tgcaatgaagggacccgcattcatagcata

SEQ ID NO: 350872 - DNA, 30 bp, Artificial Sequence
  Synthetic oligonucleotide
aggctcatttatgagagcattatccgcata

SEQ ID NO: 350873 - DNA, 30 bp, Artificial Sequence
  Synthetic oligonucleotide
gctaactcctgagtgggtctcgagcgcata

SEQ ID NO: 350874 - DNA, 30 bp, Artificial Sequence
  Synthetic oligonucleotide
gacgctgtaactttatccagtaggcgcata

SEQ ID NO: 350875 - DNA, 30 bp, Artificial Sequence
  Synthetic oligonucleotide
gcgtggacattttccccgggattgcgcata

SEQ ID NO: 350876 - DNA, 30 bp, Artificial Sequence
  Synthetic oligonucleotide
aatgacactattacgaacgatgatcgcata

SEQ ID NO: 350877 - DNA, 30 bp, Artificial Sequence
  Synthetic oligonucleotide
gaggttttgccgatcatagtgtgtcgcata

SEQ ID NO: 350878 - DNA, 30 bp, Artificial Sequence
  Synthetic oligonucleotide
tagggctgataacgttaactggttcgcata

SEQ ID NO: 350879 - DNA, 30 bp, Artificial Sequence
  Synthetic oligonucleotide
gataacctgcaccttttagatagaggcata

SEQ ID NO: 350880 - DNA, 30 bp, Artificial Sequence
  Synthetic oligonucleotide
agtcactggcgggatttctagggaggcata

SEQ ID NO: 350881 - DNA, 30 bp, Artificial Sequence
  Synthetic oligonucleotide
tgattattctggttgattgggaacggcata

SEQ ID NO: 350882 - DNA, 30 bp, Artificial Sequence
  Synthetic oligonucleotide
agctggatgggggtaatgcagcacggcata

SEQ ID NO: 350883 - DNA, 30 bp, Artificial Sequence
  Synthetic oligonucleotide
ccatacgaacctgccccagagtacggcata

SEQ ID NO: 350884 - DNA, 30 bp, Artificial Sequence
  Synthetic oligonucleotide
cggttttcttctcgtcgcgaagtcggcata

SEQ ID NO: 350885 - DNA, 30 bp, Artificial Sequence
  Synthetic oligonucleotide
ctgctccatcgactgattagcacgggcata

SEQ ID NO: 350886 - DNA, 30 bp, Artificial Sequence
  Synthetic oligonucleotide
gtaatcattggattaagttaacggggcata

SEQ ID NO: 350887 - DNA, 30 bp, Artificial Sequence
  Synthetic oligonucleotide
cactgcattctccattgaggccatggcata

SEQ ID NO: 350888 - DNA, 30 bp, Artificial Sequence
  Synthetic oligonucleotide
caagttcgtctgacattcacagatggcata

SEQ ID NO: 350889 - DNA, 30 bp, Artificial Sequence
  Synthetic oligonucleotide
atagaggacgatcatacaccgggtggcata

SEQ ID NO: 350890 - DNA, 30 bp, Artificial Sequence
  Synthetic oligonucleotide
acaggacttatagggatgaattcatgcata

SEQ ID NO: 350891 - DNA, 30 bp, Artificial Sequence
  Synthetic oligonucleotide
gaaaaacctagcgggcatgtgtactgcata

SEQ ID NO: 350892 - DNA, 30 bp, Artificial Sequence
  Synthetic oligonucleotide
acccagcgctcatagggcgattgctgcata

SEQ ID NO: 350893 - DNA, 30 bp, Artificial Sequence
  Synthetic oligonucleotide
ctgaacccacggaaaagccatgggtgcata

SEQ ID NO: 350894 - DNA, 30 bp, Artificial Sequence
  Synthetic oligonucleotide
gggttcgccatatgcatttaatacatcata

SEQ ID NO: 350895 - DNA, 30 bp, Artificial Sequence
  Synthetic oligonucleotide
ggaacgatctatcacgaatgcaagatcata

SEQ ID NO: 350896 - DNA, 30 bp, Artificial Sequence
  Synthetic oligonucleotide
cggctttgagcaccgagcaataagatcata

SEQ ID NO: 350897 - DNA, 30 bp, Artificial Sequence
  Synthetic oligonucleotide
cccactgggcgactaataacagtgatcata

SEQ ID NO: 350898 - DNA, 30 bp, Artificial Sequence
  Synthetic oligonucleotide
gtcacagttgctactggagatttgatcata

SEQ ID NO: 350899 - DNA, 30 bp, Artificial Sequence
  Synthetic oligonucleotide
caagacctgtgttggacaacgtatatcata

SEQ ID NO: 350900 - DNA, 30 bp, Artificial Sequence
  Synthetic oligonucleotide
agcgtacaagtgccctaccactgtatcata

SEQ ID NO: 350901 - DNA, 30 bp, Artificial Sequence
  Synthetic oligonucleotide
atcgatacttttatgtatattggactcata

SEQ ID NO: 350902 - DNA, 30 bp, Artificial Sequence
  Synthetic oligonucleotide
actttaaggatacaacgccgtttcctcata

SEQ ID NO: 350903 - DNA, 30 bp, Artificial Sequence
  Synthetic oligonucleotide
acatcctgatacgatccttaatagctcata

SEQ ID NO: 350904 - DNA, 30 bp, Artificial Sequence
  Synthetic oligonucleotide
ggcggaatgacgggtttaatagcgctcata

SEQ ID NO: 350905 - DNA, 30 bp, Artificial Sequence
  Synthetic oligonucleotide
gaatgacttagggaaggccgggggctcata

SEQ ID NO: 350906 - DNA, 30 bp, Artificial Sequence
  Synthetic oligonucleotide
aaagaatcgtaaatatgtaagcgtctcata

SEQ ID NO: 350907 - DNA, 30 bp, Artificial Sequence
  Synthetic oligonucleotide
tcaaatcggtgaaagtaggcagtagtcata

SEQ ID NO: 350908 - DNA, 30 bp, Artificial Sequence
  Synthetic oligonucleotide
aggggtcccggtacaggctgcgtagtcata

SEQ ID NO: 350909 - DNA, 30 bp, Artificial Sequence
  Synthetic oligonucleotide
actagatccaacttgctgtggatggtcata

SEQ ID NO: 350910 - DNA, 30 bp, Artificial Sequence
  Synthetic oligonucleotide
ttttataacgcttctgcgggtagtgtcata

SEQ ID NO: 350911 - DNA, 30 bp, Artificial Sequence
  Synthetic oligonucleotide
tttcacaagcgctacaaaatttttgtcata

SEQ ID NO: 350912 - DNA, 30 bp, Artificial Sequence
  Synthetic oligonucleotide
aacacctaagccatgaccagaccattcata

SEQ ID NO: 350913 - DNA, 30 bp, Artificial Sequence
  Synthetic oligonucleotide
tcatactagcaattgtgggtgatattcata

SEQ ID NO: 350914 - DNA, 30 bp, Artificial Sequence
  Synthetic oligonucleotide
gcgttcggctaacatgaaacctacttcata

SEQ ID NO: 350915 - DNA, 30 bp, Artificial Sequence
  Synthetic oligonucleotide
ttccttatgatttacggtacagtcttcata

SEQ ID NO: 350916 - DNA, 30 bp, Artificial Sequence
  Synthetic oligonucleotide
tcgttcaaaccaggctaccggaggttcata

SEQ ID NO: 350917 - DNA, 30 bp, Artificial Sequence
  Synthetic oligonucleotide
tgcacagataatccgggtgcccttttcata

SEQ ID NO: 350918 - DNA, 30 bp, Artificial Sequence
  Synthetic oligonucleotide
atttagtatatctagaacccgccaaagata

SEQ ID NO: 350919 - DNA, 30 bp, Artificial Sequence
  Synthetic oligonucleotide
agagtaagcgggtccagcccatcaaagata

SEQ ID NO: 350920 - DNA, 30 bp, Artificial Sequence
  Synthetic oligonucleotide
gagaaatattgtggaattgatcgaaagata

SEQ ID NO: 350921 - DNA, 30 bp, Artificial Sequence
  Synthetic oligonucleotide
gatacatggcgcgacctagcctacaagata

SEQ ID NO: 350922 - DNA, 30 bp, Artificial Sequence
  Synthetic oligonucleotide
cctcgtttccgaggacactaatccaagata

SEQ ID NO: 350923 - DNA, 30 bp, Artificial Sequence
  Synthetic oligonucleotide
aatagaaatacggaaagcgtaggcaagata

SEQ ID NO: 350924 - DNA, 30 bp, Artificial Sequence
  Synthetic oligonucleotide
cctggtatgcgtttatcttacatcaagata

SEQ ID NO: 350925 - DNA, 30 bp, Artificial Sequence
  Synthetic oligonucleotide
aatacttaggtcaatcacgatctcaagata

SEQ ID NO: 350926 - DNA, 30 bp, Artificial Sequence
  Synthetic oligonucleotide
tcaccactttgatcgactgcgccgaagata

SEQ ID NO: 350927 - DNA, 30 bp, Artificial Sequence
  Synthetic oligonucleotide
ggaatatccttatagtaacgtaggaagata

SEQ ID NO: 350928 - DNA, 30 bp, Artificial Sequence
  Synthetic oligonucleotide
tatatgcacaagggtaggcttcataagata

SEQ ID NO: 350929 - DNA, 30 bp, Artificial Sequence
  Synthetic oligonucleotide
gcataattgtgtactcgtttccctaagata

SEQ ID NO: 350930 - DNA, 30 bp, Artificial Sequence
  Synthetic oligonucleotide
tgagtcgcgtcaatagagtggtctaagata

SEQ ID NO: 350931 - DNA, 30 bp, Artificial Sequence
  Synthetic oligonucleotide
gttgcgcctcagaggcagttacgtaagata

SEQ ID NO: 350932 - DNA, 30 bp, Artificial Sequence
  Synthetic oligonucleotide
tgacatttggggtaattaaatacacagata

SEQ ID NO: 350933 - DNA, 30 bp, Artificial Sequence
  Synthetic oligonucleotide
caggggaatagactttttcgtggacagata

SEQ ID NO: 350934 - DNA, 30 bp, Artificial Sequence
  Synthetic oligonucleotide
gtccatccgatgggtaaccctttacagata

SEQ ID NO: 350935 - DNA, 31 bp, Artificial Sequence
  Synthetic oligonucleotide
aacgtttacgtcctaaacgggtttacagata

SEQ ID NO: 350936 - DNA, 30 bp, Artificial Sequence
  Synthetic oligonucleotide
actatctcggtcttatcggggccccagata

SEQ ID NO: 350937 - DNA, 30 bp, Artificial Sequence
  Synthetic oligonucleotide
tcctaattaacatacgccttcgcccagata

SEQ ID NO: 350938 - DNA, 30 bp, Artificial Sequence
  Synthetic oligonucleotide
tatacggacgcggggtcgaggtcccagata

SEQ ID NO: 350939 - DNA, 30 bp, Artificial Sequence
  Synthetic oligonucleotide
acttgcgttcccttgaagatgtgccagata

SEQ ID NO: 350940 - DNA, 30 bp, Artificial Sequence
  Synthetic oligonucleotide
cgaacagtgaaaatccgtaaggcgcagata

SEQ ID NO: 350941 - DNA, 30 bp, Artificial Sequence
  Synthetic oligonucleotide
atcacgcgaacggtaagattatatgagata

SEQ ID NO: 350942 - DNA, 31 bp, Artificial Sequence
  Synthetic oligonucleotide
ttactctggtcgctattcaagggaatagata

SEQ ID NO: 350943 - DNA, 30 bp, Artificial Sequence
  Synthetic oligonucleotide
ctagatattcggcgtagcggtcgatagata

SEQ ID NO: 350944 - DNA, 30 bp, Artificial Sequence
  Synthetic oligonucleotide
gtaggggtcggctagaaacttttatagata

SEQ ID NO: 350945 - DNA, 30 bp, Artificial Sequence
  Synthetic oligonucleotide
agaatctcaacagttcagactcactagata

SEQ ID NO: 350946 - DNA, 30 bp, Artificial Sequence
  Synthetic oligonucleotide
atacaggactaccggtgcacctactagata

SEQ ID NO: 350947 - DNA, 30 bp, Artificial Sequence
  Synthetic oligonucleotide
ggagtgtctaattcaaagaaggcgtagata

SEQ ID NO: 350948 - DNA, 30 bp, Artificial Sequence
  Synthetic oligonucleotide
gaagaaaagtaatttaataatcggtagata

SEQ ID NO: 350949 - DNA, 30 bp, Artificial Sequence
  Synthetic oligonucleotide
atgttaggggctaacctaacggtgtagata

SEQ ID NO: 350950 - DNA, 30 bp, Artificial Sequence
  Synthetic oligonucleotide
ttgaggctgcataagaaatgcatcacgata

SEQ ID NO: 350951 - DNA, 30 bp, Artificial Sequence
  Synthetic oligonucleotide
cagtcaatattctaccgttagacgacgata

SEQ ID NO: 350952 - DNA, 30 bp, Artificial Sequence
  Synthetic oligonucleotide
aggaatttgtggtataggctctggacgata

SEQ ID NO: 350953 - DNA, 30 bp, Artificial Sequence
  Synthetic oligonucleotide
tttagtcttgactatgaagtggatacgata

SEQ ID NO: 350954 - DNA, 30 bp, Artificial Sequence
  Synthetic oligonucleotide
aactcaactgttatgttatcctgtacgata

SEQ ID NO: 350955 - DNA, 30 bp, Artificial Sequence
  Synthetic oligonucleotide
tgctataacctatgctgggtaattacgata

SEQ ID NO: 350956 - DNA, 30 bp, Artificial Sequence
  Synthetic oligonucleotide
gccgtgtatagacagagacactacccgata

SEQ ID NO: 350957 - DNA, 30 bp, Artificial Sequence
  Synthetic oligonucleotide
ggcatcagggaaccgtaaaacatcccgata

SEQ ID NO: 350958 - DNA, 30 bp, Artificial Sequence
  Synthetic oligonucleotide
tgtcatttcgactgggtctctgtcccgata

SEQ ID NO: 350959 - DNA, 30 bp, Artificial Sequence
  Synthetic oligonucleotide
gggggtaggagtctttcatttaagccgata

SEQ ID NO: 350960 - DNA, 30 bp, Artificial Sequence
  Synthetic oligonucleotide
gagtttactgtgagccatttacagccgata

SEQ ID NO: 350961 - DNA, 30 bp, Artificial Sequence
  Synthetic oligonucleotide
gtaagccggttaaaaagatctaatccgata

SEQ ID NO: 350962 - DNA, 30 bp, Artificial Sequence
  Synthetic oligonucleotide
gcccggaatcgttgagaatgctcagcgata

SEQ ID NO: 350963 - DNA, 30 bp, Artificial Sequence
  Synthetic oligonucleotide
tacaggcattacacttatggtatagcgata

SEQ ID NO: 350964 - DNA, 30 bp, Artificial Sequence
  Synthetic oligonucleotide
aacctttaacaggatcatgcctacgcgata

SEQ ID NO: 350965 - DNA, 30 bp, Artificial Sequence
  Synthetic oligonucleotide
atcaaggacgagatggttcggactgcgata

SEQ ID NO: 350966 - DNA, 30 bp, Artificial Sequence
  Synthetic oligonucleotide
cccagcaaaattaagcggctcaaatcgata

SEQ ID NO: 350967 - DNA, 30 bp, Artificial Sequence
  Synthetic oligonucleotide
ctgtcttgcagctgggttatgaaatcgata

SEQ ID NO: 350968 - DNA, 30 bp, Artificial Sequence
  Synthetic oligonucleotide
atcgcgtccctgggaagtaatgaatcgata

SEQ ID NO: 350969 - DNA, 30 bp, Artificial Sequence
  Synthetic oligonucleotide
gattcgaaaagttcattcgagagatcgata

SEQ ID NO: 350970 - DNA, 30 bp, Artificial Sequence
  Synthetic oligonucleotide
ggcgggatttagcaataccgttgatcgata

SEQ ID NO: 350971 - DNA, 30 bp, Artificial Sequence
  Synthetic oligonucleotide
gtcctttctaccgagtggtcgaactcgata

SEQ ID NO: 350972 - DNA, 30 bp, Artificial Sequence
  Synthetic oligonucleotide
cattttaatggcgatttgataccgtcgata

SEQ ID NO: 350973 - DNA, 30 bp, Artificial Sequence
  Synthetic oligonucleotide
tccatcgttagcgcaacgatgctttcgata

SEQ ID NO: 350974 - DNA, 30 bp, Artificial Sequence
  Synthetic oligonucleotide
aaggaaacagcagcgtaaagaccaaggata

SEQ ID NO: 350975 - DNA, 30 bp, Artificial Sequence
  Synthetic oligonucleotide
gcgggacctttgaggtgctgtaccaggata

SEQ ID NO: 350976 - DNA, 30 bp, Artificial Sequence
  Synthetic oligonucleotide
actcggctcgcagcggcgatcgccaggata

SEQ ID NO: 350977 - DNA, 30 bp, Artificial Sequence
  Synthetic oligonucleotide
agtagagcccgtcgcaaaaccatcaggata

SEQ ID NO: 350978 - DNA, 30 bp, Artificial Sequence
  Synthetic oligonucleotide
aataaccaagaactgggcggtcggaggata

SEQ ID NO: 350979 - DNA, 30 bp, Artificial Sequence
  Synthetic oligonucleotide
gggggtcattggtgaaactaggtgaggata

SEQ ID NO: 350980 - DNA, 30 bp, Artificial Sequence
  Synthetic oligonucleotide
tatacttctagtctcttgattgtgaggata

SEQ ID NO: 350981 - DNA, 30 bp, Artificial Sequence
  Synthetic oligonucleotide
agagtctggcacggtatacaaaataggata

SEQ ID NO: 350982 - DNA, 30 bp, Artificial Sequence
  Synthetic oligonucleotide
tttcagaataccgtaagcaagcataggata

SEQ ID NO: 350983 - DNA, 30 bp, Artificial Sequence
  Synthetic oligonucleotide
tagatagaggtgaacagtccggttaggata

SEQ ID NO: 350984 - DNA, 30 bp, Artificial Sequence
  Synthetic oligonucleotide
cactcattgcggagttgtttggttaggata

SEQ ID NO: 350985 - DNA, 30 bp, Artificial Sequence
  Synthetic oligonucleotide
ggagtagctcgcccgcattagcaacggata

SEQ ID NO: 350986 - DNA, 30 bp, Artificial Sequence
  Synthetic oligonucleotide
atgtacaaagcttggtcattttaacggata

SEQ ID NO: 350987 - DNA, 29 bp, Artificial Sequence
  Synthetic oligonucleotide
gaaccggatagggagcacccacacggata

SEQ ID NO: 350988 - DNA, 30 bp, Artificial Sequence
  Synthetic oligonucleotide
gtacagaaaccctgccatgaaatacggata

SEQ ID NO: 350989 - DNA, 30 bp, Artificial Sequence
  Synthetic oligonucleotide
ttatgaatcgaggtcagtgcccaccggata

SEQ ID NO: 350990 - DNA, 30 bp, Artificial Sequence
  Synthetic oligonucleotide
ttaccaactatgcagaggcttgcccggata

SEQ ID NO: 350991 - DNA, 29 bp, Artificial Sequence
  Synthetic oligonucleotide
gagagcatgagtcgttctggcgccggata

SEQ ID NO: 350992 - DNA, 30 bp, Artificial Sequence
  Synthetic oligonucleotide
taaccggctgcctcctatccgcagcggata

SEQ ID NO: 350993 - DNA, 30 bp, Artificial Sequence
  Synthetic oligonucleotide
ctgtctacccgcacacgacatagtcggata

SEQ ID NO: 350994 - DNA, 30 bp, Artificial Sequence
  Synthetic oligonucleotide
gattatgggatcaattaatccattcggata

SEQ ID NO: 350995 - DNA, 30 bp, Artificial Sequence
  Synthetic oligonucleotide
acgcttacaggaactgcaaacgttcggata

SEQ ID NO: 350996 - DNA, 30 bp, Artificial Sequence
  Synthetic oligonucleotide
gtgtcaggtacgtttcatgtaaaagggata

SEQ ID NO: 350997 - DNA, 30 bp, Artificial Sequence
  Synthetic oligonucleotide
cggaccagggtaagggtgaagccagggata

SEQ ID NO: 350998 - DNA, 30 bp, Artificial Sequence
  Synthetic oligonucleotide
gaccatgattcggaaattcaggacgggata

SEQ ID NO: 350999 - DNA, 30 bp, Artificial Sequence
  Synthetic oligonucleotide
agaagcataagcatccattgctacgggata

SEQ ID NO: 351000 - DNA, 30 bp, Artificial Sequence
  Synthetic oligonucleotide
aatggcatccgtacccttctatgcgggata

SEQ ID NO: 351001 - DNA, 30 bp, Artificial Sequence
  Synthetic oligonucleotide
taaaaactaatgacgtaaagacaggggata

SEQ ID NO: 351002 - DNA, 30 bp, Artificial Sequence
  Synthetic oligonucleotide
tttacacggaactgtcccagtcgggggata

SEQ ID NO: 351003 - DNA, 30 bp, Artificial Sequence
  Synthetic oligonucleotide
cgaacgttatgggggagcagccatgggata

SEQ ID NO: 351004 - DNA, 30 bp, Artificial Sequence
  Synthetic oligonucleotide
cgcaggagcaaggtaacgttctatgggata

SEQ ID NO: 351005 - DNA, 30 bp, Artificial Sequence
  Synthetic oligonucleotide
aatttcagcgcatgcctcagaaaatggata

SEQ ID NO: 351006 - DNA, 30 bp, Artificial Sequence
  Synthetic oligonucleotide
ttaggagtacatgtgcactcgccatggata

SEQ ID NO: 351007 - DNA, 30 bp, Artificial Sequence
  Synthetic oligonucleotide
cagttctagggaagtgcttagatctggata

SEQ ID NO: 351008 - DNA, 30 bp, Artificial Sequence
  Synthetic oligonucleotide
gggagtgtacttgcgcattaggtctggata

SEQ ID NO: 351009 - DNA, 30 bp, Artificial Sequence
  Synthetic oligonucleotide
ggctggatcattggtggtaaatagtggata

SEQ ID NO: 351010 - DNA, 30 bp, Artificial Sequence
  Synthetic oligonucleotide
aatcaactctagtatgcgattaattggata

SEQ ID NO: 351011 - DNA, 30 bp, Artificial Sequence
  Synthetic oligonucleotide
tagcggtgactgctaccgaccgacatgata

SEQ ID NO: 351012 - DNA, 30 bp, Artificial Sequence
  Synthetic oligonucleotide
agtattaacggcgtgcaatccaggatgata

SEQ ID NO: 351013 - DNA, 30 bp, Artificial Sequence
  Synthetic oligonucleotide
cttaagtccgacagccaagagaatatgata

SEQ ID NO: 351014 - DNA, 30 bp, Artificial Sequence
  Synthetic oligonucleotide
gtaattcgtaatacgaacagcgatatgata

SEQ ID NO: 351015 - DNA, 30 bp, Artificial Sequence
  Synthetic oligonucleotide
tttcatggacatgtctacgcctatatgata

SEQ ID NO: 351016 - DNA, 30 bp, Artificial Sequence
  Synthetic oligonucleotide
agagtcgcaccagcgcgtccgggtatgata

SEQ ID NO: 351017 - DNA, 30 bp, Artificial Sequence
  Synthetic oligonucleotide
gcgtggggacagtgattcgcagttatgata

SEQ ID NO: 351018 - DNA, 30 bp, Artificial Sequence
  Synthetic oligonucleotide
cattagtgtgcaggtcccgctaaactgata

SEQ ID NO: 351019 - DNA, 30 bp, Artificial Sequence
  Synthetic oligonucleotide
acatttatatacattagggagcacctgata

SEQ ID NO: 351020 - DNA, 30 bp, Artificial Sequence
  Synthetic oligonucleotide
cactatatcggcggagtgatactgctgata

SEQ ID NO: 351021 - DNA, 30 bp, Artificial Sequence
  Synthetic oligonucleotide
tcgatcatctatgtactttgcctgctgata

SEQ ID NO: 351022 - DNA, 30 bp, Artificial Sequence
  Synthetic oligonucleotide
accgcgttgatagccttggggtgtctgata

SEQ ID NO: 351023 - DNA, 30 bp, Artificial Sequence
  Synthetic oligonucleotide
gacggcttatacggaacttgttaagtgata

SEQ ID NO: 351024 - DNA, 30 bp, Artificial Sequence
  Synthetic oligonucleotide
tcctttctatgttactgccatgcagtgata

SEQ ID NO: 351025 - DNA, 30 bp, Artificial Sequence
  Synthetic oligonucleotide
gagtacgcaaaaactagtcaaggcgtgata

SEQ ID NO: 351026 - DNA, 30 bp, Artificial Sequence
  Synthetic oligonucleotide
aaaatggaaatattctgtaatcaggtgata

SEQ ID NO: 351027 - DNA, 30 bp, Artificial Sequence
  Synthetic oligonucleotide
acggttctcgcttaaccaactccggtgata

SEQ ID NO: 351028 - DNA, 30 bp, Artificial Sequence
  Synthetic oligonucleotide
gagttagcgttaagcacaccgagggtgata

SEQ ID NO: 351029 - DNA, 30 bp, Artificial Sequence
  Synthetic oligonucleotide
gcacactcggtgcctcaatctagggtgata

SEQ ID NO: 351030 - DNA, 30 bp, Artificial Sequence
  Synthetic oligonucleotide
tcatgtttatcgacccacctttgggtgata

SEQ ID NO: 351031 - DNA, 30 bp, Artificial Sequence
  Synthetic oligonucleotide
ttatcaagtgtccctgtacatggtgtgata

SEQ ID NO: 351032 - DNA, 30 bp, Artificial Sequence
  Synthetic oligonucleotide
ggcccggccatttaaatttataaattgata

SEQ ID NO: 351033 - DNA, 30 bp, Artificial Sequence
  Synthetic oligonucleotide
cggtcaagattctcgatccgagaattgata

SEQ ID NO: 351034 - DNA, 30 bp, Artificial Sequence
  Synthetic oligonucleotide
tattcaacatccgtttagtcataattgata

SEQ ID NO: 351035 - DNA, 30 bp, Artificial Sequence
  Synthetic oligonucleotide
tgcagagttacagtatggtgagccttgata

SEQ ID NO: 351036 - DNA, 30 bp, Artificial Sequence
  Synthetic oligonucleotide
ggcgcatctgtcggtatcagatgcttgata

SEQ ID NO: 351037 - DNA, 30 bp, Artificial Sequence
  Synthetic oligonucleotide
attgctgtgaaactagcctaagagttgata

SEQ ID NO: 351038 - DNA, 30 bp, Artificial Sequence
  Synthetic oligonucleotide
tgtgcctacaagatttcttaatggttgata

SEQ ID NO: 351039 - DNA, 30 bp, Artificial Sequence
  Synthetic oligonucleotide
gtgggcgtttttgactattactttttgata

SEQ ID NO: 351040 - DNA, 30 bp, Artificial Sequence
  Synthetic oligonucleotide
acatggtgatggccgcatgctccaaatata

SEQ ID NO: 351041 - DNA, 30 bp, Artificial Sequence
  Synthetic oligonucleotide
ccggcctagtacattgtagtgagaaatata

SEQ ID NO: 351042 - DNA, 30 bp, Artificial Sequence
  Synthetic oligonucleotide
taaacaacacgcgctctcgtagtaaatata

SEQ ID NO: 351043 - DNA, 30 bp, Artificial Sequence
  Synthetic oligonucleotide
gaaaagcggtatccgaattgggacaatata

SEQ ID NO: 351044 - DNA, 30 bp, Artificial Sequence
  Synthetic oligonucleotide
ccgacctttttacaagcacaaaccaatata

SEQ ID NO: 351045 - DNA, 30 bp, Artificial Sequence
  Synthetic oligonucleotide
gggtgcatggagccagtacgacccaatata

SEQ ID NO: 351046 - DNA, 30 bp, Artificial Sequence
  Synthetic oligonucleotide
gcgctacgtaagtttagaatgcgcaatata

SEQ ID NO: 351047 - DNA, 30 bp, Artificial Sequence
  Synthetic oligonucleotide
agctctgttgtggacacacgaaagaatata

SEQ ID NO: 351048 - DNA, 30 bp, Artificial Sequence
  Synthetic oligonucleotide
tgaccccacctatacaacaggcggaatata

SEQ ID NO: 351049 - DNA, 30 bp, Artificial Sequence
  Synthetic oligonucleotide
gtcgatatgttgcggtttaacccacatata

SEQ ID NO: 351050 - DNA, 30 bp, Artificial Sequence
  Synthetic oligonucleotide
ggttcagacaaacatgcacttagacatata

SEQ ID NO: 351051 - DNA, 30 bp, Artificial Sequence
  Synthetic oligonucleotide
ctcacccaatgttaggctgagggacatata

SEQ ID NO: 351052 - DNA, 30 bp, Artificial Sequence
  Synthetic oligonucleotide
ggcgtatttcccggtattgaggtacatata

SEQ ID NO: 351053 - DNA, 30 bp, Artificial Sequence
  Synthetic oligonucleotide
atctgggttacggggttctagcatcatata

SEQ ID NO: 351054 - DNA, 30 bp, Artificial Sequence
  Synthetic oligonucleotide
agacaccatataagtctttacactcatata

SEQ ID NO: 351055 - DNA, 30 bp, Artificial Sequence
  Synthetic oligonucleotide
gcgcttatcattcctcaccaggtagatata

SEQ ID NO: 351056 - DNA, 30 bp, Artificial Sequence
  Synthetic oligonucleotide
gcggtcgttaccgttgggaacatcgatata

SEQ ID NO: 351057 - DNA, 30 bp, Artificial Sequence
  Synthetic oligonucleotide
ggatatatggccgaattgattagggatata

SEQ ID NO: 351058 - DNA, 30 bp, Artificial Sequence
  Synthetic oligonucleotide
gcccgtggctaagacggagacttggatata

SEQ ID NO: 351059 - DNA, 30 bp, Artificial Sequence
  Synthetic oligonucleotide
tatcgttttagatccattgatagtgatata

SEQ ID NO: 351060 - DNA, 31 bp, Artificial Sequence
  Synthetic oligonucleotide
gtgccttgaggtctacttcaactcatatata

SEQ ID NO: 351061 - DNA, 30 bp, Artificial Sequence
  Synthetic oligonucleotide
ggcagtagttaaatctgagcaggatatata

SEQ ID NO: 351062 - DNA, 30 bp, Artificial Sequence
  Synthetic oligonucleotide
caaagtcgagcccatttcggaggatatata

SEQ ID NO: 351063 - DNA, 30 bp, Artificial Sequence
  Synthetic oligonucleotide
cagatcctgtccagtcatgaactatatata

SEQ ID NO: 351064 - DNA, 30 bp, Artificial Sequence
  Synthetic oligonucleotide
cagttttggcatcgtatttacgactatata

SEQ ID NO: 351065 - DNA, 30 bp, Artificial Sequence
  Synthetic oligonucleotide
gatcggtcctcatataatccaatctatata

SEQ ID NO: 351066 - DNA, 30 bp, Artificial Sequence
  Synthetic oligonucleotide
gcccttatggatggtgtttagatctatata

SEQ ID NO: 351067 - DNA, 30 bp, Artificial Sequence
  Synthetic oligonucleotide
acaggaatccgcattactgtgcagtatata

SEQ ID NO: 351068 - DNA, 30 bp, Artificial Sequence
  Synthetic oligonucleotide
gcacgagcactgggtcgtctagggtatata

SEQ ID NO: 351069 - DNA, 30 bp, Artificial Sequence
  Synthetic oligonucleotide
gtctgcaattttctaggccacgtgtatata

SEQ ID NO: 351070 - DNA, 30 bp, Artificial Sequence
  Synthetic oligonucleotide
tacggataaattatcaaatacccttatata

SEQ ID NO: 351071 - DNA, 30 bp, Artificial Sequence
  Synthetic oligonucleotide
tccaactatgtaaagcacgaggaaactata

SEQ ID NO: 351072 - DNA, 30 bp, Artificial Sequence
  Synthetic oligonucleotide
gggattaaaattaaagcgaccccaactata

SEQ ID NO: 351073 - DNA, 30 bp, Artificial Sequence
  Synthetic oligonucleotide
gctcccttaggatatacgtctggaactata

SEQ ID NO: 351074 - DNA, 30 bp, Artificial Sequence
  Synthetic oligonucleotide
aacctataatcagtaagtgcactaactata

SEQ ID NO: 351075 - DNA, 31 bp, Artificial Sequence
  Synthetic oligonucleotide
gtccggatattaacttccttcggccactata

SEQ ID NO: 351076 - DNA, 30 bp, Artificial Sequence
  Synthetic oligonucleotide
gtcataggcgtgctgcaccttagcactata

SEQ ID NO: 351077 - DNA, 30 bp, Artificial Sequence
  Synthetic oligonucleotide
ccaaattgtagactcaatttcgagactata

SEQ ID NO: 351078 - DNA, 30 bp, Artificial Sequence
  Synthetic oligonucleotide
agcgtttgggtacatgctcggaggactata

SEQ ID NO: 351079 - DNA, 30 bp, Artificial Sequence
  Synthetic oligonucleotide
cgttgttgtggctcaagattcgctactata

SEQ ID NO: 351080 - DNA, 30 bp, Artificial Sequence
  Synthetic oligonucleotide
gcacagtatgagtgggagaactctactata

SEQ ID NO: 351081 - DNA, 30 bp, Artificial Sequence
  Synthetic oligonucleotide
gctatgtacagggtccgtctacgtactata

SEQ ID NO: 351082 - DNA, 30 bp, Artificial Sequence
  Synthetic oligonucleotide
agaagactcgttccagtcctgggtactata

SEQ ID NO: 351083 - DNA, 30 bp, Artificial Sequence
  Synthetic oligonucleotide
ccagcagataaatcccagggtaaacctata

SEQ ID NO: 351084 - DNA, 30 bp, Artificial Sequence
  Synthetic oligonucleotide
cgtcgttgcgttgctattgttgggcctata

SEQ ID NO: 351085 - DNA, 30 bp, Artificial Sequence
  Synthetic oligonucleotide
acacctatcttgaatgaccgaagtcctata

SEQ ID NO: 351086 - DNA, 30 bp, Artificial Sequence
  Synthetic oligonucleotide
gttaaactaccacattcttgcgcagctata

SEQ ID NO: 351087 - DNA, 30 bp, Artificial Sequence
  Synthetic oligonucleotide
cattttgtaatatcaattagcgccgctata

SEQ ID NO: 351088 - DNA, 30 bp, Artificial Sequence
  Synthetic oligonucleotide
gcagagcgagggtccgctgccgtcgctata

SEQ ID NO: 351089 - DNA, 30 bp, Artificial Sequence
  Synthetic oligonucleotide
gggtaacggttgcggctaatataggctata

SEQ ID NO: 351090 - DNA, 30 bp, Artificial Sequence
  Synthetic oligonucleotide
tgattcgaatcggattgcagattggctata

SEQ ID NO: 351091 - DNA, 30 bp, Artificial Sequence
  Synthetic oligonucleotide
aaagaccggcactacgagaagcctgctata

SEQ ID NO: 351092 - DNA, 30 bp, Artificial Sequence
  Synthetic oligonucleotide
gcagggaaccggtttagtcgaggctctata

SEQ ID NO: 351093 - DNA, 30 bp, Artificial Sequence
  Synthetic oligonucleotide
tagggggctctgggccatattatctctata

SEQ ID NO: 351094 - DNA, 30 bp, Artificial Sequence
  Synthetic oligonucleotide
gagggtgtaacgagtatatgtaattctata

SEQ ID NO: 351095 - DNA, 30 bp, Artificial Sequence
  Synthetic oligonucleotide
ataaggccgcagtagcgacgcgcttctata

SEQ ID NO: 351096 - DNA, 30 bp, Artificial Sequence
  Synthetic oligonucleotide
tctctgggtgtaagtgctaggtcttctata

SEQ ID NO: 351097 - DNA, 30 bp, Artificial Sequence
  Synthetic oligonucleotide
gagagtatgcaaggtaacgctcaaagtata

SEQ ID NO: 351098 - DNA, 30 bp, Artificial Sequence
  Synthetic oligonucleotide
gcagtttgtctacggtctgagaacagtata

SEQ ID NO: 351099 - DNA, 30 bp, Artificial Sequence
  Synthetic oligonucleotide
gactgagatctagggccataatccagtata

SEQ ID NO: 351100 - DNA, 31 bp, Artificial Sequence
  Synthetic oligonucleotide
tggaagcgttccaactgcggtttccagtata

SEQ ID NO: 351101 - DNA, 30 bp, Artificial Sequence
  Synthetic oligonucleotide
aattaacacaacaacagtcgcctcagtata

SEQ ID NO: 351102 - DNA, 30 bp, Artificial Sequence
  Synthetic oligonucleotide
ttccgaatgggacgttctggtttcagtata

SEQ ID NO: 351103 - DNA, 30 bp, Artificial Sequence
  Synthetic oligonucleotide
tgaatgaaatcaggtgtaagacggagtata

SEQ ID NO: 351104 - DNA, 30 bp, Artificial Sequence
  Synthetic oligonucleotide
tacgcgtgcttagtatggggggggagtata

SEQ ID NO: 351105 - DNA, 30 bp, Artificial Sequence
  Synthetic oligonucleotide
gtgttaatgatccaggctgttgtgagtata

SEQ ID NO: 351106 - DNA, 30 bp, Artificial Sequence
  Synthetic oligonucleotide
tcggtgcgtcacgaatctaagcatagtata

SEQ ID NO: 351107 - DNA, 30 bp, Artificial Sequence
  Synthetic oligonucleotide
tcggttgggccaggcatgggggcacgtata

SEQ ID NO: 351108 - DNA, 30 bp, Artificial Sequence
  Synthetic oligonucleotide
aacgcaggaaatgggctaataatacgtata

SEQ ID NO: 351109 - DNA, 30 bp, Artificial Sequence
  Synthetic oligonucleotide
ctatgagggtgcgatagcttaccccgtata

SEQ ID NO: 351110 - DNA, 30 bp, Artificial Sequence
  Synthetic oligonucleotide
aaacgtgctaaagaagagcagcgccgtata

SEQ ID NO: 351111 - DNA, 30 bp, Artificial Sequence
  Synthetic oligonucleotide
ccatatacccagggggtacgcttccgtata

SEQ ID NO: 351112 - DNA, 30 bp, Artificial Sequence
  Synthetic oligonucleotide
ctgcagcccgagacctaactcttccgtata

SEQ ID NO: 351113 - DNA, 30 bp, Artificial Sequence
  Synthetic oligonucleotide
gtactctggatctggtggtgccatcgtata

SEQ ID NO: 351114 - DNA, 30 bp, Artificial Sequence
  Synthetic oligonucleotide
gcaaacagcgcgcttaaaacgtaaggtata

SEQ ID NO: 351115 - DNA, 30 bp, Artificial Sequence
  Synthetic oligonucleotide
ctgggtgaaactcagcacgcgacaggtata

SEQ ID NO: 351116 - DNA, 30 bp, Artificial Sequence
  Synthetic oligonucleotide
ctcaggtttgctccgcactcctcaggtata

SEQ ID NO: 351117 - DNA, 30 bp, Artificial Sequence
  Synthetic oligonucleotide
cacctggctatcgcgccgctggtaggtata

SEQ ID NO: 351118 - DNA, 30 bp, Artificial Sequence
  Synthetic oligonucleotide
gtcctcgaggggagtgaccacctgggtata

SEQ ID NO: 351119 - DNA, 30 bp, Artificial Sequence
  Synthetic oligonucleotide
cattagcgaaggcactaagcctctggtata

SEQ ID NO: 351120 - DNA, 30 bp, Artificial Sequence
  Synthetic oligonucleotide
gcgaattcttaagtatacaaaattggtata

SEQ ID NO: 351121 - DNA, 30 bp, Artificial Sequence
  Synthetic oligonucleotide
gggatttagctggttatgagcaaatgtata

SEQ ID NO: 351122 - DNA, 30 bp, Artificial Sequence
  Synthetic oligonucleotide
ttctgattgaagaaacggtcagaatgtata

SEQ ID NO: 351123 - DNA, 30 bp, Artificial Sequence
  Synthetic oligonucleotide
gccctccatcaagtgtaaagaacatgtata

SEQ ID NO: 351124 - DNA, 30 bp, Artificial Sequence
  Synthetic oligonucleotide
tcaacatacccctggcgtgactcatgtata

SEQ ID NO: 351125 - DNA, 30 bp, Artificial Sequence
  Synthetic oligonucleotide
tcagggacttcctgctttgggcgatgtata

SEQ ID NO: 351126 - DNA, 30 bp, Artificial Sequence
  Synthetic oligonucleotide
ttcacctgtacggacacgccgggatgtata

SEQ ID NO: 351127 - DNA, 30 bp, Artificial Sequence
  Synthetic oligonucleotide
tattttgaaagagtgggaaaatcctgtata

SEQ ID NO: 351128 - DNA, 30 bp, Artificial Sequence
  Synthetic oligonucleotide
atgcacgcgatttccggataaggctgtata

SEQ ID NO: 351129 - DNA, 30 bp, Artificial Sequence
  Synthetic oligonucleotide
gggttcacacacgagttgtgtctctgtata

SEQ ID NO: 351130 - DNA, 30 bp, Artificial Sequence
  Synthetic oligonucleotide
aacatgggacatatagggggtgagtgtata

SEQ ID NO: 351131 - DNA, 30 bp, Artificial Sequence
  Synthetic oligonucleotide
ggtttaaatctcgcgaggagtaggtgtata

SEQ ID NO: 351132 - DNA, 30 bp, Artificial Sequence
  Synthetic oligonucleotide
tagtgcaaaggcagtctactagggtgtata

SEQ ID NO: 351133 - DNA, 30 bp, Artificial Sequence
  Synthetic oligonucleotide
cttggcagtagacagacggctaattgtata

SEQ ID NO: 351134 - DNA, 30 bp, Artificial Sequence
  Synthetic oligonucleotide
gactcttatctcatgaattaatcttgtata

SEQ ID NO: 351135 - DNA, 30 bp, Artificial Sequence
  Synthetic oligonucleotide
cctattagaaccaatatgatcgtttgtata

SEQ ID NO: 351136 - DNA, 30 bp, Artificial Sequence
  Synthetic oligonucleotide
atgaaatggtatgattcatcataaattata

SEQ ID NO: 351137 - DNA, 30 bp, Artificial Sequence
  Synthetic oligonucleotide
aatagttgggtacttgacagaacaattata

SEQ ID NO: 351138 - DNA, 30 bp, Artificial Sequence
  Synthetic oligonucleotide
caagctaagtatgtatacacaagaattata

SEQ ID NO: 351139 - DNA, 30 bp, Artificial Sequence
  Synthetic oligonucleotide
cgcggcgcgaaatccttttataacattata

SEQ ID NO: 351140 - DNA, 30 bp, Artificial Sequence
  Synthetic oligonucleotide
atctgataagagggtaacttactcattata

SEQ ID NO: 351141 - DNA, 30 bp, Artificial Sequence
  Synthetic oligonucleotide
tagagagaacttcaacggaaagtcattata

SEQ ID NO: 351142 - DNA, 30 bp, Artificial Sequence
  Synthetic oligonucleotide
taacttctttattgcccacccccgattata

SEQ ID NO: 351143 - DNA, 30 bp, Artificial Sequence
  Synthetic oligonucleotide
tgaaagccaatggcaacttatgtgattata

SEQ ID NO: 351144 - DNA, 30 bp, Artificial Sequence
  Synthetic oligonucleotide
tgtgtggccggtgagatgttggctattata

SEQ ID NO: 351145 - DNA, 30 bp, Artificial Sequence
  Synthetic oligonucleotide
tcccttgtaaactcgggaactccacttata

SEQ ID NO: 351146 - DNA, 30 bp, Artificial Sequence
  Synthetic oligonucleotide
ggattaagccgatacagcaaaagacttata

SEQ ID NO: 351147 - DNA, 30 bp, Artificial Sequence
  Synthetic oligonucleotide
gattaggagcggcgaaggcaacgacttata

SEQ ID NO: 351148 - DNA, 30 bp, Artificial Sequence
  Synthetic oligonucleotide
tggctgggaaacggtgtctaagtacttata

SEQ ID NO: 351149 - DNA, 30 bp, Artificial Sequence
  Synthetic oligonucleotide
acgttcagccagtattgtagagaccttata

SEQ ID NO: 351150 - DNA, 30 bp, Artificial Sequence
  Synthetic oligonucleotide
ggggatatccggaggagggatgaccttata

SEQ ID NO: 351151 - DNA, 30 bp, Artificial Sequence
  Synthetic oligonucleotide
ttaggacagatcggggcagacatccttata

SEQ ID NO: 351152 - DNA, 30 bp, Artificial Sequence
  Synthetic oligonucleotide
atgagtgatcctggggcaggtaggcttata

SEQ ID NO: 351153 - DNA, 31 bp, Artificial Sequence
  Synthetic oligonucleotide
ctggccaccgtcaaataatttagggcttata

SEQ ID NO: 351154 - DNA, 30 bp, Artificial Sequence
  Synthetic oligonucleotide
taggcctccacacctcgcctgtggcttata

SEQ ID NO: 351155 - DNA, 30 bp, Artificial Sequence
  Synthetic oligonucleotide
tccaagagggtaatgtcagcctaagttata

SEQ ID NO: 351156 - DNA, 30 bp, Artificial Sequence
  Synthetic oligonucleotide
ttaggaggtaatgcggtgaagacagttata

SEQ ID NO: 351157 - DNA, 30 bp, Artificial Sequence
  Synthetic oligonucleotide
atccagaatacagtgaaggttagagttata

SEQ ID NO: 351158 - DNA, 30 bp, Artificial Sequence
  Synthetic oligonucleotide
ccactttgattaagctacatcggagttata

SEQ ID NO: 351159 - DNA, 30 bp, Artificial Sequence
  Synthetic oligonucleotide
gctcacagttgacgtgattggctagttata

SEQ ID NO: 351160 - DNA, 30 bp, Artificial Sequence
  Synthetic oligonucleotide
tgattttgagtccgtaatgataacgttata

SEQ ID NO: 351161 - DNA, 30 bp, Artificial Sequence
  Synthetic oligonucleotide
ccgccacagcaatggctcatgtacgttata

SEQ ID NO: 351162 - DNA, 30 bp, Artificial Sequence
  Synthetic oligonucleotide
ccaactccggacaattcgctcgccgttata

SEQ ID NO: 351163 - DNA, 30 bp, Artificial Sequence
  Synthetic oligonucleotide
ttgaaagttgtactacgcttcagcgttata

SEQ ID NO: 351164 - DNA, 30 bp, Artificial Sequence
  Synthetic oligonucleotide
gcaaaagaaaatttgctcctgcaggttata

SEQ ID NO: 351165 - DNA, 30 bp, Artificial Sequence
  Synthetic oligonucleotide
tttggtatcggtcccgaggtcttatttata

SEQ ID NO: 351166 - DNA, 30 bp, Artificial Sequence
  Synthetic oligonucleotide
tagtgtgccgtcgtgcagcttgcctttata

SEQ ID NO: 351167 - DNA, 30 bp, Artificial Sequence
  Synthetic oligonucleotide
ctatggaattggatggatatttcttttata

SEQ ID NO: 351168 - DNA, 30 bp, Artificial Sequence
  Synthetic oligonucleotide
gagccgggggaaacggttctttcttttata

SEQ ID NO: 351169 - DNA, 30 bp, Artificial Sequence
  Synthetic oligonucleotide
aacgggatgactccttccaaactttttata

SEQ ID NO: 351170 - DNA, 30 bp, Artificial Sequence
  Synthetic oligonucleotide
ctaagccggcgagttgagtaggtttttata

SEQ ID NO: 351171 - DNA, 30 bp, Artificial Sequence
  Synthetic oligonucleotide
atgaattcctttaagttatctagaaaacta

SEQ ID NO: 351172 - DNA, 30 bp, Artificial Sequence
  Synthetic oligonucleotide
taagcaccgaatcgcatatagataaaacta

SEQ ID NO: 351173 - DNA, 30 bp, Artificial Sequence
  Synthetic oligonucleotide
cggtaagtccttaagctccactacaaacta

SEQ ID NO: 351174 - DNA, 30 bp, Artificial Sequence
  Synthetic oligonucleotide
tgcacatctccctttcgataaatcaaacta

SEQ ID NO: 351175 - DNA, 31 bp, Artificial Sequence
  Synthetic oligonucleotide
aaaaaaaaacttgtacatgtcctagaaacta

SEQ ID NO: 351176 - DNA, 30 bp, Artificial Sequence
  Synthetic oligonucleotide
aggaaaaccacaggctccgcagaacaacta

SEQ ID NO: 351177 - DNA, 30 bp, Artificial Sequence
  Synthetic oligonucleotide
acgatcactccgcagtccagcccacaacta

SEQ ID NO: 351178 - DNA, 30 bp, Artificial Sequence
  Synthetic oligonucleotide
ttggacagcattgactgttcgtcacaacta

SEQ ID NO: 351179 - DNA, 30 bp, Artificial Sequence
  Synthetic oligonucleotide
gtgcctgccattaacacaggcgaccaacta

SEQ ID NO: 351180 - DNA, 30 bp, Artificial Sequence
  Synthetic oligonucleotide
tatccctaacatatggaatgcggccaacta

SEQ ID NO: 351181 - DNA, 30 bp, Artificial Sequence
  Synthetic oligonucleotide
gactgtcctaatggtatgcgcgctcaacta

SEQ ID NO: 351182 - DNA, 30 bp, Artificial Sequence
  Synthetic oligonucleotide
gccatcaggcacggtattgcttctcaacta

SEQ ID NO: 351183 - DNA, 30 bp, Artificial Sequence
  Synthetic oligonucleotide
tttctcgcagcagtagggccagcagaacta

SEQ ID NO: 351184 - DNA, 30 bp, Artificial Sequence
  Synthetic oligonucleotide
attagaatgcccgtgttacattgcgaacta

SEQ ID NO: 351185 - DNA, 30 bp, Artificial Sequence
  Synthetic oligonucleotide
tgccgtatttgccttcgcgcttgcgaacta

SEQ ID NO: 351186 - DNA, 30 bp, Artificial Sequence
  Synthetic oligonucleotide
tccgacgggactctgcgggagacggaacta

SEQ ID NO: 351187 - DNA, 30 bp, Artificial Sequence
  Synthetic oligonucleotide
agtctgcaccatggctttccgaatgaacta

SEQ ID NO: 351188 - DNA, 30 bp, Artificial Sequence
  Synthetic oligonucleotide
ggtgattgttggtccgcagaacatgaacta

SEQ ID NO: 351189 - DNA, 30 bp, Artificial Sequence
  Synthetic oligonucleotide
ggaactaactgttgtccaaacggataacta

SEQ ID NO: 351190 - DNA, 30 bp, Artificial Sequence
  Synthetic oligonucleotide
agtgggcctgaacgatgtattgtataacta

SEQ ID NO: 351191 - DNA, 30 bp, Artificial Sequence
  Synthetic oligonucleotide
agcttcatatccattaggccattataacta

SEQ ID NO: 351192 - DNA, 30 bp, Artificial Sequence
  Synthetic oligonucleotide
agggcagatgtttaataataactctaacta

SEQ ID NO: 351193 - DNA, 30 bp, Artificial Sequence
  Synthetic oligonucleotide
atggaaagacatgtcgttgcaaattaacta

SEQ ID NO: 351194 - DNA, 31 bp, Artificial Sequence
  Synthetic oligonucleotide
ccaagtacggaataagggatagatttaacta

SEQ ID NO: 351195 - DNA, 30 bp, Artificial Sequence
  Synthetic oligonucleotide
ttctggccggaattcgctgcgcaaacacta

SEQ ID NO: 351196 - DNA, 30 bp, Artificial Sequence
  Synthetic oligonucleotide
tatatgtctagctcccgctgataaacacta

SEQ ID NO: 351197 - DNA, 30 bp, Artificial Sequence
  Synthetic oligonucleotide
gagggtaataccctgagtttataaacacta

SEQ ID NO: 351198 - DNA, 30 bp, Artificial Sequence
  Synthetic oligonucleotide
tcctttacaggtgagggtcggagaacacta

SEQ ID NO: 351199 - DNA, 30 bp, Artificial Sequence
  Synthetic oligonucleotide
gtcaatagatacgggactcttataacacta

SEQ ID NO: 351200 - DNA, 30 bp, Artificial Sequence
  Synthetic oligonucleotide
gcaatccccacgggtcttctagtaacacta

SEQ ID NO: 351201 - DNA, 30 bp, Artificial Sequence
  Synthetic oligonucleotide
attgcgctctgtgcgcaaggaggaccacta

SEQ ID NO: 351202 - DNA, 30 bp, Artificial Sequence
  Synthetic oligonucleotide
accatcattggagtcggggaccgcccacta

SEQ ID NO: 351203 - DNA, 30 bp, Artificial Sequence
  Synthetic oligonucleotide
ggctaaggattatagttgagatggccacta

SEQ ID NO: 351204 - DNA, 30 bp, Artificial Sequence
  Synthetic oligonucleotide
ttctccgaaaacttagacttaacagcacta

SEQ ID NO: 351205 - DNA, 30 bp, Artificial Sequence
  Synthetic oligonucleotide
aggtgcaactcctattataagacagcacta

SEQ ID NO: 351206 - DNA, 30 bp, Artificial Sequence
  Synthetic oligonucleotide
ctctttaggcttcacgacagaagagcacta

SEQ ID NO: 351207 - DNA, 30 bp, Artificial Sequence
  Synthetic oligonucleotide
ttactcatgcaaacacaggagagcgcacta

SEQ ID NO: 351208 - DNA, 30 bp, Artificial Sequence
  Synthetic oligonucleotide
agagcccggacagatgagaagttcgcacta

SEQ ID NO: 351209 - DNA, 30 bp, Artificial Sequence
  Synthetic oligonucleotide
ctagacatatatggttagatacttgcacta

SEQ ID NO: 351210 - DNA, 30 bp, Artificial Sequence
  Synthetic oligonucleotide
gctggttatcatttgggtggaaaatcacta

SEQ ID NO: 351211 - DNA, 30 bp, Artificial Sequence
  Synthetic oligonucleotide
tacggtctttttgacatggtcatatcacta

SEQ ID NO: 351212 - DNA, 30 bp, Artificial Sequence
  Synthetic oligonucleotide
ttaatcgtatctttcggccagcgctcacta

SEQ ID NO: 351213 - DNA, 30 bp, Artificial Sequence
  Synthetic oligonucleotide
acagcgcaaccaatctgttaatagtcacta

SEQ ID NO: 351214 - DNA, 30 bp, Artificial Sequence
  Synthetic oligonucleotide
agcgacgttgccagaatccgagcgtcacta

SEQ ID NO: 351215 - DNA, 30 bp, Artificial Sequence
  Synthetic oligonucleotide
tatggctggggtatagcaccattgtcacta

SEQ ID NO: 351216 - DNA, 30 bp, Artificial Sequence
  Synthetic oligonucleotide
taccatgttactccgggaggcaattcacta

SEQ ID NO: 351217 - DNA, 30 bp, Artificial Sequence
  Synthetic oligonucleotide
cgtcccatagatagtcaatataattcacta

SEQ ID NO: 351218 - DNA, 30 bp, Artificial Sequence
  Synthetic oligonucleotide
tagatgtatactactctcggccgttcacta

SEQ ID NO: 351219 - DNA, 30 bp, Artificial Sequence
  Synthetic oligonucleotide
cacatgatttccaagatcgtgcgttcacta

SEQ ID NO: 351220 - DNA, 30 bp, Artificial Sequence
  Synthetic oligonucleotide
cagatttgactttgaaaggacggttcacta

SEQ ID NO: 351221 - DNA, 30 bp, Artificial Sequence
  Synthetic oligonucleotide
tggtcaaaaaccacgggtaattcaagacta

SEQ ID NO: 351222 - DNA, 30 bp, Artificial Sequence
  Synthetic oligonucleotide
agagtccgctggtaacttaatataagacta

SEQ ID NO: 351223 - DNA, 30 bp, Artificial Sequence
  Synthetic oligonucleotide
atgttagcttcacttcgtctagtaagacta

SEQ ID NO: 351224 - DNA, 30 bp, Artificial Sequence
  Synthetic oligonucleotide
taaactaagggtagaacgcgcttaagacta

SEQ ID NO: 351225 - DNA, 30 bp, Artificial Sequence
  Synthetic oligonucleotide
ggtaaccgttcttaaaatattatcagacta

SEQ ID NO: 351226 - DNA, 30 bp, Artificial Sequence
  Synthetic oligonucleotide
tcgttttgaggttgagctaacgagagacta

SEQ ID NO: 351227 - DNA, 30 bp, Artificial Sequence
  Synthetic oligonucleotide
cgaattcctctctttttcgggtagagacta

SEQ ID NO: 351228 - DNA, 30 bp, Artificial Sequence
  Synthetic oligonucleotide
gtgtgaagctgctctgcgactccgagacta

SEQ ID NO: 351229 - DNA, 30 bp, Artificial Sequence
  Synthetic oligonucleotide
tggccatgaggactggacaacaggagacta

SEQ ID NO: 351230 - DNA, 30 bp, Artificial Sequence
  Synthetic oligonucleotide
cagtgaggcccttgttatgttgggagacta

SEQ ID NO: 351231 - DNA, 30 bp, Artificial Sequence
  Synthetic oligonucleotide
ccaatacctatcaaacgtgcgaatagacta

SEQ ID NO: 351232 - DNA, 30 bp, Artificial Sequence
  Synthetic oligonucleotide
atcccggaataatgtcgtaatcgtagacta

SEQ ID NO: 351233 - DNA, 30 bp, Artificial Sequence
  Synthetic oligonucleotide
tgtgaaagtctggactagtcattacgacta

SEQ ID NO: 351234 - DNA, 30 bp, Artificial Sequence
  Synthetic oligonucleotide
tcattctccgcaccgctaggcaagcgacta

SEQ ID NO: 351235 - DNA, 30 bp, Artificial Sequence
  Synthetic oligonucleotide
ggaaatcgcagtgtgagccggaaaggacta

SEQ ID NO: 351236 - DNA, 30 bp, Artificial Sequence
  Synthetic oligonucleotide
agtctagttgatggctgtggtcaaggacta

SEQ ID NO: 351237 - DNA, 30 bp, Artificial Sequence
  Synthetic oligonucleotide
cggtgatatggcaattatactacaggacta

SEQ ID NO: 351238 - DNA, 30 bp, Artificial Sequence
  Synthetic oligonucleotide
aatatagcccttgggtcagttaacggacta

SEQ ID NO: 351239 - DNA, 30 bp, Artificial Sequence
  Synthetic oligonucleotide
gagtggatgggacaggagtaagacggacta

SEQ ID NO: 351240 - DNA, 30 bp, Artificial Sequence
  Synthetic oligonucleotide
tgtaacattcgcgtgattatgaagggacta

SEQ ID NO: 351241 - DNA, 30 bp, Artificial Sequence
  Synthetic oligonucleotide
gagcccgatagtggtgcattccagggacta

SEQ ID NO: 351242 - DNA, 30 bp, Artificial Sequence
  Synthetic oligonucleotide
tgcgaccgtaacatagcaggctgtggacta

SEQ ID NO: 351243 - DNA, 30 bp, Artificial Sequence
  Synthetic oligonucleotide
taacttgtagtgagtcatcattgtggacta

SEQ ID NO: 351244 - DNA, 30 bp, Artificial Sequence
  Synthetic oligonucleotide
aggtagctgacgcggttgagcattggacta

SEQ ID NO: 351245 - DNA, 30 bp, Artificial Sequence
  Synthetic oligonucleotide
ttcggagtttccctcgaaacatcctgacta

SEQ ID NO: 351246 - DNA, 30 bp, Artificial Sequence
  Synthetic oligonucleotide
attggtgtcctattagaattcgcgtgacta

SEQ ID NO: 351247 - DNA, 30 bp, Artificial Sequence
  Synthetic oligonucleotide
acgggcagcgtaggagctcccacaatacta

SEQ ID NO: 351248 - DNA, 30 bp, Artificial Sequence
  Synthetic oligonucleotide
acatgagagacaggatatgctataatacta

SEQ ID NO: 351249 - DNA, 30 bp, Artificial Sequence
  Synthetic oligonucleotide
tatcccaccaattcccgagccctgatacta

SEQ ID NO: 351250 - DNA, 30 bp, Artificial Sequence
  Synthetic oligonucleotide
cgtttcataccagcgccacagaatatacta

SEQ ID NO: 351251 - DNA, 30 bp, Artificial Sequence
  Synthetic oligonucleotide
ctcgtgtcactcagaaagctgtctatacta

SEQ ID NO: 351252 - DNA, 30 bp, Artificial Sequence
  Synthetic oligonucleotide
ggccccctcaagttggcgaagagtatacta

SEQ ID NO: 351253 - DNA, 30 bp, Artificial Sequence
  Synthetic oligonucleotide
caaaactcaaaacggttttaaattatacta

SEQ ID NO: 351254 - DNA, 30 bp, Artificial Sequence
  Synthetic oligonucleotide
ggaatgctaccggtcccccccgcactacta

SEQ ID NO: 351255 - DNA, 30 bp, Artificial Sequence
  Synthetic oligonucleotide
gcacatgggtcacgattcgctctactacta

SEQ ID NO: 351256 - DNA, 30 bp, Artificial Sequence
  Synthetic oligonucleotide
aataaacgcaagagaatctagaacctacta

SEQ ID NO: 351257 - DNA, 30 bp, Artificial Sequence
  Synthetic oligonucleotide
aaaaacgtggaactccatcagagcctacta

SEQ ID NO: 351258 - DNA, 30 bp, Artificial Sequence
  Synthetic oligonucleotide
acggcgcatgcatgcatttgtccgctacta

SEQ ID NO: 351259 - DNA, 30 bp, Artificial Sequence
  Synthetic oligonucleotide
ctgaacagtgcatatcgtaagaaagtacta

SEQ ID NO: 351260 - DNA, 30 bp, Artificial Sequence
  Synthetic oligonucleotide
tttatgacttttaacaccccattagtacta

SEQ ID NO: 351261 - DNA, 30 bp, Artificial Sequence
  Synthetic oligonucleotide
acattaccgggttttaggaccaaggtacta

SEQ ID NO: 351262 - DNA, 30 bp, Artificial Sequence
  Synthetic oligonucleotide
gccacgaagatttgcgtgggctgggtacta

SEQ ID NO: 351263 - DNA, 30 bp, Artificial Sequence
  Synthetic oligonucleotide
cgactggataaatcgaatgacgctgtacta

SEQ ID NO: 351264 - DNA, 30 bp, Artificial Sequence
  Synthetic oligonucleotide
ccaacgggatttgatgcgtaaagtgtacta

SEQ ID NO: 351265 - DNA, 30 bp, Artificial Sequence
  Synthetic oligonucleotide
caaccgccccacatagcactaagtgtacta

SEQ ID NO: 351266 - DNA, 30 bp, Artificial Sequence
  Synthetic oligonucleotide
agttttcggggcgtcttaggtagtgtacta

SEQ ID NO: 351267 - DNA, 30 bp, Artificial Sequence
  Synthetic oligonucleotide
tgcgacggcgcttttgaaatcagattacta

SEQ ID NO: 351268 - DNA, 30 bp, Artificial Sequence
  Synthetic oligonucleotide
cagctcaaccctagcacatgtgacttacta

SEQ ID NO: 351269 - DNA, 30 bp, Artificial Sequence
  Synthetic oligonucleotide
actggattacgggagcccgtgcggttacta

SEQ ID NO: 351270 - DNA, 30 bp, Artificial Sequence
  Synthetic oligonucleotide
ggagtccgtccagcaagtggatggttacta

SEQ ID NO: 351271 - DNA, 30 bp, Artificial Sequence
  Synthetic oligonucleotide
ttgtagcttcaagttggtaagtatttacta

SEQ ID NO: 351272 - DNA, 30 bp, Artificial Sequence
  Synthetic oligonucleotide
agcgtatagtcccggcaaggttctttacta

SEQ ID NO: 351273 - DNA, 30 bp, Artificial Sequence
  Synthetic oligonucleotide
ttgtgccattcattgctgtaagttttacta

SEQ ID NO: 351274 - DNA, 30 bp, Artificial Sequence
  Synthetic oligonucleotide
aagggttctgccagttagactggaaaccta

SEQ ID NO: 351275 - DNA, 30 bp, Artificial Sequence
  Synthetic oligonucleotide
cgcatggttatgaacttgattcggaaccta

SEQ ID NO: 351276 - DNA, 30 bp, Artificial Sequence
  Synthetic oligonucleotide
cggctaaaattcgacttattttttaaccta

SEQ ID NO: 351277 - DNA, 30 bp, Artificial Sequence
  Synthetic oligonucleotide
gagccgcgtaggaaaaccgcagaacaccta

SEQ ID NO: 351278 - DNA, 30 bp, Artificial Sequence
  Synthetic oligonucleotide
tcctaagtcttcttttcactacgacaccta

SEQ ID NO: 351279 - DNA, 30 bp, Artificial Sequence
  Synthetic oligonucleotide
caaagtgaacctataggtgcgtgacaccta

SEQ ID NO: 351280 - DNA, 30 bp, Artificial Sequence
  Synthetic oligonucleotide
tgaccctaaacctttagactcgtgcaccta

SEQ ID NO: 351281 - DNA, 30 bp, Artificial Sequence
  Synthetic oligonucleotide
cagcgcccgcactaaccagggtctcaccta

SEQ ID NO: 351282 - DNA, 30 bp, Artificial Sequence
  Synthetic oligonucleotide
tcaatgtattttccatggctataagaccta

SEQ ID NO: 351283 - DNA, 30 bp, Artificial Sequence
  Synthetic oligonucleotide
cttacatggaatttgccctttgccgaccta

SEQ ID NO: 351284 - DNA, 30 bp, Artificial Sequence
  Synthetic oligonucleotide
aatacaggccctgtaacatcgccggaccta

SEQ ID NO: 351285 - DNA, 30 bp, Artificial Sequence
  Synthetic oligonucleotide
acggggtccgcacgctacattgatgaccta

SEQ ID NO: 351286 - DNA, 30 bp, Artificial Sequence
  Synthetic oligonucleotide
ttcatactaggaattggaacgtgtgaccta

SEQ ID NO: 351287 - DNA, 30 bp, Artificial Sequence
  Synthetic oligonucleotide
cttcagggccacgcttgttctcaataccta

SEQ ID NO: 351288 - DNA, 30 bp, Artificial Sequence
  Synthetic oligonucleotide
gtcgtcggaaacgggattgtttaataccta

SEQ ID NO: 351289 - DNA, 30 bp, Artificial Sequence
  Synthetic oligonucleotide
aacgcctggacatcctgccgtgcataccta

SEQ ID NO: 351290 - DNA, 30 bp, Artificial Sequence
  Synthetic oligonucleotide
tgaagtattgatccctgaggtcgataccta

SEQ ID NO: 351291 - DNA, 30 bp, Artificial Sequence
  Synthetic oligonucleotide
taatagccgacatttgttatgggataccta

SEQ ID NO: 351292 - DNA, 30 bp, Artificial Sequence
  Synthetic oligonucleotide
tagattcacaatacccggtccctataccta

SEQ ID NO: 351293 - DNA, 30 bp, Artificial Sequence
  Synthetic oligonucleotide
aaccgcatatagttcactaggcggtaccta

SEQ ID NO: 351294 - DNA, 30 bp, Artificial Sequence
  Synthetic oligonucleotide
gaaaaaacgcggtcgtatggagggtaccta

SEQ ID NO: 351295 - DNA, 30 bp, Artificial Sequence
  Synthetic oligonucleotide
tcttgattcgcgggggccatcgtgtaccta

SEQ ID NO: 351296 - DNA, 30 bp, Artificial Sequence
  Synthetic oligonucleotide
ctcgggcgcaggcgagagcttttttaccta

SEQ ID NO: 351297 - DNA, 30 bp, Artificial Sequence
  Synthetic oligonucleotide
gaattaacaaacggttctctaacaacccta

SEQ ID NO: 351298 - DNA, 30 bp, Artificial Sequence
  Synthetic oligonucleotide
gggtccgggattagcttatccagaacccta

SEQ ID NO: 351299 - DNA, 30 bp, Artificial Sequence
  Synthetic oligonucleotide
ttttagatgacgtcacctccgcatacccta

SEQ ID NO: 351300 - DNA, 30 bp, Artificial Sequence
  Synthetic oligonucleotide
agactgcgttaactgcccacgaaagcccta

SEQ ID NO: 351301 - DNA, 30 bp, Artificial Sequence
  Synthetic oligonucleotide
gaaataaagcagttcgaagtacaagcccta

SEQ ID NO: 351302 - DNA, 30 bp, Artificial Sequence
  Synthetic oligonucleotide
tggagtatgtacttttcaaataacgcccta

SEQ ID NO: 351303 - DNA, 30 bp, Artificial Sequence
  Synthetic oligonucleotide
catatggcacgctggggcaaagccgcccta

SEQ ID NO: 351304 - DNA, 30 bp, Artificial Sequence
  Synthetic oligonucleotide
tcgtatacgggtttacgttaaatggcccta

SEQ ID NO: 351305 - DNA, 30 bp, Artificial Sequence
  Synthetic oligonucleotide
cacgttaattttggcactaatattgcccta

SEQ ID NO: 351306 - DNA, 30 bp, Artificial Sequence
  Synthetic oligonucleotide
taattgaggtttattcatacgtaatcccta

SEQ ID NO: 351307 - DNA, 30 bp, Artificial Sequence
  Synthetic oligonucleotide
cacattagcgtaggtatactgatatcccta

SEQ ID NO: 351308 - DNA, 30 bp, Artificial Sequence
  Synthetic oligonucleotide
atcagttttgcgatacacgtcctctcccta

SEQ ID NO: 351309 - DNA, 30 bp, Artificial Sequence
  Synthetic oligonucleotide
gatacagcatgcggcgaagaatagtcccta

SEQ ID NO: 351310 - DNA, 30 bp, Artificial Sequence
  Synthetic oligonucleotide
accgcaaagaggtcgactatcgcgtcccta

SEQ ID NO: 351311 - DNA, 30 bp, Artificial Sequence
  Synthetic oligonucleotide
actatatacaataattcaatgtcttcccta

SEQ ID NO: 351312 - DNA, 30 bp, Artificial Sequence
  Synthetic oligonucleotide
actatcctaagtgaaattgcattttcccta

SEQ ID NO: 351313 - DNA, 30 bp, Artificial Sequence
  Synthetic oligonucleotide
catagcgcttgttaggcgaataaaagccta

SEQ ID NO: 351314 - DNA, 30 bp, Artificial Sequence
  Synthetic oligonucleotide
gtctgaaaatggtgctaaacgcaaagccta

SEQ ID NO: 351315 - DNA, 30 bp, Artificial Sequence
  Synthetic oligonucleotide
aatttgtaactagagtaagctgcaagccta

SEQ ID NO: 351316 - DNA, 30 bp, Artificial Sequence
  Synthetic oligonucleotide
gcaaaagtaatggtttcgaatagaagccta

SEQ ID NO: 351317 - DNA, 30 bp, Artificial Sequence
  Synthetic oligonucleotide
ccaaacggcctcccatattaactaagccta

SEQ ID NO: 351318 - DNA, 30 bp, Artificial Sequence
  Synthetic oligonucleotide
tttgacgaggacaggatgaaagtcagccta

SEQ ID NO: 351319 - DNA, 30 bp, Artificial Sequence
  Synthetic oligonucleotide
ggcgatagctggaatctagctcagagccta

SEQ ID NO: 351320 - DNA, 30 bp, Artificial Sequence
  Synthetic oligonucleotide
cttccgtagatcgctactatggagagccta

SEQ ID NO: 351321 - DNA, 30 bp, Artificial Sequence
  Synthetic oligonucleotide
ggctcactctctgctcattgggggagccta

SEQ ID NO: 351322 - DNA, 30 bp, Artificial Sequence
  Synthetic oligonucleotide
ccccagaagtatacgatttggactagccta

SEQ ID NO: 351323 - DNA, 30 bp, Artificial Sequence
  Synthetic oligonucleotide
gaggtaataaccacgtgctatactagccta

SEQ ID NO: 351324 - DNA, 30 bp, Artificial Sequence
  Synthetic oligonucleotide
tagtgtacaaagagtgtcccagaacgccta

SEQ ID NO: 351325 - DNA, 30 bp, Artificial Sequence
  Synthetic oligonucleotide
tgttgatttgatgggccaaatgtacgccta

SEQ ID NO: 351326 - DNA, 30 bp, Artificial Sequence
  Synthetic oligonucleotide
ggtattgggtagcaccttggtgaccgccta

SEQ ID NO: 351327 - DNA, 30 bp, Artificial Sequence
  Synthetic oligonucleotide
tggcgatccctaataggtaaggcccgccta

SEQ ID NO: 351328 - DNA, 30 bp, Artificial Sequence
  Synthetic oligonucleotide
ggcactcaatttgcgtacaaagagcgccta

SEQ ID NO: 351329 - DNA, 30 bp, Artificial Sequence
  Synthetic oligonucleotide
ccgcaagagattaatggctagatgcgccta

SEQ ID NO: 351330 - DNA, 30 bp, Artificial Sequence
  Synthetic oligonucleotide
agatccgaatggcgaaactattatcgccta

SEQ ID NO: 351331 - DNA, 30 bp, Artificial Sequence
  Synthetic oligonucleotide
tatcctactgctcgccgacggaacggccta

SEQ ID NO: 351332 - DNA, 30 bp, Artificial Sequence
  Synthetic oligonucleotide
gtgtcttcgaacacaaccacagcgggccta

SEQ ID NO: 351333 - DNA, 30 bp, Artificial Sequence
  Synthetic oligonucleotide
gaccgtagcatgcctggaatcatgggccta

SEQ ID NO: 351334 - DNA, 30 bp, Artificial Sequence
  Synthetic oligonucleotide
agctggaggggcaatgtgtagcaatgccta

SEQ ID NO: 351335 - DNA, 30 bp, Artificial Sequence
  Synthetic oligonucleotide
tagttttagtatgtattcctaatatgccta

SEQ ID NO: 351336 - DNA, 30 bp, Artificial Sequence
  Synthetic oligonucleotide
acgacggctgataatgttttactatgccta

SEQ ID NO: 351337 - DNA, 30 bp, Artificial Sequence
  Synthetic oligonucleotide
ccccgtaggatgttatacaaatcaatccta

SEQ ID NO: 351338 - DNA, 30 bp, Artificial Sequence
  Synthetic oligonucleotide
cttcgggaggggtagtctaggtcaatccta

SEQ ID NO: 351339 - DNA, 30 bp, Artificial Sequence
  Synthetic oligonucleotide
caataggtgcagagagtctataacatccta

SEQ ID NO: 351340 - DNA, 30 bp, Artificial Sequence
  Synthetic oligonucleotide
caaaccttccagccgtccaaggggatccta

SEQ ID NO: 351341 - DNA, 30 bp, Artificial Sequence
  Synthetic oligonucleotide
ggctccatgaatattcccaggatcctccta

SEQ ID NO: 351342 - DNA, 30 bp, Artificial Sequence
  Synthetic oligonucleotide
ggtctaccgtaatagctctgcttgctccta

SEQ ID NO: 351343 - DNA, 30 bp, Artificial Sequence
  Synthetic oligonucleotide
cattcgcctcccagtcgcgaaggtctccta

SEQ ID NO: 351344 - DNA, 30 bp, Artificial Sequence
  Synthetic oligonucleotide
gggtttcagcacgcacggttgaacgtccta

SEQ ID NO: 351345 - DNA, 30 bp, Artificial Sequence
  Synthetic oligonucleotide
cggctttaccacatatggttgtgcgtccta

SEQ ID NO: 351346 - DNA, 30 bp, Artificial Sequence
  Synthetic oligonucleotide
ctcgggtgccccgtactcgtagtcgtccta

SEQ ID NO: 351347 - DNA, 30 bp, Artificial Sequence
  Synthetic oligonucleotide
attagataattctattacccggtcgtccta

SEQ ID NO: 351348 - DNA, 30 bp, Artificial Sequence
  Synthetic oligonucleotide
gcaatatcgcgcacatctacatcggtccta

SEQ ID NO: 351349 - DNA, 30 bp, Artificial Sequence
  Synthetic oligonucleotide
catccaagatcataggcctcatcggtccta

SEQ ID NO: 351350 - DNA, 30 bp, Artificial Sequence
  Synthetic oligonucleotide
catgtattggcgaaccatagtgttgtccta

SEQ ID NO: 351351 - DNA, 30 bp, Artificial Sequence
  Synthetic oligonucleotide
acgcaccacagacggaccacgcaattccta

SEQ ID NO: 351352 - DNA, 30 bp, Artificial Sequence
  Synthetic oligonucleotide
aaaaacgttagcgctgcccgtcgattccta

SEQ ID NO: 351353 - DNA, 30 bp, Artificial Sequence
  Synthetic oligonucleotide
tgttatagtgcaagataatagggattccta

SEQ ID NO: 351354 - DNA, 30 bp, Artificial Sequence
  Synthetic oligonucleotide
gattctaaatgaacgactgcgcgtttccta

SEQ ID NO: 351355 - DNA, 30 bp, Artificial Sequence
  Synthetic oligonucleotide
gactggttataccagttcggtaaaaagcta

SEQ ID NO: 351356 - DNA, 30 bp, Artificial Sequence
  Synthetic oligonucleotide
cggaagaatctgattgcaggcgcaaagcta

SEQ ID NO: 351357 - DNA, 30 bp, Artificial Sequence
  Synthetic oligonucleotide
ctcatcccagcggatattggattaaagcta

SEQ ID NO: 351358 - DNA, 30 bp, Artificial Sequence
  Synthetic oligonucleotide
ctgtggactatcctggcatagccgaagcta

SEQ ID NO: 351359 - DNA, 30 bp, Artificial Sequence
  Synthetic oligonucleotide
gcattgagatcaaaatagccggataagcta

SEQ ID NO: 351360 - DNA, 30 bp, Artificial Sequence
  Synthetic oligonucleotide
acggttgcaacgtcgggcaattgccagcta

SEQ ID NO: 351361 - DNA, 30 bp, Artificial Sequence
  Synthetic oligonucleotide
tgttttgactttaataatcaggtccagcta

SEQ ID NO: 351362 - DNA, 30 bp, Artificial Sequence
  Synthetic oligonucleotide
cggaacgctttagtattcggggtccagcta

SEQ ID NO: 351363 - DNA, 30 bp, Artificial Sequence
  Synthetic oligonucleotide
aagagtttaagccgctcaacgtagcagcta

SEQ ID NO: 351364 - DNA, 30 bp, Artificial Sequence
  Synthetic oligonucleotide
tggtagtaaattaggaggaggccgcagcta

SEQ ID NO: 351365 - DNA, 30 bp, Artificial Sequence
  Synthetic oligonucleotide
atggtcatgctcaggatgccgctgcagcta

SEQ ID NO: 351366 - DNA, 30 bp, Artificial Sequence
  Synthetic oligonucleotide
tacagggaaacagcacgccatgtgcagcta

SEQ ID NO: 351367 - DNA, 30 bp, Artificial Sequence
  Synthetic oligonucleotide
tttgtgcggagtagagtgtgcgaagagcta

SEQ ID NO: 351368 - DNA, 30 bp, Artificial Sequence
  Synthetic oligonucleotide
tgcctagcaaattgtcacgtcctagagcta

SEQ ID NO: 351369 - DNA, 30 bp, Artificial Sequence
  Synthetic oligonucleotide
gtttcatgggcagcagagttgcgcgagcta

SEQ ID NO: 351370 - DNA, 30 bp, Artificial Sequence
  Synthetic oligonucleotide
tggcatacccaggccatcgtttaggagcta

SEQ ID NO: 351371 - DNA, 30 bp, Artificial Sequence
  Synthetic oligonucleotide
cggtccagctcccaggcaggtagggagcta

SEQ ID NO: 351372 - DNA, 30 bp, Artificial Sequence
  Synthetic oligonucleotide
tcgcccgttgattggggatgtagggagcta

SEQ ID NO: 351373 - DNA, 30 bp, Artificial Sequence
  Synthetic oligonucleotide
tcacttgagaagttgataagttgggagcta

SEQ ID NO: 351374 - DNA, 30 bp, Artificial Sequence
  Synthetic oligonucleotide
gacattttacgccatagcgtgttggagcta

SEQ ID NO: 351375 - DNA, 30 bp, Artificial Sequence
  Synthetic oligonucleotide
tttagatacgggcccttgacgactgagcta

SEQ ID NO: 351376 - DNA, 30 bp, Artificial Sequence
  Synthetic oligonucleotide
ggtattatggcactcagctgatgtgagcta

SEQ ID NO: 351377 - DNA, 30 bp, Artificial Sequence
  Synthetic oligonucleotide
gctcagggtgtttgttgaaccgaatagcta

SEQ ID NO: 351378 - DNA, 30 bp, Artificial Sequence
  Synthetic oligonucleotide
aaaggagagtatgtcatgaggtaatagcta

SEQ ID NO: 351379 - DNA, 30 bp, Artificial Sequence
  Synthetic oligonucleotide
ctataggcatgcgatcccgaagcatagcta

SEQ ID NO: 351380 - DNA, 30 bp, Artificial Sequence
  Synthetic oligonucleotide
aactcacgatagtacgcgtcaatatagcta

SEQ ID NO: 351381 - DNA, 30 bp, Artificial Sequence
  Synthetic oligonucleotide
tctgggggaacctagctccatatctagcta

SEQ ID NO: 351382 - DNA, 30 bp, Artificial Sequence
  Synthetic oligonucleotide
gaggtaccggactctggatatatctagcta

SEQ ID NO: 351383 - DNA, 30 bp, Artificial Sequence
  Synthetic oligonucleotide
gcgattatttatcatgcatgtaagtagcta

SEQ ID NO: 351384 - DNA, 30 bp, Artificial Sequence
  Synthetic oligonucleotide
gaagttgtcggttgggggcgcgagtagcta

SEQ ID NO: 351385 - DNA, 30 bp, Artificial Sequence
  Synthetic oligonucleotide
tattggctgacagaataaggtgggtagcta

SEQ ID NO: 351386 - DNA, 30 bp, Artificial Sequence
  Synthetic oligonucleotide
agagccctcctgggatagcgtatgtagcta

SEQ ID NO: 351387 - DNA, 30 bp, Artificial Sequence
  Synthetic oligonucleotide
atagttgaaagttgaacgcgcacttagcta

SEQ ID NO: 351388 - DNA, 30 bp, Artificial Sequence
  Synthetic oligonucleotide
tcctggactggatttaacacggcttagcta

SEQ ID NO: 351389 - DNA, 30 bp, Artificial Sequence
  Synthetic oligonucleotide
gtggtggggggctaaacatacgcaacgcta

SEQ ID NO: 351390 - DNA, 30 bp, Artificial Sequence
  Synthetic oligonucleotide
aaaatttgttgtccaccgccccccacgcta

SEQ ID NO: 351391 - DNA, 30 bp, Artificial Sequence
  Synthetic oligonucleotide
gtgcgcaaccgctcactggcccgcacgcta

SEQ ID NO: 351392 - DNA, 30 bp, Artificial Sequence
  Synthetic oligonucleotide
taaggtatgtaggatggtgggtgcacgcta

SEQ ID NO: 351393 - DNA, 30 bp, Artificial Sequence
  Synthetic oligonucleotide
gtacactgcggatggcgaataaagacgcta

SEQ ID NO: 351394 - DNA, 30 bp, Artificial Sequence
  Synthetic oligonucleotide
caggatgtataagtcaggtcaacgacgcta

SEQ ID NO: 351395 - DNA, 30 bp, Artificial Sequence
  Synthetic oligonucleotide
gctgccagtgcgattgggggtttgacgcta

SEQ ID NO: 351396 - DNA, 30 bp, Artificial Sequence
  Synthetic oligonucleotide
tagaggcgccgggaacggcaatgtacgcta

SEQ ID NO: 351397 - DNA, 30 bp, Artificial Sequence
  Synthetic oligonucleotide
ttaaacaatggccgttcagtatcaccgcta

SEQ ID NO: 351398 - DNA, 30 bp, Artificial Sequence
  Synthetic oligonucleotide
aaatcggtaaccaattatcatagaccgcta

SEQ ID NO: 351399 - DNA, 30 bp, Artificial Sequence
  Synthetic oligonucleotide
agtcgcctattgtaacgcaagtatccgcta

SEQ ID NO: 351400 - DNA, 30 bp, Artificial Sequence
  Synthetic oligonucleotide
tacctttcacgactagctaggtctccgcta

SEQ ID NO: 351401 - DNA, 30 bp, Artificial Sequence
  Synthetic oligonucleotide
gccccgtttgggcaatttctggaagcgcta

SEQ ID NO: 351402 - DNA, 30 bp, Artificial Sequence
  Synthetic oligonucleotide
acttcaagtagtggagtgtcaaacgcgcta

SEQ ID NO: 351403 - DNA, 30 bp, Artificial Sequence
  Synthetic oligonucleotide
tgcaagctatcaagggagtctcacgcgcta

SEQ ID NO: 351404 - DNA, 30 bp, Artificial Sequence
  Synthetic oligonucleotide
cgttttgatctgtattatcacacggcgcta

SEQ ID NO: 351405 - DNA, 30 bp, Artificial Sequence
  Synthetic oligonucleotide
gctatcaggctggtatattctgcggcgcta

SEQ ID NO: 351406 - DNA, 30 bp, Artificial Sequence
  Synthetic oligonucleotide
actgaagctgtgtcatagacatcggcgcta

SEQ ID NO: 351407 - DNA, 30 bp, Artificial Sequence
  Synthetic oligonucleotide
gccacacggatcgcctgttgtattgcgcta

SEQ ID NO: 351408 - DNA, 30 bp, Artificial Sequence
  Synthetic oligonucleotide
cagtcatgcttgacgctccatcaatcgcta

SEQ ID NO: 351409 - DNA, 30 bp, Artificial Sequence
  Synthetic oligonucleotide
actgtggacccattaacgcttcaatcgcta

SEQ ID NO: 351410 - DNA, 30 bp, Artificial Sequence
  Synthetic oligonucleotide
ccaacgatacccgggaatcctccctcgcta

SEQ ID NO: 351411 - DNA, 30 bp, Artificial Sequence
  Synthetic oligonucleotide
cacactcagcgtattagggcgggttcgcta

SEQ ID NO: 351412 - DNA, 30 bp, Artificial Sequence
  Synthetic oligonucleotide
gctagccgtgaacgccggcgcgtaaggcta

SEQ ID NO: 351413 - DNA, 30 bp, Artificial Sequence
  Synthetic oligonucleotide
tataacttgtgaatagcgaggttaaggcta

SEQ ID NO: 351414 - DNA, 30 bp, Artificial Sequence
  Synthetic oligonucleotide
cggaacgtctgctggcttgtctccaggcta

SEQ ID NO: 351415 - DNA, 30 bp, Artificial Sequence
  Synthetic oligonucleotide
tcgtataagtacaatactcacagcaggcta

SEQ ID NO: 351416 - DNA, 30 bp, Artificial Sequence
  Synthetic oligonucleotide
aataaggagcccactgactgcatcaggcta

SEQ ID NO: 351417 - DNA, 30 bp, Artificial Sequence
  Synthetic oligonucleotide
gaccagtaaaaagtgtctcacgataggcta

SEQ ID NO: 351418 - DNA, 30 bp, Artificial Sequence
  Synthetic oligonucleotide
gcaatcccattaggaattcttgataggcta

SEQ ID NO: 351419 - DNA, 30 bp, Artificial Sequence
  Synthetic oligonucleotide
agtcatgagctaaaatgcctaagtaggcta

SEQ ID NO: 351420 - DNA, 30 bp, Artificial Sequence
  Synthetic oligonucleotide
agcttcactacactcttttatagtaggcta

SEQ ID NO: 351421 - DNA, 30 bp, Artificial Sequence
  Synthetic oligonucleotide
gggatcactggcttggggagccgtaggcta

SEQ ID NO: 351422 - DNA, 30 bp, Artificial Sequence
  Synthetic oligonucleotide
gcttgtcgcagaccgaaggaccttaggcta

SEQ ID NO: 351423 - DNA, 30 bp, Artificial Sequence
  Synthetic oligonucleotide
tctccggggtgttccttcattctacggcta

SEQ ID NO: 351424 - DNA, 30 bp, Artificial Sequence
  Synthetic oligonucleotide
ctcagaacccggaacggttctccccggcta

SEQ ID NO: 351425 - DNA, 30 bp, Artificial Sequence
  Synthetic oligonucleotide
cgcacagcgtgcaagtagcatccgcggcta

SEQ ID NO: 351426 - DNA, 30 bp, Artificial Sequence
  Synthetic oligonucleotide
tagcgggctacatccaccctacggcggcta

SEQ ID NO: 351427 - DNA, 30 bp, Artificial Sequence
  Synthetic oligonucleotide
tagaacgtaatgtctcccgtggaagggcta

SEQ ID NO: 351428 - DNA, 30 bp, Artificial Sequence
  Synthetic oligonucleotide
taacaatagcgcgagcaggaagcagggcta

SEQ ID NO: 351429 - DNA, 30 bp, Artificial Sequence
  Synthetic oligonucleotide
gtggatttatctctagtctgttcagggcta

SEQ ID NO: 351430 - DNA, 30 bp, Artificial Sequence
  Synthetic oligonucleotide
tacttgcataagccggatgatctagggcta

SEQ ID NO: 351431 - DNA, 30 bp, Artificial Sequence
  Synthetic oligonucleotide
ttgggtaaaacactggttggagacgggcta

SEQ ID NO: 351432 - DNA, 30 bp, Artificial Sequence
  Synthetic oligonucleotide
cgagttgttgttgattcctgtagggggcta

SEQ ID NO: 351433 - DNA, 30 bp, Artificial Sequence
  Synthetic oligonucleotide
ccattactgtcgatcatttctaatgggcta

SEQ ID NO: 351434 - DNA, 30 bp, Artificial Sequence
  Synthetic oligonucleotide
aatctgatattactagtcagggatgggcta

SEQ ID NO: 351435 - DNA, 30 bp, Artificial Sequence
  Synthetic oligonucleotide
atgtctcagcgcaaaacgccatgatggcta

SEQ ID NO: 351436 - DNA, 30 bp, Artificial Sequence
  Synthetic oligonucleotide
gtccggcctatcaagtctggcgtatggcta

SEQ ID NO: 351437 - DNA, 30 bp, Artificial Sequence
  Synthetic oligonucleotide
caatgggaaaaatgagggatgcagtggcta

SEQ ID NO: 351438 - DNA, 30 bp, Artificial Sequence
  Synthetic oligonucleotide
aagagccttctccttggggctcagtggcta

SEQ ID NO: 351439 - DNA, 30 bp, Artificial Sequence
  Synthetic oligonucleotide
gatcattttagtggtcccttgatgtggcta

SEQ ID NO: 351440 - DNA, 30 bp, Artificial Sequence
  Synthetic oligonucleotide
cacttcggtacccttaagtgtgattggcta

SEQ ID NO: 351441 - DNA, 30 bp, Artificial Sequence
  Synthetic oligonucleotide
acaccagttcgtaatcgcgctcgttggcta

SEQ ID NO: 351442 - DNA, 30 bp, Artificial Sequence
  Synthetic oligonucleotide
tcctatcttatactgaagaacggttggcta

SEQ ID NO: 351443 - DNA, 30 bp, Artificial Sequence
  Synthetic oligonucleotide
tggttatatctttcatcaggaaaaatgcta

SEQ ID NO: 351444 - DNA, 30 bp, Artificial Sequence
  Synthetic oligonucleotide
cccaggagagtgtctgtgagtcaaatgcta

SEQ ID NO: 351445 - DNA, 30 bp, Artificial Sequence
  Synthetic oligonucleotide
ctgagccactatgcggctcatgccatgcta

SEQ ID NO: 351446 - DNA, 30 bp, Artificial Sequence
  Synthetic oligonucleotide
gatatcccagacatgttcctttccatgcta

SEQ ID NO: 351447 - DNA, 30 bp, Artificial Sequence
  Synthetic oligonucleotide
gcgggacgagtgtcagtcgctacgatgcta

SEQ ID NO: 351448 - DNA, 30 bp, Artificial Sequence
  Synthetic oligonucleotide
ctgtgtccaattgcgtttctaggactgcta

SEQ ID NO: 351449 - DNA, 30 bp, Artificial Sequence
  Synthetic oligonucleotide
tcactccgtattgtcgtttgtaagctgcta

SEQ ID NO: 351450 - DNA, 30 bp, Artificial Sequence
  Synthetic oligonucleotide
gtctaattccgggggtaagtgcggctgcta

SEQ ID NO: 351451 - DNA, 30 bp, Artificial Sequence
  Synthetic oligonucleotide
aaagacgccgtgaaagaagttccagtgcta

SEQ ID NO: 351452 - DNA, 30 bp, Artificial Sequence
  Synthetic oligonucleotide
cggcttgtccaccaaattcgtgcagtgcta

SEQ ID NO: 351453 - DNA, 30 bp, Artificial Sequence
  Synthetic oligonucleotide
tgctcggtatgacttctcatccgagtgcta

SEQ ID NO: 351454 - DNA, 30 bp, Artificial Sequence
  Synthetic oligonucleotide
atttagtcctatcatactgcgcgagtgcta

SEQ ID NO: 351455 - DNA, 30 bp, Artificial Sequence
  Synthetic oligonucleotide
atactccagcaaatgttgtggagcgtgcta

SEQ ID NO: 351456 - DNA, 30 bp, Artificial Sequence
  Synthetic oligonucleotide
tgcctgtagacaattataagtctcgtgcta

SEQ ID NO: 351457 - DNA, 30 bp, Artificial Sequence
  Synthetic oligonucleotide
atcaaggcagcaacatcgaattaggtgcta

SEQ ID NO: 351458 - DNA, 30 bp, Artificial Sequence
  Synthetic oligonucleotide
cctgcacacttggttggtaatgtggtgcta

SEQ ID NO: 351459 - DNA, 30 bp, Artificial Sequence
  Synthetic oligonucleotide
tggtcttgatgattgatctcgcatgtgcta

SEQ ID NO: 351460 - DNA, 30 bp, Artificial Sequence
  Synthetic oligonucleotide
gagcctgatatagagcactcgaaattgcta

SEQ ID NO: 351461 - DNA, 30 bp, Artificial Sequence
  Synthetic oligonucleotide
tattcgttcctggtatatcatctgttgcta

SEQ ID NO: 351462 - DNA, 30 bp, Artificial Sequence
  Synthetic oligonucleotide
tagaagatagcgggggtccatgctttgcta

SEQ ID NO: 351463 - DNA, 30 bp, Artificial Sequence
  Synthetic oligonucleotide
aggaccacctggcccccgggtcacaatcta

SEQ ID NO: 351464 - DNA, 30 bp, Artificial Sequence
  Synthetic oligonucleotide
ctcatgggatgcgatacgacggacaatcta

SEQ ID NO: 351465 - DNA, 30 bp, Artificial Sequence
  Synthetic oligonucleotide
gtgctgtccttaccttgaggatccaatcta

SEQ ID NO: 351466 - DNA, 30 bp, Artificial Sequence
  Synthetic oligonucleotide
tctccatcataagtcattattgtcaatcta

SEQ ID NO: 351467 - DNA, 30 bp, Artificial Sequence
  Synthetic oligonucleotide
atgtttggcgaacagtgttttttcaatcta

SEQ ID NO: 351468 - DNA, 30 bp, Artificial Sequence
  Synthetic oligonucleotide
gatttcaagggaccaatttcccagaatcta

SEQ ID NO: 351469 - DNA, 30 bp, Artificial Sequence
  Synthetic oligonucleotide
gtttaacggccaaactatcgcatacatcta

SEQ ID NO: 351470 - DNA, 30 bp, Artificial Sequence
  Synthetic oligonucleotide
ctattgtactcccatgggtgtgggcatcta

SEQ ID NO: 351471 - DNA, 30 bp, Artificial Sequence
  Synthetic oligonucleotide
agggcctcttggagtagctggcatcatcta

SEQ ID NO: 351472 - DNA, 30 bp, Artificial Sequence
  Synthetic oligonucleotide
agccactgcccattaccatgcagtcatcta

SEQ ID NO: 351473 - DNA, 30 bp, Artificial Sequence
  Synthetic oligonucleotide
cgtggtctttcggctggtttgcaagatcta

SEQ ID NO: 351474 - DNA, 30 bp, Artificial Sequence
  Synthetic oligonucleotide
ttgctttagcgagtcccctatggagatcta

SEQ ID NO: 351475 - DNA, 30 bp, Artificial Sequence
  Synthetic oligonucleotide
aacagtaagtttgtcaggccagtagatcta

SEQ ID NO: 351476 - DNA, 30 bp, Artificial Sequence
  Synthetic oligonucleotide
aagtcattcggacagtgcgtgcacgatcta

SEQ ID NO: 351477 - DNA, 30 bp, Artificial Sequence
  Synthetic oligonucleotide
cccgtcaccctggaaggctccagcgatcta

SEQ ID NO: 351478 - DNA, 30 bp, Artificial Sequence
  Synthetic oligonucleotide
gcctaccaagggcctaaagtggtggatcta

SEQ ID NO: 351479 - DNA, 30 bp, Artificial Sequence
  Synthetic oligonucleotide
gttaatattacctgtgatcagcatgatcta

SEQ ID NO: 351480 - DNA, 30 bp, Artificial Sequence
  Synthetic oligonucleotide
taaaggctcgcaccggtgcaaggtgatcta

SEQ ID NO: 351481 - DNA, 30 bp, Artificial Sequence
  Synthetic oligonucleotide
atgaacaggccataatcaccgtgtgatcta

SEQ ID NO: 351482 - DNA, 30 bp, Artificial Sequence
  Synthetic oligonucleotide
gctgtcgggtatctcctaaggtaatatcta

SEQ ID NO: 351483 - DNA, 30 bp, Artificial Sequence
  Synthetic oligonucleotide
catatagggaacacatgccgcctatatcta

SEQ ID NO: 351484 - DNA, 30 bp, Artificial Sequence
  Synthetic oligonucleotide
cttaggctacggtgggaaaacccctatcta

SEQ ID NO: 351485 - DNA, 30 bp, Artificial Sequence
  Synthetic oligonucleotide
gcgagatgcgtgccgacccagacgtatcta

SEQ ID NO: 351486 - DNA, 30 bp, Artificial Sequence
  Synthetic oligonucleotide
ccgtcagcagcttgtgtcacaccgtatcta

SEQ ID NO: 351487 - DNA, 30 bp, Artificial Sequence
  Synthetic oligonucleotide
atttggggtgtaggtgtttcagattatcta

SEQ ID NO: 351488 - DNA, 30 bp, Artificial Sequence
  Synthetic oligonucleotide
cagatacggagcgctgatcttgattatcta

SEQ ID NO: 351489 - DNA, 30 bp, Artificial Sequence
  Synthetic oligonucleotide
aagcgcatgtagaaaaatcactcttatcta

SEQ ID NO: 351490 - DNA, 30 bp, Artificial Sequence
  Synthetic oligonucleotide
ctgcggtgcgtcatataatgtttttatcta

SEQ ID NO: 351491 - DNA, 30 bp, Artificial Sequence
  Synthetic oligonucleotide
ccaccgccgtggcaatgggcgccaactcta

SEQ ID NO: 351492 - DNA, 30 bp, Artificial Sequence
  Synthetic oligonucleotide
gaattccacggaagttcaccgcccactcta

SEQ ID NO: 351493 - DNA, 30 bp, Artificial Sequence
  Synthetic oligonucleotide
aatgaacgatatcttagttattagactcta

SEQ ID NO: 351494 - DNA, 30 bp, Artificial Sequence
  Synthetic oligonucleotide
gcgatctgacattcatgaggcaatactcta

SEQ ID NO: 351495 - DNA, 30 bp, Artificial Sequence
  Synthetic oligonucleotide
ccaagtttatacgacggaaagagacctcta

SEQ ID NO: 351496 - DNA, 30 bp, Artificial Sequence
  Synthetic oligonucleotide
ttaacatagaaagagcgtcctcagcctcta

SEQ ID NO: 351497 - DNA, 30 bp, Artificial Sequence
  Synthetic oligonucleotide
gattagtagaaagcctgtgatctgcctcta

SEQ ID NO: 351498 - DNA, 30 bp, Artificial Sequence
  Synthetic oligonucleotide
atcccctacaagaaccgctgagtgcctcta

SEQ ID NO: 351499 - DNA, 30 bp, Artificial Sequence
  Synthetic oligonucleotide
gtaatgggacgccttggtaaggtgcctcta

SEQ ID NO: 351500 - DNA, 30 bp, Artificial Sequence
  Synthetic oligonucleotide
caagtttagactgatctcatccaagctcta

SEQ ID NO: 351501 - DNA, 30 bp, Artificial Sequence
  Synthetic oligonucleotide
agctgttggttctccgccaccttagctcta

SEQ ID NO: 351502 - DNA, 30 bp, Artificial Sequence
  Synthetic oligonucleotide
caatacaagggccttgactacattgctcta

SEQ ID NO: 351503 - DNA, 30 bp, Artificial Sequence
  Synthetic oligonucleotide
cagagggcagtaatcacgcatagatctcta

SEQ ID NO: 351504 - DNA, 30 bp, Artificial Sequence
  Synthetic oligonucleotide
gttcggcacgtgtaaaagtatagatctcta

SEQ ID NO: 351505 - DNA, 30 bp, Artificial Sequence
  Synthetic oligonucleotide
tcgtttttcccggttaattaagtgtctcta

SEQ ID NO: 351506 - DNA, 30 bp, Artificial Sequence
  Synthetic oligonucleotide
ccggacatagtctagtcagataattctcta

SEQ ID NO: 351507 - DNA, 30 bp, Artificial Sequence
  Synthetic oligonucleotide
ttgagcgaggagtactcagtcgcttctcta

SEQ ID NO: 351508 - DNA, 30 bp, Artificial Sequence
  Synthetic oligonucleotide
taatcggtatcaaggatattgtgttctcta

SEQ ID NO: 351509 - DNA, 30 bp, Artificial Sequence
  Synthetic oligonucleotide
tatcttgaagttcccaacttcggaagtcta

SEQ ID NO: 351510 - DNA, 30 bp, Artificial Sequence
  Synthetic oligonucleotide
ctatcttagctaaccggtggaataagtcta

SEQ ID NO: 351511 - DNA, 31 bp, Artificial Sequence
  Synthetic oligonucleotide
ttgaggtgaatagagcgtcgctaacagtcta

SEQ ID NO: 351512 - DNA, 30 bp, Artificial Sequence
  Synthetic oligonucleotide
aaaatcctacgatgtcatgacgggagtcta

SEQ ID NO: 351513 - DNA, 30 bp, Artificial Sequence
  Synthetic oligonucleotide
gaatgacccaaccttgtaggttgccgtcta

SEQ ID NO: 351514 - DNA, 30 bp, Artificial Sequence
  Synthetic oligonucleotide
attctgggctgactgtattgttggcgtcta

SEQ ID NO: 351515 - DNA, 30 bp, Artificial Sequence
  Synthetic oligonucleotide
tcgcgaacagctaggtgccctatgcgtcta

SEQ ID NO: 351516 - DNA, 30 bp, Artificial Sequence
  Synthetic oligonucleotide
gtgttatgttgcttgctccattatcgtcta

SEQ ID NO: 351517 - DNA, 30 bp, Artificial Sequence
  Synthetic oligonucleotide
gttgctgattagttgtttggtcctcgtcta

SEQ ID NO: 351518 - DNA, 30 bp, Artificial Sequence
  Synthetic oligonucleotide
atttcggttgcgcttatgttagctcgtcta

SEQ ID NO: 351519 - DNA, 30 bp, Artificial Sequence
  Synthetic oligonucleotide
aatccacatagcttggggttatctcgtcta

SEQ ID NO: 351520 - DNA, 30 bp, Artificial Sequence
  Synthetic oligonucleotide
cggcgtttacatatagcagtgggtcgtcta

SEQ ID NO: 351521 - DNA, 30 bp, Artificial Sequence
  Synthetic oligonucleotide
gctgagcagggggaggtaggagcaggtcta

SEQ ID NO: 351522 - DNA, 30 bp, Artificial Sequence
  Synthetic oligonucleotide
gtagtttgaactgttttttgcgacggtcta

SEQ ID NO: 351523 - DNA, 30 bp, Artificial Sequence
  Synthetic oligonucleotide
gtatcggcggtttggcagaaaaggggtcta

SEQ ID NO: 351524 - DNA, 30 bp, Artificial Sequence
  Synthetic oligonucleotide
aattagaatagcgcagaaggattgggtcta

SEQ ID NO: 351525 - DNA, 30 bp, Artificial Sequence
  Synthetic oligonucleotide
ctgagaaacttgtaccggataaatggtcta

SEQ ID NO: 351526 - DNA, 30 bp, Artificial Sequence
  Synthetic oligonucleotide
aagtcataatagttagcctcgaatggtcta

SEQ ID NO: 351527 - DNA, 30 bp, Artificial Sequence
  Synthetic oligonucleotide
aaccttaaagcacccttcacccgtggtcta

SEQ ID NO: 351528 - DNA, 30 bp, Artificial Sequence
  Synthetic oligonucleotide
aacatgttgcagagtgtcctatttggtcta

SEQ ID NO: 351529 - DNA, 30 bp, Artificial Sequence
  Synthetic oligonucleotide
gtaatgggatgttgaggcgtttttggtcta

SEQ ID NO: 351530 - DNA, 30 bp, Artificial Sequence
  Synthetic oligonucleotide
cacagtcaaacagcatgtgttctctgtcta

SEQ ID NO: 351531 - DNA, 30 bp, Artificial Sequence
  Synthetic oligonucleotide
gttataaacaaataggcatcaacgtgtcta

SEQ ID NO: 351532 - DNA, 30 bp, Artificial Sequence
  Synthetic oligonucleotide
gaaagttcttccgctaagagaacgtgtcta

SEQ ID NO: 351533 - DNA, 30 bp, Artificial Sequence
  Synthetic oligonucleotide
gcgttcgtggtccaaatgtgaccgtgtcta

SEQ ID NO: 351534 - DNA, 30 bp, Artificial Sequence
  Synthetic oligonucleotide
gctgggacaaatgcatattggatgtgtcta

SEQ ID NO: 351535 - DNA, 30 bp, Artificial Sequence
  Synthetic oligonucleotide
gatgggtctgtgctatcgcgtcattgtcta

SEQ ID NO: 351536 - DNA, 30 bp, Artificial Sequence
  Synthetic oligonucleotide
gtggtatggatagagtggtactcttgtcta

SEQ ID NO: 351537 - DNA, 30 bp, Artificial Sequence
  Synthetic oligonucleotide
gtacacgtcagttttacagggtcaattcta

SEQ ID NO: 351538 - DNA, 30 bp, Artificial Sequence
  Synthetic oligonucleotide
atccagggtggttctttaacagacattcta

SEQ ID NO: 351539 - DNA, 30 bp, Artificial Sequence
  Synthetic oligonucleotide
catgggggcacaaggcccatagccattcta

SEQ ID NO: 351540 - DNA, 30 bp, Artificial Sequence
  Synthetic oligonucleotide
acgctaaaaaatatggaccgtgccattcta

SEQ ID NO: 351541 - DNA, 30 bp, Artificial Sequence
  Synthetic oligonucleotide
tgctcggtgtggcatttactacgcattcta

SEQ ID NO: 351542 - DNA, 30 bp, Artificial Sequence
  Synthetic oligonucleotide
cgtataataggtgggctatcgcgcattcta

SEQ ID NO: 351543 - DNA, 30 bp, Artificial Sequence
  Synthetic oligonucleotide
gaatagagtctacatgtacccatcattcta

SEQ ID NO: 351544 - DNA, 30 bp, Artificial Sequence
  Synthetic oligonucleotide
gctaatatcacctcatacgggaatattcta

SEQ ID NO: 351545 - DNA, 30 bp, Artificial Sequence
  Synthetic oligonucleotide
gatataccaagcatatcccaagaacttcta

SEQ ID NO: 351546 - DNA, 30 bp, Artificial Sequence
  Synthetic oligonucleotide
cgattaatcgaccaggaccgaggacttcta

SEQ ID NO: 351547 - DNA, 30 bp, Artificial Sequence
  Synthetic oligonucleotide
gtttaatgtggccatgggttgggacttcta

SEQ ID NO: 351548 - DNA, 30 bp, Artificial Sequence
  Synthetic oligonucleotide
aatcgctaccggcagacggaagcgcttcta

SEQ ID NO: 351549 - DNA, 30 bp, Artificial Sequence
  Synthetic oligonucleotide
agccaccccttgaataagcgactgcttcta

SEQ ID NO: 351550 - DNA, 30 bp, Artificial Sequence
  Synthetic oligonucleotide
aacgatggaaaaaaaataattttgcttcta

SEQ ID NO: 351551 - DNA, 30 bp, Artificial Sequence
  Synthetic oligonucleotide
tcgctgtgtcagcgccgtatgcgtcttcta

SEQ ID NO: 351552 - DNA, 30 bp, Artificial Sequence
  Synthetic oligonucleotide
atatgagtaagatatttgaactttcttcta

SEQ ID NO: 351553 - DNA, 30 bp, Artificial Sequence
  Synthetic oligonucleotide
aaatactgttaaggtcatcccatagttcta

SEQ ID NO: 351554 - DNA, 30 bp, Artificial Sequence
  Synthetic oligonucleotide
ccaatggtgtatgttcgtttagtagttcta

SEQ ID NO: 351555 - DNA, 30 bp, Artificial Sequence
  Synthetic oligonucleotide
gctggtcaatgacggcattcgttcgttcta

SEQ ID NO: 351556 - DNA, 30 bp, Artificial Sequence
  Synthetic oligonucleotide
tatgcatcgtaactcagtctgaaggttcta

SEQ ID NO: 351557 - DNA, 30 bp, Artificial Sequence
  Synthetic oligonucleotide
aggcccacgtgtcacgggtccatggttcta

SEQ ID NO: 351558 - DNA, 30 bp, Artificial Sequence
  Synthetic oligonucleotide
tgggtagtactatcaccgatgtatgttcta

SEQ ID NO: 351559 - DNA, 30 bp, Artificial Sequence
  Synthetic oligonucleotide
gtggcgacggccattaagttgcaatttcta

SEQ ID NO: 351560 - DNA, 30 bp, Artificial Sequence
  Synthetic oligonucleotide
taggtgggtggaagctgtaagacatttcta

SEQ ID NO: 351561 - DNA, 30 bp, Artificial Sequence
  Synthetic oligonucleotide
atggtaccactgtctagttgtgcatttcta

SEQ ID NO: 351562 - DNA, 30 bp, Artificial Sequence
  Synthetic oligonucleotide
gagaatcgtagttcgcagaactgatttcta

SEQ ID NO: 351563 - DNA, 30 bp, Artificial Sequence
  Synthetic oligonucleotide
tgacgctgtcaaagtggtggaacctttcta

SEQ ID NO: 351564 - DNA, 30 bp, Artificial Sequence
  Synthetic oligonucleotide
atgaactgtcatagaggtcctacctttcta

SEQ ID NO: 351565 - DNA, 30 bp, Artificial Sequence
  Synthetic oligonucleotide
gctcgtgttaaaacgcgcgtaaggtttcta

SEQ ID NO: 351566 - DNA, 30 bp, Artificial Sequence
  Synthetic oligonucleotide
cgtcggcatgtttatcgggaattgtttcta

SEQ ID NO: 351567 - DNA, 30 bp, Artificial Sequence
  Synthetic oligonucleotide
tcaaaagaacggtattactacttgtttcta

SEQ ID NO: 351568 - DNA, 30 bp, Artificial Sequence
  Synthetic oligonucleotide
cctctggcgaaagcagtctatgtttttcta

SEQ ID NO: 351569 - DNA, 30 bp, Artificial Sequence
  Synthetic oligonucleotide
aagaggatatgatttcttgatagaaaagta

SEQ ID NO: 351570 - DNA, 30 bp, Artificial Sequence
  Synthetic oligonucleotide
taagagtgtttggattccggaggaaaagta

SEQ ID NO: 351571 - DNA, 30 bp, Artificial Sequence
  Synthetic oligonucleotide
cttaaaaagggtatgtgatatcacaaagta

SEQ ID NO: 351572 - DNA, 30 bp, Artificial Sequence
  Synthetic oligonucleotide
cggggaggacgcgcacaccacggcaaagta

SEQ ID NO: 351573 - DNA, 30 bp, Artificial Sequence
  Synthetic oligonucleotide
tggccccgcaaaatgtccttaaggaaagta

SEQ ID NO: 351574 - DNA, 30 bp, Artificial Sequence
  Synthetic oligonucleotide
agtttgacaaactttgtggtcaataaagta

SEQ ID NO: 351575 - DNA, 30 bp, Artificial Sequence
  Synthetic oligonucleotide
ctaaccagacaccgttcgctacctaaagta

SEQ ID NO: 351576 - DNA, 30 bp, Artificial Sequence
  Synthetic oligonucleotide
ggagaagaacctgcagttgactctaaagta

SEQ ID NO: 351577 - DNA, 30 bp, Artificial Sequence
  Synthetic oligonucleotide
gaaacgtcaacaggactacgggaacaagta

SEQ ID NO: 351578 - DNA, 30 bp, Artificial Sequence
  Synthetic oligonucleotide
gcaaaccttaaagtcgaagattgacaagta

SEQ ID NO: 351579 - DNA, 30 bp, Artificial Sequence
  Synthetic oligonucleotide
taggtttccagtaacatattgggccaagta

SEQ ID NO: 351580 - DNA, 30 bp, Artificial Sequence
  Synthetic oligonucleotide
agcctacgtccagatccttatgggcaagta

SEQ ID NO: 351581 - DNA, 30 bp, Artificial Sequence
  Synthetic oligonucleotide
tacttctacaacacacagtatatggaagta

SEQ ID NO: 351582 - DNA, 30 bp, Artificial Sequence
  Synthetic oligonucleotide
cgaactcaggcgtacctcagcctggaagta

SEQ ID NO: 351583 - DNA, 30 bp, Artificial Sequence
  Synthetic oligonucleotide
gcccagagctaatctagactcctggaagta

SEQ ID NO: 351584 - DNA, 30 bp, Artificial Sequence
  Synthetic oligonucleotide
gcacagagtggttcttatcgtctggaagta

SEQ ID NO: 351585 - DNA, 30 bp, Artificial Sequence
  Synthetic oligonucleotide
atccacatggaagctttcgctaaataagta

SEQ ID NO: 351586 - DNA, 30 bp, Artificial Sequence
  Synthetic oligonucleotide
gtcgaaatagcagcaaaatagcaataagta

SEQ ID NO: 351587 - DNA, 30 bp, Artificial Sequence
  Synthetic oligonucleotide
gaggtcttcatgggcattaaactataagta

SEQ ID NO: 351588 - DNA, 30 bp, Artificial Sequence
  Synthetic oligonucleotide
accccacgcgtggggtgagttcgctaagta

SEQ ID NO: 351589 - DNA, 30 bp, Artificial Sequence
  Synthetic oligonucleotide
gcaaacgactcgttcatttttacgtaagta

SEQ ID NO: 351590 - DNA, 30 bp, Artificial Sequence
  Synthetic oligonucleotide
aaatgcaggctatacctaactaggtaagta

SEQ ID NO: 351591 - DNA, 30 bp, Artificial Sequence
  Synthetic oligonucleotide
taacggcagaccgccaaggtcgtttaagta

SEQ ID NO: 351592 - DNA, 30 bp, Artificial Sequence
  Synthetic oligonucleotide
acggatggcatggcgaatggactaacagta

SEQ ID NO: 351593 - DNA, 30 bp, Artificial Sequence
  Synthetic oligonucleotide
aactagcatcccgtctgcagcctaacagta

SEQ ID NO: 351594 - DNA, 30 bp, Artificial Sequence
  Synthetic oligonucleotide
agacagttcgtcagcgagaatgtaacagta

SEQ ID NO: 351595 - DNA, 30 bp, Artificial Sequence
  Synthetic oligonucleotide
cataccaggcacatcgctttggacacagta

SEQ ID NO: 351596 - DNA, 30 bp, Artificial Sequence
  Synthetic oligonucleotide
cgcatagcttctgattatataaccacagta

SEQ ID NO: 351597 - DNA, 30 bp, Artificial Sequence
  Synthetic oligonucleotide
cattacataacgccttcatagccgacagta

SEQ ID NO: 351598 - DNA, 30 bp, Artificial Sequence
  Synthetic oligonucleotide
gtttaattcgggcatgggggacaaccagta

SEQ ID NO: 351599 - DNA, 30 bp, Artificial Sequence
  Synthetic oligonucleotide
ttcgctggcgactttattgtagaaccagta

SEQ ID NO: 351600 - DNA, 30 bp, Artificial Sequence
  Synthetic oligonucleotide
ttgaaggacgcgtcggtggaaaacccagta

SEQ ID NO: 351601 - DNA, 30 bp, Artificial Sequence
  Synthetic oligonucleotide
ccctcgcagtacagtctactagacccagta

SEQ ID NO: 351602 - DNA, 30 bp, Artificial Sequence
  Synthetic oligonucleotide
aggttaggcgtgttagccctggacccagta

SEQ ID NO: 351603 - DNA, 30 bp, Artificial Sequence
  Synthetic oligonucleotide
gcgctcagagaatactgtagacggccagta

SEQ ID NO: 351604 - DNA, 30 bp, Artificial Sequence
  Synthetic oligonucleotide
gggtgcgttgtaaaaaacactcgagcagta

SEQ ID NO: 351605 - DNA, 30 bp, Artificial Sequence
  Synthetic oligonucleotide
ccggtacgtgaccaatagctaggagcagta

SEQ ID NO: 351606 - DNA, 30 bp, Artificial Sequence
  Synthetic oligonucleotide
actttcctggtacgcctaattaccgcagta

SEQ ID NO: 351607 - DNA, 30 bp, Artificial Sequence
  Synthetic oligonucleotide
ggagaaagtaagacgagcttcttggcagta

SEQ ID NO: 351608 - DNA, 30 bp, Artificial Sequence
  Synthetic oligonucleotide
ccttaccgttagtggactggccctgcagta

SEQ ID NO: 351609 - DNA, 30 bp, Artificial Sequence
  Synthetic oligonucleotide
tcgggagatcactggttaataggtgcagta

SEQ ID NO: 351610 - DNA, 30 bp, Artificial Sequence
  Synthetic oligonucleotide
ctccatagactatatattttttgatcagta

SEQ ID NO: 351611 - DNA, 30 bp, Artificial Sequence
  Synthetic oligonucleotide
aaatggcgtataatagcgatgttatcagta

SEQ ID NO: 351612 - DNA, 30 bp, Artificial Sequence
  Synthetic oligonucleotide
acagtggctccggggaacacactctcagta

SEQ ID NO: 351613 - DNA, 30 bp, Artificial Sequence
  Synthetic oligonucleotide
gacccacaggaggaatcttaggattcagta

SEQ ID NO: 351614 - DNA, 30 bp, Artificial Sequence
  Synthetic oligonucleotide
atagccgaacttgattaatgttattcagta

SEQ ID NO: 351615 - DNA, 30 bp, Artificial Sequence
  Synthetic oligonucleotide
cagtattggcgaagtgctcaagaaagagta

SEQ ID NO: 351616 - DNA, 30 bp, Artificial Sequence
  Synthetic oligonucleotide
gtaggtggcctcaaagtaacgcacagagta

SEQ ID NO: 351617 - DNA, 30 bp, Artificial Sequence
  Synthetic oligonucleotide
tcagtctcagccatcaccggagacagagta

SEQ ID NO: 351618 - DNA, 30 bp, Artificial Sequence
  Synthetic oligonucleotide
tcgtagttatttggcgatggctccagagta

SEQ ID NO: 351619 - DNA, 30 bp, Artificial Sequence
  Synthetic oligonucleotide
atattaaggctatatttttgcagcagagta

SEQ ID NO: 351620 - DNA, 30 bp, Artificial Sequence
  Synthetic oligonucleotide
atccctaatgtaattatggtggagagagta

SEQ ID NO: 351621 - DNA, 30 bp, Artificial Sequence
  Synthetic oligonucleotide
tacttggagtgctcagcatcgcggagagta

SEQ ID NO: 351622 - DNA, 30 bp, Artificial Sequence
  Synthetic oligonucleotide
tgtagggcgggagactggtacattagagta

SEQ ID NO: 351623 - DNA, 30 bp, Artificial Sequence
  Synthetic oligonucleotide
tgccatttaactacggatactgaacgagta

SEQ ID NO: 351624 - DNA, 30 bp, Artificial Sequence
  Synthetic oligonucleotide
catcagacctgtgaactactctcacgagta

SEQ ID NO: 351625 - DNA, 30 bp, Artificial Sequence
  Synthetic oligonucleotide
ataggacttgatgtggtacttttacgagta

SEQ ID NO: 351626 - DNA, 30 bp, Artificial Sequence
  Synthetic oligonucleotide
tcatgtaacgacattagtatgttgcgagta

SEQ ID NO: 351627 - DNA, 30 bp, Artificial Sequence
  Synthetic oligonucleotide
catgacgatatggacggtccttaaggagta

SEQ ID NO: 351628 - DNA, 30 bp, Artificial Sequence
  Synthetic oligonucleotide
gacataaaccccgacacctcggtcggagta

SEQ ID NO: 351629 - DNA, 30 bp, Artificial Sequence
  Synthetic oligonucleotide
atcatgtaaagagcataactggggggagta

SEQ ID NO: 351630 - DNA, 30 bp, Artificial Sequence
  Synthetic oligonucleotide
gcgtttccaaatgagcacattatgggagta

SEQ ID NO: 351631 - DNA, 30 bp, Artificial Sequence
  Synthetic oligonucleotide
tcttcgttggatcgggtgcatggtggagta

SEQ ID NO: 351632 - DNA, 30 bp, Artificial Sequence
  Synthetic oligonucleotide
gcataggtcatgggtttagttcaatgagta

SEQ ID NO: 351633 - DNA, 30 bp, Artificial Sequence
  Synthetic oligonucleotide
tgagagatcgtgatgaacgcgacatgagta

SEQ ID NO: 351634 - DNA, 30 bp, Artificial Sequence
  Synthetic oligonucleotide
tataaatacaatctatagtatctatgagta

SEQ ID NO: 351635 - DNA, 30 bp, Artificial Sequence
  Synthetic oligonucleotide
acttgtctctatcgctttaggacctgagta

SEQ ID NO: 351636 - DNA, 30 bp, Artificial Sequence
  Synthetic oligonucleotide
ctgtacgtggtgtaagtaggaagctgagta

SEQ ID NO: 351637 - DNA, 30 bp, Artificial Sequence
  Synthetic oligonucleotide
atatctcgatccgtggcacgccagtgagta

SEQ ID NO: 351638 - DNA, 30 bp, Artificial Sequence
  Synthetic oligonucleotide
gttttggaggaattcaccgggtagtgagta

SEQ ID NO: 351639 - DNA, 30 bp, Artificial Sequence
  Synthetic oligonucleotide
aaaccggttgtcaatgtacgttcaatagta

SEQ ID NO: 351640 - DNA, 30 bp, Artificial Sequence
  Synthetic oligonucleotide
gttataggccatcggcttatggccatagta

SEQ ID NO: 351641 - DNA, 30 bp, Artificial Sequence
  Synthetic oligonucleotide
aaggcgatattaaattggggttttatagta

SEQ ID NO: 351642 - DNA, 30 bp, Artificial Sequence
  Synthetic oligonucleotide
aatagactgatgtacaaggctgaactagta

SEQ ID NO: 351643 - DNA, 30 bp, Artificial Sequence
  Synthetic oligonucleotide
ccttttgcggggcaggagttacgactagta

SEQ ID NO: 351644 - DNA, 30 bp, Artificial Sequence
  Synthetic oligonucleotide
gaaatatgggtaagcgggaatttactagta

SEQ ID NO: 351645 - DNA, 30 bp, Artificial Sequence
  Synthetic oligonucleotide
ggtatggctagccatacttgggacctagta

SEQ ID NO: 351646 - DNA, 30 bp, Artificial Sequence
  Synthetic oligonucleotide
acattgctactgaggcttgagcgcctagta

SEQ ID NO: 351647 - DNA, 30 bp, Artificial Sequence
  Synthetic oligonucleotide
agtctacattccaaaaccaaagcgctagta

SEQ ID NO: 351648 - DNA, 30 bp, Artificial Sequence
  Synthetic oligonucleotide
tttagccaccgaggtgaagctagtctagta

SEQ ID NO: 351649 - DNA, 30 bp, Artificial Sequence
  Synthetic oligonucleotide
ggatcatcctcttaggttcagcgtctagta

SEQ ID NO: 351650 - DNA, 30 bp, Artificial Sequence
  Synthetic oligonucleotide
ttggatcacttttcatggccctcagtagta

SEQ ID NO: 351651 - DNA, 30 bp, Artificial Sequence
  Synthetic oligonucleotide
agactaaggtcttagggccttgaggtagta

SEQ ID NO: 351652 - DNA, 30 bp, Artificial Sequence
  Synthetic oligonucleotide
tgcagttgtagaattggatcctaggtagta

SEQ ID NO: 351653 - DNA, 30 bp, Artificial Sequence
  Synthetic oligonucleotide
acgtacccttatagtctgctctgggtagta

SEQ ID NO: 351654 - DNA, 30 bp, Artificial Sequence
  Synthetic oligonucleotide
cgaaaacttaatgtgcggtaatatgtagta

SEQ ID NO: 351655 - DNA, 30 bp, Artificial Sequence
  Synthetic oligonucleotide
acctgtcagcaagcctggacatttgtagta

SEQ ID NO: 351656 - DNA, 30 bp, Artificial Sequence
  Synthetic oligonucleotide
tactctggatgacaattcacacgattagta

SEQ ID NO: 351657 - DNA, 30 bp, Artificial Sequence
  Synthetic oligonucleotide
gtgggtacatatcctgcggtctgattagta

SEQ ID NO: 351658 - DNA, 30 bp, Artificial Sequence
  Synthetic oligonucleotide
acttgattagggtcttagggttgattagta

SEQ ID NO: 351659 - DNA, 30 bp, Artificial Sequence
  Synthetic oligonucleotide
ctttgccagagcatcaccccgatcttagta

SEQ ID NO: 351660 - DNA, 30 bp, Artificial Sequence
  Synthetic oligonucleotide
ccggacaggtggactataaaggtcttagta

SEQ ID NO: 351661 - DNA, 30 bp, Artificial Sequence
  Synthetic oligonucleotide
ggaaataagtataacattaattagttagta

SEQ ID NO: 351662 - DNA, 30 bp, Artificial Sequence
  Synthetic oligonucleotide
aatactgtaaaagtagagtcaaggttagta

SEQ ID NO: 351663 - DNA, 31 bp, Artificial Sequence
  Synthetic oligonucleotide
atcgccgttcaaactacgttttgtgttagta

SEQ ID NO: 351664 - DNA, 30 bp, Artificial Sequence
  Synthetic oligonucleotide
ttgacggtaaaatgttataacaatttagta

SEQ ID NO: 351665 - DNA, 30 bp, Artificial Sequence
  Synthetic oligonucleotide
acagggccgggtacatggacgtatttagta

SEQ ID NO: 351666 - DNA, 30 bp, Artificial Sequence
  Synthetic oligonucleotide
ttggctctccgtaagaccatacgtttagta

SEQ ID NO: 351667 - DNA, 30 bp, Artificial Sequence
  Synthetic oligonucleotide
tgctctgccaacagggttaagggtttagta

SEQ ID NO: 351668 - DNA, 30 bp, Artificial Sequence
  Synthetic oligonucleotide
taccattgcgggccagcaagggaaaacgta

SEQ ID NO: 351669 - DNA, 30 bp, Artificial Sequence
  Synthetic oligonucleotide
aacatatatcttttcgaatcaatcaacgta

SEQ ID NO: 351670 - DNA, 30 bp, Artificial Sequence
  Synthetic oligonucleotide
acgtatgcaaagggataaaggacgaacgta

SEQ ID NO: 351671 - DNA, 30 bp, Artificial Sequence
  Synthetic oligonucleotide
ggataatctcagatagtcccgtcacacgta

SEQ ID NO: 351672 - DNA, 30 bp, Artificial Sequence
  Synthetic oligonucleotide
cgagtttacgatatagcaggtggacacgta

SEQ ID NO: 351673 - DNA, 30 bp, Artificial Sequence
  Synthetic oligonucleotide
ggtatcctaactcaagccccgatacacgta

SEQ ID NO: 351674 - DNA, 30 bp, Artificial Sequence
  Synthetic oligonucleotide
caatgggttcgtctgggagggttccacgta

SEQ ID NO: 351675 - DNA, 30 bp, Artificial Sequence
  Synthetic oligonucleotide
actgcgtagtgaagccctgagaatcacgta

SEQ ID NO: 351676 - DNA, 30 bp, Artificial Sequence
  Synthetic oligonucleotide
gttgttagagtagtaattttgaatcacgta

SEQ ID NO: 351677 - DNA, 30 bp, Artificial Sequence
  Synthetic oligonucleotide
ggtgctgtactgtacaggggagttcacgta

SEQ ID NO: 351678 - DNA, 30 bp, Artificial Sequence
  Synthetic oligonucleotide
caatgagctattctgattgttcgagacgta

SEQ ID NO: 351679 - DNA, 30 bp, Artificial Sequence
  Synthetic oligonucleotide
aacggagggcgtggaagaggtgcggacgta

SEQ ID NO: 351680 - DNA, 30 bp, Artificial Sequence
  Synthetic oligonucleotide
tttttggcattaagtgtgaggagggacgta

SEQ ID NO: 351681 - DNA, 30 bp, Artificial Sequence
  Synthetic oligonucleotide
tagctcccattgtgggtatatcttgacgta

SEQ ID NO: 351682 - DNA, 30 bp, Artificial Sequence
  Synthetic oligonucleotide
gccggtctagaggggaactatctctacgta

SEQ ID NO: 351683 - DNA, 30 bp, Artificial Sequence
  Synthetic oligonucleotide
ctgcaattagtctttgtacaggggtacgta

SEQ ID NO: 351684 - DNA, 30 bp, Artificial Sequence
  Synthetic oligonucleotide
tgaatagcatggcggctttactggtacgta

SEQ ID NO: 351685 - DNA, 30 bp, Artificial Sequence
  Synthetic oligonucleotide
ggtatttcgggcgaaatgcaattgtacgta

SEQ ID NO: 351686 - DNA, 30 bp, Artificial Sequence
  Synthetic oligonucleotide
ccctagtgcaaatccaacgtgatttacgta

SEQ ID NO: 351687 - DNA, 30 bp, Artificial Sequence
  Synthetic oligonucleotide
cgcatatgtcaccgggcactgggaaccgta

SEQ ID NO: 351688 - DNA, 30 bp, Artificial Sequence
  Synthetic oligonucleotide
tcggataccagtagttcggacgacaccgta

SEQ ID NO: 351689 - DNA, 30 bp, Artificial Sequence
  Synthetic oligonucleotide
aagaatcccgttcttataagttacaccgta

SEQ ID NO: 351690 - DNA, 30 bp, Artificial Sequence
  Synthetic oligonucleotide
gtccaggacggatttacgtaaaaacccgta

SEQ ID NO: 351691 - DNA, 30 bp, Artificial Sequence
  Synthetic oligonucleotide
gatcgctttcgcggggtatatacacccgta

SEQ ID NO: 351692 - DNA, 30 bp, Artificial Sequence
  Synthetic oligonucleotide
atcgccgttcaatacatgtaatcacccgta

SEQ ID NO: 351693 - DNA, 30 bp, Artificial Sequence
  Synthetic oligonucleotide
tcccacgacctggtacttgccaagcccgta

SEQ ID NO: 351694 - DNA, 30 bp, Artificial Sequence
  Synthetic oligonucleotide
ttttcctggtgtagtccaaacgagcccgta

SEQ ID NO: 351695 - DNA, 30 bp, Artificial Sequence
  Synthetic oligonucleotide
gagctttcgactatcgccacggggcccgta

SEQ ID NO: 351696 - DNA, 30 bp, Artificial Sequence
  Synthetic oligonucleotide
aactcattaccaaatccaccatggcccgta

SEQ ID NO: 351697 - DNA, 30 bp, Artificial Sequence
  Synthetic oligonucleotide
gagcggcgagtgacttacctgtatcccgta

SEQ ID NO: 351698 - DNA, 30 bp, Artificial Sequence
  Synthetic oligonucleotide
gcacagaacgaccccggagaggaagccgta

SEQ ID NO: 351699 - DNA, 30 bp, Artificial Sequence
  Synthetic oligonucleotide
tcatcagctagtgttgccactccagccgta

SEQ ID NO: 351700 - DNA, 30 bp, Artificial Sequence
  Synthetic oligonucleotide
ccaaggcaccgcggctccccatcagccgta

SEQ ID NO: 351701 - DNA, 30 bp, Artificial Sequence
  Synthetic oligonucleotide
ggacacggcgttatgtatacttcagccgta

SEQ ID NO: 351702 - DNA, 30 bp, Artificial Sequence
  Synthetic oligonucleotide
accgttgccaaagttatccgtgacgccgta

SEQ ID NO: 351703 - DNA, 30 bp, Artificial Sequence
  Synthetic oligonucleotide
tgtcctattgctatgaccgaccccgccgta

SEQ ID NO: 351704 - DNA, 30 bp, Artificial Sequence
  Synthetic oligonucleotide
tttacaggcgaccggaggtgccgcgccgta

SEQ ID NO: 351705 - DNA, 30 bp, Artificial Sequence
  Synthetic oligonucleotide
tactggcacggcgcaaggtaaaaggccgta

SEQ ID NO: 351706 - DNA, 30 bp, Artificial Sequence
  Synthetic oligonucleotide
caactataagagattaaattacttgccgta

SEQ ID NO: 351707 - DNA, 30 bp, Artificial Sequence
  Synthetic oligonucleotide
aggcgcaagttggttgtcccgctatccgta

SEQ ID NO: 351708 - DNA, 30 bp, Artificial Sequence
  Synthetic oligonucleotide
tcaaaacacgcaatatactcaaactccgta

SEQ ID NO: 351709 - DNA, 30 bp, Artificial Sequence
  Synthetic oligonucleotide
cttctcgccggcattctgcccacctccgta

SEQ ID NO: 351710 - DNA, 30 bp, Artificial Sequence
  Synthetic oligonucleotide
tagtatgcttgactcacagaagtctccgta

SEQ ID NO: 351711 - DNA, 30 bp, Artificial Sequence
  Synthetic oligonucleotide
tctagtgttgcaaatcggttgcagtccgta

SEQ ID NO: 351712 - DNA, 30 bp, Artificial Sequence
  Synthetic oligonucleotide
gctgatagaggtttatacgccaggtccgta

SEQ ID NO: 351713 - DNA, 30 bp, Artificial Sequence
  Synthetic oligonucleotide
ccgcaactgaggctagcataggggtccgta

SEQ ID NO: 351714 - DNA, 30 bp, Artificial Sequence
  Synthetic oligonucleotide
gtaaaatcaacttcgtagtgggattccgta

SEQ ID NO: 351715 - DNA, 30 bp, Artificial Sequence
  Synthetic oligonucleotide
acaaatgctttcacaagcctcccaagcgta

SEQ ID NO: 351716 - DNA, 30 bp, Artificial Sequence
  Synthetic oligonucleotide
ttgggttttcccgtgagaaagggaagcgta

SEQ ID NO: 351717 - DNA, 30 bp, Artificial Sequence
  Synthetic oligonucleotide
tagtttatgcgccaattgccccacagcgta

SEQ ID NO: 351718 - DNA, 30 bp, Artificial Sequence
  Synthetic oligonucleotide
catgtgttggctctacgccacagcagcgta

SEQ ID NO: 351719 - DNA, 30 bp, Artificial Sequence
  Synthetic oligonucleotide
actaaggtattctcgtggccgaatagcgta

SEQ ID NO: 351720 - DNA, 30 bp, Artificial Sequence
  Synthetic oligonucleotide
cggtttataaaggccctgaagcatagcgta

SEQ ID NO: 351721 - DNA, 30 bp, Artificial Sequence
  Synthetic oligonucleotide
accaaaggcgcaagatatactcttagcgta

SEQ ID NO: 351722 - DNA, 30 bp, Artificial Sequence
  Synthetic oligonucleotide
agtgagaggagctcgcgcatggaacgcgta

SEQ ID NO: 351723 - DNA, 30 bp, Artificial Sequence
  Synthetic oligonucleotide
agccggcccccaccgtggttgtaacgcgta

SEQ ID NO: 351724 - DNA, 30 bp, Artificial Sequence
  Synthetic oligonucleotide
gctgcgctcgggtactatatccgacgcgta

SEQ ID NO: 351725 - DNA, 30 bp, Artificial Sequence
  Synthetic oligonucleotide
gtaaccggactgagattgactgtacgcgta

SEQ ID NO: 351726 - DNA, 30 bp, Artificial Sequence
  Synthetic oligonucleotide
ctcactttcattaataagacctcccgcgta

SEQ ID NO: 351727 - DNA, 30 bp, Artificial Sequence
  Synthetic oligonucleotide
agcgttcttggttaacggatgggccgcgta

SEQ ID NO: 351728 - DNA, 30 bp, Artificial Sequence
  Synthetic oligonucleotide
gtacggtattctcgggtttagccgcgcgta

SEQ ID NO: 351729 - DNA, 30 bp, Artificial Sequence
  Synthetic oligonucleotide
aactccggccagactatttgatcgcgcgta

SEQ ID NO: 351730 - DNA, 30 bp, Artificial Sequence
  Synthetic oligonucleotide
gtggaccgtatctcttcctcgtggcgcgta

SEQ ID NO: 351731 - DNA, 30 bp, Artificial Sequence
  Synthetic oligonucleotide
agtgtggatcgccataccgttcctcgcgta

SEQ ID NO: 351732 - DNA, 30 bp, Artificial Sequence
  Synthetic oligonucleotide
agtggatttagtcctcggattgctcgcgta

SEQ ID NO: 351733 - DNA, 30 bp, Artificial Sequence
  Synthetic oligonucleotide
cttcggcgtgctcacaggctgattcgcgta

SEQ ID NO: 351734 - DNA, 30 bp, Artificial Sequence
  Synthetic oligonucleotide
tggaggacaagctctgtagacggcggcgta

SEQ ID NO: 351735 - DNA, 30 bp, Artificial Sequence
  Synthetic oligonucleotide
tgaccacgccccattaaaggtggcggcgta

SEQ ID NO: 351736 - DNA, 30 bp, Artificial Sequence
  Synthetic oligonucleotide
gcccatcagaggccagtgcttgttggcgta

SEQ ID NO: 351737 - DNA, 30 bp, Artificial Sequence
  Synthetic oligonucleotide
tttcgtgtgcagaatataggctaatgcgta

SEQ ID NO: 351738 - DNA, 30 bp, Artificial Sequence
  Synthetic oligonucleotide
catcctaaccaggtccggggcttctgcgta

SEQ ID NO: 351739 - DNA, 30 bp, Artificial Sequence
  Synthetic oligonucleotide
aaaccgtgagttcagagatcgcgttgcgta

SEQ ID NO: 351740 - DNA, 31 bp, Artificial Sequence
  Synthetic oligonucleotide
ttgagccattgcttgctatgccagcatcgta

SEQ ID NO: 351741 - DNA, 30 bp, Artificial Sequence
  Synthetic oligonucleotide
aaattcgatggcaagaataggaagatcgta

SEQ ID NO: 351742 - DNA, 30 bp, Artificial Sequence
  Synthetic oligonucleotide
catcgcaacaaagtgggatggtatatcgta

SEQ ID NO: 351743 - DNA, 30 bp, Artificial Sequence
  Synthetic oligonucleotide
gcgatgagcggcggctgaacgtctatcgta

SEQ ID NO: 351744 - DNA, 30 bp, Artificial Sequence
  Synthetic oligonucleotide
cccaattataatatgtgaggcattatcgta

SEQ ID NO: 351745 - DNA, 30 bp, Artificial Sequence
  Synthetic oligonucleotide
aatcaccctacacgctactagaagctcgta

SEQ ID NO: 351746 - DNA, 30 bp, Artificial Sequence
  Synthetic oligonucleotide
gccatgtacgcctaggtcctggagctcgta

SEQ ID NO: 351747 - DNA, 30 bp, Artificial Sequence
  Synthetic oligonucleotide
gtaatttgttaacgcgtgtgctgtctcgta

SEQ ID NO: 351748 - DNA, 30 bp, Artificial Sequence
  Synthetic oligonucleotide
gagtattgtcggtgcctatattgtctcgta

SEQ ID NO: 351749 - DNA, 30 bp, Artificial Sequence
  Synthetic oligonucleotide
ctcgcaatgtgatttatctgtgaagtcgta

SEQ ID NO: 351750 - DNA, 30 bp, Artificial Sequence
  Synthetic oligonucleotide
ttgggcactagataactttgaggagtcgta

SEQ ID NO: 351751 - DNA, 30 bp, Artificial Sequence
  Synthetic oligonucleotide
gagtgcaacgaacatagggccaacgtcgta

SEQ ID NO: 351752 - DNA, 30 bp, Artificial Sequence
  Synthetic oligonucleotide
ctgtgatgtcgctctcactatctcgtcgta

SEQ ID NO: 351753 - DNA, 30 bp, Artificial Sequence
  Synthetic oligonucleotide
ggatggggacggacttccacgcaggtcgta

SEQ ID NO: 351754 - DNA, 30 bp, Artificial Sequence
  Synthetic oligonucleotide
gtagaaaatgattctgggtgcagggtcgta

SEQ ID NO: 351755 - DNA, 30 bp, Artificial Sequence
  Synthetic oligonucleotide
ttaggcgatgctagtcgttgtagattcgta

SEQ ID NO: 351756 - DNA, 30 bp, Artificial Sequence
  Synthetic oligonucleotide
gacttcaacacacgaaagtgatacttcgta

SEQ ID NO: 351757 - DNA, 30 bp, Artificial Sequence
  Synthetic oligonucleotide
ctccggatttgaacggttaagcccttcgta

SEQ ID NO: 351758 - DNA, 30 bp, Artificial Sequence
  Synthetic oligonucleotide
aagctctataacctataggttgagttcgta

SEQ ID NO: 351759 - DNA, 30 bp, Artificial Sequence
  Synthetic oligonucleotide
gtagcgttaaggctacctgaatatttcgta

SEQ ID NO: 351760 - DNA, 30 bp, Artificial Sequence
  Synthetic oligonucleotide
ttcagtgaagtacggctattgtgtttcgta

SEQ ID NO: 351761 - DNA, 30 bp, Artificial Sequence
  Synthetic oligonucleotide
taatagtattctaatatcaagaacaaggta

SEQ ID NO: 351762 - DNA, 30 bp, Artificial Sequence
  Synthetic oligonucleotide
gctttctccacgctcaggcagtacaaggta

SEQ ID NO: 351763 - DNA, 30 bp, Artificial Sequence
  Synthetic oligonucleotide
cacggagtccaacttccgatatgcaaggta

SEQ ID NO: 351764 - DNA, 30 bp, Artificial Sequence
  Synthetic oligonucleotide
aaaggagctttcaacgcaacagggaaggta

SEQ ID NO: 351765 - DNA, 30 bp, Artificial Sequence
  Synthetic oligonucleotide
tgtgtttaattgaaactcagcgtgaaggta

SEQ ID NO: 351766 - DNA, 30 bp, Artificial Sequence
  Synthetic oligonucleotide
ttgccacacgacttcccgcctaaacaggta

SEQ ID NO: 351767 - DNA, 30 bp, Artificial Sequence
  Synthetic oligonucleotide
agtacattgtaaggtaccatggaacaggta

SEQ ID NO: 351768 - DNA, 30 bp, Artificial Sequence
  Synthetic oligonucleotide
tatgtaatcgggagcaagaccacccaggta

SEQ ID NO: 351769 - DNA, 30 bp, Artificial Sequence
  Synthetic oligonucleotide
tcctgaagatgaggacctaccatccaggta

SEQ ID NO: 351770 - DNA, 30 bp, Artificial Sequence
  Synthetic oligonucleotide
tttccgtcgtgtgtgatgctagagcaggta

SEQ ID NO: 351771 - DNA, 30 bp, Artificial Sequence
  Synthetic oligonucleotide
cggtaggatatctttcagattaggcaggta

SEQ ID NO: 351772 - DNA, 30 bp, Artificial Sequence
  Synthetic oligonucleotide
tgctcggggtgcactagctccactcaggta

SEQ ID NO: 351773 - DNA, 30 bp, Artificial Sequence
  Synthetic oligonucleotide
attaccgagggcgagccgatggctcaggta

SEQ ID NO: 351774 - DNA, 30 bp, Artificial Sequence
  Synthetic oligonucleotide
atgagactagaaactatgctgggagaggta

SEQ ID NO: 351775 - DNA, 30 bp, Artificial Sequence
  Synthetic oligonucleotide
tcctgccaactttgtctatcttccgaggta

SEQ ID NO: 351776 - DNA, 30 bp, Artificial Sequence
  Synthetic oligonucleotide
ataaagggccatgcgagttgtaatgaggta

SEQ ID NO: 351777 - DNA, 30 bp, Artificial Sequence
  Synthetic oligonucleotide
gaaatgctacctaggctattgcctgaggta

SEQ ID NO: 351778 - DNA, 30 bp, Artificial Sequence
  Synthetic oligonucleotide
tgtacaatagtaccggcaaatgctgaggta

SEQ ID NO: 351779 - DNA, 30 bp, Artificial Sequence
  Synthetic oligonucleotide
gaaaaccgggactagacccaacgtgaggta

SEQ ID NO: 351780 - DNA, 30 bp, Artificial Sequence
  Synthetic oligonucleotide
ttggtcactcgtttgaaaggccgtgaggta

SEQ ID NO: 351781 - DNA, 30 bp, Artificial Sequence
  Synthetic oligonucleotide
aagccacgggaccggaagagtattgaggta

SEQ ID NO: 351782 - DNA, 30 bp, Artificial Sequence
  Synthetic oligonucleotide
aagtctactttagaacatgcggttgaggta

SEQ ID NO: 351783 - DNA, 30 bp, Artificial Sequence
  Synthetic oligonucleotide
atttagtccgaacccggtgagaaataggta

SEQ ID NO: 351784 - DNA, 30 bp, Artificial Sequence
  Synthetic oligonucleotide
ctaggggagaacccatctaccttataggta

SEQ ID NO: 351785 - DNA, 30 bp, Artificial Sequence
  Synthetic oligonucleotide
gcaattcttttagtaggaggtccgtaggta

SEQ ID NO: 351786 - DNA, 30 bp, Artificial Sequence
  Synthetic oligonucleotide
cggtctcctaaccactaaatattgtaggta

SEQ ID NO: 351787 - DNA, 30 bp, Artificial Sequence
  Synthetic oligonucleotide
ttggcagacgaatctccgtgtttgtaggta

SEQ ID NO: 351788 - DNA, 30 bp, Artificial Sequence
  Synthetic oligonucleotide
ggtaggaacaccaagcaaccacattaggta

SEQ ID NO: 351789 - DNA, 30 bp, Artificial Sequence
  Synthetic oligonucleotide
gtcactttgagtatggtctttgattaggta

SEQ ID NO: 351790 - DNA, 30 bp, Artificial Sequence
  Synthetic oligonucleotide
tccaccccgcgcactccacaggtttaggta

SEQ ID NO: 351791 - DNA, 30 bp, Artificial Sequence
  Synthetic oligonucleotide
accactcggaccggatagcattaaacggta

SEQ ID NO: 351792 - DNA, 30 bp, Artificial Sequence
  Synthetic oligonucleotide
catctaataccaccgggtaccgtaacggta

SEQ ID NO: 351793 - DNA, 30 bp, Artificial Sequence
  Synthetic oligonucleotide
aggtcggctatctgcggattccacacggta

SEQ ID NO: 351794 - DNA, 30 bp, Artificial Sequence
  Synthetic oligonucleotide
taaaggattggagagcgtggaagcacggta

SEQ ID NO: 351795 - DNA, 30 bp, Artificial Sequence
  Synthetic oligonucleotide
gcgaactataacccagtgggtaagacggta

SEQ ID NO: 351796 - DNA, 30 bp, Artificial Sequence
  Synthetic oligonucleotide
agtcagcggggtagctaaccctctacggta

SEQ ID NO: 351797 - DNA, 30 bp, Artificial Sequence
  Synthetic oligonucleotide
gaaggccgcagtcctgcgctcgtcccggta

SEQ ID NO: 351798 - DNA, 30 bp, Artificial Sequence
  Synthetic oligonucleotide
tgggtgcatatgccttcaagctagccggta

SEQ ID NO: 351799 - DNA, 30 bp, Artificial Sequence
  Synthetic oligonucleotide
cgcaggtgcgattaatatttaaggccggta

SEQ ID NO: 351800 - DNA, 30 bp, Artificial Sequence
  Synthetic oligonucleotide
atgcctgactccgatcgggtgctgccggta

SEQ ID NO: 351801 - DNA, 30 bp, Artificial Sequence
  Synthetic oligonucleotide
aggatgtttcaattagaggcattgccggta

SEQ ID NO: 351802 - DNA, 30 bp, Artificial Sequence
  Synthetic oligonucleotide
gcacaggcccgtgaaccctatcttccggta

SEQ ID NO: 351803 - DNA, 30 bp, Artificial Sequence
  Synthetic oligonucleotide
gtattatggtcacgagacctttttccggta

SEQ ID NO: 351804 - DNA, 30 bp, Artificial Sequence
  Synthetic oligonucleotide
ggacgcaagactgaaagcgttaaagcggta

SEQ ID NO: 351805 - DNA, 30 bp, Artificial Sequence
  Synthetic oligonucleotide
atgcatgaacggtttgtcgcgcaagcggta

SEQ ID NO: 351806 - DNA, 30 bp, Artificial Sequence
  Synthetic oligonucleotide
gtattctggttaaaacggaagacagcggta

SEQ ID NO: 351807 - DNA, 30 bp, Artificial Sequence
  Synthetic oligonucleotide
gccaagggaaatcttgtgtgtacagcggta

SEQ ID NO: 351808 - DNA, 30 bp, Artificial Sequence
  Synthetic oligonucleotide
ttcggggatggtacccagatggcagcggta

SEQ ID NO: 351809 - DNA, 30 bp, Artificial Sequence
  Synthetic oligonucleotide
gacagacacccgcagtatgggagagcggta

SEQ ID NO: 351810 - DNA, 30 bp, Artificial Sequence
  Synthetic oligonucleotide
gtaactctccagaacgataacggagcggta

SEQ ID NO: 351811 - DNA, 30 bp, Artificial Sequence
  Synthetic oligonucleotide
acgtcccggacctcatccggcggagcggta

SEQ ID NO: 351812 - DNA, 30 bp, Artificial Sequence
  Synthetic oligonucleotide
gtcattaaaaggttcgtggatcgcgcggta

SEQ ID NO: 351813 - DNA, 30 bp, Artificial Sequence
  Synthetic oligonucleotide
gccatacggtgatctcatagacaatcggta

SEQ ID NO: 351814 - DNA, 30 bp, Artificial Sequence
  Synthetic oligonucleotide
tgcaattcgaggtgtggaaagtaatcggta

SEQ ID NO: 351815 - DNA, 30 bp, Artificial Sequence
  Synthetic oligonucleotide
tttatcatctaaaggaggcatagatcggta

SEQ ID NO: 351816 - DNA, 30 bp, Artificial Sequence
  Synthetic oligonucleotide
gctagagaaattgtagaatacaactcggta

SEQ ID NO: 351817 - DNA, 30 bp, Artificial Sequence
  Synthetic oligonucleotide
gctgggaccagcatctagtcaacgtcggta

SEQ ID NO: 351818 - DNA, 30 bp, Artificial Sequence
  Synthetic oligonucleotide
aataaaggctcgatgacaaatatgtcggta

SEQ ID NO: 351819 - DNA, 30 bp, Artificial Sequence
  Synthetic oligonucleotide
gctgcgatgcagaacatctagaaaagggta

SEQ ID NO: 351820 - DNA, 30 bp, Artificial Sequence
  Synthetic oligonucleotide
acggtatgacaatgtactgggccaagggta

SEQ ID NO: 351821 - DNA, 30 bp, Artificial Sequence
  Synthetic oligonucleotide
ctcgaggatgaagtgcctgcatacagggta

SEQ ID NO: 351822 - DNA, 30 bp, Artificial Sequence
  Synthetic oligonucleotide
cgagttctggcattttgcaagctcagggta

SEQ ID NO: 351823 - DNA, 30 bp, Artificial Sequence
  Synthetic oligonucleotide
cttgttaattggcccatccgaccgagggta

SEQ ID NO: 351824 - DNA, 30 bp, Artificial Sequence
  Synthetic oligonucleotide
aagaatttcgactgatgttgaccgagggta

SEQ ID NO: 351825 - DNA, 30 bp, Artificial Sequence
  Synthetic oligonucleotide
tggtagcacgtgatattaatcttgagggta

SEQ ID NO: 351826 - DNA, 30 bp, Artificial Sequence
  Synthetic oligonucleotide
acatagctagtttaagtcttcactagggta

SEQ ID NO: 351827 - DNA, 30 bp, Artificial Sequence
  Synthetic oligonucleotide
tatgacctaatcaaggggaaatgtagggta

SEQ ID NO: 351828 - DNA, 30 bp, Artificial Sequence
  Synthetic oligonucleotide
gcaacataaacgaatgcgtcttttagggta

SEQ ID NO: 351829 - DNA, 30 bp, Artificial Sequence
  Synthetic oligonucleotide
tgttgcttgtatggagtgcgtaaacgggta

SEQ ID NO: 351830 - DNA, 30 bp, Artificial Sequence
  Synthetic oligonucleotide
tgagttgtgaaaagtagtatctaacgggta

SEQ ID NO: 351831 - DNA, 30 bp, Artificial Sequence
  Synthetic oligonucleotide
taataaatgtgacgaaagtagccccgggta

SEQ ID NO: 351832 - DNA, 30 bp, Artificial Sequence
  Synthetic oligonucleotide
cgcctccgcaccccaaatttggtccgggta

SEQ ID NO: 351833 - DNA, 30 bp, Artificial Sequence
  Synthetic oligonucleotide
gttacgtgtagcgacgtacggtcgcgggta

SEQ ID NO: 351834 - DNA, 30 bp, Artificial Sequence
  Synthetic oligonucleotide
gaatggttctgtccagcactatctcgggta

SEQ ID NO: 351835 - DNA, 30 bp, Artificial Sequence
  Synthetic oligonucleotide
ctgtgcttcagcgtatctagtggtcgggta

SEQ ID NO: 351836 - DNA, 30 bp, Artificial Sequence
  Synthetic oligonucleotide
ataagggacactacggcacctctaggggta

SEQ ID NO: 351837 - DNA, 30 bp, Artificial Sequence
  Synthetic oligonucleotide
tggttgtcctcgagaactttacacggggta

SEQ ID NO: 351838 - DNA, 30 bp, Artificial Sequence
  Synthetic oligonucleotide
tatcgtgggatgctaggtttcgcgggggta

SEQ ID NO: 351839 - DNA, 30 bp, Artificial Sequence
  Synthetic oligonucleotide
tacataccaccaagatcttcacggggggta

SEQ ID NO: 351840 - DNA, 30 bp, Artificial Sequence
  Synthetic oligonucleotide
aaaaagttgcccgattcagctatgggggta

SEQ ID NO: 351841 - DNA, 30 bp, Artificial Sequence
  Synthetic oligonucleotide
gtcgcagagccaggtacaaaccatggggta

SEQ ID NO: 351842 - DNA, 30 bp, Artificial Sequence
  Synthetic oligonucleotide
cacatacaaccaaacatgttgagtggggta

SEQ ID NO: 351843 - DNA, 30 bp, Artificial Sequence
  Synthetic oligonucleotide
cccgtgtataaaggactgctttgtggggta

SEQ ID NO: 351844 - DNA, 30 bp, Artificial Sequence
  Synthetic oligonucleotide
ctgtagttacggaccaatcaaccatgggta

SEQ ID NO: 351845 - DNA, 30 bp, Artificial Sequence
  Synthetic oligonucleotide
atgtgtatcccgtgcaatctaagctgggta

SEQ ID NO: 351846 - DNA, 30 bp, Artificial Sequence
  Synthetic oligonucleotide
gattatcgtggacaggacaaggtctgggta

SEQ ID NO: 351847 - DNA, 30 bp, Artificial Sequence
  Synthetic oligonucleotide
tgtaacgacccgtagtgtctgtagtgggta

SEQ ID NO: 351848 - DNA, 30 bp, Artificial Sequence
  Synthetic oligonucleotide
aacggacaccttccgatacacaattgggta

SEQ ID NO: 351849 - DNA, 30 bp, Artificial Sequence
  Synthetic oligonucleotide
aagttgattggcggtccgtgtgcttgggta

SEQ ID NO: 351850 - DNA, 30 bp, Artificial Sequence
  Synthetic oligonucleotide
ttgagagaacagcaccatcgtcaaatggta

SEQ ID NO: 351851 - DNA, 30 bp, Artificial Sequence
  Synthetic oligonucleotide
gacggggaagagacaccagcttcaatggta

SEQ ID NO: 351852 - DNA, 30 bp, Artificial Sequence
  Synthetic oligonucleotide
tataagtggctcgtccaagtgcggatggta

SEQ ID NO: 351853 - DNA, 30 bp, Artificial Sequence
  Synthetic oligonucleotide
tatgtatagggactttatccagggatggta

SEQ ID NO: 351854 - DNA, 30 bp, Artificial Sequence
  Synthetic oligonucleotide
gcagcacgaattctcttaaataatatggta

SEQ ID NO: 351855 - DNA, 30 bp, Artificial Sequence
  Synthetic oligonucleotide
taagtaggccagattcctgaccctatggta

SEQ ID NO: 351856 - DNA, 30 bp, Artificial Sequence
  Synthetic oligonucleotide
taatagccaaacgttcgtagcggtatggta

SEQ ID NO: 351857 - DNA, 30 bp, Artificial Sequence
  Synthetic oligonucleotide
tactcgcgccaggaaagagtttgtatggta

SEQ ID NO: 351858 - DNA, 30 bp, Artificial Sequence
  Synthetic oligonucleotide
aactatcaccactcggggtgtgcactggta

SEQ ID NO: 351859 - DNA, 30 bp, Artificial Sequence
  Synthetic oligonucleotide
ccagggttgatgggcctcggtcgcctggta

SEQ ID NO: 351860 - DNA, 30 bp, Artificial Sequence
  Synthetic oligonucleotide
ctgatagtccaggtcccaaaaggcctggta

SEQ ID NO: 351861 - DNA, 30 bp, Artificial Sequence
  Synthetic oligonucleotide
taagtccagttgcgaacttagaagctggta

SEQ ID NO: 351862 - DNA, 30 bp, Artificial Sequence
  Synthetic oligonucleotide
ctctatcatcaacataattcccagctggta

SEQ ID NO: 351863 - DNA, 30 bp, Artificial Sequence
  Synthetic oligonucleotide
gtaaatctttcccgtaattgaaatctggta

SEQ ID NO: 351864 - DNA, 30 bp, Artificial Sequence
  Synthetic oligonucleotide
cagctaggctgtcataccgggaacgtggta

SEQ ID NO: 351865 - DNA, 30 bp, Artificial Sequence
  Synthetic oligonucleotide
cgttgtctcgcacaatgcccacacgtggta

SEQ ID NO: 351866 - DNA, 30 bp, Artificial Sequence
  Synthetic oligonucleotide
gaaacttagaagctgttgaaagacgtggta

SEQ ID NO: 351867 - DNA, 30 bp, Artificial Sequence
  Synthetic oligonucleotide
tagtaagatttgaaatgactcgccgtggta

SEQ ID NO: 351868 - DNA, 30 bp, Artificial Sequence
  Synthetic oligonucleotide
cgtctcagtccacgaaaacttgtggtggta

SEQ ID NO: 351869 - DNA, 30 bp, Artificial Sequence
  Synthetic oligonucleotide
aaacacatatggccgctagccggtgtggta

SEQ ID NO: 351870 - DNA, 30 bp, Artificial Sequence
  Synthetic oligonucleotide
tgaaatgtataaggtacccggattgtggta

SEQ ID NO: 351871 - DNA, 30 bp, Artificial Sequence
  Synthetic oligonucleotide
atgggggtgcagggtttatgtgaattggta

SEQ ID NO: 351872 - DNA, 30 bp, Artificial Sequence
  Synthetic oligonucleotide
gtactatggcgtttggaatcgtacttggta

SEQ ID NO: 351873 - DNA, 30 bp, Artificial Sequence
  Synthetic oligonucleotide
gtaatagcgtcttctttcaaagccttggta

SEQ ID NO: 351874 - DNA, 30 bp, Artificial Sequence
  Synthetic oligonucleotide
atactcgggctataaggatggtttttggta

SEQ ID NO: 351875 - DNA, 30 bp, Artificial Sequence
  Synthetic oligonucleotide
cactacaatggtttacgaatattaaatgta

SEQ ID NO: 351876 - DNA, 30 bp, Artificial Sequence
  Synthetic oligonucleotide
tctgataggcaggtacccgaatacaatgta

SEQ ID NO: 351877 - DNA, 30 bp, Artificial Sequence
  Synthetic oligonucleotide
ggacggtagaacaaggctcggggcaatgta

SEQ ID NO: 351878 - DNA, 30 bp, Artificial Sequence
  Synthetic oligonucleotide
cactatagattggggcaggtaaggaatgta

SEQ ID NO: 351879 - DNA, 30 bp, Artificial Sequence
  Synthetic oligonucleotide
ataagatgcaatctaggcaagcgtaatgta

SEQ ID NO: 351880 - DNA, 30 bp, Artificial Sequence
  Synthetic oligonucleotide
ggccgcgcgcacgatcagagtcaacatgta

SEQ ID NO: 351881 - DNA, 30 bp, Artificial Sequence
  Synthetic oligonucleotide
atataccgccagctatgcagaacacatgta

SEQ ID NO: 351882 - DNA, 30 bp, Artificial Sequence
  Synthetic oligonucleotide
aacaaggtagcaaatgtgctgttacatgta

SEQ ID NO: 351883 - DNA, 30 bp, Artificial Sequence
  Synthetic oligonucleotide
ttctagaggcaagtgtccatcatccatgta

SEQ ID NO: 351884 - DNA, 30 bp, Artificial Sequence
  Synthetic oligonucleotide
cagattgcctgttgcgttcgacggcatgta

SEQ ID NO: 351885 - DNA, 30 bp, Artificial Sequence
  Synthetic oligonucleotide
ggtctgggcttcaacagacacttgcatgta

SEQ ID NO: 351886 - DNA, 30 bp, Artificial Sequence
  Synthetic oligonucleotide
tggtggtcacactcaatagtctttcatgta

SEQ ID NO: 351887 - DNA, 30 bp, Artificial Sequence
  Synthetic oligonucleotide
tttagggaatccatttttccacccgatgta

SEQ ID NO: 351888 - DNA, 30 bp, Artificial Sequence
  Synthetic oligonucleotide
gggtaggtatctcagaaagctcccgatgta

SEQ ID NO: 351889 - DNA, 30 bp, Artificial Sequence
  Synthetic oligonucleotide
atctccaccgctgcgaggatggccgatgta

SEQ ID NO: 351890 - DNA, 30 bp, Artificial Sequence
  Synthetic oligonucleotide
gttccatcgtccgatgagccctgggatgta

SEQ ID NO: 351891 - DNA, 30 bp, Artificial Sequence
  Synthetic oligonucleotide
attgaagcacttttagtatcgcgtgatgta

SEQ ID NO: 351892 - DNA, 30 bp, Artificial Sequence
  Synthetic oligonucleotide
ggcctacaagaacggatatatatatatgta

SEQ ID NO: 351893 - DNA, 30 bp, Artificial Sequence
  Synthetic oligonucleotide
tggttagggcacagtattttccattatgta

SEQ ID NO: 351894 - DNA, 30 bp, Artificial Sequence
  Synthetic oligonucleotide
caggatgctcttggcttcagtacttatgta

SEQ ID NO: 351895 - DNA, 30 bp, Artificial Sequence
  Synthetic oligonucleotide
gttccaatctgagggctacgaggttatgta

SEQ ID NO: 351896 - DNA, 30 bp, Artificial Sequence
  Synthetic oligonucleotide
agtagctgcttacaaatctaatgttatgta

SEQ ID NO: 351897 - DNA, 30 bp, Artificial Sequence
  Synthetic oligonucleotide
cccgaggcaaggagtctatctttaactgta

SEQ ID NO: 351898 - DNA, 30 bp, Artificial Sequence
  Synthetic oligonucleotide
ggcaaaacgtgaatatcgtctaggactgta

SEQ ID NO: 351899 - DNA, 30 bp, Artificial Sequence
  Synthetic oligonucleotide
tgaatagtgatacaggtctatcatactgta

SEQ ID NO: 351900 - DNA, 30 bp, Artificial Sequence
  Synthetic oligonucleotide
cttatctaggcacgaccgatggaccctgta

SEQ ID NO: 351901 - DNA, 30 bp, Artificial Sequence
  Synthetic oligonucleotide
agtctccgtgtctacaggacagggcctgta

SEQ ID NO: 351902 - DNA, 30 bp, Artificial Sequence
  Synthetic oligonucleotide
gccacgtcccgcactttcacaatgcctgta

SEQ ID NO: 351903 - DNA, 30 bp, Artificial Sequence
  Synthetic oligonucleotide
atagcaagtctccctcagatgcaagctgta

SEQ ID NO: 351904 - DNA, 30 bp, Artificial Sequence
  Synthetic oligonucleotide
tcgtcatactcgtcacaagacttagctgta

SEQ ID NO: 351905 - DNA, 30 bp, Artificial Sequence
  Synthetic oligonucleotide
acccacccaagatgccatgtaaccgctgta

SEQ ID NO: 351906 - DNA, 30 bp, Artificial Sequence
  Synthetic oligonucleotide
ccaaaacattaatactattataaatctgta

SEQ ID NO: 351907 - DNA, 30 bp, Artificial Sequence
  Synthetic oligonucleotide
taggcagagactacacggtagtcatctgta

SEQ ID NO: 351908 - DNA, 30 bp, Artificial Sequence
  Synthetic oligonucleotide
ggggtccattggttcataacccgatctgta

SEQ ID NO: 351909 - DNA, 30 bp, Artificial Sequence
  Synthetic oligonucleotide
ttgactaaaacgggagttccggcctctgta

SEQ ID NO: 351910 - DNA, 30 bp, Artificial Sequence
  Synthetic oligonucleotide
tttgtaggccgatgtggccgacgctctgta

SEQ ID NO: 351911 - DNA, 30 bp, Artificial Sequence
  Synthetic oligonucleotide
cattgcccggaacgggggataccttctgta

SEQ ID NO: 351912 - DNA, 30 bp, Artificial Sequence
  Synthetic oligonucleotide
gtatttatgccggttggccagcgaagtgta

SEQ ID NO: 351913 - DNA, 30 bp, Artificial Sequence
  Synthetic oligonucleotide
acaccgaggatcaaagcttcactaagtgta

SEQ ID NO: 351914 - DNA, 30 bp, Artificial Sequence
  Synthetic oligonucleotide
tttatggcaacgatgaagaaagacagtgta

SEQ ID NO: 351915 - DNA, 30 bp, Artificial Sequence
  Synthetic oligonucleotide
gtgtgaaatattttatctttgtggagtgta

SEQ ID NO: 351916 - DNA, 30 bp, Artificial Sequence
  Synthetic oligonucleotide
gaattatgattacgttttaagctgagtgta

SEQ ID NO: 351917 - DNA, 30 bp, Artificial Sequence
  Synthetic oligonucleotide
taaaacactggtgttggcagcttgagtgta

SEQ ID NO: 351918 - DNA, 30 bp, Artificial Sequence
  Synthetic oligonucleotide
cccagcctgcaaccgaaaaactgtagtgta

SEQ ID NO: 351919 - DNA, 30 bp, Artificial Sequence
  Synthetic oligonucleotide
tacagtggtatgcaaagatagtttagtgta

SEQ ID NO: 351920 - DNA, 30 bp, Artificial Sequence
  Synthetic oligonucleotide
tagggtcctgatgcaaaccagtaacgtgta

SEQ ID NO: 351921 - DNA, 30 bp, Artificial Sequence
  Synthetic oligonucleotide
acccggctaaggacgaggtgtacacgtgta

SEQ ID NO: 351922 - DNA, 30 bp, Artificial Sequence
  Synthetic oligonucleotide
tttaaagtcaacgggcttgcataccgtgta

SEQ ID NO: 351923 - DNA, 30 bp, Artificial Sequence
  Synthetic oligonucleotide
attagcgaatgcgtgtccaaacgccgtgta

SEQ ID NO: 351924 - DNA, 30 bp, Artificial Sequence
  Synthetic oligonucleotide
atggtgaaatggtcgccttgacgccgtgta

SEQ ID NO: 351925 - DNA, 30 bp, Artificial Sequence
  Synthetic oligonucleotide
acccttactggaatcaggcggggccgtgta

SEQ ID NO: 351926 - DNA, 30 bp, Artificial Sequence
  Synthetic oligonucleotide
gtaggcgactgacgtgataggttccgtgta

SEQ ID NO: 351927 - DNA, 30 bp, Artificial Sequence
  Synthetic oligonucleotide
taacgagctctattcatcaccaatcgtgta

SEQ ID NO: 351928 - DNA, 30 bp, Artificial Sequence
  Synthetic oligonucleotide
tgatcgaggcgctctaacacccatcgtgta

SEQ ID NO: 351929 - DNA, 30 bp, Artificial Sequence
  Synthetic oligonucleotide
acctttctgggtgcataaatgtgtcgtgta

SEQ ID NO: 351930 - DNA, 30 bp, Artificial Sequence
  Synthetic oligonucleotide
aggctgtataccataagtaagatgggtgta

SEQ ID NO: 351931 - DNA, 30 bp, Artificial Sequence
  Synthetic oligonucleotide
ccagtagggtaacactagcatttgggtgta

SEQ ID NO: 351932 - DNA, 30 bp, Artificial Sequence
  Synthetic oligonucleotide
tggataccgtggtgttatgctagtggtgta

SEQ ID NO: 351933 - DNA, 30 bp, Artificial Sequence
  Synthetic oligonucleotide
ctagggacgcctggacaggttacatgtgta

SEQ ID NO: 351934 - DNA, 30 bp, Artificial Sequence
  Synthetic oligonucleotide
gactgtgtcaaggaccttctggtctgtgta

SEQ ID NO: 351935 - DNA, 30 bp, Artificial Sequence
  Synthetic oligonucleotide
tgtgtccaataatcagcctgttggtgtgta

SEQ ID NO: 351936 - DNA, 30 bp, Artificial Sequence
  Synthetic oligonucleotide
tcagtccaccctaaggtgatgcattgtgta

SEQ ID NO: 351937 - DNA, 30 bp, Artificial Sequence
  Synthetic oligonucleotide
accgcaaccttcataaaatgcgattgtgta

SEQ ID NO: 351938 - DNA, 30 bp, Artificial Sequence
  Synthetic oligonucleotide
tgattttagatttatccagcctattgtgta

SEQ ID NO: 351939 - DNA, 30 bp, Artificial Sequence
  Synthetic oligonucleotide
gccaggcgagcgggcgctaccacttgtgta

SEQ ID NO: 351940 - DNA, 30 bp, Artificial Sequence
  Synthetic oligonucleotide
ttagttacgtggtggcgcccaggttgtgta

SEQ ID NO: 351941 - DNA, 30 bp, Artificial Sequence
  Synthetic oligonucleotide
ctgagtcatctatacctgattgaaattgta

SEQ ID NO: 351942 - DNA, 30 bp, Artificial Sequence
  Synthetic oligonucleotide
gagcttgacctgttgctggagtccattgta

SEQ ID NO: 351943 - DNA, 30 bp, Artificial Sequence
  Synthetic oligonucleotide
caaagtcagacatcaagccaccggattgta

SEQ ID NO: 351944 - DNA, 30 bp, Artificial Sequence
  Synthetic oligonucleotide
cgctatccggtttaatgcaatgcccttgta

SEQ ID NO: 351945 - DNA, 30 bp, Artificial Sequence
  Synthetic oligonucleotide
gtaagttcctgtcacagagcggagcttgta

SEQ ID NO: 351946 - DNA, 30 bp, Artificial Sequence
  Synthetic oligonucleotide
ttcggagtgacaatgacaatgctagttgta

SEQ ID NO: 351947 - DNA, 30 bp, Artificial Sequence
  Synthetic oligonucleotide
ggctttacgggccccaccccagtagttgta

SEQ ID NO: 351948 - DNA, 30 bp, Artificial Sequence
  Synthetic oligonucleotide
tcctagtaaggaggggctggtgtagttgta

SEQ ID NO: 351949 - DNA, 30 bp, Artificial Sequence
  Synthetic oligonucleotide
aaaacggaaacgcagcagatacccgttgta

SEQ ID NO: 351950 - DNA, 30 bp, Artificial Sequence
  Synthetic oligonucleotide
tgtccgtgtgaggcgggcaaattcgttgta

SEQ ID NO: 351951 - DNA, 30 bp, Artificial Sequence
  Synthetic oligonucleotide
attaaggtggatctccatttacgggttgta

SEQ ID NO: 351952 - DNA, 30 bp, Artificial Sequence
  Synthetic oligonucleotide
tgttaatcagtacgatgcgcaatggttgta

SEQ ID NO: 351953 - DNA, 30 bp, Artificial Sequence
  Synthetic oligonucleotide
cgtcatacaagcagtcatgcgctggttgta

SEQ ID NO: 351954 - DNA, 30 bp, Artificial Sequence
  Synthetic oligonucleotide
aatttaggcgtacagactttagctgttgta

SEQ ID NO: 351955 - DNA, 30 bp, Artificial Sequence
  Synthetic oligonucleotide
acctgcggcacatctagcataagtgttgta

SEQ ID NO: 351956 - DNA, 30 bp, Artificial Sequence
  Synthetic oligonucleotide
ctatgacactaaagatgctacattgttgta

SEQ ID NO: 351957 - DNA, 30 bp, Artificial Sequence
  Synthetic oligonucleotide
ggccccgcgcatacaacatcttgatttgta

SEQ ID NO: 351958 - DNA, 30 bp, Artificial Sequence
  Synthetic oligonucleotide
acgaaaggaggatttttccgggtatttgta

SEQ ID NO: 351959 - DNA, 30 bp, Artificial Sequence
  Synthetic oligonucleotide
ctgcgacgccgggcgcaagtccgctttgta

SEQ ID NO: 351960 - DNA, 30 bp, Artificial Sequence
  Synthetic oligonucleotide
aggtgtctttattcataaggaatttttgta

SEQ ID NO: 351961 - DNA, 30 bp, Artificial Sequence
  Synthetic oligonucleotide
gtacggtagggcgtctcagtgctttttgta

SEQ ID NO: 351962 - DNA, 30 bp, Artificial Sequence
  Synthetic oligonucleotide
agccgttttagaattgggggcaaaaaatta

SEQ ID NO: 351963 - DNA, 30 bp, Artificial Sequence
  Synthetic oligonucleotide
tgataaattgaaaatttcagggacaaatta

SEQ ID NO: 351964 - DNA, 30 bp, Artificial Sequence
  Synthetic oligonucleotide
attctaaaacgttgctataggcccaaatta

SEQ ID NO: 351965 - DNA, 30 bp, Artificial Sequence
  Synthetic oligonucleotide
gcataagataatataaaggttatcaaatta

SEQ ID NO: 351966 - DNA, 30 bp, Artificial Sequence
  Synthetic oligonucleotide
gctttccccaggtagatccattagaaatta

SEQ ID NO: 351967 - DNA, 30 bp, Artificial Sequence
  Synthetic oligonucleotide
taacctgagcattgcatgctactgaaatta

SEQ ID NO: 351968 - DNA, 30 bp, Artificial Sequence
  Synthetic oligonucleotide
aattagagctaatgccacgaaaataaatta

SEQ ID NO: 351969 - DNA, 30 bp, Artificial Sequence
  Synthetic oligonucleotide
aggttcagttcgctacagtggcataaatta

SEQ ID NO: 351970 - DNA, 30 bp, Artificial Sequence
  Synthetic oligonucleotide
acttgttccgcgtgcgccgccagtaaatta

SEQ ID NO: 351971 - DNA, 30 bp, Artificial Sequence
  Synthetic oligonucleotide
acgcggtcctaatgaggctatggtaaatta

SEQ ID NO: 351972 - DNA, 30 bp, Artificial Sequence
  Synthetic oligonucleotide
aaataacaaacctagagatggagacaatta

SEQ ID NO: 351973 - DNA, 30 bp, Artificial Sequence
  Synthetic oligonucleotide
ggcttcgagcatctactatagacccaatta

SEQ ID NO: 351974 - DNA, 30 bp, Artificial Sequence
  Synthetic oligonucleotide
tttgcaatgaaccactatttgagtcaatta

SEQ ID NO: 351975 - DNA, 30 bp, Artificial Sequence
  Synthetic oligonucleotide
cgacgttaaaccggctcagccattcaatta

SEQ ID NO: 351976 - DNA, 30 bp, Artificial Sequence
  Synthetic oligonucleotide
tggttttgctatcgaggtcagacagaatta

SEQ ID NO: 351977 - DNA, 30 bp, Artificial Sequence
  Synthetic oligonucleotide
gtcgcggcgcatccagggccagacgaatta

SEQ ID NO: 351978 - DNA, 30 bp, Artificial Sequence
  Synthetic oligonucleotide
gtgttgtcgttcactctagatctggaatta

SEQ ID NO: 351979 - DNA, 30 bp, Artificial Sequence
  Synthetic oligonucleotide
ctaagatggatgttcatggagcctgaatta

SEQ ID NO: 351980 - DNA, 30 bp, Artificial Sequence
  Synthetic oligonucleotide
aaaagactttaggaataaccgaaataatta

SEQ ID NO: 351981 - DNA, 30 bp, Artificial Sequence
  Synthetic oligonucleotide
ccgtgggtctataatcattaccaataatta

SEQ ID NO: 351982 - DNA, 30 bp, Artificial Sequence
  Synthetic oligonucleotide
gggtattagaaacactatagagaataatta

SEQ ID NO: 351983 - DNA, 30 bp, Artificial Sequence
  Synthetic oligonucleotide
gatccggttaaaaaaagagaataataatta

SEQ ID NO: 351984 - DNA, 30 bp, Artificial Sequence
  Synthetic oligonucleotide
gatttgatggcatctataaagttataatta

SEQ ID NO: 351985 - DNA, 30 bp, Artificial Sequence
  Synthetic oligonucleotide
agatccaaaaagtagtttacggcctaatta

SEQ ID NO: 351986 - DNA, 30 bp, Artificial Sequence
  Synthetic oligonucleotide
tttgacacaataatgttccatcgctaatta

SEQ ID NO: 351987 - DNA, 30 bp, Artificial Sequence
  Synthetic oligonucleotide
ccggaagacgccgtttgatacggctaatta

SEQ ID NO: 351988 - DNA, 30 bp, Artificial Sequence
  Synthetic oligonucleotide
gggaacggaactcatggagagctctaatta

SEQ ID NO: 351989 - DNA, 30 bp, Artificial Sequence
  Synthetic oligonucleotide
cacctatataaggtttttgttgtctaatta

SEQ ID NO: 351990 - DNA, 30 bp, Artificial Sequence
  Synthetic oligonucleotide
tgtagtacttagttcaaacgcgcgtaatta

SEQ ID NO: 351991 - DNA, 30 bp, Artificial Sequence
  Synthetic oligonucleotide
ctctcgggccacatgagctctatgtaatta

SEQ ID NO: 351992 - DNA, 30 bp, Artificial Sequence
  Synthetic oligonucleotide
gataatcaacccttattccaatgttaatta

SEQ ID NO: 351993 - DNA, 30 bp, Artificial Sequence
  Synthetic oligonucleotide
tcacagggtcaagtcggaccgatttaatta

SEQ ID NO: 351994 - DNA, 30 bp, Artificial Sequence
  Synthetic oligonucleotide
atacactaagatgtcggggaagtttaatta

SEQ ID NO: 351995 - DNA, 30 bp, Artificial Sequence
  Synthetic oligonucleotide
tcttaggtatggctcctgctaggaacatta

SEQ ID NO: 351996 - DNA, 30 bp, Artificial Sequence
  Synthetic oligonucleotide
tcagtgcaatgagtttataagtgaacatta

SEQ ID NO: 351997 - DNA, 30 bp, Artificial Sequence
  Synthetic oligonucleotide
tggagcagttggggtgcggtggcgacatta

SEQ ID NO: 351998 - DNA, 30 bp, Artificial Sequence
  Synthetic oligonucleotide
atttcacaatagcacgtacatatgacatta

SEQ ID NO: 351999 - DNA, 30 bp, Artificial Sequence
  Synthetic oligonucleotide
caatcacctggcctgattctagtgacatta

SEQ ID NO: 352000 - DNA, 30 bp, Artificial Sequence
  Synthetic oligonucleotide
ttgataggaggctaaaatttcgatacatta

SEQ ID NO: 352001 - DNA, 30 bp, Artificial Sequence
  Synthetic oligonucleotide
gcgccacgggatggtccgacgggtacatta

SEQ ID NO: 352002 - DNA, 30 bp, Artificial Sequence
  Synthetic oligonucleotide
tctggacagacctcgtcaacgcaaccatta

SEQ ID NO: 352003 - DNA, 30 bp, Artificial Sequence
  Synthetic oligonucleotide
ggggaccagcatgtagactacgtaccatta

SEQ ID NO: 352004 - DNA, 30 bp, Artificial Sequence
  Synthetic oligonucleotide
aatagaccgacgtcagaattatgcccatta

SEQ ID NO: 352005 - DNA, 30 bp, Artificial Sequence
  Synthetic oligonucleotide
acttccgttcaacttagttgactcccatta

SEQ ID NO: 352006 - DNA, 30 bp, Artificial Sequence
  Synthetic oligonucleotide
gtggagttaacgtgtttaggaggtccatta

SEQ ID NO: 352007 - DNA, 30 bp, Artificial Sequence
  Synthetic oligonucleotide
atacagtagattttaaaaactagagcatta

SEQ ID NO: 352008 - DNA, 30 bp, Artificial Sequence
  Synthetic oligonucleotide
taaaatacagggcgtattcctaacgcatta

SEQ ID NO: 352009 - DNA, 30 bp, Artificial Sequence
  Synthetic oligonucleotide
tagtctaaccctatcaatttgatggcatta

SEQ ID NO: 352010 - DNA, 30 bp, Artificial Sequence
  Synthetic oligonucleotide
tgtcaagagtgcttcatacatttggcatta

SEQ ID NO: 352011 - DNA, 30 bp, Artificial Sequence
  Synthetic oligonucleotide
catggaggaggcgggttgtgtgcatcatta

SEQ ID NO: 352012 - DNA, 30 bp, Artificial Sequence
  Synthetic oligonucleotide
tcacttgagcctcacggtctgggatcatta

SEQ ID NO: 352013 - DNA, 30 bp, Artificial Sequence
  Synthetic oligonucleotide
ccaattctacggcgctttagtagctcatta

SEQ ID NO: 352014 - DNA, 30 bp, Artificial Sequence
  Synthetic oligonucleotide
gttgggtagaattgacgcattggctcatta

SEQ ID NO: 352015 - DNA, 30 bp, Artificial Sequence
  Synthetic oligonucleotide
aagacacgcgttatagtaacgaagtcatta

SEQ ID NO: 352016 - DNA, 30 bp, Artificial Sequence
  Synthetic oligonucleotide
gactcgacaatttttgtgtgctagtcatta

SEQ ID NO: 352017 - DNA, 30 bp, Artificial Sequence
  Synthetic oligonucleotide
gcactcccccagatacttgcttagtcatta

SEQ ID NO: 352018 - DNA, 30 bp, Artificial Sequence
  Synthetic oligonucleotide
agccggcagcttgtattgttccgttcatta

SEQ ID NO: 352019 - DNA, 30 bp, Artificial Sequence
  Synthetic oligonucleotide
ggcatagcagcttatttgtacaaaagatta

SEQ ID NO: 352020 - DNA, 30 bp, Artificial Sequence
  Synthetic oligonucleotide
tcctactaagacaaggtaactcgaagatta

SEQ ID NO: 352021 - DNA, 30 bp, Artificial Sequence
  Synthetic oligonucleotide
gaatggacaacggataccaccgagagatta

SEQ ID NO: 352022 - DNA, 30 bp, Artificial Sequence
  Synthetic oligonucleotide
cttcagcaagtgcagtttggaaggagatta

SEQ ID NO: 352023 - DNA, 30 bp, Artificial Sequence
  Synthetic oligonucleotide
agtaaccttagaacacaagttcggagatta

SEQ ID NO: 352024 - DNA, 30 bp, Artificial Sequence
  Synthetic oligonucleotide
tgatattattcgcattagatactgagatta

SEQ ID NO: 352025 - DNA, 30 bp, Artificial Sequence
  Synthetic oligonucleotide
ggtccacaggcctactgtattgaccgatta

SEQ ID NO: 352026 - DNA, 30 bp, Artificial Sequence
  Synthetic oligonucleotide
gtggtagtctgccgagcgtcttaccgatta

SEQ ID NO: 352027 - DNA, 30 bp, Artificial Sequence
  Synthetic oligonucleotide
agaatttcgggccgtaggcaggatcgatta

SEQ ID NO: 352028 - DNA, 30 bp, Artificial Sequence
  Synthetic oligonucleotide
tttaacataaatatgactgctattcgatta

SEQ ID NO: 352029 - DNA, 30 bp, Artificial Sequence
  Synthetic oligonucleotide
acgctactaagtattgactaaagaggatta

SEQ ID NO: 352030 - DNA, 30 bp, Artificial Sequence
  Synthetic oligonucleotide
gtaagagtgcggccttcgggcaacggatta

SEQ ID NO: 352031 - DNA, 30 bp, Artificial Sequence
  Synthetic oligonucleotide
ggcatatgacttcgttcggccaagggatta

SEQ ID NO: 352032 - DNA, 30 bp, Artificial Sequence
  Synthetic oligonucleotide
ggtagccgttaatggcacttcaagggatta

SEQ ID NO: 352033 - DNA, 30 bp, Artificial Sequence
  Synthetic oligonucleotide
cgatggatattctcggcttggatgggatta

SEQ ID NO: 352034 - DNA, 30 bp, Artificial Sequence
  Synthetic oligonucleotide
ctgacgattccatccgctggtcatggatta

SEQ ID NO: 352035 - DNA, 30 bp, Artificial Sequence
  Synthetic oligonucleotide
cgtcaggtagctcctcgagctaaatgatta

SEQ ID NO: 352036 - DNA, 30 bp, Artificial Sequence
  Synthetic oligonucleotide
ttggtgagacccaaaggtcagtaatgatta

SEQ ID NO: 352037 - DNA, 30 bp, Artificial Sequence
  Synthetic oligonucleotide
cacaatctcatgaagaatcaagcatgatta

SEQ ID NO: 352038 - DNA, 30 bp, Artificial Sequence
  Synthetic oligonucleotide
aaaaaaaagtagtacgatacctcatgatta

SEQ ID NO: 352039 - DNA, 30 bp, Artificial Sequence
  Synthetic oligonucleotide
taagggttgataacaattatacgctgatta

SEQ ID NO: 352040 - DNA, 30 bp, Artificial Sequence
  Synthetic oligonucleotide
gcgaatttcgtatatgaaacttgttgatta

SEQ ID NO: 352041 - DNA, 30 bp, Artificial Sequence
  Synthetic oligonucleotide
ataattaggaatgctcagacaatttgatta

SEQ ID NO: 352042 - DNA, 30 bp, Artificial Sequence
  Synthetic oligonucleotide
atggggcccaaggaggcttgtcaaatatta

SEQ ID NO: 352043 - DNA, 30 bp, Artificial Sequence
  Synthetic oligonucleotide
ctcttgttggaaaaggaatttagaatatta

SEQ ID NO: 352044 - DNA, 30 bp, Artificial Sequence
  Synthetic oligonucleotide
cttgcataagttggtaaaaagataatatta

SEQ ID NO: 352045 - DNA, 30 bp, Artificial Sequence
  Synthetic oligonucleotide
gtcctgtgttatcagggttgcgtaatatta

SEQ ID NO: 352046 - DNA, 30 bp, Artificial Sequence
  Synthetic oligonucleotide
cgcgcttgtaagaattattccgccatatta

SEQ ID NO: 352047 - DNA, 30 bp, Artificial Sequence
  Synthetic oligonucleotide
tctggcgaatagggtaacaatgtcatatta

SEQ ID NO: 352048 - DNA, 30 bp, Artificial Sequence
  Synthetic oligonucleotide
agtttcctagacggatgtgcccagatatta

SEQ ID NO: 352049 - DNA, 30 bp, Artificial Sequence
  Synthetic oligonucleotide
cagtacaatttttttcgcacaccgatatta

SEQ ID NO: 352050 - DNA, 30 bp, Artificial Sequence
  Synthetic oligonucleotide
ttttggaggaaggttttacaaaatatatta

SEQ ID NO: 352051 - DNA, 30 bp, Artificial Sequence
  Synthetic oligonucleotide
gacactatttcttacagcgagacactatta

SEQ ID NO: 352052 - DNA, 30 bp, Artificial Sequence
  Synthetic oligonucleotide
aggtcggtatgcgggccattgacactatta

SEQ ID NO: 352053 - DNA, 30 bp, Artificial Sequence
  Synthetic oligonucleotide
ctcccacaccctcgtgctatgatactatta

SEQ ID NO: 352054 - DNA, 30 bp, Artificial Sequence
  Synthetic oligonucleotide
aagtaattaagtaacttgttaaacctatta

SEQ ID NO: 352055 - DNA, 30 bp, Artificial Sequence
  Synthetic oligonucleotide
aaccggccagtctgagaattagtcctatta

SEQ ID NO: 352056 - DNA, 30 bp, Artificial Sequence
  Synthetic oligonucleotide
cgccatcatcacatacgtgagatgctatta

SEQ ID NO: 352057 - DNA, 30 bp, Artificial Sequence
  Synthetic oligonucleotide
cgcactaagaaacggcatagtcatctatta

SEQ ID NO: 352058 - DNA, 30 bp, Artificial Sequence
  Synthetic oligonucleotide
ctttgaatttggttggtcaaaaaagtatta

SEQ ID NO: 352059 - DNA, 30 bp, Artificial Sequence
  Synthetic oligonucleotide
atcggggaagctaaatgtaagggagtatta

SEQ ID NO: 352060 - DNA, 30 bp, Artificial Sequence
  Synthetic oligonucleotide
gcatggtacgtggattcaaggcacgtatta

SEQ ID NO: 352061 - DNA, 30 bp, Artificial Sequence
  Synthetic oligonucleotide
aataaaatgaaatttgaacaacccgtatta

SEQ ID NO: 352062 - DNA, 30 bp, Artificial Sequence
  Synthetic oligonucleotide
taaggaagaagcttctccgcagccgtatta

SEQ ID NO: 352063 - DNA, 30 bp, Artificial Sequence
  Synthetic oligonucleotide
tggaatggagcgttctgaaggcaggtatta

SEQ ID NO: 352064 - DNA, 30 bp, Artificial Sequence
  Synthetic oligonucleotide
aacggaaaaatccggttacaattggtatta

SEQ ID NO: 352065 - DNA, 30 bp, Artificial Sequence
  Synthetic oligonucleotide
aaccgatttgcaacgtcgttaaatgtatta

SEQ ID NO: 352066 - DNA, 30 bp, Artificial Sequence
  Synthetic oligonucleotide
cctatgtaacggtgtgcaaaccctgtatta

SEQ ID NO: 352067 - DNA, 30 bp, Artificial Sequence
  Synthetic oligonucleotide
taacatgatcaggtttccacgtaattatta

SEQ ID NO: 352068 - DNA, 30 bp, Artificial Sequence
  Synthetic oligonucleotide
ttaggcattcttttataggctagattatta

SEQ ID NO: 352069 - DNA, 30 bp, Artificial Sequence
  Synthetic oligonucleotide
tatgctaaacgatctaacaaggtattatta

SEQ ID NO: 352070 - DNA, 30 bp, Artificial Sequence
  Synthetic oligonucleotide
cgtggatagcctctccaatcaaacttatta

SEQ ID NO: 352071 - DNA, 30 bp, Artificial Sequence
  Synthetic oligonucleotide
tacccctgtaatcaatcggtgcccttatta

SEQ ID NO: 352072 - DNA, 30 bp, Artificial Sequence
  Synthetic oligonucleotide
cgatactcttgcggcactcagggcttatta

SEQ ID NO: 352073 - DNA, 30 bp, Artificial Sequence
  Synthetic oligonucleotide
tatgattaaattgtaaaaagaatcttatta

SEQ ID NO: 352074 - DNA, 30 bp, Artificial Sequence
  Synthetic oligonucleotide
tttcgaagtcgacgaagtagtgagttatta

SEQ ID NO: 352075 - DNA, 30 bp, Artificial Sequence
  Synthetic oligonucleotide
ggttcagacctgttatagatcgcgttatta

SEQ ID NO: 352076 - DNA, 30 bp, Artificial Sequence
  Synthetic oligonucleotide
tgtaaataaaagtcatatgataggttatta

SEQ ID NO: 352077 - DNA, 30 bp, Artificial Sequence
  Synthetic oligonucleotide
tcttcctaaagttcgcagtgtgatttatta

SEQ ID NO: 352078 - DNA, 30 bp, Artificial Sequence
  Synthetic oligonucleotide
cccacaatacgacttcgctgggttttatta

SEQ ID NO: 352079 - DNA, 30 bp, Artificial Sequence
  Synthetic oligonucleotide
gactcgtgaccgttcagggcaaaaaactta

SEQ ID NO: 352080 - DNA, 30 bp, Artificial Sequence
  Synthetic oligonucleotide
ggattaactaggatacagcactaaaactta

SEQ ID NO: 352081 - DNA, 30 bp, Artificial Sequence
  Synthetic oligonucleotide
atgtacggatatgacgtcagtgcaaactta

SEQ ID NO: 352082 - DNA, 30 bp, Artificial Sequence
  Synthetic oligonucleotide
acgctcctatgcgatactaagcgcaactta

SEQ ID NO: 352083 - DNA, 30 bp, Artificial Sequence
  Synthetic oligonucleotide
gtcaggataattgggtttgtgcgcaactta

SEQ ID NO: 352084 - DNA, 30 bp, Artificial Sequence
  Synthetic oligonucleotide
aacaaaagggggttacccctactcaactta

SEQ ID NO: 352085 - DNA, 30 bp, Artificial Sequence
  Synthetic oligonucleotide
ccctttgtacgggtattcccgccgaactta

SEQ ID NO: 352086 - DNA, 30 bp, Artificial Sequence
  Synthetic oligonucleotide
aacggcattcgtgttcgcgatgggaactta

SEQ ID NO: 352087 - DNA, 30 bp, Artificial Sequence
  Synthetic oligonucleotide
aaagccagtggttccacgatttggaactta

SEQ ID NO: 352088 - DNA, 30 bp, Artificial Sequence
  Synthetic oligonucleotide
ttgttcaggcatgtaatcttggtgaactta

SEQ ID NO: 352089 - DNA, 30 bp, Artificial Sequence
  Synthetic oligonucleotide
gtcgcctaactcgcaggtttcaaacactta

SEQ ID NO: 352090 - DNA, 30 bp, Artificial Sequence
  Synthetic oligonucleotide
agggctgtactatgggtgtgtatacactta

SEQ ID NO: 352091 - DNA, 30 bp, Artificial Sequence
  Synthetic oligonucleotide
ataaatatcgataggacgaaagtacactta

SEQ ID NO: 352092 - DNA, 30 bp, Artificial Sequence
  Synthetic oligonucleotide
tgatcccaacccaggatttcccagcactta

SEQ ID NO: 352093 - DNA, 30 bp, Artificial Sequence
  Synthetic oligonucleotide
gtatagcaacatcaaccgggatgagactta

SEQ ID NO: 352094 - DNA, 30 bp, Artificial Sequence
  Synthetic oligonucleotide
tgtcaatgccctaccaggacaaaggactta

SEQ ID NO: 352095 - DNA, 30 bp, Artificial Sequence
  Synthetic oligonucleotide
ggtgacgaagacggggaggccggggactta

SEQ ID NO: 352096 - DNA, 30 bp, Artificial Sequence
  Synthetic oligonucleotide
ggcattatagtggcatcctgtcatgactta

SEQ ID NO: 352097 - DNA, 30 bp, Artificial Sequence
  Synthetic oligonucleotide
gacctcatgtccgtcggagccgctgactta

SEQ ID NO: 352098 - DNA, 30 bp, Artificial Sequence
  Synthetic oligonucleotide
cctcaggagggacccccagtcgctgactta

SEQ ID NO: 352099 - DNA, 30 bp, Artificial Sequence
  Synthetic oligonucleotide
taattgggcgagacagcaccgattgactta

SEQ ID NO: 352100 - DNA, 30 bp, Artificial Sequence
  Synthetic oligonucleotide
ctcggccttagttcgtgatatgaatactta

SEQ ID NO: 352101 - DNA, 30 bp, Artificial Sequence
  Synthetic oligonucleotide
gtggtagaagatcgtactctgtaatactta

SEQ ID NO: 352102 - DNA, 30 bp, Artificial Sequence
  Synthetic oligonucleotide
catatctcaattgcgaggatcgcatactta

SEQ ID NO: 352103 - DNA, 30 bp, Artificial Sequence
  Synthetic oligonucleotide
gtgtataagacccctgcgatgcgctactta

SEQ ID NO: 352104 - DNA, 30 bp, Artificial Sequence
  Synthetic oligonucleotide
aacaatgtgggatgacgacgaggttactta

SEQ ID NO: 352105 - DNA, 30 bp, Artificial Sequence
  Synthetic oligonucleotide
gatgaggaaccctatcgcagcctttactta

SEQ ID NO: 352106 - DNA, 30 bp, Artificial Sequence
  Synthetic oligonucleotide
ctgcatttttgagtgatcagtaagacctta

SEQ ID NO: 352107 - DNA, 30 bp, Artificial Sequence
  Synthetic oligonucleotide
acgaataaagtttcttggcatgcaccctta

SEQ ID NO: 352108 - DNA, 30 bp, Artificial Sequence
  Synthetic oligonucleotide
ccgcttagcagacatgatgtgtcgccctta

SEQ ID NO: 352109 - DNA, 30 bp, Artificial Sequence
  Synthetic oligonucleotide
ccgatatgcacaaactctatatggccctta

SEQ ID NO: 352110 - DNA, 30 bp, Artificial Sequence
  Synthetic oligonucleotide
accagaacgacacataatagacgtccctta

SEQ ID NO: 352111 - DNA, 30 bp, Artificial Sequence
  Synthetic oligonucleotide
attacgcctaacggacataatgaagcctta

SEQ ID NO: 352112 - DNA, 30 bp, Artificial Sequence
  Synthetic oligonucleotide
gtggtcggataggcctcacaaggagcctta

SEQ ID NO: 352113 - DNA, 30 bp, Artificial Sequence
  Synthetic oligonucleotide
agaggtaatttgtgagttgttggagcctta

SEQ ID NO: 352114 - DNA, 30 bp, Artificial Sequence
  Synthetic oligonucleotide
agtacaaatgatctgcagcgaatagcctta

SEQ ID NO: 352115 - DNA, 30 bp, Artificial Sequence
  Synthetic oligonucleotide
gacaactccacgggcaggcacctagcctta

SEQ ID NO: 352116 - DNA, 30 bp, Artificial Sequence
  Synthetic oligonucleotide
ttcgatcaaatgtgagtatagtccgcctta

SEQ ID NO: 352117 - DNA, 30 bp, Artificial Sequence
  Synthetic oligonucleotide
ggttagtatcggggcttaataacggcctta

SEQ ID NO: 352118 - DNA, 30 bp, Artificial Sequence
  Synthetic oligonucleotide
aacgctgcctatctgcactcttgggcctta

SEQ ID NO: 352119 - DNA, 30 bp, Artificial Sequence
  Synthetic oligonucleotide
ggacccttgaggctatagatcaactcctta

SEQ ID NO: 352120 - DNA, 30 bp, Artificial Sequence
  Synthetic oligonucleotide
gcaattttcaagtttcatgtaacgtcctta

SEQ ID NO: 352121 - DNA, 30 bp, Artificial Sequence
  Synthetic oligonucleotide
atggaagcacctgatcattagtattcctta

SEQ ID NO: 352122 - DNA, 30 bp, Artificial Sequence
  Synthetic oligonucleotide
attcatagaagtaatgagggggcttcctta

SEQ ID NO: 352123 - DNA, 30 bp, Artificial Sequence
  Synthetic oligonucleotide
ccggtccatcgcgagaggtctaaaagctta

SEQ ID NO: 352124 - DNA, 30 bp, Artificial Sequence
  Synthetic oligonucleotide
ctgataatcctaaacgtcatacacagctta

SEQ ID NO: 352125 - DNA, 30 bp, Artificial Sequence
  Synthetic oligonucleotide
acattaaggtcagctttttagcggagctta

SEQ ID NO: 352126 - DNA, 30 bp, Artificial Sequence
  Synthetic oligonucleotide
taaagcctttaatctgcggatattagctta

SEQ ID NO: 352127 - DNA, 30 bp, Artificial Sequence
  Synthetic oligonucleotide
ccaggccgaaaggttggtggcaaacgctta

SEQ ID NO: 352128 - DNA, 30 bp, Artificial Sequence
  Synthetic oligonucleotide
ttaagatatagactctgcgctcgacgctta

SEQ ID NO: 352129 - DNA, 30 bp, Artificial Sequence
  Synthetic oligonucleotide
ttctcaactaatatgggctcatgacgctta

SEQ ID NO: 352130 - DNA, 30 bp, Artificial Sequence
  Synthetic oligonucleotide
gatcagtactcctttctcgccggccgctta

SEQ ID NO: 352131 - DNA, 30 bp, Artificial Sequence
  Synthetic oligonucleotide
tactggatcacattggttaaactccgctta

SEQ ID NO: 352132 - DNA, 30 bp, Artificial Sequence
  Synthetic oligonucleotide
aacaggcgcctaaagtagataacaggctta

SEQ ID NO: 352133 - DNA, 30 bp, Artificial Sequence
  Synthetic oligonucleotide
tacgggtgtctcgatctaatgatcggctta

SEQ ID NO: 352134 - DNA, 30 bp, Artificial Sequence
  Synthetic oligonucleotide
ttttccactaaaacgccaatccagggctta

SEQ ID NO: 352135 - DNA, 30 bp, Artificial Sequence
  Synthetic oligonucleotide
cctttagcttggcatgaaacgtggggctta

SEQ ID NO: 352136 - DNA, 30 bp, Artificial Sequence
  Synthetic oligonucleotide
aacgtttgccttgcaaggacattatgctta

SEQ ID NO: 352137 - DNA, 30 bp, Artificial Sequence
  Synthetic oligonucleotide
tctcgttcctgcgttatacctttctgctta

SEQ ID NO: 352138 - DNA, 30 bp, Artificial Sequence
  Synthetic oligonucleotide
atttctgtggatagcagactatcgtgctta

SEQ ID NO: 352139 - DNA, 30 bp, Artificial Sequence
  Synthetic oligonucleotide
ctccattaacgtagtaccattttgtgctta

SEQ ID NO: 352140 - DNA, 30 bp, Artificial Sequence
  Synthetic oligonucleotide
tcctttatctttacgactatgatttgctta

SEQ ID NO: 352141 - DNA, 30 bp, Artificial Sequence
  Synthetic oligonucleotide
acagcatatcaatgcggcgttgaaatctta

SEQ ID NO: 352142 - DNA, 30 bp, Artificial Sequence
  Synthetic oligonucleotide
gtaaccctgggggggcgagcctaaatctta

SEQ ID NO: 352143 - DNA, 30 bp, Artificial Sequence
  Synthetic oligonucleotide
ctttatggagaatatctgggcgtaatctta

SEQ ID NO: 352144 - DNA, 30 bp, Artificial Sequence
  Synthetic oligonucleotide
gcaaacatgcacctgcgcttggtaatctta

SEQ ID NO: 352145 - DNA, 29 bp, Artificial Sequence
  Synthetic oligonucleotide
tgcccccatctatctcggactgcatctta

SEQ ID NO: 352146 - DNA, 30 bp, Artificial Sequence
  Synthetic oligonucleotide
tttctagtcaattacatgcaacggatctta

SEQ ID NO: 352147 - DNA, 30 bp, Artificial Sequence
  Synthetic oligonucleotide
acttcaaccataagtctccgcaatatctta

SEQ ID NO: 352148 - DNA, 30 bp, Artificial Sequence
  Synthetic oligonucleotide
gccatcataagcagttaggagcgtatctta

SEQ ID NO: 352149 - DNA, 30 bp, Artificial Sequence
  Synthetic oligonucleotide
atcgtttatgtaggtatttagacactctta

SEQ ID NO: 352150 - DNA, 30 bp, Artificial Sequence
  Synthetic oligonucleotide
cttgcctgtaagagccttcctctcctctta

SEQ ID NO: 352151 - DNA, 30 bp, Artificial Sequence
  Synthetic oligonucleotide
tcctctcttatacgctctgtccggctctta

SEQ ID NO: 352152 - DNA, 30 bp, Artificial Sequence
  Synthetic oligonucleotide
cctcgcctcgtaagaacgccctatctctta

SEQ ID NO: 352153 - DNA, 30 bp, Artificial Sequence
  Synthetic oligonucleotide
attcggatcgcaaccaattaacaagtctta

SEQ ID NO: 352154 - DNA, 30 bp, Artificial Sequence
  Synthetic oligonucleotide
actgggggttgtagagtcgcgtcagtctta

SEQ ID NO: 352155 - DNA, 30 bp, Artificial Sequence
  Synthetic oligonucleotide
ttagatgttcggactgaattaatagtctta

SEQ ID NO: 352156 - DNA, 30 bp, Artificial Sequence
  Synthetic oligonucleotide
aaatgtaatcatgcagtggtaacggtctta

SEQ ID NO: 352157 - DNA, 30 bp, Artificial Sequence
  Synthetic oligonucleotide
gcctgcacctctagcttgcggacggtctta

SEQ ID NO: 352158 - DNA, 30 bp, Artificial Sequence
  Synthetic oligonucleotide
ttgcgtcatttaaaagcacagcgggtctta

SEQ ID NO: 352159 - DNA, 30 bp, Artificial Sequence
  Synthetic oligonucleotide
cttcatagctcatagggcagcaggttctta

SEQ ID NO: 352160 - DNA, 30 bp, Artificial Sequence
  Synthetic oligonucleotide
taaggcctccgtcatggaagttaaaagtta

SEQ ID NO: 352161 - DNA, 30 bp, Artificial Sequence
  Synthetic oligonucleotide
cgcagaaggattacgtatcggacaaagtta

SEQ ID NO: 352162 - DNA, 30 bp, Artificial Sequence
  Synthetic oligonucleotide
gagcacctagaggtgctgagactaaagtta

SEQ ID NO: 352163 - DNA, 30 bp, Artificial Sequence
  Synthetic oligonucleotide
tacgacacgcgtcgcgagcgggtaaagtta

SEQ ID NO: 352164 - DNA, 30 bp, Artificial Sequence
  Synthetic oligonucleotide
ataataggcagtcgtgtcaggaacaagtta

SEQ ID NO: 352165 - DNA, 30 bp, Artificial Sequence
  Synthetic oligonucleotide
gcgagccaattaccgtttccactcaagtta

SEQ ID NO: 352166 - DNA, 30 bp, Artificial Sequence
  Synthetic oligonucleotide
aatggtatacgctcttaccgcaagaagtta

SEQ ID NO: 352167 - DNA, 30 bp, Artificial Sequence
  Synthetic oligonucleotide
gaatcggtacccaaggttctgcggaagtta

SEQ ID NO: 352168 - DNA, 30 bp, Artificial Sequence
  Synthetic oligonucleotide
acgacagactcgatcctagtagggaagtta

SEQ ID NO: 352169 - DNA, 30 bp, Artificial Sequence
  Synthetic oligonucleotide
ttccggatgcgcacggccggcctgaagtta

SEQ ID NO: 352170 - DNA, 30 bp, Artificial Sequence
  Synthetic oligonucleotide
gatgagaacttgatcaatgggttgaagtta

SEQ ID NO: 352171 - DNA, 30 bp, Artificial Sequence
  Synthetic oligonucleotide
catcttgtctccatgcaacgggataagtta

SEQ ID NO: 352172 - DNA, 30 bp, Artificial Sequence
  Synthetic oligonucleotide
cgattgttatacgcatacaattctaagtta

SEQ ID NO: 352173 - DNA, 30 bp, Artificial Sequence
  Synthetic oligonucleotide
tctctgaaatccagttatcatagtaagtta

SEQ ID NO: 352174 - DNA, 30 bp, Artificial Sequence
  Synthetic oligonucleotide
gtgtggatacctaaccttagtattaagtta

SEQ ID NO: 352175 - DNA, 30 bp, Artificial Sequence
  Synthetic oligonucleotide
ggtagtgacctcttgtccgcatttaagtta

SEQ ID NO: 352176 - DNA, 30 bp, Artificial Sequence
  Synthetic oligonucleotide
ttggtttgcgagaacgtggcgtttaagtta

SEQ ID NO: 352177 - DNA, 30 bp, Artificial Sequence
  Synthetic oligonucleotide
ggccttcatccaattgaaactgcacagtta

SEQ ID NO: 352178 - DNA, 30 bp, Artificial Sequence
  Synthetic oligonucleotide
ataaacattccgttaatagggctacagtta

SEQ ID NO: 352179 - DNA, 30 bp, Artificial Sequence
  Synthetic oligonucleotide
cacgttagtattgtttatctcaaccagtta

SEQ ID NO: 352180 - DNA, 30 bp, Artificial Sequence
  Synthetic oligonucleotide
ctcaatactagttgcattggatgtcagtta

SEQ ID NO: 352181 - DNA, 30 bp, Artificial Sequence
  Synthetic oligonucleotide
cattccgaaacttattgtctaggagagtta

SEQ ID NO: 352182 - DNA, 30 bp, Artificial Sequence
  Synthetic oligonucleotide
aatagggcaattgcggtggcgttagagtta

SEQ ID NO: 352183 - DNA, 30 bp, Artificial Sequence
  Synthetic oligonucleotide
taggtggacaaaatccgcatgactgagtta

SEQ ID NO: 352184 - DNA, 30 bp, Artificial Sequence
  Synthetic oligonucleotide
tgtgcgtcctttctggtgcatgctgagtta

SEQ ID NO: 352185 - DNA, 30 bp, Artificial Sequence
  Synthetic oligonucleotide
gtacctaccggtaaccggatcagtgagtta

SEQ ID NO: 352186 - DNA, 30 bp, Artificial Sequence
  Synthetic oligonucleotide
tatagcgcaccctgtcttgcatgtgagtta

SEQ ID NO: 352187 - DNA, 30 bp, Artificial Sequence
  Synthetic oligonucleotide
tattacctcagaccacgacggtgtgagtta

SEQ ID NO: 352188 - DNA, 30 bp, Artificial Sequence
  Synthetic oligonucleotide
cttcgggtgtgcatcgtaggaagatagtta

SEQ ID NO: 352189 - DNA, 30 bp, Artificial Sequence
  Synthetic oligonucleotide
agcacaaagagatagctctctttatagtta

SEQ ID NO: 352190 - DNA, 30 bp, Artificial Sequence
  Synthetic oligonucleotide
cgtagcagtagaatagtgtttttatagtta

SEQ ID NO: 352191 - DNA, 29 bp, Artificial Sequence
  Synthetic oligonucleotide
gtgctaatccgttgttagagtactagtta

SEQ ID NO: 352192 - DNA, 30 bp, Artificial Sequence
  Synthetic oligonucleotide
aaataaggtcagcaaccggttccctagtta

SEQ ID NO: 352193 - DNA, 30 bp, Artificial Sequence
  Synthetic oligonucleotide
gtatattatacatttagaaatagctagtta

SEQ ID NO: 352194 - DNA, 30 bp, Artificial Sequence
  Synthetic oligonucleotide
tacaacataaaagaatatggtgtctagtta

SEQ ID NO: 352195 - DNA, 30 bp, Artificial Sequence
  Synthetic oligonucleotide
ctagtagctccattgctaatattctagtta

SEQ ID NO: 352196 - DNA, 30 bp, Artificial Sequence
  Synthetic oligonucleotide
tggattcacttccatcgaggcgagtagtta

SEQ ID NO: 352197 - DNA, 30 bp, Artificial Sequence
  Synthetic oligonucleotide
gggaggctttgattttaaagctagtagtta

SEQ ID NO: 352198 - DNA, 30 bp, Artificial Sequence
  Synthetic oligonucleotide
tcccggaaactaggctgacgttagtagtta

SEQ ID NO: 352199 - DNA, 30 bp, Artificial Sequence
  Synthetic oligonucleotide
cgtgtctccgcgtttctaggagcgtagtta

SEQ ID NO: 352200 - DNA, 30 bp, Artificial Sequence
  Synthetic oligonucleotide
agagcaggcttagtgagtgaccggtagtta

SEQ ID NO: 352201 - DNA, 30 bp, Artificial Sequence
  Synthetic oligonucleotide
cgcacgaccggagccttgtatgtgtagtta

SEQ ID NO: 352202 - DNA, 30 bp, Artificial Sequence
  Synthetic oligonucleotide
atcctcacacaagggtaaacaggaacgtta

SEQ ID NO: 352203 - DNA, 30 bp, Artificial Sequence
  Synthetic oligonucleotide
cgcgtgcaattcggaatacgtaccacgtta

SEQ ID NO: 352204 - DNA, 30 bp, Artificial Sequence
  Synthetic oligonucleotide
acagagcgtgcaaaggtcaatttcacgtta

SEQ ID NO: 352205 - DNA, 30 bp, Artificial Sequence
  Synthetic oligonucleotide
acgtggtcactctaagtcgtctggacgtta

SEQ ID NO: 352206 - DNA, 30 bp, Artificial Sequence
  Synthetic oligonucleotide
ggccaggtctgcccaggggatctgacgtta

SEQ ID NO: 352207 - DNA, 30 bp, Artificial Sequence
  Synthetic oligonucleotide
aggtccatcgcgtcctttaaagtgacgtta

SEQ ID NO: 352208 - DNA, 30 bp, Artificial Sequence
  Synthetic oligonucleotide
atttatccggcgggtaaacaccatacgtta

SEQ ID NO: 352209 - DNA, 30 bp, Artificial Sequence
  Synthetic oligonucleotide
ggcccacgtcgcagcaggcagtatacgtta

SEQ ID NO: 352210 - DNA, 30 bp, Artificial Sequence
  Synthetic oligonucleotide
gcgcgtccgcttttaaatgctcgtacgtta

SEQ ID NO: 352211 - DNA, 30 bp, Artificial Sequence
  Synthetic oligonucleotide
tatggtgagtagatcgcatatgtaccgtta

SEQ ID NO: 352212 - DNA, 30 bp, Artificial Sequence
  Synthetic oligonucleotide
gtaaaacgtaggtcggttcttgacgcgtta

SEQ ID NO: 352213 - DNA, 30 bp, Artificial Sequence
  Synthetic oligonucleotide
tcctctttgttgttacccaatgtggcgtta

SEQ ID NO: 352214 - DNA, 30 bp, Artificial Sequence
  Synthetic oligonucleotide
ctcttataatgactgattatcgaatcgtta

SEQ ID NO: 352215 - DNA, 30 bp, Artificial Sequence
  Synthetic oligonucleotide
tagtgtcagtcagtgcttctttaatcgtta

SEQ ID NO: 352216 - DNA, 30 bp, Artificial Sequence
  Synthetic oligonucleotide
tttcaaacacgacattcacggacatcgtta

SEQ ID NO: 352217 - DNA, 30 bp, Artificial Sequence
  Synthetic oligonucleotide
cgtcctcggcctgtttgtggcaaaaggtta

SEQ ID NO: 352218 - DNA, 30 bp, Artificial Sequence
  Synthetic oligonucleotide
gttctggacctcatcatccggaaaaggtta

SEQ ID NO: 352219 - DNA, 30 bp, Artificial Sequence
  Synthetic oligonucleotide
agtcggcaccatttcggcctccaaaggtta

SEQ ID NO: 352220 - DNA, 30 bp, Artificial Sequence
  Synthetic oligonucleotide
caatccgtgaactatagctatgaaaggtta

SEQ ID NO: 352221 - DNA, 30 bp, Artificial Sequence
  Synthetic oligonucleotide
aggctgtgaacagcagcaacgccaaggtta

SEQ ID NO: 352222 - DNA, 30 bp, Artificial Sequence
  Synthetic oligonucleotide
tttggtactatacctcggttggagaggtta

SEQ ID NO: 352223 - DNA, 30 bp, Artificial Sequence
  Synthetic oligonucleotide
tggtagtacggtacggtgaccaggaggtta

SEQ ID NO: 352224 - DNA, 30 bp, Artificial Sequence
  Synthetic oligonucleotide
ctcgctgcgccgcattttgtcgggaggtta

SEQ ID NO: 352225 - DNA, 30 bp, Artificial Sequence
  Synthetic oligonucleotide
gcctaacgttggggacctaattggaggtta

SEQ ID NO: 352226 - DNA, 30 bp, Artificial Sequence
  Synthetic oligonucleotide
tgtaagtcgactcctcgcttgaataggtta

SEQ ID NO: 352227 - DNA, 30 bp, Artificial Sequence
  Synthetic oligonucleotide
cacatccttaagcgtgttagccttaggtta

SEQ ID NO: 352228 - DNA, 30 bp, Artificial Sequence
  Synthetic oligonucleotide
tgggggttaacaggaacggggtttaggtta

SEQ ID NO: 352229 - DNA, 30 bp, Artificial Sequence
  Synthetic oligonucleotide
cccctgtggaacggttcgaaatcacggtta

SEQ ID NO: 352230 - DNA, 30 bp, Artificial Sequence
  Synthetic oligonucleotide
tacggatcattgggacctgttcgacggtta

SEQ ID NO: 352231 - DNA, 30 bp, Artificial Sequence
  Synthetic oligonucleotide
gccataggttcaagtaatacgcaccggtta

SEQ ID NO: 352232 - DNA, 30 bp, Artificial Sequence
  Synthetic oligonucleotide
gatcaacgctgagcgccgctaacccggtta

SEQ ID NO: 352233 - DNA, 30 bp, Artificial Sequence
  Synthetic oligonucleotide
attgttgtctgatcgggaaggttccggtta

SEQ ID NO: 352234 - DNA, 30 bp, Artificial Sequence
  Synthetic oligonucleotide
aaaatcagagggcacgcataacctcggtta

SEQ ID NO: 352235 - DNA, 30 bp, Artificial Sequence
  Synthetic oligonucleotide
ttgatgtcccgtatgcaatcatctcggtta

SEQ ID NO: 352236 - DNA, 30 bp, Artificial Sequence
  Synthetic oligonucleotide
gaggaaatcagcaggggtacctgtcggtta

SEQ ID NO: 352237 - DNA, 30 bp, Artificial Sequence
  Synthetic oligonucleotide
gagtggagacggggggtggttcaagggtta

SEQ ID NO: 352238 - DNA, 30 bp, Artificial Sequence
  Synthetic oligonucleotide
tgtggaaggaagaaggccgatccagggtta

SEQ ID NO: 352239 - DNA, 30 bp, Artificial Sequence
  Synthetic oligonucleotide
gccgatcgaacccgctttggaagagggtta

SEQ ID NO: 352240 - DNA, 30 bp, Artificial Sequence
  Synthetic oligonucleotide
tgtgagaggctacaataacagagagggtta

SEQ ID NO: 352241 - DNA, 30 bp, Artificial Sequence
  Synthetic oligonucleotide
attgggaaaagagcgtaaaggctagggtta

SEQ ID NO: 352242 - DNA, 30 bp, Artificial Sequence
  Synthetic oligonucleotide
tttatattaacgtgtcctaaaagcgggtta

SEQ ID NO: 352243 - DNA, 30 bp, Artificial Sequence
  Synthetic oligonucleotide
tgtggactgggggctagacacggcgggtta

SEQ ID NO: 352244 - DNA, 30 bp, Artificial Sequence
  Synthetic oligonucleotide
gattcagacctagaagtctgagaggggtta

SEQ ID NO: 352245 - DNA, 30 bp, Artificial Sequence
  Synthetic oligonucleotide
ccaaacaaaacaaatatgttgtaggggtta

SEQ ID NO: 352246 - DNA, 30 bp, Artificial Sequence
  Synthetic oligonucleotide
tgcgcgtatataatcggtgttcgggggtta

SEQ ID NO: 352247 - DNA, 30 bp, Artificial Sequence
  Synthetic oligonucleotide
ctataataatgtacaagtaagggggggtta

SEQ ID NO: 352248 - DNA, 30 bp, Artificial Sequence
  Synthetic oligonucleotide
gtttgaggagtatcttcacgtgctgggtta

SEQ ID NO: 352249 - DNA, 30 bp, Artificial Sequence
  Synthetic oligonucleotide
cgtgcttgtgtacatgacagtggtgggtta

SEQ ID NO: 352250 - DNA, 30 bp, Artificial Sequence
  Synthetic oligonucleotide
acaaagcctataaccaaataaattgggtta

SEQ ID NO: 352251 - DNA, 30 bp, Artificial Sequence
  Synthetic oligonucleotide
tttgccactggagaggttcatacatggtta

SEQ ID NO: 352252 - DNA, 30 bp, Artificial Sequence
  Synthetic oligonucleotide
gacggaactatttcttctggcgtatggtta

SEQ ID NO: 352253 - DNA, 30 bp, Artificial Sequence
  Synthetic oligonucleotide
taagcaagaagatttatctggatgtggtta

SEQ ID NO: 352254 - DNA, 30 bp, Artificial Sequence
  Synthetic oligonucleotide
gacttcggcacgctcactattatgtggtta

SEQ ID NO: 352255 - DNA, 30 bp, Artificial Sequence
  Synthetic oligonucleotide
ttatcaaagaaatgttgcatcctgtggtta

SEQ ID NO: 352256 - DNA, 30 bp, Artificial Sequence
  Synthetic oligonucleotide
atgtagaacgacaaccttttattgtggtta

SEQ ID NO: 352257 - DNA, 30 bp, Artificial Sequence
  Synthetic oligonucleotide
gatctatgcgccaggctaaagcattggtta

SEQ ID NO: 352258 - DNA, 30 bp, Artificial Sequence
  Synthetic oligonucleotide
acaggatccggaagcgcggtggattggtta

SEQ ID NO: 352259 - DNA, 30 bp, Artificial Sequence
  Synthetic oligonucleotide
agaaaaaaacgcaaccctcgttgttggtta

SEQ ID NO: 352260 - DNA, 30 bp, Artificial Sequence
  Synthetic oligonucleotide
cgcaaggtgggttgatacagcgaaatgtta

SEQ ID NO: 352261 - DNA, 30 bp, Artificial Sequence
  Synthetic oligonucleotide
tctgcgacttgctcatcgatgcacatgtta

SEQ ID NO: 352262 - DNA, 30 bp, Artificial Sequence
  Synthetic oligonucleotide
ccatcgcacaagtctgacccgtacatgtta

SEQ ID NO: 352263 - DNA, 30 bp, Artificial Sequence
  Synthetic oligonucleotide
ccataatattagcgtaagacacccatgtta

SEQ ID NO: 352264 - DNA, 30 bp, Artificial Sequence
  Synthetic oligonucleotide
aatgccccgagggctgtcgtgaagatgtta

SEQ ID NO: 352265 - DNA, 30 bp, Artificial Sequence
  Synthetic oligonucleotide
ccacatttacgggcttctgtacagatgtta

SEQ ID NO: 352266 - DNA, 30 bp, Artificial Sequence
  Synthetic oligonucleotide
atagcctccattgtccccctagcgatgtta

SEQ ID NO: 352267 - DNA, 30 bp, Artificial Sequence
  Synthetic oligonucleotide
tctaacacttagataaacaaggatatgtta

SEQ ID NO: 352268 - DNA, 30 bp, Artificial Sequence
  Synthetic oligonucleotide
cgtataacatggtactaacaaactatgtta

SEQ ID NO: 352269 - DNA, 29 bp, Artificial Sequence
  Synthetic oligonucleotide
agctcttataaataagagctagtatgtta

SEQ ID NO: 352270 - DNA, 30 bp, Artificial Sequence
  Synthetic oligonucleotide
ctctaccgacaaatttcgaaaggtatgtta

SEQ ID NO: 352271 - DNA, 30 bp, Artificial Sequence
  Synthetic oligonucleotide
gttttgagatgtgttcccgtttgtatgtta

SEQ ID NO: 352272 - DNA, 30 bp, Artificial Sequence
  Synthetic oligonucleotide
aggtgggacgaaaacaaaatttaactgtta

SEQ ID NO: 352273 - DNA, 30 bp, Artificial Sequence
  Synthetic oligonucleotide
gcattggagtgttgtcaatgcccactgtta

SEQ ID NO: 352274 - DNA, 30 bp, Artificial Sequence
  Synthetic oligonucleotide
caccgtcctagacgctcaggagcactgtta

SEQ ID NO: 352275 - DNA, 30 bp, Artificial Sequence
  Synthetic oligonucleotide
aaaaagatgtcagaaaggttccccctgtta

SEQ ID NO: 352276 - DNA, 30 bp, Artificial Sequence
  Synthetic oligonucleotide
gggtctcgatggctcacatggctcctgtta

SEQ ID NO: 352277 - DNA, 30 bp, Artificial Sequence
  Synthetic oligonucleotide
agatttagtgtatgtattgtgcctctgtta

SEQ ID NO: 352278 - DNA, 30 bp, Artificial Sequence
  Synthetic oligonucleotide
tgttactgtcgcttagggagatctctgtta

SEQ ID NO: 352279 - DNA, 30 bp, Artificial Sequence
  Synthetic oligonucleotide
aatgtccacaatcaaacgctgattctgtta

SEQ ID NO: 352280 - DNA, 30 bp, Artificial Sequence
  Synthetic oligonucleotide
tactgctcatggagcattagagccgtgtta

SEQ ID NO: 352281 - DNA, 30 bp, Artificial Sequence
  Synthetic oligonucleotide
atgaacgttaagccttgcgggggcgtgtta

SEQ ID NO: 352282 - DNA, 30 bp, Artificial Sequence
  Synthetic oligonucleotide
accactgtgtggcttgtgtcccaggtgtta

SEQ ID NO: 352283 - DNA, 30 bp, Artificial Sequence
  Synthetic oligonucleotide
gaaactaagagtcggttggcgggggtgtta

SEQ ID NO: 352284 - DNA, 30 bp, Artificial Sequence
  Synthetic oligonucleotide
acccgaggtcgagaaaagggatatgtgtta

SEQ ID NO: 352285 - DNA, 30 bp, Artificial Sequence
  Synthetic oligonucleotide
gtgaggtaatgctggattaccagtgtgtta

SEQ ID NO: 352286 - DNA, 30 bp, Artificial Sequence
  Synthetic oligonucleotide
atgtattgaaagggtgtcccgggtgtgtta

SEQ ID NO: 352287 - DNA, 30 bp, Artificial Sequence
  Synthetic oligonucleotide
aatgctagcctcgatgtattagttgtgtta

SEQ ID NO: 352288 - DNA, 30 bp, Artificial Sequence
  Synthetic oligonucleotide
atctacatgcgaaaagcaccggttgtgtta

SEQ ID NO: 352289 - DNA, 30 bp, Artificial Sequence
  Synthetic oligonucleotide
ccagcggacgcatggtccaacctattgtta

SEQ ID NO: 352290 - DNA, 30 bp, Artificial Sequence
  Synthetic oligonucleotide
atcctcatctaagcaagcagtggcttgtta

SEQ ID NO: 352291 - DNA, 30 bp, Artificial Sequence
  Synthetic oligonucleotide
cgaacaaagaatttggccctgcggttgtta

SEQ ID NO: 352292 - DNA, 30 bp, Artificial Sequence
  Synthetic oligonucleotide
tctagtagaaccctcttcacaggtttgtta

SEQ ID NO: 352293 - DNA, 30 bp, Artificial Sequence
  Synthetic oligonucleotide
aagccgggtttacaaaataccacaaattta

SEQ ID NO: 352294 - DNA, 30 bp, Artificial Sequence
  Synthetic oligonucleotide
cgcagacacggatcctttcagccaaattta

SEQ ID NO: 352295 - DNA, 30 bp, Artificial Sequence
  Synthetic oligonucleotide
ccgatgtgaatgtgatatggaataaattta

SEQ ID NO: 352296 - DNA, 30 bp, Artificial Sequence
  Synthetic oligonucleotide
ggaagcgttcacatttgtgcggtaaattta

SEQ ID NO: 352297 - DNA, 30 bp, Artificial Sequence
  Synthetic oligonucleotide
tacgaaggcatggtttcgcacttaaattta

SEQ ID NO: 352298 - DNA, 30 bp, Artificial Sequence
  Synthetic oligonucleotide
gtcctggctggtaattaagagttaaattta

SEQ ID NO: 352299 - DNA, 30 bp, Artificial Sequence
  Synthetic oligonucleotide
gattcgccaccccggaaaaatcagaattta

SEQ ID NO: 352300 - DNA, 30 bp, Artificial Sequence
  Synthetic oligonucleotide
actttaaccgaggcctcgaatacgaattta

SEQ ID NO: 352301 - DNA, 30 bp, Artificial Sequence
  Synthetic oligonucleotide
gtcagcggaaagtccatgagatggaattta

SEQ ID NO: 352302 - DNA, 30 bp, Artificial Sequence
  Synthetic oligonucleotide
tatgcaagtgaacgtacagcttggaattta

SEQ ID NO: 352303 - DNA, 30 bp, Artificial Sequence
  Synthetic oligonucleotide
gctgtagatccattagttacgctgaattta

SEQ ID NO: 352304 - DNA, 30 bp, Artificial Sequence
  Synthetic oligonucleotide
acgtctaatcaccgcgaacatctgaattta

SEQ ID NO: 352305 - DNA, 30 bp, Artificial Sequence
  Synthetic oligonucleotide
cagcgtttctgcagaagtttagtgaattta

SEQ ID NO: 352306 - DNA, 30 bp, Artificial Sequence
  Synthetic oligonucleotide
ccagttcgctcgatttagtaccttaattta

SEQ ID NO: 352307 - DNA, 30 bp, Artificial Sequence
  Synthetic oligonucleotide
gtcaacgggagatagaataacatacattta

SEQ ID NO: 352308 - DNA, 30 bp, Artificial Sequence
  Synthetic oligonucleotide
accttctttcccaggcgtcgcgtacattta

SEQ ID NO: 352309 - DNA, 30 bp, Artificial Sequence
  Synthetic oligonucleotide
aacgctccgatcttctacgggtcccattta

SEQ ID NO: 352310 - DNA, 30 bp, Artificial Sequence
  Synthetic oligonucleotide
ttatcaagctcctattgactcatccattta

SEQ ID NO: 352311 - DNA, 30 bp, Artificial Sequence
  Synthetic oligonucleotide
gcacctatcctagtttaagatgtccattta

SEQ ID NO: 352312 - DNA, 30 bp, Artificial Sequence
  Synthetic oligonucleotide
tattggggggcccttcgcccgaagcattta

SEQ ID NO: 352313 - DNA, 30 bp, Artificial Sequence
  Synthetic oligonucleotide
gacgaaaagctatagcgtacagcgcattta

SEQ ID NO: 352314 - DNA, 30 bp, Artificial Sequence
  Synthetic oligonucleotide
accgacaaagaaaaatttcgcgttcattta

SEQ ID NO: 352315 - DNA, 30 bp, Artificial Sequence
  Synthetic oligonucleotide
agattatcatgcctaaaccagctagattta

SEQ ID NO: 352316 - DNA, 30 bp, Artificial Sequence
  Synthetic oligonucleotide
cccacttaggttctgggacaggacgattta

SEQ ID NO: 352317 - DNA, 30 bp, Artificial Sequence
  Synthetic oligonucleotide
gttgtcggagttggttccacacgcgattta

SEQ ID NO: 352318 - DNA, 30 bp, Artificial Sequence
  Synthetic oligonucleotide
gtgacatcaagagcctatggagcggattta

SEQ ID NO: 352319 - DNA, 30 bp, Artificial Sequence
  Synthetic oligonucleotide
cgaactactcgttgtgtcataagggattta

SEQ ID NO: 352320 - DNA, 30 bp, Artificial Sequence
  Synthetic oligonucleotide
gcaaggacgtattataactcagtggattta

SEQ ID NO: 352321 - DNA, 30 bp, Artificial Sequence
  Synthetic oligonucleotide
caatacgtgaacagacagcgtgctgattta

SEQ ID NO: 352322 - DNA, 30 bp, Artificial Sequence
  Synthetic oligonucleotide
aaggaaagcttaaaagacgtctctgattta

SEQ ID NO: 352323 - DNA, 30 bp, Artificial Sequence
  Synthetic oligonucleotide
aaagccctttagggacatggacgtgattta

SEQ ID NO: 352324 - DNA, 30 bp, Artificial Sequence
  Synthetic oligonucleotide
aacagccaagcaatgggtcgaacatattta

SEQ ID NO: 352325 - DNA, 30 bp, Artificial Sequence
  Synthetic oligonucleotide
gcttaatccacaggatgcgggtgatattta

SEQ ID NO: 352326 - DNA, 30 bp, Artificial Sequence
  Synthetic oligonucleotide
ggtaaaggagcgaacgtgaagctctattta

SEQ ID NO: 352327 - DNA, 30 bp, Artificial Sequence
  Synthetic oligonucleotide
cgacattcgtcggtagtagttaagtattta

SEQ ID NO: 352328 - DNA, 30 bp, Artificial Sequence
  Synthetic oligonucleotide
atgggtatccccattgttatgcagtattta

SEQ ID NO: 352329 - DNA, 30 bp, Artificial Sequence
  Synthetic oligonucleotide
ggcaaacgggcagataatatctagtattta

SEQ ID NO: 352330 - DNA, 30 bp, Artificial Sequence
  Synthetic oligonucleotide
aaaaatgtcctcctgaccaaaacgtattta

SEQ ID NO: 352331 - DNA, 30 bp, Artificial Sequence
  Synthetic oligonucleotide
gccgctcgtacaataatactatcgtattta

SEQ ID NO: 352332 - DNA, 30 bp, Artificial Sequence
  Synthetic oligonucleotide
ctgcatggaatcacgagcgaatgttattta

SEQ ID NO: 352333 - DNA, 30 bp, Artificial Sequence
  Synthetic oligonucleotide
cgatcgtaaacctctggataaatttattta

SEQ ID NO: 352334 - DNA, 30 bp, Artificial Sequence
  Synthetic oligonucleotide
tcggtttgtatgctgggattggaaacttta

SEQ ID NO: 352335 - DNA, 30 bp, Artificial Sequence
  Synthetic oligonucleotide
aaataggcggaataatatgcccgcacttta

SEQ ID NO: 352336 - DNA, 30 bp, Artificial Sequence
  Synthetic oligonucleotide
tatcagtgcaaaggttcgagattcacttta

SEQ ID NO: 352337 - DNA, 30 bp, Artificial Sequence
  Synthetic oligonucleotide
aataatatgcgaagccgctaaaggacttta

SEQ ID NO: 352338 - DNA, 30 bp, Artificial Sequence
  Synthetic oligonucleotide
agtgccgtctgatggtggagacggacttta

SEQ ID NO: 352339 - DNA, 30 bp, Artificial Sequence
  Synthetic oligonucleotide
gggctgtcctcgagagctactttgacttta

SEQ ID NO: 352340 - DNA, 30 bp, Artificial Sequence
  Synthetic oligonucleotide
cagagtcaaaccgaggtcgtgtatacttta

SEQ ID NO: 352341 - DNA, 30 bp, Artificial Sequence
  Synthetic oligonucleotide
aaggttaagcttcttattctaagtacttta

SEQ ID NO: 352342 - DNA, 30 bp, Artificial Sequence
  Synthetic oligonucleotide
taacgtgcgatgatttatcaaggtacttta

SEQ ID NO: 352343 - DNA, 30 bp, Artificial Sequence
  Synthetic oligonucleotide
tcaccatggctccaacgctcaattacttta

SEQ ID NO: 352344 - DNA, 30 bp, Artificial Sequence
  Synthetic oligonucleotide
tgcttggtggtctgtcattcctttacttta

SEQ ID NO: 352345 - DNA, 30 bp, Artificial Sequence
  Synthetic oligonucleotide
ggaaacagcttccgtaccaagctaccttta

SEQ ID NO: 352346 - DNA, 39 bp, Artificial Sequence
  Synthetic oligonucleotide
ttgttgtgttctctttttgtgttttccttcttaccttta

SEQ ID NO: 352347 - DNA, 30 bp, Artificial Sequence
  Synthetic oligonucleotide
ccataaagcggaacagttctgtagccttta

SEQ ID NO: 352348 - DNA, 30 bp, Artificial Sequence
  Synthetic oligonucleotide
ctcctcgtgctcaatcaagtgtggccttta

SEQ ID NO: 352349 - DNA, 30 bp, Artificial Sequence
  Synthetic oligonucleotide
cgttaatgttttaactggtgtatgccttta

SEQ ID NO: 352350 - DNA, 30 bp, Artificial Sequence
  Synthetic oligonucleotide
acatctcggtagacgattctgggagcttta

SEQ ID NO: 352351 - DNA, 30 bp, Artificial Sequence
  Synthetic oligonucleotide
ttatcgttgcgttgtcggatatacgcttta

SEQ ID NO: 352352 - DNA, 30 bp, Artificial Sequence
  Synthetic oligonucleotide
actaaactgcggttcgcaagtaccgcttta

SEQ ID NO: 352353 - DNA, 30 bp, Artificial Sequence
  Synthetic oligonucleotide
tcacatcatggggtgttagcattcgcttta

SEQ ID NO: 352354 - DNA, 30 bp, Artificial Sequence
  Synthetic oligonucleotide
cagaacctaattaatccaccaggtgcttta

SEQ ID NO: 352355 - DNA, 30 bp, Artificial Sequence
  Synthetic oligonucleotide
ggatatgggctattgcgggtgttatcttta

SEQ ID NO: 352356 - DNA, 30 bp, Artificial Sequence
  Synthetic oligonucleotide
tgatcctactgagggtctctgatctcttta

SEQ ID NO: 352357 - DNA, 30 bp, Artificial Sequence
  Synthetic oligonucleotide
gccagacaagtgccaaggttagtctcttta

SEQ ID NO: 352358 - DNA, 30 bp, Artificial Sequence
  Synthetic oligonucleotide
gaattaattgtagtatgagccttctcttta

SEQ ID NO: 352359 - DNA, 30 bp, Artificial Sequence
  Synthetic oligonucleotide
gagccacagtaggtgcaaaggcattcttta

SEQ ID NO: 352360 - DNA, 30 bp, Artificial Sequence
  Synthetic oligonucleotide
gtcaaagtctttggaagctctgattcttta

SEQ ID NO: 352361 - DNA, 30 bp, Artificial Sequence
  Synthetic oligonucleotide
ggcctgtctgttttaaccgtctcaagttta

SEQ ID NO: 352362 - DNA, 30 bp, Artificial Sequence
  Synthetic oligonucleotide
aatctttccctccacaccacaagaagttta

SEQ ID NO: 352363 - DNA, 30 bp, Artificial Sequence
  Synthetic oligonucleotide
cagcaacccggttggcgttatctcagttta

SEQ ID NO: 352364 - DNA, 30 bp, Artificial Sequence
  Synthetic oligonucleotide
gtatttgcactacgaaaatctgtcagttta

SEQ ID NO: 352365 - DNA, 30 bp, Artificial Sequence
  Synthetic oligonucleotide
gggtattccggcgcaatgcatccgagttta

SEQ ID NO: 352366 - DNA, 30 bp, Artificial Sequence
  Synthetic oligonucleotide
cctaaatgtcagatgccaaaacatagttta

SEQ ID NO: 352367 - DNA, 30 bp, Artificial Sequence
  Synthetic oligonucleotide
agtttaatttacgtgttggtccgacgttta

SEQ ID NO: 352368 - DNA, 30 bp, Artificial Sequence
  Synthetic oligonucleotide
atatgtgattagatggtgtgatgacgttta

SEQ ID NO: 352369 - DNA, 30 bp, Artificial Sequence
  Synthetic oligonucleotide
aacagaacatttgatgttaaatctcgttta

SEQ ID NO: 352370 - DNA, 30 bp, Artificial Sequence
  Synthetic oligonucleotide
ccaattaagagaaaccgatgcgaaggttta

SEQ ID NO: 352371 - DNA, 30 bp, Artificial Sequence
  Synthetic oligonucleotide
tattggcgccaaggcggttttgccggttta

SEQ ID NO: 352372 - DNA, 30 bp, Artificial Sequence
  Synthetic oligonucleotide
tcttgcaggtggagacagcgtagcggttta

SEQ ID NO: 352373 - DNA, 30 bp, Artificial Sequence
  Synthetic oligonucleotide
aacaacgtaatcgctctcctgtagggttta

SEQ ID NO: 352374 - DNA, 30 bp, Artificial Sequence
  Synthetic oligonucleotide
gggactagcctgatatttttcgatggttta

SEQ ID NO: 352375 - DNA, 30 bp, Artificial Sequence
  Synthetic oligonucleotide
actacagccgccgggccaatcggtggttta

SEQ ID NO: 352376 - DNA, 30 bp, Artificial Sequence
  Synthetic oligonucleotide
ggaagtcgcgtgcactgccaaaaatgttta

SEQ ID NO: 352377 - DNA, 30 bp, Artificial Sequence
  Synthetic oligonucleotide
ccgtcacgtctagagtcttgtgaatgttta

SEQ ID NO: 352378 - DNA, 30 bp, Artificial Sequence
  Synthetic oligonucleotide
gggctattaaagctctgttatcactgttta

SEQ ID NO: 352379 - DNA, 30 bp, Artificial Sequence
  Synthetic oligonucleotide
gacagcgtgctcgctcgttctgagtgttta

SEQ ID NO: 352380 - DNA, 30 bp, Artificial Sequence
  Synthetic oligonucleotide
atggcaagagttagaacctcaaattgttta

SEQ ID NO: 352381 - DNA, 30 bp, Artificial Sequence
  Synthetic oligonucleotide
gacgcgggtgagttaccgtgcaattgttta

SEQ ID NO: 352382 - DNA, 30 bp, Artificial Sequence
  Synthetic oligonucleotide
gttgtccgagagtatatggcggattgttta

SEQ ID NO: 352383 - DNA, 30 bp, Artificial Sequence
  Synthetic oligonucleotide
tgggaaaattagcagagtatttaaatttta

SEQ ID NO: 352384 - DNA, 30 bp, Artificial Sequence
  Synthetic oligonucleotide
cctataatataaagtcagaacgtaatttta

SEQ ID NO: 352385 - DNA, 30 bp, Artificial Sequence
  Synthetic oligonucleotide
gcgttgctaaaagtgtgaagtcacatttta

SEQ ID NO: 352386 - DNA, 30 bp, Artificial Sequence
  Synthetic oligonucleotide
ggcataaattaattttcaagctacatttta

SEQ ID NO: 352387 - DNA, 30 bp, Artificial Sequence
  Synthetic oligonucleotide
cgcgcatttatacaggacgctaagatttta

SEQ ID NO: 352388 - DNA, 30 bp, Artificial Sequence
  Synthetic oligonucleotide
agtccgaattacacgcgtgttcggatttta

SEQ ID NO: 352389 - DNA, 30 bp, Artificial Sequence
  Synthetic oligonucleotide
tctagcctaagtgaaatgagctatatttta

SEQ ID NO: 352390 - DNA, 30 bp, Artificial Sequence
  Synthetic oligonucleotide
ttgcgtgtagggctgacacaattactttta

SEQ ID NO: 352391 - DNA, 30 bp, Artificial Sequence
  Synthetic oligonucleotide
acctcttttactcgctctagttacctttta

SEQ ID NO: 352392 - DNA, 30 bp, Artificial Sequence
  Synthetic oligonucleotide
taaatgagcacaaaatatgggaagctttta

SEQ ID NO: 352393 - DNA, 30 bp, Artificial Sequence
  Synthetic oligonucleotide
aataatgccccggatggtaggccgctttta

SEQ ID NO: 352394 - DNA, 30 bp, Artificial Sequence
  Synthetic oligonucleotide
atagggggccggtttacaaactctctttta

SEQ ID NO: 352395 - DNA, 30 bp, Artificial Sequence
  Synthetic oligonucleotide
gataacagggaggactggtttagtctttta

SEQ ID NO: 352396 - DNA, 30 bp, Artificial Sequence
  Synthetic oligonucleotide
acgcgaaacagtgattagatttcagtttta

SEQ ID NO: 352397 - DNA, 30 bp, Artificial Sequence
  Synthetic oligonucleotide
cgttctggaagtttttatccaggagtttta

SEQ ID NO: 352398 - DNA, 30 bp, Artificial Sequence
  Synthetic oligonucleotide
gcctgataaagtctccaactggtcgtttta

SEQ ID NO: 352399 - DNA, 30 bp, Artificial Sequence
  Synthetic oligonucleotide
ccgagaatcaacgatgatggtgtcgtttta

SEQ ID NO: 352400 - DNA, 30 bp, Artificial Sequence
  Synthetic oligonucleotide
gtcgccaatacaggtcaggggcaggtttta

SEQ ID NO: 352401 - DNA, 30 bp, Artificial Sequence
  Synthetic oligonucleotide
gccgagaaataggcgaaccttcaggtttta

SEQ ID NO: 352402 - DNA, 30 bp, Artificial Sequence
  Synthetic oligonucleotide
actatgcattagcaaattaaggtggtttta

SEQ ID NO: 352403 - DNA, 30 bp, Artificial Sequence
  Synthetic oligonucleotide
tgattggagcggcggcggttccaattttta

SEQ ID NO: 352404 - DNA, 30 bp, Artificial Sequence
  Synthetic oligonucleotide
cgagtttcattgtgtggatacgcattttta

SEQ ID NO: 352405 - DNA, 30 bp, Artificial Sequence
  Synthetic oligonucleotide
tgatcccatacgaccagccagcgattttta

SEQ ID NO: 352406 - DNA, 30 bp, Artificial Sequence
  Synthetic oligonucleotide
aagcggacacgttaagtcggcggattttta

SEQ ID NO: 352407 - DNA, 30 bp, Artificial Sequence
  Synthetic oligonucleotide
aacctggtcccgtactatgttatattttta

SEQ ID NO: 352408 - DNA, 30 bp, Artificial Sequence
  Synthetic oligonucleotide
gaccaaggtgcgcggccggaccccttttta

SEQ ID NO: 352409 - DNA, 30 bp, Artificial Sequence
  Synthetic oligonucleotide
aagtgatagggatacatcccaagcttttta

SEQ ID NO: 352410 - DNA, 30 bp, Artificial Sequence
  Synthetic oligonucleotide
taataatatgacagtgaactaacgttttta

SEQ ID NO: 352411 - DNA, 30 bp, Artificial Sequence
  Synthetic oligonucleotide
cccaacttgagcggagacagtacgttttta

SEQ ID NO: 352412 - DNA, 30 bp, Artificial Sequence
  Synthetic oligonucleotide
aacatgcagtacttcatcctaggtttttta

SEQ ID NO: 352413 - DNA, 30 bp, Artificial Sequence
  Synthetic oligonucleotide
gcggatgcgctgcatcaacggggtttttta

SEQ ID NO: 352414 - DNA, 30 bp, Artificial Sequence
  Synthetic oligonucleotide
gggacaacattcgttggtattgcaaaaaac

SEQ ID NO: 352415 - DNA, 30 bp, Artificial Sequence
  Synthetic oligonucleotide
attccaacataagtatgaggaagcaaaaac

SEQ ID NO: 352416 - DNA, 30 bp, Artificial Sequence
  Synthetic oligonucleotide
catcaggcagttgtaactagtttcaaaaac

SEQ ID NO: 352417 - DNA, 30 bp, Artificial Sequence
  Synthetic oligonucleotide
atggtttgatttgtacgtccggagaaaaac

SEQ ID NO: 352418 - DNA, 30 bp, Artificial Sequence
  Synthetic oligonucleotide
acaaacattactgtcgactttgagaaaaac

SEQ ID NO: 352419 - DNA, 30 bp, Artificial Sequence
  Synthetic oligonucleotide
cccattgaaacgagccggaatgtgaaaaac

SEQ ID NO: 352420 - DNA, 30 bp, Artificial Sequence
  Synthetic oligonucleotide
ttatttgggacgatttgtggccataaaaac

SEQ ID NO: 352421 - DNA, 30 bp, Artificial Sequence
  Synthetic oligonucleotide
gtagtgcaagcacaacacctaactaaaaac

SEQ ID NO: 352422 - DNA, 30 bp, Artificial Sequence
  Synthetic oligonucleotide
taattctgagagcttacgttgactaaaaac

SEQ ID NO: 352423 - DNA, 30 bp, Artificial Sequence
  Synthetic oligonucleotide
ttggcaacatctctatactcgcctaaaaac

SEQ ID NO: 352424 - DNA, 30 bp, Artificial Sequence
  Synthetic oligonucleotide
cggtccgtatacggtcgaaagagtaaaaac

SEQ ID NO: 352425 - DNA, 30 bp, Artificial Sequence
  Synthetic oligonucleotide
gggccctgatcatcaaatcttaaacaaaac

SEQ ID NO: 352426 - DNA, 30 bp, Artificial Sequence
  Synthetic oligonucleotide
caaaattggcccgcggctgggggacaaaac

SEQ ID NO: 352427 - DNA, 30 bp, Artificial Sequence
  Synthetic oligonucleotide
gctcatgcgacttgtcgatgcccgcaaaac

SEQ ID NO: 352428 - DNA, 30 bp, Artificial Sequence
  Synthetic oligonucleotide
caccggattctagtagaagtaaatcaaaac

SEQ ID NO: 352429 - DNA, 30 bp, Artificial Sequence
  Synthetic oligonucleotide
cccgcgacttcgttgagtatcagtcaaaac

SEQ ID NO: 352430 - DNA, 30 bp, Artificial Sequence
  Synthetic oligonucleotide
atatcgtattttatcagtggcattcaaaac

SEQ ID NO: 352431 - DNA, 30 bp, Artificial Sequence
  Synthetic oligonucleotide
cgtatactactagcctagggcacagaaaac

SEQ ID NO: 352432 - DNA, 30 bp, Artificial Sequence
  Synthetic oligonucleotide
gacaaccccgttatggttcgattagaaaac

SEQ ID NO: 352433 - DNA, 30 bp, Artificial Sequence
  Synthetic oligonucleotide
cccggatcctctatcccgaatcccgaaaac

SEQ ID NO: 352434 - DNA, 30 bp, Artificial Sequence
  Synthetic oligonucleotide
atcatgggcgagccgcggagaatggaaaac

SEQ ID NO: 352435 - DNA, 30 bp, Artificial Sequence
  Synthetic oligonucleotide
aagccccatgcgttaatgtgcgcctaaaac

SEQ ID NO: 352436 - DNA, 30 bp, Artificial Sequence
  Synthetic oligonucleotide
ttgcagttgatgaaaagcggtgcgtaaaac

SEQ ID NO: 352437 - DNA, 30 bp, Artificial Sequence
  Synthetic oligonucleotide
acctgctgattaaacattagcaggtaaaac

SEQ ID NO: 352438 - DNA, 30 bp, Artificial Sequence
  Synthetic oligonucleotide
ggaccgcattcgcgcacggagacttaaaac

SEQ ID NO: 352439 - DNA, 30 bp, Artificial Sequence
  Synthetic oligonucleotide
ttgagctgctacttcgtgggaagttaaaac

SEQ ID NO: 352440 - DNA, 30 bp, Artificial Sequence
  Synthetic oligonucleotide
cgacgccacccgggaagggggaaaacaaac

SEQ ID NO: 352441 - DNA, 30 bp, Artificial Sequence
  Synthetic oligonucleotide
gtccagcaggcttttcgtcccgaaacaaac

SEQ ID NO: 352442 - DNA, 30 bp, Artificial Sequence
  Synthetic oligonucleotide
atcgtgcgtagtccgcgcgggcgaacaaac

SEQ ID NO: 352443 - DNA, 30 bp, Artificial Sequence
  Synthetic oligonucleotide
cgatatgcaaacctggtgtgtcgaacaaac

SEQ ID NO: 352444 - DNA, 30 bp, Artificial Sequence
  Synthetic oligonucleotide
cccaatggatcgtcgctacagaacacaaac

SEQ ID NO: 352445 - DNA, 30 bp, Artificial Sequence
  Synthetic oligonucleotide
tgtttaaataggtgggcgcttaggacaaac

SEQ ID NO: 352446 - DNA, 30 bp, Artificial Sequence
  Synthetic oligonucleotide
gctctcgaccgtaactgactctggacaaac

SEQ ID NO: 352447 - DNA, 30 bp, Artificial Sequence
  Synthetic oligonucleotide
agtgtagcgactcactgcacgtggacaaac

SEQ ID NO: 352448 - DNA, 30 bp, Artificial Sequence
  Synthetic oligonucleotide
tagttatcagtttaatgtgtgctgacaaac

SEQ ID NO: 352449 - DNA, 30 bp, Artificial Sequence
  Synthetic oligonucleotide
tggttaatgcgaatcaagattctcccaaac

SEQ ID NO: 352450 - DNA, 30 bp, Artificial Sequence
  Synthetic oligonucleotide
tttcatacagtgtaagtgacggtcccaaac

SEQ ID NO: 352451 - DNA, 30 bp, Artificial Sequence
  Synthetic oligonucleotide
tacgtattcctcggcatatcaaatccaaac

SEQ ID NO: 352452 - DNA, 30 bp, Artificial Sequence
  Synthetic oligonucleotide
tcaaaataggatttaaggggtgctccaaac

SEQ ID NO: 352453 - DNA, 30 bp, Artificial Sequence
  Synthetic oligonucleotide
gttcaccttggtgaagtcacttttccaaac

SEQ ID NO: 352454 - DNA, 30 bp, Artificial Sequence
  Synthetic oligonucleotide
gtattgtggggggcgcatgtgtaagcaaac

SEQ ID NO: 352455 - DNA, 30 bp, Artificial Sequence
  Synthetic oligonucleotide
gtaaactttgggattagtaccccagcaaac

SEQ ID NO: 352456 - DNA, 30 bp, Artificial Sequence
  Synthetic oligonucleotide
gatcggtgctttatataaggtagagcaaac

SEQ ID NO: 352457 - DNA, 30 bp, Artificial Sequence
  Synthetic oligonucleotide
taagtctgcatgttctatgagctcgcaaac

SEQ ID NO: 352458 - DNA, 30 bp, Artificial Sequence
  Synthetic oligonucleotide
ttgttatctacaatatgtcctattgcaaac

SEQ ID NO: 352459 - DNA, 30 bp, Artificial Sequence
  Synthetic oligonucleotide
cacttaccaggcaacagaacataatcaaac

SEQ ID NO: 352460 - DNA, 30 bp, Artificial Sequence
  Synthetic oligonucleotide
tcacgccaggtattcaattcaaggtcaaac

SEQ ID NO: 352461 - DNA, 30 bp, Artificial Sequence
  Synthetic oligonucleotide
gtcgtttatcactatataagcacttcaaac

SEQ ID NO: 352462 - DNA, 30 bp, Artificial Sequence
  Synthetic oligonucleotide
tgaatccactagcagccagacgaaagaaac

SEQ ID NO: 352463 - DNA, 30 bp, Artificial Sequence
  Synthetic oligonucleotide
gtacagattcaaaatacccagtaaagaaac

SEQ ID NO: 352464 - DNA, 30 bp, Artificial Sequence
  Synthetic oligonucleotide
tcctgtagggaagctgtaggactaagaaac

SEQ ID NO: 352465 - DNA, 31 bp, Artificial Sequence
  Synthetic oligonucleotide
ttgatccgggccttggcttaatcccagaaac

SEQ ID NO: 352466 - DNA, 30 bp, Artificial Sequence
  Synthetic oligonucleotide
cgatgaaagtgggaggaccccctcagaaac

SEQ ID NO: 352467 - DNA, 30 bp, Artificial Sequence
  Synthetic oligonucleotide
cttaggaagtcccatcgcagagctagaaac

SEQ ID NO: 352468 - DNA, 30 bp, Artificial Sequence
  Synthetic oligonucleotide
ttaatatggtcatgatcctaacgacgaaac

SEQ ID NO: 352469 - DNA, 31 bp, Artificial Sequence
  Synthetic oligonucleotide
gtttactggtaagcgtggccactgccgaaac

SEQ ID NO: 352470 - DNA, 30 bp, Artificial Sequence
  Synthetic oligonucleotide
ccgcaaacgttgtattcaactctgcgaaac

SEQ ID NO: 352471 - DNA, 30 bp, Artificial Sequence
  Synthetic oligonucleotide
ttggtgcgactgatttccactggtcgaaac

SEQ ID NO: 352472 - DNA, 30 bp, Artificial Sequence
  Synthetic oligonucleotide
gtggagcagtattcataccatcaaggaaac

SEQ ID NO: 352473 - DNA, 30 bp, Artificial Sequence
  Synthetic oligonucleotide
gtggattcaatgaagttcaactcaggaaac

SEQ ID NO: 352474 - DNA, 30 bp, Artificial Sequence
  Synthetic oligonucleotide
gaactaagttcgcgtcgcggcggaggaaac

SEQ ID NO: 352475 - DNA, 30 bp, Artificial Sequence
  Synthetic oligonucleotide
aaatgatgtcgtaataaccgttacggaaac

SEQ ID NO: 352476 - DNA, 30 bp, Artificial Sequence
  Synthetic oligonucleotide
ttcgggaaacttatctttctcgccggaaac

SEQ ID NO: 352477 - DNA, 30 bp, Artificial Sequence
  Synthetic oligonucleotide
cttactccttcgtataagaacttcggaaac

SEQ ID NO: 352478 - DNA, 30 bp, Artificial Sequence
  Synthetic oligonucleotide
aataattgtcatgactcgtacccgggaaac

SEQ ID NO: 352479 - DNA, 30 bp, Artificial Sequence
  Synthetic oligonucleotide
aaaggtatttaatcagtagaaaatggaaac

SEQ ID NO: 352480 - DNA, 30 bp, Artificial Sequence
  Synthetic oligonucleotide
aatctccgagatctataaatgtatggaaac

SEQ ID NO: 352481 - DNA, 30 bp, Artificial Sequence
  Synthetic oligonucleotide
gttcggccgactgtattagagattggaaac

SEQ ID NO: 352482 - DNA, 30 bp, Artificial Sequence
  Synthetic oligonucleotide
cactattataccgcgggcgtagttggaaac

SEQ ID NO: 352483 - DNA, 30 bp, Artificial Sequence
  Synthetic oligonucleotide
aaaggaaaggggattcccaacaaatgaaac

SEQ ID NO: 352484 - DNA, 30 bp, Artificial Sequence
  Synthetic oligonucleotide
gtaagcagaaggtatacacagctatgaaac

SEQ ID NO: 352485 - DNA, 30 bp, Artificial Sequence
  Synthetic oligonucleotide
tcgcgcttagtgcatgtggtgcagtgaaac

SEQ ID NO: 352486 - DNA, 30 bp, Artificial Sequence
  Synthetic oligonucleotide
taattaattgcatcccgatcatggtgaaac

SEQ ID NO: 352487 - DNA, 30 bp, Artificial Sequence
  Synthetic oligonucleotide
aatgttacctaccttaagaatctgtgaaac

SEQ ID NO: 352488 - DNA, 30 bp, Artificial Sequence
  Synthetic oligonucleotide
ccttattcccgtccagacgaaacttgaaac

SEQ ID NO: 352489 - DNA, 30 bp, Artificial Sequence
  Synthetic oligonucleotide
cataacgtgacatacatcgccttaataaac

SEQ ID NO: 352490 - DNA, 30 bp, Artificial Sequence
  Synthetic oligonucleotide
cttatccgctagccacgaggggacataaac

SEQ ID NO: 352491 - DNA, 30 bp, Artificial Sequence
  Synthetic oligonucleotide
tgagcgtaaggcggcttcgcctacataaac

SEQ ID NO: 352492 - DNA, 30 bp, Artificial Sequence
  Synthetic oligonucleotide
ctaaaggtatgcggagcaacacccataaac

SEQ ID NO: 352493 - DNA, 30 bp, Artificial Sequence
  Synthetic oligonucleotide
ccaatgaaaaattcccaccgcatgataaac

SEQ ID NO: 352494 - DNA, 30 bp, Artificial Sequence
  Synthetic oligonucleotide
atacagacccgtatgcggggagatataaac

SEQ ID NO: 352495 - DNA, 30 bp, Artificial Sequence
  Synthetic oligonucleotide
ttctcgtgatgtagagcgattgaagtaaac

SEQ ID NO: 352496 - DNA, 30 bp, Artificial Sequence
  Synthetic oligonucleotide
tatgtcctgggttactaaagatgagtaaac

SEQ ID NO: 352497 - DNA, 30 bp, Artificial Sequence
  Synthetic oligonucleotide
ctgtcggaattaagtttagcatacgtaaac

SEQ ID NO: 352498 - DNA, 30 bp, Artificial Sequence
  Synthetic oligonucleotide
atgtccagctctcatgtaagaggcgtaaac

SEQ ID NO: 352499 - DNA, 30 bp, Artificial Sequence
  Synthetic oligonucleotide
cgggagtggaattcaattatcgtcgtaaac

SEQ ID NO: 352500 - DNA, 30 bp, Artificial Sequence
  Synthetic oligonucleotide
ttgtcatgccagaaactttgattcgtaaac

SEQ ID NO: 352501 - DNA, 30 bp, Artificial Sequence
  Synthetic oligonucleotide
tagtataaacggacgactgattaattaaac

SEQ ID NO: 352502 - DNA, 30 bp, Artificial Sequence
  Synthetic oligonucleotide
ggcattaagccatgcttgtaaggattaaac

SEQ ID NO: 352503 - DNA, 30 bp, Artificial Sequence
  Synthetic oligonucleotide
gggcaggacaccactgattgcggcttaaac

SEQ ID NO: 352504 - DNA, 30 bp, Artificial Sequence
  Synthetic oligonucleotide
cgaaggcgtcgaaggacgcaggcgttaaac

SEQ ID NO: 352505 - DNA, 30 bp, Artificial Sequence
  Synthetic oligonucleotide
ttcggaccagagttcgttaagtatttaaac

SEQ ID NO: 352506 - DNA, 30 bp, Artificial Sequence
  Synthetic oligonucleotide
agataacgaagccctggcgctgctttaaac

SEQ ID NO: 352507 - DNA, 30 bp, Artificial Sequence
  Synthetic oligonucleotide
aacttcgccgagaaatctacccgtttaaac

SEQ ID NO: 352508 - DNA, 30 bp, Artificial Sequence
  Synthetic oligonucleotide
tgagaataatttgttcttactacaaacaac

SEQ ID NO: 352509 - DNA, 30 bp, Artificial Sequence
  Synthetic oligonucleotide
gctcgatcggccgtaccatatttaaacaac

SEQ ID NO: 352510 - DNA, 30 bp, Artificial Sequence
  Synthetic oligonucleotide
attagatgctaggtgtgtaagttcaacaac

SEQ ID NO: 352511 - DNA, 30 bp, Artificial Sequence
  Synthetic oligonucleotide
atatttatttgcggatgacctaagaacaac

SEQ ID NO: 352512 - DNA, 30 bp, Artificial Sequence
  Synthetic oligonucleotide
gtatgagttaaccagacggttgggaacaac

SEQ ID NO: 352513 - DNA, 30 bp, Artificial Sequence
  Synthetic oligonucleotide
gggtggtattgtgttattgacttacacaac

SEQ ID NO: 352514 - DNA, 30 bp, Artificial Sequence
  Synthetic oligonucleotide
taggtaccaaactgacccgagacccacaac

SEQ ID NO: 352515 - DNA, 29 bp, Artificial Sequence
  Synthetic oligonucleotide
ccgttgcgcacgtgggcgtaccgcacaac

SEQ ID NO: 352516 - DNA, 30 bp, Artificial Sequence
  Synthetic oligonucleotide
tccccgatggaacctgcaaaagatcacaac

SEQ ID NO: 352517 - DNA, 30 bp, Artificial Sequence
  Synthetic oligonucleotide
aaattaagtggggatgagtttcctcacaac

SEQ ID NO: 352518 - DNA, 30 bp, Artificial Sequence
  Synthetic oligonucleotide
ttgtcggagttagggcggcattgagacaac

SEQ ID NO: 352519 - DNA, 30 bp, Artificial Sequence
  Synthetic oligonucleotide
gcactcagggctgggactatgtccgacaac

SEQ ID NO: 352520 - DNA, 30 bp, Artificial Sequence
  Synthetic oligonucleotide
ttggggattcaataagttaattgcgacaac

SEQ ID NO: 352521 - DNA, 30 bp, Artificial Sequence
  Synthetic oligonucleotide
atcacagttagcaacggggcgaatgacaac

SEQ ID NO: 352522 - DNA, 30 bp, Artificial Sequence
  Synthetic oligonucleotide
aatctcgttgctgtgcaagattgtgacaac

SEQ ID NO: 352523 - DNA, 30 bp, Artificial Sequence
  Synthetic oligonucleotide
cccgccacataggtctataaggcatacaac

SEQ ID NO: 352524 - DNA, 30 bp, Artificial Sequence
  Synthetic oligonucleotide
gcgggagtttggatgtgccagagctacaac

SEQ ID NO: 352525 - DNA, 30 bp, Artificial Sequence
  Synthetic oligonucleotide
gggggcgggcttctttacctagagtacaac

SEQ ID NO: 352526 - DNA, 31 bp, Artificial Sequence
  Synthetic oligonucleotide
gttaggttctcagtaccacatgcggtacaac

SEQ ID NO: 352527 - DNA, 30 bp, Artificial Sequence
  Synthetic oligonucleotide
agtattgcgataaataccattagttacaac

SEQ ID NO: 352528 - DNA, 30 bp, Artificial Sequence
  Synthetic oligonucleotide
gtcgatcgttgtccaaaagtaaaaaccaac

SEQ ID NO: 352529 - DNA, 30 bp, Artificial Sequence
  Synthetic oligonucleotide
aaagggggataccgctggcgccaaaccaac

SEQ ID NO: 352530 - DNA, 30 bp, Artificial Sequence
  Synthetic oligonucleotide
acctgtggtctggttgcggcattaaccaac

SEQ ID NO: 352531 - DNA, 30 bp, Artificial Sequence
  Synthetic oligonucleotide
ggttgggtagatcggagagggcacaccaac

SEQ ID NO: 352532 - DNA, 30 bp, Artificial Sequence
  Synthetic oligonucleotide
tacccttcggtgactccgcgtaccaccaac

SEQ ID NO: 352533 - DNA, 30 bp, Artificial Sequence
  Synthetic oligonucleotide
gggtagcaggtaccttgtccgaagaccaac

SEQ ID NO: 352534 - DNA, 30 bp, Artificial Sequence
  Synthetic oligonucleotide
ttcggcactataaatcctctttataccaac

SEQ ID NO: 352535 - DNA, 30 bp, Artificial Sequence
  Synthetic oligonucleotide
ggctttcaccttatcacgtagtcgcccaac

SEQ ID NO: 352536 - DNA, 30 bp, Artificial Sequence
  Synthetic oligonucleotide
atcccctgccggaggggatatgggcccaac

SEQ ID NO: 352537 - DNA, 30 bp, Artificial Sequence
  Synthetic oligonucleotide
atccagggatttcgcgagtcgtttcccaac

SEQ ID NO: 352538 - DNA, 30 bp, Artificial Sequence
  Synthetic oligonucleotide
gattaatccagctggttgatcatagccaac

SEQ ID NO: 352539 - DNA, 30 bp, Artificial Sequence
  Synthetic oligonucleotide
tcgattggttgctcttttattcaggccaac

SEQ ID NO: 352540 - DNA, 30 bp, Artificial Sequence
  Synthetic oligonucleotide
gtcttgaaagtttcgtatagcacggccaac

SEQ ID NO: 352541 - DNA, 30 bp, Artificial Sequence
  Synthetic oligonucleotide
cagatgatctcgttctgtggtatggccaac

SEQ ID NO: 352542 - DNA, 30 bp, Artificial Sequence
  Synthetic oligonucleotide
tggagcaattcagcgctaataaatgccaac

SEQ ID NO: 352543 - DNA, 30 bp, Artificial Sequence
  Synthetic oligonucleotide
agtgctgtatatctattgccgcctgccaac

SEQ ID NO: 352544 - DNA, 30 bp, Artificial Sequence
  Synthetic oligonucleotide
ctcgaacacctccctttgcgtggtgccaac

SEQ ID NO: 352545 - DNA, 30 bp, Artificial Sequence
  Synthetic oligonucleotide
accaagccccttgagccgtcaacatccaac

SEQ ID NO: 352546 - DNA, 30 bp, Artificial Sequence
  Synthetic oligonucleotide
ttacgtagctggcagcaattttgctccaac

SEQ ID NO: 352547 - DNA, 30 bp, Artificial Sequence
  Synthetic oligonucleotide
gcagtccgaatcacaagttatcagtccaac

SEQ ID NO: 352548 - DNA, 30 bp, Artificial Sequence
  Synthetic oligonucleotide
cgatgtagatgtttctatgcgaattccaac

SEQ ID NO: 352549 - DNA, 30 bp, Artificial Sequence
  Synthetic oligonucleotide
tcgccatctgatctaggagaactttccaac

SEQ ID NO: 352550 - DNA, 30 bp, Artificial Sequence
  Synthetic oligonucleotide
cggcaggtaacgcccgtctgctgaagcaac

SEQ ID NO: 352551 - DNA, 30 bp, Artificial Sequence
  Synthetic oligonucleotide
agttgttatcataattgaaatgtaagcaac

SEQ ID NO: 352552 - DNA, 30 bp, Artificial Sequence
  Synthetic oligonucleotide
ctcaaaaagagccgccttgccaccagcaac

SEQ ID NO: 352553 - DNA, 30 bp, Artificial Sequence
  Synthetic oligonucleotide
ttggagttttgggcaaggctggccagcaac

SEQ ID NO: 352554 - DNA, 28 bp, Artificial Sequence
  Synthetic oligonucleotide
cccgcggttcatagaccccagcagcaac

SEQ ID NO: 352555 - DNA, 30 bp, Artificial Sequence
  Synthetic oligonucleotide
gctgtatcgaacatatctatgctgagcaac

SEQ ID NO: 352556 - DNA, 30 bp, Artificial Sequence
  Synthetic oligonucleotide
gcggttagttgttcattcgcggttagcaac

SEQ ID NO: 352557 - DNA, 30 bp, Artificial Sequence
  Synthetic oligonucleotide
tcgtcatcccgtatcagccaacgccgcaac

SEQ ID NO: 352558 - DNA, 30 bp, Artificial Sequence
  Synthetic oligonucleotide
ccacagactaatggttttcggttgcgcaac

SEQ ID NO: 352559 - DNA, 30 bp, Artificial Sequence
  Synthetic oligonucleotide
gagctatacacttttggtctaataggcaac

SEQ ID NO: 352560 - DNA, 30 bp, Artificial Sequence
  Synthetic oligonucleotide
gataagatgccaaaggtaggtctaggcaac

SEQ ID NO: 352561 - DNA, 30 bp, Artificial Sequence
  Synthetic oligonucleotide
tgctattaacattagaggtctaacggcaac

SEQ ID NO: 352562 - DNA, 30 bp, Artificial Sequence
  Synthetic oligonucleotide
gctggcgcaggaagccgatgatcgggcaac

SEQ ID NO: 352563 - DNA, 30 bp, Artificial Sequence
  Synthetic oligonucleotide
aaggtcgaccttcgctgtttcctgggcaac

SEQ ID NO: 352564 - DNA, 30 bp, Artificial Sequence
  Synthetic oligonucleotide
atatgtaaacggtgcatggagctgggcaac

SEQ ID NO: 352565 - DNA, 30 bp, Artificial Sequence
  Synthetic oligonucleotide
tcgtagggataatatgagcacgatggcaac

SEQ ID NO: 352566 - DNA, 30 bp, Artificial Sequence
  Synthetic oligonucleotide
ggcgttgagccctctaaattggaatgcaac

SEQ ID NO: 352567 - DNA, 30 bp, Artificial Sequence
  Synthetic oligonucleotide
gtgagccaagcccatgacggggcatgcaac

SEQ ID NO: 352568 - DNA, 30 bp, Artificial Sequence
  Synthetic oligonucleotide
atctactgccacatgatggtttcatgcaac

SEQ ID NO: 352569 - DNA, 30 bp, Artificial Sequence
  Synthetic oligonucleotide
gctagaaaccattgatattgaccgtgcaac

SEQ ID NO: 352570 - DNA, 30 bp, Artificial Sequence
  Synthetic oligonucleotide
attaattcgaacgagcaaggcggttgcaac

SEQ ID NO: 352571 - DNA, 30 bp, Artificial Sequence
  Synthetic oligonucleotide
tgcgcatcggaagccttccatggaatcaac

SEQ ID NO: 352572 - DNA, 30 bp, Artificial Sequence
  Synthetic oligonucleotide
caattcgtttctatggctcacctgatcaac

SEQ ID NO: 352573 - DNA, 30 bp, Artificial Sequence
  Synthetic oligonucleotide
cgttccaacagttgtgatgggttgatcaac

SEQ ID NO: 352574 - DNA, 30 bp, Artificial Sequence
  Synthetic oligonucleotide
ccgctgtgtgggactaggcgcagtatcaac

SEQ ID NO: 352575 - DNA, 30 bp, Artificial Sequence
  Synthetic oligonucleotide
gatttgcgcgagatacaatgttgtatcaac

SEQ ID NO: 352576 - DNA, 30 bp, Artificial Sequence
  Synthetic oligonucleotide
aggtattctaatcttcccgcgcaactcaac

SEQ ID NO: 352577 - DNA, 30 bp, Artificial Sequence
  Synthetic oligonucleotide
ggaccgtcactagtgccataaccactcaac

SEQ ID NO: 352578 - DNA, 30 bp, Artificial Sequence
  Synthetic oligonucleotide
ctaaataacgcgaaattccgtgcactcaac

SEQ ID NO: 352579 - DNA, 30 bp, Artificial Sequence
  Synthetic oligonucleotide
caggaaaggctttactgtttgaagctcaac

SEQ ID NO: 352580 - DNA, 30 bp, Artificial Sequence
  Synthetic oligonucleotide
acgagtcgcgcgaaacatcgcccgctcaac

SEQ ID NO: 352581 - DNA, 30 bp, Artificial Sequence
  Synthetic oligonucleotide
gcgatctccgctcatttcctatggctcaac

SEQ ID NO: 352582 - DNA, 30 bp, Artificial Sequence
  Synthetic oligonucleotide
ggaaccgcaagtgaaggattcctgctcaac

SEQ ID NO: 352583 - DNA, 30 bp, Artificial Sequence
  Synthetic oligonucleotide
ccgggtcgactaggtaacccggtgctcaac

SEQ ID NO: 352584 - DNA, 30 bp, Artificial Sequence
  Synthetic oligonucleotide
gtcccccagatgaacggtagatatctcaac

SEQ ID NO: 352585 - DNA, 30 bp, Artificial Sequence
  Synthetic oligonucleotide
acctcacgcaggagacgagcgaaagtcaac

SEQ ID NO: 352586 - DNA, 30 bp, Artificial Sequence
  Synthetic oligonucleotide
cttttaatatgtaggaacatacaagtcaac

SEQ ID NO: 352587 - DNA, 30 bp, Artificial Sequence
  Synthetic oligonucleotide
cccgttctctggatgggttgctcggtcaac

SEQ ID NO: 352588 - DNA, 30 bp, Artificial Sequence
  Synthetic oligonucleotide
caatcacatacttgtggccactgggtcaac

SEQ ID NO: 352589 - DNA, 30 bp, Artificial Sequence
  Synthetic oligonucleotide
caccagccaggggctcctccaactgtcaac

SEQ ID NO: 352590 - DNA, 30 bp, Artificial Sequence
  Synthetic oligonucleotide
gtgccaggtattgaggggccccctgtcaac

SEQ ID NO: 352591 - DNA, 30 bp, Artificial Sequence
  Synthetic oligonucleotide
aggggccgtaggaagataattcaattcaac

SEQ ID NO: 352592 - DNA, 30 bp, Artificial Sequence
  Synthetic oligonucleotide
gtgacacttcgcccgcatatctaattcaac

SEQ ID NO: 352593 - DNA, 30 bp, Artificial Sequence
  Synthetic oligonucleotide
ctagctttaacgccgttgccatgattcaac

SEQ ID NO: 352594 - DNA, 30 bp, Artificial Sequence
  Synthetic oligonucleotide
ctagtcctcttgaaaattccaaacttcaac

SEQ ID NO: 352595 - DNA, 30 bp, Artificial Sequence
  Synthetic oligonucleotide
agtgctgaatccaatcgctgatagttcaac

SEQ ID NO: 352596 - DNA, 30 bp, Artificial Sequence
  Synthetic oligonucleotide
cacatgaaaattggaccgagcgcgttcaac

SEQ ID NO: 352597 - DNA, 30 bp, Artificial Sequence
  Synthetic oligonucleotide
agatcctagatggcctctgatgatttcaac

SEQ ID NO: 352598 - DNA, 30 bp, Artificial Sequence
  Synthetic oligonucleotide
gcagttagtggcaccgattaacgtttcaac

SEQ ID NO: 352599 - DNA, 30 bp, Artificial Sequence
  Synthetic oligonucleotide
acgcaattgttcttcagtgtcattttcaac

SEQ ID NO: 352600 - DNA, 30 bp, Artificial Sequence
  Synthetic oligonucleotide
taaacgcttctactgacatgtcttttcaac

SEQ ID NO: 352601 - DNA, 30 bp, Artificial Sequence
  Synthetic oligonucleotide
agagacacagaggatcttggttaaaagaac

SEQ ID NO: 352602 - DNA, 30 bp, Artificial Sequence
  Synthetic oligonucleotide
ggccctgcaagatcaacctgcgcaaagaac

SEQ ID NO: 352603 - DNA, 30 bp, Artificial Sequence
  Synthetic oligonucleotide
cccaactggataatctgtgagttaaagaac

SEQ ID NO: 352604 - DNA, 30 bp, Artificial Sequence
  Synthetic oligonucleotide
ctggtgacttgacatcgtagtaccaagaac

SEQ ID NO: 352605 - DNA, 30 bp, Artificial Sequence
  Synthetic oligonucleotide
ttagcggatgcccttcgatgaagcaagaac

SEQ ID NO: 352606 - DNA, 30 bp, Artificial Sequence
  Synthetic oligonucleotide
tgacctacgtgtttgaaatcctgcaagaac

SEQ ID NO: 352607 - DNA, 30 bp, Artificial Sequence
  Synthetic oligonucleotide
agggagtcgcatggaaggcattagaagaac

SEQ ID NO: 352608 - DNA, 30 bp, Artificial Sequence
  Synthetic oligonucleotide
ctataggggctttggtgtcaagataagaac

SEQ ID NO: 352609 - DNA, 30 bp, Artificial Sequence
  Synthetic oligonucleotide
ttaaaatcgatagcgcagctttgacagaac

SEQ ID NO: 352610 - DNA, 30 bp, Artificial Sequence
  Synthetic oligonucleotide
ttcgctatgaacgcgtggtaagcccagaac

SEQ ID NO: 352611 - DNA, 30 bp, Artificial Sequence
  Synthetic oligonucleotide
gctcccattcgcagagggttaatccagaac

SEQ ID NO: 352612 - DNA, 30 bp, Artificial Sequence
  Synthetic oligonucleotide
gtgctggagagtggctggatcgggcagaac

SEQ ID NO: 352613 - DNA, 30 bp, Artificial Sequence
  Synthetic oligonucleotide
tcatttggcatagccagaaatttgcagaac

SEQ ID NO: 352614 - DNA, 30 bp, Artificial Sequence
  Synthetic oligonucleotide
cgggtcccccgcgcgttcgtctaagagaac

SEQ ID NO: 352615 - DNA, 30 bp, Artificial Sequence
  Synthetic oligonucleotide
gttccgaggtttgctgtgcttcgagagaac

SEQ ID NO: 352616 - DNA, 30 bp, Artificial Sequence
  Synthetic oligonucleotide
aacaggaattactctatgcagcaggagaac

SEQ ID NO: 352617 - DNA, 30 bp, Artificial Sequence
  Synthetic oligonucleotide
gtaactggaacacatcagtcatcggagaac

SEQ ID NO: 352618 - DNA, 30 bp, Artificial Sequence
  Synthetic oligonucleotide
tgtcctctgctgtctcactcacttgagaac

SEQ ID NO: 352619 - DNA, 30 bp, Artificial Sequence
  Synthetic oligonucleotide
tgttgtaaaaatggtggtaaaagctagaac

SEQ ID NO: 352620 - DNA, 30 bp, Artificial Sequence
  Synthetic oligonucleotide
tgctgtacccaaagcatcgcaccgtagaac

SEQ ID NO: 352621 - DNA, 30 bp, Artificial Sequence
  Synthetic oligonucleotide
caaaagtatgtgtacggtcgaacttagaac

SEQ ID NO: 352622 - DNA, 30 bp, Artificial Sequence
  Synthetic oligonucleotide
aaagatttcaaacctttaaattcttagaac

SEQ ID NO: 352623 - DNA, 30 bp, Artificial Sequence
  Synthetic oligonucleotide
taaaaaccataccgcaaggccagttagaac

SEQ ID NO: 352624 - DNA, 30 bp, Artificial Sequence
  Synthetic oligonucleotide
agaagcctcataattgatttccgttagaac

SEQ ID NO: 352625 - DNA, 30 bp, Artificial Sequence
  Synthetic oligonucleotide
aggggcaattcaggagtttttgtttagaac

SEQ ID NO: 352626 - DNA, 30 bp, Artificial Sequence
  Synthetic oligonucleotide
agccgcatctagctattccataacacgaac

SEQ ID NO: 352627 - DNA, 30 bp, Artificial Sequence
  Synthetic oligonucleotide
cttaagtcccaatggtcggggatcacgaac

SEQ ID NO: 352628 - DNA, 30 bp, Artificial Sequence
  Synthetic oligonucleotide
cccgaggtggtgtgttcacctgcgacgaac

SEQ ID NO: 352629 - DNA, 30 bp, Artificial Sequence
  Synthetic oligonucleotide
gggaggtttagtcttctttgtaggacgaac

SEQ ID NO: 352630 - DNA, 30 bp, Artificial Sequence
  Synthetic oligonucleotide
atttcgcttattaacacccttgtgacgaac

SEQ ID NO: 352631 - DNA, 30 bp, Artificial Sequence
  Synthetic oligonucleotide
tctgcgccactgtggcatgcaggtacgaac

SEQ ID NO: 352632 - DNA, 30 bp, Artificial Sequence
  Synthetic oligonucleotide
ctagtgcttgttctgtgactaaaaccgaac

SEQ ID NO: 352633 - DNA, 30 bp, Artificial Sequence
  Synthetic oligonucleotide
taactccgcggatagaccaggattccgaac

SEQ ID NO: 352634 - DNA, 30 bp, Artificial Sequence
  Synthetic oligonucleotide
ctaatttacgccaacagcacgagcgcgaac

SEQ ID NO: 352635 - DNA, 30 bp, Artificial Sequence
  Synthetic oligonucleotide
cgtcgccgagtcgatggcctctattcgaac

SEQ ID NO: 352636 - DNA, 30 bp, Artificial Sequence
  Synthetic oligonucleotide
ttagaacccgctccgctgaaggtttcgaac

SEQ ID NO: 352637 - DNA, 30 bp, Artificial Sequence
  Synthetic oligonucleotide
cacagagtcatgcgctaagtattttcgaac

SEQ ID NO: 352638 - DNA, 30 bp, Artificial Sequence
  Synthetic oligonucleotide
gaaaaatctaatacttgcaagtaaaggaac

SEQ ID NO: 352639 - DNA, 30 bp, Artificial Sequence
  Synthetic oligonucleotide
acgcggttcttgtcttcaaatagcaggaac

SEQ ID NO: 352640 - DNA, 30 bp, Artificial Sequence
  Synthetic oligonucleotide
aacttcatttgtgtcgggtataataggaac

SEQ ID NO: 352641 - DNA, 30 bp, Artificial Sequence
  Synthetic oligonucleotide
atcgcaaggacagtcgtaggtattaggaac

SEQ ID NO: 352642 - DNA, 30 bp, Artificial Sequence
  Synthetic oligonucleotide
ggacggtctctcggggtttcagttaggaac

SEQ ID NO: 352643 - DNA, 30 bp, Artificial Sequence
  Synthetic oligonucleotide
aaacttccaggcagagcggatttacggaac

SEQ ID NO: 352644 - DNA, 30 bp, Artificial Sequence
  Synthetic oligonucleotide
aggtttgatacgtacgcgcccacgcggaac

SEQ ID NO: 352645 - DNA, 30 bp, Artificial Sequence
  Synthetic oligonucleotide
gttaatatgtcggggtgtagagatcggaac

SEQ ID NO: 352646 - DNA, 30 bp, Artificial Sequence
  Synthetic oligonucleotide
aggagacgtcggagttcgtcgtgtcggaac

SEQ ID NO: 352647 - DNA, 30 bp, Artificial Sequence
  Synthetic oligonucleotide
cgtatttgactcagttcccgtattcggaac

SEQ ID NO: 352648 - DNA, 30 bp, Artificial Sequence
  Synthetic oligonucleotide
gccagcagcgcgatcgtaagactagggaac

SEQ ID NO: 352649 - DNA, 30 bp, Artificial Sequence
  Synthetic oligonucleotide
tagtataaaatcgcgccccccgtcgggaac

SEQ ID NO: 352650 - DNA, 30 bp, Artificial Sequence
  Synthetic oligonucleotide
ccatcggtgatctttgttgcacaggggaac

SEQ ID NO: 352651 - DNA, 30 bp, Artificial Sequence
  Synthetic oligonucleotide
cgttcctctcggacaaacttagtggggaac

SEQ ID NO: 352652 - DNA, 29 bp, Artificial Sequence
  Synthetic oligonucleotide
tatttgactatcgcgtccgggtggggaac

SEQ ID NO: 352653 - DNA, 30 bp, Artificial Sequence
  Synthetic oligonucleotide
gcgcagttagaatgcgttagaggtgggaac

SEQ ID NO: 352654 - DNA, 30 bp, Artificial Sequence
  Synthetic oligonucleotide
ggcataagtctacggagtttaattgggaac

SEQ ID NO: 352655 - DNA, 30 bp, Artificial Sequence
  Synthetic oligonucleotide
gttaaggggttgcgcgtcgggacatggaac

SEQ ID NO: 352656 - DNA, 30 bp, Artificial Sequence
  Synthetic oligonucleotide
acaggcactgactaatagaggctatggaac

SEQ ID NO: 352657 - DNA, 30 bp, Artificial Sequence
  Synthetic oligonucleotide
agcacggtccgagtcaggcagggctggaac

SEQ ID NO: 352658 - DNA, 30 bp, Artificial Sequence
  Synthetic oligonucleotide
acgtatggtactcggccgcccaggtggaac

SEQ ID NO: 352659 - DNA, 30 bp, Artificial Sequence
  Synthetic oligonucleotide
cttgatggggttggaaattgggtttggaac

SEQ ID NO: 352660 - DNA, 30 bp, Artificial Sequence
  Synthetic oligonucleotide
ctagtacagtaatggggcaatgccatgaac

SEQ ID NO: 352661 - DNA, 30 bp, Artificial Sequence
  Synthetic oligonucleotide
agggtatgaagtccccggctcaagatgaac

SEQ ID NO: 352662 - DNA, 30 bp, Artificial Sequence
  Synthetic oligonucleotide
aatatatggcaggtgtgcatcaggatgaac

SEQ ID NO: 352663 - DNA, 30 bp, Artificial Sequence
  Synthetic oligonucleotide
ctgacgcaaagggcggttatagtgatgaac

SEQ ID NO: 352664 - DNA, 30 bp, Artificial Sequence
  Synthetic oligonucleotide
aagtttcttatggcaaaccatcctatgaac

SEQ ID NO: 352665 - DNA, 30 bp, Artificial Sequence
  Synthetic oligonucleotide
gggactatgataggatcattgtctatgaac

SEQ ID NO: 352666 - DNA, 30 bp, Artificial Sequence
  Synthetic oligonucleotide
gatcaaaacggatgcctgggtattatgaac

SEQ ID NO: 352667 - DNA, 30 bp, Artificial Sequence
  Synthetic oligonucleotide
agctacaacccttcggctcgttgactgaac

SEQ ID NO: 352668 - DNA, 30 bp, Artificial Sequence
  Synthetic oligonucleotide
ttattttgtcaaagccggagtttactgaac

SEQ ID NO: 352669 - DNA, 30 bp, Artificial Sequence
  Synthetic oligonucleotide
gaagacctacgccgctgcgaacacctgaac

SEQ ID NO: 352670 - DNA, 30 bp, Artificial Sequence
  Synthetic oligonucleotide
ttgaaggaaatgttccatgacagcctgaac

SEQ ID NO: 352671 - DNA, 30 bp, Artificial Sequence
  Synthetic oligonucleotide
cttagggtccatggtaaaggcttcctgaac

SEQ ID NO: 352672 - DNA, 30 bp, Artificial Sequence
  Synthetic oligonucleotide
gggcgatccacgtcgacggaggagctgaac

SEQ ID NO: 352673 - DNA, 30 bp, Artificial Sequence
  Synthetic oligonucleotide
ttcggttaacccgctgaatttaaagtgaac

SEQ ID NO: 352674 - DNA, 30 bp, Artificial Sequence
  Synthetic oligonucleotide
ggggacaagcagttatcggttgaagtgaac

SEQ ID NO: 352675 - DNA, 30 bp, Artificial Sequence
  Synthetic oligonucleotide
aacaatgaatgcgtaagctttctagtgaac

SEQ ID NO: 352676 - DNA, 30 bp, Artificial Sequence
  Synthetic oligonucleotide
gggtatgtgcacgtgtcgagcgtagtgaac

SEQ ID NO: 352677 - DNA, 30 bp, Artificial Sequence
  Synthetic oligonucleotide
ggttaatgtcggaactagatgatggtgaac

SEQ ID NO: 352678 - DNA, 30 bp, Artificial Sequence
  Synthetic oligonucleotide
caggtggtctggactgctaggcgtgtgaac

SEQ ID NO: 352679 - DNA, 30 bp, Artificial Sequence
  Synthetic oligonucleotide
gcgtttcaaggagaggtgcccttattgaac

SEQ ID NO: 352680 - DNA, 30 bp, Artificial Sequence
  Synthetic oligonucleotide
taggcacttagctgtgaacgtcagttgaac

SEQ ID NO: 352681 - DNA, 30 bp, Artificial Sequence
  Synthetic oligonucleotide
cacgtgcctcggcttgaggggaggttgaac

SEQ ID NO: 352682 - DNA, 30 bp, Artificial Sequence
  Synthetic oligonucleotide
gtcttccaccgtcagtggcgcggtttgaac

SEQ ID NO: 352683 - DNA, 30 bp, Artificial Sequence
  Synthetic oligonucleotide
ttactagtacgattggcaaaatgtttgaac

SEQ ID NO: 352684 - DNA, 30 bp, Artificial Sequence
  Synthetic oligonucleotide
cctcgcggcaaatgtacctgaaaaaataac

SEQ ID NO: 352685 - DNA, 30 bp, Artificial Sequence
  Synthetic oligonucleotide
tagaccaagcggtgcctagcctcaaataac

SEQ ID NO: 352686 - DNA, 30 bp, Artificial Sequence
  Synthetic oligonucleotide
cgatggttagtttgttctaaccacaataac

SEQ ID NO: 352687 - DNA, 30 bp, Artificial Sequence
  Synthetic oligonucleotide
gttctaaaaatgccttaattacccaataac

SEQ ID NO: 352688 - DNA, 30 bp, Artificial Sequence
  Synthetic oligonucleotide
gagtttagtgaaacgacctatagcaataac

SEQ ID NO: 352689 - DNA, 30 bp, Artificial Sequence
  Synthetic oligonucleotide
gaaggtctgcctgagtggtcgtgcaataac

SEQ ID NO: 352690 - DNA, 30 bp, Artificial Sequence
  Synthetic oligonucleotide
gacaatgagatagttagcgttgtgaataac

SEQ ID NO: 352691 - DNA, 30 bp, Artificial Sequence
  Synthetic oligonucleotide
ggttgggaataagttcagtctgataataac

SEQ ID NO: 352692 - DNA, 30 bp, Artificial Sequence
  Synthetic oligonucleotide
ggacatttgagagctaatctttataataac

SEQ ID NO: 352693 - DNA, 30 bp, Artificial Sequence
  Synthetic oligonucleotide
taacccaattagctagtgatacaacataac

SEQ ID NO: 352694 - DNA, 30 bp, Artificial Sequence
  Synthetic oligonucleotide
gtcctagttcgttctaaaacataccataac

SEQ ID NO: 352695 - DNA, 30 bp, Artificial Sequence
  Synthetic oligonucleotide
cggttgcctcaaaacctataaagccataac

SEQ ID NO: 352696 - DNA, 30 bp, Artificial Sequence
  Synthetic oligonucleotide
gcaggaggaggtaggttaaaaggccataac

SEQ ID NO: 352697 - DNA, 30 bp, Artificial Sequence
  Synthetic oligonucleotide
ggtgttcatttttcaaggatgctccataac

SEQ ID NO: 352698 - DNA, 30 bp, Artificial Sequence
  Synthetic oligonucleotide
actggtacaaacaggggtccggagcataac

SEQ ID NO: 352699 - DNA, 30 bp, Artificial Sequence
  Synthetic oligonucleotide
aacgtgctgtcacatttgtacaatcataac

SEQ ID NO: 352700 - DNA, 30 bp, Artificial Sequence
  Synthetic oligonucleotide
gctccgtgacattaacagtagtctcataac

SEQ ID NO: 352701 - DNA, 30 bp, Artificial Sequence
  Synthetic oligonucleotide
acttggattctgcgtcaaagacaagataac

SEQ ID NO: 352702 - DNA, 30 bp, Artificial Sequence
  Synthetic oligonucleotide
acatgagctccaatcaagctctgagataac

SEQ ID NO: 352703 - DNA, 30 bp, Artificial Sequence
  Synthetic oligonucleotide
gtactggcgattggtgcacgcctagataac

SEQ ID NO: 352704 - DNA, 30 bp, Artificial Sequence
  Synthetic oligonucleotide
gtgacgaaggttcagattagttaggataac

SEQ ID NO: 352705 - DNA, 30 bp, Artificial Sequence
  Synthetic oligonucleotide
tcactggtgtgacaagggaacgttgataac

SEQ ID NO: 352706 - DNA, 30 bp, Artificial Sequence
  Synthetic oligonucleotide
tgggactctccggagattgtgtttgataac

SEQ ID NO: 352707 - DNA, 30 bp, Artificial Sequence
  Synthetic oligonucleotide
ggggttcggctactgccaacccgatataac

SEQ ID NO: 352708 - DNA, 30 bp, Artificial Sequence
  Synthetic oligonucleotide
tagtgttactatagtgtggtgtactataac

SEQ ID NO: 352709 - DNA, 30 bp, Artificial Sequence
  Synthetic oligonucleotide
cttatcgctggctaatccggggtgtataac

SEQ ID NO: 352710 - DNA, 30 bp, Artificial Sequence
  Synthetic oligonucleotide
gtctctttgtcctaaggggccaattataac

SEQ ID NO: 352711 - DNA, 30 bp, Artificial Sequence
  Synthetic oligonucleotide
aggggtggatcacgacgggccagttataac

SEQ ID NO: 352712 - DNA, 30 bp, Artificial Sequence
  Synthetic oligonucleotide
ttagcgagtaggtgacagataggttataac

SEQ ID NO: 352713 - DNA, 30 bp, Artificial Sequence
  Synthetic oligonucleotide
ttagcatgttacgtgtgcgcggtttataac

SEQ ID NO: 352714 - DNA, 29 bp, Artificial Sequence
  Synthetic oligonucleotide
ctatcgttatacttaaattgccgactaac

SEQ ID NO: 352715 - DNA, 30 bp, Artificial Sequence
  Synthetic oligonucleotide
ggtaatcgagcagttctcttatatactaac

SEQ ID NO: 352716 - DNA, 30 bp, Artificial Sequence
  Synthetic oligonucleotide
cttgtacgaacgcttaaacgttatactaac

SEQ ID NO: 352717 - DNA, 30 bp, Artificial Sequence
  Synthetic oligonucleotide
gtaagctattgcgtctcgtgcattactaac

SEQ ID NO: 352718 - DNA, 30 bp, Artificial Sequence
  Synthetic oligonucleotide
taaaggggcttttggtgactgcttactaac

SEQ ID NO: 352719 - DNA, 30 bp, Artificial Sequence
  Synthetic oligonucleotide
aatgtgtcgtcagtaatggaggttactaac

SEQ ID NO: 352720 - DNA, 30 bp, Artificial Sequence
  Synthetic oligonucleotide
tttcaatcgcgcatgacgcgcccgcctaac

SEQ ID NO: 352721 - DNA, 30 bp, Artificial Sequence
  Synthetic oligonucleotide
agactgttcctgacgttactgtttcctaac

SEQ ID NO: 352722 - DNA, 30 bp, Artificial Sequence
  Synthetic oligonucleotide
gggtaaacccgctgcaggagtacagctaac

SEQ ID NO: 352723 - DNA, 30 bp, Artificial Sequence
  Synthetic oligonucleotide
ctaccggaccctaattgctatagagctaac

SEQ ID NO: 352724 - DNA, 30 bp, Artificial Sequence
  Synthetic oligonucleotide
agaatttggctctcatatagtatctctaac

SEQ ID NO: 352725 - DNA, 30 bp, Artificial Sequence
  Synthetic oligonucleotide
tcgtctaggagacgaagtttctggtctaac

SEQ ID NO: 352726 - DNA, 30 bp, Artificial Sequence
  Synthetic oligonucleotide
atcgccggatcccgtctttttagttctaac

SEQ ID NO: 352727 - DNA, 30 bp, Artificial Sequence
  Synthetic oligonucleotide
tacccaactatcttattcatagaaagtaac

SEQ ID NO: 352728 - DNA, 29 bp, Artificial Sequence
  Synthetic oligonucleotide
ctccgatcgaagtgagaattagaagtaac

SEQ ID NO: 352729 - DNA, 30 bp, Artificial Sequence
  Synthetic oligonucleotide
attaatttggcccagcacattcgaagtaac

SEQ ID NO: 352730 - DNA, 30 bp, Artificial Sequence
  Synthetic oligonucleotide
tctgcactccggcccaaccgtctaagtaac

SEQ ID NO: 352731 - DNA, 30 bp, Artificial Sequence
  Synthetic oligonucleotide
gtgaattttaaacgaggcggaaacagtaac

SEQ ID NO: 352732 - DNA, 30 bp, Artificial Sequence
  Synthetic oligonucleotide
tggacagcttgtcagcgttaacccagtaac

SEQ ID NO: 352733 - DNA, 30 bp, Artificial Sequence
  Synthetic oligonucleotide
cgacctccgaaattgactgctcccagtaac

SEQ ID NO: 352734 - DNA, 30 bp, Artificial Sequence
  Synthetic oligonucleotide
gtgtgtctgacatagcaggtcagcagtaac

SEQ ID NO: 352735 - DNA, 30 bp, Artificial Sequence
  Synthetic oligonucleotide
gagcattgtaggtgacagagaatcagtaac

SEQ ID NO: 352736 - DNA, 30 bp, Artificial Sequence
  Synthetic oligonucleotide
ttaacttgaacgagttatcatttcagtaac

SEQ ID NO: 352737 - DNA, 30 bp, Artificial Sequence
  Synthetic oligonucleotide
gtccttacagaccatgtcgaacctagtaac

SEQ ID NO: 352738 - DNA, 30 bp, Artificial Sequence
  Synthetic oligonucleotide
atgggtttttgagcgtgacagcaacgtaac

SEQ ID NO: 352739 - DNA, 30 bp, Artificial Sequence
  Synthetic oligonucleotide
gaagaggatcagtgccatttgcaccgtaac

SEQ ID NO: 352740 - DNA, 30 bp, Artificial Sequence
  Synthetic oligonucleotide
acagagaatgtgcaaccttacacgcgtaac

SEQ ID NO: 352741 - DNA, 30 bp, Artificial Sequence
  Synthetic oligonucleotide
atcggacggaagtagcagttcacgcgtaac

SEQ ID NO: 352742 - DNA, 30 bp, Artificial Sequence
  Synthetic oligonucleotide
catgtcgagactcggcccaattggcgtaac

SEQ ID NO: 352743 - DNA, 30 bp, Artificial Sequence
  Synthetic oligonucleotide
gtgttgtatcagtagaggtgtgatcgtaac

SEQ ID NO: 352744 - DNA, 30 bp, Artificial Sequence
  Synthetic oligonucleotide
tgttaatagagactattcgatactcgtaac

SEQ ID NO: 352745 - DNA, 30 bp, Artificial Sequence
  Synthetic oligonucleotide
gcggaataaaatcctactcgatttcgtaac

SEQ ID NO: 352746 - DNA, 30 bp, Artificial Sequence
  Synthetic oligonucleotide
ctcgtaggtacacacgaacgcgcaggtaac

SEQ ID NO: 352747 - DNA, 30 bp, Artificial Sequence
  Synthetic oligonucleotide
accttggaatggaaagatactcgaggtaac

SEQ ID NO: 352748 - DNA, 30 bp, Artificial Sequence
  Synthetic oligonucleotide
cttaagacccactaatggaggcagggtaac

SEQ ID NO: 352749 - DNA, 30 bp, Artificial Sequence
  Synthetic oligonucleotide
accatacctttccggacaactgcgggtaac

SEQ ID NO: 352750 - DNA, 30 bp, Artificial Sequence
  Synthetic oligonucleotide
gtatgggtccggttagtctgcaatggtaac

SEQ ID NO: 352751 - DNA, 30 bp, Artificial Sequence
  Synthetic oligonucleotide
gcctagtcgggaggaaggagcacatgtaac

SEQ ID NO: 352752 - DNA, 30 bp, Artificial Sequence
  Synthetic oligonucleotide
atagcttgtaaatgggaacctgcatgtaac

SEQ ID NO: 352753 - DNA, 30 bp, Artificial Sequence
  Synthetic oligonucleotide
agtgccctttggaagcgacttagctgtaac

SEQ ID NO: 352754 - DNA, 30 bp, Artificial Sequence
  Synthetic oligonucleotide
gtatccgataaaaaatccgtggagtgtaac

SEQ ID NO: 352755 - DNA, 30 bp, Artificial Sequence
  Synthetic oligonucleotide
actgtgtgagctttctatatacggtgtaac

SEQ ID NO: 352756 - DNA, 30 bp, Artificial Sequence
  Synthetic oligonucleotide
tagggctgtttcgtgagggaccgttgtaac

SEQ ID NO: 352757 - DNA, 30 bp, Artificial Sequence
  Synthetic oligonucleotide
ccctgtttagggttggtcaacctttgtaac

SEQ ID NO: 352758 - DNA, 30 bp, Artificial Sequence
  Synthetic oligonucleotide
gtaggtcaaactatatcatccgtttgtaac

SEQ ID NO: 352759 - DNA, 30 bp, Artificial Sequence
  Synthetic oligonucleotide
tcatggaagatgggttagaatctaattaac

SEQ ID NO: 352760 - DNA, 30 bp, Artificial Sequence
  Synthetic oligonucleotide
catgtggattaccttcacacgagcattaac

SEQ ID NO: 352761 - DNA, 30 bp, Artificial Sequence
  Synthetic oligonucleotide
tactactagaggaacgtcaccttcattaac

SEQ ID NO: 352762 - DNA, 30 bp, Artificial Sequence
  Synthetic oligonucleotide
aaaacgttcggagcactgtcctagattaac

SEQ ID NO: 352763 - DNA, 30 bp, Artificial Sequence
  Synthetic oligonucleotide
gcagtgctcaacgtgtgagtagggattaac

SEQ ID NO: 352764 - DNA, 30 bp, Artificial Sequence
  Synthetic oligonucleotide
agatttctatgacaattagaatgacttaac

SEQ ID NO: 352765 - DNA, 30 bp, Artificial Sequence
  Synthetic oligonucleotide
actgctaggatccctagggatctacttaac

SEQ ID NO: 352766 - DNA, 30 bp, Artificial Sequence
  Synthetic oligonucleotide
tagcaaattatagtgggagggtaccttaac

SEQ ID NO: 352767 - DNA, 30 bp, Artificial Sequence
  Synthetic oligonucleotide
gagggaccattagcaacggtaccccttaac

SEQ ID NO: 352768 - DNA, 30 bp, Artificial Sequence
  Synthetic oligonucleotide
gcagttctccaaagtaaggtcagccttaac

SEQ ID NO: 352769 - DNA, 30 bp, Artificial Sequence
  Synthetic oligonucleotide
aactctacttcgtggatctgaggccttaac

SEQ ID NO: 352770 - DNA, 30 bp, Artificial Sequence
  Synthetic oligonucleotide
gtagggcaaactgactgttaaaatcttaac

SEQ ID NO: 352771 - DNA, 30 bp, Artificial Sequence
  Synthetic oligonucleotide
tttagcttagtctgttactaagatcttaac

SEQ ID NO: 352772 - DNA, 30 bp, Artificial Sequence
  Synthetic oligonucleotide
ggtttaacgggagggactggtgaagttaac

SEQ ID NO: 352773 - DNA, 30 bp, Artificial Sequence
  Synthetic oligonucleotide
tatgggaggatgcgcaggaccgcagttaac

SEQ ID NO: 352774 - DNA, 30 bp, Artificial Sequence
  Synthetic oligonucleotide
tcgaaattggcatgtgctaagtcagttaac

SEQ ID NO: 352775 - DNA, 30 bp, Artificial Sequence
  Synthetic oligonucleotide
cataaaggtatgggtgggaacttagttaac

SEQ ID NO: 352776 - DNA, 30 bp, Artificial Sequence
  Synthetic oligonucleotide
catcgtccagtgcgatgaggagacgttaac

SEQ ID NO: 352777 - DNA, 30 bp, Artificial Sequence
  Synthetic oligonucleotide
ctcttctagggaactgggggcgtcgttaac

SEQ ID NO: 352778 - DNA, 30 bp, Artificial Sequence
  Synthetic oligonucleotide
aacttcgcaacgtcgggacatttcgttaac

SEQ ID NO: 352779 - DNA, 30 bp, Artificial Sequence
  Synthetic oligonucleotide
gtccatgagtagcagactataacggttaac

SEQ ID NO: 352780 - DNA, 30 bp, Artificial Sequence
  Synthetic oligonucleotide
ttgcggcccatgccagaggagtgggttaac

SEQ ID NO: 352781 - DNA, 30 bp, Artificial Sequence
  Synthetic oligonucleotide
aattgtggatacactggcgaaactgttaac

SEQ ID NO: 352782 - DNA, 30 bp, Artificial Sequence
  Synthetic oligonucleotide
cgttcagtgacggttttttgttttgttaac

SEQ ID NO: 352783 - DNA, 30 bp, Artificial Sequence
  Synthetic oligonucleotide
aaccatctgcgcacatgttcggaatttaac

SEQ ID NO: 352784 - DNA, 30 bp, Artificial Sequence
  Synthetic oligonucleotide
cacatagcttcggatgagtgaacatttaac

SEQ ID NO: 352785 - DNA, 30 bp, Artificial Sequence
  Synthetic oligonucleotide
atgcggcaattagatcacggtacatttaac

SEQ ID NO: 352786 - DNA, 30 bp, Artificial Sequence
  Synthetic oligonucleotide
atgtcgtaagggtattttaatatatttaac

SEQ ID NO: 352787 - DNA, 30 bp, Artificial Sequence
  Synthetic oligonucleotide
acgtggaacgatggctagctatggtttaac

SEQ ID NO: 352788 - DNA, 30 bp, Artificial Sequence
  Synthetic oligonucleotide
aagtagaggttccatgtatcattgtttaac

SEQ ID NO: 352789 - DNA, 30 bp, Artificial Sequence
  Synthetic oligonucleotide
gcgcgcagcatcacggggctggcttttaac

SEQ ID NO: 352790 - DNA, 30 bp, Artificial Sequence
  Synthetic oligonucleotide
gggtacttgctgccgacttatcgttttaac

SEQ ID NO: 352791 - DNA, 30 bp, Artificial Sequence
  Synthetic oligonucleotide
ggaactatatagaatattattggttttaac

SEQ ID NO: 352792 - DNA, 31 bp, Artificial Sequence
  Synthetic oligonucleotide
ttccactaatatactactgtctcaaaaacac

SEQ ID NO: 352793 - DNA, 30 bp, Artificial Sequence
  Synthetic oligonucleotide
tgtccggaaagtgctgtctaaacaaaacac

SEQ ID NO: 352794 - DNA, 30 bp, Artificial Sequence
  Synthetic oligonucleotide
atttgagtttaaggtctaatgacaaaacac

SEQ ID NO: 352795 - DNA, 30 bp, Artificial Sequence
  Synthetic oligonucleotide
agttcgattccttgatttaggtcaaaacac

SEQ ID NO: 352796 - DNA, 30 bp, Artificial Sequence
  Synthetic oligonucleotide
agttcataagatcggaagcaatccaaacac

SEQ ID NO: 352797 - DNA, 30 bp, Artificial Sequence
  Synthetic oligonucleotide
tcactctggacggctgttaagtgcaaacac

SEQ ID NO: 352798 - DNA, 30 bp, Artificial Sequence
  Synthetic oligonucleotide
cactaagcaactcccttagcggcgaaacac

SEQ ID NO: 352799 - DNA, 30 bp, Artificial Sequence
  Synthetic oligonucleotide
aaagctactggttcgtctgtggcgaaacac

SEQ ID NO: 352800 - DNA, 30 bp, Artificial Sequence
  Synthetic oligonucleotide
gatattgagagctgtattttacggaaacac

SEQ ID NO: 352801 - DNA, 30 bp, Artificial Sequence
  Synthetic oligonucleotide
atcaatagtttgctcactaaggataaacac

SEQ ID NO: 352802 - DNA, 30 bp, Artificial Sequence
  Synthetic oligonucleotide
cttactgggaatgtacaagtctctaaacac

SEQ ID NO: 352803 - DNA, 31 bp, Artificial Sequence
  Synthetic oligonucleotide
actacccgcacggcctatcagccgtaaacac

SEQ ID NO: 352804 - DNA, 30 bp, Artificial Sequence
  Synthetic oligonucleotide
aaacaggttaacggtcattgttgtaaacac

SEQ ID NO: 352805 - DNA, 30 bp, Artificial Sequence
  Synthetic oligonucleotide
ggtgtgggggtttgcaatgcggttaaacac

SEQ ID NO: 352806 - DNA, 30 bp, Artificial Sequence
  Synthetic oligonucleotide
gtgagcctagttaagcagtacaaacaacac

SEQ ID NO: 352807 - DNA, 30 bp, Artificial Sequence
  Synthetic oligonucleotide
agtgaatcttactgcaccgacggacaacac

SEQ ID NO: 352808 - DNA, 30 bp, Artificial Sequence
  Synthetic oligonucleotide
tttttataagcagacaactcgggccaacac

SEQ ID NO: 352809 - DNA, 30 bp, Artificial Sequence
  Synthetic oligonucleotide
cgatagattaaggatcgtttatcgcaacac

SEQ ID NO: 352810 - DNA, 30 bp, Artificial Sequence
  Synthetic oligonucleotide
ccgccaagcacagtcctgaacgctcaacac

SEQ ID NO: 352811 - DNA, 30 bp, Artificial Sequence
  Synthetic oligonucleotide
gtgttcaaattgttttctcaaagtcaacac

SEQ ID NO: 352812 - DNA, 30 bp, Artificial Sequence
  Synthetic oligonucleotide
catggatcgggtatcctaccttaagaacac

SEQ ID NO: 352813 - DNA, 30 bp, Artificial Sequence
  Synthetic oligonucleotide
acgatttagctgagcgagggaacagaacac

SEQ ID NO: 352814 - DNA, 30 bp, Artificial Sequence
  Synthetic oligonucleotide
gccatcagggacgcctgggttacagaacac

SEQ ID NO: 352815 - DNA, 30 bp, Artificial Sequence
  Synthetic oligonucleotide
aacgcccttcgtcacacatctcgagaacac

SEQ ID NO: 352816 - DNA, 30 bp, Artificial Sequence
  Synthetic oligonucleotide
attagtctcattgttgtaccagccgaacac

SEQ ID NO: 352817 - DNA, 30 bp, Artificial Sequence
  Synthetic oligonucleotide
gatctgaatccggtggagtgatgcgaacac

SEQ ID NO: 352818 - DNA, 30 bp, Artificial Sequence
  Synthetic oligonucleotide
tcgtaacctggttaagcgttccgggaacac

SEQ ID NO: 352819 - DNA, 30 bp, Artificial Sequence
  Synthetic oligonucleotide
tgaaaagctcacacggcgtttatggaacac

SEQ ID NO: 352820 - DNA, 30 bp, Artificial Sequence
  Synthetic oligonucleotide
atgctccagagagtccactgttttgaacac

SEQ ID NO: 352821 - DNA, 30 bp, Artificial Sequence
  Synthetic oligonucleotide
gagcagtgcagtatagtcaagcaataacac

SEQ ID NO: 352822 - DNA, 30 bp, Artificial Sequence
  Synthetic oligonucleotide
gagcaggttcgggtcctattgctataacac

SEQ ID NO: 352823 - DNA, 30 bp, Artificial Sequence
  Synthetic oligonucleotide
cttatgctcaagctcgggacatagtaacac

SEQ ID NO: 352824 - DNA, 30 bp, Artificial Sequence
  Synthetic oligonucleotide
tatggctagttaggcaaaggcgtgtaacac

SEQ ID NO: 352825 - DNA, 30 bp, Artificial Sequence
  Synthetic oligonucleotide
gtcggcattccgactgaacctggttaacac

SEQ ID NO: 352826 - DNA, 30 bp, Artificial Sequence
  Synthetic oligonucleotide
agatttcatgagagaggagcagcaacacac

SEQ ID NO: 352827 - DNA, 30 bp, Artificial Sequence
  Synthetic oligonucleotide
agagcatactacggattgtacgtaacacac

SEQ ID NO: 352828 - DNA, 30 bp, Artificial Sequence
  Synthetic oligonucleotide
gatgaaataactttacttatggccacacac

SEQ ID NO: 352829 - DNA, 30 bp, Artificial Sequence
  Synthetic oligonucleotide
ggtctcccggaacggcggtgtgagacacac

SEQ ID NO: 352830 - DNA, 30 bp, Artificial Sequence
  Synthetic oligonucleotide
cggcgcggacgcacgctattctttacacac

SEQ ID NO: 352831 - DNA, 30 bp, Artificial Sequence
  Synthetic oligonucleotide
tcccttaacgtttctggcagacccccacac

SEQ ID NO: 352832 - DNA, 30 bp, Artificial Sequence
  Synthetic oligonucleotide
cttagctcgtgtcctcttctaatgccacac

SEQ ID NO: 352833 - DNA, 30 bp, Artificial Sequence
  Synthetic oligonucleotide
aactagagcgtttaaggtcacgatccacac

SEQ ID NO: 352834 - DNA, 30 bp, Artificial Sequence
  Synthetic oligonucleotide
gtcatggtccatttccgaaaccgtccacac

SEQ ID NO: 352835 - DNA, 30 bp, Artificial Sequence
  Synthetic oligonucleotide
atcccatctgttgaggtacagagggcacac

SEQ ID NO: 352836 - DNA, 30 bp, Artificial Sequence
  Synthetic oligonucleotide
tagactttccctaggtctcaggttgcacac

SEQ ID NO: 352837 - DNA, 30 bp, Artificial Sequence
  Synthetic oligonucleotide
ttcaaaaagtcatcttccttaaaatcacac

SEQ ID NO: 352838 - DNA, 30 bp, Artificial Sequence
  Synthetic oligonucleotide
tatgcgaacatccgtgcgactaagtcacac

SEQ ID NO: 352839 - DNA, 30 bp, Artificial Sequence
  Synthetic oligonucleotide
cgatgcctcgagcatttgggagagtcacac

SEQ ID NO: 352840 - DNA, 30 bp, Artificial Sequence
  Synthetic oligonucleotide
aaaggtgtacctaccgttcgttagtcacac

SEQ ID NO: 352841 - DNA, 30 bp, Artificial Sequence
  Synthetic oligonucleotide
actatgtgacttggtaccccgaattcacac

SEQ ID NO: 352842 - DNA, 30 bp, Artificial Sequence
  Synthetic oligonucleotide
tgaacgcgcaagaggagaaactattcacac

SEQ ID NO: 352843 - DNA, 30 bp, Artificial Sequence
  Synthetic oligonucleotide
catgtgtgctgcctgcaggacgcaagacac

SEQ ID NO: 352844 - DNA, 30 bp, Artificial Sequence
  Synthetic oligonucleotide
aagtgggcgttaattccatgaagcagacac

SEQ ID NO: 352845 - DNA, 30 bp, Artificial Sequence
  Synthetic oligonucleotide
agaaaactttgccagcatgacgtcagacac

SEQ ID NO: 352846 - DNA, 30 bp, Artificial Sequence
  Synthetic oligonucleotide
taattggcatttgggtaatcagcgagacac

SEQ ID NO: 352847 - DNA, 30 bp, Artificial Sequence
  Synthetic oligonucleotide
tcaagaaactttagaagtataagtagacac

SEQ ID NO: 352848 - DNA, 28 bp, Artificial Sequence
  Synthetic oligonucleotide
cgttcgctcctttatcataaaacgacac

SEQ ID NO: 352849 - DNA, 30 bp, Artificial Sequence
  Synthetic oligonucleotide
gttgatcgtgaaaagcctcggcaacgacac

SEQ ID NO: 352850 - DNA, 30 bp, Artificial Sequence
  Synthetic oligonucleotide
gggtaaggtagggatcgcaacggacgacac

SEQ ID NO: 352851 - DNA, 30 bp, Artificial Sequence
  Synthetic oligonucleotide
ttaaccttatcataagcacgaagccgacac

SEQ ID NO: 352852 - DNA, 30 bp, Artificial Sequence
  Synthetic oligonucleotide
agaacacgtgctcaggcaccgttccgacac

SEQ ID NO: 352853 - DNA, 30 bp, Artificial Sequence
  Synthetic oligonucleotide
ccggccaatattcttttaagttagcgacac

SEQ ID NO: 352854 - DNA, 30 bp, Artificial Sequence
  Synthetic oligonucleotide
ccactagcgactaagtgtcccaacggacac

SEQ ID NO: 352855 - DNA, 30 bp, Artificial Sequence
  Synthetic oligonucleotide
cgagtatatagttcggagggtcgcggacac

SEQ ID NO: 352856 - DNA, 30 bp, Artificial Sequence
  Synthetic oligonucleotide
tactttaatgcccgccctgtcaagggacac

SEQ ID NO: 352857 - DNA, 30 bp, Artificial Sequence
  Synthetic oligonucleotide
ttctatactcagaagaatattaggggacac

SEQ ID NO: 352858 - DNA, 30 bp, Artificial Sequence
  Synthetic oligonucleotide
cgaatggggattttcatgatcgggggacac

SEQ ID NO: 352859 - DNA, 30 bp, Artificial Sequence
  Synthetic oligonucleotide
cagtatcccaggcggggaaatactggacac

SEQ ID NO: 352860 - DNA, 30 bp, Artificial Sequence
  Synthetic oligonucleotide
aacattaaaatggtatctagccttggacac

SEQ ID NO: 352861 - DNA, 30 bp, Artificial Sequence
  Synthetic oligonucleotide
ttaacaggtggtgtcttttcgcgctgacac

SEQ ID NO: 352862 - DNA, 30 bp, Artificial Sequence
  Synthetic oligonucleotide
aaccactcatcgcgtagtgtcatgtgacac

SEQ ID NO: 352863 - DNA, 30 bp, Artificial Sequence
  Synthetic oligonucleotide
gtagcggtcatcgtgtctcgcacaatacac

SEQ ID NO: 352864 - DNA, 30 bp, Artificial Sequence
  Synthetic oligonucleotide
ctctgtaatgtgctaattatcacaatacac

SEQ ID NO: 352865 - DNA, 30 bp, Artificial Sequence
  Synthetic oligonucleotide
gctgcgttgggcatagggacggccatacac

SEQ ID NO: 352866 - DNA, 30 bp, Artificial Sequence
  Synthetic oligonucleotide
gtctaacgcaatggtataacaagcatacac

SEQ ID NO: 352867 - DNA, 30 bp, Artificial Sequence
  Synthetic oligonucleotide
gccttgtcatacagctcttccagcatacac

SEQ ID NO: 352868 - DNA, 30 bp, Artificial Sequence
  Synthetic oligonucleotide
catacatgccactatgcggaacgcatacac

SEQ ID NO: 352869 - DNA, 30 bp, Artificial Sequence
  Synthetic oligonucleotide
gactaagccgtcgtatggcccgcgatacac

SEQ ID NO: 352870 - DNA, 30 bp, Artificial Sequence
  Synthetic oligonucleotide
cactagtcggctgcaaacttcgctatacac

SEQ ID NO: 352871 - DNA, 30 bp, Artificial Sequence
  Synthetic oligonucleotide
ggacccgtagagtctgatcatagactacac

SEQ ID NO: 352872 - DNA, 30 bp, Artificial Sequence
  Synthetic oligonucleotide
cgtttctagcgttctatgcgctagctacac

SEQ ID NO: 352873 - DNA, 30 bp, Artificial Sequence
  Synthetic oligonucleotide
cttcactagtttaaagtagtgcatctacac

SEQ ID NO: 352874 - DNA, 30 bp, Artificial Sequence
  Synthetic oligonucleotide
atccgcaaataggctgtgacatatctacac

SEQ ID NO: 352875 - DNA, 30 bp, Artificial Sequence
  Synthetic oligonucleotide
ctgagactgactgcagaatagtctctacac

SEQ ID NO: 352876 - DNA, 30 bp, Artificial Sequence
  Synthetic oligonucleotide
caggagattcgcatcagactggaagtacac

SEQ ID NO: 352877 - DNA, 30 bp, Artificial Sequence
  Synthetic oligonucleotide
ggagttcgcaaaagcgtgtagtgagtacac

SEQ ID NO: 352878 - DNA, 30 bp, Artificial Sequence
  Synthetic oligonucleotide
tatcggaacggcttgcttgatatagtacac

SEQ ID NO: 352879 - DNA, 30 bp, Artificial Sequence
  Synthetic oligonucleotide
attcgacaaccctattacctagcggtacac

SEQ ID NO: 352880 - DNA, 30 bp, Artificial Sequence
  Synthetic oligonucleotide
accagtggatatgcagcgatagatgtacac

SEQ ID NO: 352881 - DNA, 30 bp, Artificial Sequence
  Synthetic oligonucleotide
cgtattcttgtgacagcggaacctgtacac

SEQ ID NO: 352882 - DNA, 30 bp, Artificial Sequence
  Synthetic oligonucleotide
gtcctactttgtaaattcgaacgattacac

SEQ ID NO: 352883 - DNA, 30 bp, Artificial Sequence
  Synthetic oligonucleotide
acagcctctgacaggaccccctgattacac

SEQ ID NO: 352884 - DNA, 30 bp, Artificial Sequence
  Synthetic oligonucleotide
atcgcgtaagcttttggacggtacttacac

SEQ ID NO: 352885 - DNA, 30 bp, Artificial Sequence
  Synthetic oligonucleotide
actacccaatgcgcgtggctttagttacac

SEQ ID NO: 352886 - DNA, 30 bp, Artificial Sequence
  Synthetic oligonucleotide
cagaagctgaatgatccggagtcgttacac

SEQ ID NO: 352887 - DNA, 30 bp, Artificial Sequence
  Synthetic oligonucleotide
ggaaaaatcggggcaggccacagtttacac

SEQ ID NO: 352888 - DNA, 30 bp, Artificial Sequence
  Synthetic oligonucleotide
gtaaatggggtcgagcccacatttttacac

SEQ ID NO: 352889 - DNA, 30 bp, Artificial Sequence
  Synthetic oligonucleotide
taatttcttggagaggtgcgttaaaaccac

SEQ ID NO: 352890 - DNA, 30 bp, Artificial Sequence
  Synthetic oligonucleotide
ctcgtgtggcccgtcctctgatcaaaccac

SEQ ID NO: 352891 - DNA, 30 bp, Artificial Sequence
  Synthetic oligonucleotide
ttctagacgagatccatcccaaggaaccac

SEQ ID NO: 352892 - DNA, 30 bp, Artificial Sequence
  Synthetic oligonucleotide
ctttagacataagtttaaatcttgaaccac

SEQ ID NO: 352893 - DNA, 30 bp, Artificial Sequence
  Synthetic oligonucleotide
ggaagctgccctgctgactgtgataaccac

SEQ ID NO: 352894 - DNA, 30 bp, Artificial Sequence
  Synthetic oligonucleotide
acgagccgcaatatcatgcacgcacaccac

SEQ ID NO: 352895 - DNA, 30 bp, Artificial Sequence
  Synthetic oligonucleotide
taccggatctcttcacgggctggacaccac

SEQ ID NO: 352896 - DNA, 30 bp, Artificial Sequence
  Synthetic oligonucleotide
agcactaaaaatgtgcgacgtcggcaccac

SEQ ID NO: 352897 - DNA, 30 bp, Artificial Sequence
  Synthetic oligonucleotide
ctcttgatcgcgatgtgcttgtttcaccac

SEQ ID NO: 352898 - DNA, 30 bp, Artificial Sequence
  Synthetic oligonucleotide
aaaaaagatttagagcatcggatagaccac

SEQ ID NO: 352899 - DNA, 30 bp, Artificial Sequence
  Synthetic oligonucleotide
aattggacgagtgcaaagcgctccgaccac

SEQ ID NO: 352900 - DNA, 30 bp, Artificial Sequence
  Synthetic oligonucleotide
cggacgattcttagaagaccgtccgaccac

SEQ ID NO: 352901 - DNA, 30 bp, Artificial Sequence
  Synthetic oligonucleotide
tggataatgacgtaatgaactttggaccac

SEQ ID NO: 352902 - DNA, 30 bp, Artificial Sequence
  Synthetic oligonucleotide
gaggcaatatagtcttgccaaactgaccac

SEQ ID NO: 352903 - DNA, 30 bp, Artificial Sequence
  Synthetic oligonucleotide
ctctagtcgtcgaaccatatagctgaccac

SEQ ID NO: 352904 - DNA, 30 bp, Artificial Sequence
  Synthetic oligonucleotide
tgctcagcaggaggtatatagggataccac

SEQ ID NO: 352905 - DNA, 30 bp, Artificial Sequence
  Synthetic oligonucleotide
gccgttctcgtatactcaattcagtaccac

SEQ ID NO: 352906 - DNA, 30 bp, Artificial Sequence
  Synthetic oligonucleotide
caacccaagtgttggatgacgaggtaccac

SEQ ID NO: 352907 - DNA, 30 bp, Artificial Sequence
  Synthetic oligonucleotide
tagagatggaccttttagatctcttaccac

SEQ ID NO: 352908 - DNA, 29 bp, Artificial Sequence
  Synthetic oligonucleotide
gtaaaccctgatcgcgcgatttttaccac

SEQ ID NO: 352909 - DNA, 30 bp, Artificial Sequence
  Synthetic oligonucleotide
tcgtactgagcgacgctgccacacacccac

SEQ ID NO: 352910 - DNA, 30 bp, Artificial Sequence
  Synthetic oligonucleotide
ggatatttatacttttagaatctgacccac

SEQ ID NO: 352911 - DNA, 30 bp, Artificial Sequence
  Synthetic oligonucleotide
ttactcgacaagctcgaccagattacccac

SEQ ID NO: 352912 - DNA, 30 bp, Artificial Sequence
  Synthetic oligonucleotide
ttttcgtcgaaaagtaatgcacccccccac

SEQ ID NO: 352913 - DNA, 30 bp, Artificial Sequence
  Synthetic oligonucleotide
aagataagcaggagacgcctactcccccac

SEQ ID NO: 352914 - DNA, 30 bp, Artificial Sequence
  Synthetic oligonucleotide
atttacgtacgtttacacgtgacggcccac

SEQ ID NO: 352915 - DNA, 30 bp, Artificial Sequence
  Synthetic oligonucleotide
agctatattaaaatcttttgctatgcccac

SEQ ID NO: 352916 - DNA, 30 bp, Artificial Sequence
  Synthetic oligonucleotide
taacggtccacactgagagccattgcccac

SEQ ID NO: 352917 - DNA, 30 bp, Artificial Sequence
  Synthetic oligonucleotide
ccaatttttaccggggtaacgttctcccac

SEQ ID NO: 352918 - DNA, 30 bp, Artificial Sequence
  Synthetic oligonucleotide
caggggacaccgcgcagtggcctgtcccac

SEQ ID NO: 352919 - DNA, 30 bp, Artificial Sequence
  Synthetic oligonucleotide
aagcgtttagtaatgatatgcaattcccac

SEQ ID NO: 352920 - DNA, 30 bp, Artificial Sequence
  Synthetic oligonucleotide
tccagctatatgtcggtcagccgaagccac

SEQ ID NO: 352921 - DNA, 30 bp, Artificial Sequence
  Synthetic oligonucleotide
gactaatatgttcgataagtgggaagccac

SEQ ID NO: 352922 - DNA, 30 bp, Artificial Sequence
  Synthetic oligonucleotide
atatgcttcgttccgcgggtgggaagccac

SEQ ID NO: 352923 - DNA, 30 bp, Artificial Sequence
  Synthetic oligonucleotide
gataagtagatggagctcccggtaagccac

SEQ ID NO: 352924 - DNA, 30 bp, Artificial Sequence
  Synthetic oligonucleotide
gttaatctgaacatgtatggccacagccac

SEQ ID NO: 352925 - DNA, 30 bp, Artificial Sequence
  Synthetic oligonucleotide
taccggttttcctgaaatcatgtcagccac

SEQ ID NO: 352926 - DNA, 30 bp, Artificial Sequence
  Synthetic oligonucleotide
gtgagatccgagctttaagggcagagccac

SEQ ID NO: 352927 - DNA, 30 bp, Artificial Sequence
  Synthetic oligonucleotide
cgtcctttctcgttctactaccggagccac

SEQ ID NO: 352928 - DNA, 30 bp, Artificial Sequence
  Synthetic oligonucleotide
tattaggaacggccatcacgacatagccac

SEQ ID NO: 352929 - DNA, 30 bp, Artificial Sequence
  Synthetic oligonucleotide
ctaaatcaattcaatggaggccttagccac

SEQ ID NO: 352930 - DNA, 30 bp, Artificial Sequence
  Synthetic oligonucleotide
atcgccgaaaaagctagatatagacgccac

SEQ ID NO: 352931 - DNA, 30 bp, Artificial Sequence
  Synthetic oligonucleotide
ctcgagcaacacgcatgttaagaccgccac

SEQ ID NO: 352932 - DNA, 30 bp, Artificial Sequence
  Synthetic oligonucleotide
gtttacagcaaggactttgggggccgccac

SEQ ID NO: 352933 - DNA, 30 bp, Artificial Sequence
  Synthetic oligonucleotide
aaatcatattgcctggaccggttccgccac

SEQ ID NO: 352934 - DNA, 30 bp, Artificial Sequence
  Synthetic oligonucleotide
acatcgtctgaatcgtggccgacgcgccac

SEQ ID NO: 352935 - DNA, 30 bp, Artificial Sequence
  Synthetic oligonucleotide
gcctggggtagactttcaaaaaatcgccac

SEQ ID NO: 352936 - DNA, 30 bp, Artificial Sequence
  Synthetic oligonucleotide
aacgtttagatgagtctggagtctcgccac

SEQ ID NO: 352937 - DNA, 30 bp, Artificial Sequence
  Synthetic oligonucleotide
caggaatagaatcctggtgcccgtcgccac

SEQ ID NO: 352938 - DNA, 30 bp, Artificial Sequence
  Synthetic oligonucleotide
cgtctatgttgcgttaataaaaccggccac

SEQ ID NO: 352939 - DNA, 30 bp, Artificial Sequence
  Synthetic oligonucleotide
ggcaacatgggcgggtggagggccggccac

SEQ ID NO: 352940 - DNA, 30 bp, Artificial Sequence
  Synthetic oligonucleotide
tgttgttacactattcggctttgcggccac

SEQ ID NO: 352941 - DNA, 30 bp, Artificial Sequence
  Synthetic oligonucleotide
aaatactcggccacgatctgcgcgggccac

SEQ ID NO: 352942 - DNA, 30 bp, Artificial Sequence
  Synthetic oligonucleotide
tctacatggtcagtttgcaggtcgggccac

SEQ ID NO: 352943 - DNA, 30 bp, Artificial Sequence
  Synthetic oligonucleotide
ctatctgtaatatataaaagtcggggccac

SEQ ID NO: 352944 - DNA, 30 bp, Artificial Sequence
  Synthetic oligonucleotide
ggggcggggggacttggattaagtggccac

SEQ ID NO: 352945 - DNA, 30 bp, Artificial Sequence
  Synthetic oligonucleotide
taaacaacggctcgttgcgttcgtggccac

SEQ ID NO: 352946 - DNA, 30 bp, Artificial Sequence
  Synthetic oligonucleotide
tttcccagagttgatccacacattggccac

SEQ ID NO: 352947 - DNA, 30 bp, Artificial Sequence
  Synthetic oligonucleotide
ggaaacgggctatatcgccgtccctgccac

SEQ ID NO: 352948 - DNA, 30 bp, Artificial Sequence
  Synthetic oligonucleotide
ttagcgcattttaagggagaatcgtgccac

SEQ ID NO: 352949 - DNA, 30 bp, Artificial Sequence
  Synthetic oligonucleotide
aagttatgatttgaaactttgctgtgccac

SEQ ID NO: 352950 - DNA, 30 bp, Artificial Sequence
  Synthetic oligonucleotide
tatttatatcaaatcctggacaacatccac

SEQ ID NO: 352951 - DNA, 30 bp, Artificial Sequence
  Synthetic oligonucleotide
attgcttttattgcatatgtctccatccac

SEQ ID NO: 352952 - DNA, 30 bp, Artificial Sequence
  Synthetic oligonucleotide
ctttgattgagtgagggtaacatcatccac

SEQ ID NO: 352953 - DNA, 30 bp, Artificial Sequence
  Synthetic oligonucleotide
tatgggactatatagtactttatgatccac

SEQ ID NO: 352954 - DNA, 30 bp, Artificial Sequence
  Synthetic oligonucleotide
aaggcgggtcccgtggctgatttgatccac

SEQ ID NO: 352955 - DNA, 30 bp, Artificial Sequence
  Synthetic oligonucleotide
ttagtagtggttcagccattacgtatccac

SEQ ID NO: 352956 - DNA, 30 bp, Artificial Sequence
  Synthetic oligonucleotide
cttttacaggtgggctaccggcgtatccac

SEQ ID NO: 352957 - DNA, 30 bp, Artificial Sequence
  Synthetic oligonucleotide
ggcagcaaggtgtggcagataccactccac

SEQ ID NO: 352958 - DNA, 30 bp, Artificial Sequence
  Synthetic oligonucleotide
aaaatgccttgttgatgggtacccctccac

SEQ ID NO: 352959 - DNA, 30 bp, Artificial Sequence
  Synthetic oligonucleotide
aagtgacgtcgtgggtataccggcctccac

SEQ ID NO: 352960 - DNA, 30 bp, Artificial Sequence
  Synthetic oligonucleotide
ccaaggtgtatcagcggcggctagctccac

SEQ ID NO: 352961 - DNA, 30 bp, Artificial Sequence
  Synthetic oligonucleotide
acgtcccataactgtaaataaaggctccac

SEQ ID NO: 352962 - DNA, 30 bp, Artificial Sequence
  Synthetic oligonucleotide
tgccttcacaacacggaacaacggctccac

SEQ ID NO: 352963 - DNA, 30 bp, Artificial Sequence
  Synthetic oligonucleotide
tataagagtttgttggttcttcaagtccac

SEQ ID NO: 352964 - DNA, 30 bp, Artificial Sequence
  Synthetic oligonucleotide
cagctcaggattatggctcttttagtccac

SEQ ID NO: 352965 - DNA, 30 bp, Artificial Sequence
  Synthetic oligonucleotide
tctgaatgatgcgttggacgaaaggtccac

SEQ ID NO: 352966 - DNA, 30 bp, Artificial Sequence
  Synthetic oligonucleotide
ttggggatcgtctcgactggtgcggtccac

SEQ ID NO: 352967 - DNA, 30 bp, Artificial Sequence
  Synthetic oligonucleotide
ctatctctgattagatttagttcggtccac

SEQ ID NO: 352968 - DNA, 30 bp, Artificial Sequence
  Synthetic oligonucleotide
gctgccgatcatcaacagggattggtccac

SEQ ID NO: 352969 - DNA, 30 bp, Artificial Sequence
  Synthetic oligonucleotide
aatttcagcaatgaccaatgtttggtccac

SEQ ID NO: 352970 - DNA, 30 bp, Artificial Sequence
  Synthetic oligonucleotide
ggattgaggccgtgataagctaatgtccac

SEQ ID NO: 352971 - DNA, 30 bp, Artificial Sequence
  Synthetic oligonucleotide
gtccggtttagcggggctccacgtgtccac

SEQ ID NO: 352972 - DNA, 30 bp, Artificial Sequence
  Synthetic oligonucleotide
gcagggagttatgttggttaacacttccac

SEQ ID NO: 352973 - DNA, 30 bp, Artificial Sequence
  Synthetic oligonucleotide
cctttcggggacgaagaaccaggcttccac

SEQ ID NO: 352974 - DNA, 30 bp, Artificial Sequence
  Synthetic oligonucleotide
agtacattcatcatttaatattgtttccac

SEQ ID NO: 352975 - DNA, 30 bp, Artificial Sequence
  Synthetic oligonucleotide
tagattccactcttaaaatggcaaaagcac

SEQ ID NO: 352976 - DNA, 30 bp, Artificial Sequence
  Synthetic oligonucleotide
gtacaggcgattcattatgcatgaaagcac

SEQ ID NO: 352977 - DNA, 30 bp, Artificial Sequence
  Synthetic oligonucleotide
aaaatttcccataggcgttcgatcaagcac

SEQ ID NO: 352978 - DNA, 30 bp, Artificial Sequence
  Synthetic oligonucleotide
gcgcgtagctgtagattggttctcaagcac

SEQ ID NO: 352979 - DNA, 30 bp, Artificial Sequence
  Synthetic oligonucleotide
tggtcattaagagccggtcgaatgaagcac

SEQ ID NO: 352980 - DNA, 30 bp, Artificial Sequence
  Synthetic oligonucleotide
atcctagtacttcagtactataataagcac

SEQ ID NO: 352981 - DNA, 30 bp, Artificial Sequence
  Synthetic oligonucleotide
cgctgtttcgcccaatagagcgataagcac

SEQ ID NO: 352982 - DNA, 30 bp, Artificial Sequence
  Synthetic oligonucleotide
cagcttgagtagtgtcctgagcttaagcac

SEQ ID NO: 352983 - DNA, 30 bp, Artificial Sequence
  Synthetic oligonucleotide
tgcactccctctctctcccgttgccagcac

SEQ ID NO: 352984 - DNA, 30 bp, Artificial Sequence
  Synthetic oligonucleotide
caagtgataaatagctaaggacagcagcac

SEQ ID NO: 352985 - DNA, 30 bp, Artificial Sequence
  Synthetic oligonucleotide
gacccgtcatctgacacgcgcattcagcac

SEQ ID NO: 352986 - DNA, 30 bp, Artificial Sequence
  Synthetic oligonucleotide
ctgggtctatatgctttcagttaagagcac

SEQ ID NO: 352987 - DNA, 30 bp, Artificial Sequence
  Synthetic oligonucleotide
gttgatatgggaacactatgtaacgagcac

SEQ ID NO: 352988 - DNA, 30 bp, Artificial Sequence
  Synthetic oligonucleotide
atctacatggttagccaggagtccgagcac

SEQ ID NO: 352989 - DNA, 30 bp, Artificial Sequence
  Synthetic oligonucleotide
ggggcgttcaagctcagccgccgcgagcac

SEQ ID NO: 352990 - DNA, 30 bp, Artificial Sequence
  Synthetic oligonucleotide
tgcgccgcatgcagcgagcgtgtcgagcac

SEQ ID NO: 352991 - DNA, 30 bp, Artificial Sequence
  Synthetic oligonucleotide
atggtgcaatagctatggctaatggagcac

SEQ ID NO: 352992 - DNA, 30 bp, Artificial Sequence
  Synthetic oligonucleotide
cgaattaagagtcctttccgtactgagcac

SEQ ID NO: 352993 - DNA, 30 bp, Artificial Sequence
  Synthetic oligonucleotide
gttttggcactatccgtaccgtgtgagcac

SEQ ID NO: 352994 - DNA, 30 bp, Artificial Sequence
  Synthetic oligonucleotide
gactctctaggcaatttagctaaatagcac

SEQ ID NO: 352995 - DNA, 30 bp, Artificial Sequence
  Synthetic oligonucleotide
aattaaaccgtagggtatctggtatagcac

SEQ ID NO: 352996 - DNA, 30 bp, Artificial Sequence
  Synthetic oligonucleotide
gtagctgcaaatttgtaggtaaactagcac

SEQ ID NO: 352997 - DNA, 30 bp, Artificial Sequence
  Synthetic oligonucleotide
ataaaatccgatgtcgattaagactagcac

SEQ ID NO: 352998 - DNA, 30 bp, Artificial Sequence
  Synthetic oligonucleotide
atgtacaagcttttcaagtattcgtagcac

SEQ ID NO: 352999 - DNA, 30 bp, Artificial Sequence
  Synthetic oligonucleotide
ccccgatattagtcagcttaaatttagcac

SEQ ID NO: 353000 - DNA, 30 bp, Artificial Sequence
  Synthetic oligonucleotide
tgtttacttgcgactgtttcaatttagcac

SEQ ID NO: 353001 - DNA, 31 bp, Artificial Sequence
  Synthetic oligonucleotide
aggaaactagttgcattcactattttagcac

SEQ ID NO: 353002 - DNA, 30 bp, Artificial Sequence
  Synthetic oligonucleotide
ttccagacgggcctacgttccgccacgcac

SEQ ID NO: 353003 - DNA, 30 bp, Artificial Sequence
  Synthetic oligonucleotide
gttaaactacggatgtaataatcgacgcac

SEQ ID NO: 353004 - DNA, 30 bp, Artificial Sequence
  Synthetic oligonucleotide
acggatctctaaattaatttcgatacgcac

SEQ ID NO: 353005 - DNA, 30 bp, Artificial Sequence
  Synthetic oligonucleotide
atgacccttcacccctataaataaccgcac

SEQ ID NO: 353006 - DNA, 30 bp, Artificial Sequence
  Synthetic oligonucleotide
aacggatcctagagcgccctccgaccgcac

SEQ ID NO: 353007 - DNA, 30 bp, Artificial Sequence
  Synthetic oligonucleotide
tgagccttcgcatgttaatttggaccgcac

SEQ ID NO: 353008 - DNA, 30 bp, Artificial Sequence
  Synthetic oligonucleotide
cgatctgagactgccgcatttgtaccgcac

SEQ ID NO: 353009 - DNA, 30 bp, Artificial Sequence
  Synthetic oligonucleotide
taaatattacacagacagcctttaccgcac

SEQ ID NO: 353010 - DNA, 30 bp, Artificial Sequence
  Synthetic oligonucleotide
actcctatacacgcagggctacatccgcac

SEQ ID NO: 353011 - DNA, 30 bp, Artificial Sequence
  Synthetic oligonucleotide
gtcgacataaccaccctgttctatccgcac

SEQ ID NO: 353012 - DNA, 30 bp, Artificial Sequence
  Synthetic oligonucleotide
atccaaaatacttagagttcagctccgcac

SEQ ID NO: 353013 - DNA, 30 bp, Artificial Sequence
  Synthetic oligonucleotide
aaatgaagagtccgttatctctccgcgcac

SEQ ID NO: 353014 - DNA, 30 bp, Artificial Sequence
  Synthetic oligonucleotide
ggtggctaggccagaagaccacgcgcgcac

SEQ ID NO: 353015 - DNA, 30 bp, Artificial Sequence
  Synthetic oligonucleotide
ctatgggggctaccagcagctgaggcgcac

SEQ ID NO: 353016 - DNA, 30 bp, Artificial Sequence
  Synthetic oligonucleotide
gccgcgtgacacacgcttggtagggcgcac

SEQ ID NO: 353017 - DNA, 30 bp, Artificial Sequence
  Synthetic oligonucleotide
cttcgggacgtacaccttggtatggcgcac

SEQ ID NO: 353018 - DNA, 30 bp, Artificial Sequence
  Synthetic oligonucleotide
tatatgttagaaagcatgtttactgcgcac

SEQ ID NO: 353019 - DNA, 30 bp, Artificial Sequence
  Synthetic oligonucleotide
cctacaccagaaaacgtttttgttgcgcac

SEQ ID NO: 353020 - DNA, 30 bp, Artificial Sequence
  Synthetic oligonucleotide
gagtttcgggcattatcagatcaatcgcac

SEQ ID NO: 353021 - DNA, 30 bp, Artificial Sequence
  Synthetic oligonucleotide
gatcggtagtcgcataaactgtaatcgcac

SEQ ID NO: 353022 - DNA, 30 bp, Artificial Sequence
  Synthetic oligonucleotide
gatacagtctaataaaagtcgctatcgcac

SEQ ID NO: 353023 - DNA, 30 bp, Artificial Sequence
  Synthetic oligonucleotide
agaattgaacgtccttaatcagattcgcac

SEQ ID NO: 353024 - DNA, 30 bp, Artificial Sequence
  Synthetic oligonucleotide
gcaggcggtaaacaacgaagcctttcgcac

SEQ ID NO: 353025 - DNA, 30 bp, Artificial Sequence
  Synthetic oligonucleotide
cgccgaagcgttctatactgccaaaggcac

SEQ ID NO: 353026 - DNA, 30 bp, Artificial Sequence
  Synthetic oligonucleotide
gctgcaccctcgttcagcagtcaaaggcac

SEQ ID NO: 353027 - DNA, 30 bp, Artificial Sequence
  Synthetic oligonucleotide
aacatcaccgctgagaatggacacaggcac

SEQ ID NO: 353028 - DNA, 30 bp, Artificial Sequence
  Synthetic oligonucleotide
acatcggtctagacgcactgtgacaggcac

SEQ ID NO: 353029 - DNA, 30 bp, Artificial Sequence
  Synthetic oligonucleotide
aagtgcagtcttggcaagttgtgtaggcac

SEQ ID NO: 353030 - DNA, 30 bp, Artificial Sequence
  Synthetic oligonucleotide
gccacttaatgagtgtggaaataacggcac

SEQ ID NO: 353031 - DNA, 30 bp, Artificial Sequence
  Synthetic oligonucleotide
ttaatcgcgagctattagacggcacggcac

SEQ ID NO: 353032 - DNA, 30 bp, Artificial Sequence
  Synthetic oligonucleotide
taggagactcaaaagtcccgcttacggcac

SEQ ID NO: 353033 - DNA, 30 bp, Artificial Sequence
  Synthetic oligonucleotide
cgtaactcggggcttgcacagaaccggcac

SEQ ID NO: 353034 - DNA, 30 bp, Artificial Sequence
  Synthetic oligonucleotide
cggtttcctgccgatgacttaccccggcac

SEQ ID NO: 353035 - DNA, 30 bp, Artificial Sequence
  Synthetic oligonucleotide
aaagcgcctaccgttatcagatcccggcac

SEQ ID NO: 353036 - DNA, 30 bp, Artificial Sequence
  Synthetic oligonucleotide
ccgtggacgcaatgttcacctaggcggcac

SEQ ID NO: 353037 - DNA, 30 bp, Artificial Sequence
  Synthetic oligonucleotide
atattcaagaaccgtgggcaggggcggcac

SEQ ID NO: 353038 - DNA, 30 bp, Artificial Sequence
  Synthetic oligonucleotide
aggtggcaccggggggcttcaaatcggcac

SEQ ID NO: 353039 - DNA, 30 bp, Artificial Sequence
  Synthetic oligonucleotide
catgctagactgtattgtagcacagggcac

SEQ ID NO: 353040 - DNA, 30 bp, Artificial Sequence
  Synthetic oligonucleotide
gctaagaggagcaggatctaacgagggcac

SEQ ID NO: 353041 - DNA, 30 bp, Artificial Sequence
  Synthetic oligonucleotide
ttggtgcgttattgggagatggtagggcac

SEQ ID NO: 353042 - DNA, 30 bp, Artificial Sequence
  Synthetic oligonucleotide
ccgctagagcattaatcctgagacgggcac

SEQ ID NO: 353043 - DNA, 30 bp, Artificial Sequence
  Synthetic oligonucleotide
catggatgtttagcatgtggttacgggcac

SEQ ID NO: 353044 - DNA, 30 bp, Artificial Sequence
  Synthetic oligonucleotide
ggctttgcccaattcgtgggcctcgggcac

SEQ ID NO: 353045 - DNA, 30 bp, Artificial Sequence
  Synthetic oligonucleotide
aggacattggactttgttgtataggggcac

SEQ ID NO: 353046 - DNA, 30 bp, Artificial Sequence
  Synthetic oligonucleotide
aatatctgtgcgaatttatgtgcggggcac

SEQ ID NO: 353047 - DNA, 30 bp, Artificial Sequence
  Synthetic oligonucleotide
agcagcacagctcctcctcgacatgggcac

SEQ ID NO: 353048 - DNA, 30 bp, Artificial Sequence
  Synthetic oligonucleotide
tctccggggtaagaactgaagtttgggcac

SEQ ID NO: 353049 - DNA, 30 bp, Artificial Sequence
  Synthetic oligonucleotide
aaaagatttaataggctactatgatggcac

SEQ ID NO: 353050 - DNA, 30 bp, Artificial Sequence
  Synthetic oligonucleotide
gcaacctgtcgcccgtagagatactggcac

SEQ ID NO: 353051 - DNA, 30 bp, Artificial Sequence
  Synthetic oligonucleotide
cggtttatgcgtaagcagagacagtggcac

SEQ ID NO: 353052 - DNA, 30 bp, Artificial Sequence
  Synthetic oligonucleotide
gcaaacacaatggggttcccgatgtggcac

SEQ ID NO: 353053 - DNA, 30 bp, Artificial Sequence
  Synthetic oligonucleotide
atcgtaagggcattttttgacgattggcac

SEQ ID NO: 353054 - DNA, 30 bp, Artificial Sequence
  Synthetic oligonucleotide
atatatccaacatttggtgagtattggcac

SEQ ID NO: 353055 - DNA, 30 bp, Artificial Sequence
  Synthetic oligonucleotide
cagagctaggcctgctcgtcgtcttggcac

SEQ ID NO: 353056 - DNA, 30 bp, Artificial Sequence
  Synthetic oligonucleotide
ggtcttgcgcggtgggtatgcagttggcac

SEQ ID NO: 353057 - DNA, 30 bp, Artificial Sequence
  Synthetic oligonucleotide
accgattctgggttaaatgctggtatgcac

SEQ ID NO: 353058 - DNA, 30 bp, Artificial Sequence
  Synthetic oligonucleotide
cggtatttctaagattaaagaattatgcac

SEQ ID NO: 353059 - DNA, 30 bp, Artificial Sequence
  Synthetic oligonucleotide
taagtaaatcatttagatgtgcgcctgcac

SEQ ID NO: 353060 - DNA, 30 bp, Artificial Sequence
  Synthetic oligonucleotide
ttatgtagacaggtggcgcaatgcctgcac

SEQ ID NO: 353061 - DNA, 30 bp, Artificial Sequence
  Synthetic oligonucleotide
gagtagccatgagtaaactgccagctgcac

SEQ ID NO: 353062 - DNA, 30 bp, Artificial Sequence
  Synthetic oligonucleotide
caatgacgtatgtattaggaattgctgcac

SEQ ID NO: 353063 - DNA, 30 bp, Artificial Sequence
  Synthetic oligonucleotide
cctaaagctttagcaactgcaactctgcac

SEQ ID NO: 353064 - DNA, 30 bp, Artificial Sequence
  Synthetic oligonucleotide
cgacggacggtccccgcgggatctctgcac

SEQ ID NO: 353065 - DNA, 30 bp, Artificial Sequence
  Synthetic oligonucleotide
ttcacaaataataattgcgtatcagtgcac

SEQ ID NO: 353066 - DNA, 30 bp, Artificial Sequence
  Synthetic oligonucleotide
taccgacgggcggtgtagtcagccgtgcac

SEQ ID NO: 353067 - DNA, 30 bp, Artificial Sequence
  Synthetic oligonucleotide
ttgcaatagagccagtagatcgcggtgcac

SEQ ID NO: 353068 - DNA, 30 bp, Artificial Sequence
  Synthetic oligonucleotide
tttcccgcagatggggggcgcagggtgcac

SEQ ID NO: 353069 - DNA, 30 bp, Artificial Sequence
  Synthetic oligonucleotide
gggccacgctccggtttacacggggtgcac

SEQ ID NO: 353070 - DNA, 30 bp, Artificial Sequence
  Synthetic oligonucleotide
gattgcaatggaggacaggaacaattgcac

SEQ ID NO: 353071 - DNA, 30 bp, Artificial Sequence
  Synthetic oligonucleotide
gcatctgaataccgaaagtatgccttgcac

SEQ ID NO: 353072 - DNA, 30 bp, Artificial Sequence
  Synthetic oligonucleotide
taaaatttggtcagggcggatcgcttgcac

SEQ ID NO: 353073 - DNA, 30 bp, Artificial Sequence
  Synthetic oligonucleotide
agacacattggtttagtcggtaagttgcac

SEQ ID NO: 353074 - DNA, 30 bp, Artificial Sequence
  Synthetic oligonucleotide
gacgcccaccataaattgatgacaaatcac

SEQ ID NO: 353075 - DNA, 30 bp, Artificial Sequence
  Synthetic oligonucleotide
gcgtccgggttcaatccaaggcacaatcac

SEQ ID NO: 353076 - DNA, 30 bp, Artificial Sequence
  Synthetic oligonucleotide
tctttcccagtaagcattgagcgcaatcac

SEQ ID NO: 353077 - DNA, 30 bp, Artificial Sequence
  Synthetic oligonucleotide
tcgttcactgcagggtaggcggtcaatcac

SEQ ID NO: 353078 - DNA, 30 bp, Artificial Sequence
  Synthetic oligonucleotide
ggagattctcggtacaatcgtgcgaatcac

SEQ ID NO: 353079 - DNA, 30 bp, Artificial Sequence
  Synthetic oligonucleotide
gtagtttttcccggtaggtctccacatcac

SEQ ID NO: 353080 - DNA, 29 bp, Artificial Sequence
  Synthetic oligonucleotide
gcttgctatcgatgggcgcggcacatcac

SEQ ID NO: 353081 - DNA, 30 bp, Artificial Sequence
  Synthetic oligonucleotide
tgtcttctaccgcttttcaggcgacatcac

SEQ ID NO: 353082 - DNA, 30 bp, Artificial Sequence
  Synthetic oligonucleotide
agctgctgtgaagactttataggacatcac

SEQ ID NO: 353083 - DNA, 30 bp, Artificial Sequence
  Synthetic oligonucleotide
gtatcgcatgttgcattttgcatacatcac

SEQ ID NO: 353084 - DNA, 30 bp, Artificial Sequence
  Synthetic oligonucleotide
ttcttaaagattggtttaaccgaccatcac

SEQ ID NO: 353085 - DNA, 30 bp, Artificial Sequence
  Synthetic oligonucleotide
ggccagcaatctctacctatgggccatcac

SEQ ID NO: 353086 - DNA, 30 bp, Artificial Sequence
  Synthetic oligonucleotide
cgcgccgacaataattgtcacctccatcac

SEQ ID NO: 353087 - DNA, 30 bp, Artificial Sequence
  Synthetic oligonucleotide
gtttagaggtcaagtgagggaaagcatcac

SEQ ID NO: 353088 - DNA, 30 bp, Artificial Sequence
  Synthetic oligonucleotide
gtgggggactagaataaatccccgcatcac

SEQ ID NO: 353089 - DNA, 30 bp, Artificial Sequence
  Synthetic oligonucleotide
aatagactatcggatgaatcagggcatcac

SEQ ID NO: 353090 - DNA, 30 bp, Artificial Sequence
  Synthetic oligonucleotide
gtgaattgcaccgagtcatctttgcatcac

SEQ ID NO: 353091 - DNA, 30 bp, Artificial Sequence
  Synthetic oligonucleotide
accgtacctcgacgcattatagttcatcac

SEQ ID NO: 353092 - DNA, 30 bp, Artificial Sequence
  Synthetic oligonucleotide
tgtaggtctcataggctgcaaagcgatcac

SEQ ID NO: 353093 - DNA, 30 bp, Artificial Sequence
  Synthetic oligonucleotide
ggtccggtacgccgtttcaccctcgatcac

SEQ ID NO: 353094 - DNA, 30 bp, Artificial Sequence
  Synthetic oligonucleotide
tcaggttgaccctacgtcgctacatatcac

SEQ ID NO: 353095 - DNA, 30 bp, Artificial Sequence
  Synthetic oligonucleotide
gatttccgtctccgtcaccgtctctatcac

SEQ ID NO: 353096 - DNA, 30 bp, Artificial Sequence
  Synthetic oligonucleotide
agttttgagtcgactgtctataaaactcac

SEQ ID NO: 353097 - DNA, 30 bp, Artificial Sequence
  Synthetic oligonucleotide
gttaaacgttctcattgaatggaaactcac

SEQ ID NO: 353098 - DNA, 30 bp, Artificial Sequence
  Synthetic oligonucleotide
cagatccgatagagctttattgacactcac

SEQ ID NO: 353099 - DNA, 30 bp, Artificial Sequence
  Synthetic oligonucleotide
ccatttatttttataattggagttactcac

SEQ ID NO: 353100 - DNA, 30 bp, Artificial Sequence
  Synthetic oligonucleotide
gtgttacggcagaaatctaagacacctcac

SEQ ID NO: 353101 - DNA, 30 bp, Artificial Sequence
  Synthetic oligonucleotide
taagaaatcttgacaaaatgtgcacctcac

SEQ ID NO: 353102 - DNA, 31 bp, Artificial Sequence
  Synthetic oligonucleotide
gaccgtctggtagacaggctaacagcctcac

SEQ ID NO: 353103 - DNA, 30 bp, Artificial Sequence
  Synthetic oligonucleotide
aattaggtaggcaccgctatgtcgcctcac

SEQ ID NO: 353104 - DNA, 30 bp, Artificial Sequence
  Synthetic oligonucleotide
tagctacagaatcctcggtgattgcctcac

SEQ ID NO: 353105 - DNA, 30 bp, Artificial Sequence
  Synthetic oligonucleotide
atttaagtgcctgcaagccagtcagctcac

SEQ ID NO: 353106 - DNA, 30 bp, Artificial Sequence
  Synthetic oligonucleotide
ctgtcccggctctgcattcttgccgctcac

SEQ ID NO: 353107 - DNA, 30 bp, Artificial Sequence
  Synthetic oligonucleotide
cgatctcagcttcaagactgaatcgctcac

SEQ ID NO: 353108 - DNA, 30 bp, Artificial Sequence
  Synthetic oligonucleotide
ctagcacatctactcttgtcctgtgctcac

SEQ ID NO: 353109 - DNA, 30 bp, Artificial Sequence
  Synthetic oligonucleotide
tgtccgtccagcctatatacccttgctcac

SEQ ID NO: 353110 - DNA, 30 bp, Artificial Sequence
  Synthetic oligonucleotide
gaaggtgagcaaagatcaaatcttgctcac

SEQ ID NO: 353111 - DNA, 30 bp, Artificial Sequence
  Synthetic oligonucleotide
ctaacagacctaatgggtctttttgctcac

SEQ ID NO: 353112 - DNA, 30 bp, Artificial Sequence
  Synthetic oligonucleotide
cctggtaactactcgtgtacatactctcac

SEQ ID NO: 353113 - DNA, 30 bp, Artificial Sequence
  Synthetic oligonucleotide
agtgtatgtgttgtcagtaaacgctctcac

SEQ ID NO: 353114 - DNA, 30 bp, Artificial Sequence
  Synthetic oligonucleotide
cggacagacagcttaaggcgtccgtctcac

SEQ ID NO: 353115 - DNA, 30 bp, Artificial Sequence
  Synthetic oligonucleotide
cacgaaggcataacccggcctcggtctcac

SEQ ID NO: 353116 - DNA, 30 bp, Artificial Sequence
  Synthetic oligonucleotide
ttatagccgtcgagttacgttgggtctcac

SEQ ID NO: 353117 - DNA, 30 bp, Artificial Sequence
  Synthetic oligonucleotide
ttcaactagcccggaagaaacggcagtcac

SEQ ID NO: 353118 - DNA, 30 bp, Artificial Sequence
  Synthetic oligonucleotide
gaatcacccatcgtgagatgcgtcagtcac

SEQ ID NO: 353119 - DNA, 30 bp, Artificial Sequence
  Synthetic oligonucleotide
gtgctaagctccaaatatgacttcagtcac

SEQ ID NO: 353120 - DNA, 30 bp, Artificial Sequence
  Synthetic oligonucleotide
acattagtccccgcggcaacttcgagtcac

SEQ ID NO: 353121 - DNA, 30 bp, Artificial Sequence
  Synthetic oligonucleotide
gcatgcatgtcatgtcttatatggagtcac

SEQ ID NO: 353122 - DNA, 30 bp, Artificial Sequence
  Synthetic oligonucleotide
gcactttacgattgagcgcctgtgagtcac

SEQ ID NO: 353123 - DNA, 30 bp, Artificial Sequence
  Synthetic oligonucleotide
tagcgcagcacttatttggttaatagtcac

SEQ ID NO: 353124 - DNA, 30 bp, Artificial Sequence
  Synthetic oligonucleotide
cccgcgctatttctcttatatacacgtcac

SEQ ID NO: 353125 - DNA, 30 bp, Artificial Sequence
  Synthetic oligonucleotide
tctacctggatcaggtgctgtacacgtcac

SEQ ID NO: 353126 - DNA, 30 bp, Artificial Sequence
  Synthetic oligonucleotide
ttattcggcacacgctcctattcacgtcac

SEQ ID NO: 353127 - DNA, 30 bp, Artificial Sequence
  Synthetic oligonucleotide
tagtcgcgtgctactaaaagcctacgtcac

SEQ ID NO: 353128 - DNA, 30 bp, Artificial Sequence
  Synthetic oligonucleotide
ctcagataacgccagggctgttaccgtcac

SEQ ID NO: 353129 - DNA, 30 bp, Artificial Sequence
  Synthetic oligonucleotide
tggaacgctttattgcttggcgagcgtcac

SEQ ID NO: 353130 - DNA, 30 bp, Artificial Sequence
  Synthetic oligonucleotide
gacagctcatgaccggcaacgcaaggtcac

SEQ ID NO: 353131 - DNA, 30 bp, Artificial Sequence
  Synthetic oligonucleotide
tggtgtccctcaaaagtactatgaggtcac

SEQ ID NO: 353132 - DNA, 30 bp, Artificial Sequence
  Synthetic oligonucleotide
ctttccgcggtgttcagtgcttacggtcac

SEQ ID NO: 353133 - DNA, 30 bp, Artificial Sequence
  Synthetic oligonucleotide
tcgaatcggggaatgcggcacactggtcac

SEQ ID NO: 353134 - DNA, 30 bp, Artificial Sequence
  Synthetic oligonucleotide
atgcccatggcacggaatcaaatctgtcac

SEQ ID NO: 353135 - DNA, 30 bp, Artificial Sequence
  Synthetic oligonucleotide
gaagcgcgaatgtaatggccttagtgtcac

SEQ ID NO: 353136 - DNA, 29 bp, Artificial Sequence
  Synthetic oligonucleotide
ttaacaaagggtgttctgaaaggtgtcac

SEQ ID NO: 353137 - DNA, 30 bp, Artificial Sequence
  Synthetic oligonucleotide
cccccgataactcgtaaaagttgttgtcac

SEQ ID NO: 353138 - DNA, 30 bp, Artificial Sequence
  Synthetic oligonucleotide
aagggctttatgtgacttccttaaattcac

SEQ ID NO: 353139 - DNA, 30 bp, Artificial Sequence
  Synthetic oligonucleotide
gttaacgaagccaagcaagtaataattcac

SEQ ID NO: 353140 - DNA, 30 bp, Artificial Sequence
  Synthetic oligonucleotide
tcaatcttaaaaaattttacgaatattcac

SEQ ID NO: 353141 - DNA, 30 bp, Artificial Sequence
  Synthetic oligonucleotide
gcttcagcttactgtaatatgtaacttcac

SEQ ID NO: 353142 - DNA, 30 bp, Artificial Sequence
  Synthetic oligonucleotide
ggactataagcccagatcgtacgtcttcac

SEQ ID NO: 353143 - DNA, 30 bp, Artificial Sequence
  Synthetic oligonucleotide
cagttttggaatcagtacgactaagttcac

SEQ ID NO: 353144 - DNA, 30 bp, Artificial Sequence
  Synthetic oligonucleotide
gcagggaacacaaatgacagtagagttcac

SEQ ID NO: 353145 - DNA, 30 bp, Artificial Sequence
  Synthetic oligonucleotide
acccatggcctttcgaccgacggagttcac

SEQ ID NO: 353146 - DNA, 30 bp, Artificial Sequence
  Synthetic oligonucleotide
tccggaattaatttcagaccaggcgttcac

SEQ ID NO: 353147 - DNA, 30 bp, Artificial Sequence
  Synthetic oligonucleotide
ccaagatcgagtaagctaggtctcgttcac

SEQ ID NO: 353148 - DNA, 30 bp, Artificial Sequence
  Synthetic oligonucleotide
attgtgtgtagataaattcgcttcgttcac

SEQ ID NO: 353149 - DNA, 30 bp, Artificial Sequence
  Synthetic oligonucleotide
tgcaggtgacatacttcgtgtctggttcac

SEQ ID NO: 353150 - DNA, 30 bp, Artificial Sequence
  Synthetic oligonucleotide
tgtgtaggttccattcaccaaagtgttcac

SEQ ID NO: 353151 - DNA, 30 bp, Artificial Sequence
  Synthetic oligonucleotide
ctacttgctcgctaactaggccgatttcac

SEQ ID NO: 353152 - DNA, 30 bp, Artificial Sequence
  Synthetic oligonucleotide
tcatcgaggtactgtctaacgttatttcac

SEQ ID NO: 353153 - DNA, 30 bp, Artificial Sequence
  Synthetic oligonucleotide
aggtcaactcagtatgattggtactttcac

SEQ ID NO: 353154 - DNA, 30 bp, Artificial Sequence
  Synthetic oligonucleotide
gggttgtaatgttatcgtctgccctttcac

SEQ ID NO: 353155 - DNA, 30 bp, Artificial Sequence
  Synthetic oligonucleotide
aaaaccgagcgagtaagcgctagttttcac

SEQ ID NO: 353156 - DNA, 30 bp, Artificial Sequence
  Synthetic oligonucleotide
gactcgcacatctggggataatgttttcac

SEQ ID NO: 353157 - DNA, 30 bp, Artificial Sequence
  Synthetic oligonucleotide
gaataactcctaagttaatatatttttcac

SEQ ID NO: 353158 - DNA, 34 bp, Artificial Sequence
  Synthetic oligonucleotide
gatcctagaccaccacgtgtccatcagaaaagac

SEQ ID NO: 353159 - DNA, 34 bp, Artificial Sequence
  Synthetic oligonucleotide
gatactagacccccacgtgtccatcagaaaagac

SEQ ID NO: 353160 - DNA, 30 bp, Artificial Sequence
  Synthetic oligonucleotide
gctcaagagccaggtggatcatgaaaagac

SEQ ID NO: 353161 - DNA, 30 bp, Artificial Sequence
  Synthetic oligonucleotide
cgatcgtctcgtttttgttagcacaaagac

SEQ ID NO: 353162 - DNA, 30 bp, Artificial Sequence
  Synthetic oligonucleotide
catgattcaggtttacgatctaccaaagac

SEQ ID NO: 353163 - DNA, 30 bp, Artificial Sequence
  Synthetic oligonucleotide
atgagtcaatagcaactgtggagcaaagac

SEQ ID NO: 353164 - DNA, 30 bp, Artificial Sequence
  Synthetic oligonucleotide
gaggcataatcctacaactaggtcaaagac

SEQ ID NO: 353165 - DNA, 30 bp, Artificial Sequence
  Synthetic oligonucleotide
atatcatttggtcctatcagttagaaagac

SEQ ID NO: 353166 - DNA, 30 bp, Artificial Sequence
  Synthetic oligonucleotide
agcgagtccagtctcgaactttagaaagac

SEQ ID NO: 353167 - DNA, 30 bp, Artificial Sequence
  Synthetic oligonucleotide
ggacgcttggccagaccagagtttaaagac

SEQ ID NO: 353168 - DNA, 30 bp, Artificial Sequence
  Synthetic oligonucleotide
ctcggaagtggtcgtgacccaggacaagac

SEQ ID NO: 353169 - DNA, 30 bp, Artificial Sequence
  Synthetic oligonucleotide
aaattactattaggacacgtcatccaagac

SEQ ID NO: 353170 - DNA, 30 bp, Artificial Sequence
  Synthetic oligonucleotide
tttcgatagtcgtggaatatcacgcaagac

SEQ ID NO: 353171 - DNA, 30 bp, Artificial Sequence
  Synthetic oligonucleotide
gtgctcagaggtagcactcattggcaagac

SEQ ID NO: 353172 - DNA, 30 bp, Artificial Sequence
  Synthetic oligonucleotide
actacagcgagcggtacttgcacggaagac

SEQ ID NO: 353173 - DNA, 30 bp, Artificial Sequence
  Synthetic oligonucleotide
cccgcacccacccgactaataacataagac

SEQ ID NO: 353174 - DNA, 30 bp, Artificial Sequence
  Synthetic oligonucleotide
agttcctaacgacgccgtaggggataagac

SEQ ID NO: 353175 - DNA, 30 bp, Artificial Sequence
  Synthetic oligonucleotide
atgcatgaaaacaaggccgtacgctaagac

SEQ ID NO: 353176 - DNA, 30 bp, Artificial Sequence
  Synthetic oligonucleotide
tctgtgggagatcacctcttaggctaagac

SEQ ID NO: 353177 - DNA, 30 bp, Artificial Sequence
  Synthetic oligonucleotide
ggcctaagcgctgagctcttgccgtaagac

SEQ ID NO: 353178 - DNA, 30 bp, Artificial Sequence
  Synthetic oligonucleotide
gtactggatccaatcacttacgggtaagac

SEQ ID NO: 353179 - DNA, 30 bp, Artificial Sequence
  Synthetic oligonucleotide
ctattagaacaatattgtgagatgtaagac

SEQ ID NO: 353180 - DNA, 30 bp, Artificial Sequence
  Synthetic oligonucleotide
acatgcgtgtatccgcgtgattcaacagac

SEQ ID NO: 353181 - DNA, 30 bp, Artificial Sequence
  Synthetic oligonucleotide
acccacaatgcttggcggccgcgcacagac

SEQ ID NO: 353182 - DNA, 30 bp, Artificial Sequence
  Synthetic oligonucleotide
ttgcacgatgagggcctttccgcgacagac

SEQ ID NO: 353183 - DNA, 30 bp, Artificial Sequence
  Synthetic oligonucleotide
tgcgaatactcgactggcagtctgacagac

SEQ ID NO: 353184 - DNA, 30 bp, Artificial Sequence
  Synthetic oligonucleotide
ttacagctgtccgacgacttcgttacagac

SEQ ID NO: 353185 - DNA, 30 bp, Artificial Sequence
  Synthetic oligonucleotide
tggaggggcaaacaatgtggataaccagac

SEQ ID NO: 353186 - DNA, 30 bp, Artificial Sequence
  Synthetic oligonucleotide
ccatggattggattcgggcggttgccagac

SEQ ID NO: 353187 - DNA, 30 bp, Artificial Sequence
  Synthetic oligonucleotide
tatgaatgtacgtatgctctccgggcagac

SEQ ID NO: 353188 - DNA, 30 bp, Artificial Sequence
  Synthetic oligonucleotide
tatcagtaccggcaccaaaggatggcagac

SEQ ID NO: 353189 - DNA, 30 bp, Artificial Sequence
  Synthetic oligonucleotide
tgcatactacctgtccaatttatggcagac

SEQ ID NO: 353190 - DNA, 30 bp, Artificial Sequence
  Synthetic oligonucleotide
tattattccgcttatggtcagctggcagac

SEQ ID NO: 353191 - DNA, 30 bp, Artificial Sequence
  Synthetic oligonucleotide
accatttaaaaatgaatatgggttgcagac

SEQ ID NO: 353192 - DNA, 30 bp, Artificial Sequence
  Synthetic oligonucleotide
ggtacgtatgtcacataatggtttgcagac

SEQ ID NO: 353193 - DNA, 30 bp, Artificial Sequence
  Synthetic oligonucleotide
cgttgaagtcccgtagctcccacatcagac

SEQ ID NO: 353194 - DNA, 30 bp, Artificial Sequence
  Synthetic oligonucleotide
tctggctgtaagtgttagaggtcatcagac

SEQ ID NO: 353195 - DNA, 30 bp, Artificial Sequence
  Synthetic oligonucleotide
tagacagcggatttatgggttatatcagac

SEQ ID NO: 353196 - DNA, 30 bp, Artificial Sequence
  Synthetic oligonucleotide
aggaataaagagacggtgctgtcttcagac

SEQ ID NO: 353197 - DNA, 30 bp, Artificial Sequence
  Synthetic oligonucleotide
tcataggatatccgatagagtttttcagac

SEQ ID NO: 353198 - DNA, 30 bp, Artificial Sequence
  Synthetic oligonucleotide
aatttcaatggcaacgtgtttacgagagac

SEQ ID NO: 353199 - DNA, 30 bp, Artificial Sequence
  Synthetic oligonucleotide
ttcggtaggttgctagtacatgatagagac

SEQ ID NO: 353200 - DNA, 30 bp, Artificial Sequence
  Synthetic oligonucleotide
ggctagagaatgccgcctcttggtagagac

SEQ ID NO: 353201 - DNA, 30 bp, Artificial Sequence
  Synthetic oligonucleotide
agccgtacaaccggcttcgaccaacgagac

SEQ ID NO: 353202 - DNA, 30 bp, Artificial Sequence
  Synthetic oligonucleotide
gaacgcgcgatgtgataccctccccgagac

SEQ ID NO: 353203 - DNA, 30 bp, Artificial Sequence
  Synthetic oligonucleotide
gctgacgctgggtagacattctgccgagac

SEQ ID NO: 353204 - DNA, 30 bp, Artificial Sequence
  Synthetic oligonucleotide
tgtactataggctgagccacgacgcgagac

SEQ ID NO: 353205 - DNA, 30 bp, Artificial Sequence
  Synthetic oligonucleotide
ggtggatcggcccaacgcggaggtcgagac

SEQ ID NO: 353206 - DNA, 30 bp, Artificial Sequence
  Synthetic oligonucleotide
tccatcaatggcttctatagtgaaggagac

SEQ ID NO: 353207 - DNA, 30 bp, Artificial Sequence
  Synthetic oligonucleotide
aaatctacctagagaattggcccaggagac

SEQ ID NO: 353208 - DNA, 30 bp, Artificial Sequence
  Synthetic oligonucleotide
cgaacgcgtgtagtcatcggaaccggagac

SEQ ID NO: 353209 - DNA, 30 bp, Artificial Sequence
  Synthetic oligonucleotide
gagaggccctcaagttgtatgaccggagac

SEQ ID NO: 353210 - DNA, 30 bp, Artificial Sequence
  Synthetic oligonucleotide
cctttgccgaactttctcgtgccgggagac

SEQ ID NO: 353211 - DNA, 30 bp, Artificial Sequence
  Synthetic oligonucleotide
acgtgtcgcgaagctagcgctccgggagac

SEQ ID NO: 353212 - DNA, 30 bp, Artificial Sequence
  Synthetic oligonucleotide
agtaaagtacctctcctagcaaatggagac

SEQ ID NO: 353213 - DNA, 30 bp, Artificial Sequence
  Synthetic oligonucleotide
tctcaggacggcttaatatcagagtgagac

SEQ ID NO: 353214 - DNA, 30 bp, Artificial Sequence
  Synthetic oligonucleotide
agatatctggtaccttaggagtattgagac

SEQ ID NO: 353215 - DNA, 30 bp, Artificial Sequence
  Synthetic oligonucleotide
gcgtctcaaaaagactttccgtattgagac

SEQ ID NO: 353216 - DNA, 30 bp, Artificial Sequence
  Synthetic oligonucleotide
tagtaattgtagtccttgtcacacatagac

SEQ ID NO: 353217 - DNA, 30 bp, Artificial Sequence
  Synthetic oligonucleotide
acccctagatcctcaacattaagcatagac

SEQ ID NO: 353218 - DNA, 30 bp, Artificial Sequence
  Synthetic oligonucleotide
atattagtgcggctttttgaaggcatagac

SEQ ID NO: 353219 - DNA, 30 bp, Artificial Sequence
  Synthetic oligonucleotide
atgtgaggccataattttggaacgatagac

SEQ ID NO: 353220 - DNA, 30 bp, Artificial Sequence
  Synthetic oligonucleotide
gcacacctcaagcgacccgccaggatagac

SEQ ID NO: 353221 - DNA, 30 bp, Artificial Sequence
  Synthetic oligonucleotide
ctcggttcgggagcacccagctggatagac

SEQ ID NO: 353222 - DNA, 30 bp, Artificial Sequence
  Synthetic oligonucleotide
tagaggagcgccctctttaggggtatagac

SEQ ID NO: 353223 - DNA, 30 bp, Artificial Sequence
  Synthetic oligonucleotide
tcaacacaagattgaatatctacactagac

SEQ ID NO: 353224 - DNA, 30 bp, Artificial Sequence
  Synthetic oligonucleotide
cctaaaaagcctccgtcgtgccacctagac

SEQ ID NO: 353225 - DNA, 30 bp, Artificial Sequence
  Synthetic oligonucleotide
gcccatgtagcagatgtaacaaggctagac

SEQ ID NO: 353226 - DNA, 30 bp, Artificial Sequence
  Synthetic oligonucleotide
cgtaaatgtactatgggaagtaatctagac

SEQ ID NO: 353227 - DNA, 30 bp, Artificial Sequence
  Synthetic oligonucleotide
atctagtagggttgcaaaggggctctagac

SEQ ID NO: 353228 - DNA, 30 bp, Artificial Sequence
  Synthetic oligonucleotide
gtactctaggaggtgtgccacggtctagac

SEQ ID NO: 353229 - DNA, 31 bp, Artificial Sequence
  Synthetic oligonucleotide
ttctatgaagagatgtgtcaatttagtagac

SEQ ID NO: 353230 - DNA, 30 bp, Artificial Sequence
  Synthetic oligonucleotide
atattaagacgccatgaaacccacgtagac

SEQ ID NO: 353231 - DNA, 30 bp, Artificial Sequence
  Synthetic oligonucleotide
tctgtagttaagacagatggcaaggtagac

SEQ ID NO: 353232 - DNA, 30 bp, Artificial Sequence
  Synthetic oligonucleotide
ggtcactcgattgacgtggatatggtagac

SEQ ID NO: 353233 - DNA, 30 bp, Artificial Sequence
  Synthetic oligonucleotide
gctgttcttcttgactaaggaaatgtagac

SEQ ID NO: 353234 - DNA, 30 bp, Artificial Sequence
  Synthetic oligonucleotide
ttgtgttgtaatctaccccacggtgtagac

SEQ ID NO: 353235 - DNA, 30 bp, Artificial Sequence
  Synthetic oligonucleotide
gtaacataattctacaataaagaattagac

SEQ ID NO: 353236 - DNA, 30 bp, Artificial Sequence
  Synthetic oligonucleotide
gggagatgctagcgaaggctagtattagac

SEQ ID NO: 353237 - DNA, 30 bp, Artificial Sequence
  Synthetic oligonucleotide
agatgcgctatggtttcatccgtgttagac

SEQ ID NO: 353238 - DNA, 30 bp, Artificial Sequence
  Synthetic oligonucleotide
catggtcaaagcaattgttccgtgttagac

SEQ ID NO: 353239 - DNA, 30 bp, Artificial Sequence
  Synthetic oligonucleotide
acgcgtgcctaaatcgtcatgcctttagac

SEQ ID NO: 353240 - DNA, 30 bp, Artificial Sequence
  Synthetic oligonucleotide
tgtatgggtatatactgcatttgtttagac

SEQ ID NO: 353241 - DNA, 30 bp, Artificial Sequence
  Synthetic oligonucleotide
gctctacaccgcatgtgtatctttttagac

SEQ ID NO: 353242 - DNA, 30 bp, Artificial Sequence
  Synthetic oligonucleotide
tcaggagattatttggaaacccaaaacgac

SEQ ID NO: 353243 - DNA, 30 bp, Artificial Sequence
  Synthetic oligonucleotide
ggttcacggtccccttctcgttcaaacgac

SEQ ID NO: 353244 - DNA, 30 bp, Artificial Sequence
  Synthetic oligonucleotide
tatgtggtgtatccacataacataaacgac

SEQ ID NO: 353245 - DNA, 30 bp, Artificial Sequence
  Synthetic oligonucleotide
tcctaagcaagtagcgcaaccgtaaacgac

SEQ ID NO: 353246 - DNA, 30 bp, Artificial Sequence
  Synthetic oligonucleotide
gcagttggggtcctctcgatatgcaacgac

SEQ ID NO: 353247 - DNA, 30 bp, Artificial Sequence
  Synthetic oligonucleotide
catcctggactttttttacaagcgaacgac

SEQ ID NO: 353248 - DNA, 30 bp, Artificial Sequence
  Synthetic oligonucleotide
gaatatttagggaatcatacagcgaacgac

SEQ ID NO: 353249 - DNA, 30 bp, Artificial Sequence
  Synthetic oligonucleotide
aagattccacgtctgcatcacgataacgac

SEQ ID NO: 353250 - DNA, 30 bp, Artificial Sequence
  Synthetic oligonucleotide
acgcagcgatatatatgacaccctaacgac

SEQ ID NO: 353251 - DNA, 30 bp, Artificial Sequence
  Synthetic oligonucleotide
gtttaacgtgactagttagggtctaacgac

SEQ ID NO: 353252 - DNA, 30 bp, Artificial Sequence
  Synthetic oligonucleotide
tctctctgtcaagacacggtcgttaacgac

SEQ ID NO: 353253 - DNA, 30 bp, Artificial Sequence
  Synthetic oligonucleotide
ccggtaggaaggcacggcacacagcacgac

SEQ ID NO: 353254 - DNA, 30 bp, Artificial Sequence
  Synthetic oligonucleotide
acattaacgtaataccgttagcatcacgac

SEQ ID NO: 353255 - DNA, 30 bp, Artificial Sequence
  Synthetic oligonucleotide
cggtttagcgaaggcgatccatatcacgac

SEQ ID NO: 353256 - DNA, 30 bp, Artificial Sequence
  Synthetic oligonucleotide
ttctgaagtagactaggcgatattcacgac

SEQ ID NO: 353257 - DNA, 30 bp, Artificial Sequence
  Synthetic oligonucleotide
aagctttgatttcacacaactcacgacgac

SEQ ID NO: 353258 - DNA, 30 bp, Artificial Sequence
  Synthetic oligonucleotide
tcgcccgttatagtcgaaagtgtcgacgac

SEQ ID NO: 353259 - DNA, 30 bp, Artificial Sequence
  Synthetic oligonucleotide
attagcacgtcaattagctgttaggacgac

SEQ ID NO: 353260 - DNA, 30 bp, Artificial Sequence
  Synthetic oligonucleotide
acagagccccggtgtgaagagggggacgac

SEQ ID NO: 353261 - DNA, 30 bp, Artificial Sequence
  Synthetic oligonucleotide
gcagcgtaggattacctcgcgtatgacgac

SEQ ID NO: 353262 - DNA, 30 bp, Artificial Sequence
  Synthetic oligonucleotide
acgcttaccaccagttcaccgcctgacgac

SEQ ID NO: 353263 - DNA, 30 bp, Artificial Sequence
  Synthetic oligonucleotide
ccagcaataatatccgcgcacgctgacgac

SEQ ID NO: 353264 - DNA, 30 bp, Artificial Sequence
  Synthetic oligonucleotide
cgtggttgaaagtatctgggaggtgacgac

SEQ ID NO: 353265 - DNA, 30 bp, Artificial Sequence
  Synthetic oligonucleotide
gaatgattgcgcatccacgagtttgacgac

SEQ ID NO: 353266 - DNA, 30 bp, Artificial Sequence
  Synthetic oligonucleotide
cgcccggacttcacggtggataactacgac

SEQ ID NO: 353267 - DNA, 30 bp, Artificial Sequence
  Synthetic oligonucleotide
gatgccctggctagggggtcctcctacgac

SEQ ID NO: 353268 - DNA, 30 bp, Artificial Sequence
  Synthetic oligonucleotide
tgtccgttcctcacaggctaagcgtacgac

SEQ ID NO: 353269 - DNA, 30 bp, Artificial Sequence
  Synthetic oligonucleotide
ttatggggttagtctacaagggggtacgac

SEQ ID NO: 353270 - DNA, 30 bp, Artificial Sequence
  Synthetic oligonucleotide
gccgacccttcatcaataaagccttacgac

SEQ ID NO: 353271 - DNA, 30 bp, Artificial Sequence
  Synthetic oligonucleotide
tgaatggaggaagattgcggggtttacgac

SEQ ID NO: 353272 - DNA, 30 bp, Artificial Sequence
  Synthetic oligonucleotide
caatcatgaatactatttcaaataaccgac

SEQ ID NO: 353273 - DNA, 30 bp, Artificial Sequence
  Synthetic oligonucleotide
ctgtagctagtattagggcgttaacccgac

SEQ ID NO: 353274 - DNA, 30 bp, Artificial Sequence
  Synthetic oligonucleotide
caacgggcgcatcccctcattgagcccgac

SEQ ID NO: 353275 - DNA, 30 bp, Artificial Sequence
  Synthetic oligonucleotide
ggcccctagcaacgtatgatgtggcccgac

SEQ ID NO: 353276 - DNA, 30 bp, Artificial Sequence
  Synthetic oligonucleotide
gtcgcaacaacttttctcttgctcgccgac

SEQ ID NO: 353277 - DNA, 30 bp, Artificial Sequence
  Synthetic oligonucleotide
gcaaagcggccaagaggagctagggccgac

SEQ ID NO: 353278 - DNA, 30 bp, Artificial Sequence
  Synthetic oligonucleotide
ttagccactacttgtatggggttggccgac

SEQ ID NO: 353279 - DNA, 30 bp, Artificial Sequence
  Synthetic oligonucleotide
ctaagatcccaataagcggcgaatgccgac

SEQ ID NO: 353280 - DNA, 30 bp, Artificial Sequence
  Synthetic oligonucleotide
tatcagatagaatacctgggggcatccgac

SEQ ID NO: 353281 - DNA, 30 bp, Artificial Sequence
  Synthetic oligonucleotide
gctcaggtccaagtcggtcactgatccgac

SEQ ID NO: 353282 - DNA, 30 bp, Artificial Sequence
  Synthetic oligonucleotide
catcaagcactcgccgtcacaatatccgac

SEQ ID NO: 353283 - DNA, 30 bp, Artificial Sequence
  Synthetic oligonucleotide
atccgtctcccctgttgaaccatctccgac

SEQ ID NO: 353284 - DNA, 30 bp, Artificial Sequence
  Synthetic oligonucleotide
cgggcataccgatcggagtgtctgtccgac

SEQ ID NO: 353285 - DNA, 30 bp, Artificial Sequence
  Synthetic oligonucleotide
tacaaaaaaataccagggcttgcttccgac

SEQ ID NO: 353286 - DNA, 30 bp, Artificial Sequence
  Synthetic oligonucleotide
gttaggccagcaccgggaaaaaaaagcgac

SEQ ID NO: 353287 - DNA, 30 bp, Artificial Sequence
  Synthetic oligonucleotide
ctgtgacctatattcatgctggaaagcgac

SEQ ID NO: 353288 - DNA, 30 bp, Artificial Sequence
  Synthetic oligonucleotide
gcgaattaagccataatctacgcaagcgac

SEQ ID NO: 353289 - DNA, 30 bp, Artificial Sequence
  Synthetic oligonucleotide
atgggttcagcccttgggtcatcaagcgac

SEQ ID NO: 353290 - DNA, 30 bp, Artificial Sequence
  Synthetic oligonucleotide
tacaacgcagctcagaagtggcacagcgac

SEQ ID NO: 353291 - DNA, 30 bp, Artificial Sequence
  Synthetic oligonucleotide
cccggttaataaatggaggttcgcagcgac

SEQ ID NO: 353292 - DNA, 30 bp, Artificial Sequence
  Synthetic oligonucleotide
acttggaactcttctatttcgatcagcgac

SEQ ID NO: 353293 - DNA, 30 bp, Artificial Sequence
  Synthetic oligonucleotide
ctacgtatctacgccctatctcggagcgac

SEQ ID NO: 353294 - DNA, 31 bp, Artificial Sequence
  Synthetic oligonucleotide
acgttgaagagctattcgataatatagcgac

SEQ ID NO: 353295 - DNA, 30 bp, Artificial Sequence
  Synthetic oligonucleotide
gttctggaaggcgcgtaggttggccgcgac

SEQ ID NO: 353296 - DNA, 30 bp, Artificial Sequence
  Synthetic oligonucleotide
tttcggggataagttacccacctgcgcgac

SEQ ID NO: 353297 - DNA, 30 bp, Artificial Sequence
  Synthetic oligonucleotide
acatggagtcgctctgagccgattcgcgac

SEQ ID NO: 353298 - DNA, 30 bp, Artificial Sequence
  Synthetic oligonucleotide
tcgttatactcccgttatacagttcgcgac

SEQ ID NO: 353299 - DNA, 30 bp, Artificial Sequence
  Synthetic oligonucleotide
acgttttaatctcaagtctggggaggcgac

SEQ ID NO: 353300 - DNA, 30 bp, Artificial Sequence
  Synthetic oligonucleotide
tttagtctggtccgcgaccagaggggcgac

SEQ ID NO: 353301 - DNA, 30 bp, Artificial Sequence
  Synthetic oligonucleotide
tggcgccggcttgagaactcagtgggcgac

SEQ ID NO: 353302 - DNA, 30 bp, Artificial Sequence
  Synthetic oligonucleotide
gtggagttagattagtaagggacatgcgac

SEQ ID NO: 353303 - DNA, 30 bp, Artificial Sequence
  Synthetic oligonucleotide
caatagcttggccaacggttcttatgcgac

SEQ ID NO: 353304 - DNA, 30 bp, Artificial Sequence
  Synthetic oligonucleotide
gtaactagcaggacctcggaagactgcgac

SEQ ID NO: 353305 - DNA, 30 bp, Artificial Sequence
  Synthetic oligonucleotide
atcatgtcactgctatgtcccatctgcgac

SEQ ID NO: 353306 - DNA, 30 bp, Artificial Sequence
  Synthetic oligonucleotide
actatgcgccacaatgcagcgttctgcgac

SEQ ID NO: 353307 - DNA, 30 bp, Artificial Sequence
  Synthetic oligonucleotide
gtgcgcagaggctctataattcaaatcgac

SEQ ID NO: 353308 - DNA, 30 bp, Artificial Sequence
  Synthetic oligonucleotide
atactttataagatacgggacataatcgac

SEQ ID NO: 353309 - DNA, 30 bp, Artificial Sequence
  Synthetic oligonucleotide
tatacaaagttcggagtcccctggatcgac

SEQ ID NO: 353310 - DNA, 30 bp, Artificial Sequence
  Synthetic oligonucleotide
agtcggacgcagaaactgtaactgatcgac

SEQ ID NO: 353311 - DNA, 30 bp, Artificial Sequence
  Synthetic oligonucleotide
ttaacgacagaaagcgaccgggtgatcgac

SEQ ID NO: 353312 - DNA, 30 bp, Artificial Sequence
  Synthetic oligonucleotide
aatgacaagaatctatactggggactcgac

SEQ ID NO: 353313 - DNA, 31 bp, Artificial Sequence
  Synthetic oligonucleotide
aattatggggacccgacttgaggacctcgac

SEQ ID NO: 353314 - DNA, 30 bp, Artificial Sequence
  Synthetic oligonucleotide
cttacttagcaatcgtaatctgtgctcgac

SEQ ID NO: 353315 - DNA, 30 bp, Artificial Sequence
  Synthetic oligonucleotide
ccgagtgtcaattccaatcaatatctcgac

SEQ ID NO: 353316 - DNA, 30 bp, Artificial Sequence
  Synthetic oligonucleotide
agtacagcccgggtttcacactcagtcgac

SEQ ID NO: 353317 - DNA, 30 bp, Artificial Sequence
  Synthetic oligonucleotide
caaatcgggggtacatagtatcacgtcgac

SEQ ID NO: 353318 - DNA, 30 bp, Artificial Sequence
  Synthetic oligonucleotide
aacccggtatagtcagacaataccgtcgac

SEQ ID NO: 353319 - DNA, 30 bp, Artificial Sequence
  Synthetic oligonucleotide
ggaacctctcagtcccacgtaccggtcgac

SEQ ID NO: 353320 - DNA, 30 bp, Artificial Sequence
  Synthetic oligonucleotide
attcccctcatactggggacccgtgtcgac

SEQ ID NO: 353321 - DNA, 30 bp, Artificial Sequence
  Synthetic oligonucleotide
gcatgcagagccctcgaagccgagttcgac

SEQ ID NO: 353322 - DNA, 30 bp, Artificial Sequence
  Synthetic oligonucleotide
tctgactacaaagatgggctggggttcgac

SEQ ID NO: 353323 - DNA, 30 bp, Artificial Sequence
  Synthetic oligonucleotide
acacccacctcggaaaaaacgcatttcgac

SEQ ID NO: 353324 - DNA, 30 bp, Artificial Sequence
  Synthetic oligonucleotide
gggtccacgagaattttacccgttttcgac

SEQ ID NO: 353325 - DNA, 30 bp, Artificial Sequence
  Synthetic oligonucleotide
ccggttctgtgttatgaccacacaaaggac

SEQ ID NO: 353326 - DNA, 30 bp, Artificial Sequence
  Synthetic oligonucleotide
ttgcagtaggggtataactttacaaaggac

SEQ ID NO: 353327 - DNA, 30 bp, Artificial Sequence
  Synthetic oligonucleotide
gcggtgcgaaactgcttcatcgctaaggac

SEQ ID NO: 353328 - DNA, 30 bp, Artificial Sequence
  Synthetic oligonucleotide
cgagtttaaaatgtggaagctgctaaggac

SEQ ID NO: 353329 - DNA, 30 bp, Artificial Sequence
  Synthetic oligonucleotide
atgcagtcatacactttcacggaacaggac

SEQ ID NO: 353330 - DNA, 30 bp, Artificial Sequence
  Synthetic oligonucleotide
ggcctgggtctagtattattggaacaggac

SEQ ID NO: 353331 - DNA, 30 bp, Artificial Sequence
  Synthetic oligonucleotide
gcccttagatactctagggtcgcacaggac

SEQ ID NO: 353332 - DNA, 30 bp, Artificial Sequence
  Synthetic oligonucleotide
atgatctcatgctgtgacagttcacaggac

SEQ ID NO: 353333 - DNA, 30 bp, Artificial Sequence
  Synthetic oligonucleotide
caatcggaaactacgaattgcagacaggac

SEQ ID NO: 353334 - DNA, 30 bp, Artificial Sequence
  Synthetic oligonucleotide
aaagtcccaagtaagagttgtttacaggac

SEQ ID NO: 353335 - DNA, 30 bp, Artificial Sequence
  Synthetic oligonucleotide
gggtttcccttccttctagtacaccaggac

SEQ ID NO: 353336 - DNA, 30 bp, Artificial Sequence
  Synthetic oligonucleotide
cactccgaccgatttggcaacgcgcaggac

SEQ ID NO: 353337 - DNA, 30 bp, Artificial Sequence
  Synthetic oligonucleotide
ttcggagcagattttgtatgcctgcaggac

SEQ ID NO: 353338 - DNA, 30 bp, Artificial Sequence
  Synthetic oligonucleotide
tataacatgccgttctgaaaggatcaggac

SEQ ID NO: 353339 - DNA, 30 bp, Artificial Sequence
  Synthetic oligonucleotide
agcaaattacttggtgacgtactagaggac

SEQ ID NO: 353340 - DNA, 31 bp, Artificial Sequence
  Synthetic oligonucleotide
ttatggaagcactgcggcatgtcaggaggac

SEQ ID NO: 353341 - DNA, 30 bp, Artificial Sequence
  Synthetic oligonucleotide
tccggccttccgtagctgaatatggaggac

SEQ ID NO: 353342 - DNA, 30 bp, Artificial Sequence
  Synthetic oligonucleotide
ttcgtatcgagtcggtttgtaaatgaggac

SEQ ID NO: 353343 - DNA, 30 bp, Artificial Sequence
  Synthetic oligonucleotide
gttgatgctactgtaggtatacgataggac

SEQ ID NO: 353344 - DNA, 30 bp, Artificial Sequence
  Synthetic oligonucleotide
ttcctaacgacgaggggctcagactaggac

SEQ ID NO: 353345 - DNA, 30 bp, Artificial Sequence
  Synthetic oligonucleotide
atcatttcaatactatgggggcggtaggac

SEQ ID NO: 353346 - DNA, 30 bp, Artificial Sequence
  Synthetic oligonucleotide
cttatcagtaccttctgggctccttaggac

SEQ ID NO: 353347 - DNA, 30 bp, Artificial Sequence
  Synthetic oligonucleotide
cacaagctggtaaagttaaggtaaacggac

SEQ ID NO: 353348 - DNA, 30 bp, Artificial Sequence
  Synthetic oligonucleotide
gcaattatgatgatccctcacaggacggac

SEQ ID NO: 353349 - DNA, 30 bp, Artificial Sequence
  Synthetic oligonucleotide
atggagacggtcggcggtcccgggacggac

SEQ ID NO: 353350 - DNA, 30 bp, Artificial Sequence
  Synthetic oligonucleotide
gggtaggtctggtagatgaaggggacggac

SEQ ID NO: 353351 - DNA, 31 bp, Artificial Sequence
  Synthetic oligonucleotide
cagtcgaacacgtacttaggagaatacggac

SEQ ID NO: 353352 - DNA, 30 bp, Artificial Sequence
  Synthetic oligonucleotide
ggtcatttcaacctacgggttaatacggac

SEQ ID NO: 353353 - DNA, 30 bp, Artificial Sequence
  Synthetic oligonucleotide
atttgctctagtcggttatctcatacggac

SEQ ID NO: 353354 - DNA, 30 bp, Artificial Sequence
  Synthetic oligonucleotide
ggacaatggcattagcggtttgttacggac

SEQ ID NO: 353355 - DNA, 30 bp, Artificial Sequence
  Synthetic oligonucleotide
accctgaacacttgagggatagaaccggac

SEQ ID NO: 353356 - DNA, 30 bp, Artificial Sequence
  Synthetic oligonucleotide
aaacaagtctactataatcttaccccggac

SEQ ID NO: 353357 - DNA, 30 bp, Artificial Sequence
  Synthetic oligonucleotide
ccagctaagccgagggcaggaatcccggac

SEQ ID NO: 353358 - DNA, 30 bp, Artificial Sequence
  Synthetic oligonucleotide
atcacaatgctattgcccgctgcgccggac

SEQ ID NO: 353359 - DNA, 30 bp, Artificial Sequence
  Synthetic oligonucleotide
agtggtacagtgcgctatgctgcgccggac

SEQ ID NO: 353360 - DNA, 30 bp, Artificial Sequence
  Synthetic oligonucleotide
tatgctagtcacaatgacggatggccggac

SEQ ID NO: 353361 - DNA, 30 bp, Artificial Sequence
  Synthetic oligonucleotide
ttagcggtctacaacggttcgtgagcggac

SEQ ID NO: 353362 - DNA, 30 bp, Artificial Sequence
  Synthetic oligonucleotide
gttacgctctccgggcatcttgtcgcggac

SEQ ID NO: 353363 - DNA, 30 bp, Artificial Sequence
  Synthetic oligonucleotide
gtccataataggtctggatagggggcggac

SEQ ID NO: 353364 - DNA, 30 bp, Artificial Sequence
  Synthetic oligonucleotide
actcttcagctatacgtgcgtggtgcggac

SEQ ID NO: 353365 - DNA, 30 bp, Artificial Sequence
  Synthetic oligonucleotide
aattcgcactttggttaaggtcttgcggac

SEQ ID NO: 353366 - DNA, 30 bp, Artificial Sequence
  Synthetic oligonucleotide
tcgttactacaaggcactcaactgtcggac

SEQ ID NO: 353367 - DNA, 30 bp, Artificial Sequence
  Synthetic oligonucleotide
gcagacggtcaagcgttagttaaaagggac

SEQ ID NO: 353368 - DNA, 30 bp, Artificial Sequence
  Synthetic oligonucleotide
aagtgggtcagaggagccgaggaaagggac

SEQ ID NO: 353369 - DNA, 30 bp, Artificial Sequence
  Synthetic oligonucleotide
tgttcttgggtgcgttttcgggaaagggac

SEQ ID NO: 353370 - DNA, 30 bp, Artificial Sequence
  Synthetic oligonucleotide
gcatgacacctttagccttctctaagggac

SEQ ID NO: 353371 - DNA, 30 bp, Artificial Sequence
  Synthetic oligonucleotide
aacaagtcccggaggcgcgagttaagggac

SEQ ID NO: 353372 - DNA, 30 bp, Artificial Sequence
  Synthetic oligonucleotide
gataagaaggacgccgtgacttgcagggac

SEQ ID NO: 353373 - DNA, 30 bp, Artificial Sequence
  Synthetic oligonucleotide
ttaagtgtagaaatggatgggctcagggac

SEQ ID NO: 353374 - DNA, 30 bp, Artificial Sequence
  Synthetic oligonucleotide
attcctatatatggagtctgtaagagggac

SEQ ID NO: 353375 - DNA, 30 bp, Artificial Sequence
  Synthetic oligonucleotide
aattcagccgtataaagtaaggttagggac

SEQ ID NO: 353376 - DNA, 30 bp, Artificial Sequence
  Synthetic oligonucleotide
ggatactccgcgtccagtcaatgacgggac

SEQ ID NO: 353377 - DNA, 30 bp, Artificial Sequence
  Synthetic oligonucleotide
atgcaatcaaccactccaactggccgggac

SEQ ID NO: 353378 - DNA, 30 bp, Artificial Sequence
  Synthetic oligonucleotide
ttgctatcggcgcgttacggaaacggggac

SEQ ID NO: 353379 - DNA, 30 bp, Artificial Sequence
  Synthetic oligonucleotide
cgcggtccggaccggacattaaccggggac

SEQ ID NO: 353380 - DNA, 27 bp, Artificial Sequence
  Synthetic oligonucleotide
ggcgttgtcggctataggcgcggggac

SEQ ID NO: 353381 - DNA, 30 bp, Artificial Sequence
  Synthetic oligonucleotide
aaccgggttcctttacgtcagggcggggac

SEQ ID NO: 353382 - DNA, 30 bp, Artificial Sequence
  Synthetic oligonucleotide
gacaattctacatatattctgaaatgggac

SEQ ID NO: 353383 - DNA, 30 bp, Artificial Sequence
  Synthetic oligonucleotide
gcagcagaaagaaagtgtgctaactgggac

SEQ ID NO: 353384 - DNA, 30 bp, Artificial Sequence
  Synthetic oligonucleotide
aagtctgcttttcaattctgggagtgggac

SEQ ID NO: 353385 - DNA, 30 bp, Artificial Sequence
  Synthetic oligonucleotide
aagaaggttgctgcctcgtagtggtgggac

SEQ ID NO: 353386 - DNA, 30 bp, Artificial Sequence
  Synthetic oligonucleotide
caccatcaggtgctagtggtcctgtgggac

SEQ ID NO: 353387 - DNA, 30 bp, Artificial Sequence
  Synthetic oligonucleotide
ctccttcgccgcgattacgtttattgggac

SEQ ID NO: 353388 - DNA, 30 bp, Artificial Sequence
  Synthetic oligonucleotide
atgagtcagtggaccgagtgaagttgggac

SEQ ID NO: 353389 - DNA, 30 bp, Artificial Sequence
  Synthetic oligonucleotide
tacgtcggcagaccaaacttaagttgggac

SEQ ID NO: 353390 - DNA, 30 bp, Artificial Sequence
  Synthetic oligonucleotide
cattagataggggctcgactattttgggac

SEQ ID NO: 353391 - DNA, 30 bp, Artificial Sequence
  Synthetic oligonucleotide
gtgttggaggagatttctggcagaatggac

SEQ ID NO: 353392 - DNA, 30 bp, Artificial Sequence
  Synthetic oligonucleotide
attagggatcggaatcatgcatctatggac

SEQ ID NO: 353393 - DNA, 30 bp, Artificial Sequence
  Synthetic oligonucleotide
acaattctagacgcggtgaacgttatggac

SEQ ID NO: 353394 - DNA, 30 bp, Artificial Sequence
  Synthetic oligonucleotide
ataccacgtgtgcgcgtatgggttatggac

SEQ ID NO: 353395 - DNA, 30 bp, Artificial Sequence
  Synthetic oligonucleotide
acctttaactggtcagattgaagactggac

SEQ ID NO: 353396 - DNA, 30 bp, Artificial Sequence
  Synthetic oligonucleotide
aagatgtatttctccgattgggtactggac

SEQ ID NO: 353397 - DNA, 30 bp, Artificial Sequence
  Synthetic oligonucleotide
gatcaaggccactactgtttattactggac

SEQ ID NO: 353398 - DNA, 30 bp, Artificial Sequence
  Synthetic oligonucleotide
ggggactttaaggcattccaacagctggac

SEQ ID NO: 353399 - DNA, 30 bp, Artificial Sequence
  Synthetic oligonucleotide
agacggtggtctactaggattgctctggac

SEQ ID NO: 353400 - DNA, 30 bp, Artificial Sequence
  Synthetic oligonucleotide
cctactctactcttcgtaatgagtctggac

SEQ ID NO: 353401 - DNA, 30 bp, Artificial Sequence
  Synthetic oligonucleotide
gaactagggcgttcggtagtctttctggac

SEQ ID NO: 353402 - DNA, 30 bp, Artificial Sequence
  Synthetic oligonucleotide
cacccttaaagccaattcgcctaagtggac

SEQ ID NO: 353403 - DNA, 30 bp, Artificial Sequence
  Synthetic oligonucleotide
ttgggtagatgagcgcatagcacagtggac

SEQ ID NO: 353404 - DNA, 30 bp, Artificial Sequence
  Synthetic oligonucleotide
cctgcacctaatttggtgttgctagtggac

SEQ ID NO: 353405 - DNA, 30 bp, Artificial Sequence
  Synthetic oligonucleotide
cagacgccttgtggaatatcgtccgtggac

SEQ ID NO: 353406 - DNA, 30 bp, Artificial Sequence
  Synthetic oligonucleotide
agtgttaataatgtccggagtctcgtggac

SEQ ID NO: 353407 - DNA, 30 bp, Artificial Sequence
  Synthetic oligonucleotide
cgcggtggcctgggctggctgtcggtggac

SEQ ID NO: 353408 - DNA, 30 bp, Artificial Sequence
  Synthetic oligonucleotide
atggatatgaaggcaacggtgtatgtggac

SEQ ID NO: 353409 - DNA, 30 bp, Artificial Sequence
  Synthetic oligonucleotide
gtcaagaattaatgttaacgacgtgtggac

SEQ ID NO: 353410 - DNA, 30 bp, Artificial Sequence
  Synthetic oligonucleotide
ggaaaaggagtcagctacttaggtgtggac

SEQ ID NO: 353411 - DNA, 30 bp, Artificial Sequence
  Synthetic oligonucleotide
ctcaggatggtgtggccttagtgtgtggac

SEQ ID NO: 353412 - DNA, 30 bp, Artificial Sequence
  Synthetic oligonucleotide
attgcagtggatgagaagcagtttgtggac

SEQ ID NO: 353413 - DNA, 30 bp, Artificial Sequence
  Synthetic oligonucleotide
acacgggattctgataagttctaattggac

SEQ ID NO: 353414 - DNA, 30 bp, Artificial Sequence
  Synthetic oligonucleotide
cgggcgaggaattgctcatcgttattggac

SEQ ID NO: 353415 - DNA, 30 bp, Artificial Sequence
  Synthetic oligonucleotide
cggttagtttgcagtcgaacttgcttggac

SEQ ID NO: 353416 - DNA, 30 bp, Artificial Sequence
  Synthetic oligonucleotide
ctaaccccttaggccaggcgtccgttggac

SEQ ID NO: 353417 - DNA, 30 bp, Artificial Sequence
  Synthetic oligonucleotide
cagagcatccaattcatgatagtgttggac

SEQ ID NO: 353418 - DNA, 30 bp, Artificial Sequence
  Synthetic oligonucleotide
gttcggaaccatcctaggcgagctttggac

SEQ ID NO: 353419 - DNA, 30 bp, Artificial Sequence
  Synthetic oligonucleotide
tgtaaatggcccctgttgatgcttttggac

SEQ ID NO: 353420 - DNA, 30 bp, Artificial Sequence
  Synthetic oligonucleotide
ccggtcctcgggttaaagcgggaaaatgac

SEQ ID NO: 353421 - DNA, 30 bp, Artificial Sequence
  Synthetic oligonucleotide
acctcggggccaagaagtaaagcaaatgac

SEQ ID NO: 353422 - DNA, 30 bp, Artificial Sequence
  Synthetic oligonucleotide
tcagcgctcagatcgaacagtgcaaatgac

SEQ ID NO: 353423 - DNA, 30 bp, Artificial Sequence
  Synthetic oligonucleotide
accccgaggtaaaaacggcgggccaatgac

SEQ ID NO: 353424 - DNA, 30 bp, Artificial Sequence
  Synthetic oligonucleotide
catcagaatagagcgtgtatattcaatgac

SEQ ID NO: 353425 - DNA, 30 bp, Artificial Sequence
  Synthetic oligonucleotide
ctgaatatgcctacataacttttcaatgac

SEQ ID NO: 353426 - DNA, 30 bp, Artificial Sequence
  Synthetic oligonucleotide
atatacggagcctttatataacagaatgac

SEQ ID NO: 353427 - DNA, 30 bp, Artificial Sequence
  Synthetic oligonucleotide
tgtgtgtactgactaatataagtacatgac

SEQ ID NO: 353428 - DNA, 30 bp, Artificial Sequence
  Synthetic oligonucleotide
aaccggtaagggtggaaataacgccatgac

SEQ ID NO: 353429 - DNA, 30 bp, Artificial Sequence
  Synthetic oligonucleotide
aagcactctgagaattggctcaatcatgac

SEQ ID NO: 353430 - DNA, 30 bp, Artificial Sequence
  Synthetic oligonucleotide
cgtccattccctttgttctgggatcatgac

SEQ ID NO: 353431 - DNA, 30 bp, Artificial Sequence
  Synthetic oligonucleotide
ttacagttgggggaggtggcgtctcatgac

SEQ ID NO: 353432 - DNA, 30 bp, Artificial Sequence
  Synthetic oligonucleotide
acagtccttcaagatgtacatcttcatgac

SEQ ID NO: 353433 - DNA, 30 bp, Artificial Sequence
  Synthetic oligonucleotide
gagtatagtcatggcatatctggagatgac

SEQ ID NO: 353434 - DNA, 30 bp, Artificial Sequence
  Synthetic oligonucleotide
gctatgcctccaagtcgtctcatagatgac

SEQ ID NO: 353435 - DNA, 30 bp, Artificial Sequence
  Synthetic oligonucleotide
ctatgtgaaatcaccgccattctagatgac

SEQ ID NO: 353436 - DNA, 30 bp, Artificial Sequence
  Synthetic oligonucleotide
cgagcgcgtaactcagcatccaacgatgac

SEQ ID NO: 353437 - DNA, 30 bp, Artificial Sequence
  Synthetic oligonucleotide
tccgacatgccggtacatgcgggcgatgac

SEQ ID NO: 353438 - DNA, 30 bp, Artificial Sequence
  Synthetic oligonucleotide
ttctcagccagtaggtcaatcattgatgac

SEQ ID NO: 353439 - DNA, 30 bp, Artificial Sequence
  Synthetic oligonucleotide
atgtttattcatgactttgtgagatatgac

SEQ ID NO: 353440 - DNA, 30 bp, Artificial Sequence
  Synthetic oligonucleotide
agattcacctccttccctactagatatgac

SEQ ID NO: 353441 - DNA, 30 bp, Artificial Sequence
  Synthetic oligonucleotide
aacacgttccgtgagagagaccgatatgac

SEQ ID NO: 353442 - DNA, 30 bp, Artificial Sequence
  Synthetic oligonucleotide
ttcacgagtgaccacattcgcagctatgac

SEQ ID NO: 353443 - DNA, 30 bp, Artificial Sequence
  Synthetic oligonucleotide
attggccggaaagtgcctgggcgctatgac

SEQ ID NO: 353444 - DNA, 30 bp, Artificial Sequence
  Synthetic oligonucleotide
aaaacatcgttcaggaggtttgtctatgac

SEQ ID NO: 353445 - DNA, 30 bp, Artificial Sequence
  Synthetic oligonucleotide
acccttacggaccgccaaaatgtgtatgac

SEQ ID NO: 353446 - DNA, 30 bp, Artificial Sequence
  Synthetic oligonucleotide
cttatggcaatcccgaactgtatttatgac

SEQ ID NO: 353447 - DNA, 31 bp, Artificial Sequence
  Synthetic oligonucleotide
ttgggtgaataacacacatgacggaactgac

SEQ ID NO: 353448 - DNA, 30 bp, Artificial Sequence
  Synthetic oligonucleotide
aggtgggaggtagcagaggttataactgac

SEQ ID NO: 353449 - DNA, 30 bp, Artificial Sequence
  Synthetic oligonucleotide
cgcacctctctaccccttgcccacactgac

SEQ ID NO: 353450 - DNA, 30 bp, Artificial Sequence
  Synthetic oligonucleotide
atagtgttgcggaggataaaagacactgac

SEQ ID NO: 353451 - DNA, 30 bp, Artificial Sequence
  Synthetic oligonucleotide
agtctagttcaccgtatcataagcactgac

SEQ ID NO: 353452 - DNA, 30 bp, Artificial Sequence
  Synthetic oligonucleotide
tatccctctcagctggagcaggcgactgac

SEQ ID NO: 353453 - DNA, 30 bp, Artificial Sequence
  Synthetic oligonucleotide
tcgttacccgaaccctgtcgtgttactgac

SEQ ID NO: 353454 - DNA, 30 bp, Artificial Sequence
  Synthetic oligonucleotide
ctgctggaccgccaaacctaaaaacctgac

SEQ ID NO: 353455 - DNA, 30 bp, Artificial Sequence
  Synthetic oligonucleotide
tagtcgaagctatcgacgcctgaacctgac

SEQ ID NO: 353456 - DNA, 30 bp, Artificial Sequence
  Synthetic oligonucleotide
catttagatgggcgttaagctgcacctgac

SEQ ID NO: 353457 - DNA, 30 bp, Artificial Sequence
  Synthetic oligonucleotide
cgagctggggtacttgctccaagacctgac

SEQ ID NO: 353458 - DNA, 30 bp, Artificial Sequence
  Synthetic oligonucleotide
agacccttaacttgtcggtggagacctgac

SEQ ID NO: 353459 - DNA, 30 bp, Artificial Sequence
  Synthetic oligonucleotide
gtggggtcacccggggagcggaaccctgac

SEQ ID NO: 353460 - DNA, 30 bp, Artificial Sequence
  Synthetic oligonucleotide
gaacaagcaaatttgtgtgtaggccctgac

SEQ ID NO: 353461 - DNA, 30 bp, Artificial Sequence
  Synthetic oligonucleotide
ggagacttattgatggggtaagggcctgac

SEQ ID NO: 353462 - DNA, 30 bp, Artificial Sequence
  Synthetic oligonucleotide
gaggagttgtcatgttcttactttcctgac

SEQ ID NO: 353463 - DNA, 30 bp, Artificial Sequence
  Synthetic oligonucleotide
agaggatttggtcctagcaggtttcctgac

SEQ ID NO: 353464 - DNA, 30 bp, Artificial Sequence
  Synthetic oligonucleotide
ccgtctgtgtctggaaaagtgtttcctgac

SEQ ID NO: 353465 - DNA, 30 bp, Artificial Sequence
  Synthetic oligonucleotide
aggtgggggcgcgaaggtattggcgctgac

SEQ ID NO: 353466 - DNA, 30 bp, Artificial Sequence
  Synthetic oligonucleotide
gtatagtcatatgagtttagggaggctgac

SEQ ID NO: 353467 - DNA, 30 bp, Artificial Sequence
  Synthetic oligonucleotide
ctgagcgtctgcgtatatactacggctgac

SEQ ID NO: 353468 - DNA, 30 bp, Artificial Sequence
  Synthetic oligonucleotide
ggtaatgcgttgaaaaaacgtcaatctgac

SEQ ID NO: 353469 - DNA, 30 bp, Artificial Sequence
  Synthetic oligonucleotide
gtttgagtgcctcgctacgaagtatctgac

SEQ ID NO: 353470 - DNA, 30 bp, Artificial Sequence
  Synthetic oligonucleotide
tcagaagaagctctatgtagagactctgac

SEQ ID NO: 353471 - DNA, 30 bp, Artificial Sequence
  Synthetic oligonucleotide
ccccgctcatgcactttactgatctctgac

SEQ ID NO: 353472 - DNA, 30 bp, Artificial Sequence
  Synthetic oligonucleotide
ataagataggctatcaagtccttctctgac

SEQ ID NO: 353473 - DNA, 30 bp, Artificial Sequence
  Synthetic oligonucleotide
ttgtggttatctacttcatggaagtctgac

SEQ ID NO: 353474 - DNA, 31 bp, Artificial Sequence
  Synthetic oligonucleotide
gtattcgtggtttgaacaatccgggtctgac

SEQ ID NO: 353475 - DNA, 30 bp, Artificial Sequence
  Synthetic oligonucleotide
aacgcggttgattagccgggcatttctgac

SEQ ID NO: 353476 - DNA, 30 bp, Artificial Sequence
  Synthetic oligonucleotide
acaccctttcttatccaccgacgaagtgac

SEQ ID NO: 353477 - DNA, 30 bp, Artificial Sequence
  Synthetic oligonucleotide
cgctgtatccagttcgggccgagcagtgac

SEQ ID NO: 353478 - DNA, 30 bp, Artificial Sequence
  Synthetic oligonucleotide
gcgtcacttcaaacaccagcttgcagtgac

SEQ ID NO: 353479 - DNA, 30 bp, Artificial Sequence
  Synthetic oligonucleotide
gacacctgttaggtgagtctggggagtgac

SEQ ID NO: 353480 - DNA, 30 bp, Artificial Sequence
  Synthetic oligonucleotide
cttcctttcactggatagctccgtagtgac

SEQ ID NO: 353481 - DNA, 30 bp, Artificial Sequence
  Synthetic oligonucleotide
tcgcgcttaaataatgtatatgtacgtgac

SEQ ID NO: 353482 - DNA, 30 bp, Artificial Sequence
  Synthetic oligonucleotide
gctctactacggtggttctctccccgtgac

SEQ ID NO: 353483 - DNA, 30 bp, Artificial Sequence
  Synthetic oligonucleotide
agcttttatacccacgtgctcgggcgtgac

SEQ ID NO: 353484 - DNA, 30 bp, Artificial Sequence
  Synthetic oligonucleotide
gtgtgtgcagatagtgcaccaactcgtgac

SEQ ID NO: 353485 - DNA, 30 bp, Artificial Sequence
  Synthetic oligonucleotide
catccaatttcagaacgtgggcgtcgtgac

SEQ ID NO: 353486 - DNA, 30 bp, Artificial Sequence
  Synthetic oligonucleotide
cgggatttagcaaccggtgctacaggtgac

SEQ ID NO: 353487 - DNA, 30 bp, Artificial Sequence
  Synthetic oligonucleotide
gagacagccgtctccccgccgagcggtgac

SEQ ID NO: 353488 - DNA, 30 bp, Artificial Sequence
  Synthetic oligonucleotide
ttagggcactgcagccccacgtcgggtgac

SEQ ID NO: 353489 - DNA, 29 bp, Artificial Sequence
  Synthetic oligonucleotide
agatggcgaagggggtcagcgggggtgac

SEQ ID NO: 353490 - DNA, 30 bp, Artificial Sequence
  Synthetic oligonucleotide
ttaaaaataaattgcgggctacgtggtgac

SEQ ID NO: 353491 - DNA, 30 bp, Artificial Sequence
  Synthetic oligonucleotide
gggctaagtttgttgcggccaggtggtgac

SEQ ID NO: 353492 - DNA, 30 bp, Artificial Sequence
  Synthetic oligonucleotide
atcggaaatacggtacctgattaatgtgac

SEQ ID NO: 353493 - DNA, 30 bp, Artificial Sequence
  Synthetic oligonucleotide
ggaaccacgttaattgggatctcatgtgac

SEQ ID NO: 353494 - DNA, 30 bp, Artificial Sequence
  Synthetic oligonucleotide
atgtatatgaggtgccggtgcaactgtgac

SEQ ID NO: 353495 - DNA, 30 bp, Artificial Sequence
  Synthetic oligonucleotide
gccgttggaaattttccggaaacctgtgac

SEQ ID NO: 353496 - DNA, 30 bp, Artificial Sequence
  Synthetic oligonucleotide
gcggcgccacgggtttccccgtagtgtgac

SEQ ID NO: 353497 - DNA, 30 bp, Artificial Sequence
  Synthetic oligonucleotide
gccggcagtagtattgcctacgcttgtgac

SEQ ID NO: 353498 - DNA, 30 bp, Artificial Sequence
  Synthetic oligonucleotide
cctgacatgggcagagtccgctcttgtgac

SEQ ID NO: 353499 - DNA, 30 bp, Artificial Sequence
  Synthetic oligonucleotide
gatcgcgccccaaggttctcttcttgtgac

SEQ ID NO: 353500 - DNA, 30 bp, Artificial Sequence
  Synthetic oligonucleotide
gtagtcattgttgattatccggaaattgac

SEQ ID NO: 353501 - DNA, 30 bp, Artificial Sequence
  Synthetic oligonucleotide
tcccgtggaggagtacgcgatcgcattgac

SEQ ID NO: 353502 - DNA, 30 bp, Artificial Sequence
  Synthetic oligonucleotide
atggtaaccgttgataaacccacgattgac

SEQ ID NO: 353503 - DNA, 30 bp, Artificial Sequence
  Synthetic oligonucleotide
ttcggattcagcgcgattataaggattgac

SEQ ID NO: 353504 - DNA, 30 bp, Artificial Sequence
  Synthetic oligonucleotide
cagacaaaacattttctacgaaatattgac

SEQ ID NO: 353505 - DNA, 30 bp, Artificial Sequence
  Synthetic oligonucleotide
accctaggtaagcatcaccgagctattgac

SEQ ID NO: 353506 - DNA, 30 bp, Artificial Sequence
  Synthetic oligonucleotide
ttttgctaagtagggttcgaaacgcttgac

SEQ ID NO: 353507 - DNA, 30 bp, Artificial Sequence
  Synthetic oligonucleotide
cttctattcgaagttgccattccgcttgac

SEQ ID NO: 353508 - DNA, 30 bp, Artificial Sequence
  Synthetic oligonucleotide
aagtagcgggactagacaacattgcttgac

SEQ ID NO: 353509 - DNA, 30 bp, Artificial Sequence
  Synthetic oligonucleotide
agccgtgatttgtcgatacatcatcttgac

SEQ ID NO: 353510 - DNA, 30 bp, Artificial Sequence
  Synthetic oligonucleotide
ctaggaatgtatggaaagggggttcttgac

SEQ ID NO: 353511 - DNA, 30 bp, Artificial Sequence
  Synthetic oligonucleotide
tgcaggctttttctgccaggaagcgttgac

SEQ ID NO: 353512 - DNA, 30 bp, Artificial Sequence
  Synthetic oligonucleotide
aaaggcggtccgtagcttcgacgcgttgac

SEQ ID NO: 353513 - DNA, 30 bp, Artificial Sequence
  Synthetic oligonucleotide
tcatgcagctggcaggcaatattcgttgac

SEQ ID NO: 353514 - DNA, 30 bp, Artificial Sequence
  Synthetic oligonucleotide
gttacaagggtactatggggttcggttgac

SEQ ID NO: 353515 - DNA, 30 bp, Artificial Sequence
  Synthetic oligonucleotide
ggcatcttaaattaggtgggtgaatttgac

SEQ ID NO: 353516 - DNA, 30 bp, Artificial Sequence
  Synthetic oligonucleotide
attctgctgcctggcgaccggtaatttgac

SEQ ID NO: 353517 - DNA, 30 bp, Artificial Sequence
  Synthetic oligonucleotide
atacgtgggaatagaatgtggtaatttgac

SEQ ID NO: 353518 - DNA, 30 bp, Artificial Sequence
  Synthetic oligonucleotide
ttatgtgaacggactcgtacggcctttgac

SEQ ID NO: 353519 - DNA, 30 bp, Artificial Sequence
  Synthetic oligonucleotide
agagggtagtcctatgaacccggctttgac

SEQ ID NO: 353520 - DNA, 30 bp, Artificial Sequence
  Synthetic oligonucleotide
cctagctagagacggattatgacgtttgac

SEQ ID NO: 353521 - DNA, 30 bp, Artificial Sequence
  Synthetic oligonucleotide
ggattagtctgaatatctgccaattttgac

SEQ ID NO: 353522 - DNA, 30 bp, Artificial Sequence
  Synthetic oligonucleotide
gcttaaggcagttgctagtggatttttgac

SEQ ID NO: 353523 - DNA, 30 bp, Artificial Sequence
  Synthetic oligonucleotide
cgttgggttgagaacgctctcaaaaaatac

SEQ ID NO: 353524 - DNA, 30 bp, Artificial Sequence
  Synthetic oligonucleotide
catcattttctcaattgtaccgccaaatac

SEQ ID NO: 353525 - DNA, 30 bp, Artificial Sequence
  Synthetic oligonucleotide
atcggctcaaagaagtagctgtgcaaatac

SEQ ID NO: 353526 - DNA, 30 bp, Artificial Sequence
  Synthetic oligonucleotide
cgtctgtacactctctatagtatcaaatac

SEQ ID NO: 353527 - DNA, 30 bp, Artificial Sequence
  Synthetic oligonucleotide
tcaaagcttggattggtgggggtcaaatac

SEQ ID NO: 353528 - DNA, 30 bp, Artificial Sequence
  Synthetic oligonucleotide
tgtcgcgggacgatttaacgccggaaatac

SEQ ID NO: 353529 - DNA, 30 bp, Artificial Sequence
  Synthetic oligonucleotide
tagaggggtatggtccagtggtggaaatac

SEQ ID NO: 353530 - DNA, 30 bp, Artificial Sequence
  Synthetic oligonucleotide
taaaaggttaagtaaacggccatgaaatac

SEQ ID NO: 353531 - DNA, 30 bp, Artificial Sequence
  Synthetic oligonucleotide
cagcttacccaccattcagttcctaaatac

SEQ ID NO: 353532 - DNA, 30 bp, Artificial Sequence
  Synthetic oligonucleotide
cagcgggatggtcacaagttagttaaatac

SEQ ID NO: 353533 - DNA, 30 bp, Artificial Sequence
  Synthetic oligonucleotide
cccatacgcgcgagaacgcgcgatcaatac

SEQ ID NO: 353534 - DNA, 30 bp, Artificial Sequence
  Synthetic oligonucleotide
gtccgcccagatggagaatacgttcaatac

SEQ ID NO: 353535 - DNA, 30 bp, Artificial Sequence
  Synthetic oligonucleotide
gacaaggttacggattgtgtgctagaatac

SEQ ID NO: 353536 - DNA, 30 bp, Artificial Sequence
  Synthetic oligonucleotide
cactttgcactatattgtcgcaccgaatac

SEQ ID NO: 353537 - DNA, 30 bp, Artificial Sequence
  Synthetic oligonucleotide
cctcatactgtatcttttaatatcgaatac

SEQ ID NO: 353538 - DNA, 30 bp, Artificial Sequence
  Synthetic oligonucleotide
gtatctagggttggggaacttacggaatac

SEQ ID NO: 353539 - DNA, 30 bp, Artificial Sequence
  Synthetic oligonucleotide
ctcttatagatttagcgcataggggaatac

SEQ ID NO: 353540 - DNA, 30 bp, Artificial Sequence
  Synthetic oligonucleotide
gaagattagggctctaaaataattgaatac

SEQ ID NO: 353541 - DNA, 30 bp, Artificial Sequence
  Synthetic oligonucleotide
ggacgttatgaggcatagcagtgataatac

SEQ ID NO: 353542 - DNA, 30 bp, Artificial Sequence
  Synthetic oligonucleotide
agttgtcgtaggtaatccgagtgataatac

SEQ ID NO: 353543 - DNA, 30 bp, Artificial Sequence
  Synthetic oligonucleotide
taggggtgacttgtacgaagctcctaatac

SEQ ID NO: 353544 - DNA, 30 bp, Artificial Sequence
  Synthetic oligonucleotide
gccgataaagttatttttgtctgctaatac

SEQ ID NO: 353545 - DNA, 30 bp, Artificial Sequence
  Synthetic oligonucleotide
tacttatacatgggatgacctccgtaatac

SEQ ID NO: 353546 - DNA, 30 bp, Artificial Sequence
  Synthetic oligonucleotide
cagcccaaggagtttcatctccggtaatac

SEQ ID NO: 353547 - DNA, 30 bp, Artificial Sequence
  Synthetic oligonucleotide
cgccaccatttttcgcaacacgtgtaatac

SEQ ID NO: 353548 - DNA, 30 bp, Artificial Sequence
  Synthetic oligonucleotide
acaggatgttaaatcgagcacgcttaatac

SEQ ID NO: 353549 - DNA, 31 bp, Artificial Sequence
  Synthetic oligonucleotide
cacattagtggagtcccctcccagttaatac

SEQ ID NO: 353550 - DNA, 30 bp, Artificial Sequence
  Synthetic oligonucleotide
cccgaacaccaatactctttcatttaatac

SEQ ID NO: 353551 - DNA, 30 bp, Artificial Sequence
  Synthetic oligonucleotide
ctatcaatttgggactgactagaaacatac

SEQ ID NO: 353552 - DNA, 30 bp, Artificial Sequence
  Synthetic oligonucleotide
ttgttgaggttccgtctctgaaacacatac

SEQ ID NO: 353553 - DNA, 30 bp, Artificial Sequence
  Synthetic oligonucleotide
gcttggatatcgattttaactatcacatac

SEQ ID NO: 353554 - DNA, 30 bp, Artificial Sequence
  Synthetic oligonucleotide
ctcggcgcaaatacactatgcgtcacatac

SEQ ID NO: 353555 - DNA, 30 bp, Artificial Sequence
  Synthetic oligonucleotide
gacgatggccccatggaggagcagacatac

SEQ ID NO: 353556 - DNA, 30 bp, Artificial Sequence
  Synthetic oligonucleotide
gcggtatgcggaggtcaccagatgacatac

SEQ ID NO: 353557 - DNA, 30 bp, Artificial Sequence
  Synthetic oligonucleotide
ccatccaattaggctctcgtcgctacatac

SEQ ID NO: 353558 - DNA, 30 bp, Artificial Sequence
  Synthetic oligonucleotide
tcgggcacttccgacaaaaaatttacatac

SEQ ID NO: 353559 - DNA, 30 bp, Artificial Sequence
  Synthetic oligonucleotide
agtatccttggatacgtaacaaacccatac

SEQ ID NO: 353560 - DNA, 30 bp, Artificial Sequence
  Synthetic oligonucleotide
gtatgtacctaatcagtacataagccatac

SEQ ID NO: 353561 - DNA, 30 bp, Artificial Sequence
  Synthetic oligonucleotide
cggcggatgggcaagttcgttgagccatac

SEQ ID NO: 353562 - DNA, 30 bp, Artificial Sequence
  Synthetic oligonucleotide
atgcgtgggctttaagggaaagtgccatac

SEQ ID NO: 353563 - DNA, 30 bp, Artificial Sequence
  Synthetic oligonucleotide
aaacggaaaccgggacggattttgccatac

SEQ ID NO: 353564 - DNA, 30 bp, Artificial Sequence
  Synthetic oligonucleotide
cagcaaacacttgggccctctgatccatac

SEQ ID NO: 353565 - DNA, 30 bp, Artificial Sequence
  Synthetic oligonucleotide
gtttaggctcttacaagcattcctccatac

SEQ ID NO: 353566 - DNA, 30 bp, Artificial Sequence
  Synthetic oligonucleotide
gagacgataatggatttagggatcgcatac

SEQ ID NO: 353567 - DNA, 30 bp, Artificial Sequence
  Synthetic oligonucleotide
agtgggaatctgacaccgaaggtcgcatac

SEQ ID NO: 353568 - DNA, 30 bp, Artificial Sequence
  Synthetic oligonucleotide
cccttcaccgttttaaaagacacggcatac

SEQ ID NO: 353569 - DNA, 30 bp, Artificial Sequence
  Synthetic oligonucleotide
acatggtccgcactttgaggtagggcatac

SEQ ID NO: 353570 - DNA, 30 bp, Artificial Sequence
  Synthetic oligonucleotide
gggcgcaggtgtcattatattagggcatac

SEQ ID NO: 353571 - DNA, 30 bp, Artificial Sequence
  Synthetic oligonucleotide
aacctcaattaccaacggatcactgcatac

SEQ ID NO: 353572 - DNA, 30 bp, Artificial Sequence
  Synthetic oligonucleotide
agcggtcttgatgaaaatgtcggtgcatac

SEQ ID NO: 353573 - DNA, 30 bp, Artificial Sequence
  Synthetic oligonucleotide
ttatctatctcatcggagacgtactcatac

SEQ ID NO: 353574 - DNA, 30 bp, Artificial Sequence
  Synthetic oligonucleotide
ccgaacgccgccgctatatacgcctcatac

SEQ ID NO: 353575 - DNA, 30 bp, Artificial Sequence
  Synthetic oligonucleotide
ttcttgcaactccacaggcgctattcatac

SEQ ID NO: 353576 - DNA, 30 bp, Artificial Sequence
  Synthetic oligonucleotide
gtctgtagttaggatataccgccaagatac

SEQ ID NO: 353577 - DNA, 30 bp, Artificial Sequence
  Synthetic oligonucleotide
attgagtaaagtcatgtgtaatgaagatac

SEQ ID NO: 353578 - DNA, 30 bp, Artificial Sequence
  Synthetic oligonucleotide
ccgtcatttacaagaactgtatacagatac

SEQ ID NO: 353579 - DNA, 30 bp, Artificial Sequence
  Synthetic oligonucleotide
cttatcgctgcataacgatttcggagatac

SEQ ID NO: 353580 - DNA, 30 bp, Artificial Sequence
  Synthetic oligonucleotide
gctaagttctacacatggtgagatagatac

SEQ ID NO: 353581 - DNA, 30 bp, Artificial Sequence
  Synthetic oligonucleotide
ttgacggagtctgcgcacctgagtagatac

SEQ ID NO: 353582 - DNA, 30 bp, Artificial Sequence
  Synthetic oligonucleotide
aacacctactaacggtcccagttacgatac

SEQ ID NO: 353583 - DNA, 30 bp, Artificial Sequence
  Synthetic oligonucleotide
tccttaaaacttgcatatttcctccgatac

SEQ ID NO: 353584 - DNA, 30 bp, Artificial Sequence
  Synthetic oligonucleotide
tgtgttaaaggacccaacttcaatcgatac

SEQ ID NO: 353585 - DNA, 30 bp, Artificial Sequence
  Synthetic oligonucleotide
tggcccattgggcaggataattttcgatac

SEQ ID NO: 353586 - DNA, 30 bp, Artificial Sequence
  Synthetic oligonucleotide
acgacagctattttccccggtaaaggatac

SEQ ID NO: 353587 - DNA, 30 bp, Artificial Sequence
  Synthetic oligonucleotide
tatttgcgtttacctacagagcggggatac

SEQ ID NO: 353588 - DNA, 30 bp, Artificial Sequence
  Synthetic oligonucleotide
cacaaagggccaacttcttatattggatac

SEQ ID NO: 353589 - DNA, 30 bp, Artificial Sequence
  Synthetic oligonucleotide
atgccccacggttcttatgaacgatgatac

SEQ ID NO: 353590 - DNA, 30 bp, Artificial Sequence
  Synthetic oligonucleotide
caggcattctgaagtagccggatctgatac

SEQ ID NO: 353591 - DNA, 30 bp, Artificial Sequence
  Synthetic oligonucleotide
tatcggtttaccagaccgagtgagtgatac

SEQ ID NO: 353592 - DNA, 30 bp, Artificial Sequence
  Synthetic oligonucleotide
gctcttgccgacacgcatatgaggtgatac

SEQ ID NO: 353593 - DNA, 30 bp, Artificial Sequence
  Synthetic oligonucleotide
gttgaaattagaccttgcccaaattgatac

SEQ ID NO: 353594 - DNA, 30 bp, Artificial Sequence
  Synthetic oligonucleotide
atttaatcgttcggatatgcgtcttgatac

SEQ ID NO: 353595 - DNA, 30 bp, Artificial Sequence
  Synthetic oligonucleotide
ctacaacgcggcttagcgagagacatatac

SEQ ID NO: 353596 - DNA, 30 bp, Artificial Sequence
  Synthetic oligonucleotide
tatgtagaccaaaccgaatagaagatatac

SEQ ID NO: 353597 - DNA, 30 bp, Artificial Sequence
  Synthetic oligonucleotide
tgtgagctaggcccctcagaaatgatatac

SEQ ID NO: 353598 - DNA, 30 bp, Artificial Sequence
  Synthetic oligonucleotide
ttattatgcggaccagtatcactgatatac

SEQ ID NO: 353599 - DNA, 30 bp, Artificial Sequence
  Synthetic oligonucleotide
atagtgccactagtaagcaacattatatac

SEQ ID NO: 353600 - DNA, 30 bp, Artificial Sequence
  Synthetic oligonucleotide
agcgctttttgcatgctactgattatatac

SEQ ID NO: 353601 - DNA, 30 bp, Artificial Sequence
  Synthetic oligonucleotide
cttagctaatcagtgtgacttacactatac

SEQ ID NO: 353602 - DNA, 30 bp, Artificial Sequence
  Synthetic oligonucleotide
gcacttctaactagttcccgcgcactatac

SEQ ID NO: 353603 - DNA, 30 bp, Artificial Sequence
  Synthetic oligonucleotide
gcgccttcttgtggagcataggagctatac

SEQ ID NO: 353604 - DNA, 30 bp, Artificial Sequence
  Synthetic oligonucleotide
tcacttattgatatgacagccctgctatac

SEQ ID NO: 353605 - DNA, 30 bp, Artificial Sequence
  Synthetic oligonucleotide
ggcgtactatgttcaatgtgagatctatac

SEQ ID NO: 353606 - DNA, 30 bp, Artificial Sequence
  Synthetic oligonucleotide
gcgttgcggagtgctgtcttcgatctatac

SEQ ID NO: 353607 - DNA, 30 bp, Artificial Sequence
  Synthetic oligonucleotide
tattgtcgcaagtgtaggtaccgtctatac

SEQ ID NO: 353608 - DNA, 30 bp, Artificial Sequence
  Synthetic oligonucleotide
attcccaatacttagcatcgaggtctatac

SEQ ID NO: 353609 - DNA, 30 bp, Artificial Sequence
  Synthetic oligonucleotide
aatccgattaattagagaaaatgtctatac

SEQ ID NO: 353610 - DNA, 28 bp, Artificial Sequence
  Synthetic oligonucleotide
aatatggttattataacatcaagtatac

SEQ ID NO: 353611 - DNA, 30 bp, Artificial Sequence
  Synthetic oligonucleotide
agtcctctaaattcattgaagatagtatac

SEQ ID NO: 353612 - DNA, 30 bp, Artificial Sequence
  Synthetic oligonucleotide
gagatacgccccacattgattcacgtatac

SEQ ID NO: 353613 - DNA, 30 bp, Artificial Sequence
  Synthetic oligonucleotide
agtggcgcttgcagaatggggaccgtatac

SEQ ID NO: 353614 - DNA, 30 bp, Artificial Sequence
  Synthetic oligonucleotide
tttaaaaatgctaaggcggcgttcgtatac

SEQ ID NO: 353615 - DNA, 30 bp, Artificial Sequence
  Synthetic oligonucleotide
gggtcttacattttatacagcacggtatac

SEQ ID NO: 353616 - DNA, 30 bp, Artificial Sequence
  Synthetic oligonucleotide
gacatctagaggtgactgattggggtatac

SEQ ID NO: 353617 - DNA, 30 bp, Artificial Sequence
  Synthetic oligonucleotide
caggaggagcgagtcaaactcactgtatac

SEQ ID NO: 353618 - DNA, 30 bp, Artificial Sequence
  Synthetic oligonucleotide
aaataatagagtcagcagttgagtgtatac

SEQ ID NO: 353619 - DNA, 30 bp, Artificial Sequence
  Synthetic oligonucleotide
agtaattaacggagcaatgcgtaattatac

SEQ ID NO: 353620 - DNA, 30 bp, Artificial Sequence
  Synthetic oligonucleotide
ggggttcacgagattgaacccggattatac

SEQ ID NO: 353621 - DNA, 30 bp, Artificial Sequence
  Synthetic oligonucleotide
agtataggaagaggattgcaatgattatac

SEQ ID NO: 353622 - DNA, 30 bp, Artificial Sequence
  Synthetic oligonucleotide
ccttgagacaactagatcttaatattatac

SEQ ID NO: 353623 - DNA, 30 bp, Artificial Sequence
  Synthetic oligonucleotide
ccgtgtgcctttgctcaatattacttatac

SEQ ID NO: 353624 - DNA, 30 bp, Artificial Sequence
  Synthetic oligonucleotide
gaatgcgcaagaactggctctcccttatac

SEQ ID NO: 353625 - DNA, 30 bp, Artificial Sequence
  Synthetic oligonucleotide
ctatctactagtactagtttcaggttatac

SEQ ID NO: 353626 - DNA, 30 bp, Artificial Sequence
  Synthetic oligonucleotide
catggaacttacacaccggacgtgttatac

SEQ ID NO: 353627 - DNA, 30 bp, Artificial Sequence
  Synthetic oligonucleotide
agacggctacatggtcaatgaaatttatac

SEQ ID NO: 353628 - DNA, 30 bp, Artificial Sequence
  Synthetic oligonucleotide
cgagctatgtcgcgcctcggtaatttatac

SEQ ID NO: 353629 - DNA, 30 bp, Artificial Sequence
  Synthetic oligonucleotide
gcagcgcatgtcatactcctcagtttatac

SEQ ID NO: 353630 - DNA, 30 bp, Artificial Sequence
  Synthetic oligonucleotide
ggagggtcaagggctgattggtaaaactac

SEQ ID NO: 353631 - DNA, 30 bp, Artificial Sequence
  Synthetic oligonucleotide
aagcagttaaatcgtgaggctacaaactac

SEQ ID NO: 353632 - DNA, 30 bp, Artificial Sequence
  Synthetic oligonucleotide
ttgcgacggggctgcaggccttgcaactac

SEQ ID NO: 353633 - DNA, 30 bp, Artificial Sequence
  Synthetic oligonucleotide
aagtataatgaattaatcaactggaactac

SEQ ID NO: 353634 - DNA, 30 bp, Artificial Sequence
  Synthetic oligonucleotide
tattcgatctctaatgtctacagacactac

SEQ ID NO: 353635 - DNA, 30 bp, Artificial Sequence
  Synthetic oligonucleotide
ctataacactcaacgcgacgagtacactac

SEQ ID NO: 353636 - DNA, 30 bp, Artificial Sequence
  Synthetic oligonucleotide
gtattcacagcggacccaggttaccactac

SEQ ID NO: 353637 - DNA, 30 bp, Artificial Sequence
  Synthetic oligonucleotide
agccaggggcatcatttttgttgccactac

SEQ ID NO: 353638 - DNA, 30 bp, Artificial Sequence
  Synthetic oligonucleotide
atggataagagactacaaccgacgcactac

SEQ ID NO: 353639 - DNA, 30 bp, Artificial Sequence
  Synthetic oligonucleotide
gagagatcttaaacatacaatacgcactac

SEQ ID NO: 353640 - DNA, 30 bp, Artificial Sequence
  Synthetic oligonucleotide
aaattatctcaacgggctatcatagactac

SEQ ID NO: 353641 - DNA, 30 bp, Artificial Sequence
  Synthetic oligonucleotide
tacatgccgagagtggagtcgctagactac

SEQ ID NO: 353642 - DNA, 30 bp, Artificial Sequence
  Synthetic oligonucleotide
gggaaacggtttctacagggacgcgactac

SEQ ID NO: 353643 - DNA, 30 bp, Artificial Sequence
  Synthetic oligonucleotide
atgaaccgcaaatataaaccgagggactac

SEQ ID NO: 353644 - DNA, 30 bp, Artificial Sequence
  Synthetic oligonucleotide
ctctgatgctataacgaagtgggggactac

SEQ ID NO: 353645 - DNA, 30 bp, Artificial Sequence
  Synthetic oligonucleotide
tagtaaaggaggtttctggagtatgactac

SEQ ID NO: 353646 - DNA, 30 bp, Artificial Sequence
  Synthetic oligonucleotide
ccgtggtaatattccggtagtattgactac

SEQ ID NO: 353647 - DNA, 30 bp, Artificial Sequence
  Synthetic oligonucleotide
tttgcgtattgtttggcggtgaaatactac

SEQ ID NO: 353648 - DNA, 30 bp, Artificial Sequence
  Synthetic oligonucleotide
ttgaagagtctgtacaactatcaatactac

SEQ ID NO: 353649 - DNA, 30 bp, Artificial Sequence
  Synthetic oligonucleotide
atcggggggttttggttttgataatactac

SEQ ID NO: 353650 - DNA, 30 bp, Artificial Sequence
  Synthetic oligonucleotide
aggctggtagagatggcccgcacatactac

SEQ ID NO: 353651 - DNA, 30 bp, Artificial Sequence
  Synthetic oligonucleotide
atacagaccatagggaacgcgagctactac

SEQ ID NO: 353652 - DNA, 30 bp, Artificial Sequence
  Synthetic oligonucleotide
cagcttaactagtgtctaaagatttactac

SEQ ID NO: 353653 - DNA, 30 bp, Artificial Sequence
  Synthetic oligonucleotide
catctaagatgagtaaatcactcaacctac

SEQ ID NO: 353654 - DNA, 30 bp, Artificial Sequence
  Synthetic oligonucleotide
agtcccgcataggcgcgggggtgaacctac

SEQ ID NO: 353655 - DNA, 30 bp, Artificial Sequence
  Synthetic oligonucleotide
gtgctaatcctgattgatccagtgacctac

SEQ ID NO: 353656 - DNA, 30 bp, Artificial Sequence
  Synthetic oligonucleotide
ctaattcagggcactaagactttgacctac

SEQ ID NO: 353657 - DNA, 30 bp, Artificial Sequence
  Synthetic oligonucleotide
accagcagtcgaactgcgcgtttgacctac

SEQ ID NO: 353658 - DNA, 30 bp, Artificial Sequence
  Synthetic oligonucleotide
aatgttggaggttcacggaaaactacctac

SEQ ID NO: 353659 - DNA, 30 bp, Artificial Sequence
  Synthetic oligonucleotide
gagacgatatacggcagccgggttacctac

SEQ ID NO: 353660 - DNA, 30 bp, Artificial Sequence
  Synthetic oligonucleotide
gatatcgcaaagtattttgcctttacctac

SEQ ID NO: 353661 - DNA, 30 bp, Artificial Sequence
  Synthetic oligonucleotide
tcagcaatatgctagcacagataaccctac

SEQ ID NO: 353662 - DNA, 30 bp, Artificial Sequence
  Synthetic oligonucleotide
tgtcgggttaacaagcgtgtagtaccctac

SEQ ID NO: 353663 - DNA, 30 bp, Artificial Sequence
  Synthetic oligonucleotide
gcgaactcgtacctttacaatagcccctac

SEQ ID NO: 353664 - DNA, 30 bp, Artificial Sequence
  Synthetic oligonucleotide
atgggccgtcggttgcgttgtggcccctac

SEQ ID NO: 353665 - DNA, 30 bp, Artificial Sequence
  Synthetic oligonucleotide
aaattgggaagccacacaatgcgagcctac

SEQ ID NO: 353666 - DNA, 30 bp, Artificial Sequence
  Synthetic oligonucleotide
tcagccaatttggatcgaatggtagcctac

SEQ ID NO: 353667 - DNA, 30 bp, Artificial Sequence
  Synthetic oligonucleotide
cctaggacgggttcgcttaggtaatcctac

SEQ ID NO: 353668 - DNA, 30 bp, Artificial Sequence
  Synthetic oligonucleotide
taccatggaaacgggttatctatatcctac

SEQ ID NO: 353669 - DNA, 30 bp, Artificial Sequence
  Synthetic oligonucleotide
aaactcgtctcacagaccgggacctcctac

SEQ ID NO: 353670 - DNA, 30 bp, Artificial Sequence
  Synthetic oligonucleotide
atttggtctaagaccaaacaatcctcctac

SEQ ID NO: 353671 - DNA, 30 bp, Artificial Sequence
  Synthetic oligonucleotide
actaaagacggcatgtacgctatctcctac

SEQ ID NO: 353672 - DNA, 30 bp, Artificial Sequence
  Synthetic oligonucleotide
gtacctgaagtgcaccgcaccgtctcctac

SEQ ID NO: 353673 - DNA, 30 bp, Artificial Sequence
  Synthetic oligonucleotide
ggttcagacagaactaacttggaaagctac

SEQ ID NO: 353674 - DNA, 30 bp, Artificial Sequence
  Synthetic oligonucleotide
catcaagaacctatgtgatacttaagctac

SEQ ID NO: 353675 - DNA, 30 bp, Artificial Sequence
  Synthetic oligonucleotide
gcctctctagtcgaaatttggcccagctac

SEQ ID NO: 353676 - DNA, 30 bp, Artificial Sequence
  Synthetic oligonucleotide
aacagtctatcgatatgacaacagagctac

SEQ ID NO: 353677 - DNA, 30 bp, Artificial Sequence
  Synthetic oligonucleotide
gaggataaccagggtttatagcatagctac

SEQ ID NO: 353678 - DNA, 30 bp, Artificial Sequence
  Synthetic oligonucleotide
tctagggtgattcacaagaagtatagctac

SEQ ID NO: 353679 - DNA, 30 bp, Artificial Sequence
  Synthetic oligonucleotide
aaatattggccacagactactgcacgctac

SEQ ID NO: 353680 - DNA, 30 bp, Artificial Sequence
  Synthetic oligonucleotide
ccaggagccgcatcgcccgaccgccgctac

SEQ ID NO: 353681 - DNA, 30 bp, Artificial Sequence
  Synthetic oligonucleotide
tgggaactaatacgagctacgctccgctac

SEQ ID NO: 353682 - DNA, 30 bp, Artificial Sequence
  Synthetic oligonucleotide
acataagggtcaggtatattggtccgctac

SEQ ID NO: 353683 - DNA, 30 bp, Artificial Sequence
  Synthetic oligonucleotide
gcctcaattcactacgagtacactcgctac

SEQ ID NO: 353684 - DNA, 30 bp, Artificial Sequence
  Synthetic oligonucleotide
gccatgagagttctggttgagtttcgctac

SEQ ID NO: 353685 - DNA, 30 bp, Artificial Sequence
  Synthetic oligonucleotide
gccatgaaaattttatggccgacaggctac

SEQ ID NO: 353686 - DNA, 30 bp, Artificial Sequence
  Synthetic oligonucleotide
agccaacgcgtagcgaatgttatcggctac

SEQ ID NO: 353687 - DNA, 30 bp, Artificial Sequence
  Synthetic oligonucleotide
ctgctcgtggtgttatagtgaaggggctac

SEQ ID NO: 353688 - DNA, 30 bp, Artificial Sequence
  Synthetic oligonucleotide
ttgcggggcaagtatgaacgcgaatgctac

SEQ ID NO: 353689 - DNA, 30 bp, Artificial Sequence
  Synthetic oligonucleotide
tctacgattgaaacgggccccttgtgctac

SEQ ID NO: 353690 - DNA, 30 bp, Artificial Sequence
  Synthetic oligonucleotide
aattggacaaggtgagctggcttgatctac

SEQ ID NO: 353691 - DNA, 30 bp, Artificial Sequence
  Synthetic oligonucleotide
catattaagataaatgctacatcactctac

SEQ ID NO: 353692 - DNA, 30 bp, Artificial Sequence
  Synthetic oligonucleotide
tgtgtttcggacgaggcctgaggactctac

SEQ ID NO: 353693 - DNA, 30 bp, Artificial Sequence
  Synthetic oligonucleotide
attacaattaccacgttttaaggtctctac

SEQ ID NO: 353694 - DNA, 30 bp, Artificial Sequence
  Synthetic oligonucleotide
tattgaggtgatcaccttaccggtctctac

SEQ ID NO: 353695 - DNA, 30 bp, Artificial Sequence
  Synthetic oligonucleotide
gatgtgggggtcgttaataacaaagtctac

SEQ ID NO: 353696 - DNA, 30 bp, Artificial Sequence
  Synthetic oligonucleotide
gggggaccagaggtcctatcaaacgtctac

SEQ ID NO: 353697 - DNA, 30 bp, Artificial Sequence
  Synthetic oligonucleotide
atgcaatccctctcccaagcgcccgtctac

SEQ ID NO: 353698 - DNA, 30 bp, Artificial Sequence
  Synthetic oligonucleotide
agggtgggccgcggcgggatgagcgtctac

SEQ ID NO: 353699 - DNA, 30 bp, Artificial Sequence
  Synthetic oligonucleotide
ggaggtctgacagttgcataggtcgtctac

SEQ ID NO: 353700 - DNA, 30 bp, Artificial Sequence
  Synthetic oligonucleotide
acaggtccgttcctgaaatgcttggtctac

SEQ ID NO: 353701 - DNA, 30 bp, Artificial Sequence
  Synthetic oligonucleotide
cgggcggtacggctgagatcatatgtctac

SEQ ID NO: 353702 - DNA, 30 bp, Artificial Sequence
  Synthetic oligonucleotide
agggacgatatgaaacgctcctagttctac

SEQ ID NO: 353703 - DNA, 30 bp, Artificial Sequence
  Synthetic oligonucleotide
gaagtacggctagtccgcagttagttctac

SEQ ID NO: 353704 - DNA, 30 bp, Artificial Sequence
  Synthetic oligonucleotide
tgagcagatcaccaagcatgggatttctac

SEQ ID NO: 353705 - DNA, 30 bp, Artificial Sequence
  Synthetic oligonucleotide
attaactgggagaacagatcattaaagtac

SEQ ID NO: 353706 - DNA, 30 bp, Artificial Sequence
  Synthetic oligonucleotide
gttgggtaacaaccgcttagccacaagtac

SEQ ID NO: 353707 - DNA, 30 bp, Artificial Sequence
  Synthetic oligonucleotide
ccaggttagattacactatgcgccaagtac

SEQ ID NO: 353708 - DNA, 30 bp, Artificial Sequence
  Synthetic oligonucleotide
gctatactccctaacaaggtatgcaagtac

SEQ ID NO: 353709 - DNA, 30 bp, Artificial Sequence
  Synthetic oligonucleotide
gataactcattcattgaaacagggaagtac

SEQ ID NO: 353710 - DNA, 30 bp, Artificial Sequence
  Synthetic oligonucleotide
gtttttgacagctcggtgttgtataagtac

SEQ ID NO: 353711 - DNA, 30 bp, Artificial Sequence
  Synthetic oligonucleotide
gctgtcatcgagacggtgaatagtaagtac

SEQ ID NO: 353712 - DNA, 30 bp, Artificial Sequence
  Synthetic oligonucleotide
tacacgatggagttaccattcgcacagtac

SEQ ID NO: 353713 - DNA, 30 bp, Artificial Sequence
  Synthetic oligonucleotide
ccggggtatcatgggcacgacggacagtac

SEQ ID NO: 353714 - DNA, 30 bp, Artificial Sequence
  Synthetic oligonucleotide
ctaatattgcttcgaagtgaaaatcagtac

SEQ ID NO: 353715 - DNA, 30 bp, Artificial Sequence
  Synthetic oligonucleotide
tcccagtcctcgtcaactagcgatcagtac

SEQ ID NO: 353716 - DNA, 30 bp, Artificial Sequence
  Synthetic oligonucleotide
tatttacacagcggggtcttgtctcagtac

SEQ ID NO: 353717 - DNA, 30 bp, Artificial Sequence
  Synthetic oligonucleotide
cactctgctggcgcacagcaaagtcagtac

SEQ ID NO: 353718 - DNA, 30 bp, Artificial Sequence
  Synthetic oligonucleotide
gggtccgcgttctctgaatcttttcagtac

SEQ ID NO: 353719 - DNA, 30 bp, Artificial Sequence
  Synthetic oligonucleotide
aagtcttagatgaaacggctagaagagtac

SEQ ID NO: 353720 - DNA, 30 bp, Artificial Sequence
  Synthetic oligonucleotide
gtagtgctactatataactcagacgagtac

SEQ ID NO: 353721 - DNA, 30 bp, Artificial Sequence
  Synthetic oligonucleotide
ttatggaccaactatcctttacaggagtac

SEQ ID NO: 353722 - DNA, 30 bp, Artificial Sequence
  Synthetic oligonucleotide
cttgtattgttcgagaaggcataggagtac

SEQ ID NO: 353723 - DNA, 30 bp, Artificial Sequence
  Synthetic oligonucleotide
aggcccccgtacataggagagtaggagtac

SEQ ID NO: 353724 - DNA, 30 bp, Artificial Sequence
  Synthetic oligonucleotide
cctagtataccataccttatattggagtac

SEQ ID NO: 353725 - DNA, 30 bp, Artificial Sequence
  Synthetic oligonucleotide
ctcctggagactattaaatggactgagtac

SEQ ID NO: 353726 - DNA, 30 bp, Artificial Sequence
  Synthetic oligonucleotide
caaattctgagttgcgggattgaatagtac

SEQ ID NO: 353727 - DNA, 30 bp, Artificial Sequence
  Synthetic oligonucleotide
tcatttattcaaatggcggtaagatagtac

SEQ ID NO: 353728 - DNA, 30 bp, Artificial Sequence
  Synthetic oligonucleotide
tacaaaaaaccatctcctgggggatagtac

SEQ ID NO: 353729 - DNA, 30 bp, Artificial Sequence
  Synthetic oligonucleotide
gagatgtggataccagatggaacctagtac

SEQ ID NO: 353730 - DNA, 30 bp, Artificial Sequence
  Synthetic oligonucleotide
ctctggaattatagtgaacccagctagtac

SEQ ID NO: 353731 - DNA, 30 bp, Artificial Sequence
  Synthetic oligonucleotide
gccagagtgcctcgtcacagaggctagtac

SEQ ID NO: 353732 - DNA, 30 bp, Artificial Sequence
  Synthetic oligonucleotide
catagagatactggtactatacagtagtac

SEQ ID NO: 353733 - DNA, 30 bp, Artificial Sequence
  Synthetic oligonucleotide
ttgtatcgtttgcatatcccatagtagtac

SEQ ID NO: 353734 - DNA, 30 bp, Artificial Sequence
  Synthetic oligonucleotide
gcgtattgactgttgatcggagcgtagtac

SEQ ID NO: 353735 - DNA, 30 bp, Artificial Sequence
  Synthetic oligonucleotide
tccgtctcaccagtaaacggactgtagtac

SEQ ID NO: 353736 - DNA, 30 bp, Artificial Sequence
  Synthetic oligonucleotide
aatcttacgggtacgtacgtcgtgtagtac

SEQ ID NO: 353737 - DNA, 30 bp, Artificial Sequence
  Synthetic oligonucleotide
ctataagtaggtacatgatgcggttagtac

SEQ ID NO: 353738 - DNA, 30 bp, Artificial Sequence
  Synthetic oligonucleotide
tgctgggcacgccagtttgctgaaacgtac

SEQ ID NO: 353739 - DNA, 30 bp, Artificial Sequence
  Synthetic oligonucleotide
gactcttaacaaccaagacatcgaacgtac

SEQ ID NO: 353740 - DNA, 30 bp, Artificial Sequence
  Synthetic oligonucleotide
cgccgagcccatgttcatggtggaacgtac

SEQ ID NO: 353741 - DNA, 30 bp, Artificial Sequence
  Synthetic oligonucleotide
caagacgatcggacgttcgtgctaacgtac

SEQ ID NO: 353742 - DNA, 30 bp, Artificial Sequence
  Synthetic oligonucleotide
cccaccgttacgactgtgccacacacgtac

SEQ ID NO: 353743 - DNA, 30 bp, Artificial Sequence
  Synthetic oligonucleotide
actgccctccccaaatggcgaaccacgtac

SEQ ID NO: 353744 - DNA, 30 bp, Artificial Sequence
  Synthetic oligonucleotide
tatgcctcgcagatatccgggaccacgtac

SEQ ID NO: 353745 - DNA, 30 bp, Artificial Sequence
  Synthetic oligonucleotide
caacaaaaacgataaagccgcctcacgtac

SEQ ID NO: 353746 - DNA, 30 bp, Artificial Sequence
  Synthetic oligonucleotide
ccaataggtgtaggtggttcatagacgtac

SEQ ID NO: 353747 - DNA, 30 bp, Artificial Sequence
  Synthetic oligonucleotide
agcatattgggattctgttaaacaccgtac

SEQ ID NO: 353748 - DNA, 30 bp, Artificial Sequence
  Synthetic oligonucleotide
gctatgagctatgtcgcacttccaccgtac

SEQ ID NO: 353749 - DNA, 30 bp, Artificial Sequence
  Synthetic oligonucleotide
tttgaaacccgaccggaggattacccgtac

SEQ ID NO: 353750 - DNA, 30 bp, Artificial Sequence
  Synthetic oligonucleotide
gaactatgtttatggacatcagccccgtac

SEQ ID NO: 353751 - DNA, 30 bp, Artificial Sequence
  Synthetic oligonucleotide
tcatacggaaattacctttcgagtccgtac

SEQ ID NO: 353752 - DNA, 30 bp, Artificial Sequence
  Synthetic oligonucleotide
aatgtcagggcgtcagagtccctagcgtac

SEQ ID NO: 353753 - DNA, 30 bp, Artificial Sequence
  Synthetic oligonucleotide
gttgcgcctgttagcggccaaaacgcgtac

SEQ ID NO: 353754 - DNA, 30 bp, Artificial Sequence
  Synthetic oligonucleotide
tgactatccacgagtctcagacccgcgtac

SEQ ID NO: 353755 - DNA, 30 bp, Artificial Sequence
  Synthetic oligonucleotide
ctcccttcaattaggacacgctgcgcgtac

SEQ ID NO: 353756 - DNA, 29 bp, Artificial Sequence
  Synthetic oligonucleotide
ttcactcgtcctgcgaaggacaggcgtac

SEQ ID NO: 353757 - DNA, 30 bp, Artificial Sequence
  Synthetic oligonucleotide
tccgcgttgtactgcagttccagggcgtac

SEQ ID NO: 353758 - DNA, 30 bp, Artificial Sequence
  Synthetic oligonucleotide
cagggggtctactgtatgcttatggcgtac

SEQ ID NO: 353759 - DNA, 30 bp, Artificial Sequence
  Synthetic oligonucleotide
gccaaagaagatccttctcttatggcgtac

SEQ ID NO: 353760 - DNA, 30 bp, Artificial Sequence
  Synthetic oligonucleotide
gcaaccatgacgatacccagggcatcgtac

SEQ ID NO: 353761 - DNA, 30 bp, Artificial Sequence
  Synthetic oligonucleotide
gaccctgaacgagccgatccgacgtcgtac

SEQ ID NO: 353762 - DNA, 30 bp, Artificial Sequence
  Synthetic oligonucleotide
tagagggctggtcgactcaggaattcgtac

SEQ ID NO: 353763 - DNA, 30 bp, Artificial Sequence
  Synthetic oligonucleotide
atgaacgtatgtaggccgaactgttcgtac

SEQ ID NO: 353764 - DNA, 30 bp, Artificial Sequence
  Synthetic oligonucleotide
aattaaatcgagttacgacctccaaggtac

SEQ ID NO: 353765 - DNA, 30 bp, Artificial Sequence
  Synthetic oligonucleotide
gcattgtaaaaagtgtaccactgaaggtac

SEQ ID NO: 353766 - DNA, 30 bp, Artificial Sequence
  Synthetic oligonucleotide
agtaccctgacctacaggggggacaggtac

SEQ ID NO: 353767 - DNA, 30 bp, Artificial Sequence
  Synthetic oligonucleotide
ggttggtttaagctattatggatcaggtac

SEQ ID NO: 353768 - DNA, 30 bp, Artificial Sequence
  Synthetic oligonucleotide
gacggagtgcaaaggtaccttaagaggtac

SEQ ID NO: 353769 - DNA, 30 bp, Artificial Sequence
  Synthetic oligonucleotide
aatactgttttcatacgcgaagcgaggtac

SEQ ID NO: 353770 - DNA, 30 bp, Artificial Sequence
  Synthetic oligonucleotide
gaagctagtgtcttggagctctggaggtac

SEQ ID NO: 353771 - DNA, 30 bp, Artificial Sequence
  Synthetic oligonucleotide
tctccagagtaggcgtccgtttggaggtac

SEQ ID NO: 353772 - DNA, 30 bp, Artificial Sequence
  Synthetic oligonucleotide
atgtccgccctggcgtgatgccgtaggtac

SEQ ID NO: 353773 - DNA, 30 bp, Artificial Sequence
  Synthetic oligonucleotide
taacccattcgacctaccagtcgtaggtac

SEQ ID NO: 353774 - DNA, 30 bp, Artificial Sequence
  Synthetic oligonucleotide
atattgctcgatccacgctaggttaggtac

SEQ ID NO: 353775 - DNA, 30 bp, Artificial Sequence
  Synthetic oligonucleotide
tctcccgtgacgtgccaatttcaacggtac

SEQ ID NO: 353776 - DNA, 30 bp, Artificial Sequence
  Synthetic oligonucleotide
ttagcatatacgggtccaaatagacggtac

SEQ ID NO: 353777 - DNA, 30 bp, Artificial Sequence
  Synthetic oligonucleotide
ccgaaattcggaagggattgatgacggtac

SEQ ID NO: 353778 - DNA, 30 bp, Artificial Sequence
  Synthetic oligonucleotide
tctctgcaggtagttagtaggttgcggtac

SEQ ID NO: 353779 - DNA, 30 bp, Artificial Sequence
  Synthetic oligonucleotide
atccgttaatcctatgcgacctatcggtac

SEQ ID NO: 353780 - DNA, 30 bp, Artificial Sequence
  Synthetic oligonucleotide
agggcggcgatagcgatcgattatcggtac

SEQ ID NO: 353781 - DNA, 30 bp, Artificial Sequence
  Synthetic oligonucleotide
gaccaaacggatgcgtggaggggtcggtac

SEQ ID NO: 353782 - DNA, 30 bp, Artificial Sequence
  Synthetic oligonucleotide
ttggtcggcgtgttacggatggttcggtac

SEQ ID NO: 353783 - DNA, 30 bp, Artificial Sequence
  Synthetic oligonucleotide
ctagagtttcaacccgggaatagagggtac

SEQ ID NO: 353784 - DNA, 30 bp, Artificial Sequence
  Synthetic oligonucleotide
cggaagtacatcgtaaaacctctagggtac

SEQ ID NO: 353785 - DNA, 30 bp, Artificial Sequence
  Synthetic oligonucleotide
ccattctataaagtccgattctacgggtac

SEQ ID NO: 353786 - DNA, 30 bp, Artificial Sequence
  Synthetic oligonucleotide
ttggggcggtcttttgtgcgctcggggtac

SEQ ID NO: 353787 - DNA, 30 bp, Artificial Sequence
  Synthetic oligonucleotide
aaggaaatctcaggaatttggcttgggtac

SEQ ID NO: 353788 - DNA, 30 bp, Artificial Sequence
  Synthetic oligonucleotide
gctttaggttagggtgctacagttgggtac

SEQ ID NO: 353789 - DNA, 30 bp, Artificial Sequence
  Synthetic oligonucleotide
aattccgatcgtgtacttagctaatggtac

SEQ ID NO: 353790 - DNA, 30 bp, Artificial Sequence
  Synthetic oligonucleotide
gttacacgatgcgtaggggcagtctggtac

SEQ ID NO: 353791 - DNA, 30 bp, Artificial Sequence
  Synthetic oligonucleotide
gatgattaaggggctggtggggagtggtac

SEQ ID NO: 353792 - DNA, 30 bp, Artificial Sequence
  Synthetic oligonucleotide
ctggtgggcccggaaaatgtatagtggtac

SEQ ID NO: 353793 - DNA, 30 bp, Artificial Sequence
  Synthetic oligonucleotide
tcgcagattggttaatagcggacgtggtac

SEQ ID NO: 353794 - DNA, 30 bp, Artificial Sequence
  Synthetic oligonucleotide
gaacggactcgcggtatttgactgtggtac

SEQ ID NO: 353795 - DNA, 30 bp, Artificial Sequence
  Synthetic oligonucleotide
gagctgatcagcgtgctgctcccaatgtac

SEQ ID NO: 353796 - DNA, 30 bp, Artificial Sequence
  Synthetic oligonucleotide
aaatcgtatgggcgtctagtcgcaatgtac

SEQ ID NO: 353797 - DNA, 30 bp, Artificial Sequence
  Synthetic oligonucleotide
aagctaggttcaccgtggcatcgaatgtac

SEQ ID NO: 353798 - DNA, 30 bp, Artificial Sequence
  Synthetic oligonucleotide
gttaccaggagggcgaagcagtgcatgtac

SEQ ID NO: 353799 - DNA, 30 bp, Artificial Sequence
  Synthetic oligonucleotide
gttgttttggatcaaagagaagggatgtac

SEQ ID NO: 353800 - DNA, 30 bp, Artificial Sequence
  Synthetic oligonucleotide
accagagagcatgtctgttagcgtatgtac

SEQ ID NO: 353801 - DNA, 30 bp, Artificial Sequence
  Synthetic oligonucleotide
gtcagtaccgctctatctgcacttatgtac

SEQ ID NO: 353802 - DNA, 30 bp, Artificial Sequence
  Synthetic oligonucleotide
gccaagtataccgccgagatacccgtgtac

SEQ ID NO: 353803 - DNA, 30 bp, Artificial Sequence
  Synthetic oligonucleotide
ggtcttcttctccgtacaacgtccgtgtac

SEQ ID NO: 353804 - DNA, 30 bp, Artificial Sequence
  Synthetic oligonucleotide
gggtatcatagttgtagtccgctggtgtac

SEQ ID NO: 353805 - DNA, 30 bp, Artificial Sequence
  Synthetic oligonucleotide
tcgttccgagtagatgtgaaatctgtgtac

SEQ ID NO: 353806 - DNA, 30 bp, Artificial Sequence
  Synthetic oligonucleotide
gtgtaattggataacgacatgtttgtgtac

SEQ ID NO: 353807 - DNA, 30 bp, Artificial Sequence
  Synthetic oligonucleotide
gcgtctcatactggagggtctacattgtac

SEQ ID NO: 353808 - DNA, 30 bp, Artificial Sequence
  Synthetic oligonucleotide
atcgacctgttgtcaagtccgggattgtac

SEQ ID NO: 353809 - DNA, 30 bp, Artificial Sequence
  Synthetic oligonucleotide
tagggtacaccataggtattgctattgtac

SEQ ID NO: 353810 - DNA, 30 bp, Artificial Sequence
  Synthetic oligonucleotide
ggaatttgtgcgagcagctaccggttgtac

SEQ ID NO: 353811 - DNA, 30 bp, Artificial Sequence
  Synthetic oligonucleotide
caggatatgttctccactatccggttgtac

SEQ ID NO: 353812 - DNA, 30 bp, Artificial Sequence
  Synthetic oligonucleotide
tgctaggaacgtacagttgtttgtttgtac

SEQ ID NO: 353813 - DNA, 30 bp, Artificial Sequence
  Synthetic oligonucleotide
ttcgatccgaccggcacatacgttttgtac

SEQ ID NO: 353814 - DNA, 30 bp, Artificial Sequence
  Synthetic oligonucleotide
gaccggcaatcctaggggggggaaaattac

SEQ ID NO: 353815 - DNA, 30 bp, Artificial Sequence
  Synthetic oligonucleotide
atgggcctcacagcgactaatgtaaattac

SEQ ID NO: 353816 - DNA, 30 bp, Artificial Sequence
  Synthetic oligonucleotide
tccagttcatgacccggagacttaaattac

SEQ ID NO: 353817 - DNA, 30 bp, Artificial Sequence
  Synthetic oligonucleotide
caacagacttccccggggtggtacaattac

SEQ ID NO: 353818 - DNA, 30 bp, Artificial Sequence
  Synthetic oligonucleotide
ttatcatcgccacaagtgttcatcaattac

SEQ ID NO: 353819 - DNA, 30 bp, Artificial Sequence
  Synthetic oligonucleotide
aacttttgaggacttcaaagccggaattac

SEQ ID NO: 353820 - DNA, 30 bp, Artificial Sequence
  Synthetic oligonucleotide
tttctacattgcactcttatgagtaattac

SEQ ID NO: 353821 - DNA, 30 bp, Artificial Sequence
  Synthetic oligonucleotide
acgtgatcaaaacacggggttcttaattac

SEQ ID NO: 353822 - DNA, 30 bp, Artificial Sequence
  Synthetic oligonucleotide
attagaatcgtcaggtaactcgttaattac

SEQ ID NO: 353823 - DNA, 30 bp, Artificial Sequence
  Synthetic oligonucleotide
ttcgtgccagaagttaccgagtttaattac

SEQ ID NO: 353824 - DNA, 30 bp, Artificial Sequence
  Synthetic oligonucleotide
cgcctgcacgatgttagatatcgacattac

SEQ ID NO: 353825 - DNA, 30 bp, Artificial Sequence
  Synthetic oligonucleotide
gctagtgtcgcacagcgtggggtacattac

SEQ ID NO: 353826 - DNA, 30 bp, Artificial Sequence
  Synthetic oligonucleotide
gaaagggaaccttgccccttgttacattac

SEQ ID NO: 353827 - DNA, 30 bp, Artificial Sequence
  Synthetic oligonucleotide
tatcagacgcaaggtaaacactcccattac

SEQ ID NO: 353828 - DNA, 30 bp, Artificial Sequence
  Synthetic oligonucleotide
ctggctgaggaactgatggtgggccattac

SEQ ID NO: 353829 - DNA, 30 bp, Artificial Sequence
  Synthetic oligonucleotide
tcgcacctgggagctgcatacctgcattac

SEQ ID NO: 353830 - DNA, 30 bp, Artificial Sequence
  Synthetic oligonucleotide
ctcacgcacttctggggatgtgtgcattac

SEQ ID NO: 353831 - DNA, 30 bp, Artificial Sequence
  Synthetic oligonucleotide
atctgtgtggtagcgtcctggcatcattac

SEQ ID NO: 353832 - DNA, 30 bp, Artificial Sequence
  Synthetic oligonucleotide
atcccaagtacttactgaaggcctcattac

SEQ ID NO: 353833 - DNA, 30 bp, Artificial Sequence
  Synthetic oligonucleotide
cctgccctagtaaacttagtatgtcattac

SEQ ID NO: 353834 - DNA, 30 bp, Artificial Sequence
  Synthetic oligonucleotide
cgtcctgcgcggttcgcaacgacagattac

SEQ ID NO: 353835 - DNA, 30 bp, Artificial Sequence
  Synthetic oligonucleotide
ttaatatgataatgcgacgcaccagattac

SEQ ID NO: 353836 - DNA, 30 bp, Artificial Sequence
  Synthetic oligonucleotide
aacaaattatatatcacatgtttggattac

SEQ ID NO: 353837 - DNA, 30 bp, Artificial Sequence
  Synthetic oligonucleotide
acggggtcggtcctcatagacgatgattac

SEQ ID NO: 353838 - DNA, 30 bp, Artificial Sequence
  Synthetic oligonucleotide
agaacatgtcttgagatatgatctgattac

SEQ ID NO: 353839 - DNA, 30 bp, Artificial Sequence
  Synthetic oligonucleotide
cacccggtgaagccctcgccgtctgattac

SEQ ID NO: 353840 - DNA, 30 bp, Artificial Sequence
  Synthetic oligonucleotide
taacgccgcataggagattagtgtgattac

SEQ ID NO: 353841 - DNA, 30 bp, Artificial Sequence
  Synthetic oligonucleotide
tacctattaacgtgcgaagatacatattac

SEQ ID NO: 353842 - DNA, 30 bp, Artificial Sequence
  Synthetic oligonucleotide
caagtagccccaggttcgtcttgatattac

SEQ ID NO: 353843 - DNA, 30 bp, Artificial Sequence
  Synthetic oligonucleotide
tacagttaacgagtattcaaggagtattac

SEQ ID NO: 353844 - DNA, 30 bp, Artificial Sequence
  Synthetic oligonucleotide
aagccagtcttacgtagtgaaatgtattac

SEQ ID NO: 353845 - DNA, 30 bp, Artificial Sequence
  Synthetic oligonucleotide
actcgtgcgctgggtacgacttcttattac

SEQ ID NO: 353846 - DNA, 30 bp, Artificial Sequence
  Synthetic oligonucleotide
ctccataatataacagtcctaggttattac

SEQ ID NO: 353847 - DNA, 30 bp, Artificial Sequence
  Synthetic oligonucleotide
gttcgcgataacctttggcctactacttac

SEQ ID NO: 353848 - DNA, 30 bp, Artificial Sequence
  Synthetic oligonucleotide
gaaatagtgaagaccacgcggtgtacttac

SEQ ID NO: 353849 - DNA, 30 bp, Artificial Sequence
  Synthetic oligonucleotide
caatatagacatcatcggttataaccttac

SEQ ID NO: 353850 - DNA, 30 bp, Artificial Sequence
  Synthetic oligonucleotide
agtagatgtaatctacttgtaataccttac

SEQ ID NO: 353851 - DNA, 30 bp, Artificial Sequence
  Synthetic oligonucleotide
ttgccctctcggtatgaagctttaccttac

SEQ ID NO: 353852 - DNA, 30 bp, Artificial Sequence
  Synthetic oligonucleotide
cgacagagttgagccttccagaagccttac

SEQ ID NO: 353853 - DNA, 30 bp, Artificial Sequence
  Synthetic oligonucleotide
agggctagattcacctgaggttggccttac

SEQ ID NO: 353854 - DNA, 31 bp, Artificial Sequence
  Synthetic oligonucleotide
tgcgaaacgtcatagttgcaggattccttac

SEQ ID NO: 353855 - DNA, 30 bp, Artificial Sequence
  Synthetic oligonucleotide
agcggattgcaacttggaacgtcagcttac

SEQ ID NO: 353856 - DNA, 30 bp, Artificial Sequence
  Synthetic oligonucleotide
gatgtactatgcagatgattgggagcttac

SEQ ID NO: 353857 - DNA, 30 bp, Artificial Sequence
  Synthetic oligonucleotide
gttcgaaggcgcagtcagagatccgcttac

SEQ ID NO: 353858 - DNA, 30 bp, Artificial Sequence
  Synthetic oligonucleotide
cattgggtgccaaccacagatcgcgcttac

SEQ ID NO: 353859 - DNA, 30 bp, Artificial Sequence
  Synthetic oligonucleotide
cgcaacgtgaggaggtagcaggaggcttac

SEQ ID NO: 353860 - DNA, 30 bp, Artificial Sequence
  Synthetic oligonucleotide
tggccttgtaaaaattaatcaatggcttac

SEQ ID NO: 353861 - DNA, 30 bp, Artificial Sequence
  Synthetic oligonucleotide
gactaagacatcacgtgatactttgcttac

SEQ ID NO: 353862 - DNA, 30 bp, Artificial Sequence
  Synthetic oligonucleotide
cgatcctctattctcattactacatcttac

SEQ ID NO: 353863 - DNA, 30 bp, Artificial Sequence
  Synthetic oligonucleotide
caatgtaaagtacgtaggtggcgatcttac

SEQ ID NO: 353864 - DNA, 30 bp, Artificial Sequence
  Synthetic oligonucleotide
catcgaggtcggccgtaaacgacctcttac

SEQ ID NO: 353865 - DNA, 30 bp, Artificial Sequence
  Synthetic oligonucleotide
acgaacgtgtcagctcagacgtggtcttac

SEQ ID NO: 353866 - DNA, 30 bp, Artificial Sequence
  Synthetic oligonucleotide
tcctacgacttttaccagagtatgtcttac

SEQ ID NO: 353867 - DNA, 30 bp, Artificial Sequence
  Synthetic oligonucleotide
tctcctcgctcccggttgtgctgaagttac

SEQ ID NO: 353868 - DNA, 30 bp, Artificial Sequence
  Synthetic oligonucleotide
caccgactaagggccttttcggtaagttac

SEQ ID NO: 353869 - DNA, 30 bp, Artificial Sequence
  Synthetic oligonucleotide
gatataacctacgcgggtctggtaagttac

SEQ ID NO: 353870 - DNA, 30 bp, Artificial Sequence
  Synthetic oligonucleotide
atcgaaagcagcgttcgtccgttaagttac

SEQ ID NO: 353871 - DNA, 30 bp, Artificial Sequence
  Synthetic oligonucleotide
gttggccgacatatatacgtacacagttac

SEQ ID NO: 353872 - DNA, 30 bp, Artificial Sequence
  Synthetic oligonucleotide
atgatgttgttgggggtgctgtgcagttac

SEQ ID NO: 353873 - DNA, 30 bp, Artificial Sequence
  Synthetic oligonucleotide
cggaccgcagattaacgcgggctcagttac

SEQ ID NO: 353874 - DNA, 30 bp, Artificial Sequence
  Synthetic oligonucleotide
gctgaaagtgctttatcggaattcagttac

SEQ ID NO: 353875 - DNA, 30 bp, Artificial Sequence
  Synthetic oligonucleotide
gacccttctcctctgtttgactagagttac

SEQ ID NO: 353876 - DNA, 30 bp, Artificial Sequence
  Synthetic oligonucleotide
ccattcctgcatatctcacccttgagttac

SEQ ID NO: 353877 - DNA, 30 bp, Artificial Sequence
  Synthetic oligonucleotide
gcatcagggtcttccgggggagatagttac

SEQ ID NO: 353878 - DNA, 30 bp, Artificial Sequence
  Synthetic oligonucleotide
tggcatgttatacacaactgtcgtagttac

SEQ ID NO: 353879 - DNA, 30 bp, Artificial Sequence
  Synthetic oligonucleotide
gatactaaagacgtctaccgaggtagttac

SEQ ID NO: 353880 - DNA, 30 bp, Artificial Sequence
  Synthetic oligonucleotide
atatcctccatgtctcaataccttagttac

SEQ ID NO: 353881 - DNA, 30 bp, Artificial Sequence
  Synthetic oligonucleotide
cgggagaccgtacacgcgtagacacgttac

SEQ ID NO: 353882 - DNA, 30 bp, Artificial Sequence
  Synthetic oligonucleotide
ctattataaatacagtcttgaggacgttac

SEQ ID NO: 353883 - DNA, 30 bp, Artificial Sequence
  Synthetic oligonucleotide
agtgtctagaacgtattaatcggccgttac

SEQ ID NO: 353884 - DNA, 30 bp, Artificial Sequence
  Synthetic oligonucleotide
gtagtggcggtcgggacggattctcgttac

SEQ ID NO: 353885 - DNA, 30 bp, Artificial Sequence
  Synthetic oligonucleotide
tctagcttgggtttcccaatttttcgttac

SEQ ID NO: 353886 - DNA, 29 bp, Artificial Sequence
  Synthetic oligonucleotide
tacctcataagaagctcaagtaaggttac

SEQ ID NO: 353887 - DNA, 30 bp, Artificial Sequence
  Synthetic oligonucleotide
gtgaaagtggtggacacggcatgaggttac

SEQ ID NO: 353888 - DNA, 30 bp, Artificial Sequence
  Synthetic oligonucleotide
gagttactaggcaggcgagtccagggttac

SEQ ID NO: 353889 - DNA, 30 bp, Artificial Sequence
  Synthetic oligonucleotide
tatcatatccagcgttagcgtgctggttac

SEQ ID NO: 353890 - DNA, 30 bp, Artificial Sequence
  Synthetic oligonucleotide
gctgggcttattagacacttgcgtggttac

SEQ ID NO: 353891 - DNA, 30 bp, Artificial Sequence
  Synthetic oligonucleotide
ccgggttgccaactgaaatctagatgttac

SEQ ID NO: 353892 - DNA, 30 bp, Artificial Sequence
  Synthetic oligonucleotide
ggaaaggcctctgaggccccacgatgttac

SEQ ID NO: 353893 - DNA, 30 bp, Artificial Sequence
  Synthetic oligonucleotide
gcgtcatctggttggggggtaatatgttac

SEQ ID NO: 353894 - DNA, 30 bp, Artificial Sequence
  Synthetic oligonucleotide
aggattccagtccatgtgtacctatgttac

SEQ ID NO: 353895 - DNA, 30 bp, Artificial Sequence
  Synthetic oligonucleotide
agctcttctgtaccatacagggcctgttac

SEQ ID NO: 353896 - DNA, 30 bp, Artificial Sequence
  Synthetic oligonucleotide
gcctcactcggagaactcgtgagctgttac

SEQ ID NO: 353897 - DNA, 30 bp, Artificial Sequence
  Synthetic oligonucleotide
aaatgcaacttcaatctaagggattgttac

SEQ ID NO: 353898 - DNA, 30 bp, Artificial Sequence
  Synthetic oligonucleotide
cactcgtcgcgaagtcgtagtggttgttac

SEQ ID NO: 353899 - DNA, 30 bp, Artificial Sequence
  Synthetic oligonucleotide
gaagtgttcccgttttagttgctttgttac

SEQ ID NO: 353900 - DNA, 30 bp, Artificial Sequence
  Synthetic oligonucleotide
cccagttgccccccctaaataaaaatttac

SEQ ID NO: 353901 - DNA, 30 bp, Artificial Sequence
  Synthetic oligonucleotide
tgctctgttgggatcatcattggaatttac

SEQ ID NO: 353902 - DNA, 30 bp, Artificial Sequence
  Synthetic oligonucleotide
ttcatcctcaaactaggtatggtcatttac

SEQ ID NO: 353903 - DNA, 30 bp, Artificial Sequence
  Synthetic oligonucleotide
tccaactcgctattacggtgagtgatttac

SEQ ID NO: 353904 - DNA, 30 bp, Artificial Sequence
  Synthetic oligonucleotide
tcaggatcgtcaaaggttcatactatttac

SEQ ID NO: 353905 - DNA, 30 bp, Artificial Sequence
  Synthetic oligonucleotide
atatcacgtgatcctgcggattgtatttac

SEQ ID NO: 353906 - DNA, 30 bp, Artificial Sequence
  Synthetic oligonucleotide
aattaacagaaggccacgtggatactttac

SEQ ID NO: 353907 - DNA, 30 bp, Artificial Sequence
  Synthetic oligonucleotide
gcactttcgcgcaagactatgtccctttac

SEQ ID NO: 353908 - DNA, 30 bp, Artificial Sequence
  Synthetic oligonucleotide
ccggcccaaacaccgcggtgacagctttac

SEQ ID NO: 353909 - DNA, 30 bp, Artificial Sequence
  Synthetic oligonucleotide
gcctcctatggggtcgattagcggctttac

SEQ ID NO: 353910 - DNA, 30 bp, Artificial Sequence
  Synthetic oligonucleotide
aagcgtcacactcacgatggcatgctttac

SEQ ID NO: 353911 - DNA, 30 bp, Artificial Sequence
  Synthetic oligonucleotide
agaaatccacagacgcgccagatgctttac

SEQ ID NO: 353912 - DNA, 30 bp, Artificial Sequence
  Synthetic oligonucleotide
catcatatgatacagtgcctcactctttac

SEQ ID NO: 353913 - DNA, 30 bp, Artificial Sequence
  Synthetic oligonucleotide
tgcataacgctctccagtgggcaagtttac

SEQ ID NO: 353914 - DNA, 30 bp, Artificial Sequence
  Synthetic oligonucleotide
taatttaataaaggatatcatcaagtttac

SEQ ID NO: 353915 - DNA, 30 bp, Artificial Sequence
  Synthetic oligonucleotide
aatgttctgagccgacgtgataccgtttac

SEQ ID NO: 353916 - DNA, 30 bp, Artificial Sequence
  Synthetic oligonucleotide
ccgcacgcttagaaagccacttgcgtttac

SEQ ID NO: 353917 - DNA, 30 bp, Artificial Sequence
  Synthetic oligonucleotide
tcacatccagttattgggctgagggtttac

SEQ ID NO: 353918 - DNA, 30 bp, Artificial Sequence
  Synthetic oligonucleotide
acgttattgtaacttggttaaaatgtttac

SEQ ID NO: 353919 - DNA, 30 bp, Artificial Sequence
  Synthetic oligonucleotide
ctggctggaggtctgtcctgccgtgtttac

SEQ ID NO: 353920 - DNA, 30 bp, Artificial Sequence
  Synthetic oligonucleotide
atgaaggaggactcagtgtgaggtgtttac

SEQ ID NO: 353921 - DNA, 30 bp, Artificial Sequence
  Synthetic oligonucleotide
cacggccggatagttcaaaatcgattttac

SEQ ID NO: 353922 - DNA, 30 bp, Artificial Sequence
  Synthetic oligonucleotide
aattcgctgggacgcataatcggattttac

SEQ ID NO: 353923 - DNA, 30 bp, Artificial Sequence
  Synthetic oligonucleotide
ttcggtggaccgttcaggtccgggttttac

SEQ ID NO: 353924 - DNA, 30 bp, Artificial Sequence
  Synthetic oligonucleotide
tggcgctcgagggctactgactcaaaaacc

SEQ ID NO: 353925 - DNA, 30 bp, Artificial Sequence
  Synthetic oligonucleotide
acgcccgataatgtgggttcctcaaaaacc

SEQ ID NO: 353926 - DNA, 30 bp, Artificial Sequence
  Synthetic oligonucleotide
gggaagtgacagggaccattgataaaaacc

SEQ ID NO: 353927 - DNA, 30 bp, Artificial Sequence
  Synthetic oligonucleotide
agacgctcacgtcaaccacttgccaaaacc

SEQ ID NO: 353928 - DNA, 30 bp, Artificial Sequence
  Synthetic oligonucleotide
ggtggttcaagggctactctgtccaaaacc

SEQ ID NO: 353929 - DNA, 30 bp, Artificial Sequence
  Synthetic oligonucleotide
aacggggtaagatcctgcatcctcaaaacc

SEQ ID NO: 353930 - DNA, 30 bp, Artificial Sequence
  Synthetic oligonucleotide
gttcagagatgatgcatccggtagaaaacc

SEQ ID NO: 353931 - DNA, 30 bp, Artificial Sequence
  Synthetic oligonucleotide
tagctgccgagttaacagaaatggaaaacc

SEQ ID NO: 353932 - DNA, 30 bp, Artificial Sequence
  Synthetic oligonucleotide
catgactgccattgaggcatggataaaacc

SEQ ID NO: 353933 - DNA, 31 bp, Artificial Sequence
  Synthetic oligonucleotide
agtttgtcatcgtcgcctagggactaaaacc

SEQ ID NO: 353934 - DNA, 30 bp, Artificial Sequence
  Synthetic oligonucleotide
atcgataaacacttagtttcgcctaaaacc

SEQ ID NO: 353935 - DNA, 30 bp, Artificial Sequence
  Synthetic oligonucleotide
tatcggatctatagtcatagtatacaaacc

SEQ ID NO: 353936 - DNA, 30 bp, Artificial Sequence
  Synthetic oligonucleotide
tccaatgcagtaactgtatcaatccaaacc

SEQ ID NO: 353937 - DNA, 30 bp, Artificial Sequence
  Synthetic oligonucleotide
taacctggaaagcgtacatgggggcaaacc

SEQ ID NO: 353938 - DNA, 30 bp, Artificial Sequence
  Synthetic oligonucleotide
cggggtagggttgtggtaagtgggcaaacc

SEQ ID NO: 353939 - DNA, 30 bp, Artificial Sequence
  Synthetic oligonucleotide
ggcttagaagcttatgcttgactgcaaacc

SEQ ID NO: 353940 - DNA, 30 bp, Artificial Sequence
  Synthetic oligonucleotide
gggcaccatgaaataagcgtcagtcaaacc

SEQ ID NO: 353941 - DNA, 30 bp, Artificial Sequence
  Synthetic oligonucleotide
tgttgcgtcacccgaacttgtagtcaaacc

SEQ ID NO: 353942 - DNA, 30 bp, Artificial Sequence
  Synthetic oligonucleotide
aatcccttagaatgaggggtcggagaaacc

SEQ ID NO: 353943 - DNA, 30 bp, Artificial Sequence
  Synthetic oligonucleotide
aaggagcggtacagcatcaactgagaaacc

SEQ ID NO: 353944 - DNA, 30 bp, Artificial Sequence
  Synthetic oligonucleotide
gttggccgaagggtgcgaaccctagaaacc

SEQ ID NO: 353945 - DNA, 30 bp, Artificial Sequence
  Synthetic oligonucleotide
agcgttgctacctaaggtccgttagaaacc

SEQ ID NO: 353946 - DNA, 30 bp, Artificial Sequence
  Synthetic oligonucleotide
gatgaaaggccttttcgaatgtatgaaacc

SEQ ID NO: 353947 - DNA, 30 bp, Artificial Sequence
  Synthetic oligonucleotide
cgcggtttgagctggatttacagtgaaacc

SEQ ID NO: 353948 - DNA, 30 bp, Artificial Sequence
  Synthetic oligonucleotide
gctgtacgaatgctctcgatgtttgaaacc

SEQ ID NO: 353949 - DNA, 30 bp, Artificial Sequence
  Synthetic oligonucleotide
tgcgtcaggctcttggtgacgtaataaacc

SEQ ID NO: 353950 - DNA, 30 bp, Artificial Sequence
  Synthetic oligonucleotide
gctgcagcacaattcatagacacataaacc

SEQ ID NO: 353951 - DNA, 30 bp, Artificial Sequence
  Synthetic oligonucleotide
gtctaggaagttgcatgtgcaagataaacc

SEQ ID NO: 353952 - DNA, 30 bp, Artificial Sequence
  Synthetic oligonucleotide
cattattagtaagctttgggcgtataaacc

SEQ ID NO: 353953 - DNA, 30 bp, Artificial Sequence
  Synthetic oligonucleotide
tggttgagcaattaattgactcgctaaacc

SEQ ID NO: 353954 - DNA, 30 bp, Artificial Sequence
  Synthetic oligonucleotide
gcgaaaagcaccgtagtggccatctaaacc

SEQ ID NO: 353955 - DNA, 30 bp, Artificial Sequence
  Synthetic oligonucleotide
ggggtggtatgaggcgcgagtttctaaacc

SEQ ID NO: 353956 - DNA, 30 bp, Artificial Sequence
  Synthetic oligonucleotide
agagtttgagcgttacaagtaaggtaaacc

SEQ ID NO: 353957 - DNA, 30 bp, Artificial Sequence
  Synthetic oligonucleotide
cattgaatgtaacggtccaggaggtaaacc

SEQ ID NO: 353958 - DNA, 30 bp, Artificial Sequence
  Synthetic oligonucleotide
tctagcgggcatccgcgaactgtgtaaacc

SEQ ID NO: 353959 - DNA, 30 bp, Artificial Sequence
  Synthetic oligonucleotide
tagtggcggttaaattacgcctcttaaacc

SEQ ID NO: 353960 - DNA, 30 bp, Artificial Sequence
  Synthetic oligonucleotide
acatcaagtcgtcttaaccgtccaacaacc

SEQ ID NO: 353961 - DNA, 30 bp, Artificial Sequence
  Synthetic oligonucleotide
acctgacgaggttgttgagtcctaacaacc

SEQ ID NO: 353962 - DNA, 30 bp, Artificial Sequence
  Synthetic oligonucleotide
aaatcgagttataacgacttagagacaacc

SEQ ID NO: 353963 - DNA, 30 bp, Artificial Sequence
  Synthetic oligonucleotide
cttacatcgcaatcaattgcacggacaacc

SEQ ID NO: 353964 - DNA, 30 bp, Artificial Sequence
  Synthetic oligonucleotide
ttgtgcctaaacgggcaaaatcggacaacc

SEQ ID NO: 353965 - DNA, 30 bp, Artificial Sequence
  Synthetic oligonucleotide
aagacggcataagctgattgtcggacaacc

SEQ ID NO: 353966 - DNA, 30 bp, Artificial Sequence
  Synthetic oligonucleotide
gttctggaccccgttggtggttcaccaacc

SEQ ID NO: 353967 - DNA, 30 bp, Artificial Sequence
  Synthetic oligonucleotide
aaatgtgtcgaagaatcgtaagagccaacc

SEQ ID NO: 353968 - DNA, 30 bp, Artificial Sequence
  Synthetic oligonucleotide
ttcatagagatccatccctcgtacgcaacc

SEQ ID NO: 353969 - DNA, 30 bp, Artificial Sequence
  Synthetic oligonucleotide
gcggaccacgtagtttacgtgtacgcaacc

SEQ ID NO: 353970 - DNA, 30 bp, Artificial Sequence
  Synthetic oligonucleotide
cctagctgtcgatcacgggattctgcaacc

SEQ ID NO: 353971 - DNA, 30 bp, Artificial Sequence
  Synthetic oligonucleotide
atcacctgtggctggaggtgcggtgcaacc

SEQ ID NO: 353972 - DNA, 30 bp, Artificial Sequence
  Synthetic oligonucleotide
gtgtcttaattaatgttaggctgtgcaacc

SEQ ID NO: 353973 - DNA, 30 bp, Artificial Sequence
  Synthetic oligonucleotide
agtttcgtgtgccatggtgtggcatcaacc

SEQ ID NO: 353974 - DNA, 29 bp, Artificial Sequence
  Synthetic oligonucleotide
gtatttcgcttactagatctatatcaacc

SEQ ID NO: 353975 - DNA, 30 bp, Artificial Sequence
  Synthetic oligonucleotide
caaactctataattaacatatacctcaacc

SEQ ID NO: 353976 - DNA, 30 bp, Artificial Sequence
  Synthetic oligonucleotide
tgtactttggatcgcggaccagtctcaacc

SEQ ID NO: 353977 - DNA, 30 bp, Artificial Sequence
  Synthetic oligonucleotide
aaaccgtccattactgtaaaagagtcaacc

SEQ ID NO: 353978 - DNA, 30 bp, Artificial Sequence
  Synthetic oligonucleotide
atttcctgaaagcgttaacatgcgtcaacc

SEQ ID NO: 353979 - DNA, 30 bp, Artificial Sequence
  Synthetic oligonucleotide
acaccggcatcaagacctcataggtcaacc

SEQ ID NO: 353980 - DNA, 30 bp, Artificial Sequence
  Synthetic oligonucleotide
gctaatgatgtcactttggcgatgtcaacc

SEQ ID NO: 353981 - DNA, 30 bp, Artificial Sequence
  Synthetic oligonucleotide
gttcgttcccttcacaatggcgtgtcaacc

SEQ ID NO: 353982 - DNA, 30 bp, Artificial Sequence
  Synthetic oligonucleotide
ctcacagctaacatgtattgaggaagaacc

SEQ ID NO: 353983 - DNA, 30 bp, Artificial Sequence
  Synthetic oligonucleotide
tgcctcagacgtaataatgatggaagaacc

SEQ ID NO: 353984 - DNA, 30 bp, Artificial Sequence
  Synthetic oligonucleotide
gacgtatggtaggtctagcctataagaacc

SEQ ID NO: 353985 - DNA, 30 bp, Artificial Sequence
  Synthetic oligonucleotide
tgtttaaggacatgggggatcttaagaacc

SEQ ID NO: 353986 - DNA, 30 bp, Artificial Sequence
  Synthetic oligonucleotide
aagttctcacaggctctcacaaacagaacc

SEQ ID NO: 353987 - DNA, 30 bp, Artificial Sequence
  Synthetic oligonucleotide
gttacagcgattgtattgttcaacagaacc

SEQ ID NO: 353988 - DNA, 30 bp, Artificial Sequence
  Synthetic oligonucleotide
ctggattatgcaatcattttagatagaacc

SEQ ID NO: 353989 - DNA, 30 bp, Artificial Sequence
  Synthetic oligonucleotide
cagcactcagataagcccccaccacgaacc

SEQ ID NO: 353990 - DNA, 30 bp, Artificial Sequence
  Synthetic oligonucleotide
ccaaagagatttgggtagagaggacgaacc

SEQ ID NO: 353991 - DNA, 30 bp, Artificial Sequence
  Synthetic oligonucleotide
agattgcgcagcaatactgtaatacgaacc

SEQ ID NO: 353992 - DNA, 30 bp, Artificial Sequence
  Synthetic oligonucleotide
gaaaaatcacaattttggtctgcccgaacc

SEQ ID NO: 353993 - DNA, 30 bp, Artificial Sequence
  Synthetic oligonucleotide
gctgtcggggaggtcaccaccgacggaacc

SEQ ID NO: 353994 - DNA, 30 bp, Artificial Sequence
  Synthetic oligonucleotide
cacgtaacagatagcaggaataagggaacc

SEQ ID NO: 353995 - DNA, 30 bp, Artificial Sequence
  Synthetic oligonucleotide
cctttcgtatcgtcctagcgcgggggaacc

SEQ ID NO: 353996 - DNA, 30 bp, Artificial Sequence
  Synthetic oligonucleotide
gtttcagcgtcaaggtatgaaaatggaacc

SEQ ID NO: 353997 - DNA, 30 bp, Artificial Sequence
  Synthetic oligonucleotide
gagaatataagatttgacagacatggaacc

SEQ ID NO: 353998 - DNA, 30 bp, Artificial Sequence
  Synthetic oligonucleotide
ccaaaattgagacatttgacgtctggaacc

SEQ ID NO: 353999 - DNA, 30 bp, Artificial Sequence
  Synthetic oligonucleotide
gcggtccaaggacgaattatcggtggaacc

SEQ ID NO: 354000 - DNA, 30 bp, Artificial Sequence
  Synthetic oligonucleotide
tacctccccgggttaacaaagggtggaacc

SEQ ID NO: 354001 - DNA, 30 bp, Artificial Sequence
  Synthetic oligonucleotide
tttttcgcgagcctcgaatcacttggaacc

SEQ ID NO: 354002 - DNA, 30 bp, Artificial Sequence
  Synthetic oligonucleotide
ataggagttccacgactatgacttggaacc

SEQ ID NO: 354003 - DNA, 30 bp, Artificial Sequence
  Synthetic oligonucleotide
gcaaatcagaatctgaagtaccttggaacc

SEQ ID NO: 354004 - DNA, 30 bp, Artificial Sequence
  Synthetic oligonucleotide
tatcactatgccgaatgacgcgttggaacc

SEQ ID NO: 354005 - DNA, 30 bp, Artificial Sequence
  Synthetic oligonucleotide
tttgtatccgtgttgtatgtatttggaacc

SEQ ID NO: 354006 - DNA, 30 bp, Artificial Sequence
  Synthetic oligonucleotide
attccggataggtattaggagtactgaacc

SEQ ID NO: 354007 - DNA, 30 bp, Artificial Sequence
  Synthetic oligonucleotide
tcggcattgggatgctctttgggctgaacc

SEQ ID NO: 354008 - DNA, 30 bp, Artificial Sequence
  Synthetic oligonucleotide
ggataccgtgtattagactaatgctgaacc

SEQ ID NO: 354009 - DNA, 30 bp, Artificial Sequence
  Synthetic oligonucleotide
cgcgctcctttgggaattccatgctgaacc

SEQ ID NO: 354010 - DNA, 30 bp, Artificial Sequence
  Synthetic oligonucleotide
gacaggggcaaagtctctacttgctgaacc

SEQ ID NO: 354011 - DNA, 30 bp, Artificial Sequence
  Synthetic oligonucleotide
tacaggtaaggcggacaagccttctgaacc

SEQ ID NO: 354012 - DNA, 30 bp, Artificial Sequence
  Synthetic oligonucleotide
accgctttgagtcgggcatagtcgtgaacc

SEQ ID NO: 354013 - DNA, 30 bp, Artificial Sequence
  Synthetic oligonucleotide
tgggcgggctgtctatagcaatgaataacc

SEQ ID NO: 354014 - DNA, 30 bp, Artificial Sequence
  Synthetic oligonucleotide
gttggttgacgatataacgataggataacc

SEQ ID NO: 354015 - DNA, 30 bp, Artificial Sequence
  Synthetic oligonucleotide
cttcgacagtagtccacctacgtgataacc

SEQ ID NO: 354016 - DNA, 30 bp, Artificial Sequence
  Synthetic oligonucleotide
gggatcgtttaagatccattacaactaacc

SEQ ID NO: 354017 - DNA, 30 bp, Artificial Sequence
  Synthetic oligonucleotide
cacagtgtttggctgaagttggagctaacc

SEQ ID NO: 354018 - DNA, 30 bp, Artificial Sequence
  Synthetic oligonucleotide
tttactcacagcgaagtctccgggctaacc

SEQ ID NO: 354019 - DNA, 30 bp, Artificial Sequence
  Synthetic oligonucleotide
cttaacagcttcggcccagcggatctaacc

SEQ ID NO: 354020 - DNA, 30 bp, Artificial Sequence
  Synthetic oligonucleotide
gggcaccctagtctctagaacgcggtaacc

SEQ ID NO: 354021 - DNA, 30 bp, Artificial Sequence
  Synthetic oligonucleotide
tacaatccagttccatacggtaatgtaacc

SEQ ID NO: 354022 - DNA, 29 bp, Artificial Sequence
  Synthetic oligonucleotide
cagggagcaataagttcaatcgtgtaacc

SEQ ID NO: 354023 - DNA, 30 bp, Artificial Sequence
  Synthetic oligonucleotide
gtagatcctgggcacattgaatttgtaacc

SEQ ID NO: 354024 - DNA, 30 bp, Artificial Sequence
  Synthetic oligonucleotide
attgggaaaaagttattaaaaaaattaacc

SEQ ID NO: 354025 - DNA, 30 bp, Artificial Sequence
  Synthetic oligonucleotide
gagtagccagtcgtcgcacgacaattaacc

SEQ ID NO: 354026 - DNA, 30 bp, Artificial Sequence
  Synthetic oligonucleotide
ccatcagcgtcgctctacgcgcgattaacc

SEQ ID NO: 354027 - DNA, 30 bp, Artificial Sequence
  Synthetic oligonucleotide
gttagaggcccactggccgtggagttaacc

SEQ ID NO: 354028 - DNA, 30 bp, Artificial Sequence
  Synthetic oligonucleotide
cttgcctactgcggcgcacatgagttaacc

SEQ ID NO: 354029 - DNA, 30 bp, Artificial Sequence
  Synthetic oligonucleotide
cagtcactcactagacatctacctttaacc

SEQ ID NO: 354030 - DNA, 30 bp, Artificial Sequence
  Synthetic oligonucleotide
tttttggtaactaacagccttacaaacacc

SEQ ID NO: 354031 - DNA, 30 bp, Artificial Sequence
  Synthetic oligonucleotide
caccgcaggatgagcatgttgcgaaacacc

SEQ ID NO: 354032 - DNA, 30 bp, Artificial Sequence
  Synthetic oligonucleotide
gggcggtgagaacaccggaccatgaacacc

SEQ ID NO: 354033 - DNA, 30 bp, Artificial Sequence
  Synthetic oligonucleotide
atctttactggatccatcgtggtgaacacc

SEQ ID NO: 354034 - DNA, 30 bp, Artificial Sequence
  Synthetic oligonucleotide
ggacagggtttaagacccgggttgaacacc

SEQ ID NO: 354035 - DNA, 30 bp, Artificial Sequence
  Synthetic oligonucleotide
aatgacagccagctagacgggcgtaacacc

SEQ ID NO: 354036 - DNA, 30 bp, Artificial Sequence
  Synthetic oligonucleotide
aatacaattagttgcgttcccgaccacacc

SEQ ID NO: 354037 - DNA, 30 bp, Artificial Sequence
  Synthetic oligonucleotide
aggaatgtgtacagatctagtctccacacc

SEQ ID NO: 354038 - DNA, 30 bp, Artificial Sequence
  Synthetic oligonucleotide
gggagttagacggtgccattgttccacacc

SEQ ID NO: 354039 - DNA, 30 bp, Artificial Sequence
  Synthetic oligonucleotide
agctcaggggctggtagagtaacgcacacc

SEQ ID NO: 354040 - DNA, 30 bp, Artificial Sequence
  Synthetic oligonucleotide
gtggcgggatgccaggaaccggcgcacacc

SEQ ID NO: 354041 - DNA, 30 bp, Artificial Sequence
  Synthetic oligonucleotide
tacttcttttcataagactcgactcacacc

SEQ ID NO: 354042 - DNA, 30 bp, Artificial Sequence
  Synthetic oligonucleotide
gtcataggccttgattgagtagttcacacc

SEQ ID NO: 354043 - DNA, 30 bp, Artificial Sequence
  Synthetic oligonucleotide
tggggacaacgatgaccgggacaagacacc

SEQ ID NO: 354044 - DNA, 30 bp, Artificial Sequence
  Synthetic oligonucleotide
tcgtcgcatattatggctggatcggacacc

SEQ ID NO: 354045 - DNA, 30 bp, Artificial Sequence
  Synthetic oligonucleotide
aatagatattcaaaggaaataagggacacc

SEQ ID NO: 354046 - DNA, 30 bp, Artificial Sequence
  Synthetic oligonucleotide
gcccacttgaattcccttgtgccatacacc

SEQ ID NO: 354047 - DNA, 30 bp, Artificial Sequence
  Synthetic oligonucleotide
ccccggatgtgcacgtcggttgcatacacc

SEQ ID NO: 354048 - DNA, 30 bp, Artificial Sequence
  Synthetic oligonucleotide
tacttagtaccgaacgattcaggatacacc

SEQ ID NO: 354049 - DNA, 30 bp, Artificial Sequence
  Synthetic oligonucleotide
taacgttattctctaatggtacattacacc

SEQ ID NO: 354050 - DNA, 30 bp, Artificial Sequence
  Synthetic oligonucleotide
gggtcgcgatcccgtttttatcaaaccacc

SEQ ID NO: 354051 - DNA, 30 bp, Artificial Sequence
  Synthetic oligonucleotide
atcaaacacagcagtggttctcaaaccacc

SEQ ID NO: 354052 - DNA, 30 bp, Artificial Sequence
  Synthetic oligonucleotide
gggacaacgtggtttagattctaaaccacc

SEQ ID NO: 354053 - DNA, 30 bp, Artificial Sequence
  Synthetic oligonucleotide
gagagggtccgattttcaggcagaaccacc

SEQ ID NO: 354054 - DNA, 30 bp, Artificial Sequence
  Synthetic oligonucleotide
atgctggtgcaaaacgagccgcccaccacc

SEQ ID NO: 354055 - DNA, 30 bp, Artificial Sequence
  Synthetic oligonucleotide
tatatcatttcgtatcaaccaatcaccacc

SEQ ID NO: 354056 - DNA, 30 bp, Artificial Sequence
  Synthetic oligonucleotide
tgggggccttagaatatgtgttagaccacc

SEQ ID NO: 354057 - DNA, 30 bp, Artificial Sequence
  Synthetic oligonucleotide
gctgtgtcagcggtcaatagctcgaccacc

SEQ ID NO: 354058 - DNA, 30 bp, Artificial Sequence
  Synthetic oligonucleotide
acgttccaggacaaaattatctttaccacc

SEQ ID NO: 354059 - DNA, 30 bp, Artificial Sequence
  Synthetic oligonucleotide
aaatgggagtttgatgttatgatacccacc

SEQ ID NO: 354060 - DNA, 30 bp, Artificial Sequence
  Synthetic oligonucleotide
taggatgggtcagcagccccgttacccacc

SEQ ID NO: 354061 - DNA, 30 bp, Artificial Sequence
  Synthetic oligonucleotide
atgcgagaacccttaagaatctaccccacc

SEQ ID NO: 354062 - DNA, 30 bp, Artificial Sequence
  Synthetic oligonucleotide
gatttaggtcatgctggattaaagcccacc

SEQ ID NO: 354063 - DNA, 30 bp, Artificial Sequence
  Synthetic oligonucleotide
ggtcgtggtttagcgtatggaccgcccacc

SEQ ID NO: 354064 - DNA, 30 bp, Artificial Sequence
  Synthetic oligonucleotide
tttcgatgagtagggcgagtctaagccacc

SEQ ID NO: 354065 - DNA, 30 bp, Artificial Sequence
  Synthetic oligonucleotide
acgccccttatcgattagcctccagccacc

SEQ ID NO: 354066 - DNA, 30 bp, Artificial Sequence
  Synthetic oligonucleotide
gctgcgtctacgtagtaaggcatcgccacc

SEQ ID NO: 354067 - DNA, 30 bp, Artificial Sequence
  Synthetic oligonucleotide
gtttgcacgaatgtccaatacagtgccacc

SEQ ID NO: 354068 - DNA, 30 bp, Artificial Sequence
  Synthetic oligonucleotide
ggaactcctagaaacccgtctaaatccacc

SEQ ID NO: 354069 - DNA, 30 bp, Artificial Sequence
  Synthetic oligonucleotide
tatggggttcctgaaaatgaatgatccacc

SEQ ID NO: 354070 - DNA, 30 bp, Artificial Sequence
  Synthetic oligonucleotide
gaaaccccctggcagtcataagtatccacc

SEQ ID NO: 354071 - DNA, 30 bp, Artificial Sequence
  Synthetic oligonucleotide
aggggtacgtttggattttacgtatccacc

SEQ ID NO: 354072 - DNA, 30 bp, Artificial Sequence
  Synthetic oligonucleotide
tttttcctaggcatcatttcaggctccacc

SEQ ID NO: 354073 - DNA, 30 bp, Artificial Sequence
  Synthetic oligonucleotide
aaacaaaaaaaccacctgacatattccacc

SEQ ID NO: 354074 - DNA, 30 bp, Artificial Sequence
  Synthetic oligonucleotide
tcagaactgaccaacgcaacgccttccacc

SEQ ID NO: 354075 - DNA, 30 bp, Artificial Sequence
  Synthetic oligonucleotide
agcgtagcttcacgaggttatttttccacc

SEQ ID NO: 354076 - DNA, 30 bp, Artificial Sequence
  Synthetic oligonucleotide
tacaatccgtaagatccgtcatgaagcacc

SEQ ID NO: 354077 - DNA, 30 bp, Artificial Sequence
  Synthetic oligonucleotide
gaattgaccgatgatgaggcactgagcacc

SEQ ID NO: 354078 - DNA, 30 bp, Artificial Sequence
  Synthetic oligonucleotide
ggcgaagctagctccagggtatatagcacc

SEQ ID NO: 354079 - DNA, 30 bp, Artificial Sequence
  Synthetic oligonucleotide
ttggtgccacggatatagaaaactagcacc

SEQ ID NO: 354080 - DNA, 30 bp, Artificial Sequence
  Synthetic oligonucleotide
atggtgctaaatcgaatattcgctagcacc

SEQ ID NO: 354081 - DNA, 30 bp, Artificial Sequence
  Synthetic oligonucleotide
actcccgctaggaccctgctggctagcacc

SEQ ID NO: 354082 - DNA, 30 bp, Artificial Sequence
  Synthetic oligonucleotide
gtccagatggtttgtgtcaaccgtagcacc

SEQ ID NO: 354083 - DNA, 30 bp, Artificial Sequence
  Synthetic oligonucleotide
caggtggtaacggacagaatctcacgcacc

SEQ ID NO: 354084 - DNA, 30 bp, Artificial Sequence
  Synthetic oligonucleotide
ttacgctggatatacacaaatccaggcacc

SEQ ID NO: 354085 - DNA, 30 bp, Artificial Sequence
  Synthetic oligonucleotide
gtttgtcggtatctaagcgttccaggcacc

SEQ ID NO: 354086 - DNA, 30 bp, Artificial Sequence
  Synthetic oligonucleotide
gcgtgccgagttagcatccacaacggcacc

SEQ ID NO: 354087 - DNA, 30 bp, Artificial Sequence
  Synthetic oligonucleotide
ggcggagtaagtggcctcagtcacggcacc

SEQ ID NO: 354088 - DNA, 30 bp, Artificial Sequence
  Synthetic oligonucleotide
tgtgggtcatcgggtcagtgcgatggcacc

SEQ ID NO: 354089 - DNA, 30 bp, Artificial Sequence
  Synthetic oligonucleotide
gtaccctggtttttaaagtgaactggcacc

SEQ ID NO: 354090 - DNA, 30 bp, Artificial Sequence
  Synthetic oligonucleotide
gaaaaacggcctcgccggtccttatgcacc

SEQ ID NO: 354091 - DNA, 40 bp, Artificial Sequence
  Synthetic oligonucleotide
tctatcgttatcgtggtatacctcagctttgtattgcacc

SEQ ID NO: 354092 - DNA, 30 bp, Artificial Sequence
  Synthetic oligonucleotide
taaccatgagcgctctgaacatcttgcacc

SEQ ID NO: 354093 - DNA, 30 bp, Artificial Sequence
  Synthetic oligonucleotide
ggagattttgtggagaacagcaatatcacc

SEQ ID NO: 354094 - DNA, 30 bp, Artificial Sequence
  Synthetic oligonucleotide
gattaacgactcttagtccataatatcacc

SEQ ID NO: 354095 - DNA, 30 bp, Artificial Sequence
  Synthetic oligonucleotide
tgtattggactgtactcgttcaaactcacc

SEQ ID NO: 354096 - DNA, 30 bp, Artificial Sequence
  Synthetic oligonucleotide
aaatggttaaagactgtcagctcactcacc

SEQ ID NO: 354097 - DNA, 30 bp, Artificial Sequence
  Synthetic oligonucleotide
tattatatcaccacaaagaacgtactcacc

SEQ ID NO: 354098 - DNA, 30 bp, Artificial Sequence
  Synthetic oligonucleotide
actcgctaaagtggaaatattttactcacc

SEQ ID NO: 354099 - DNA, 30 bp, Artificial Sequence
  Synthetic oligonucleotide
gtgaaagacgtgagcagtcagcatctcacc

SEQ ID NO: 354100 - DNA, 31 bp, Artificial Sequence
  Synthetic oligonucleotide
tatggcgtacaggacactgggctatctcacc

SEQ ID NO: 354101 - DNA, 30 bp, Artificial Sequence
  Synthetic oligonucleotide
gtttaatttaatccttggcatccagtcacc

SEQ ID NO: 354102 - DNA, 30 bp, Artificial Sequence
  Synthetic oligonucleotide
atcgcaaactatcagcaagctgtagtcacc

SEQ ID NO: 354103 - DNA, 30 bp, Artificial Sequence
  Synthetic oligonucleotide
gagcgtggtcgtcctggaactttagtcacc

SEQ ID NO: 354104 - DNA, 30 bp, Artificial Sequence
  Synthetic oligonucleotide
agttcatggagcaaacggttacacgtcacc

SEQ ID NO: 354105 - DNA, 30 bp, Artificial Sequence
  Synthetic oligonucleotide
gtagaatcctagaattttgaggccgtcacc

SEQ ID NO: 354106 - DNA, 30 bp, Artificial Sequence
  Synthetic oligonucleotide
gaattctgtaagttatgatatcgcgtcacc

SEQ ID NO: 354107 - DNA, 30 bp, Artificial Sequence
  Synthetic oligonucleotide
tacgcgaatttagggttgtgggcggtcacc

SEQ ID NO: 354108 - DNA, 30 bp, Artificial Sequence
  Synthetic oligonucleotide
aaatgttaagggtgggtcggtacattcacc

SEQ ID NO: 354109 - DNA, 30 bp, Artificial Sequence
  Synthetic oligonucleotide
ccttcgttttacgagggcggtggattcacc

SEQ ID NO: 354110 - DNA, 30 bp, Artificial Sequence
  Synthetic oligonucleotide
gctcagatacgcccgtattcgcacttcacc

SEQ ID NO: 354111 - DNA, 30 bp, Artificial Sequence
  Synthetic oligonucleotide
caatctgcgtgctttcgaatgcgcttcacc

SEQ ID NO: 354112 - DNA, 30 bp, Artificial Sequence
  Synthetic oligonucleotide
gagccctaatgaccataggcttatttcacc

SEQ ID NO: 354113 - DNA, 30 bp, Artificial Sequence
  Synthetic oligonucleotide
tggcatacgaggtactcgcagggtttcacc

SEQ ID NO: 354114 - DNA, 30 bp, Artificial Sequence
  Synthetic oligonucleotide
cagcagtgtcgttcacggctgtgtttcacc

SEQ ID NO: 354115 - DNA, 30 bp, Artificial Sequence
  Synthetic oligonucleotide
gttggcccccggacgagctaaattttcacc

SEQ ID NO: 354116 - DNA, 30 bp, Artificial Sequence
  Synthetic oligonucleotide
tcatgtgagaggcgtaagccgttaaagacc

SEQ ID NO: 354117 - DNA, 30 bp, Artificial Sequence
  Synthetic oligonucleotide
agtagttttcacattcggggaaataagacc

SEQ ID NO: 354118 - DNA, 30 bp, Artificial Sequence
  Synthetic oligonucleotide
gattgttggcaaagggtatattgtaagacc

SEQ ID NO: 354119 - DNA, 30 bp, Artificial Sequence
  Synthetic oligonucleotide
ggtgtataagacacaaactgacttaagacc

SEQ ID NO: 354120 - DNA, 30 bp, Artificial Sequence
  Synthetic oligonucleotide
cagatcgagagccctgcgagtccgcagacc

SEQ ID NO: 354121 - DNA, 30 bp, Artificial Sequence
  Synthetic oligonucleotide
attagttacctggtggtatccgggcagacc

SEQ ID NO: 354122 - DNA, 30 bp, Artificial Sequence
  Synthetic oligonucleotide
gtacagccgtacaatgccaccattcagacc

SEQ ID NO: 354123 - DNA, 30 bp, Artificial Sequence
  Synthetic oligonucleotide
tgattttggggaatgcctcgtacagagacc

SEQ ID NO: 354124 - DNA, 30 bp, Artificial Sequence
  Synthetic oligonucleotide
gcccgtcaacatgggaatacggcagagacc

SEQ ID NO: 354125 - DNA, 30 bp, Artificial Sequence
  Synthetic oligonucleotide
gtttggtcggttaccattgaacgagagacc

SEQ ID NO: 354126 - DNA, 30 bp, Artificial Sequence
  Synthetic oligonucleotide
tacatcaatagagtctgtgaaaacgagacc

SEQ ID NO: 354127 - DNA, 30 bp, Artificial Sequence
  Synthetic oligonucleotide
gagatctcatatctcccgagctgggagacc

SEQ ID NO: 354128 - DNA, 30 bp, Artificial Sequence
  Synthetic oligonucleotide
gtaataaaaactttgcgtatagttgagacc

SEQ ID NO: 354129 - DNA, 30 bp, Artificial Sequence
  Synthetic oligonucleotide
gattgggtatacggttccgcatcatagacc

SEQ ID NO: 354130 - DNA, 30 bp, Artificial Sequence
  Synthetic oligonucleotide
agactaagcaagtttatgttgctatagacc

SEQ ID NO: 354131 - DNA, 30 bp, Artificial Sequence
  Synthetic oligonucleotide
ataacaggcagcggtaagggaaactagacc

SEQ ID NO: 354132 - DNA, 30 bp, Artificial Sequence
  Synthetic oligonucleotide
tgtaggagtattagcgggcaaaaaacgacc

SEQ ID NO: 354133 - DNA, 30 bp, Artificial Sequence
  Synthetic oligonucleotide
cggtctagggctgccacctggtaaacgacc

SEQ ID NO: 354134 - DNA, 30 bp, Artificial Sequence
  Synthetic oligonucleotide
tgttgttagtcaaggacgaaacacacgacc

SEQ ID NO: 354135 - DNA, 30 bp, Artificial Sequence
  Synthetic oligonucleotide
gttcacgccagcttcatgcgagccacgacc

SEQ ID NO: 354136 - DNA, 30 bp, Artificial Sequence
  Synthetic oligonucleotide
ggcggacaaatagaatttattgagacgacc

SEQ ID NO: 354137 - DNA, 30 bp, Artificial Sequence
  Synthetic oligonucleotide
aggtatccggcgtccggtatagggacgacc

SEQ ID NO: 354138 - DNA, 30 bp, Artificial Sequence
  Synthetic oligonucleotide
gaaacctacgctactacagaaaatacgacc

SEQ ID NO: 354139 - DNA, 30 bp, Artificial Sequence
  Synthetic oligonucleotide
gcatcagattagtatgtcattcctacgacc

SEQ ID NO: 354140 - DNA, 30 bp, Artificial Sequence
  Synthetic oligonucleotide
agctaacatgatacccgaacatgtacgacc

SEQ ID NO: 354141 - DNA, 30 bp, Artificial Sequence
  Synthetic oligonucleotide
catattcccgataccatgagtgttacgacc

SEQ ID NO: 354142 - DNA, 30 bp, Artificial Sequence
  Synthetic oligonucleotide
atgctgcaacgggactttagggaaccgacc

SEQ ID NO: 354143 - DNA, 30 bp, Artificial Sequence
  Synthetic oligonucleotide
gacgggtacacttgacactacttcccgacc

SEQ ID NO: 354144 - DNA, 30 bp, Artificial Sequence
  Synthetic oligonucleotide
cctacccccgatcattgtacgattccgacc

SEQ ID NO: 354145 - DNA, 30 bp, Artificial Sequence
  Synthetic oligonucleotide
ggcccgtctgcgtctgcgatgcaagcgacc

SEQ ID NO: 354146 - DNA, 30 bp, Artificial Sequence
  Synthetic oligonucleotide
aaattagatgggatgggattctaagcgacc

SEQ ID NO: 354147 - DNA, 31 bp, Artificial Sequence
  Synthetic oligonucleotide
atggacgctgaagcaccgttagtaagcgacc

SEQ ID NO: 354148 - DNA, 30 bp, Artificial Sequence
  Synthetic oligonucleotide
ccttggaagcccgagacgattctagcgacc

SEQ ID NO: 354149 - DNA, 30 bp, Artificial Sequence
  Synthetic oligonucleotide
tcgcagtatatgcataatttctgggcgacc

SEQ ID NO: 354150 - DNA, 30 bp, Artificial Sequence
  Synthetic oligonucleotide
cgtttctgtccggccagataattggcgacc

SEQ ID NO: 354151 - DNA, 30 bp, Artificial Sequence
  Synthetic oligonucleotide
actatcacaagcctcagcgtggaatcgacc

SEQ ID NO: 354152 - DNA, 30 bp, Artificial Sequence
  Synthetic oligonucleotide
acgttctggttaccagggatggtctcgacc

SEQ ID NO: 354153 - DNA, 30 bp, Artificial Sequence
  Synthetic oligonucleotide
gccagctgccccctaagtacgtagtcgacc

SEQ ID NO: 354154 - DNA, 30 bp, Artificial Sequence
  Synthetic oligonucleotide
ccgctcaaagcgattgtcactgattcgacc

SEQ ID NO: 354155 - DNA, 30 bp, Artificial Sequence
  Synthetic oligonucleotide
gcaaaaggcggggtggatacctcttcgacc

SEQ ID NO: 354156 - DNA, 30 bp, Artificial Sequence
  Synthetic oligonucleotide
ggtctacaagttttacttgccacaaggacc

SEQ ID NO: 354157 - DNA, 30 bp, Artificial Sequence
  Synthetic oligonucleotide
tgcgataacgcaatcctgtcaagaaggacc

SEQ ID NO: 354158 - DNA, 30 bp, Artificial Sequence
  Synthetic oligonucleotide
tttagtattcagtaggtcatctgaaggacc

SEQ ID NO: 354159 - DNA, 30 bp, Artificial Sequence
  Synthetic oligonucleotide
aactcgaagtgttcgagtatattaaggacc

SEQ ID NO: 354160 - DNA, 30 bp, Artificial Sequence
  Synthetic oligonucleotide
tcttaaacacgatgggtacttgccaggacc

SEQ ID NO: 354161 - DNA, 30 bp, Artificial Sequence
  Synthetic oligonucleotide
agaattcgtaattctcccggatccaggacc

SEQ ID NO: 354162 - DNA, 30 bp, Artificial Sequence
  Synthetic oligonucleotide
gacagtttgaagccgaagcctatcaggacc

SEQ ID NO: 354163 - DNA, 31 bp, Artificial Sequence
  Synthetic oligonucleotide
gtgccttgaccattagaatcttattaggacc

SEQ ID NO: 354164 - DNA, 30 bp, Artificial Sequence
  Synthetic oligonucleotide
ttgcgctaggatcatattcacacacggacc

SEQ ID NO: 354165 - DNA, 30 bp, Artificial Sequence
  Synthetic oligonucleotide
gaaccctccaaaccgcggggtatacggacc

SEQ ID NO: 354166 - DNA, 30 bp, Artificial Sequence
  Synthetic oligonucleotide
gtattgaacctctcccatttttaccggacc

SEQ ID NO: 354167 - DNA, 30 bp, Artificial Sequence
  Synthetic oligonucleotide
cacttgagaaagtccgaggttgcgcggacc

SEQ ID NO: 354168 - DNA, 30 bp, Artificial Sequence
  Synthetic oligonucleotide
taaacaaccatggccttgggtcggcggacc

SEQ ID NO: 354169 - DNA, 30 bp, Artificial Sequence
  Synthetic oligonucleotide
tgtcagcgtctttaaccgcatttagggacc

SEQ ID NO: 354170 - DNA, 30 bp, Artificial Sequence
  Synthetic oligonucleotide
gcattacattgttggaccaacatggggacc

SEQ ID NO: 354171 - DNA, 30 bp, Artificial Sequence
  Synthetic oligonucleotide
cttcttgacggaaacactatacgtgggacc

SEQ ID NO: 354172 - DNA, 30 bp, Artificial Sequence
  Synthetic oligonucleotide
atctgttcgtcgtctgatatgatgtggacc

SEQ ID NO: 354173 - DNA, 30 bp, Artificial Sequence
  Synthetic oligonucleotide
tcaagtgattgccaatgtatacaaatgacc

SEQ ID NO: 354174 - DNA, 30 bp, Artificial Sequence
  Synthetic oligonucleotide
ataaacgctaatgaaccactggcaatgacc

SEQ ID NO: 354175 - DNA, 30 bp, Artificial Sequence
  Synthetic oligonucleotide
ctggcgacgatgcataagtggttaatgacc

SEQ ID NO: 354176 - DNA, 30 bp, Artificial Sequence
  Synthetic oligonucleotide
gattaactaatgcgggttcctagcatgacc

SEQ ID NO: 354177 - DNA, 30 bp, Artificial Sequence
  Synthetic oligonucleotide
ggtatagcgccgtgtccatgtcggatgacc

SEQ ID NO: 354178 - DNA, 30 bp, Artificial Sequence
  Synthetic oligonucleotide
tccgttttatttgaacgcacactgatgacc

SEQ ID NO: 354179 - DNA, 30 bp, Artificial Sequence
  Synthetic oligonucleotide
ggacttcgaacgagaggttgccatatgacc

SEQ ID NO: 354180 - DNA, 30 bp, Artificial Sequence
  Synthetic oligonucleotide
ctcattcctggccggacatagcatatgacc

SEQ ID NO: 354181 - DNA, 30 bp, Artificial Sequence
  Synthetic oligonucleotide
tcggcgctttaacttcggagatcactgacc

SEQ ID NO: 354182 - DNA, 30 bp, Artificial Sequence
  Synthetic oligonucleotide
tcccataattgcgtagtcctaaacctgacc

SEQ ID NO: 354183 - DNA, 30 bp, Artificial Sequence
  Synthetic oligonucleotide
cttgcatgcaacctgggaatcaggctgacc

SEQ ID NO: 354184 - DNA, 30 bp, Artificial Sequence
  Synthetic oligonucleotide
tactatttagggagtagaatgatagtgacc

SEQ ID NO: 354185 - DNA, 30 bp, Artificial Sequence
  Synthetic oligonucleotide
cccggaacacgtagggcataggcggtgacc

SEQ ID NO: 354186 - DNA, 30 bp, Artificial Sequence
  Synthetic oligonucleotide
tacagaaacctatcaaaggtttatgtgacc

SEQ ID NO: 354187 - DNA, 30 bp, Artificial Sequence
  Synthetic oligonucleotide
gacgcaagtcatttgcagcctgctgtgacc

SEQ ID NO: 354188 - DNA, 30 bp, Artificial Sequence
  Synthetic oligonucleotide
ttagaagacacgtgggatcatccattgacc

SEQ ID NO: 354189 - DNA, 30 bp, Artificial Sequence
  Synthetic oligonucleotide
acatgcctagttatgttattacccttgacc

SEQ ID NO: 354190 - DNA, 30 bp, Artificial Sequence
  Synthetic oligonucleotide
acttagtacgtaccggctcggcccttgacc

SEQ ID NO: 354191 - DNA, 30 bp, Artificial Sequence
  Synthetic oligonucleotide
gtgcgcccgtgacccctaatgatcttgacc

SEQ ID NO: 354192 - DNA, 30 bp, Artificial Sequence
  Synthetic oligonucleotide
tatgcacacattgctctaatccagttgacc

SEQ ID NO: 354193 - DNA, 30 bp, Artificial Sequence
  Synthetic oligonucleotide
tcagtattttaaggttctgattggttgacc

SEQ ID NO: 354194 - DNA, 30 bp, Artificial Sequence
  Synthetic oligonucleotide
gtgatcctgtgtaattcaatggtgttgacc

SEQ ID NO: 354195 - DNA, 30 bp, Artificial Sequence
  Synthetic oligonucleotide
tggcattatgaaagacgttgaaatttgacc

SEQ ID NO: 354196 - DNA, 30 bp, Artificial Sequence
  Synthetic oligonucleotide
ttactggtcttgcctggcttgaatttgacc

SEQ ID NO: 354197 - DNA, 30 bp, Artificial Sequence
  Synthetic oligonucleotide
acatttaaggtcgggttcagataaaatacc

SEQ ID NO: 354198 - DNA, 30 bp, Artificial Sequence
  Synthetic oligonucleotide
aagaacatttggacatgggtgtgaaatacc

SEQ ID NO: 354199 - DNA, 30 bp, Artificial Sequence
  Synthetic oligonucleotide
acgaaggacgcccttgcagagaggaatacc

SEQ ID NO: 354200 - DNA, 30 bp, Artificial Sequence
  Synthetic oligonucleotide
ttaacacgcgggacgatccggaataatacc

SEQ ID NO: 354201 - DNA, 30 bp, Artificial Sequence
  Synthetic oligonucleotide
tcgggaccgatcgtatctatttataatacc

SEQ ID NO: 354202 - DNA, 30 bp, Artificial Sequence
  Synthetic oligonucleotide
gcaaggctctcctagcagagaggtaatacc

SEQ ID NO: 354203 - DNA, 30 bp, Artificial Sequence
  Synthetic oligonucleotide
cacgcagacgatagacggagtacacatacc

SEQ ID NO: 354204 - DNA, 30 bp, Artificial Sequence
  Synthetic oligonucleotide
ttgaacggtccatttatagtccgacatacc

SEQ ID NO: 354205 - DNA, 30 bp, Artificial Sequence
  Synthetic oligonucleotide
aaatacttaccgccctcgcattcgcatacc

SEQ ID NO: 354206 - DNA, 30 bp, Artificial Sequence
  Synthetic oligonucleotide
gttgatcgtataccgtcaacagcagatacc

SEQ ID NO: 354207 - DNA, 30 bp, Artificial Sequence
  Synthetic oligonucleotide
gagcctgcctctgtatatatccgcgatacc

SEQ ID NO: 354208 - DNA, 30 bp, Artificial Sequence
  Synthetic oligonucleotide
aggcggcatctttgccgcaacagggatacc

SEQ ID NO: 354209 - DNA, 30 bp, Artificial Sequence
  Synthetic oligonucleotide
cggccacaatggccctctatccgggatacc

SEQ ID NO: 354210 - DNA, 30 bp, Artificial Sequence
  Synthetic oligonucleotide
tgacgaagccaaaggctcctctgggatacc

SEQ ID NO: 354211 - DNA, 30 bp, Artificial Sequence
  Synthetic oligonucleotide
cagcaatataaacgcatcgaccttgatacc

SEQ ID NO: 354212 - DNA, 30 bp, Artificial Sequence
  Synthetic oligonucleotide
tgagcgtaggcactttaagtcacctatacc

SEQ ID NO: 354213 - DNA, 30 bp, Artificial Sequence
  Synthetic oligonucleotide
tcttggattctggttttcacagagtatacc

SEQ ID NO: 354214 - DNA, 30 bp, Artificial Sequence
  Synthetic oligonucleotide
cggccgactttgttttcaccgaattatacc

SEQ ID NO: 354215 - DNA, 30 bp, Artificial Sequence
  Synthetic oligonucleotide
gatgccactcatcattatacaccttatacc

SEQ ID NO: 354216 - DNA, 29 bp, Artificial Sequence
  Synthetic oligonucleotide
gctgcactataaggggaaatcgcactacc

SEQ ID NO: 354217 - DNA, 30 bp, Artificial Sequence
  Synthetic oligonucleotide
gatgagccactttgggttacggtgactacc

SEQ ID NO: 354218 - DNA, 30 bp, Artificial Sequence
  Synthetic oligonucleotide
gaacccttcgtccatatgaagccacctacc

SEQ ID NO: 354219 - DNA, 30 bp, Artificial Sequence
  Synthetic oligonucleotide
ctggccgatcatccgaaccgggcacctacc

SEQ ID NO: 354220 - DNA, 30 bp, Artificial Sequence
  Synthetic oligonucleotide
caactaaacggtatttagactacgcctacc

SEQ ID NO: 354221 - DNA, 30 bp, Artificial Sequence
  Synthetic oligonucleotide
gcagatactaactgcgttccaagtcctacc

SEQ ID NO: 354222 - DNA, 30 bp, Artificial Sequence
  Synthetic oligonucleotide
tgggggccctaagtgagcacaggtcctacc

SEQ ID NO: 354223 - DNA, 30 bp, Artificial Sequence
  Synthetic oligonucleotide
tgccttcggcaccataggcaagcagctacc

SEQ ID NO: 354224 - DNA, 30 bp, Artificial Sequence
  Synthetic oligonucleotide
cgctaggacaaaggaattttcgtagctacc

SEQ ID NO: 354225 - DNA, 30 bp, Artificial Sequence
  Synthetic oligonucleotide
gggctgctgcagctcagtgggcaggctacc

SEQ ID NO: 354226 - DNA, 30 bp, Artificial Sequence
  Synthetic oligonucleotide
gcaccatgaggtacgccgattccggctacc

SEQ ID NO: 354227 - DNA, 30 bp, Artificial Sequence
  Synthetic oligonucleotide
atacccagactaccctctaccagggctacc

SEQ ID NO: 354228 - DNA, 30 bp, Artificial Sequence
  Synthetic oligonucleotide
aaacagtgatttgtcaagttcctggctacc

SEQ ID NO: 354229 - DNA, 30 bp, Artificial Sequence
  Synthetic oligonucleotide
ctgtaagggagtcgtagcgatattgctacc

SEQ ID NO: 354230 - DNA, 30 bp, Artificial Sequence
  Synthetic oligonucleotide
ggaataggtcgtttaaggacttaatctacc

SEQ ID NO: 354231 - DNA, 30 bp, Artificial Sequence
  Synthetic oligonucleotide
tgccctaggactcggactgtaagctctacc

SEQ ID NO: 354232 - DNA, 30 bp, Artificial Sequence
  Synthetic oligonucleotide
aagctcctcaatacaacctgatagtctacc

SEQ ID NO: 354233 - DNA, 30 bp, Artificial Sequence
  Synthetic oligonucleotide
gagggggtgtgggcagacttggattctacc

SEQ ID NO: 354234 - DNA, 30 bp, Artificial Sequence
  Synthetic oligonucleotide
ctcgcgacacatttagcgcaaagttctacc

SEQ ID NO: 354235 - DNA, 30 bp, Artificial Sequence
  Synthetic oligonucleotide
gtctcggatcgggctaacacacgttctacc

SEQ ID NO: 354236 - DNA, 30 bp, Artificial Sequence
  Synthetic oligonucleotide
accgccaacaggcaggtggattgttctacc

SEQ ID NO: 354237 - DNA, 30 bp, Artificial Sequence
  Synthetic oligonucleotide
cacattggctttaccgtaatagaaagtacc

SEQ ID NO: 354238 - DNA, 30 bp, Artificial Sequence
  Synthetic oligonucleotide
gcatctacccgtatcttagataagagtacc

SEQ ID NO: 354239 - DNA, 30 bp, Artificial Sequence
  Synthetic oligonucleotide
gggatggtgtacgatcgcactccgagtacc

SEQ ID NO: 354240 - DNA, 30 bp, Artificial Sequence
  Synthetic oligonucleotide
tagcacactaaagcgctcgagcatagtacc

SEQ ID NO: 354241 - DNA, 30 bp, Artificial Sequence
  Synthetic oligonucleotide
gtcgttcaagcgtaacctcgggatagtacc

SEQ ID NO: 354242 - DNA, 30 bp, Artificial Sequence
  Synthetic oligonucleotide
tccgaaaaacatggccgtacccctagtacc

SEQ ID NO: 354243 - DNA, 30 bp, Artificial Sequence
  Synthetic oligonucleotide
tgtaggaagttcggtgtgtgagctagtacc

SEQ ID NO: 354244 - DNA, 30 bp, Artificial Sequence
  Synthetic oligonucleotide
aagtgccactagtgtttgttcggtagtacc

SEQ ID NO: 354245 - DNA, 30 bp, Artificial Sequence
  Synthetic oligonucleotide
gcgtctccagttggttgatttgttagtacc

SEQ ID NO: 354246 - DNA, 30 bp, Artificial Sequence
  Synthetic oligonucleotide
gaaggtttctcaacccacggctttagtacc

SEQ ID NO: 354247 - DNA, 30 bp, Artificial Sequence
  Synthetic oligonucleotide
ggatccctgtacgatactttggcccgtacc

SEQ ID NO: 354248 - DNA, 30 bp, Artificial Sequence
  Synthetic oligonucleotide
acgcatataacatccgatgcttatcgtacc

SEQ ID NO: 354249 - DNA, 30 bp, Artificial Sequence
  Synthetic oligonucleotide
tcaggaacgttccgtcaattaagaggtacc

SEQ ID NO: 354250 - DNA, 30 bp, Artificial Sequence
  Synthetic oligonucleotide
tgttacagggggcacggagccagaggtacc

SEQ ID NO: 354251 - DNA, 30 bp, Artificial Sequence
  Synthetic oligonucleotide
atgcttcaaatatattatcttctaggtacc

SEQ ID NO: 354252 - DNA, 30 bp, Artificial Sequence
  Synthetic oligonucleotide
cagagtaggcacagtcccggactctgtacc

SEQ ID NO: 354253 - DNA, 30 bp, Artificial Sequence
  Synthetic oligonucleotide
ggtatgttaagaagtcttggactctgtacc

SEQ ID NO: 354254 - DNA, 30 bp, Artificial Sequence
  Synthetic oligonucleotide
agtaacccagttactccgagactgtgtacc

SEQ ID NO: 354255 - DNA, 30 bp, Artificial Sequence
  Synthetic oligonucleotide
gataattagcttatgagcggacgttgtacc

SEQ ID NO: 354256 - DNA, 30 bp, Artificial Sequence
  Synthetic oligonucleotide
cggacatacgggttcttgtgtacaattacc

SEQ ID NO: 354257 - DNA, 30 bp, Artificial Sequence
  Synthetic oligonucleotide
ctagcgcaatccgatcttcccggaattacc

SEQ ID NO: 354258 - DNA, 30 bp, Artificial Sequence
  Synthetic oligonucleotide
gcatatgtaaatacaagtattggaattacc

SEQ ID NO: 354259 - DNA, 30 bp, Artificial Sequence
  Synthetic oligonucleotide
acactccgacgctgtgtagtgataattacc

SEQ ID NO: 354260 - DNA, 30 bp, Artificial Sequence
  Synthetic oligonucleotide
gattcgttcagggggcggtatataattacc

SEQ ID NO: 354261 - DNA, 30 bp, Artificial Sequence
  Synthetic oligonucleotide
gaagtcatgtcgtgtaatcttaacattacc

SEQ ID NO: 354262 - DNA, 30 bp, Artificial Sequence
  Synthetic oligonucleotide
atagcatcgtactccagcggactcattacc

SEQ ID NO: 354263 - DNA, 30 bp, Artificial Sequence
  Synthetic oligonucleotide
cacagaggtcctataaataaggggattacc

SEQ ID NO: 354264 - DNA, 30 bp, Artificial Sequence
  Synthetic oligonucleotide
cccaatgcatcgaaccagcaactgattacc

SEQ ID NO: 354265 - DNA, 30 bp, Artificial Sequence
  Synthetic oligonucleotide
caccacggtcataaagaaaatcatattacc

SEQ ID NO: 354266 - DNA, 30 bp, Artificial Sequence
  Synthetic oligonucleotide
gacgggctctcaacggagagtggtattacc

SEQ ID NO: 354267 - DNA, 30 bp, Artificial Sequence
  Synthetic oligonucleotide
aacagtgacatacaaggggaagttattacc

SEQ ID NO: 354268 - DNA, 30 bp, Artificial Sequence
  Synthetic oligonucleotide
gtgacttcttgacctccagcgagacttacc

SEQ ID NO: 354269 - DNA, 30 bp, Artificial Sequence
  Synthetic oligonucleotide
ggagtccgtcaacaacatccaggccttacc

SEQ ID NO: 354270 - DNA, 30 bp, Artificial Sequence
  Synthetic oligonucleotide
ttgtgcagcatagcggcttatactcttacc

SEQ ID NO: 354271 - DNA, 30 bp, Artificial Sequence
  Synthetic oligonucleotide
tctagtaagggtggttgcctaatagttacc

SEQ ID NO: 354272 - DNA, 30 bp, Artificial Sequence
  Synthetic oligonucleotide
tgcaggtcttaggcataatgatgcgttacc

SEQ ID NO: 354273 - DNA, 30 bp, Artificial Sequence
  Synthetic oligonucleotide
ctcgccgggaccctataagttatcgttacc

SEQ ID NO: 354274 - DNA, 30 bp, Artificial Sequence
  Synthetic oligonucleotide
agtaggaggcgatcggtatacaaggttacc

SEQ ID NO: 354275 - DNA, 30 bp, Artificial Sequence
  Synthetic oligonucleotide
atctttaataagagctctcatagggttacc

SEQ ID NO: 354276 - DNA, 30 bp, Artificial Sequence
  Synthetic oligonucleotide
tcattaaggtcagcgtgaagtggtgttacc

SEQ ID NO: 354277 - DNA, 30 bp, Artificial Sequence
  Synthetic oligonucleotide
ttgattttagaaggtgacgaacttgttacc

SEQ ID NO: 354278 - DNA, 30 bp, Artificial Sequence
  Synthetic oligonucleotide
atctcgctaaccatctgattatttgttacc

SEQ ID NO: 354279 - DNA, 30 bp, Artificial Sequence
  Synthetic oligonucleotide
ccaactcgctctcgccactgccgatttacc

SEQ ID NO: 354280 - DNA, 30 bp, Artificial Sequence
  Synthetic oligonucleotide
ctttgtataccaatgtcaaggccctttacc

SEQ ID NO: 354281 - DNA, 30 bp, Artificial Sequence
  Synthetic oligonucleotide
attgattgtttcgatcaaatatggtttacc

SEQ ID NO: 354282 - DNA, 30 bp, Artificial Sequence
  Synthetic oligonucleotide
ggtcagaaggggaggcctgaccattttacc

SEQ ID NO: 354283 - DNA, 30 bp, Artificial Sequence
  Synthetic oligonucleotide
cgtgagtcagctcctgctgagcattttacc

SEQ ID NO: 354284 - DNA, 30 bp, Artificial Sequence
  Synthetic oligonucleotide
agcacaggtttcccccctttcttttttacc

SEQ ID NO: 354285 - DNA, 30 bp, Artificial Sequence
  Synthetic oligonucleotide
agagacgaaacgctgttggtagaaaaaccc

SEQ ID NO: 354286 - DNA, 30 bp, Artificial Sequence
  Synthetic oligonucleotide
catttcgggatcatccttctttagaaaccc

SEQ ID NO: 354287 - DNA, 30 bp, Artificial Sequence
  Synthetic oligonucleotide
caatacagcctgctgggaagaaataaaccc

SEQ ID NO: 354288 - DNA, 30 bp, Artificial Sequence
  Synthetic oligonucleotide
tctggcaagtcggcgcttatgactaaaccc

SEQ ID NO: 354289 - DNA, 30 bp, Artificial Sequence
  Synthetic oligonucleotide
cctgggtgtttttgctttagagaccaaccc

SEQ ID NO: 354290 - DNA, 30 bp, Artificial Sequence
  Synthetic oligonucleotide
ccccgaataagggaaggaagcacccaaccc

SEQ ID NO: 354291 - DNA, 30 bp, Artificial Sequence
  Synthetic oligonucleotide
gaataggctgaacaatatatgacccaaccc

SEQ ID NO: 354292 - DNA, 30 bp, Artificial Sequence
  Synthetic oligonucleotide
cattgaacgctaattgcaaggagccaaccc

SEQ ID NO: 354293 - DNA, 30 bp, Artificial Sequence
  Synthetic oligonucleotide
ccttttaatcgtgataaaaatcgccaaccc

SEQ ID NO: 354294 - DNA, 30 bp, Artificial Sequence
  Synthetic oligonucleotide
tgacaattcttcctccagccatgccaaccc

SEQ ID NO: 354295 - DNA, 30 bp, Artificial Sequence
  Synthetic oligonucleotide
ggagctcattgaactagacgcgcgcaaccc

SEQ ID NO: 354296 - DNA, 30 bp, Artificial Sequence
  Synthetic oligonucleotide
gtacgctgtgtaatcttggcatttcaaccc

SEQ ID NO: 354297 - DNA, 30 bp, Artificial Sequence
  Synthetic oligonucleotide
gccaagttggtattcgcaaactttcaaccc

SEQ ID NO: 354298 - DNA, 30 bp, Artificial Sequence
  Synthetic oligonucleotide
cgggaatcctaagagctacggagagaaccc

SEQ ID NO: 354299 - DNA, 30 bp, Artificial Sequence
  Synthetic oligonucleotide
tggaatttcagatagaacactatcgaaccc

SEQ ID NO: 354300 - DNA, 30 bp, Artificial Sequence
  Synthetic oligonucleotide
atacgtccgcagtgcgaggatgcggaaccc

SEQ ID NO: 354301 - DNA, 30 bp, Artificial Sequence
  Synthetic oligonucleotide
acgctcgttaatgatatgtggggggaaccc

SEQ ID NO: 354302 - DNA, 30 bp, Artificial Sequence
  Synthetic oligonucleotide
acttttgtgtatagaatcatagtggaaccc

SEQ ID NO: 354303 - DNA, 30 bp, Artificial Sequence
  Synthetic oligonucleotide
gttatcttgaggggtggggacgtggaaccc

SEQ ID NO: 354304 - DNA, 30 bp, Artificial Sequence
  Synthetic oligonucleotide
agaagctgcctcgctaagtttcatgaaccc

SEQ ID NO: 354305 - DNA, 30 bp, Artificial Sequence
  Synthetic oligonucleotide
tctattgggctaggatagtgtactgaaccc

SEQ ID NO: 354306 - DNA, 30 bp, Artificial Sequence
  Synthetic oligonucleotide
tccattgcggaggggtactccagataaccc

SEQ ID NO: 354307 - DNA, 30 bp, Artificial Sequence
  Synthetic oligonucleotide
tgtaatgaaatgatgcctgatccctaaccc

SEQ ID NO: 354308 - DNA, 30 bp, Artificial Sequence
  Synthetic oligonucleotide
gcaatgggttaatagtcacattggtaaccc

SEQ ID NO: 354309 - DNA, 30 bp, Artificial Sequence
  Synthetic oligonucleotide
gcctacgacgggttatatagcttgtaaccc

SEQ ID NO: 354310 - DNA, 30 bp, Artificial Sequence
  Synthetic oligonucleotide
attgtttcctgtacctatgtggtttaaccc

SEQ ID NO: 354311 - DNA, 30 bp, Artificial Sequence
  Synthetic oligonucleotide
cccgacaatctgaccttagtgtaaacaccc

SEQ ID NO: 354312 - DNA, 30 bp, Artificial Sequence
  Synthetic oligonucleotide
aaagtcgttcagccacgttgtggcacaccc

SEQ ID NO: 354313 - DNA, 30 bp, Artificial Sequence
  Synthetic oligonucleotide
atatggtcttagaagtcatcaaagacaccc

SEQ ID NO: 354314 - DNA, 30 bp, Artificial Sequence
  Synthetic oligonucleotide
taacgctttaaagtgggactctggacaccc

SEQ ID NO: 354315 - DNA, 30 bp, Artificial Sequence
  Synthetic oligonucleotide
tgagatcaagaggaaccgtcttggacaccc

SEQ ID NO: 354316 - DNA, 30 bp, Artificial Sequence
  Synthetic oligonucleotide
atccagatcggggtacaggctcttacaccc

SEQ ID NO: 354317 - DNA, 30 bp, Artificial Sequence
  Synthetic oligonucleotide
ggcgcataaggttgctattaaggaccaccc

SEQ ID NO: 354318 - DNA, 30 bp, Artificial Sequence
  Synthetic oligonucleotide
agggatacgcccaacggtactcacccaccc

SEQ ID NO: 354319 - DNA, 30 bp, Artificial Sequence
  Synthetic oligonucleotide
acgttgtttacctaatagcgagccccaccc

SEQ ID NO: 354320 - DNA, 30 bp, Artificial Sequence
  Synthetic oligonucleotide
gccaaggtatccggatgagcttcgccaccc

SEQ ID NO: 354321 - DNA, 30 bp, Artificial Sequence
  Synthetic oligonucleotide
acatggtatgggagatgtttacttccaccc

SEQ ID NO: 354322 - DNA, 30 bp, Artificial Sequence
  Synthetic oligonucleotide
aggttgacaaggacagatatccttccaccc

SEQ ID NO: 354323 - DNA, 30 bp, Artificial Sequence
  Synthetic oligonucleotide
tcattgcctttagattattagcgagcaccc

SEQ ID NO: 354324 - DNA, 30 bp, Artificial Sequence
  Synthetic oligonucleotide
ccatggcgattcatctatacaggcgcaccc

SEQ ID NO: 354325 - DNA, 30 bp, Artificial Sequence
  Synthetic oligonucleotide
gaccttaagtttttcgacagagtcgcaccc

SEQ ID NO: 354326 - DNA, 30 bp, Artificial Sequence
  Synthetic oligonucleotide
cacatactcgatttatgactagaggcaccc

SEQ ID NO: 354327 - DNA, 30 bp, Artificial Sequence
  Synthetic oligonucleotide
gttaggacggtctcttatagcttggcaccc

SEQ ID NO: 354328 - DNA, 30 bp, Artificial Sequence
  Synthetic oligonucleotide
tcaccgaccctgggtgataacatatcaccc

SEQ ID NO: 354329 - DNA, 30 bp, Artificial Sequence
  Synthetic oligonucleotide
gaagccctgtacgacccattcttatcaccc

SEQ ID NO: 354330 - DNA, 30 bp, Artificial Sequence
  Synthetic oligonucleotide
gtaatgtacggtcccaaggcgctctcaccc

SEQ ID NO: 354331 - DNA, 30 bp, Artificial Sequence
  Synthetic oligonucleotide
ttgttacaggtgcagtccggtcagtcaccc

SEQ ID NO: 354332 - DNA, 30 bp, Artificial Sequence
  Synthetic oligonucleotide
gtatttcgtccttatcgttctcggtcaccc

SEQ ID NO: 354333 - DNA, 30 bp, Artificial Sequence
  Synthetic oligonucleotide
ttcagatggctaacgggtgcgcattcaccc

SEQ ID NO: 354334 - DNA, 30 bp, Artificial Sequence
  Synthetic oligonucleotide
agcgtattgcagccatacataacttcaccc

SEQ ID NO: 354335 - DNA, 30 bp, Artificial Sequence
  Synthetic oligonucleotide
atactaggtattgtcaggtgtaaaagaccc

SEQ ID NO: 354336 - DNA, 31 bp, Artificial Sequence
  Synthetic oligonucleotide
ttgtaaacgtcagttactatgataaagaccc

SEQ ID NO: 354337 - DNA, 30 bp, Artificial Sequence
  Synthetic oligonucleotide
gaaactactctggtaaccatcgtcagaccc

SEQ ID NO: 354338 - DNA, 30 bp, Artificial Sequence
  Synthetic oligonucleotide
tgacctcctaagaagcgagacaggagaccc

SEQ ID NO: 354339 - DNA, 30 bp, Artificial Sequence
  Synthetic oligonucleotide
acatattgagcatagcgagccatgagaccc

SEQ ID NO: 354340 - DNA, 30 bp, Artificial Sequence
  Synthetic oligonucleotide
cgcattttcgggacgttagttcttagaccc

SEQ ID NO: 354341 - DNA, 30 bp, Artificial Sequence
  Synthetic oligonucleotide
aacgctcgccattgactccctagccgaccc

SEQ ID NO: 354342 - DNA, 30 bp, Artificial Sequence
  Synthetic oligonucleotide
ggaggttgaggcaaagtagtgtttcgaccc

SEQ ID NO: 354343 - DNA, 30 bp, Artificial Sequence
  Synthetic oligonucleotide
cgtgacactattatcctgaaccaaggaccc

SEQ ID NO: 354344 - DNA, 30 bp, Artificial Sequence
  Synthetic oligonucleotide
ctaggctggactcaatggccgacaggaccc

SEQ ID NO: 354345 - DNA, 30 bp, Artificial Sequence
  Synthetic oligonucleotide
tgtaccccagaggcgctagcaccaggaccc

SEQ ID NO: 354346 - DNA, 29 bp, Artificial Sequence
  Synthetic oligonucleotide
ttttatagtgggttcgtaatccaggaccc

SEQ ID NO: 354347 - DNA, 30 bp, Artificial Sequence
  Synthetic oligonucleotide
tgcacttttagcgtaaaggcctccggaccc

SEQ ID NO: 354348 - DNA, 30 bp, Artificial Sequence
  Synthetic oligonucleotide
gggtcttaattgatcaattcaaagggaccc

SEQ ID NO: 354349 - DNA, 30 bp, Artificial Sequence
  Synthetic oligonucleotide
gctctttggggcacacatctgaggggaccc

SEQ ID NO: 354350 - DNA, 30 bp, Artificial Sequence
  Synthetic oligonucleotide
gtcgacaggcgggcgctcaccactggaccc

SEQ ID NO: 354351 - DNA, 29 bp, Artificial Sequence
  Synthetic oligonucleotide
ctaatcagatgttattacatggatgaccc

SEQ ID NO: 354352 - DNA, 30 bp, Artificial Sequence
  Synthetic oligonucleotide
gtgagataaagcagtggattaatatgaccc

SEQ ID NO: 354353 - DNA, 30 bp, Artificial Sequence
  Synthetic oligonucleotide
tatccccaacacgtgaaacacctatgaccc

SEQ ID NO: 354354 - DNA, 30 bp, Artificial Sequence
  Synthetic oligonucleotide
agttatggaacagcgggtctattatgaccc

SEQ ID NO: 354355 - DNA, 30 bp, Artificial Sequence
  Synthetic oligonucleotide
gggtgtcatgggttcctagacaactgaccc

SEQ ID NO: 354356 - DNA, 30 bp, Artificial Sequence
  Synthetic oligonucleotide
gcagccaggatcgaccacttgctactaccc

SEQ ID NO: 354357 - DNA, 30 bp, Artificial Sequence
  Synthetic oligonucleotide
tctacacgggaaggttactggtccctaccc

SEQ ID NO: 354358 - DNA, 30 bp, Artificial Sequence
  Synthetic oligonucleotide
ctttatgcaccgcgtatcatagaagtaccc

SEQ ID NO: 354359 - DNA, 30 bp, Artificial Sequence
  Synthetic oligonucleotide
ctcaaagttgcttacgagttctaagtaccc

SEQ ID NO: 354360 - DNA, 30 bp, Artificial Sequence
  Synthetic oligonucleotide
gttgtatactattagatggcgaacgtaccc

SEQ ID NO: 354361 - DNA, 30 bp, Artificial Sequence
  Synthetic oligonucleotide
atcaatcagtgcgtcgtgttaatggtaccc

SEQ ID NO: 354362 - DNA, 30 bp, Artificial Sequence
  Synthetic oligonucleotide
ttgattatggacatcgtcaagggtgtaccc

SEQ ID NO: 354363 - DNA, 30 bp, Artificial Sequence
  Synthetic oligonucleotide
cgccttgcgcgttatgacagaattgtaccc

SEQ ID NO: 354364 - DNA, 30 bp, Artificial Sequence
  Synthetic oligonucleotide
gacagaatgttacaaaatatttgcttaccc

SEQ ID NO: 354365 - DNA, 30 bp, Artificial Sequence
  Synthetic oligonucleotide
gcagggagctgtctctctctgcagttaccc

SEQ ID NO: 354366 - DNA, 30 bp, Artificial Sequence
  Synthetic oligonucleotide
ccgctggtcgtacgtaggatcaggttaccc

SEQ ID NO: 354367 - DNA, 30 bp, Artificial Sequence
  Synthetic oligonucleotide
tgcggatttacctcaaaacttgcaaacccc

SEQ ID NO: 354368 - DNA, 30 bp, Artificial Sequence
  Synthetic oligonucleotide
caaggttctgattaacctctgataaacccc

SEQ ID NO: 354369 - DNA, 30 bp, Artificial Sequence
  Synthetic oligonucleotide
actgactaggggccatccaattggaacccc

SEQ ID NO: 354370 - DNA, 30 bp, Artificial Sequence
  Synthetic oligonucleotide
atgatcgaaggatttactcttatgaacccc

SEQ ID NO: 354371 - DNA, 30 bp, Artificial Sequence
  Synthetic oligonucleotide
gaacggcttttagaattagtctgacacccc

SEQ ID NO: 354372 - DNA, 30 bp, Artificial Sequence
  Synthetic oligonucleotide
caacatatgccttgtgattgtgtacacccc

SEQ ID NO: 354373 - DNA, 30 bp, Artificial Sequence
  Synthetic oligonucleotide
aaaatgaaggatgtcgtggcagctcacccc

SEQ ID NO: 354374 - DNA, 30 bp, Artificial Sequence
  Synthetic oligonucleotide
gctaacaacgatcggaaagaccgtcacccc

SEQ ID NO: 354375 - DNA, 30 bp, Artificial Sequence
  Synthetic oligonucleotide
acatctggcaagggtctccagtgtcacccc

SEQ ID NO: 354376 - DNA, 30 bp, Artificial Sequence
  Synthetic oligonucleotide
tgataattgttctttgcacacaacgacccc

SEQ ID NO: 354377 - DNA, 30 bp, Artificial Sequence
  Synthetic oligonucleotide
gttaaatgagtgtgcacggaaaccgacccc

SEQ ID NO: 354378 - DNA, 30 bp, Artificial Sequence
  Synthetic oligonucleotide
gtcgatatggcgcacgtcctcgccgacccc

SEQ ID NO: 354379 - DNA, 30 bp, Artificial Sequence
  Synthetic oligonucleotide
ctatttgtttttgtgacccacgaatacccc

SEQ ID NO: 354380 - DNA, 30 bp, Artificial Sequence
  Synthetic oligonucleotide
cccgatcgaaggtgcaagttccgatacccc

SEQ ID NO: 354381 - DNA, 30 bp, Artificial Sequence
  Synthetic oligonucleotide
tagtgtcgacccccaggccggcactacccc

SEQ ID NO: 354382 - DNA, 30 bp, Artificial Sequence
  Synthetic oligonucleotide
actaagtgaagtagtcttccgtactacccc

SEQ ID NO: 354383 - DNA, 30 bp, Artificial Sequence
  Synthetic oligonucleotide
caaatttcacctacttgatctatgtacccc

SEQ ID NO: 354384 - DNA, 30 bp, Artificial Sequence
  Synthetic oligonucleotide
gatagctccccccagataaagttgtacccc

SEQ ID NO: 354385 - DNA, 30 bp, Artificial Sequence
  Synthetic oligonucleotide
acatctcggacggatgtaggatcttacccc

SEQ ID NO: 354386 - DNA, 30 bp, Artificial Sequence
  Synthetic oligonucleotide
ggaagacccagaattgggttgggttacccc

SEQ ID NO: 354387 - DNA, 30 bp, Artificial Sequence
  Synthetic oligonucleotide
gtgagtgtgacaaatttgcttataaccccc

SEQ ID NO: 354388 - DNA, 30 bp, Artificial Sequence
  Synthetic oligonucleotide
gacgctgaagcgccaagaggggtgaccccc

SEQ ID NO: 354389 - DNA, 30 bp, Artificial Sequence
  Synthetic oligonucleotide
caccgcgtgcagggagggcgaggtaccccc

SEQ ID NO: 354390 - DNA, 30 bp, Artificial Sequence
  Synthetic oligonucleotide
gaaggacgttgtctcggttggaaccccccc

SEQ ID NO: 354391 - DNA, 30 bp, Artificial Sequence
  Synthetic oligonucleotide
caaaaaaaccgcaacgctatagagcccccc

SEQ ID NO: 354392 - DNA, 30 bp, Artificial Sequence
  Synthetic oligonucleotide
ggtaccaggatgtttttcggggtagccccc

SEQ ID NO: 354393 - DNA, 30 bp, Artificial Sequence
  Synthetic oligonucleotide
gttatacgcggcgcaagtctgagcgccccc

SEQ ID NO: 354394 - DNA, 30 bp, Artificial Sequence
  Synthetic oligonucleotide
attagggggtaaggctagcacggcgccccc

SEQ ID NO: 354395 - DNA, 30 bp, Artificial Sequence
  Synthetic oligonucleotide
tcaccgaatgtctggggcacttgcgccccc

SEQ ID NO: 354396 - DNA, 30 bp, Artificial Sequence
  Synthetic oligonucleotide
gctggaggagtgtacggtcaataggccccc

SEQ ID NO: 354397 - DNA, 30 bp, Artificial Sequence
  Synthetic oligonucleotide
gtatcacatgtcttaagccgagatgccccc

SEQ ID NO: 354398 - DNA, 30 bp, Artificial Sequence
  Synthetic oligonucleotide
ctcaacgaatgcagactctagtttgccccc

SEQ ID NO: 354399 - DNA, 31 bp, Artificial Sequence
  Synthetic oligonucleotide
cttggcttccgccttcagctctatatccccc

SEQ ID NO: 354400 - DNA, 30 bp, Artificial Sequence
  Synthetic oligonucleotide
tacagggattgcagcgacaatgtatccccc

SEQ ID NO: 354401 - DNA, 30 bp, Artificial Sequence
  Synthetic oligonucleotide
acactctcggatgaattgaactcctccccc

SEQ ID NO: 354402 - DNA, 30 bp, Artificial Sequence
  Synthetic oligonucleotide
gcatacgaggcagaaggtggaggctccccc

SEQ ID NO: 354403 - DNA, 30 bp, Artificial Sequence
  Synthetic oligonucleotide
agctgttccattctatgtaataagtccccc

SEQ ID NO: 354404 - DNA, 30 bp, Artificial Sequence
  Synthetic oligonucleotide
tacgcctgatggtctcctatgcggtccccc

SEQ ID NO: 354405 - DNA, 30 bp, Artificial Sequence
  Synthetic oligonucleotide
tggttgagcccagggggtacacattccccc

SEQ ID NO: 354406 - DNA, 30 bp, Artificial Sequence
  Synthetic oligonucleotide
ccgtaggatatgtgtagctccttttccccc

SEQ ID NO: 354407 - DNA, 30 bp, Artificial Sequence
  Synthetic oligonucleotide
ccagcgtagaattttttgctaaaaagcccc

SEQ ID NO: 354408 - DNA, 30 bp, Artificial Sequence
  Synthetic oligonucleotide
attgagcggtgtatcgtttatgcccgcccc

SEQ ID NO: 354409 - DNA, 30 bp, Artificial Sequence
  Synthetic oligonucleotide
attttgcttagccggcaacacgcgcgcccc

SEQ ID NO: 354410 - DNA, 30 bp, Artificial Sequence
  Synthetic oligonucleotide
atgggcggcgattgttgtctaggtcgcccc

SEQ ID NO: 354411 - DNA, 30 bp, Artificial Sequence
  Synthetic oligonucleotide
gccctaacatgctccggtgagtttcgcccc

SEQ ID NO: 354412 - DNA, 30 bp, Artificial Sequence
  Synthetic oligonucleotide
atttgtatccttattgtaaggaaaggcccc

SEQ ID NO: 354413 - DNA, 30 bp, Artificial Sequence
  Synthetic oligonucleotide
caccttagattttccgcggggctaggcccc

SEQ ID NO: 354414 - DNA, 30 bp, Artificial Sequence
  Synthetic oligonucleotide
ttcctaaggacatggtctatccatggcccc

SEQ ID NO: 354415 - DNA, 30 bp, Artificial Sequence
  Synthetic oligonucleotide
taggttaaaggattgaccaattaatgcccc

SEQ ID NO: 354416 - DNA, 30 bp, Artificial Sequence
  Synthetic oligonucleotide
tagcgccttcggtccagagatcgctgcccc

SEQ ID NO: 354417 - DNA, 30 bp, Artificial Sequence
  Synthetic oligonucleotide
ttgcagtgggggtgccacatatagtgcccc

SEQ ID NO: 354418 - DNA, 30 bp, Artificial Sequence
  Synthetic oligonucleotide
acgttatcctccggttaaagtccttgcccc

SEQ ID NO: 354419 - DNA, 30 bp, Artificial Sequence
  Synthetic oligonucleotide
acagcaacggcgcttctacgataaatcccc

SEQ ID NO: 354420 - DNA, 30 bp, Artificial Sequence
  Synthetic oligonucleotide
acccgagggttgagtttcatcttcatcccc

SEQ ID NO: 354421 - DNA, 30 bp, Artificial Sequence
  Synthetic oligonucleotide
tgtgtagggaatcgtgtatggcagatcccc

SEQ ID NO: 354422 - DNA, 30 bp, Artificial Sequence
  Synthetic oligonucleotide
cgaccaaagcctcatagtttccgtatcccc

SEQ ID NO: 354423 - DNA, 30 bp, Artificial Sequence
  Synthetic oligonucleotide
gtcacgcttaggtagggtcaaattatcccc

SEQ ID NO: 354424 - DNA, 30 bp, Artificial Sequence
  Synthetic oligonucleotide
aggaacggcggatgtcaattgtaactcccc

SEQ ID NO: 354425 - DNA, 30 bp, Artificial Sequence
  Synthetic oligonucleotide
cgtgcttctaattactagcgcgcgctcccc

SEQ ID NO: 354426 - DNA, 30 bp, Artificial Sequence
  Synthetic oligonucleotide
tccggatcacatactgggatggctctcccc

SEQ ID NO: 354427 - DNA, 30 bp, Artificial Sequence
  Synthetic oligonucleotide
ggtttcttgtcacatagagtatgagtcccc

SEQ ID NO: 354428 - DNA, 30 bp, Artificial Sequence
  Synthetic oligonucleotide
acaactggtttgtcatggccaagcgtcccc

SEQ ID NO: 354429 - DNA, 30 bp, Artificial Sequence
  Synthetic oligonucleotide
gggaaatttggcctgatctggctcgtcccc

SEQ ID NO: 354430 - DNA, 30 bp, Artificial Sequence
  Synthetic oligonucleotide
tgtcgcgacaaggttcactatgtcgtcccc

SEQ ID NO: 354431 - DNA, 30 bp, Artificial Sequence
  Synthetic oligonucleotide
tgaaggactcacaattctaaggaggtcccc

SEQ ID NO: 354432 - DNA, 30 bp, Artificial Sequence
  Synthetic oligonucleotide
tcgcacgaactgggtaaacgaccggtcccc

SEQ ID NO: 354433 - DNA, 30 bp, Artificial Sequence
  Synthetic oligonucleotide
gggtctgggttgaaacaatgcaaattcccc

SEQ ID NO: 354434 - DNA, 30 bp, Artificial Sequence
  Synthetic oligonucleotide
ggatgtttctagcaataagtccccaagccc

SEQ ID NO: 354435 - DNA, 30 bp, Artificial Sequence
  Synthetic oligonucleotide
ggtcaggccctcccggcggcgcgcaagccc

SEQ ID NO: 354436 - DNA, 30 bp, Artificial Sequence
  Synthetic oligonucleotide
aaagttccgttctcacagcgacataagccc

SEQ ID NO: 354437 - DNA, 30 bp, Artificial Sequence
  Synthetic oligonucleotide
ctcggcgcgttatacccacggactaagccc

SEQ ID NO: 354438 - DNA, 30 bp, Artificial Sequence
  Synthetic oligonucleotide
cacctagaatctgaccaacccatacagccc

SEQ ID NO: 354439 - DNA, 30 bp, Artificial Sequence
  Synthetic oligonucleotide
gtctggcttctctcaatcgcctaccagccc

SEQ ID NO: 354440 - DNA, 30 bp, Artificial Sequence
  Synthetic oligonucleotide
cttgtaccggctaaatggatcgcgcagccc

SEQ ID NO: 354441 - DNA, 30 bp, Artificial Sequence
  Synthetic oligonucleotide
tacggtagggtactccttaccaatcagccc

SEQ ID NO: 354442 - DNA, 30 bp, Artificial Sequence
  Synthetic oligonucleotide
gcccttacaatttcttttcggagtcagccc

SEQ ID NO: 354443 - DNA, 30 bp, Artificial Sequence
  Synthetic oligonucleotide
ttgaattgtaattggcataacagcgagccc

SEQ ID NO: 354444 - DNA, 30 bp, Artificial Sequence
  Synthetic oligonucleotide
cgatggtttgcagcccgatgattcgagccc

SEQ ID NO: 354445 - DNA, 31 bp, Artificial Sequence
  Synthetic oligonucleotide
tcctagatacgtcctgatatggaaggagccc

SEQ ID NO: 354446 - DNA, 30 bp, Artificial Sequence
  Synthetic oligonucleotide
gaaggtcgccagcgtgtagctgcctagccc

SEQ ID NO: 354447 - DNA, 30 bp, Artificial Sequence
  Synthetic oligonucleotide
ctaatctggaatcttgggtcaccgtagccc

SEQ ID NO: 354448 - DNA, 30 bp, Artificial Sequence
  Synthetic oligonucleotide
caatctagcagttggtacttgcaaacgccc

SEQ ID NO: 354449 - DNA, 30 bp, Artificial Sequence
  Synthetic oligonucleotide
attatatcgtcggcgcagtgtcacacgccc

SEQ ID NO: 354450 - DNA, 30 bp, Artificial Sequence
  Synthetic oligonucleotide
aacccggaatcaagtccatgatagacgccc

SEQ ID NO: 354451 - DNA, 30 bp, Artificial Sequence
  Synthetic oligonucleotide
tgaacagtatagtccaaaataattacgccc

SEQ ID NO: 354452 - DNA, 30 bp, Artificial Sequence
  Synthetic oligonucleotide
ttcaagcctgatgatagagaataagcgccc

SEQ ID NO: 354453 - DNA, 30 bp, Artificial Sequence
  Synthetic oligonucleotide
tggagctgattaaggtcgggataagcgccc

SEQ ID NO: 354454 - DNA, 30 bp, Artificial Sequence
  Synthetic oligonucleotide
cctgagttgttgttcgatgtgcaggcgccc

SEQ ID NO: 354455 - DNA, 30 bp, Artificial Sequence
  Synthetic oligonucleotide
caccgtggggtatgcgaattatgctcgccc

SEQ ID NO: 354456 - DNA, 30 bp, Artificial Sequence
  Synthetic oligonucleotide
gcttggttcagtcagcattttcattcgccc

SEQ ID NO: 354457 - DNA, 30 bp, Artificial Sequence
  Synthetic oligonucleotide
ttagactccatatcacgatcatcttcgccc

SEQ ID NO: 354458 - DNA, 30 bp, Artificial Sequence
  Synthetic oligonucleotide
atcaatatatactagcccgatcaaaggccc

SEQ ID NO: 354459 - DNA, 30 bp, Artificial Sequence
  Synthetic oligonucleotide
gcctgaaccggacaggtggacgaaaggccc

SEQ ID NO: 354460 - DNA, 30 bp, Artificial Sequence
  Synthetic oligonucleotide
agtgcagtgcctggcataccataaaggccc

SEQ ID NO: 354461 - DNA, 30 bp, Artificial Sequence
  Synthetic oligonucleotide
acggtttggggccgagcgggctacaggccc

SEQ ID NO: 354462 - DNA, 30 bp, Artificial Sequence
  Synthetic oligonucleotide
ggcgccgagagagggaagggcagcaggccc

SEQ ID NO: 354463 - DNA, 30 bp, Artificial Sequence
  Synthetic oligonucleotide
cgtcccatcatcttgggggctatcaggccc

SEQ ID NO: 354464 - DNA, 30 bp, Artificial Sequence
  Synthetic oligonucleotide
ttattcgcagtcaagtaaaccgagaggccc

SEQ ID NO: 354465 - DNA, 30 bp, Artificial Sequence
  Synthetic oligonucleotide
ttgaacctggggcggaaacaacctaggccc

SEQ ID NO: 354466 - DNA, 30 bp, Artificial Sequence
  Synthetic oligonucleotide
tccgtaatacgcttttaagtatttaggccc

SEQ ID NO: 354467 - DNA, 30 bp, Artificial Sequence
  Synthetic oligonucleotide
ttgggaaattccggaaagaattcccggccc

SEQ ID NO: 354468 - DNA, 30 bp, Artificial Sequence
  Synthetic oligonucleotide
tgtgtgaacagttcgccaggcatccggccc

SEQ ID NO: 354469 - DNA, 30 bp, Artificial Sequence
  Synthetic oligonucleotide
ggaccagcggctaccccgctgtcgcggccc

SEQ ID NO: 354470 - DNA, 30 bp, Artificial Sequence
  Synthetic oligonucleotide
cgaccagttaaagttgggccggctcggccc

SEQ ID NO: 354471 - DNA, 30 bp, Artificial Sequence
  Synthetic oligonucleotide
ataatggcgtcgccgaccgggtccgggccc

SEQ ID NO: 354472 - DNA, 30 bp, Artificial Sequence
  Synthetic oligonucleotide
cagcggacgggcttagcggatatcgggccc

SEQ ID NO: 354473 - DNA, 30 bp, Artificial Sequence
  Synthetic oligonucleotide
gggcatggatcactaacggggctcgggccc

SEQ ID NO: 354474 - DNA, 30 bp, Artificial Sequence
  Synthetic oligonucleotide
ccccgccggggcagacgcgtgaaggggccc

SEQ ID NO: 354475 - DNA, 30 bp, Artificial Sequence
  Synthetic oligonucleotide
cagggcatcactgacaactgagtggggccc

SEQ ID NO: 354476 - DNA, 30 bp, Artificial Sequence
  Synthetic oligonucleotide
gagggctgatgtttatgagtaaatgggccc

SEQ ID NO: 354477 - DNA, 30 bp, Artificial Sequence
  Synthetic oligonucleotide
taaagtcgtaggtcctcgagacatgggccc

SEQ ID NO: 354478 - DNA, 30 bp, Artificial Sequence
  Synthetic oligonucleotide
agtggtattaacaatccgaccattgggccc

SEQ ID NO: 354479 - DNA, 30 bp, Artificial Sequence
  Synthetic oligonucleotide
cgctcagctttgtcaagagaaagctggccc

SEQ ID NO: 354480 - DNA, 30 bp, Artificial Sequence
  Synthetic oligonucleotide
atgcttagagggacgtaatctgcaatgccc

SEQ ID NO: 354481 - DNA, 30 bp, Artificial Sequence
  Synthetic oligonucleotide
agtttatacgtgggtctccagggaatgccc

SEQ ID NO: 354482 - DNA, 30 bp, Artificial Sequence
  Synthetic oligonucleotide
tcagggctgggataatatcgtctcatgccc

SEQ ID NO: 354483 - DNA, 30 bp, Artificial Sequence
  Synthetic oligonucleotide
gaccccgacgcacaataactaagactgccc

SEQ ID NO: 354484 - DNA, 30 bp, Artificial Sequence
  Synthetic oligonucleotide
aatatgaccatatgttgacatagcctgccc

SEQ ID NO: 354485 - DNA, 30 bp, Artificial Sequence
  Synthetic oligonucleotide
gggaccccccaatagaaagttctcctgccc

SEQ ID NO: 354486 - DNA, 30 bp, Artificial Sequence
  Synthetic oligonucleotide
aagaactctacaggtcctcaaacgctgccc

SEQ ID NO: 354487 - DNA, 30 bp, Artificial Sequence
  Synthetic oligonucleotide
gaaatcaaatgattgcctcacaggctgccc

SEQ ID NO: 354488 - DNA, 30 bp, Artificial Sequence
  Synthetic oligonucleotide
gttggttcctcgcggcggacctatctgccc

SEQ ID NO: 354489 - DNA, 30 bp, Artificial Sequence
  Synthetic oligonucleotide
gcggcaacaggtagggggcctagagtgccc

SEQ ID NO: 354490 - DNA, 30 bp, Artificial Sequence
  Synthetic oligonucleotide
agcggaggccgggatttatgagacgtgccc

SEQ ID NO: 354491 - DNA, 30 bp, Artificial Sequence
  Synthetic oligonucleotide
atgatgggcccggtgtgactaaccgtgccc

SEQ ID NO: 354492 - DNA, 30 bp, Artificial Sequence
  Synthetic oligonucleotide
gtcaggacagctataaacagatccgtgccc

SEQ ID NO: 354493 - DNA, 30 bp, Artificial Sequence
  Synthetic oligonucleotide
aaaatagcgcttaccaacgctcgtgtgccc

SEQ ID NO: 354494 - DNA, 30 bp, Artificial Sequence
  Synthetic oligonucleotide
acgctttgcaagaacgagtgaaaattgccc

SEQ ID NO: 354495 - DNA, 30 bp, Artificial Sequence
  Synthetic oligonucleotide
atcaaagaccggtttatgctacaattgccc

SEQ ID NO: 354496 - DNA, 30 bp, Artificial Sequence
  Synthetic oligonucleotide
acatgcgtacgccttgggatgggcttgccc

SEQ ID NO: 354497 - DNA, 30 bp, Artificial Sequence
  Synthetic oligonucleotide
cgcgattctttgcatgtctcaacgttgccc

SEQ ID NO: 354498 - DNA, 30 bp, Artificial Sequence
  Synthetic oligonucleotide
gtcagtgtagaagccgtagtcgttttgccc

SEQ ID NO: 354499 - DNA, 30 bp, Artificial Sequence
  Synthetic oligonucleotide
gcacattagcctaattctgatttaaatccc

SEQ ID NO: 354500 - DNA, 30 bp, Artificial Sequence
  Synthetic oligonucleotide
acccggtatgtgagctactaccacaatccc

SEQ ID NO: 354501 - DNA, 30 bp, Artificial Sequence
  Synthetic oligonucleotide
gcttgacggggaatcaattggccgaatccc

SEQ ID NO: 354502 - DNA, 30 bp, Artificial Sequence
  Synthetic oligonucleotide
ccactggtcccattataatatgggaatccc

SEQ ID NO: 354503 - DNA, 30 bp, Artificial Sequence
  Synthetic oligonucleotide
taaagcgacgcgcccggtttcgtgaatccc

SEQ ID NO: 354504 - DNA, 30 bp, Artificial Sequence
  Synthetic oligonucleotide
ctacgagcagtgtccacagaattacatccc

SEQ ID NO: 354505 - DNA, 30 bp, Artificial Sequence
  Synthetic oligonucleotide
gtctggaaggagggggctcgcatccatccc

SEQ ID NO: 354506 - DNA, 30 bp, Artificial Sequence
  Synthetic oligonucleotide
aggtagaggtttacaaagcgggctcatccc

SEQ ID NO: 354507 - DNA, 30 bp, Artificial Sequence
  Synthetic oligonucleotide
tcgagggattcggtgaacatcctcgatccc

SEQ ID NO: 354508 - DNA, 30 bp, Artificial Sequence
  Synthetic oligonucleotide
atgaatttacctgccttcgtcctatatccc

SEQ ID NO: 354509 - DNA, 30 bp, Artificial Sequence
  Synthetic oligonucleotide
gttcattacaagttggaatgcgattatccc

SEQ ID NO: 354510 - DNA, 30 bp, Artificial Sequence
  Synthetic oligonucleotide
ggtgcgtgtttttcgtaatgatattatccc

SEQ ID NO: 354511 - DNA, 30 bp, Artificial Sequence
  Synthetic oligonucleotide
agcactgggggctttatacccagaactccc

SEQ ID NO: 354512 - DNA, 30 bp, Artificial Sequence
  Synthetic oligonucleotide
ggactttaggacgtgctgtcagtaactccc

SEQ ID NO: 354513 - DNA, 30 bp, Artificial Sequence
  Synthetic oligonucleotide
gtattatcatcggattaaacagagactccc

SEQ ID NO: 354514 - DNA, 30 bp, Artificial Sequence
  Synthetic oligonucleotide
attatgtgcacgatgatttggtggactccc

SEQ ID NO: 354515 - DNA, 30 bp, Artificial Sequence
  Synthetic oligonucleotide
atgcagtcatgtggtaggccgagtactccc

SEQ ID NO: 354516 - DNA, 30 bp, Artificial Sequence
  Synthetic oligonucleotide
ttttacctcagagatgacgattttactccc

SEQ ID NO: 354517 - DNA, 30 bp, Artificial Sequence
  Synthetic oligonucleotide
atatcaaaacacacaagggacactcctccc

SEQ ID NO: 354518 - DNA, 30 bp, Artificial Sequence
  Synthetic oligonucleotide
gctatagcgatcagcgggactggtcctccc

SEQ ID NO: 354519 - DNA, 30 bp, Artificial Sequence
  Synthetic oligonucleotide
gtgagacccgaggtccgagaccgagctccc

SEQ ID NO: 354520 - DNA, 30 bp, Artificial Sequence
  Synthetic oligonucleotide
gaggggtagcctctacctctcttagctccc

SEQ ID NO: 354521 - DNA, 30 bp, Artificial Sequence
  Synthetic oligonucleotide
ctcccattgggagcgtgagccgaggctccc

SEQ ID NO: 354522 - DNA, 30 bp, Artificial Sequence
  Synthetic oligonucleotide
agctcagcagcatccggagtatatgctccc

SEQ ID NO: 354523 - DNA, 30 bp, Artificial Sequence
  Synthetic oligonucleotide
tgaatgggtcctaagatttctttctctccc

SEQ ID NO: 354524 - DNA, 30 bp, Artificial Sequence
  Synthetic oligonucleotide
cttttcatagaataaacctccccgtctccc

SEQ ID NO: 354525 - DNA, 30 bp, Artificial Sequence
  Synthetic oligonucleotide
attcggaattaacggccatacttttctccc

SEQ ID NO: 354526 - DNA, 30 bp, Artificial Sequence
  Synthetic oligonucleotide
ctattgctaggaggggcttccctaagtccc

SEQ ID NO: 354527 - DNA, 30 bp, Artificial Sequence
  Synthetic oligonucleotide
tccaagtcactaacggccgtcgacagtccc

SEQ ID NO: 354528 - DNA, 30 bp, Artificial Sequence
  Synthetic oligonucleotide
acgagcccgattgatgcagatctcagtccc

SEQ ID NO: 354529 - DNA, 30 bp, Artificial Sequence
  Synthetic oligonucleotide
acctaatattgcttgagtcccacgagtccc

SEQ ID NO: 354530 - DNA, 30 bp, Artificial Sequence
  Synthetic oligonucleotide
aagcttacttcggtcttaaagggtagtccc

SEQ ID NO: 354531 - DNA, 30 bp, Artificial Sequence
  Synthetic oligonucleotide
gcgttggtcccatacatggccattagtccc

SEQ ID NO: 354532 - DNA, 30 bp, Artificial Sequence
  Synthetic oligonucleotide
catattaagctgcgcttgatcgttagtccc

SEQ ID NO: 354533 - DNA, 30 bp, Artificial Sequence
  Synthetic oligonucleotide
caatgattgtgttgtagacaacaacgtccc

SEQ ID NO: 354534 - DNA, 30 bp, Artificial Sequence
  Synthetic oligonucleotide
ctaaggttgccaaccgatcgttgacgtccc

SEQ ID NO: 354535 - DNA, 30 bp, Artificial Sequence
  Synthetic oligonucleotide
aagttcggaagatacgaaggtatccgtccc

SEQ ID NO: 354536 - DNA, 30 bp, Artificial Sequence
  Synthetic oligonucleotide
gaggggatgctcaggcgcgtagtccgtccc

SEQ ID NO: 354537 - DNA, 30 bp, Artificial Sequence
  Synthetic oligonucleotide
tacgcgcttatgggtcataagcagcgtccc

SEQ ID NO: 354538 - DNA, 30 bp, Artificial Sequence
  Synthetic oligonucleotide
gacctcagatgtcatcggttgacgcgtccc

SEQ ID NO: 354539 - DNA, 30 bp, Artificial Sequence
  Synthetic oligonucleotide
gccatcagaccagtacatttagggcgtccc

SEQ ID NO: 354540 - DNA, 30 bp, Artificial Sequence
  Synthetic oligonucleotide
gattctttataaagccacaagtatcgtccc

SEQ ID NO: 354541 - DNA, 31 bp, Artificial Sequence
  Synthetic oligonucleotide
agttactgcctctgttggtcgctcaggtccc

SEQ ID NO: 354542 - DNA, 30 bp, Artificial Sequence
  Synthetic oligonucleotide
cagtacggattatccctgctgaccggtccc

SEQ ID NO: 354543 - DNA, 30 bp, Artificial Sequence
  Synthetic oligonucleotide
agagtcttgagtagtacgttcttcggtccc

SEQ ID NO: 354544 - DNA, 30 bp, Artificial Sequence
  Synthetic oligonucleotide
atttcgtcacggcttgggaataagggtccc

SEQ ID NO: 354545 - DNA, 30 bp, Artificial Sequence
  Synthetic oligonucleotide
cgtcacagccactatgaagacccgggtccc

SEQ ID NO: 354546 - DNA, 30 bp, Artificial Sequence
  Synthetic oligonucleotide
ggcaccaactgtgctgaacgtccgggtccc

SEQ ID NO: 354547 - DNA, 30 bp, Artificial Sequence
  Synthetic oligonucleotide
aaggagaaggttgacatagaatggggtccc

SEQ ID NO: 354548 - DNA, 30 bp, Artificial Sequence
  Synthetic oligonucleotide
tggaacgtttatagagttaagggtggtccc

SEQ ID NO: 354549 - DNA, 30 bp, Artificial Sequence
  Synthetic oligonucleotide
aaggtcgtaaaaggctctgggaaatgtccc

SEQ ID NO: 354550 - DNA, 30 bp, Artificial Sequence
  Synthetic oligonucleotide
gtccagaacagaggcgctaccttatgtccc

SEQ ID NO: 354551 - DNA, 30 bp, Artificial Sequence
  Synthetic oligonucleotide
tacattcactcgagaacgggaggctgtccc

SEQ ID NO: 354552 - DNA, 30 bp, Artificial Sequence
  Synthetic oligonucleotide
cagctctacaacgtgggccgcttgtgtccc

SEQ ID NO: 354553 - DNA, 30 bp, Artificial Sequence
  Synthetic oligonucleotide
ggggatacgaagtcctaatgtttaattccc

SEQ ID NO: 354554 - DNA, 30 bp, Artificial Sequence
  Synthetic oligonucleotide
tcggagagtcttagaacgcatcacattccc

SEQ ID NO: 354555 - DNA, 30 bp, Artificial Sequence
  Synthetic oligonucleotide
acatgagataagcagaaatctcagattccc

SEQ ID NO: 354556 - DNA, 30 bp, Artificial Sequence
  Synthetic oligonucleotide
gcatgacaggttagggggagaccgattccc

SEQ ID NO: 354557 - DNA, 30 bp, Artificial Sequence
  Synthetic oligonucleotide
ttaggacgacggtctcagtccctgattccc

SEQ ID NO: 354558 - DNA, 30 bp, Artificial Sequence
  Synthetic oligonucleotide
ttgaaggggcagataggttcagtgattccc

SEQ ID NO: 354559 - DNA, 30 bp, Artificial Sequence
  Synthetic oligonucleotide
aatgtcaataatcaaggggggaatattccc

SEQ ID NO: 354560 - DNA, 30 bp, Artificial Sequence
  Synthetic oligonucleotide
agctgggtaattcagtgcgttgatattccc

SEQ ID NO: 354561 - DNA, 30 bp, Artificial Sequence
  Synthetic oligonucleotide
ggagtcaataagactattcaagttattccc

SEQ ID NO: 354562 - DNA, 30 bp, Artificial Sequence
  Synthetic oligonucleotide
tccccgggttattggaactttggacttccc

SEQ ID NO: 354563 - DNA, 30 bp, Artificial Sequence
  Synthetic oligonucleotide
ggggaaagttgccgaataggtgtacttccc

SEQ ID NO: 354564 - DNA, 30 bp, Artificial Sequence
  Synthetic oligonucleotide
acgtgattgccgttccaaagaacccttccc

SEQ ID NO: 354565 - DNA, 30 bp, Artificial Sequence
  Synthetic oligonucleotide
gcgtggtgacgtaaaatgcggttgcttccc

SEQ ID NO: 354566 - DNA, 30 bp, Artificial Sequence
  Synthetic oligonucleotide
ggagcgcagaagttatagattcaagttccc

SEQ ID NO: 354567 - DNA, 30 bp, Artificial Sequence
  Synthetic oligonucleotide
tcagaaaaggaggctattatgtaagttccc

SEQ ID NO: 354568 - DNA, 30 bp, Artificial Sequence
  Synthetic oligonucleotide
taacgttgagatattaatgcggcagttccc

SEQ ID NO: 354569 - DNA, 28 bp, Artificial Sequence
  Synthetic oligonucleotide
cgagattttcagtggtgggggcgttccc

SEQ ID NO: 354570 - DNA, 30 bp, Artificial Sequence
  Synthetic oligonucleotide
tagcggaattgggccaattgaatatttccc

SEQ ID NO: 354571 - DNA, 30 bp, Artificial Sequence
  Synthetic oligonucleotide
gtacacgggtaagtcatgacgcactttccc

SEQ ID NO: 354572 - DNA, 30 bp, Artificial Sequence
  Synthetic oligonucleotide
catttcatcgaaatgacacagttttttccc

SEQ ID NO: 354573 - DNA, 30 bp, Artificial Sequence
  Synthetic oligonucleotide
tagtctgaacctcagctgaagataaaagcc

SEQ ID NO: 354574 - DNA, 30 bp, Artificial Sequence
  Synthetic oligonucleotide
ccatacgcaattatattgtaactaaaagcc

SEQ ID NO: 354575 - DNA, 30 bp, Artificial Sequence
  Synthetic oligonucleotide
gaagaaaggttgccggacttcctaaaagcc

SEQ ID NO: 354576 - DNA, 30 bp, Artificial Sequence
  Synthetic oligonucleotide
gcgggatctccttagtttcgctaacaagcc

SEQ ID NO: 354577 - DNA, 30 bp, Artificial Sequence
  Synthetic oligonucleotide
aggaagtacatttcgcaacgggtacaagcc

SEQ ID NO: 354578 - DNA, 30 bp, Artificial Sequence
  Synthetic oligonucleotide
gtacataacaggagctgtctaacgcaagcc

SEQ ID NO: 354579 - DNA, 30 bp, Artificial Sequence
  Synthetic oligonucleotide
ggcactaataaattagactggatgcaagcc

SEQ ID NO: 354580 - DNA, 30 bp, Artificial Sequence
  Synthetic oligonucleotide
atatgtaggggatcgtgactacgtcaagcc

SEQ ID NO: 354581 - DNA, 30 bp, Artificial Sequence
  Synthetic oligonucleotide
actatagggtttctctgagataaagaagcc

SEQ ID NO: 354582 - DNA, 30 bp, Artificial Sequence
  Synthetic oligonucleotide
gtatgtagaaagccctcgtatatagaagcc

SEQ ID NO: 354583 - DNA, 30 bp, Artificial Sequence
  Synthetic oligonucleotide
caacgcggtccctttgccctcaacgaagcc

SEQ ID NO: 354584 - DNA, 30 bp, Artificial Sequence
  Synthetic oligonucleotide
gccgcgatataatgatatcgccgcgaagcc

SEQ ID NO: 354585 - DNA, 30 bp, Artificial Sequence
  Synthetic oligonucleotide
gaatagcggatattgtatagttgcgaagcc

SEQ ID NO: 354586 - DNA, 30 bp, Artificial Sequence
  Synthetic oligonucleotide
tttatagacctcgggcgagatagtgaagcc

SEQ ID NO: 354587 - DNA, 30 bp, Artificial Sequence
  Synthetic oligonucleotide
tactcgggtaacttcacatatcgtgaagcc

SEQ ID NO: 354588 - DNA, 30 bp, Artificial Sequence
  Synthetic oligonucleotide
tgtttcggagtaagctgtacaggctaagcc

SEQ ID NO: 354589 - DNA, 30 bp, Artificial Sequence
  Synthetic oligonucleotide
aaggctaacgccctacattgcatgtaagcc

SEQ ID NO: 354590 - DNA, 30 bp, Artificial Sequence
  Synthetic oligonucleotide
tatgagttgttccatgccctatattaagcc

SEQ ID NO: 354591 - DNA, 30 bp, Artificial Sequence
  Synthetic oligonucleotide
accttcgaatagttgtaatgtacttaagcc

SEQ ID NO: 354592 - DNA, 30 bp, Artificial Sequence
  Synthetic oligonucleotide
cgggacaactcagggctgtgcaaaacagcc

SEQ ID NO: 354593 - DNA, 30 bp, Artificial Sequence
  Synthetic oligonucleotide
tagaaacgatacgcccccaggaaaacagcc

SEQ ID NO: 354594 - DNA, 30 bp, Artificial Sequence
  Synthetic oligonucleotide
gcttgatgtggggtacctaggttaacagcc

SEQ ID NO: 354595 - DNA, 30 bp, Artificial Sequence
  Synthetic oligonucleotide
agcacacagcgggtttgagggcccacagcc

SEQ ID NO: 354596 - DNA, 30 bp, Artificial Sequence
  Synthetic oligonucleotide
gcactcagcattcgcggtcgagtcacagcc

SEQ ID NO: 354597 - DNA, 30 bp, Artificial Sequence
  Synthetic oligonucleotide
catgtatccttggctcacatagggacagcc

SEQ ID NO: 354598 - DNA, 30 bp, Artificial Sequence
  Synthetic oligonucleotide
atatcttaaataatacctcaccgtacagcc

SEQ ID NO: 354599 - DNA, 30 bp, Artificial Sequence
  Synthetic oligonucleotide
cctgttaactcggatagaatatgtacagcc

SEQ ID NO: 354600 - DNA, 30 bp, Artificial Sequence
  Synthetic oligonucleotide
aacggcttgtccccaggccctattacagcc

SEQ ID NO: 354601 - DNA, 30 bp, Artificial Sequence
  Synthetic oligonucleotide
cggcctgtcgggcctttgttaggaccagcc

SEQ ID NO: 354602 - DNA, 30 bp, Artificial Sequence
  Synthetic oligonucleotide
ggatgactctagataaggctctgaccagcc

SEQ ID NO: 354603 - DNA, 30 bp, Artificial Sequence
  Synthetic oligonucleotide
gaataatattcaagtctcagggcgccagcc

SEQ ID NO: 354604 - DNA, 29 bp, Artificial Sequence
  Synthetic oligonucleotide
tgggtccatcggttagcgtttggccagcc

SEQ ID NO: 354605 - DNA, 30 bp, Artificial Sequence
  Synthetic oligonucleotide
acatttggattaatgttgatgaatccagcc

SEQ ID NO: 354606 - DNA, 30 bp, Artificial Sequence
  Synthetic oligonucleotide
gggtcgcatagaaactctatgtatccagcc

SEQ ID NO: 354607 - DNA, 30 bp, Artificial Sequence
  Synthetic oligonucleotide
ctaggcttcggaagtacgctacaagcagcc

SEQ ID NO: 354608 - DNA, 30 bp, Artificial Sequence
  Synthetic oligonucleotide
aaggccggaacgggcattaggatcgcagcc

SEQ ID NO: 354609 - DNA, 30 bp, Artificial Sequence
  Synthetic oligonucleotide
acgcaagcggaccgctcggttcaatcagcc

SEQ ID NO: 354610 - DNA, 30 bp, Artificial Sequence
  Synthetic oligonucleotide
ctagcctaaagggcaggttttatatcagcc

SEQ ID NO: 354611 - DNA, 30 bp, Artificial Sequence
  Synthetic oligonucleotide
ggcttgatggacacagctgaggtctcagcc

SEQ ID NO: 354612 - DNA, 30 bp, Artificial Sequence
  Synthetic oligonucleotide
aggataccgggctcctctgtaacgtcagcc

SEQ ID NO: 354613 - DNA, 30 bp, Artificial Sequence
  Synthetic oligonucleotide
atgccgaataagagggggttgaattcagcc

SEQ ID NO: 354614 - DNA, 30 bp, Artificial Sequence
  Synthetic oligonucleotide
ggaggtggatacgccccggatcattcagcc

SEQ ID NO: 354615 - DNA, 30 bp, Artificial Sequence
  Synthetic oligonucleotide
gtatttgtccatgcatgataggtttcagcc

SEQ ID NO: 354616 - DNA, 30 bp, Artificial Sequence
  Synthetic oligonucleotide
catgtatagttacacgggactacaagagcc

SEQ ID NO: 354617 - DNA, 30 bp, Artificial Sequence
  Synthetic oligonucleotide
ctcacggtgtcactgttatagtacagagcc

SEQ ID NO: 354618 - DNA, 30 bp, Artificial Sequence
  Synthetic oligonucleotide
gttttcagggttaacctgatgtagagagcc

SEQ ID NO: 354619 - DNA, 30 bp, Artificial Sequence
  Synthetic oligonucleotide
atagatactaggatttatgcgccgagagcc

SEQ ID NO: 354620 - DNA, 35 bp, Artificial Sequence
  Synthetic oligonucleotide
tcgtggcagctcgacactgatcaattagccgagcc

SEQ ID NO: 354621 - DNA, 30 bp, Artificial Sequence
  Synthetic oligonucleotide
cacttccctgcgtgtgctcatgatcgagcc

SEQ ID NO: 354622 - DNA, 30 bp, Artificial Sequence
  Synthetic oligonucleotide
cacggtcttgatccccgttagtttcgagcc

SEQ ID NO: 354623 - DNA, 30 bp, Artificial Sequence
  Synthetic oligonucleotide
cacgagtctctaccacgacgtacaggagcc

SEQ ID NO: 354624 - DNA, 30 bp, Artificial Sequence
  Synthetic oligonucleotide
aaaaattctgacgtactacctccaggagcc

SEQ ID NO: 354625 - DNA, 30 bp, Artificial Sequence
  Synthetic oligonucleotide
cggctagcacatcctgcattggcaggagcc

SEQ ID NO: 354626 - DNA, 30 bp, Artificial Sequence
  Synthetic oligonucleotide
gtactctgtgtggccgggatgagaggagcc

SEQ ID NO: 354627 - DNA, 31 bp, Artificial Sequence
  Synthetic oligonucleotide
tcctgggatagttggcgtctcggggggagcc

SEQ ID NO: 354628 - DNA, 30 bp, Artificial Sequence
  Synthetic oligonucleotide
cgatagggtgcctaccgaggtcgtggagcc

SEQ ID NO: 354629 - DNA, 30 bp, Artificial Sequence
  Synthetic oligonucleotide
cctgcgcttgctagagtttgggaatgagcc

SEQ ID NO: 354630 - DNA, 30 bp, Artificial Sequence
  Synthetic oligonucleotide
atgagctcttatactgacaatgcatgagcc

SEQ ID NO: 354631 - DNA, 29 bp, Artificial Sequence
  Synthetic oligonucleotide
aatcggttttcggatgaacctagtgagcc

SEQ ID NO: 354632 - DNA, 30 bp, Artificial Sequence
  Synthetic oligonucleotide
tgataattatggaagcggtgatggtgagcc

SEQ ID NO: 354633 - DNA, 30 bp, Artificial Sequence
  Synthetic oligonucleotide
ttcaagccgtcattttagtccatgtgagcc

SEQ ID NO: 354634 - DNA, 30 bp, Artificial Sequence
  Synthetic oligonucleotide
actaccgtaggactcgttgtatattgagcc

SEQ ID NO: 354635 - DNA, 30 bp, Artificial Sequence
  Synthetic oligonucleotide
tccgggattccgtaacaatgtttttgagcc

SEQ ID NO: 354636 - DNA, 30 bp, Artificial Sequence
  Synthetic oligonucleotide
ggcaggctcagtaccaaggaacacatagcc

SEQ ID NO: 354637 - DNA, 30 bp, Artificial Sequence
  Synthetic oligonucleotide
gttcctgcacaagcaatttcttccatagcc

SEQ ID NO: 354638 - DNA, 30 bp, Artificial Sequence
  Synthetic oligonucleotide
gtaacccggtgggcgtgaaggttcatagcc

SEQ ID NO: 354639 - DNA, 30 bp, Artificial Sequence
  Synthetic oligonucleotide
ggtccgcggatatatgtcatcaagatagcc

SEQ ID NO: 354640 - DNA, 30 bp, Artificial Sequence
  Synthetic oligonucleotide
gtcaccacgggaactttacctatgatagcc

SEQ ID NO: 354641 - DNA, 31 bp, Artificial Sequence
  Synthetic oligonucleotide
gctttccaatagaagtgtccatgccctagcc

SEQ ID NO: 354642 - DNA, 30 bp, Artificial Sequence
  Synthetic oligonucleotide
ttcgtgaatcataatacacggttgctagcc

SEQ ID NO: 354643 - DNA, 30 bp, Artificial Sequence
  Synthetic oligonucleotide
gagatatttgcttacatcagaaatctagcc

SEQ ID NO: 354644 - DNA, 30 bp, Artificial Sequence
  Synthetic oligonucleotide
tcagtccctatttggaaagttatcgtagcc

SEQ ID NO: 354645 - DNA, 30 bp, Artificial Sequence
  Synthetic oligonucleotide
atctagcatgagcgcgtccgcctcgtagcc

SEQ ID NO: 354646 - DNA, 30 bp, Artificial Sequence
  Synthetic oligonucleotide
gattcggtaatacacctagctctcgtagcc

SEQ ID NO: 354647 - DNA, 30 bp, Artificial Sequence
  Synthetic oligonucleotide
acttaaggagttcgccgttgagcggtagcc

SEQ ID NO: 354648 - DNA, 30 bp, Artificial Sequence
  Synthetic oligonucleotide
tggtcccctgggtactcacgcatggtagcc

SEQ ID NO: 354649 - DNA, 30 bp, Artificial Sequence
  Synthetic oligonucleotide
tacgccgagagtctccgataagtggtagcc

SEQ ID NO: 354650 - DNA, 30 bp, Artificial Sequence
  Synthetic oligonucleotide
acaagtagaatggtactctcaaatgtagcc

SEQ ID NO: 354651 - DNA, 30 bp, Artificial Sequence
  Synthetic oligonucleotide
ttagacgactgctccgcttgaaatgtagcc

SEQ ID NO: 354652 - DNA, 30 bp, Artificial Sequence
  Synthetic oligonucleotide
gtccggaattttctgggataagctgtagcc

SEQ ID NO: 354653 - DNA, 30 bp, Artificial Sequence
  Synthetic oligonucleotide
agataacatatgatccggtaaattgtagcc

SEQ ID NO: 354654 - DNA, 30 bp, Artificial Sequence
  Synthetic oligonucleotide
gcacctgtatggcactgggagaccttagcc

SEQ ID NO: 354655 - DNA, 30 bp, Artificial Sequence
  Synthetic oligonucleotide
taagacccgtgaatccttaaaaggttagcc

SEQ ID NO: 354656 - DNA, 30 bp, Artificial Sequence
  Synthetic oligonucleotide
caaggaccggtacgttcaggatatttagcc

SEQ ID NO: 354657 - DNA, 30 bp, Artificial Sequence
  Synthetic oligonucleotide
aactcttagacatgctggcataaaaacgcc

SEQ ID NO: 354658 - DNA, 30 bp, Artificial Sequence
  Synthetic oligonucleotide
tgaatctcgatttgttttttcagaaacgcc

SEQ ID NO: 354659 - DNA, 30 bp, Artificial Sequence
  Synthetic oligonucleotide
gccatgaggccagagctgccatggaacgcc

SEQ ID NO: 354660 - DNA, 30 bp, Artificial Sequence
  Synthetic oligonucleotide
acttttacagactcctaaggactgaacgcc

SEQ ID NO: 354661 - DNA, 30 bp, Artificial Sequence
  Synthetic oligonucleotide
catggtttagtccgtcattgtgtgaacgcc

SEQ ID NO: 354662 - DNA, 30 bp, Artificial Sequence
  Synthetic oligonucleotide
ctagcaagctggaatagacgctataacgcc

SEQ ID NO: 354663 - DNA, 30 bp, Artificial Sequence
  Synthetic oligonucleotide
catgaatttgccctggacatagttaacgcc

SEQ ID NO: 354664 - DNA, 30 bp, Artificial Sequence
  Synthetic oligonucleotide
gttgacccgagagtcattcagatacacgcc

SEQ ID NO: 354665 - DNA, 31 bp, Artificial Sequence
  Synthetic oligonucleotide
ccaatggatgttaggtcggcaagtacacgcc

SEQ ID NO: 354666 - DNA, 30 bp, Artificial Sequence
  Synthetic oligonucleotide
gatggatcctgtgcgacagtttcccacgcc

SEQ ID NO: 354667 - DNA, 30 bp, Artificial Sequence
  Synthetic oligonucleotide
tcgcgtcaaggaggcgacagtatccacgcc

SEQ ID NO: 354668 - DNA, 30 bp, Artificial Sequence
  Synthetic oligonucleotide
gtgcctattaatgccatctggtggcacgcc

SEQ ID NO: 354669 - DNA, 30 bp, Artificial Sequence
  Synthetic oligonucleotide
gaagcggtgctgaggtcatatttgcacgcc

SEQ ID NO: 354670 - DNA, 30 bp, Artificial Sequence
  Synthetic oligonucleotide
ccaaaaggacttctagtattgtaggacgcc

SEQ ID NO: 354671 - DNA, 30 bp, Artificial Sequence
  Synthetic oligonucleotide
aagtacatctgcgtcgtaaacgcggacgcc

SEQ ID NO: 354672 - DNA, 30 bp, Artificial Sequence
  Synthetic oligonucleotide
cgaacagaaaaacggcccaggagggacgcc

SEQ ID NO: 354673 - DNA, 30 bp, Artificial Sequence
  Synthetic oligonucleotide
aggtgccgcacgtgtgcagaaattgacgcc

SEQ ID NO: 354674 - DNA, 30 bp, Artificial Sequence
  Synthetic oligonucleotide
catagctctctatattccggctactacgcc

SEQ ID NO: 354675 - DNA, 30 bp, Artificial Sequence
  Synthetic oligonucleotide
gcctgcaccgagaacacagttatctacgcc

SEQ ID NO: 354676 - DNA, 30 bp, Artificial Sequence
  Synthetic oligonucleotide
tgggattggtgattattaaacgtctacgcc

SEQ ID NO: 354677 - DNA, 30 bp, Artificial Sequence
  Synthetic oligonucleotide
caggtgccatatgtgtgcaagcggtacgcc

SEQ ID NO: 354678 - DNA, 30 bp, Artificial Sequence
  Synthetic oligonucleotide
tcctctttattacattgtaacgagaccgcc

SEQ ID NO: 354679 - DNA, 30 bp, Artificial Sequence
  Synthetic oligonucleotide
gctatcgggtcgaatgccaaggcgaccgcc

SEQ ID NO: 354680 - DNA, 30 bp, Artificial Sequence
  Synthetic oligonucleotide
ttcatcccagcacctcacaatgtgaccgcc

SEQ ID NO: 354681 - DNA, 30 bp, Artificial Sequence
  Synthetic oligonucleotide
acgataggtttcggttactgaggccccgcc

SEQ ID NO: 354682 - DNA, 30 bp, Artificial Sequence
  Synthetic oligonucleotide
gttcttgtgtatcttgtactggtgcccgcc

SEQ ID NO: 354683 - DNA, 30 bp, Artificial Sequence
  Synthetic oligonucleotide
cttcggggagccttttgtctctaagccgcc

SEQ ID NO: 354684 - DNA, 30 bp, Artificial Sequence
  Synthetic oligonucleotide
ggcattgcacgggggcaggtggtagccgcc

SEQ ID NO: 354685 - DNA, 30 bp, Artificial Sequence
  Synthetic oligonucleotide
gataaccccgttcaagatgtcggcgccgcc

SEQ ID NO: 354686 - DNA, 30 bp, Artificial Sequence
  Synthetic oligonucleotide
tttccacaaagtgtcttgcataatgccgcc

SEQ ID NO: 354687 - DNA, 30 bp, Artificial Sequence
  Synthetic oligonucleotide
catccaattatgggatggtgtggatccgcc

SEQ ID NO: 354688 - DNA, 30 bp, Artificial Sequence
  Synthetic oligonucleotide
gagcttggaaataatagtagatgctccgcc

SEQ ID NO: 354689 - DNA, 30 bp, Artificial Sequence
  Synthetic oligonucleotide
aaaacgctgtttctaggccttacgtccgcc

SEQ ID NO: 354690 - DNA, 30 bp, Artificial Sequence
  Synthetic oligonucleotide
caattcatagaagggttgatagggtccgcc

SEQ ID NO: 354691 - DNA, 29 bp, Artificial Sequence
  Synthetic oligonucleotide
caccagcacgtgcccccagaccaagcgcc

SEQ ID NO: 354692 - DNA, 30 bp, Artificial Sequence
  Synthetic oligonucleotide
ggtgcaatagagaagttctacccaagcgcc

SEQ ID NO: 354693 - DNA, 30 bp, Artificial Sequence
  Synthetic oligonucleotide
cagttcagagtctcaactgggggaagcgcc

SEQ ID NO: 354694 - DNA, 30 bp, Artificial Sequence
  Synthetic oligonucleotide
gaatatccacagggcctcgggtggagcgcc

SEQ ID NO: 354695 - DNA, 30 bp, Artificial Sequence
  Synthetic oligonucleotide
tcgatctaaaagtagcagaatgtgagcgcc

SEQ ID NO: 354696 - DNA, 30 bp, Artificial Sequence
  Synthetic oligonucleotide
gacgttggatcccataagggcaaacgcgcc

SEQ ID NO: 354697 - DNA, 30 bp, Artificial Sequence
  Synthetic oligonucleotide
tgacttctcgctttcttaactcgacgcgcc

SEQ ID NO: 354698 - DNA, 30 bp, Artificial Sequence
  Synthetic oligonucleotide
gctggaagctagtagatagtcctacgcgcc

SEQ ID NO: 354699 - DNA, 30 bp, Artificial Sequence
  Synthetic oligonucleotide
ctggaacatacattatgttatgtacgcgcc

SEQ ID NO: 354700 - DNA, 30 bp, Artificial Sequence
  Synthetic oligonucleotide
ctatccctgtctgtagagactgaccgcgcc

SEQ ID NO: 354701 - DNA, 30 bp, Artificial Sequence
  Synthetic oligonucleotide
atttagcatagaaagctaatggcccgcgcc

SEQ ID NO: 354702 - DNA, 30 bp, Artificial Sequence
  Synthetic oligonucleotide
ccccagggtggggggatgtttttgcgcgcc

SEQ ID NO: 354703 - DNA, 30 bp, Artificial Sequence
  Synthetic oligonucleotide
acgcgcccagttaaacctgcatatcgcgcc

SEQ ID NO: 354704 - DNA, 30 bp, Artificial Sequence
  Synthetic oligonucleotide
atgtagccacgataacgtaccaacggcgcc

SEQ ID NO: 354705 - DNA, 30 bp, Artificial Sequence
  Synthetic oligonucleotide
ttatctccagcgtagactaaatccggcgcc

SEQ ID NO: 354706 - DNA, 29 bp, Artificial Sequence
  Synthetic oligonucleotide
gtgtgacggtctgatagttcctcggcgcc

SEQ ID NO: 354707 - DNA, 30 bp, Artificial Sequence
  Synthetic oligonucleotide
gacaaagtcccaacaatgcgcagtggcgcc

SEQ ID NO: 354708 - DNA, 30 bp, Artificial Sequence
  Synthetic oligonucleotide
agaatcctccgatgtttatatggatgcgcc

SEQ ID NO: 354709 - DNA, 30 bp, Artificial Sequence
  Synthetic oligonucleotide
cctcggtgatccaaagtgggcttgtgcgcc

SEQ ID NO: 354710 - DNA, 30 bp, Artificial Sequence
  Synthetic oligonucleotide
caattgtggggcgacgccgaccattgcgcc

SEQ ID NO: 354711 - DNA, 30 bp, Artificial Sequence
  Synthetic oligonucleotide
cccgtgttatggttgggcagtggttgcgcc

SEQ ID NO: 354712 - DNA, 30 bp, Artificial Sequence
  Synthetic oligonucleotide
aggatcagcgcagaaattgaccagatcgcc

SEQ ID NO: 354713 - DNA, 30 bp, Artificial Sequence
  Synthetic oligonucleotide
tccatgttatagaggagtcatattatcgcc

SEQ ID NO: 354714 - DNA, 30 bp, Artificial Sequence
  Synthetic oligonucleotide
gcacgagggctcttcccgggctatctcgcc

SEQ ID NO: 354715 - DNA, 30 bp, Artificial Sequence
  Synthetic oligonucleotide
aagataggttcttgcgggagatttctcgcc

SEQ ID NO: 354716 - DNA, 30 bp, Artificial Sequence
  Synthetic oligonucleotide
actggagccttggacagttagaaggtcgcc

SEQ ID NO: 354717 - DNA, 30 bp, Artificial Sequence
  Synthetic oligonucleotide
aaatttgccacttcaacccagcaggtcgcc

SEQ ID NO: 354718 - DNA, 30 bp, Artificial Sequence
  Synthetic oligonucleotide
ttaaactgaataactcaagtaatggtcgcc

SEQ ID NO: 354719 - DNA, 30 bp, Artificial Sequence
  Synthetic oligonucleotide
gtaacatatgagactcgcggtattgtcgcc

SEQ ID NO: 354720 - DNA, 30 bp, Artificial Sequence
  Synthetic oligonucleotide
attttcgttggcggagcgaggtgattcgcc

SEQ ID NO: 354721 - DNA, 30 bp, Artificial Sequence
  Synthetic oligonucleotide
tagtacttggcaactgcgatccacttcgcc

SEQ ID NO: 354722 - DNA, 30 bp, Artificial Sequence
  Synthetic oligonucleotide
gtttaaaacctaccacctatcgggttcgcc

SEQ ID NO: 354723 - DNA, 30 bp, Artificial Sequence
  Synthetic oligonucleotide
cttgtcgttgagcaaagaaccctgttcgcc

SEQ ID NO: 354724 - DNA, 30 bp, Artificial Sequence
  Synthetic oligonucleotide
agagattaggtctgtggccggtgtttcgcc

SEQ ID NO: 354725 - DNA, 30 bp, Artificial Sequence
  Synthetic oligonucleotide
gtccagatcagtcggacacacgcaaaggcc

SEQ ID NO: 354726 - DNA, 30 bp, Artificial Sequence
  Synthetic oligonucleotide
gcacccgctgacgtgagactaataaaggcc

SEQ ID NO: 354727 - DNA, 30 bp, Artificial Sequence
  Synthetic oligonucleotide
ggacgtgctgcagccgtttggaagaaggcc

SEQ ID NO: 354728 - DNA, 30 bp, Artificial Sequence
  Synthetic oligonucleotide
gaaaaagataggaaagccagtcagaaggcc

SEQ ID NO: 354729 - DNA, 30 bp, Artificial Sequence
  Synthetic oligonucleotide
tcggtgcctggcctccgcgggcgtaaggcc

SEQ ID NO: 354730 - DNA, 30 bp, Artificial Sequence
  Synthetic oligonucleotide
tacttggaaggatgtactcctcgtaaggcc

SEQ ID NO: 354731 - DNA, 30 bp, Artificial Sequence
  Synthetic oligonucleotide
atagcttcccgaaactgctttctacaggcc

SEQ ID NO: 354732 - DNA, 31 bp, Artificial Sequence
  Synthetic oligonucleotide
gtaaaggcgtctgtatagccgtcaccaggcc

SEQ ID NO: 354733 - DNA, 30 bp, Artificial Sequence
  Synthetic oligonucleotide
tctccggctgaaactgataacatccaggcc

SEQ ID NO: 354734 - DNA, 30 bp, Artificial Sequence
  Synthetic oligonucleotide
cactgagaagtgagcaacacggtgcaggcc

SEQ ID NO: 354735 - DNA, 30 bp, Artificial Sequence
  Synthetic oligonucleotide
aagcctctgattgttcatcgcattcaggcc

SEQ ID NO: 354736 - DNA, 30 bp, Artificial Sequence
  Synthetic oligonucleotide
ggatgacttccatacgaatgtaaagaggcc

SEQ ID NO: 354737 - DNA, 30 bp, Artificial Sequence
  Synthetic oligonucleotide
acggatcgaatgcggtatagcgacgaggcc

SEQ ID NO: 354738 - DNA, 30 bp, Artificial Sequence
  Synthetic oligonucleotide
gggacatcaggtactggctcggatgaggcc

SEQ ID NO: 354739 - DNA, 30 bp, Artificial Sequence
  Synthetic oligonucleotide
gaactcagggtatccccaagaaaataggcc

SEQ ID NO: 354740 - DNA, 30 bp, Artificial Sequence
  Synthetic oligonucleotide
ctggacagaaagtatgatgcgcaataggcc

SEQ ID NO: 354741 - DNA, 30 bp, Artificial Sequence
  Synthetic oligonucleotide
gcggatggcagggatcaagactcataggcc

SEQ ID NO: 354742 - DNA, 30 bp, Artificial Sequence
  Synthetic oligonucleotide
taggaggggggcttggcgtggtgataggcc

SEQ ID NO: 354743 - DNA, 30 bp, Artificial Sequence
  Synthetic oligonucleotide
ttctgttataatcgcattattttataggcc

SEQ ID NO: 354744 - DNA, 30 bp, Artificial Sequence
  Synthetic oligonucleotide
cggccttcgttgaagggagtccgctaggcc

SEQ ID NO: 354745 - DNA, 30 bp, Artificial Sequence
  Synthetic oligonucleotide
tgctgcagactgacgacgactttctaggcc

SEQ ID NO: 354746 - DNA, 30 bp, Artificial Sequence
  Synthetic oligonucleotide
gatttggggcccaatgcatgtaggtaggcc

SEQ ID NO: 354747 - DNA, 30 bp, Artificial Sequence
  Synthetic oligonucleotide
aaagcaggtatggctctaagatgttaggcc

SEQ ID NO: 354748 - DNA, 30 bp, Artificial Sequence
  Synthetic oligonucleotide
gaagaactgtggaggaggtagcaaacggcc

SEQ ID NO: 354749 - DNA, 30 bp, Artificial Sequence
  Synthetic oligonucleotide
cgcgtaatgagtggcttatctatgacggcc

SEQ ID NO: 354750 - DNA, 30 bp, Artificial Sequence
  Synthetic oligonucleotide
catgggtgcttgactatgggcagtacggcc

SEQ ID NO: 354751 - DNA, 30 bp, Artificial Sequence
  Synthetic oligonucleotide
atccagctactatcgcatcaccaaccggcc

SEQ ID NO: 354752 - DNA, 30 bp, Artificial Sequence
  Synthetic oligonucleotide
tggaagtgtgggaagctatacgcaccggcc

SEQ ID NO: 354753 - DNA, 30 bp, Artificial Sequence
  Synthetic oligonucleotide
caaactgacactgaccaggctaatccggcc

SEQ ID NO: 354754 - DNA, 30 bp, Artificial Sequence
  Synthetic oligonucleotide
ggcctaatgggtccaaaagccaacgcggcc

SEQ ID NO: 354755 - DNA, 30 bp, Artificial Sequence
  Synthetic oligonucleotide
gaactagtctgatacttgaagaaggcggcc

SEQ ID NO: 354756 - DNA, 30 bp, Artificial Sequence
  Synthetic oligonucleotide
agcaagacgggttaagcctgtcatgcggcc

SEQ ID NO: 354757 - DNA, 30 bp, Artificial Sequence
  Synthetic oligonucleotide
gcgcccaccgttgtggcgagttctgcggcc

SEQ ID NO: 354758 - DNA, 30 bp, Artificial Sequence
  Synthetic oligonucleotide
ttaaactacttcttctttacgagatcggcc

SEQ ID NO: 354759 - DNA, 30 bp, Artificial Sequence
  Synthetic oligonucleotide
attaccatggtagggatgatcatctcggcc

SEQ ID NO: 354760 - DNA, 30 bp, Artificial Sequence
  Synthetic oligonucleotide
atttagagtctctagtatgtatattcggcc

SEQ ID NO: 354761 - DNA, 30 bp, Artificial Sequence
  Synthetic oligonucleotide
gccgaggtgcagaagtccggtcaaagggcc

SEQ ID NO: 354762 - DNA, 30 bp, Artificial Sequence
  Synthetic oligonucleotide
atgcaggacaggggggcgcaaccaagggcc

SEQ ID NO: 354763 - DNA, 30 bp, Artificial Sequence
  Synthetic oligonucleotide
ggaaaacatcctcttttggtcataagggcc

SEQ ID NO: 354764 - DNA, 30 bp, Artificial Sequence
  Synthetic oligonucleotide
gttgagcagtagctataacctatcagggcc

SEQ ID NO: 354765 - DNA, 30 bp, Artificial Sequence
  Synthetic oligonucleotide
ccagggaaagggtgcgacgttatcagggcc

SEQ ID NO: 354766 - DNA, 30 bp, Artificial Sequence
  Synthetic oligonucleotide
ttcatgcgggacatagtatggctcagggcc

SEQ ID NO: 354767 - DNA, 30 bp, Artificial Sequence
  Synthetic oligonucleotide
acatttcgctatcatgcgcgtccgagggcc

SEQ ID NO: 354768 - DNA, 30 bp, Artificial Sequence
  Synthetic oligonucleotide
taatatcggtgattcatggcctcgagggcc

SEQ ID NO: 354769 - DNA, 30 bp, Artificial Sequence
  Synthetic oligonucleotide
gtataatgtgaaacgggtatagggagggcc

SEQ ID NO: 354770 - DNA, 30 bp, Artificial Sequence
  Synthetic oligonucleotide
gacaggcgcatttgggggtgagttagggcc

SEQ ID NO: 354771 - DNA, 30 bp, Artificial Sequence
  Synthetic oligonucleotide
attcaaaagaggccaaattgacctcgggcc

SEQ ID NO: 354772 - DNA, 30 bp, Artificial Sequence
  Synthetic oligonucleotide
ctggtagcaatcgtcgggaatagtcgggcc

SEQ ID NO: 354773 - DNA, 30 bp, Artificial Sequence
  Synthetic oligonucleotide
cagggcattttcactaccttgcgtcgggcc

SEQ ID NO: 354774 - DNA, 30 bp, Artificial Sequence
  Synthetic oligonucleotide
tcgcctgggtccattagtggggcaggggcc

SEQ ID NO: 354775 - DNA, 30 bp, Artificial Sequence
  Synthetic oligonucleotide
aattgtctaataatcagccatggaggggcc

SEQ ID NO: 354776 - DNA, 30 bp, Artificial Sequence
  Synthetic oligonucleotide
ttagagttgaggagtctccgcgtcggggcc

SEQ ID NO: 354777 - DNA, 30 bp, Artificial Sequence
  Synthetic oligonucleotide
cgcacctgtcgtgataggtatccgggggcc

SEQ ID NO: 354778 - DNA, 30 bp, Artificial Sequence
  Synthetic oligonucleotide
tataggtcgtggttccgccattcgggggcc

SEQ ID NO: 354779 - DNA, 30 bp, Artificial Sequence
  Synthetic oligonucleotide
atgttctactaccaccaaactgggggggcc

SEQ ID NO: 354780 - DNA, 30 bp, Artificial Sequence
  Synthetic oligonucleotide
tgggacggctattggtgatttcatggggcc

SEQ ID NO: 354781 - DNA, 30 bp, Artificial Sequence
  Synthetic oligonucleotide
gtcagactttttgactcatgagttggggcc

SEQ ID NO: 354782 - DNA, 30 bp, Artificial Sequence
  Synthetic oligonucleotide
ccgggtaggccttggacagccccatgggcc

SEQ ID NO: 354783 - DNA, 30 bp, Artificial Sequence
  Synthetic oligonucleotide
ctgtcttcgtggggctatgaccgatgggcc

SEQ ID NO: 354784 - DNA, 30 bp, Artificial Sequence
  Synthetic oligonucleotide
acagttcatataaggtactaagtatgggcc

SEQ ID NO: 354785 - DNA, 30 bp, Artificial Sequence
  Synthetic oligonucleotide
catctgtcgtgggcggctcatgactgggcc

SEQ ID NO: 354786 - DNA, 30 bp, Artificial Sequence
  Synthetic oligonucleotide
cccacacggtgtagttgatagcgctgggcc

SEQ ID NO: 354787 - DNA, 30 bp, Artificial Sequence
  Synthetic oligonucleotide
ctgacgtctcttcaggccaaggtctgggcc

SEQ ID NO: 354788 - DNA, 30 bp, Artificial Sequence
  Synthetic oligonucleotide
cggcaaatatgctggggactcttctgggcc

SEQ ID NO: 354789 - DNA, 30 bp, Artificial Sequence
  Synthetic oligonucleotide
accgggttataacccgtcgaagtgtgggcc

SEQ ID NO: 354790 - DNA, 30 bp, Artificial Sequence
  Synthetic oligonucleotide
tgggtggttgaccccctggatacttgggcc

SEQ ID NO: 354791 - DNA, 30 bp, Artificial Sequence
  Synthetic oligonucleotide
gagtgaggagacaagcatatcagttgggcc

SEQ ID NO: 354792 - DNA, 30 bp, Artificial Sequence
  Synthetic oligonucleotide
gaagccagggcatagtttgcacgttgggcc

SEQ ID NO: 354793 - DNA, 30 bp, Artificial Sequence
  Synthetic oligonucleotide
cggatgacagttctaggagcccgttgggcc

SEQ ID NO: 354794 - DNA, 30 bp, Artificial Sequence
  Synthetic oligonucleotide
ctgtgggcctttcgaacttgcgtttgggcc

SEQ ID NO: 354795 - DNA, 30 bp, Artificial Sequence
  Synthetic oligonucleotide
gtcactaatagtaacgccaacaaaatggcc

SEQ ID NO: 354796 - DNA, 30 bp, Artificial Sequence
  Synthetic oligonucleotide
gcatccctagtggtctcttagcaaatggcc

SEQ ID NO: 354797 - DNA, 30 bp, Artificial Sequence
  Synthetic oligonucleotide
cctacaggctgtccgtaatgctaaatggcc

SEQ ID NO: 354798 - DNA, 30 bp, Artificial Sequence
  Synthetic oligonucleotide
gtgacggggctatgtttaaaagcaatggcc

SEQ ID NO: 354799 - DNA, 30 bp, Artificial Sequence
  Synthetic oligonucleotide
atccaggttacacgggattccgcaatggcc

SEQ ID NO: 354800 - DNA, 30 bp, Artificial Sequence
  Synthetic oligonucleotide
ctccttcacggcgataggacagccatggcc

SEQ ID NO: 354801 - DNA, 30 bp, Artificial Sequence
  Synthetic oligonucleotide
gtcgtttcggcaggctgtaagcggatggcc

SEQ ID NO: 354802 - DNA, 30 bp, Artificial Sequence
  Synthetic oligonucleotide
cattaggatttccaaaacgtcgctatggcc

SEQ ID NO: 354803 - DNA, 30 bp, Artificial Sequence
  Synthetic oligonucleotide
cacgtccgccgtatgagctcataactggcc

SEQ ID NO: 354804 - DNA, 30 bp, Artificial Sequence
  Synthetic oligonucleotide
gcagttttcattacaagaacagatctggcc

SEQ ID NO: 354805 - DNA, 30 bp, Artificial Sequence
  Synthetic oligonucleotide
agcgtcactcttgaggtgtttagtctggcc

SEQ ID NO: 354806 - DNA, 30 bp, Artificial Sequence
  Synthetic oligonucleotide
atcaccatagtcttcaaagggggcgtggcc

SEQ ID NO: 354807 - DNA, 30 bp, Artificial Sequence
  Synthetic oligonucleotide
aaaaggaaagtgatagaatgagcggtggcc

SEQ ID NO: 354808 - DNA, 30 bp, Artificial Sequence
  Synthetic oligonucleotide
ttgcacttattagggggagagtcggtggcc

SEQ ID NO: 354809 - DNA, 30 bp, Artificial Sequence
  Synthetic oligonucleotide
ggacataaattaccgatagcttagttggcc

SEQ ID NO: 354810 - DNA, 30 bp, Artificial Sequence
  Synthetic oligonucleotide
agtaaccccttcaagggatgtacgttggcc

SEQ ID NO: 354811 - DNA, 30 bp, Artificial Sequence
  Synthetic oligonucleotide
cgagttatattagcaaatcaattgttggcc

SEQ ID NO: 354812 - DNA, 30 bp, Artificial Sequence
  Synthetic oligonucleotide
tacaccgcagaggagaaagacacaaatgcc

SEQ ID NO: 354813 - DNA, 30 bp, Artificial Sequence
  Synthetic oligonucleotide
gtatgactgagacctccaatggtaaatgcc

SEQ ID NO: 354814 - DNA, 30 bp, Artificial Sequence
  Synthetic oligonucleotide
ttagaggctctgaggtgtgcatccaatgcc

SEQ ID NO: 354815 - DNA, 30 bp, Artificial Sequence
  Synthetic oligonucleotide
ctccaccccgacacgaatgggaagaatgcc

SEQ ID NO: 354816 - DNA, 30 bp, Artificial Sequence
  Synthetic oligonucleotide
ggagacatttttgtcagcttgtagaatgcc

SEQ ID NO: 354817 - DNA, 30 bp, Artificial Sequence
  Synthetic oligonucleotide
tgttccagtatggtggggcggaataatgcc

SEQ ID NO: 354818 - DNA, 30 bp, Artificial Sequence
  Synthetic oligonucleotide
gacgtggccaactattgtgacacacatgcc

SEQ ID NO: 354819 - DNA, 30 bp, Artificial Sequence
  Synthetic oligonucleotide
atggcagcagtacttacaggaaaccatgcc

SEQ ID NO: 354820 - DNA, 30 bp, Artificial Sequence
  Synthetic oligonucleotide
cacgcgtaattctaggagtggtcgcatgcc

SEQ ID NO: 354821 - DNA, 30 bp, Artificial Sequence
  Synthetic oligonucleotide
caaaggccaaggtggaggctcaggcatgcc

SEQ ID NO: 354822 - DNA, 30 bp, Artificial Sequence
  Synthetic oligonucleotide
atatagcataaacgctaattttggcatgcc

SEQ ID NO: 354823 - DNA, 30 bp, Artificial Sequence
  Synthetic oligonucleotide
ttttcgtgaacaaccggctaagttcatgcc

SEQ ID NO: 354824 - DNA, 30 bp, Artificial Sequence
  Synthetic oligonucleotide
ggtccgcatacccaggcattaaaggatgcc

SEQ ID NO: 354825 - DNA, 30 bp, Artificial Sequence
  Synthetic oligonucleotide
acaaccagattcctggtaatataggatgcc

SEQ ID NO: 354826 - DNA, 30 bp, Artificial Sequence
  Synthetic oligonucleotide
tctggatagcacgcccatttaagggatgcc

SEQ ID NO: 354827 - DNA, 30 bp, Artificial Sequence
  Synthetic oligonucleotide
ggacgagttgtcagaggtaagtttgatgcc

SEQ ID NO: 354828 - DNA, 30 bp, Artificial Sequence
  Synthetic oligonucleotide
aaatagttgagcaagatggcaacatatgcc

SEQ ID NO: 354829 - DNA, 30 bp, Artificial Sequence
  Synthetic oligonucleotide
agattgcagaagaatgtcacaggatatgcc

SEQ ID NO: 354830 - DNA, 30 bp, Artificial Sequence
  Synthetic oligonucleotide
ggagttgctaacgtgttaggcgactatgcc

SEQ ID NO: 354831 - DNA, 30 bp, Artificial Sequence
  Synthetic oligonucleotide
gatgcagaacgcaagtatcccctctatgcc

SEQ ID NO: 354832 - DNA, 30 bp, Artificial Sequence
  Synthetic oligonucleotide
agtgttaacgtatctgtacgtttctatgcc

SEQ ID NO: 354833 - DNA, 30 bp, Artificial Sequence
  Synthetic oligonucleotide
gcatcctccgtaaatttgaatcattatgcc

SEQ ID NO: 354834 - DNA, 30 bp, Artificial Sequence
  Synthetic oligonucleotide
gacgcgtaagccgagaagtgctcttatgcc

SEQ ID NO: 354835 - DNA, 30 bp, Artificial Sequence
  Synthetic oligonucleotide
cacatatgaccacaaggaccgataactgcc

SEQ ID NO: 354836 - DNA, 30 bp, Artificial Sequence
  Synthetic oligonucleotide
atgacatgtagaggtgtccagtagactgcc

SEQ ID NO: 354837 - DNA, 30 bp, Artificial Sequence
  Synthetic oligonucleotide
tctgtgacaaattgatatggtgggactgcc

SEQ ID NO: 354838 - DNA, 30 bp, Artificial Sequence
  Synthetic oligonucleotide
aggtcgtttccttacatgtcgttgactgcc

SEQ ID NO: 354839 - DNA, 30 bp, Artificial Sequence
  Synthetic oligonucleotide
cgcggtagagttcggttttaaaatactgcc

SEQ ID NO: 354840 - DNA, 30 bp, Artificial Sequence
  Synthetic oligonucleotide
agattgtgcgtacagcgttggaatactgcc

SEQ ID NO: 354841 - DNA, 30 bp, Artificial Sequence
  Synthetic oligonucleotide
agctgcatggttgagccatcggctactgcc

SEQ ID NO: 354842 - DNA, 30 bp, Artificial Sequence
  Synthetic oligonucleotide
aaagtaacgagctgatccgaacaacctgcc

SEQ ID NO: 354843 - DNA, 30 bp, Artificial Sequence
  Synthetic oligonucleotide
cagttatagaagttaggagggccccctgcc

SEQ ID NO: 354844 - DNA, 30 bp, Artificial Sequence
  Synthetic oligonucleotide
ggcttcgtggttacgggtatgaatcctgcc

SEQ ID NO: 354845 - DNA, 30 bp, Artificial Sequence
  Synthetic oligonucleotide
cacggcatcaggataggcgcgtacgctgcc

SEQ ID NO: 354846 - DNA, 30 bp, Artificial Sequence
  Synthetic oligonucleotide
taatgactaccccgaagcttacgggctgcc

SEQ ID NO: 354847 - DNA, 30 bp, Artificial Sequence
  Synthetic oligonucleotide
gtctaatgtggcatttgggtcttggctgcc

SEQ ID NO: 354848 - DNA, 30 bp, Artificial Sequence
  Synthetic oligonucleotide
gtgagatcccttaagcttaaatcctctgcc

SEQ ID NO: 354849 - DNA, 30 bp, Artificial Sequence
  Synthetic oligonucleotide
cgtgaacgcgagagcaactggagctctgcc

SEQ ID NO: 354850 - DNA, 30 bp, Artificial Sequence
  Synthetic oligonucleotide
agttgcaacaacctcgaccaattgtctgcc

SEQ ID NO: 354851 - DNA, 30 bp, Artificial Sequence
  Synthetic oligonucleotide
tataggcccaaacgtagctacacttctgcc

SEQ ID NO: 354852 - DNA, 30 bp, Artificial Sequence
  Synthetic oligonucleotide
aagcctagctgatcaggttgcgcttctgcc

SEQ ID NO: 354853 - DNA, 30 bp, Artificial Sequence
  Synthetic oligonucleotide
tatatcggagtaatactagtccggagtgcc

SEQ ID NO: 354854 - DNA, 30 bp, Artificial Sequence
  Synthetic oligonucleotide
tgggcgcgttaaacaggcgccctgagtgcc

SEQ ID NO: 354855 - DNA, 30 bp, Artificial Sequence
  Synthetic oligonucleotide
tggttatagattagcgtatgtaatagtgcc

SEQ ID NO: 354856 - DNA, 30 bp, Artificial Sequence
  Synthetic oligonucleotide
cagattactttggcgctataatttagtgcc

SEQ ID NO: 354857 - DNA, 30 bp, Artificial Sequence
  Synthetic oligonucleotide
ggataagaactcttatgaagggaacgtgcc

SEQ ID NO: 354858 - DNA, 30 bp, Artificial Sequence
  Synthetic oligonucleotide
ctccgaggccaaatgaccaatatacgtgcc

SEQ ID NO: 354859 - DNA, 30 bp, Artificial Sequence
  Synthetic oligonucleotide
cttacatattgcggggaacgcaatcgtgcc

SEQ ID NO: 354860 - DNA, 30 bp, Artificial Sequence
  Synthetic oligonucleotide
actcaattttggtaccggcccccctgtgcc

SEQ ID NO: 354861 - DNA, 30 bp, Artificial Sequence
  Synthetic oligonucleotide
caacatactactggtaaccgtccgtgtgcc

SEQ ID NO: 354862 - DNA, 30 bp, Artificial Sequence
  Synthetic oligonucleotide
gataactcagaaacgtcgacatattgtgcc

SEQ ID NO: 354863 - DNA, 30 bp, Artificial Sequence
  Synthetic oligonucleotide
ttagattagccttctgttctcacttgtgcc

SEQ ID NO: 354864 - DNA, 30 bp, Artificial Sequence
  Synthetic oligonucleotide
gggagaggggaagcgggcgtacgaattgcc

SEQ ID NO: 354865 - DNA, 30 bp, Artificial Sequence
  Synthetic oligonucleotide
tcggggacttcacatgtgtaacggattgcc

SEQ ID NO: 354866 - DNA, 30 bp, Artificial Sequence
  Synthetic oligonucleotide
tttaggtgagagctctaaacgagtattgcc

SEQ ID NO: 354867 - DNA, 30 bp, Artificial Sequence
  Synthetic oligonucleotide
cagtcttactaggaagtgattgtagttgcc

SEQ ID NO: 354868 - DNA, 30 bp, Artificial Sequence
  Synthetic oligonucleotide
aaatactgtagaaacagatgagttgttgcc

SEQ ID NO: 354869 - DNA, 30 bp, Artificial Sequence
  Synthetic oligonucleotide
attaaatctggaacggaacgccaatttgcc

SEQ ID NO: 354870 - DNA, 30 bp, Artificial Sequence
  Synthetic oligonucleotide
tctgaaaagtctatacgtaatatatttgcc

SEQ ID NO: 354871 - DNA, 30 bp, Artificial Sequence
  Synthetic oligonucleotide
cgcgtgcgcggtgtgcttaatatctttgcc

SEQ ID NO: 354872 - DNA, 30 bp, Artificial Sequence
  Synthetic oligonucleotide
ttcacttgtgattgatgtatgaagtttgcc

SEQ ID NO: 354873 - DNA, 30 bp, Artificial Sequence
  Synthetic oligonucleotide
ccctggtgagtggattacttatagtttgcc

SEQ ID NO: 354874 - DNA, 30 bp, Artificial Sequence
  Synthetic oligonucleotide
acgtccggcagtgtaggattggcgtttgcc

SEQ ID NO: 354875 - DNA, 30 bp, Artificial Sequence
  Synthetic oligonucleotide
gaccgcaattttctacgttgaatgtttgcc

SEQ ID NO: 354876 - DNA, 30 bp, Artificial Sequence
  Synthetic oligonucleotide
acgtgtcggccagcgtagcacgcttttgcc

SEQ ID NO: 354877 - DNA, 30 bp, Artificial Sequence
  Synthetic oligonucleotide
ccgacggtttgaattcggtcaagttttgcc

SEQ ID NO: 354878 - DNA, 30 bp, Artificial Sequence
  Synthetic oligonucleotide
gttatcagcggaatcaaaccgcgttttgcc

SEQ ID NO: 354879 - DNA, 30 bp, Artificial Sequence
  Synthetic oligonucleotide
acacggcggtacgtacttgcaaaaaaatcc

SEQ ID NO: 354880 - DNA, 30 bp, Artificial Sequence
  Synthetic oligonucleotide
gtaccgaacgggcgttttcggcgaaaatcc

SEQ ID NO: 354881 - DNA, 30 bp, Artificial Sequence
  Synthetic oligonucleotide
tcagggtcgacacaaaaggttataaaatcc

SEQ ID NO: 354882 - DNA, 30 bp, Artificial Sequence
  Synthetic oligonucleotide
caggcgtacaagtgcctctggcgcaaatcc

SEQ ID NO: 354883 - DNA, 30 bp, Artificial Sequence
  Synthetic oligonucleotide
gtactaggggaggagcgaggtgcgaaatcc

SEQ ID NO: 354884 - DNA, 30 bp, Artificial Sequence
  Synthetic oligonucleotide
gtcttgtaaacagtgcgacatacacaatcc

SEQ ID NO: 354885 - DNA, 30 bp, Artificial Sequence
  Synthetic oligonucleotide
tgtagtaaagccagcaataccagccaatcc

SEQ ID NO: 354886 - DNA, 30 bp, Artificial Sequence
  Synthetic oligonucleotide
atctaataggaaactggtcggggccaatcc

SEQ ID NO: 354887 - DNA, 30 bp, Artificial Sequence
  Synthetic oligonucleotide
cgacgacacgctgtggaaccggtgcaatcc

SEQ ID NO: 354888 - DNA, 30 bp, Artificial Sequence
  Synthetic oligonucleotide
gtggctttgtgctcatacggatatcaatcc

SEQ ID NO: 354889 - DNA, 30 bp, Artificial Sequence
  Synthetic oligonucleotide
gaatagagaaacctactagcttatcaatcc

SEQ ID NO: 354890 - DNA, 30 bp, Artificial Sequence
  Synthetic oligonucleotide
tagtcgaatataagttgcccataagaatcc

SEQ ID NO: 354891 - DNA, 30 bp, Artificial Sequence
  Synthetic oligonucleotide
gcaacacgagttatcaacgttgcagaatcc

SEQ ID NO: 354892 - DNA, 30 bp, Artificial Sequence
  Synthetic oligonucleotide
atttactaacttggctcgcactgagaatcc

SEQ ID NO: 354893 - DNA, 30 bp, Artificial Sequence
  Synthetic oligonucleotide
actcctactggtgacagcgatatcgaatcc

SEQ ID NO: 354894 - DNA, 30 bp, Artificial Sequence
  Synthetic oligonucleotide
tttgtgtaaacttaaaacagagcggaatcc

SEQ ID NO: 354895 - DNA, 30 bp, Artificial Sequence
  Synthetic oligonucleotide
acagaatggtactagtaatcagtggaatcc

SEQ ID NO: 354896 - DNA, 30 bp, Artificial Sequence
  Synthetic oligonucleotide
tttaggttcataggaacggtatatgaatcc

SEQ ID NO: 354897 - DNA, 30 bp, Artificial Sequence
  Synthetic oligonucleotide
taagtggcacagaaccatctttaataatcc

SEQ ID NO: 354898 - DNA, 30 bp, Artificial Sequence
  Synthetic oligonucleotide
agatggtaatggtacgggcattcataatcc

SEQ ID NO: 354899 - DNA, 30 bp, Artificial Sequence
  Synthetic oligonucleotide
cgtggcatagttgtactgcgcctataatcc

SEQ ID NO: 354900 - DNA, 30 bp, Artificial Sequence
  Synthetic oligonucleotide
gcggcgaagggatattattcatactaatcc

SEQ ID NO: 354901 - DNA, 30 bp, Artificial Sequence
  Synthetic oligonucleotide
accgtttccagggccaggcgcgtttaatcc

SEQ ID NO: 354902 - DNA, 30 bp, Artificial Sequence
  Synthetic oligonucleotide
gaagaccgacgctggaagtcccacacatcc

SEQ ID NO: 354903 - DNA, 30 bp, Artificial Sequence
  Synthetic oligonucleotide
tgaaaggttatgccgggctgatatacatcc

SEQ ID NO: 354904 - DNA, 30 bp, Artificial Sequence
  Synthetic oligonucleotide
cgtatcgtccggtacgcctcgaatccatcc

SEQ ID NO: 354905 - DNA, 30 bp, Artificial Sequence
  Synthetic oligonucleotide
gcttagttagagttgccggttgtagcatcc

SEQ ID NO: 354906 - DNA, 30 bp, Artificial Sequence
  Synthetic oligonucleotide
atgttatcgtcaggccggttgggcgcatcc

SEQ ID NO: 354907 - DNA, 30 bp, Artificial Sequence
  Synthetic oligonucleotide
aatacgacaccgcacgactggcaggcatcc

SEQ ID NO: 354908 - DNA, 30 bp, Artificial Sequence
  Synthetic oligonucleotide
tcgtgtgacgttgcgtgaagcccggcatcc

SEQ ID NO: 354909 - DNA, 30 bp, Artificial Sequence
  Synthetic oligonucleotide
agcgctatagattcgattgatagggcatcc

SEQ ID NO: 354910 - DNA, 30 bp, Artificial Sequence
  Synthetic oligonucleotide
gtattgcctaaatccacaaccgatgcatcc

SEQ ID NO: 354911 - DNA, 30 bp, Artificial Sequence
  Synthetic oligonucleotide
aactttgtgttccgagaggcacttgcatcc

SEQ ID NO: 354912 - DNA, 30 bp, Artificial Sequence
  Synthetic oligonucleotide
gtattcagacaccagaccgaacaatcatcc

SEQ ID NO: 354913 - DNA, 30 bp, Artificial Sequence
  Synthetic oligonucleotide
ataacgtctgacaatacattacactcatcc

SEQ ID NO: 354914 - DNA, 30 bp, Artificial Sequence
  Synthetic oligonucleotide
gcagtcctagcttagcaggcatagtcatcc

SEQ ID NO: 354915 - DNA, 30 bp, Artificial Sequence
  Synthetic oligonucleotide
gacgtataccgtcgcatcaattagtcatcc

SEQ ID NO: 354916 - DNA, 30 bp, Artificial Sequence
  Synthetic oligonucleotide
attgcgtagacggttgtgttaacgtcatcc

SEQ ID NO: 354917 - DNA, 30 bp, Artificial Sequence
  Synthetic oligonucleotide
agactttcacgtaggacaggtaattcatcc

SEQ ID NO: 354918 - DNA, 30 bp, Artificial Sequence
  Synthetic oligonucleotide
agtagggttacctctccggcatattcatcc

SEQ ID NO: 354919 - DNA, 30 bp, Artificial Sequence
  Synthetic oligonucleotide
gctcgaagagagtgcattccaccttcatcc

SEQ ID NO: 354920 - DNA, 30 bp, Artificial Sequence
  Synthetic oligonucleotide
aagcttgattcaagaccgtcgcgttcatcc

SEQ ID NO: 354921 - DNA, 30 bp, Artificial Sequence
  Synthetic oligonucleotide
atgaggcaggaacctggatctttttcatcc

SEQ ID NO: 354922 - DNA, 30 bp, Artificial Sequence
  Synthetic oligonucleotide
catggtgcttttgatacatattcaagatcc

SEQ ID NO: 354923 - DNA, 30 bp, Artificial Sequence
  Synthetic oligonucleotide
aactcagccataacctttgggggaagatcc

SEQ ID NO: 354924 - DNA, 30 bp, Artificial Sequence
  Synthetic oligonucleotide
cgacaagaccagcgcttggcgtacagatcc

SEQ ID NO: 354925 - DNA, 30 bp, Artificial Sequence
  Synthetic oligonucleotide
acaggccataaactgcgtatcagtagatcc

SEQ ID NO: 354926 - DNA, 30 bp, Artificial Sequence
  Synthetic oligonucleotide
tatgttcgcatccatcgcggaggtagatcc

SEQ ID NO: 354927 - DNA, 30 bp, Artificial Sequence
  Synthetic oligonucleotide
gcaaatggtagcgtatgagtataccgatcc

SEQ ID NO: 354928 - DNA, 30 bp, Artificial Sequence
  Synthetic oligonucleotide
acagcattcgaacaggaggtataccgatcc

SEQ ID NO: 354929 - DNA, 30 bp, Artificial Sequence
  Synthetic oligonucleotide
taaactatcacttctaaccgggcccgatcc

SEQ ID NO: 354930 - DNA, 30 bp, Artificial Sequence
  Synthetic oligonucleotide
tagaataacaatgggagaggtatccgatcc

SEQ ID NO: 354931 - DNA, 29 bp, Artificial Sequence
  Synthetic oligonucleotide
ttcttgaagcctgggtaacagggcgatcc

SEQ ID NO: 354932 - DNA, 30 bp, Artificial Sequence
  Synthetic oligonucleotide
cccctgtcattgtggggatggctgcgatcc

SEQ ID NO: 354933 - DNA, 30 bp, Artificial Sequence
  Synthetic oligonucleotide
ccacagacgaccgcccaatcattaggatcc

SEQ ID NO: 354934 - DNA, 30 bp, Artificial Sequence
  Synthetic oligonucleotide
aggccagacgctacgaccgtttacggatcc

SEQ ID NO: 354935 - DNA, 30 bp, Artificial Sequence
  Synthetic oligonucleotide
ttcgagagggtaacgacctttggcggatcc

SEQ ID NO: 354936 - DNA, 30 bp, Artificial Sequence
  Synthetic oligonucleotide
cggctttgattatggatcttactgggatcc

SEQ ID NO: 354937 - DNA, 30 bp, Artificial Sequence
  Synthetic oligonucleotide
caccgattatcagcttgtgcacatggatcc

SEQ ID NO: 354938 - DNA, 30 bp, Artificial Sequence
  Synthetic oligonucleotide
tatgagccggaggagattaggctatgatcc

SEQ ID NO: 354939 - DNA, 31 bp, Artificial Sequence
  Synthetic oligonucleotide
ccttatttggtagcgtggcgtctcctgatcc

SEQ ID NO: 354940 - DNA, 30 bp, Artificial Sequence
  Synthetic oligonucleotide
catcttgaaggctgcgaccaacaaatatcc

SEQ ID NO: 354941 - DNA, 30 bp, Artificial Sequence
  Synthetic oligonucleotide
tgagcgcaaatccataattatgcaatatcc

SEQ ID NO: 354942 - DNA, 30 bp, Artificial Sequence
  Synthetic oligonucleotide
ccgtagtgctaaggtctaaaagtaatatcc

SEQ ID NO: 354943 - DNA, 30 bp, Artificial Sequence
  Synthetic oligonucleotide
caggcgtacccgtctctggtgcccatatcc

SEQ ID NO: 354944 - DNA, 30 bp, Artificial Sequence
  Synthetic oligonucleotide
cacacgcagcgcaatatgaacagcatatcc

SEQ ID NO: 354945 - DNA, 30 bp, Artificial Sequence
  Synthetic oligonucleotide
tagttaaggtttccagcccgaacgatatcc

SEQ ID NO: 354946 - DNA, 30 bp, Artificial Sequence
  Synthetic oligonucleotide
gttataagtggccccaagccgcatatatcc

SEQ ID NO: 354947 - DNA, 30 bp, Artificial Sequence
  Synthetic oligonucleotide
ataatgttctagacgttatgcctcctatcc

SEQ ID NO: 354948 - DNA, 30 bp, Artificial Sequence
  Synthetic oligonucleotide
ttagtgtcgatagtaaattctgggctatcc

SEQ ID NO: 354949 - DNA, 30 bp, Artificial Sequence
  Synthetic oligonucleotide
ctcaacagccccgggtcgagcttgctatcc

SEQ ID NO: 354950 - DNA, 30 bp, Artificial Sequence
  Synthetic oligonucleotide
tgatgcttttacacagggacacaagtatcc

SEQ ID NO: 354951 - DNA, 30 bp, Artificial Sequence
  Synthetic oligonucleotide
cagtagaacgcggtagggcctgaagtatcc

SEQ ID NO: 354952 - DNA, 30 bp, Artificial Sequence
  Synthetic oligonucleotide
gcagtaagggtcaatttaaaaatagtatcc

SEQ ID NO: 354953 - DNA, 30 bp, Artificial Sequence
  Synthetic oligonucleotide
ttcggtcctcaagtgttacggctagtatcc

SEQ ID NO: 354954 - DNA, 30 bp, Artificial Sequence
  Synthetic oligonucleotide
gcgcctgtagagccaatacatgtagtatcc

SEQ ID NO: 354955 - DNA, 30 bp, Artificial Sequence
  Synthetic oligonucleotide
catgtcccaaacagggaaggactcgtatcc

SEQ ID NO: 354956 - DNA, 30 bp, Artificial Sequence
  Synthetic oligonucleotide
ttgggttatcaattctcgtgtcttgtatcc

SEQ ID NO: 354957 - DNA, 30 bp, Artificial Sequence
  Synthetic oligonucleotide
gccccctaattagatccgtattttgtatcc

SEQ ID NO: 354958 - DNA, 30 bp, Artificial Sequence
  Synthetic oligonucleotide
taattctcgtaatggcggcgtaagttatcc

SEQ ID NO: 354959 - DNA, 30 bp, Artificial Sequence
  Synthetic oligonucleotide
tacccctcttaaccggcttgagtgttatcc

SEQ ID NO: 354960 - DNA, 30 bp, Artificial Sequence
  Synthetic oligonucleotide
gcacctgtcattgtgggcggatatttatcc

SEQ ID NO: 354961 - DNA, 30 bp, Artificial Sequence
  Synthetic oligonucleotide
attagaagtacctgtgcgtgagttttatcc

SEQ ID NO: 354962 - DNA, 30 bp, Artificial Sequence
  Synthetic oligonucleotide
gatcaaggacgcgccagcaaaaaaaactcc

SEQ ID NO: 354963 - DNA, 30 bp, Artificial Sequence
  Synthetic oligonucleotide
ctcctgtcaattcatcttgctcaaaactcc

SEQ ID NO: 354964 - DNA, 30 bp, Artificial Sequence
  Synthetic oligonucleotide
accagtgcctgttcagataggcgaaactcc

SEQ ID NO: 354965 - DNA, 30 bp, Artificial Sequence
  Synthetic oligonucleotide
cgcaggactaaaacgaaccgttgcaactcc

SEQ ID NO: 354966 - DNA, 30 bp, Artificial Sequence
  Synthetic oligonucleotide
cttcgctttacgttcacgagattcaactcc

SEQ ID NO: 354967 - DNA, 30 bp, Artificial Sequence
  Synthetic oligonucleotide
acttgcacctgtaggagaccttctaactcc

SEQ ID NO: 354968 - DNA, 25 bp, Artificial Sequence
  Synthetic oligonucleotide
ggagtgagtgagccctgttaactcc

SEQ ID NO: 354969 - DNA, 37 bp, Artificial Sequence
  Synthetic oligonucleotide
gttacagctgggtgtctccgatagtcatgaacactcc

SEQ ID NO: 354970 - DNA, 30 bp, Artificial Sequence
  Synthetic oligonucleotide
ttggtggggttaagcacctgctggcactcc

SEQ ID NO: 354971 - DNA, 30 bp, Artificial Sequence
  Synthetic oligonucleotide
aaaactagctattcagaaaatgcagactcc

SEQ ID NO: 354972 - DNA, 30 bp, Artificial Sequence
  Synthetic oligonucleotide
gacaccgcttgaataggagggcccgactcc

SEQ ID NO: 354973 - DNA, 30 bp, Artificial Sequence
  Synthetic oligonucleotide
cggcggtcaaaaagactttgccgggactcc

SEQ ID NO: 354974 - DNA, 30 bp, Artificial Sequence
  Synthetic oligonucleotide
ctggagtgatgtcgaagttagggggactcc

SEQ ID NO: 354975 - DNA, 30 bp, Artificial Sequence
  Synthetic oligonucleotide
gaggaagtgaggggcggggtatctgactcc

SEQ ID NO: 354976 - DNA, 30 bp, Artificial Sequence
  Synthetic oligonucleotide
ttgcgcaaatcgttgtgatgtacatactcc

SEQ ID NO: 354977 - DNA, 30 bp, Artificial Sequence
  Synthetic oligonucleotide
ggtcaattaacacgcggtggcatctactcc

SEQ ID NO: 354978 - DNA, 30 bp, Artificial Sequence
  Synthetic oligonucleotide
gtgggtagcatccttttgaggaggtactcc

SEQ ID NO: 354979 - DNA, 30 bp, Artificial Sequence
  Synthetic oligonucleotide
tcttggcttggcagttccagggtgtactcc

SEQ ID NO: 354980 - DNA, 30 bp, Artificial Sequence
  Synthetic oligonucleotide
tttgctttgtaacctattagtatttactcc

SEQ ID NO: 354981 - DNA, 30 bp, Artificial Sequence
  Synthetic oligonucleotide
tcatcgacatctgccgatgggctttactcc

SEQ ID NO: 354982 - DNA, 30 bp, Artificial Sequence
  Synthetic oligonucleotide
taaacatgagggccactgagtgtaacctcc

SEQ ID NO: 354983 - DNA, 30 bp, Artificial Sequence
  Synthetic oligonucleotide
gaaatgtatcaagttagtgtgatcacctcc

SEQ ID NO: 354984 - DNA, 30 bp, Artificial Sequence
  Synthetic oligonucleotide
aacataactagggttagtgagaacccctcc

SEQ ID NO: 354985 - DNA, 40 bp, Artificial Sequence
  Synthetic oligonucleotide
gctccgtccggttgtgatctagcgctcagaaaatccctcc

SEQ ID NO: 354986 - DNA, 30 bp, Artificial Sequence
  Synthetic oligonucleotide
acgattctagtaccagcgcactatccctcc

SEQ ID NO: 354987 - DNA, 30 bp, Artificial Sequence
  Synthetic oligonucleotide
taccacatgtaactgtaagagtctccctcc

SEQ ID NO: 354988 - DNA, 30 bp, Artificial Sequence
  Synthetic oligonucleotide
ctgtggggaaatctacccgtatttccctcc

SEQ ID NO: 354989 - DNA, 30 bp, Artificial Sequence
  Synthetic oligonucleotide
gccgcgggtctactactagtgccagcctcc

SEQ ID NO: 354990 - DNA, 30 bp, Artificial Sequence
  Synthetic oligonucleotide
taatttaggcgagctaaagtagcagcctcc

SEQ ID NO: 354991 - DNA, 30 bp, Artificial Sequence
  Synthetic oligonucleotide
cgtacgctcagacgcttcgtctcagcctcc

SEQ ID NO: 354992 - DNA, 30 bp, Artificial Sequence
  Synthetic oligonucleotide
gggacgaatttttataggtgttatgcctcc

SEQ ID NO: 354993 - DNA, 30 bp, Artificial Sequence
  Synthetic oligonucleotide
ggtacgttccctcatgcttctcctgcctcc

SEQ ID NO: 354994 - DNA, 30 bp, Artificial Sequence
  Synthetic oligonucleotide
aaactaaaaaacttggtcagtgaatcctcc

SEQ ID NO: 354995 - DNA, 30 bp, Artificial Sequence
  Synthetic oligonucleotide
tagtgtgcacaagaccccaggctctcctcc

SEQ ID NO: 354996 - DNA, 30 bp, Artificial Sequence
  Synthetic oligonucleotide
ctaatgggggtatctcgttgggagtcctcc

SEQ ID NO: 354997 - DNA, 30 bp, Artificial Sequence
  Synthetic oligonucleotide
gggctctctgcacaaaacggttagtcctcc

SEQ ID NO: 354998 - DNA, 30 bp, Artificial Sequence
  Synthetic oligonucleotide
gaccttgtaataggagcggaattttcctcc

SEQ ID NO: 354999 - DNA, 30 bp, Artificial Sequence
  Synthetic oligonucleotide
cctgcgagattgtaagtaattgacagctcc

SEQ ID NO: 355000 - DNA, 30 bp, Artificial Sequence
  Synthetic oligonucleotide
aacgtctatagcgacgtggtcccgagctcc

SEQ ID NO: 355001 - DNA, 30 bp, Artificial Sequence
  Synthetic oligonucleotide
attattagaagtagcgtttcaaatagctcc

SEQ ID NO: 355002 - DNA, 30 bp, Artificial Sequence
  Synthetic oligonucleotide
agcgaccatgcttgtcagcactatagctcc

SEQ ID NO: 355003 - DNA, 30 bp, Artificial Sequence
  Synthetic oligonucleotide
ggggtactttcgcgcgccgcatcacgctcc

SEQ ID NO: 355004 - DNA, 30 bp, Artificial Sequence
  Synthetic oligonucleotide
gcaattggcaacccgaaatcagtccgctcc

SEQ ID NO: 355005 - DNA, 30 bp, Artificial Sequence
  Synthetic oligonucleotide
taggtttccgggcttcattaagttcgctcc

SEQ ID NO: 355006 - DNA, 30 bp, Artificial Sequence
  Synthetic oligonucleotide
ccgagatgcttagggacccttttaggctcc

SEQ ID NO: 355007 - DNA, 30 bp, Artificial Sequence
  Synthetic oligonucleotide
gctggtaacatcgccaaatgccggggctcc

SEQ ID NO: 355008 - DNA, 30 bp, Artificial Sequence
  Synthetic oligonucleotide
agactagtacagaaaaagttcttgggctcc

SEQ ID NO: 355009 - DNA, 30 bp, Artificial Sequence
  Synthetic oligonucleotide
gtacgtatacccgtgtgttaaggtggctcc

SEQ ID NO: 355010 - DNA, 30 bp, Artificial Sequence
  Synthetic oligonucleotide
gaaactgaataaagtctgatggagtgctcc

SEQ ID NO: 355011 - DNA, 30 bp, Artificial Sequence
  Synthetic oligonucleotide
aatcaccgagggcaaggctgtcggtgctcc

SEQ ID NO: 355012 - DNA, 30 bp, Artificial Sequence
  Synthetic oligonucleotide
cctgcagaaaaactgtacattgggtgctcc

SEQ ID NO: 355013 - DNA, 30 bp, Artificial Sequence
  Synthetic oligonucleotide
agtctataaatttaaggtttttgttgctcc

SEQ ID NO: 355014 - DNA, 30 bp, Artificial Sequence
  Synthetic oligonucleotide
gtgtggttgttaagccgccggggcatctcc

SEQ ID NO: 355015 - DNA, 30 bp, Artificial Sequence
  Synthetic oligonucleotide
ggttcaggaactcacccacgctttatctcc

SEQ ID NO: 355016 - DNA, 30 bp, Artificial Sequence
  Synthetic oligonucleotide
ataatggaaagccgaatgcacaaactctcc

SEQ ID NO: 355017 - DNA, 30 bp, Artificial Sequence
  Synthetic oligonucleotide
aaccgtatacgtcataaacaattactctcc

SEQ ID NO: 355018 - DNA, 30 bp, Artificial Sequence
  Synthetic oligonucleotide
atcgagaggagtgaatacacgttactctcc

SEQ ID NO: 355019 - DNA, 30 bp, Artificial Sequence
  Synthetic oligonucleotide
gctaggagtgtagacagtgatgacctctcc

SEQ ID NO: 355020 - DNA, 30 bp, Artificial Sequence
  Synthetic oligonucleotide
tttgctgtcaccctttaaaacgccctctcc

SEQ ID NO: 355021 - DNA, 30 bp, Artificial Sequence
  Synthetic oligonucleotide
gtccacttgtgatcccgtggtttagtctcc

SEQ ID NO: 355022 - DNA, 30 bp, Artificial Sequence
  Synthetic oligonucleotide
taaagtgaagataggggtttcaccgtctcc

SEQ ID NO: 355023 - DNA, 30 bp, Artificial Sequence
  Synthetic oligonucleotide
taagctgctgtatgttactgaggtgtctcc

SEQ ID NO: 355024 - DNA, 30 bp, Artificial Sequence
  Synthetic oligonucleotide
atttcgaaaggtcaaatcgcgcttgtctcc

SEQ ID NO: 355025 - DNA, 30 bp, Artificial Sequence
  Synthetic oligonucleotide
gtagtcaaagttttacgctatcttgtctcc

SEQ ID NO: 355026 - DNA, 30 bp, Artificial Sequence
  Synthetic oligonucleotide
gttctctcctatttcaaactgtgattctcc

SEQ ID NO: 355027 - DNA, 30 bp, Artificial Sequence
  Synthetic oligonucleotide
ctagggacgggaaaagacggtgccttctcc

SEQ ID NO: 355028 - DNA, 30 bp, Artificial Sequence
  Synthetic oligonucleotide
ccttcgtgggcggcaaggcggttcttctcc

SEQ ID NO: 355029 - DNA, 30 bp, Artificial Sequence
  Synthetic oligonucleotide
cgatcccctggcttgagtacttggttctcc

SEQ ID NO: 355030 - DNA, 30 bp, Artificial Sequence
  Synthetic oligonucleotide
tgaatttaaataggtcggaagactttctcc

SEQ ID NO: 355031 - DNA, 30 bp, Artificial Sequence
  Synthetic oligonucleotide
gccaatcgagctgggtgattaagtttctcc

SEQ ID NO: 355032 - DNA, 30 bp, Artificial Sequence
  Synthetic oligonucleotide
ctcagatagcggcgctatcaggaaaagtcc

SEQ ID NO: 355033 - DNA, 30 bp, Artificial Sequence
  Synthetic oligonucleotide
actcgaagcacaatgcacagtacaaagtcc

SEQ ID NO: 355034 - DNA, 30 bp, Artificial Sequence
  Synthetic oligonucleotide
gggggagcggcatcgcgagcccgaaagtcc

SEQ ID NO: 355035 - DNA, 30 bp, Artificial Sequence
  Synthetic oligonucleotide
cagtggggcacagtccggcccaataagtcc

SEQ ID NO: 355036 - DNA, 30 bp, Artificial Sequence
  Synthetic oligonucleotide
gaggggcaatcatagcctaatggtaagtcc

SEQ ID NO: 355037 - DNA, 30 bp, Artificial Sequence
  Synthetic oligonucleotide
gatttaggcaaggaatgagcggttaagtcc

SEQ ID NO: 355038 - DNA, 30 bp, Artificial Sequence
  Synthetic oligonucleotide
tccctgatggcggacgatggtaagcagtcc

SEQ ID NO: 355039 - DNA, 30 bp, Artificial Sequence
  Synthetic oligonucleotide
gcctaaggatctgtcggatattggcagtcc

SEQ ID NO: 355040 - DNA, 30 bp, Artificial Sequence
  Synthetic oligonucleotide
aataaaatctatactgcgtgcttgcagtcc

SEQ ID NO: 355041 - DNA, 30 bp, Artificial Sequence
  Synthetic oligonucleotide
gtcgcgcatggtttgtttagccatcagtcc

SEQ ID NO: 355042 - DNA, 30 bp, Artificial Sequence
  Synthetic oligonucleotide
ctttatcagcccatcatacagtctcagtcc

SEQ ID NO: 355043 - DNA, 30 bp, Artificial Sequence
  Synthetic oligonucleotide
gaagctgaaaagggttgtaaatttcagtcc

SEQ ID NO: 355044 - DNA, 31 bp, Artificial Sequence
  Synthetic oligonucleotide
ggggaatgattgtgtttgtattatagagtcc

SEQ ID NO: 355045 - DNA, 29 bp, Artificial Sequence
  Synthetic oligonucleotide
ttttactgggagaaggtattgccgagtcc

SEQ ID NO: 355046 - DNA, 30 bp, Artificial Sequence
  Synthetic oligonucleotide
agcggggggactacgcaacttgccgagtcc

SEQ ID NO: 355047 - DNA, 30 bp, Artificial Sequence
  Synthetic oligonucleotide
actgtacgagacctcgttagccgcgagtcc

SEQ ID NO: 355048 - DNA, 30 bp, Artificial Sequence
  Synthetic oligonucleotide
atactgaaagttgcacaggaggcggagtcc

SEQ ID NO: 355049 - DNA, 30 bp, Artificial Sequence
  Synthetic oligonucleotide
cgctccgctgtatccagcggatctgagtcc

SEQ ID NO: 355050 - DNA, 30 bp, Artificial Sequence
  Synthetic oligonucleotide
gtaaaattgtatcttcacctcacatagtcc

SEQ ID NO: 355051 - DNA, 30 bp, Artificial Sequence
  Synthetic oligonucleotide
aagaccaagaggtcagaacaatcatagtcc

SEQ ID NO: 355052 - DNA, 30 bp, Artificial Sequence
  Synthetic oligonucleotide
tactcaaatcgagcataagtgggttagtcc

SEQ ID NO: 355053 - DNA, 30 bp, Artificial Sequence
  Synthetic oligonucleotide
ccatagggcgtcgggacatagctttagtcc

SEQ ID NO: 355054 - DNA, 30 bp, Artificial Sequence
  Synthetic oligonucleotide
gatagtcgtaatcagacgctatacacgtcc

SEQ ID NO: 355055 - DNA, 30 bp, Artificial Sequence
  Synthetic oligonucleotide
atcttgctgtgagcaaatcggttcacgtcc

SEQ ID NO: 355056 - DNA, 30 bp, Artificial Sequence
  Synthetic oligonucleotide
gaataaaactatgggaagcagtaaccgtcc

SEQ ID NO: 355057 - DNA, 30 bp, Artificial Sequence
  Synthetic oligonucleotide
tgtgatgacctttcaccggcgccaccgtcc

SEQ ID NO: 355058 - DNA, 30 bp, Artificial Sequence
  Synthetic oligonucleotide
tgcacgaagggcccctgtggtagaccgtcc

SEQ ID NO: 355059 - DNA, 30 bp, Artificial Sequence
  Synthetic oligonucleotide
ctctatcatggtgatgcgcatctaccgtcc

SEQ ID NO: 355060 - DNA, 30 bp, Artificial Sequence
  Synthetic oligonucleotide
aacacagcgaattacgaaataattccgtcc

SEQ ID NO: 355061 - DNA, 30 bp, Artificial Sequence
  Synthetic oligonucleotide
atccttgtgaaatagctcttgtgagcgtcc

SEQ ID NO: 355062 - DNA, 30 bp, Artificial Sequence
  Synthetic oligonucleotide
aattgccctgaatataacagagacgcgtcc

SEQ ID NO: 355063 - DNA, 30 bp, Artificial Sequence
  Synthetic oligonucleotide
ttggtgtttgcatccgcatcaacggcgtcc

SEQ ID NO: 355064 - DNA, 30 bp, Artificial Sequence
  Synthetic oligonucleotide
gtagatttcagcatgcaaaagtcggcgtcc

SEQ ID NO: 355065 - DNA, 30 bp, Artificial Sequence
  Synthetic oligonucleotide
agttggcttagcccaccgatatgtgcgtcc

SEQ ID NO: 355066 - DNA, 30 bp, Artificial Sequence
  Synthetic oligonucleotide
gatgctcacgcatcagtggaataatcgtcc

SEQ ID NO: 355067 - DNA, 30 bp, Artificial Sequence
  Synthetic oligonucleotide
tggaaacagattgtgctccgttcatcgtcc

SEQ ID NO: 355068 - DNA, 30 bp, Artificial Sequence
  Synthetic oligonucleotide
cttgatttagaaattcaatctcgctcgtcc

SEQ ID NO: 355069 - DNA, 30 bp, Artificial Sequence
  Synthetic oligonucleotide
taggcaggattggtcaactggttgtcgtcc

SEQ ID NO: 355070 - DNA, 30 bp, Artificial Sequence
  Synthetic oligonucleotide
ggttgtattaggacgataatggcttcgtcc

SEQ ID NO: 355071 - DNA, 30 bp, Artificial Sequence
  Synthetic oligonucleotide
aaggttctttaaggtcgccgtaaaaggtcc

SEQ ID NO: 355072 - DNA, 30 bp, Artificial Sequence
  Synthetic oligonucleotide
cgtctaaccgcgggcctggggccaaggtcc

SEQ ID NO: 355073 - DNA, 30 bp, Artificial Sequence
  Synthetic oligonucleotide
attgaccggggtgctccacatataaggtcc

SEQ ID NO: 355074 - DNA, 30 bp, Artificial Sequence
  Synthetic oligonucleotide
aggcccatccttttggaggccttaaggtcc

SEQ ID NO: 355075 - DNA, 30 bp, Artificial Sequence
  Synthetic oligonucleotide
gcacgattcaagtgctattggcacaggtcc

SEQ ID NO: 355076 - DNA, 30 bp, Artificial Sequence
  Synthetic oligonucleotide
ggggctccaagaaattgaaaaggcaggtcc

SEQ ID NO: 355077 - DNA, 30 bp, Artificial Sequence
  Synthetic oligonucleotide
ggtggatccgtaggcgtaccgcagaggtcc

SEQ ID NO: 355078 - DNA, 30 bp, Artificial Sequence
  Synthetic oligonucleotide
gagggctcttacgggcaaaatacgaggtcc

SEQ ID NO: 355079 - DNA, 30 bp, Artificial Sequence
  Synthetic oligonucleotide
aaaggatacagttccaagactgggaggtcc

SEQ ID NO: 355080 - DNA, 30 bp, Artificial Sequence
  Synthetic oligonucleotide
caggccattccacaaccgtcgtggaggtcc

SEQ ID NO: 355081 - DNA, 30 bp, Artificial Sequence
  Synthetic oligonucleotide
tccaagaccagtggtactcgaagtaggtcc

SEQ ID NO: 355082 - DNA, 30 bp, Artificial Sequence
  Synthetic oligonucleotide
ttggtgcacgatcgtcgactcgaacggtcc

SEQ ID NO: 355083 - DNA, 30 bp, Artificial Sequence
  Synthetic oligonucleotide
agtcttgtgaccctatcgcgagcacggtcc

SEQ ID NO: 355084 - DNA, 30 bp, Artificial Sequence
  Synthetic oligonucleotide
aagagtaatggggaggcttccgtacggtcc

SEQ ID NO: 355085 - DNA, 30 bp, Artificial Sequence
  Synthetic oligonucleotide
ggacccgccattagggcgtcggtacggtcc

SEQ ID NO: 355086 - DNA, 30 bp, Artificial Sequence
  Synthetic oligonucleotide
gtccccatcgagatacgtcagttacggtcc

SEQ ID NO: 355087 - DNA, 30 bp, Artificial Sequence
  Synthetic oligonucleotide
attcattggacatggtcaaactagcggtcc

SEQ ID NO: 355088 - DNA, 30 bp, Artificial Sequence
  Synthetic oligonucleotide
ataagccggtatacaggttcctggcggtcc

SEQ ID NO: 355089 - DNA, 30 bp, Artificial Sequence
  Synthetic oligonucleotide
aaaagatactcggatcggtgctaagggtcc

SEQ ID NO: 355090 - DNA, 30 bp, Artificial Sequence
  Synthetic oligonucleotide
ggggaacccgtagtgggtacgagagggtcc

SEQ ID NO: 355091 - DNA, 30 bp, Artificial Sequence
  Synthetic oligonucleotide
ctggcattagacattatgttaatagggtcc

SEQ ID NO: 355092 - DNA, 30 bp, Artificial Sequence
  Synthetic oligonucleotide
tcctaaacggcagtgttcaagtttgggtcc

SEQ ID NO: 355093 - DNA, 30 bp, Artificial Sequence
  Synthetic oligonucleotide
aagagttaaggaaaaaattttagctggtcc

SEQ ID NO: 355094 - DNA, 30 bp, Artificial Sequence
  Synthetic oligonucleotide
tttggggccataggagagtgaccttggtcc

SEQ ID NO: 355095 - DNA, 30 bp, Artificial Sequence
  Synthetic oligonucleotide
aagctttgagacaagaaacttgcttggtcc

SEQ ID NO: 355096 - DNA, 30 bp, Artificial Sequence
  Synthetic oligonucleotide
cggctacgtgtgaacccgccgggttggtcc

SEQ ID NO: 355097 - DNA, 30 bp, Artificial Sequence
  Synthetic oligonucleotide
ggtaatggtagtggtccggctccaatgtcc

SEQ ID NO: 355098 - DNA, 30 bp, Artificial Sequence
  Synthetic oligonucleotide
tgcgccctgcacaacctagttgcaatgtcc

SEQ ID NO: 355099 - DNA, 30 bp, Artificial Sequence
  Synthetic oligonucleotide
ggaggtgggattaactgcagtttaatgtcc

SEQ ID NO: 355100 - DNA, 30 bp, Artificial Sequence
  Synthetic oligonucleotide
tgggtatcgttacgtgttagaaatatgtcc

SEQ ID NO: 355101 - DNA, 30 bp, Artificial Sequence
  Synthetic oligonucleotide
tacttcgtgtcggagctcattacactgtcc

SEQ ID NO: 355102 - DNA, 30 bp, Artificial Sequence
  Synthetic oligonucleotide
ctgatgagtatcaggccgtaaagactgtcc

SEQ ID NO: 355103 - DNA, 30 bp, Artificial Sequence
  Synthetic oligonucleotide
gatagcctatctcactacgacaacctgtcc

SEQ ID NO: 355104 - DNA, 30 bp, Artificial Sequence
  Synthetic oligonucleotide
caaaagtactcatattcggggtacctgtcc

SEQ ID NO: 355105 - DNA, 30 bp, Artificial Sequence
  Synthetic oligonucleotide
gaagagcagatagtgagttaaacgctgtcc

SEQ ID NO: 355106 - DNA, 30 bp, Artificial Sequence
  Synthetic oligonucleotide
attgttcacatacgggccaaacatctgtcc

SEQ ID NO: 355107 - DNA, 30 bp, Artificial Sequence
  Synthetic oligonucleotide
gggtcagaagtgcacatgttcactctgtcc

SEQ ID NO: 355108 - DNA, 30 bp, Artificial Sequence
  Synthetic oligonucleotide
aggctcggggtattcggctgtgaagtgtcc

SEQ ID NO: 355109 - DNA, 30 bp, Artificial Sequence
  Synthetic oligonucleotide
gagaactcttacacgaacaagccagtgtcc

SEQ ID NO: 355110 - DNA, 30 bp, Artificial Sequence
  Synthetic oligonucleotide
gaatttagcatagaccggcgacgagtgtcc

SEQ ID NO: 355111 - DNA, 30 bp, Artificial Sequence
  Synthetic oligonucleotide
attcgatcaatctagtgcgtacgcgtgtcc

SEQ ID NO: 355112 - DNA, 30 bp, Artificial Sequence
  Synthetic oligonucleotide
ggcagatcgtatgtgccgatgctggtgtcc

SEQ ID NO: 355113 - DNA, 30 bp, Artificial Sequence
  Synthetic oligonucleotide
attggtaagtttaccaatggacttgtgtcc

SEQ ID NO: 355114 - DNA, 30 bp, Artificial Sequence
  Synthetic oligonucleotide
catcgcgcgcgtcattatagagcattgtcc

SEQ ID NO: 355115 - DNA, 30 bp, Artificial Sequence
  Synthetic oligonucleotide
cacgtttcaaatgtttgggtgtgattgtcc

SEQ ID NO: 355116 - DNA, 30 bp, Artificial Sequence
  Synthetic oligonucleotide
atgcagttcacgcctattcaccgcttgtcc

SEQ ID NO: 355117 - DNA, 30 bp, Artificial Sequence
  Synthetic oligonucleotide
tacaacgctcccagaactgttaagttgtcc

SEQ ID NO: 355118 - DNA, 30 bp, Artificial Sequence
  Synthetic oligonucleotide
atcttctgcgtgacgtttctagatttgtcc

SEQ ID NO: 355119 - DNA, 30 bp, Artificial Sequence
  Synthetic oligonucleotide
tctcctaagcagatggaagacactttgtcc

SEQ ID NO: 355120 - DNA, 30 bp, Artificial Sequence
  Synthetic oligonucleotide
tttctgtaacagatacgtacaagtttgtcc

SEQ ID NO: 355121 - DNA, 30 bp, Artificial Sequence
  Synthetic oligonucleotide
caaatggtgcattccggtaatcgaaattcc

SEQ ID NO: 355122 - DNA, 30 bp, Artificial Sequence
  Synthetic oligonucleotide
cgcggctatatgtcgtcataatgaaattcc

SEQ ID NO: 355123 - DNA, 30 bp, Artificial Sequence
  Synthetic oligonucleotide
ttagaatagggtcttaccgggctaaattcc

SEQ ID NO: 355124 - DNA, 30 bp, Artificial Sequence
  Synthetic oligonucleotide
gcgtacggtgataggattctatctaattcc

SEQ ID NO: 355125 - DNA, 30 bp, Artificial Sequence
  Synthetic oligonucleotide
agatccagttaccgttgatgctgtaattcc

SEQ ID NO: 355126 - DNA, 30 bp, Artificial Sequence
  Synthetic oligonucleotide
gttgacgaagtacgtaactctattaattcc

SEQ ID NO: 355127 - DNA, 30 bp, Artificial Sequence
  Synthetic oligonucleotide
cgggcccaccgtctggatatcgaacattcc

SEQ ID NO: 355128 - DNA, 30 bp, Artificial Sequence
  Synthetic oligonucleotide
gtgtggcaaccacactcagaaccccattcc

SEQ ID NO: 355129 - DNA, 30 bp, Artificial Sequence
  Synthetic oligonucleotide
caagatctgacggacacgcaacggcattcc

SEQ ID NO: 355130 - DNA, 30 bp, Artificial Sequence
  Synthetic oligonucleotide
ggtaattgggctcaaggggccttagattcc

SEQ ID NO: 355131 - DNA, 30 bp, Artificial Sequence
  Synthetic oligonucleotide
gaagcaaacctcgtgagcgaggacgattcc

SEQ ID NO: 355132 - DNA, 30 bp, Artificial Sequence
  Synthetic oligonucleotide
gtatttacatgacggtgttaaggcgattcc

SEQ ID NO: 355133 - DNA, 30 bp, Artificial Sequence
  Synthetic oligonucleotide
acagagttgtagcaccctccgtgcgattcc

SEQ ID NO: 355134 - DNA, 30 bp, Artificial Sequence
  Synthetic oligonucleotide
ttacgcaataaacctggctcacgggattcc

SEQ ID NO: 355135 - DNA, 30 bp, Artificial Sequence
  Synthetic oligonucleotide
cattcaggcctatcttgacgaggggattcc

SEQ ID NO: 355136 - DNA, 30 bp, Artificial Sequence
  Synthetic oligonucleotide
ggcccactatcggtagtgcatattgattcc

SEQ ID NO: 355137 - DNA, 30 bp, Artificial Sequence
  Synthetic oligonucleotide
tagaaataggcattgcaaagattatattcc

SEQ ID NO: 355138 - DNA, 30 bp, Artificial Sequence
  Synthetic oligonucleotide
gattaacaagcgtcagctgaaaactattcc

SEQ ID NO: 355139 - DNA, 30 bp, Artificial Sequence
  Synthetic oligonucleotide
cgatctagcgcctctgtatgagactattcc

SEQ ID NO: 355140 - DNA, 30 bp, Artificial Sequence
  Synthetic oligonucleotide
ggtaggagtgttcggctctccacctattcc

SEQ ID NO: 355141 - DNA, 30 bp, Artificial Sequence
  Synthetic oligonucleotide
caagggttccggatactctgtacttattcc

SEQ ID NO: 355142 - DNA, 30 bp, Artificial Sequence
  Synthetic oligonucleotide
aagcagttgtgagcctgatcgcaaacttcc

SEQ ID NO: 355143 - DNA, 30 bp, Artificial Sequence
  Synthetic oligonucleotide
gttttccagggtccgggactgccaacttcc

SEQ ID NO: 355144 - DNA, 30 bp, Artificial Sequence
  Synthetic oligonucleotide
cagctggatggcccttacgagcgaacttcc

SEQ ID NO: 355145 - DNA, 30 bp, Artificial Sequence
  Synthetic oligonucleotide
gaacacagtcctgggcctaaggtaacttcc

SEQ ID NO: 355146 - DNA, 30 bp, Artificial Sequence
  Synthetic oligonucleotide
gggtgtctcacgcagggggttagcacttcc

SEQ ID NO: 355147 - DNA, 30 bp, Artificial Sequence
  Synthetic oligonucleotide
ccggttcagcccccctccttcctcacttcc

SEQ ID NO: 355148 - DNA, 30 bp, Artificial Sequence
  Synthetic oligonucleotide
gagatctgtctgtagacgcctaagacttcc

SEQ ID NO: 355149 - DNA, 30 bp, Artificial Sequence
  Synthetic oligonucleotide
gtcaacgcggaaagttgaggatagacttcc

SEQ ID NO: 355150 - DNA, 30 bp, Artificial Sequence
  Synthetic oligonucleotide
gtccacgtacctgaccgtcgcaatacttcc

SEQ ID NO: 355151 - DNA, 30 bp, Artificial Sequence
  Synthetic oligonucleotide
tgaaagccgtagctagattcttctacttcc

SEQ ID NO: 355152 - DNA, 30 bp, Artificial Sequence
  Synthetic oligonucleotide
cgcaatttaggatggtgatcggccccttcc

SEQ ID NO: 355153 - DNA, 30 bp, Artificial Sequence
  Synthetic oligonucleotide
tggagtcagatgctagattcgaggccttcc

SEQ ID NO: 355154 - DNA, 30 bp, Artificial Sequence
  Synthetic oligonucleotide
tataaatgccgatgcacatagcctccttcc

SEQ ID NO: 355155 - DNA, 30 bp, Artificial Sequence
  Synthetic oligonucleotide
ggccgttaccaggcgcccgtgggagcttcc

SEQ ID NO: 355156 - DNA, 30 bp, Artificial Sequence
  Synthetic oligonucleotide
ggctcgacgttcatagtgggcagggcttcc

SEQ ID NO: 355157 - DNA, 30 bp, Artificial Sequence
  Synthetic oligonucleotide
ttgttgccggtgagggagcataatgcttcc

SEQ ID NO: 355158 - DNA, 30 bp, Artificial Sequence
  Synthetic oligonucleotide
aactgagtttgaggaaaagatccatcttcc

SEQ ID NO: 355159 - DNA, 30 bp, Artificial Sequence
  Synthetic oligonucleotide
tatctggtgggactaagggacaagtcttcc

SEQ ID NO: 355160 - DNA, 30 bp, Artificial Sequence
  Synthetic oligonucleotide
ttaggagagaccatccctagtgcgtcttcc

SEQ ID NO: 355161 - DNA, 30 bp, Artificial Sequence
  Synthetic oligonucleotide
cagcaagtaatgtgaaagcacggttcttcc

SEQ ID NO: 355162 - DNA, 30 bp, Artificial Sequence
  Synthetic oligonucleotide
aagggaaagcagctactacccggttcttcc

SEQ ID NO: 355163 - DNA, 30 bp, Artificial Sequence
  Synthetic oligonucleotide
agcatcaccattgtgtgatagataagttcc

SEQ ID NO: 355164 - DNA, 30 bp, Artificial Sequence
  Synthetic oligonucleotide
tagatcgaacggagtctggaaggcagttcc

SEQ ID NO: 355165 - DNA, 30 bp, Artificial Sequence
  Synthetic oligonucleotide
ttgtagcctaacgatagggtctgcagttcc

SEQ ID NO: 355166 - DNA, 30 bp, Artificial Sequence
  Synthetic oligonucleotide
tgctcagcaattctgcgctgagggagttcc

SEQ ID NO: 355167 - DNA, 30 bp, Artificial Sequence
  Synthetic oligonucleotide
gcaccaaaccttgtcgcggtaacacgttcc

SEQ ID NO: 355168 - DNA, 30 bp, Artificial Sequence
  Synthetic oligonucleotide
tacgcgcgagggtccggtgccggacgttcc

SEQ ID NO: 355169 - DNA, 30 bp, Artificial Sequence
  Synthetic oligonucleotide
atttgtatgggctagctacggaggcgttcc

SEQ ID NO: 355170 - DNA, 30 bp, Artificial Sequence
  Synthetic oligonucleotide
gtagcttgaaggcgttccattaggcgttcc

SEQ ID NO: 355171 - DNA, 30 bp, Artificial Sequence
  Synthetic oligonucleotide
tggtgtgacactgtgatctcgggaggttcc

SEQ ID NO: 355172 - DNA, 30 bp, Artificial Sequence
  Synthetic oligonucleotide
cctttaaggggaccagcaattggaggttcc

SEQ ID NO: 355173 - DNA, 30 bp, Artificial Sequence
  Synthetic oligonucleotide
ttggtctaagtcaacaaacagttaggttcc

SEQ ID NO: 355174 - DNA, 30 bp, Artificial Sequence
  Synthetic oligonucleotide
gttcccattatctcgattactctgggttcc

SEQ ID NO: 355175 - DNA, 30 bp, Artificial Sequence
  Synthetic oligonucleotide
agctactccctgcttcgagtacatggttcc

SEQ ID NO: 355176 - DNA, 30 bp, Artificial Sequence
  Synthetic oligonucleotide
tccgcccaactaactttcgatgctggttcc

SEQ ID NO: 355177 - DNA, 30 bp, Artificial Sequence
  Synthetic oligonucleotide
ttctctcacaccattcgtagggcatgttcc

SEQ ID NO: 355178 - DNA, 30 bp, Artificial Sequence
  Synthetic oligonucleotide
tcccttacattagcatggtctggatgttcc

SEQ ID NO: 355179 - DNA, 30 bp, Artificial Sequence
  Synthetic oligonucleotide
attcggcaaaaacaattacggcaaatttcc

SEQ ID NO: 355180 - DNA, 30 bp, Artificial Sequence
  Synthetic oligonucleotide
gaataggtgaagatcgttggcacaatttcc

SEQ ID NO: 355181 - DNA, 30 bp, Artificial Sequence
  Synthetic oligonucleotide
cgtctgacgttctgcgtctgctcaatttcc

SEQ ID NO: 355182 - DNA, 30 bp, Artificial Sequence
  Synthetic oligonucleotide
gtaaggaagcgagcgacttacggcatttcc

SEQ ID NO: 355183 - DNA, 30 bp, Artificial Sequence
  Synthetic oligonucleotide
cactcgaaggattcctcccgtctcatttcc

SEQ ID NO: 355184 - DNA, 30 bp, Artificial Sequence
  Synthetic oligonucleotide
attaagaatggggagagaggacgtatttcc

SEQ ID NO: 355185 - DNA, 30 bp, Artificial Sequence
  Synthetic oligonucleotide
ttcaatagtgaggtgtctcaacaactttcc

SEQ ID NO: 355186 - DNA, 30 bp, Artificial Sequence
  Synthetic oligonucleotide
tgaagaactacaacactgctgatactttcc

SEQ ID NO: 355187 - DNA, 30 bp, Artificial Sequence
  Synthetic oligonucleotide
gccagtggagcatgccacacctacctttcc

SEQ ID NO: 355188 - DNA, 30 bp, Artificial Sequence
  Synthetic oligonucleotide
caggctgcgcttaataaatgaagcctttcc

SEQ ID NO: 355189 - DNA, 30 bp, Artificial Sequence
  Synthetic oligonucleotide
actctagtagcagggattgacagcctttcc

SEQ ID NO: 355190 - DNA, 30 bp, Artificial Sequence
  Synthetic oligonucleotide
cggtaaattatggtcctgtatagcctttcc

SEQ ID NO: 355191 - DNA, 30 bp, Artificial Sequence
  Synthetic oligonucleotide
aacatctttgagagtcgagcatggctttcc

SEQ ID NO: 355192 - DNA, 30 bp, Artificial Sequence
  Synthetic oligonucleotide
agcccaaactcatgtgcgggactgctttcc

SEQ ID NO: 355193 - DNA, 30 bp, Artificial Sequence
  Synthetic oligonucleotide
tgcgtttgcagtaggatggcccatctttcc

SEQ ID NO: 355194 - DNA, 30 bp, Artificial Sequence
  Synthetic oligonucleotide
gatagctgatacatttacaatactctttcc

SEQ ID NO: 355195 - DNA, 30 bp, Artificial Sequence
  Synthetic oligonucleotide
ggcggtatacaggcgttaagagaagtttcc

SEQ ID NO: 355196 - DNA, 30 bp, Artificial Sequence
  Synthetic oligonucleotide
tgaatccgtgggcctgccgtcacggtttcc

SEQ ID NO: 355197 - DNA, 30 bp, Artificial Sequence
  Synthetic oligonucleotide
aagctacaactctgtcgtatgacggtttcc

SEQ ID NO: 355198 - DNA, 30 bp, Artificial Sequence
  Synthetic oligonucleotide
accactaatcgcgatcaccgagtggtttcc

SEQ ID NO: 355199 - DNA, 30 bp, Artificial Sequence
  Synthetic oligonucleotide
tacaaatgtataggctccaacaatgtttcc

SEQ ID NO: 355200 - DNA, 30 bp, Artificial Sequence
  Synthetic oligonucleotide
aatgtgttcccaggcgtgtacaatgtttcc

SEQ ID NO: 355201 - DNA, 30 bp, Artificial Sequence
  Synthetic oligonucleotide
ggcaagcataattcacatgactatgtttcc

SEQ ID NO: 355202 - DNA, 30 bp, Artificial Sequence
  Synthetic oligonucleotide
atcctcacatggacagtattgtacttttcc

SEQ ID NO: 355203 - DNA, 30 bp, Artificial Sequence
  Synthetic oligonucleotide
tagtgtactaaatctcctttagcgttttcc

SEQ ID NO: 355204 - DNA, 31 bp, Artificial Sequence
  Synthetic oligonucleotide
cggttcgggggtgatttcctcctatttttcc

SEQ ID NO: 355205 - DNA, 30 bp, Artificial Sequence
  Synthetic oligonucleotide
ttgataatttccgtgtgttgtattttttcc

SEQ ID NO: 355206 - DNA, 30 bp, Artificial Sequence
  Synthetic oligonucleotide
tatgacccacatacctattcggcaaaaagc

SEQ ID NO: 355207 - DNA, 30 bp, Artificial Sequence
  Synthetic oligonucleotide
cattcgtggctctatttataggataaaagc

SEQ ID NO: 355208 - DNA, 30 bp, Artificial Sequence
  Synthetic oligonucleotide
agggatagtactgttagtatcgctaaaagc

SEQ ID NO: 355209 - DNA, 30 bp, Artificial Sequence
  Synthetic oligonucleotide
gacgtctctgaatgtatctattcacaaagc

SEQ ID NO: 355210 - DNA, 30 bp, Artificial Sequence
  Synthetic oligonucleotide
tgattcttaacagtgtgagtattacaaagc

SEQ ID NO: 355211 - DNA, 30 bp, Artificial Sequence
  Synthetic oligonucleotide
aaactggtaaggctcggtctaaaccaaagc

SEQ ID NO: 355212 - DNA, 30 bp, Artificial Sequence
  Synthetic oligonucleotide
tcgatacgaaagaggcgagactagcaaagc

SEQ ID NO: 355213 - DNA, 30 bp, Artificial Sequence
  Synthetic oligonucleotide
ctcccaaggtaggaaggtgcgtcgcaaagc

SEQ ID NO: 355214 - DNA, 30 bp, Artificial Sequence
  Synthetic oligonucleotide
tcctacgtaatacacgggtaaattcaaagc

SEQ ID NO: 355215 - DNA, 30 bp, Artificial Sequence
  Synthetic oligonucleotide
cagatctaagttggctcatcctttcaaagc

SEQ ID NO: 355216 - DNA, 30 bp, Artificial Sequence
  Synthetic oligonucleotide
tatgatttgggcttacagtgcaaagaaagc

SEQ ID NO: 355217 - DNA, 30 bp, Artificial Sequence
  Synthetic oligonucleotide
agtcggagttcatcaactgttgaagaaagc

SEQ ID NO: 355218 - DNA, 30 bp, Artificial Sequence
  Synthetic oligonucleotide
atatgaatgtgcgatgcgcatacggaaagc

SEQ ID NO: 355219 - DNA, 30 bp, Artificial Sequence
  Synthetic oligonucleotide
ctttgatcagacgtcatggcaatggaaagc

SEQ ID NO: 355220 - DNA, 30 bp, Artificial Sequence
  Synthetic oligonucleotide
gactctactgcgtgcatctgaatggaaagc

SEQ ID NO: 355221 - DNA, 30 bp, Artificial Sequence
  Synthetic oligonucleotide
aagtaccggggctacgtcgcgctggaaagc

SEQ ID NO: 355222 - DNA, 30 bp, Artificial Sequence
  Synthetic oligonucleotide
cctgcccatgatcatcgcaacttggaaagc

SEQ ID NO: 355223 - DNA, 30 bp, Artificial Sequence
  Synthetic oligonucleotide
agccaaatgctgattacattgtaataaagc

SEQ ID NO: 355224 - DNA, 30 bp, Artificial Sequence
  Synthetic oligonucleotide
gtacacgtatgtcccgacttttcataaagc

SEQ ID NO: 355225 - DNA, 30 bp, Artificial Sequence
  Synthetic oligonucleotide
aagtggcctctagaaacgccagactaaagc

SEQ ID NO: 355226 - DNA, 30 bp, Artificial Sequence
  Synthetic oligonucleotide
caatagagtggtcacgagttcacttaaagc

SEQ ID NO: 355227 - DNA, 30 bp, Artificial Sequence
  Synthetic oligonucleotide
gtgaagcagacctaatttggacgttaaagc

SEQ ID NO: 355228 - DNA, 30 bp, Artificial Sequence
  Synthetic oligonucleotide
tcgtcccagttaagttgtgttatttaaagc

SEQ ID NO: 355229 - DNA, 30 bp, Artificial Sequence
  Synthetic oligonucleotide
aaagctggtttccgtcggatagtttaaagc

SEQ ID NO: 355230 - DNA, 30 bp, Artificial Sequence
  Synthetic oligonucleotide
gctgctggactccagtcgcaggagacaagc

SEQ ID NO: 355231 - DNA, 30 bp, Artificial Sequence
  Synthetic oligonucleotide
tcggatcgaaggacttagggcctgacaagc

SEQ ID NO: 355232 - DNA, 30 bp, Artificial Sequence
  Synthetic oligonucleotide
tacgccgggtttacagtttcatatacaagc

SEQ ID NO: 355233 - DNA, 30 bp, Artificial Sequence
  Synthetic oligonucleotide
atgcgggccatctaaaaccccttcccaagc

SEQ ID NO: 355234 - DNA, 30 bp, Artificial Sequence
  Synthetic oligonucleotide
tccggccgaatttgttgtagcagagcaagc

SEQ ID NO: 355235 - DNA, 30 bp, Artificial Sequence
  Synthetic oligonucleotide
cattcttatgcactacgggacatagcaagc

SEQ ID NO: 355236 - DNA, 30 bp, Artificial Sequence
  Synthetic oligonucleotide
cgggaccatggatgcggccaggacgcaagc

SEQ ID NO: 355237 - DNA, 30 bp, Artificial Sequence
  Synthetic oligonucleotide
tgaatgcttctaacgatcaggctcgcaagc

SEQ ID NO: 355238 - DNA, 30 bp, Artificial Sequence
  Synthetic oligonucleotide
ggagggccgcgggccaacaatgaggcaagc

SEQ ID NO: 355239 - DNA, 30 bp, Artificial Sequence
  Synthetic oligonucleotide
gattatcacatctatgatcaagcggcaagc

SEQ ID NO: 355240 - DNA, 30 bp, Artificial Sequence
  Synthetic oligonucleotide
gtggatatttgggttaccaaatcggcaagc

SEQ ID NO: 355241 - DNA, 30 bp, Artificial Sequence
  Synthetic oligonucleotide
gtctacgtaagctggtctcaccaatcaagc

SEQ ID NO: 355242 - DNA, 30 bp, Artificial Sequence
  Synthetic oligonucleotide
tttatcgtgggctggaatcctaactcaagc

SEQ ID NO: 355243 - DNA, 30 bp, Artificial Sequence
  Synthetic oligonucleotide
attaagaagtacaattcaggtaactcaagc

SEQ ID NO: 355244 - DNA, 30 bp, Artificial Sequence
  Synthetic oligonucleotide
gcagaagcacaccgtacgccaatgtcaagc

SEQ ID NO: 355245 - DNA, 30 bp, Artificial Sequence
  Synthetic oligonucleotide
gctggtttgaggtcctacgcaccttcaagc

SEQ ID NO: 355246 - DNA, 30 bp, Artificial Sequence
  Synthetic oligonucleotide
atcagcggtcatcggattgcaagcagaagc

SEQ ID NO: 355247 - DNA, 30 bp, Artificial Sequence
  Synthetic oligonucleotide
accttgaatttggcatcgtctaggagaagc

SEQ ID NO: 355248 - DNA, 30 bp, Artificial Sequence
  Synthetic oligonucleotide
tccattgtggccatttgtgtgtgtagaagc

SEQ ID NO: 355249 - DNA, 30 bp, Artificial Sequence
  Synthetic oligonucleotide
agttatagtccggtctcacacattagaagc

SEQ ID NO: 355250 - DNA, 30 bp, Artificial Sequence
  Synthetic oligonucleotide
cccaagtggtgacagctgtaagcacgaagc

SEQ ID NO: 355251 - DNA, 30 bp, Artificial Sequence
  Synthetic oligonucleotide
tagcgctttgaaaaccgtgaaagacgaagc

SEQ ID NO: 355252 - DNA, 30 bp, Artificial Sequence
  Synthetic oligonucleotide
aactactgatccggatatagaaagcgaagc

SEQ ID NO: 355253 - DNA, 30 bp, Artificial Sequence
  Synthetic oligonucleotide
gggaagttccggttttcgtaagagcgaagc

SEQ ID NO: 355254 - DNA, 30 bp, Artificial Sequence
  Synthetic oligonucleotide
gtttgctgggtggaaagtgaatagcgaagc

SEQ ID NO: 355255 - DNA, 30 bp, Artificial Sequence
  Synthetic oligonucleotide
gagggatagcgtcaaccgcgcccgcgaagc

SEQ ID NO: 355256 - DNA, 30 bp, Artificial Sequence
  Synthetic oligonucleotide
atctcagatttccaggattgcaatcgaagc

SEQ ID NO: 355257 - DNA, 30 bp, Artificial Sequence
  Synthetic oligonucleotide
gcatctttacatccctaatatcgtcgaagc

SEQ ID NO: 355258 - DNA, 30 bp, Artificial Sequence
  Synthetic oligonucleotide
aagatggcacaacaggagttatgtcgaagc

SEQ ID NO: 355259 - DNA, 30 bp, Artificial Sequence
  Synthetic oligonucleotide
aatcgcaattagtacagcccgctaggaagc

SEQ ID NO: 355260 - DNA, 31 bp, Artificial Sequence
  Synthetic oligonucleotide
gggctttgattggtccaagcggctaggaagc

SEQ ID NO: 355261 - DNA, 30 bp, Artificial Sequence
  Synthetic oligonucleotide
taatgtgaagcaatcccgctttccggaagc

SEQ ID NO: 355262 - DNA, 30 bp, Artificial Sequence
  Synthetic oligonucleotide
cctattttgtattgtatgagggggggaagc

SEQ ID NO: 355263 - DNA, 30 bp, Artificial Sequence
  Synthetic oligonucleotide
atagcaactcataaagacccttggggaagc

SEQ ID NO: 355264 - DNA, 30 bp, Artificial Sequence
  Synthetic oligonucleotide
agttgaggtggtcgtctaccctttggaagc

SEQ ID NO: 355265 - DNA, 30 bp, Artificial Sequence
  Synthetic oligonucleotide
cacatgtgccaaagcgggccatcatgaagc

SEQ ID NO: 355266 - DNA, 30 bp, Artificial Sequence
  Synthetic oligonucleotide
taacatctattgtcggcggcctcatgaagc

SEQ ID NO: 355267 - DNA, 30 bp, Artificial Sequence
  Synthetic oligonucleotide
tgcatagttattgaatctttgggatgaagc

SEQ ID NO: 355268 - DNA, 30 bp, Artificial Sequence
  Synthetic oligonucleotide
gcgtgtgatgcagacaagcgcgtatgaagc

SEQ ID NO: 355269 - DNA, 30 bp, Artificial Sequence
  Synthetic oligonucleotide
tccgggcagctgaggttagttgacataagc

SEQ ID NO: 355270 - DNA, 30 bp, Artificial Sequence
  Synthetic oligonucleotide
gatgtcgcgcaatgtgtattgcccataagc

SEQ ID NO: 355271 - DNA, 30 bp, Artificial Sequence
  Synthetic oligonucleotide
gtagtttggttaattaatttagaactaagc

SEQ ID NO: 355272 - DNA, 30 bp, Artificial Sequence
  Synthetic oligonucleotide
gggatcctgcatcgcgtatattatctaagc

SEQ ID NO: 355273 - DNA, 30 bp, Artificial Sequence
  Synthetic oligonucleotide
tgcaaaacccccccggctacttctctaagc

SEQ ID NO: 355274 - DNA, 30 bp, Artificial Sequence
  Synthetic oligonucleotide
tataggtactcgtgtttgacaagagtaagc

SEQ ID NO: 355275 - DNA, 30 bp, Artificial Sequence
  Synthetic oligonucleotide
ggtgaggcggcggtttttgaaatagtaagc

SEQ ID NO: 355276 - DNA, 30 bp, Artificial Sequence
  Synthetic oligonucleotide
ttcgagcattctccgttgtaattcgtaagc

SEQ ID NO: 355277 - DNA, 30 bp, Artificial Sequence
  Synthetic oligonucleotide
attgaacatagatacggagccccggtaagc

SEQ ID NO: 355278 - DNA, 30 bp, Artificial Sequence
  Synthetic oligonucleotide
cacattacctgtcagacgacaagggtaagc

SEQ ID NO: 355279 - DNA, 30 bp, Artificial Sequence
  Synthetic oligonucleotide
aagaccgtgtaagtagggtgttgggtaagc

SEQ ID NO: 355280 - DNA, 30 bp, Artificial Sequence
  Synthetic oligonucleotide
atgaaatagatagagggtttccaattaagc

SEQ ID NO: 355281 - DNA, 30 bp, Artificial Sequence
  Synthetic oligonucleotide
ggctctagagggacctgtccccgattaagc

SEQ ID NO: 355282 - DNA, 30 bp, Artificial Sequence
  Synthetic oligonucleotide
tgggagattgaggtggcaaatcgattaagc

SEQ ID NO: 355283 - DNA, 30 bp, Artificial Sequence
  Synthetic oligonucleotide
actggacagttatccatgtgatgattaagc

SEQ ID NO: 355284 - DNA, 30 bp, Artificial Sequence
  Synthetic oligonucleotide
gcaaagcgttcgtttgagcactgattaagc

SEQ ID NO: 355285 - DNA, 30 bp, Artificial Sequence
  Synthetic oligonucleotide
aatgtcgtggcgggatttcggaagttaagc

SEQ ID NO: 355286 - DNA, 30 bp, Artificial Sequence
  Synthetic oligonucleotide
gttttagagaacttgtgaccgtatttaagc

SEQ ID NO: 355287 - DNA, 30 bp, Artificial Sequence
  Synthetic oligonucleotide
ctctgtaagaaattagtttcatctttaagc

SEQ ID NO: 355288 - DNA, 30 bp, Artificial Sequence
  Synthetic oligonucleotide
cgtttaaaggttccccaattgtctttaagc

SEQ ID NO: 355289 - DNA, 30 bp, Artificial Sequence
  Synthetic oligonucleotide
tgggctacgggtgtcaagtcgcgtttaagc

SEQ ID NO: 355290 - DNA, 30 bp, Artificial Sequence
  Synthetic oligonucleotide
cctagcgtagaaccgcacttcattttaagc

SEQ ID NO: 355291 - DNA, 30 bp, Artificial Sequence
  Synthetic oligonucleotide
ttaattggtcagcacaagtgttaaaacagc

SEQ ID NO: 355292 - DNA, 30 bp, Artificial Sequence
  Synthetic oligonucleotide
gaactacctctgggccgttcaccaaacagc

SEQ ID NO: 355293 - DNA, 30 bp, Artificial Sequence
  Synthetic oligonucleotide
aacacttgcaagccaaagctaggaaacagc

SEQ ID NO: 355294 - DNA, 30 bp, Artificial Sequence
  Synthetic oligonucleotide
cacagcaacggtccctattaacggaacagc

SEQ ID NO: 355295 - DNA, 30 bp, Artificial Sequence
  Synthetic oligonucleotide
agcagctaaggtagtgccccacataacagc

SEQ ID NO: 355296 - DNA, 30 bp, Artificial Sequence
  Synthetic oligonucleotide
agattggaagatcgcagttatcaacacagc

SEQ ID NO: 355297 - DNA, 30 bp, Artificial Sequence
  Synthetic oligonucleotide
tagcataccatcctaagtagcgaacacagc

SEQ ID NO: 355298 - DNA, 30 bp, Artificial Sequence
  Synthetic oligonucleotide
ctggtgcaacttatcgcatgtacacacagc

SEQ ID NO: 355299 - DNA, 30 bp, Artificial Sequence
  Synthetic oligonucleotide
ctgtccaagactaagggcattgcgcacagc

SEQ ID NO: 355300 - DNA, 30 bp, Artificial Sequence
  Synthetic oligonucleotide
acgaaacctgaagcagcgcacgcagacagc

SEQ ID NO: 355301 - DNA, 30 bp, Artificial Sequence
  Synthetic oligonucleotide
tccatcgcgagttttccgggatgcgacagc

SEQ ID NO: 355302 - DNA, 30 bp, Artificial Sequence
  Synthetic oligonucleotide
ttggcaggaggctgcctacaatgtgacagc

SEQ ID NO: 355303 - DNA, 30 bp, Artificial Sequence
  Synthetic oligonucleotide
aaacataatcgtttcatgtaatttgacagc

SEQ ID NO: 355304 - DNA, 30 bp, Artificial Sequence
  Synthetic oligonucleotide
ggagcggttctacaacagagtagatacagc

SEQ ID NO: 355305 - DNA, 30 bp, Artificial Sequence
  Synthetic oligonucleotide
cattagccggcgcataagggccactacagc

SEQ ID NO: 355306 - DNA, 30 bp, Artificial Sequence
  Synthetic oligonucleotide
gcccgtcctccatgctctttgtagtacagc

SEQ ID NO: 355307 - DNA, 30 bp, Artificial Sequence
  Synthetic oligonucleotide
cttgatgctgaacttgcatagaattacagc

SEQ ID NO: 355308 - DNA, 30 bp, Artificial Sequence
  Synthetic oligonucleotide
aaatatgggcacgtgaatagttattacagc

SEQ ID NO: 355309 - DNA, 30 bp, Artificial Sequence
  Synthetic oligonucleotide
atttacagcaaaagctacagcagttacagc

SEQ ID NO: 355310 - DNA, 30 bp, Artificial Sequence
  Synthetic oligonucleotide
aaacggtgcggtcatccaatacgttacagc

SEQ ID NO: 355311 - DNA, 30 bp, Artificial Sequence
  Synthetic oligonucleotide
ggagtgcaggaccgcatgtatatttacagc

SEQ ID NO: 355312 - DNA, 30 bp, Artificial Sequence
  Synthetic oligonucleotide
tcttgggttgtcaagcagcataggaccagc

SEQ ID NO: 355313 - DNA, 30 bp, Artificial Sequence
  Synthetic oligonucleotide
ggcgttacggcaggggtaaatgataccagc

SEQ ID NO: 355314 - DNA, 30 bp, Artificial Sequence
  Synthetic oligonucleotide
gtatatttcgtcccaactgtcgttaccagc

SEQ ID NO: 355315 - DNA, 30 bp, Artificial Sequence
  Synthetic oligonucleotide
caagtttgcttaagcattacgggacccagc

SEQ ID NO: 355316 - DNA, 30 bp, Artificial Sequence
  Synthetic oligonucleotide
agtacgattgtagtactgtaactacccagc

SEQ ID NO: 355317 - DNA, 30 bp, Artificial Sequence
  Synthetic oligonucleotide
gggtattgaggttagtgggatgaccccagc

SEQ ID NO: 355318 - DNA, 30 bp, Artificial Sequence
  Synthetic oligonucleotide
gaataaaagtccgtgatagatcatcccagc

SEQ ID NO: 355319 - DNA, 30 bp, Artificial Sequence
  Synthetic oligonucleotide
acctgtatttcaaaaaagatgggtcccagc

SEQ ID NO: 355320 - DNA, 30 bp, Artificial Sequence
  Synthetic oligonucleotide
aagctaagattgggagcacctcttcccagc

SEQ ID NO: 355321 - DNA, 30 bp, Artificial Sequence
  Synthetic oligonucleotide
ctcacacctcatcggcgtccgctagccagc

SEQ ID NO: 355322 - DNA, 30 bp, Artificial Sequence
  Synthetic oligonucleotide
ctcatgtcaagctaaagcccaccggccagc

SEQ ID NO: 355323 - DNA, 30 bp, Artificial Sequence
  Synthetic oligonucleotide
tgagtaggcgcagtggtccaggatgccagc

SEQ ID NO: 355324 - DNA, 30 bp, Artificial Sequence
  Synthetic oligonucleotide
agccccgtagtgcaaatatggactgccagc

SEQ ID NO: 355325 - DNA, 30 bp, Artificial Sequence
  Synthetic oligonucleotide
atcttgcggggccgaaagcctattgccagc

SEQ ID NO: 355326 - DNA, 30 bp, Artificial Sequence
  Synthetic oligonucleotide
caattagttatgtagtagtgctttgccagc

SEQ ID NO: 355327 - DNA, 30 bp, Artificial Sequence
  Synthetic oligonucleotide
cctgccgctcttggcctggatgactccagc

SEQ ID NO: 355328 - DNA, 30 bp, Artificial Sequence
  Synthetic oligonucleotide
agaggggggacgaccgtgggcacctccagc

SEQ ID NO: 355329 - DNA, 30 bp, Artificial Sequence
  Synthetic oligonucleotide
ttaaagggctgccacttttgagagtccagc

SEQ ID NO: 355330 - DNA, 30 bp, Artificial Sequence
  Synthetic oligonucleotide
caacccctgcagtgtacagattaacgcagc

SEQ ID NO: 355331 - DNA, 30 bp, Artificial Sequence
  Synthetic oligonucleotide
ttgataaaacttaatagacgactacgcagc

SEQ ID NO: 355332 - DNA, 30 bp, Artificial Sequence
  Synthetic oligonucleotide
gtatgaagggaatcaaatgcaacgcgcagc

SEQ ID NO: 355333 - DNA, 30 bp, Artificial Sequence
  Synthetic oligonucleotide
tagatgtgaaccagcttaggggttcgcagc

SEQ ID NO: 355334 - DNA, 30 bp, Artificial Sequence
  Synthetic oligonucleotide
ctagacagtactaagtattgtccaggcagc

SEQ ID NO: 355335 - DNA, 30 bp, Artificial Sequence
  Synthetic oligonucleotide
ggagcatctggcccggctgaatcaggcagc

SEQ ID NO: 355336 - DNA, 30 bp, Artificial Sequence
  Synthetic oligonucleotide
atgcattggtctcacaggaaccccggcagc

SEQ ID NO: 355337 - DNA, 30 bp, Artificial Sequence
  Synthetic oligonucleotide
ccgcactcaaatgcggattcatagggcagc

SEQ ID NO: 355338 - DNA, 30 bp, Artificial Sequence
  Synthetic oligonucleotide
ctatgggcaggtcctcaggctgggggcagc

SEQ ID NO: 355339 - DNA, 30 bp, Artificial Sequence
  Synthetic oligonucleotide
ttgtcccgaaaaataacgtgatatggcagc

SEQ ID NO: 355340 - DNA, 30 bp, Artificial Sequence
  Synthetic oligonucleotide
agtttttaaatcctggccgtgaaatgcagc

SEQ ID NO: 355341 - DNA, 30 bp, Artificial Sequence
  Synthetic oligonucleotide
gcacgacacttgatgtgtttaatatgcagc

SEQ ID NO: 355342 - DNA, 30 bp, Artificial Sequence
  Synthetic oligonucleotide
gctcatgggaaagagagtcatatatgcagc

SEQ ID NO: 355343 - DNA, 30 bp, Artificial Sequence
  Synthetic oligonucleotide
tcaaacgcccctcaagggatactatgcagc

SEQ ID NO: 355344 - DNA, 30 bp, Artificial Sequence
  Synthetic oligonucleotide
aattatctgctgtcacgacccgtatgcagc

SEQ ID NO: 355345 - DNA, 30 bp, Artificial Sequence
  Synthetic oligonucleotide
tattgaatggccctttcgtactagtgcagc

SEQ ID NO: 355346 - DNA, 30 bp, Artificial Sequence
  Synthetic oligonucleotide
cctatctcccatatggttgcctcgtgcagc

SEQ ID NO: 355347 - DNA, 30 bp, Artificial Sequence
  Synthetic oligonucleotide
tgaagctattgtccgggttcaatttgcagc

SEQ ID NO: 355348 - DNA, 30 bp, Artificial Sequence
  Synthetic oligonucleotide
aactcttcatgtgttgttcgattttgcagc

SEQ ID NO: 355349 - DNA, 30 bp, Artificial Sequence
  Synthetic oligonucleotide
ttagaggcccgataaatgctcataatcagc

SEQ ID NO: 355350 - DNA, 30 bp, Artificial Sequence
  Synthetic oligonucleotide
ttcgcgcaagctaataaccgagtaatcagc

SEQ ID NO: 355351 - DNA, 30 bp, Artificial Sequence
  Synthetic oligonucleotide
agcccgacttcagaagtatcggtaatcagc

SEQ ID NO: 355352 - DNA, 30 bp, Artificial Sequence
  Synthetic oligonucleotide
ggcaggcactagggagatcgctttatcagc

SEQ ID NO: 355353 - DNA, 30 bp, Artificial Sequence
  Synthetic oligonucleotide
atcgttgtaaccaaacctcgtcacctcagc

SEQ ID NO: 355354 - DNA, 30 bp, Artificial Sequence
  Synthetic oligonucleotide
gaattgtcgcgcttgttaagtgccctcagc

SEQ ID NO: 355355 - DNA, 30 bp, Artificial Sequence
  Synthetic oligonucleotide
gtgctaacgcctcgagttctccttctcagc

SEQ ID NO: 355356 - DNA, 30 bp, Artificial Sequence
  Synthetic oligonucleotide
aagtgaccataacgttcgagcccagtcagc

SEQ ID NO: 355357 - DNA, 30 bp, Artificial Sequence
  Synthetic oligonucleotide
cacgatctggtagtgcagcaaatagtcagc

SEQ ID NO: 355358 - DNA, 30 bp, Artificial Sequence
  Synthetic oligonucleotide
gtccattccccggcaagcgtcttagtcagc

SEQ ID NO: 355359 - DNA, 30 bp, Artificial Sequence
  Synthetic oligonucleotide
tcaacgtgccgcctttgtaagttagtcagc

SEQ ID NO: 355360 - DNA, 30 bp, Artificial Sequence
  Synthetic oligonucleotide
aagcccttttgcgcaaaagttccggtcagc

SEQ ID NO: 355361 - DNA, 30 bp, Artificial Sequence
  Synthetic oligonucleotide
ccagacaatcaagtgctcatctcggtcagc

SEQ ID NO: 355362 - DNA, 30 bp, Artificial Sequence
  Synthetic oligonucleotide
tatgcctcgctgcgtcttgaaaatgtcagc

SEQ ID NO: 355363 - DNA, 30 bp, Artificial Sequence
  Synthetic oligonucleotide
taggtatcttagggatcgcaagtcttcagc

SEQ ID NO: 355364 - DNA, 30 bp, Artificial Sequence
  Synthetic oligonucleotide
ttcttgctcctgttttgatctttcttcagc

SEQ ID NO: 355365 - DNA, 30 bp, Artificial Sequence
  Synthetic oligonucleotide
tagatgcggactatatgtgtttcgttcagc

SEQ ID NO: 355366 - DNA, 30 bp, Artificial Sequence
  Synthetic oligonucleotide
cggtttttgttcacaccatgtaatttcagc

SEQ ID NO: 355367 - DNA, 30 bp, Artificial Sequence
  Synthetic oligonucleotide
gctggcacaggcgtgcctcttaatttcagc

SEQ ID NO: 355368 - DNA, 30 bp, Artificial Sequence
  Synthetic oligonucleotide
aagcatggcagaaataactgaagtttcagc

SEQ ID NO: 355369 - DNA, 30 bp, Artificial Sequence
  Synthetic oligonucleotide
aagtctgttctcacttgggattcaaagagc

SEQ ID NO: 355370 - DNA, 30 bp, Artificial Sequence
  Synthetic oligonucleotide
gctgccaccagtcagcagtagtacaagagc

SEQ ID NO: 355371 - DNA, 30 bp, Artificial Sequence
  Synthetic oligonucleotide
gggggagcaaagtaacacactttgaagagc

SEQ ID NO: 355372 - DNA, 30 bp, Artificial Sequence
  Synthetic oligonucleotide
gtagcccaaggacatatattaagtaagagc

SEQ ID NO: 355373 - DNA, 30 bp, Artificial Sequence
  Synthetic oligonucleotide
tgttacaggaagcggtgtctaggccagagc

SEQ ID NO: 355374 - DNA, 30 bp, Artificial Sequence
  Synthetic oligonucleotide
gtatagtttatacagcgacagttgcagagc

SEQ ID NO: 355375 - DNA, 30 bp, Artificial Sequence
  Synthetic oligonucleotide
cgattgccaggtattagtcccaaagagagc

SEQ ID NO: 355376 - DNA, 30 bp, Artificial Sequence
  Synthetic oligonucleotide
tccgatcaaaagtcggcacggttagagagc

SEQ ID NO: 355377 - DNA, 30 bp, Artificial Sequence
  Synthetic oligonucleotide
catgtcaatattgcggttgcaaccgagagc

SEQ ID NO: 355378 - DNA, 30 bp, Artificial Sequence
  Synthetic oligonucleotide
cggggggttcgataaatagtaacggagagc

SEQ ID NO: 355379 - DNA, 30 bp, Artificial Sequence
  Synthetic oligonucleotide
cgtgggctgcatggtcatggcctggagagc

SEQ ID NO: 355380 - DNA, 30 bp, Artificial Sequence
  Synthetic oligonucleotide
actttgtgtgtaacgtccactgtctagagc

SEQ ID NO: 355381 - DNA, 30 bp, Artificial Sequence
  Synthetic oligonucleotide
tagagctggcttcgaacactctagtagagc

SEQ ID NO: 355382 - DNA, 30 bp, Artificial Sequence
  Synthetic oligonucleotide
ggggacagaccggggcgattcgtttagagc

SEQ ID NO: 355383 - DNA, 30 bp, Artificial Sequence
  Synthetic oligonucleotide
aaagacggttgtcctgaattcttttagagc

SEQ ID NO: 355384 - DNA, 30 bp, Artificial Sequence
  Synthetic oligonucleotide
attaggttttgaacggtcatcaacacgagc

SEQ ID NO: 355385 - DNA, 30 bp, Artificial Sequence
  Synthetic oligonucleotide
ttctgagcaaggtgtaaaaagcacacgagc

SEQ ID NO: 355386 - DNA, 30 bp, Artificial Sequence
  Synthetic oligonucleotide
taccagtcgaaccatgcaaaccccacgagc

SEQ ID NO: 355387 - DNA, 30 bp, Artificial Sequence
  Synthetic oligonucleotide
ctaccggacgccacccccggagccacgagc

SEQ ID NO: 355388 - DNA, 30 bp, Artificial Sequence
  Synthetic oligonucleotide
atgagtggtatcgactctccagtcacgagc

SEQ ID NO: 355389 - DNA, 30 bp, Artificial Sequence
  Synthetic oligonucleotide
tattctagtcaagtaatcagggagacgagc

SEQ ID NO: 355390 - DNA, 30 bp, Artificial Sequence
  Synthetic oligonucleotide
caaccgtgagcttttccataccatacgagc

SEQ ID NO: 355391 - DNA, 30 bp, Artificial Sequence
  Synthetic oligonucleotide
aagcgactgtgttgctattaagctacgagc

SEQ ID NO: 355392 - DNA, 30 bp, Artificial Sequence
  Synthetic oligonucleotide
aacgcgaatgcaggctcacgtgctacgagc

SEQ ID NO: 355393 - DNA, 30 bp, Artificial Sequence
  Synthetic oligonucleotide
ctttgcattggtgttgcccgttgaccgagc

SEQ ID NO: 355394 - DNA, 30 bp, Artificial Sequence
  Synthetic oligonucleotide
tggaatcccagcggaagtttcttaccgagc

SEQ ID NO: 355395 - DNA, 30 bp, Artificial Sequence
  Synthetic oligonucleotide
tatggacgcctacccattattgttccgagc

SEQ ID NO: 355396 - DNA, 30 bp, Artificial Sequence
  Synthetic oligonucleotide
aggcttcgttagatagcaggggcagcgagc

SEQ ID NO: 355397 - DNA, 30 bp, Artificial Sequence
  Synthetic oligonucleotide
tgacgactaagtgattgcgcaaaggcgagc

SEQ ID NO: 355398 - DNA, 30 bp, Artificial Sequence
  Synthetic oligonucleotide
ctcataatttgatacgaacagctggcgagc

SEQ ID NO: 355399 - DNA, 30 bp, Artificial Sequence
  Synthetic oligonucleotide
aacaagaggttgaaaccgttcctctcgagc

SEQ ID NO: 355400 - DNA, 30 bp, Artificial Sequence
  Synthetic oligonucleotide
ctcggcggtttatcaagtcacctgtcgagc

SEQ ID NO: 355401 - DNA, 30 bp, Artificial Sequence
  Synthetic oligonucleotide
gcgttagctcgtgttaaacaattttcgagc

SEQ ID NO: 355402 - DNA, 30 bp, Artificial Sequence
  Synthetic oligonucleotide
cctttcgcttactggtcgttcctaaggagc

SEQ ID NO: 355403 - DNA, 30 bp, Artificial Sequence
  Synthetic oligonucleotide
cttcatagtgctatctgtgactacaggagc

SEQ ID NO: 355404 - DNA, 30 bp, Artificial Sequence
  Synthetic oligonucleotide
gaacttgggacatgaagttttgtgaggagc

SEQ ID NO: 355405 - DNA, 30 bp, Artificial Sequence
  Synthetic oligonucleotide
tggtgagtgcgggcgagctgcggtaggagc

SEQ ID NO: 355406 - DNA, 30 bp, Artificial Sequence
  Synthetic oligonucleotide
tgggtactctccgagccgaagtcacggagc

SEQ ID NO: 355407 - DNA, 30 bp, Artificial Sequence
  Synthetic oligonucleotide
gtgaatgcaaactcactactataccggagc

SEQ ID NO: 355408 - DNA, 30 bp, Artificial Sequence
  Synthetic oligonucleotide
cgtaattatctcaacggctaacgccggagc

SEQ ID NO: 355409 - DNA, 30 bp, Artificial Sequence
  Synthetic oligonucleotide
cgtaaaatcttattgctatgcaatcggagc

SEQ ID NO: 355410 - DNA, 30 bp, Artificial Sequence
  Synthetic oligonucleotide
accgagactaccgatgcggttactcggagc

SEQ ID NO: 355411 - DNA, 30 bp, Artificial Sequence
  Synthetic oligonucleotide
cggagtgcacctttttatataggtcggagc

SEQ ID NO: 355412 - DNA, 29 bp, Artificial Sequence
  Synthetic oligonucleotide
atgttacgtatatataacaccaagggagc

SEQ ID NO: 355413 - DNA, 30 bp, Artificial Sequence
  Synthetic oligonucleotide
atgcacatgcgattatgataagtagggagc

SEQ ID NO: 355414 - DNA, 30 bp, Artificial Sequence
  Synthetic oligonucleotide
attcctttcacgcaacgaagttacgggagc

SEQ ID NO: 355415 - DNA, 30 bp, Artificial Sequence
  Synthetic oligonucleotide
agaggcggacgcacatgcatttacgggagc

SEQ ID NO: 355416 - DNA, 30 bp, Artificial Sequence
  Synthetic oligonucleotide
agtgtcgggatcgacttgctatccgggagc

SEQ ID NO: 355417 - DNA, 30 bp, Artificial Sequence
  Synthetic oligonucleotide
agagttgggcactagcctctcagcgggagc

SEQ ID NO: 355418 - DNA, 30 bp, Artificial Sequence
  Synthetic oligonucleotide
agacgttcagtcgctgcctactgcgggagc

SEQ ID NO: 355419 - DNA, 30 bp, Artificial Sequence
  Synthetic oligonucleotide
ggaaagaggcctggtaatttactcgggagc

SEQ ID NO: 355420 - DNA, 30 bp, Artificial Sequence
  Synthetic oligonucleotide
ggaacattgcctccctatctctaggggagc

SEQ ID NO: 355421 - DNA, 30 bp, Artificial Sequence
  Synthetic oligonucleotide
tggtacgcctctaggggcctttcggggagc

SEQ ID NO: 355422 - DNA, 30 bp, Artificial Sequence
  Synthetic oligonucleotide
atcccactagcaccatcataaatggggagc

SEQ ID NO: 355423 - DNA, 30 bp, Artificial Sequence
  Synthetic oligonucleotide
aaacgccatcgaatggagtatcactggagc

SEQ ID NO: 355424 - DNA, 30 bp, Artificial Sequence
  Synthetic oligonucleotide
aaacgtatcttgtcagcggatgactggagc

SEQ ID NO: 355425 - DNA, 30 bp, Artificial Sequence
  Synthetic oligonucleotide
aacgggttttggtgagcgggatagtggagc

SEQ ID NO: 355426 - DNA, 30 bp, Artificial Sequence
  Synthetic oligonucleotide
aaaagttcaggattagaatcgagaatgagc

SEQ ID NO: 355427 - DNA, 30 bp, Artificial Sequence
  Synthetic oligonucleotide
tacggttgaagttctcatgcctgaatgagc

SEQ ID NO: 355428 - DNA, 30 bp, Artificial Sequence
  Synthetic oligonucleotide
atggggctcatgggtaagctgaacatgagc

SEQ ID NO: 355429 - DNA, 30 bp, Artificial Sequence
  Synthetic oligonucleotide
ccagcctgctcgcagccatcgtccatgagc

SEQ ID NO: 355430 - DNA, 30 bp, Artificial Sequence
  Synthetic oligonucleotide
agacggtgtgtttgcgtctagtggatgagc

SEQ ID NO: 355431 - DNA, 30 bp, Artificial Sequence
  Synthetic oligonucleotide
cccgggatctgaaattgtaggtatatgagc

SEQ ID NO: 355432 - DNA, 30 bp, Artificial Sequence
  Synthetic oligonucleotide
aaaacaaatgtatgcgggcagatactgagc

SEQ ID NO: 355433 - DNA, 30 bp, Artificial Sequence
  Synthetic oligonucleotide
aaatatgggcggcatggatgagggctgagc

SEQ ID NO: 355434 - DNA, 30 bp, Artificial Sequence
  Synthetic oligonucleotide
ggcatagtggtgcacggacgggctctgagc

SEQ ID NO: 355435 - DNA, 30 bp, Artificial Sequence
  Synthetic oligonucleotide
aatggaaaagctacgctcgcttgtctgagc

SEQ ID NO: 355436 - DNA, 30 bp, Artificial Sequence
  Synthetic oligonucleotide
atagtacgagactttgacaccagcgtgagc

SEQ ID NO: 355437 - DNA, 30 bp, Artificial Sequence
  Synthetic oligonucleotide
tctcgccgagtaggactctctggcgtgagc

SEQ ID NO: 355438 - DNA, 30 bp, Artificial Sequence
  Synthetic oligonucleotide
cgttctccctagacgatcaacttcgtgagc

SEQ ID NO: 355439 - DNA, 30 bp, Artificial Sequence
  Synthetic oligonucleotide
accgcgccagtaggccctactggggtgagc

SEQ ID NO: 355440 - DNA, 30 bp, Artificial Sequence
  Synthetic oligonucleotide
taatcgcgatgctgcgacacttctgtgagc

SEQ ID NO: 355441 - DNA, 30 bp, Artificial Sequence
  Synthetic oligonucleotide
aacccacaatcgggcactatggttgtgagc

SEQ ID NO: 355442 - DNA, 30 bp, Artificial Sequence
  Synthetic oligonucleotide
ctaaccttggcgttttaatcaggattgagc

SEQ ID NO: 355443 - DNA, 30 bp, Artificial Sequence
  Synthetic oligonucleotide
agattactggtcgtttcacaggtcttgagc

SEQ ID NO: 355444 - DNA, 30 bp, Artificial Sequence
  Synthetic oligonucleotide
gtcagactttatggggtagtttagttgagc

SEQ ID NO: 355445 - DNA, 30 bp, Artificial Sequence
  Synthetic oligonucleotide
ctgtatgctgggttaagccatgctttgagc

SEQ ID NO: 355446 - DNA, 30 bp, Artificial Sequence
  Synthetic oligonucleotide
aactctcaacacgcttacggagttttgagc

SEQ ID NO: 355447 - DNA, 30 bp, Artificial Sequence
  Synthetic oligonucleotide
tggttgtatatccaggcccaagtaaatagc

SEQ ID NO: 355448 - DNA, 30 bp, Artificial Sequence
  Synthetic oligonucleotide
ggtcttattacattttagacccccaatagc

SEQ ID NO: 355449 - DNA, 30 bp, Artificial Sequence
  Synthetic oligonucleotide
tatgagctgacatgctccggacgcaatagc

SEQ ID NO: 355450 - DNA, 30 bp, Artificial Sequence
  Synthetic oligonucleotide
tcgcgatttatacggatcctgcagaatagc

SEQ ID NO: 355451 - DNA, 30 bp, Artificial Sequence
  Synthetic oligonucleotide
gcatgggacaaagttttcaagtagaatagc

SEQ ID NO: 355452 - DNA, 30 bp, Artificial Sequence
  Synthetic oligonucleotide
cgctacaaataatatcccgtagggaatagc

SEQ ID NO: 355453 - DNA, 30 bp, Artificial Sequence
  Synthetic oligonucleotide
gctgttctgttagacaagtaatggaatagc

SEQ ID NO: 355454 - DNA, 30 bp, Artificial Sequence
  Synthetic oligonucleotide
accggtagcgattcgagataatttaatagc

SEQ ID NO: 355455 - DNA, 30 bp, Artificial Sequence
  Synthetic oligonucleotide
gcagcgctcgggggatcctcataacatagc

SEQ ID NO: 355456 - DNA, 30 bp, Artificial Sequence
  Synthetic oligonucleotide
gctgatatagacgactaagctgcccatagc

SEQ ID NO: 355457 - DNA, 30 bp, Artificial Sequence
  Synthetic oligonucleotide
tatcgtgaatcatattgcgattgccatagc

SEQ ID NO: 355458 - DNA, 30 bp, Artificial Sequence
  Synthetic oligonucleotide
cggaatcgttccgacggatattggcatagc

SEQ ID NO: 355459 - DNA, 30 bp, Artificial Sequence
  Synthetic oligonucleotide
gaaccctttaggggcagagcaagagatagc

SEQ ID NO: 355460 - DNA, 30 bp, Artificial Sequence
  Synthetic oligonucleotide
ccggtgcgcagtaatttgcgccccgatagc

SEQ ID NO: 355461 - DNA, 30 bp, Artificial Sequence
  Synthetic oligonucleotide
gtcgatttctactagtcttgcgtcgatagc

SEQ ID NO: 355462 - DNA, 30 bp, Artificial Sequence
  Synthetic oligonucleotide
gggcatatggttgcccgcgcaatggatagc

SEQ ID NO: 355463 - DNA, 30 bp, Artificial Sequence
  Synthetic oligonucleotide
tacaggtcgtatccctccccgtaatatagc

SEQ ID NO: 355464 - DNA, 30 bp, Artificial Sequence
  Synthetic oligonucleotide
tagtcaactgatggtgagtacacctatagc

SEQ ID NO: 355465 - DNA, 30 bp, Artificial Sequence
  Synthetic oligonucleotide
ctctggcacttgatggaagtactctatagc

SEQ ID NO: 355466 - DNA, 30 bp, Artificial Sequence
  Synthetic oligonucleotide
cttataaacggacgcacgaattagtatagc

SEQ ID NO: 355467 - DNA, 30 bp, Artificial Sequence
  Synthetic oligonucleotide
gtactgtttgacttcacgcgatggtatagc

SEQ ID NO: 355468 - DNA, 30 bp, Artificial Sequence
  Synthetic oligonucleotide
accccgtagcgtggggaagataattatagc

SEQ ID NO: 355469 - DNA, 30 bp, Artificial Sequence
  Synthetic oligonucleotide
cagcatagaaccgtgccattcacaactagc

SEQ ID NO: 355470 - DNA, 30 bp, Artificial Sequence
  Synthetic oligonucleotide
tatatgaactgccatcccgctaacactagc

SEQ ID NO: 355471 - DNA, 30 bp, Artificial Sequence
  Synthetic oligonucleotide
gcgcgtcttcttgaatgctcgaggactagc

SEQ ID NO: 355472 - DNA, 30 bp, Artificial Sequence
  Synthetic oligonucleotide
acggccgtttcagttcctttcagtactagc

SEQ ID NO: 355473 - DNA, 30 bp, Artificial Sequence
  Synthetic oligonucleotide
ttatgaatgagccgataccaagttactagc

SEQ ID NO: 355474 - DNA, 30 bp, Artificial Sequence
  Synthetic oligonucleotide
ggacaggggggcaccagagggcaccctagc

SEQ ID NO: 355475 - DNA, 30 bp, Artificial Sequence
  Synthetic oligonucleotide
gggctcaagggataatgcggcggccctagc

SEQ ID NO: 355476 - DNA, 30 bp, Artificial Sequence
  Synthetic oligonucleotide
atcctggcagggtagagagcgttgcctagc

SEQ ID NO: 355477 - DNA, 30 bp, Artificial Sequence
  Synthetic oligonucleotide
gctggctgtacactagcgtggcgtcctagc

SEQ ID NO: 355478 - DNA, 30 bp, Artificial Sequence
  Synthetic oligonucleotide
ctcaaagcgcggctttcttttagcgctagc

SEQ ID NO: 355479 - DNA, 30 bp, Artificial Sequence
  Synthetic oligonucleotide
gtcgtgttaagatcccaaaattgcgctagc

SEQ ID NO: 355480 - DNA, 30 bp, Artificial Sequence
  Synthetic oligonucleotide
aaaagggttccctttacacctttcgctagc

SEQ ID NO: 355481 - DNA, 30 bp, Artificial Sequence
  Synthetic oligonucleotide
tggcttaagaacagttgtcatacggctagc

SEQ ID NO: 355482 - DNA, 30 bp, Artificial Sequence
  Synthetic oligonucleotide
gagacactgaagtagtagcgtggggctagc

SEQ ID NO: 355483 - DNA, 30 bp, Artificial Sequence
  Synthetic oligonucleotide
cggtttaagcaatcaaggacgcgtgctagc

SEQ ID NO: 355484 - DNA, 30 bp, Artificial Sequence
  Synthetic oligonucleotide
ctgcaaacacacatattagagtttgctagc

SEQ ID NO: 355485 - DNA, 30 bp, Artificial Sequence
  Synthetic oligonucleotide
gcaacttggaggccgctctccttctctagc

SEQ ID NO: 355486 - DNA, 30 bp, Artificial Sequence
  Synthetic oligonucleotide
ctgactcggacagaccagcccaggtctagc

SEQ ID NO: 355487 - DNA, 30 bp, Artificial Sequence
  Synthetic oligonucleotide
cgccttgatagactagtatctgggtctagc

SEQ ID NO: 355488 - DNA, 30 bp, Artificial Sequence
  Synthetic oligonucleotide
tctggaagaatgtacgtgaccatttctagc

SEQ ID NO: 355489 - DNA, 30 bp, Artificial Sequence
  Synthetic oligonucleotide
gaccacgttacgcactttgagcaaagtagc

SEQ ID NO: 355490 - DNA, 30 bp, Artificial Sequence
  Synthetic oligonucleotide
gagtgtcaactaatcactccaggcagtagc

SEQ ID NO: 355491 - DNA, 30 bp, Artificial Sequence
  Synthetic oligonucleotide
ccaccttgggaaacagacaatgggagtagc

SEQ ID NO: 355492 - DNA, 30 bp, Artificial Sequence
  Synthetic oligonucleotide
gttccttatacacagtaagagtggagtagc

SEQ ID NO: 355493 - DNA, 30 bp, Artificial Sequence
  Synthetic oligonucleotide
gaagtatgataagatcgtttcatacgtagc

SEQ ID NO: 355494 - DNA, 30 bp, Artificial Sequence
  Synthetic oligonucleotide
gtactcaatcaagattcccgtttacgtagc

SEQ ID NO: 355495 - DNA, 30 bp, Artificial Sequence
  Synthetic oligonucleotide
cccgtggctaatatcaagactgaccgtagc

SEQ ID NO: 355496 - DNA, 30 bp, Artificial Sequence
  Synthetic oligonucleotide
gcatgcttggtgtatccactatggcgtagc

SEQ ID NO: 355497 - DNA, 30 bp, Artificial Sequence
  Synthetic oligonucleotide
tcaaatggatgccagggggttcttcgtagc

SEQ ID NO: 355498 - DNA, 30 bp, Artificial Sequence
  Synthetic oligonucleotide
aggcgggggggacgacaacagcccggtagc

SEQ ID NO: 355499 - DNA, 30 bp, Artificial Sequence
  Synthetic oligonucleotide
gttcatccacgaattggataatcgggtagc

SEQ ID NO: 355500 - DNA, 30 bp, Artificial Sequence
  Synthetic oligonucleotide
ggatcgagccggttcattgaacggggtagc

SEQ ID NO: 355501 - DNA, 30 bp, Artificial Sequence
  Synthetic oligonucleotide
tgcctttagtaagagttaagctatggtagc

SEQ ID NO: 355502 - DNA, 30 bp, Artificial Sequence
  Synthetic oligonucleotide
tgcagcaaatactcaagtcgaactggtagc

SEQ ID NO: 355503 - DNA, 30 bp, Artificial Sequence
  Synthetic oligonucleotide
tgagcgacttaggcaggcggtgactgtagc

SEQ ID NO: 355504 - DNA, 30 bp, Artificial Sequence
  Synthetic oligonucleotide
ggttgcttgttccaggatacggcgtgtagc

SEQ ID NO: 355505 - DNA, 30 bp, Artificial Sequence
  Synthetic oligonucleotide
ccaaataagcatacaaaccttagaattagc

SEQ ID NO: 355506 - DNA, 30 bp, Artificial Sequence
  Synthetic oligonucleotide
tatcggacccgctcccaaataataattagc

SEQ ID NO: 355507 - DNA, 30 bp, Artificial Sequence
  Synthetic oligonucleotide
ccagccaaccgctacggtcagggcattagc

SEQ ID NO: 355508 - DNA, 30 bp, Artificial Sequence
  Synthetic oligonucleotide
cggttgtagttgtaagaacggatcattagc

SEQ ID NO: 355509 - DNA, 30 bp, Artificial Sequence
  Synthetic oligonucleotide
agttttcaccgtgaatatgtcgtcattagc

SEQ ID NO: 355510 - DNA, 30 bp, Artificial Sequence
  Synthetic oligonucleotide
cgggttctgatttcatcaacatagattagc

SEQ ID NO: 355511 - DNA, 30 bp, Artificial Sequence
  Synthetic oligonucleotide
cgtagctagggcgatctgcaaatgattagc

SEQ ID NO: 355512 - DNA, 30 bp, Artificial Sequence
  Synthetic oligonucleotide
gcggcatgcgttgaattaaaagatattagc

SEQ ID NO: 355513 - DNA, 30 bp, Artificial Sequence
  Synthetic oligonucleotide
cgctcactcctaacgagcgtgcgtattagc

SEQ ID NO: 355514 - DNA, 30 bp, Artificial Sequence
  Synthetic oligonucleotide
gtatgtaggacgttctgcttgcgtattagc

SEQ ID NO: 355515 - DNA, 30 bp, Artificial Sequence
  Synthetic oligonucleotide
agaggtcggttgtgggaaaggaaacttagc

SEQ ID NO: 355516 - DNA, 30 bp, Artificial Sequence
  Synthetic oligonucleotide
gcgggccctaccgacctgctaggccttagc

SEQ ID NO: 355517 - DNA, 30 bp, Artificial Sequence
  Synthetic oligonucleotide
attgcagtgcatagcactgtagagcttagc

SEQ ID NO: 355518 - DNA, 30 bp, Artificial Sequence
  Synthetic oligonucleotide
ccacggaggacatatgtcttccgagttagc

SEQ ID NO: 355519 - DNA, 30 bp, Artificial Sequence
  Synthetic oligonucleotide
cttgtagcccacatggaaaggttagttagc

SEQ ID NO: 355520 - DNA, 30 bp, Artificial Sequence
  Synthetic oligonucleotide
aaacttttcaggtaggagactttagttagc

SEQ ID NO: 355521 - DNA, 30 bp, Artificial Sequence
  Synthetic oligonucleotide
acccaagttcaccgttctcagaccgttagc

SEQ ID NO: 355522 - DNA, 30 bp, Artificial Sequence
  Synthetic oligonucleotide
tcatgaattactgaaacggtgatcgttagc

SEQ ID NO: 355523 - DNA, 30 bp, Artificial Sequence
  Synthetic oligonucleotide
ggccaataaaggtcagcctaacaggttagc

SEQ ID NO: 355524 - DNA, 30 bp, Artificial Sequence
  Synthetic oligonucleotide
gggcccttggtagctggagttagggttagc

SEQ ID NO: 355525 - DNA, 30 bp, Artificial Sequence
  Synthetic oligonucleotide
caggtggccgaaattacagcagttgttagc

SEQ ID NO: 355526 - DNA, 30 bp, Artificial Sequence
  Synthetic oligonucleotide
gaagccaagcaatagtgttcataatttagc

SEQ ID NO: 355527 - DNA, 30 bp, Artificial Sequence
  Synthetic oligonucleotide
ctcagatctcggaatttcaaaagatttagc

SEQ ID NO: 355528 - DNA, 30 bp, Artificial Sequence
  Synthetic oligonucleotide
caacttcctttgcccataggtctatttagc

SEQ ID NO: 355529 - DNA, 30 bp, Artificial Sequence
  Synthetic oligonucleotide
cacgtatgtaattggtgctccagctttagc

SEQ ID NO: 355530 - DNA, 30 bp, Artificial Sequence
  Synthetic oligonucleotide
ataatctgccaaagccccgtgagaaaacgc

SEQ ID NO: 355531 - DNA, 30 bp, Artificial Sequence
  Synthetic oligonucleotide
gaaaggtagaccacagtacatggcaaacgc

SEQ ID NO: 355532 - DNA, 30 bp, Artificial Sequence
  Synthetic oligonucleotide
gcttggtttacgtttggaccctgcaaacgc

SEQ ID NO: 355533 - DNA, 30 bp, Artificial Sequence
  Synthetic oligonucleotide
gacgaagcgtaggcttgtgaagcgaaacgc

SEQ ID NO: 355534 - DNA, 30 bp, Artificial Sequence
  Synthetic oligonucleotide
ctgtctgatattctggcataggcgaaacgc

SEQ ID NO: 355535 - DNA, 30 bp, Artificial Sequence
  Synthetic oligonucleotide
ctttgtccgtaaccagagggatcgaaacgc

SEQ ID NO: 355536 - DNA, 30 bp, Artificial Sequence
  Synthetic oligonucleotide
gtttgagcagagcacatatccgggaaacgc

SEQ ID NO: 355537 - DNA, 30 bp, Artificial Sequence
  Synthetic oligonucleotide
tataatgtagaacggtaatacaataaacgc

SEQ ID NO: 355538 - DNA, 30 bp, Artificial Sequence
  Synthetic oligonucleotide
tatgaggggttacaagattctcataaacgc

SEQ ID NO: 355539 - DNA, 30 bp, Artificial Sequence
  Synthetic oligonucleotide
cagggaagttttaaattcacatctaaacgc

SEQ ID NO: 355540 - DNA, 31 bp, Artificial Sequence
  Synthetic oligonucleotide
gtcctattagtcggatggcagatctaaacgc

SEQ ID NO: 355541 - DNA, 30 bp, Artificial Sequence
  Synthetic oligonucleotide
aagatagggaaactgagcctcattaaacgc

SEQ ID NO: 355542 - DNA, 30 bp, Artificial Sequence
  Synthetic oligonucleotide
ctccgaaatagggccccctaacagcaacgc

SEQ ID NO: 355543 - DNA, 30 bp, Artificial Sequence
  Synthetic oligonucleotide
gtttggcagctccaattaggccggcaacgc

SEQ ID NO: 355544 - DNA, 30 bp, Artificial Sequence
  Synthetic oligonucleotide
gggagttcgcgagaaacgcaagtgcaacgc

SEQ ID NO: 355545 - DNA, 30 bp, Artificial Sequence
  Synthetic oligonucleotide
accatattcacaatgaagaggtgtcaacgc

SEQ ID NO: 355546 - DNA, 30 bp, Artificial Sequence
  Synthetic oligonucleotide
accggggtgtagtgccccggtgtagaacgc

SEQ ID NO: 355547 - DNA, 30 bp, Artificial Sequence
  Synthetic oligonucleotide
ttcacgaaacccaacgcctcttccgaacgc

SEQ ID NO: 355548 - DNA, 30 bp, Artificial Sequence
  Synthetic oligonucleotide
aaactatccttgttaggaaaatatgaacgc

SEQ ID NO: 355549 - DNA, 30 bp, Artificial Sequence
  Synthetic oligonucleotide
acttcgttgacggcaacagggccataacgc

SEQ ID NO: 355550 - DNA, 30 bp, Artificial Sequence
  Synthetic oligonucleotide
aactctatgcaggcgtcacatctctaacgc

SEQ ID NO: 355551 - DNA, 30 bp, Artificial Sequence
  Synthetic oligonucleotide
tacaaagtttgcagatgtccgacgtaacgc

SEQ ID NO: 355552 - DNA, 30 bp, Artificial Sequence
  Synthetic oligonucleotide
cgcccgtgaaattcaaggagcgtgtaacgc

SEQ ID NO: 355553 - DNA, 30 bp, Artificial Sequence
  Synthetic oligonucleotide
gattgtagaatgtctacgaccaattaacgc

SEQ ID NO: 355554 - DNA, 30 bp, Artificial Sequence
  Synthetic oligonucleotide
attgaactctcaaccgttcaaacttaacgc

SEQ ID NO: 355555 - DNA, 30 bp, Artificial Sequence
  Synthetic oligonucleotide
tttgccggtttactggggtaatcttaacgc

SEQ ID NO: 355556 - DNA, 30 bp, Artificial Sequence
  Synthetic oligonucleotide
gcctacctcgtgagtaaccgcggttaacgc

SEQ ID NO: 355557 - DNA, 30 bp, Artificial Sequence
  Synthetic oligonucleotide
ccaacgataatatactctcaataaacacgc

SEQ ID NO: 355558 - DNA, 30 bp, Artificial Sequence
  Synthetic oligonucleotide
tctgtttccctcgatgagagagggacacgc

SEQ ID NO: 355559 - DNA, 30 bp, Artificial Sequence
  Synthetic oligonucleotide
caaatccaccaataagaattcgtgacacgc

SEQ ID NO: 355560 - DNA, 30 bp, Artificial Sequence
  Synthetic oligonucleotide
gggctgcccaatcaggcctattctacacgc

SEQ ID NO: 355561 - DNA, 30 bp, Artificial Sequence
  Synthetic oligonucleotide
gtaatttcaatcccccaaagtggtacacgc

SEQ ID NO: 355562 - DNA, 30 bp, Artificial Sequence
  Synthetic oligonucleotide
tgcctggctccaacagtctaatagccacgc

SEQ ID NO: 355563 - DNA, 30 bp, Artificial Sequence
  Synthetic oligonucleotide
taacttaaaaggcctccaatgtaggcacgc

SEQ ID NO: 355564 - DNA, 30 bp, Artificial Sequence
  Synthetic oligonucleotide
ctgtggtaaatgtccaagggtcgtgcacgc

SEQ ID NO: 355565 - DNA, 30 bp, Artificial Sequence
  Synthetic oligonucleotide
ttagagtcgcggtattcgttggactcacgc

SEQ ID NO: 355566 - DNA, 30 bp, Artificial Sequence
  Synthetic oligonucleotide
ctacaggtggaccgataatattactcacgc

SEQ ID NO: 355567 - DNA, 30 bp, Artificial Sequence
  Synthetic oligonucleotide
ggtctattagatattgtctgcacctcacgc

SEQ ID NO: 355568 - DNA, 30 bp, Artificial Sequence
  Synthetic oligonucleotide
ggtaaagtacccttactcctgggctcacgc

SEQ ID NO: 355569 - DNA, 30 bp, Artificial Sequence
  Synthetic oligonucleotide
tgatggggaaaatcggttgattcaagacgc

SEQ ID NO: 355570 - DNA, 30 bp, Artificial Sequence
  Synthetic oligonucleotide
tcaacgaccatagttagcggccgaagacgc

SEQ ID NO: 355571 - DNA, 30 bp, Artificial Sequence
  Synthetic oligonucleotide
tccctaaatgggctacgacccttaagacgc

SEQ ID NO: 355572 - DNA, 30 bp, Artificial Sequence
  Synthetic oligonucleotide
atataggggccgaaggagctgaaccgacgc

SEQ ID NO: 355573 - DNA, 30 bp, Artificial Sequence
  Synthetic oligonucleotide
gtcgcagtagagacaacgaccagccgacgc

SEQ ID NO: 355574 - DNA, 30 bp, Artificial Sequence
  Synthetic oligonucleotide
acaatccttccgcgggagtaaacgcgacgc

SEQ ID NO: 355575 - DNA, 30 bp, Artificial Sequence
  Synthetic oligonucleotide
cggttgcagcattggataaccgtgcgacgc

SEQ ID NO: 355576 - DNA, 30 bp, Artificial Sequence
  Synthetic oligonucleotide
gaatgaaggacaaaccaggccattcgacgc

SEQ ID NO: 355577 - DNA, 30 bp, Artificial Sequence
  Synthetic oligonucleotide
atacggtcatctttagtgaaagttcgacgc

SEQ ID NO: 355578 - DNA, 30 bp, Artificial Sequence
  Synthetic oligonucleotide
aagtagggcaagaaatgtgtttttcgacgc

SEQ ID NO: 355579 - DNA, 30 bp, Artificial Sequence
  Synthetic oligonucleotide
ttgcaaacggaaattgttcccacaggacgc

SEQ ID NO: 355580 - DNA, 30 bp, Artificial Sequence
  Synthetic oligonucleotide
gggtgcagggggattaaggatagaggacgc

SEQ ID NO: 355581 - DNA, 30 bp, Artificial Sequence
  Synthetic oligonucleotide
ctcaagtcaaaaatggatgcgatcggacgc

SEQ ID NO: 355582 - DNA, 30 bp, Artificial Sequence
  Synthetic oligonucleotide
acagcaccgatcaattagccaaggggacgc

SEQ ID NO: 355583 - DNA, 30 bp, Artificial Sequence
  Synthetic oligonucleotide
tacgttctcatcgtggcacaccgtggacgc

SEQ ID NO: 355584 - DNA, 30 bp, Artificial Sequence
  Synthetic oligonucleotide
acctgggcgtacgaaccgatagcctgacgc

SEQ ID NO: 355585 - DNA, 30 bp, Artificial Sequence
  Synthetic oligonucleotide
atgaggcagggattcaccgaactctgacgc

SEQ ID NO: 355586 - DNA, 30 bp, Artificial Sequence
  Synthetic oligonucleotide
aaacggtaatcactgaccaaattctgacgc

SEQ ID NO: 355587 - DNA, 30 bp, Artificial Sequence
  Synthetic oligonucleotide
tcctgttacaaaaccacggtggtaatacgc

SEQ ID NO: 355588 - DNA, 30 bp, Artificial Sequence
  Synthetic oligonucleotide
ctggattccggcggttgtaagacgatacgc

SEQ ID NO: 355589 - DNA, 30 bp, Artificial Sequence
  Synthetic oligonucleotide
gggagttagtaaggtacgcttacgatacgc

SEQ ID NO: 355590 - DNA, 30 bp, Artificial Sequence
  Synthetic oligonucleotide
actcgttaccaagcccggttataactacgc

SEQ ID NO: 355591 - DNA, 30 bp, Artificial Sequence
  Synthetic oligonucleotide
tacttgagcgagctatggcggaagctacgc

SEQ ID NO: 355592 - DNA, 30 bp, Artificial Sequence
  Synthetic oligonucleotide
ttcaagtgatgtacactggcccgcgtacgc

SEQ ID NO: 355593 - DNA, 30 bp, Artificial Sequence
  Synthetic oligonucleotide
attaggtaagaggttcgcattaatgtacgc

SEQ ID NO: 355594 - DNA, 30 bp, Artificial Sequence
  Synthetic oligonucleotide
acggttaccttagaaaattactaattacgc

SEQ ID NO: 355595 - DNA, 30 bp, Artificial Sequence
  Synthetic oligonucleotide
ggctgtgtctttctgactcacgtattacgc

SEQ ID NO: 355596 - DNA, 30 bp, Artificial Sequence
  Synthetic oligonucleotide
attatagcgtgttcaagcctccccttacgc

SEQ ID NO: 355597 - DNA, 30 bp, Artificial Sequence
  Synthetic oligonucleotide
ccgtggtcgccttgtttggcgaagttacgc

SEQ ID NO: 355598 - DNA, 30 bp, Artificial Sequence
  Synthetic oligonucleotide
gcctaaatgggtaaatagagtcccaaccgc

SEQ ID NO: 355599 - DNA, 30 bp, Artificial Sequence
  Synthetic oligonucleotide
ccgacgtaaagacgattgagggtcaaccgc

SEQ ID NO: 355600 - DNA, 30 bp, Artificial Sequence
  Synthetic oligonucleotide
ttgccctcctggcaggaaacggttaaccgc

SEQ ID NO: 355601 - DNA, 30 bp, Artificial Sequence
  Synthetic oligonucleotide
tccggcaccgcggtttctggcaaccaccgc

SEQ ID NO: 355602 - DNA, 30 bp, Artificial Sequence
  Synthetic oligonucleotide
aattgggctgacgtcgtatggaagcaccgc

SEQ ID NO: 355603 - DNA, 30 bp, Artificial Sequence
  Synthetic oligonucleotide
aacgaactgtctagagaaaactggcaccgc

SEQ ID NO: 355604 - DNA, 30 bp, Artificial Sequence
  Synthetic oligonucleotide
ggataattcatggaatgtgcgctgcaccgc

SEQ ID NO: 355605 - DNA, 30 bp, Artificial Sequence
  Synthetic oligonucleotide
gattgagttagtcagcgtttagctcaccgc

SEQ ID NO: 355606 - DNA, 30 bp, Artificial Sequence
  Synthetic oligonucleotide
actggtgttcttatacttcccaaagaccgc

SEQ ID NO: 355607 - DNA, 30 bp, Artificial Sequence
  Synthetic oligonucleotide
gacctgttgggcaggtattatgcagaccgc

SEQ ID NO: 355608 - DNA, 30 bp, Artificial Sequence
  Synthetic oligonucleotide
tgttacatttcgcaagtcttgggagaccgc

SEQ ID NO: 355609 - DNA, 30 bp, Artificial Sequence
  Synthetic oligonucleotide
tagccagcgatgtagtgggattccgaccgc

SEQ ID NO: 355610 - DNA, 30 bp, Artificial Sequence
  Synthetic oligonucleotide
atgtcatagcctgtctccaggacggaccgc

SEQ ID NO: 355611 - DNA, 30 bp, Artificial Sequence
  Synthetic oligonucleotide
gggcagtgtacactacggtcgctggaccgc

SEQ ID NO: 355612 - DNA, 30 bp, Artificial Sequence
  Synthetic oligonucleotide
gtcgtctgagaaggcttgggtttaacccgc

SEQ ID NO: 355613 - DNA, 30 bp, Artificial Sequence
  Synthetic oligonucleotide
aagtccaagtatacgctaagacacacccgc

SEQ ID NO: 355614 - DNA, 30 bp, Artificial Sequence
  Synthetic oligonucleotide
ccgaaagcatacagcggagggctcacccgc

SEQ ID NO: 355615 - DNA, 30 bp, Artificial Sequence
  Synthetic oligonucleotide
cgcaaaaagtagggcagcattcggacccgc

SEQ ID NO: 355616 - DNA, 30 bp, Artificial Sequence
  Synthetic oligonucleotide
gacgattggcagatagacaaggggacccgc

SEQ ID NO: 355617 - DNA, 30 bp, Artificial Sequence
  Synthetic oligonucleotide
ctcccaacaggttacgggatatgtacccgc

SEQ ID NO: 355618 - DNA, 30 bp, Artificial Sequence
  Synthetic oligonucleotide
gggtacaggaactaactgaagtgtacccgc

SEQ ID NO: 355619 - DNA, 30 bp, Artificial Sequence
  Synthetic oligonucleotide
aggtagctgggaagctactggcgtccccgc

SEQ ID NO: 355620 - DNA, 30 bp, Artificial Sequence
  Synthetic oligonucleotide
gacagtgacccaactaaaacagttccccgc

SEQ ID NO: 355621 - DNA, 30 bp, Artificial Sequence
  Synthetic oligonucleotide
tgccgtgactgacttattaggcaagcccgc

SEQ ID NO: 355622 - DNA, 30 bp, Artificial Sequence
  Synthetic oligonucleotide
gtgggacaatccggctttcttcgagcccgc

SEQ ID NO: 355623 - DNA, 30 bp, Artificial Sequence
  Synthetic oligonucleotide
tattcgctttgtcacaacttaacggcccgc

SEQ ID NO: 355624 - DNA, 30 bp, Artificial Sequence
  Synthetic oligonucleotide
gcattcgagcaacccgaaatcctggcccgc

SEQ ID NO: 355625 - DNA, 30 bp, Artificial Sequence
  Synthetic oligonucleotide
atgggatgcactcgactgatgtagtcccgc

SEQ ID NO: 355626 - DNA, 30 bp, Artificial Sequence
  Synthetic oligonucleotide
cacagtcgcctaggttagattgcttcccgc

SEQ ID NO: 355627 - DNA, 30 bp, Artificial Sequence
  Synthetic oligonucleotide
actcatctccccttgagttctgtttcccgc

SEQ ID NO: 355628 - DNA, 30 bp, Artificial Sequence
  Synthetic oligonucleotide
atatatggatataagcggaaatcaagccgc

SEQ ID NO: 355629 - DNA, 30 bp, Artificial Sequence
  Synthetic oligonucleotide
cgttctcccggccgacaagagataagccgc

SEQ ID NO: 355630 - DNA, 30 bp, Artificial Sequence
  Synthetic oligonucleotide
atattaaagtggatcacgtgagttagccgc

SEQ ID NO: 355631 - DNA, 30 bp, Artificial Sequence
  Synthetic oligonucleotide
atccgaaacaatcctcttgttatacgccgc

SEQ ID NO: 355632 - DNA, 29 bp, Artificial Sequence
  Synthetic oligonucleotide
tagcctcaattatcgaaccaaagcgccgc

SEQ ID NO: 355633 - DNA, 30 bp, Artificial Sequence
  Synthetic oligonucleotide
cagcgcgctcaaattgcgtgtaggcgccgc

SEQ ID NO: 355634 - DNA, 30 bp, Artificial Sequence
  Synthetic oligonucleotide
gccatagatgtagtgcttgtgcggcgccgc

SEQ ID NO: 355635 - DNA, 30 bp, Artificial Sequence
  Synthetic oligonucleotide
aacgttgcataaccgtagttggtgcgccgc

SEQ ID NO: 355636 - DNA, 30 bp, Artificial Sequence
  Synthetic oligonucleotide
cactgagggtccaggacatagtacggccgc

SEQ ID NO: 355637 - DNA, 30 bp, Artificial Sequence
  Synthetic oligonucleotide
ggatgcacatcatgtagtttgcgcggccgc

SEQ ID NO: 355638 - DNA, 30 bp, Artificial Sequence
  Synthetic oligonucleotide
tatccttaccgccacatatcaacgggccgc

SEQ ID NO: 355639 - DNA, 30 bp, Artificial Sequence
  Synthetic oligonucleotide
gtagatcgcagataagctcaggcgggccgc

SEQ ID NO: 355640 - DNA, 30 bp, Artificial Sequence
  Synthetic oligonucleotide
agacggctgcgacaaaagagcttgggccgc

SEQ ID NO: 355641 - DNA, 30 bp, Artificial Sequence
  Synthetic oligonucleotide
caaagggtagagcggtggttctttggccgc

SEQ ID NO: 355642 - DNA, 30 bp, Artificial Sequence
  Synthetic oligonucleotide
tattttcgcctggagacagacggatgccgc

SEQ ID NO: 355643 - DNA, 31 bp, Artificial Sequence
  Synthetic oligonucleotide
ataacggctacgtcaattcagactgtgccgc

SEQ ID NO: 355644 - DNA, 30 bp, Artificial Sequence
  Synthetic oligonucleotide
gcatactaccagctgcggatgtattgccgc

SEQ ID NO: 355645 - DNA, 30 bp, Artificial Sequence
  Synthetic oligonucleotide
tcagagcatgagactatcttaatttgccgc

SEQ ID NO: 355646 - DNA, 30 bp, Artificial Sequence
  Synthetic oligonucleotide
cctataacagcgtcttttacgtcaatccgc

SEQ ID NO: 355647 - DNA, 30 bp, Artificial Sequence
  Synthetic oligonucleotide
ccagcattgggttcagaagtacgaatccgc

SEQ ID NO: 355648 - DNA, 30 bp, Artificial Sequence
  Synthetic oligonucleotide
gaaatggatggagcaacaaacaagatccgc

SEQ ID NO: 355649 - DNA, 30 bp, Artificial Sequence
  Synthetic oligonucleotide
tccatcctcccaccgcggtaagggatccgc

SEQ ID NO: 355650 - DNA, 30 bp, Artificial Sequence
  Synthetic oligonucleotide
gggtggaaggtaaactaccgcgggatccgc

SEQ ID NO: 355651 - DNA, 30 bp, Artificial Sequence
  Synthetic oligonucleotide
atgcttggcaatcccccttctgggatccgc

SEQ ID NO: 355652 - DNA, 30 bp, Artificial Sequence
  Synthetic oligonucleotide
gggacactggacgcgggttctcgtatccgc

SEQ ID NO: 355653 - DNA, 30 bp, Artificial Sequence
  Synthetic oligonucleotide
atgggcgtactctgttaaaattttatccgc

SEQ ID NO: 355654 - DNA, 30 bp, Artificial Sequence
  Synthetic oligonucleotide
attaccgacaatacgaaatctggtctccgc

SEQ ID NO: 355655 - DNA, 30 bp, Artificial Sequence
  Synthetic oligonucleotide
gaggaactgcggtcgttctctctagtccgc

SEQ ID NO: 355656 - DNA, 30 bp, Artificial Sequence
  Synthetic oligonucleotide
tacgggacgttgtaggtggcaccggtccgc

SEQ ID NO: 355657 - DNA, 30 bp, Artificial Sequence
  Synthetic oligonucleotide
tatttgaaatagcgtacaaagccggtccgc

SEQ ID NO: 355658 - DNA, 30 bp, Artificial Sequence
  Synthetic oligonucleotide
gaatattacaataatacagcacatgtccgc

SEQ ID NO: 355659 - DNA, 30 bp, Artificial Sequence
  Synthetic oligonucleotide
aaagacttgcctggtaggggctatgtccgc

SEQ ID NO: 355660 - DNA, 30 bp, Artificial Sequence
  Synthetic oligonucleotide
cttcgtggtgttccttctcgattattccgc

SEQ ID NO: 355661 - DNA, 30 bp, Artificial Sequence
  Synthetic oligonucleotide
ctaaggcccgtatggaagctgtagttccgc

SEQ ID NO: 355662 - DNA, 30 bp, Artificial Sequence
  Synthetic oligonucleotide
aataaaacacgttgtggaacttagttccgc

SEQ ID NO: 355663 - DNA, 30 bp, Artificial Sequence
  Synthetic oligonucleotide
tgcaggattaggtgaatgtgcatcaagcgc

SEQ ID NO: 355664 - DNA, 30 bp, Artificial Sequence
  Synthetic oligonucleotide
ttagaatttaagtctaagtacgagaagcgc

SEQ ID NO: 355665 - DNA, 30 bp, Artificial Sequence
  Synthetic oligonucleotide
cagacttggcccctctgttgttggaagcgc

SEQ ID NO: 355666 - DNA, 30 bp, Artificial Sequence
  Synthetic oligonucleotide
ggagcggttagcttcgacagggctaagcgc

SEQ ID NO: 355667 - DNA, 30 bp, Artificial Sequence
  Synthetic oligonucleotide
tcgagcacccacgacatacgagttaagcgc

SEQ ID NO: 355668 - DNA, 30 bp, Artificial Sequence
  Synthetic oligonucleotide
gatcgtaaactagggcagtcttcacagcgc

SEQ ID NO: 355669 - DNA, 30 bp, Artificial Sequence
  Synthetic oligonucleotide
gcactcaccaggtacgcggattagcagcgc

SEQ ID NO: 355670 - DNA, 30 bp, Artificial Sequence
  Synthetic oligonucleotide
gtagtgattcaagaggcaatctatcagcgc

SEQ ID NO: 355671 - DNA, 30 bp, Artificial Sequence
  Synthetic oligonucleotide
ccgctctaccccggattccgttctcagcgc

SEQ ID NO: 355672 - DNA, 31 bp, Artificial Sequence
  Synthetic oligonucleotide
ggagttctccttgtgggcgaacctagagcgc

SEQ ID NO: 355673 - DNA, 30 bp, Artificial Sequence
  Synthetic oligonucleotide
cccccaaaaatggaagtccatttagagcgc

SEQ ID NO: 355674 - DNA, 30 bp, Artificial Sequence
  Synthetic oligonucleotide
gcagaaatattggtgtggcttaacgagcgc

SEQ ID NO: 355675 - DNA, 30 bp, Artificial Sequence
  Synthetic oligonucleotide
tgacatcaaatggtttattcagccgagcgc

SEQ ID NO: 355676 - DNA, 30 bp, Artificial Sequence
  Synthetic oligonucleotide
acaatctcactgtacgcccgttcggagcgc

SEQ ID NO: 355677 - DNA, 30 bp, Artificial Sequence
  Synthetic oligonucleotide
tcctgtaggccagcaacttggctggagcgc

SEQ ID NO: 355678 - DNA, 30 bp, Artificial Sequence
  Synthetic oligonucleotide
agtcctatcgtggcatcaatggtggagcgc

SEQ ID NO: 355679 - DNA, 30 bp, Artificial Sequence
  Synthetic oligonucleotide
gtcctcaccattgccataaactgtgagcgc

SEQ ID NO: 355680 - DNA, 31 bp, Artificial Sequence
  Synthetic oligonucleotide
ttacaagccacttcttgagaatggatagcgc

SEQ ID NO: 355681 - DNA, 30 bp, Artificial Sequence
  Synthetic oligonucleotide
ttactcactttggaggctgacacgtagcgc

SEQ ID NO: 355682 - DNA, 30 bp, Artificial Sequence
  Synthetic oligonucleotide
gatatgtgaaccgtaaggtttccgtagcgc

SEQ ID NO: 355683 - DNA, 30 bp, Artificial Sequence
  Synthetic oligonucleotide
agactaatgtaatcttggggcttgtagcgc

SEQ ID NO: 355684 - DNA, 30 bp, Artificial Sequence
  Synthetic oligonucleotide
accaaattgtttattcactatccttagcgc

SEQ ID NO: 355685 - DNA, 30 bp, Artificial Sequence
  Synthetic oligonucleotide
gacagagatctttgactacaacgaacgcgc

SEQ ID NO: 355686 - DNA, 30 bp, Artificial Sequence
  Synthetic oligonucleotide
gatttatgtacgatggcccggccgacgcgc

SEQ ID NO: 355687 - DNA, 30 bp, Artificial Sequence
  Synthetic oligonucleotide
ctgcagttacttgacttcactagtacgcgc

SEQ ID NO: 355688 - DNA, 30 bp, Artificial Sequence
  Synthetic oligonucleotide
cacatgtagcgcaatagattctacccgcgc

SEQ ID NO: 355689 - DNA, 30 bp, Artificial Sequence
  Synthetic oligonucleotide
gatggcaccaattatggcgatagcccgcgc

SEQ ID NO: 355690 - DNA, 30 bp, Artificial Sequence
  Synthetic oligonucleotide
caagcactattttaccagggcgagccgcgc

SEQ ID NO: 355691 - DNA, 30 bp, Artificial Sequence
  Synthetic oligonucleotide
atagcatggcctattcgtccaacgccgcgc

SEQ ID NO: 355692 - DNA, 30 bp, Artificial Sequence
  Synthetic oligonucleotide
tagttcaaagtgcacgggtcagggccgcgc

SEQ ID NO: 355693 - DNA, 30 bp, Artificial Sequence
  Synthetic oligonucleotide
tgaggtgtccctcgctagatccttccgcgc

SEQ ID NO: 355694 - DNA, 30 bp, Artificial Sequence
  Synthetic oligonucleotide
ttcaaggccgatttggtggacccagcgcgc

SEQ ID NO: 355695 - DNA, 30 bp, Artificial Sequence
  Synthetic oligonucleotide
gcctcagtcttgcctgaggaatacgcgcgc

SEQ ID NO: 355696 - DNA, 30 bp, Artificial Sequence
  Synthetic oligonucleotide
cccccactgcaatggaggtggaaggcgcgc

SEQ ID NO: 355697 - DNA, 30 bp, Artificial Sequence
  Synthetic oligonucleotide
tcagacagagcggacgaaatttcggcgcgc

SEQ ID NO: 355698 - DNA, 30 bp, Artificial Sequence
  Synthetic oligonucleotide
cctaatttcaatgtggtcttagatgcgcgc

SEQ ID NO: 355699 - DNA, 30 bp, Artificial Sequence
  Synthetic oligonucleotide
gtacacacttggagattcaaaggtgcgcgc

SEQ ID NO: 355700 - DNA, 30 bp, Artificial Sequence
  Synthetic oligonucleotide
agacaactcttacatgcacttgtctcgcgc

SEQ ID NO: 355701 - DNA, 30 bp, Artificial Sequence
  Synthetic oligonucleotide
gctaacgccgggtcgatatttgattcgcgc

SEQ ID NO: 355702 - DNA, 30 bp, Artificial Sequence
  Synthetic oligonucleotide
attaaatgagatagcgtcccgacaaggcgc

SEQ ID NO: 355703 - DNA, 30 bp, Artificial Sequence
  Synthetic oligonucleotide
gggctcgtcccagacctggatacaaggcgc

SEQ ID NO: 355704 - DNA, 30 bp, Artificial Sequence
  Synthetic oligonucleotide
ttagacacgcccgattagtggttaaggcgc

SEQ ID NO: 355705 - DNA, 30 bp, Artificial Sequence
  Synthetic oligonucleotide
gctatgccgtggaacctgggtacgaggcgc

SEQ ID NO: 355706 - DNA, 30 bp, Artificial Sequence
  Synthetic oligonucleotide
gatgtcaaaccgtccagcatatcgaggcgc

SEQ ID NO: 355707 - DNA, 30 bp, Artificial Sequence
  Synthetic oligonucleotide
agcagacacttctctggggttgggaggcgc

SEQ ID NO: 355708 - DNA, 30 bp, Artificial Sequence
  Synthetic oligonucleotide
ttctcgcattaagccaacaaaagtaggcgc

SEQ ID NO: 355709 - DNA, 30 bp, Artificial Sequence
  Synthetic oligonucleotide
cgaagcgaccgaacagtttgcatacggcgc

SEQ ID NO: 355710 - DNA, 30 bp, Artificial Sequence
  Synthetic oligonucleotide
ccgtgggacacccgacccaccctacggcgc

SEQ ID NO: 355711 - DNA, 30 bp, Artificial Sequence
  Synthetic oligonucleotide
gtgcgcgacacggagtaagtcaaccggcgc

SEQ ID NO: 355712 - DNA, 30 bp, Artificial Sequence
  Synthetic oligonucleotide
gcctagacctttcgtgccaaagaccggcgc

SEQ ID NO: 355713 - DNA, 30 bp, Artificial Sequence
  Synthetic oligonucleotide
cccgtgaattcggttgcgaggcagcggcgc

SEQ ID NO: 355714 - DNA, 30 bp, Artificial Sequence
  Synthetic oligonucleotide
gttaaaaggaaaggctaaaatgcgcggcgc

SEQ ID NO: 355715 - DNA, 30 bp, Artificial Sequence
  Synthetic oligonucleotide
tacctcagagcgtcaacccgatggcggcgc

SEQ ID NO: 355716 - DNA, 30 bp, Artificial Sequence
  Synthetic oligonucleotide
cgtcccaagggttaaggcctaaccgggcgc

SEQ ID NO: 355717 - DNA, 30 bp, Artificial Sequence
  Synthetic oligonucleotide
taccaacgctttgtcatggtatccgggcgc

SEQ ID NO: 355718 - DNA, 30 bp, Artificial Sequence
  Synthetic oligonucleotide
acctcatggaggtcacacaccggcgggcgc

SEQ ID NO: 355719 - DNA, 30 bp, Artificial Sequence
  Synthetic oligonucleotide
cggctgcggtttagctgaaccctggggcgc

SEQ ID NO: 355720 - DNA, 30 bp, Artificial Sequence
  Synthetic oligonucleotide
agcacttgaccaaatgggctcgtggggcgc

SEQ ID NO: 355721 - DNA, 30 bp, Artificial Sequence
  Synthetic oligonucleotide
tcttagagtacgagatgtaatttggggcgc

SEQ ID NO: 355722 - DNA, 30 bp, Artificial Sequence
  Synthetic oligonucleotide
ttatcctaatcacagagaacgtgtgggcgc

SEQ ID NO: 355723 - DNA, 30 bp, Artificial Sequence
  Synthetic oligonucleotide
ggcgagctgcaagaccatgcccttgggcgc

SEQ ID NO: 355724 - DNA, 30 bp, Artificial Sequence
  Synthetic oligonucleotide
cttcaccaaaaaacaactgccgcctggcgc

SEQ ID NO: 355725 - DNA, 30 bp, Artificial Sequence
  Synthetic oligonucleotide
ttggctgaccttgatgatcgggggtggcgc

SEQ ID NO: 355726 - DNA, 30 bp, Artificial Sequence
  Synthetic oligonucleotide
aacattgttgcgacgggcggctaaatgcgc

SEQ ID NO: 355727 - DNA, 30 bp, Artificial Sequence
  Synthetic oligonucleotide
cgtgggcgtccgcagcggaagctaatgcgc

SEQ ID NO: 355728 - DNA, 30 bp, Artificial Sequence
  Synthetic oligonucleotide
aacgacgtttgtaccttccgcgtaatgcgc

SEQ ID NO: 355729 - DNA, 30 bp, Artificial Sequence
  Synthetic oligonucleotide
tgcaaggttgcgtaggggaaaaccatgcgc

SEQ ID NO: 355730 - DNA, 30 bp, Artificial Sequence
  Synthetic oligonucleotide
cgcgaccgggcatctccgccacgcatgcgc

SEQ ID NO: 355731 - DNA, 30 bp, Artificial Sequence
  Synthetic oligonucleotide
cgggttttcatataataggttgggatgcgc

SEQ ID NO: 355732 - DNA, 30 bp, Artificial Sequence
  Synthetic oligonucleotide
tacgatttgctaatactcactagtatgcgc

SEQ ID NO: 355733 - DNA, 30 bp, Artificial Sequence
  Synthetic oligonucleotide
gtcagccagggttgccagcacattatgcgc

SEQ ID NO: 355734 - DNA, 30 bp, Artificial Sequence
  Synthetic oligonucleotide
ttagtgtattccaagggtgaacacctgcgc

SEQ ID NO: 355735 - DNA, 30 bp, Artificial Sequence
  Synthetic oligonucleotide
atgtctagtcggcttgcactcgccctgcgc

SEQ ID NO: 355736 - DNA, 30 bp, Artificial Sequence
  Synthetic oligonucleotide
ttttagggaagtgacaccggcccagtgcgc

SEQ ID NO: 355737 - DNA, 30 bp, Artificial Sequence
  Synthetic oligonucleotide
aacagaaccagttaagccgcagtggtgcgc

SEQ ID NO: 355738 - DNA, 30 bp, Artificial Sequence
  Synthetic oligonucleotide
ccgaggcttgtcccgcaaggtttggtgcgc

SEQ ID NO: 355739 - DNA, 30 bp, Artificial Sequence
  Synthetic oligonucleotide
tcagcatccggacctttagaaacattgcgc

SEQ ID NO: 355740 - DNA, 30 bp, Artificial Sequence
  Synthetic oligonucleotide
tgtatctgggggagttcgggcgtattgcgc

SEQ ID NO: 355741 - DNA, 30 bp, Artificial Sequence
  Synthetic oligonucleotide
gactgtatagctattctagtgagcttgcgc

SEQ ID NO: 355742 - DNA, 30 bp, Artificial Sequence
  Synthetic oligonucleotide
agttgatagagggcaatcgggttcttgcgc

SEQ ID NO: 355743 - DNA, 30 bp, Artificial Sequence
  Synthetic oligonucleotide
gcttcggctgtattccggtatgaaaatcgc

SEQ ID NO: 355744 - DNA, 40 bp, Artificial Sequence
  Synthetic oligonucleotide
aaattgttcttagctagagatccctcacgtcacaaatcgc

SEQ ID NO: 355745 - DNA, 30 bp, Artificial Sequence
  Synthetic oligonucleotide
gacgcatgcacttgaactgcaggcaatcgc

SEQ ID NO: 355746 - DNA, 30 bp, Artificial Sequence
  Synthetic oligonucleotide
ttattgcagggagcatacggtgcgaatcgc

SEQ ID NO: 355747 - DNA, 30 bp, Artificial Sequence
  Synthetic oligonucleotide
atctggtcattgctgtaattagtgaatcgc

SEQ ID NO: 355748 - DNA, 30 bp, Artificial Sequence
  Synthetic oligonucleotide
agtgcgccctcgttcaacttcgtgaatcgc

SEQ ID NO: 355749 - DNA, 30 bp, Artificial Sequence
  Synthetic oligonucleotide
tctaaacaaatacagcttatgtctaatcgc

SEQ ID NO: 355750 - DNA, 30 bp, Artificial Sequence
  Synthetic oligonucleotide
aattgttgctccttcaccgcgccacatcgc

SEQ ID NO: 355751 - DNA, 30 bp, Artificial Sequence
  Synthetic oligonucleotide
actcagtacggagaaggagggtcgcatcgc

SEQ ID NO: 355752 - DNA, 30 bp, Artificial Sequence
  Synthetic oligonucleotide
cagatgccagaaactggatcggtgcatcgc

SEQ ID NO: 355753 - DNA, 30 bp, Artificial Sequence
  Synthetic oligonucleotide
gctcgaggtggcaacggtggatctcatcgc

SEQ ID NO: 355754 - DNA, 30 bp, Artificial Sequence
  Synthetic oligonucleotide
attgagtaaataatcaattagagagatcgc

SEQ ID NO: 355755 - DNA, 30 bp, Artificial Sequence
  Synthetic oligonucleotide
ttcgacccggaggcatacaggaccgatcgc

SEQ ID NO: 355756 - DNA, 30 bp, Artificial Sequence
  Synthetic oligonucleotide
agtcggaggcctgacagaataggcgatcgc

SEQ ID NO: 355757 - DNA, 30 bp, Artificial Sequence
  Synthetic oligonucleotide
ttccgctaattatgatgtcaccaggatcgc

SEQ ID NO: 355758 - DNA, 30 bp, Artificial Sequence
  Synthetic oligonucleotide
tgtggttgcggcgtacgtatactggatcgc

SEQ ID NO: 355759 - DNA, 30 bp, Artificial Sequence
  Synthetic oligonucleotide
ttgagtgtcggcggataatggtgtgatcgc

SEQ ID NO: 355760 - DNA, 30 bp, Artificial Sequence
  Synthetic oligonucleotide
gacgaaatataaaccctatttgcatatcgc

SEQ ID NO: 355761 - DNA, 30 bp, Artificial Sequence
  Synthetic oligonucleotide
atcaagcttccatctagggtcatatatcgc

SEQ ID NO: 355762 - DNA, 30 bp, Artificial Sequence
  Synthetic oligonucleotide
aagagaaactgtgcaacccgtcgctatcgc

SEQ ID NO: 355763 - DNA, 30 bp, Artificial Sequence
  Synthetic oligonucleotide
gccccgcgaagctaaatagacatctatcgc

SEQ ID NO: 355764 - DNA, 30 bp, Artificial Sequence
  Synthetic oligonucleotide
tcctcggctccctggcaacaaagcactcgc

SEQ ID NO: 355765 - DNA, 30 bp, Artificial Sequence
  Synthetic oligonucleotide
gaaactcccctggattggggggtgactcgc

SEQ ID NO: 355766 - DNA, 30 bp, Artificial Sequence
  Synthetic oligonucleotide
ctagtcggccgataatcagcgcctactcgc

SEQ ID NO: 355767 - DNA, 30 bp, Artificial Sequence
  Synthetic oligonucleotide
gagtaggctgggcactgtatcagccctcgc

SEQ ID NO: 355768 - DNA, 30 bp, Artificial Sequence
  Synthetic oligonucleotide
ttcacaaatcaaattgggattcagcctcgc

SEQ ID NO: 355769 - DNA, 30 bp, Artificial Sequence
  Synthetic oligonucleotide
aggtattatgcagtacacacctagcctcgc

SEQ ID NO: 355770 - DNA, 30 bp, Artificial Sequence
  Synthetic oligonucleotide
cggtcgcaacgcgacctggagactcctcgc

SEQ ID NO: 355771 - DNA, 30 bp, Artificial Sequence
  Synthetic oligonucleotide
ttgattgcagcacactgcagggttcctcgc

SEQ ID NO: 355772 - DNA, 30 bp, Artificial Sequence
  Synthetic oligonucleotide
caacgcagaacactgtgccacactgctcgc

SEQ ID NO: 355773 - DNA, 30 bp, Artificial Sequence
  Synthetic oligonucleotide
tccgtgagtgctataatctcgggatctcgc

SEQ ID NO: 355774 - DNA, 30 bp, Artificial Sequence
  Synthetic oligonucleotide
cagttaacttaggtttaaggcccgtctcgc

SEQ ID NO: 355775 - DNA, 30 bp, Artificial Sequence
  Synthetic oligonucleotide
tacactacccttacctcttctccgtctcgc

SEQ ID NO: 355776 - DNA, 30 bp, Artificial Sequence
  Synthetic oligonucleotide
aagatgagcctctgttaagattcgtctcgc

SEQ ID NO: 355777 - DNA, 30 bp, Artificial Sequence
  Synthetic oligonucleotide
atcgctagaggcccagctatcctgtctcgc

SEQ ID NO: 355778 - DNA, 30 bp, Artificial Sequence
  Synthetic oligonucleotide
gcgcccggactagaaatgggtcgaagtcgc

SEQ ID NO: 355779 - DNA, 30 bp, Artificial Sequence
  Synthetic oligonucleotide
cggctgactgggggacttgtcagcagtcgc

SEQ ID NO: 355780 - DNA, 30 bp, Artificial Sequence
  Synthetic oligonucleotide
cgtaaatccccttacggaggtaaacgtcgc

SEQ ID NO: 355781 - DNA, 30 bp, Artificial Sequence
  Synthetic oligonucleotide
ttttcgtgaggcgtaaatagtaaccgtcgc

SEQ ID NO: 355782 - DNA, 30 bp, Artificial Sequence
  Synthetic oligonucleotide
tcacactatctgggagcgctgggtcgtcgc

SEQ ID NO: 355783 - DNA, 30 bp, Artificial Sequence
  Synthetic oligonucleotide
tgtgggggagggtcctgtctcacaggtcgc

SEQ ID NO: 355784 - DNA, 30 bp, Artificial Sequence
  Synthetic oligonucleotide
tacggttggcagcatccagcgtcaggtcgc

SEQ ID NO: 355785 - DNA, 30 bp, Artificial Sequence
  Synthetic oligonucleotide
gtaaacggttcgcgcgcgagccacggtcgc

SEQ ID NO: 355786 - DNA, 30 bp, Artificial Sequence
  Synthetic oligonucleotide
gctgtttgctgatacggcttcgtgggtcgc

SEQ ID NO: 355787 - DNA, 30 bp, Artificial Sequence
  Synthetic oligonucleotide
gctggttaggggacaactggtacatgtcgc

SEQ ID NO: 355788 - DNA, 30 bp, Artificial Sequence
  Synthetic oligonucleotide
acgagaacgccctacttgttaatctgtcgc

SEQ ID NO: 355789 - DNA, 30 bp, Artificial Sequence
  Synthetic oligonucleotide
aacgtcacgtatccgggctttctgtgtcgc

SEQ ID NO: 355790 - DNA, 30 bp, Artificial Sequence
  Synthetic oligonucleotide
tattgtctatttggcgtatgcacttgtcgc

SEQ ID NO: 355791 - DNA, 30 bp, Artificial Sequence
  Synthetic oligonucleotide
gtgctataaaatccggaatggccttgtcgc

SEQ ID NO: 355792 - DNA, 30 bp, Artificial Sequence
  Synthetic oligonucleotide
gaagatttggccgatccggctatttgtcgc

SEQ ID NO: 355793 - DNA, 30 bp, Artificial Sequence
  Synthetic oligonucleotide
tatgtggtgagtggggtattggtttgtcgc

SEQ ID NO: 355794 - DNA, 30 bp, Artificial Sequence
  Synthetic oligonucleotide
attacatagaatctgtcactgcccattcgc

SEQ ID NO: 355795 - DNA, 30 bp, Artificial Sequence
  Synthetic oligonucleotide
gtgcgctatgcgaaacgtatgctcattcgc

SEQ ID NO: 355796 - DNA, 30 bp, Artificial Sequence
  Synthetic oligonucleotide
agaagtcggagacgagccaaagtcattcgc

SEQ ID NO: 355797 - DNA, 30 bp, Artificial Sequence
  Synthetic oligonucleotide
tgcccgtgcatgtgacaccagctgattcgc

SEQ ID NO: 355798 - DNA, 30 bp, Artificial Sequence
  Synthetic oligonucleotide
gattcgtgctcgtcatcttacagtattcgc

SEQ ID NO: 355799 - DNA, 30 bp, Artificial Sequence
  Synthetic oligonucleotide
ccgggagcagctgtctcttcaatacttcgc

SEQ ID NO: 355800 - DNA, 30 bp, Artificial Sequence
  Synthetic oligonucleotide
gataagggaagcgtgtctcctttacttcgc

SEQ ID NO: 355801 - DNA, 30 bp, Artificial Sequence
  Synthetic oligonucleotide
tcacaagtctcgtatctatatcaccttcgc

SEQ ID NO: 355802 - DNA, 30 bp, Artificial Sequence
  Synthetic oligonucleotide
tgatccattccaggagttttgtaccttcgc

SEQ ID NO: 355803 - DNA, 30 bp, Artificial Sequence
  Synthetic oligonucleotide
ctatcattagtgtatgctacgtcccttcgc

SEQ ID NO: 355804 - DNA, 30 bp, Artificial Sequence
  Synthetic oligonucleotide
ccccactgtaagtgtgggcctctccttcgc

SEQ ID NO: 355805 - DNA, 30 bp, Artificial Sequence
  Synthetic oligonucleotide
ggcgggctattccctaggtctgtgcttcgc

SEQ ID NO: 355806 - DNA, 30 bp, Artificial Sequence
  Synthetic oligonucleotide
aagttgtccatactctgtagacaggttcgc

SEQ ID NO: 355807 - DNA, 30 bp, Artificial Sequence
  Synthetic oligonucleotide
ctcgctccgggatccaggttcgtatttcgc

SEQ ID NO: 355808 - DNA, 30 bp, Artificial Sequence
  Synthetic oligonucleotide
tctttgtcgaattcgtgcgcatagtttcgc

SEQ ID NO: 355809 - DNA, 30 bp, Artificial Sequence
  Synthetic oligonucleotide
tcagaaatcaaggccgaccgagtgtttcgc

SEQ ID NO: 355810 - DNA, 30 bp, Artificial Sequence
  Synthetic oligonucleotide
taccttggcccggagatgtcgttgtttcgc

SEQ ID NO: 355811 - DNA, 30 bp, Artificial Sequence
  Synthetic oligonucleotide
cacgaaaatgcctttctcggatattttcgc

SEQ ID NO: 355812 - DNA, 30 bp, Artificial Sequence
  Synthetic oligonucleotide
cggtaacgtgatgtttttcattgaaaaggc

SEQ ID NO: 355813 - DNA, 30 bp, Artificial Sequence
  Synthetic oligonucleotide
gtccccggcgtgtgtaaccataccaaaggc

SEQ ID NO: 355814 - DNA, 30 bp, Artificial Sequence
  Synthetic oligonucleotide
tgtccgtagcatgtatccatgtcgaaaggc

SEQ ID NO: 355815 - DNA, 30 bp, Artificial Sequence
  Synthetic oligonucleotide
ggaatcttccccgcggcaaagggtaaaggc

SEQ ID NO: 355816 - DNA, 30 bp, Artificial Sequence
  Synthetic oligonucleotide
ttagcgcaacgacggcctaaatcacaaggc

SEQ ID NO: 355817 - DNA, 30 bp, Artificial Sequence
  Synthetic oligonucleotide
accggcctgcggggcagatgttagcaaggc

SEQ ID NO: 355818 - DNA, 30 bp, Artificial Sequence
  Synthetic oligonucleotide
tgggggaatcttttcttttttacagaaggc

SEQ ID NO: 355819 - DNA, 30 bp, Artificial Sequence
  Synthetic oligonucleotide
aattaacaacttaagtggtatcacgaaggc

SEQ ID NO: 355820 - DNA, 30 bp, Artificial Sequence
  Synthetic oligonucleotide
tctatacctaaacgaagacgcatcgaaggc

SEQ ID NO: 355821 - DNA, 30 bp, Artificial Sequence
  Synthetic oligonucleotide
gcgtgtgttgcatatatcaccaaggaaggc

SEQ ID NO: 355822 - DNA, 30 bp, Artificial Sequence
  Synthetic oligonucleotide
gattgagctgacccctcagcggaggaaggc

SEQ ID NO: 355823 - DNA, 30 bp, Artificial Sequence
  Synthetic oligonucleotide
tttgagcatggtaccggaagcgcggaaggc

SEQ ID NO: 355824 - DNA, 30 bp, Artificial Sequence
  Synthetic oligonucleotide
agggttggaggaatttgtttggcggaaggc

SEQ ID NO: 355825 - DNA, 30 bp, Artificial Sequence
  Synthetic oligonucleotide
tcgctataaggtttcgggcaaagggaaggc

SEQ ID NO: 355826 - DNA, 30 bp, Artificial Sequence
  Synthetic oligonucleotide
tcttgaccagcgtaggtatctctggaaggc

SEQ ID NO: 355827 - DNA, 30 bp, Artificial Sequence
  Synthetic oligonucleotide
gtctgacatagcatacacccacatgaaggc

SEQ ID NO: 355828 - DNA, 30 bp, Artificial Sequence
  Synthetic oligonucleotide
aacccgtcctccctgtgtagctcataaggc

SEQ ID NO: 355829 - DNA, 30 bp, Artificial Sequence
  Synthetic oligonucleotide
tgtagaattcggcatctagaggcctaaggc

SEQ ID NO: 355830 - DNA, 30 bp, Artificial Sequence
  Synthetic oligonucleotide
ttttaaatccattatggctacagctaaggc

SEQ ID NO: 355831 - DNA, 30 bp, Artificial Sequence
  Synthetic oligonucleotide
tgtagagtagctgtccctgacggctaaggc

SEQ ID NO: 355832 - DNA, 30 bp, Artificial Sequence
  Synthetic oligonucleotide
ctgattaaacgaagcctaacgaagtaaggc

SEQ ID NO: 355833 - DNA, 30 bp, Artificial Sequence
  Synthetic oligonucleotide
ttacataggtaagcagactctaggtaaggc

SEQ ID NO: 355834 - DNA, 30 bp, Artificial Sequence
  Synthetic oligonucleotide
tagaacatcaccgcgtctctcatgtaaggc

SEQ ID NO: 355835 - DNA, 30 bp, Artificial Sequence
  Synthetic oligonucleotide
cctagcaacggacaaattcatgtgtaaggc

SEQ ID NO: 355836 - DNA, 30 bp, Artificial Sequence
  Synthetic oligonucleotide
gtgattttagaggcacgtacaaattaaggc

SEQ ID NO: 355837 - DNA, 30 bp, Artificial Sequence
  Synthetic oligonucleotide
tactaccgtgaagcttctgcaacttaaggc

SEQ ID NO: 355838 - DNA, 30 bp, Artificial Sequence
  Synthetic oligonucleotide
cgcataggtatgggtgaactcccttaaggc

SEQ ID NO: 355839 - DNA, 30 bp, Artificial Sequence
  Synthetic oligonucleotide
acgcatgcccatgtatagatcttttaaggc

SEQ ID NO: 355840 - DNA, 30 bp, Artificial Sequence
  Synthetic oligonucleotide
tatgccagataaccagttaggttttaaggc

SEQ ID NO: 355841 - DNA, 30 bp, Artificial Sequence
  Synthetic oligonucleotide
gcatgtagtaacccaaggagcccaacaggc

SEQ ID NO: 355842 - DNA, 30 bp, Artificial Sequence
  Synthetic oligonucleotide
acaaagatgtcccatcgtggactaacaggc

SEQ ID NO: 355843 - DNA, 30 bp, Artificial Sequence
  Synthetic oligonucleotide
atacatagtaaatgtagtcgtgtcacaggc

SEQ ID NO: 355844 - DNA, 29 bp, Artificial Sequence
  Synthetic oligonucleotide
gtgcgaatgcctacactcagcagacaggc

SEQ ID NO: 355845 - DNA, 30 bp, Artificial Sequence
  Synthetic oligonucleotide
ggctgttcgttgaagaccacgcggacaggc

SEQ ID NO: 355846 - DNA, 30 bp, Artificial Sequence
  Synthetic oligonucleotide
tcgtgtcaccagggaccggtagaaccaggc

SEQ ID NO: 355847 - DNA, 30 bp, Artificial Sequence
  Synthetic oligonucleotide
cagtggtctatctctgcaacgttaccaggc

SEQ ID NO: 355848 - DNA, 30 bp, Artificial Sequence
  Synthetic oligonucleotide
ccttgtcaaaatggattactgcagccaggc

SEQ ID NO: 355849 - DNA, 31 bp, Artificial Sequence
  Synthetic oligonucleotide
cttgccggatcggaagggactatctccaggc

SEQ ID NO: 355850 - DNA, 30 bp, Artificial Sequence
  Synthetic oligonucleotide
gtttcatatttgacctgcagctcagcaggc

SEQ ID NO: 355851 - DNA, 30 bp, Artificial Sequence
  Synthetic oligonucleotide
tatcatttttgttcggcaccgggagcaggc

SEQ ID NO: 355852 - DNA, 30 bp, Artificial Sequence
  Synthetic oligonucleotide
tacggcgtggtaggttgtctggtcgcaggc

SEQ ID NO: 355853 - DNA, 30 bp, Artificial Sequence
  Synthetic oligonucleotide
gtaatactcgctctaatagtactggcaggc

SEQ ID NO: 355854 - DNA, 30 bp, Artificial Sequence
  Synthetic oligonucleotide
gacggtaggagtcttctgtactcctcaggc

SEQ ID NO: 355855 - DNA, 30 bp, Artificial Sequence
  Synthetic oligonucleotide
agcttgtgttgcagctgtcggtcctcaggc

SEQ ID NO: 355856 - DNA, 30 bp, Artificial Sequence
  Synthetic oligonucleotide
cactacaaaatcggcttcccgcagtcaggc

SEQ ID NO: 355857 - DNA, 30 bp, Artificial Sequence
  Synthetic oligonucleotide
agtgaagcccctcatgatgtgtagtcaggc

SEQ ID NO: 355858 - DNA, 30 bp, Artificial Sequence
  Synthetic oligonucleotide
agaaggattctacataggtatcggtcaggc

SEQ ID NO: 355859 - DNA, 30 bp, Artificial Sequence
  Synthetic oligonucleotide
gcctaaaccataatacaggtatggtcaggc

SEQ ID NO: 355860 - DNA, 30 bp, Artificial Sequence
  Synthetic oligonucleotide
acggctaaattgtgtttgccgctgtcaggc

SEQ ID NO: 355861 - DNA, 30 bp, Artificial Sequence
  Synthetic oligonucleotide
agaaccggcataattaggaggctgtcaggc

SEQ ID NO: 355862 - DNA, 30 bp, Artificial Sequence
  Synthetic oligonucleotide
agttataaaaggagttaagtttcttcaggc

SEQ ID NO: 355863 - DNA, 30 bp, Artificial Sequence
  Synthetic oligonucleotide
cggaccaaccaggtgccccgtagttcaggc

SEQ ID NO: 355864 - DNA, 30 bp, Artificial Sequence
  Synthetic oligonucleotide
aactaagggcatgatcttgccggaagaggc

SEQ ID NO: 355865 - DNA, 30 bp, Artificial Sequence
  Synthetic oligonucleotide
actgacacgggacggccttttagcagaggc

SEQ ID NO: 355866 - DNA, 30 bp, Artificial Sequence
  Synthetic oligonucleotide
taagtgtcaggttaagcgcccgtcagaggc

SEQ ID NO: 355867 - DNA, 31 bp, Artificial Sequence
  Synthetic oligonucleotide
aggccggtgaaacacttcactgtatagaggc

SEQ ID NO: 355868 - DNA, 30 bp, Artificial Sequence
  Synthetic oligonucleotide
ctagctaccatgaactacgggattagaggc

SEQ ID NO: 355869 - DNA, 30 bp, Artificial Sequence
  Synthetic oligonucleotide
atgacaagtctatatcatcctgttcgaggc

SEQ ID NO: 355870 - DNA, 30 bp, Artificial Sequence
  Synthetic oligonucleotide
aaggtgctacacatatgtcagtacggaggc

SEQ ID NO: 355871 - DNA, 31 bp, Artificial Sequence
  Synthetic oligonucleotide
tcacttgtagattgtgtcccacaagggaggc

SEQ ID NO: 355872 - DNA, 30 bp, Artificial Sequence
  Synthetic oligonucleotide
ttctggctgctcctataggtcaagggaggc

SEQ ID NO: 355873 - DNA, 30 bp, Artificial Sequence
  Synthetic oligonucleotide
agggtgaacgtcatcaagcgttagggaggc

SEQ ID NO: 355874 - DNA, 30 bp, Artificial Sequence
  Synthetic oligonucleotide
gtgtgcgtcgcccgccatttgaatggaggc

SEQ ID NO: 355875 - DNA, 30 bp, Artificial Sequence
  Synthetic oligonucleotide
ttgtcgaaactcaggacagttactggaggc

SEQ ID NO: 355876 - DNA, 30 bp, Artificial Sequence
  Synthetic oligonucleotide
gcagtgtggcgcgatggtacaacctgaggc

SEQ ID NO: 355877 - DNA, 30 bp, Artificial Sequence
  Synthetic oligonucleotide
ggctttgaatctatactttgcagctgaggc

SEQ ID NO: 355878 - DNA, 30 bp, Artificial Sequence
  Synthetic oligonucleotide
atctctgaactgcaggtagaggtctgaggc

SEQ ID NO: 355879 - DNA, 30 bp, Artificial Sequence
  Synthetic oligonucleotide
ttgctacgctatcccgtcaaagaaataggc

SEQ ID NO: 355880 - DNA, 30 bp, Artificial Sequence
  Synthetic oligonucleotide
ggctcaggtatttgagactcgtgaataggc

SEQ ID NO: 355881 - DNA, 30 bp, Artificial Sequence
  Synthetic oligonucleotide
catggtctgattggaatgtattgaataggc

SEQ ID NO: 355882 - DNA, 30 bp, Artificial Sequence
  Synthetic oligonucleotide
gtgatcggcagacgcggactgaacataggc

SEQ ID NO: 355883 - DNA, 30 bp, Artificial Sequence
  Synthetic oligonucleotide
gtgataaagtgaaacttgacggcgataggc

SEQ ID NO: 355884 - DNA, 30 bp, Artificial Sequence
  Synthetic oligonucleotide
acgcggagataacgcattacagaactaggc

SEQ ID NO: 355885 - DNA, 30 bp, Artificial Sequence
  Synthetic oligonucleotide
tcgttgcgcctcgtcgacttgtaactaggc

SEQ ID NO: 355886 - DNA, 30 bp, Artificial Sequence
  Synthetic oligonucleotide
cgaagggtaacggggggttagccactaggc

SEQ ID NO: 355887 - DNA, 30 bp, Artificial Sequence
  Synthetic oligonucleotide
aggcctaaatttttggtgttaggcctaggc

SEQ ID NO: 355888 - DNA, 30 bp, Artificial Sequence
  Synthetic oligonucleotide
gtaggtctctaatctaacacgtagctaggc

SEQ ID NO: 355889 - DNA, 30 bp, Artificial Sequence
  Synthetic oligonucleotide
tgcctgttaagaagtatgttcaggctaggc

SEQ ID NO: 355890 - DNA, 30 bp, Artificial Sequence
  Synthetic oligonucleotide
cgtgcgcccggttcctcacctctagtaggc

SEQ ID NO: 355891 - DNA, 30 bp, Artificial Sequence
  Synthetic oligonucleotide
agctggcaacgcctatcattaatcgtaggc

SEQ ID NO: 355892 - DNA, 30 bp, Artificial Sequence
  Synthetic oligonucleotide
ccaattgaaataacctattcaacggtaggc

SEQ ID NO: 355893 - DNA, 30 bp, Artificial Sequence
  Synthetic oligonucleotide
ttccaaacggccactgacgtttgggtaggc

SEQ ID NO: 355894 - DNA, 30 bp, Artificial Sequence
  Synthetic oligonucleotide
taaatccgaattcatgtccagtctgtaggc

SEQ ID NO: 355895 - DNA, 30 bp, Artificial Sequence
  Synthetic oligonucleotide
tgatagaacaaggtgcttgccattgtaggc

SEQ ID NO: 355896 - DNA, 30 bp, Artificial Sequence
  Synthetic oligonucleotide
atctcggtgcgtctttaattggttgtaggc

SEQ ID NO: 355897 - DNA, 30 bp, Artificial Sequence
  Synthetic oligonucleotide
gttatgagcatcctgtgccacgaattaggc

SEQ ID NO: 355898 - DNA, 30 bp, Artificial Sequence
  Synthetic oligonucleotide
cacatttcactcatgctggtgtaattaggc

SEQ ID NO: 355899 - DNA, 30 bp, Artificial Sequence
  Synthetic oligonucleotide
tgtcaataccctagacggacaacattaggc

SEQ ID NO: 355900 - DNA, 30 bp, Artificial Sequence
  Synthetic oligonucleotide
gcagctggctgctgcaacttagtattaggc

SEQ ID NO: 355901 - DNA, 30 bp, Artificial Sequence
  Synthetic oligonucleotide
taggttaggtatgaatgatctagcttaggc

SEQ ID NO: 355902 - DNA, 30 bp, Artificial Sequence
  Synthetic oligonucleotide
ctgcgtgcaacgccttagtcggtcttaggc

SEQ ID NO: 355903 - DNA, 30 bp, Artificial Sequence
  Synthetic oligonucleotide
tccaaaacgcgagaaggaatttagttaggc

SEQ ID NO: 355904 - DNA, 30 bp, Artificial Sequence
  Synthetic oligonucleotide
ctgtaacctgagacggggtgccaaaacggc

SEQ ID NO: 355905 - DNA, 30 bp, Artificial Sequence
  Synthetic oligonucleotide
gaaagccggaaggatctgcattcaaacggc

SEQ ID NO: 355906 - DNA, 30 bp, Artificial Sequence
  Synthetic oligonucleotide
cggaagcaatttgttatgcttatgaacggc

SEQ ID NO: 355907 - DNA, 30 bp, Artificial Sequence
  Synthetic oligonucleotide
ggtgagggttaagcaggactttgtaacggc

SEQ ID NO: 355908 - DNA, 30 bp, Artificial Sequence
  Synthetic oligonucleotide
accaaaacaatcacattttgcattaacggc

SEQ ID NO: 355909 - DNA, 30 bp, Artificial Sequence
  Synthetic oligonucleotide
aatgaacagtttcgtcacccaccacacggc

SEQ ID NO: 355910 - DNA, 30 bp, Artificial Sequence
  Synthetic oligonucleotide
tcttttcgggatttggcggcattacacggc

SEQ ID NO: 355911 - DNA, 30 bp, Artificial Sequence
  Synthetic oligonucleotide
cgactttgcaaaagaatttgataccacggc

SEQ ID NO: 355912 - DNA, 30 bp, Artificial Sequence
  Synthetic oligonucleotide
gggaattgacttcaatttgataatcacggc

SEQ ID NO: 355913 - DNA, 30 bp, Artificial Sequence
  Synthetic oligonucleotide
accggaagtcgcttcctcaagcctcacggc

SEQ ID NO: 355914 - DNA, 30 bp, Artificial Sequence
  Synthetic oligonucleotide
catatatatgtaaacactcttaaagacggc

SEQ ID NO: 355915 - DNA, 30 bp, Artificial Sequence
  Synthetic oligonucleotide
acgaattaggtgctgtttatggaagacggc

SEQ ID NO: 355916 - DNA, 30 bp, Artificial Sequence
  Synthetic oligonucleotide
tgactgtgtcagtatggggtggaagacggc

SEQ ID NO: 355917 - DNA, 30 bp, Artificial Sequence
  Synthetic oligonucleotide
aacgccaggtagcccgaagttagagacggc

SEQ ID NO: 355918 - DNA, 30 bp, Artificial Sequence
  Synthetic oligonucleotide
ctttactcaacggtttggggatgagacggc

SEQ ID NO: 355919 - DNA, 30 bp, Artificial Sequence
  Synthetic oligonucleotide
gaaaaagtaaggcttaggcgtcacgacggc

SEQ ID NO: 355920 - DNA, 30 bp, Artificial Sequence
  Synthetic oligonucleotide
tcaccccagtgctttacctccttcgacggc

SEQ ID NO: 355921 - DNA, 30 bp, Artificial Sequence
  Synthetic oligonucleotide
ttaggatctagccagagtttgtcggacggc

SEQ ID NO: 355922 - DNA, 30 bp, Artificial Sequence
  Synthetic oligonucleotide
acagattaggtcccggcagtgcgggacggc

SEQ ID NO: 355923 - DNA, 30 bp, Artificial Sequence
  Synthetic oligonucleotide
gaacggggttgaagccccgatcttgacggc

SEQ ID NO: 355924 - DNA, 30 bp, Artificial Sequence
  Synthetic oligonucleotide
agatacgattctattattcatgcatacggc

SEQ ID NO: 355925 - DNA, 30 bp, Artificial Sequence
  Synthetic oligonucleotide
aacaagcgttatggtgaatctgcctacggc

SEQ ID NO: 355926 - DNA, 30 bp, Artificial Sequence
  Synthetic oligonucleotide
gtaactgccccttgagcggcccgctacggc

SEQ ID NO: 355927 - DNA, 30 bp, Artificial Sequence
  Synthetic oligonucleotide
aaacgtttacgacgtttatgaggctacggc

SEQ ID NO: 355928 - DNA, 30 bp, Artificial Sequence
  Synthetic oligonucleotide
aaggtactgggctggtttggaaagtacggc

SEQ ID NO: 355929 - DNA, 30 bp, Artificial Sequence
  Synthetic oligonucleotide
gggggatttcggcaggaattttagtacggc

SEQ ID NO: 355930 - DNA, 30 bp, Artificial Sequence
  Synthetic oligonucleotide
ttaaaagcaagacaagctcacacgtacggc

SEQ ID NO: 355931 - DNA, 30 bp, Artificial Sequence
  Synthetic oligonucleotide
gcgggtcgggttacggggaacaattacggc

SEQ ID NO: 355932 - DNA, 30 bp, Artificial Sequence
  Synthetic oligonucleotide
aacgtgcggtcctcccactatcaaaccggc

SEQ ID NO: 355933 - DNA, 30 bp, Artificial Sequence
  Synthetic oligonucleotide
attacttaaggtaactattactccaccggc

SEQ ID NO: 355934 - DNA, 30 bp, Artificial Sequence
  Synthetic oligonucleotide
ccgtggactgtgaagtcaccgctcaccggc

SEQ ID NO: 355935 - DNA, 30 bp, Artificial Sequence
  Synthetic oligonucleotide
agctttacgatgagtccctgaatgaccggc

SEQ ID NO: 355936 - DNA, 30 bp, Artificial Sequence
  Synthetic oligonucleotide
ggattacgaactttgttgtggtataccggc

SEQ ID NO: 355937 - DNA, 31 bp, Artificial Sequence
  Synthetic oligonucleotide
gccagcgaagtatccacaaaaccttaccggc

SEQ ID NO: 355938 - DNA, 30 bp, Artificial Sequence
  Synthetic oligonucleotide
tagacctgcaaagcgcggggggcacccggc

SEQ ID NO: 355939 - DNA, 30 bp, Artificial Sequence
  Synthetic oligonucleotide
gacttcaagcagtctagtctattacccggc

SEQ ID NO: 355940 - DNA, 30 bp, Artificial Sequence
  Synthetic oligonucleotide
tttaccgatgatgaggtgatacagcccggc

SEQ ID NO: 355941 - DNA, 30 bp, Artificial Sequence
  Synthetic oligonucleotide
aggcgggcgttgagactatagtcgcccggc

SEQ ID NO: 355942 - DNA, 30 bp, Artificial Sequence
  Synthetic oligonucleotide
atacggatgtgacacgcggtcaggcccggc

SEQ ID NO: 355943 - DNA, 30 bp, Artificial Sequence
  Synthetic oligonucleotide
gaatagcggtctgtatacagggcagccggc

SEQ ID NO: 355944 - DNA, 30 bp, Artificial Sequence
  Synthetic oligonucleotide
cgcccggggcgcaagtaattccgggccggc

SEQ ID NO: 355945 - DNA, 30 bp, Artificial Sequence
  Synthetic oligonucleotide
atggttttcgtgtcaatcagaaatgccggc

SEQ ID NO: 355946 - DNA, 30 bp, Artificial Sequence
  Synthetic oligonucleotide
gttcttcatcaaacaaatgtacctgccggc

SEQ ID NO: 355947 - DNA, 30 bp, Artificial Sequence
  Synthetic oligonucleotide
agtctttgcattatgggaagctactccggc

SEQ ID NO: 355948 - DNA, 30 bp, Artificial Sequence
  Synthetic oligonucleotide
agccacgcgtgtttttgactgcattccggc

SEQ ID NO: 355949 - DNA, 30 bp, Artificial Sequence
  Synthetic oligonucleotide
aaatgttgatgcattcacatcaacagcggc

SEQ ID NO: 355950 - DNA, 30 bp, Artificial Sequence
  Synthetic oligonucleotide
ttaatgttctgtatttgtcaggtcagcggc

SEQ ID NO: 355951 - DNA, 30 bp, Artificial Sequence
  Synthetic oligonucleotide
ctaacatattagccatagccggtcagcggc

SEQ ID NO: 355952 - DNA, 30 bp, Artificial Sequence
  Synthetic oligonucleotide
aaactgacgaaaatatcagtgcagagcggc

SEQ ID NO: 355953 - DNA, 30 bp, Artificial Sequence
  Synthetic oligonucleotide
aaatcgatcgcgtcccactgtacgagcggc

SEQ ID NO: 355954 - DNA, 30 bp, Artificial Sequence
  Synthetic oligonucleotide
ataagcactgatatagataatgatagcggc

SEQ ID NO: 355955 - DNA, 30 bp, Artificial Sequence
  Synthetic oligonucleotide
gcgcgcgcgggttcatggaaatgtagcggc

SEQ ID NO: 355956 - DNA, 30 bp, Artificial Sequence
  Synthetic oligonucleotide
gactgacctcccgttaaattaattagcggc

SEQ ID NO: 355957 - DNA, 30 bp, Artificial Sequence
  Synthetic oligonucleotide
tacagttaaataagggatcctatacgcggc

SEQ ID NO: 355958 - DNA, 30 bp, Artificial Sequence
  Synthetic oligonucleotide
atacggtaacttgtttgctaggagcgcggc

SEQ ID NO: 355959 - DNA, 30 bp, Artificial Sequence
  Synthetic oligonucleotide
aaatccgcgcaatatgcatgtaaaggcggc

SEQ ID NO: 355960 - DNA, 30 bp, Artificial Sequence
  Synthetic oligonucleotide
attccagggtgtttgtagcaagcaggcggc

SEQ ID NO: 355961 - DNA, 30 bp, Artificial Sequence
  Synthetic oligonucleotide
gatacaatactacagccggtgcacggcggc

SEQ ID NO: 355962 - DNA, 30 bp, Artificial Sequence
  Synthetic oligonucleotide
ttcgtgcgaccaaatggctaggccggcggc

SEQ ID NO: 355963 - DNA, 30 bp, Artificial Sequence
  Synthetic oligonucleotide
tgctacagagtttggaatccccagggcggc

SEQ ID NO: 355964 - DNA, 30 bp, Artificial Sequence
  Synthetic oligonucleotide
tcgcctttaggcgattaattacggggcggc

SEQ ID NO: 355965 - DNA, 30 bp, Artificial Sequence
  Synthetic oligonucleotide
aggatactgccgggatttgggtctggcggc

SEQ ID NO: 355966 - DNA, 30 bp, Artificial Sequence
  Synthetic oligonucleotide
ataactgcttgggaaatccgatgtggcggc

SEQ ID NO: 355967 - DNA, 30 bp, Artificial Sequence
  Synthetic oligonucleotide
ttgttgttgcgcattgccacgtaatgcggc

SEQ ID NO: 355968 - DNA, 30 bp, Artificial Sequence
  Synthetic oligonucleotide
acttgatgcacgtgaggtgcagtatgcggc

SEQ ID NO: 355969 - DNA, 30 bp, Artificial Sequence
  Synthetic oligonucleotide
ataaacttaaattagctcacttactgcggc

SEQ ID NO: 355970 - DNA, 30 bp, Artificial Sequence
  Synthetic oligonucleotide
gggtttaaagcttggactcgggaaatcggc

SEQ ID NO: 355971 - DNA, 30 bp, Artificial Sequence
  Synthetic oligonucleotide
gaagagatacctccagcgtaaaccatcggc

SEQ ID NO: 355972 - DNA, 30 bp, Artificial Sequence
  Synthetic oligonucleotide
acttccagagttcccagtttcaggatcggc

SEQ ID NO: 355973 - DNA, 30 bp, Artificial Sequence
  Synthetic oligonucleotide
ttagttgcaaacatatgaaatttgatcggc

SEQ ID NO: 355974 - DNA, 30 bp, Artificial Sequence
  Synthetic oligonucleotide
agcaatgacaagccgtcgaagtcactcggc

SEQ ID NO: 355975 - DNA, 30 bp, Artificial Sequence
  Synthetic oligonucleotide
aagatataaacacttcgtgtaagactcggc

SEQ ID NO: 355976 - DNA, 30 bp, Artificial Sequence
  Synthetic oligonucleotide
atttctttcttacacgagcatcccctcggc

SEQ ID NO: 355977 - DNA, 30 bp, Artificial Sequence
  Synthetic oligonucleotide
tagaacgagggaaacggtgccctcctcggc

SEQ ID NO: 355978 - DNA, 30 bp, Artificial Sequence
  Synthetic oligonucleotide
gaggctcaatgggtcctatcccagctcggc

SEQ ID NO: 355979 - DNA, 30 bp, Artificial Sequence
  Synthetic oligonucleotide
ttataatcacgttcggatatcttgctcggc

SEQ ID NO: 355980 - DNA, 30 bp, Artificial Sequence
  Synthetic oligonucleotide
taggtcgacaagtcatgagaaagagtcggc

SEQ ID NO: 355981 - DNA, 30 bp, Artificial Sequence
  Synthetic oligonucleotide
gggaatttaggaacatgacgcgtagtcggc

SEQ ID NO: 355982 - DNA, 30 bp, Artificial Sequence
  Synthetic oligonucleotide
acatacgttacaaactaattattagtcggc

SEQ ID NO: 355983 - DNA, 30 bp, Artificial Sequence
  Synthetic oligonucleotide
accttgagaccgataggccaccacgtcggc

SEQ ID NO: 355984 - DNA, 30 bp, Artificial Sequence
  Synthetic oligonucleotide
tacgaaaagccgttcaagccggccgtcggc

SEQ ID NO: 355985 - DNA, 30 bp, Artificial Sequence
  Synthetic oligonucleotide
gttaagccggcgcaccaaaaacgcgtcggc

SEQ ID NO: 355986 - DNA, 30 bp, Artificial Sequence
  Synthetic oligonucleotide
gtcgtccctatactcaattctttcgtcggc

SEQ ID NO: 355987 - DNA, 30 bp, Artificial Sequence
  Synthetic oligonucleotide
ttgagtacctgctcagaactaacggtcggc

SEQ ID NO: 355988 - DNA, 30 bp, Artificial Sequence
  Synthetic oligonucleotide
tcgtagaggcaggaaccttaacgggtcggc

SEQ ID NO: 355989 - DNA, 30 bp, Artificial Sequence
  Synthetic oligonucleotide
tattcgattactattgtcttataattcggc

SEQ ID NO: 355990 - DNA, 30 bp, Artificial Sequence
  Synthetic oligonucleotide
ataaaacgttatgaattcggctaattcggc

SEQ ID NO: 355991 - DNA, 30 bp, Artificial Sequence
  Synthetic oligonucleotide
actatctcgtctttgctgaccttattcggc

SEQ ID NO: 355992 - DNA, 30 bp, Artificial Sequence
  Synthetic oligonucleotide
aagcggttggatgggcacagacgcttcggc

SEQ ID NO: 355993 - DNA, 30 bp, Artificial Sequence
  Synthetic oligonucleotide
acagacactactatatacatgtatttcggc

SEQ ID NO: 355994 - DNA, 30 bp, Artificial Sequence
  Synthetic oligonucleotide
tgcggcgcagagggtttaagtactttcggc

SEQ ID NO: 355995 - DNA, 30 bp, Artificial Sequence
  Synthetic oligonucleotide
ctgccggcgtggggccacgaagctttcggc

SEQ ID NO: 355996 - DNA, 30 bp, Artificial Sequence
  Synthetic oligonucleotide
cttaacagggtatgagggttatttttcggc

SEQ ID NO: 355997 - DNA, 30 bp, Artificial Sequence
  Synthetic oligonucleotide
caacctcagcctagggttaacacaaagggc

SEQ ID NO: 355998 - DNA, 30 bp, Artificial Sequence
  Synthetic oligonucleotide
gaagttcactcgaggcacccatacaagggc

SEQ ID NO: 355999 - DNA, 30 bp, Artificial Sequence
  Synthetic oligonucleotide
caatattctgaatttagattacgcaagggc

SEQ ID NO: 356000 - DNA, 30 bp, Artificial Sequence
  Synthetic oligonucleotide
ctcgaagggccaaagtacccgacgaagggc

SEQ ID NO: 356001 - DNA, 30 bp, Artificial Sequence
  Synthetic oligonucleotide
ccaggtgtctgacgcgaggtactgaagggc

SEQ ID NO: 356002 - DNA, 30 bp, Artificial Sequence
  Synthetic oligonucleotide
cacggccgatttcatgggatatataagggc

SEQ ID NO: 356003 - DNA, 30 bp, Artificial Sequence
  Synthetic oligonucleotide
tgtcctgtcggccggttcgtatctaagggc

SEQ ID NO: 356004 - DNA, 30 bp, Artificial Sequence
  Synthetic oligonucleotide
ggctaaacgatcgcagaaaggggtaagggc

SEQ ID NO: 356005 - DNA, 30 bp, Artificial Sequence
  Synthetic oligonucleotide
tgttgcagacgcgccgtgttagaccagggc

SEQ ID NO: 356006 - DNA, 30 bp, Artificial Sequence
  Synthetic oligonucleotide
atgcatttgtagactcagtctcgccagggc

SEQ ID NO: 356007 - DNA, 30 bp, Artificial Sequence
  Synthetic oligonucleotide
catatctctaagtcgggttacccgcagggc

SEQ ID NO: 356008 - DNA, 30 bp, Artificial Sequence
  Synthetic oligonucleotide
tactagggaattcgcaacaaaattcagggc

SEQ ID NO: 356009 - DNA, 30 bp, Artificial Sequence
  Synthetic oligonucleotide
caaggggggggaaagtcgaggacagagggc

SEQ ID NO: 356010 - DNA, 30 bp, Artificial Sequence
  Synthetic oligonucleotide
ggacagtttacttcgatcagacgcgagggc

SEQ ID NO: 356011 - DNA, 30 bp, Artificial Sequence
  Synthetic oligonucleotide
cgccgctggtacatgtgattgtgcgagggc

SEQ ID NO: 356012 - DNA, 30 bp, Artificial Sequence
  Synthetic oligonucleotide
gattgcattccttatggagcgatcgagggc

SEQ ID NO: 356013 - DNA, 30 bp, Artificial Sequence
  Synthetic oligonucleotide
gtgctgcgaaaacccggttgtgtcgagggc

SEQ ID NO: 356014 - DNA, 30 bp, Artificial Sequence
  Synthetic oligonucleotide
aggacgggccgtcacggtaagatggagggc

SEQ ID NO: 356015 - DNA, 30 bp, Artificial Sequence
  Synthetic oligonucleotide
taacccattactacttcacgtatggagggc

SEQ ID NO: 356016 - DNA, 30 bp, Artificial Sequence
  Synthetic oligonucleotide
gaggaacgcatggggccacaagatgagggc

SEQ ID NO: 356017 - DNA, 30 bp, Artificial Sequence
  Synthetic oligonucleotide
ctaggacctctatggcacgcggatgagggc

SEQ ID NO: 356018 - DNA, 30 bp, Artificial Sequence
  Synthetic oligonucleotide
aagcgtgcttgccggccgacataatagggc

SEQ ID NO: 356019 - DNA, 30 bp, Artificial Sequence
  Synthetic oligonucleotide
gatcgatctgtaaatattgacgcctagggc

SEQ ID NO: 356020 - DNA, 30 bp, Artificial Sequence
  Synthetic oligonucleotide
ccggtcgctgatttaacggcttgctagggc

SEQ ID NO: 356021 - DNA, 30 bp, Artificial Sequence
  Synthetic oligonucleotide
tccaccaatacattttaagttacgtagggc

SEQ ID NO: 356022 - DNA, 30 bp, Artificial Sequence
  Synthetic oligonucleotide
tgataacgaaccggatgaaggttttagggc

SEQ ID NO: 356023 - DNA, 30 bp, Artificial Sequence
  Synthetic oligonucleotide
gatacgtaagacattttctatttttagggc

SEQ ID NO: 356024 - DNA, 30 bp, Artificial Sequence
  Synthetic oligonucleotide
tcgggtaggaaagggtgcgacatcacgggc

SEQ ID NO: 356025 - DNA, 30 bp, Artificial Sequence
  Synthetic oligonucleotide
attcagatcgcagtgagtcccaagacgggc

SEQ ID NO: 356026 - DNA, 30 bp, Artificial Sequence
  Synthetic oligonucleotide
gctagctggccttactcgattaggacgggc

SEQ ID NO: 356027 - DNA, 30 bp, Artificial Sequence
  Synthetic oligonucleotide
atgtagacaagaatgggaatcctgacgggc

SEQ ID NO: 356028 - DNA, 30 bp, Artificial Sequence
  Synthetic oligonucleotide
gttcgacgggctagatctttggaaccgggc

SEQ ID NO: 356029 - DNA, 30 bp, Artificial Sequence
  Synthetic oligonucleotide
gggcggcggtaggcggtgctcggaccgggc

SEQ ID NO: 356030 - DNA, 30 bp, Artificial Sequence
  Synthetic oligonucleotide
gactcataacttgagtaaatattcccgggc

SEQ ID NO: 356031 - DNA, 30 bp, Artificial Sequence
  Synthetic oligonucleotide
atacggtgtgccagaatgggtaggccgggc

SEQ ID NO: 356032 - DNA, 30 bp, Artificial Sequence
  Synthetic oligonucleotide
accgagggcgccccagcttcgtatccgggc

SEQ ID NO: 356033 - DNA, 30 bp, Artificial Sequence
  Synthetic oligonucleotide
aatgtcacccgatactccagagcagcgggc

SEQ ID NO: 356034 - DNA, 30 bp, Artificial Sequence
  Synthetic oligonucleotide
gaaatatctggacgttgggagttcgcgggc

SEQ ID NO: 356035 - DNA, 30 bp, Artificial Sequence
  Synthetic oligonucleotide
gcaaaaatcaatcttatttgcctggcgggc

SEQ ID NO: 356036 - DNA, 30 bp, Artificial Sequence
  Synthetic oligonucleotide
gcagattaacaatacgtcaggattgcgggc

SEQ ID NO: 356037 - DNA, 30 bp, Artificial Sequence
  Synthetic oligonucleotide
tatgcgtgtattactgactaacaatcgggc

SEQ ID NO: 356038 - DNA, 30 bp, Artificial Sequence
  Synthetic oligonucleotide
tcccgtgtaccaaaatactgacaatcgggc

SEQ ID NO: 356039 - DNA, 30 bp, Artificial Sequence
  Synthetic oligonucleotide
tggatgtccaaagggtcagctttctcgggc

SEQ ID NO: 356040 - DNA, 30 bp, Artificial Sequence
  Synthetic oligonucleotide
ggggtcgtcgaggggaaacacgagtcgggc

SEQ ID NO: 356041 - DNA, 30 bp, Artificial Sequence
  Synthetic oligonucleotide
gcagttcggcaagccaaaaaaaaaaggggc

SEQ ID NO: 356042 - DNA, 30 bp, Artificial Sequence
  Synthetic oligonucleotide
ctgtggtttcacagagtccgcatgaggggc

SEQ ID NO: 356043 - DNA, 30 bp, Artificial Sequence
  Synthetic oligonucleotide
ttcaagggataggtaattcgtgataggggc

SEQ ID NO: 356044 - DNA, 30 bp, Artificial Sequence
  Synthetic oligonucleotide
tcccggggtcacggggtaatggaacggggc

SEQ ID NO: 356045 - DNA, 30 bp, Artificial Sequence
  Synthetic oligonucleotide
ttggcttctgcgtattccatcggacggggc

SEQ ID NO: 356046 - DNA, 30 bp, Artificial Sequence
  Synthetic oligonucleotide
actattgatactctagaatttgtacggggc

SEQ ID NO: 356047 - DNA, 30 bp, Artificial Sequence
  Synthetic oligonucleotide
cattataatttccattcaggtttacggggc

SEQ ID NO: 356048 - DNA, 30 bp, Artificial Sequence
  Synthetic oligonucleotide
agaggttaatagtgggactttcaccggggc

SEQ ID NO: 356049 - DNA, 30 bp, Artificial Sequence
  Synthetic oligonucleotide
gtaaacacgtgcatgggtgaatgccggggc

SEQ ID NO: 356050 - DNA, 30 bp, Artificial Sequence
  Synthetic oligonucleotide
ccagttcttccgatttgccaatgtcggggc

SEQ ID NO: 356051 - DNA, 30 bp, Artificial Sequence
  Synthetic oligonucleotide
aaagcactcaataaactggtaatagggggc

SEQ ID NO: 356052 - DNA, 30 bp, Artificial Sequence
  Synthetic oligonucleotide
gaaaaattctgtaaccaaacgaacgggggc

SEQ ID NO: 356053 - DNA, 30 bp, Artificial Sequence
  Synthetic oligonucleotide
agcagggattttattttgcatggggggggc

SEQ ID NO: 356054 - DNA, 30 bp, Artificial Sequence
  Synthetic oligonucleotide
cacaattgaaccgtactactggtggggggc

SEQ ID NO: 356055 - DNA, 30 bp, Artificial Sequence
  Synthetic oligonucleotide
ggcgcccattgttcgcacaatttggggggc

SEQ ID NO: 356056 - DNA, 30 bp, Artificial Sequence
  Synthetic oligonucleotide
cctcaaatttccatgcgcttgcctgggggc

SEQ ID NO: 356057 - DNA, 30 bp, Artificial Sequence
  Synthetic oligonucleotide
tgattgtctgtaaccttgagatgtgggggc

SEQ ID NO: 356058 - DNA, 30 bp, Artificial Sequence
  Synthetic oligonucleotide
aagattgcttttaaacaggtaattgggggc

SEQ ID NO: 356059 - DNA, 30 bp, Artificial Sequence
  Synthetic oligonucleotide
tgttacgtcagcaaaagtgactttgggggc

SEQ ID NO: 356060 - DNA, 30 bp, Artificial Sequence
  Synthetic oligonucleotide
acgatgccatctcttattactttatggggc

SEQ ID NO: 356061 - DNA, 30 bp, Artificial Sequence
  Synthetic oligonucleotide
gaggtgtcgtttgccaggccaaagtggggc

SEQ ID NO: 356062 - DNA, 30 bp, Artificial Sequence
  Synthetic oligonucleotide
ggtatgacggggcctttttacacttggggc

SEQ ID NO: 356063 - DNA, 30 bp, Artificial Sequence
  Synthetic oligonucleotide
tgtgccccccgtgtttaaggtgaaatgggc

SEQ ID NO: 356064 - DNA, 30 bp, Artificial Sequence
  Synthetic oligonucleotide
gtattcactgccgcctaactagcaatgggc

SEQ ID NO: 356065 - DNA, 30 bp, Artificial Sequence
  Synthetic oligonucleotide
cgcagtgggtagacagccggaggaatgggc

SEQ ID NO: 356066 - DNA, 30 bp, Artificial Sequence
  Synthetic oligonucleotide
ttatggtgaacaaatagacaccacatgggc

SEQ ID NO: 356067 - DNA, 30 bp, Artificial Sequence
  Synthetic oligonucleotide
gacaactgtaagatctgtccccgtatgggc

SEQ ID NO: 356068 - DNA, 30 bp, Artificial Sequence
  Synthetic oligonucleotide
cacactgttaaatttataacgggtatgggc

SEQ ID NO: 356069 - DNA, 30 bp, Artificial Sequence
  Synthetic oligonucleotide
acatatgctggcgggcagggcattatgggc

SEQ ID NO: 356070 - DNA, 30 bp, Artificial Sequence
  Synthetic oligonucleotide
gagctctgtctgccgcaaggtattatgggc

SEQ ID NO: 356071 - DNA, 30 bp, Artificial Sequence
  Synthetic oligonucleotide
taaatagggtcagatgccacgtttatgggc

SEQ ID NO: 356072 - DNA, 30 bp, Artificial Sequence
  Synthetic oligonucleotide
agctccgacccgggcgataaaattctgggc

SEQ ID NO: 356073 - DNA, 30 bp, Artificial Sequence
  Synthetic oligonucleotide
atcgggcgatctgtttcgctgctagtgggc

SEQ ID NO: 356074 - DNA, 30 bp, Artificial Sequence
  Synthetic oligonucleotide
cgctttcgtgcgcctgtagttcacgtgggc

SEQ ID NO: 356075 - DNA, 30 bp, Artificial Sequence
  Synthetic oligonucleotide
gtcaatagttttaggaatatagaggtgggc

SEQ ID NO: 356076 - DNA, 30 bp, Artificial Sequence
  Synthetic oligonucleotide
ctgaggacggaagacagcgcccaattgggc

SEQ ID NO: 356077 - DNA, 30 bp, Artificial Sequence
  Synthetic oligonucleotide
agagcggaggtgtaggcagccggattgggc

SEQ ID NO: 356078 - DNA, 30 bp, Artificial Sequence
  Synthetic oligonucleotide
ttttccacgagagccgaccagctattgggc

SEQ ID NO: 356079 - DNA, 30 bp, Artificial Sequence
  Synthetic oligonucleotide
tatccgacgggcataacttctaacttgggc

SEQ ID NO: 356080 - DNA, 30 bp, Artificial Sequence
  Synthetic oligonucleotide
caagtgtacattgtacccaaccccttgggc

SEQ ID NO: 356081 - DNA, 30 bp, Artificial Sequence
  Synthetic oligonucleotide
tctgtggatgtgctaacaattttcttgggc

SEQ ID NO: 356082 - DNA, 30 bp, Artificial Sequence
  Synthetic oligonucleotide
gggaattagatcggtatccaggggttgggc

SEQ ID NO: 356083 - DNA, 30 bp, Artificial Sequence
  Synthetic oligonucleotide
tacagttgtgcataaagactaaatttgggc

SEQ ID NO: 356084 - DNA, 30 bp, Artificial Sequence
  Synthetic oligonucleotide
ttgttttaatgaaagtgtgctgctttgggc

SEQ ID NO: 356085 - DNA, 30 bp, Artificial Sequence
  Synthetic oligonucleotide
ctcactgactttgtaggggcagacaatggc

SEQ ID NO: 356086 - DNA, 30 bp, Artificial Sequence
  Synthetic oligonucleotide
gttatatggaaatgggttagcagcaatggc

SEQ ID NO: 356087 - DNA, 30 bp, Artificial Sequence
  Synthetic oligonucleotide
ggaaactatgtaccgttgttggggaatggc

SEQ ID NO: 356088 - DNA, 30 bp, Artificial Sequence
  Synthetic oligonucleotide
tacgcgttgggtacgctggagtgtaatggc

SEQ ID NO: 356089 - DNA, 30 bp, Artificial Sequence
  Synthetic oligonucleotide
ggttccagtggaagtactagaaaacatggc

SEQ ID NO: 356090 - DNA, 30 bp, Artificial Sequence
  Synthetic oligonucleotide
ttcaacgtactgtccttgaggggacatggc

SEQ ID NO: 356091 - DNA, 30 bp, Artificial Sequence
  Synthetic oligonucleotide
aggagctggtgatccgcttcgccccatggc

SEQ ID NO: 356092 - DNA, 30 bp, Artificial Sequence
  Synthetic oligonucleotide
ggacttagcattatactgctaggccatggc

SEQ ID NO: 356093 - DNA, 30 bp, Artificial Sequence
  Synthetic oligonucleotide
aataagttagtatcctgggacttggatggc

SEQ ID NO: 356094 - DNA, 30 bp, Artificial Sequence
  Synthetic oligonucleotide
cttagataggcacagttggcgttggatggc

SEQ ID NO: 356095 - DNA, 30 bp, Artificial Sequence
  Synthetic oligonucleotide
caacatgcagctctggctaatttggatggc

SEQ ID NO: 356096 - DNA, 30 bp, Artificial Sequence
  Synthetic oligonucleotide
gatcacgagtaccgtactatttatgatggc

SEQ ID NO: 356097 - DNA, 30 bp, Artificial Sequence
  Synthetic oligonucleotide
gctgcttcagtatttcaggatcagtatggc

SEQ ID NO: 356098 - DNA, 30 bp, Artificial Sequence
  Synthetic oligonucleotide
agcactgtttaccgcagtgcatagtatggc

SEQ ID NO: 356099 - DNA, 30 bp, Artificial Sequence
  Synthetic oligonucleotide
cgcccaccgccttgctcattgcgttatggc

SEQ ID NO: 356100 - DNA, 30 bp, Artificial Sequence
  Synthetic oligonucleotide
caattaggtaaatgtgcatgaatttatggc

SEQ ID NO: 356101 - DNA, 30 bp, Artificial Sequence
  Synthetic oligonucleotide
ttaggggcaggaaacagtcgtttttatggc

SEQ ID NO: 356102 - DNA, 30 bp, Artificial Sequence
  Synthetic oligonucleotide
gccagccataaagtcgtacgcaaaactggc

SEQ ID NO: 356103 - DNA, 30 bp, Artificial Sequence
  Synthetic oligonucleotide
accctaagcgaaataggtttgcgcactggc

SEQ ID NO: 356104 - DNA, 30 bp, Artificial Sequence
  Synthetic oligonucleotide
gtatgccgctgaggaacctcggtcactggc

SEQ ID NO: 356105 - DNA, 30 bp, Artificial Sequence
  Synthetic oligonucleotide
gccccggctcaaaatagtcttgatactggc

SEQ ID NO: 356106 - DNA, 30 bp, Artificial Sequence
  Synthetic oligonucleotide
cttatatccagaaaggccggctttactggc

SEQ ID NO: 356107 - DNA, 30 bp, Artificial Sequence
  Synthetic oligonucleotide
ttcgcgcaaccacacaaggacctacctggc

SEQ ID NO: 356108 - DNA, 30 bp, Artificial Sequence
  Synthetic oligonucleotide
ggccaattagcatgcggatccaatcctggc

SEQ ID NO: 356109 - DNA, 30 bp, Artificial Sequence
  Synthetic oligonucleotide
tttccacagttagattctctataagctggc

SEQ ID NO: 356110 - DNA, 30 bp, Artificial Sequence
  Synthetic oligonucleotide
attgcaccttaaacagctgcggtatctggc

SEQ ID NO: 356111 - DNA, 30 bp, Artificial Sequence
  Synthetic oligonucleotide
tgttaagtgtcagactaagacgtgtctggc

SEQ ID NO: 356112 - DNA, 30 bp, Artificial Sequence
  Synthetic oligonucleotide
aggaagttcaatgacggattgttttctggc

SEQ ID NO: 356113 - DNA, 30 bp, Artificial Sequence
  Synthetic oligonucleotide
tggacatctagatcgaagagatgaagtggc

SEQ ID NO: 356114 - DNA, 30 bp, Artificial Sequence
  Synthetic oligonucleotide
ttaggaagccaattatgtgaatccagtggc

SEQ ID NO: 356115 - DNA, 30 bp, Artificial Sequence
  Synthetic oligonucleotide
tcgtgtgtgccatgccgaatttcacgtggc

SEQ ID NO: 356116 - DNA, 30 bp, Artificial Sequence
  Synthetic oligonucleotide
tcatttactcttctcactttcggccgtggc

SEQ ID NO: 356117 - DNA, 30 bp, Artificial Sequence
  Synthetic oligonucleotide
taccacacgaagtccacggggggccgtggc

SEQ ID NO: 356118 - DNA, 30 bp, Artificial Sequence
  Synthetic oligonucleotide
ctgccatcgcagtagatctcgattcgtggc

SEQ ID NO: 356119 - DNA, 30 bp, Artificial Sequence
  Synthetic oligonucleotide
tccgacttgaattttcgaatacagggtggc

SEQ ID NO: 356120 - DNA, 30 bp, Artificial Sequence
  Synthetic oligonucleotide
aacatcttaatactcacgaaaccgggtggc

SEQ ID NO: 356121 - DNA, 30 bp, Artificial Sequence
  Synthetic oligonucleotide
gccgtagaggcgcgcgaccatcgatgtggc

SEQ ID NO: 356122 - DNA, 30 bp, Artificial Sequence
  Synthetic oligonucleotide
gggagcgactttacggccataccctgtggc

SEQ ID NO: 356123 - DNA, 30 bp, Artificial Sequence
  Synthetic oligonucleotide
acttgtcggtaatgagatctaagctgtggc

SEQ ID NO: 356124 - DNA, 30 bp, Artificial Sequence
  Synthetic oligonucleotide
aacaatcttattaaacatagtaggtgtggc

SEQ ID NO: 356125 - DNA, 30 bp, Artificial Sequence
  Synthetic oligonucleotide
gcttaactaaggattgtgtctccttgtggc

SEQ ID NO: 356126 - DNA, 30 bp, Artificial Sequence
  Synthetic oligonucleotide
atcctgcagggcggttcaacatgttgtggc

SEQ ID NO: 356127 - DNA, 30 bp, Artificial Sequence
  Synthetic oligonucleotide
catttattttggggaggtcagctttgtggc

SEQ ID NO: 356128 - DNA, 30 bp, Artificial Sequence
  Synthetic oligonucleotide
actatgtccctacttgcaaaagtttgtggc

SEQ ID NO: 356129 - DNA, 30 bp, Artificial Sequence
  Synthetic oligonucleotide
tacaacgatctctattcgcctacaattggc

SEQ ID NO: 356130 - DNA, 30 bp, Artificial Sequence
  Synthetic oligonucleotide
tattgttctatcgtgtatgtgtgaattggc

SEQ ID NO: 356131 - DNA, 30 bp, Artificial Sequence
  Synthetic oligonucleotide
atttgcacgtgatccggataccacattggc

SEQ ID NO: 356132 - DNA, 30 bp, Artificial Sequence
  Synthetic oligonucleotide
ctttcaggcatatacgcatattacattggc

SEQ ID NO: 356133 - DNA, 30 bp, Artificial Sequence
  Synthetic oligonucleotide
atgtttagtccaatggtggtgaccattggc

SEQ ID NO: 356134 - DNA, 30 bp, Artificial Sequence
  Synthetic oligonucleotide
tataccaatgcgacgctcccccgcattggc

SEQ ID NO: 356135 - DNA, 30 bp, Artificial Sequence
  Synthetic oligonucleotide
aagagtttgatctgcttctagacgattggc

SEQ ID NO: 356136 - DNA, 30 bp, Artificial Sequence
  Synthetic oligonucleotide
cgaggacgggagcagcattataggattggc

SEQ ID NO: 356137 - DNA, 30 bp, Artificial Sequence
  Synthetic oligonucleotide
acctaaccgcgtctggataatgggattggc

SEQ ID NO: 356138 - DNA, 30 bp, Artificial Sequence
  Synthetic oligonucleotide
gcctctaggagggtctgctatgatattggc

SEQ ID NO: 356139 - DNA, 30 bp, Artificial Sequence
  Synthetic oligonucleotide
gtgtacttgtactatacgagcgcgcttggc

SEQ ID NO: 356140 - DNA, 30 bp, Artificial Sequence
  Synthetic oligonucleotide
gatatccaatatttagcgcctaatcttggc

SEQ ID NO: 356141 - DNA, 30 bp, Artificial Sequence
  Synthetic oligonucleotide
tacgcgcggattaaggacatatatcttggc

SEQ ID NO: 356142 - DNA, 30 bp, Artificial Sequence
  Synthetic oligonucleotide
ggtgaggcatgtagtactgggttcgttggc

SEQ ID NO: 356143 - DNA, 30 bp, Artificial Sequence
  Synthetic oligonucleotide
gccgaggaaccaggttgggcgcgggttggc

SEQ ID NO: 356144 - DNA, 30 bp, Artificial Sequence
  Synthetic oligonucleotide
tgctatagcttaagcccgcggattgttggc

SEQ ID NO: 356145 - DNA, 30 bp, Artificial Sequence
  Synthetic oligonucleotide
ctctacactcgtggctgatagcttgttggc

SEQ ID NO: 356146 - DNA, 30 bp, Artificial Sequence
  Synthetic oligonucleotide
gcaaataggaaatctaggttgaaatttggc

SEQ ID NO: 356147 - DNA, 30 bp, Artificial Sequence
  Synthetic oligonucleotide
cccatgatttacattctttaatcttttggc

SEQ ID NO: 356148 - DNA, 30 bp, Artificial Sequence
  Synthetic oligonucleotide
tgttaatgggtaacgcgcagtggttttggc

SEQ ID NO: 356149 - DNA, 30 bp, Artificial Sequence
  Synthetic oligonucleotide
agcagtcttcgtataatttgcccaaaatgc

SEQ ID NO: 356150 - DNA, 30 bp, Artificial Sequence
  Synthetic oligonucleotide
aatcgctggaggtgttcagaaagcaaatgc

SEQ ID NO: 356151 - DNA, 30 bp, Artificial Sequence
  Synthetic oligonucleotide
gcaacaggggatccaggaaagcggaaatgc

SEQ ID NO: 356152 - DNA, 30 bp, Artificial Sequence
  Synthetic oligonucleotide
gtggcgaacgttacctttgtcatgaaatgc

SEQ ID NO: 356153 - DNA, 30 bp, Artificial Sequence
  Synthetic oligonucleotide
cgggaatagcctcactagaaccttaaatgc

SEQ ID NO: 356154 - DNA, 30 bp, Artificial Sequence
  Synthetic oligonucleotide
aaacaagtgttagactgagactttaaatgc

SEQ ID NO: 356155 - DNA, 30 bp, Artificial Sequence
  Synthetic oligonucleotide
aaagaatttaaactgcgtactcaacaatgc

SEQ ID NO: 356156 - DNA, 30 bp, Artificial Sequence
  Synthetic oligonucleotide
gaaacctactagctaagcgttccgcaatgc

SEQ ID NO: 356157 - DNA, 30 bp, Artificial Sequence
  Synthetic oligonucleotide
tgacgtgtagaccatcctttggtgcaatgc

SEQ ID NO: 356158 - DNA, 30 bp, Artificial Sequence
  Synthetic oligonucleotide
tgagactacaaaatggaagtctctcaatgc

SEQ ID NO: 356159 - DNA, 30 bp, Artificial Sequence
  Synthetic oligonucleotide
gtcgggcaccatcgcacgatagaagaatgc

SEQ ID NO: 356160 - DNA, 30 bp, Artificial Sequence
  Synthetic oligonucleotide
taaccataacctctttcacgactagaatgc

SEQ ID NO: 356161 - DNA, 30 bp, Artificial Sequence
  Synthetic oligonucleotide
atgtataatagacgcaaaaacgtagaatgc

SEQ ID NO: 356162 - DNA, 30 bp, Artificial Sequence
  Synthetic oligonucleotide
gggataacacagcatcggagccccgaatgc

SEQ ID NO: 356163 - DNA, 30 bp, Artificial Sequence
  Synthetic oligonucleotide
tactgcctacctgctgcttaaactgaatgc

SEQ ID NO: 356164 - DNA, 30 bp, Artificial Sequence
  Synthetic oligonucleotide
ctttaccagacttgtattgagaaataatgc

SEQ ID NO: 356165 - DNA, 30 bp, Artificial Sequence
  Synthetic oligonucleotide
tccgggagcaactattccgtatcgtaatgc

SEQ ID NO: 356166 - DNA, 30 bp, Artificial Sequence
  Synthetic oligonucleotide
ggggattctagtccaccacagtcgtaatgc

SEQ ID NO: 356167 - DNA, 30 bp, Artificial Sequence
  Synthetic oligonucleotide
ttaaaagggccacgatttaagctttaatgc

SEQ ID NO: 356168 - DNA, 30 bp, Artificial Sequence
  Synthetic oligonucleotide
actcttgatgtatgcaatcataaaacatgc

SEQ ID NO: 356169 - DNA, 30 bp, Artificial Sequence
  Synthetic oligonucleotide
tagatctgtgaagtctcgtgtacaacatgc

SEQ ID NO: 356170 - DNA, 30 bp, Artificial Sequence
  Synthetic oligonucleotide
ataactattaaaacagaagctccaacatgc

SEQ ID NO: 356171 - DNA, 30 bp, Artificial Sequence
  Synthetic oligonucleotide
cgcttctaagcaagaggaaactccacatgc

SEQ ID NO: 356172 - DNA, 30 bp, Artificial Sequence
  Synthetic oligonucleotide
aagacatgagcacggaatatgtgcacatgc

SEQ ID NO: 356173 - DNA, 30 bp, Artificial Sequence
  Synthetic oligonucleotide
cgtggacttgagctaaacggactgacatgc

SEQ ID NO: 356174 - DNA, 30 bp, Artificial Sequence
  Synthetic oligonucleotide
aatttgcgacaaaggcggccgactacatgc

SEQ ID NO: 356175 - DNA, 30 bp, Artificial Sequence
  Synthetic oligonucleotide
gagaaaggttgtgaagactgccccccatgc

SEQ ID NO: 356176 - DNA, 30 bp, Artificial Sequence
  Synthetic oligonucleotide
gttacgcaaggttcatagacatccccatgc

SEQ ID NO: 356177 - DNA, 30 bp, Artificial Sequence
  Synthetic oligonucleotide
gcaataacgctttgtcagtaggggccatgc

SEQ ID NO: 356178 - DNA, 30 bp, Artificial Sequence
  Synthetic oligonucleotide
tcaggtagccggcgcgctcgagatccatgc

SEQ ID NO: 356179 - DNA, 30 bp, Artificial Sequence
  Synthetic oligonucleotide
cgccacgtctgtccacgcccttatccatgc

SEQ ID NO: 356180 - DNA, 30 bp, Artificial Sequence
  Synthetic oligonucleotide
tgcagagacacatcctgcgtgagtccatgc

SEQ ID NO: 356181 - DNA, 30 bp, Artificial Sequence
  Synthetic oligonucleotide
ctgtaatatccgtttcttaagatagcatgc

SEQ ID NO: 356182 - DNA, 30 bp, Artificial Sequence
  Synthetic oligonucleotide
gctagataatgtttcaagcgagtcgcatgc

SEQ ID NO: 356183 - DNA, 30 bp, Artificial Sequence
  Synthetic oligonucleotide
gcccattacagtgtgctatcatcggcatgc

SEQ ID NO: 356184 - DNA, 30 bp, Artificial Sequence
  Synthetic oligonucleotide
atacggacaggcattagggccatggcatgc

SEQ ID NO: 356185 - DNA, 30 bp, Artificial Sequence
  Synthetic oligonucleotide
tacaagtgaaacaatttgacagaatcatgc

SEQ ID NO: 356186 - DNA, 30 bp, Artificial Sequence
  Synthetic oligonucleotide
atttgatacatcctaagcgggccatcatgc

SEQ ID NO: 356187 - DNA, 30 bp, Artificial Sequence
  Synthetic oligonucleotide
aataacgcgtgaatagagaagcgctcatgc

SEQ ID NO: 356188 - DNA, 30 bp, Artificial Sequence
  Synthetic oligonucleotide
aagtacagaatgactctttaattctcatgc

SEQ ID NO: 356189 - DNA, 30 bp, Artificial Sequence
  Synthetic oligonucleotide
ttaggaggtgggccgttgggtaagtcatgc

SEQ ID NO: 356190 - DNA, 30 bp, Artificial Sequence
  Synthetic oligonucleotide
gaagcaacagtcttccagacgacgtcatgc

SEQ ID NO: 356191 - DNA, 30 bp, Artificial Sequence
  Synthetic oligonucleotide
gcttcctaccaatataggcgcaggtcatgc

SEQ ID NO: 356192 - DNA, 30 bp, Artificial Sequence
  Synthetic oligonucleotide
gcttcggttagggggccccattggtcatgc

SEQ ID NO: 356193 - DNA, 30 bp, Artificial Sequence
  Synthetic oligonucleotide
tattatccataaagcttggagtattcatgc

SEQ ID NO: 356194 - DNA, 30 bp, Artificial Sequence
  Synthetic oligonucleotide
aatacaggtgagcgttattagtaaagatgc

SEQ ID NO: 356195 - DNA, 30 bp, Artificial Sequence
  Synthetic oligonucleotide
acaaccaatgggaggcttataacaagatgc

SEQ ID NO: 356196 - DNA, 30 bp, Artificial Sequence
  Synthetic oligonucleotide
agttgagcggtcctcaccgtatacagatgc

SEQ ID NO: 356197 - DNA, 30 bp, Artificial Sequence
  Synthetic oligonucleotide
ctagatgacatgggctttcggaagagatgc

SEQ ID NO: 356198 - DNA, 30 bp, Artificial Sequence
  Synthetic oligonucleotide
cagttttggcctcaccagattcctagatgc

SEQ ID NO: 356199 - DNA, 30 bp, Artificial Sequence
  Synthetic oligonucleotide
cgtctttatatgaaaatcactggtagatgc

SEQ ID NO: 356200 - DNA, 30 bp, Artificial Sequence
  Synthetic oligonucleotide
ctgcacgatgacagtgatctcgcacgatgc

SEQ ID NO: 356201 - DNA, 30 bp, Artificial Sequence
  Synthetic oligonucleotide
acgctaggacacagcatgcggcaccgatgc

SEQ ID NO: 356202 - DNA, 30 bp, Artificial Sequence
  Synthetic oligonucleotide
gcataaagatagcttgcttgcgtccgatgc

SEQ ID NO: 356203 - DNA, 30 bp, Artificial Sequence
  Synthetic oligonucleotide
accacggggtagaacgtagttaagcgatgc

SEQ ID NO: 356204 - DNA, 30 bp, Artificial Sequence
  Synthetic oligonucleotide
gtcgtatatcaacagcctgtttatcgatgc

SEQ ID NO: 356205 - DNA, 30 bp, Artificial Sequence
  Synthetic oligonucleotide
gttaacgttcgttgacaaaaagctcgatgc

SEQ ID NO: 356206 - DNA, 30 bp, Artificial Sequence
  Synthetic oligonucleotide
tttatcttaagccaagtagtaaaaggatgc

SEQ ID NO: 356207 - DNA, 30 bp, Artificial Sequence
  Synthetic oligonucleotide
cgttcgcgcgggtttggcctatcaggatgc

SEQ ID NO: 356208 - DNA, 30 bp, Artificial Sequence
  Synthetic oligonucleotide
catggcatcaaaagacggtccacgggatgc

SEQ ID NO: 356209 - DNA, 30 bp, Artificial Sequence
  Synthetic oligonucleotide
atgaaccccatcagaaattggttgggatgc

SEQ ID NO: 356210 - DNA, 30 bp, Artificial Sequence
  Synthetic oligonucleotide
gatactgatcgggcaaggagcagatgatgc

SEQ ID NO: 356211 - DNA, 30 bp, Artificial Sequence
  Synthetic oligonucleotide
gggactactgatacatcatacttctgatgc

SEQ ID NO: 356212 - DNA, 30 bp, Artificial Sequence
  Synthetic oligonucleotide
ttagttaagcagaaaccatgtttctgatgc

SEQ ID NO: 356213 - DNA, 30 bp, Artificial Sequence
  Synthetic oligonucleotide
gggcgatagggaaaacctctcccttgatgc

SEQ ID NO: 356214 - DNA, 30 bp, Artificial Sequence
  Synthetic oligonucleotide
aacagttcccgtgtcggggtacgttgatgc

SEQ ID NO: 356215 - DNA, 30 bp, Artificial Sequence
  Synthetic oligonucleotide
ccaggggtgccaagacggacagtaatatgc

SEQ ID NO: 356216 - DNA, 30 bp, Artificial Sequence
  Synthetic oligonucleotide
gtcagacacccccccgttttcatcatatgc

SEQ ID NO: 356217 - DNA, 30 bp, Artificial Sequence
  Synthetic oligonucleotide
agtttgacatataaatagtatgtcatatgc

SEQ ID NO: 356218 - DNA, 30 bp, Artificial Sequence
  Synthetic oligonucleotide
aaggttggcacataatggctacatatatgc

SEQ ID NO: 356219 - DNA, 30 bp, Artificial Sequence
  Synthetic oligonucleotide
caatacgatttcaagctttcagctatatgc

SEQ ID NO: 356220 - DNA, 30 bp, Artificial Sequence
  Synthetic oligonucleotide
gcgagctcagagaggtcagtctctatatgc

SEQ ID NO: 356221 - DNA, 30 bp, Artificial Sequence
  Synthetic oligonucleotide
tgtgtttaggggtcaacgggagaactatgc

SEQ ID NO: 356222 - DNA, 30 bp, Artificial Sequence
  Synthetic oligonucleotide
tccaatcaaccagtaacgctctgcctatgc

SEQ ID NO: 356223 - DNA, 30 bp, Artificial Sequence
  Synthetic oligonucleotide
tttgatggtgcatgggacgcctagctatgc

SEQ ID NO: 356224 - DNA, 30 bp, Artificial Sequence
  Synthetic oligonucleotide
ggtcggggaaatagtttgtttggtctatgc

SEQ ID NO: 356225 - DNA, 30 bp, Artificial Sequence
  Synthetic oligonucleotide
tctatccctgtatttgctttaatagtatgc

SEQ ID NO: 356226 - DNA, 30 bp, Artificial Sequence
  Synthetic oligonucleotide
gcaacaggtaaacaaccagaatacgtatgc

SEQ ID NO: 356227 - DNA, 30 bp, Artificial Sequence
  Synthetic oligonucleotide
atacggtcctggggtttaattggcgtatgc

SEQ ID NO: 356228 - DNA, 30 bp, Artificial Sequence
  Synthetic oligonucleotide
tactgaatgaaagtcacgggcgcggtatgc

SEQ ID NO: 356229 - DNA, 30 bp, Artificial Sequence
  Synthetic oligonucleotide
gtaccctaagcaggtcgcgggttggtatgc

SEQ ID NO: 356230 - DNA, 30 bp, Artificial Sequence
  Synthetic oligonucleotide
cgcaagtttagatatccaagttaattatgc

SEQ ID NO: 356231 - DNA, 30 bp, Artificial Sequence
  Synthetic oligonucleotide
ttgaagttttggctgccgacatacttatgc

SEQ ID NO: 356232 - DNA, 30 bp, Artificial Sequence
  Synthetic oligonucleotide
agaggttacagctaagctagtttcttatgc

SEQ ID NO: 356233 - DNA, 30 bp, Artificial Sequence
  Synthetic oligonucleotide
attgtctggtggctcataactaagttatgc

SEQ ID NO: 356234 - DNA, 30 bp, Artificial Sequence
  Synthetic oligonucleotide
ggaccctctagtggtaatggagagttatgc

SEQ ID NO: 356235 - DNA, 30 bp, Artificial Sequence
  Synthetic oligonucleotide
ccactgcagtattgcctcgagaggttatgc

SEQ ID NO: 356236 - DNA, 30 bp, Artificial Sequence
  Synthetic oligonucleotide
gggatctcttggactatggcgcggttatgc

SEQ ID NO: 356237 - DNA, 30 bp, Artificial Sequence
  Synthetic oligonucleotide
ggatagtgtacgcagtaatggccgaactgc

SEQ ID NO: 356238 - DNA, 29 bp, Artificial Sequence
  Synthetic oligonucleotide
tgtaatatgacgtcgctcggaggaactgc

SEQ ID NO: 356239 - DNA, 30 bp, Artificial Sequence
  Synthetic oligonucleotide
tagggccccgccgtcaacagccgtaactgc

SEQ ID NO: 356240 - DNA, 30 bp, Artificial Sequence
  Synthetic oligonucleotide
ttacgattccaaatacctgtaggtaactgc

SEQ ID NO: 356241 - DNA, 30 bp, Artificial Sequence
  Synthetic oligonucleotide
gagcgcctacgttcgcacgaagttaactgc

SEQ ID NO: 356242 - DNA, 30 bp, Artificial Sequence
  Synthetic oligonucleotide
cacataaccgacgccctttagccgcactgc

SEQ ID NO: 356243 - DNA, 30 bp, Artificial Sequence
  Synthetic oligonucleotide
aagcacagttgaagaggcttttatcactgc

SEQ ID NO: 356244 - DNA, 30 bp, Artificial Sequence
  Synthetic oligonucleotide
taaccgtggaatgcattataacccgactgc

SEQ ID NO: 356245 - DNA, 30 bp, Artificial Sequence
  Synthetic oligonucleotide
attaaaagcagagcaaacagtggcgactgc

SEQ ID NO: 356246 - DNA, 30 bp, Artificial Sequence
  Synthetic oligonucleotide
ggtttgggggcttttgagtacagggactgc

SEQ ID NO: 356247 - DNA, 30 bp, Artificial Sequence
  Synthetic oligonucleotide
ataggcctttgccttagtcagcatgactgc

SEQ ID NO: 356248 - DNA, 30 bp, Artificial Sequence
  Synthetic oligonucleotide
atctagtggatagcgtaacggatatactgc

SEQ ID NO: 356249 - DNA, 30 bp, Artificial Sequence
  Synthetic oligonucleotide
tatgtggttcggttcgtctcagactactgc

SEQ ID NO: 356250 - DNA, 30 bp, Artificial Sequence
  Synthetic oligonucleotide
tgattgtcttcattgtcaaaccagtactgc

SEQ ID NO: 356251 - DNA, 30 bp, Artificial Sequence
  Synthetic oligonucleotide
tgattagttcgaaatgtacgcgcgtactgc

SEQ ID NO: 356252 - DNA, 30 bp, Artificial Sequence
  Synthetic oligonucleotide
gagagagttcctgtcgagtcatggtactgc

SEQ ID NO: 356253 - DNA, 30 bp, Artificial Sequence
  Synthetic oligonucleotide
gtatggttaattacatagtctcattactgc

SEQ ID NO: 356254 - DNA, 30 bp, Artificial Sequence
  Synthetic oligonucleotide
atctttttataggaaatcgttccaacctgc

SEQ ID NO: 356255 - DNA, 30 bp, Artificial Sequence
  Synthetic oligonucleotide
ttttgtgcgaatagcgtttgcagaacctgc

SEQ ID NO: 356256 - DNA, 30 bp, Artificial Sequence
  Synthetic oligonucleotide
caaaaagcactgattgctctagtaacctgc

SEQ ID NO: 356257 - DNA, 30 bp, Artificial Sequence
  Synthetic oligonucleotide
cgcaagacagagtgattgactgtaacctgc

SEQ ID NO: 356258 - DNA, 30 bp, Artificial Sequence
  Synthetic oligonucleotide
acctgaagcttgactgtgagctagacctgc

SEQ ID NO: 356259 - DNA, 30 bp, Artificial Sequence
  Synthetic oligonucleotide
gatggacatctttatgcatacgggacctgc

SEQ ID NO: 356260 - DNA, 30 bp, Artificial Sequence
  Synthetic oligonucleotide
tgcatagcttatagatgatacagtacctgc

SEQ ID NO: 356261 - DNA, 30 bp, Artificial Sequence
  Synthetic oligonucleotide
agttggcgattatttagctggtaaccctgc

SEQ ID NO: 356262 - DNA, 30 bp, Artificial Sequence
  Synthetic oligonucleotide
tgaataaggtaattatacgccggaccctgc

SEQ ID NO: 356263 - DNA, 30 bp, Artificial Sequence
  Synthetic oligonucleotide
gcggccaagtaagagatttacataccctgc

SEQ ID NO: 356264 - DNA, 30 bp, Artificial Sequence
  Synthetic oligonucleotide
cagagtcccagtttacgctgatacccctgc

SEQ ID NO: 356265 - DNA, 30 bp, Artificial Sequence
  Synthetic oligonucleotide
acggaaggaaccccggggtgatatccctgc

SEQ ID NO: 356266 - DNA, 30 bp, Artificial Sequence
  Synthetic oligonucleotide
tgagtgctcaagatttacttcagtccctgc

SEQ ID NO: 356267 - DNA, 30 bp, Artificial Sequence
  Synthetic oligonucleotide
tagcaatacctggaatacatctaagcctgc

SEQ ID NO: 356268 - DNA, 30 bp, Artificial Sequence
  Synthetic oligonucleotide
cggtattgcaggatgaaaatgctcgcctgc

SEQ ID NO: 356269 - DNA, 30 bp, Artificial Sequence
  Synthetic oligonucleotide
aactggccagatctgtcataatcggcctgc

SEQ ID NO: 356270 - DNA, 30 bp, Artificial Sequence
  Synthetic oligonucleotide
atggagtgacaattgggcattgtggcctgc

SEQ ID NO: 356271 - DNA, 30 bp, Artificial Sequence
  Synthetic oligonucleotide
ggagtgcattttcatgcccggtctgcctgc

SEQ ID NO: 356272 - DNA, 30 bp, Artificial Sequence
  Synthetic oligonucleotide
acttctagacggtcacaaaagcgtgcctgc

SEQ ID NO: 356273 - DNA, 30 bp, Artificial Sequence
  Synthetic oligonucleotide
gccctttagaatctatggccaccatcctgc

SEQ ID NO: 356274 - DNA, 30 bp, Artificial Sequence
  Synthetic oligonucleotide
ctcagagcgattcaaaatcactcgtcctgc

SEQ ID NO: 356275 - DNA, 30 bp, Artificial Sequence
  Synthetic oligonucleotide
ttcaaccatcatcaatcctggtcttcctgc

SEQ ID NO: 356276 - DNA, 30 bp, Artificial Sequence
  Synthetic oligonucleotide
gtaaaggctatgcgcacacaaagttcctgc

SEQ ID NO: 356277 - DNA, 30 bp, Artificial Sequence
  Synthetic oligonucleotide
ctctgttccctgaacataaattctagctgc

SEQ ID NO: 356278 - DNA, 30 bp, Artificial Sequence
  Synthetic oligonucleotide
tgtcgtccgaatacgtcagttattagctgc

SEQ ID NO: 356279 - DNA, 30 bp, Artificial Sequence
  Synthetic oligonucleotide
ttgacgagctcatagtgcggtcaacgctgc

SEQ ID NO: 356280 - DNA, 30 bp, Artificial Sequence
  Synthetic oligonucleotide
atagaatgtaaatcaggccgtggccgctgc

SEQ ID NO: 356281 - DNA, 30 bp, Artificial Sequence
  Synthetic oligonucleotide
catcacagctcgcccgactcacggcgctgc

SEQ ID NO: 356282 - DNA, 30 bp, Artificial Sequence
  Synthetic oligonucleotide
tattctgttctcacatgctgtggaggctgc

SEQ ID NO: 356283 - DNA, 30 bp, Artificial Sequence
  Synthetic oligonucleotide
tcttccgttgtttgcctgcggtacggctgc

SEQ ID NO: 356284 - DNA, 30 bp, Artificial Sequence
  Synthetic oligonucleotide
accggatacatccatgcgagttccggctgc

SEQ ID NO: 356285 - DNA, 30 bp, Artificial Sequence
  Synthetic oligonucleotide
aatgcgtctcaagaaatagagatcggctgc

SEQ ID NO: 356286 - DNA, 30 bp, Artificial Sequence
  Synthetic oligonucleotide
acagcatacacgaatctgctttcgggctgc

SEQ ID NO: 356287 - DNA, 30 bp, Artificial Sequence
  Synthetic oligonucleotide
gagtctatgatgcgctcaatccactgctgc

SEQ ID NO: 356288 - DNA, 30 bp, Artificial Sequence
  Synthetic oligonucleotide
cgctacgcttgtttatataccccctgctgc

SEQ ID NO: 356289 - DNA, 30 bp, Artificial Sequence
  Synthetic oligonucleotide
ccgggcagaccgcttgttagcatgtgctgc

SEQ ID NO: 356290 - DNA, 30 bp, Artificial Sequence
  Synthetic oligonucleotide
agccgggttgcattgggctatagttgctgc

SEQ ID NO: 356291 - DNA, 30 bp, Artificial Sequence
  Synthetic oligonucleotide
ggttgaattggtacggagacggagatctgc

SEQ ID NO: 356292 - DNA, 30 bp, Artificial Sequence
  Synthetic oligonucleotide
gcgggtcgcgaaatcactgtgacgatctgc

SEQ ID NO: 356293 - DNA, 30 bp, Artificial Sequence
  Synthetic oligonucleotide
tattcaacccgtagaggggcatggatctgc

SEQ ID NO: 356294 - DNA, 30 bp, Artificial Sequence
  Synthetic oligonucleotide
gatcaaggcaattaaggaattcatatctgc

SEQ ID NO: 356295 - DNA, 30 bp, Artificial Sequence
  Synthetic oligonucleotide
tgcagtcgcagggaatactcgtctatctgc

SEQ ID NO: 356296 - DNA, 30 bp, Artificial Sequence
  Synthetic oligonucleotide
ccatgaaatcggagcatgcgcggtatctgc

SEQ ID NO: 356297 - DNA, 30 bp, Artificial Sequence
  Synthetic oligonucleotide
gtgacctttacaacattgctgcttatctgc

SEQ ID NO: 356298 - DNA, 30 bp, Artificial Sequence
  Synthetic oligonucleotide
atgttagtatagcatacaatctttatctgc

SEQ ID NO: 356299 - DNA, 30 bp, Artificial Sequence
  Synthetic oligonucleotide
tactgcccggatcgatagcgcccactctgc

SEQ ID NO: 356300 - DNA, 30 bp, Artificial Sequence
  Synthetic oligonucleotide
aaggggacaaggggagaagacgcgctctgc

SEQ ID NO: 356301 - DNA, 30 bp, Artificial Sequence
  Synthetic oligonucleotide
accataaatatctgccatagctttctctgc

SEQ ID NO: 356302 - DNA, 30 bp, Artificial Sequence
  Synthetic oligonucleotide
acttaaacttaacgccttttctaagtctgc

SEQ ID NO: 356303 - DNA, 30 bp, Artificial Sequence
  Synthetic oligonucleotide
ctctggtcaactaattacacatgcgtctgc

SEQ ID NO: 356304 - DNA, 30 bp, Artificial Sequence
  Synthetic oligonucleotide
cgtgatttcagttagggtgtaaaggtctgc

SEQ ID NO: 356305 - DNA, 30 bp, Artificial Sequence
  Synthetic oligonucleotide
gtgtctagcatacggggtcgtaaggtctgc

SEQ ID NO: 356306 - DNA, 30 bp, Artificial Sequence
  Synthetic oligonucleotide
taggccgcattgggttaagcgacggtctgc

SEQ ID NO: 356307 - DNA, 30 bp, Artificial Sequence
  Synthetic oligonucleotide
agtataagctaactattaactggattctgc

SEQ ID NO: 356308 - DNA, 30 bp, Artificial Sequence
  Synthetic oligonucleotide
tggctttatctgttcgagacacacttctgc

SEQ ID NO: 356309 - DNA, 30 bp, Artificial Sequence
  Synthetic oligonucleotide
tatgtaagatgcgaacccaattccttctgc

SEQ ID NO: 356310 - DNA, 30 bp, Artificial Sequence
  Synthetic oligonucleotide
ttacacgaacgccgatgacaagtcttctgc

SEQ ID NO: 356311 - DNA, 30 bp, Artificial Sequence
  Synthetic oligonucleotide
tgtaacccgggtcatataatgcggttctgc

SEQ ID NO: 356312 - DNA, 30 bp, Artificial Sequence
  Synthetic oligonucleotide
ctacccccgggtcaatacggggtaaagtgc

SEQ ID NO: 356313 - DNA, 30 bp, Artificial Sequence
  Synthetic oligonucleotide
gtatttaggaggcacctgttggtaaagtgc

SEQ ID NO: 356314 - DNA, 30 bp, Artificial Sequence
  Synthetic oligonucleotide
ctcagggattcctagatttctgccaagtgc

SEQ ID NO: 356315 - DNA, 30 bp, Artificial Sequence
  Synthetic oligonucleotide
ttgttagttggggcaaacatttagaagtgc

SEQ ID NO: 356316 - DNA, 30 bp, Artificial Sequence
  Synthetic oligonucleotide
atgtgtctggctagatagcggccccagtgc

SEQ ID NO: 356317 - DNA, 30 bp, Artificial Sequence
  Synthetic oligonucleotide
atgagtccgctacagagatcgctccagtgc

SEQ ID NO: 356318 - DNA, 30 bp, Artificial Sequence
  Synthetic oligonucleotide
tggctactattcaccaatgacgtccagtgc

SEQ ID NO: 356319 - DNA, 30 bp, Artificial Sequence
  Synthetic oligonucleotide
atcatcgactttgaatttttagagcagtgc

SEQ ID NO: 356320 - DNA, 30 bp, Artificial Sequence
  Synthetic oligonucleotide
tttttgagaggtaagcaaccggaagagtgc

SEQ ID NO: 356321 - DNA, 30 bp, Artificial Sequence
  Synthetic oligonucleotide
tatcatatgcccagccaactctaagagtgc

SEQ ID NO: 356322 - DNA, 30 bp, Artificial Sequence
  Synthetic oligonucleotide
aagtttcatctagacagagtacacgagtgc

SEQ ID NO: 356323 - DNA, 30 bp, Artificial Sequence
  Synthetic oligonucleotide
ttacttactaattcgcccaagagcgagtgc

SEQ ID NO: 356324 - DNA, 30 bp, Artificial Sequence
  Synthetic oligonucleotide
ttataacgctttgcgagtgacagggagtgc

SEQ ID NO: 356325 - DNA, 30 bp, Artificial Sequence
  Synthetic oligonucleotide
aattggccctagtacgacaaatgggagtgc

SEQ ID NO: 356326 - DNA, 30 bp, Artificial Sequence
  Synthetic oligonucleotide
gcagtacgtgggtgtcaaggttgtgagtgc

SEQ ID NO: 356327 - DNA, 30 bp, Artificial Sequence
  Synthetic oligonucleotide
gcccgtctaggcccctgaaattcatagtgc

SEQ ID NO: 356328 - DNA, 30 bp, Artificial Sequence
  Synthetic oligonucleotide
ctcgtctagtgtttgagacaactatagtgc

SEQ ID NO: 356329 - DNA, 30 bp, Artificial Sequence
  Synthetic oligonucleotide
gctcttgactggtgggccttaccctagtgc

SEQ ID NO: 356330 - DNA, 30 bp, Artificial Sequence
  Synthetic oligonucleotide
ttggggaaccgcctacacatcgtctagtgc

SEQ ID NO: 356331 - DNA, 30 bp, Artificial Sequence
  Synthetic oligonucleotide
atcccggttgctagccccttaaagtagtgc

SEQ ID NO: 356332 - DNA, 30 bp, Artificial Sequence
  Synthetic oligonucleotide
ggacaaaaggattacggcctttagtagtgc

SEQ ID NO: 356333 - DNA, 30 bp, Artificial Sequence
  Synthetic oligonucleotide
aaaaccaggatgcgaagtcgggattagtgc

SEQ ID NO: 356334 - DNA, 30 bp, Artificial Sequence
  Synthetic oligonucleotide
actggcaaccaaatctaccgttgttagtgc

SEQ ID NO: 356335 - DNA, 30 bp, Artificial Sequence
  Synthetic oligonucleotide
gaaggggtaggctacgcaaaccgaacgtgc

SEQ ID NO: 356336 - DNA, 30 bp, Artificial Sequence
  Synthetic oligonucleotide
gcgtgacatgaggaagcctggttaacgtgc

SEQ ID NO: 356337 - DNA, 30 bp, Artificial Sequence
  Synthetic oligonucleotide
tcagcccacagcctttacgtgcacacgtgc

SEQ ID NO: 356338 - DNA, 30 bp, Artificial Sequence
  Synthetic oligonucleotide
atcccgggctcgcacaaggtgatcacgtgc

SEQ ID NO: 356339 - DNA, 30 bp, Artificial Sequence
  Synthetic oligonucleotide
acctttaatgaccacacatcgcaaccgtgc

SEQ ID NO: 356340 - DNA, 30 bp, Artificial Sequence
  Synthetic oligonucleotide
ttcttaccaggaagttgcactcacccgtgc

SEQ ID NO: 356341 - DNA, 30 bp, Artificial Sequence
  Synthetic oligonucleotide
gaaaggtcaactactggtcatgtcccgtgc

SEQ ID NO: 356342 - DNA, 30 bp, Artificial Sequence
  Synthetic oligonucleotide
ttcccctgaagcgtcctatagaatccgtgc

SEQ ID NO: 356343 - DNA, 30 bp, Artificial Sequence
  Synthetic oligonucleotide
atctaaagtgcgacaggtctgcgtccgtgc

SEQ ID NO: 356344 - DNA, 30 bp, Artificial Sequence
  Synthetic oligonucleotide
tggttccctccacaactctccgttccgtgc

SEQ ID NO: 356345 - DNA, 30 bp, Artificial Sequence
  Synthetic oligonucleotide
tataagttcgccacacgtaatcgagcgtgc

SEQ ID NO: 356346 - DNA, 30 bp, Artificial Sequence
  Synthetic oligonucleotide
cagaccattacgcatactagttaggcgtgc

SEQ ID NO: 356347 - DNA, 30 bp, Artificial Sequence
  Synthetic oligonucleotide
aagtttccccatagtggcacctaatcgtgc

SEQ ID NO: 356348 - DNA, 30 bp, Artificial Sequence
  Synthetic oligonucleotide
ggtgatacagccactccttaaggatcgtgc

SEQ ID NO: 356349 - DNA, 30 bp, Artificial Sequence
  Synthetic oligonucleotide
caggttttgcgctactcgtgggtatcgtgc

SEQ ID NO: 356350 - DNA, 29 bp, Artificial Sequence
  Synthetic oligonucleotide
gatattcgaaccagtagggcttatcgtgc

SEQ ID NO: 356351 - DNA, 30 bp, Artificial Sequence
  Synthetic oligonucleotide
ctagttcaaaagttctctttgccgtcgtgc

SEQ ID NO: 356352 - DNA, 30 bp, Artificial Sequence
  Synthetic oligonucleotide
ggccgggcatagggttggctgaattcgtgc

SEQ ID NO: 356353 - DNA, 30 bp, Artificial Sequence
  Synthetic oligonucleotide
tattaattccacagttaccagacttcgtgc

SEQ ID NO: 356354 - DNA, 30 bp, Artificial Sequence
  Synthetic oligonucleotide
actgttaatggtacagcgtcaccttcgtgc

SEQ ID NO: 356355 - DNA, 30 bp, Artificial Sequence
  Synthetic oligonucleotide
ccgaaatggagcggcaacaggagaaggtgc

SEQ ID NO: 356356 - DNA, 30 bp, Artificial Sequence
  Synthetic oligonucleotide
gcatgcgcatacgacaaaatacgaaggtgc

SEQ ID NO: 356357 - DNA, 30 bp, Artificial Sequence
  Synthetic oligonucleotide
ggctggttgtaatgttatgcaagcaggtgc

SEQ ID NO: 356358 - DNA, 30 bp, Artificial Sequence
  Synthetic oligonucleotide
caccgggcatgtccgaggcacaagaggtgc

SEQ ID NO: 356359 - DNA, 30 bp, Artificial Sequence
  Synthetic oligonucleotide
caaaagagggattctctgtgcgcgaggtgc

SEQ ID NO: 356360 - DNA, 30 bp, Artificial Sequence
  Synthetic oligonucleotide
gccgatggccctaatcgaccacggaggtgc

SEQ ID NO: 356361 - DNA, 30 bp, Artificial Sequence
  Synthetic oligonucleotide
aattcacgctagaaaatttcgatgaggtgc

SEQ ID NO: 356362 - DNA, 30 bp, Artificial Sequence
  Synthetic oligonucleotide
gtctacgtgtaaatatattgaactaggtgc

SEQ ID NO: 356363 - DNA, 30 bp, Artificial Sequence
  Synthetic oligonucleotide
cctttcttcgtgtgaccttacgctaggtgc

SEQ ID NO: 356364 - DNA, 31 bp, Artificial Sequence
  Synthetic oligonucleotide
ctgctctgacgtctacaagatgagacggtgc

SEQ ID NO: 356365 - DNA, 30 bp, Artificial Sequence
  Synthetic oligonucleotide
tctcgttcatattgaaatcgtgtacggtgc

SEQ ID NO: 356366 - DNA, 30 bp, Artificial Sequence
  Synthetic oligonucleotide
caactgatacctgtagagtttcgccggtgc

SEQ ID NO: 356367 - DNA, 30 bp, Artificial Sequence
  Synthetic oligonucleotide
gtacgaatcgctagtagtccacagcggtgc

SEQ ID NO: 356368 - DNA, 30 bp, Artificial Sequence
  Synthetic oligonucleotide
taaagcgcttctgggacaccgaatcggtgc

SEQ ID NO: 356369 - DNA, 30 bp, Artificial Sequence
  Synthetic oligonucleotide
gcgtaccagaaaaagcaatcctatcggtgc

SEQ ID NO: 356370 - DNA, 30 bp, Artificial Sequence
  Synthetic oligonucleotide
acgatagcaagaccgatgccatgtcggtgc

SEQ ID NO: 356371 - DNA, 30 bp, Artificial Sequence
  Synthetic oligonucleotide
gaaatccccagctcgcatgatgaagggtgc

SEQ ID NO: 356372 - DNA, 30 bp, Artificial Sequence
  Synthetic oligonucleotide
gacacgtcaggcgcagccagagcagggtgc

SEQ ID NO: 356373 - DNA, 30 bp, Artificial Sequence
  Synthetic oligonucleotide
tcccacaagtggcacagtgctgtcgggtgc

SEQ ID NO: 356374 - DNA, 30 bp, Artificial Sequence
  Synthetic oligonucleotide
tcgggaaaaattagtggtcagggggggtgc

SEQ ID NO: 356375 - DNA, 30 bp, Artificial Sequence
  Synthetic oligonucleotide
cgtgcaggcccaagcacgattcatgggtgc

SEQ ID NO: 356376 - DNA, 30 bp, Artificial Sequence
  Synthetic oligonucleotide
gcacagactgatgcaaaaatagatgggtgc

SEQ ID NO: 356377 - DNA, 30 bp, Artificial Sequence
  Synthetic oligonucleotide
agcttcgtcgaaagtgagcgtgctgggtgc

SEQ ID NO: 356378 - DNA, 30 bp, Artificial Sequence
  Synthetic oligonucleotide
gggtctgggtccggataaatgtttgggtgc

SEQ ID NO: 356379 - DNA, 30 bp, Artificial Sequence
  Synthetic oligonucleotide
gctcattcatatggacaagtagaatggtgc

SEQ ID NO: 356380 - DNA, 30 bp, Artificial Sequence
  Synthetic oligonucleotide
gtttaagaagttgatcttacgagatggtgc

SEQ ID NO: 356381 - DNA, 30 bp, Artificial Sequence
  Synthetic oligonucleotide
tagagcaatggatttctaaaccggtggtgc

SEQ ID NO: 356382 - DNA, 30 bp, Artificial Sequence
  Synthetic oligonucleotide
gtgcttacgccctagggctatatttggtgc

SEQ ID NO: 356383 - DNA, 30 bp, Artificial Sequence
  Synthetic oligonucleotide
gcatcattatagccgcctaaagacatgtgc

SEQ ID NO: 356384 - DNA, 30 bp, Artificial Sequence
  Synthetic oligonucleotide
gaaggcccttctctagagtgtgttatgtgc

SEQ ID NO: 356385 - DNA, 30 bp, Artificial Sequence
  Synthetic oligonucleotide
gcgtaattcataatatcgttaccactgtgc

SEQ ID NO: 356386 - DNA, 30 bp, Artificial Sequence
  Synthetic oligonucleotide
cacttctctcccagcataaggggactgtgc

SEQ ID NO: 356387 - DNA, 30 bp, Artificial Sequence
  Synthetic oligonucleotide
ccaaaatttagcggcattgttttcctgtgc

SEQ ID NO: 356388 - DNA, 30 bp, Artificial Sequence
  Synthetic oligonucleotide
atattaaaatgacttaagcgtacgctgtgc

SEQ ID NO: 356389 - DNA, 30 bp, Artificial Sequence
  Synthetic oligonucleotide
gttaagccaatgagactgacctcagtgtgc

SEQ ID NO: 356390 - DNA, 30 bp, Artificial Sequence
  Synthetic oligonucleotide
cttcttaaggctgattcatccgccgtgtgc

SEQ ID NO: 356391 - DNA, 30 bp, Artificial Sequence
  Synthetic oligonucleotide
tctgcgagtggatcgagagtgtgggtgtgc

SEQ ID NO: 356392 - DNA, 30 bp, Artificial Sequence
  Synthetic oligonucleotide
gtaacagcggaagcggaatgattggtgtgc

SEQ ID NO: 356393 - DNA, 30 bp, Artificial Sequence
  Synthetic oligonucleotide
gccaatgcacgcctcgacgacaatgtgtgc

SEQ ID NO: 356394 - DNA, 30 bp, Artificial Sequence
  Synthetic oligonucleotide
ttacaccttgcgaacaagccccatgtgtgc

SEQ ID NO: 356395 - DNA, 30 bp, Artificial Sequence
  Synthetic oligonucleotide
ataggtaatcacggtggacgaagtgtgtgc

SEQ ID NO: 356396 - DNA, 30 bp, Artificial Sequence
  Synthetic oligonucleotide
aattcgaggtgcaacagggaacaattgtgc

SEQ ID NO: 356397 - DNA, 30 bp, Artificial Sequence
  Synthetic oligonucleotide
caactctctatcaacccagcgctattgtgc

SEQ ID NO: 356398 - DNA, 30 bp, Artificial Sequence
  Synthetic oligonucleotide
accggcgtcacccggttaacttacttgtgc

SEQ ID NO: 356399 - DNA, 30 bp, Artificial Sequence
  Synthetic oligonucleotide
tcggaagcaacacatagacgagccttgtgc

SEQ ID NO: 356400 - DNA, 30 bp, Artificial Sequence
  Synthetic oligonucleotide
tactatcgcagtcttatttgcgccttgtgc

SEQ ID NO: 356401 - DNA, 30 bp, Artificial Sequence
  Synthetic oligonucleotide
ctttcgtattatctcctcttaatcttgtgc

SEQ ID NO: 356402 - DNA, 30 bp, Artificial Sequence
  Synthetic oligonucleotide
cgtttgaaaagaataggctaccgtttgtgc

SEQ ID NO: 356403 - DNA, 30 bp, Artificial Sequence
  Synthetic oligonucleotide
agattcacttcttaaagcaaagaaaattgc

SEQ ID NO: 356404 - DNA, 30 bp, Artificial Sequence
  Synthetic oligonucleotide
aagtgaataggcctggtccgcacaaattgc

SEQ ID NO: 356405 - DNA, 30 bp, Artificial Sequence
  Synthetic oligonucleotide
agttcgtcttctcgatgtcatacaaattgc

SEQ ID NO: 356406 - DNA, 30 bp, Artificial Sequence
  Synthetic oligonucleotide
ccatgcgcagagcagtatcttccaaattgc

SEQ ID NO: 356407 - DNA, 30 bp, Artificial Sequence
  Synthetic oligonucleotide
atacacttgcaacatacgttttcaaattgc

SEQ ID NO: 356408 - DNA, 30 bp, Artificial Sequence
  Synthetic oligonucleotide
tcggggattgaagggaaattctgaaattgc

SEQ ID NO: 356409 - DNA, 30 bp, Artificial Sequence
  Synthetic oligonucleotide
agcttactgtccggaattcgcggcaattgc

SEQ ID NO: 356410 - DNA, 30 bp, Artificial Sequence
  Synthetic oligonucleotide
gtttgccgcacatggcaggggaggaattgc

SEQ ID NO: 356411 - DNA, 30 bp, Artificial Sequence
  Synthetic oligonucleotide
gcatagaactatgtacccacctataattgc

SEQ ID NO: 356412 - DNA, 30 bp, Artificial Sequence
  Synthetic oligonucleotide
ttcaaatggcgaagttgggcacttaattgc

SEQ ID NO: 356413 - DNA, 30 bp, Artificial Sequence
  Synthetic oligonucleotide
aaggttttgttgcgtggtttgagacattgc

SEQ ID NO: 356414 - DNA, 30 bp, Artificial Sequence
  Synthetic oligonucleotide
atccacccgacaagttagtagatccattgc

SEQ ID NO: 356415 - DNA, 29 bp, Artificial Sequence
  Synthetic oligonucleotide
agggggtcaaaatcgaatagtcgcattgc

SEQ ID NO: 356416 - DNA, 30 bp, Artificial Sequence
  Synthetic oligonucleotide
ttcactaaactacgcacaattgggcattgc

SEQ ID NO: 356417 - DNA, 30 bp, Artificial Sequence
  Synthetic oligonucleotide
caaagggtcccgcggtccaatggtcattgc

SEQ ID NO: 356418 - DNA, 30 bp, Artificial Sequence
  Synthetic oligonucleotide
agtagtaatggataactccccattcattgc

SEQ ID NO: 356419 - DNA, 30 bp, Artificial Sequence
  Synthetic oligonucleotide
gagggtcaacccgtctatcgtcaggattgc

SEQ ID NO: 356420 - DNA, 30 bp, Artificial Sequence
  Synthetic oligonucleotide
gttatattagtagtgcatgtaatggattgc

SEQ ID NO: 356421 - DNA, 30 bp, Artificial Sequence
  Synthetic oligonucleotide
ttatatagcttgatgtcatgccatgattgc

SEQ ID NO: 356422 - DNA, 30 bp, Artificial Sequence
  Synthetic oligonucleotide
tagtaacagacctgtcggaggcatgattgc

SEQ ID NO: 356423 - DNA, 30 bp, Artificial Sequence
  Synthetic oligonucleotide
gcgttggattagtaattctccggtgattgc

SEQ ID NO: 356424 - DNA, 30 bp, Artificial Sequence
  Synthetic oligonucleotide
atatggctggcaaatgtatccgtatattgc

SEQ ID NO: 356425 - DNA, 30 bp, Artificial Sequence
  Synthetic oligonucleotide
taaatgcgcgcgctgctacatacgtattgc

SEQ ID NO: 356426 - DNA, 30 bp, Artificial Sequence
  Synthetic oligonucleotide
gtaaaactaaagaagtcgcagaggtattgc

SEQ ID NO: 356427 - DNA, 30 bp, Artificial Sequence
  Synthetic oligonucleotide
agtaggggtcaccctaaaatcacttattgc

SEQ ID NO: 356428 - DNA, 30 bp, Artificial Sequence
  Synthetic oligonucleotide
ctggttaatacgatactagtgacttattgc

SEQ ID NO: 356429 - DNA, 30 bp, Artificial Sequence
  Synthetic oligonucleotide
agggcgggttaaggagaatgtccttattgc

SEQ ID NO: 356430 - DNA, 30 bp, Artificial Sequence
  Synthetic oligonucleotide
agtccccttgtttaagcgctgatttattgc

SEQ ID NO: 356431 - DNA, 30 bp, Artificial Sequence
  Synthetic oligonucleotide
gtccggcggttatagtagctgtgaacttgc

SEQ ID NO: 356432 - DNA, 30 bp, Artificial Sequence
  Synthetic oligonucleotide
tgtcgagccccctctgtcactaacacttgc

SEQ ID NO: 356433 - DNA, 30 bp, Artificial Sequence
  Synthetic oligonucleotide
ttagctttgtaactggggtgggtgacttgc

SEQ ID NO: 356434 - DNA, 30 bp, Artificial Sequence
  Synthetic oligonucleotide
acccaggcatcgtacatttctcctacttgc

SEQ ID NO: 356435 - DNA, 30 bp, Artificial Sequence
  Synthetic oligonucleotide
tcttatctcttggggtgtatcacaccttgc

SEQ ID NO: 356436 - DNA, 30 bp, Artificial Sequence
  Synthetic oligonucleotide
cataaagcttgaagccgcttcctaccttgc

SEQ ID NO: 356437 - DNA, 30 bp, Artificial Sequence
  Synthetic oligonucleotide
aaacccaatagactgcgctaaagtccttgc

SEQ ID NO: 356438 - DNA, 30 bp, Artificial Sequence
  Synthetic oligonucleotide
ttctttggagtaggtctctatgttccttgc

SEQ ID NO: 356439 - DNA, 30 bp, Artificial Sequence
  Synthetic oligonucleotide
cataatcgtgccagggttgattaagcttgc

SEQ ID NO: 356440 - DNA, 30 bp, Artificial Sequence
  Synthetic oligonucleotide
tcagatcaagccaagacgttcagggcttgc

SEQ ID NO: 356441 - DNA, 30 bp, Artificial Sequence
  Synthetic oligonucleotide
cacccgcacatgtagatcacagatgcttgc

SEQ ID NO: 356442 - DNA, 30 bp, Artificial Sequence
  Synthetic oligonucleotide
ggaggctagcaactcgattcgcctgcttgc

SEQ ID NO: 356443 - DNA, 30 bp, Artificial Sequence
  Synthetic oligonucleotide
cctttgcctactattgcccttagtgcttgc

SEQ ID NO: 356444 - DNA, 30 bp, Artificial Sequence
  Synthetic oligonucleotide
tctattactaatcgagtagaacgtgcttgc

SEQ ID NO: 356445 - DNA, 30 bp, Artificial Sequence
  Synthetic oligonucleotide
cgaaatagacgcgtggtcgagtactcttgc

SEQ ID NO: 356446 - DNA, 30 bp, Artificial Sequence
  Synthetic oligonucleotide
gtcgagcctgaccggcccagtagctcttgc

SEQ ID NO: 356447 - DNA, 30 bp, Artificial Sequence
  Synthetic oligonucleotide
gaaaattgtacacgttgaattaaaagttgc

SEQ ID NO: 356448 - DNA, 30 bp, Artificial Sequence
  Synthetic oligonucleotide
ttgtcacaccatatattgcaatgaagttgc

SEQ ID NO: 356449 - DNA, 30 bp, Artificial Sequence
  Synthetic oligonucleotide
gtacccgggaatccatacttaaacagttgc

SEQ ID NO: 356450 - DNA, 30 bp, Artificial Sequence
  Synthetic oligonucleotide
cactttaggagtttgaactttaccagttgc

SEQ ID NO: 356451 - DNA, 30 bp, Artificial Sequence
  Synthetic oligonucleotide
tctcgcggatgcaagatggttctcagttgc

SEQ ID NO: 356452 - DNA, 30 bp, Artificial Sequence
  Synthetic oligonucleotide
gggcggtgttctggaaaggataggagttgc

SEQ ID NO: 356453 - DNA, 30 bp, Artificial Sequence
  Synthetic oligonucleotide
aaagcatcggtgatttctccacaacgttgc

SEQ ID NO: 356454 - DNA, 30 bp, Artificial Sequence
  Synthetic oligonucleotide
caagcgccctcggaataaaattaccgttgc

SEQ ID NO: 356455 - DNA, 30 bp, Artificial Sequence
  Synthetic oligonucleotide
aactctggacgttttacccatatccgttgc

SEQ ID NO: 356456 - DNA, 30 bp, Artificial Sequence
  Synthetic oligonucleotide
taactagagcctttgggaaaaatgcgttgc

SEQ ID NO: 356457 - DNA, 30 bp, Artificial Sequence
  Synthetic oligonucleotide
ttaaggattggttccgcgggactgcgttgc

SEQ ID NO: 356458 - DNA, 30 bp, Artificial Sequence
  Synthetic oligonucleotide
atacatgcgttgtcggtcctggaaggttgc

SEQ ID NO: 356459 - DNA, 30 bp, Artificial Sequence
  Synthetic oligonucleotide
aagatagacgggcccggagttcacggttgc

SEQ ID NO: 356460 - DNA, 30 bp, Artificial Sequence
  Synthetic oligonucleotide
attcagggactcatacgcccgttgggttgc

SEQ ID NO: 356461 - DNA, 30 bp, Artificial Sequence
  Synthetic oligonucleotide
ttgtttcctgtgtgaaacatacgatgttgc

SEQ ID NO: 356462 - DNA, 30 bp, Artificial Sequence
  Synthetic oligonucleotide
attgacgtcccctcagtaacgtgctgttgc

SEQ ID NO: 356463 - DNA, 30 bp, Artificial Sequence
  Synthetic oligonucleotide
agtatgtcgaacggaagagcggggtgttgc

SEQ ID NO: 356464 - DNA, 30 bp, Artificial Sequence
  Synthetic oligonucleotide
tgactaccgctttttaggtgcttcatttgc

SEQ ID NO: 356465 - DNA, 30 bp, Artificial Sequence
  Synthetic oligonucleotide
ccactcttgcacaatgtaagtatgatttgc

SEQ ID NO: 356466 - DNA, 30 bp, Artificial Sequence
  Synthetic oligonucleotide
caatatctcttcgccagtctaaatatttgc

SEQ ID NO: 356467 - DNA, 30 bp, Artificial Sequence
  Synthetic oligonucleotide
gtcccttgttacataagcacagctatttgc

SEQ ID NO: 356468 - DNA, 30 bp, Artificial Sequence
  Synthetic oligonucleotide
ataggttactcatcgaggcggagtatttgc

SEQ ID NO: 356469 - DNA, 30 bp, Artificial Sequence
  Synthetic oligonucleotide
aacgaaactttgtttattagcggtatttgc

SEQ ID NO: 356470 - DNA, 30 bp, Artificial Sequence
  Synthetic oligonucleotide
aaccgggttagacaaggccccattatttgc

SEQ ID NO: 356471 - DNA, 30 bp, Artificial Sequence
  Synthetic oligonucleotide
gttgagtatggaagaccgccatttatttgc

SEQ ID NO: 356472 - DNA, 30 bp, Artificial Sequence
  Synthetic oligonucleotide
tagcataagcatggggacatgccactttgc

SEQ ID NO: 356473 - DNA, 30 bp, Artificial Sequence
  Synthetic oligonucleotide
caccccattccccgtcacgctacgctttgc

SEQ ID NO: 356474 - DNA, 30 bp, Artificial Sequence
  Synthetic oligonucleotide
agtgtattgttggtcctaggttggctttgc

SEQ ID NO: 356475 - DNA, 30 bp, Artificial Sequence
  Synthetic oligonucleotide
gccgcaaagaagtcattgatgggtctttgc

SEQ ID NO: 356476 - DNA, 30 bp, Artificial Sequence
  Synthetic oligonucleotide
atgcacgcatagaaggtgttatcagtttgc

SEQ ID NO: 356477 - DNA, 30 bp, Artificial Sequence
  Synthetic oligonucleotide
ccgttgttcgtagcaaccggatgagtttgc

SEQ ID NO: 356478 - DNA, 30 bp, Artificial Sequence
  Synthetic oligonucleotide
tgttacagctcaccaatatggttagtttgc

SEQ ID NO: 356479 - DNA, 30 bp, Artificial Sequence
  Synthetic oligonucleotide
acccacgcccatttccaaagtgaggtttgc

SEQ ID NO: 356480 - DNA, 30 bp, Artificial Sequence
  Synthetic oligonucleotide
gacgttttaccaagggtcctacgattttgc

SEQ ID NO: 356481 - DNA, 30 bp, Artificial Sequence
  Synthetic oligonucleotide
tgaatggaacccggtcgccatatattttgc

SEQ ID NO: 356482 - DNA, 30 bp, Artificial Sequence
  Synthetic oligonucleotide
ggaatatgagcttgaataatttccttttgc

SEQ ID NO: 356483 - DNA, 30 bp, Artificial Sequence
  Synthetic oligonucleotide
ttatgtgtacagcacaccgtgagcttttgc

SEQ ID NO: 356484 - DNA, 30 bp, Artificial Sequence
  Synthetic oligonucleotide
gcatagccggattgcgtcgttaggttttgc

SEQ ID NO: 356485 - DNA, 30 bp, Artificial Sequence
  Synthetic oligonucleotide
gacatcacgagaaaatttgttcatttttgc

SEQ ID NO: 356486 - DNA, 30 bp, Artificial Sequence
  Synthetic oligonucleotide
gcgttatctgtaagcagaattggaaaaatc

SEQ ID NO: 356487 - DNA, 30 bp, Artificial Sequence
  Synthetic oligonucleotide
gtcaatcgtctttaacttccgaccaaaatc

SEQ ID NO: 356488 - DNA, 30 bp, Artificial Sequence
  Synthetic oligonucleotide
gtttgcgaattagactgatagaagaaaatc

SEQ ID NO: 356489 - DNA, 30 bp, Artificial Sequence
  Synthetic oligonucleotide
tcacagcaggtgaaaggtgagatgaaaatc

SEQ ID NO: 356490 - DNA, 30 bp, Artificial Sequence
  Synthetic oligonucleotide
taggctctcctatgttcgaacctgaaaatc

SEQ ID NO: 356491 - DNA, 30 bp, Artificial Sequence
  Synthetic oligonucleotide
aacaatgactgtatttatgcggtgaaaatc

SEQ ID NO: 356492 - DNA, 30 bp, Artificial Sequence
  Synthetic oligonucleotide
ttcgcaaatatctgtctgttacataaaatc

SEQ ID NO: 356493 - DNA, 30 bp, Artificial Sequence
  Synthetic oligonucleotide
cattgtcacagtgtatggtcttctaaaatc

SEQ ID NO: 356494 - DNA, 30 bp, Artificial Sequence
  Synthetic oligonucleotide
ttgtcggattcctaaatctcaggtaaaatc

SEQ ID NO: 356495 - DNA, 30 bp, Artificial Sequence
  Synthetic oligonucleotide
gttaggccagttagtgaccgtattaaaatc

SEQ ID NO: 356496 - DNA, 30 bp, Artificial Sequence
  Synthetic oligonucleotide
tcagatgaaaatcatcaagctgttaaaatc

SEQ ID NO: 356497 - DNA, 30 bp, Artificial Sequence
  Synthetic oligonucleotide
gaaacgacgatagcttgtgcacaacaaatc

SEQ ID NO: 356498 - DNA, 30 bp, Artificial Sequence
  Synthetic oligonucleotide
gggggccgaaagtgtacgagcgcacaaatc

SEQ ID NO: 356499 - DNA, 30 bp, Artificial Sequence
  Synthetic oligonucleotide
gggtaatcggaaggggaccgtggacaaatc

SEQ ID NO: 356500 - DNA, 30 bp, Artificial Sequence
  Synthetic oligonucleotide
aaaaagcacctaagcccgatgccgcaaatc

SEQ ID NO: 356501 - DNA, 30 bp, Artificial Sequence
  Synthetic oligonucleotide
agttaaagtgggatcgttatctcgcaaatc

SEQ ID NO: 356502 - DNA, 30 bp, Artificial Sequence
  Synthetic oligonucleotide
cattggcctttcgcatgaaaggggcaaatc

SEQ ID NO: 356503 - DNA, 30 bp, Artificial Sequence
  Synthetic oligonucleotide
cacccgacaaaagtacgggtatctcaaatc

SEQ ID NO: 356504 - DNA, 30 bp, Artificial Sequence
  Synthetic oligonucleotide
ttgcctatcgacagatgctcaattcaaatc

SEQ ID NO: 356505 - DNA, 30 bp, Artificial Sequence
  Synthetic oligonucleotide
gcggtgaaccaccactacgcggttcaaatc

SEQ ID NO: 356506 - DNA, 30 bp, Artificial Sequence
  Synthetic oligonucleotide
aggaaatgggccccctcttctgttcaaatc

SEQ ID NO: 356507 - DNA, 30 bp, Artificial Sequence
  Synthetic oligonucleotide
cttgggggacatgggttaaactaagaaatc

SEQ ID NO: 356508 - DNA, 30 bp, Artificial Sequence
  Synthetic oligonucleotide
acagggcacattcctggacgcttagaaatc

SEQ ID NO: 356509 - DNA, 30 bp, Artificial Sequence
  Synthetic oligonucleotide
cttagctgagggttgatctatgaggaaatc

SEQ ID NO: 356510 - DNA, 30 bp, Artificial Sequence
  Synthetic oligonucleotide
ctagtgtgagtcctgtggcagaatgaaatc

SEQ ID NO: 356511 - DNA, 30 bp, Artificial Sequence
  Synthetic oligonucleotide
ctggtccgttcaattcttgggaaataaatc

SEQ ID NO: 356512 - DNA, 30 bp, Artificial Sequence
  Synthetic oligonucleotide
accacagcctgaagcgtaggtgaataaatc

SEQ ID NO: 356513 - DNA, 30 bp, Artificial Sequence
  Synthetic oligonucleotide
tcaagataactgatattactgtaataaatc

SEQ ID NO: 356514 - DNA, 30 bp, Artificial Sequence
  Synthetic oligonucleotide
acgattcgttacgtcaaggatatataaatc

SEQ ID NO: 356515 - DNA, 30 bp, Artificial Sequence
  Synthetic oligonucleotide
gggcgggcccttccatcgtgggtataaatc

SEQ ID NO: 356516 - DNA, 30 bp, Artificial Sequence
  Synthetic oligonucleotide
atgctatgacatttgaggcgacgctaaatc

SEQ ID NO: 356517 - DNA, 30 bp, Artificial Sequence
  Synthetic oligonucleotide
aaatgtggccacatggcaatgctctaaatc

SEQ ID NO: 356518 - DNA, 30 bp, Artificial Sequence
  Synthetic oligonucleotide
atctcgtcgctctcggtgccgccgtaaatc

SEQ ID NO: 356519 - DNA, 30 bp, Artificial Sequence
  Synthetic oligonucleotide
aattcagctaaggggacaactcggtaaatc

SEQ ID NO: 356520 - DNA, 30 bp, Artificial Sequence
  Synthetic oligonucleotide
ttaacacatgaggcttgtatttcttaaatc

SEQ ID NO: 356521 - DNA, 30 bp, Artificial Sequence
  Synthetic oligonucleotide
aattgagtcgtgcccggccactgttaaatc

SEQ ID NO: 356522 - DNA, 30 bp, Artificial Sequence
  Synthetic oligonucleotide
tgtgctggtcactgcgggcttgtaacaatc

SEQ ID NO: 356523 - DNA, 30 bp, Artificial Sequence
  Synthetic oligonucleotide
ttagacggggggagcgcgaatgacacaatc

SEQ ID NO: 356524 - DNA, 30 bp, Artificial Sequence
  Synthetic oligonucleotide
atactcctagtccgcacggcaacgacaatc

SEQ ID NO: 356525 - DNA, 30 bp, Artificial Sequence
  Synthetic oligonucleotide
gccgtgttggtatgagacacggggacaatc

SEQ ID NO: 356526 - DNA, 30 bp, Artificial Sequence
  Synthetic oligonucleotide
ctaggcccctaccgattggcgaatacaatc

SEQ ID NO: 356527 - DNA, 30 bp, Artificial Sequence
  Synthetic oligonucleotide
tgtcgttatgcgtctcggcatcgtacaatc

SEQ ID NO: 356528 - DNA, 30 bp, Artificial Sequence
  Synthetic oligonucleotide
ggcctgatcatcgtacagggtctaccaatc

SEQ ID NO: 356529 - DNA, 30 bp, Artificial Sequence
  Synthetic oligonucleotide
gtggcggaacatattatgctccccccaatc

SEQ ID NO: 356530 - DNA, 30 bp, Artificial Sequence
  Synthetic oligonucleotide
caactttcttcatgcatatagcagccaatc

SEQ ID NO: 356531 - DNA, 30 bp, Artificial Sequence
  Synthetic oligonucleotide
aatgaatggtaacaccgtgattagccaatc

SEQ ID NO: 356532 - DNA, 30 bp, Artificial Sequence
  Synthetic oligonucleotide
aggagattgctcctatggactgggccaatc

SEQ ID NO: 356533 - DNA, 30 bp, Artificial Sequence
  Synthetic oligonucleotide
gagattaggggctctaataagctgccaatc

SEQ ID NO: 356534 - DNA, 30 bp, Artificial Sequence
  Synthetic oligonucleotide
acactgaaatcgccatcgttataagcaatc

SEQ ID NO: 356535 - DNA, 30 bp, Artificial Sequence
  Synthetic oligonucleotide
cggtctctaacgttcaagtcgacagcaatc

SEQ ID NO: 356536 - DNA, 30 bp, Artificial Sequence
  Synthetic oligonucleotide
gatatgtatactaccgatatgtgagcaatc

SEQ ID NO: 356537 - DNA, 30 bp, Artificial Sequence
  Synthetic oligonucleotide
ctatgatactaagatggttggatagcaatc

SEQ ID NO: 356538 - DNA, 30 bp, Artificial Sequence
  Synthetic oligonucleotide
tcccaaatgtataagacgctagtggcaatc

SEQ ID NO: 356539 - DNA, 30 bp, Artificial Sequence
  Synthetic oligonucleotide
cgggattactctccatagtgtgaatcaatc

SEQ ID NO: 356540 - DNA, 30 bp, Artificial Sequence
  Synthetic oligonucleotide
atgttctataatttatggcattgctcaatc

SEQ ID NO: 356541 - DNA, 30 bp, Artificial Sequence
  Synthetic oligonucleotide
tagctgcggtgtggtagtcgttagtcaatc

SEQ ID NO: 356542 - DNA, 31 bp, Artificial Sequence
  Synthetic oligonucleotide
aatgggttacaggtccttattcgcgtcaatc

SEQ ID NO: 356543 - DNA, 30 bp, Artificial Sequence
  Synthetic oligonucleotide
aaatatcatgattaactgctgatgtcaatc

SEQ ID NO: 356544 - DNA, 30 bp, Artificial Sequence
  Synthetic oligonucleotide
ggatacttggtattaattcaacattcaatc

SEQ ID NO: 356545 - DNA, 30 bp, Artificial Sequence
  Synthetic oligonucleotide
gtcttcgaaggataagtcaagtgaagaatc

SEQ ID NO: 356546 - DNA, 30 bp, Artificial Sequence
  Synthetic oligonucleotide
agcagtcatgtatgggatatcgtaagaatc

SEQ ID NO: 356547 - DNA, 30 bp, Artificial Sequence
  Synthetic oligonucleotide
gggtgcatctccgatatccacgtgagaatc

SEQ ID NO: 356548 - DNA, 30 bp, Artificial Sequence
  Synthetic oligonucleotide
gttctatgagtcgttggctaggatagaatc

SEQ ID NO: 356549 - DNA, 30 bp, Artificial Sequence
  Synthetic oligonucleotide
gccaagcacatggctgggacggaccgaatc

SEQ ID NO: 356550 - DNA, 30 bp, Artificial Sequence
  Synthetic oligonucleotide
ctagtcccgatagttgtgtcacgccgaatc

SEQ ID NO: 356551 - DNA, 30 bp, Artificial Sequence
  Synthetic oligonucleotide
ctaagtttgtcaaagtcactccgccgaatc

SEQ ID NO: 356552 - DNA, 30 bp, Artificial Sequence
  Synthetic oligonucleotide
ccctcgatgaaatgtttgcaaccgcgaatc

SEQ ID NO: 356553 - DNA, 30 bp, Artificial Sequence
  Synthetic oligonucleotide
caaattcaaagttcctgagaaaaaggaatc

SEQ ID NO: 356554 - DNA, 30 bp, Artificial Sequence
  Synthetic oligonucleotide
gaataatacctgtatagtccacccggaatc

SEQ ID NO: 356555 - DNA, 30 bp, Artificial Sequence
  Synthetic oligonucleotide
ttgggataagatttgctactatgcggaatc

SEQ ID NO: 356556 - DNA, 30 bp, Artificial Sequence
  Synthetic oligonucleotide
agaatcagacacgggggcaatcggggaatc

SEQ ID NO: 356557 - DNA, 30 bp, Artificial Sequence
  Synthetic oligonucleotide
cagtcagacccgggaatcggcatgggaatc

SEQ ID NO: 356558 - DNA, 30 bp, Artificial Sequence
  Synthetic oligonucleotide
gcatccaaaggcaacccgtctcttggaatc

SEQ ID NO: 356559 - DNA, 30 bp, Artificial Sequence
  Synthetic oligonucleotide
tgaactcaggatgctctaagcaaatgaatc

SEQ ID NO: 356560 - DNA, 30 bp, Artificial Sequence
  Synthetic oligonucleotide
gatatgtttctctttacatacacatgaatc

SEQ ID NO: 356561 - DNA, 30 bp, Artificial Sequence
  Synthetic oligonucleotide
ctataatctagtcagtagaccagctgaatc

SEQ ID NO: 356562 - DNA, 30 bp, Artificial Sequence
  Synthetic oligonucleotide
cacagaagtatgcccttaactaggtgaatc

SEQ ID NO: 356563 - DNA, 30 bp, Artificial Sequence
  Synthetic oligonucleotide
ttgaggtatagtgatgtcttcaggataatc

SEQ ID NO: 356564 - DNA, 30 bp, Artificial Sequence
  Synthetic oligonucleotide
agtaaggatgagctgtaatcgaggataatc

SEQ ID NO: 356565 - DNA, 30 bp, Artificial Sequence
  Synthetic oligonucleotide
cgcggttggtaatgggaatgagggataatc

SEQ ID NO: 356566 - DNA, 30 bp, Artificial Sequence
  Synthetic oligonucleotide
cttgccagtcgtttcaaggaatggataatc

SEQ ID NO: 356567 - DNA, 30 bp, Artificial Sequence
  Synthetic oligonucleotide
ccgacggtacttctgtgtagctatataatc

SEQ ID NO: 356568 - DNA, 30 bp, Artificial Sequence
  Synthetic oligonucleotide
accgcaatattcttgtttgtacttataatc

SEQ ID NO: 356569 - DNA, 30 bp, Artificial Sequence
  Synthetic oligonucleotide
gtggccattccatcatgcaactttataatc

SEQ ID NO: 356570 - DNA, 30 bp, Artificial Sequence
  Synthetic oligonucleotide
tactcgtgcaaagccttagcagtactaatc

SEQ ID NO: 356571 - DNA, 30 bp, Artificial Sequence
  Synthetic oligonucleotide
ctcaaaccatattacaaatctttactaatc

SEQ ID NO: 356572 - DNA, 30 bp, Artificial Sequence
  Synthetic oligonucleotide
aagtgaccggatggttcacggagcctaatc

SEQ ID NO: 356573 - DNA, 30 bp, Artificial Sequence
  Synthetic oligonucleotide
acaaggccccacagtccatttctgctaatc

SEQ ID NO: 356574 - DNA, 30 bp, Artificial Sequence
  Synthetic oligonucleotide
atatgagatgtgagggccggtatcgtaatc

SEQ ID NO: 356575 - DNA, 30 bp, Artificial Sequence
  Synthetic oligonucleotide
acacacctgggtcttggaatcagtgtaatc

SEQ ID NO: 356576 - DNA, 30 bp, Artificial Sequence
  Synthetic oligonucleotide
tcacttgcagatacttgaaatgttgtaatc

SEQ ID NO: 356577 - DNA, 30 bp, Artificial Sequence
  Synthetic oligonucleotide
taacgtccgcctgtagatcaataattaatc

SEQ ID NO: 356578 - DNA, 30 bp, Artificial Sequence
  Synthetic oligonucleotide
ataagcccgagcttggcttagtaattaatc

SEQ ID NO: 356579 - DNA, 30 bp, Artificial Sequence
  Synthetic oligonucleotide
ggcttttcaaagatttgaatcatattaatc

SEQ ID NO: 356580 - DNA, 30 bp, Artificial Sequence
  Synthetic oligonucleotide
gaaagcatgggcccggtaagcctattaatc

SEQ ID NO: 356581 - DNA, 30 bp, Artificial Sequence
  Synthetic oligonucleotide
ccttagattgctgtccgggttttattaatc

SEQ ID NO: 356582 - DNA, 30 bp, Artificial Sequence
  Synthetic oligonucleotide
tgtatcggatgtaaactgctgcgcttaatc

SEQ ID NO: 356583 - DNA, 30 bp, Artificial Sequence
  Synthetic oligonucleotide
ctatcgaagcggccggcgcatcagttaatc

SEQ ID NO: 356584 - DNA, 30 bp, Artificial Sequence
  Synthetic oligonucleotide
aaagacgctgagccctcgttggatttaatc

SEQ ID NO: 356585 - DNA, 30 bp, Artificial Sequence
  Synthetic oligonucleotide
tcagaggcgggcgatagtaactatttaatc

SEQ ID NO: 356586 - DNA, 30 bp, Artificial Sequence
  Synthetic oligonucleotide
aaaggtattcatatcttttcaggtttaatc

SEQ ID NO: 356587 - DNA, 30 bp, Artificial Sequence
  Synthetic oligonucleotide
caaccctggattcgtaaaagtccaaacatc

SEQ ID NO: 356588 - DNA, 30 bp, Artificial Sequence
  Synthetic oligonucleotide
atatccatcgtttagttataatgaaacatc

SEQ ID NO: 356589 - DNA, 31 bp, Artificial Sequence
  Synthetic oligonucleotide
gtaagacgggagcgtgatgccgataaacatc

SEQ ID NO: 356590 - DNA, 30 bp, Artificial Sequence
  Synthetic oligonucleotide
gaggatcatggatcagaccgtgccaacatc

SEQ ID NO: 356591 - DNA, 30 bp, Artificial Sequence
  Synthetic oligonucleotide
aacttggctgataggttagttgcgcacatc

SEQ ID NO: 356592 - DNA, 30 bp, Artificial Sequence
  Synthetic oligonucleotide
acctagacggaagagcaggagcgcgacatc

SEQ ID NO: 356593 - DNA, 30 bp, Artificial Sequence
  Synthetic oligonucleotide
ctgcgctgtcataaaacctatgaggacatc

SEQ ID NO: 356594 - DNA, 30 bp, Artificial Sequence
  Synthetic oligonucleotide
tgctaaactcaccaaggatgcccggacatc

SEQ ID NO: 356595 - DNA, 30 bp, Artificial Sequence
  Synthetic oligonucleotide
agcaccgacagcaacagtagatgggacatc

SEQ ID NO: 356596 - DNA, 30 bp, Artificial Sequence
  Synthetic oligonucleotide
ttgattatcagattgggctagcatgacatc

SEQ ID NO: 356597 - DNA, 30 bp, Artificial Sequence
  Synthetic oligonucleotide
gacaaacttttgacagtaagtcatgacatc

SEQ ID NO: 356598 - DNA, 30 bp, Artificial Sequence
  Synthetic oligonucleotide
aaccgtactgggacagccacacctgacatc

SEQ ID NO: 356599 - DNA, 30 bp, Artificial Sequence
  Synthetic oligonucleotide
gatacgcgttttgagttcgtcattgacatc

SEQ ID NO: 356600 - DNA, 29 bp, Artificial Sequence
  Synthetic oligonucleotide
cgacctgggcctacagtcaggaatacatc

SEQ ID NO: 356601 - DNA, 30 bp, Artificial Sequence
  Synthetic oligonucleotide
aatctcgacggaggttaagttccatacatc

SEQ ID NO: 356602 - DNA, 29 bp, Artificial Sequence
  Synthetic oligonucleotide
ttcggcttgataggtatcttcgatacatc

SEQ ID NO: 356603 - DNA, 30 bp, Artificial Sequence
  Synthetic oligonucleotide
gaaccacaaacaactttgcgttgatacatc

SEQ ID NO: 356604 - DNA, 30 bp, Artificial Sequence
  Synthetic oligonucleotide
acttccgcatagaaggcctgttgatacatc

SEQ ID NO: 356605 - DNA, 30 bp, Artificial Sequence
  Synthetic oligonucleotide
taattccataacgctcgctttgactacatc

SEQ ID NO: 356606 - DNA, 30 bp, Artificial Sequence
  Synthetic oligonucleotide
tcattccctcgtcggcgattttattacatc

SEQ ID NO: 356607 - DNA, 30 bp, Artificial Sequence
  Synthetic oligonucleotide
agcgcggccttaatgcggaactgttacatc

SEQ ID NO: 356608 - DNA, 30 bp, Artificial Sequence
  Synthetic oligonucleotide
attacaccagtacgtgctattctttacatc

SEQ ID NO: 356609 - DNA, 30 bp, Artificial Sequence
  Synthetic oligonucleotide
cagcacctgcattagataggacaaaccatc

SEQ ID NO: 356610 - DNA, 30 bp, Artificial Sequence
  Synthetic oligonucleotide
tcgttgttacggctctatggaaggaccatc

SEQ ID NO: 356611 - DNA, 30 bp, Artificial Sequence
  Synthetic oligonucleotide
aacaatgaagcttcggcttacgataccatc

SEQ ID NO: 356612 - DNA, 30 bp, Artificial Sequence
  Synthetic oligonucleotide
taaacacggggcgtccactatcaacccatc

SEQ ID NO: 356613 - DNA, 30 bp, Artificial Sequence
  Synthetic oligonucleotide
gcaggaacaaccgggatgtctatccccatc

SEQ ID NO: 356614 - DNA, 30 bp, Artificial Sequence
  Synthetic oligonucleotide
ggcagtgggccacaccggtaccagcccatc

SEQ ID NO: 356615 - DNA, 30 bp, Artificial Sequence
  Synthetic oligonucleotide
gaatcaaaagaaagcacccaaaatcccatc

SEQ ID NO: 356616 - DNA, 30 bp, Artificial Sequence
  Synthetic oligonucleotide
gacatgtccccgttggtattccaagccatc

SEQ ID NO: 356617 - DNA, 30 bp, Artificial Sequence
  Synthetic oligonucleotide
gtgcgtaatgacccaatggcgctcgccatc

SEQ ID NO: 356618 - DNA, 30 bp, Artificial Sequence
  Synthetic oligonucleotide
tggaattgctctgtacggagccaggccatc

SEQ ID NO: 356619 - DNA, 30 bp, Artificial Sequence
  Synthetic oligonucleotide
ttccgagtcgtcatttttgtttatgccatc

SEQ ID NO: 356620 - DNA, 30 bp, Artificial Sequence
  Synthetic oligonucleotide
cgctctcctgcgtttacatggtctgccatc

SEQ ID NO: 356621 - DNA, 30 bp, Artificial Sequence
  Synthetic oligonucleotide
tgaagttggatttacttgttagtatccatc

SEQ ID NO: 356622 - DNA, 30 bp, Artificial Sequence
  Synthetic oligonucleotide
gtcggcttttaattcctcttaaactccatc

SEQ ID NO: 356623 - DNA, 30 bp, Artificial Sequence
  Synthetic oligonucleotide
taaccgccaccgtcccggccccgctccatc

SEQ ID NO: 356624 - DNA, 30 bp, Artificial Sequence
  Synthetic oligonucleotide
agggatggaaattccttaatcaagtccatc

SEQ ID NO: 356625 - DNA, 30 bp, Artificial Sequence
  Synthetic oligonucleotide
ccagtattgccgggaatttgaccgtccatc

SEQ ID NO: 356626 - DNA, 30 bp, Artificial Sequence
  Synthetic oligonucleotide
acactccccaaactctacgcatcgtccatc

SEQ ID NO: 356627 - DNA, 30 bp, Artificial Sequence
  Synthetic oligonucleotide
gcacgtccgtggcagctaccgccttccatc

SEQ ID NO: 356628 - DNA, 27 bp, Artificial Sequence
  Synthetic oligonucleotide
gtggcgctggtaatcccgccttccatc

SEQ ID NO: 356629 - DNA, 30 bp, Artificial Sequence
  Synthetic oligonucleotide
ataaccccgtcgcgactcggaagttccatc

SEQ ID NO: 356630 - DNA, 30 bp, Artificial Sequence
  Synthetic oligonucleotide
tacgtcataatcagtaccgagttttccatc

SEQ ID NO: 356631 - DNA, 30 bp, Artificial Sequence
  Synthetic oligonucleotide
ctactatggacacagggtaacagcagcatc

SEQ ID NO: 356632 - DNA, 30 bp, Artificial Sequence
  Synthetic oligonucleotide
tatcaacattatgggacgttaggcagcatc

SEQ ID NO: 356633 - DNA, 30 bp, Artificial Sequence
  Synthetic oligonucleotide
gattacaccttgttccgcaatgtcagcatc

SEQ ID NO: 356634 - DNA, 30 bp, Artificial Sequence
  Synthetic oligonucleotide
cggcattactgtcccggtgcgttcagcatc

SEQ ID NO: 356635 - DNA, 30 bp, Artificial Sequence
  Synthetic oligonucleotide
cacagagtttgtcatgaaagcacgagcatc

SEQ ID NO: 356636 - DNA, 30 bp, Artificial Sequence
  Synthetic oligonucleotide
gctaccctccaggtgagcgctgggagcatc

SEQ ID NO: 356637 - DNA, 30 bp, Artificial Sequence
  Synthetic oligonucleotide
acggtggtgggtttgcgtgaaaatagcatc

SEQ ID NO: 356638 - DNA, 30 bp, Artificial Sequence
  Synthetic oligonucleotide
actatgtcctacagacccagcgcacgcatc

SEQ ID NO: 356639 - DNA, 30 bp, Artificial Sequence
  Synthetic oligonucleotide
aagtcgagttatgattccgaaacccgcatc

SEQ ID NO: 356640 - DNA, 30 bp, Artificial Sequence
  Synthetic oligonucleotide
agttgacgcagggggaaacaggcgcgcatc

SEQ ID NO: 356641 - DNA, 30 bp, Artificial Sequence
  Synthetic oligonucleotide
ttgaatgttgaattagcaccaagtcgcatc

SEQ ID NO: 356642 - DNA, 30 bp, Artificial Sequence
  Synthetic oligonucleotide
aatcactaatacgaagcatcctttcgcatc

SEQ ID NO: 356643 - DNA, 30 bp, Artificial Sequence
  Synthetic oligonucleotide
ttgagcggccaccattgatccgaaggcatc

SEQ ID NO: 356644 - DNA, 30 bp, Artificial Sequence
  Synthetic oligonucleotide
acgctggggatccttaccgcaacaggcatc

SEQ ID NO: 356645 - DNA, 30 bp, Artificial Sequence
  Synthetic oligonucleotide
ttaaatctgtgatggtagatgagaggcatc

SEQ ID NO: 356646 - DNA, 30 bp, Artificial Sequence
  Synthetic oligonucleotide
gcaaccacatttacgtgttcgcgaggcatc

SEQ ID NO: 356647 - DNA, 30 bp, Artificial Sequence
  Synthetic oligonucleotide
aaacaccattacgaacgcatacccggcatc

SEQ ID NO: 356648 - DNA, 30 bp, Artificial Sequence
  Synthetic oligonucleotide
atggatcaaaggtaacattgacggggcatc

SEQ ID NO: 356649 - DNA, 30 bp, Artificial Sequence
  Synthetic oligonucleotide
ccattctcaacggctatacttttgggcatc

SEQ ID NO: 356650 - DNA, 30 bp, Artificial Sequence
  Synthetic oligonucleotide
atatcttgacacgcgtgtagccatggcatc

SEQ ID NO: 356651 - DNA, 30 bp, Artificial Sequence
  Synthetic oligonucleotide
ctaaatcagtgcatactggtagatggcatc

SEQ ID NO: 356652 - DNA, 30 bp, Artificial Sequence
  Synthetic oligonucleotide
tttcttcatcctcctccagttattggcatc

SEQ ID NO: 356653 - DNA, 30 bp, Artificial Sequence
  Synthetic oligonucleotide
aatttaagataatatacaacgacatgcatc

SEQ ID NO: 356654 - DNA, 30 bp, Artificial Sequence
  Synthetic oligonucleotide
aggggtttttggcacaaggagatgtgcatc

SEQ ID NO: 356655 - DNA, 30 bp, Artificial Sequence
  Synthetic oligonucleotide
tccccatcacttgaagggggaatttgcatc

SEQ ID NO: 356656 - DNA, 30 bp, Artificial Sequence
  Synthetic oligonucleotide
gcaaaataaaactcggctagttgaatcatc

SEQ ID NO: 356657 - DNA, 30 bp, Artificial Sequence
  Synthetic oligonucleotide
ttcgtagcaataacgcctagaataatcatc

SEQ ID NO: 356658 - DNA, 30 bp, Artificial Sequence
  Synthetic oligonucleotide
tgactagggggctaacaccggttaatcatc

SEQ ID NO: 356659 - DNA, 30 bp, Artificial Sequence
  Synthetic oligonucleotide
ggtaggaatggagtacaccgtcccatcatc

SEQ ID NO: 356660 - DNA, 30 bp, Artificial Sequence
  Synthetic oligonucleotide
actaggccctattaaggagggaatatcatc

SEQ ID NO: 356661 - DNA, 30 bp, Artificial Sequence
  Synthetic oligonucleotide
gaccgtgattcgccttagggcaaactcatc

SEQ ID NO: 356662 - DNA, 30 bp, Artificial Sequence
  Synthetic oligonucleotide
acctactagggcttacgtgatgaactcatc

SEQ ID NO: 356663 - DNA, 30 bp, Artificial Sequence
  Synthetic oligonucleotide
aactgtggccacgtgaacagtggactcatc

SEQ ID NO: 356664 - DNA, 30 bp, Artificial Sequence
  Synthetic oligonucleotide
aacgggtccgggtccgtacgctagctcatc

SEQ ID NO: 356665 - DNA, 30 bp, Artificial Sequence
  Synthetic oligonucleotide
atctacatcagctgtgtagtcaatctcatc

SEQ ID NO: 356666 - DNA, 30 bp, Artificial Sequence
  Synthetic oligonucleotide
gccaggtacttgcccataaccgtcgtcatc

SEQ ID NO: 356667 - DNA, 30 bp, Artificial Sequence
  Synthetic oligonucleotide
tgattggagttgcccgcgcctttcgtcatc

SEQ ID NO: 356668 - DNA, 30 bp, Artificial Sequence
  Synthetic oligonucleotide
tcttccatcaagcagttccgaggggtcatc

SEQ ID NO: 356669 - DNA, 30 bp, Artificial Sequence
  Synthetic oligonucleotide
tcgatcttttcagcggtagctgtggtcatc

SEQ ID NO: 356670 - DNA, 30 bp, Artificial Sequence
  Synthetic oligonucleotide
caggagaaagcactcatagaggttgtcatc

SEQ ID NO: 356671 - DNA, 30 bp, Artificial Sequence
  Synthetic oligonucleotide
tgaggggtgttgtgagggtgataattcatc

SEQ ID NO: 356672 - DNA, 30 bp, Artificial Sequence
  Synthetic oligonucleotide
tacatcgggtgtgtgttaaagtgattcatc

SEQ ID NO: 356673 - DNA, 30 bp, Artificial Sequence
  Synthetic oligonucleotide
ataagcgactagtacgcacaacggttcatc

SEQ ID NO: 356674 - DNA, 30 bp, Artificial Sequence
  Synthetic oligonucleotide
gctctgggccacatatgaatatgtttcatc

SEQ ID NO: 356675 - DNA, 30 bp, Artificial Sequence
  Synthetic oligonucleotide
ggataaccagtttatgaaaagaaaaagatc

SEQ ID NO: 356676 - DNA, 30 bp, Artificial Sequence
  Synthetic oligonucleotide
tatcatgttatgacgggagcaataaagatc

SEQ ID NO: 356677 - DNA, 30 bp, Artificial Sequence
  Synthetic oligonucleotide
gtctgcccccggtacatgggagacaagatc

SEQ ID NO: 356678 - DNA, 30 bp, Artificial Sequence
  Synthetic oligonucleotide
tctctaggggcgtgaagtcctcggaagatc

SEQ ID NO: 356679 - DNA, 30 bp, Artificial Sequence
  Synthetic oligonucleotide
gcctcattcgcagacgggtcagtgaagatc

SEQ ID NO: 356680 - DNA, 30 bp, Artificial Sequence
  Synthetic oligonucleotide
tccgtgcctgtttcgaggaagttacagatc

SEQ ID NO: 356681 - DNA, 30 bp, Artificial Sequence
  Synthetic oligonucleotide
tgtcttagttccaaagggttactccagatc

SEQ ID NO: 356682 - DNA, 30 bp, Artificial Sequence
  Synthetic oligonucleotide
ggctctagacagacccggaacccgcagatc

SEQ ID NO: 356683 - DNA, 30 bp, Artificial Sequence
  Synthetic oligonucleotide
atcaggtccgaactggtccaacatcagatc

SEQ ID NO: 356684 - DNA, 30 bp, Artificial Sequence
  Synthetic oligonucleotide
tcaagcgatcgtggagattatcctcagatc

SEQ ID NO: 356685 - DNA, 30 bp, Artificial Sequence
  Synthetic oligonucleotide
gaaatatcgtactttggtattcttcagatc

SEQ ID NO: 356686 - DNA, 30 bp, Artificial Sequence
  Synthetic oligonucleotide
caagggccaggccctcaggttatggagatc

SEQ ID NO: 356687 - DNA, 30 bp, Artificial Sequence
  Synthetic oligonucleotide
tcttccatcggtgcttacctcgttgagatc

SEQ ID NO: 356688 - DNA, 30 bp, Artificial Sequence
  Synthetic oligonucleotide
aatcaggtaagattgtgtcttttatagatc

SEQ ID NO: 356689 - DNA, 30 bp, Artificial Sequence
  Synthetic oligonucleotide
cagattgcctgttgccgggttgactagatc

SEQ ID NO: 356690 - DNA, 30 bp, Artificial Sequence
  Synthetic oligonucleotide
ccaatgagtttgctatctagggcgtagatc

SEQ ID NO: 356691 - DNA, 30 bp, Artificial Sequence
  Synthetic oligonucleotide
ttcgtccgaataggattccttaggtagatc

SEQ ID NO: 356692 - DNA, 30 bp, Artificial Sequence
  Synthetic oligonucleotide
gcacacgactacgcgggccagccttagatc

SEQ ID NO: 356693 - DNA, 30 bp, Artificial Sequence
  Synthetic oligonucleotide
aagttaaccatgttagactaccccacgatc

SEQ ID NO: 356694 - DNA, 30 bp, Artificial Sequence
  Synthetic oligonucleotide
cctgccacctatcggcgataatgcacgatc

SEQ ID NO: 356695 - DNA, 30 bp, Artificial Sequence
  Synthetic oligonucleotide
aagcacctactgagtcacttggtcacgatc

SEQ ID NO: 356696 - DNA, 30 bp, Artificial Sequence
  Synthetic oligonucleotide
ttactggtctgacgcgctatctagacgatc

SEQ ID NO: 356697 - DNA, 30 bp, Artificial Sequence
  Synthetic oligonucleotide
gggattaaccggtacagaagcctaccgatc

SEQ ID NO: 356698 - DNA, 30 bp, Artificial Sequence
  Synthetic oligonucleotide
tgaacgcgttggattctaaataacccgatc

SEQ ID NO: 356699 - DNA, 30 bp, Artificial Sequence
  Synthetic oligonucleotide
ctggacggctgatgattgagcatcccgatc

SEQ ID NO: 356700 - DNA, 30 bp, Artificial Sequence
  Synthetic oligonucleotide
catcatccggctatgggaggcaatccgatc

SEQ ID NO: 356701 - DNA, 30 bp, Artificial Sequence
  Synthetic oligonucleotide
acccttccatggggtacgaactgagcgatc

SEQ ID NO: 356702 - DNA, 30 bp, Artificial Sequence
  Synthetic oligonucleotide
gcaggtgacgcttacatgttatgggcgatc

SEQ ID NO: 356703 - DNA, 30 bp, Artificial Sequence
  Synthetic oligonucleotide
gatagtgtgatgtgagacaggtgggcgatc

SEQ ID NO: 356704 - DNA, 30 bp, Artificial Sequence
  Synthetic oligonucleotide
aagcgcgctcgctaatgcatcctggcgatc

SEQ ID NO: 356705 - DNA, 30 bp, Artificial Sequence
  Synthetic oligonucleotide
ggggggactctccgcgaacgctgtgcgatc

SEQ ID NO: 356706 - DNA, 30 bp, Artificial Sequence
  Synthetic oligonucleotide
gaccgcctgcgcgattgcttctgtgcgatc

SEQ ID NO: 356707 - DNA, 30 bp, Artificial Sequence
  Synthetic oligonucleotide
gctggtggccgcataaactagcactcgatc

SEQ ID NO: 356708 - DNA, 30 bp, Artificial Sequence
  Synthetic oligonucleotide
ttggcaaatcggagcacagccgactcgatc

SEQ ID NO: 356709 - DNA, 30 bp, Artificial Sequence
  Synthetic oligonucleotide
ttccttacagtgcgatcaggttcgtcgatc

SEQ ID NO: 356710 - DNA, 30 bp, Artificial Sequence
  Synthetic oligonucleotide
cctatagtaaacggtatcgagctgtcgatc

SEQ ID NO: 356711 - DNA, 31 bp, Artificial Sequence
  Synthetic oligonucleotide
tttgggagctatttcaaaagttcgaaggatc

SEQ ID NO: 356712 - DNA, 30 bp, Artificial Sequence
  Synthetic oligonucleotide
tttacagccaatattaggaagtgaaggatc

SEQ ID NO: 356713 - DNA, 30 bp, Artificial Sequence
  Synthetic oligonucleotide
ggccgcaagctgtggtacccctccaggatc

SEQ ID NO: 356714 - DNA, 30 bp, Artificial Sequence
  Synthetic oligonucleotide
tgagaggaaattataagaggttccaggatc

SEQ ID NO: 356715 - DNA, 30 bp, Artificial Sequence
  Synthetic oligonucleotide
tctccgttgcagcccgcagatggcaggatc

SEQ ID NO: 356716 - DNA, 30 bp, Artificial Sequence
  Synthetic oligonucleotide
atgttatatgaatctatcccgcgacggatc

SEQ ID NO: 356717 - DNA, 30 bp, Artificial Sequence
  Synthetic oligonucleotide
gacatttctcattattacagtaaccggatc

SEQ ID NO: 356718 - DNA, 30 bp, Artificial Sequence
  Synthetic oligonucleotide
caccatataaacaaagttcaagtgcggatc

SEQ ID NO: 356719 - DNA, 30 bp, Artificial Sequence
  Synthetic oligonucleotide
actaggtatacgaaagacgcctatcggatc

SEQ ID NO: 356720 - DNA, 30 bp, Artificial Sequence
  Synthetic oligonucleotide
catattctagttcaatttggggttcggatc

SEQ ID NO: 356721 - DNA, 30 bp, Artificial Sequence
  Synthetic oligonucleotide
tgccgtgagtgcgaggcggactgagggatc

SEQ ID NO: 356722 - DNA, 30 bp, Artificial Sequence
  Synthetic oligonucleotide
aacgacttgagtttcgacccgaacgggatc

SEQ ID NO: 356723 - DNA, 30 bp, Artificial Sequence
  Synthetic oligonucleotide
ccgactactactagtccccggaccgggatc

SEQ ID NO: 356724 - DNA, 30 bp, Artificial Sequence
  Synthetic oligonucleotide
cagaattgctagggacacctgcatgggatc

SEQ ID NO: 356725 - DNA, 30 bp, Artificial Sequence
  Synthetic oligonucleotide
ttacccgagggggtgattggcgctgggatc

SEQ ID NO: 356726 - DNA, 30 bp, Artificial Sequence
  Synthetic oligonucleotide
cagaaccctatcagtaatagtgctgggatc

SEQ ID NO: 356727 - DNA, 30 bp, Artificial Sequence
  Synthetic oligonucleotide
atagccatatgtatcggtccgagtgggatc

SEQ ID NO: 356728 - DNA, 30 bp, Artificial Sequence
  Synthetic oligonucleotide
agaccaaaattggttttaggtagatggatc

SEQ ID NO: 356729 - DNA, 30 bp, Artificial Sequence
  Synthetic oligonucleotide
tatgtccgggctgagttgatatattggatc

SEQ ID NO: 356730 - DNA, 30 bp, Artificial Sequence
  Synthetic oligonucleotide
cggttttgttgctccccgtgctagatgatc

SEQ ID NO: 356731 - DNA, 30 bp, Artificial Sequence
  Synthetic oligonucleotide
gtaggaagcttcggggttagtttgatgatc

SEQ ID NO: 356732 - DNA, 30 bp, Artificial Sequence
  Synthetic oligonucleotide
atcgtggtttgtttcagtcgagctatgatc

SEQ ID NO: 356733 - DNA, 30 bp, Artificial Sequence
  Synthetic oligonucleotide
ctttcgaattagcaaccgcggaaactgatc

SEQ ID NO: 356734 - DNA, 30 bp, Artificial Sequence
  Synthetic oligonucleotide
aatgaggaccccgcctatatgacactgatc

SEQ ID NO: 356735 - DNA, 30 bp, Artificial Sequence
  Synthetic oligonucleotide
aaaatgttctcctggtcgttagcactgatc

SEQ ID NO: 356736 - DNA, 30 bp, Artificial Sequence
  Synthetic oligonucleotide
agacagctaatacctaggcgctcactgatc

SEQ ID NO: 356737 - DNA, 30 bp, Artificial Sequence
  Synthetic oligonucleotide
tgactatagcagatgcaccatttactgatc

SEQ ID NO: 356738 - DNA, 30 bp, Artificial Sequence
  Synthetic oligonucleotide
acatgaaaatttccggtacaccagctgatc

SEQ ID NO: 356739 - DNA, 30 bp, Artificial Sequence
  Synthetic oligonucleotide
tatcatccttgatcatgacgagggctgatc

SEQ ID NO: 356740 - DNA, 30 bp, Artificial Sequence
  Synthetic oligonucleotide
ctgtcactatagcagctctcgagagtgatc

SEQ ID NO: 356741 - DNA, 30 bp, Artificial Sequence
  Synthetic oligonucleotide
gcctctgtctactactcggccaccgtgatc

SEQ ID NO: 356742 - DNA, 30 bp, Artificial Sequence
  Synthetic oligonucleotide
gttacaggttcctacgaacgtatcgtgatc

SEQ ID NO: 356743 - DNA, 30 bp, Artificial Sequence
  Synthetic oligonucleotide
ccttacgctacggcagagacacaggtgatc

SEQ ID NO: 356744 - DNA, 30 bp, Artificial Sequence
  Synthetic oligonucleotide
attcagtaaccgaccgaagctgcggtgatc

SEQ ID NO: 356745 - DNA, 30 bp, Artificial Sequence
  Synthetic oligonucleotide
aagccaaggtgtggaatatgtgtattgatc

SEQ ID NO: 356746 - DNA, 30 bp, Artificial Sequence
  Synthetic oligonucleotide
gttcctggtgtgcacgtactgctcttgatc

SEQ ID NO: 356747 - DNA, 30 bp, Artificial Sequence
  Synthetic oligonucleotide
caagcttacgcttaactggctttcttgatc

SEQ ID NO: 356748 - DNA, 30 bp, Artificial Sequence
  Synthetic oligonucleotide
tcaactatttcggagttgtgtatgttgatc

SEQ ID NO: 356749 - DNA, 30 bp, Artificial Sequence
  Synthetic oligonucleotide
aacagtgagtgagcagacatcccaaatatc

SEQ ID NO: 356750 - DNA, 30 bp, Artificial Sequence
  Synthetic oligonucleotide
tgggttaacttgaaaagacgatcaaatatc

SEQ ID NO: 356751 - DNA, 30 bp, Artificial Sequence
  Synthetic oligonucleotide
ctctaaatggggtaagggtgttgaaatatc

SEQ ID NO: 356752 - DNA, 30 bp, Artificial Sequence
  Synthetic oligonucleotide
ctagattactgctattactttaacaatatc

SEQ ID NO: 356753 - DNA, 30 bp, Artificial Sequence
  Synthetic oligonucleotide
tatatgagcacgtacacggtccacaatatc

SEQ ID NO: 356754 - DNA, 30 bp, Artificial Sequence
  Synthetic oligonucleotide
ctaaaaacgggcagcatatcgaccaatatc

SEQ ID NO: 356755 - DNA, 30 bp, Artificial Sequence
  Synthetic oligonucleotide
agggtgcgcagcatcggggcactcaatatc

SEQ ID NO: 356756 - DNA, 30 bp, Artificial Sequence
  Synthetic oligonucleotide
tgaatagttggaagaatggagcagaatatc

SEQ ID NO: 356757 - DNA, 30 bp, Artificial Sequence
  Synthetic oligonucleotide
gagtaacagctatagtggcgatagaatatc

SEQ ID NO: 356758 - DNA, 30 bp, Artificial Sequence
  Synthetic oligonucleotide
cagtagattgtgctaagcgtactgaatatc

SEQ ID NO: 356759 - DNA, 30 bp, Artificial Sequence
  Synthetic oligonucleotide
accaagggccatgcgtataccagtaatatc

SEQ ID NO: 356760 - DNA, 30 bp, Artificial Sequence
  Synthetic oligonucleotide
ggattttcttgtgcccttaaaagccatatc

SEQ ID NO: 356761 - DNA, 30 bp, Artificial Sequence
  Synthetic oligonucleotide
ggcttagcagctcgggtatggagccatatc

SEQ ID NO: 356762 - DNA, 30 bp, Artificial Sequence
  Synthetic oligonucleotide
gcaaaaggttacgttagctagtggcatatc

SEQ ID NO: 356763 - DNA, 30 bp, Artificial Sequence
  Synthetic oligonucleotide
ttgatgatgatggctactcagattcatatc

SEQ ID NO: 356764 - DNA, 30 bp, Artificial Sequence
  Synthetic oligonucleotide
cctgcagtttgattacgttcgtacgatatc

SEQ ID NO: 356765 - DNA, 30 bp, Artificial Sequence
  Synthetic oligonucleotide
ggacgattaccatctgtcatttccgatatc

SEQ ID NO: 356766 - DNA, 30 bp, Artificial Sequence
  Synthetic oligonucleotide
tagtgcaaaaagtcttggcacggcgatatc

SEQ ID NO: 356767 - DNA, 30 bp, Artificial Sequence
  Synthetic oligonucleotide
atcatgcgtcatctcaagtttggcgatatc

SEQ ID NO: 356768 - DNA, 30 bp, Artificial Sequence
  Synthetic oligonucleotide
gtttcaaaggccctacaggtgtctgatatc

SEQ ID NO: 356769 - DNA, 30 bp, Artificial Sequence
  Synthetic oligonucleotide
cattaattgaacgcatctatgtttgatatc

SEQ ID NO: 356770 - DNA, 30 bp, Artificial Sequence
  Synthetic oligonucleotide
tgcaatcacgctgttggcggtgaatatatc

SEQ ID NO: 356771 - DNA, 30 bp, Artificial Sequence
  Synthetic oligonucleotide
gatcctcccggtgcgttgcggttatatatc

SEQ ID NO: 356772 - DNA, 30 bp, Artificial Sequence
  Synthetic oligonucleotide
ttgggtacccgggagtaagaagcttatatc

SEQ ID NO: 356773 - DNA, 30 bp, Artificial Sequence
  Synthetic oligonucleotide
gggtccacaagttatagaccgcgttatatc

SEQ ID NO: 356774 - DNA, 30 bp, Artificial Sequence
  Synthetic oligonucleotide
gttcgagggaaccgttcatagggttatatc

SEQ ID NO: 356775 - DNA, 30 bp, Artificial Sequence
  Synthetic oligonucleotide
caaagcgtggtatttagttgtcagactatc

SEQ ID NO: 356776 - DNA, 30 bp, Artificial Sequence
  Synthetic oligonucleotide
actgcacccgtaaatgggtcttagactatc

SEQ ID NO: 356777 - DNA, 30 bp, Artificial Sequence
  Synthetic oligonucleotide
cctcctctgcactcaatgtacaggactatc

SEQ ID NO: 356778 - DNA, 30 bp, Artificial Sequence
  Synthetic oligonucleotide
cgaataagttttgtcgccaggttacctatc

SEQ ID NO: 356779 - DNA, 30 bp, Artificial Sequence
  Synthetic oligonucleotide
acaaatgacggacgatcggcccaccctatc

SEQ ID NO: 356780 - DNA, 30 bp, Artificial Sequence
  Synthetic oligonucleotide
gcttcgcactgcggtattgaataccctatc

SEQ ID NO: 356781 - DNA, 30 bp, Artificial Sequence
  Synthetic oligonucleotide
gacagactagttgtaaatacgattcctatc

SEQ ID NO: 356782 - DNA, 30 bp, Artificial Sequence
  Synthetic oligonucleotide
agcttgcaccgggtcacgttggttcctatc

SEQ ID NO: 356783 - DNA, 30 bp, Artificial Sequence
  Synthetic oligonucleotide
cgtgctttagtgggcgaggctcgagctatc

SEQ ID NO: 356784 - DNA, 30 bp, Artificial Sequence
  Synthetic oligonucleotide
atgttagtgttacttggaatcacggctatc

SEQ ID NO: 356785 - DNA, 30 bp, Artificial Sequence
  Synthetic oligonucleotide
ttcctctggaacctcataggcatggctatc

SEQ ID NO: 356786 - DNA, 30 bp, Artificial Sequence
  Synthetic oligonucleotide
agaagatttatgaagtatttgaatgctatc

SEQ ID NO: 356787 - DNA, 30 bp, Artificial Sequence
  Synthetic oligonucleotide
ctacttgagcagacaaaatgaattgctatc

SEQ ID NO: 356788 - DNA, 30 bp, Artificial Sequence
  Synthetic oligonucleotide
cgtctttatcgcgtgggtttgtgatctatc

SEQ ID NO: 356789 - DNA, 30 bp, Artificial Sequence
  Synthetic oligonucleotide
cccggtcggtggaacagggcgagctctatc

SEQ ID NO: 356790 - DNA, 30 bp, Artificial Sequence
  Synthetic oligonucleotide
tcgtccttaacgccgttcagtgagtctatc

SEQ ID NO: 356791 - DNA, 30 bp, Artificial Sequence
  Synthetic oligonucleotide
aggttatctcgaaacgcgtgttagtctatc

SEQ ID NO: 356792 - DNA, 30 bp, Artificial Sequence
  Synthetic oligonucleotide
aaataatgttgcatcggttggcggtctatc

SEQ ID NO: 356793 - DNA, 30 bp, Artificial Sequence
  Synthetic oligonucleotide
ttccatcagagacgactcattacttctatc

SEQ ID NO: 356794 - DNA, 30 bp, Artificial Sequence
  Synthetic oligonucleotide
aataaagccccgaatggtttgagaagtatc

SEQ ID NO: 356795 - DNA, 30 bp, Artificial Sequence
  Synthetic oligonucleotide
attgctttctcaaactcataggtaagtatc

SEQ ID NO: 356796 - DNA, 30 bp, Artificial Sequence
  Synthetic oligonucleotide
aagtggtgttggagtgaattggtaagtatc

SEQ ID NO: 356797 - DNA, 30 bp, Artificial Sequence
  Synthetic oligonucleotide
ttaaattaaacagcgtaaatcagcagtatc

SEQ ID NO: 356798 - DNA, 30 bp, Artificial Sequence
  Synthetic oligonucleotide
cggtgtctctttcatccaaccgcgagtatc

SEQ ID NO: 356799 - DNA, 30 bp, Artificial Sequence
  Synthetic oligonucleotide
aatagttagttggaggatcgcgctagtatc

SEQ ID NO: 356800 - DNA, 30 bp, Artificial Sequence
  Synthetic oligonucleotide
aataatgcgttcgctccatgaggtagtatc

SEQ ID NO: 356801 - DNA, 30 bp, Artificial Sequence
  Synthetic oligonucleotide
atagcagacctcgatccatcccaacgtatc

SEQ ID NO: 356802 - DNA, 30 bp, Artificial Sequence
  Synthetic oligonucleotide
aagcacacccacggacttgaaagacgtatc

SEQ ID NO: 356803 - DNA, 30 bp, Artificial Sequence
  Synthetic oligonucleotide
atgtatcggtaagatggccacactcgtatc

SEQ ID NO: 356804 - DNA, 30 bp, Artificial Sequence
  Synthetic oligonucleotide
tttgaagggtattctgcatctattcgtatc

SEQ ID NO: 356805 - DNA, 30 bp, Artificial Sequence
  Synthetic oligonucleotide
tcgtcctttagactgttacattcaggtatc

SEQ ID NO: 356806 - DNA, 30 bp, Artificial Sequence
  Synthetic oligonucleotide
gagtacctttaactgggcacgagaggtatc

SEQ ID NO: 356807 - DNA, 30 bp, Artificial Sequence
  Synthetic oligonucleotide
tggtcctcagactcccaatctgtaggtatc

SEQ ID NO: 356808 - DNA, 30 bp, Artificial Sequence
  Synthetic oligonucleotide
acggaactccggcatttatgcagcggtatc

SEQ ID NO: 356809 - DNA, 30 bp, Artificial Sequence
  Synthetic oligonucleotide
atatgcgactagagtcgagggttcggtatc

SEQ ID NO: 356810 - DNA, 30 bp, Artificial Sequence
  Synthetic oligonucleotide
gtggacttcactatcaatatgatatgtatc

SEQ ID NO: 356811 - DNA, 30 bp, Artificial Sequence
  Synthetic oligonucleotide
tgtggggaggaacactcccgtgtatgtatc

SEQ ID NO: 356812 - DNA, 30 bp, Artificial Sequence
  Synthetic oligonucleotide
ttatgatcgttcttcgtctagcactgtatc

SEQ ID NO: 356813 - DNA, 30 bp, Artificial Sequence
  Synthetic oligonucleotide
gaaaagcactataattttgcccagtgtatc

SEQ ID NO: 356814 - DNA, 30 bp, Artificial Sequence
  Synthetic oligonucleotide
ggacactctgggctgtcgttaacttgtatc

SEQ ID NO: 356815 - DNA, 30 bp, Artificial Sequence
  Synthetic oligonucleotide
tcgagatccgctaaaacaccggtaattatc

SEQ ID NO: 356816 - DNA, 30 bp, Artificial Sequence
  Synthetic oligonucleotide
ccggctggaaaggagagtccttacattatc

SEQ ID NO: 356817 - DNA, 30 bp, Artificial Sequence
  Synthetic oligonucleotide
agactgacaaaacccacgaacggcattatc

SEQ ID NO: 356818 - DNA, 30 bp, Artificial Sequence
  Synthetic oligonucleotide
ggggggaccggcgtgtaggggggcattatc

SEQ ID NO: 356819 - DNA, 30 bp, Artificial Sequence
  Synthetic oligonucleotide
tgccttgtgacaccacatggtggcattatc

SEQ ID NO: 356820 - DNA, 30 bp, Artificial Sequence
  Synthetic oligonucleotide
tgaaaattcagtttaatactgcggattatc

SEQ ID NO: 356821 - DNA, 30 bp, Artificial Sequence
  Synthetic oligonucleotide
tatctcaccctaaattcaggtgggattatc

SEQ ID NO: 356822 - DNA, 30 bp, Artificial Sequence
  Synthetic oligonucleotide
gggtgtaacctgttattccgtcctattatc

SEQ ID NO: 356823 - DNA, 30 bp, Artificial Sequence
  Synthetic oligonucleotide
gagcgaaattcgatgttgcgatctattatc

SEQ ID NO: 356824 - DNA, 30 bp, Artificial Sequence
  Synthetic oligonucleotide
ctgaggccgccaaggacatggacacttatc

SEQ ID NO: 356825 - DNA, 30 bp, Artificial Sequence
  Synthetic oligonucleotide
taagtaccagggtttgtcggggagcttatc

SEQ ID NO: 356826 - DNA, 30 bp, Artificial Sequence
  Synthetic oligonucleotide
taacaccggtccgtatcacaaccgcttatc

SEQ ID NO: 356827 - DNA, 30 bp, Artificial Sequence
  Synthetic oligonucleotide
gagaaagactcattgctctgcgatcttatc

SEQ ID NO: 356828 - DNA, 30 bp, Artificial Sequence
  Synthetic oligonucleotide
acgcacgggtgttcaatctctacagttatc

SEQ ID NO: 356829 - DNA, 30 bp, Artificial Sequence
  Synthetic oligonucleotide
gtaaaagggtcagtctcacaagcagttatc

SEQ ID NO: 356830 - DNA, 30 bp, Artificial Sequence
  Synthetic oligonucleotide
gaattgtcttgtaggcgaacggaggttatc

SEQ ID NO: 356831 - DNA, 30 bp, Artificial Sequence
  Synthetic oligonucleotide
gcgtttaggttagtgattcaccgggttatc

SEQ ID NO: 356832 - DNA, 30 bp, Artificial Sequence
  Synthetic oligonucleotide
gccttgcgcctatagtagccacatgttatc

SEQ ID NO: 356833 - DNA, 30 bp, Artificial Sequence
  Synthetic oligonucleotide
agagacatttgaggatccacaccatttatc

SEQ ID NO: 356834 - DNA, 30 bp, Artificial Sequence
  Synthetic oligonucleotide
ataaaggtagccatgagtttcgactttatc

SEQ ID NO: 356835 - DNA, 30 bp, Artificial Sequence
  Synthetic oligonucleotide
cactgagacctattaacattaacctttatc

SEQ ID NO: 356836 - DNA, 30 bp, Artificial Sequence
  Synthetic oligonucleotide
agtgtcacccacatgttcatagcctttatc

SEQ ID NO: 356837 - DNA, 30 bp, Artificial Sequence
  Synthetic oligonucleotide
gggggtctgttgtattcgtgttgctttatc

SEQ ID NO: 356838 - DNA, 30 bp, Artificial Sequence
  Synthetic oligonucleotide
catagtgctgatattacaagaatctttatc

SEQ ID NO: 356839 - DNA, 30 bp, Artificial Sequence
  Synthetic oligonucleotide
gagggattttcgaattcaagtagttttatc

SEQ ID NO: 356840 - DNA, 30 bp, Artificial Sequence
  Synthetic oligonucleotide
gggtcgcactgggcgtccactggttttatc

SEQ ID NO: 356841 - DNA, 30 bp, Artificial Sequence
  Synthetic oligonucleotide
atacttttatttggaacggtgcaaaaactc

SEQ ID NO: 356842 - DNA, 30 bp, Artificial Sequence
  Synthetic oligonucleotide
ctaattattcttgaagaagatatcaaactc

SEQ ID NO: 356843 - DNA, 30 bp, Artificial Sequence
  Synthetic oligonucleotide
gtgcgaggcgtcataagaggtgtcaaactc

SEQ ID NO: 356844 - DNA, 30 bp, Artificial Sequence
  Synthetic oligonucleotide
atctgtagtatcgtcagttggcagaaactc

SEQ ID NO: 356845 - DNA, 30 bp, Artificial Sequence
  Synthetic oligonucleotide
gtaaggtctagaccgtagaaggataaactc

SEQ ID NO: 356846 - DNA, 30 bp, Artificial Sequence
  Synthetic oligonucleotide
tacaatcgaaccctcttacgtagtaaactc

SEQ ID NO: 356847 - DNA, 30 bp, Artificial Sequence
  Synthetic oligonucleotide
gtaaaaaggaaacggttggataaacaactc

SEQ ID NO: 356848 - DNA, 30 bp, Artificial Sequence
  Synthetic oligonucleotide
tctgtcatggtagtccccgctacgcaactc

SEQ ID NO: 356849 - DNA, 30 bp, Artificial Sequence
  Synthetic oligonucleotide
taaagagggaatgttcgattgagtcaactc

SEQ ID NO: 356850 - DNA, 30 bp, Artificial Sequence
  Synthetic oligonucleotide
gggttttaaatagcttgtagtagtcaactc

SEQ ID NO: 356851 - DNA, 30 bp, Artificial Sequence
  Synthetic oligonucleotide
actaggttcgccaaggcgcggtcagaactc

SEQ ID NO: 356852 - DNA, 30 bp, Artificial Sequence
  Synthetic oligonucleotide
taactcaagtatcgggctcaaatcgaactc

SEQ ID NO: 356853 - DNA, 30 bp, Artificial Sequence
  Synthetic oligonucleotide
ccctaggactcggtcataggtgaggaactc

SEQ ID NO: 356854 - DNA, 30 bp, Artificial Sequence
  Synthetic oligonucleotide
cgcccgacgggacactggtccctggaactc

SEQ ID NO: 356855 - DNA, 30 bp, Artificial Sequence
  Synthetic oligonucleotide
ttttgaacgtgtccgaccctctgctaactc

SEQ ID NO: 356856 - DNA, 30 bp, Artificial Sequence
  Synthetic oligonucleotide
caatccgcctgaaccgtagcctagtaactc

SEQ ID NO: 356857 - DNA, 30 bp, Artificial Sequence
  Synthetic oligonucleotide
gcagatgggaagttagacgcttggtaactc

SEQ ID NO: 356858 - DNA, 30 bp, Artificial Sequence
  Synthetic oligonucleotide
tgccattcgagtcttgacagactgtaactc

SEQ ID NO: 356859 - DNA, 30 bp, Artificial Sequence
  Synthetic oligonucleotide
tcagtagatccatggtccagccattaactc

SEQ ID NO: 356860 - DNA, 30 bp, Artificial Sequence
  Synthetic oligonucleotide
aggacctgtatagataaggagtcttaactc

SEQ ID NO: 356861 - DNA, 30 bp, Artificial Sequence
  Synthetic oligonucleotide
aggtattataaaggtataaaagtttaactc

SEQ ID NO: 356862 - DNA, 30 bp, Artificial Sequence
  Synthetic oligonucleotide
cgaattcttccaggtgcagcttaaacactc

SEQ ID NO: 356863 - DNA, 30 bp, Artificial Sequence
  Synthetic oligonucleotide
ctgggacctgtacccaagccaggcacactc

SEQ ID NO: 356864 - DNA, 30 bp, Artificial Sequence
  Synthetic oligonucleotide
caatacagattgcttattacggggacactc

SEQ ID NO: 356865 - DNA, 30 bp, Artificial Sequence
  Synthetic oligonucleotide
cagctgacaaagcacgtcccatggacactc

SEQ ID NO: 356866 - DNA, 30 bp, Artificial Sequence
  Synthetic oligonucleotide
gatactacataagtgacgagtttgacactc

SEQ ID NO: 356867 - DNA, 30 bp, Artificial Sequence
  Synthetic oligonucleotide
cgccttcccaaatgtaacagcgctacactc

SEQ ID NO: 356868 - DNA, 30 bp, Artificial Sequence
  Synthetic oligonucleotide
atttgtaggccgatgctcaagagtacactc

SEQ ID NO: 356869 - DNA, 30 bp, Artificial Sequence
  Synthetic oligonucleotide
cagagaactttactttcgatgggtacactc

SEQ ID NO: 356870 - DNA, 30 bp, Artificial Sequence
  Synthetic oligonucleotide
gactggcgtatccgaagccagtgcccactc

SEQ ID NO: 356871 - DNA, 30 bp, Artificial Sequence
  Synthetic oligonucleotide
ttaggccgggtagactaatgagtcccactc

SEQ ID NO: 356872 - DNA, 30 bp, Artificial Sequence
  Synthetic oligonucleotide
ggcacgtggttcccactgcctcctccactc

SEQ ID NO: 356873 - DNA, 30 bp, Artificial Sequence
  Synthetic oligonucleotide
gtcatggggtattgactggatgctccactc

SEQ ID NO: 356874 - DNA, 30 bp, Artificial Sequence
  Synthetic oligonucleotide
cacattcacatcgcatcagatcttccactc

SEQ ID NO: 356875 - DNA, 30 bp, Artificial Sequence
  Synthetic oligonucleotide
ccggcacacggctgtatgacctaagcactc

SEQ ID NO: 356876 - DNA, 30 bp, Artificial Sequence
  Synthetic oligonucleotide
aagggccagaacaaattcggctacgcactc

SEQ ID NO: 356877 - DNA, 30 bp, Artificial Sequence
  Synthetic oligonucleotide
cctcctagcaaaaaacgcgcttgcgcactc

SEQ ID NO: 356878 - DNA, 30 bp, Artificial Sequence
  Synthetic oligonucleotide
acccgaggtctaaaagatcgttcggcactc

SEQ ID NO: 356879 - DNA, 30 bp, Artificial Sequence
  Synthetic oligonucleotide
cttgaatgattcatacgccgtcgggcactc

SEQ ID NO: 356880 - DNA, 30 bp, Artificial Sequence
  Synthetic oligonucleotide
gggcgcttcgccgggataacgaatgcactc

SEQ ID NO: 356881 - DNA, 30 bp, Artificial Sequence
  Synthetic oligonucleotide
gggtcgagttatggggtgaaagctgcactc

SEQ ID NO: 356882 - DNA, 30 bp, Artificial Sequence
  Synthetic oligonucleotide
agtgcaatctggtgtgaaccaaagtcactc

SEQ ID NO: 356883 - DNA, 30 bp, Artificial Sequence
  Synthetic oligonucleotide
taaaagagtaataactaacgggagtcactc

SEQ ID NO: 356884 - DNA, 30 bp, Artificial Sequence
  Synthetic oligonucleotide
ttgagatcgcggtggaatcgcgcaagactc

SEQ ID NO: 356885 - DNA, 30 bp, Artificial Sequence
  Synthetic oligonucleotide
aacacttgccctgttaaatcgcgaagactc

SEQ ID NO: 356886 - DNA, 30 bp, Artificial Sequence
  Synthetic oligonucleotide
gttgtgtatccataaatagtagtaagactc

SEQ ID NO: 356887 - DNA, 30 bp, Artificial Sequence
  Synthetic oligonucleotide
taacagtcaccagtgccgacgcacagactc

SEQ ID NO: 356888 - DNA, 30 bp, Artificial Sequence
  Synthetic oligonucleotide
aaaggcctaccatgatcgtgggggagactc

SEQ ID NO: 356889 - DNA, 30 bp, Artificial Sequence
  Synthetic oligonucleotide
tcgctctcaatcccggagatcggacgactc

SEQ ID NO: 356890 - DNA, 30 bp, Artificial Sequence
  Synthetic oligonucleotide
tgtacattacagctgactcccgtacgactc

SEQ ID NO: 356891 - DNA, 30 bp, Artificial Sequence
  Synthetic oligonucleotide
tggatagacagacggtctattcgcggactc

SEQ ID NO: 356892 - DNA, 30 bp, Artificial Sequence
  Synthetic oligonucleotide
tctattcgatatagcacatcacggggactc

SEQ ID NO: 356893 - DNA, 30 bp, Artificial Sequence
  Synthetic oligonucleotide
gggcgtcaaaaaacgtgttctaattgactc

SEQ ID NO: 356894 - DNA, 30 bp, Artificial Sequence
  Synthetic oligonucleotide
ccgactttggacacgacgggtctttgactc

SEQ ID NO: 356895 - DNA, 30 bp, Artificial Sequence
  Synthetic oligonucleotide
tcataaaaggattggaacgatgaaatactc

SEQ ID NO: 356896 - DNA, 30 bp, Artificial Sequence
  Synthetic oligonucleotide
ggctaacactccacctacgtccacatactc

SEQ ID NO: 356897 - DNA, 30 bp, Artificial Sequence
  Synthetic oligonucleotide
acctcatacgctcctaaaacgcgcatactc

SEQ ID NO: 356898 - DNA, 30 bp, Artificial Sequence
  Synthetic oligonucleotide
tgatcagtgtatatttgtaaggtcatactc

SEQ ID NO: 356899 - DNA, 30 bp, Artificial Sequence
  Synthetic oligonucleotide
gacaccgaagcttttcactgaaatatactc

SEQ ID NO: 356900 - DNA, 30 bp, Artificial Sequence
  Synthetic oligonucleotide
cgccctgaactttatcaactttttatactc

SEQ ID NO: 356901 - DNA, 30 bp, Artificial Sequence
  Synthetic oligonucleotide
cgaaaagattagagtcagacgttactactc

SEQ ID NO: 356902 - DNA, 30 bp, Artificial Sequence
  Synthetic oligonucleotide
gaggtaatgtcgcatcaacgaaggctactc

SEQ ID NO: 356903 - DNA, 30 bp, Artificial Sequence
  Synthetic oligonucleotide
gacattcttgcgtcgaaaccgatgctactc

SEQ ID NO: 356904 - DNA, 30 bp, Artificial Sequence
  Synthetic oligonucleotide
ggtgatctctagtagcagcccctgctactc

SEQ ID NO: 356905 - DNA, 30 bp, Artificial Sequence
  Synthetic oligonucleotide
gtaaactaagcctacgtagagtatctactc

SEQ ID NO: 356906 - DNA, 30 bp, Artificial Sequence
  Synthetic oligonucleotide
acagtagtggggtataggcaacgtctactc

SEQ ID NO: 356907 - DNA, 30 bp, Artificial Sequence
  Synthetic oligonucleotide
tatgggcttagattaatgacgccagtactc

SEQ ID NO: 356908 - DNA, 30 bp, Artificial Sequence
  Synthetic oligonucleotide
gaactcgtacagcgtatcttctcagtactc

SEQ ID NO: 356909 - DNA, 30 bp, Artificial Sequence
  Synthetic oligonucleotide
ggacatgcatcacatgcgccgctagtactc

SEQ ID NO: 356910 - DNA, 30 bp, Artificial Sequence
  Synthetic oligonucleotide
ccttaccaatagaatagccggggtgtactc

SEQ ID NO: 356911 - DNA, 30 bp, Artificial Sequence
  Synthetic oligonucleotide
ggtgcgtgctacgacccttgggttgtactc

SEQ ID NO: 356912 - DNA, 30 bp, Artificial Sequence
  Synthetic oligonucleotide
gataaggctgccttagaggttaaattactc

SEQ ID NO: 356913 - DNA, 30 bp, Artificial Sequence
  Synthetic oligonucleotide
ttgctagaattcacatagtgtgaattactc

SEQ ID NO: 356914 - DNA, 30 bp, Artificial Sequence
  Synthetic oligonucleotide
gtgtccgcaaggagagacccctcattactc

SEQ ID NO: 356915 - DNA, 30 bp, Artificial Sequence
  Synthetic oligonucleotide
gatctctggaataatggcacgggattactc

SEQ ID NO: 356916 - DNA, 30 bp, Artificial Sequence
  Synthetic oligonucleotide
ttaggaaccatgcagattatcgacttactc

SEQ ID NO: 356917 - DNA, 30 bp, Artificial Sequence
  Synthetic oligonucleotide
aggttaatcaagtgtacgcaggacttactc

SEQ ID NO: 356918 - DNA, 30 bp, Artificial Sequence
  Synthetic oligonucleotide
acaatgtgcttcggtcatgaaacaaacctc

SEQ ID NO: 356919 - DNA, 30 bp, Artificial Sequence
  Synthetic oligonucleotide
cacacggatcccagaagttgtttcaacctc

SEQ ID NO: 356920 - DNA, 30 bp, Artificial Sequence
  Synthetic oligonucleotide
gatgggatttaaacatacggcaggaacctc

SEQ ID NO: 356921 - DNA, 30 bp, Artificial Sequence
  Synthetic oligonucleotide
ccctcgacatcagtgttttcgatgaacctc

SEQ ID NO: 356922 - DNA, 30 bp, Artificial Sequence
  Synthetic oligonucleotide
atgccacagtctcccccagagcataacctc

SEQ ID NO: 356923 - DNA, 30 bp, Artificial Sequence
  Synthetic oligonucleotide
cacaagcgtgtagccacttcagcacacctc

SEQ ID NO: 356924 - DNA, 30 bp, Artificial Sequence
  Synthetic oligonucleotide
gaaaagttagtcgtaaaagttcgacacctc

SEQ ID NO: 356925 - DNA, 30 bp, Artificial Sequence
  Synthetic oligonucleotide
ctccccgcacctcatgctgtcacccacctc

SEQ ID NO: 356926 - DNA, 30 bp, Artificial Sequence
  Synthetic oligonucleotide
taaagtatcagaggggatgacaatcacctc

SEQ ID NO: 356927 - DNA, 30 bp, Artificial Sequence
  Synthetic oligonucleotide
aaatgtaatccgcgcaatacgcgtcacctc

SEQ ID NO: 356928 - DNA, 30 bp, Artificial Sequence
  Synthetic oligonucleotide
aaggcagatgagcttgtgcggtttcacctc

SEQ ID NO: 356929 - DNA, 30 bp, Artificial Sequence
  Synthetic oligonucleotide
caagtccgagaccggcgggttaaagacctc

SEQ ID NO: 356930 - DNA, 30 bp, Artificial Sequence
  Synthetic oligonucleotide
aatcaggtcagcggcaggtaaagagacctc

SEQ ID NO: 356931 - DNA, 30 bp, Artificial Sequence
  Synthetic oligonucleotide
gtactcacatgtagtccaatttgagacctc

SEQ ID NO: 356932 - DNA, 30 bp, Artificial Sequence
  Synthetic oligonucleotide
ctgttgcaaggatacaggaggtaggacctc

SEQ ID NO: 356933 - DNA, 30 bp, Artificial Sequence
  Synthetic oligonucleotide
cgcgatgggtttatttggttcgctgacctc

SEQ ID NO: 356934 - DNA, 30 bp, Artificial Sequence
  Synthetic oligonucleotide
ccgctcatcttaatggccgtgtcctacctc

SEQ ID NO: 356935 - DNA, 30 bp, Artificial Sequence
  Synthetic oligonucleotide
cgttcggcgaccgaccgactcggctacctc

SEQ ID NO: 356936 - DNA, 30 bp, Artificial Sequence
  Synthetic oligonucleotide
ccaattaggaccgggccataaaagtacctc

SEQ ID NO: 356937 - DNA, 30 bp, Artificial Sequence
  Synthetic oligonucleotide
ttttaatgcaccacctcgtaacgttacctc

SEQ ID NO: 356938 - DNA, 30 bp, Artificial Sequence
  Synthetic oligonucleotide
caaacaaaggtgtgtctttgtataaccctc

SEQ ID NO: 356939 - DNA, 30 bp, Artificial Sequence
  Synthetic oligonucleotide
cggcacgtattggtttcttcagtaaccctc

SEQ ID NO: 356940 - DNA, 30 bp, Artificial Sequence
  Synthetic oligonucleotide
gcatgttgcctaccgggacctagcaccctc

SEQ ID NO: 356941 - DNA, 30 bp, Artificial Sequence
  Synthetic oligonucleotide
acctgggcgtgtcgggaaaccggcaccctc

SEQ ID NO: 356942 - DNA, 30 bp, Artificial Sequence
  Synthetic oligonucleotide
aggaggcgcgacgcctatgcttagaccctc

SEQ ID NO: 356943 - DNA, 30 bp, Artificial Sequence
  Synthetic oligonucleotide
gctactccctgtgcttattggccgaccctc

SEQ ID NO: 356944 - DNA, 29 bp, Artificial Sequence
  Synthetic oligonucleotide
gcccggacagcgtcgcaatccggaccctc

SEQ ID NO: 356945 - DNA, 30 bp, Artificial Sequence
  Synthetic oligonucleotide
ccgaaacgtcttttaactagagcgcccctc

SEQ ID NO: 356946 - DNA, 30 bp, Artificial Sequence
  Synthetic oligonucleotide
atgatcacggtagatgtagatcctcccctc

SEQ ID NO: 356947 - DNA, 30 bp, Artificial Sequence
  Synthetic oligonucleotide
gggccctgacctgttaagcgagaagccctc

SEQ ID NO: 356948 - DNA, 30 bp, Artificial Sequence
  Synthetic oligonucleotide
tccatgattagagatttgcgcgtagccctc

SEQ ID NO: 356949 - DNA, 30 bp, Artificial Sequence
  Synthetic oligonucleotide
cgtaaagtctaagtcaggaacgccgccctc

SEQ ID NO: 356950 - DNA, 30 bp, Artificial Sequence
  Synthetic oligonucleotide
tggaaaaatctgatggtcttccgcgccctc

SEQ ID NO: 356951 - DNA, 30 bp, Artificial Sequence
  Synthetic oligonucleotide
ggatgtggaatgagacgttggcaggccctc

SEQ ID NO: 356952 - DNA, 30 bp, Artificial Sequence
  Synthetic oligonucleotide
tacgtatagcgtgggttttgttttgccctc

SEQ ID NO: 356953 - DNA, 30 bp, Artificial Sequence
  Synthetic oligonucleotide
ctcacttttacttaagaaaagacatccctc

SEQ ID NO: 356954 - DNA, 30 bp, Artificial Sequence
  Synthetic oligonucleotide
tggtgtaaatgaggcaggaggttatccctc

SEQ ID NO: 356955 - DNA, 30 bp, Artificial Sequence
  Synthetic oligonucleotide
cggaagtttagcgggaggtctggcagcctc

SEQ ID NO: 356956 - DNA, 30 bp, Artificial Sequence
  Synthetic oligonucleotide
tataggtgtctgttgtcatgtggcagcctc

SEQ ID NO: 356957 - DNA, 30 bp, Artificial Sequence
  Synthetic oligonucleotide
tggtcacagacaattctacgtgcgagcctc

SEQ ID NO: 356958 - DNA, 30 bp, Artificial Sequence
  Synthetic oligonucleotide
cagttccgcagagctagcgtaaaccgcctc

SEQ ID NO: 356959 - DNA, 30 bp, Artificial Sequence
  Synthetic oligonucleotide
gggaactcagtttgatagtcgtcaggcctc

SEQ ID NO: 356960 - DNA, 30 bp, Artificial Sequence
  Synthetic oligonucleotide
gactccggggcttgcacatactccggcctc

SEQ ID NO: 356961 - DNA, 30 bp, Artificial Sequence
  Synthetic oligonucleotide
gagttgtcccgtaaaattggttccggcctc

SEQ ID NO: 356962 - DNA, 30 bp, Artificial Sequence
  Synthetic oligonucleotide
gcataacgattcgcactgtgtcagggcctc

SEQ ID NO: 356963 - DNA, 30 bp, Artificial Sequence
  Synthetic oligonucleotide
attctcccagtcggccttcgtacgggcctc

SEQ ID NO: 356964 - DNA, 30 bp, Artificial Sequence
  Synthetic oligonucleotide
agagacatttatcggagaaccgcgggcctc

SEQ ID NO: 356965 - DNA, 30 bp, Artificial Sequence
  Synthetic oligonucleotide
ccgcttagtgtcaactattaaaggggcctc

SEQ ID NO: 356966 - DNA, 30 bp, Artificial Sequence
  Synthetic oligonucleotide
cttagaataatacattagacagaatgcctc

SEQ ID NO: 356967 - DNA, 30 bp, Artificial Sequence
  Synthetic oligonucleotide
ctatcttgcttatgggtgagcgcatgcctc

SEQ ID NO: 356968 - DNA, 30 bp, Artificial Sequence
  Synthetic oligonucleotide
catacctgtaccgagaaggacatatgcctc

SEQ ID NO: 356969 - DNA, 30 bp, Artificial Sequence
  Synthetic oligonucleotide
taggctaaaggacctgttttctcctgcctc

SEQ ID NO: 356970 - DNA, 30 bp, Artificial Sequence
  Synthetic oligonucleotide
ccccgcacgtagttgtcaataaggtgcctc

SEQ ID NO: 356971 - DNA, 30 bp, Artificial Sequence
  Synthetic oligonucleotide
gtggtggacaatcgcggaatgatgtgcctc

SEQ ID NO: 356972 - DNA, 30 bp, Artificial Sequence
  Synthetic oligonucleotide
cgcggcccgtttaaagaatggatttgcctc

SEQ ID NO: 356973 - DNA, 30 bp, Artificial Sequence
  Synthetic oligonucleotide
tacccacctagcgagtatcggtacatcctc

SEQ ID NO: 356974 - DNA, 30 bp, Artificial Sequence
  Synthetic oligonucleotide
aaatccgggcaggggtgatagcccatcctc

SEQ ID NO: 356975 - DNA, 30 bp, Artificial Sequence
  Synthetic oligonucleotide
aaagattgaatttaactcagaagcatcctc

SEQ ID NO: 356976 - DNA, 30 bp, Artificial Sequence
  Synthetic oligonucleotide
ccatcccgcgactggacattgagcatcctc

SEQ ID NO: 356977 - DNA, 30 bp, Artificial Sequence
  Synthetic oligonucleotide
tgaagacccctggggcactatagcatcctc

SEQ ID NO: 356978 - DNA, 30 bp, Artificial Sequence
  Synthetic oligonucleotide
agacgccggatcgggtaatcactcatcctc

SEQ ID NO: 356979 - DNA, 30 bp, Artificial Sequence
  Synthetic oligonucleotide
accgcggatcgacctgtgggaaatatcctc

SEQ ID NO: 356980 - DNA, 30 bp, Artificial Sequence
  Synthetic oligonucleotide
acaggcgccgtctatagcaagtggctcctc

SEQ ID NO: 356981 - DNA, 30 bp, Artificial Sequence
  Synthetic oligonucleotide
agacataaggtcttgtagtcttatctcctc

SEQ ID NO: 356982 - DNA, 30 bp, Artificial Sequence
  Synthetic oligonucleotide
acggtctggacaccccacagcgttctcctc

SEQ ID NO: 356983 - DNA, 30 bp, Artificial Sequence
  Synthetic oligonucleotide
ctagcaaatgccagccggaatacagtcctc

SEQ ID NO: 356984 - DNA, 30 bp, Artificial Sequence
  Synthetic oligonucleotide
gggatgagtttagttcttcacagcgtcctc

SEQ ID NO: 356985 - DNA, 30 bp, Artificial Sequence
  Synthetic oligonucleotide
gatagggtctcttgccacaaaccggtcctc

SEQ ID NO: 356986 - DNA, 30 bp, Artificial Sequence
  Synthetic oligonucleotide
gactggtgtactgcagaacgcgtggtcctc

SEQ ID NO: 356987 - DNA, 30 bp, Artificial Sequence
  Synthetic oligonucleotide
taaaaaagcacttatctcatcggtgtcctc

SEQ ID NO: 356988 - DNA, 30 bp, Artificial Sequence
  Synthetic oligonucleotide
acgtgatgctcactggcagcgtttgtcctc

SEQ ID NO: 356989 - DNA, 29 bp, Artificial Sequence
  Synthetic oligonucleotide
gaataactgggaatacctggcccttcctc

SEQ ID NO: 356990 - DNA, 30 bp, Artificial Sequence
  Synthetic oligonucleotide
caggcaaaagctgtgtaggcttggttcctc

SEQ ID NO: 356991 - DNA, 30 bp, Artificial Sequence
  Synthetic oligonucleotide
catttttgagcgcaaaatccgtgtttcctc

SEQ ID NO: 356992 - DNA, 30 bp, Artificial Sequence
  Synthetic oligonucleotide
gaagaattcaaaagcaaaactcttttcctc

SEQ ID NO: 356993 - DNA, 29 bp, Artificial Sequence
  Synthetic oligonucleotide
gacgctgttctctatatctgctcaagctc

SEQ ID NO: 356994 - DNA, 30 bp, Artificial Sequence
  Synthetic oligonucleotide
tttagtacaaagaagtagtagccgaagctc

SEQ ID NO: 356995 - DNA, 30 bp, Artificial Sequence
  Synthetic oligonucleotide
gagaatagactatacttggcggataagctc

SEQ ID NO: 356996 - DNA, 30 bp, Artificial Sequence
  Synthetic oligonucleotide
ctttgttactcgtcctaatgcccacagctc

SEQ ID NO: 356997 - DNA, 30 bp, Artificial Sequence
  Synthetic oligonucleotide
accgaaaagtagccaagttaattacagctc

SEQ ID NO: 356998 - DNA, 30 bp, Artificial Sequence
  Synthetic oligonucleotide
gaacccgcgaacagtggcggcttgcagctc

SEQ ID NO: 356999 - DNA, 30 bp, Artificial Sequence
  Synthetic oligonucleotide
aagtgtgcggggggggtttcgagtcagctc

SEQ ID NO: 357000 - DNA, 30 bp, Artificial Sequence
  Synthetic oligonucleotide
gtgaattcgtcatctggcttatcggagctc

SEQ ID NO: 357001 - DNA, 30 bp, Artificial Sequence
  Synthetic oligonucleotide
aatccaattgggtagagtttatgggagctc

SEQ ID NO: 357002 - DNA, 30 bp, Artificial Sequence
  Synthetic oligonucleotide
gtgggccatgtatcttgatggctggagctc

SEQ ID NO: 357003 - DNA, 30 bp, Artificial Sequence
  Synthetic oligonucleotide
ctgggcgccacaacacgccagtgatagctc

SEQ ID NO: 357004 - DNA, 30 bp, Artificial Sequence
  Synthetic oligonucleotide
ggtctatgccattgacctagccgctagctc

SEQ ID NO: 357005 - DNA, 30 bp, Artificial Sequence
  Synthetic oligonucleotide
cagtcaaacttagctcctatttagtagctc

SEQ ID NO: 357006 - DNA, 30 bp, Artificial Sequence
  Synthetic oligonucleotide
agccacaggtgagcagagcttatgtagctc

SEQ ID NO: 357007 - DNA, 30 bp, Artificial Sequence
  Synthetic oligonucleotide
ggatatggtagcggagttcttgtttagctc

SEQ ID NO: 357008 - DNA, 30 bp, Artificial Sequence
  Synthetic oligonucleotide
gttttaatccgatatcccgattaaacgctc

SEQ ID NO: 357009 - DNA, 30 bp, Artificial Sequence
  Synthetic oligonucleotide
cagttaagttccataggtcatagaacgctc

SEQ ID NO: 357010 - DNA, 30 bp, Artificial Sequence
  Synthetic oligonucleotide
aaggtcatttgattgtgcactctcacgctc

SEQ ID NO: 357011 - DNA, 31 bp, Artificial Sequence
  Synthetic oligonucleotide
caaggtgatctaaagtggctgttggacgctc

SEQ ID NO: 357012 - DNA, 30 bp, Artificial Sequence
  Synthetic oligonucleotide
gcggagctagcgtccacgagggtcccgctc

SEQ ID NO: 357013 - DNA, 30 bp, Artificial Sequence
  Synthetic oligonucleotide
tgtcccagagagtaatgacagggtccgctc

SEQ ID NO: 357014 - DNA, 30 bp, Artificial Sequence
  Synthetic oligonucleotide
aagcattttagcatctagaggtacgcgctc

SEQ ID NO: 357015 - DNA, 30 bp, Artificial Sequence
  Synthetic oligonucleotide
aatgtacgggtaggctggcggtgcgcgctc

SEQ ID NO: 357016 - DNA, 30 bp, Artificial Sequence
  Synthetic oligonucleotide
gaataagatgaattggttgtggcggcgctc

SEQ ID NO: 357017 - DNA, 30 bp, Artificial Sequence
  Synthetic oligonucleotide
ccctagagcagagtcagctcgtatgcgctc

SEQ ID NO: 357018 - DNA, 30 bp, Artificial Sequence
  Synthetic oligonucleotide
caaaagtagggttatggtagttttgcgctc

SEQ ID NO: 357019 - DNA, 30 bp, Artificial Sequence
  Synthetic oligonucleotide
agtccagagtcccggcttggggtatcgctc

SEQ ID NO: 357020 - DNA, 30 bp, Artificial Sequence
  Synthetic oligonucleotide
ggtgaactcatcatatttctggagtcgctc

SEQ ID NO: 357021 - DNA, 30 bp, Artificial Sequence
  Synthetic oligonucleotide
tctgagggtctatgaacgttatgttcgctc

SEQ ID NO: 357022 - DNA, 30 bp, Artificial Sequence
  Synthetic oligonucleotide
taccccatctgaagaggggccctttcgctc

SEQ ID NO: 357023 - DNA, 30 bp, Artificial Sequence
  Synthetic oligonucleotide
tatagacgacccaagtgagtcgaaaggctc

SEQ ID NO: 357024 - DNA, 30 bp, Artificial Sequence
  Synthetic oligonucleotide
cacatgtgtggtactgccttgtaaaggctc

SEQ ID NO: 357025 - DNA, 30 bp, Artificial Sequence
  Synthetic oligonucleotide
cgactagctgaggtcatgagcacgaggctc

SEQ ID NO: 357026 - DNA, 30 bp, Artificial Sequence
  Synthetic oligonucleotide
aaatttaagcattcgtaataccgtaggctc

SEQ ID NO: 357027 - DNA, 30 bp, Artificial Sequence
  Synthetic oligonucleotide
cgaccgctcatctccggaagaacacggctc

SEQ ID NO: 357028 - DNA, 30 bp, Artificial Sequence
  Synthetic oligonucleotide
aactcggcgtccgttattgctggacggctc

SEQ ID NO: 357029 - DNA, 30 bp, Artificial Sequence
  Synthetic oligonucleotide
tcgtagtagatcttcgaagcagaccggctc

SEQ ID NO: 357030 - DNA, 30 bp, Artificial Sequence
  Synthetic oligonucleotide
tgggcagctgaggggcgaagggcgcggctc

SEQ ID NO: 357031 - DNA, 30 bp, Artificial Sequence
  Synthetic oligonucleotide
gttgtaaggtagccaacacaggatcggctc

SEQ ID NO: 357032 - DNA, 30 bp, Artificial Sequence
  Synthetic oligonucleotide
agtagggtcggtacaagcagacaagggctc

SEQ ID NO: 357033 - DNA, 30 bp, Artificial Sequence
  Synthetic oligonucleotide
ttgcgcgaccggtcattcgggtcagggctc

SEQ ID NO: 357034 - DNA, 30 bp, Artificial Sequence
  Synthetic oligonucleotide
tcaccttagatagtctatcggagcgggctc

SEQ ID NO: 357035 - DNA, 30 bp, Artificial Sequence
  Synthetic oligonucleotide
tcggggtgaacataccccgaaaaggggctc

SEQ ID NO: 357036 - DNA, 30 bp, Artificial Sequence
  Synthetic oligonucleotide
ttaacatgatcagaagcgcatgatgggctc

SEQ ID NO: 357037 - DNA, 30 bp, Artificial Sequence
  Synthetic oligonucleotide
cgtgtgacggccgctcattctgctgggctc

SEQ ID NO: 357038 - DNA, 30 bp, Artificial Sequence
  Synthetic oligonucleotide
gatagtccttgcgctaagcagaactggctc

SEQ ID NO: 357039 - DNA, 30 bp, Artificial Sequence
  Synthetic oligonucleotide
ggcatcgacatgatgcgctagagctggctc

SEQ ID NO: 357040 - DNA, 30 bp, Artificial Sequence
  Synthetic oligonucleotide
ctatgataaatgctcgccgacttgtggctc

SEQ ID NO: 357041 - DNA, 30 bp, Artificial Sequence
  Synthetic oligonucleotide
tcaaggtcaacctcttcagaacaaatgctc

SEQ ID NO: 357042 - DNA, 30 bp, Artificial Sequence
  Synthetic oligonucleotide
gtaaactagagcgtagtctcaacaatgctc

SEQ ID NO: 357043 - DNA, 30 bp, Artificial Sequence
  Synthetic oligonucleotide
gattttgggctaatcacagctgacatgctc

SEQ ID NO: 357044 - DNA, 30 bp, Artificial Sequence
  Synthetic oligonucleotide
acgccagtcagggaaaggccttccatgctc

SEQ ID NO: 357045 - DNA, 30 bp, Artificial Sequence
  Synthetic oligonucleotide
atgaccggttggcacggtcggcctatgctc

SEQ ID NO: 357046 - DNA, 30 bp, Artificial Sequence
  Synthetic oligonucleotide
aaaaccatggttgccaatcccgctatgctc

SEQ ID NO: 357047 - DNA, 30 bp, Artificial Sequence
  Synthetic oligonucleotide
agagtagtccgctgaaggaagctactgctc

SEQ ID NO: 357048 - DNA, 30 bp, Artificial Sequence
  Synthetic oligonucleotide
acggttcggagctgatgggcggcgctgctc

SEQ ID NO: 357049 - DNA, 30 bp, Artificial Sequence
  Synthetic oligonucleotide
gctaggggtatggtggggaacgctctgctc

SEQ ID NO: 357050 - DNA, 30 bp, Artificial Sequence
  Synthetic oligonucleotide
aaaactctgggaacgacgaaactggtgctc

SEQ ID NO: 357051 - DNA, 30 bp, Artificial Sequence
  Synthetic oligonucleotide
cctgttagtactatgccggaattggtgctc

SEQ ID NO: 357052 - DNA, 30 bp, Artificial Sequence
  Synthetic oligonucleotide
gggggacgggggacttataaccaattgctc

SEQ ID NO: 357053 - DNA, 30 bp, Artificial Sequence
  Synthetic oligonucleotide
taggctcaccataacgttgtacacttgctc

SEQ ID NO: 357054 - DNA, 30 bp, Artificial Sequence
  Synthetic oligonucleotide
gggttcgaaagtgctctccgtgtcttgctc

SEQ ID NO: 357055 - DNA, 30 bp, Artificial Sequence
  Synthetic oligonucleotide
ggatggacccagagcgggcagttcttgctc

SEQ ID NO: 357056 - DNA, 30 bp, Artificial Sequence
  Synthetic oligonucleotide
tgagtggttgacgggaacgggaacaatctc

SEQ ID NO: 357057 - DNA, 30 bp, Artificial Sequence
  Synthetic oligonucleotide
tgctcaagaggctaaacttgagagaatctc

SEQ ID NO: 357058 - DNA, 30 bp, Artificial Sequence
  Synthetic oligonucleotide
taggaaaggtccacgggacgcgcgaatctc

SEQ ID NO: 357059 - DNA, 30 bp, Artificial Sequence
  Synthetic oligonucleotide
taggacgtagaaggaaaatcaaggaatctc

SEQ ID NO: 357060 - DNA, 30 bp, Artificial Sequence
  Synthetic oligonucleotide
ctccagggaagccggagatcgaggaatctc

SEQ ID NO: 357061 - DNA, 30 bp, Artificial Sequence
  Synthetic oligonucleotide
accattaccataaatgggtcggataatctc

SEQ ID NO: 357062 - DNA, 30 bp, Artificial Sequence
  Synthetic oligonucleotide
caaggttagtgtaattttctgggtaatctc

SEQ ID NO: 357063 - DNA, 30 bp, Artificial Sequence
  Synthetic oligonucleotide
ctcgactaggacgatataccttgtaatctc

SEQ ID NO: 357064 - DNA, 30 bp, Artificial Sequence
  Synthetic oligonucleotide
cgtcctgacatatgacccccctgacatctc

SEQ ID NO: 357065 - DNA, 28 bp, Artificial Sequence
  Synthetic oligonucleotide
aaggatactacgggacagtgtccatctc

SEQ ID NO: 357066 - DNA, 30 bp, Artificial Sequence
  Synthetic oligonucleotide
tacctacctctactgattctgttccatctc

SEQ ID NO: 357067 - DNA, 30 bp, Artificial Sequence
  Synthetic oligonucleotide
ccgccaagctagaaccccttctagcatctc

SEQ ID NO: 357068 - DNA, 30 bp, Artificial Sequence
  Synthetic oligonucleotide
agttacccgcgcgaattaggtgcgcatctc

SEQ ID NO: 357069 - DNA, 30 bp, Artificial Sequence
  Synthetic oligonucleotide
tagctccttggcggccctactggagatctc

SEQ ID NO: 357070 - DNA, 30 bp, Artificial Sequence
  Synthetic oligonucleotide
taatgtaaacggtctggggtactagatctc

SEQ ID NO: 357071 - DNA, 30 bp, Artificial Sequence
  Synthetic oligonucleotide
tgttacgttctattactaaagaacgatctc

SEQ ID NO: 357072 - DNA, 30 bp, Artificial Sequence
  Synthetic oligonucleotide
tgagatctcagcaacggtggagtatatctc

SEQ ID NO: 357073 - DNA, 30 bp, Artificial Sequence
  Synthetic oligonucleotide
tcagcctagtcttgcagagtaagctatctc

SEQ ID NO: 357074 - DNA, 30 bp, Artificial Sequence
  Synthetic oligonucleotide
caggccgattaatagtggtggacgtatctc

SEQ ID NO: 357075 - DNA, 30 bp, Artificial Sequence
  Synthetic oligonucleotide
gctacaacgcctagtaaggctccttatctc

SEQ ID NO: 357076 - DNA, 30 bp, Artificial Sequence
  Synthetic oligonucleotide
ttgttttatcaaagcgtacaggcttatctc

SEQ ID NO: 357077 - DNA, 30 bp, Artificial Sequence
  Synthetic oligonucleotide
acttcaggttgaaagccaagtttgactctc

SEQ ID NO: 357078 - DNA, 30 bp, Artificial Sequence
  Synthetic oligonucleotide
cagattttcgcgcgggttgttcagcctctc

SEQ ID NO: 357079 - DNA, 31 bp, Artificial Sequence
  Synthetic oligonucleotide
ttaaaagctgcaccacgcattccatcctctc

SEQ ID NO: 357080 - DNA, 30 bp, Artificial Sequence
  Synthetic oligonucleotide
atatattggcaatttataggtcacgctctc

SEQ ID NO: 357081 - DNA, 30 bp, Artificial Sequence
  Synthetic oligonucleotide
accttactgtacaagacgccatacgctctc

SEQ ID NO: 357082 - DNA, 30 bp, Artificial Sequence
  Synthetic oligonucleotide
tgacgtcagaaggagagggcacccgctctc

SEQ ID NO: 357083 - DNA, 30 bp, Artificial Sequence
  Synthetic oligonucleotide
cacatcgtgttgcgttccacacaggctctc

SEQ ID NO: 357084 - DNA, 30 bp, Artificial Sequence
  Synthetic oligonucleotide
atgcaagcgccgccgttaatattggctctc

SEQ ID NO: 357085 - DNA, 30 bp, Artificial Sequence
  Synthetic oligonucleotide
tatcactacgttaggaattagtatgctctc

SEQ ID NO: 357086 - DNA, 30 bp, Artificial Sequence
  Synthetic oligonucleotide
cgcgcgaaaattccgattcagaaatctctc

SEQ ID NO: 357087 - DNA, 30 bp, Artificial Sequence
  Synthetic oligonucleotide
gagtcccgattaatgatctagttctctctc

SEQ ID NO: 357088 - DNA, 30 bp, Artificial Sequence
  Synthetic oligonucleotide
ctgggcggcgccttgtgtatggcgtctctc

SEQ ID NO: 357089 - DNA, 30 bp, Artificial Sequence
  Synthetic oligonucleotide
aagggcattttcaaagaatatccttctctc

SEQ ID NO: 357090 - DNA, 30 bp, Artificial Sequence
  Synthetic oligonucleotide
cataagctgtagtagtggggggaaagtctc

SEQ ID NO: 357091 - DNA, 30 bp, Artificial Sequence
  Synthetic oligonucleotide
gttctagtcgcgttaggagagtaaagtctc

SEQ ID NO: 357092 - DNA, 30 bp, Artificial Sequence
  Synthetic oligonucleotide
ccgattgtaggtcgtacgccctttagtctc

SEQ ID NO: 357093 - DNA, 30 bp, Artificial Sequence
  Synthetic oligonucleotide
aaccctctatgctgtgcaatattacgtctc

SEQ ID NO: 357094 - DNA, 30 bp, Artificial Sequence
  Synthetic oligonucleotide
acgattagctcggccaaagtaggccgtctc

SEQ ID NO: 357095 - DNA, 30 bp, Artificial Sequence
  Synthetic oligonucleotide
tcgagatcttaccgcctaatttaaggtctc

SEQ ID NO: 357096 - DNA, 30 bp, Artificial Sequence
  Synthetic oligonucleotide
atcatattcggttcgcggaagacaggtctc

SEQ ID NO: 357097 - DNA, 30 bp, Artificial Sequence
  Synthetic oligonucleotide
ggaacttattgcgttatccaatgcggtctc

SEQ ID NO: 357098 - DNA, 30 bp, Artificial Sequence
  Synthetic oligonucleotide
aatattcaaactaatgacagtgtgggtctc

SEQ ID NO: 357099 - DNA, 30 bp, Artificial Sequence
  Synthetic oligonucleotide
ttttaaaggtgcttcgaaacgtaatgtctc

SEQ ID NO: 357100 - DNA, 30 bp, Artificial Sequence
  Synthetic oligonucleotide
gattttcagactataaaaactagatgtctc

SEQ ID NO: 357101 - DNA, 30 bp, Artificial Sequence
  Synthetic oligonucleotide
ctgagtggacgcccctggtgagactgtctc

SEQ ID NO: 357102 - DNA, 30 bp, Artificial Sequence
  Synthetic oligonucleotide
tcgtcgacatagttgggctgaacctgtctc

SEQ ID NO: 357103 - DNA, 30 bp, Artificial Sequence
  Synthetic oligonucleotide
tggggatcttaaattctctgaatctgtctc

SEQ ID NO: 357104 - DNA, 30 bp, Artificial Sequence
  Synthetic oligonucleotide
gaataacattcatagttatacacttgtctc

SEQ ID NO: 357105 - DNA, 30 bp, Artificial Sequence
  Synthetic oligonucleotide
gtaggcatttatccctgtcggaaaattctc

SEQ ID NO: 357106 - DNA, 30 bp, Artificial Sequence
  Synthetic oligonucleotide
acagtagcggcaaatgtttggtcaattctc

SEQ ID NO: 357107 - DNA, 30 bp, Artificial Sequence
  Synthetic oligonucleotide
gtggtatactggatgtcatttggaattctc

SEQ ID NO: 357108 - DNA, 30 bp, Artificial Sequence
  Synthetic oligonucleotide
agcgacaacacactttctggactcattctc

SEQ ID NO: 357109 - DNA, 30 bp, Artificial Sequence
  Synthetic oligonucleotide
accttagttggtcggtgcaactctattctc

SEQ ID NO: 357110 - DNA, 30 bp, Artificial Sequence
  Synthetic oligonucleotide
tactccttgtcgccacacttttaacttctc

SEQ ID NO: 357111 - DNA, 30 bp, Artificial Sequence
  Synthetic oligonucleotide
ataggatggtcatacagggagtcacttctc

SEQ ID NO: 357112 - DNA, 30 bp, Artificial Sequence
  Synthetic oligonucleotide
tggtgcgatatacttcccaagggacttctc

SEQ ID NO: 357113 - DNA, 30 bp, Artificial Sequence
  Synthetic oligonucleotide
tagatactggctgcgagacgtgcgcttctc

SEQ ID NO: 357114 - DNA, 30 bp, Artificial Sequence
  Synthetic oligonucleotide
gactgttggggggacggatgtgcagttctc

SEQ ID NO: 357115 - DNA, 30 bp, Artificial Sequence
  Synthetic oligonucleotide
tgtacaatggacggacggctcagagttctc

SEQ ID NO: 357116 - DNA, 30 bp, Artificial Sequence
  Synthetic oligonucleotide
gcgaccgaaacagtaaaaaattacgttctc

SEQ ID NO: 357117 - DNA, 30 bp, Artificial Sequence
  Synthetic oligonucleotide
aagatggattggtgggttaggacggttctc

SEQ ID NO: 357118 - DNA, 30 bp, Artificial Sequence
  Synthetic oligonucleotide
cgctgtttcgcgagatccagtaatgttctc

SEQ ID NO: 357119 - DNA, 30 bp, Artificial Sequence
  Synthetic oligonucleotide
atcagaaaatcggcttctaatcgtgttctc

SEQ ID NO: 357120 - DNA, 30 bp, Artificial Sequence
  Synthetic oligonucleotide
agcggttcatggaaatgacaaggtgttctc

SEQ ID NO: 357121 - DNA, 30 bp, Artificial Sequence
  Synthetic oligonucleotide
ggcgagttcaggatgggactgtaatttctc

SEQ ID NO: 357122 - DNA, 30 bp, Artificial Sequence
  Synthetic oligonucleotide
aatatgccacgtgagtgcgaattatttctc

SEQ ID NO: 357123 - DNA, 30 bp, Artificial Sequence
  Synthetic oligonucleotide
aggcaggagaatagagcagcggcgtttctc

SEQ ID NO: 357124 - DNA, 30 bp, Artificial Sequence
  Synthetic oligonucleotide
tgtgacttgcagtccggtcaaaggtttctc

SEQ ID NO: 357125 - DNA, 30 bp, Artificial Sequence
  Synthetic oligonucleotide
gtaggcgttcagagggcgttaatgtttctc

SEQ ID NO: 357126 - DNA, 30 bp, Artificial Sequence
  Synthetic oligonucleotide
gaccggcggacttatcacctagtgtttctc

SEQ ID NO: 357127 - DNA, 30 bp, Artificial Sequence
  Synthetic oligonucleotide
tttgtccggctaaatggtcaggtgtttctc

SEQ ID NO: 357128 - DNA, 30 bp, Artificial Sequence
  Synthetic oligonucleotide
gcgagcgaaacacacaacgatgtgtttctc

SEQ ID NO: 357129 - DNA, 30 bp, Artificial Sequence
  Synthetic oligonucleotide
gcgtgtgttaggaacggcaattattttctc

SEQ ID NO: 357130 - DNA, 30 bp, Artificial Sequence
  Synthetic oligonucleotide
ctcggattatctatcgtacttctttttctc

SEQ ID NO: 357131 - DNA, 30 bp, Artificial Sequence
  Synthetic oligonucleotide
gttcctaagcctatgttcacacgaaaagtc

SEQ ID NO: 357132 - DNA, 30 bp, Artificial Sequence
  Synthetic oligonucleotide
aggtaacggtgccggagacacataaaagtc

SEQ ID NO: 357133 - DNA, 30 bp, Artificial Sequence
  Synthetic oligonucleotide
taacatcggaccaacggtgtgaccaaagtc

SEQ ID NO: 357134 - DNA, 30 bp, Artificial Sequence
  Synthetic oligonucleotide
taagatgttgcatccggtaaatgcaaagtc

SEQ ID NO: 357135 - DNA, 30 bp, Artificial Sequence
  Synthetic oligonucleotide
tagttttagttgcttatgttggtcaaagtc

SEQ ID NO: 357136 - DNA, 30 bp, Artificial Sequence
  Synthetic oligonucleotide
aaccaatacagctctactgttgagaaagtc

SEQ ID NO: 357137 - DNA, 30 bp, Artificial Sequence
  Synthetic oligonucleotide
tttttcgcagtggcatggttagggaaagtc

SEQ ID NO: 357138 - DNA, 30 bp, Artificial Sequence
  Synthetic oligonucleotide
ttaagtccttatctaacatccttgaaagtc

SEQ ID NO: 357139 - DNA, 30 bp, Artificial Sequence
  Synthetic oligonucleotide
cctaggtatagttagaagaaaaataaagtc

SEQ ID NO: 357140 - DNA, 30 bp, Artificial Sequence
  Synthetic oligonucleotide
catcgctacaaatgccaggggccacaagtc

SEQ ID NO: 357141 - DNA, 30 bp, Artificial Sequence
  Synthetic oligonucleotide
aagtgaacaacctactatatttgacaagtc

SEQ ID NO: 357142 - DNA, 30 bp, Artificial Sequence
  Synthetic oligonucleotide
tctgcttatatagatttatggaggcaagtc

SEQ ID NO: 357143 - DNA, 30 bp, Artificial Sequence
  Synthetic oligonucleotide
ttaaagcgcgatcacggacttcggcaagtc

SEQ ID NO: 357144 - DNA, 30 bp, Artificial Sequence
  Synthetic oligonucleotide
gcattgggcaactcttgctttctgcaagtc

SEQ ID NO: 357145 - DNA, 30 bp, Artificial Sequence
  Synthetic oligonucleotide
attgaatacgtgaaagatcatactcaagtc

SEQ ID NO: 357146 - DNA, 30 bp, Artificial Sequence
  Synthetic oligonucleotide
cgcgcctttcacagtattaaagtagaagtc

SEQ ID NO: 357147 - DNA, 30 bp, Artificial Sequence
  Synthetic oligonucleotide
taaatgaagtttccttcgggaatcgaagtc

SEQ ID NO: 357148 - DNA, 30 bp, Artificial Sequence
  Synthetic oligonucleotide
aaggagggtcattccaagccttcggaagtc

SEQ ID NO: 357149 - DNA, 30 bp, Artificial Sequence
  Synthetic oligonucleotide
aaaaacagtgagcgttaaaaaatggaagtc

SEQ ID NO: 357150 - DNA, 30 bp, Artificial Sequence
  Synthetic oligonucleotide
ggaaatacgttctgataaataactgaagtc

SEQ ID NO: 357151 - DNA, 30 bp, Artificial Sequence
  Synthetic oligonucleotide
accatccccttccaacccaatcgataagtc

SEQ ID NO: 357152 - DNA, 30 bp, Artificial Sequence
  Synthetic oligonucleotide
tctaccggtgcttaatctagtttataagtc

SEQ ID NO: 357153 - DNA, 29 bp, Artificial Sequence
  Synthetic oligonucleotide
tctgtcccacagaggggtaaaagtaagtc

SEQ ID NO: 357154 - DNA, 30 bp, Artificial Sequence
  Synthetic oligonucleotide
gccttgatttgtaacaagttcacgtaagtc

SEQ ID NO: 357155 - DNA, 30 bp, Artificial Sequence
  Synthetic oligonucleotide
cgttcagattgcaaaacagtctcgtaagtc

SEQ ID NO: 357156 - DNA, 30 bp, Artificial Sequence
  Synthetic oligonucleotide
ccgtaccggcagcattttccgcggtaagtc

SEQ ID NO: 357157 - DNA, 30 bp, Artificial Sequence
  Synthetic oligonucleotide
ccggactagtggcctcggaaggtgtaagtc

SEQ ID NO: 357158 - DNA, 30 bp, Artificial Sequence
  Synthetic oligonucleotide
agagaaccatgtgactctttgtgttaagtc

SEQ ID NO: 357159 - DNA, 30 bp, Artificial Sequence
  Synthetic oligonucleotide
tttggatttcttaatttctgtatttaagtc

SEQ ID NO: 357160 - DNA, 30 bp, Artificial Sequence
  Synthetic oligonucleotide
tatacggtgcagtagatcgaacaaacagtc

SEQ ID NO: 357161 - DNA, 30 bp, Artificial Sequence
  Synthetic oligonucleotide
ggtggtagtctattgaccgcgctgacagtc

SEQ ID NO: 357162 - DNA, 30 bp, Artificial Sequence
  Synthetic oligonucleotide
acgacatttggcaggacgaaggctacagtc

SEQ ID NO: 357163 - DNA, 30 bp, Artificial Sequence
  Synthetic oligonucleotide
ggttaggcctctgtcgaagtaattacagtc

SEQ ID NO: 357164 - DNA, 30 bp, Artificial Sequence
  Synthetic oligonucleotide
accccccatagcatacctaacgtcccagtc

SEQ ID NO: 357165 - DNA, 30 bp, Artificial Sequence
  Synthetic oligonucleotide
gggcagcagttattaggtacttagccagtc

SEQ ID NO: 357166 - DNA, 30 bp, Artificial Sequence
  Synthetic oligonucleotide
ggtcacagggaacttgtcagttctccagtc

SEQ ID NO: 357167 - DNA, 30 bp, Artificial Sequence
  Synthetic oligonucleotide
cgtacaacatcccatttcagctaggcagtc

SEQ ID NO: 357168 - DNA, 30 bp, Artificial Sequence
  Synthetic oligonucleotide
tgctacctcgtgggtggttgttatgcagtc

SEQ ID NO: 357169 - DNA, 30 bp, Artificial Sequence
  Synthetic oligonucleotide
gcatgactgaaacgtgaagatcctgcagtc

SEQ ID NO: 357170 - DNA, 30 bp, Artificial Sequence
  Synthetic oligonucleotide
tttctctacagtatatgacatagtgcagtc

SEQ ID NO: 357171 - DNA, 30 bp, Artificial Sequence
  Synthetic oligonucleotide
gaatcgtctgtcccacacttcatatcagtc

SEQ ID NO: 357172 - DNA, 30 bp, Artificial Sequence
  Synthetic oligonucleotide
aataccgaggatcgcaaagaggcgtcagtc

SEQ ID NO: 357173 - DNA, 30 bp, Artificial Sequence
  Synthetic oligonucleotide
ggagctgaacgagtttctgcgctgtcagtc

SEQ ID NO: 357174 - DNA, 30 bp, Artificial Sequence
  Synthetic oligonucleotide
ccctggatagccaggaagcaggtgtcagtc

SEQ ID NO: 357175 - DNA, 30 bp, Artificial Sequence
  Synthetic oligonucleotide
actactaacgccttagggcgtgtttcagtc

SEQ ID NO: 357176 - DNA, 30 bp, Artificial Sequence
  Synthetic oligonucleotide
ggatcgtaattcgccctcgtcagaagagtc

SEQ ID NO: 357177 - DNA, 30 bp, Artificial Sequence
  Synthetic oligonucleotide
gttgcggatatacctccactgtcgagagtc

SEQ ID NO: 357178 - DNA, 30 bp, Artificial Sequence
  Synthetic oligonucleotide
ctgtttaagggaatgggacaaatgagagtc

SEQ ID NO: 357179 - DNA, 30 bp, Artificial Sequence
  Synthetic oligonucleotide
tagagcgacatagtcagtatgttgagagtc

SEQ ID NO: 357180 - DNA, 30 bp, Artificial Sequence
  Synthetic oligonucleotide
gtgagcgagatctcactggtgattagagtc

SEQ ID NO: 357181 - DNA, 30 bp, Artificial Sequence
  Synthetic oligonucleotide
ggttggcggtcgagcaaactacgacgagtc

SEQ ID NO: 357182 - DNA, 30 bp, Artificial Sequence
  Synthetic oligonucleotide
tgatcgagtagcaacgcggccggacgagtc

SEQ ID NO: 357183 - DNA, 30 bp, Artificial Sequence
  Synthetic oligonucleotide
ctggttgtgagtaggggcgttttacgagtc

SEQ ID NO: 357184 - DNA, 30 bp, Artificial Sequence
  Synthetic oligonucleotide
ggtatactcaggtagggatttcaccgagtc

SEQ ID NO: 357185 - DNA, 30 bp, Artificial Sequence
  Synthetic oligonucleotide
attttggcaaggcagccaaagcgtcgagtc

SEQ ID NO: 357186 - DNA, 30 bp, Artificial Sequence
  Synthetic oligonucleotide
gatgaaagtatgcagatttagacaggagtc

SEQ ID NO: 357187 - DNA, 30 bp, Artificial Sequence
  Synthetic oligonucleotide
gtcaagagaggcggtaagctaccaggagtc

SEQ ID NO: 357188 - DNA, 30 bp, Artificial Sequence
  Synthetic oligonucleotide
tgtaaagtatggagtagttccttaggagtc

SEQ ID NO: 357189 - DNA, 30 bp, Artificial Sequence
  Synthetic oligonucleotide
cccaatatggtatgcaaggataacggagtc

SEQ ID NO: 357190 - DNA, 30 bp, Artificial Sequence
  Synthetic oligonucleotide
ggcctttggtattagtaccggcgcggagtc

SEQ ID NO: 357191 - DNA, 30 bp, Artificial Sequence
  Synthetic oligonucleotide
atcgcggagctccaaggccctgatggagtc

SEQ ID NO: 357192 - DNA, 30 bp, Artificial Sequence
  Synthetic oligonucleotide
tagacggcttcttggtccagtacatgagtc

SEQ ID NO: 357193 - DNA, 30 bp, Artificial Sequence
  Synthetic oligonucleotide
gcgtttgcgtcagacaacgtaacctgagtc

SEQ ID NO: 357194 - DNA, 30 bp, Artificial Sequence
  Synthetic oligonucleotide
atttggtcgacagcccaatacatctgagtc

SEQ ID NO: 357195 - DNA, 30 bp, Artificial Sequence
  Synthetic oligonucleotide
atatgtccctacgcatactagatctgagtc

SEQ ID NO: 357196 - DNA, 30 bp, Artificial Sequence
  Synthetic oligonucleotide
tttaagcagttaggtattagcgattgagtc

SEQ ID NO: 357197 - DNA, 30 bp, Artificial Sequence
  Synthetic oligonucleotide
attcacgggttcgtcccggctcaaatagtc

SEQ ID NO: 357198 - DNA, 30 bp, Artificial Sequence
  Synthetic oligonucleotide
cacacagctcgctccttgcccccaatagtc

SEQ ID NO: 357199 - DNA, 30 bp, Artificial Sequence
  Synthetic oligonucleotide
cctgggatcacggactagcgcataatagtc

SEQ ID NO: 357200 - DNA, 30 bp, Artificial Sequence
  Synthetic oligonucleotide
acatctatttggtaccttccacacatagtc

SEQ ID NO: 357201 - DNA, 30 bp, Artificial Sequence
  Synthetic oligonucleotide
tagcggccgcgtagcaacaatcccatagtc

SEQ ID NO: 357202 - DNA, 30 bp, Artificial Sequence
  Synthetic oligonucleotide
gtctacttcccccgacactccaagatagtc

SEQ ID NO: 357203 - DNA, 30 bp, Artificial Sequence
  Synthetic oligonucleotide
taacctgcgggggacttgaggaaactagtc

SEQ ID NO: 357204 - DNA, 30 bp, Artificial Sequence
  Synthetic oligonucleotide
gctttattatcttcatctagtacactagtc

SEQ ID NO: 357205 - DNA, 30 bp, Artificial Sequence
  Synthetic oligonucleotide
acagcagagaactggctgctattactagtc

SEQ ID NO: 357206 - DNA, 30 bp, Artificial Sequence
  Synthetic oligonucleotide
cttctgagcggtgggtacgggcacctagtc

SEQ ID NO: 357207 - DNA, 30 bp, Artificial Sequence
  Synthetic oligonucleotide
gtaggacattggagacaggtcgccctagtc

SEQ ID NO: 357208 - DNA, 30 bp, Artificial Sequence
  Synthetic oligonucleotide
gagacgttgtgcactgacgggcgcctagtc

SEQ ID NO: 357209 - DNA, 30 bp, Artificial Sequence
  Synthetic oligonucleotide
ttactcacggatgctgcctaatgcctagtc

SEQ ID NO: 357210 - DNA, 30 bp, Artificial Sequence
  Synthetic oligonucleotide
ggtctttacaaacggattagcgtcctagtc

SEQ ID NO: 357211 - DNA, 30 bp, Artificial Sequence
  Synthetic oligonucleotide
ggagatataagaaaacccgctcagctagtc

SEQ ID NO: 357212 - DNA, 30 bp, Artificial Sequence
  Synthetic oligonucleotide
atatctgccgctcaagtacgcgagctagtc

SEQ ID NO: 357213 - DNA, 30 bp, Artificial Sequence
  Synthetic oligonucleotide
aattcaggtggcgccgtattcgggctagtc

SEQ ID NO: 357214 - DNA, 30 bp, Artificial Sequence
  Synthetic oligonucleotide
cagtcagttaagaggctggccgaagtagtc

SEQ ID NO: 357215 - DNA, 30 bp, Artificial Sequence
  Synthetic oligonucleotide
ggcgtagacactggcattcattaagtagtc

SEQ ID NO: 357216 - DNA, 30 bp, Artificial Sequence
  Synthetic oligonucleotide
ttgtcccgtaaagctttaagtgtcgtagtc

SEQ ID NO: 357217 - DNA, 30 bp, Artificial Sequence
  Synthetic oligonucleotide
tccccgtagacgtgatcatgaacggtagtc

SEQ ID NO: 357218 - DNA, 30 bp, Artificial Sequence
  Synthetic oligonucleotide
acactcataggtagtgcaggagctgtagtc

SEQ ID NO: 357219 - DNA, 30 bp, Artificial Sequence
  Synthetic oligonucleotide
ttacgctgtcctcatactgtcccattagtc

SEQ ID NO: 357220 - DNA, 30 bp, Artificial Sequence
  Synthetic oligonucleotide
aaccgcgtgtactattggaagaccttagtc

SEQ ID NO: 357221 - DNA, 30 bp, Artificial Sequence
  Synthetic oligonucleotide
gtggcagagtggtaacccagaacgttagtc

SEQ ID NO: 357222 - DNA, 30 bp, Artificial Sequence
  Synthetic oligonucleotide
ctatactcgccgcccgatctgtctttagtc

SEQ ID NO: 357223 - DNA, 30 bp, Artificial Sequence
  Synthetic oligonucleotide
taaggggtacgttcggtacaacttttagtc

SEQ ID NO: 357224 - DNA, 30 bp, Artificial Sequence
  Synthetic oligonucleotide
tacagcaaaggtgcaggcgtttacaacgtc

SEQ ID NO: 357225 - DNA, 30 bp, Artificial Sequence
  Synthetic oligonucleotide
tccaggaatgctgggggggactgcaacgtc

SEQ ID NO: 357226 - DNA, 30 bp, Artificial Sequence
  Synthetic oligonucleotide
catttcggaagaactcgtgcttcgaacgtc

SEQ ID NO: 357227 - DNA, 30 bp, Artificial Sequence
  Synthetic oligonucleotide
agaccgttgcaataattaagcactaacgtc

SEQ ID NO: 357228 - DNA, 30 bp, Artificial Sequence
  Synthetic oligonucleotide
aattaacggtataagaggccaacacacgtc

SEQ ID NO: 357229 - DNA, 30 bp, Artificial Sequence
  Synthetic oligonucleotide
actatagtgtatctgatcgtcaaccacgtc

SEQ ID NO: 357230 - DNA, 30 bp, Artificial Sequence
  Synthetic oligonucleotide
aatcagaccctagccaccattaaccacgtc

SEQ ID NO: 357231 - DNA, 30 bp, Artificial Sequence
  Synthetic oligonucleotide
ttacgtaagcgaagatgatccttgcacgtc

SEQ ID NO: 357232 - DNA, 30 bp, Artificial Sequence
  Synthetic oligonucleotide
accattcgtgccggctcaattatagacgtc

SEQ ID NO: 357233 - DNA, 30 bp, Artificial Sequence
  Synthetic oligonucleotide
tttcatatcgggtatggtctaggggacgtc

SEQ ID NO: 357234 - DNA, 30 bp, Artificial Sequence
  Synthetic oligonucleotide
tcaaaccctttggtgtcatatctggacgtc

SEQ ID NO: 357235 - DNA, 30 bp, Artificial Sequence
  Synthetic oligonucleotide
cacccttgggtgtgcggaacatcatacgtc

SEQ ID NO: 357236 - DNA, 30 bp, Artificial Sequence
  Synthetic oligonucleotide
gcaccgggcgtccagacgtacggctacgtc

SEQ ID NO: 357237 - DNA, 30 bp, Artificial Sequence
  Synthetic oligonucleotide
gattaatgtctatttaaacagctctacgtc

SEQ ID NO: 357238 - DNA, 30 bp, Artificial Sequence
  Synthetic oligonucleotide
tatcgaacgtgttggtattgatagtacgtc

SEQ ID NO: 357239 - DNA, 30 bp, Artificial Sequence
  Synthetic oligonucleotide
tacagtcttcgatcactgcgattgtacgtc

SEQ ID NO: 357240 - DNA, 30 bp, Artificial Sequence
  Synthetic oligonucleotide
gtgtgggattctgtcggaacaatttacgtc

SEQ ID NO: 357241 - DNA, 30 bp, Artificial Sequence
  Synthetic oligonucleotide
tacctaccggttgtccgtggttcaaccgtc

SEQ ID NO: 357242 - DNA, 30 bp, Artificial Sequence
  Synthetic oligonucleotide
gttatatcaggcttagtaaacctaaccgtc

SEQ ID NO: 357243 - DNA, 30 bp, Artificial Sequence
  Synthetic oligonucleotide
gttggaagtggtaagcacaagctaaccgtc

SEQ ID NO: 357244 - DNA, 30 bp, Artificial Sequence
  Synthetic oligonucleotide
ttaaaatatggcggccgtccatacaccgtc

SEQ ID NO: 357245 - DNA, 30 bp, Artificial Sequence
  Synthetic oligonucleotide
gttcaacagcctgtgtaatcacagaccgtc

SEQ ID NO: 357246 - DNA, 30 bp, Artificial Sequence
  Synthetic oligonucleotide
ttgaagtacgttgtatgccggtcacccgtc

SEQ ID NO: 357247 - DNA, 30 bp, Artificial Sequence
  Synthetic oligonucleotide
ttgctatcagaacagctgcgacaccccgtc

SEQ ID NO: 357248 - DNA, 30 bp, Artificial Sequence
  Synthetic oligonucleotide
ccaagcgcacacgagctattataagccgtc

SEQ ID NO: 357249 - DNA, 30 bp, Artificial Sequence
  Synthetic oligonucleotide
cgcacgcgatgtagtacctcgggagccgtc

SEQ ID NO: 357250 - DNA, 30 bp, Artificial Sequence
  Synthetic oligonucleotide
gccgcaattttggaggggagtcatgccgtc

SEQ ID NO: 357251 - DNA, 30 bp, Artificial Sequence
  Synthetic oligonucleotide
cattaccaaaacgtttgcaaaatatccgtc

SEQ ID NO: 357252 - DNA, 30 bp, Artificial Sequence
  Synthetic oligonucleotide
gtgttttaataaaagctatgagcctccgtc

SEQ ID NO: 357253 - DNA, 30 bp, Artificial Sequence
  Synthetic oligonucleotide
tgcggccgtagtagcgtgcagtagtccgtc

SEQ ID NO: 357254 - DNA, 30 bp, Artificial Sequence
  Synthetic oligonucleotide
aaaaaggcattatactattgcacgtccgtc

SEQ ID NO: 357255 - DNA, 30 bp, Artificial Sequence
  Synthetic oligonucleotide
tatttggaatagtggccgtcaccgtccgtc

SEQ ID NO: 357256 - DNA, 30 bp, Artificial Sequence
  Synthetic oligonucleotide
attaaacagagacagcctcaggggtccgtc

SEQ ID NO: 357257 - DNA, 30 bp, Artificial Sequence
  Synthetic oligonucleotide
atcaggccattgtgattcataatgtccgtc

SEQ ID NO: 357258 - DNA, 30 bp, Artificial Sequence
  Synthetic oligonucleotide
ggattacgtacgggaatgtcagggagcgtc

SEQ ID NO: 357259 - DNA, 30 bp, Artificial Sequence
  Synthetic oligonucleotide
ggcgcgcagcttacctggtaaattagcgtc

SEQ ID NO: 357260 - DNA, 30 bp, Artificial Sequence
  Synthetic oligonucleotide
tttaaagtggtctggacggggttccgcgtc

SEQ ID NO: 357261 - DNA, 30 bp, Artificial Sequence
  Synthetic oligonucleotide
ggacgggcgaccgattagatgcagcgcgtc

SEQ ID NO: 357262 - DNA, 30 bp, Artificial Sequence
  Synthetic oligonucleotide
aggttgcttgtagccgcaatcgagcgcgtc

SEQ ID NO: 357263 - DNA, 30 bp, Artificial Sequence
  Synthetic oligonucleotide
tgtaagctggagttatattatcatggcgtc

SEQ ID NO: 357264 - DNA, 30 bp, Artificial Sequence
  Synthetic oligonucleotide
acataatgtgctttaaattaagaatgcgtc

SEQ ID NO: 357265 - DNA, 30 bp, Artificial Sequence
  Synthetic oligonucleotide
tgtatggccaatttgggacccggatgcgtc

SEQ ID NO: 357266 - DNA, 30 bp, Artificial Sequence
  Synthetic oligonucleotide
ctgagaaggacctgtatcggacactgcgtc

SEQ ID NO: 357267 - DNA, 30 bp, Artificial Sequence
  Synthetic oligonucleotide
tcgttgagcgatcataatgtgacgtgcgtc

SEQ ID NO: 357268 - DNA, 30 bp, Artificial Sequence
  Synthetic oligonucleotide
tacaggaaacccgggtcagtggggtgcgtc

SEQ ID NO: 357269 - DNA, 30 bp, Artificial Sequence
  Synthetic oligonucleotide
gtacaatttgggaacctgtaccacatcgtc

SEQ ID NO: 357270 - DNA, 30 bp, Artificial Sequence
  Synthetic oligonucleotide
gacccaagttcagagatccgacagatcgtc

SEQ ID NO: 357271 - DNA, 30 bp, Artificial Sequence
  Synthetic oligonucleotide
aaagaattttaaggaatggacgatatcgtc

SEQ ID NO: 357272 - DNA, 30 bp, Artificial Sequence
  Synthetic oligonucleotide
gtaagatatttgtagtctcacaaactcgtc

SEQ ID NO: 357273 - DNA, 30 bp, Artificial Sequence
  Synthetic oligonucleotide
atcacgcaactgatcacaattcgcctcgtc

SEQ ID NO: 357274 - DNA, 30 bp, Artificial Sequence
  Synthetic oligonucleotide
tacccttactgacggtgtcgccttctcgtc

SEQ ID NO: 357275 - DNA, 30 bp, Artificial Sequence
  Synthetic oligonucleotide
gccacggttgcgcggtgatcgtaagtcgtc

SEQ ID NO: 357276 - DNA, 30 bp, Artificial Sequence
  Synthetic oligonucleotide
gcataagaaaagacttcttatacagtcgtc

SEQ ID NO: 357277 - DNA, 30 bp, Artificial Sequence
  Synthetic oligonucleotide
gaacgcctgtaaaggttatccggcgtcgtc

SEQ ID NO: 357278 - DNA, 30 bp, Artificial Sequence
  Synthetic oligonucleotide
agagttcttagcggctgtgtattggtcgtc

SEQ ID NO: 357279 - DNA, 30 bp, Artificial Sequence
  Synthetic oligonucleotide
tttttaagaatgaattcgaggatattcgtc

SEQ ID NO: 357280 - DNA, 30 bp, Artificial Sequence
  Synthetic oligonucleotide
ccgattgcagcgaagaagcgagccttcgtc

SEQ ID NO: 357281 - DNA, 30 bp, Artificial Sequence
  Synthetic oligonucleotide
gaaggtgggccggttcccgcgggcttcgtc

SEQ ID NO: 357282 - DNA, 30 bp, Artificial Sequence
  Synthetic oligonucleotide
cccgcgcattgcttgtgaggcgggttcgtc

SEQ ID NO: 357283 - DNA, 30 bp, Artificial Sequence
  Synthetic oligonucleotide
tggtcaacacacccagaaggcgatttcgtc

SEQ ID NO: 357284 - DNA, 30 bp, Artificial Sequence
  Synthetic oligonucleotide
gttaagattcccgtaatcgaaattttcgtc

SEQ ID NO: 357285 - DNA, 30 bp, Artificial Sequence
  Synthetic oligonucleotide
gaatcgttagatcatgatgttgttttcgtc

SEQ ID NO: 357286 - DNA, 30 bp, Artificial Sequence
  Synthetic oligonucleotide
ggcttataccagcgagtcagctttttcgtc

SEQ ID NO: 357287 - DNA, 30 bp, Artificial Sequence
  Synthetic oligonucleotide
cgtgtttcactgcaatggcttctaaaggtc

SEQ ID NO: 357288 - DNA, 30 bp, Artificial Sequence
  Synthetic oligonucleotide
ctagtcttaacgaatagtgaggccaaggtc

SEQ ID NO: 357289 - DNA, 30 bp, Artificial Sequence
  Synthetic oligonucleotide
cacctagtggacctgcgaccaagcaaggtc

SEQ ID NO: 357290 - DNA, 30 bp, Artificial Sequence
  Synthetic oligonucleotide
tgcacttacggataagcgttcgagaaggtc

SEQ ID NO: 357291 - DNA, 30 bp, Artificial Sequence
  Synthetic oligonucleotide
ggtaagccctgtgttttaatctcgaaggtc

SEQ ID NO: 357292 - DNA, 30 bp, Artificial Sequence
  Synthetic oligonucleotide
gtgatgcagacgctgatgggctggaaggtc

SEQ ID NO: 357293 - DNA, 30 bp, Artificial Sequence
  Synthetic oligonucleotide
aatcgcgaggatttatctctgttgaaggtc

SEQ ID NO: 357294 - DNA, 30 bp, Artificial Sequence
  Synthetic oligonucleotide
taagacgaggtactaaaccttactaaggtc

SEQ ID NO: 357295 - DNA, 30 bp, Artificial Sequence
  Synthetic oligonucleotide
acaggacacgagggaggtcaggaacaggtc

SEQ ID NO: 357296 - DNA, 30 bp, Artificial Sequence
  Synthetic oligonucleotide
ttgttaatgttggtatgatgacgacaggtc

SEQ ID NO: 357297 - DNA, 30 bp, Artificial Sequence
  Synthetic oligonucleotide
taggtggctcctacaacacttatacaggtc

SEQ ID NO: 357298 - DNA, 30 bp, Artificial Sequence
  Synthetic oligonucleotide
ataaacaggctatgtcgtggaaaccaggtc

SEQ ID NO: 357299 - DNA, 30 bp, Artificial Sequence
  Synthetic oligonucleotide
gcagagcaccgaataggaattgggcaggtc

SEQ ID NO: 357300 - DNA, 30 bp, Artificial Sequence
  Synthetic oligonucleotide
ctcaattaggaaaacgttaagttgcaggtc

SEQ ID NO: 357301 - DNA, 30 bp, Artificial Sequence
  Synthetic oligonucleotide
agccgtaaagtgcttccccctagagaggtc

SEQ ID NO: 357302 - DNA, 30 bp, Artificial Sequence
  Synthetic oligonucleotide
ctccgataagcctttgtaggaatagaggtc

SEQ ID NO: 357303 - DNA, 30 bp, Artificial Sequence
  Synthetic oligonucleotide
gtccctgtgcgttcgagggaacaggaggtc

SEQ ID NO: 357304 - DNA, 30 bp, Artificial Sequence
  Synthetic oligonucleotide
gaattgtttatcagtaggggcgcggaggtc

SEQ ID NO: 357305 - DNA, 30 bp, Artificial Sequence
  Synthetic oligonucleotide
gcagatcttcccgcctgcagaagggaggtc

SEQ ID NO: 357306 - DNA, 30 bp, Artificial Sequence
  Synthetic oligonucleotide
ctatgctttgtgccttctggagatgaggtc

SEQ ID NO: 357307 - DNA, 30 bp, Artificial Sequence
  Synthetic oligonucleotide
ccgacgactagaatttggattatataggtc

SEQ ID NO: 357308 - DNA, 30 bp, Artificial Sequence
  Synthetic oligonucleotide
gttgattcatacggggaggctccctaggtc

SEQ ID NO: 357309 - DNA, 30 bp, Artificial Sequence
  Synthetic oligonucleotide
gcctaggatagagattcgctgagctaggtc

SEQ ID NO: 357310 - DNA, 30 bp, Artificial Sequence
  Synthetic oligonucleotide
ggcggtagtacgcaaaccctccagtaggtc

SEQ ID NO: 357311 - DNA, 31 bp, Artificial Sequence
  Synthetic oligonucleotide
aacctcgtctgctccttcctaagggtaggtc

SEQ ID NO: 357312 - DNA, 30 bp, Artificial Sequence
  Synthetic oligonucleotide
cgacagttacctactgtgcgtttgtaggtc

SEQ ID NO: 357313 - DNA, 30 bp, Artificial Sequence
  Synthetic oligonucleotide
ttatgtgttcgatatgcggacgcttaggtc

SEQ ID NO: 357314 - DNA, 30 bp, Artificial Sequence
  Synthetic oligonucleotide
gaattacgagtcccggtacaacgttaggtc

SEQ ID NO: 357315 - DNA, 30 bp, Artificial Sequence
  Synthetic oligonucleotide
cttaccgaaacagtaattgttgtttaggtc

SEQ ID NO: 357316 - DNA, 30 bp, Artificial Sequence
  Synthetic oligonucleotide
tgctttccggacgagtcagtccgcacggtc

SEQ ID NO: 357317 - DNA, 30 bp, Artificial Sequence
  Synthetic oligonucleotide
gttctcgcgtggttagatcaccatacggtc

SEQ ID NO: 357318 - DNA, 30 bp, Artificial Sequence
  Synthetic oligonucleotide
ttgaacaaacgcggaacaccccgtacggtc

SEQ ID NO: 357319 - DNA, 30 bp, Artificial Sequence
  Synthetic oligonucleotide
tttgtgtggcatattttgcaggttacggtc

SEQ ID NO: 357320 - DNA, 30 bp, Artificial Sequence
  Synthetic oligonucleotide
tgagcagagcaacactacacatcaccggtc

SEQ ID NO: 357321 - DNA, 30 bp, Artificial Sequence
  Synthetic oligonucleotide
tgcgggtaacccggcgtggtgagaccggtc

SEQ ID NO: 357322 - DNA, 30 bp, Artificial Sequence
  Synthetic oligonucleotide
tgttagaggttcattatgacgagcccggtc

SEQ ID NO: 357323 - DNA, 30 bp, Artificial Sequence
  Synthetic oligonucleotide
ccgctcgatactgctgcggaaggcccggtc

SEQ ID NO: 357324 - DNA, 30 bp, Artificial Sequence
  Synthetic oligonucleotide
ctttgcgaaaaaatgagctacaatccggtc

SEQ ID NO: 357325 - DNA, 30 bp, Artificial Sequence
  Synthetic oligonucleotide
ttaaacactgcccgacttggagaagcggtc

SEQ ID NO: 357326 - DNA, 30 bp, Artificial Sequence
  Synthetic oligonucleotide
cataggtccgaagagtatatcggagcggtc

SEQ ID NO: 357327 - DNA, 30 bp, Artificial Sequence
  Synthetic oligonucleotide
atccgaagctttgccgcgtacttggcggtc

SEQ ID NO: 357328 - DNA, 30 bp, Artificial Sequence
  Synthetic oligonucleotide
tggtagtcatccccgaggtgtgctgcggtc

SEQ ID NO: 357329 - DNA, 30 bp, Artificial Sequence
  Synthetic oligonucleotide
tcgcacgatttaaagtagttttttgcggtc

SEQ ID NO: 357330 - DNA, 30 bp, Artificial Sequence
  Synthetic oligonucleotide
ttttctgccttcaatttaccggcctcggtc

SEQ ID NO: 357331 - DNA, 30 bp, Artificial Sequence
  Synthetic oligonucleotide
gaactcggttgcctatggtacctctcggtc

SEQ ID NO: 357332 - DNA, 30 bp, Artificial Sequence
  Synthetic oligonucleotide
aagctcctatatggatctgatttgtcggtc

SEQ ID NO: 357333 - DNA, 30 bp, Artificial Sequence
  Synthetic oligonucleotide
ggccttcagggggatgggtcgaattcggtc

SEQ ID NO: 357334 - DNA, 30 bp, Artificial Sequence
  Synthetic oligonucleotide
acgtccagttcaggaacctgagcaagggtc

SEQ ID NO: 357335 - DNA, 30 bp, Artificial Sequence
  Synthetic oligonucleotide
agtggtgacttggaaggccgatacagggtc

SEQ ID NO: 357336 - DNA, 30 bp, Artificial Sequence
  Synthetic oligonucleotide
acaaatggcaatggatagtcccccagggtc

SEQ ID NO: 357337 - DNA, 30 bp, Artificial Sequence
  Synthetic oligonucleotide
gccaaattctaccgtttttttcgcagggtc

SEQ ID NO: 357338 - DNA, 30 bp, Artificial Sequence
  Synthetic oligonucleotide
agccaaatgcaacacagtagatagagggtc

SEQ ID NO: 357339 - DNA, 30 bp, Artificial Sequence
  Synthetic oligonucleotide
gcaaacggcgggacccagaaatcgagggtc

SEQ ID NO: 357340 - DNA, 30 bp, Artificial Sequence
  Synthetic oligonucleotide
gttagactaccaggttccaagattagggtc

SEQ ID NO: 357341 - DNA, 30 bp, Artificial Sequence
  Synthetic oligonucleotide
ggtattcttcctaaacggagatcacgggtc

SEQ ID NO: 357342 - DNA, 30 bp, Artificial Sequence
  Synthetic oligonucleotide
ccagaagggtccaaaatgcgcccccgggtc

SEQ ID NO: 357343 - DNA, 30 bp, Artificial Sequence
  Synthetic oligonucleotide
aattgacttataacaatcgtgttccgggtc

SEQ ID NO: 357344 - DNA, 30 bp, Artificial Sequence
  Synthetic oligonucleotide
ggcgttcagatcggccaatgtttccgggtc

SEQ ID NO: 357345 - DNA, 30 bp, Artificial Sequence
  Synthetic oligonucleotide
agtcctaaagagtccttacgccagcgggtc

SEQ ID NO: 357346 - DNA, 30 bp, Artificial Sequence
  Synthetic oligonucleotide
ggaggattgacggggtcggactagcgggtc

SEQ ID NO: 357347 - DNA, 30 bp, Artificial Sequence
  Synthetic oligonucleotide
gaagctacgtctgagttttaaacgcgggtc

SEQ ID NO: 357348 - DNA, 30 bp, Artificial Sequence
  Synthetic oligonucleotide
gacacttgcaagcagtaccgtgcgcgggtc

SEQ ID NO: 357349 - DNA, 30 bp, Artificial Sequence
  Synthetic oligonucleotide
caggttatgggttcgtccccaaaaggggtc

SEQ ID NO: 357350 - DNA, 30 bp, Artificial Sequence
  Synthetic oligonucleotide
tccctaggaccgctgccaaacacaggggtc

SEQ ID NO: 357351 - DNA, 30 bp, Artificial Sequence
  Synthetic oligonucleotide
caaattggtcacgtctcctcgtgaggggtc

SEQ ID NO: 357352 - DNA, 30 bp, Artificial Sequence
  Synthetic oligonucleotide
gtccaccgctatccctcattaataggggtc

SEQ ID NO: 357353 - DNA, 30 bp, Artificial Sequence
  Synthetic oligonucleotide
gggcgtctgctccttgcgtgattaggggtc

SEQ ID NO: 357354 - DNA, 30 bp, Artificial Sequence
  Synthetic oligonucleotide
gctggatacaacccgatcactacgggggtc

SEQ ID NO: 357355 - DNA, 30 bp, Artificial Sequence
  Synthetic oligonucleotide
acacactatggtgagaaatttaggggggtc

SEQ ID NO: 357356 - DNA, 31 bp, Artificial Sequence
  Synthetic oligonucleotide
gtatttccgtaagcacttactcactggggtc

SEQ ID NO: 357357 - DNA, 30 bp, Artificial Sequence
  Synthetic oligonucleotide
cggcagtaacgtgccaatgggactggggtc

SEQ ID NO: 357358 - DNA, 30 bp, Artificial Sequence
  Synthetic oligonucleotide
cgttacttttcatatctgagcctttgggtc

SEQ ID NO: 357359 - DNA, 30 bp, Artificial Sequence
  Synthetic oligonucleotide
agtatatatcctaaccagtaggaaatggtc

SEQ ID NO: 357360 - DNA, 30 bp, Artificial Sequence
  Synthetic oligonucleotide
cggaatgttatagtgggtgcgtcaatggtc

SEQ ID NO: 357361 - DNA, 30 bp, Artificial Sequence
  Synthetic oligonucleotide
tgagtagtctataactttgcgataatggtc

SEQ ID NO: 357362 - DNA, 30 bp, Artificial Sequence
  Synthetic oligonucleotide
tccacagtaggtaccattcctcggatggtc

SEQ ID NO: 357363 - DNA, 30 bp, Artificial Sequence
  Synthetic oligonucleotide
aaagcccgagttattaacgacctgatggtc

SEQ ID NO: 357364 - DNA, 30 bp, Artificial Sequence
  Synthetic oligonucleotide
gcagagtagaataatacactgcttatggtc

SEQ ID NO: 357365 - DNA, 30 bp, Artificial Sequence
  Synthetic oligonucleotide
tctcaggaacggtataatcctcttatggtc

SEQ ID NO: 357366 - DNA, 30 bp, Artificial Sequence
  Synthetic oligonucleotide
caacaaatcgcattatctagagttatggtc

SEQ ID NO: 357367 - DNA, 30 bp, Artificial Sequence
  Synthetic oligonucleotide
ggaaaacacgcgcaggacgagtcactggtc

SEQ ID NO: 357368 - DNA, 31 bp, Artificial Sequence
  Synthetic oligonucleotide
actaactgtcctttaagcagatcccctggtc

SEQ ID NO: 357369 - DNA, 30 bp, Artificial Sequence
  Synthetic oligonucleotide
tcttgatttctggggtaatccagcctggtc

SEQ ID NO: 357370 - DNA, 30 bp, Artificial Sequence
  Synthetic oligonucleotide
cgcagggggcctctgggtgtggtcctggtc

SEQ ID NO: 357371 - DNA, 30 bp, Artificial Sequence
  Synthetic oligonucleotide
cgctaagaacaaagcaggatattcctggtc

SEQ ID NO: 357372 - DNA, 30 bp, Artificial Sequence
  Synthetic oligonucleotide
aaccttcgctttaactcacgatctctggtc

SEQ ID NO: 357373 - DNA, 30 bp, Artificial Sequence
  Synthetic oligonucleotide
cggtgtttagatgaccatgatgttctggtc

SEQ ID NO: 357374 - DNA, 30 bp, Artificial Sequence
  Synthetic oligonucleotide
tgttcaagccccagtataaggaaagtggtc

SEQ ID NO: 357375 - DNA, 30 bp, Artificial Sequence
  Synthetic oligonucleotide
tcccgaaaaacggcaataattgcagtggtc

SEQ ID NO: 357376 - DNA, 30 bp, Artificial Sequence
  Synthetic oligonucleotide
ccttggtaaacgacccaggcgtacgtggtc

SEQ ID NO: 357377 - DNA, 30 bp, Artificial Sequence
  Synthetic oligonucleotide
tctttctgaggatacagcgttcccgtggtc

SEQ ID NO: 357378 - DNA, 30 bp, Artificial Sequence
  Synthetic oligonucleotide
ggtaaatattgtttttgatgctccgtggtc

SEQ ID NO: 357379 - DNA, 30 bp, Artificial Sequence
  Synthetic oligonucleotide
aattgtatggtcagactctttagcgtggtc

SEQ ID NO: 357380 - DNA, 30 bp, Artificial Sequence
  Synthetic oligonucleotide
caatttgtatctagcaccgttacggtggtc

SEQ ID NO: 357381 - DNA, 30 bp, Artificial Sequence
  Synthetic oligonucleotide
aggtgcatacgctgctgagctatggtggtc

SEQ ID NO: 357382 - DNA, 30 bp, Artificial Sequence
  Synthetic oligonucleotide
cgacttatacggtttagcggagtattggtc

SEQ ID NO: 357383 - DNA, 30 bp, Artificial Sequence
  Synthetic oligonucleotide
atacgatcatcgaacggaaagcccttggtc

SEQ ID NO: 357384 - DNA, 30 bp, Artificial Sequence
  Synthetic oligonucleotide
cgtacctcacgaaggcgatagggcttggtc

SEQ ID NO: 357385 - DNA, 30 bp, Artificial Sequence
  Synthetic oligonucleotide
acttataaacgataccaataaacgttggtc

SEQ ID NO: 357386 - DNA, 30 bp, Artificial Sequence
  Synthetic oligonucleotide
gtcgacataacgagcatcagttcgttggtc

SEQ ID NO: 357387 - DNA, 30 bp, Artificial Sequence
  Synthetic oligonucleotide
catccgttcatcgtgcagtacaggttggtc

SEQ ID NO: 357388 - DNA, 30 bp, Artificial Sequence
  Synthetic oligonucleotide
ctagatcgaagatcctcagcatctttggtc

SEQ ID NO: 357389 - DNA, 30 bp, Artificial Sequence
  Synthetic oligonucleotide
tactgattataacacattatcagtttggtc

SEQ ID NO: 357390 - DNA, 30 bp, Artificial Sequence
  Synthetic oligonucleotide
ggtgtattaattattggtatgtgaaatgtc

SEQ ID NO: 357391 - DNA, 30 bp, Artificial Sequence
  Synthetic oligonucleotide
ccgtgtccggcgcccagttggctaaatgtc

SEQ ID NO: 357392 - DNA, 30 bp, Artificial Sequence
  Synthetic oligonucleotide
agcttcggatatcgacgattcgacaatgtc

SEQ ID NO: 357393 - DNA, 30 bp, Artificial Sequence
  Synthetic oligonucleotide
cggtaccgggcacgttctgcctgcaatgtc

SEQ ID NO: 357394 - DNA, 30 bp, Artificial Sequence
  Synthetic oligonucleotide
agagcaagcgctccctcgatttcgaatgtc

SEQ ID NO: 357395 - DNA, 30 bp, Artificial Sequence
  Synthetic oligonucleotide
cgtgttacgtaaacgcttgagggtaatgtc

SEQ ID NO: 357396 - DNA, 30 bp, Artificial Sequence
  Synthetic oligonucleotide
ttacttagattccatattgttcttaatgtc

SEQ ID NO: 357397 - DNA, 30 bp, Artificial Sequence
  Synthetic oligonucleotide
tgtgttatgctagtagaggggtcacatgtc

SEQ ID NO: 357398 - DNA, 30 bp, Artificial Sequence
  Synthetic oligonucleotide
cgcctgctggtattagtatgggtacatgtc

SEQ ID NO: 357399 - DNA, 30 bp, Artificial Sequence
  Synthetic oligonucleotide
tctgttgaactgttgatgactttccatgtc

SEQ ID NO: 357400 - DNA, 30 bp, Artificial Sequence
  Synthetic oligonucleotide
ataacccgatactggcaaatcccgcatgtc

SEQ ID NO: 357401 - DNA, 30 bp, Artificial Sequence
  Synthetic oligonucleotide
tagtgtacaggattgtactatccgcatgtc

SEQ ID NO: 357402 - DNA, 30 bp, Artificial Sequence
  Synthetic oligonucleotide
aggcaggatgcagttggggcttcgcatgtc

SEQ ID NO: 357403 - DNA, 30 bp, Artificial Sequence
  Synthetic oligonucleotide
gaagtcgggacgccacggatgttgcatgtc

SEQ ID NO: 357404 - DNA, 30 bp, Artificial Sequence
  Synthetic oligonucleotide
aataatgtgtctgggatcattcatcatgtc

SEQ ID NO: 357405 - DNA, 30 bp, Artificial Sequence
  Synthetic oligonucleotide
ggggctagcgatttttgttggtctcatgtc

SEQ ID NO: 357406 - DNA, 30 bp, Artificial Sequence
  Synthetic oligonucleotide
catggctcggttggaactcgcctagatgtc

SEQ ID NO: 357407 - DNA, 30 bp, Artificial Sequence
  Synthetic oligonucleotide
caaattaaaccacgcgcgtatctagatgtc

SEQ ID NO: 357408 - DNA, 30 bp, Artificial Sequence
  Synthetic oligonucleotide
gcaggaaatcagacgtctttcaccgatgtc

SEQ ID NO: 357409 - DNA, 29 bp, Artificial Sequence
  Synthetic oligonucleotide
ccgactctttcaggtatcatgcggatgtc

SEQ ID NO: 357410 - DNA, 30 bp, Artificial Sequence
  Synthetic oligonucleotide
cgacactcgaaagcctttcttctatatgtc

SEQ ID NO: 357411 - DNA, 30 bp, Artificial Sequence
  Synthetic oligonucleotide
cggcagataacgagatacatagagtatgtc

SEQ ID NO: 357412 - DNA, 30 bp, Artificial Sequence
  Synthetic oligonucleotide
aggtaaaaactgatgctccgtcattatgtc

SEQ ID NO: 357413 - DNA, 30 bp, Artificial Sequence
  Synthetic oligonucleotide
cagaactgtaaaagcaaattcttttatgtc

SEQ ID NO: 357414 - DNA, 30 bp, Artificial Sequence
  Synthetic oligonucleotide
tacctatatcaatgaataggtccaactgtc

SEQ ID NO: 357415 - DNA, 30 bp, Artificial Sequence
  Synthetic oligonucleotide
taaggtcggtatgaagtttattgcactgtc

SEQ ID NO: 357416 - DNA, 30 bp, Artificial Sequence
  Synthetic oligonucleotide
ctttggagtagtttagtgtcaagacctgtc

SEQ ID NO: 357417 - DNA, 30 bp, Artificial Sequence
  Synthetic oligonucleotide
tctgcgtgacatgttggatgcttccctgtc

SEQ ID NO: 357418 - DNA, 30 bp, Artificial Sequence
  Synthetic oligonucleotide
ttcaatgggggataagacatcaggcctgtc

SEQ ID NO: 357419 - DNA, 30 bp, Artificial Sequence
  Synthetic oligonucleotide
gacttagcagcgctatgattaaatcctgtc

SEQ ID NO: 357420 - DNA, 30 bp, Artificial Sequence
  Synthetic oligonucleotide
tatgaacggctaaaatcgctggatcctgtc

SEQ ID NO: 357421 - DNA, 30 bp, Artificial Sequence
  Synthetic oligonucleotide
atgcctcctcactcggtcatccgtcctgtc

SEQ ID NO: 357422 - DNA, 30 bp, Artificial Sequence
  Synthetic oligonucleotide
agggagattgcagcgtatcgttgtcctgtc

SEQ ID NO: 357423 - DNA, 30 bp, Artificial Sequence
  Synthetic oligonucleotide
taaaatcataagccttggttataagctgtc

SEQ ID NO: 357424 - DNA, 30 bp, Artificial Sequence
  Synthetic oligonucleotide
atacacacgcggccataagcatcttctgtc

SEQ ID NO: 357425 - DNA, 30 bp, Artificial Sequence
  Synthetic oligonucleotide
tactggtatgactttaggctgggaagtgtc

SEQ ID NO: 357426 - DNA, 30 bp, Artificial Sequence
  Synthetic oligonucleotide
gaagactatagtcactaattctgaagtgtc

SEQ ID NO: 357427 - DNA, 30 bp, Artificial Sequence
  Synthetic oligonucleotide
catatgtaagcccttagtgggttaagtgtc

SEQ ID NO: 357428 - DNA, 30 bp, Artificial Sequence
  Synthetic oligonucleotide
atataaaaggcgctacatgagaggagtgtc

SEQ ID NO: 357429 - DNA, 30 bp, Artificial Sequence
  Synthetic oligonucleotide
gtcgccaccgagattaagacgtctagtgtc

SEQ ID NO: 357430 - DNA, 30 bp, Artificial Sequence
  Synthetic oligonucleotide
ggaggttgtctataaccccagggtagtgtc

SEQ ID NO: 357431 - DNA, 30 bp, Artificial Sequence
  Synthetic oligonucleotide
gctatcacggtcagatcctccgaacgtgtc

SEQ ID NO: 357432 - DNA, 30 bp, Artificial Sequence
  Synthetic oligonucleotide
gaaatcaccatgagagcattacgacgtgtc

SEQ ID NO: 357433 - DNA, 30 bp, Artificial Sequence
  Synthetic oligonucleotide
acttatgttatcgttatcggaagccgtgtc

SEQ ID NO: 357434 - DNA, 30 bp, Artificial Sequence
  Synthetic oligonucleotide
taaattcgggttcattgatgagagcgtgtc

SEQ ID NO: 357435 - DNA, 30 bp, Artificial Sequence
  Synthetic oligonucleotide
atgcgacgctaagtccgcaaggagcgtgtc

SEQ ID NO: 357436 - DNA, 30 bp, Artificial Sequence
  Synthetic oligonucleotide
gtgtgcaaccgcatctagctggtgcgtgtc

SEQ ID NO: 357437 - DNA, 30 bp, Artificial Sequence
  Synthetic oligonucleotide
ctggaataaagctaacggacccgaggtgtc

SEQ ID NO: 357438 - DNA, 30 bp, Artificial Sequence
  Synthetic oligonucleotide
gtgttgtttaaggtctgcttatacggtgtc

SEQ ID NO: 357439 - DNA, 30 bp, Artificial Sequence
  Synthetic oligonucleotide
aactcctttttggaattcgcatggggtgtc

SEQ ID NO: 357440 - DNA, 30 bp, Artificial Sequence
  Synthetic oligonucleotide
caggcacagaacaggatctaggtgggtgtc

SEQ ID NO: 357441 - DNA, 30 bp, Artificial Sequence
  Synthetic oligonucleotide
ggagactatgtcactagtggacatggtgtc

SEQ ID NO: 357442 - DNA, 30 bp, Artificial Sequence
  Synthetic oligonucleotide
tgaagggacgtttataggcggccatgtgtc

SEQ ID NO: 357443 - DNA, 30 bp, Artificial Sequence
  Synthetic oligonucleotide
cgcagggctttaaccaatagtccatgtgtc

SEQ ID NO: 357444 - DNA, 30 bp, Artificial Sequence
  Synthetic oligonucleotide
gagcaggagacgcggacatgatcatgtgtc

SEQ ID NO: 357445 - DNA, 30 bp, Artificial Sequence
  Synthetic oligonucleotide
ggaatgcaagggataccggactgatgtgtc

SEQ ID NO: 357446 - DNA, 30 bp, Artificial Sequence
  Synthetic oligonucleotide
agaaaatgactgaagattttcgcctgtgtc

SEQ ID NO: 357447 - DNA, 30 bp, Artificial Sequence
  Synthetic oligonucleotide
ttacatatttgtccatcttaaggctgtgtc

SEQ ID NO: 357448 - DNA, 29 bp, Artificial Sequence
  Synthetic oligonucleotide
ctgaaaacggttctatcctaacttgtgtc

SEQ ID NO: 357449 - DNA, 30 bp, Artificial Sequence
  Synthetic oligonucleotide
tcttgtgagacttcacttcacttttgtgtc

SEQ ID NO: 357450 - DNA, 30 bp, Artificial Sequence
  Synthetic oligonucleotide
taatagaggatggaatttccgacaattgtc

SEQ ID NO: 357451 - DNA, 30 bp, Artificial Sequence
  Synthetic oligonucleotide
aaaattagtgcgagtctgtgccagattgtc

SEQ ID NO: 357452 - DNA, 30 bp, Artificial Sequence
  Synthetic oligonucleotide
attctttgaagttaccgtgccggtattgtc

SEQ ID NO: 357453 - DNA, 31 bp, Artificial Sequence
  Synthetic oligonucleotide
ttataacccgttaacaacacgtgcacttgtc

SEQ ID NO: 357454 - DNA, 30 bp, Artificial Sequence
  Synthetic oligonucleotide
tcactcatacagcactcccgaagccttgtc

SEQ ID NO: 357455 - DNA, 30 bp, Artificial Sequence
  Synthetic oligonucleotide
cagtggtattggggaggagatatccttgtc

SEQ ID NO: 357456 - DNA, 30 bp, Artificial Sequence
  Synthetic oligonucleotide
agatcgcacgccgatctcggagctcttgtc

SEQ ID NO: 357457 - DNA, 30 bp, Artificial Sequence
  Synthetic oligonucleotide
gacaccgccgccatgctaaatcttcttgtc

SEQ ID NO: 357458 - DNA, 30 bp, Artificial Sequence
  Synthetic oligonucleotide
gactcagcaaccaagtagactagagttgtc

SEQ ID NO: 357459 - DNA, 30 bp, Artificial Sequence
  Synthetic oligonucleotide
acatgacatttccgctcaatttgcgttgtc

SEQ ID NO: 357460 - DNA, 30 bp, Artificial Sequence
  Synthetic oligonucleotide
tggtaaccaaagttcaaggccttcgttgtc

SEQ ID NO: 357461 - DNA, 30 bp, Artificial Sequence
  Synthetic oligonucleotide
gcagagtattaatggttgtgtaatgttgtc

SEQ ID NO: 357462 - DNA, 30 bp, Artificial Sequence
  Synthetic oligonucleotide
gccaacgtattagcatggccctatgttgtc

SEQ ID NO: 357463 - DNA, 30 bp, Artificial Sequence
  Synthetic oligonucleotide
aatctgagaaagactcacattcaatttgtc

SEQ ID NO: 357464 - DNA, 30 bp, Artificial Sequence
  Synthetic oligonucleotide
ggggacatttcctttggcgtgtaatttgtc

SEQ ID NO: 357465 - DNA, 30 bp, Artificial Sequence
  Synthetic oligonucleotide
tattagaccgctttgaagtgtggatttgtc

SEQ ID NO: 357466 - DNA, 30 bp, Artificial Sequence
  Synthetic oligonucleotide
ccttgatcagaaacctacctatgatttgtc

SEQ ID NO: 357467 - DNA, 30 bp, Artificial Sequence
  Synthetic oligonucleotide
tgaaggaccgtcctcttaacattatttgtc

SEQ ID NO: 357468 - DNA, 30 bp, Artificial Sequence
  Synthetic oligonucleotide
tccggcgaacaagtaggatatggctttgtc

SEQ ID NO: 357469 - DNA, 30 bp, Artificial Sequence
  Synthetic oligonucleotide
gatgcgaaaagtaaagctaaaaggtttgtc

SEQ ID NO: 357470 - DNA, 30 bp, Artificial Sequence
  Synthetic oligonucleotide
gttgggctatgtcgttagctgcggtttgtc

SEQ ID NO: 357471 - DNA, 30 bp, Artificial Sequence
  Synthetic oligonucleotide
gcggtggtgtttactcgccgggtgtttgtc

SEQ ID NO: 357472 - DNA, 30 bp, Artificial Sequence
  Synthetic oligonucleotide
cggacgcggggtacgttgacaagttttgtc

SEQ ID NO: 357473 - DNA, 30 bp, Artificial Sequence
  Synthetic oligonucleotide
actcatggctaactctctactagttttgtc

SEQ ID NO: 357474 - DNA, 30 bp, Artificial Sequence
  Synthetic oligonucleotide
tgcaaggtcggcaatatccgattaaaattc

SEQ ID NO: 357475 - DNA, 30 bp, Artificial Sequence
  Synthetic oligonucleotide
tcgcatacggtttatcgtttatgcaaattc

SEQ ID NO: 357476 - DNA, 30 bp, Artificial Sequence
  Synthetic oligonucleotide
caggatcggttgcgcgtggaccggaaattc

SEQ ID NO: 357477 - DNA, 30 bp, Artificial Sequence
  Synthetic oligonucleotide
ggcggagttgcgacctctatgtaacaattc

SEQ ID NO: 357478 - DNA, 30 bp, Artificial Sequence
  Synthetic oligonucleotide
cccgctcggcacagctcgatgtgacaattc

SEQ ID NO: 357479 - DNA, 30 bp, Artificial Sequence
  Synthetic oligonucleotide
acattaagcggggaatggatttaccaattc

SEQ ID NO: 357480 - DNA, 30 bp, Artificial Sequence
  Synthetic oligonucleotide
taccaacgatggagaaacagctcccaattc

SEQ ID NO: 357481 - DNA, 30 bp, Artificial Sequence
  Synthetic oligonucleotide
gaataacccgatagccatacggtgcaattc

SEQ ID NO: 357482 - DNA, 30 bp, Artificial Sequence
  Synthetic oligonucleotide
gcgcaggcaaagcttgaaatctatcaattc

SEQ ID NO: 357483 - DNA, 30 bp, Artificial Sequence
  Synthetic oligonucleotide
gggggttaaggcgcccggcaagctcaattc

SEQ ID NO: 357484 - DNA, 30 bp, Artificial Sequence
  Synthetic oligonucleotide
agggtagggtacgcatcaggaggtcaattc

SEQ ID NO: 357485 - DNA, 30 bp, Artificial Sequence
  Synthetic oligonucleotide
aaatacaatgtaaatgccagacaagaattc

SEQ ID NO: 357486 - DNA, 30 bp, Artificial Sequence
  Synthetic oligonucleotide
atctgcgtcccacggaagccctaagaattc

SEQ ID NO: 357487 - DNA, 30 bp, Artificial Sequence
  Synthetic oligonucleotide
ggcagatatatactgtctcccagagaattc

SEQ ID NO: 357488 - DNA, 30 bp, Artificial Sequence
  Synthetic oligonucleotide
tacggccttgagccaagaaccggagaattc

SEQ ID NO: 357489 - DNA, 30 bp, Artificial Sequence
  Synthetic oligonucleotide
gggttaaatagttagcggttgctagaattc

SEQ ID NO: 357490 - DNA, 30 bp, Artificial Sequence
  Synthetic oligonucleotide
ctggaaactcaatcccccattatcgaattc

SEQ ID NO: 357491 - DNA, 30 bp, Artificial Sequence
  Synthetic oligonucleotide
ttgctcatgatccgtgtgaggttcgaattc

SEQ ID NO: 357492 - DNA, 30 bp, Artificial Sequence
  Synthetic oligonucleotide
ttaaacaacctagaggatagaaaggaattc

SEQ ID NO: 357493 - DNA, 30 bp, Artificial Sequence
  Synthetic oligonucleotide
aaagtccggagtccaagacattcggaattc

SEQ ID NO: 357494 - DNA, 30 bp, Artificial Sequence
  Synthetic oligonucleotide
aaaatatggtgaaatgcataacaataattc

SEQ ID NO: 357495 - DNA, 30 bp, Artificial Sequence
  Synthetic oligonucleotide
cagtgcgtgatccactgagaacgataattc

SEQ ID NO: 357496 - DNA, 30 bp, Artificial Sequence
  Synthetic oligonucleotide
gtcgccgggaggtctctataggactaattc

SEQ ID NO: 357497 - DNA, 30 bp, Artificial Sequence
  Synthetic oligonucleotide
agcggaacgagtgcttcgggatattaattc

SEQ ID NO: 357498 - DNA, 30 bp, Artificial Sequence
  Synthetic oligonucleotide
tagaatgttggccatacagcgcgttaattc

SEQ ID NO: 357499 - DNA, 30 bp, Artificial Sequence
  Synthetic oligonucleotide
ttgaaaaacatcctctattataaaacattc

SEQ ID NO: 357500 - DNA, 30 bp, Artificial Sequence
  Synthetic oligonucleotide
gctgcgcaatgttcccttcgagcaacattc

SEQ ID NO: 357501 - DNA, 30 bp, Artificial Sequence
  Synthetic oligonucleotide
gctaatcgctcaatcgctttgacgacattc

SEQ ID NO: 357502 - DNA, 30 bp, Artificial Sequence
  Synthetic oligonucleotide
gcgatgcctccattcgggacgttgacattc

SEQ ID NO: 357503 - DNA, 30 bp, Artificial Sequence
  Synthetic oligonucleotide
gtggtgagcagaaaaaatacgaacccattc

SEQ ID NO: 357504 - DNA, 30 bp, Artificial Sequence
  Synthetic oligonucleotide
gttcagaaagtttcgtactccgacccattc

SEQ ID NO: 357505 - DNA, 30 bp, Artificial Sequence
  Synthetic oligonucleotide
ttcttctaatcgcggaggaattgtccattc

SEQ ID NO: 357506 - DNA, 30 bp, Artificial Sequence
  Synthetic oligonucleotide
aacagtgaaggcgcacgtgtctttccattc

SEQ ID NO: 357507 - DNA, 30 bp, Artificial Sequence
  Synthetic oligonucleotide
ggggtccaaataatagtcggtacagcattc

SEQ ID NO: 357508 - DNA, 30 bp, Artificial Sequence
  Synthetic oligonucleotide
cttctcagatgtcggatcatggcagcattc

SEQ ID NO: 357509 - DNA, 30 bp, Artificial Sequence
  Synthetic oligonucleotide
gtgggactaaccaggtgggtaaacgcattc

SEQ ID NO: 357510 - DNA, 30 bp, Artificial Sequence
  Synthetic oligonucleotide
acactgtaaatttttatcagatccgcattc

SEQ ID NO: 357511 - DNA, 30 bp, Artificial Sequence
  Synthetic oligonucleotide
cagggaggatttctgatccctaaggcattc

SEQ ID NO: 357512 - DNA, 30 bp, Artificial Sequence
  Synthetic oligonucleotide
atgcataacattaggggcaaccgtgcattc

SEQ ID NO: 357513 - DNA, 30 bp, Artificial Sequence
  Synthetic oligonucleotide
catctgattcaaaactgctcgagatcattc

SEQ ID NO: 357514 - DNA, 30 bp, Artificial Sequence
  Synthetic oligonucleotide
cgcataagactttgtcaccggagatcattc

SEQ ID NO: 357515 - DNA, 30 bp, Artificial Sequence
  Synthetic oligonucleotide
gtactgaaaataccatagttcgtctcattc

SEQ ID NO: 357516 - DNA, 30 bp, Artificial Sequence
  Synthetic oligonucleotide
gctcaatttaggcagtgaaggaggtcattc

SEQ ID NO: 357517 - DNA, 30 bp, Artificial Sequence
  Synthetic oligonucleotide
taacgctccgtcagcggaccctggtcattc

SEQ ID NO: 357518 - DNA, 30 bp, Artificial Sequence
  Synthetic oligonucleotide
ggccagcattgatccatagatacaagattc

SEQ ID NO: 357519 - DNA, 30 bp, Artificial Sequence
  Synthetic oligonucleotide
cccataagtgaaaacgcctgatgaagattc

SEQ ID NO: 357520 - DNA, 30 bp, Artificial Sequence
  Synthetic oligonucleotide
ggacacttagtggatctggaaaacagattc

SEQ ID NO: 357521 - DNA, 30 bp, Artificial Sequence
  Synthetic oligonucleotide
caatctaatcttacatccaggcacagattc

SEQ ID NO: 357522 - DNA, 30 bp, Artificial Sequence
  Synthetic oligonucleotide
gcaagctggatccccaagcatgacagattc

SEQ ID NO: 357523 - DNA, 30 bp, Artificial Sequence
  Synthetic oligonucleotide
attaagggaggcagctgtgcgtagagattc

SEQ ID NO: 357524 - DNA, 30 bp, Artificial Sequence
  Synthetic oligonucleotide
ttagtaactatggcacggggcccgagattc

SEQ ID NO: 357525 - DNA, 30 bp, Artificial Sequence
  Synthetic oligonucleotide
cgcaaaccccgtcagccacagtggagattc

SEQ ID NO: 357526 - DNA, 30 bp, Artificial Sequence
  Synthetic oligonucleotide
attacacctacttcatgtcagatgagattc

SEQ ID NO: 357527 - DNA, 30 bp, Artificial Sequence
  Synthetic oligonucleotide
aatactaggccaagccagcataatagattc

SEQ ID NO: 357528 - DNA, 30 bp, Artificial Sequence
  Synthetic oligonucleotide
gcgtctggatcgaacgtaccgtgacgattc

SEQ ID NO: 357529 - DNA, 30 bp, Artificial Sequence
  Synthetic oligonucleotide
agaagtctgagcgacaataaattacgattc

SEQ ID NO: 357530 - DNA, 30 bp, Artificial Sequence
  Synthetic oligonucleotide
gtggaacggaaaggtcggccgcaccgattc

SEQ ID NO: 357531 - DNA, 30 bp, Artificial Sequence
  Synthetic oligonucleotide
tccttactttatacgagtactttccgattc

SEQ ID NO: 357532 - DNA, 30 bp, Artificial Sequence
  Synthetic oligonucleotide
gattcgggttagtcgtctcgggcgcgattc

SEQ ID NO: 357533 - DNA, 30 bp, Artificial Sequence
  Synthetic oligonucleotide
ctatcacccggcgcatgttatcttcgattc

SEQ ID NO: 357534 - DNA, 30 bp, Artificial Sequence
  Synthetic oligonucleotide
taacttaggaaccgcacgtgtgttcgattc

SEQ ID NO: 357535 - DNA, 30 bp, Artificial Sequence
  Synthetic oligonucleotide
tgttagaatgcagaatactagtaaggattc

SEQ ID NO: 357536 - DNA, 30 bp, Artificial Sequence
  Synthetic oligonucleotide
aataacagtgtccattagacaccaggattc

SEQ ID NO: 357537 - DNA, 30 bp, Artificial Sequence
  Synthetic oligonucleotide
caaaggaagccatggctggttttcggattc

SEQ ID NO: 357538 - DNA, 30 bp, Artificial Sequence
  Synthetic oligonucleotide
ttctacattaacaagcgcgctcgtggattc

SEQ ID NO: 357539 - DNA, 30 bp, Artificial Sequence
  Synthetic oligonucleotide
gagcagtcccagctagaaacggcatgattc

SEQ ID NO: 357540 - DNA, 30 bp, Artificial Sequence
  Synthetic oligonucleotide
cgggaactatgcccattctgaggctgattc

SEQ ID NO: 357541 - DNA, 30 bp, Artificial Sequence
  Synthetic oligonucleotide
cactcatcacacccacgggagcggtgattc

SEQ ID NO: 357542 - DNA, 30 bp, Artificial Sequence
  Synthetic oligonucleotide
gcttggggcaatcgtttatggaaaatattc

SEQ ID NO: 357543 - DNA, 30 bp, Artificial Sequence
  Synthetic oligonucleotide
ggagccgcccgaccactgcactgaatattc

SEQ ID NO: 357544 - DNA, 30 bp, Artificial Sequence
  Synthetic oligonucleotide
ctgggatagtcaaagactgttataatattc

SEQ ID NO: 357545 - DNA, 30 bp, Artificial Sequence
  Synthetic oligonucleotide
ttgacaggaaagtagggaaatttcatattc

SEQ ID NO: 357546 - DNA, 30 bp, Artificial Sequence
  Synthetic oligonucleotide
gtttgaggagtcttgtccgtccatatattc

SEQ ID NO: 357547 - DNA, 30 bp, Artificial Sequence
  Synthetic oligonucleotide
tgtaaaaaaattgctcgttaatgtatattc

SEQ ID NO: 357548 - DNA, 30 bp, Artificial Sequence
  Synthetic oligonucleotide
ggtactgcgattatctcacgccttatattc

SEQ ID NO: 357549 - DNA, 30 bp, Artificial Sequence
  Synthetic oligonucleotide
tctcgttatccattagcggacggcctattc

SEQ ID NO: 357550 - DNA, 30 bp, Artificial Sequence
  Synthetic oligonucleotide
tattaggtagattacaggtccggcctattc

SEQ ID NO: 357551 - DNA, 30 bp, Artificial Sequence
  Synthetic oligonucleotide
gccgggagggtatctatgagaatcctattc

SEQ ID NO: 357552 - DNA, 30 bp, Artificial Sequence
  Synthetic oligonucleotide
ccaatattaccgcgttactatgggctattc

SEQ ID NO: 357553 - DNA, 30 bp, Artificial Sequence
  Synthetic oligonucleotide
catcaccgactgacaatactctgtctattc

SEQ ID NO: 357554 - DNA, 30 bp, Artificial Sequence
  Synthetic oligonucleotide
ttgtagacacgtgtgcatacgaaagtattc

SEQ ID NO: 357555 - DNA, 30 bp, Artificial Sequence
  Synthetic oligonucleotide
ttatagcaccttttataaccaaacgtattc

SEQ ID NO: 357556 - DNA, 30 bp, Artificial Sequence
  Synthetic oligonucleotide
ggaatgtgcctagtacgccgtaccgtattc

SEQ ID NO: 357557 - DNA, 30 bp, Artificial Sequence
  Synthetic oligonucleotide
tatcgtgattccattagcagctaggtattc

SEQ ID NO: 357558 - DNA, 30 bp, Artificial Sequence
  Synthetic oligonucleotide
agatgggtccccaagcacggccgtgtattc

SEQ ID NO: 357559 - DNA, 30 bp, Artificial Sequence
  Synthetic oligonucleotide
ttcgatgattacgatggatcggtattattc

SEQ ID NO: 357560 - DNA, 30 bp, Artificial Sequence
  Synthetic oligonucleotide
tgcccaacgttcctgtgggtgccgttattc

SEQ ID NO: 357561 - DNA, 30 bp, Artificial Sequence
  Synthetic oligonucleotide
agtgcgcacaaccttcgatagtctttattc

SEQ ID NO: 357562 - DNA, 30 bp, Artificial Sequence
  Synthetic oligonucleotide
caagtatcacggcctcgagcgtaaaacttc

SEQ ID NO: 357563 - DNA, 30 bp, Artificial Sequence
  Synthetic oligonucleotide
tgggagttgtgagtagaaagtagaaacttc

SEQ ID NO: 357564 - DNA, 30 bp, Artificial Sequence
  Synthetic oligonucleotide
tgcaagtggagctttcgtatggtaaacttc

SEQ ID NO: 357565 - DNA, 30 bp, Artificial Sequence
  Synthetic oligonucleotide
agtcagtttatcgcatgattaaataacttc

SEQ ID NO: 357566 - DNA, 30 bp, Artificial Sequence
  Synthetic oligonucleotide
gggtaggagtccgcttggacgcataacttc

SEQ ID NO: 357567 - DNA, 30 bp, Artificial Sequence
  Synthetic oligonucleotide
tagccatcttctagcattcgctcacacttc

SEQ ID NO: 357568 - DNA, 30 bp, Artificial Sequence
  Synthetic oligonucleotide
tacaacactggctgcgcacgacaccacttc

SEQ ID NO: 357569 - DNA, 30 bp, Artificial Sequence
  Synthetic oligonucleotide
gtcaaacaattccgtggcacgcaccacttc

SEQ ID NO: 357570 - DNA, 30 bp, Artificial Sequence
  Synthetic oligonucleotide
ttggtgcattggcctttgtaataccacttc

SEQ ID NO: 357571 - DNA, 30 bp, Artificial Sequence
  Synthetic oligonucleotide
actttatagattagtcttagtcggcacttc

SEQ ID NO: 357572 - DNA, 30 bp, Artificial Sequence
  Synthetic oligonucleotide
ccccgatgaaaaggattatagtatcacttc

SEQ ID NO: 357573 - DNA, 30 bp, Artificial Sequence
  Synthetic oligonucleotide
atgaccgttagggttgtaacacgtcacttc

SEQ ID NO: 357574 - DNA, 30 bp, Artificial Sequence
  Synthetic oligonucleotide
aagatcatgctgtggacatggattcacttc

SEQ ID NO: 357575 - DNA, 30 bp, Artificial Sequence
  Synthetic oligonucleotide
tcatattgtcggacaatgcccgcagacttc

SEQ ID NO: 357576 - DNA, 30 bp, Artificial Sequence
  Synthetic oligonucleotide
ccacatgctacctattaacaattcgacttc

SEQ ID NO: 357577 - DNA, 30 bp, Artificial Sequence
  Synthetic oligonucleotide
tagtatttgacgcttcaggaaagatacttc

SEQ ID NO: 357578 - DNA, 30 bp, Artificial Sequence
  Synthetic oligonucleotide
aattcggcgtataagtctcaacactacttc

SEQ ID NO: 357579 - DNA, 30 bp, Artificial Sequence
  Synthetic oligonucleotide
atcgaagatataactatttgcggctacttc

SEQ ID NO: 357580 - DNA, 30 bp, Artificial Sequence
  Synthetic oligonucleotide
cctcttaagaaagaagttttacagtacttc

SEQ ID NO: 357581 - DNA, 30 bp, Artificial Sequence
  Synthetic oligonucleotide
atcgacggtcgtccgtcgcctatgtacttc

SEQ ID NO: 357582 - DNA, 30 bp, Artificial Sequence
  Synthetic oligonucleotide
tcagtttcagacacctcattctaaaccttc

SEQ ID NO: 357583 - DNA, 30 bp, Artificial Sequence
  Synthetic oligonucleotide
atagggtccttactaaatatcatcaccttc

SEQ ID NO: 357584 - DNA, 30 bp, Artificial Sequence
  Synthetic oligonucleotide
ctccggcgcggttcaccgaaaaagaccttc

SEQ ID NO: 357585 - DNA, 30 bp, Artificial Sequence
  Synthetic oligonucleotide
ttcctcttaagcaacggaacaaagaccttc

SEQ ID NO: 357586 - DNA, 30 bp, Artificial Sequence
  Synthetic oligonucleotide
ccagaagtcgctgcctatgacgggaccttc

SEQ ID NO: 357587 - DNA, 30 bp, Artificial Sequence
  Synthetic oligonucleotide
acaattttacatgttcgatcggttaccttc

SEQ ID NO: 357588 - DNA, 30 bp, Artificial Sequence
  Synthetic oligonucleotide
gcgtggctcatacccaagatgacccccttc

SEQ ID NO: 357589 - DNA, 30 bp, Artificial Sequence
  Synthetic oligonucleotide
cactagggacgcgggcctcaatcccccttc

SEQ ID NO: 357590 - DNA, 30 bp, Artificial Sequence
  Synthetic oligonucleotide
aatctagcctataagacacgaacagccttc

SEQ ID NO: 357591 - DNA, 30 bp, Artificial Sequence
  Synthetic oligonucleotide
gtgccttggtcctagagttatacggccttc

SEQ ID NO: 357592 - DNA, 30 bp, Artificial Sequence
  Synthetic oligonucleotide
taaggtattttcagacaacatttggccttc

SEQ ID NO: 357593 - DNA, 30 bp, Artificial Sequence
  Synthetic oligonucleotide
gatacgccatttctgggcacgcatgccttc

SEQ ID NO: 357594 - DNA, 30 bp, Artificial Sequence
  Synthetic oligonucleotide
tgaaaaatatgttcaattcacgctgccttc

SEQ ID NO: 357595 - DNA, 30 bp, Artificial Sequence
  Synthetic oligonucleotide
gctggatggcgacttttagctaaatccttc

SEQ ID NO: 357596 - DNA, 30 bp, Artificial Sequence
  Synthetic oligonucleotide
gtacacggcacctccgcaatcggatccttc

SEQ ID NO: 357597 - DNA, 30 bp, Artificial Sequence
  Synthetic oligonucleotide
aaaatgcagctcacatgcattggatccttc

SEQ ID NO: 357598 - DNA, 30 bp, Artificial Sequence
  Synthetic oligonucleotide
acaacagcaaaatactcttgctcctccttc

SEQ ID NO: 357599 - DNA, 30 bp, Artificial Sequence
  Synthetic oligonucleotide
gaacaagctttatagtccttgcgctccttc

SEQ ID NO: 357600 - DNA, 30 bp, Artificial Sequence
  Synthetic oligonucleotide
tttcacggtgtgaggagatttgtgtccttc

SEQ ID NO: 357601 - DNA, 30 bp, Artificial Sequence
  Synthetic oligonucleotide
gagggtttgcacgctcataagaattccttc

SEQ ID NO: 357602 - DNA, 30 bp, Artificial Sequence
  Synthetic oligonucleotide
ctagtaagtgcacggtgtttatattccttc

SEQ ID NO: 357603 - DNA, 30 bp, Artificial Sequence
  Synthetic oligonucleotide
ctccacagcgttcaccctgacttttccttc

SEQ ID NO: 357604 - DNA, 30 bp, Artificial Sequence
  Synthetic oligonucleotide
tctgaagtagtgcattatagttgaagcttc

SEQ ID NO: 357605 - DNA, 30 bp, Artificial Sequence
  Synthetic oligonucleotide
tacgccatgtgaagggcggacgacagcttc

SEQ ID NO: 357606 - DNA, 30 bp, Artificial Sequence
  Synthetic oligonucleotide
ccgttgagggcaatttgctgtctcagcttc

SEQ ID NO: 357607 - DNA, 30 bp, Artificial Sequence
  Synthetic oligonucleotide
gcgttaccgtcgtaaggaagcctgagcttc

SEQ ID NO: 357608 - DNA, 30 bp, Artificial Sequence
  Synthetic oligonucleotide
acctgttggctctcttcagcgtaacgcttc

SEQ ID NO: 357609 - DNA, 30 bp, Artificial Sequence
  Synthetic oligonucleotide
ttgggaggagtaacacatgtcgcacgcttc

SEQ ID NO: 357610 - DNA, 30 bp, Artificial Sequence
  Synthetic oligonucleotide
gcaaattaagtgccgtcggggggacgcttc

SEQ ID NO: 357611 - DNA, 30 bp, Artificial Sequence
  Synthetic oligonucleotide
gcgggcgggggccgcttcgtcggccgcttc

SEQ ID NO: 357612 - DNA, 30 bp, Artificial Sequence
  Synthetic oligonucleotide
ggttaacgtcaaggggtgtactgccgcttc

SEQ ID NO: 357613 - DNA, 30 bp, Artificial Sequence
  Synthetic oligonucleotide
gtctgatggcacctactacaggggcgcttc

SEQ ID NO: 357614 - DNA, 30 bp, Artificial Sequence
  Synthetic oligonucleotide
acagaacgattctcaataacctatcgcttc

SEQ ID NO: 357615 - DNA, 30 bp, Artificial Sequence
  Synthetic oligonucleotide
ccatcttgtgtttatgttgggcgtcgcttc

SEQ ID NO: 357616 - DNA, 30 bp, Artificial Sequence
  Synthetic oligonucleotide
atcgggattctgcccataaattaaggcttc

SEQ ID NO: 357617 - DNA, 30 bp, Artificial Sequence
  Synthetic oligonucleotide
accccagtaagggaataccgaaccggcttc

SEQ ID NO: 357618 - DNA, 30 bp, Artificial Sequence
  Synthetic oligonucleotide
cccctccgcggacgaagtgagtccggcttc

SEQ ID NO: 357619 - DNA, 30 bp, Artificial Sequence
  Synthetic oligonucleotide
tgaccgcgatctagcagtcttttcggcttc

SEQ ID NO: 357620 - DNA, 30 bp, Artificial Sequence
  Synthetic oligonucleotide
tagttggattcatagaacgcacagggcttc

SEQ ID NO: 357621 - DNA, 29 bp, Artificial Sequence
  Synthetic oligonucleotide
gcagtggatagtaacactagactggcttc

SEQ ID NO: 357622 - DNA, 30 bp, Artificial Sequence
  Synthetic oligonucleotide
atatctcccgaagacttttaattatgcttc

SEQ ID NO: 357623 - DNA, 30 bp, Artificial Sequence
  Synthetic oligonucleotide
ccgcttctattagtttagggttattgcttc

SEQ ID NO: 357624 - DNA, 30 bp, Artificial Sequence
  Synthetic oligonucleotide
ggtaaaggataatcgacctgtcaaatcttc

SEQ ID NO: 357625 - DNA, 30 bp, Artificial Sequence
  Synthetic oligonucleotide
actaaccttagggccggcgattgaatcttc

SEQ ID NO: 357626 - DNA, 30 bp, Artificial Sequence
  Synthetic oligonucleotide
atgtttaacaatctcagggtaataatcttc

SEQ ID NO: 357627 - DNA, 30 bp, Artificial Sequence
  Synthetic oligonucleotide
agattcaggattttatgttagaacatcttc

SEQ ID NO: 357628 - DNA, 30 bp, Artificial Sequence
  Synthetic oligonucleotide
aggatggggagatacgtagctcacatcttc

SEQ ID NO: 357629 - DNA, 30 bp, Artificial Sequence
  Synthetic oligonucleotide
acggctcccccatagtaactgcagatcttc

SEQ ID NO: 357630 - DNA, 30 bp, Artificial Sequence
  Synthetic oligonucleotide
cttccaccgacatgctaatagaggatcttc

SEQ ID NO: 357631 - DNA, 30 bp, Artificial Sequence
  Synthetic oligonucleotide
ttgccgaggtctggtgctgaatctatcttc

SEQ ID NO: 357632 - DNA, 30 bp, Artificial Sequence
  Synthetic oligonucleotide
gcacttatattctaagcatgcattatcttc

SEQ ID NO: 357633 - DNA, 30 bp, Artificial Sequence
  Synthetic oligonucleotide
atcactcgcaactaacacggctttatcttc

SEQ ID NO: 357634 - DNA, 30 bp, Artificial Sequence
  Synthetic oligonucleotide
cagtgtagcgggaagccaaacgaactcttc

SEQ ID NO: 357635 - DNA, 30 bp, Artificial Sequence
  Synthetic oligonucleotide
agtcatctaaacgttacgttgatactcttc

SEQ ID NO: 357636 - DNA, 30 bp, Artificial Sequence
  Synthetic oligonucleotide
tcctaaggcaacgcttttactaacctcttc

SEQ ID NO: 357637 - DNA, 30 bp, Artificial Sequence
  Synthetic oligonucleotide
tgcgaacagtcgtcaacttgaaatctcttc

SEQ ID NO: 357638 - DNA, 30 bp, Artificial Sequence
  Synthetic oligonucleotide
agcatcactgtctccgttttgtgtctcttc

SEQ ID NO: 357639 - DNA, 30 bp, Artificial Sequence
  Synthetic oligonucleotide
ctataggtagcatgttcggtcgaggtcttc

SEQ ID NO: 357640 - DNA, 30 bp, Artificial Sequence
  Synthetic oligonucleotide
ccaagagaaaagcaatcgcgccgggtcttc

SEQ ID NO: 357641 - DNA, 30 bp, Artificial Sequence
  Synthetic oligonucleotide
caaacctgcttaaagttgccctgggtcttc

SEQ ID NO: 357642 - DNA, 30 bp, Artificial Sequence
  Synthetic oligonucleotide
tacaacggcttaacgaactgaagtgtcttc

SEQ ID NO: 357643 - DNA, 30 bp, Artificial Sequence
  Synthetic oligonucleotide
aagttgccacaaactatacagggtgtcttc

SEQ ID NO: 357644 - DNA, 30 bp, Artificial Sequence
  Synthetic oligonucleotide
atgtgtaggacgggaagtgggatattcttc

SEQ ID NO: 357645 - DNA, 30 bp, Artificial Sequence
  Synthetic oligonucleotide
cgtctcctctgctcccggtgtatcttcttc

SEQ ID NO: 357646 - DNA, 30 bp, Artificial Sequence
  Synthetic oligonucleotide
ttgggtaaccaaaaagttaatacaaagttc

SEQ ID NO: 357647 - DNA, 30 bp, Artificial Sequence
  Synthetic oligonucleotide
atagtggtggcaaaggtctcctgaaagttc

SEQ ID NO: 357648 - DNA, 30 bp, Artificial Sequence
  Synthetic oligonucleotide
taactattgaagggggttacggacaagttc

SEQ ID NO: 357649 - DNA, 30 bp, Artificial Sequence
  Synthetic oligonucleotide
aatcattcctttgtagagagctgcaagttc

SEQ ID NO: 357650 - DNA, 30 bp, Artificial Sequence
  Synthetic oligonucleotide
ataccacctgagcgccaggcgcgacagttc

SEQ ID NO: 357651 - DNA, 30 bp, Artificial Sequence
  Synthetic oligonucleotide
gctcaatatatcatgtatagattacagttc

SEQ ID NO: 357652 - DNA, 30 bp, Artificial Sequence
  Synthetic oligonucleotide
aatggcgcgaagcacctctgaatccagttc

SEQ ID NO: 357653 - DNA, 30 bp, Artificial Sequence
  Synthetic oligonucleotide
aggttgacctgttaagtcttagtccagttc

SEQ ID NO: 357654 - DNA, 30 bp, Artificial Sequence
  Synthetic oligonucleotide
tttgggttcaatagggcacgatagcagttc

SEQ ID NO: 357655 - DNA, 30 bp, Artificial Sequence
  Synthetic oligonucleotide
catgagaccgttgaaactagaggtcagttc

SEQ ID NO: 357656 - DNA, 30 bp, Artificial Sequence
  Synthetic oligonucleotide
ggatagtatgggcatattagtgtagagttc

SEQ ID NO: 357657 - DNA, 30 bp, Artificial Sequence
  Synthetic oligonucleotide
tgtttacgtgaagtctttgcaggcgagttc

SEQ ID NO: 357658 - DNA, 30 bp, Artificial Sequence
  Synthetic oligonucleotide
ggaataaggacaacccttggaggcgagttc

SEQ ID NO: 357659 - DNA, 30 bp, Artificial Sequence
  Synthetic oligonucleotide
tttggagaggattattggccggaggagttc

SEQ ID NO: 357660 - DNA, 30 bp, Artificial Sequence
  Synthetic oligonucleotide
ataacgacgcatagtatgattcttgagttc

SEQ ID NO: 357661 - DNA, 30 bp, Artificial Sequence
  Synthetic oligonucleotide
caaagggacggtgagggggtatcatagttc

SEQ ID NO: 357662 - DNA, 30 bp, Artificial Sequence
  Synthetic oligonucleotide
acaccgcagagcgcgttctccgagtagttc

SEQ ID NO: 357663 - DNA, 30 bp, Artificial Sequence
  Synthetic oligonucleotide
cacgccagaaaccacagtgccggttagttc

SEQ ID NO: 357664 - DNA, 30 bp, Artificial Sequence
  Synthetic oligonucleotide
ataggtaacgttccatagtacgcaacgttc

SEQ ID NO: 357665 - DNA, 30 bp, Artificial Sequence
  Synthetic oligonucleotide
ataaaggtcaccgcgtttgtatgcacgttc

SEQ ID NO: 357666 - DNA, 30 bp, Artificial Sequence
  Synthetic oligonucleotide
ggcaggctggatagacataaagtcacgttc

SEQ ID NO: 357667 - DNA, 29 bp, Artificial Sequence
  Synthetic oligonucleotide
ttaaataccgtcacgtacgacggacgttc

SEQ ID NO: 357668 - DNA, 30 bp, Artificial Sequence
  Synthetic oligonucleotide
gtttgattccggacatgacgacctacgttc

SEQ ID NO: 357669 - DNA, 30 bp, Artificial Sequence
  Synthetic oligonucleotide
tacagaggacctcaattgcccggtacgttc

SEQ ID NO: 357670 - DNA, 30 bp, Artificial Sequence
  Synthetic oligonucleotide
ggtatataaaacagtcctagaattacgttc

SEQ ID NO: 357671 - DNA, 30 bp, Artificial Sequence
  Synthetic oligonucleotide
ggtaaagcgtgacctcatccagtcccgttc

SEQ ID NO: 357672 - DNA, 30 bp, Artificial Sequence
  Synthetic oligonucleotide
ttactgtctccctgaagtcagcggccgttc

SEQ ID NO: 357673 - DNA, 30 bp, Artificial Sequence
  Synthetic oligonucleotide
tacatctgaccgtaccaatagtttccgttc

SEQ ID NO: 357674 - DNA, 30 bp, Artificial Sequence
  Synthetic oligonucleotide
tgaaatacctgtatgttaatcgtagcgttc

SEQ ID NO: 357675 - DNA, 30 bp, Artificial Sequence
  Synthetic oligonucleotide
actgagacggcggtccttgcgtaggcgttc

SEQ ID NO: 357676 - DNA, 31 bp, Artificial Sequence
  Synthetic oligonucleotide
cgcttggggagttgcgtctttaccggcgttc

SEQ ID NO: 357677 - DNA, 30 bp, Artificial Sequence
  Synthetic oligonucleotide
atccgtcaactgagctcgcgccgggcgttc

SEQ ID NO: 357678 - DNA, 30 bp, Artificial Sequence
  Synthetic oligonucleotide
atgcgggtcgtcgcgcaagctttggcgttc

SEQ ID NO: 357679 - DNA, 30 bp, Artificial Sequence
  Synthetic oligonucleotide
tatgctgatggttctgagccaggctcgttc

SEQ ID NO: 357680 - DNA, 30 bp, Artificial Sequence
  Synthetic oligonucleotide
agagtctgcgaaacaccctgtgtctcgttc

SEQ ID NO: 357681 - DNA, 30 bp, Artificial Sequence
  Synthetic oligonucleotide
catcaaaattcgcaatcacgtttgtcgttc

SEQ ID NO: 357682 - DNA, 30 bp, Artificial Sequence
  Synthetic oligonucleotide
gcggaacaaccaacagctattcgttcgttc

SEQ ID NO: 357683 - DNA, 30 bp, Artificial Sequence
  Synthetic oligonucleotide
ggggccgcgctaggtggctaaggttcgttc

SEQ ID NO: 357684 - DNA, 30 bp, Artificial Sequence
  Synthetic oligonucleotide
gaggacaaatgagagcattatggttcgttc

SEQ ID NO: 357685 - DNA, 29 bp, Artificial Sequence
  Synthetic oligonucleotide
actgcctagactggcggatccgaaggttc

SEQ ID NO: 357686 - DNA, 30 bp, Artificial Sequence
  Synthetic oligonucleotide
ctctctctgaccttggagcggataaggttc

SEQ ID NO: 357687 - DNA, 30 bp, Artificial Sequence
  Synthetic oligonucleotide
gtgctaaccctcggaccagaggtgaggttc

SEQ ID NO: 357688 - DNA, 30 bp, Artificial Sequence
  Synthetic oligonucleotide
gggccccggacgctgcttgctagtaggttc

SEQ ID NO: 357689 - DNA, 30 bp, Artificial Sequence
  Synthetic oligonucleotide
atgttgccccgggatcggaatcgacggttc

SEQ ID NO: 357690 - DNA, 30 bp, Artificial Sequence
  Synthetic oligonucleotide
cccgcatgccacggagctcaataccggttc

SEQ ID NO: 357691 - DNA, 30 bp, Artificial Sequence
  Synthetic oligonucleotide
tccgaaggcgccccaaactaagggcggttc

SEQ ID NO: 357692 - DNA, 30 bp, Artificial Sequence
  Synthetic oligonucleotide
ggttgcagggtgtaattagtcgatcggttc

SEQ ID NO: 357693 - DNA, 30 bp, Artificial Sequence
  Synthetic oligonucleotide
acgttcgaatgaatggtgcgggaagggttc

SEQ ID NO: 357694 - DNA, 30 bp, Artificial Sequence
  Synthetic oligonucleotide
tccgtgaagtgtcggacgacgagagggttc

SEQ ID NO: 357695 - DNA, 30 bp, Artificial Sequence
  Synthetic oligonucleotide
tcggctaaaaaggcaccggcacacgggttc

SEQ ID NO: 357696 - DNA, 30 bp, Artificial Sequence
  Synthetic oligonucleotide
aagttattaggatgacataagcccgggttc

SEQ ID NO: 357697 - DNA, 30 bp, Artificial Sequence
  Synthetic oligonucleotide
ttgccttacacatgtaagtaagtcgggttc

SEQ ID NO: 357698 - DNA, 30 bp, Artificial Sequence
  Synthetic oligonucleotide
aaggctgggcataactgggtacctgggttc

SEQ ID NO: 357699 - DNA, 30 bp, Artificial Sequence
  Synthetic oligonucleotide
gctgaagtgcaggtttgggggcgtgggttc

SEQ ID NO: 357700 - DNA, 30 bp, Artificial Sequence
  Synthetic oligonucleotide
tgactcaccgcattcaccggcgaatggttc

SEQ ID NO: 357701 - DNA, 30 bp, Artificial Sequence
  Synthetic oligonucleotide
cagccctgaattaatcttttgttatggttc

SEQ ID NO: 357702 - DNA, 30 bp, Artificial Sequence
  Synthetic oligonucleotide
accactggaatgcctcacagccactggttc

SEQ ID NO: 357703 - DNA, 30 bp, Artificial Sequence
  Synthetic oligonucleotide
ccacatcagacaccgagcccgcactggttc

SEQ ID NO: 357704 - DNA, 30 bp, Artificial Sequence
  Synthetic oligonucleotide
ggtgaagtgttggtgatacacgcgtggttc

SEQ ID NO: 357705 - DNA, 30 bp, Artificial Sequence
  Synthetic oligonucleotide
tagagataccgtatcttcccacggtggttc

SEQ ID NO: 357706 - DNA, 30 bp, Artificial Sequence
  Synthetic oligonucleotide
ctgagtcatcttagtacggcggaaatgttc

SEQ ID NO: 357707 - DNA, 30 bp, Artificial Sequence
  Synthetic oligonucleotide
gtggtttggggatggcattgctaaatgttc

SEQ ID NO: 357708 - DNA, 30 bp, Artificial Sequence
  Synthetic oligonucleotide
ggaatcgtcgttggtcctctaccaatgttc

SEQ ID NO: 357709 - DNA, 30 bp, Artificial Sequence
  Synthetic oligonucleotide
gccaagtttgcaaaccttttggtaatgttc

SEQ ID NO: 357710 - DNA, 30 bp, Artificial Sequence
  Synthetic oligonucleotide
tggacgtcgtgaggcgcccagccgatgttc

SEQ ID NO: 357711 - DNA, 30 bp, Artificial Sequence
  Synthetic oligonucleotide
taaaaactctctggcccgcgtcttatgttc

SEQ ID NO: 357712 - DNA, 30 bp, Artificial Sequence
  Synthetic oligonucleotide
tgcttgttggtgagttatcggtttatgttc

SEQ ID NO: 357713 - DNA, 30 bp, Artificial Sequence
  Synthetic oligonucleotide
aatgaaattccaatttttctgaaactgttc

SEQ ID NO: 357714 - DNA, 30 bp, Artificial Sequence
  Synthetic oligonucleotide
gcgaaatgagacaggccccgcgaactgttc

SEQ ID NO: 357715 - DNA, 30 bp, Artificial Sequence
  Synthetic oligonucleotide
agccgccggagagcggcaccagcgctgttc

SEQ ID NO: 357716 - DNA, 30 bp, Artificial Sequence
  Synthetic oligonucleotide
agatatggcgcccccgtcctctcgctgttc

SEQ ID NO: 357717 - DNA, 30 bp, Artificial Sequence
  Synthetic oligonucleotide
atatgcactgacgatacacgacgagtgttc

SEQ ID NO: 357718 - DNA, 30 bp, Artificial Sequence
  Synthetic oligonucleotide
acgtaccacgccccgacatttaaggtgttc

SEQ ID NO: 357719 - DNA, 30 bp, Artificial Sequence
  Synthetic oligonucleotide
aaagcccacgtgtgagttgattaggtgttc

SEQ ID NO: 357720 - DNA, 29 bp, Artificial Sequence
  Synthetic oligonucleotide
cactacggagtggccgtagttttgtgttc

SEQ ID NO: 357721 - DNA, 30 bp, Artificial Sequence
  Synthetic oligonucleotide
gtttccgagagatgaattgggtaattgttc

SEQ ID NO: 357722 - DNA, 31 bp, Artificial Sequence
  Synthetic oligonucleotide
tgctaactctgtttcaacgcaaacgttgttc

SEQ ID NO: 357723 - DNA, 30 bp, Artificial Sequence
  Synthetic oligonucleotide
gtaatattggtgcaagtagcagaaaatttc

SEQ ID NO: 357724 - DNA, 30 bp, Artificial Sequence
  Synthetic oligonucleotide
aatggaaaggtacgtttatacgcaaatttc

SEQ ID NO: 357725 - DNA, 30 bp, Artificial Sequence
  Synthetic oligonucleotide
acctacctttggacaggttcgataaatttc

SEQ ID NO: 357726 - DNA, 30 bp, Artificial Sequence
  Synthetic oligonucleotide
ataccgtttactagccccgatctaaatttc

SEQ ID NO: 357727 - DNA, 30 bp, Artificial Sequence
  Synthetic oligonucleotide
aactgacgtcccctaggtattggcaatttc

SEQ ID NO: 357728 - DNA, 30 bp, Artificial Sequence
  Synthetic oligonucleotide
cacggtaaagaaaagggggcagcgaatttc

SEQ ID NO: 357729 - DNA, 30 bp, Artificial Sequence
  Synthetic oligonucleotide
acacaggtatcctccggtacctcacatttc

SEQ ID NO: 357730 - DNA, 29 bp, Artificial Sequence
  Synthetic oligonucleotide
gggtcgctgcccatgcaaggatacatttc

SEQ ID NO: 357731 - DNA, 30 bp, Artificial Sequence
  Synthetic oligonucleotide
gcggttatgcctcgtcactcacaccatttc

SEQ ID NO: 357732 - DNA, 30 bp, Artificial Sequence
  Synthetic oligonucleotide
agtcgtattaggtagggtggttaccatttc

SEQ ID NO: 357733 - DNA, 30 bp, Artificial Sequence
  Synthetic oligonucleotide
ccatagttcggcagcaagagatgccatttc

SEQ ID NO: 357734 - DNA, 30 bp, Artificial Sequence
  Synthetic oligonucleotide
tgtttgtgctgcaagtgtatccagcatttc

SEQ ID NO: 357735 - DNA, 30 bp, Artificial Sequence
  Synthetic oligonucleotide
gctattagcggcatatgtggcacgcatttc

SEQ ID NO: 357736 - DNA, 30 bp, Artificial Sequence
  Synthetic oligonucleotide
cgcctcggaagacgattgaaatgtcatttc

SEQ ID NO: 357737 - DNA, 30 bp, Artificial Sequence
  Synthetic oligonucleotide
taagtactactgtacaagatcaaagatttc

SEQ ID NO: 357738 - DNA, 30 bp, Artificial Sequence
  Synthetic oligonucleotide
aacacatggttttgaatggctgaggatttc

SEQ ID NO: 357739 - DNA, 30 bp, Artificial Sequence
  Synthetic oligonucleotide
caacagaccattctcatgttcgcggatttc

SEQ ID NO: 357740 - DNA, 31 bp, Artificial Sequence
  Synthetic oligonucleotide
tatgcccgaccggaaggttcgtgcggatttc

SEQ ID NO: 357741 - DNA, 30 bp, Artificial Sequence
  Synthetic oligonucleotide
caaagatgacgtagaattcttttggatttc

SEQ ID NO: 357742 - DNA, 30 bp, Artificial Sequence
  Synthetic oligonucleotide
ttagaagttcaccgcgtatgaactgatttc

SEQ ID NO: 357743 - DNA, 30 bp, Artificial Sequence
  Synthetic oligonucleotide
ggagcacaggggataagggtatgtgatttc

SEQ ID NO: 357744 - DNA, 30 bp, Artificial Sequence
  Synthetic oligonucleotide
atgatatcgactatacgatctgtatatttc

SEQ ID NO: 357745 - DNA, 30 bp, Artificial Sequence
  Synthetic oligonucleotide
ctattaatcgctttctaatttccgtatttc

SEQ ID NO: 357746 - DNA, 30 bp, Artificial Sequence
  Synthetic oligonucleotide
aatctgggtaaatataacgactcgtatttc

SEQ ID NO: 357747 - DNA, 30 bp, Artificial Sequence
  Synthetic oligonucleotide
cgggcaagcacctaatcgggcaaaactttc

SEQ ID NO: 357748 - DNA, 31 bp, Artificial Sequence
  Synthetic oligonucleotide
ggatggttttcacgaagcgtttcgaactttc

SEQ ID NO: 357749 - DNA, 30 bp, Artificial Sequence
  Synthetic oligonucleotide
taaattaggcttgggccccaaggaactttc

SEQ ID NO: 357750 - DNA, 30 bp, Artificial Sequence
  Synthetic oligonucleotide
ttagatcacgaatagcatttattaactttc

SEQ ID NO: 357751 - DNA, 30 bp, Artificial Sequence
  Synthetic oligonucleotide
gatcggataacatggtcgggcatgactttc

SEQ ID NO: 357752 - DNA, 30 bp, Artificial Sequence
  Synthetic oligonucleotide
tgagcgtggtattgggtactagtgactttc

SEQ ID NO: 357753 - DNA, 30 bp, Artificial Sequence
  Synthetic oligonucleotide
atacgtttctaatatggagtaccacctttc

SEQ ID NO: 357754 - DNA, 30 bp, Artificial Sequence
  Synthetic oligonucleotide
acaagttcggggatatcgggaagccctttc

SEQ ID NO: 357755 - DNA, 30 bp, Artificial Sequence
  Synthetic oligonucleotide
ctccagtgaccagtaggttcgatgcctttc

SEQ ID NO: 357756 - DNA, 30 bp, Artificial Sequence
  Synthetic oligonucleotide
taaatcgctgtaagtaggatcagcgctttc

SEQ ID NO: 357757 - DNA, 30 bp, Artificial Sequence
  Synthetic oligonucleotide
ccgctattactatgtaataagccggctttc

SEQ ID NO: 357758 - DNA, 30 bp, Artificial Sequence
  Synthetic oligonucleotide
caataatttggaagcaagtagagggctttc

SEQ ID NO: 357759 - DNA, 30 bp, Artificial Sequence
  Synthetic oligonucleotide
gaccaacaattatgtttcgagcgggctttc

SEQ ID NO: 357760 - DNA, 30 bp, Artificial Sequence
  Synthetic oligonucleotide
gcataaaggccggaatagaaataatctttc

SEQ ID NO: 357761 - DNA, 30 bp, Artificial Sequence
  Synthetic oligonucleotide
atagctgacttcaagttggaagactctttc

SEQ ID NO: 357762 - DNA, 30 bp, Artificial Sequence
  Synthetic oligonucleotide
atgaagcttcgatggggcaaattgtctttc

SEQ ID NO: 357763 - DNA, 30 bp, Artificial Sequence
  Synthetic oligonucleotide
cagaacccataggatacacataattctttc

SEQ ID NO: 357764 - DNA, 30 bp, Artificial Sequence
  Synthetic oligonucleotide
gaataagatggcaacgtccagcgttctttc

SEQ ID NO: 357765 - DNA, 30 bp, Artificial Sequence
  Synthetic oligonucleotide
ggtgcatagaccgatccgttgaaaagtttc

SEQ ID NO: 357766 - DNA, 30 bp, Artificial Sequence
  Synthetic oligonucleotide
cgctcatcccagaagggatcattaagtttc

SEQ ID NO: 357767 - DNA, 30 bp, Artificial Sequence
  Synthetic oligonucleotide
cgcgtggagcagtgtcttctttagagtttc

SEQ ID NO: 357768 - DNA, 30 bp, Artificial Sequence
  Synthetic oligonucleotide
gcgtaaatggttttataccatcggagtttc

SEQ ID NO: 357769 - DNA, 30 bp, Artificial Sequence
  Synthetic oligonucleotide
ggcgccaagatcatgggttttatgagtttc

SEQ ID NO: 357770 - DNA, 30 bp, Artificial Sequence
  Synthetic oligonucleotide
tagcctatctggccaaccgagagtagtttc

SEQ ID NO: 357771 - DNA, 30 bp, Artificial Sequence
  Synthetic oligonucleotide
acgtaccacactaggcccctccgtagtttc

SEQ ID NO: 357772 - DNA, 30 bp, Artificial Sequence
  Synthetic oligonucleotide
ccagagtcactgcaagtgtcgggtagtttc

SEQ ID NO: 357773 - DNA, 30 bp, Artificial Sequence
  Synthetic oligonucleotide
tcccgcttgagggatttgagatttagtttc

SEQ ID NO: 357774 - DNA, 30 bp, Artificial Sequence
  Synthetic oligonucleotide
accgatttatattaattgggaatacgtttc

SEQ ID NO: 357775 - DNA, 30 bp, Artificial Sequence
  Synthetic oligonucleotide
acgcatagagaagttacttagtagcgtttc

SEQ ID NO: 357776 - DNA, 30 bp, Artificial Sequence
  Synthetic oligonucleotide
aaatgtagaggaagcggatcgtggcgtttc

SEQ ID NO: 357777 - DNA, 30 bp, Artificial Sequence
  Synthetic oligonucleotide
tctgtgaaacttccggcgccctaaggtttc

SEQ ID NO: 357778 - DNA, 30 bp, Artificial Sequence
  Synthetic oligonucleotide
aaagtggaccattggtccaggacaggtttc

SEQ ID NO: 357779 - DNA, 30 bp, Artificial Sequence
  Synthetic oligonucleotide
ttcacttttgtacaccacactccaggtttc

SEQ ID NO: 357780 - DNA, 30 bp, Artificial Sequence
  Synthetic oligonucleotide
ctgttcttatagttatcaggctcaggtttc

SEQ ID NO: 357781 - DNA, 30 bp, Artificial Sequence
  Synthetic oligonucleotide
ccaagcattggtcatctaataagaggtttc

SEQ ID NO: 357782 - DNA, 30 bp, Artificial Sequence
  Synthetic oligonucleotide
ttggatgtggtgatctcttgatgaggtttc

SEQ ID NO: 357783 - DNA, 30 bp, Artificial Sequence
  Synthetic oligonucleotide
cgtgaggttagagtcggatctaacggtttc

SEQ ID NO: 357784 - DNA, 30 bp, Artificial Sequence
  Synthetic oligonucleotide
ggagctattgtttacctttgcactggtttc

SEQ ID NO: 357785 - DNA, 30 bp, Artificial Sequence
  Synthetic oligonucleotide
tgggtccacactagagttcaaacatgtttc

SEQ ID NO: 357786 - DNA, 30 bp, Artificial Sequence
  Synthetic oligonucleotide
gctagaagtgatatcggccgtgagtgtttc

SEQ ID NO: 357787 - DNA, 30 bp, Artificial Sequence
  Synthetic oligonucleotide
atcacggatcttttctgcaacgtgtgtttc

SEQ ID NO: 357788 - DNA, 30 bp, Artificial Sequence
  Synthetic oligonucleotide
cgcagaaattaagttcgtctttattgtttc

SEQ ID NO: 357789 - DNA, 30 bp, Artificial Sequence
  Synthetic oligonucleotide
gaaaacatagaacgagttaatacgattttc

SEQ ID NO: 357790 - DNA, 30 bp, Artificial Sequence
  Synthetic oligonucleotide
gagcagtttccagaaagacgacggattttc

SEQ ID NO: 357791 - DNA, 30 bp, Artificial Sequence
  Synthetic oligonucleotide
atataacaggcccgaaggaaatggattttc

SEQ ID NO: 357792 - DNA, 30 bp, Artificial Sequence
  Synthetic oligonucleotide
gagcataagccggagtccatataacttttc

SEQ ID NO: 357793 - DNA, 30 bp, Artificial Sequence
  Synthetic oligonucleotide
tcggaacacccagagggcgtcctacttttc

SEQ ID NO: 357794 - DNA, 30 bp, Artificial Sequence
  Synthetic oligonucleotide
gtcgcattggcggtatcgagaaaccttttc

SEQ ID NO: 357795 - DNA, 30 bp, Artificial Sequence
  Synthetic oligonucleotide
taatcgggtaattggaccaccgaccttttc

SEQ ID NO: 357796 - DNA, 30 bp, Artificial Sequence
  Synthetic oligonucleotide
tcatggtctggaatcattaagacccttttc

SEQ ID NO: 357797 - DNA, 30 bp, Artificial Sequence
  Synthetic oligonucleotide
gagctcggtggagctgttgcaggccttttc

SEQ ID NO: 357798 - DNA, 30 bp, Artificial Sequence
  Synthetic oligonucleotide
acagcctagctctgtatcttccagcttttc

SEQ ID NO: 357799 - DNA, 30 bp, Artificial Sequence
  Synthetic oligonucleotide
aggcgtcactcgctggccaccgagcttttc

SEQ ID NO: 357800 - DNA, 30 bp, Artificial Sequence
  Synthetic oligonucleotide
tttacggtccaacgccaaatgtggcttttc

SEQ ID NO: 357801 - DNA, 30 bp, Artificial Sequence
  Synthetic oligonucleotide
ataatcggacagtggagcgccaatcttttc

SEQ ID NO: 357802 - DNA, 30 bp, Artificial Sequence
  Synthetic oligonucleotide
agggtgatatgatttaaatccaaagttttc

SEQ ID NO: 357803 - DNA, 30 bp, Artificial Sequence
  Synthetic oligonucleotide
tggactgtgatggaaaagaggaaagttttc

SEQ ID NO: 357804 - DNA, 31 bp, Artificial Sequence
  Synthetic oligonucleotide
ttgaggcagtgctatgtttagggatgttttc

SEQ ID NO: 357805 - DNA, 30 bp, Artificial Sequence
  Synthetic oligonucleotide
ttgcaagaccaaggcctgccttatgttttc

SEQ ID NO: 357806 - DNA, 30 bp, Artificial Sequence
  Synthetic oligonucleotide
acatatgggaccaccatatctactgttttc

SEQ ID NO: 357807 - DNA, 30 bp, Artificial Sequence
  Synthetic oligonucleotide
atgcaatcatagcttatcaaacttgttttc

SEQ ID NO: 357808 - DNA, 30 bp, Artificial Sequence
  Synthetic oligonucleotide
cagctggcgaatgtacgtgatgaatttttc

SEQ ID NO: 357809 - DNA, 30 bp, Artificial Sequence
  Synthetic oligonucleotide
atgtataaactaagcactattggatttttc

SEQ ID NO: 357810 - DNA, 30 bp, Artificial Sequence
  Synthetic oligonucleotide
ttggtggtcatataatgtggaatatttttc

SEQ ID NO: 357811 - DNA, 30 bp, Artificial Sequence
  Synthetic oligonucleotide
aatccaaacatgttcccacagctctttttc

SEQ ID NO: 357812 - DNA, 30 bp, Artificial Sequence
  Synthetic oligonucleotide
cgtgcacgttaatgggcctagctctttttc

SEQ ID NO: 357813 - DNA, 30 bp, Artificial Sequence
  Synthetic oligonucleotide
gctggacatcgataaaggcgaccgtttttc

SEQ ID NO: 357814 - DNA, 30 bp, Artificial Sequence
  Synthetic oligonucleotide
ctccgccatacagagcaagtcgcgtttttc

SEQ ID NO: 357815 - DNA, 30 bp, Artificial Sequence
  Synthetic oligonucleotide
aggactatccgtaacgcggcggaaaaaaag

SEQ ID NO: 357816 - DNA, 29 bp, Artificial Sequence
  Synthetic oligonucleotide
agtagcgggatagcgaaagcttaaaaaag

SEQ ID NO: 357817 - DNA, 30 bp, Artificial Sequence
  Synthetic oligonucleotide
ctcctggccagtattaagatgctgaaaaag

SEQ ID NO: 357818 - DNA, 30 bp, Artificial Sequence
  Synthetic oligonucleotide
cgttgtgttcacttgtttgtataccaaaag

SEQ ID NO: 357819 - DNA, 30 bp, Artificial Sequence
  Synthetic oligonucleotide
aaccatcaggctgtcaacccaatgcaaaag

SEQ ID NO: 357820 - DNA, 30 bp, Artificial Sequence
  Synthetic oligonucleotide
gacagcggcaggacggcagtggcagaaaag

SEQ ID NO: 357821 - DNA, 30 bp, Artificial Sequence
  Synthetic oligonucleotide
gcctgtgtggacgggccacgatgagaaaag

SEQ ID NO: 357822 - DNA, 30 bp, Artificial Sequence
  Synthetic oligonucleotide
aaggaccattcgttttaattattagaaaag

SEQ ID NO: 357823 - DNA, 30 bp, Artificial Sequence
  Synthetic oligonucleotide
gtgtactatctatcctatattaccgaaaag

SEQ ID NO: 357824 - DNA, 30 bp, Artificial Sequence
  Synthetic oligonucleotide
acctgagcatattgggtgtaccaggaaaag

SEQ ID NO: 357825 - DNA, 30 bp, Artificial Sequence
  Synthetic oligonucleotide
cgacctgatgagtggtcaagcagggaaaag

SEQ ID NO: 357826 - DNA, 30 bp, Artificial Sequence
  Synthetic oligonucleotide
gaggattgttgatgattagccagtgaaaag

SEQ ID NO: 357827 - DNA, 30 bp, Artificial Sequence
  Synthetic oligonucleotide
aaggttacatttgttgactttaaataaaag

SEQ ID NO: 357828 - DNA, 30 bp, Artificial Sequence
  Synthetic oligonucleotide
atacgtctcgtaggtcccactttataaaag

SEQ ID NO: 357829 - DNA, 30 bp, Artificial Sequence
  Synthetic oligonucleotide
cttttctcacagatctcgggacactaaaag

SEQ ID NO: 357830 - DNA, 30 bp, Artificial Sequence
  Synthetic oligonucleotide
cgttgtccaaataacggggcactctaaaag

SEQ ID NO: 357831 - DNA, 30 bp, Artificial Sequence
  Synthetic oligonucleotide
ggaagccctgggatgacccagaggtaaaag

SEQ ID NO: 357832 - DNA, 30 bp, Artificial Sequence
  Synthetic oligonucleotide
tgcctaattaccatcggcagcatgtaaaag

SEQ ID NO: 357833 - DNA, 30 bp, Artificial Sequence
  Synthetic oligonucleotide
caacccactgcttcgggttgtcattaaaag

SEQ ID NO: 357834 - DNA, 30 bp, Artificial Sequence
  Synthetic oligonucleotide
aaaaatagactacagcagcctccttaaaag

SEQ ID NO: 357835 - DNA, 30 bp, Artificial Sequence
  Synthetic oligonucleotide
gcaaaagtgcttgcttaactacaaacaaag

SEQ ID NO: 357836 - DNA, 30 bp, Artificial Sequence
  Synthetic oligonucleotide
gtttgcggatggttatgattcttcacaaag

SEQ ID NO: 357837 - DNA, 30 bp, Artificial Sequence
  Synthetic oligonucleotide
aagttctttgagaacgactatcagacaaag

SEQ ID NO: 357838 - DNA, 30 bp, Artificial Sequence
  Synthetic oligonucleotide
atggtttgtcacgtaagctcagagacaaag

SEQ ID NO: 357839 - DNA, 30 bp, Artificial Sequence
  Synthetic oligonucleotide
cgtatttaacttgtggcaactgagacaaag

SEQ ID NO: 357840 - DNA, 30 bp, Artificial Sequence
  Synthetic oligonucleotide
gggtctagcgtaaacgaattttctacaaag

SEQ ID NO: 357841 - DNA, 30 bp, Artificial Sequence
  Synthetic oligonucleotide
ttagttgtaaccttgaagaaggttacaaag

SEQ ID NO: 357842 - DNA, 30 bp, Artificial Sequence
  Synthetic oligonucleotide
tagggacctactgatctggcggaaccaaag

SEQ ID NO: 357843 - DNA, 30 bp, Artificial Sequence
  Synthetic oligonucleotide
atccgccactgggacaatctcgtaccaaag

SEQ ID NO: 357844 - DNA, 30 bp, Artificial Sequence
  Synthetic oligonucleotide
acgcacgtacgccgaagatcatagccaaag

SEQ ID NO: 357845 - DNA, 30 bp, Artificial Sequence
  Synthetic oligonucleotide
tgatgatacaacgcccagtttaggccaaag

SEQ ID NO: 357846 - DNA, 30 bp, Artificial Sequence
  Synthetic oligonucleotide
atcacgcataggtagcagacgtggccaaag

SEQ ID NO: 357847 - DNA, 30 bp, Artificial Sequence
  Synthetic oligonucleotide
ttaagtaactcgatagagtggcctccaaag

SEQ ID NO: 357848 - DNA, 30 bp, Artificial Sequence
  Synthetic oligonucleotide
aagtcacctacgccaccgctagcagcaaag

SEQ ID NO: 357849 - DNA, 30 bp, Artificial Sequence
  Synthetic oligonucleotide
aagcttcaatccgcgatggccatggcaaag

SEQ ID NO: 357850 - DNA, 30 bp, Artificial Sequence
  Synthetic oligonucleotide
tattgctgaactgtaatccagtctgcaaag

SEQ ID NO: 357851 - DNA, 30 bp, Artificial Sequence
  Synthetic oligonucleotide
cggtgtctataagaccgacaagcatcaaag

SEQ ID NO: 357852 - DNA, 30 bp, Artificial Sequence
  Synthetic oligonucleotide
tggccatatgctataccattaaattcaaag

SEQ ID NO: 357853 - DNA, 30 bp, Artificial Sequence
  Synthetic oligonucleotide
taacgtgcttgttgctagtgccccagaaag

SEQ ID NO: 357854 - DNA, 30 bp, Artificial Sequence
  Synthetic oligonucleotide
gtttcggcaaaagggggggagcgcagaaag

SEQ ID NO: 357855 - DNA, 30 bp, Artificial Sequence
  Synthetic oligonucleotide
tatagtgtggagaatgagggagcgagaaag

SEQ ID NO: 357856 - DNA, 30 bp, Artificial Sequence
  Synthetic oligonucleotide
gaaatgggtacgacacgcagaaggagaaag

SEQ ID NO: 357857 - DNA, 30 bp, Artificial Sequence
  Synthetic oligonucleotide
ttctatagaagaccgagttcaccgcgaaag

SEQ ID NO: 357858 - DNA, 30 bp, Artificial Sequence
  Synthetic oligonucleotide
gttgcagaaatttgtatatcgctgcgaaag

SEQ ID NO: 357859 - DNA, 30 bp, Artificial Sequence
  Synthetic oligonucleotide
ttgtcacttacaattctcagcattcgaaag

SEQ ID NO: 357860 - DNA, 30 bp, Artificial Sequence
  Synthetic oligonucleotide
atttagagcactgaggagttcaaaggaaag

SEQ ID NO: 357861 - DNA, 30 bp, Artificial Sequence
  Synthetic oligonucleotide
gaacaggtactctcatactagctatgaaag

SEQ ID NO: 357862 - DNA, 30 bp, Artificial Sequence
  Synthetic oligonucleotide
tataagctgtacacgtggtgatggtgaaag

SEQ ID NO: 357863 - DNA, 30 bp, Artificial Sequence
  Synthetic oligonucleotide
tctttcttttcaaaccaccaggtgtgaaag

SEQ ID NO: 357864 - DNA, 30 bp, Artificial Sequence
  Synthetic oligonucleotide
agttggcaaagcttctggcctttgtgaaag

SEQ ID NO: 357865 - DNA, 30 bp, Artificial Sequence
  Synthetic oligonucleotide
ccgtgtcagactccggaaaagaaaataaag

SEQ ID NO: 357866 - DNA, 30 bp, Artificial Sequence
  Synthetic oligonucleotide
gggcacgatatcattacgttctgaataaag

SEQ ID NO: 357867 - DNA, 30 bp, Artificial Sequence
  Synthetic oligonucleotide
gagcgacagcctaacgatctaataataaag

SEQ ID NO: 357868 - DNA, 30 bp, Artificial Sequence
  Synthetic oligonucleotide
ttagagtccggttagcatgttcagataaag

SEQ ID NO: 357869 - DNA, 30 bp, Artificial Sequence
  Synthetic oligonucleotide
cggaagcacaatactctatgatagataaag

SEQ ID NO: 357870 - DNA, 30 bp, Artificial Sequence
  Synthetic oligonucleotide
tcaagccgggcgattaatacgcggataaag

SEQ ID NO: 357871 - DNA, 30 bp, Artificial Sequence
  Synthetic oligonucleotide
ggcctgggaacttttgggttcatgataaag

SEQ ID NO: 357872 - DNA, 30 bp, Artificial Sequence
  Synthetic oligonucleotide
acgggaattcttactgagagtttgataaag

SEQ ID NO: 357873 - DNA, 30 bp, Artificial Sequence
  Synthetic oligonucleotide
tagtgggtcctagtttccacaaacctaaag

SEQ ID NO: 357874 - DNA, 30 bp, Artificial Sequence
  Synthetic oligonucleotide
acccgtgcgatagacccttaatacctaaag

SEQ ID NO: 357875 - DNA, 30 bp, Artificial Sequence
  Synthetic oligonucleotide
gtctgtaggtcagtagggtcttgcctaaag

SEQ ID NO: 357876 - DNA, 31 bp, Artificial Sequence
  Synthetic oligonucleotide
aaacgcatagattccgcactgattgctaaag

SEQ ID NO: 357877 - DNA, 30 bp, Artificial Sequence
  Synthetic oligonucleotide
ctaggttttgaactcgcccgatatctaaag

SEQ ID NO: 357878 - DNA, 30 bp, Artificial Sequence
  Synthetic oligonucleotide
ccagtcacacgccgattccgcactctaaag

SEQ ID NO: 357879 - DNA, 30 bp, Artificial Sequence
  Synthetic oligonucleotide
ggtcggagtcttggtttttgaattctaaag

SEQ ID NO: 357880 - DNA, 30 bp, Artificial Sequence
  Synthetic oligonucleotide
aggtgatttatgaaacaaaaggttctaaag

SEQ ID NO: 357881 - DNA, 30 bp, Artificial Sequence
  Synthetic oligonucleotide
tgcctataggactcgaagaaggccgtaaag

SEQ ID NO: 357882 - DNA, 30 bp, Artificial Sequence
  Synthetic oligonucleotide
gcaccagaacgcgtagcacaaagcgtaaag

SEQ ID NO: 357883 - DNA, 30 bp, Artificial Sequence
  Synthetic oligonucleotide
atgcgcactctcttgccaaacacggtaaag

SEQ ID NO: 357884 - DNA, 30 bp, Artificial Sequence
  Synthetic oligonucleotide
agtagtaacatcctgtctaagcgggtaaag

SEQ ID NO: 357885 - DNA, 30 bp, Artificial Sequence
  Synthetic oligonucleotide
gggtggtcagccggggggcggcgggtaaag

SEQ ID NO: 357886 - DNA, 30 bp, Artificial Sequence
  Synthetic oligonucleotide
gtatggcatacggaaacttacggggtaaag

SEQ ID NO: 357887 - DNA, 30 bp, Artificial Sequence
  Synthetic oligonucleotide
actcgtctctgcacgtcagattgggtaaag

SEQ ID NO: 357888 - DNA, 30 bp, Artificial Sequence
  Synthetic oligonucleotide
gtacaatgcaccaaaatcgcttgtgtaaag

SEQ ID NO: 357889 - DNA, 30 bp, Artificial Sequence
  Synthetic oligonucleotide
tatggatttcatataaaagatccattaaag

SEQ ID NO: 357890 - DNA, 30 bp, Artificial Sequence
  Synthetic oligonucleotide
ttaagaattaagccgacggggatattaaag

SEQ ID NO: 357891 - DNA, 30 bp, Artificial Sequence
  Synthetic oligonucleotide
atgccggagcgtcccgccaccttattaaag

SEQ ID NO: 357892 - DNA, 30 bp, Artificial Sequence
  Synthetic oligonucleotide
aatctacaacaaactcaaactcacttaaag

SEQ ID NO: 357893 - DNA, 30 bp, Artificial Sequence
  Synthetic oligonucleotide
gtcacttgcgaaatccaaagaaagttaaag

SEQ ID NO: 357894 - DNA, 30 bp, Artificial Sequence
  Synthetic oligonucleotide
gttcggtcattaattgtttatcatttaaag

SEQ ID NO: 357895 - DNA, 30 bp, Artificial Sequence
  Synthetic oligonucleotide
ccgccgtccccttcccatcggtctttaaag

SEQ ID NO: 357896 - DNA, 30 bp, Artificial Sequence
  Synthetic oligonucleotide
ttgtagatcacaagggcgtcttcaaacaag

SEQ ID NO: 357897 - DNA, 30 bp, Artificial Sequence
  Synthetic oligonucleotide
aattatatgttgtaagtcattctaaacaag

SEQ ID NO: 357898 - DNA, 30 bp, Artificial Sequence
  Synthetic oligonucleotide
gtgaataatccaaaagccacgcagaacaag

SEQ ID NO: 357899 - DNA, 30 bp, Artificial Sequence
  Synthetic oligonucleotide
aacttctgtcatgactttggaattaacaag

SEQ ID NO: 357900 - DNA, 30 bp, Artificial Sequence
  Synthetic oligonucleotide
gatacgaagattttgcattgaaaacacaag

SEQ ID NO: 357901 - DNA, 30 bp, Artificial Sequence
  Synthetic oligonucleotide
gcagtgagaagctccgtcgccgcacacaag

SEQ ID NO: 357902 - DNA, 30 bp, Artificial Sequence
  Synthetic oligonucleotide
cacttagaggtctagtgaccgagacacaag

SEQ ID NO: 357903 - DNA, 30 bp, Artificial Sequence
  Synthetic oligonucleotide
agaacactcgtggcgtgagtattccacaag

SEQ ID NO: 357904 - DNA, 30 bp, Artificial Sequence
  Synthetic oligonucleotide
tagtagacggcgctcgggcctcggcacaag

SEQ ID NO: 357905 - DNA, 30 bp, Artificial Sequence
  Synthetic oligonucleotide
tgacggtttgagcctacctatggagacaag

SEQ ID NO: 357906 - DNA, 30 bp, Artificial Sequence
  Synthetic oligonucleotide
cgccaggtattgtcaagcccattagacaag

SEQ ID NO: 357907 - DNA, 30 bp, Artificial Sequence
  Synthetic oligonucleotide
gccacttgtttacggttatgacccgacaag

SEQ ID NO: 357908 - DNA, 30 bp, Artificial Sequence
  Synthetic oligonucleotide
agttcgtttcatgcggggacaacggacaag

SEQ ID NO: 357909 - DNA, 30 bp, Artificial Sequence
  Synthetic oligonucleotide
caaggtttgttcggatatcggtatgacaag

SEQ ID NO: 357910 - DNA, 30 bp, Artificial Sequence
  Synthetic oligonucleotide
attcacccatcgcagttcgtagttgacaag

SEQ ID NO: 357911 - DNA, 30 bp, Artificial Sequence
  Synthetic oligonucleotide
ggaaagtatgtaaccgtttttagatacaag

SEQ ID NO: 357912 - DNA, 30 bp, Artificial Sequence
  Synthetic oligonucleotide
tgcgagtgtgtagtttataagtgatacaag

SEQ ID NO: 357913 - DNA, 27 bp, Artificial Sequence
  Synthetic oligonucleotide
agtatcgatttctgttggatatacaag

SEQ ID NO: 357914 - DNA, 30 bp, Artificial Sequence
  Synthetic oligonucleotide
agaatgtgttcaaatgtgtccccctacaag

SEQ ID NO: 357915 - DNA, 30 bp, Artificial Sequence
  Synthetic oligonucleotide
tcagattatgtctcgagtcacatctacaag

SEQ ID NO: 357916 - DNA, 30 bp, Artificial Sequence
  Synthetic oligonucleotide
tttcccttgattgtgttgttctagtacaag

SEQ ID NO: 357917 - DNA, 30 bp, Artificial Sequence
  Synthetic oligonucleotide
ctagtagggacgtagggtgatagaaccaag

SEQ ID NO: 357918 - DNA, 30 bp, Artificial Sequence
  Synthetic oligonucleotide
caagccccgataggtgctaggtggaccaag

SEQ ID NO: 357919 - DNA, 30 bp, Artificial Sequence
  Synthetic oligonucleotide
ccctcgtgtatggattcattgctgaccaag

SEQ ID NO: 357920 - DNA, 30 bp, Artificial Sequence
  Synthetic oligonucleotide
tatacaattggaatggccgtatagcccaag

SEQ ID NO: 357921 - DNA, 30 bp, Artificial Sequence
  Synthetic oligonucleotide
tccctgagttgtgaggttttatagcccaag

SEQ ID NO: 357922 - DNA, 30 bp, Artificial Sequence
  Synthetic oligonucleotide
ctcaatatttctcacaacgccacgcccaag

SEQ ID NO: 357923 - DNA, 30 bp, Artificial Sequence
  Synthetic oligonucleotide
tctggcccagtagcactgtaggatcccaag

SEQ ID NO: 357924 - DNA, 30 bp, Artificial Sequence
  Synthetic oligonucleotide
ggccccgttgtccgcgatggacgtcccaag

SEQ ID NO: 357925 - DNA, 30 bp, Artificial Sequence
  Synthetic oligonucleotide
taatgctttgcatgtcccatggacgccaag

SEQ ID NO: 357926 - DNA, 30 bp, Artificial Sequence
  Synthetic oligonucleotide
aactgcatgggtgggggcaacttggccaag

SEQ ID NO: 357927 - DNA, 27 bp, Artificial Sequence
  Synthetic oligonucleotide
tgatcgtgtactgttggtcttgccaag

SEQ ID NO: 357928 - DNA, 30 bp, Artificial Sequence
  Synthetic oligonucleotide
attaggactcatagtacggtataatccaag

SEQ ID NO: 357929 - DNA, 30 bp, Artificial Sequence
  Synthetic oligonucleotide
agtcgatttcacgccggatggacatccaag

SEQ ID NO: 357930 - DNA, 30 bp, Artificial Sequence
  Synthetic oligonucleotide
atcttgtttgccccgcagggcgattccaag

SEQ ID NO: 357931 - DNA, 30 bp, Artificial Sequence
  Synthetic oligonucleotide
aaaacgagcccgtcatttgcaggttccaag

SEQ ID NO: 357932 - DNA, 30 bp, Artificial Sequence
  Synthetic oligonucleotide
gcacatgcggatactagtcccaaaagcaag

SEQ ID NO: 357933 - DNA, 30 bp, Artificial Sequence
  Synthetic oligonucleotide
cttttggtgttgcatctaatcgccagcaag

SEQ ID NO: 357934 - DNA, 30 bp, Artificial Sequence
  Synthetic oligonucleotide
atccacctggggctattcgccactagcaag

SEQ ID NO: 357935 - DNA, 30 bp, Artificial Sequence
  Synthetic oligonucleotide
acggcggttagattggcttaggaacgcaag

SEQ ID NO: 357936 - DNA, 30 bp, Artificial Sequence
  Synthetic oligonucleotide
gacgctaataggagtgctagcggacgcaag

SEQ ID NO: 357937 - DNA, 30 bp, Artificial Sequence
  Synthetic oligonucleotide
cctcctcgtatgtcagcgtcactacgcaag

SEQ ID NO: 357938 - DNA, 30 bp, Artificial Sequence
  Synthetic oligonucleotide
cgtgtcccaagtgggattccgaaccgcaag

SEQ ID NO: 357939 - DNA, 30 bp, Artificial Sequence
  Synthetic oligonucleotide
acacgctcgctctaattaatgctccgcaag

SEQ ID NO: 357940 - DNA, 30 bp, Artificial Sequence
  Synthetic oligonucleotide
gccgatcagccttaaaagtgcttccgcaag

SEQ ID NO: 357941 - DNA, 30 bp, Artificial Sequence
  Synthetic oligonucleotide
gttagcgcgtaaactggaattaggcgcaag

SEQ ID NO: 357942 - DNA, 30 bp, Artificial Sequence
  Synthetic oligonucleotide
cctacgaacacctgattggcatggcgcaag

SEQ ID NO: 357943 - DNA, 30 bp, Artificial Sequence
  Synthetic oligonucleotide
gtacatactatattcatgggcctgcgcaag

SEQ ID NO: 357944 - DNA, 30 bp, Artificial Sequence
  Synthetic oligonucleotide
gcaacgagcccgccttactctaaaggcaag

SEQ ID NO: 357945 - DNA, 30 bp, Artificial Sequence
  Synthetic oligonucleotide
caaacgcaggggcatataagtaaaggcaag

SEQ ID NO: 357946 - DNA, 30 bp, Artificial Sequence
  Synthetic oligonucleotide
tatgaatctcgtctgtcccttggaggcaag

SEQ ID NO: 357947 - DNA, 30 bp, Artificial Sequence
  Synthetic oligonucleotide
tgcaaggccctgacaatgcgactcggcaag

SEQ ID NO: 357948 - DNA, 30 bp, Artificial Sequence
  Synthetic oligonucleotide
gcgtgcctccggcactgtccaaagggcaag

SEQ ID NO: 357949 - DNA, 30 bp, Artificial Sequence
  Synthetic oligonucleotide
aaaaatctatggagagaagttaggggcaag

SEQ ID NO: 357950 - DNA, 30 bp, Artificial Sequence
  Synthetic oligonucleotide
aagcagtgttgcaaaggcgactaatgcaag

SEQ ID NO: 357951 - DNA, 30 bp, Artificial Sequence
  Synthetic oligonucleotide
ttccacggaacgttagcgttcacatgcaag

SEQ ID NO: 357952 - DNA, 30 bp, Artificial Sequence
  Synthetic oligonucleotide
aatataacactggacacgtaactatgcaag

SEQ ID NO: 357953 - DNA, 30 bp, Artificial Sequence
  Synthetic oligonucleotide
gaggatgtttaatagagcgaacgctgcaag

SEQ ID NO: 357954 - DNA, 30 bp, Artificial Sequence
  Synthetic oligonucleotide
gcttccgctctggtgagattaaagtgcaag

SEQ ID NO: 357955 - DNA, 31 bp, Artificial Sequence
  Synthetic oligonucleotide
gaaaacagggtgataggtgtttgggtgcaag

SEQ ID NO: 357956 - DNA, 30 bp, Artificial Sequence
  Synthetic oligonucleotide
agttatcgagcctctcggaggagttgcaag

SEQ ID NO: 357957 - DNA, 31 bp, Artificial Sequence
  Synthetic oligonucleotide
taggctaggggtttggcggagtgcgatcaag

SEQ ID NO: 357958 - DNA, 30 bp, Artificial Sequence
  Synthetic oligonucleotide
atccacctgatccgttcaattgggatcaag

SEQ ID NO: 357959 - DNA, 30 bp, Artificial Sequence
  Synthetic oligonucleotide
cgcatctaagtggaatttcggttgatcaag

SEQ ID NO: 357960 - DNA, 30 bp, Artificial Sequence
  Synthetic oligonucleotide
ctcctcggagttactcttcgtttgatcaag

SEQ ID NO: 357961 - DNA, 30 bp, Artificial Sequence
  Synthetic oligonucleotide
tattataatcgacgtcgcatttatatcaag

SEQ ID NO: 357962 - DNA, 30 bp, Artificial Sequence
  Synthetic oligonucleotide
acaattatctcatacgaagtttatatcaag

SEQ ID NO: 357963 - DNA, 30 bp, Artificial Sequence
  Synthetic oligonucleotide
ggtctatgagtgtgatggatgcctatcaag

SEQ ID NO: 357964 - DNA, 30 bp, Artificial Sequence
  Synthetic oligonucleotide
ttctgtatgtctgggaggcgtggtatcaag

SEQ ID NO: 357965 - DNA, 30 bp, Artificial Sequence
  Synthetic oligonucleotide
actcaccacccgagagaggttttcctcaag

SEQ ID NO: 357966 - DNA, 30 bp, Artificial Sequence
  Synthetic oligonucleotide
gtgataacttatatgaaagagctgctcaag

SEQ ID NO: 357967 - DNA, 30 bp, Artificial Sequence
  Synthetic oligonucleotide
gcatgagcaaccagactaatcagtctcaag

SEQ ID NO: 357968 - DNA, 30 bp, Artificial Sequence
  Synthetic oligonucleotide
ttgccaaccctggatcaatgggttctcaag

SEQ ID NO: 357969 - DNA, 30 bp, Artificial Sequence
  Synthetic oligonucleotide
ttgagtcttatatcttagccaatagtcaag

SEQ ID NO: 357970 - DNA, 30 bp, Artificial Sequence
  Synthetic oligonucleotide
gtactcgcgaaacattaataatacgtcaag

SEQ ID NO: 357971 - DNA, 30 bp, Artificial Sequence
  Synthetic oligonucleotide
gcgctagggagctggccgttgtgggtcaag

SEQ ID NO: 357972 - DNA, 30 bp, Artificial Sequence
  Synthetic oligonucleotide
aagcatgcacttaaccggttcagtgtcaag

SEQ ID NO: 357973 - DNA, 30 bp, Artificial Sequence
  Synthetic oligonucleotide
tgggatttggatagaacatgctgtgtcaag

SEQ ID NO: 357974 - DNA, 30 bp, Artificial Sequence
  Synthetic oligonucleotide
aattccggtcgcacaagcgaagttgtcaag

SEQ ID NO: 357975 - DNA, 30 bp, Artificial Sequence
  Synthetic oligonucleotide
aatatctagcgcccacgcgtgtttgtcaag

SEQ ID NO: 357976 - DNA, 30 bp, Artificial Sequence
  Synthetic oligonucleotide
aagtagctgatggtgcccttgtcattcaag

SEQ ID NO: 357977 - DNA, 30 bp, Artificial Sequence
  Synthetic oligonucleotide
tgccttgacgatcaggtcgatcagttcaag

SEQ ID NO: 357978 - DNA, 30 bp, Artificial Sequence
  Synthetic oligonucleotide
atgacgtgatcaaacttgagaaatttcaag

SEQ ID NO: 357979 - DNA, 30 bp, Artificial Sequence
  Synthetic oligonucleotide
ctcttatggggattaccgatgactttcaag

SEQ ID NO: 357980 - DNA, 30 bp, Artificial Sequence
  Synthetic oligonucleotide
ctgctcctggacatggctcggcgtttcaag

SEQ ID NO: 357981 - DNA, 30 bp, Artificial Sequence
  Synthetic oligonucleotide
aaagtctcagtgtagacttaagaaaagaag

SEQ ID NO: 357982 - DNA, 30 bp, Artificial Sequence
  Synthetic oligonucleotide
aaagtgggtcatggattcttcgaaaagaag

SEQ ID NO: 357983 - DNA, 30 bp, Artificial Sequence
  Synthetic oligonucleotide
cgagccgactaaacggaggaataaaagaag

SEQ ID NO: 357984 - DNA, 30 bp, Artificial Sequence
  Synthetic oligonucleotide
ggataaggggcctacagggcgggtaagaag

SEQ ID NO: 357985 - DNA, 30 bp, Artificial Sequence
  Synthetic oligonucleotide
aggcctttcctcccctcaagcgtccagaag

SEQ ID NO: 357986 - DNA, 30 bp, Artificial Sequence
  Synthetic oligonucleotide
gggcctttcaccgatttatatccgcagaag

SEQ ID NO: 357987 - DNA, 30 bp, Artificial Sequence
  Synthetic oligonucleotide
tcttgacagggtttgttatcatcgcagaag

SEQ ID NO: 357988 - DNA, 30 bp, Artificial Sequence
  Synthetic oligonucleotide
actgtttcgccttggataacgtcgcagaag

SEQ ID NO: 357989 - DNA, 30 bp, Artificial Sequence
  Synthetic oligonucleotide
tggtactcggcagcgcgtactcatcagaag

SEQ ID NO: 357990 - DNA, 30 bp, Artificial Sequence
  Synthetic oligonucleotide
aaagatgtaatatgtctgcttcgggagaag

SEQ ID NO: 357991 - DNA, 30 bp, Artificial Sequence
  Synthetic oligonucleotide
ggactacttccaatgggtgctgatgagaag

SEQ ID NO: 357992 - DNA, 30 bp, Artificial Sequence
  Synthetic oligonucleotide
taacggctttccggtggtggttctgagaag

SEQ ID NO: 357993 - DNA, 30 bp, Artificial Sequence
  Synthetic oligonucleotide
cagcttctcatgaacgaattatcatagaag

SEQ ID NO: 357994 - DNA, 30 bp, Artificial Sequence
  Synthetic oligonucleotide
gagagagatgcggagtccttttcatagaag

SEQ ID NO: 357995 - DNA, 30 bp, Artificial Sequence
  Synthetic oligonucleotide
gaacggctagtgccagtttaatcgtagaag

SEQ ID NO: 357996 - DNA, 30 bp, Artificial Sequence
  Synthetic oligonucleotide
gatggttactagcgggactccgggtagaag

SEQ ID NO: 357997 - DNA, 30 bp, Artificial Sequence
  Synthetic oligonucleotide
aacgcatatggcatcgcattaatttagaag

SEQ ID NO: 357998 - DNA, 30 bp, Artificial Sequence
  Synthetic oligonucleotide
tgatggttgaccgctttattgatttagaag

SEQ ID NO: 357999 - DNA, 30 bp, Artificial Sequence
  Synthetic oligonucleotide
accagtactgttagatgctaactttagaag

SEQ ID NO: 358000 - DNA, 30 bp, Artificial Sequence
  Synthetic oligonucleotide
gacagcatctcccacattcttggaacgaag

SEQ ID NO: 358001 - DNA, 30 bp, Artificial Sequence
  Synthetic oligonucleotide
atcctgttcaggcgcattagaataacgaag

SEQ ID NO: 358002 - DNA, 30 bp, Artificial Sequence
  Synthetic oligonucleotide
ggcagctcacgccgttcttttagcacgaag

SEQ ID NO: 358003 - DNA, 30 bp, Artificial Sequence
  Synthetic oligonucleotide
taaggtcgttagaacatactcatcacgaag

SEQ ID NO: 358004 - DNA, 30 bp, Artificial Sequence
  Synthetic oligonucleotide
acgcgagtctgtctcaggatgcagacgaag

SEQ ID NO: 358005 - DNA, 30 bp, Artificial Sequence
  Synthetic oligonucleotide
gttggacgagcaaaacttcgggagacgaag

SEQ ID NO: 358006 - DNA, 30 bp, Artificial Sequence
  Synthetic oligonucleotide
cttcacggagtctagtctcgtatgacgaag

SEQ ID NO: 358007 - DNA, 30 bp, Artificial Sequence
  Synthetic oligonucleotide
cggagtccgagcctttgtagggtgacgaag

SEQ ID NO: 358008 - DNA, 30 bp, Artificial Sequence
  Synthetic oligonucleotide
tcctggtattatccgggcagcaatacgaag

SEQ ID NO: 358009 - DNA, 30 bp, Artificial Sequence
  Synthetic oligonucleotide
cgagtaagcaactggatggagcatacgaag

SEQ ID NO: 358010 - DNA, 30 bp, Artificial Sequence
  Synthetic oligonucleotide
taaagtcatgcagatggtgtcggtacgaag

SEQ ID NO: 358011 - DNA, 30 bp, Artificial Sequence
  Synthetic oligonucleotide
aagtgtgagcccgctagaaggcttacgaag

SEQ ID NO: 358012 - DNA, 30 bp, Artificial Sequence
  Synthetic oligonucleotide
ggaactgtaatgaactgatgtgcaccgaag

SEQ ID NO: 358013 - DNA, 30 bp, Artificial Sequence
  Synthetic oligonucleotide
gcataatcgttggttaacaacgtaccgaag

SEQ ID NO: 358014 - DNA, 30 bp, Artificial Sequence
  Synthetic oligonucleotide
cgcagccgagcagggcactagtacccgaag

SEQ ID NO: 358015 - DNA, 30 bp, Artificial Sequence
  Synthetic oligonucleotide
taatgcgattcatccttagtccgcccgaag

SEQ ID NO: 358016 - DNA, 30 bp, Artificial Sequence
  Synthetic oligonucleotide
taatcatcaagtatattcactgatccgaag

SEQ ID NO: 358017 - DNA, 30 bp, Artificial Sequence
  Synthetic oligonucleotide
attgagtcatgggcagcggtaatagcgaag

SEQ ID NO: 358018 - DNA, 30 bp, Artificial Sequence
  Synthetic oligonucleotide
ggatccacgcgcagaggatactccgcgaag

SEQ ID NO: 358019 - DNA, 30 bp, Artificial Sequence
  Synthetic oligonucleotide
ctacttaaagtggccctaacaagtgcgaag

SEQ ID NO: 358020 - DNA, 30 bp, Artificial Sequence
  Synthetic oligonucleotide
acacaataggtcgcttttacccaatcgaag

SEQ ID NO: 358021 - DNA, 30 bp, Artificial Sequence
  Synthetic oligonucleotide
tcggcaataagtggttctcccccatcgaag

SEQ ID NO: 358022 - DNA, 30 bp, Artificial Sequence
  Synthetic oligonucleotide
gaaaagcgcatgtactcacgtgcatcgaag

SEQ ID NO: 358023 - DNA, 30 bp, Artificial Sequence
  Synthetic oligonucleotide
gctggcatggtcagtatgcctagatcgaag

SEQ ID NO: 358024 - DNA, 30 bp, Artificial Sequence
  Synthetic oligonucleotide
atacactgttttggtctggaagtatcgaag

SEQ ID NO: 358025 - DNA, 30 bp, Artificial Sequence
  Synthetic oligonucleotide
tcttagcatacaatgcacgggccctcgaag

SEQ ID NO: 358026 - DNA, 30 bp, Artificial Sequence
  Synthetic oligonucleotide
gagaaaagtaaagtaggaactccctcgaag

SEQ ID NO: 358027 - DNA, 30 bp, Artificial Sequence
  Synthetic oligonucleotide
tatgaggctcgaaaagaacccaccaggaag

SEQ ID NO: 358028 - DNA, 30 bp, Artificial Sequence
  Synthetic oligonucleotide
aagttcttcctgcctatcaacaagcggaag

SEQ ID NO: 358029 - DNA, 30 bp, Artificial Sequence
  Synthetic oligonucleotide
ttgacggggcctacggaagagcttcggaag

SEQ ID NO: 358030 - DNA, 30 bp, Artificial Sequence
  Synthetic oligonucleotide
cattattatctgtgatcgaacccagggaag

SEQ ID NO: 358031 - DNA, 30 bp, Artificial Sequence
  Synthetic oligonucleotide
gagaccgtatcctccctttttgacgggaag

SEQ ID NO: 358032 - DNA, 30 bp, Artificial Sequence
  Synthetic oligonucleotide
taccaaactttttagagctctaaggggaag

SEQ ID NO: 358033 - DNA, 30 bp, Artificial Sequence
  Synthetic oligonucleotide
tctcttcaatttgttgagggacaggggaag

SEQ ID NO: 358034 - DNA, 30 bp, Artificial Sequence
  Synthetic oligonucleotide
cactatacccgtgatgtggtagtggggaag

SEQ ID NO: 358035 - DNA, 30 bp, Artificial Sequence
  Synthetic oligonucleotide
cagtcatcatcggtggtgagggatgggaag

SEQ ID NO: 358036 - DNA, 30 bp, Artificial Sequence
  Synthetic oligonucleotide
tcactcgaggagtcccgctggtctgggaag

SEQ ID NO: 358037 - DNA, 30 bp, Artificial Sequence
  Synthetic oligonucleotide
cctatttaaatcagaccttcaggtgggaag

SEQ ID NO: 358038 - DNA, 30 bp, Artificial Sequence
  Synthetic oligonucleotide
tgggatcaccctgggtgatggtcctggaag

SEQ ID NO: 358039 - DNA, 30 bp, Artificial Sequence
  Synthetic oligonucleotide
tttgagtcccggatacttcatcggtggaag

SEQ ID NO: 358040 - DNA, 30 bp, Artificial Sequence
  Synthetic oligonucleotide
aagggggacggggcataacggtgttggaag

SEQ ID NO: 358041 - DNA, 30 bp, Artificial Sequence
  Synthetic oligonucleotide
cctggatcctgctaaagaccagtttggaag

SEQ ID NO: 358042 - DNA, 30 bp, Artificial Sequence
  Synthetic oligonucleotide
ttggaaatctgttggacgcataaaatgaag

SEQ ID NO: 358043 - DNA, 30 bp, Artificial Sequence
  Synthetic oligonucleotide
acatgtgacgtgttgtaagacgcaatgaag

SEQ ID NO: 358044 - DNA, 30 bp, Artificial Sequence
  Synthetic oligonucleotide
gggtaaaaatacttgcagtttttcatgaag

SEQ ID NO: 358045 - DNA, 30 bp, Artificial Sequence
  Synthetic oligonucleotide
acatcgtaatggtagatgttatagatgaag

SEQ ID NO: 358046 - DNA, 30 bp, Artificial Sequence
  Synthetic oligonucleotide
ccagagtaattcattcattaagggatgaag

SEQ ID NO: 358047 - DNA, 30 bp, Artificial Sequence
  Synthetic oligonucleotide
gctcaatcatcccgcaatttggggatgaag

SEQ ID NO: 358048 - DNA, 30 bp, Artificial Sequence
  Synthetic oligonucleotide
atgcgcaggtgagcttcttggaatatgaag

SEQ ID NO: 358049 - DNA, 30 bp, Artificial Sequence
  Synthetic oligonucleotide
gagccgcagggatgtaccggatctatgaag

SEQ ID NO: 358050 - DNA, 30 bp, Artificial Sequence
  Synthetic oligonucleotide
tgcaagctaggcgaggcgttgcgtatgaag

SEQ ID NO: 358051 - DNA, 30 bp, Artificial Sequence
  Synthetic oligonucleotide
taactatccaggtgttactaatttatgaag

SEQ ID NO: 358052 - DNA, 30 bp, Artificial Sequence
  Synthetic oligonucleotide
gtaatttatgtgatgtcacgttaactgaag

SEQ ID NO: 358053 - DNA, 30 bp, Artificial Sequence
  Synthetic oligonucleotide
ctttgcggtcgactatatataccactgaag

SEQ ID NO: 358054 - DNA, 30 bp, Artificial Sequence
  Synthetic oligonucleotide
ttcacatcccagaaaaagtaagtactgaag

SEQ ID NO: 358055 - DNA, 30 bp, Artificial Sequence
  Synthetic oligonucleotide
gccccgccgttacggaaccggttcctgaag

SEQ ID NO: 358056 - DNA, 30 bp, Artificial Sequence
  Synthetic oligonucleotide
ccacgaaaatagtcaagaatgtaagtgaag

SEQ ID NO: 358057 - DNA, 30 bp, Artificial Sequence
  Synthetic oligonucleotide
cggctatggggaagtggttgttcagtgaag

SEQ ID NO: 358058 - DNA, 30 bp, Artificial Sequence
  Synthetic oligonucleotide
atattagtttcagttcggtctagcgtgaag

SEQ ID NO: 358059 - DNA, 30 bp, Artificial Sequence
  Synthetic oligonucleotide
cattggtggcgtttatagcatggcgtgaag

SEQ ID NO: 358060 - DNA, 30 bp, Artificial Sequence
  Synthetic oligonucleotide
taattgagaagggtggaaagcatcgtgaag

SEQ ID NO: 358061 - DNA, 30 bp, Artificial Sequence
  Synthetic oligonucleotide
accaggactttaaaatctcccctggtgaag

SEQ ID NO: 358062 - DNA, 30 bp, Artificial Sequence
  Synthetic oligonucleotide
attctgtgagctatcagccggcttgtgaag

SEQ ID NO: 358063 - DNA, 30 bp, Artificial Sequence
  Synthetic oligonucleotide
ccaacccacttcaccaccgctcttgtgaag

SEQ ID NO: 358064 - DNA, 30 bp, Artificial Sequence
  Synthetic oligonucleotide
tgcattctatatgacaccacagcattgaag

SEQ ID NO: 358065 - DNA, 30 bp, Artificial Sequence
  Synthetic oligonucleotide
tgctactccatgtccctcttctacttgaag

SEQ ID NO: 358066 - DNA, 30 bp, Artificial Sequence
  Synthetic oligonucleotide
taggcgcggcgatcgcctgccttcttgaag

SEQ ID NO: 358067 - DNA, 30 bp, Artificial Sequence
  Synthetic oligonucleotide
gcactcgctgccaacagtctcgtgttgaag

SEQ ID NO: 358068 - DNA, 30 bp, Artificial Sequence
  Synthetic oligonucleotide
atagaagtcttgggataccctttgttgaag

SEQ ID NO: 358069 - DNA, 30 bp, Artificial Sequence
  Synthetic oligonucleotide
gcgtcggacacaattcctagacatttgaag

SEQ ID NO: 358070 - DNA, 30 bp, Artificial Sequence
  Synthetic oligonucleotide
aagaatgacgacagaaactatcttttgaag

SEQ ID NO: 358071 - DNA, 30 bp, Artificial Sequence
  Synthetic oligonucleotide
aacggtcctgtttggacgtgatttttgaag

SEQ ID NO: 358072 - DNA, 30 bp, Artificial Sequence
  Synthetic oligonucleotide
aacctgaggccaggcaacgaaggaaataag

SEQ ID NO: 358073 - DNA, 30 bp, Artificial Sequence
  Synthetic oligonucleotide
acctgtctaattctgtcacgagtcaataag

SEQ ID NO: 358074 - DNA, 30 bp, Artificial Sequence
  Synthetic oligonucleotide
tacgatgagttagtaataggcgtcaataag

SEQ ID NO: 358075 - DNA, 30 bp, Artificial Sequence
  Synthetic oligonucleotide
tatctacgggcccaggtcagacataataag

SEQ ID NO: 358076 - DNA, 30 bp, Artificial Sequence
  Synthetic oligonucleotide
acggtactttgcgttataatctaccataag

SEQ ID NO: 358077 - DNA, 30 bp, Artificial Sequence
  Synthetic oligonucleotide
caggcgcggagagggtttctcctccataag

SEQ ID NO: 358078 - DNA, 30 bp, Artificial Sequence
  Synthetic oligonucleotide
tatgctcgtgtacgaagcgcacggcataag

SEQ ID NO: 358079 - DNA, 30 bp, Artificial Sequence
  Synthetic oligonucleotide
accactactcaattagattaataagataag

SEQ ID NO: 358080 - DNA, 30 bp, Artificial Sequence
  Synthetic oligonucleotide
tggttggacccgcatatttgcctcgataag

SEQ ID NO: 358081 - DNA, 30 bp, Artificial Sequence
  Synthetic oligonucleotide
cgagctcagataagttgcttatatgataag

SEQ ID NO: 358082 - DNA, 30 bp, Artificial Sequence
  Synthetic oligonucleotide
ctcatattacttatggggctcgttgataag

SEQ ID NO: 358083 - DNA, 30 bp, Artificial Sequence
  Synthetic oligonucleotide
ggtcgccagtgatgtgctcttgttgataag

SEQ ID NO: 358084 - DNA, 30 bp, Artificial Sequence
  Synthetic oligonucleotide
taggtcatggattacccctatccatataag

SEQ ID NO: 358085 - DNA, 30 bp, Artificial Sequence
  Synthetic oligonucleotide
tttccctgagctgtggggcagtgttataag

SEQ ID NO: 358086 - DNA, 30 bp, Artificial Sequence
  Synthetic oligonucleotide
gacttgtgagaaagacgtgtcaagactaag

SEQ ID NO: 358087 - DNA, 30 bp, Artificial Sequence
  Synthetic oligonucleotide
ggctcccagcactgataaggcaatactaag

SEQ ID NO: 358088 - DNA, 30 bp, Artificial Sequence
  Synthetic oligonucleotide
gcgttctggatagggtcgggttaacctaag

SEQ ID NO: 358089 - DNA, 30 bp, Artificial Sequence
  Synthetic oligonucleotide
tcgccggggggtccgtgaagtatccctaag

SEQ ID NO: 358090 - DNA, 30 bp, Artificial Sequence
  Synthetic oligonucleotide
tgcgggaggcatttttgtctggcgcctaag

SEQ ID NO: 358091 - DNA, 30 bp, Artificial Sequence
  Synthetic oligonucleotide
acttggtggatgatattacagttgcctaag

SEQ ID NO: 358092 - DNA, 30 bp, Artificial Sequence
  Synthetic oligonucleotide
tcgggtttcgagtgagtagtccatcctaag

SEQ ID NO: 358093 - DNA, 30 bp, Artificial Sequence
  Synthetic oligonucleotide
agtgacttcaacaacgtgacctcagctaag

SEQ ID NO: 358094 - DNA, 30 bp, Artificial Sequence
  Synthetic oligonucleotide
tgaatgtctgtgaacggaatgaccgctaag

SEQ ID NO: 358095 - DNA, 31 bp, Artificial Sequence
  Synthetic oligonucleotide
taccgatttgagtatcatcgttaccgctaag

SEQ ID NO: 358096 - DNA, 30 bp, Artificial Sequence
  Synthetic oligonucleotide
attttcatggcaggcgagtgctccgctaag

SEQ ID NO: 358097 - DNA, 30 bp, Artificial Sequence
  Synthetic oligonucleotide
acagcaacttattggttactcaaggctaag

SEQ ID NO: 358098 - DNA, 30 bp, Artificial Sequence
  Synthetic oligonucleotide
aagatgatatcttcgaaggacttggctaag

SEQ ID NO: 358099 - DNA, 30 bp, Artificial Sequence
  Synthetic oligonucleotide
tctaaatgagggtctattacgactgctaag

SEQ ID NO: 358100 - DNA, 31 bp, Artificial Sequence
  Synthetic oligonucleotide
atgatggacttgtggcatctgggttgctaag

SEQ ID NO: 358101 - DNA, 30 bp, Artificial Sequence
  Synthetic oligonucleotide
attggtgactcggtctatttcgaatctaag

SEQ ID NO: 358102 - DNA, 30 bp, Artificial Sequence
  Synthetic oligonucleotide
ttacttcctcatgaaaagagcgcatctaag

SEQ ID NO: 358103 - DNA, 30 bp, Artificial Sequence
  Synthetic oligonucleotide
ccttaacggcgctgcattacgaactctaag

SEQ ID NO: 358104 - DNA, 30 bp, Artificial Sequence
  Synthetic oligonucleotide
cgtcgttgttcgcatcgtattggctctaag

SEQ ID NO: 358105 - DNA, 30 bp, Artificial Sequence
  Synthetic oligonucleotide
tttactgcaatcctgttttagtgctctaag

SEQ ID NO: 358106 - DNA, 30 bp, Artificial Sequence
  Synthetic oligonucleotide
ggccagtccatgtcaattactaagtctaag

SEQ ID NO: 358107 - DNA, 30 bp, Artificial Sequence
  Synthetic oligonucleotide
agtcgcggactttttggtgtgccgtctaag

SEQ ID NO: 358108 - DNA, 30 bp, Artificial Sequence
  Synthetic oligonucleotide
gctttgtaacgcccatggaaagcgtctaag

SEQ ID NO: 358109 - DNA, 30 bp, Artificial Sequence
  Synthetic oligonucleotide
gcttatgtaaccttggactaggtgtctaag

SEQ ID NO: 358110 - DNA, 30 bp, Artificial Sequence
  Synthetic oligonucleotide
tgtatgaccactggtgctagagcttctaag

SEQ ID NO: 358111 - DNA, 30 bp, Artificial Sequence
  Synthetic oligonucleotide
gctactttgggctatctaagcagaagtaag

SEQ ID NO: 358112 - DNA, 30 bp, Artificial Sequence
  Synthetic oligonucleotide
tcatgtagctaggctaagtgttgaagtaag

SEQ ID NO: 358113 - DNA, 30 bp, Artificial Sequence
  Synthetic oligonucleotide
gtaatctctacatttgggaaaaccagtaag

SEQ ID NO: 358114 - DNA, 30 bp, Artificial Sequence
  Synthetic oligonucleotide
ctccaatctccacgacgagcgcccagtaag

SEQ ID NO: 358115 - DNA, 30 bp, Artificial Sequence
  Synthetic oligonucleotide
tacgttgaggtaccctcattctggagtaag

SEQ ID NO: 358116 - DNA, 30 bp, Artificial Sequence
  Synthetic oligonucleotide
acctttcaaggtcagtcagtatatagtaag

SEQ ID NO: 358117 - DNA, 30 bp, Artificial Sequence
  Synthetic oligonucleotide
aacaccaatgtacgtgatacgtcacgtaag

SEQ ID NO: 358118 - DNA, 30 bp, Artificial Sequence
  Synthetic oligonucleotide
aagaaccgaatcttgatacgggtacgtaag

SEQ ID NO: 358119 - DNA, 30 bp, Artificial Sequence
  Synthetic oligonucleotide
gtttgaggcgtaatatcgggataccgtaag

SEQ ID NO: 358120 - DNA, 30 bp, Artificial Sequence
  Synthetic oligonucleotide
gcgcggcttacgtcaattataagccgtaag

SEQ ID NO: 358121 - DNA, 30 bp, Artificial Sequence
  Synthetic oligonucleotide
gtgtttagtagaatgcacggtgtgcgtaag

SEQ ID NO: 358122 - DNA, 30 bp, Artificial Sequence
  Synthetic oligonucleotide
gtgtcgggcccgcgtcacgttcatcgtaag

SEQ ID NO: 358123 - DNA, 30 bp, Artificial Sequence
  Synthetic oligonucleotide
ctcacgtgtacgcaagggaaaagtcgtaag

SEQ ID NO: 358124 - DNA, 30 bp, Artificial Sequence
  Synthetic oligonucleotide
aacagataataaattaggcgctgtcgtaag

SEQ ID NO: 358125 - DNA, 30 bp, Artificial Sequence
  Synthetic oligonucleotide
gccctgagattcctgcaaatttttcgtaag

SEQ ID NO: 358126 - DNA, 30 bp, Artificial Sequence
  Synthetic oligonucleotide
actctggtacctagtcttgccaaaggtaag

SEQ ID NO: 358127 - DNA, 30 bp, Artificial Sequence
  Synthetic oligonucleotide
cggctcgtccgcccgtgtagcaaaggtaag

SEQ ID NO: 358128 - DNA, 30 bp, Artificial Sequence
  Synthetic oligonucleotide
ggccgggcgggcctaatagtgcgaggtaag

SEQ ID NO: 358129 - DNA, 30 bp, Artificial Sequence
  Synthetic oligonucleotide
cacccgtcgagagttcgctagacgggtaag

SEQ ID NO: 358130 - DNA, 30 bp, Artificial Sequence
  Synthetic oligonucleotide
ggtgtgattaattggcagcatagtggtaag

SEQ ID NO: 358131 - DNA, 30 bp, Artificial Sequence
  Synthetic oligonucleotide
gatctaggttaaaaatttcagtaatgtaag

SEQ ID NO: 358132 - DNA, 30 bp, Artificial Sequence
  Synthetic oligonucleotide
cttatttaatgcattctgtttacatgtaag

SEQ ID NO: 358133 - DNA, 30 bp, Artificial Sequence
  Synthetic oligonucleotide
ttgcatcattttttattgtcacgatgtaag

SEQ ID NO: 358134 - DNA, 30 bp, Artificial Sequence
  Synthetic oligonucleotide
gtttttaaatggtgcttgtgttcctgtaag

SEQ ID NO: 358135 - DNA, 30 bp, Artificial Sequence
  Synthetic oligonucleotide
tgctgatcttttggggtgatttcctgtaag

SEQ ID NO: 358136 - DNA, 30 bp, Artificial Sequence
  Synthetic oligonucleotide
ggctcagggaggcgcatagggagctgtaag

SEQ ID NO: 358137 - DNA, 30 bp, Artificial Sequence
  Synthetic oligonucleotide
agagttgaatttacttcttacgattgtaag

SEQ ID NO: 358138 - DNA, 30 bp, Artificial Sequence
  Synthetic oligonucleotide
gaagattcttggagggatagctattgtaag

SEQ ID NO: 358139 - DNA, 30 bp, Artificial Sequence
  Synthetic oligonucleotide
tcccgaggggggctggaacaagtttgtaag

SEQ ID NO: 358140 - DNA, 30 bp, Artificial Sequence
  Synthetic oligonucleotide
ctaagatgttgaccatggcccgaaattaag

SEQ ID NO: 358141 - DNA, 30 bp, Artificial Sequence
  Synthetic oligonucleotide
tgtttttagattcaactaaagtaaattaag

SEQ ID NO: 358142 - DNA, 30 bp, Artificial Sequence
  Synthetic oligonucleotide
acatttcaatcacccgttccgtcaattaag

SEQ ID NO: 358143 - DNA, 30 bp, Artificial Sequence
  Synthetic oligonucleotide
tagttgtggggttatacagagggaattaag

SEQ ID NO: 358144 - DNA, 30 bp, Artificial Sequence
  Synthetic oligonucleotide
gtctttatcctggcctatacgaacattaag

SEQ ID NO: 358145 - DNA, 30 bp, Artificial Sequence
  Synthetic oligonucleotide
gctggtttgagtcaggcaatgatgattaag

SEQ ID NO: 358146 - DNA, 30 bp, Artificial Sequence
  Synthetic oligonucleotide
ttcgctcgaagtatagttcggtctattaag

SEQ ID NO: 358147 - DNA, 30 bp, Artificial Sequence
  Synthetic oligonucleotide
catttataattcagtgacatttttattaag

SEQ ID NO: 358148 - DNA, 30 bp, Artificial Sequence
  Synthetic oligonucleotide
cacttcaacgtcgatcagttctaacttaag

SEQ ID NO: 358149 - DNA, 30 bp, Artificial Sequence
  Synthetic oligonucleotide
gaatattattactatcgtcggagacttaag

SEQ ID NO: 358150 - DNA, 30 bp, Artificial Sequence
  Synthetic oligonucleotide
gggggcctttcacgatacatgcaccttaag

SEQ ID NO: 358151 - DNA, 30 bp, Artificial Sequence
  Synthetic oligonucleotide
gcaaatcggagaatgacggcatgccttaag

SEQ ID NO: 358152 - DNA, 30 bp, Artificial Sequence
  Synthetic oligonucleotide
gggggggtacagaacagaagacgtcttaag

SEQ ID NO: 358153 - DNA, 30 bp, Artificial Sequence
  Synthetic oligonucleotide
cgtgtgggaattgtttacctcggtcttaag

SEQ ID NO: 358154 - DNA, 30 bp, Artificial Sequence
  Synthetic oligonucleotide
ggtacaccccttagggcaaagtgtcttaag

SEQ ID NO: 358155 - DNA, 30 bp, Artificial Sequence
  Synthetic oligonucleotide
tcggtgtaggtgtggtattggcacgttaag

SEQ ID NO: 358156 - DNA, 30 bp, Artificial Sequence
  Synthetic oligonucleotide
gaatgacgtcctaggtcaactgtcgttaag

SEQ ID NO: 358157 - DNA, 30 bp, Artificial Sequence
  Synthetic oligonucleotide
cctaaccatattatattcagggcggttaag

SEQ ID NO: 358158 - DNA, 30 bp, Artificial Sequence
  Synthetic oligonucleotide
aggttatggtgggaacgttcgagggttaag

SEQ ID NO: 358159 - DNA, 30 bp, Artificial Sequence
  Synthetic oligonucleotide
ggttgactcacgtaacgtgaaactgttaag

SEQ ID NO: 358160 - DNA, 30 bp, Artificial Sequence
  Synthetic oligonucleotide
tgagagtgcgcatgtcacgtagcatttaag

SEQ ID NO: 358161 - DNA, 30 bp, Artificial Sequence
  Synthetic oligonucleotide
ggattttgagtgaactcggaccgatttaag

SEQ ID NO: 358162 - DNA, 30 bp, Artificial Sequence
  Synthetic oligonucleotide
aaatctggagtccagagctatcgatttaag

SEQ ID NO: 358163 - DNA, 30 bp, Artificial Sequence
  Synthetic oligonucleotide
tctatacccggaagtagcactgtatttaag

SEQ ID NO: 358164 - DNA, 30 bp, Artificial Sequence
  Synthetic oligonucleotide
acgccaggctgggcctaacgtagctttaag

SEQ ID NO: 358165 - DNA, 30 bp, Artificial Sequence
  Synthetic oligonucleotide
tgctgcgaactcttagatacacagtttaag

SEQ ID NO: 358166 - DNA, 30 bp, Artificial Sequence
  Synthetic oligonucleotide
gtctgtaccttccttgaaacaaggtttaag

SEQ ID NO: 358167 - DNA, 30 bp, Artificial Sequence
  Synthetic oligonucleotide
aaccacggtgtatttcgtaatgattttaag

SEQ ID NO: 358168 - DNA, 30 bp, Artificial Sequence
  Synthetic oligonucleotide
ctcggcgtggtccccaggaaaagttttaag

SEQ ID NO: 358169 - DNA, 30 bp, Artificial Sequence
  Synthetic oligonucleotide
tatgcatccctaggacgtagtgtcaaacag

SEQ ID NO: 358170 - DNA, 30 bp, Artificial Sequence
  Synthetic oligonucleotide
taacagtgtaattcacgatgttataaacag

SEQ ID NO: 358171 - DNA, 30 bp, Artificial Sequence
  Synthetic oligonucleotide
ggtgacttccgcagcaggattcctaaacag

SEQ ID NO: 358172 - DNA, 30 bp, Artificial Sequence
  Synthetic oligonucleotide
tttccgctttcatagtatccgtatcaacag

SEQ ID NO: 358173 - DNA, 30 bp, Artificial Sequence
  Synthetic oligonucleotide
aacctctctagtccatggtgcggagaacag

SEQ ID NO: 358174 - DNA, 30 bp, Artificial Sequence
  Synthetic oligonucleotide
agtagtttcgaggatatcttgtgagaacag

SEQ ID NO: 358175 - DNA, 30 bp, Artificial Sequence
  Synthetic oligonucleotide
atcatcgggggcttcataaattaggaacag

SEQ ID NO: 358176 - DNA, 30 bp, Artificial Sequence
  Synthetic oligonucleotide
attttatataggtcgggagtacctgaacag

SEQ ID NO: 358177 - DNA, 30 bp, Artificial Sequence
  Synthetic oligonucleotide
tgtgctacatcgtcgactaggtcctaacag

SEQ ID NO: 358178 - DNA, 30 bp, Artificial Sequence
  Synthetic oligonucleotide
aacaattcagcacaatacattacgtaacag

SEQ ID NO: 358179 - DNA, 30 bp, Artificial Sequence
  Synthetic oligonucleotide
gcatgcaaaaaaggggtgtaatcttaacag

SEQ ID NO: 358180 - DNA, 30 bp, Artificial Sequence
  Synthetic oligonucleotide
atcgttgcgtattcgtcactgcaaacacag

SEQ ID NO: 358181 - DNA, 30 bp, Artificial Sequence
  Synthetic oligonucleotide
caaaaacgataccgtgtacctataacacag

SEQ ID NO: 358182 - DNA, 30 bp, Artificial Sequence
  Synthetic oligonucleotide
cagacatctaccggtgtcttagcgacacag

SEQ ID NO: 358183 - DNA, 30 bp, Artificial Sequence
  Synthetic oligonucleotide
cactgtccccggttccttttcgcgacacag

SEQ ID NO: 358184 - DNA, 30 bp, Artificial Sequence
  Synthetic oligonucleotide
caagattcgaaccacggcgctatgacacag

SEQ ID NO: 358185 - DNA, 30 bp, Artificial Sequence
  Synthetic oligonucleotide
aaaggggattcacacccgtctattacacag

SEQ ID NO: 358186 - DNA, 30 bp, Artificial Sequence
  Synthetic oligonucleotide
cgataggtgacttgggctagacgcccacag

SEQ ID NO: 358187 - DNA, 30 bp, Artificial Sequence
  Synthetic oligonucleotide
cccccggggtcactgtcctgatgcccacag

SEQ ID NO: 358188 - DNA, 30 bp, Artificial Sequence
  Synthetic oligonucleotide
gacttttatccctgaaacagccagccacag

SEQ ID NO: 358189 - DNA, 30 bp, Artificial Sequence
  Synthetic oligonucleotide
gtccgcaaactgtacactaatatagcacag

SEQ ID NO: 358190 - DNA, 30 bp, Artificial Sequence
  Synthetic oligonucleotide
ggctaactcattgggtgctgtaacgcacag

SEQ ID NO: 358191 - DNA, 30 bp, Artificial Sequence
  Synthetic oligonucleotide
ccgggtaagctacgggacgggatcgcacag

SEQ ID NO: 358192 - DNA, 30 bp, Artificial Sequence
  Synthetic oligonucleotide
ttctggaacgtccggctcctggtcgcacag

SEQ ID NO: 358193 - DNA, 30 bp, Artificial Sequence
  Synthetic oligonucleotide
gcagcttattaagcttcattccttgcacag

SEQ ID NO: 358194 - DNA, 30 bp, Artificial Sequence
  Synthetic oligonucleotide
tcgggcttccgccctggtagcacttcacag

SEQ ID NO: 358195 - DNA, 30 bp, Artificial Sequence
  Synthetic oligonucleotide
cgtgcagcgggcgttcaaccacgttcacag

SEQ ID NO: 358196 - DNA, 30 bp, Artificial Sequence
  Synthetic oligonucleotide
gtatcacattgtgtttactccgtaagacag

SEQ ID NO: 358197 - DNA, 30 bp, Artificial Sequence
  Synthetic oligonucleotide
ctaaatggaccgaccatgtgcatcagacag

SEQ ID NO: 358198 - DNA, 30 bp, Artificial Sequence
  Synthetic oligonucleotide
gtgtcctattgctcctaggatccccgacag

SEQ ID NO: 358199 - DNA, 30 bp, Artificial Sequence
  Synthetic oligonucleotide
aaacaagtctatacgaactataggcgacag

SEQ ID NO: 358200 - DNA, 30 bp, Artificial Sequence
  Synthetic oligonucleotide
taggtccgggataatcggaaatacggacag

SEQ ID NO: 358201 - DNA, 30 bp, Artificial Sequence
  Synthetic oligonucleotide
ggcctcgcaaggaggtaagggtgcggacag

SEQ ID NO: 358202 - DNA, 30 bp, Artificial Sequence
  Synthetic oligonucleotide
attcatttgcaagaatatctgtgcggacag

SEQ ID NO: 358203 - DNA, 30 bp, Artificial Sequence
  Synthetic oligonucleotide
gccctggtctaaggccaacaatagggacag

SEQ ID NO: 358204 - DNA, 30 bp, Artificial Sequence
  Synthetic oligonucleotide
tcttaacccgaatctcagcgaaatggacag

SEQ ID NO: 358205 - DNA, 30 bp, Artificial Sequence
  Synthetic oligonucleotide
aaatcccatgcacaagatatgcctggacag

SEQ ID NO: 358206 - DNA, 30 bp, Artificial Sequence
  Synthetic oligonucleotide
ttactcggttccgggctcaggaaatgacag

SEQ ID NO: 358207 - DNA, 30 bp, Artificial Sequence
  Synthetic oligonucleotide
agagacggggatgggattacaggatgacag

SEQ ID NO: 358208 - DNA, 30 bp, Artificial Sequence
  Synthetic oligonucleotide
ctcagtaattccccacttgttttatgacag

SEQ ID NO: 358209 - DNA, 30 bp, Artificial Sequence
  Synthetic oligonucleotide
gcttctcgcttactcacctccgattgacag

SEQ ID NO: 358210 - DNA, 30 bp, Artificial Sequence
  Synthetic oligonucleotide
attgaatagctgttaagaccagcaatacag

SEQ ID NO: 358211 - DNA, 30 bp, Artificial Sequence
  Synthetic oligonucleotide
gtaatccgaatttacgacttcagaatacag

SEQ ID NO: 358212 - DNA, 30 bp, Artificial Sequence
  Synthetic oligonucleotide
tttgtgtcatagacgagggcgcacatacag

SEQ ID NO: 358213 - DNA, 30 bp, Artificial Sequence
  Synthetic oligonucleotide
tcaattgaaattgtcagccgcgccatacag

SEQ ID NO: 358214 - DNA, 30 bp, Artificial Sequence
  Synthetic oligonucleotide
ggcgggatgatgcactgtgactgcatacag

SEQ ID NO: 358215 - DNA, 30 bp, Artificial Sequence
  Synthetic oligonucleotide
ggaagctggccctagtccggacggatacag

SEQ ID NO: 358216 - DNA, 30 bp, Artificial Sequence
  Synthetic oligonucleotide
attccaaacaataatatcttccatatacag

SEQ ID NO: 358217 - DNA, 30 bp, Artificial Sequence
  Synthetic oligonucleotide
tccggctctatctaccctgaaagtatacag

SEQ ID NO: 358218 - DNA, 30 bp, Artificial Sequence
  Synthetic oligonucleotide
taaactaaacttgtatcatccagtatacag

SEQ ID NO: 358219 - DNA, 30 bp, Artificial Sequence
  Synthetic oligonucleotide
ctgtggtgagagcagaggagccttatacag

SEQ ID NO: 358220 - DNA, 30 bp, Artificial Sequence
  Synthetic oligonucleotide
tgggttcggccgctctatggcgggctacag

SEQ ID NO: 358221 - DNA, 30 bp, Artificial Sequence
  Synthetic oligonucleotide
gcactaacctgtcatgaattgtatctacag

SEQ ID NO: 358222 - DNA, 30 bp, Artificial Sequence
  Synthetic oligonucleotide
catagatgctgttgccatcgagtggtacag

SEQ ID NO: 358223 - DNA, 30 bp, Artificial Sequence
  Synthetic oligonucleotide
agcgagcccaagaaccagttgttggtacag

SEQ ID NO: 358224 - DNA, 30 bp, Artificial Sequence
  Synthetic oligonucleotide
tacccgtcttgtctagcgacgggtgtacag

SEQ ID NO: 358225 - DNA, 30 bp, Artificial Sequence
  Synthetic oligonucleotide
ccactctagcgacgggttccaattgtacag

SEQ ID NO: 358226 - DNA, 30 bp, Artificial Sequence
  Synthetic oligonucleotide
cactgcccctatcttgctaaagcattacag

SEQ ID NO: 358227 - DNA, 30 bp, Artificial Sequence
  Synthetic oligonucleotide
tcgtcatttgatgaacatagcagcttacag

SEQ ID NO: 358228 - DNA, 30 bp, Artificial Sequence
  Synthetic oligonucleotide
aactcgaggtacaattgagcgtgcttacag

SEQ ID NO: 358229 - DNA, 30 bp, Artificial Sequence
  Synthetic oligonucleotide
aggcaaaggtatgacctaagagtcttacag

SEQ ID NO: 358230 - DNA, 30 bp, Artificial Sequence
  Synthetic oligonucleotide
gcagcgattccgttgacggataagttacag

SEQ ID NO: 358231 - DNA, 30 bp, Artificial Sequence
  Synthetic oligonucleotide
aaccggattagaccaatccagttaaaccag

SEQ ID NO: 358232 - DNA, 30 bp, Artificial Sequence
  Synthetic oligonucleotide
agcggttggcttttgaagcctaacaaccag

SEQ ID NO: 358233 - DNA, 30 bp, Artificial Sequence
  Synthetic oligonucleotide
actacgcagatcagtggattaggcaaccag

SEQ ID NO: 358234 - DNA, 30 bp, Artificial Sequence
  Synthetic oligonucleotide
gtaatgccgcgctgtattacggataaccag

SEQ ID NO: 358235 - DNA, 30 bp, Artificial Sequence
  Synthetic oligonucleotide
cagcattttactatgattcaccgacaccag

SEQ ID NO: 358236 - DNA, 30 bp, Artificial Sequence
  Synthetic oligonucleotide
tctgaggtttcatgccgtgtagtacaccag

SEQ ID NO: 358237 - DNA, 30 bp, Artificial Sequence
  Synthetic oligonucleotide
ttctccgtgtccattggatacatccaccag

SEQ ID NO: 358238 - DNA, 30 bp, Artificial Sequence
  Synthetic oligonucleotide
aactgtggtcaccttgatgcggtccaccag

SEQ ID NO: 358239 - DNA, 30 bp, Artificial Sequence
  Synthetic oligonucleotide
attcaatttgacttgaggtctcggcaccag

SEQ ID NO: 358240 - DNA, 30 bp, Artificial Sequence
  Synthetic oligonucleotide
tctatctggatgctattggggggtcaccag

SEQ ID NO: 358241 - DNA, 30 bp, Artificial Sequence
  Synthetic oligonucleotide
tttctgaccgcttataggtcactcgaccag

SEQ ID NO: 358242 - DNA, 30 bp, Artificial Sequence
  Synthetic oligonucleotide
gaccttggtaatgcgatacagcaggaccag

SEQ ID NO: 358243 - DNA, 30 bp, Artificial Sequence
  Synthetic oligonucleotide
tcttattgaagcgccgtagctacggaccag

SEQ ID NO: 358244 - DNA, 30 bp, Artificial Sequence
  Synthetic oligonucleotide
ttaagaactaaacgtcaggcagatgaccag

SEQ ID NO: 358245 - DNA, 30 bp, Artificial Sequence
  Synthetic oligonucleotide
gcactcagggtcttacccccggctgaccag

SEQ ID NO: 358246 - DNA, 30 bp, Artificial Sequence
  Synthetic oligonucleotide
gggggtctcccgacgccctccccataccag

SEQ ID NO: 358247 - DNA, 30 bp, Artificial Sequence
  Synthetic oligonucleotide
gagctccaccccatcattggggcataccag

SEQ ID NO: 358248 - DNA, 30 bp, Artificial Sequence
  Synthetic oligonucleotide
gggtcagtggaagatatagtgcgataccag

SEQ ID NO: 358249 - DNA, 30 bp, Artificial Sequence
  Synthetic oligonucleotide
ggactacatgtgaagactgcacgctaccag

SEQ ID NO: 358250 - DNA, 30 bp, Artificial Sequence
  Synthetic oligonucleotide
cttgacgataaattcattacggagtaccag

SEQ ID NO: 358251 - DNA, 30 bp, Artificial Sequence
  Synthetic oligonucleotide
tgtgtagcatgggacggggcctagtaccag

SEQ ID NO: 358252 - DNA, 30 bp, Artificial Sequence
  Synthetic oligonucleotide
gaagcaccttgacatggatcagggtaccag

SEQ ID NO: 358253 - DNA, 30 bp, Artificial Sequence
  Synthetic oligonucleotide
cttattcagccaatcattcatttgtaccag

SEQ ID NO: 358254 - DNA, 30 bp, Artificial Sequence
  Synthetic oligonucleotide
cgaatagatgaacactttacgggttaccag

SEQ ID NO: 358255 - DNA, 30 bp, Artificial Sequence
  Synthetic oligonucleotide
tgttataccaagcgtttcacgccaacccag

SEQ ID NO: 358256 - DNA, 30 bp, Artificial Sequence
  Synthetic oligonucleotide
aggcggctttgcatattacgcgacacccag

SEQ ID NO: 358257 - DNA, 30 bp, Artificial Sequence
  Synthetic oligonucleotide
cccgttaccaagtgctgcgcatacacccag

SEQ ID NO: 358258 - DNA, 30 bp, Artificial Sequence
  Synthetic oligonucleotide
catgaggctatcttgcagtcgcccacccag

SEQ ID NO: 358259 - DNA, 30 bp, Artificial Sequence
  Synthetic oligonucleotide
ttgttacagtcacggcgctaatcgacccag

SEQ ID NO: 358260 - DNA, 30 bp, Artificial Sequence
  Synthetic oligonucleotide
gctgggcatgcgaaaaatgcattaccccag

SEQ ID NO: 358261 - DNA, 30 bp, Artificial Sequence
  Synthetic oligonucleotide
gaatctcaaggaaggattgtacacccccag

SEQ ID NO: 358262 - DNA, 30 bp, Artificial Sequence
  Synthetic oligonucleotide
tagatattatcccggcattttgagccccag

SEQ ID NO: 358263 - DNA, 30 bp, Artificial Sequence
  Synthetic oligonucleotide
tgccctgcgtggagaccagcaattccccag

SEQ ID NO: 358264 - DNA, 30 bp, Artificial Sequence
  Synthetic oligonucleotide
aaagagatcgtctcgcgatgtaacgcccag

SEQ ID NO: 358265 - DNA, 30 bp, Artificial Sequence
  Synthetic oligonucleotide
tgggtcgcttcgtcgatttgccacgcccag

SEQ ID NO: 358266 - DNA, 30 bp, Artificial Sequence
  Synthetic oligonucleotide
gcacctctaaaaaaggtaccatacgcccag

SEQ ID NO: 358267 - DNA, 30 bp, Artificial Sequence
  Synthetic oligonucleotide
ctatagatcagggctctcgttcgggcccag

SEQ ID NO: 358268 - DNA, 30 bp, Artificial Sequence
  Synthetic oligonucleotide
tcattttagtatgggacagtctcatcccag

SEQ ID NO: 358269 - DNA, 30 bp, Artificial Sequence
  Synthetic oligonucleotide
gtccctcagcatatgccaacgtgatcccag

SEQ ID NO: 358270 - DNA, 30 bp, Artificial Sequence
  Synthetic oligonucleotide
gcggaccaaggacacggactcagctcccag

SEQ ID NO: 358271 - DNA, 30 bp, Artificial Sequence
  Synthetic oligonucleotide
gttcctatagattattgttatctgtcccag

SEQ ID NO: 358272 - DNA, 30 bp, Artificial Sequence
  Synthetic oligonucleotide
gtcgggacacagccatctggatgttcccag

SEQ ID NO: 358273 - DNA, 30 bp, Artificial Sequence
  Synthetic oligonucleotide
ggttggtgggcgagacgccctctttcccag

SEQ ID NO: 358274 - DNA, 30 bp, Artificial Sequence
  Synthetic oligonucleotide
gggtgctgagaatatggctcgaaaagccag

SEQ ID NO: 358275 - DNA, 30 bp, Artificial Sequence
  Synthetic oligonucleotide
tgcctgagagtcccaaatccggcaagccag

SEQ ID NO: 358276 - DNA, 30 bp, Artificial Sequence
  Synthetic oligonucleotide
accaagccccggataccagattacagccag

SEQ ID NO: 358277 - DNA, 30 bp, Artificial Sequence
  Synthetic oligonucleotide
aacacccaggttgttagttcttacagccag

SEQ ID NO: 358278 - DNA, 30 bp, Artificial Sequence
  Synthetic oligonucleotide
ttggtcccacagcgtgtcccatccagccag

SEQ ID NO: 358279 - DNA, 30 bp, Artificial Sequence
  Synthetic oligonucleotide
gggttgtcacttcagaaattatgcagccag

SEQ ID NO: 358280 - DNA, 30 bp, Artificial Sequence
  Synthetic oligonucleotide
atttcctaccagtatggtctgctcagccag

SEQ ID NO: 358281 - DNA, 30 bp, Artificial Sequence
  Synthetic oligonucleotide
ttcaggtgaaccccttgtagcaagagccag

SEQ ID NO: 358282 - DNA, 30 bp, Artificial Sequence
  Synthetic oligonucleotide
gttctggcgttctgtgaaaacgatagccag

SEQ ID NO: 358283 - DNA, 30 bp, Artificial Sequence
  Synthetic oligonucleotide
cctgaacccaacttgatgagaacacgccag

SEQ ID NO: 358284 - DNA, 30 bp, Artificial Sequence
  Synthetic oligonucleotide
tccggctagctccctgcttggacacgccag

SEQ ID NO: 358285 - DNA, 30 bp, Artificial Sequence
  Synthetic oligonucleotide
agaagtttatgttgcctaattaaccgccag

SEQ ID NO: 358286 - DNA, 30 bp, Artificial Sequence
  Synthetic oligonucleotide
gtacttccgtctaacgataatgcccgccag

SEQ ID NO: 358287 - DNA, 30 bp, Artificial Sequence
  Synthetic oligonucleotide
taggccccgggttctctgaaaatgcgccag

SEQ ID NO: 358288 - DNA, 30 bp, Artificial Sequence
  Synthetic oligonucleotide
attaacataagttgcccactgtctcgccag

SEQ ID NO: 358289 - DNA, 30 bp, Artificial Sequence
  Synthetic oligonucleotide
gccgtaaaactgttatactcaagtcgccag

SEQ ID NO: 358290 - DNA, 30 bp, Artificial Sequence
  Synthetic oligonucleotide
agcagcatagatgtgtggctcccaggccag

SEQ ID NO: 358291 - DNA, 30 bp, Artificial Sequence
  Synthetic oligonucleotide
cggggcttatccgttggaggaaagggccag

SEQ ID NO: 358292 - DNA, 30 bp, Artificial Sequence
  Synthetic oligonucleotide
gacttccgttttgcaactaggtagggccag

SEQ ID NO: 358293 - DNA, 30 bp, Artificial Sequence
  Synthetic oligonucleotide
taggaatgaactacagggcgctttggccag

SEQ ID NO: 358294 - DNA, 30 bp, Artificial Sequence
  Synthetic oligonucleotide
attggactttagggttagatacaatgccag

SEQ ID NO: 358295 - DNA, 30 bp, Artificial Sequence
  Synthetic oligonucleotide
aaatcggataatttatgcggaaaaatccag

SEQ ID NO: 358296 - DNA, 30 bp, Artificial Sequence
  Synthetic oligonucleotide
gcgcttgcttgggtcttaacccaaatccag

SEQ ID NO: 358297 - DNA, 30 bp, Artificial Sequence
  Synthetic oligonucleotide
tattgtagtaacgatgctcgttcaatccag

SEQ ID NO: 358298 - DNA, 30 bp, Artificial Sequence
  Synthetic oligonucleotide
ggaggtacaaattgtacagtgctaatccag

SEQ ID NO: 358299 - DNA, 30 bp, Artificial Sequence
  Synthetic oligonucleotide
ttgtctaataagtagttcgttaccatccag

SEQ ID NO: 358300 - DNA, 30 bp, Artificial Sequence
  Synthetic oligonucleotide
tcccctaaagcaacggttcgccccatccag

SEQ ID NO: 358301 - DNA, 30 bp, Artificial Sequence
  Synthetic oligonucleotide
tgtacacgttcggaagcatgtaagatccag

SEQ ID NO: 358302 - DNA, 30 bp, Artificial Sequence
  Synthetic oligonucleotide
cctcacggataggccatttagtggatccag

SEQ ID NO: 358303 - DNA, 30 bp, Artificial Sequence
  Synthetic oligonucleotide
ggagtgattagaattcttgtgctcctccag

SEQ ID NO: 358304 - DNA, 30 bp, Artificial Sequence
  Synthetic oligonucleotide
aataacatttacactaccttgttcctccag

SEQ ID NO: 358305 - DNA, 30 bp, Artificial Sequence
  Synthetic oligonucleotide
aaacatcaatctctttctcgacagctccag

SEQ ID NO: 358306 - DNA, 30 bp, Artificial Sequence
  Synthetic oligonucleotide
ggattgctgtgacgcgaaccgtagctccag

SEQ ID NO: 358307 - DNA, 30 bp, Artificial Sequence
  Synthetic oligonucleotide
catagattatttagcagactgtcgctccag

SEQ ID NO: 358308 - DNA, 30 bp, Artificial Sequence
  Synthetic oligonucleotide
ggcgggcacctccaggtctaaaggctccag

SEQ ID NO: 358309 - DNA, 30 bp, Artificial Sequence
  Synthetic oligonucleotide
tatacaaagcgtttaggagaaatgctccag

SEQ ID NO: 358310 - DNA, 30 bp, Artificial Sequence
  Synthetic oligonucleotide
catgtcgaggcacgcatccgtgctctccag

SEQ ID NO: 358311 - DNA, 30 bp, Artificial Sequence
  Synthetic oligonucleotide
ttagtaatcatggcttcaaatgaagtccag

SEQ ID NO: 358312 - DNA, 30 bp, Artificial Sequence
  Synthetic oligonucleotide
gacgatagatatgggtcttagggagtccag

SEQ ID NO: 358313 - DNA, 30 bp, Artificial Sequence
  Synthetic oligonucleotide
aaaaaaaagcatttaatcggaacggtccag

SEQ ID NO: 358314 - DNA, 30 bp, Artificial Sequence
  Synthetic oligonucleotide
ataagctgagtgtactatctctttgtccag

SEQ ID NO: 358315 - DNA, 30 bp, Artificial Sequence
  Synthetic oligonucleotide
caaataatagcagtccccttcgtcttccag

SEQ ID NO: 358316 - DNA, 30 bp, Artificial Sequence
  Synthetic oligonucleotide
tcgatctttcaaaaaatgtgggagttccag

SEQ ID NO: 358317 - DNA, 30 bp, Artificial Sequence
  Synthetic oligonucleotide
gggtacggagctgccgcccatctgttccag

SEQ ID NO: 358318 - DNA, 30 bp, Artificial Sequence
  Synthetic oligonucleotide
caaattctaaggtgccgtgctaatttccag

SEQ ID NO: 358319 - DNA, 30 bp, Artificial Sequence
  Synthetic oligonucleotide
cccgctacagcgataattacctctttccag

SEQ ID NO: 358320 - DNA, 26 bp, Artificial Sequence
  Synthetic oligonucleotide
tggaaagccttgggcgtctgaagcag

SEQ ID NO: 358321 - DNA, 30 bp, Artificial Sequence
  Synthetic oligonucleotide
tgggcaccgtgtttagtagtagataagcag

SEQ ID NO: 358322 - DNA, 30 bp, Artificial Sequence
  Synthetic oligonucleotide
aatccattgcggattgtcttcggtaagcag

SEQ ID NO: 358323 - DNA, 30 bp, Artificial Sequence
  Synthetic oligonucleotide
gaagagggggcccttaagaacccgcagcag

SEQ ID NO: 358324 - DNA, 30 bp, Artificial Sequence
  Synthetic oligonucleotide
atgggtaataccatcaggcgacggcagcag

SEQ ID NO: 358325 - DNA, 30 bp, Artificial Sequence
  Synthetic oligonucleotide
tatagggagttatcggcctctgggcagcag

SEQ ID NO: 358326 - DNA, 30 bp, Artificial Sequence
  Synthetic oligonucleotide
tcatcccagacacagaagtgcctgcagcag

SEQ ID NO: 358327 - DNA, 30 bp, Artificial Sequence
  Synthetic oligonucleotide
cggttactctggcgtggaccacatcagcag

SEQ ID NO: 358328 - DNA, 30 bp, Artificial Sequence
  Synthetic oligonucleotide
ataacgcacctccccagaaggtttcagcag

SEQ ID NO: 358329 - DNA, 30 bp, Artificial Sequence
  Synthetic oligonucleotide
gaaataaagttaatatctttaacagagcag

SEQ ID NO: 358330 - DNA, 30 bp, Artificial Sequence
  Synthetic oligonucleotide
attgcgtcagccctggtaacacgcgagcag

SEQ ID NO: 358331 - DNA, 30 bp, Artificial Sequence
  Synthetic oligonucleotide
gtgtaattgcacagcaaagttatcgagcag

SEQ ID NO: 358332 - DNA, 30 bp, Artificial Sequence
  Synthetic oligonucleotide
gggtaacttaattaaaccggactcgagcag

SEQ ID NO: 358333 - DNA, 30 bp, Artificial Sequence
  Synthetic oligonucleotide
tctcggataattatattcagagaggagcag

SEQ ID NO: 358334 - DNA, 30 bp, Artificial Sequence
  Synthetic oligonucleotide
gtgaattgttccctacggagtggtgagcag

SEQ ID NO: 358335 - DNA, 30 bp, Artificial Sequence
  Synthetic oligonucleotide
gacgtggctgttggtcttgcgagaacgcag

SEQ ID NO: 358336 - DNA, 30 bp, Artificial Sequence
  Synthetic oligonucleotide
aataaccgcaagtgatcgctgcgcacgcag

SEQ ID NO: 358337 - DNA, 30 bp, Artificial Sequence
  Synthetic oligonucleotide
attcagggcatatggcctaagcgtacgcag

SEQ ID NO: 358338 - DNA, 30 bp, Artificial Sequence
  Synthetic oligonucleotide
gccaaatcaaaggccgtttgcggtacgcag

SEQ ID NO: 358339 - DNA, 30 bp, Artificial Sequence
  Synthetic oligonucleotide
gcgtaattttgctatcccaacattacgcag

SEQ ID NO: 358340 - DNA, 30 bp, Artificial Sequence
  Synthetic oligonucleotide
aatccatcttcagacattcttcaaccgcag

SEQ ID NO: 358341 - DNA, 30 bp, Artificial Sequence
  Synthetic oligonucleotide
gggggtctcaccggacgtaggagaccgcag

SEQ ID NO: 358342 - DNA, 30 bp, Artificial Sequence
  Synthetic oligonucleotide
ttcaccaatatgcacctacttcacccgcag

SEQ ID NO: 358343 - DNA, 31 bp, Artificial Sequence
  Synthetic oligonucleotide
atataacgtcatcaatacactgtagccgcag

SEQ ID NO: 358344 - DNA, 30 bp, Artificial Sequence
  Synthetic oligonucleotide
gtctagccacattgctgcaaggtgccgcag

SEQ ID NO: 358345 - DNA, 30 bp, Artificial Sequence
  Synthetic oligonucleotide
gtccgagataatccggctgatattccgcag

SEQ ID NO: 358346 - DNA, 30 bp, Artificial Sequence
  Synthetic oligonucleotide
ctcggacatcatttcagtcggtttccgcag

SEQ ID NO: 358347 - DNA, 30 bp, Artificial Sequence
  Synthetic oligonucleotide
actagctttaatagcaactctgaagcgcag

SEQ ID NO: 358348 - DNA, 30 bp, Artificial Sequence
  Synthetic oligonucleotide
agaatctgagctactggtcgttacgcgcag

SEQ ID NO: 358349 - DNA, 30 bp, Artificial Sequence
  Synthetic oligonucleotide
gaaacataggcctccgcaccgggcgcgcag

SEQ ID NO: 358350 - DNA, 30 bp, Artificial Sequence
  Synthetic oligonucleotide
tggattgattcctggctagcgactgcgcag

SEQ ID NO: 358351 - DNA, 30 bp, Artificial Sequence
  Synthetic oligonucleotide
ggctaaatgtatgattgtttagcatcgcag

SEQ ID NO: 358352 - DNA, 31 bp, Artificial Sequence
  Synthetic oligonucleotide
ctaacccgagaaggttaattttgtatcgcag

SEQ ID NO: 358353 - DNA, 30 bp, Artificial Sequence
  Synthetic oligonucleotide
tgcttcgagattctagtataattgtcgcag

SEQ ID NO: 358354 - DNA, 30 bp, Artificial Sequence
  Synthetic oligonucleotide
aagaacctgccggggttcggtgacaggcag

SEQ ID NO: 358355 - DNA, 30 bp, Artificial Sequence
  Synthetic oligonucleotide
tacaggtaatgcgggaggtgtttcaggcag

SEQ ID NO: 358356 - DNA, 30 bp, Artificial Sequence
  Synthetic oligonucleotide
gttacctaccgccggcgtggggggaggcag

SEQ ID NO: 358357 - DNA, 30 bp, Artificial Sequence
  Synthetic oligonucleotide
gggtcccctcgtgccaaaagattacggcag

SEQ ID NO: 358358 - DNA, 30 bp, Artificial Sequence
  Synthetic oligonucleotide
gtcgtacgtttagcctaccctggccggcag

SEQ ID NO: 358359 - DNA, 30 bp, Artificial Sequence
  Synthetic oligonucleotide
gcctcgcgcaatgctagaggacacgggcag

SEQ ID NO: 358360 - DNA, 30 bp, Artificial Sequence
  Synthetic oligonucleotide
gcttgcccgggcccctatgatagcgggcag

SEQ ID NO: 358361 - DNA, 30 bp, Artificial Sequence
  Synthetic oligonucleotide
ggcacttgacggggaacatggtaggggcag

SEQ ID NO: 358362 - DNA, 30 bp, Artificial Sequence
  Synthetic oligonucleotide
ggcccttcttaaaggctctgtaatgggcag

SEQ ID NO: 358363 - DNA, 30 bp, Artificial Sequence
  Synthetic oligonucleotide
tcccaatagggtcggtgcttgcttgggcag

SEQ ID NO: 358364 - DNA, 30 bp, Artificial Sequence
  Synthetic oligonucleotide
catttggaattgcaaattactcaatggcag

SEQ ID NO: 358365 - DNA, 30 bp, Artificial Sequence
  Synthetic oligonucleotide
tgttatatccttatcgcttaatcatggcag

SEQ ID NO: 358366 - DNA, 30 bp, Artificial Sequence
  Synthetic oligonucleotide
aatcccgaacacggactcatcatctggcag

SEQ ID NO: 358367 - DNA, 30 bp, Artificial Sequence
  Synthetic oligonucleotide
atccacgctaactgggatcccctctggcag

SEQ ID NO: 358368 - DNA, 30 bp, Artificial Sequence
  Synthetic oligonucleotide
ggcatcactattgtgatgtcaaggtggcag

SEQ ID NO: 358369 - DNA, 30 bp, Artificial Sequence
  Synthetic oligonucleotide
caccgtgtagccttgccagtatggtggcag

SEQ ID NO: 358370 - DNA, 30 bp, Artificial Sequence
  Synthetic oligonucleotide
gagccaaactatgcgctactttggtggcag

SEQ ID NO: 358371 - DNA, 30 bp, Artificial Sequence
  Synthetic oligonucleotide
cttatgaggtgtgaacagcttaagatgcag

SEQ ID NO: 358372 - DNA, 30 bp, Artificial Sequence
  Synthetic oligonucleotide
ttccacgcaatatagattatgcagatgcag

SEQ ID NO: 358373 - DNA, 30 bp, Artificial Sequence
  Synthetic oligonucleotide
cgttcaggctggacgcactaaaatatgcag

SEQ ID NO: 358374 - DNA, 30 bp, Artificial Sequence
  Synthetic oligonucleotide
cactcgccaatggattagagaaatatgcag

SEQ ID NO: 358375 - DNA, 30 bp, Artificial Sequence
  Synthetic oligonucleotide
aatgtttgccaggaagtttcttctatgcag

SEQ ID NO: 358376 - DNA, 30 bp, Artificial Sequence
  Synthetic oligonucleotide
caaccggtgggagcctcggtaattatgcag

SEQ ID NO: 358377 - DNA, 30 bp, Artificial Sequence
  Synthetic oligonucleotide
gtacgggcaagggcacccttcctcctgcag

SEQ ID NO: 358378 - DNA, 30 bp, Artificial Sequence
  Synthetic oligonucleotide
ctcggttaagtcatggtcgcccgagtgcag

SEQ ID NO: 358379 - DNA, 30 bp, Artificial Sequence
  Synthetic oligonucleotide
gtcgtggctccatgacggtaacgcgtgcag

SEQ ID NO: 358380 - DNA, 30 bp, Artificial Sequence
  Synthetic oligonucleotide
ctcataataatgttgctcaccgaggtgcag

SEQ ID NO: 358381 - DNA, 30 bp, Artificial Sequence
  Synthetic oligonucleotide
aatcggatggccggtatttcggaggtgcag

SEQ ID NO: 358382 - DNA, 30 bp, Artificial Sequence
  Synthetic oligonucleotide
aagaggacgttatgtcacagcacggtgcag

SEQ ID NO: 358383 - DNA, 30 bp, Artificial Sequence
  Synthetic oligonucleotide
cattgtggggcaaacggcgctaatgtgcag

SEQ ID NO: 358384 - DNA, 30 bp, Artificial Sequence
  Synthetic oligonucleotide
gcacgtatcttttcacatactattgtgcag

SEQ ID NO: 358385 - DNA, 30 bp, Artificial Sequence
  Synthetic oligonucleotide
ggttgcctaagtgcatgagcccttgtgcag

SEQ ID NO: 358386 - DNA, 30 bp, Artificial Sequence
  Synthetic oligonucleotide
agagggtgggagagtaagtggacgttgcag

SEQ ID NO: 358387 - DNA, 30 bp, Artificial Sequence
  Synthetic oligonucleotide
ttggtaggtcattagactcatgtgttgcag

SEQ ID NO: 358388 - DNA, 30 bp, Artificial Sequence
  Synthetic oligonucleotide
atcgttacgtgtttcacatgccatttgcag

SEQ ID NO: 358389 - DNA, 30 bp, Artificial Sequence
  Synthetic oligonucleotide
gattctaaaaaacgtgaatatgatttgcag

SEQ ID NO: 358390 - DNA, 31 bp, Artificial Sequence
  Synthetic oligonucleotide
ccgttgaaatttcgtaagaaattctttgcag

SEQ ID NO: 358391 - DNA, 30 bp, Artificial Sequence
  Synthetic oligonucleotide
aaagactttacctggcgggttagtttgcag

SEQ ID NO: 358392 - DNA, 30 bp, Artificial Sequence
  Synthetic oligonucleotide
gtttggtgataaagtaaaattcgaaatcag

SEQ ID NO: 358393 - DNA, 30 bp, Artificial Sequence
  Synthetic oligonucleotide
attattctcaacgacatgggtgtcaatcag

SEQ ID NO: 358394 - DNA, 30 bp, Artificial Sequence
  Synthetic oligonucleotide
atgtagacaatgctcgggtaattcaatcag

SEQ ID NO: 358395 - DNA, 30 bp, Artificial Sequence
  Synthetic oligonucleotide
gaacaaggcgcgagacagttgcgtaatcag

SEQ ID NO: 358396 - DNA, 30 bp, Artificial Sequence
  Synthetic oligonucleotide
cattcttatgcactacagatagcacatcag

SEQ ID NO: 358397 - DNA, 30 bp, Artificial Sequence
  Synthetic oligonucleotide
gagtcaatagggactatctgcgaccatcag

SEQ ID NO: 358398 - DNA, 30 bp, Artificial Sequence
  Synthetic oligonucleotide
ttaatggacactcgcctagtttcccatcag

SEQ ID NO: 358399 - DNA, 30 bp, Artificial Sequence
  Synthetic oligonucleotide
cccggtttaactaacaaggtgatgcatcag

SEQ ID NO: 358400 - DNA, 30 bp, Artificial Sequence
  Synthetic oligonucleotide
ctttacgcggcgagacttcgctaggatcag

SEQ ID NO: 358401 - DNA, 30 bp, Artificial Sequence
  Synthetic oligonucleotide
gtcatctcagttcctgctgcaacggatcag

SEQ ID NO: 358402 - DNA, 30 bp, Artificial Sequence
  Synthetic oligonucleotide
tcgccagcatcactatccaaattggatcag

SEQ ID NO: 358403 - DNA, 30 bp, Artificial Sequence
  Synthetic oligonucleotide
cactaatagaaggacgccgcatcatatcag

SEQ ID NO: 358404 - DNA, 30 bp, Artificial Sequence
  Synthetic oligonucleotide
gattccataatttaacatcgttcgtatcag

SEQ ID NO: 358405 - DNA, 30 bp, Artificial Sequence
  Synthetic oligonucleotide
aggttacttatacttttagcgacttatcag

SEQ ID NO: 358406 - DNA, 30 bp, Artificial Sequence
  Synthetic oligonucleotide
gcccggcgactagcatagtcaagttatcag

SEQ ID NO: 358407 - DNA, 30 bp, Artificial Sequence
  Synthetic oligonucleotide
tgcggatcagtatactggatcatttatcag

SEQ ID NO: 358408 - DNA, 30 bp, Artificial Sequence
  Synthetic oligonucleotide
caacggataaccataaaggtgctttatcag

SEQ ID NO: 358409 - DNA, 30 bp, Artificial Sequence
  Synthetic oligonucleotide
ccgctcggtgtcgggagctgccaaactcag

SEQ ID NO: 358410 - DNA, 30 bp, Artificial Sequence
  Synthetic oligonucleotide
gaacagtaagggtgtaattaccccactcag

SEQ ID NO: 358411 - DNA, 30 bp, Artificial Sequence
  Synthetic oligonucleotide
gaggtcaaaggcacttaaatacgcactcag

SEQ ID NO: 358412 - DNA, 30 bp, Artificial Sequence
  Synthetic oligonucleotide
ttggttgcgtcgcacgtgctattgactcag

SEQ ID NO: 358413 - DNA, 30 bp, Artificial Sequence
  Synthetic oligonucleotide
aacgctagaggtggggcactttctactcag

SEQ ID NO: 358414 - DNA, 30 bp, Artificial Sequence
  Synthetic oligonucleotide
atgcgtgtatctactaagagcacgcctcag

SEQ ID NO: 358415 - DNA, 30 bp, Artificial Sequence
  Synthetic oligonucleotide
taacgcctattaagggcgccgggtcctcag

SEQ ID NO: 358416 - DNA, 30 bp, Artificial Sequence
  Synthetic oligonucleotide
gtcttgctcgaagatttttatttcgctcag

SEQ ID NO: 358417 - DNA, 30 bp, Artificial Sequence
  Synthetic oligonucleotide
gaatgcaaatgttaaaaaatcaaggctcag

SEQ ID NO: 358418 - DNA, 30 bp, Artificial Sequence
  Synthetic oligonucleotide
gatatagtgtcggtcttcctcaaggctcag

SEQ ID NO: 358419 - DNA, 30 bp, Artificial Sequence
  Synthetic oligonucleotide
ggtctattcagttcgatgccccaggctcag

SEQ ID NO: 358420 - DNA, 30 bp, Artificial Sequence
  Synthetic oligonucleotide
ctttacttgtaagctccaatcgaggctcag

SEQ ID NO: 358421 - DNA, 30 bp, Artificial Sequence
  Synthetic oligonucleotide
gcaatgtaatagcccgttccgtgggctcag

SEQ ID NO: 358422 - DNA, 30 bp, Artificial Sequence
  Synthetic oligonucleotide
ttctagttgcggtgagaagagaatgctcag

SEQ ID NO: 358423 - DNA, 30 bp, Artificial Sequence
  Synthetic oligonucleotide
actgctgggtcaacctatacaggtgctcag

SEQ ID NO: 358424 - DNA, 30 bp, Artificial Sequence
  Synthetic oligonucleotide
gtattcaaactcgggtggttcccgtctcag

SEQ ID NO: 358425 - DNA, 30 bp, Artificial Sequence
  Synthetic oligonucleotide
gaatgaattgaggataggttgcattctcag

SEQ ID NO: 358426 - DNA, 30 bp, Artificial Sequence
  Synthetic oligonucleotide
gacggtaattttaaatctcgtctaagtcag

SEQ ID NO: 358427 - DNA, 30 bp, Artificial Sequence
  Synthetic oligonucleotide
tgtagcttagtctattcgctcaagagtcag

SEQ ID NO: 358428 - DNA, 30 bp, Artificial Sequence
  Synthetic oligonucleotide
attgacgaagctgcaatgtaactacgtcag

SEQ ID NO: 358429 - DNA, 30 bp, Artificial Sequence
  Synthetic oligonucleotide
ggatatatggagagaggcggggcccgtcag

SEQ ID NO: 358430 - DNA, 30 bp, Artificial Sequence
  Synthetic oligonucleotide
gaaatcgaccgaacatatgagttccgtcag

SEQ ID NO: 358431 - DNA, 30 bp, Artificial Sequence
  Synthetic oligonucleotide
ctctgccagtctcttttggtatcaggtcag

SEQ ID NO: 358432 - DNA, 30 bp, Artificial Sequence
  Synthetic oligonucleotide
cccctaagatgctaagctgagggaggtcag

SEQ ID NO: 358433 - DNA, 30 bp, Artificial Sequence
  Synthetic oligonucleotide
atctttgctatctcggtatgtttaggtcag

SEQ ID NO: 358434 - DNA, 30 bp, Artificial Sequence
  Synthetic oligonucleotide
tgaagcacgatgtcagctgtagtcggtcag

SEQ ID NO: 358435 - DNA, 30 bp, Artificial Sequence
  Synthetic oligonucleotide
tagtaagggttgttagcttcggagggtcag

SEQ ID NO: 358436 - DNA, 30 bp, Artificial Sequence
  Synthetic oligonucleotide
tatagatgtcctcattcgggtttgggtcag

SEQ ID NO: 358437 - DNA, 30 bp, Artificial Sequence
  Synthetic oligonucleotide
cattattaagctgaggaaaaaactggtcag

SEQ ID NO: 358438 - DNA, 30 bp, Artificial Sequence
  Synthetic oligonucleotide
ctcactcggcggtagcatagtactggtcag

SEQ ID NO: 358439 - DNA, 30 bp, Artificial Sequence
  Synthetic oligonucleotide
tgagtcctcctgtcccccgtgtttggtcag

SEQ ID NO: 358440 - DNA, 30 bp, Artificial Sequence
  Synthetic oligonucleotide
catgggccgccgatacaaatttaatgtcag

SEQ ID NO: 358441 - DNA, 30 bp, Artificial Sequence
  Synthetic oligonucleotide
gttggaggttgagcgagcgacgcatgtcag

SEQ ID NO: 358442 - DNA, 30 bp, Artificial Sequence
  Synthetic oligonucleotide
tggtctagctgcaactgtgagttctgtcag

SEQ ID NO: 358443 - DNA, 30 bp, Artificial Sequence
  Synthetic oligonucleotide
agttgacgcgttgtggtcccctcgtgtcag

SEQ ID NO: 358444 - DNA, 30 bp, Artificial Sequence
  Synthetic oligonucleotide
tcctgtattgggatagataaggggtgtcag

SEQ ID NO: 358445 - DNA, 30 bp, Artificial Sequence
  Synthetic oligonucleotide
ccatgagagggcaatcagataaattgtcag

SEQ ID NO: 358446 - DNA, 30 bp, Artificial Sequence
  Synthetic oligonucleotide
gcaacctcttaccttcagctgtattgtcag

SEQ ID NO: 358447 - DNA, 31 bp, Artificial Sequence
  Synthetic oligonucleotide
agcgcgtaatcagttgcccgcaatttgtcag

SEQ ID NO: 358448 - DNA, 30 bp, Artificial Sequence
  Synthetic oligonucleotide
gtacttttgccgcaaagttttccaattcag

SEQ ID NO: 358449 - DNA, 30 bp, Artificial Sequence
  Synthetic oligonucleotide
ttcggcagacagactttacgaagcattcag

SEQ ID NO: 358450 - DNA, 30 bp, Artificial Sequence
  Synthetic oligonucleotide
ctctatatttacactgttatattcattcag

SEQ ID NO: 358451 - DNA, 30 bp, Artificial Sequence
  Synthetic oligonucleotide
gcctgagaattcaggaggacagggattcag

SEQ ID NO: 358452 - DNA, 30 bp, Artificial Sequence
  Synthetic oligonucleotide
gaagacgtggttgcggaccggcaacttcag

SEQ ID NO: 358453 - DNA, 30 bp, Artificial Sequence
  Synthetic oligonucleotide
ttcttctcataaagtgcgctgccccttcag

SEQ ID NO: 358454 - DNA, 29 bp, Artificial Sequence
  Synthetic oligonucleotide
atcttgatggttattaaagcaatcttcag

SEQ ID NO: 358455 - DNA, 30 bp, Artificial Sequence
  Synthetic oligonucleotide
gtttcttagatgaaatacaatgctcttcag

SEQ ID NO: 358456 - DNA, 30 bp, Artificial Sequence
  Synthetic oligonucleotide
cggcgtggaatgaccggtcagtttcttcag

SEQ ID NO: 358457 - DNA, 30 bp, Artificial Sequence
  Synthetic oligonucleotide
gctgcgcctcagagaggtacctcagttcag

SEQ ID NO: 358458 - DNA, 30 bp, Artificial Sequence
  Synthetic oligonucleotide
ccgtgtggctttatatttatgtcagttcag

SEQ ID NO: 358459 - DNA, 30 bp, Artificial Sequence
  Synthetic oligonucleotide
aaccctctgtggtctagtggcggagttcag

SEQ ID NO: 358460 - DNA, 30 bp, Artificial Sequence
  Synthetic oligonucleotide
gccgcccctcaggcccctgccatcgttcag

SEQ ID NO: 358461 - DNA, 30 bp, Artificial Sequence
  Synthetic oligonucleotide
attaccatttcgacttccacgaaggttcag

SEQ ID NO: 358462 - DNA, 30 bp, Artificial Sequence
  Synthetic oligonucleotide
tctccatattgttgccaacgcctggttcag

SEQ ID NO: 358463 - DNA, 30 bp, Artificial Sequence
  Synthetic oligonucleotide
actccagaagttgctgttgtcctggttcag

SEQ ID NO: 358464 - DNA, 30 bp, Artificial Sequence
  Synthetic oligonucleotide
tataggtactgtaaaagaacggctgttcag

SEQ ID NO: 358465 - DNA, 30 bp, Artificial Sequence
  Synthetic oligonucleotide
actgccaacgcaaaggtggctgctgttcag

SEQ ID NO: 358466 - DNA, 30 bp, Artificial Sequence
  Synthetic oligonucleotide
tatcattagtggggcgattttgttgttcag

SEQ ID NO: 358467 - DNA, 30 bp, Artificial Sequence
  Synthetic oligonucleotide
aagtttttatcggttggtcaagaatttcag

SEQ ID NO: 358468 - DNA, 30 bp, Artificial Sequence
  Synthetic oligonucleotide
tggccacgaaccgcatggtattaatttcag

SEQ ID NO: 358469 - DNA, 30 bp, Artificial Sequence
  Synthetic oligonucleotide
ccacgttattatctaatgtggaactttcag

SEQ ID NO: 358470 - DNA, 30 bp, Artificial Sequence
  Synthetic oligonucleotide
attccaccgataagaggtcttatctttcag

SEQ ID NO: 358471 - DNA, 30 bp, Artificial Sequence
  Synthetic oligonucleotide
cacggctcgcgtcactgttcatagtttcag

SEQ ID NO: 358472 - DNA, 30 bp, Artificial Sequence
  Synthetic oligonucleotide
ttgcgtacaggtgtcatcataaggtttcag

SEQ ID NO: 358473 - DNA, 30 bp, Artificial Sequence
  Synthetic oligonucleotide
acctaaggagtacctcggtcggggtttcag

SEQ ID NO: 358474 - DNA, 30 bp, Artificial Sequence
  Synthetic oligonucleotide
ttattctcgacggtacaatccagttttcag

SEQ ID NO: 358475 - DNA, 30 bp, Artificial Sequence
  Synthetic oligonucleotide
tcctcgtgagaggttgatacgtgttttcag

SEQ ID NO: 358476 - DNA, 30 bp, Artificial Sequence
  Synthetic oligonucleotide
aatggaccgtaacagtggcgtagaaaagag

SEQ ID NO: 358477 - DNA, 30 bp, Artificial Sequence
  Synthetic oligonucleotide
gacgagatttacgaagggcgaaccaaagag

SEQ ID NO: 358478 - DNA, 30 bp, Artificial Sequence
  Synthetic oligonucleotide
ccaaataaggctcatggcaaaggcaaagag

SEQ ID NO: 358479 - DNA, 30 bp, Artificial Sequence
  Synthetic oligonucleotide
gtatccccttggaatccgaagtagaaagag

SEQ ID NO: 358480 - DNA, 30 bp, Artificial Sequence
  Synthetic oligonucleotide
aaatgaatggcataaagaagccggaaagag

SEQ ID NO: 358481 - DNA, 30 bp, Artificial Sequence
  Synthetic oligonucleotide
gcgaaggccaaagtggtttcaattaaagag

SEQ ID NO: 358482 - DNA, 30 bp, Artificial Sequence
  Synthetic oligonucleotide
cgagcgagtgggaatgcatgccttaaagag

SEQ ID NO: 358483 - DNA, 30 bp, Artificial Sequence
  Synthetic oligonucleotide
atgttcgttgtatctccgaaaaaacaagag

SEQ ID NO: 358484 - DNA, 30 bp, Artificial Sequence
  Synthetic oligonucleotide
taaattgatgccaaattatgactccaagag

SEQ ID NO: 358485 - DNA, 30 bp, Artificial Sequence
  Synthetic oligonucleotide
gtgctcgcagaccgtggttttatgcaagag

SEQ ID NO: 358486 - DNA, 30 bp, Artificial Sequence
  Synthetic oligonucleotide
tttcgacgatatacagggtgggaagaagag

SEQ ID NO: 358487 - DNA, 30 bp, Artificial Sequence
  Synthetic oligonucleotide
tgtatggttcatattaggcatgtagaagag

SEQ ID NO: 358488 - DNA, 30 bp, Artificial Sequence
  Synthetic oligonucleotide
tttgagacgatagtcgtcatcatcgaagag

SEQ ID NO: 358489 - DNA, 30 bp, Artificial Sequence
  Synthetic oligonucleotide
ccaattgttagtaacagttggcgtgaagag

SEQ ID NO: 358490 - DNA, 30 bp, Artificial Sequence
  Synthetic oligonucleotide
acaggtaattatgaaggtggcacataagag

SEQ ID NO: 358491 - DNA, 30 bp, Artificial Sequence
  Synthetic oligonucleotide
cagaaagggggggaccgggccagctaagag

SEQ ID NO: 358492 - DNA, 30 bp, Artificial Sequence
  Synthetic oligonucleotide
accgggggcagtccgcggttccggtaagag

SEQ ID NO: 358493 - DNA, 31 bp, Artificial Sequence
  Synthetic oligonucleotide
tacaatggttaagtaaaaatctttgtaagag

SEQ ID NO: 358494 - DNA, 30 bp, Artificial Sequence
  Synthetic oligonucleotide
gtgtacttcatccgaaactgtccttaagag

SEQ ID NO: 358495 - DNA, 30 bp, Artificial Sequence
  Synthetic oligonucleotide
gtttggtggaagtgtggcgtgaaaacagag

SEQ ID NO: 358496 - DNA, 30 bp, Artificial Sequence
  Synthetic oligonucleotide
tatttccgtatcatccagttgtcaacagag

SEQ ID NO: 358497 - DNA, 30 bp, Artificial Sequence
  Synthetic oligonucleotide
aatacaatacaaaactatggtggaacagag

SEQ ID NO: 358498 - DNA, 30 bp, Artificial Sequence
  Synthetic oligonucleotide
gaattgctataacgatcttggaacacagag

SEQ ID NO: 358499 - DNA, 30 bp, Artificial Sequence
  Synthetic oligonucleotide
taaaacctcataaatgctgtcaggacagag

SEQ ID NO: 358500 - DNA, 30 bp, Artificial Sequence
  Synthetic oligonucleotide
ttttataagagggctacgaaacggacagag

SEQ ID NO: 358501 - DNA, 30 bp, Artificial Sequence
  Synthetic oligonucleotide
ttacccctagttgtacccaaggggacagag

SEQ ID NO: 358502 - DNA, 30 bp, Artificial Sequence
  Synthetic oligonucleotide
tcttgactcaatttgaaaacggtgacagag

SEQ ID NO: 358503 - DNA, 30 bp, Artificial Sequence
  Synthetic oligonucleotide
taagtttaaaggggcatcacaaatacagag

SEQ ID NO: 358504 - DNA, 30 bp, Artificial Sequence
  Synthetic oligonucleotide
tacggactctggatcaccatacctacagag

SEQ ID NO: 358505 - DNA, 30 bp, Artificial Sequence
  Synthetic oligonucleotide
tattgggtgcacgggaggccttctacagag

SEQ ID NO: 358506 - DNA, 30 bp, Artificial Sequence
  Synthetic oligonucleotide
tagtataaacagtacaggtgatacgcagag

SEQ ID NO: 358507 - DNA, 30 bp, Artificial Sequence
  Synthetic oligonucleotide
gtacccatatgaggcgtcagctccgcagag

SEQ ID NO: 358508 - DNA, 30 bp, Artificial Sequence
  Synthetic oligonucleotide
aggggctttacccgttggatagaggcagag

SEQ ID NO: 358509 - DNA, 30 bp, Artificial Sequence
  Synthetic oligonucleotide
ctggaagttataattgacggggctgcagag

SEQ ID NO: 358510 - DNA, 30 bp, Artificial Sequence
  Synthetic oligonucleotide
atgtaggttgggtatccgcccattgcagag

SEQ ID NO: 358511 - DNA, 30 bp, Artificial Sequence
  Synthetic oligonucleotide
ttactgtttttcacccgctactttgcagag

SEQ ID NO: 358512 - DNA, 30 bp, Artificial Sequence
  Synthetic oligonucleotide
gtgcaataccacactcttagtccatcagag

SEQ ID NO: 358513 - DNA, 30 bp, Artificial Sequence
  Synthetic oligonucleotide
tttcacttaacccatgacggaatctcagag

SEQ ID NO: 358514 - DNA, 30 bp, Artificial Sequence
  Synthetic oligonucleotide
ctctctccaacccgtggaacaatgtcagag

SEQ ID NO: 358515 - DNA, 30 bp, Artificial Sequence
  Synthetic oligonucleotide
ttatgcggctgatcaatgtacccttcagag

SEQ ID NO: 358516 - DNA, 30 bp, Artificial Sequence
  Synthetic oligonucleotide
caaaacattaatataggtctaggttcagag

SEQ ID NO: 358517 - DNA, 30 bp, Artificial Sequence
  Synthetic oligonucleotide
cctttatcctctcggcgctggacaagagag

SEQ ID NO: 358518 - DNA, 30 bp, Artificial Sequence
  Synthetic oligonucleotide
cagacgcatcttcaccgtgacacgagagag

SEQ ID NO: 358519 - DNA, 30 bp, Artificial Sequence
  Synthetic oligonucleotide
tttgacgctccgccatggcgatgtagagag

SEQ ID NO: 358520 - DNA, 30 bp, Artificial Sequence
  Synthetic oligonucleotide
gtgtataattttgagggtgatgtacgagag

SEQ ID NO: 358521 - DNA, 30 bp, Artificial Sequence
  Synthetic oligonucleotide
ctttctttcgagagctccagtttccgagag

SEQ ID NO: 358522 - DNA, 30 bp, Artificial Sequence
  Synthetic oligonucleotide
ctttaccgttgaagtaagtataagcgagag

SEQ ID NO: 358523 - DNA, 30 bp, Artificial Sequence
  Synthetic oligonucleotide
ttaacctctgtaccgtcgaagccgcgagag

SEQ ID NO: 358524 - DNA, 30 bp, Artificial Sequence
  Synthetic oligonucleotide
cttaaaacggtcccccgcatacatcgagag

SEQ ID NO: 358525 - DNA, 30 bp, Artificial Sequence
  Synthetic oligonucleotide
cacaggttgttataccctagctttcgagag

SEQ ID NO: 358526 - DNA, 30 bp, Artificial Sequence
  Synthetic oligonucleotide
cgttttttgttccaggcgcgagaaggagag

SEQ ID NO: 358527 - DNA, 31 bp, Artificial Sequence
  Synthetic oligonucleotide
cctctctatgttaaagtttcaaggcggagag

SEQ ID NO: 358528 - DNA, 30 bp, Artificial Sequence
  Synthetic oligonucleotide
gattataaccgttgctgtaacgtgggagag

SEQ ID NO: 358529 - DNA, 30 bp, Artificial Sequence
  Synthetic oligonucleotide
ctggaggaaacgtgagtagtggtgggagag

SEQ ID NO: 358530 - DNA, 30 bp, Artificial Sequence
  Synthetic oligonucleotide
actcgaatggcttcggcaatctctggagag

SEQ ID NO: 358531 - DNA, 30 bp, Artificial Sequence
  Synthetic oligonucleotide
ttacattttgttaatatacgacgtggagag

SEQ ID NO: 358532 - DNA, 30 bp, Artificial Sequence
  Synthetic oligonucleotide
tgggtcaaagcccagctccgccgtggagag

SEQ ID NO: 358533 - DNA, 30 bp, Artificial Sequence
  Synthetic oligonucleotide
gatattacgcattgcttggaccttggagag

SEQ ID NO: 358534 - DNA, 30 bp, Artificial Sequence
  Synthetic oligonucleotide
gagtcgctccgcgttcagcgagttggagag

SEQ ID NO: 358535 - DNA, 30 bp, Artificial Sequence
  Synthetic oligonucleotide
aagaacctcgtactccacctgtaatgagag

SEQ ID NO: 358536 - DNA, 30 bp, Artificial Sequence
  Synthetic oligonucleotide
tcctatatacggggtttggtcgcgtgagag

SEQ ID NO: 358537 - DNA, 30 bp, Artificial Sequence
  Synthetic oligonucleotide
tattattgaagcacataagaatcgtgagag

SEQ ID NO: 358538 - DNA, 30 bp, Artificial Sequence
  Synthetic oligonucleotide
tatctgacatattacctgatccattgagag

SEQ ID NO: 358539 - DNA, 30 bp, Artificial Sequence
  Synthetic oligonucleotide
tggggtagagacacgactcttggttgagag

SEQ ID NO: 358540 - DNA, 30 bp, Artificial Sequence
  Synthetic oligonucleotide
aaaggtgtgacagggatacgaaaaatagag

SEQ ID NO: 358541 - DNA, 30 bp, Artificial Sequence
  Synthetic oligonucleotide
atttactgttcacacgtggtccaaatagag

SEQ ID NO: 358542 - DNA, 30 bp, Artificial Sequence
  Synthetic oligonucleotide
ctccaagggaaccgagagaatttaatagag

SEQ ID NO: 358543 - DNA, 30 bp, Artificial Sequence
  Synthetic oligonucleotide
tgattgtgagcctgggatcgctacatagag

SEQ ID NO: 358544 - DNA, 30 bp, Artificial Sequence
  Synthetic oligonucleotide
tcgatcataggtttatttgtcagcatagag

SEQ ID NO: 358545 - DNA, 30 bp, Artificial Sequence
  Synthetic oligonucleotide
acataggtgttcgtcatgaacaatatagag

SEQ ID NO: 358546 - DNA, 30 bp, Artificial Sequence
  Synthetic oligonucleotide
tagcatagggagctgaggtatgctatagag

SEQ ID NO: 358547 - DNA, 30 bp, Artificial Sequence
  Synthetic oligonucleotide
gcagagaataacaacggcctttttatagag

SEQ ID NO: 358548 - DNA, 30 bp, Artificial Sequence
  Synthetic oligonucleotide
ggatggatgtcaattttctggatactagag

SEQ ID NO: 358549 - DNA, 30 bp, Artificial Sequence
  Synthetic oligonucleotide
tccttgggttcatctattcttatactagag

SEQ ID NO: 358550 - DNA, 30 bp, Artificial Sequence
  Synthetic oligonucleotide
gtactgcggtggtaaatagcgctactagag

SEQ ID NO: 358551 - DNA, 30 bp, Artificial Sequence
  Synthetic oligonucleotide
aattcataagtattggtgggtctactagag

SEQ ID NO: 358552 - DNA, 30 bp, Artificial Sequence
  Synthetic oligonucleotide
tcactccaagtgcgtacgcacgacctagag

SEQ ID NO: 358553 - DNA, 30 bp, Artificial Sequence
  Synthetic oligonucleotide
aaagtttgtatagctactttgtacgtagag

SEQ ID NO: 358554 - DNA, 30 bp, Artificial Sequence
  Synthetic oligonucleotide
agtagcggcccgtgtcttgggcccgtagag

SEQ ID NO: 358555 - DNA, 30 bp, Artificial Sequence
  Synthetic oligonucleotide
cgtttggctaggtcaacgggaggcgtagag

SEQ ID NO: 358556 - DNA, 30 bp, Artificial Sequence
  Synthetic oligonucleotide
ggcttgtgaattgaaggttcgttcgtagag

SEQ ID NO: 358557 - DNA, 30 bp, Artificial Sequence
  Synthetic oligonucleotide
aaaaggtacgttattctcttagatgtagag

SEQ ID NO: 358558 - DNA, 30 bp, Artificial Sequence
  Synthetic oligonucleotide
gaatcattcaaagtgctaggatatgtagag

SEQ ID NO: 358559 - DNA, 30 bp, Artificial Sequence
  Synthetic oligonucleotide
cattccttgtgaccgtacccgtgtgtagag

SEQ ID NO: 358560 - DNA, 30 bp, Artificial Sequence
  Synthetic oligonucleotide
gcgttagctaacgtagcatttcttgtagag

SEQ ID NO: 358561 - DNA, 30 bp, Artificial Sequence
  Synthetic oligonucleotide
tggtatataaccgcatagatccgattagag

SEQ ID NO: 358562 - DNA, 30 bp, Artificial Sequence
  Synthetic oligonucleotide
tctacgcttggtcacgtgcgcggattagag

SEQ ID NO: 358563 - DNA, 30 bp, Artificial Sequence
  Synthetic oligonucleotide
aagtaaaccaccggcctcggccacttagag

SEQ ID NO: 358564 - DNA, 30 bp, Artificial Sequence
  Synthetic oligonucleotide
tgacatactaataggttatcgaatttagag

SEQ ID NO: 358565 - DNA, 30 bp, Artificial Sequence
  Synthetic oligonucleotide
cctctctacggtacagaatagtgtttagag

SEQ ID NO: 358566 - DNA, 30 bp, Artificial Sequence
  Synthetic oligonucleotide
acatctttcgactgaaatacatttttagag

SEQ ID NO: 358567 - DNA, 30 bp, Artificial Sequence
  Synthetic oligonucleotide
aagtattggcactaggggctcaagaacgag

SEQ ID NO: 358568 - DNA, 30 bp, Artificial Sequence
  Synthetic oligonucleotide
actcttgtcaaaccttacttggagaacgag

SEQ ID NO: 358569 - DNA, 30 bp, Artificial Sequence
  Synthetic oligonucleotide
agtttttagcccttatgcgttagacacgag

SEQ ID NO: 358570 - DNA, 30 bp, Artificial Sequence
  Synthetic oligonucleotide
aatggggtttacccttcactgctgcacgag

SEQ ID NO: 358571 - DNA, 30 bp, Artificial Sequence
  Synthetic oligonucleotide
gcgtcataagtgagccctgacgtagacgag

SEQ ID NO: 358572 - DNA, 30 bp, Artificial Sequence
  Synthetic oligonucleotide
tctgactggaatcacgggtatgtcgacgag

SEQ ID NO: 358573 - DNA, 30 bp, Artificial Sequence
  Synthetic oligonucleotide
agttcctggttttcgccaacccgggacgag

SEQ ID NO: 358574 - DNA, 30 bp, Artificial Sequence
  Synthetic oligonucleotide
tgatcgatgatacattgatgtatggacgag

SEQ ID NO: 358575 - DNA, 30 bp, Artificial Sequence
  Synthetic oligonucleotide
ggcatcatcataggttaaagcctggacgag

SEQ ID NO: 358576 - DNA, 30 bp, Artificial Sequence
  Synthetic oligonucleotide
cgctcccctagacgagcaccgactgacgag

SEQ ID NO: 358577 - DNA, 30 bp, Artificial Sequence
  Synthetic oligonucleotide
tacattgccaatattaccaatatatacgag

SEQ ID NO: 358578 - DNA, 30 bp, Artificial Sequence
  Synthetic oligonucleotide
tctacattaggtgaccaggagctatacgag

SEQ ID NO: 358579 - DNA, 30 bp, Artificial Sequence
  Synthetic oligonucleotide
actccgtagtgtgcaagcattagcaccgag

SEQ ID NO: 358580 - DNA, 30 bp, Artificial Sequence
  Synthetic oligonucleotide
aatttcgaccctcagtctgtccggcccgag

SEQ ID NO: 358581 - DNA, 30 bp, Artificial Sequence
  Synthetic oligonucleotide
gggactggacatcgttatttttgtcccgag

SEQ ID NO: 358582 - DNA, 30 bp, Artificial Sequence
  Synthetic oligonucleotide
gttatgctctgtaattaaactaaggccgag

SEQ ID NO: 358583 - DNA, 30 bp, Artificial Sequence
  Synthetic oligonucleotide
tagtttcacgcatcgtgcgcgccggccgag

SEQ ID NO: 358584 - DNA, 30 bp, Artificial Sequence
  Synthetic oligonucleotide
tagttaagaggtggagttattaatgccgag

SEQ ID NO: 358585 - DNA, 30 bp, Artificial Sequence
  Synthetic oligonucleotide
aaccccattttaattagactacttgccgag

SEQ ID NO: 358586 - DNA, 30 bp, Artificial Sequence
  Synthetic oligonucleotide
gcatgcgttattctctcaagggactccgag

SEQ ID NO: 358587 - DNA, 30 bp, Artificial Sequence
  Synthetic oligonucleotide
tcccgttaaagattatctcacagttccgag

SEQ ID NO: 358588 - DNA, 30 bp, Artificial Sequence
  Synthetic oligonucleotide
ctgtgccctttttagcgattcgtttccgag

SEQ ID NO: 358589 - DNA, 30 bp, Artificial Sequence
  Synthetic oligonucleotide
attaaaaatagattggtaaaagccagcgag

SEQ ID NO: 358590 - DNA, 30 bp, Artificial Sequence
  Synthetic oligonucleotide
gctactgggtatttagactcaatgagcgag

SEQ ID NO: 358591 - DNA, 30 bp, Artificial Sequence
  Synthetic oligonucleotide
gtttagagtgttctggacgctactagcgag

SEQ ID NO: 358592 - DNA, 30 bp, Artificial Sequence
  Synthetic oligonucleotide
tcactaggcatcgtgttgcccctacgcgag

SEQ ID NO: 358593 - DNA, 30 bp, Artificial Sequence
  Synthetic oligonucleotide
cgcatcaagtcgacggcgtgtttccgcgag

SEQ ID NO: 358594 - DNA, 30 bp, Artificial Sequence
  Synthetic oligonucleotide
gatggtttggcttagaggtattggcgcgag

SEQ ID NO: 358595 - DNA, 30 bp, Artificial Sequence
  Synthetic oligonucleotide
ttagccccagtatggagaagatgcggcgag

SEQ ID NO: 358596 - DNA, 30 bp, Artificial Sequence
  Synthetic oligonucleotide
cccctgaaaggctttggcaactgatgcgag

SEQ ID NO: 358597 - DNA, 30 bp, Artificial Sequence
  Synthetic oligonucleotide
aatcactatttaaagaaagactactgcgag

SEQ ID NO: 358598 - DNA, 30 bp, Artificial Sequence
  Synthetic oligonucleotide
ttgaagtccctattgatcatgcagtgcgag

SEQ ID NO: 358599 - DNA, 30 bp, Artificial Sequence
  Synthetic oligonucleotide
cccagcgcggatctgattccatggtgcgag

SEQ ID NO: 358600 - DNA, 30 bp, Artificial Sequence
  Synthetic oligonucleotide
catacccggccaatcattatcgtgtgcgag

SEQ ID NO: 358601 - DNA, 30 bp, Artificial Sequence
  Synthetic oligonucleotide
tagttcgttgttatattgtagttgtgcgag

SEQ ID NO: 358602 - DNA, 30 bp, Artificial Sequence
  Synthetic oligonucleotide
gctaatcctgcgctactttctgtaatcgag

SEQ ID NO: 358603 - DNA, 30 bp, Artificial Sequence
  Synthetic oligonucleotide
agcgtttactttcgtattaccgacatcgag

SEQ ID NO: 358604 - DNA, 30 bp, Artificial Sequence
  Synthetic oligonucleotide
tcgcgtgttgtgtgggagtccggcatcgag

SEQ ID NO: 358605 - DNA, 30 bp, Artificial Sequence
  Synthetic oligonucleotide
aaaaacctacgggggggagggtggatcgag

SEQ ID NO: 358606 - DNA, 30 bp, Artificial Sequence
  Synthetic oligonucleotide
tcttccctattggtttctgtagatatcgag

SEQ ID NO: 358607 - DNA, 30 bp, Artificial Sequence
  Synthetic oligonucleotide
tgcgcttgatagctgttattggatatcgag

SEQ ID NO: 358608 - DNA, 30 bp, Artificial Sequence
  Synthetic oligonucleotide
ttcccacgtgaaagtgagaaaagactcgag

SEQ ID NO: 358609 - DNA, 30 bp, Artificial Sequence
  Synthetic oligonucleotide
cttcggcattgcgtgatatttagcctcgag

SEQ ID NO: 358610 - DNA, 30 bp, Artificial Sequence
  Synthetic oligonucleotide
acacgattgtaagcctaaattgcgctcgag

SEQ ID NO: 358611 - DNA, 30 bp, Artificial Sequence
  Synthetic oligonucleotide
aacctgtagggcgtacgggactcgctcgag

SEQ ID NO: 358612 - DNA, 31 bp, Artificial Sequence
  Synthetic oligonucleotide
atactttatgggaatggctcattaggtcgag

SEQ ID NO: 358613 - DNA, 30 bp, Artificial Sequence
  Synthetic oligonucleotide
accctattagaatggcggggcggggtcgag

SEQ ID NO: 358614 - DNA, 30 bp, Artificial Sequence
  Synthetic oligonucleotide
aaagtatcagatggcccccgggatgtcgag

SEQ ID NO: 358615 - DNA, 30 bp, Artificial Sequence
  Synthetic oligonucleotide
tgaaaatcgtatcagcggctctatgtcgag

SEQ ID NO: 358616 - DNA, 30 bp, Artificial Sequence
  Synthetic oligonucleotide
ctcaccggttctttcaaatcaggtgtcgag

SEQ ID NO: 358617 - DNA, 30 bp, Artificial Sequence
  Synthetic oligonucleotide
tgaattaggaatgcgtttgtaatcttcgag

SEQ ID NO: 358618 - DNA, 30 bp, Artificial Sequence
  Synthetic oligonucleotide
ttgcacaattaatcgttcttccagttcgag

SEQ ID NO: 358619 - DNA, 30 bp, Artificial Sequence
  Synthetic oligonucleotide
actaattctcatagcagacgctctttcgag

SEQ ID NO: 358620 - DNA, 30 bp, Artificial Sequence
  Synthetic oligonucleotide
cttggcactgtggacttaaaaagtttcgag

SEQ ID NO: 358621 - DNA, 29 bp, Artificial Sequence
  Synthetic oligonucleotide
ttaaggaacggttgagatcctgaaaggag

SEQ ID NO: 358622 - DNA, 30 bp, Artificial Sequence
  Synthetic oligonucleotide
catctgtcgtatagagtccaatataaggag

SEQ ID NO: 358623 - DNA, 30 bp, Artificial Sequence
  Synthetic oligonucleotide
gtagaactgtccctctttgaacctaaggag

SEQ ID NO: 358624 - DNA, 30 bp, Artificial Sequence
  Synthetic oligonucleotide
ggcagctcagacggccctccaattaaggag

SEQ ID NO: 358625 - DNA, 30 bp, Artificial Sequence
  Synthetic oligonucleotide
cgcatgccgttacgcacggacattaaggag

SEQ ID NO: 358626 - DNA, 30 bp, Artificial Sequence
  Synthetic oligonucleotide
gcacgtatgcgggaaagcgctcgccaggag

SEQ ID NO: 358627 - DNA, 30 bp, Artificial Sequence
  Synthetic oligonucleotide
gctacttcgcaggtgtcaccatgtcaggag

SEQ ID NO: 358628 - DNA, 30 bp, Artificial Sequence
  Synthetic oligonucleotide
gctagcgactttctcgcgacccttcaggag

SEQ ID NO: 358629 - DNA, 30 bp, Artificial Sequence
  Synthetic oligonucleotide
gtcgtgcaggggagtggttattaggaggag

SEQ ID NO: 358630 - DNA, 30 bp, Artificial Sequence
  Synthetic oligonucleotide
aaatatgccggcgcatgcacggactaggag

SEQ ID NO: 358631 - DNA, 30 bp, Artificial Sequence
  Synthetic oligonucleotide
cacaagcgagctagaccctgggtctaggag

SEQ ID NO: 358632 - DNA, 30 bp, Artificial Sequence
  Synthetic oligonucleotide
ctagtgtatgtaaggggacttgtgtaggag

SEQ ID NO: 358633 - DNA, 30 bp, Artificial Sequence
  Synthetic oligonucleotide
ttgtagttcttacaatggcacaaaacggag

SEQ ID NO: 358634 - DNA, 30 bp, Artificial Sequence
  Synthetic oligonucleotide
gccatatggactctgttcgcctcaacggag

SEQ ID NO: 358635 - DNA, 30 bp, Artificial Sequence
  Synthetic oligonucleotide
ataactcggatggtgggtaaggacacggag

SEQ ID NO: 358636 - DNA, 30 bp, Artificial Sequence
  Synthetic oligonucleotide
tagcagtttaaatgcggagttaccacggag

SEQ ID NO: 358637 - DNA, 30 bp, Artificial Sequence
  Synthetic oligonucleotide
tattattaaagttatgaaattaggacggag

SEQ ID NO: 358638 - DNA, 30 bp, Artificial Sequence
  Synthetic oligonucleotide
caccgtcggccccggactcactggacggag

SEQ ID NO: 358639 - DNA, 30 bp, Artificial Sequence
  Synthetic oligonucleotide
atatgtaagatgctattcttacacccggag

SEQ ID NO: 358640 - DNA, 30 bp, Artificial Sequence
  Synthetic oligonucleotide
gcagctgttggctacggggtaaccccggag

SEQ ID NO: 358641 - DNA, 30 bp, Artificial Sequence
  Synthetic oligonucleotide
tctacacaggtatggttacagaatccggag

SEQ ID NO: 358642 - DNA, 30 bp, Artificial Sequence
  Synthetic oligonucleotide
cactgttatacgctgggcctctcagcggag

SEQ ID NO: 358643 - DNA, 30 bp, Artificial Sequence
  Synthetic oligonucleotide
aaataatatcgtgcgctctgcaacgcggag

SEQ ID NO: 358644 - DNA, 30 bp, Artificial Sequence
  Synthetic oligonucleotide
caacttgaatatagtttgttgcacgcggag

SEQ ID NO: 358645 - DNA, 30 bp, Artificial Sequence
  Synthetic oligonucleotide
ggaatctcctcgcttggcttggccgcggag

SEQ ID NO: 358646 - DNA, 30 bp, Artificial Sequence
  Synthetic oligonucleotide
gtaccgttccacgctaagggcaatgcggag

SEQ ID NO: 358647 - DNA, 30 bp, Artificial Sequence
  Synthetic oligonucleotide
gtaaggggtgggtcgtggctttatgcggag

SEQ ID NO: 358648 - DNA, 30 bp, Artificial Sequence
  Synthetic oligonucleotide
ggtgccttccttcttctccgctctgcggag

SEQ ID NO: 358649 - DNA, 30 bp, Artificial Sequence
  Synthetic oligonucleotide
ttttgaaccgttggttaacggacatcggag

SEQ ID NO: 358650 - DNA, 30 bp, Artificial Sequence
  Synthetic oligonucleotide
tagtgttttgcgtcccgtgagatatcggag

SEQ ID NO: 358651 - DNA, 30 bp, Artificial Sequence
  Synthetic oligonucleotide
catatggaccatatactgctgctgtcggag

SEQ ID NO: 358652 - DNA, 30 bp, Artificial Sequence
  Synthetic oligonucleotide
tagtcgactagcttagcattgtattcggag

SEQ ID NO: 358653 - DNA, 30 bp, Artificial Sequence
  Synthetic oligonucleotide
gtccgtaaccaggaggacgctaaaagggag

SEQ ID NO: 358654 - DNA, 30 bp, Artificial Sequence
  Synthetic oligonucleotide
aaagacagggacggactgcactaaagggag

SEQ ID NO: 358655 - DNA, 30 bp, Artificial Sequence
  Synthetic oligonucleotide
gatatatcccgtccacatctggtcagggag

SEQ ID NO: 358656 - DNA, 30 bp, Artificial Sequence
  Synthetic oligonucleotide
gtattcttcgatggaaacattgagagggag

SEQ ID NO: 358657 - DNA, 30 bp, Artificial Sequence
  Synthetic oligonucleotide
ggcttgtccatttatgaggtgacgagggag

SEQ ID NO: 358658 - DNA, 30 bp, Artificial Sequence
  Synthetic oligonucleotide
agtagtttttatgaggactatgggagggag

SEQ ID NO: 358659 - DNA, 30 bp, Artificial Sequence
  Synthetic oligonucleotide
atgccatctggtgccacacatgtccgggag

SEQ ID NO: 358660 - DNA, 30 bp, Artificial Sequence
  Synthetic oligonucleotide
ccgtatcctatcgttggccacgctcgggag

SEQ ID NO: 358661 - DNA, 30 bp, Artificial Sequence
  Synthetic oligonucleotide
ctatgcatcccttcatagccaggtcgggag

SEQ ID NO: 358662 - DNA, 30 bp, Artificial Sequence
  Synthetic oligonucleotide
tgttggaacatgggccggagtggtcgggag

SEQ ID NO: 358663 - DNA, 30 bp, Artificial Sequence
  Synthetic oligonucleotide
aataatctaagaggccatactctaggggag

SEQ ID NO: 358664 - DNA, 30 bp, Artificial Sequence
  Synthetic oligonucleotide
attcggtaggttaccgcattatcgggggag

SEQ ID NO: 358665 - DNA, 30 bp, Artificial Sequence
  Synthetic oligonucleotide
actacgaagtgcatagcaccctcgggggag

SEQ ID NO: 358666 - DNA, 30 bp, Artificial Sequence
  Synthetic oligonucleotide
tattggggtagacggggtatttttggggag

SEQ ID NO: 358667 - DNA, 30 bp, Artificial Sequence
  Synthetic oligonucleotide
atggagctgtggcacgtgcggcgatgggag

SEQ ID NO: 358668 - DNA, 30 bp, Artificial Sequence
  Synthetic oligonucleotide
caggtatcttgggaacccatggcctgggag

SEQ ID NO: 358669 - DNA, 29 bp, Artificial Sequence
  Synthetic oligonucleotide
tccattatctaaggttttgtaattgggag

SEQ ID NO: 358670 - DNA, 30 bp, Artificial Sequence
  Synthetic oligonucleotide
tttgtttatggcaggacacagagcatggag

SEQ ID NO: 358671 - DNA, 30 bp, Artificial Sequence
  Synthetic oligonucleotide
gtcggaggaccttcggatagtggcatggag

SEQ ID NO: 358672 - DNA, 30 bp, Artificial Sequence
  Synthetic oligonucleotide
gaaacgtcttaggaaattttaactatggag

SEQ ID NO: 358673 - DNA, 30 bp, Artificial Sequence
  Synthetic oligonucleotide
gtaatccatgtatggcatagtccactggag

SEQ ID NO: 358674 - DNA, 30 bp, Artificial Sequence
  Synthetic oligonucleotide
gtttgtcttgaccatgccaaactgctggag

SEQ ID NO: 358675 - DNA, 30 bp, Artificial Sequence
  Synthetic oligonucleotide
ataattggcagcgttactaacctgctggag

SEQ ID NO: 358676 - DNA, 30 bp, Artificial Sequence
  Synthetic oligonucleotide
ccttcacgagggtttacatgattgctggag

SEQ ID NO: 358677 - DNA, 30 bp, Artificial Sequence
  Synthetic oligonucleotide
gctacggccatggttgtgaggcaagtggag

SEQ ID NO: 358678 - DNA, 30 bp, Artificial Sequence
  Synthetic oligonucleotide
gccgggcttcactctgcatgaatagtggag

SEQ ID NO: 358679 - DNA, 30 bp, Artificial Sequence
  Synthetic oligonucleotide
atttaggtgaacgtgtgagggctcgtggag

SEQ ID NO: 358680 - DNA, 30 bp, Artificial Sequence
  Synthetic oligonucleotide
aacaattatcattaactgaaccaattggag

SEQ ID NO: 358681 - DNA, 30 bp, Artificial Sequence
  Synthetic oligonucleotide
gtttttaaggccacactcgtgtaattggag

SEQ ID NO: 358682 - DNA, 30 bp, Artificial Sequence
  Synthetic oligonucleotide
caatttatgtaaatccgtagtatattggag

SEQ ID NO: 358683 - DNA, 30 bp, Artificial Sequence
  Synthetic oligonucleotide
aatagcgaagtctaagaatttgggttggag

SEQ ID NO: 358684 - DNA, 30 bp, Artificial Sequence
  Synthetic oligonucleotide
atttgcggataagagcataatttgttggag

SEQ ID NO: 358685 - DNA, 30 bp, Artificial Sequence
  Synthetic oligonucleotide
ctttaacatcactgtcaattgagtttggag

SEQ ID NO: 358686 - DNA, 30 bp, Artificial Sequence
  Synthetic oligonucleotide
aatcggctggagcccttctcccgtttggag

SEQ ID NO: 358687 - DNA, 30 bp, Artificial Sequence
  Synthetic oligonucleotide
acctccatatataaatgctatagaaatgag

SEQ ID NO: 358688 - DNA, 30 bp, Artificial Sequence
  Synthetic oligonucleotide
cgagtgaacagaggacaaataatgaatgag

SEQ ID NO: 358689 - DNA, 30 bp, Artificial Sequence
  Synthetic oligonucleotide
tatgctgatgcttgtacggggaaacatgag

SEQ ID NO: 358690 - DNA, 30 bp, Artificial Sequence
  Synthetic oligonucleotide
aaggtatggtctgcgacgggggaacatgag

SEQ ID NO: 358691 - DNA, 30 bp, Artificial Sequence
  Synthetic oligonucleotide
gaccgttggttagggtcgctgatccatgag

SEQ ID NO: 358692 - DNA, 30 bp, Artificial Sequence
  Synthetic oligonucleotide
acgctggcaccccgtcgtaccctgcatgag

SEQ ID NO: 358693 - DNA, 30 bp, Artificial Sequence
  Synthetic oligonucleotide
gaccaggctcgaccaatgcccctgcatgag

SEQ ID NO: 358694 - DNA, 30 bp, Artificial Sequence
  Synthetic oligonucleotide
atagggtagtgtcgacgaactggtcatgag

SEQ ID NO: 358695 - DNA, 30 bp, Artificial Sequence
  Synthetic oligonucleotide
tatttagggccccgaggagcacgagatgag

SEQ ID NO: 358696 - DNA, 30 bp, Artificial Sequence
  Synthetic oligonucleotide
cgtcccgtgtagttacgccaggtagatgag

SEQ ID NO: 358697 - DNA, 30 bp, Artificial Sequence
  Synthetic oligonucleotide
gggcatgtggatgtgtgatacaacgatgag

SEQ ID NO: 358698 - DNA, 30 bp, Artificial Sequence
  Synthetic oligonucleotide
ctcgtcatacgcttttgttttggggatgag

SEQ ID NO: 358699 - DNA, 30 bp, Artificial Sequence
  Synthetic oligonucleotide
gattaacatggccgcgcacttgatgatgag

SEQ ID NO: 358700 - DNA, 30 bp, Artificial Sequence
  Synthetic oligonucleotide
gtcttctttaagctagaaaggaactatgag

SEQ ID NO: 358701 - DNA, 30 bp, Artificial Sequence
  Synthetic oligonucleotide
gtattcgctcggtatttgatgcgctatgag

SEQ ID NO: 358702 - DNA, 30 bp, Artificial Sequence
  Synthetic oligonucleotide
tcgtcgtccctaggcagcgctggctatgag

SEQ ID NO: 358703 - DNA, 30 bp, Artificial Sequence
  Synthetic oligonucleotide
cggagtaccaccgcggcgcttatctatgag

SEQ ID NO: 358704 - DNA, 30 bp, Artificial Sequence
  Synthetic oligonucleotide
ctttgaagttagggttgttagaagtatgag

SEQ ID NO: 358705 - DNA, 30 bp, Artificial Sequence
  Synthetic oligonucleotide
tgcttcggccgggaggttaaaaattatgag

SEQ ID NO: 358706 - DNA, 30 bp, Artificial Sequence
  Synthetic oligonucleotide
ttctggaattcctaacggcttcaaactgag

SEQ ID NO: 358707 - DNA, 30 bp, Artificial Sequence
  Synthetic oligonucleotide
agcgtcccgccaacaactatatcaactgag

SEQ ID NO: 358708 - DNA, 30 bp, Artificial Sequence
  Synthetic oligonucleotide
ttagacggatatcgcagtgagcacactgag

SEQ ID NO: 358709 - DNA, 30 bp, Artificial Sequence
  Synthetic oligonucleotide
aaaatttgacacagggggaagcagactgag

SEQ ID NO: 358710 - DNA, 30 bp, Artificial Sequence
  Synthetic oligonucleotide
gtagagatgtgcactcaacctcagactgag

SEQ ID NO: 358711 - DNA, 30 bp, Artificial Sequence
  Synthetic oligonucleotide
actgaaacttgaaggtgttttgcgactgag

SEQ ID NO: 358712 - DNA, 30 bp, Artificial Sequence
  Synthetic oligonucleotide
ataacttgcaagtgttggctcatgactgag

SEQ ID NO: 358713 - DNA, 30 bp, Artificial Sequence
  Synthetic oligonucleotide
ggattaggatcatagcggcttctacctgag

SEQ ID NO: 358714 - DNA, 30 bp, Artificial Sequence
  Synthetic oligonucleotide
agatgaaaacccattgatcgcgaccctgag

SEQ ID NO: 358715 - DNA, 30 bp, Artificial Sequence
  Synthetic oligonucleotide
atttaatgttacccggggacatacgctgag

SEQ ID NO: 358716 - DNA, 30 bp, Artificial Sequence
  Synthetic oligonucleotide
caatcagtgacacgtcgtgactaatctgag

SEQ ID NO: 358717 - DNA, 30 bp, Artificial Sequence
  Synthetic oligonucleotide
agtttccgggccatgcaaaattactctgag

SEQ ID NO: 358718 - DNA, 30 bp, Artificial Sequence
  Synthetic oligonucleotide
cgtgatacaaaggacagatgtacttctgag

SEQ ID NO: 358719 - DNA, 30 bp, Artificial Sequence
  Synthetic oligonucleotide
gttatctagagatcaaatttgttttctgag

SEQ ID NO: 358720 - DNA, 30 bp, Artificial Sequence
  Synthetic oligonucleotide
cgtcacaaggtaatgcttctttcaagtgag

SEQ ID NO: 358721 - DNA, 30 bp, Artificial Sequence
  Synthetic oligonucleotide
aataccctcttgtataggagacccagtgag

SEQ ID NO: 358722 - DNA, 30 bp, Artificial Sequence
  Synthetic oligonucleotide
ctcctggacgcattggtgggcagcagtgag

SEQ ID NO: 358723 - DNA, 30 bp, Artificial Sequence
  Synthetic oligonucleotide
caacgattactttggagccgccggagtgag

SEQ ID NO: 358724 - DNA, 30 bp, Artificial Sequence
  Synthetic oligonucleotide
ttgcttgtcgattaccgaatatggagtgag

SEQ ID NO: 358725 - DNA, 30 bp, Artificial Sequence
  Synthetic oligonucleotide
taatgggattaattatgttcggatagtgag

SEQ ID NO: 358726 - DNA, 30 bp, Artificial Sequence
  Synthetic oligonucleotide
aactcaattgctaaaaccaagactagtgag

SEQ ID NO: 358727 - DNA, 30 bp, Artificial Sequence
  Synthetic oligonucleotide
tcaataaacatgaactgtaaaggtagtgag

SEQ ID NO: 358728 - DNA, 30 bp, Artificial Sequence
  Synthetic oligonucleotide
aatcaaggtgatctttgtacagaacgtgag

SEQ ID NO: 358729 - DNA, 30 bp, Artificial Sequence
  Synthetic oligonucleotide
gttcacttcaggcgcgattcaacccgtgag

SEQ ID NO: 358730 - DNA, 30 bp, Artificial Sequence
  Synthetic oligonucleotide
taccgacacttttgttacaatgagcgtgag

SEQ ID NO: 358731 - DNA, 30 bp, Artificial Sequence
  Synthetic oligonucleotide
aagataggacagttataagttactcgtgag

SEQ ID NO: 358732 - DNA, 30 bp, Artificial Sequence
  Synthetic oligonucleotide
gggcaccacgggagggcgggagctcgtgag

SEQ ID NO: 358733 - DNA, 30 bp, Artificial Sequence
  Synthetic oligonucleotide
cgccgcgagtgaagtcgtaatagtcgtgag

SEQ ID NO: 358734 - DNA, 30 bp, Artificial Sequence
  Synthetic oligonucleotide
gtcggtaggggtcatacctttaaaggtgag

SEQ ID NO: 358735 - DNA, 30 bp, Artificial Sequence
  Synthetic oligonucleotide
gatagggcacgcaggttggtgcgcggtgag

SEQ ID NO: 358736 - DNA, 30 bp, Artificial Sequence
  Synthetic oligonucleotide
tatatgatctgtataacgagctggggtgag

SEQ ID NO: 358737 - DNA, 30 bp, Artificial Sequence
  Synthetic oligonucleotide
ctttcgctaaagcgtgtcaagcatggtgag

SEQ ID NO: 358738 - DNA, 30 bp, Artificial Sequence
  Synthetic oligonucleotide
acaagcctggtcaatgcgagatctggtgag

SEQ ID NO: 358739 - DNA, 30 bp, Artificial Sequence
  Synthetic oligonucleotide
gggaattccacaaccttgtttaaatgtgag

SEQ ID NO: 358740 - DNA, 30 bp, Artificial Sequence
  Synthetic oligonucleotide
attgtagattgaccttaagcacgatgtgag

SEQ ID NO: 358741 - DNA, 30 bp, Artificial Sequence
  Synthetic oligonucleotide
ataagagataagagcacccttttctgtgag

SEQ ID NO: 358742 - DNA, 30 bp, Artificial Sequence
  Synthetic oligonucleotide
aactataattccgcgagtaaacagtgtgag

SEQ ID NO: 358743 - DNA, 30 bp, Artificial Sequence
  Synthetic oligonucleotide
tcttaggactaagcgaccgtggaaattgag

SEQ ID NO: 358744 - DNA, 30 bp, Artificial Sequence
  Synthetic oligonucleotide
ttttaggacgcctgacttttatgcattgag

SEQ ID NO: 358745 - DNA, 29 bp, Artificial Sequence
  Synthetic oligonucleotide
gaaaacaaggcgaattaggaatcattgag

SEQ ID NO: 358746 - DNA, 30 bp, Artificial Sequence
  Synthetic oligonucleotide
gacgagcatgctggaaattgacttattgag

SEQ ID NO: 358747 - DNA, 30 bp, Artificial Sequence
  Synthetic oligonucleotide
cacatcggtgatggcgtctcttcacttgag

SEQ ID NO: 358748 - DNA, 29 bp, Artificial Sequence
  Synthetic oligonucleotide
gacacactaaggaactgagtgtccttgag

SEQ ID NO: 358749 - DNA, 30 bp, Artificial Sequence
  Synthetic oligonucleotide
tggccctcaactcgcacaaagcctgttgag

SEQ ID NO: 358750 - DNA, 30 bp, Artificial Sequence
  Synthetic oligonucleotide
gaatcgaaccatatgctaggcaaatttgag

SEQ ID NO: 358751 - DNA, 30 bp, Artificial Sequence
  Synthetic oligonucleotide
tcggcgaacatgcgggactattcatttgag

SEQ ID NO: 358752 - DNA, 30 bp, Artificial Sequence
  Synthetic oligonucleotide
tgttgcacagcgcactggtggggctttgag

SEQ ID NO: 358753 - DNA, 30 bp, Artificial Sequence
  Synthetic oligonucleotide
ggggcgggggaaggaggacgttagtttgag

SEQ ID NO: 358754 - DNA, 30 bp, Artificial Sequence
  Synthetic oligonucleotide
gttgtgtcccgtttatgggcggggtttgag

SEQ ID NO: 358755 - DNA, 30 bp, Artificial Sequence
  Synthetic oligonucleotide
cggtatggggagagcgcccggttgtttgag

SEQ ID NO: 358756 - DNA, 30 bp, Artificial Sequence
  Synthetic oligonucleotide
ggacatgggttactcatcggttattttgag

SEQ ID NO: 358757 - DNA, 30 bp, Artificial Sequence
  Synthetic oligonucleotide
taggagaggggcatgataacgccttttgag

SEQ ID NO: 358758 - DNA, 30 bp, Artificial Sequence
  Synthetic oligonucleotide
tactagtagagagtcgctagcgccaaatag

SEQ ID NO: 358759 - DNA, 30 bp, Artificial Sequence
  Synthetic oligonucleotide
ttagctatgaccgtgacgatatgcaaatag

SEQ ID NO: 358760 - DNA, 30 bp, Artificial Sequence
  Synthetic oligonucleotide
aacccgcaatgtgtctgtccagggaaatag

SEQ ID NO: 358761 - DNA, 30 bp, Artificial Sequence
  Synthetic oligonucleotide
cctcataggttgcgctggtccatgaaatag

SEQ ID NO: 358762 - DNA, 30 bp, Artificial Sequence
  Synthetic oligonucleotide
cctcacgaaaagcacgcgcaccaccaatag

SEQ ID NO: 358763 - DNA, 30 bp, Artificial Sequence
  Synthetic oligonucleotide
agttccttagttaagggaacggaccaatag

SEQ ID NO: 358764 - DNA, 30 bp, Artificial Sequence
  Synthetic oligonucleotide
gtgttcaaacaatgagatacggcccaatag

SEQ ID NO: 358765 - DNA, 30 bp, Artificial Sequence
  Synthetic oligonucleotide
actactatgttacatacgtccgtccaatag

SEQ ID NO: 358766 - DNA, 30 bp, Artificial Sequence
  Synthetic oligonucleotide
ccgcttctatcaatcttgaatgtccaatag

SEQ ID NO: 358767 - DNA, 30 bp, Artificial Sequence
  Synthetic oligonucleotide
gttaaataagtcagagccagggcgcaatag

SEQ ID NO: 358768 - DNA, 30 bp, Artificial Sequence
  Synthetic oligonucleotide
tgttgaagtggctttttattattgcaatag

SEQ ID NO: 358769 - DNA, 30 bp, Artificial Sequence
  Synthetic oligonucleotide
gatttagcgcccggacacttggatcaatag

SEQ ID NO: 358770 - DNA, 30 bp, Artificial Sequence
  Synthetic oligonucleotide
gaaaggatacacaaacttcccggtcaatag

SEQ ID NO: 358771 - DNA, 30 bp, Artificial Sequence
  Synthetic oligonucleotide
aatagcccccggtgcttctaataagaatag

SEQ ID NO: 358772 - DNA, 30 bp, Artificial Sequence
  Synthetic oligonucleotide
ataatgtcgtcatggtgcttcacagaatag

SEQ ID NO: 358773 - DNA, 30 bp, Artificial Sequence
  Synthetic oligonucleotide
ttcaattatcctgcatgggcagcagaatag

SEQ ID NO: 358774 - DNA, 30 bp, Artificial Sequence
  Synthetic oligonucleotide
ttatatttaagactatggagtagggaatag

SEQ ID NO: 358775 - DNA, 30 bp, Artificial Sequence
  Synthetic oligonucleotide
gtcacgatagctcctgcgatggctgaatag

SEQ ID NO: 358776 - DNA, 30 bp, Artificial Sequence
  Synthetic oligonucleotide
atttactggtttcggcggattaaataatag

SEQ ID NO: 358777 - DNA, 30 bp, Artificial Sequence
  Synthetic oligonucleotide
agaaccatcaatatggcggatgaataatag

SEQ ID NO: 358778 - DNA, 30 bp, Artificial Sequence
  Synthetic oligonucleotide
atgccgggtaggattgtcagtggctaatag

SEQ ID NO: 358779 - DNA, 30 bp, Artificial Sequence
  Synthetic oligonucleotide
tgagcttatcgagagctttcagagtaatag

SEQ ID NO: 358780 - DNA, 30 bp, Artificial Sequence
  Synthetic oligonucleotide
gcagggtcgcacgcgcgggtcacgtaatag

SEQ ID NO: 358781 - DNA, 30 bp, Artificial Sequence
  Synthetic oligonucleotide
tccgaagtttggcaacagttgaggtaatag

SEQ ID NO: 358782 - DNA, 30 bp, Artificial Sequence
  Synthetic oligonucleotide
tcagggatttctatatcattgcccacatag

SEQ ID NO: 358783 - DNA, 30 bp, Artificial Sequence
  Synthetic oligonucleotide
agaatttggctatttagcggtaagacatag

SEQ ID NO: 358784 - DNA, 30 bp, Artificial Sequence
  Synthetic oligonucleotide
tcacgaattttttatgggcggactacatag

SEQ ID NO: 358785 - DNA, 30 bp, Artificial Sequence
  Synthetic oligonucleotide
agacctagtagctcgatgcagttcccatag

SEQ ID NO: 358786 - DNA, 30 bp, Artificial Sequence
  Synthetic oligonucleotide
ctcgtctaaatccacacaggtccgccatag

SEQ ID NO: 358787 - DNA, 30 bp, Artificial Sequence
  Synthetic oligonucleotide
ttagtaagggacaaggggctcctgccatag

SEQ ID NO: 358788 - DNA, 30 bp, Artificial Sequence
  Synthetic oligonucleotide
ttggttgtagactcaagtgttagtccatag

SEQ ID NO: 358789 - DNA, 30 bp, Artificial Sequence
  Synthetic oligonucleotide
atacctgatcccctatctatccaagcatag

SEQ ID NO: 358790 - DNA, 30 bp, Artificial Sequence
  Synthetic oligonucleotide
aatacctcggtttatctgtttctggcatag

SEQ ID NO: 358791 - DNA, 30 bp, Artificial Sequence
  Synthetic oligonucleotide
cttggatgggacagcggcattgtggcatag

SEQ ID NO: 358792 - DNA, 30 bp, Artificial Sequence
  Synthetic oligonucleotide
aaccacttgccggattgtacggcatcatag

SEQ ID NO: 358793 - DNA, 30 bp, Artificial Sequence
  Synthetic oligonucleotide
tcgagtgcggaatgccgctccggatcatag

SEQ ID NO: 358794 - DNA, 30 bp, Artificial Sequence
  Synthetic oligonucleotide
gcatctccatgagtgtaacttaactcatag

SEQ ID NO: 358795 - DNA, 30 bp, Artificial Sequence
  Synthetic oligonucleotide
agtctctagaaggacacgcgcacgtcatag

SEQ ID NO: 358796 - DNA, 30 bp, Artificial Sequence
  Synthetic oligonucleotide
gtctaaaaaccgtgtggatactggtcatag

SEQ ID NO: 358797 - DNA, 30 bp, Artificial Sequence
  Synthetic oligonucleotide
gatatacccaaaaggttatgactgtcatag

SEQ ID NO: 358798 - DNA, 30 bp, Artificial Sequence
  Synthetic oligonucleotide
tgtggatggcgtcaggcggccctgtcatag

SEQ ID NO: 358799 - DNA, 30 bp, Artificial Sequence
  Synthetic oligonucleotide
atagtcgtaaaactaggcacaagttcatag

SEQ ID NO: 358800 - DNA, 30 bp, Artificial Sequence
  Synthetic oligonucleotide
accgccgtaaacgatcatgatgacagatag

SEQ ID NO: 358801 - DNA, 30 bp, Artificial Sequence
  Synthetic oligonucleotide
catttaatacgttatagggctgccagatag

SEQ ID NO: 358802 - DNA, 30 bp, Artificial Sequence
  Synthetic oligonucleotide
aaatactcttgaaggaaccatttgagatag

SEQ ID NO: 358803 - DNA, 30 bp, Artificial Sequence
  Synthetic oligonucleotide
gatttaccgcgactgccggtgcgacgatag

SEQ ID NO: 358804 - DNA, 30 bp, Artificial Sequence
  Synthetic oligonucleotide
tttcctggagctgcctctagcgtacgatag

SEQ ID NO: 358805 - DNA, 30 bp, Artificial Sequence
  Synthetic oligonucleotide
ggttttcggcggcccaccagtaaccgatag

SEQ ID NO: 358806 - DNA, 30 bp, Artificial Sequence
  Synthetic oligonucleotide
actaccacgatattaagagtcttccgatag

SEQ ID NO: 358807 - DNA, 30 bp, Artificial Sequence
  Synthetic oligonucleotide
gacgctatgcagtaaggaggacatcgatag

SEQ ID NO: 358808 - DNA, 30 bp, Artificial Sequence
  Synthetic oligonucleotide
cctgatatacaggtggaacactttcgatag

SEQ ID NO: 358809 - DNA, 30 bp, Artificial Sequence
  Synthetic oligonucleotide
aaagatctcgccttaatcaattttcgatag

SEQ ID NO: 358810 - DNA, 30 bp, Artificial Sequence
  Synthetic oligonucleotide
gtaaaagtaagaccaagctcggaaggatag

SEQ ID NO: 358811 - DNA, 30 bp, Artificial Sequence
  Synthetic oligonucleotide
ttggcagccgacggacgcccataaggatag

SEQ ID NO: 358812 - DNA, 30 bp, Artificial Sequence
  Synthetic oligonucleotide
cagattgtccgtacgcaaagaacaggatag

SEQ ID NO: 358813 - DNA, 30 bp, Artificial Sequence
  Synthetic oligonucleotide
gaccaggcgttttggtattttgcaggatag

SEQ ID NO: 358814 - DNA, 30 bp, Artificial Sequence
  Synthetic oligonucleotide
tttccccactggaccaagtccagaggatag

SEQ ID NO: 358815 - DNA, 30 bp, Artificial Sequence
  Synthetic oligonucleotide
gttattactgtaccaatgccaggaggatag

SEQ ID NO: 358816 - DNA, 30 bp, Artificial Sequence
  Synthetic oligonucleotide
actactaatcactgtaaggtatgaggatag

SEQ ID NO: 358817 - DNA, 30 bp, Artificial Sequence
  Synthetic oligonucleotide
ggggtctttgaatctgatgatcacggatag

SEQ ID NO: 358818 - DNA, 30 bp, Artificial Sequence
  Synthetic oligonucleotide
tgattcgaaagtcaagtaatgatcggatag

SEQ ID NO: 358819 - DNA, 30 bp, Artificial Sequence
  Synthetic oligonucleotide
caatgccagtcagtaactcgctagggatag

SEQ ID NO: 358820 - DNA, 30 bp, Artificial Sequence
  Synthetic oligonucleotide
acatcgtgtgcactaccgcattaatgatag

SEQ ID NO: 358821 - DNA, 30 bp, Artificial Sequence
  Synthetic oligonucleotide
ttattaccctcaagctatccacgatgatag

SEQ ID NO: 358822 - DNA, 30 bp, Artificial Sequence
  Synthetic oligonucleotide
attggatgtagtttagatgagggatgatag

SEQ ID NO: 358823 - DNA, 30 bp, Artificial Sequence
  Synthetic oligonucleotide
cttcccaggtctcattgggagtgatgatag

SEQ ID NO: 358824 - DNA, 30 bp, Artificial Sequence
  Synthetic oligonucleotide
gtcgtataatgggaatagtaggtctgatag

SEQ ID NO: 358825 - DNA, 30 bp, Artificial Sequence
  Synthetic oligonucleotide
tacccgtaattaaatgaagatttgtgatag

SEQ ID NO: 358826 - DNA, 30 bp, Artificial Sequence
  Synthetic oligonucleotide
gggggttgcccataggcgccacgttgatag

SEQ ID NO: 358827 - DNA, 30 bp, Artificial Sequence
  Synthetic oligonucleotide
tgattagattatgaagttcaggacatatag

SEQ ID NO: 358828 - DNA, 30 bp, Artificial Sequence
  Synthetic oligonucleotide
tagtatatccgatagtcccggggcatatag

SEQ ID NO: 358829 - DNA, 30 bp, Artificial Sequence
  Synthetic oligonucleotide
aaggtggtagtaatattggcattgatatag

SEQ ID NO: 358830 - DNA, 30 bp, Artificial Sequence
  Synthetic oligonucleotide
gtacacgggtgttgggattgacgtatatag

SEQ ID NO: 358831 - DNA, 30 bp, Artificial Sequence
  Synthetic oligonucleotide
aaggctcgcttcaaagaatgctttatatag

SEQ ID NO: 358832 - DNA, 30 bp, Artificial Sequence
  Synthetic oligonucleotide
atactgtctactttttaatatggactatag

SEQ ID NO: 358833 - DNA, 30 bp, Artificial Sequence
  Synthetic oligonucleotide
aagttgcagtcaacgtcggtttagctatag

SEQ ID NO: 358834 - DNA, 30 bp, Artificial Sequence
  Synthetic oligonucleotide
cagacctcggtagcatccaagctgctatag

SEQ ID NO: 358835 - DNA, 30 bp, Artificial Sequence
  Synthetic oligonucleotide
taatgagcggacgtgacggcggctctatag

SEQ ID NO: 358836 - DNA, 30 bp, Artificial Sequence
  Synthetic oligonucleotide
ttcgcgagtggagcgtggttccgtctatag

SEQ ID NO: 358837 - DNA, 30 bp, Artificial Sequence
  Synthetic oligonucleotide
gattacggttattaattccagcaagtatag

SEQ ID NO: 358838 - DNA, 30 bp, Artificial Sequence
  Synthetic oligonucleotide
gaattaagccgcgagccatctgacgtatag

SEQ ID NO: 358839 - DNA, 30 bp, Artificial Sequence
  Synthetic oligonucleotide
ggttatgttctattagttaggttcgtatag

SEQ ID NO: 358840 - DNA, 30 bp, Artificial Sequence
  Synthetic oligonucleotide
ttcaagtaaggagcggagcaagtggtatag

SEQ ID NO: 358841 - DNA, 30 bp, Artificial Sequence
  Synthetic oligonucleotide
tagggtgttacacatccatactctgtatag

SEQ ID NO: 358842 - DNA, 30 bp, Artificial Sequence
  Synthetic oligonucleotide
cgtaaatgtggacttccgtgtgcattatag

SEQ ID NO: 358843 - DNA, 30 bp, Artificial Sequence
  Synthetic oligonucleotide
cgcagtataatttaaagtataagattatag

SEQ ID NO: 358844 - DNA, 30 bp, Artificial Sequence
  Synthetic oligonucleotide
gatgatttgaattccgatttgggattatag

SEQ ID NO: 358845 - DNA, 30 bp, Artificial Sequence
  Synthetic oligonucleotide
ctggtattatacgtggtagtcttattatag

SEQ ID NO: 358846 - DNA, 30 bp, Artificial Sequence
  Synthetic oligonucleotide
agttccaatactacaacggttgacttatag

SEQ ID NO: 358847 - DNA, 30 bp, Artificial Sequence
  Synthetic oligonucleotide
atgcgtgcgttaagtctaatatacttatag

SEQ ID NO: 358848 - DNA, 30 bp, Artificial Sequence
  Synthetic oligonucleotide
gtggtgtcggctcgaactcctttcttatag

SEQ ID NO: 358849 - DNA, 30 bp, Artificial Sequence
  Synthetic oligonucleotide
gaggttgttacttctagatataggttatag

SEQ ID NO: 358850 - DNA, 30 bp, Artificial Sequence
  Synthetic oligonucleotide
gactggacgcaggatggactggatttatag

SEQ ID NO: 358851 - DNA, 30 bp, Artificial Sequence
  Synthetic oligonucleotide
ccggactatctataaacaagcattttatag

SEQ ID NO: 358852 - DNA, 30 bp, Artificial Sequence
  Synthetic oligonucleotide
gtttagcgcgtagaggatggtagaaactag

SEQ ID NO: 358853 - DNA, 30 bp, Artificial Sequence
  Synthetic oligonucleotide
gttcacttgcacgggactcctctaaactag

SEQ ID NO: 358854 - DNA, 30 bp, Artificial Sequence
  Synthetic oligonucleotide
cttcttatcgggcacagacttccgaactag

SEQ ID NO: 358855 - DNA, 30 bp, Artificial Sequence
  Synthetic oligonucleotide
ttagatggcaaaaggcactagaggaactag

SEQ ID NO: 358856 - DNA, 30 bp, Artificial Sequence
  Synthetic oligonucleotide
ttggcgatagatggctggccccgccactag

SEQ ID NO: 358857 - DNA, 30 bp, Artificial Sequence
  Synthetic oligonucleotide
aaagaggctcagcacgccgttggccactag

SEQ ID NO: 358858 - DNA, 30 bp, Artificial Sequence
  Synthetic oligonucleotide
cagacagaggattgacgcgctagtcactag

SEQ ID NO: 358859 - DNA, 30 bp, Artificial Sequence
  Synthetic oligonucleotide
ggctctgtctagacgcgcggtagtcactag

SEQ ID NO: 358860 - DNA, 30 bp, Artificial Sequence
  Synthetic oligonucleotide
ccctttctggtccattgagctgcagactag

SEQ ID NO: 358861 - DNA, 30 bp, Artificial Sequence
  Synthetic oligonucleotide
ataggtgaagtgtatggcaacgcatactag

SEQ ID NO: 358862 - DNA, 30 bp, Artificial Sequence
  Synthetic oligonucleotide
ttaggtgtggttggggtggatgcatactag

SEQ ID NO: 358863 - DNA, 30 bp, Artificial Sequence
  Synthetic oligonucleotide
ccttgcacacacggcgtgacgagatactag

SEQ ID NO: 358864 - DNA, 30 bp, Artificial Sequence
  Synthetic oligonucleotide
cctgggcattaattctccaaattctactag

SEQ ID NO: 358865 - DNA, 30 bp, Artificial Sequence
  Synthetic oligonucleotide
ttgcaacctatagaagcaaggtcgtactag

SEQ ID NO: 358866 - DNA, 30 bp, Artificial Sequence
  Synthetic oligonucleotide
tttcgaggttgacgcctggaacggtactag

SEQ ID NO: 358867 - DNA, 30 bp, Artificial Sequence
  Synthetic oligonucleotide
gcagtggggttgatctagcatcggtactag

SEQ ID NO: 358868 - DNA, 30 bp, Artificial Sequence
  Synthetic oligonucleotide
tgaatcggtgcatactccggattgtactag

SEQ ID NO: 358869 - DNA, 30 bp, Artificial Sequence
  Synthetic oligonucleotide
gtcaggcggctctattctgtcgattactag

SEQ ID NO: 358870 - DNA, 30 bp, Artificial Sequence
  Synthetic oligonucleotide
ttccactcgacgctgagttgagcttactag

SEQ ID NO: 358871 - DNA, 30 bp, Artificial Sequence
  Synthetic oligonucleotide
ctttataggggacggtgacaatgttactag

SEQ ID NO: 358872 - DNA, 30 bp, Artificial Sequence
  Synthetic oligonucleotide
aaaaaaacgaaggtgtcgtcatacacctag

SEQ ID NO: 358873 - DNA, 30 bp, Artificial Sequence
  Synthetic oligonucleotide
acttatcgtcctctacaaggcaccacctag

SEQ ID NO: 358874 - DNA, 30 bp, Artificial Sequence
  Synthetic oligonucleotide
aacgggcgtggattggtgccggccacctag

SEQ ID NO: 358875 - DNA, 30 bp, Artificial Sequence
  Synthetic oligonucleotide
actcagagactgttataatggtcgacctag

SEQ ID NO: 358876 - DNA, 30 bp, Artificial Sequence
  Synthetic oligonucleotide
gatacaaaacttgtaatttctttgacctag

SEQ ID NO: 358877 - DNA, 30 bp, Artificial Sequence
  Synthetic oligonucleotide
tgaaatgggtgtcgcaggaattttacctag

SEQ ID NO: 358878 - DNA, 30 bp, Artificial Sequence
  Synthetic oligonucleotide
ggcttcccgatatcgtggtcgtcaccctag

SEQ ID NO: 358879 - DNA, 30 bp, Artificial Sequence
  Synthetic oligonucleotide
tcggcttatctttcttttttaaccccctag

SEQ ID NO: 358880 - DNA, 30 bp, Artificial Sequence
  Synthetic oligonucleotide
cattggtagcgagggcaatttaccccctag

SEQ ID NO: 358881 - DNA, 30 bp, Artificial Sequence
  Synthetic oligonucleotide
tagccgtgttcagtacgtggcttgccctag

SEQ ID NO: 358882 - DNA, 30 bp, Artificial Sequence
  Synthetic oligonucleotide
ggcgccctactcctatgggtacatccctag

SEQ ID NO: 358883 - DNA, 30 bp, Artificial Sequence
  Synthetic oligonucleotide
ctgcatgcatacgacagacacatagcctag

SEQ ID NO: 358884 - DNA, 30 bp, Artificial Sequence
  Synthetic oligonucleotide
ctgggccattgaagccgcgagctagcctag

SEQ ID NO: 358885 - DNA, 30 bp, Artificial Sequence
  Synthetic oligonucleotide
catgaggactaggttgcgtggcgcgcctag

SEQ ID NO: 358886 - DNA, 30 bp, Artificial Sequence
  Synthetic oligonucleotide
ttggtgcgggcggcgcggggcgaggcctag

SEQ ID NO: 358887 - DNA, 30 bp, Artificial Sequence
  Synthetic oligonucleotide
caggtaatattgggcgcttactgggcctag

SEQ ID NO: 358888 - DNA, 30 bp, Artificial Sequence
  Synthetic oligonucleotide
aaataggttcggcgattgtattctgcctag

SEQ ID NO: 358889 - DNA, 30 bp, Artificial Sequence
  Synthetic oligonucleotide
acccagttagaacgacgcttcttatcctag

SEQ ID NO: 358890 - DNA, 30 bp, Artificial Sequence
  Synthetic oligonucleotide
attttgattacttctcacttcttctcctag

SEQ ID NO: 358891 - DNA, 30 bp, Artificial Sequence
  Synthetic oligonucleotide
caattttgaatcagaaaattgaagtcctag

SEQ ID NO: 358892 - DNA, 30 bp, Artificial Sequence
  Synthetic oligonucleotide
catgcattatgtaagggtataccgtcctag

SEQ ID NO: 358893 - DNA, 30 bp, Artificial Sequence
  Synthetic oligonucleotide
gatggattacacactgtattctagagctag

SEQ ID NO: 358894 - DNA, 29 bp, Artificial Sequence
  Synthetic oligonucleotide
gcactgcttgggagggagagagtagctag

SEQ ID NO: 358895 - DNA, 30 bp, Artificial Sequence
  Synthetic oligonucleotide
ttcaggactcgcgtttcgtcgggtagctag

SEQ ID NO: 358896 - DNA, 30 bp, Artificial Sequence
  Synthetic oligonucleotide
ctgggcataaaagtttacagggcacgctag

SEQ ID NO: 358897 - DNA, 30 bp, Artificial Sequence
  Synthetic oligonucleotide
cgtgcctatgcgcatggaaatatgcgctag

SEQ ID NO: 358898 - DNA, 30 bp, Artificial Sequence
  Synthetic oligonucleotide
atgtgttcatataacagtttttgtcgctag

SEQ ID NO: 358899 - DNA, 30 bp, Artificial Sequence
  Synthetic oligonucleotide
gatctctcgtatagggtgagacttcgctag

SEQ ID NO: 358900 - DNA, 30 bp, Artificial Sequence
  Synthetic oligonucleotide
caatctgatattgacgaggaacaaggctag

SEQ ID NO: 358901 - DNA, 30 bp, Artificial Sequence
  Synthetic oligonucleotide
ttttatgggcgtcgcgggtgaacaggctag

SEQ ID NO: 358902 - DNA, 30 bp, Artificial Sequence
  Synthetic oligonucleotide
acggcgtctgacacagtaagaggcggctag

SEQ ID NO: 358903 - DNA, 30 bp, Artificial Sequence
  Synthetic oligonucleotide
gcgcagataatcgagatgcgctttggctag

SEQ ID NO: 358904 - DNA, 30 bp, Artificial Sequence
  Synthetic oligonucleotide
gttgaattaaatccgtaggggttatgctag

SEQ ID NO: 358905 - DNA, 30 bp, Artificial Sequence
  Synthetic oligonucleotide
caataaggtataagcttgcaatcctgctag

SEQ ID NO: 358906 - DNA, 30 bp, Artificial Sequence
  Synthetic oligonucleotide
caatagcaaacggtcttattgtgctgctag

SEQ ID NO: 358907 - DNA, 28 bp, Artificial Sequence
  Synthetic oligonucleotide
acctaccgtaagaactcgcaagtgctag

SEQ ID NO: 358908 - DNA, 30 bp, Artificial Sequence
  Synthetic oligonucleotide
taaggattaagcgcggttagcatttgctag

SEQ ID NO: 358909 - DNA, 30 bp, Artificial Sequence
  Synthetic oligonucleotide
gctggtcacaatcaagtgacacaaatctag

SEQ ID NO: 358910 - DNA, 30 bp, Artificial Sequence
  Synthetic oligonucleotide
gctaattgggcttgtatcctataaatctag

SEQ ID NO: 358911 - DNA, 30 bp, Artificial Sequence
  Synthetic oligonucleotide
aacgattatatccgtgtcctgctaatctag

SEQ ID NO: 358912 - DNA, 30 bp, Artificial Sequence
  Synthetic oligonucleotide
agtgtatgacttcgttgcaacgacatctag

SEQ ID NO: 358913 - DNA, 30 bp, Artificial Sequence
  Synthetic oligonucleotide
gggcagagacctttatctcgtcgcatctag

SEQ ID NO: 358914 - DNA, 30 bp, Artificial Sequence
  Synthetic oligonucleotide
ggagagactaaaggactatattatatctag

SEQ ID NO: 358915 - DNA, 30 bp, Artificial Sequence
  Synthetic oligonucleotide
ccattattatcggacgtctggagtatctag

SEQ ID NO: 358916 - DNA, 30 bp, Artificial Sequence
  Synthetic oligonucleotide
gtttgtgagaagcatatgatacgactctag

SEQ ID NO: 358917 - DNA, 30 bp, Artificial Sequence
  Synthetic oligonucleotide
cgcggcagttgaaacaaacgcatcctctag

SEQ ID NO: 358918 - DNA, 30 bp, Artificial Sequence
  Synthetic oligonucleotide
ctagagataagttgactacacgctctctag

SEQ ID NO: 358919 - DNA, 30 bp, Artificial Sequence
  Synthetic oligonucleotide
gctttcggagttggctggggggctctctag

SEQ ID NO: 358920 - DNA, 30 bp, Artificial Sequence
  Synthetic oligonucleotide
ttaagcccggacaagtatggtattctctag

SEQ ID NO: 358921 - DNA, 30 bp, Artificial Sequence
  Synthetic oligonucleotide
tatacgtcccatataatgtttcgcgtctag

SEQ ID NO: 358922 - DNA, 30 bp, Artificial Sequence
  Synthetic oligonucleotide
ggatttaaagcgtctgaccaaaaggtctag

SEQ ID NO: 358923 - DNA, 30 bp, Artificial Sequence
  Synthetic oligonucleotide
gcagccctggagcaaatggtgtcggtctag

SEQ ID NO: 358924 - DNA, 30 bp, Artificial Sequence
  Synthetic oligonucleotide
taggtttaaagccgttaattagatgtctag

SEQ ID NO: 358925 - DNA, 30 bp, Artificial Sequence
  Synthetic oligonucleotide
gatattccatagggatagcttgctgtctag

SEQ ID NO: 358926 - DNA, 30 bp, Artificial Sequence
  Synthetic oligonucleotide
ggtataatggccaccctaaaatgtgtctag

SEQ ID NO: 358927 - DNA, 30 bp, Artificial Sequence
  Synthetic oligonucleotide
acatatattgatcggtcgctacttgtctag

SEQ ID NO: 358928 - DNA, 30 bp, Artificial Sequence
  Synthetic oligonucleotide
ttaccagcgtgatttagggataaattctag

SEQ ID NO: 358929 - DNA, 30 bp, Artificial Sequence
  Synthetic oligonucleotide
atggtcccgtgtggccttattaaattctag

SEQ ID NO: 358930 - DNA, 30 bp, Artificial Sequence
  Synthetic oligonucleotide
acctgtgattcagtcaatcgtccattctag

SEQ ID NO: 358931 - DNA, 30 bp, Artificial Sequence
  Synthetic oligonucleotide
cctcttgaatctattaggcccggaaagtag

SEQ ID NO: 358932 - DNA, 30 bp, Artificial Sequence
  Synthetic oligonucleotide
ccctctcgaacgagacggtcaaccaagtag

SEQ ID NO: 358933 - DNA, 30 bp, Artificial Sequence
  Synthetic oligonucleotide
gtcaacttctgtaaacgggattccaagtag

SEQ ID NO: 358934 - DNA, 30 bp, Artificial Sequence
  Synthetic oligonucleotide
aattgaccttatcgcgtcagcatcaagtag

SEQ ID NO: 358935 - DNA, 30 bp, Artificial Sequence
  Synthetic oligonucleotide
tttgaggcaacatttagacggaggaagtag

SEQ ID NO: 358936 - DNA, 30 bp, Artificial Sequence
  Synthetic oligonucleotide
aaccgatgctcagttgctgctcggaagtag

SEQ ID NO: 358937 - DNA, 30 bp, Artificial Sequence
  Synthetic oligonucleotide
ttttcggcctcaaacacccaggggaagtag

SEQ ID NO: 358938 - DNA, 30 bp, Artificial Sequence
  Synthetic oligonucleotide
atggctacaactaggcttctgactaagtag

SEQ ID NO: 358939 - DNA, 30 bp, Artificial Sequence
  Synthetic oligonucleotide
ggagcaacctactacatttacagtaagtag

SEQ ID NO: 358940 - DNA, 30 bp, Artificial Sequence
  Synthetic oligonucleotide
gctgtacgaacggtcatggtttgacagtag

SEQ ID NO: 358941 - DNA, 30 bp, Artificial Sequence
  Synthetic oligonucleotide
ctcgcaaagagctacgtgtgggagcagtag

SEQ ID NO: 358942 - DNA, 30 bp, Artificial Sequence
  Synthetic oligonucleotide
tttatggaaaacaaccgacgccatcagtag

SEQ ID NO: 358943 - DNA, 30 bp, Artificial Sequence
  Synthetic oligonucleotide
ggcaagcgttcaagtacatcatccgagtag

SEQ ID NO: 358944 - DNA, 30 bp, Artificial Sequence
  Synthetic oligonucleotide
agaccgtttcagtactaaaagcactagtag

SEQ ID NO: 358945 - DNA, 30 bp, Artificial Sequence
  Synthetic oligonucleotide
tctagatttgcagttggtagtcactagtag

SEQ ID NO: 358946 - DNA, 30 bp, Artificial Sequence
  Synthetic oligonucleotide
ccataatactgggactactgcagctagtag

SEQ ID NO: 358947 - DNA, 30 bp, Artificial Sequence
  Synthetic oligonucleotide
agtatattgggggtggcacactgctagtag

SEQ ID NO: 358948 - DNA, 30 bp, Artificial Sequence
  Synthetic oligonucleotide
cggggcaaacttccggtgtagtagtagtag

SEQ ID NO: 358949 - DNA, 30 bp, Artificial Sequence
  Synthetic oligonucleotide
catgttcttttggttcggtgagcttagtag

SEQ ID NO: 358950 - DNA, 30 bp, Artificial Sequence
  Synthetic oligonucleotide
ccctcactgattacgtacgaccgttagtag

SEQ ID NO: 358951 - DNA, 30 bp, Artificial Sequence
  Synthetic oligonucleotide
taccaatggccagttaccgtcgtaacgtag

SEQ ID NO: 358952 - DNA, 30 bp, Artificial Sequence
  Synthetic oligonucleotide
gatgggaactttagcacgcataacacgtag

SEQ ID NO: 358953 - DNA, 30 bp, Artificial Sequence
  Synthetic oligonucleotide
ttggatacaatttttgaacacggcacgtag

SEQ ID NO: 358954 - DNA, 30 bp, Artificial Sequence
  Synthetic oligonucleotide
ctcgtcggcgaggactcgtaccctacgtag

SEQ ID NO: 358955 - DNA, 30 bp, Artificial Sequence
  Synthetic oligonucleotide
agctcaagtacacatacgagagctacgtag

SEQ ID NO: 358956 - DNA, 30 bp, Artificial Sequence
  Synthetic oligonucleotide
ggcaaacgacagttgagaattcaaccgtag

SEQ ID NO: 358957 - DNA, 30 bp, Artificial Sequence
  Synthetic oligonucleotide
tcgacgcacggtacactgtcgtcaccgtag

SEQ ID NO: 358958 - DNA, 30 bp, Artificial Sequence
  Synthetic oligonucleotide
gtggcgcgggttgggaaaggtggaccgtag

SEQ ID NO: 358959 - DNA, 30 bp, Artificial Sequence
  Synthetic oligonucleotide
ataacccatctctgagagatccccccgtag

SEQ ID NO: 358960 - DNA, 30 bp, Artificial Sequence
  Synthetic oligonucleotide
cggtgtcgtttgaagtgaaataatccgtag

SEQ ID NO: 358961 - DNA, 30 bp, Artificial Sequence
  Synthetic oligonucleotide
gcacgtcctatactctacggggctccgtag

SEQ ID NO: 358962 - DNA, 30 bp, Artificial Sequence
  Synthetic oligonucleotide
gaaaagaatagacgcatgaaagttccgtag

SEQ ID NO: 358963 - DNA, 30 bp, Artificial Sequence
  Synthetic oligonucleotide
aatatgatcacgtaagctggtgttccgtag

SEQ ID NO: 358964 - DNA, 30 bp, Artificial Sequence
  Synthetic oligonucleotide
gaccccatcgtgtcactacactttccgtag

SEQ ID NO: 358965 - DNA, 30 bp, Artificial Sequence
  Synthetic oligonucleotide
tgtattaggtaatccttatgaaaagcgtag

SEQ ID NO: 358966 - DNA, 30 bp, Artificial Sequence
  Synthetic oligonucleotide
tccgcgtgtactatacgtacctcagcgtag

SEQ ID NO: 358967 - DNA, 30 bp, Artificial Sequence
  Synthetic oligonucleotide
aacctctgagcctgccatgacaccgcgtag

SEQ ID NO: 358968 - DNA, 30 bp, Artificial Sequence
  Synthetic oligonucleotide
ccgggagctcttcaccaatgggccgcgtag

SEQ ID NO: 358969 - DNA, 30 bp, Artificial Sequence
  Synthetic oligonucleotide
gcgacaagagacagacaagttgtcgcgtag

SEQ ID NO: 358970 - DNA, 30 bp, Artificial Sequence
  Synthetic oligonucleotide
tacacgataaatggtcttgccaaggcgtag

SEQ ID NO: 358971 - DNA, 30 bp, Artificial Sequence
  Synthetic oligonucleotide
aaaggttttgggggactgatgactgcgtag

SEQ ID NO: 358972 - DNA, 30 bp, Artificial Sequence
  Synthetic oligonucleotide
tgattattacgccagagtttacaatcgtag

SEQ ID NO: 358973 - DNA, 30 bp, Artificial Sequence
  Synthetic oligonucleotide
ctcaagctatttgccggggcattctcgtag

SEQ ID NO: 358974 - DNA, 30 bp, Artificial Sequence
  Synthetic oligonucleotide
aaatggtcacaggttaacgcgtgttcgtag

SEQ ID NO: 358975 - DNA, 30 bp, Artificial Sequence
  Synthetic oligonucleotide
tgtaatttgagctataagctcatttcgtag

SEQ ID NO: 358976 - DNA, 30 bp, Artificial Sequence
  Synthetic oligonucleotide
atttcctagagagggaacctatgaaggtag

SEQ ID NO: 358977 - DNA, 30 bp, Artificial Sequence
  Synthetic oligonucleotide
accgtgtcctctcgttaatgattaaggtag

SEQ ID NO: 358978 - DNA, 30 bp, Artificial Sequence
  Synthetic oligonucleotide
aataatggacacgtcatactccggaggtag

SEQ ID NO: 358979 - DNA, 30 bp, Artificial Sequence
  Synthetic oligonucleotide
ttagttggatggaatctgtgaggtaggtag

SEQ ID NO: 358980 - DNA, 30 bp, Artificial Sequence
  Synthetic oligonucleotide
tgctagtttcatcacatggacagacggtag

SEQ ID NO: 358981 - DNA, 30 bp, Artificial Sequence
  Synthetic oligonucleotide
agggtctagagaatccagtcatgacggtag

SEQ ID NO: 358982 - DNA, 30 bp, Artificial Sequence
  Synthetic oligonucleotide
cagattgcgatgggtgaaatgggccggtag

SEQ ID NO: 358983 - DNA, 30 bp, Artificial Sequence
  Synthetic oligonucleotide
ggcaggccgatgttctaactatagcggtag

SEQ ID NO: 358984 - DNA, 30 bp, Artificial Sequence
  Synthetic oligonucleotide
ggagatgattgtgcactcgcttgtcggtag

SEQ ID NO: 358985 - DNA, 30 bp, Artificial Sequence
  Synthetic oligonucleotide
ggaagacggacataggtgtgggcagggtag

SEQ ID NO: 358986 - DNA, 30 bp, Artificial Sequence
  Synthetic oligonucleotide
gaaatcctggagggtcggatacgagggtag

SEQ ID NO: 358987 - DNA, 30 bp, Artificial Sequence
  Synthetic oligonucleotide
aacttttacaacccgatgtgatgagggtag

SEQ ID NO: 358988 - DNA, 30 bp, Artificial Sequence
  Synthetic oligonucleotide
cctccctttgtatagaaacaaaacgggtag

SEQ ID NO: 358989 - DNA, 30 bp, Artificial Sequence
  Synthetic oligonucleotide
cggcgacacactattcggccggtggggtag

SEQ ID NO: 358990 - DNA, 30 bp, Artificial Sequence
  Synthetic oligonucleotide
cttgtactatttacactgagattggggtag

SEQ ID NO: 358991 - DNA, 30 bp, Artificial Sequence
  Synthetic oligonucleotide
acaattctcctacgcagagtatatgggtag

SEQ ID NO: 358992 - DNA, 30 bp, Artificial Sequence
  Synthetic oligonucleotide
agacgccaataacctcccacatttgggtag

SEQ ID NO: 358993 - DNA, 30 bp, Artificial Sequence
  Synthetic oligonucleotide
gttctttgggaaacttgtgtatcgtggtag

SEQ ID NO: 358994 - DNA, 30 bp, Artificial Sequence
  Synthetic oligonucleotide
cgctgtatctacggagcatcgatgtggtag

SEQ ID NO: 358995 - DNA, 30 bp, Artificial Sequence
  Synthetic oligonucleotide
cgaccgcaaacagcgcaccgtatttggtag

SEQ ID NO: 358996 - DNA, 30 bp, Artificial Sequence
  Synthetic oligonucleotide
ggatacgcaacctctcgctgggacatgtag

SEQ ID NO: 358997 - DNA, 30 bp, Artificial Sequence
  Synthetic oligonucleotide
gtcgcggcaatgcaccagaattgcatgtag

SEQ ID NO: 358998 - DNA, 30 bp, Artificial Sequence
  Synthetic oligonucleotide
gagtttctaaagtgggacacacagatgtag

SEQ ID NO: 358999 - DNA, 30 bp, Artificial Sequence
  Synthetic oligonucleotide
gtcgagttccagtctacatacacgatgtag

SEQ ID NO: 359000 - DNA, 30 bp, Artificial Sequence
  Synthetic oligonucleotide
catgtagcctggttgtatagtggtatgtag

SEQ ID NO: 359001 - DNA, 30 bp, Artificial Sequence
  Synthetic oligonucleotide
agccttcaaggctggggcgatatcctgtag

SEQ ID NO: 359002 - DNA, 30 bp, Artificial Sequence
  Synthetic oligonucleotide
aaaatataaagcgaccagggagcgctgtag

SEQ ID NO: 359003 - DNA, 30 bp, Artificial Sequence
  Synthetic oligonucleotide
aaggctccaagtctgtatcttgggctgtag

SEQ ID NO: 359004 - DNA, 30 bp, Artificial Sequence
  Synthetic oligonucleotide
ccagtagccacatatagcacaccagtgtag

SEQ ID NO: 359005 - DNA, 30 bp, Artificial Sequence
  Synthetic oligonucleotide
catcatgttgcgcggccagccgcagtgtag

SEQ ID NO: 359006 - DNA, 30 bp, Artificial Sequence
  Synthetic oligonucleotide
agcctgcaattgttctagatctgagtgtag

SEQ ID NO: 359007 - DNA, 30 bp, Artificial Sequence
  Synthetic oligonucleotide
ggacaagaatgtcggaaagataccgtgtag

SEQ ID NO: 359008 - DNA, 30 bp, Artificial Sequence
  Synthetic oligonucleotide
tttgttggggcattaagtccgtgcgtgtag

SEQ ID NO: 359009 - DNA, 30 bp, Artificial Sequence
  Synthetic oligonucleotide
aaaacaatgagtcaaggtagttaggtgtag

SEQ ID NO: 359010 - DNA, 30 bp, Artificial Sequence
  Synthetic oligonucleotide
gaaaccaatctcgggatattgccggtgtag

SEQ ID NO: 359011 - DNA, 30 bp, Artificial Sequence
  Synthetic oligonucleotide
attcccatgcattcgactgatattgtgtag

SEQ ID NO: 359012 - DNA, 30 bp, Artificial Sequence
  Synthetic oligonucleotide
ggttactcccggtatgtcatggtcttgtag

SEQ ID NO: 359013 - DNA, 30 bp, Artificial Sequence
  Synthetic oligonucleotide
ggggttagtggtataatagtgttcttgtag

SEQ ID NO: 359014 - DNA, 30 bp, Artificial Sequence
  Synthetic oligonucleotide
gcactccctctttttatgactgagttgtag

SEQ ID NO: 359015 - DNA, 30 bp, Artificial Sequence
  Synthetic oligonucleotide
gttaactgctgtactaggattcggttgtag

SEQ ID NO: 359016 - DNA, 30 bp, Artificial Sequence
  Synthetic oligonucleotide
tacccatccgctgtagaggggagtttgtag

SEQ ID NO: 359017 - DNA, 30 bp, Artificial Sequence
  Synthetic oligonucleotide
gcgcaatacatatatggatactgtttgtag

SEQ ID NO: 359018 - DNA, 30 bp, Artificial Sequence
  Synthetic oligonucleotide
agttagctaagagctctgtgctaaaattag

SEQ ID NO: 359019 - DNA, 30 bp, Artificial Sequence
  Synthetic oligonucleotide
gtttatgaagtggtacggaagtaaaattag

SEQ ID NO: 359020 - DNA, 30 bp, Artificial Sequence
  Synthetic oligonucleotide
atttgtgcataggctcagggttaaaattag

SEQ ID NO: 359021 - DNA, 30 bp, Artificial Sequence
  Synthetic oligonucleotide
caatgcggggcttcgtttgatagcaattag

SEQ ID NO: 359022 - DNA, 30 bp, Artificial Sequence
  Synthetic oligonucleotide
gtgtccacgtaactggccgagtgcaattag

SEQ ID NO: 359023 - DNA, 30 bp, Artificial Sequence
  Synthetic oligonucleotide
tcttaggatcgggaggtatggcgtaattag

SEQ ID NO: 359024 - DNA, 30 bp, Artificial Sequence
  Synthetic oligonucleotide
aatgccttcgtaggctatccatgtaattag

SEQ ID NO: 359025 - DNA, 30 bp, Artificial Sequence
  Synthetic oligonucleotide
agttctcgtgacccactccactgacattag

SEQ ID NO: 359026 - DNA, 30 bp, Artificial Sequence
  Synthetic oligonucleotide
tccggtctcagcgcgtagaggtaccattag

SEQ ID NO: 359027 - DNA, 30 bp, Artificial Sequence
  Synthetic oligonucleotide
gacgggctaatggaattccagattcattag

SEQ ID NO: 359028 - DNA, 29 bp, Artificial Sequence
  Synthetic oligonucleotide
gcaagttatcagatattcagtaagattag

SEQ ID NO: 359029 - DNA, 30 bp, Artificial Sequence
  Synthetic oligonucleotide
tttgtgtgtttttcgattcggctagattag

SEQ ID NO: 359030 - DNA, 30 bp, Artificial Sequence
  Synthetic oligonucleotide
acatctgcccccggtcagaatcacgattag

SEQ ID NO: 359031 - DNA, 30 bp, Artificial Sequence
  Synthetic oligonucleotide
tcgacagataagactagaatatctgattag

SEQ ID NO: 359032 - DNA, 30 bp, Artificial Sequence
  Synthetic oligonucleotide
acgcgcgcgttgggacgctcggttgattag

SEQ ID NO: 359033 - DNA, 30 bp, Artificial Sequence
  Synthetic oligonucleotide
taaagtaaaccatctcagtccccatattag

SEQ ID NO: 359034 - DNA, 30 bp, Artificial Sequence
  Synthetic oligonucleotide
tccgaggggtactttgatccgtcatattag

SEQ ID NO: 359035 - DNA, 30 bp, Artificial Sequence
  Synthetic oligonucleotide
gaatgccaagctcataagcaaggatattag

SEQ ID NO: 359036 - DNA, 30 bp, Artificial Sequence
  Synthetic oligonucleotide
tgccgcgtcaagataatcgttagctattag

SEQ ID NO: 359037 - DNA, 30 bp, Artificial Sequence
  Synthetic oligonucleotide
acatattcatcccggtgtagctgctattag

SEQ ID NO: 359038 - DNA, 30 bp, Artificial Sequence
  Synthetic oligonucleotide
ataaagcattagttaggcgtagagtattag

SEQ ID NO: 359039 - DNA, 30 bp, Artificial Sequence
  Synthetic oligonucleotide
tcactccttactagaatcgacgcgtattag

SEQ ID NO: 359040 - DNA, 30 bp, Artificial Sequence
  Synthetic oligonucleotide
atcgatcgctacaatgcgaataattattag

SEQ ID NO: 359041 - DNA, 30 bp, Artificial Sequence
  Synthetic oligonucleotide
ggcgatctttccggataacgtatttattag

SEQ ID NO: 359042 - DNA, 30 bp, Artificial Sequence
  Synthetic oligonucleotide
caagacgatagtctgggacatctttattag

SEQ ID NO: 359043 - DNA, 30 bp, Artificial Sequence
  Synthetic oligonucleotide
gagagctgccgtacgagatgtctttattag

SEQ ID NO: 359044 - DNA, 30 bp, Artificial Sequence
  Synthetic oligonucleotide
gacacactcaagtttgatcttcaaacttag

SEQ ID NO: 359045 - DNA, 30 bp, Artificial Sequence
  Synthetic oligonucleotide
gacgtatgttgccagggcttcacaacttag

SEQ ID NO: 359046 - DNA, 30 bp, Artificial Sequence
  Synthetic oligonucleotide
gaaggggtggagcaaacgaagcacacttag

SEQ ID NO: 359047 - DNA, 30 bp, Artificial Sequence
  Synthetic oligonucleotide
ggcatgtcaaacatgccaatagacacttag

SEQ ID NO: 359048 - DNA, 30 bp, Artificial Sequence
  Synthetic oligonucleotide
accgcaacttggccatgaagttacacttag

SEQ ID NO: 359049 - DNA, 30 bp, Artificial Sequence
  Synthetic oligonucleotide
acgtctgccgggaggatccggcggacttag

SEQ ID NO: 359050 - DNA, 30 bp, Artificial Sequence
  Synthetic oligonucleotide
ttgtttactacaaggacattctatacttag

SEQ ID NO: 359051 - DNA, 30 bp, Artificial Sequence
  Synthetic oligonucleotide
aacatctttgaatctaaaggttttacttag

SEQ ID NO: 359052 - DNA, 30 bp, Artificial Sequence
  Synthetic oligonucleotide
atattaggctcatagtcgcgttttccttag

SEQ ID NO: 359053 - DNA, 30 bp, Artificial Sequence
  Synthetic oligonucleotide
aggctatggccaatctcgaatgaagcttag

SEQ ID NO: 359054 - DNA, 30 bp, Artificial Sequence
  Synthetic oligonucleotide
cggcaggtttccgcctaagtcgacgcttag

SEQ ID NO: 359055 - DNA, 30 bp, Artificial Sequence
  Synthetic oligonucleotide
tgtgaaccccgtccgtgtaagaaggcttag

SEQ ID NO: 359056 - DNA, 30 bp, Artificial Sequence
  Synthetic oligonucleotide
taactgcgaatttgaaaacggtaggcttag

SEQ ID NO: 359057 - DNA, 30 bp, Artificial Sequence
  Synthetic oligonucleotide
cgcgttcagtctaaaggctcctaatcttag

SEQ ID NO: 359058 - DNA, 30 bp, Artificial Sequence
  Synthetic oligonucleotide
gcctaagttctgtagatctgaggatcttag

SEQ ID NO: 359059 - DNA, 30 bp, Artificial Sequence
  Synthetic oligonucleotide
ctctatatacgttttgtactgggatcttag

SEQ ID NO: 359060 - DNA, 30 bp, Artificial Sequence
  Synthetic oligonucleotide
gctatcgtgtccggtttgctgatatcttag

SEQ ID NO: 359061 - DNA, 30 bp, Artificial Sequence
  Synthetic oligonucleotide
aatgtcatcgccccccagtgattatcttag

SEQ ID NO: 359062 - DNA, 30 bp, Artificial Sequence
  Synthetic oligonucleotide
actgaaaacggtcgtgtctagaattcttag

SEQ ID NO: 359063 - DNA, 30 bp, Artificial Sequence
  Synthetic oligonucleotide
cctccataactgtcccctgttctttcttag

SEQ ID NO: 359064 - DNA, 30 bp, Artificial Sequence
  Synthetic oligonucleotide
aacatttctatcatgaggtgactaagttag

SEQ ID NO: 359065 - DNA, 30 bp, Artificial Sequence
  Synthetic oligonucleotide
tcattcattatggaatgtcaggtaagttag

SEQ ID NO: 359066 - DNA, 30 bp, Artificial Sequence
  Synthetic oligonucleotide
cttattgtacgagttggggggtcgagttag

SEQ ID NO: 359067 - DNA, 30 bp, Artificial Sequence
  Synthetic oligonucleotide
tgttaaatattttgtctcaggtggagttag

SEQ ID NO: 359068 - DNA, 30 bp, Artificial Sequence
  Synthetic oligonucleotide
atgcggggccctacacgtagttggagttag

SEQ ID NO: 359069 - DNA, 30 bp, Artificial Sequence
  Synthetic oligonucleotide
ccggtttgttatataccttgagatagttag

SEQ ID NO: 359070 - DNA, 30 bp, Artificial Sequence
  Synthetic oligonucleotide
gtaagacggcctagttagtttcctagttag

SEQ ID NO: 359071 - DNA, 30 bp, Artificial Sequence
  Synthetic oligonucleotide
tctagtaactacatagtcgtgggtagttag

SEQ ID NO: 359072 - DNA, 30 bp, Artificial Sequence
  Synthetic oligonucleotide
ccctgtcactattttgcacagtttagttag

SEQ ID NO: 359073 - DNA, 30 bp, Artificial Sequence
  Synthetic oligonucleotide
ggccaaggtcctaatctttgatgacgttag

SEQ ID NO: 359074 - DNA, 30 bp, Artificial Sequence
  Synthetic oligonucleotide
cagggccgatgcaaactacaggtacgttag

SEQ ID NO: 359075 - DNA, 30 bp, Artificial Sequence
  Synthetic oligonucleotide
aaatcaatagtcatagattggaaccgttag

SEQ ID NO: 359076 - DNA, 30 bp, Artificial Sequence
  Synthetic oligonucleotide
cttgccagtgcgcaccggggtccccgttag

SEQ ID NO: 359077 - DNA, 30 bp, Artificial Sequence
  Synthetic oligonucleotide
agccgagatcttgtgagcgcgaagcgttag

SEQ ID NO: 359078 - DNA, 30 bp, Artificial Sequence
  Synthetic oligonucleotide
cgagtggttcaggcagacgctaggcgttag

SEQ ID NO: 359079 - DNA, 30 bp, Artificial Sequence
  Synthetic oligonucleotide
ttaggggcagtaccgccgggtttgcgttag

SEQ ID NO: 359080 - DNA, 30 bp, Artificial Sequence
  Synthetic oligonucleotide
aatgctgaccaggaaaagatagctcgttag

SEQ ID NO: 359081 - DNA, 30 bp, Artificial Sequence
  Synthetic oligonucleotide
atttctgtaactagcgctctatttcgttag

SEQ ID NO: 359082 - DNA, 30 bp, Artificial Sequence
  Synthetic oligonucleotide
ccaatttggtcatacggtcgtacaggttag

SEQ ID NO: 359083 - DNA, 30 bp, Artificial Sequence
  Synthetic oligonucleotide
tgcgagtgagggtcacactccccaggttag

SEQ ID NO: 359084 - DNA, 30 bp, Artificial Sequence
  Synthetic oligonucleotide
gtgcgaatgcttgaaggcattctaggttag

SEQ ID NO: 359085 - DNA, 30 bp, Artificial Sequence
  Synthetic oligonucleotide
gccgagttattatcggtttcatgcggttag

SEQ ID NO: 359086 - DNA, 30 bp, Artificial Sequence
  Synthetic oligonucleotide
atctacgtctcgtcgcagataccgggttag

SEQ ID NO: 359087 - DNA, 30 bp, Artificial Sequence
  Synthetic oligonucleotide
taaaactatagtggcttcttacatggttag

SEQ ID NO: 359088 - DNA, 30 bp, Artificial Sequence
  Synthetic oligonucleotide
atcatcgagctactcctataaaaatgttag

SEQ ID NO: 359089 - DNA, 30 bp, Artificial Sequence
  Synthetic oligonucleotide
ggtgttgtcgcgggtcccttggaatgttag

SEQ ID NO: 359090 - DNA, 30 bp, Artificial Sequence
  Synthetic oligonucleotide
ccgggcacttgtattaaccccatatgttag

SEQ ID NO: 359091 - DNA, 30 bp, Artificial Sequence
  Synthetic oligonucleotide
caatgatataggacgcgataaacctgttag

SEQ ID NO: 359092 - DNA, 30 bp, Artificial Sequence
  Synthetic oligonucleotide
gaatacatagaaaaatgtccactctgttag

SEQ ID NO: 359093 - DNA, 30 bp, Artificial Sequence
  Synthetic oligonucleotide
gttctcgatctcgttgtcgtatgttgttag

SEQ ID NO: 359094 - DNA, 30 bp, Artificial Sequence
  Synthetic oligonucleotide
tgcagctacaatggaattgagtgaatttag

SEQ ID NO: 359095 - DNA, 30 bp, Artificial Sequence
  Synthetic oligonucleotide
aaaaatttagtcgttaatacggtaatttag

SEQ ID NO: 359096 - DNA, 30 bp, Artificial Sequence
  Synthetic oligonucleotide
cagccttaactatgttgatttaacatttag

SEQ ID NO: 359097 - DNA, 30 bp, Artificial Sequence
  Synthetic oligonucleotide
cctcttcaggttgacattagtatcatttag

SEQ ID NO: 359098 - DNA, 30 bp, Artificial Sequence
  Synthetic oligonucleotide
agatcagaaagggtagtgacatcgatttag

SEQ ID NO: 359099 - DNA, 30 bp, Artificial Sequence
  Synthetic oligonucleotide
gccttctgggccagtttcagtgatatttag

SEQ ID NO: 359100 - DNA, 30 bp, Artificial Sequence
  Synthetic oligonucleotide
gttgagggctcaaaccccggaaatctttag

SEQ ID NO: 359101 - DNA, 30 bp, Artificial Sequence
  Synthetic oligonucleotide
taaacaattgtaaaggctcgttaagtttag

SEQ ID NO: 359102 - DNA, 30 bp, Artificial Sequence
  Synthetic oligonucleotide
ctttactgagacttaagctgaggagtttag

SEQ ID NO: 359103 - DNA, 30 bp, Artificial Sequence
  Synthetic oligonucleotide
caaaatatgaccctggggttggtggtttag

SEQ ID NO: 359104 - DNA, 30 bp, Artificial Sequence
  Synthetic oligonucleotide
ctgggcaactctgctaatttttatgtttag

SEQ ID NO: 359105 - DNA, 30 bp, Artificial Sequence
  Synthetic oligonucleotide
tgtgtactgtcggtacataatcaattttag

SEQ ID NO: 359106 - DNA, 30 bp, Artificial Sequence
  Synthetic oligonucleotide
aagtttacatcctatcaaatttaattttag

SEQ ID NO: 359107 - DNA, 30 bp, Artificial Sequence
  Synthetic oligonucleotide
caggaatcatatgctctggtttgattttag

SEQ ID NO: 359108 - DNA, 30 bp, Artificial Sequence
  Synthetic oligonucleotide
tctttgtatatcaactgtgtgaggttttag

SEQ ID NO: 359109 - DNA, 30 bp, Artificial Sequence
  Synthetic oligonucleotide
gtacatcctccaaagactatgatgttttag

SEQ ID NO: 359110 - DNA, 30 bp, Artificial Sequence
  Synthetic oligonucleotide
ttcgttcaggatctttatggcaatttttag

SEQ ID NO: 359111 - DNA, 30 bp, Artificial Sequence
  Synthetic oligonucleotide
tgtacactatgtacatgatcccatttttag

SEQ ID NO: 359112 - DNA, 30 bp, Artificial Sequence
  Synthetic oligonucleotide
tgtttaggaaggctcaagccagatttttag

SEQ ID NO: 359113 - DNA, 30 bp, Artificial Sequence
  Synthetic oligonucleotide
caccttgaaacattctcagttgctttttag

SEQ ID NO: 359114 - DNA, 30 bp, Artificial Sequence
  Synthetic oligonucleotide
ctactcctcttccggtgcagttccaaaacg

SEQ ID NO: 359115 - DNA, 30 bp, Artificial Sequence
  Synthetic oligonucleotide
gtccgcgctcttcgaattagtagcaaaacg

SEQ ID NO: 359116 - DNA, 30 bp, Artificial Sequence
  Synthetic oligonucleotide
atgctctaacgtacgtggtcgcggaaaacg

SEQ ID NO: 359117 - DNA, 30 bp, Artificial Sequence
  Synthetic oligonucleotide
tatattggagtgttatttgccgataaaacg

SEQ ID NO: 359118 - DNA, 30 bp, Artificial Sequence
  Synthetic oligonucleotide
ttgactcgtgcgtcgtagtaacctaaaacg

SEQ ID NO: 359119 - DNA, 30 bp, Artificial Sequence
  Synthetic oligonucleotide
caaagaacctacatggtgattccacaaacg

SEQ ID NO: 359120 - DNA, 30 bp, Artificial Sequence
  Synthetic oligonucleotide
atttgtctcggctgaaggttaggacaaacg

SEQ ID NO: 359121 - DNA, 30 bp, Artificial Sequence
  Synthetic oligonucleotide
gtaacgaagcggatctattacgcgcaaacg

SEQ ID NO: 359122 - DNA, 30 bp, Artificial Sequence
  Synthetic oligonucleotide
tgtagaggctcagcttagctatggcaaacg

SEQ ID NO: 359123 - DNA, 30 bp, Artificial Sequence
  Synthetic oligonucleotide
ttacccgtaaacgtgattcagtaagaaacg

SEQ ID NO: 359124 - DNA, 30 bp, Artificial Sequence
  Synthetic oligonucleotide
ggagagtcgctggaccccgctggagaaacg

SEQ ID NO: 359125 - DNA, 30 bp, Artificial Sequence
  Synthetic oligonucleotide
ttagacaaaagcagaaggtggttagaaacg

SEQ ID NO: 359126 - DNA, 30 bp, Artificial Sequence
  Synthetic oligonucleotide
cttccaactgatgttgaaaagtcataaacg

SEQ ID NO: 359127 - DNA, 30 bp, Artificial Sequence
  Synthetic oligonucleotide
gtgtggggtattcataaacgcggataaacg

SEQ ID NO: 359128 - DNA, 30 bp, Artificial Sequence
  Synthetic oligonucleotide
cctttgtaatgcctcaacggtttataaacg

SEQ ID NO: 359129 - DNA, 30 bp, Artificial Sequence
  Synthetic oligonucleotide
ttagtgaccaatgggttgaaacactaaacg

SEQ ID NO: 359130 - DNA, 30 bp, Artificial Sequence
  Synthetic oligonucleotide
ccttcttagtggatccagcctatctaaacg

SEQ ID NO: 359131 - DNA, 30 bp, Artificial Sequence
  Synthetic oligonucleotide
agtacttcatgcgatgaggcgttgtaaacg

SEQ ID NO: 359132 - DNA, 30 bp, Artificial Sequence
  Synthetic oligonucleotide
tcggcctcacttatattgctttattaaacg

SEQ ID NO: 359133 - DNA, 30 bp, Artificial Sequence
  Synthetic oligonucleotide
tccgacataggtatcgtttcaggcacaacg

SEQ ID NO: 359134 - DNA, 30 bp, Artificial Sequence
  Synthetic oligonucleotide
cggacagtttctgaggacaatttcacaacg

SEQ ID NO: 359135 - DNA, 30 bp, Artificial Sequence
  Synthetic oligonucleotide
cccgataacactagagacctctagacaacg

SEQ ID NO: 359136 - DNA, 30 bp, Artificial Sequence
  Synthetic oligonucleotide
tgaccatgagcgcctctgctgtagacaacg

SEQ ID NO: 359137 - DNA, 30 bp, Artificial Sequence
  Synthetic oligonucleotide
ttccgtcaataatagggggagtcgacaacg

SEQ ID NO: 359138 - DNA, 30 bp, Artificial Sequence
  Synthetic oligonucleotide
gagaaatatgtgtagaattctgtgacaacg

SEQ ID NO: 359139 - DNA, 30 bp, Artificial Sequence
  Synthetic oligonucleotide
attataattggaacctgggagtttacaacg

SEQ ID NO: 359140 - DNA, 30 bp, Artificial Sequence
  Synthetic oligonucleotide
aaggcctataattgcatgtctaaaccaacg

SEQ ID NO: 359141 - DNA, 30 bp, Artificial Sequence
  Synthetic oligonucleotide
ggatatgaggccggtgattaccacccaacg

SEQ ID NO: 359142 - DNA, 30 bp, Artificial Sequence
  Synthetic oligonucleotide
accctaggctatcgagggaggcggccaacg

SEQ ID NO: 359143 - DNA, 30 bp, Artificial Sequence
  Synthetic oligonucleotide
ctcagttttaaaaagtgccggtctccaacg

SEQ ID NO: 359144 - DNA, 30 bp, Artificial Sequence
  Synthetic oligonucleotide
gcgagcgttccgtcaaagacataagcaacg

SEQ ID NO: 359145 - DNA, 30 bp, Artificial Sequence
  Synthetic oligonucleotide
cctctcggacagcggaggcgatacgcaacg

SEQ ID NO: 359146 - DNA, 30 bp, Artificial Sequence
  Synthetic oligonucleotide
aggggatcggttagccacggacaggcaacg

SEQ ID NO: 359147 - DNA, 30 bp, Artificial Sequence
  Synthetic oligonucleotide
taaatcgtggtgcgttcgccaggtgcaacg

SEQ ID NO: 359148 - DNA, 30 bp, Artificial Sequence
  Synthetic oligonucleotide
ctcatgtcctcagtcgataggtttgcaacg

SEQ ID NO: 359149 - DNA, 30 bp, Artificial Sequence
  Synthetic oligonucleotide
gccccgatactcgcagtctatccatcaacg

SEQ ID NO: 359150 - DNA, 30 bp, Artificial Sequence
  Synthetic oligonucleotide
ggcgcctagttgaacgattcaagatcaacg

SEQ ID NO: 359151 - DNA, 30 bp, Artificial Sequence
  Synthetic oligonucleotide
tagaataggtaactatgcggtagctcaacg

SEQ ID NO: 359152 - DNA, 30 bp, Artificial Sequence
  Synthetic oligonucleotide
acacaatcgtttgattttttgttaagaacg

SEQ ID NO: 359153 - DNA, 30 bp, Artificial Sequence
  Synthetic oligonucleotide
atatcccgtccaatgggatatcacagaacg

SEQ ID NO: 359154 - DNA, 30 bp, Artificial Sequence
  Synthetic oligonucleotide
catacggacccatcacgcgtcctcagaacg

SEQ ID NO: 359155 - DNA, 30 bp, Artificial Sequence
  Synthetic oligonucleotide
tcctgtgtgaaaccactgaggaggagaacg

SEQ ID NO: 359156 - DNA, 30 bp, Artificial Sequence
  Synthetic oligonucleotide
atgaacgtgtatgggggtacggggagaacg

SEQ ID NO: 359157 - DNA, 30 bp, Artificial Sequence
  Synthetic oligonucleotide
atagtcgggcttcacaaggcagtgagaacg

SEQ ID NO: 359158 - DNA, 30 bp, Artificial Sequence
  Synthetic oligonucleotide
ggattcattaaagttgtaacacctagaacg

SEQ ID NO: 359159 - DNA, 30 bp, Artificial Sequence
  Synthetic oligonucleotide
gtaggagattataacgatatctctagaacg

SEQ ID NO: 359160 - DNA, 30 bp, Artificial Sequence
  Synthetic oligonucleotide
catgttgcgacgttagacaaatctcgaacg

SEQ ID NO: 359161 - DNA, 30 bp, Artificial Sequence
  Synthetic oligonucleotide
atggatcccactaacctcacacgtcgaacg

SEQ ID NO: 359162 - DNA, 30 bp, Artificial Sequence
  Synthetic oligonucleotide
aaataaggttactcatcgtctaaaggaacg

SEQ ID NO: 359163 - DNA, 30 bp, Artificial Sequence
  Synthetic oligonucleotide
agaggttggggcagacagtcctcaggaacg

SEQ ID NO: 359164 - DNA, 30 bp, Artificial Sequence
  Synthetic oligonucleotide
gcagcatagttaaatctccgcgccggaacg

SEQ ID NO: 359165 - DNA, 30 bp, Artificial Sequence
  Synthetic oligonucleotide
cgtttgtcatacccaatcgcgactggaacg

SEQ ID NO: 359166 - DNA, 30 bp, Artificial Sequence
  Synthetic oligonucleotide
tatgcgaacactactatggccgttggaacg

SEQ ID NO: 359167 - DNA, 30 bp, Artificial Sequence
  Synthetic oligonucleotide
cacagcttaagctcagagacgcaatgaacg

SEQ ID NO: 359168 - DNA, 30 bp, Artificial Sequence
  Synthetic oligonucleotide
actacggttttctgatgaggagaatgaacg

SEQ ID NO: 359169 - DNA, 30 bp, Artificial Sequence
  Synthetic oligonucleotide
aaaaatggcatctccgacacttgatgaacg

SEQ ID NO: 359170 - DNA, 30 bp, Artificial Sequence
  Synthetic oligonucleotide
ggtgttcgcgctcagtcgacgtgctgaacg

SEQ ID NO: 359171 - DNA, 30 bp, Artificial Sequence
  Synthetic oligonucleotide
aaaagagatacgaggtggttagcgtgaacg

SEQ ID NO: 359172 - DNA, 30 bp, Artificial Sequence
  Synthetic oligonucleotide
atcgatgcctactctaggggtttgtgaacg

SEQ ID NO: 359173 - DNA, 30 bp, Artificial Sequence
  Synthetic oligonucleotide
tcttcgccatgccatgaagggccttgaacg

SEQ ID NO: 359174 - DNA, 30 bp, Artificial Sequence
  Synthetic oligonucleotide
cctttatccatcaaccttagacacataacg

SEQ ID NO: 359175 - DNA, 30 bp, Artificial Sequence
  Synthetic oligonucleotide
ctgcacattggccagcaggactacataacg

SEQ ID NO: 359176 - DNA, 30 bp, Artificial Sequence
  Synthetic oligonucleotide
ctataacctattcgagtttattcgataacg

SEQ ID NO: 359177 - DNA, 30 bp, Artificial Sequence
  Synthetic oligonucleotide
gaggcgcgattgacggatgatctgataacg

SEQ ID NO: 359178 - DNA, 30 bp, Artificial Sequence
  Synthetic oligonucleotide
agggacaggttatactaaacgattataacg

SEQ ID NO: 359179 - DNA, 30 bp, Artificial Sequence
  Synthetic oligonucleotide
gccctataagtggatatgtttattataacg

SEQ ID NO: 359180 - DNA, 30 bp, Artificial Sequence
  Synthetic oligonucleotide
gcactagccttcggtacttttaagctaacg

SEQ ID NO: 359181 - DNA, 30 bp, Artificial Sequence
  Synthetic oligonucleotide
tgacagccaaaggataccacgtggctaacg

SEQ ID NO: 359182 - DNA, 30 bp, Artificial Sequence
  Synthetic oligonucleotide
atgtgatgattcacatttcgttggctaacg

SEQ ID NO: 359183 - DNA, 30 bp, Artificial Sequence
  Synthetic oligonucleotide
gtggataccccggtttaaactcctctaacg

SEQ ID NO: 359184 - DNA, 31 bp, Artificial Sequence
  Synthetic oligonucleotide
gcaagatatgtaacattagatgtttctaacg

SEQ ID NO: 359185 - DNA, 30 bp, Artificial Sequence
  Synthetic oligonucleotide
tctgtacgagatgtggtgaaggcagtaacg

SEQ ID NO: 359186 - DNA, 30 bp, Artificial Sequence
  Synthetic oligonucleotide
gacacgggcttagctaaatgaagagtaacg

SEQ ID NO: 359187 - DNA, 30 bp, Artificial Sequence
  Synthetic oligonucleotide
accagggttgatatgaaggcaggagtaacg

SEQ ID NO: 359188 - DNA, 30 bp, Artificial Sequence
  Synthetic oligonucleotide
cagcggtacgtctgctctaggctcgtaacg

SEQ ID NO: 359189 - DNA, 30 bp, Artificial Sequence
  Synthetic oligonucleotide
aaggatcgctgaagcgattcattcgtaacg

SEQ ID NO: 359190 - DNA, 30 bp, Artificial Sequence
  Synthetic oligonucleotide
gataaaactaaattaacaggttcggtaacg

SEQ ID NO: 359191 - DNA, 30 bp, Artificial Sequence
  Synthetic oligonucleotide
cgttagcggtcagacagcgtcctggtaacg

SEQ ID NO: 359192 - DNA, 30 bp, Artificial Sequence
  Synthetic oligonucleotide
ttcgctagtgtggacgatcaaactgtaacg

SEQ ID NO: 359193 - DNA, 30 bp, Artificial Sequence
  Synthetic oligonucleotide
ctaaagtcgatgattgatttgactgtaacg

SEQ ID NO: 359194 - DNA, 30 bp, Artificial Sequence
  Synthetic oligonucleotide
tagcaggtactggcgcgtaccgttgtaacg

SEQ ID NO: 359195 - DNA, 30 bp, Artificial Sequence
  Synthetic oligonucleotide
atcatgtcttttaaacaacgccacttaacg

SEQ ID NO: 359196 - DNA, 30 bp, Artificial Sequence
  Synthetic oligonucleotide
caattggatatcagcgtctagctcttaacg

SEQ ID NO: 359197 - DNA, 30 bp, Artificial Sequence
  Synthetic oligonucleotide
gcggcattacataacatcccagtcttaacg

SEQ ID NO: 359198 - DNA, 30 bp, Artificial Sequence
  Synthetic oligonucleotide
ttaacccgtggcgccactaatatgttaacg

SEQ ID NO: 359199 - DNA, 30 bp, Artificial Sequence
  Synthetic oligonucleotide
atataacggatatgggtgaaagtgttaacg

SEQ ID NO: 359200 - DNA, 30 bp, Artificial Sequence
  Synthetic oligonucleotide
aaccttggactacacatcagagctttaacg

SEQ ID NO: 359201 - DNA, 30 bp, Artificial Sequence
  Synthetic oligonucleotide
caacgtttggaatcgtcagccagtttaacg

SEQ ID NO: 359202 - DNA, 30 bp, Artificial Sequence
  Synthetic oligonucleotide
tgatcagcccgtcttatcgtgtttttaacg

SEQ ID NO: 359203 - DNA, 30 bp, Artificial Sequence
  Synthetic oligonucleotide
cccgttaatatgcgcataaaagcaaacacg

SEQ ID NO: 359204 - DNA, 30 bp, Artificial Sequence
  Synthetic oligonucleotide
taaccatacaatgaaatttgagtcaacacg

SEQ ID NO: 359205 - DNA, 30 bp, Artificial Sequence
  Synthetic oligonucleotide
atctgcaactaattagtttctgtgaacacg

SEQ ID NO: 359206 - DNA, 30 bp, Artificial Sequence
  Synthetic oligonucleotide
gggtttttctggttaggtaagtctaacacg

SEQ ID NO: 359207 - DNA, 30 bp, Artificial Sequence
  Synthetic oligonucleotide
agccagttgaacgggggccaaggacacacg

SEQ ID NO: 359208 - DNA, 30 bp, Artificial Sequence
  Synthetic oligonucleotide
gaaaacgcgtatttacaccagcagcacacg

SEQ ID NO: 359209 - DNA, 30 bp, Artificial Sequence
  Synthetic oligonucleotide
tctgtgtaggttcctcagggatgtcacacg

SEQ ID NO: 359210 - DNA, 30 bp, Artificial Sequence
  Synthetic oligonucleotide
aattagagagtgggttacctcccagacacg

SEQ ID NO: 359211 - DNA, 30 bp, Artificial Sequence
  Synthetic oligonucleotide
gttgtttgtctggggcaagagctagacacg

SEQ ID NO: 359212 - DNA, 30 bp, Artificial Sequence
  Synthetic oligonucleotide
cgcgtattgagcagaagcgccgaggacacg

SEQ ID NO: 359213 - DNA, 30 bp, Artificial Sequence
  Synthetic oligonucleotide
tctagctcgtgtggtcatcagccggacacg

SEQ ID NO: 359214 - DNA, 30 bp, Artificial Sequence
  Synthetic oligonucleotide
acaacgttgtagtaacctataggggacacg

SEQ ID NO: 359215 - DNA, 30 bp, Artificial Sequence
  Synthetic oligonucleotide
caacaccaacaggaggcgatgggggacacg

SEQ ID NO: 359216 - DNA, 30 bp, Artificial Sequence
  Synthetic oligonucleotide
gatctgattctgtaccggccaatggacacg

SEQ ID NO: 359217 - DNA, 30 bp, Artificial Sequence
  Synthetic oligonucleotide
gacgacttagttgactacgatattgacacg

SEQ ID NO: 359218 - DNA, 30 bp, Artificial Sequence
  Synthetic oligonucleotide
ggtataggcagcaatgagaaacaatacacg

SEQ ID NO: 359219 - DNA, 30 bp, Artificial Sequence
  Synthetic oligonucleotide
tgccaggccagaggcaggacgagatacacg

SEQ ID NO: 359220 - DNA, 30 bp, Artificial Sequence
  Synthetic oligonucleotide
agattagtggcaggatggggcggctacacg

SEQ ID NO: 359221 - DNA, 30 bp, Artificial Sequence
  Synthetic oligonucleotide
gggctgatcctcccttgtacggagtacacg

SEQ ID NO: 359222 - DNA, 30 bp, Artificial Sequence
  Synthetic oligonucleotide
aattatcgagcacagcttacttagtacacg

SEQ ID NO: 359223 - DNA, 30 bp, Artificial Sequence
  Synthetic oligonucleotide
tctatgtacgcgtaaggcctagggtacacg

SEQ ID NO: 359224 - DNA, 30 bp, Artificial Sequence
  Synthetic oligonucleotide
ggcggctctttgcacttatgcaattacacg

SEQ ID NO: 359225 - DNA, 30 bp, Artificial Sequence
  Synthetic oligonucleotide
caaccgtgcagtatttaggttacttacacg

SEQ ID NO: 359226 - DNA, 30 bp, Artificial Sequence
  Synthetic oligonucleotide
catgattacgtgttattttgcagttacacg

SEQ ID NO: 359227 - DNA, 30 bp, Artificial Sequence
  Synthetic oligonucleotide
tacgtgtttctcaggggatgtctttacacg

SEQ ID NO: 359228 - DNA, 30 bp, Artificial Sequence
  Synthetic oligonucleotide
aacatgaaagtaacttttatagtttacacg

SEQ ID NO: 359229 - DNA, 30 bp, Artificial Sequence
  Synthetic oligonucleotide
atcacgtatggtaatcgtgtggcaaccacg

SEQ ID NO: 359230 - DNA, 30 bp, Artificial Sequence
  Synthetic oligonucleotide
accacggacatctgacttgcgtgcaccacg

SEQ ID NO: 359231 - DNA, 30 bp, Artificial Sequence
  Synthetic oligonucleotide
aagtatctacgtgggtccgctaagaccacg

SEQ ID NO: 359232 - DNA, 30 bp, Artificial Sequence
  Synthetic oligonucleotide
ggtttcgccgtgtacggtacatcgaccacg

SEQ ID NO: 359233 - DNA, 30 bp, Artificial Sequence
  Synthetic oligonucleotide
aaatcccccgacagaactcatcggaccacg

SEQ ID NO: 359234 - DNA, 30 bp, Artificial Sequence
  Synthetic oligonucleotide
gtttcgatactgaaaaatgttggacccacg

SEQ ID NO: 359235 - DNA, 30 bp, Artificial Sequence
  Synthetic oligonucleotide
tatcgtctttcaaggtgcctataccccacg

SEQ ID NO: 359236 - DNA, 30 bp, Artificial Sequence
  Synthetic oligonucleotide
ctagaataagttctgatgggcactcccacg

SEQ ID NO: 359237 - DNA, 30 bp, Artificial Sequence
  Synthetic oligonucleotide
aacgcaccctttgctgtgtctcctcccacg

SEQ ID NO: 359238 - DNA, 30 bp, Artificial Sequence
  Synthetic oligonucleotide
tgctatgctcgcctaatacgaatagccacg

SEQ ID NO: 359239 - DNA, 30 bp, Artificial Sequence
  Synthetic oligonucleotide
ttggaatttttatacataggccccgccacg

SEQ ID NO: 359240 - DNA, 30 bp, Artificial Sequence
  Synthetic oligonucleotide
ctgcgcagcctgaaataggtgtaggccacg

SEQ ID NO: 359241 - DNA, 30 bp, Artificial Sequence
  Synthetic oligonucleotide
acacaagagcccgagacgttgccggccacg

SEQ ID NO: 359242 - DNA, 30 bp, Artificial Sequence
  Synthetic oligonucleotide
tatcgggtttactatacgagaagggccacg

SEQ ID NO: 359243 - DNA, 30 bp, Artificial Sequence
  Synthetic oligonucleotide
actaggggccgttcacctggcggggccacg

SEQ ID NO: 359244 - DNA, 30 bp, Artificial Sequence
  Synthetic oligonucleotide
gtctcttgcagtttcgttttaatggccacg

SEQ ID NO: 359245 - DNA, 30 bp, Artificial Sequence
  Synthetic oligonucleotide
ttttgcgtccggttacgacattgatccacg

SEQ ID NO: 359246 - DNA, 30 bp, Artificial Sequence
  Synthetic oligonucleotide
gcgacgcagacagacccacagatatccacg

SEQ ID NO: 359247 - DNA, 30 bp, Artificial Sequence
  Synthetic oligonucleotide
cttttagaaattctctggagtatctccacg

SEQ ID NO: 359248 - DNA, 30 bp, Artificial Sequence
  Synthetic oligonucleotide
gtgactattggtcctcggtgagggtccacg

SEQ ID NO: 359249 - DNA, 30 bp, Artificial Sequence
  Synthetic oligonucleotide
taatatatagtggacgtgagaatgtccacg

SEQ ID NO: 359250 - DNA, 30 bp, Artificial Sequence
  Synthetic oligonucleotide
tatcttcacaggagtacttgaccttccacg

SEQ ID NO: 359251 - DNA, 29 bp, Artificial Sequence
  Synthetic oligonucleotide
gagcaaacataccgtggccggtttccacg

SEQ ID NO: 359252 - DNA, 30 bp, Artificial Sequence
  Synthetic oligonucleotide
ataatatttttctgaaacattagaagcacg

SEQ ID NO: 359253 - DNA, 30 bp, Artificial Sequence
  Synthetic oligonucleotide
cgtacctgctacttgaaatatcgtagcacg

SEQ ID NO: 359254 - DNA, 30 bp, Artificial Sequence
  Synthetic oligonucleotide
gtaccaattgactccgcgaagtttagcacg

SEQ ID NO: 359255 - DNA, 30 bp, Artificial Sequence
  Synthetic oligonucleotide
acagtggctcggaaaagagttacacgcacg

SEQ ID NO: 359256 - DNA, 30 bp, Artificial Sequence
  Synthetic oligonucleotide
gtgttggggtatgcactatgcatacgcacg

SEQ ID NO: 359257 - DNA, 30 bp, Artificial Sequence
  Synthetic oligonucleotide
tgcacgaagcgcacacacgcgtgccgcacg

SEQ ID NO: 359258 - DNA, 30 bp, Artificial Sequence
  Synthetic oligonucleotide
tttagcgtctatacgaatattctccgcacg

SEQ ID NO: 359259 - DNA, 30 bp, Artificial Sequence
  Synthetic oligonucleotide
agggaattgagatgcgggccctagcgcacg

SEQ ID NO: 359260 - DNA, 30 bp, Artificial Sequence
  Synthetic oligonucleotide
tgtcttccatcaccgttatctcttcgcacg

SEQ ID NO: 359261 - DNA, 30 bp, Artificial Sequence
  Synthetic oligonucleotide
gttgagaaagcgtttccgggataaggcacg

SEQ ID NO: 359262 - DNA, 30 bp, Artificial Sequence
  Synthetic oligonucleotide
agtagcgcttgccttgctgtcaggggcacg

SEQ ID NO: 359263 - DNA, 30 bp, Artificial Sequence
  Synthetic oligonucleotide
tatgtagagccaggcaaacactatggcacg

SEQ ID NO: 359264 - DNA, 30 bp, Artificial Sequence
  Synthetic oligonucleotide
cgtagctactgcagagagttgactggcacg

SEQ ID NO: 359265 - DNA, 30 bp, Artificial Sequence
  Synthetic oligonucleotide
acgttcttggtcccgtgaagcggtggcacg

SEQ ID NO: 359266 - DNA, 31 bp, Artificial Sequence
  Synthetic oligonucleotide
gcaggtaaatttgtttgacaggccatgcacg

SEQ ID NO: 359267 - DNA, 30 bp, Artificial Sequence
  Synthetic oligonucleotide
gatgtacgctgccccgaagttgtatgcacg

SEQ ID NO: 359268 - DNA, 30 bp, Artificial Sequence
  Synthetic oligonucleotide
atctacagaatacctagtaggcgctgcacg

SEQ ID NO: 359269 - DNA, 30 bp, Artificial Sequence
  Synthetic oligonucleotide
aggagctagcccaaaccggcggggtgcacg

SEQ ID NO: 359270 - DNA, 30 bp, Artificial Sequence
  Synthetic oligonucleotide
tattagattaggcctgtaatgatttgcacg

SEQ ID NO: 359271 - DNA, 30 bp, Artificial Sequence
  Synthetic oligonucleotide
tctattaaggagtacttacaaaaaatcacg

SEQ ID NO: 359272 - DNA, 30 bp, Artificial Sequence
  Synthetic oligonucleotide
gagagacctggaacgtttgttagaatcacg

SEQ ID NO: 359273 - DNA, 30 bp, Artificial Sequence
  Synthetic oligonucleotide
cagatacgcactcactatgtactaatcacg

SEQ ID NO: 359274 - DNA, 30 bp, Artificial Sequence
  Synthetic oligonucleotide
aagaatgttttgaatttgctcttaatcacg

SEQ ID NO: 359275 - DNA, 30 bp, Artificial Sequence
  Synthetic oligonucleotide
gaagcatagttgttgatcaaagacatcacg

SEQ ID NO: 359276 - DNA, 31 bp, Artificial Sequence
  Synthetic oligonucleotide
agtacgccgcacttcctggctgtccatcacg

SEQ ID NO: 359277 - DNA, 30 bp, Artificial Sequence
  Synthetic oligonucleotide
gtcgcaaaccttattcgcgaaaggatcacg

SEQ ID NO: 359278 - DNA, 30 bp, Artificial Sequence
  Synthetic oligonucleotide
gccagagaggtttaggaaaagtggatcacg

SEQ ID NO: 359279 - DNA, 30 bp, Artificial Sequence
  Synthetic oligonucleotide
ttaggacgtgcttcggacaggaatatcacg

SEQ ID NO: 359280 - DNA, 30 bp, Artificial Sequence
  Synthetic oligonucleotide
ctcacatttggatattcggctggtatcacg

SEQ ID NO: 359281 - DNA, 30 bp, Artificial Sequence
  Synthetic oligonucleotide
actccatcaaactaagaatcagttatcacg

SEQ ID NO: 359282 - DNA, 30 bp, Artificial Sequence
  Synthetic oligonucleotide
ccgtgtaaactaccatgagcttaactcacg

SEQ ID NO: 359283 - DNA, 30 bp, Artificial Sequence
  Synthetic oligonucleotide
tcagatctctaatatgttcatagactcacg

SEQ ID NO: 359284 - DNA, 30 bp, Artificial Sequence
  Synthetic oligonucleotide
tggggtcccgccaaaaggtgcctcctcacg

SEQ ID NO: 359285 - DNA, 30 bp, Artificial Sequence
  Synthetic oligonucleotide
tcagagatctggttcgatacgcggctcacg

SEQ ID NO: 359286 - DNA, 30 bp, Artificial Sequence
  Synthetic oligonucleotide
gagtaaatatcacgatgcaccacagtcacg

SEQ ID NO: 359287 - DNA, 30 bp, Artificial Sequence
  Synthetic oligonucleotide
cggtgcgggctcaccgaataggcagtcacg

SEQ ID NO: 359288 - DNA, 30 bp, Artificial Sequence
  Synthetic oligonucleotide
gtgcttcaatatactaaaattggagtcacg

SEQ ID NO: 359289 - DNA, 30 bp, Artificial Sequence
  Synthetic oligonucleotide
ccaaactatgtgatattgcacttggtcacg

SEQ ID NO: 359290 - DNA, 30 bp, Artificial Sequence
  Synthetic oligonucleotide
tcaatgcatggccagcatatatgtgtcacg

SEQ ID NO: 359291 - DNA, 30 bp, Artificial Sequence
  Synthetic oligonucleotide
ttcacactgaaaatcaagtgcattgtcacg

SEQ ID NO: 359292 - DNA, 30 bp, Artificial Sequence
  Synthetic oligonucleotide
tagcggaaaaatctgtctggggttgtcacg

SEQ ID NO: 359293 - DNA, 30 bp, Artificial Sequence
  Synthetic oligonucleotide
tttatttgaacggggcgagggcacttcacg

SEQ ID NO: 359294 - DNA, 30 bp, Artificial Sequence
  Synthetic oligonucleotide
gccattccgcaaacgccagttccgttcacg

SEQ ID NO: 359295 - DNA, 30 bp, Artificial Sequence
  Synthetic oligonucleotide
tcggcagacgttgttccttttcgtttcacg

SEQ ID NO: 359296 - DNA, 30 bp, Artificial Sequence
  Synthetic oligonucleotide
tttaaaattatattatgaacaagaaagacg

SEQ ID NO: 359297 - DNA, 30 bp, Artificial Sequence
  Synthetic oligonucleotide
gcgttccgtagcctactttaagtaaagacg

SEQ ID NO: 359298 - DNA, 30 bp, Artificial Sequence
  Synthetic oligonucleotide
atacccgacgttttaccagtatccaagacg

SEQ ID NO: 359299 - DNA, 30 bp, Artificial Sequence
  Synthetic oligonucleotide
cttggcacaattgattctatatggaagacg

SEQ ID NO: 359300 - DNA, 30 bp, Artificial Sequence
  Synthetic oligonucleotide
tcgaaaagagtttatgggccccataagacg

SEQ ID NO: 359301 - DNA, 25 bp, Artificial Sequence
  Synthetic oligonucleotide
aatatggaacggacgcgttaagacg

SEQ ID NO: 359302 - DNA, 30 bp, Artificial Sequence
  Synthetic oligonucleotide
tggataatcgtgatggccacaccccagacg

SEQ ID NO: 359303 - DNA, 30 bp, Artificial Sequence
  Synthetic oligonucleotide
atctacagccaatgaaagtaatgccagacg

SEQ ID NO: 359304 - DNA, 30 bp, Artificial Sequence
  Synthetic oligonucleotide
tccctcatgtctgaactcgtttcagagacg

SEQ ID NO: 359305 - DNA, 30 bp, Artificial Sequence
  Synthetic oligonucleotide
cgtactcattatcttgagtgtctagagacg

SEQ ID NO: 359306 - DNA, 30 bp, Artificial Sequence
  Synthetic oligonucleotide
gtccaagttgtccttcgtacagcggagacg

SEQ ID NO: 359307 - DNA, 30 bp, Artificial Sequence
  Synthetic oligonucleotide
ccgtctttggtatgtggcaaactggagacg

SEQ ID NO: 359308 - DNA, 30 bp, Artificial Sequence
  Synthetic oligonucleotide
ctcgtgtactccctttagcagtatgagacg

SEQ ID NO: 359309 - DNA, 30 bp, Artificial Sequence
  Synthetic oligonucleotide
tatcatagctacacatgtggcgctgagacg

SEQ ID NO: 359310 - DNA, 30 bp, Artificial Sequence
  Synthetic oligonucleotide
ggacttggtgtccacgtcctgagatagacg

SEQ ID NO: 359311 - DNA, 30 bp, Artificial Sequence
  Synthetic oligonucleotide
gcttaattcacactacgttgctgatagacg

SEQ ID NO: 359312 - DNA, 30 bp, Artificial Sequence
  Synthetic oligonucleotide
tgggtgagcagtccgcacagggtatagacg

SEQ ID NO: 359313 - DNA, 30 bp, Artificial Sequence
  Synthetic oligonucleotide
taaatgatggagacacgtatattatagacg

SEQ ID NO: 359314 - DNA, 30 bp, Artificial Sequence
  Synthetic oligonucleotide
atctgggcatcgggagcttcaggctagacg

SEQ ID NO: 359315 - DNA, 30 bp, Artificial Sequence
  Synthetic oligonucleotide
ctagagacgccatggcaaccagtctagacg

SEQ ID NO: 359316 - DNA, 30 bp, Artificial Sequence
  Synthetic oligonucleotide
tcacgtgtagtcgttaacattgattagacg

SEQ ID NO: 359317 - DNA, 30 bp, Artificial Sequence
  Synthetic oligonucleotide
ctgccgtaaaatgctgtgcagccaacgacg

SEQ ID NO: 359318 - DNA, 30 bp, Artificial Sequence
  Synthetic oligonucleotide
gccatcccttccaaattcgttagaacgacg

SEQ ID NO: 359319 - DNA, 30 bp, Artificial Sequence
  Synthetic oligonucleotide
gaacgtcccattctggatctcggaacgacg

SEQ ID NO: 359320 - DNA, 30 bp, Artificial Sequence
  Synthetic oligonucleotide
gatgattagccgtggacatctctaacgacg

SEQ ID NO: 359321 - DNA, 30 bp, Artificial Sequence
  Synthetic oligonucleotide
cccaaacacggtactggctaaaagacgacg

SEQ ID NO: 359322 - DNA, 30 bp, Artificial Sequence
  Synthetic oligonucleotide
tctagccactattttcccgttctgacgacg

SEQ ID NO: 359323 - DNA, 30 bp, Artificial Sequence
  Synthetic oligonucleotide
gcgtatttaggcgcatagaatactacgacg

SEQ ID NO: 359324 - DNA, 30 bp, Artificial Sequence
  Synthetic oligonucleotide
tcagacaaatgaagtctagggtctacgacg

SEQ ID NO: 359325 - DNA, 30 bp, Artificial Sequence
  Synthetic oligonucleotide
ttcgatagttaacgtcttatacgtacgacg

SEQ ID NO: 359326 - DNA, 30 bp, Artificial Sequence
  Synthetic oligonucleotide
caagtgctagctcgatctaatgcaccgacg

SEQ ID NO: 359327 - DNA, 35 bp, Artificial Sequence
  Synthetic oligonucleotide
ttatccaaggagcggcggttgcgcttgggccgacg

SEQ ID NO: 359328 - DNA, 30 bp, Artificial Sequence
  Synthetic oligonucleotide
aatatagcgcgtcgaaaatatgttccgacg

SEQ ID NO: 359329 - DNA, 30 bp, Artificial Sequence
  Synthetic oligonucleotide
ataatattgttgccatggtaataagcgacg

SEQ ID NO: 359330 - DNA, 30 bp, Artificial Sequence
  Synthetic oligonucleotide
aaacatctatatagagatgctccagcgacg

SEQ ID NO: 359331 - DNA, 30 bp, Artificial Sequence
  Synthetic oligonucleotide
gcgcgatggcaccagctacccgaggcgacg

SEQ ID NO: 359332 - DNA, 30 bp, Artificial Sequence
  Synthetic oligonucleotide
aatattccgtatttaggcaacgttgcgacg

SEQ ID NO: 359333 - DNA, 30 bp, Artificial Sequence
  Synthetic oligonucleotide
aacgcaggcgggtacactctgctctcgacg

SEQ ID NO: 359334 - DNA, 30 bp, Artificial Sequence
  Synthetic oligonucleotide
tggggccaacgggataggagcacgtcgacg

SEQ ID NO: 359335 - DNA, 30 bp, Artificial Sequence
  Synthetic oligonucleotide
ggttcattttcgggccaacttgggtcgacg

SEQ ID NO: 359336 - DNA, 30 bp, Artificial Sequence
  Synthetic oligonucleotide
gaatagagagacgggggttggttttcgacg

SEQ ID NO: 359337 - DNA, 30 bp, Artificial Sequence
  Synthetic oligonucleotide
cgaaatctcaactaagttgattgaaggacg

SEQ ID NO: 359338 - DNA, 30 bp, Artificial Sequence
  Synthetic oligonucleotide
atcgggagcgcataatattgtaacaggacg

SEQ ID NO: 359339 - DNA, 30 bp, Artificial Sequence
  Synthetic oligonucleotide
cagggggtcgcaggtatagcggacaggacg

SEQ ID NO: 359340 - DNA, 30 bp, Artificial Sequence
  Synthetic oligonucleotide
attagagccggtctttaaatgcccaggacg

SEQ ID NO: 359341 - DNA, 30 bp, Artificial Sequence
  Synthetic oligonucleotide
ccgcttggtgttcgctaagcggggaggacg

SEQ ID NO: 359342 - DNA, 30 bp, Artificial Sequence
  Synthetic oligonucleotide
tgctcgaattttttgagcatctggaggacg

SEQ ID NO: 359343 - DNA, 30 bp, Artificial Sequence
  Synthetic oligonucleotide
tggacttgtatgttggggtcttggaggacg

SEQ ID NO: 359344 - DNA, 30 bp, Artificial Sequence
  Synthetic oligonucleotide
cccctctcatgagagcaaagtgataggacg

SEQ ID NO: 359345 - DNA, 30 bp, Artificial Sequence
  Synthetic oligonucleotide
tctgttaagaggtataacattagacggacg

SEQ ID NO: 359346 - DNA, 30 bp, Artificial Sequence
  Synthetic oligonucleotide
cgttcgcgttgtatgtaggttttacggacg

SEQ ID NO: 359347 - DNA, 30 bp, Artificial Sequence
  Synthetic oligonucleotide
tttagccgatgtgcaatgcttgtccggacg

SEQ ID NO: 359348 - DNA, 30 bp, Artificial Sequence
  Synthetic oligonucleotide
ttcgagaaagaacacttcggccagcggacg

SEQ ID NO: 359349 - DNA, 30 bp, Artificial Sequence
  Synthetic oligonucleotide
gggttgacttttagcacccctcggcggacg

SEQ ID NO: 359350 - DNA, 30 bp, Artificial Sequence
  Synthetic oligonucleotide
ctcaattcagggcacgagcttcgtcggacg

SEQ ID NO: 359351 - DNA, 31 bp, Artificial Sequence
  Synthetic oligonucleotide
taatgtatttacggtaaataattgtcggacg

SEQ ID NO: 359352 - DNA, 30 bp, Artificial Sequence
  Synthetic oligonucleotide
atacttaggaccatactccctactgggacg

SEQ ID NO: 359353 - DNA, 30 bp, Artificial Sequence
  Synthetic oligonucleotide
cttaagttcataccgggcgggctatggacg

SEQ ID NO: 359354 - DNA, 30 bp, Artificial Sequence
  Synthetic oligonucleotide
ctgcaaggcgtcgccgttgggctatggacg

SEQ ID NO: 359355 - DNA, 30 bp, Artificial Sequence
  Synthetic oligonucleotide
cactgtaatagccagaagcaccactggacg

SEQ ID NO: 359356 - DNA, 30 bp, Artificial Sequence
  Synthetic oligonucleotide
gcttacagcgaccacgtcggccactggacg

SEQ ID NO: 359357 - DNA, 30 bp, Artificial Sequence
  Synthetic oligonucleotide
gaatgaatggggtggtggccgtgctggacg

SEQ ID NO: 359358 - DNA, 28 bp, Artificial Sequence
  Synthetic oligonucleotide
gcatattagagtccaggcgttgtggacg

SEQ ID NO: 359359 - DNA, 30 bp, Artificial Sequence
  Synthetic oligonucleotide
tccgcaccgaccgtgcctaacaattggacg

SEQ ID NO: 359360 - DNA, 30 bp, Artificial Sequence
  Synthetic oligonucleotide
agttattcgaacttagcaggtcaaatgacg

SEQ ID NO: 359361 - DNA, 30 bp, Artificial Sequence
  Synthetic oligonucleotide
gctatgagggtttggcgagggggaatgacg

SEQ ID NO: 359362 - DNA, 30 bp, Artificial Sequence
  Synthetic oligonucleotide
ggaagagcgcttggactcgcgcccatgacg

SEQ ID NO: 359363 - DNA, 30 bp, Artificial Sequence
  Synthetic oligonucleotide
ttgtagagattactgggctaagagatgacg

SEQ ID NO: 359364 - DNA, 30 bp, Artificial Sequence
  Synthetic oligonucleotide
ctgcgtggacgtagtgtagtgtcgatgacg

SEQ ID NO: 359365 - DNA, 30 bp, Artificial Sequence
  Synthetic oligonucleotide
cctataagacactggatgctctggatgacg

SEQ ID NO: 359366 - DNA, 30 bp, Artificial Sequence
  Synthetic oligonucleotide
aaatgagtgtatatagggaggggactgacg

SEQ ID NO: 359367 - DNA, 30 bp, Artificial Sequence
  Synthetic oligonucleotide
ggctgcccctatggtgataactgactgacg

SEQ ID NO: 359368 - DNA, 30 bp, Artificial Sequence
  Synthetic oligonucleotide
caagagacggttgaggcccgtcccctgacg

SEQ ID NO: 359369 - DNA, 30 bp, Artificial Sequence
  Synthetic oligonucleotide
gtaagcgggaccaactgacggagcctgacg

SEQ ID NO: 359370 - DNA, 30 bp, Artificial Sequence
  Synthetic oligonucleotide
tcctggggtctacaacactcgaagctgacg

SEQ ID NO: 359371 - DNA, 30 bp, Artificial Sequence
  Synthetic oligonucleotide
gtggtggcgtatgattaagaggggctgacg

SEQ ID NO: 359372 - DNA, 30 bp, Artificial Sequence
  Synthetic oligonucleotide
ttaagattacctgacgatcatgggctgacg

SEQ ID NO: 359373 - DNA, 30 bp, Artificial Sequence
  Synthetic oligonucleotide
aagcacaacataggggagcccgatctgacg

SEQ ID NO: 359374 - DNA, 30 bp, Artificial Sequence
  Synthetic oligonucleotide
tgacggtatagttgtagtgggtatctgacg

SEQ ID NO: 359375 - DNA, 30 bp, Artificial Sequence
  Synthetic oligonucleotide
ggacctatcaatggtcttacagaagtgacg

SEQ ID NO: 359376 - DNA, 30 bp, Artificial Sequence
  Synthetic oligonucleotide
gccaatacctcgagttggtgggcagtgacg

SEQ ID NO: 359377 - DNA, 30 bp, Artificial Sequence
  Synthetic oligonucleotide
ccaagtgttctagagcttggcgccgtgacg

SEQ ID NO: 359378 - DNA, 30 bp, Artificial Sequence
  Synthetic oligonucleotide
gttcgcattgcgaaccgaccggccgtgacg

SEQ ID NO: 359379 - DNA, 30 bp, Artificial Sequence
  Synthetic oligonucleotide
cagtaagggcctggagttaagttcgtgacg

SEQ ID NO: 359380 - DNA, 30 bp, Artificial Sequence
  Synthetic oligonucleotide
ggagggggcagctactgggtggcggtgacg

SEQ ID NO: 359381 - DNA, 30 bp, Artificial Sequence
  Synthetic oligonucleotide
aatcgcttagggaagttattgtcggtgacg

SEQ ID NO: 359382 - DNA, 30 bp, Artificial Sequence
  Synthetic oligonucleotide
aaagcgggaaacgggggtaacctggtgacg

SEQ ID NO: 359383 - DNA, 30 bp, Artificial Sequence
  Synthetic oligonucleotide
ctggagtcggatcccatgccgctggtgacg

SEQ ID NO: 359384 - DNA, 30 bp, Artificial Sequence
  Synthetic oligonucleotide
ttcgtcacccttgcaccgcctctggtgacg

SEQ ID NO: 359385 - DNA, 30 bp, Artificial Sequence
  Synthetic oligonucleotide
taccaattcctagtaaattcacatgtgacg

SEQ ID NO: 359386 - DNA, 30 bp, Artificial Sequence
  Synthetic oligonucleotide
tctaagagtgttagtaggatcgatgtgacg

SEQ ID NO: 359387 - DNA, 30 bp, Artificial Sequence
  Synthetic oligonucleotide
cggcgtactaacttatgggatcgtgtgacg

SEQ ID NO: 359388 - DNA, 30 bp, Artificial Sequence
  Synthetic oligonucleotide
taacagtcatagctgtccttgaaattgacg

SEQ ID NO: 359389 - DNA, 30 bp, Artificial Sequence
  Synthetic oligonucleotide
tctgtatcatattgccagccacaattgacg

SEQ ID NO: 359390 - DNA, 30 bp, Artificial Sequence
  Synthetic oligonucleotide
cccaaagacgtcgtctttgtctagttgacg

SEQ ID NO: 359391 - DNA, 30 bp, Artificial Sequence
  Synthetic oligonucleotide
tccacgagggtattacaatctttgttgacg

SEQ ID NO: 359392 - DNA, 30 bp, Artificial Sequence
  Synthetic oligonucleotide
gttgggtgattgaacacgtgatatttgacg

SEQ ID NO: 359393 - DNA, 30 bp, Artificial Sequence
  Synthetic oligonucleotide
acgacgatgtatgaagtaacctatttgacg

SEQ ID NO: 359394 - DNA, 30 bp, Artificial Sequence
  Synthetic oligonucleotide
gactggttttgaatagtgggtgcaaatacg

SEQ ID NO: 359395 - DNA, 30 bp, Artificial Sequence
  Synthetic oligonucleotide
acgaatgttacgctatgcgacggaaatacg

SEQ ID NO: 359396 - DNA, 30 bp, Artificial Sequence
  Synthetic oligonucleotide
atgctcggagatgttataattgacaatacg

SEQ ID NO: 359397 - DNA, 30 bp, Artificial Sequence
  Synthetic oligonucleotide
aactatggctggacacagataatgaatacg

SEQ ID NO: 359398 - DNA, 30 bp, Artificial Sequence
  Synthetic oligonucleotide
actgacctccttgcacgggtatataatacg

SEQ ID NO: 359399 - DNA, 30 bp, Artificial Sequence
  Synthetic oligonucleotide
tagaagaagtcgatgcatcgacgtaatacg

SEQ ID NO: 359400 - DNA, 30 bp, Artificial Sequence
  Synthetic oligonucleotide
gcacttgcttgctgaatcgacaaacatacg

SEQ ID NO: 359401 - DNA, 30 bp, Artificial Sequence
  Synthetic oligonucleotide
ttgtcatctaaggattttcgataacatacg

SEQ ID NO: 359402 - DNA, 30 bp, Artificial Sequence
  Synthetic oligonucleotide
agccaggacggtcgcgtactgacacatacg

SEQ ID NO: 359403 - DNA, 30 bp, Artificial Sequence
  Synthetic oligonucleotide
ggactcacagccccggcggatgcacatacg

SEQ ID NO: 359404 - DNA, 30 bp, Artificial Sequence
  Synthetic oligonucleotide
tatcaggacctaggtaaatatccccatacg

SEQ ID NO: 359405 - DNA, 30 bp, Artificial Sequence
  Synthetic oligonucleotide
aacggtgtcccagggttatttctccatacg

SEQ ID NO: 359406 - DNA, 30 bp, Artificial Sequence
  Synthetic oligonucleotide
agtactggacgcaacttatgtgatcatacg

SEQ ID NO: 359407 - DNA, 30 bp, Artificial Sequence
  Synthetic oligonucleotide
tacccatgcacaaataattgcggtcatacg

SEQ ID NO: 359408 - DNA, 30 bp, Artificial Sequence
  Synthetic oligonucleotide
actggcctagtgtatgccggatgtcatacg

SEQ ID NO: 359409 - DNA, 30 bp, Artificial Sequence
  Synthetic oligonucleotide
gttttgtgcttggacaccccccaagatacg

SEQ ID NO: 359410 - DNA, 30 bp, Artificial Sequence
  Synthetic oligonucleotide
caacttttcgccgatgcgctccgagatacg

SEQ ID NO: 359411 - DNA, 30 bp, Artificial Sequence
  Synthetic oligonucleotide
ctttaaaaacatgggattgggttagatacg

SEQ ID NO: 359412 - DNA, 30 bp, Artificial Sequence
  Synthetic oligonucleotide
tcggcatagatatatttctaagacgatacg

SEQ ID NO: 359413 - DNA, 30 bp, Artificial Sequence
  Synthetic oligonucleotide
tgtctgagtatgccgctggtgtgcgatacg

SEQ ID NO: 359414 - DNA, 30 bp, Artificial Sequence
  Synthetic oligonucleotide
gccggcccactgtgtgaaatatcggatacg

SEQ ID NO: 359415 - DNA, 30 bp, Artificial Sequence
  Synthetic oligonucleotide
gttcgcgggcaagaggagatgatggatacg

SEQ ID NO: 359416 - DNA, 30 bp, Artificial Sequence
  Synthetic oligonucleotide
attgggaaatttacgtacccgggtgatacg

SEQ ID NO: 359417 - DNA, 30 bp, Artificial Sequence
  Synthetic oligonucleotide
gtagcagttagctccgtcatttgtgatacg

SEQ ID NO: 359418 - DNA, 27 bp, Artificial Sequence
  Synthetic oligonucleotide
ttgtccacatgtgggcaaattgatacg

SEQ ID NO: 359419 - DNA, 30 bp, Artificial Sequence
  Synthetic oligonucleotide
gacgtttaccgccttagattacttgatacg

SEQ ID NO: 359420 - DNA, 30 bp, Artificial Sequence
  Synthetic oligonucleotide
gatccagatagttcggaactagaatatacg

SEQ ID NO: 359421 - DNA, 30 bp, Artificial Sequence
  Synthetic oligonucleotide
agatttgaaactgatactgggtgatatacg

SEQ ID NO: 359422 - DNA, 30 bp, Artificial Sequence
  Synthetic oligonucleotide
aatttattggcagacggggcgatatatacg

SEQ ID NO: 359423 - DNA, 30 bp, Artificial Sequence
  Synthetic oligonucleotide
ctaggggataaccgatacgtttagtatacg

SEQ ID NO: 359424 - DNA, 30 bp, Artificial Sequence
  Synthetic oligonucleotide
cttagaagtaagtcgttccaagcgtatacg

SEQ ID NO: 359425 - DNA, 30 bp, Artificial Sequence
  Synthetic oligonucleotide
ccaatcctcatgatggtagggaggtatacg

SEQ ID NO: 359426 - DNA, 30 bp, Artificial Sequence
  Synthetic oligonucleotide
ggaggaaaacacacacgtttcatgtatacg

SEQ ID NO: 359427 - DNA, 30 bp, Artificial Sequence
  Synthetic oligonucleotide
ttacacagacagtatgaatgggattatacg

SEQ ID NO: 359428 - DNA, 30 bp, Artificial Sequence
  Synthetic oligonucleotide
aagatcgggattattgcgaagatttatacg

SEQ ID NO: 359429 - DNA, 30 bp, Artificial Sequence
  Synthetic oligonucleotide
atctcttgttctgtcagaatgtgcactacg

SEQ ID NO: 359430 - DNA, 30 bp, Artificial Sequence
  Synthetic oligonucleotide
tcggttcaaaacctttgtcaataacctacg

SEQ ID NO: 359431 - DNA, 30 bp, Artificial Sequence
  Synthetic oligonucleotide
tttcctagggtggcaacaatttaacctacg

SEQ ID NO: 359432 - DNA, 30 bp, Artificial Sequence
  Synthetic oligonucleotide
tgctttcatagtattcgataagaagctacg

SEQ ID NO: 359433 - DNA, 30 bp, Artificial Sequence
  Synthetic oligonucleotide
ctttagccatcaatcgtattgtcagctacg

SEQ ID NO: 359434 - DNA, 30 bp, Artificial Sequence
  Synthetic oligonucleotide
ggagttatgagtcactcgcagagagctacg

SEQ ID NO: 359435 - DNA, 30 bp, Artificial Sequence
  Synthetic oligonucleotide
aataaggctcggtcgatttgtaacgctacg

SEQ ID NO: 359436 - DNA, 30 bp, Artificial Sequence
  Synthetic oligonucleotide
gaagaaggggcaaggtggaggctcgctacg

SEQ ID NO: 359437 - DNA, 30 bp, Artificial Sequence
  Synthetic oligonucleotide
ttctggtccagggtccgtgtataggctacg

SEQ ID NO: 359438 - DNA, 31 bp, Artificial Sequence
  Synthetic oligonucleotide
tcaaacgaatcgatcttccgagtctgctacg

SEQ ID NO: 359439 - DNA, 30 bp, Artificial Sequence
  Synthetic oligonucleotide
gtcagggccggcccttgtagtattgctacg

SEQ ID NO: 359440 - DNA, 30 bp, Artificial Sequence
  Synthetic oligonucleotide
gatagagtcggctgtggttccaaatctacg

SEQ ID NO: 359441 - DNA, 30 bp, Artificial Sequence
  Synthetic oligonucleotide
agaatgtcttggcgcctacgtaaatctacg

SEQ ID NO: 359442 - DNA, 30 bp, Artificial Sequence
  Synthetic oligonucleotide
tatcaaatcgggtagtagccgcagtctacg

SEQ ID NO: 359443 - DNA, 30 bp, Artificial Sequence
  Synthetic oligonucleotide
gatgaatattgcgaaggcatggtgtctacg

SEQ ID NO: 359444 - DNA, 30 bp, Artificial Sequence
  Synthetic oligonucleotide
gatctgccacgttgcagtcataaaagtacg

SEQ ID NO: 359445 - DNA, 30 bp, Artificial Sequence
  Synthetic oligonucleotide
ctgcatttaattactacggtttacagtacg

SEQ ID NO: 359446 - DNA, 30 bp, Artificial Sequence
  Synthetic oligonucleotide
tcccgtatttcaacgcaatggtccagtacg

SEQ ID NO: 359447 - DNA, 30 bp, Artificial Sequence
  Synthetic oligonucleotide
cctactactcggagagccccatgcagtacg

SEQ ID NO: 359448 - DNA, 30 bp, Artificial Sequence
  Synthetic oligonucleotide
cccaacattaaacaaatgggtgtcagtacg

SEQ ID NO: 359449 - DNA, 30 bp, Artificial Sequence
  Synthetic oligonucleotide
taattgggggtacaatatcctggtagtacg

SEQ ID NO: 359450 - DNA, 30 bp, Artificial Sequence
  Synthetic oligonucleotide
caatattggacttcttcggatgcacgtacg

SEQ ID NO: 359451 - DNA, 30 bp, Artificial Sequence
  Synthetic oligonucleotide
cctcggtgtaggaattaatgacgacgtacg

SEQ ID NO: 359452 - DNA, 30 bp, Artificial Sequence
  Synthetic oligonucleotide
ctgcgtacagttgtggcttttagccgtacg

SEQ ID NO: 359453 - DNA, 30 bp, Artificial Sequence
  Synthetic oligonucleotide
ggctcacgcactcccacagaagtccgtacg

SEQ ID NO: 359454 - DNA, 30 bp, Artificial Sequence
  Synthetic oligonucleotide
tcacaggcgcttcttactcgaaggcgtacg

SEQ ID NO: 359455 - DNA, 30 bp, Artificial Sequence
  Synthetic oligonucleotide
gtgcagcagaattagtcttgcgtgcgtacg

SEQ ID NO: 359456 - DNA, 30 bp, Artificial Sequence
  Synthetic oligonucleotide
gattgactcagagtcggcatcggtcgtacg

SEQ ID NO: 359457 - DNA, 30 bp, Artificial Sequence
  Synthetic oligonucleotide
atgtcacagcaaacgccactcttaggtacg

SEQ ID NO: 359458 - DNA, 30 bp, Artificial Sequence
  Synthetic oligonucleotide
ctccagacgcaactcagtcagaccggtacg

SEQ ID NO: 359459 - DNA, 30 bp, Artificial Sequence
  Synthetic oligonucleotide
aagttcgggcgaacgagaccgttgggtacg

SEQ ID NO: 359460 - DNA, 30 bp, Artificial Sequence
  Synthetic oligonucleotide
taggatctgggccccacgcgtaatggtacg

SEQ ID NO: 359461 - DNA, 30 bp, Artificial Sequence
  Synthetic oligonucleotide
gataatcgttaggtatgaagggctggtacg

SEQ ID NO: 359462 - DNA, 30 bp, Artificial Sequence
  Synthetic oligonucleotide
tcaataatggccccgcataatagatgtacg

SEQ ID NO: 359463 - DNA, 30 bp, Artificial Sequence
  Synthetic oligonucleotide
gcaacctaacaaccccgcactatatgtacg

SEQ ID NO: 359464 - DNA, 30 bp, Artificial Sequence
  Synthetic oligonucleotide
ttagcggaaggctgctgacctctatgtacg

SEQ ID NO: 359465 - DNA, 30 bp, Artificial Sequence
  Synthetic oligonucleotide
gcgtataatacgtaccaacatgactgtacg

SEQ ID NO: 359466 - DNA, 30 bp, Artificial Sequence
  Synthetic oligonucleotide
atgctcgcacagcgtgctaaaccctgtacg

SEQ ID NO: 359467 - DNA, 30 bp, Artificial Sequence
  Synthetic oligonucleotide
cgttggttaattttacaacctttgtgtacg

SEQ ID NO: 359468 - DNA, 30 bp, Artificial Sequence
  Synthetic oligonucleotide
atcactattgtgtacaacagcaattgtacg

SEQ ID NO: 359469 - DNA, 30 bp, Artificial Sequence
  Synthetic oligonucleotide
tggtgacaagagtgcttgtctcaaattacg

SEQ ID NO: 359470 - DNA, 30 bp, Artificial Sequence
  Synthetic oligonucleotide
gacagcatatgatggggacggatcattacg

SEQ ID NO: 359471 - DNA, 30 bp, Artificial Sequence
  Synthetic oligonucleotide
gccatgtgtacattttcttgcgatattacg

SEQ ID NO: 359472 - DNA, 30 bp, Artificial Sequence
  Synthetic oligonucleotide
ctataaccgtgatcttaaaaatttattacg

SEQ ID NO: 359473 - DNA, 30 bp, Artificial Sequence
  Synthetic oligonucleotide
gaaataacatgcattctaagatttattacg

SEQ ID NO: 359474 - DNA, 30 bp, Artificial Sequence
  Synthetic oligonucleotide
tcgtgtctgcacaagaggttgcaccttacg

SEQ ID NO: 359475 - DNA, 30 bp, Artificial Sequence
  Synthetic oligonucleotide
aacacctttacgatgtaattagtccttacg

SEQ ID NO: 359476 - DNA, 30 bp, Artificial Sequence
  Synthetic oligonucleotide
ctggatctcagcgtgtgcgggtagcttacg

SEQ ID NO: 359477 - DNA, 30 bp, Artificial Sequence
  Synthetic oligonucleotide
atctttcgaagccctagccaagcgcttacg

SEQ ID NO: 359478 - DNA, 30 bp, Artificial Sequence
  Synthetic oligonucleotide
ctcaatgatagtgtagcagaagttcttacg

SEQ ID NO: 359479 - DNA, 30 bp, Artificial Sequence
  Synthetic oligonucleotide
aggtatctcgcgcctgtacacgcagttacg

SEQ ID NO: 359480 - DNA, 30 bp, Artificial Sequence
  Synthetic oligonucleotide
cacttatgaagcggactcgtgtacgttacg

SEQ ID NO: 359481 - DNA, 30 bp, Artificial Sequence
  Synthetic oligonucleotide
tttccgcgtctaattcacgggggcgttacg

SEQ ID NO: 359482 - DNA, 30 bp, Artificial Sequence
  Synthetic oligonucleotide
gcaaatgggtgttaagacctaaaggttacg

SEQ ID NO: 359483 - DNA, 30 bp, Artificial Sequence
  Synthetic oligonucleotide
gtggcacgtgcccaatgttgtacggttacg

SEQ ID NO: 359484 - DNA, 30 bp, Artificial Sequence
  Synthetic oligonucleotide
gggcacggatcttctatagcgaatgttacg

SEQ ID NO: 359485 - DNA, 30 bp, Artificial Sequence
  Synthetic oligonucleotide
ggatcccgttaggggataataactgttacg

SEQ ID NO: 359486 - DNA, 30 bp, Artificial Sequence
  Synthetic oligonucleotide
atgttgtctctgtcgcgtaaatctgttacg

SEQ ID NO: 359487 - DNA, 30 bp, Artificial Sequence
  Synthetic oligonucleotide
gagggcgtattccaatctctccaatttacg

SEQ ID NO: 359488 - DNA, 30 bp, Artificial Sequence
  Synthetic oligonucleotide
gcgttttacccctgggggatttgatttacg

SEQ ID NO: 359489 - DNA, 30 bp, Artificial Sequence
  Synthetic oligonucleotide
gttggccttagatggtacgactactttacg

SEQ ID NO: 359490 - DNA, 30 bp, Artificial Sequence
  Synthetic oligonucleotide
gtgccataggtatttgaaaggtcctttacg

SEQ ID NO: 359491 - DNA, 30 bp, Artificial Sequence
  Synthetic oligonucleotide
acgctctctgatgcttgtttcaagtttacg

SEQ ID NO: 359492 - DNA, 30 bp, Artificial Sequence
  Synthetic oligonucleotide
ggttggtcctgtagacgttatctgtttacg

SEQ ID NO: 359493 - DNA, 30 bp, Artificial Sequence
  Synthetic oligonucleotide
aatctcagggttactcacaaccacaaaccg

SEQ ID NO: 359494 - DNA, 30 bp, Artificial Sequence
  Synthetic oligonucleotide
tcgaaatgtggaaaggctgtgatgaaaccg

SEQ ID NO: 359495 - DNA, 30 bp, Artificial Sequence
  Synthetic oligonucleotide
agagtgacctcacgtcgtgggcctaaaccg

SEQ ID NO: 359496 - DNA, 30 bp, Artificial Sequence
  Synthetic oligonucleotide
ttggttaagcttaaaatgccctttaaaccg

SEQ ID NO: 359497 - DNA, 30 bp, Artificial Sequence
  Synthetic oligonucleotide
cctcggcgggctggtcaagatccacaaccg

SEQ ID NO: 359498 - DNA, 30 bp, Artificial Sequence
  Synthetic oligonucleotide
acagcttcagcatttctcggaacgcaaccg

SEQ ID NO: 359499 - DNA, 30 bp, Artificial Sequence
  Synthetic oligonucleotide
cggctatgccagctcggccttactcaaccg

SEQ ID NO: 359500 - DNA, 30 bp, Artificial Sequence
  Synthetic oligonucleotide
aaaagcagcaaaccgagttgtagtcaaccg

SEQ ID NO: 359501 - DNA, 30 bp, Artificial Sequence
  Synthetic oligonucleotide
gtgcccccgtgtctgttgctgtttcaaccg

SEQ ID NO: 359502 - DNA, 30 bp, Artificial Sequence
  Synthetic oligonucleotide
agccatagtgaatcggtctcccatgaaccg

SEQ ID NO: 359503 - DNA, 30 bp, Artificial Sequence
  Synthetic oligonucleotide
ggctctttaagagaatggcggcaataaccg

SEQ ID NO: 359504 - DNA, 30 bp, Artificial Sequence
  Synthetic oligonucleotide
agtttagccctgtcgcgtaactcataaccg

SEQ ID NO: 359505 - DNA, 30 bp, Artificial Sequence
  Synthetic oligonucleotide
ggtattctgtaagcccggttaagctaaccg

SEQ ID NO: 359506 - DNA, 30 bp, Artificial Sequence
  Synthetic oligonucleotide
attatgcaagggtaggatcagcgctaaccg

SEQ ID NO: 359507 - DNA, 30 bp, Artificial Sequence
  Synthetic oligonucleotide
tactgagaaaaagcggtcaacggctaaccg

SEQ ID NO: 359508 - DNA, 30 bp, Artificial Sequence
  Synthetic oligonucleotide
tgcatccgcttcactggtcgcccgtaaccg

SEQ ID NO: 359509 - DNA, 30 bp, Artificial Sequence
  Synthetic oligonucleotide
aaggtgcaattacggtgggcggggtaaccg

SEQ ID NO: 359510 - DNA, 30 bp, Artificial Sequence
  Synthetic oligonucleotide
ctaacacgtcacctgtgttaagcaacaccg

SEQ ID NO: 359511 - DNA, 30 bp, Artificial Sequence
  Synthetic oligonucleotide
gggccggctcagccgatgctagccacaccg

SEQ ID NO: 359512 - DNA, 30 bp, Artificial Sequence
  Synthetic oligonucleotide
ggctgctgtccttgcagttgtggcacaccg

SEQ ID NO: 359513 - DNA, 30 bp, Artificial Sequence
  Synthetic oligonucleotide
catccgggcggttgtcgagcagtcacaccg

SEQ ID NO: 359514 - DNA, 30 bp, Artificial Sequence
  Synthetic oligonucleotide
ctgtcgtattgacgactttacgagacaccg

SEQ ID NO: 359515 - DNA, 30 bp, Artificial Sequence
  Synthetic oligonucleotide
caagaagtcttgctagctcgtcctacaccg

SEQ ID NO: 359516 - DNA, 30 bp, Artificial Sequence
  Synthetic oligonucleotide
gttagtatctcgcctaaagcgtgtacaccg

SEQ ID NO: 359517 - DNA, 30 bp, Artificial Sequence
  Synthetic oligonucleotide
cctggttactataggtggcagacaccaccg

SEQ ID NO: 359518 - DNA, 30 bp, Artificial Sequence
  Synthetic oligonucleotide
atcgcgcacgaattgatgacttagccaccg

SEQ ID NO: 359519 - DNA, 30 bp, Artificial Sequence
  Synthetic oligonucleotide
atatagccctctaggctaggaattccaccg

SEQ ID NO: 359520 - DNA, 30 bp, Artificial Sequence
  Synthetic oligonucleotide
atgggccggataagaaattacctagcaccg

SEQ ID NO: 359521 - DNA, 30 bp, Artificial Sequence
  Synthetic oligonucleotide
gaatcacgacttcgtctagggcgcgcaccg

SEQ ID NO: 359522 - DNA, 30 bp, Artificial Sequence
  Synthetic oligonucleotide
ctaaacacatctacaaggttgggcgcaccg

SEQ ID NO: 359523 - DNA, 30 bp, Artificial Sequence
  Synthetic oligonucleotide
aaaggtgcatgaaactgtaacatggcaccg

SEQ ID NO: 359524 - DNA, 30 bp, Artificial Sequence
  Synthetic oligonucleotide
gaagtccccagccatccatctcgtgcaccg

SEQ ID NO: 359525 - DNA, 30 bp, Artificial Sequence
  Synthetic oligonucleotide
ccccttcggcagtgaacgacgacatcaccg

SEQ ID NO: 359526 - DNA, 30 bp, Artificial Sequence
  Synthetic oligonucleotide
cggtatgaaacgatcagcggaatatcaccg

SEQ ID NO: 359527 - DNA, 30 bp, Artificial Sequence
  Synthetic oligonucleotide
ctcacctcctcgatccggagtttatcaccg

SEQ ID NO: 359528 - DNA, 30 bp, Artificial Sequence
  Synthetic oligonucleotide
tatcgcactcttatagggttaaagtcaccg

SEQ ID NO: 359529 - DNA, 30 bp, Artificial Sequence
  Synthetic oligonucleotide
gggcgctgtagagttctatgggcgtcaccg

SEQ ID NO: 359530 - DNA, 30 bp, Artificial Sequence
  Synthetic oligonucleotide
gtcctcattgatgtcgataacgtgtcaccg

SEQ ID NO: 359531 - DNA, 30 bp, Artificial Sequence
  Synthetic oligonucleotide
gacaaaatcccaacaacggcctagagaccg

SEQ ID NO: 359532 - DNA, 30 bp, Artificial Sequence
  Synthetic oligonucleotide
ttaaatatcccaataggccaagtgagaccg

SEQ ID NO: 359533 - DNA, 30 bp, Artificial Sequence
  Synthetic oligonucleotide
cgcatcggtcatgatacttgcgaacgaccg

SEQ ID NO: 359534 - DNA, 30 bp, Artificial Sequence
  Synthetic oligonucleotide
gaaaatatgccacaggcggccaaccgaccg

SEQ ID NO: 359535 - DNA, 30 bp, Artificial Sequence
  Synthetic oligonucleotide
agtcacctctattagcactgctgtcgaccg

SEQ ID NO: 359536 - DNA, 30 bp, Artificial Sequence
  Synthetic oligonucleotide
tctcggtccgggagaaagtccaaaggaccg

SEQ ID NO: 359537 - DNA, 30 bp, Artificial Sequence
  Synthetic oligonucleotide
actaccaccacattactgaaggacggaccg

SEQ ID NO: 359538 - DNA, 30 bp, Artificial Sequence
  Synthetic oligonucleotide
cgcggagggcaccgtattcgaaggggaccg

SEQ ID NO: 359539 - DNA, 30 bp, Artificial Sequence
  Synthetic oligonucleotide
tatcccacaactcgatgcaggggtggaccg

SEQ ID NO: 359540 - DNA, 30 bp, Artificial Sequence
  Synthetic oligonucleotide
agcgcactaggtattaactggcttggaccg

SEQ ID NO: 359541 - DNA, 30 bp, Artificial Sequence
  Synthetic oligonucleotide
cgcaccttcacgtggacaaggcagtgaccg

SEQ ID NO: 359542 - DNA, 30 bp, Artificial Sequence
  Synthetic oligonucleotide
ctattttctgatggagatgtattttgaccg

SEQ ID NO: 359543 - DNA, 30 bp, Artificial Sequence
  Synthetic oligonucleotide
taacgccagggcacatccggttcaataccg

SEQ ID NO: 359544 - DNA, 30 bp, Artificial Sequence
  Synthetic oligonucleotide
aagtatggctacatggtatttataataccg

SEQ ID NO: 359545 - DNA, 30 bp, Artificial Sequence
  Synthetic oligonucleotide
aacccaggcgtgtcagctggtgccataccg

SEQ ID NO: 359546 - DNA, 30 bp, Artificial Sequence
  Synthetic oligonucleotide
aatctatcgatgtcgcgattcctcataccg

SEQ ID NO: 359547 - DNA, 30 bp, Artificial Sequence
  Synthetic oligonucleotide
aaaaagacagggttatcatatcagataccg

SEQ ID NO: 359548 - DNA, 30 bp, Artificial Sequence
  Synthetic oligonucleotide
acacgtgaatgcctctgtcaggcgataccg

SEQ ID NO: 359549 - DNA, 30 bp, Artificial Sequence
  Synthetic oligonucleotide
aaccgcttatagctcttatgaatgataccg

SEQ ID NO: 359550 - DNA, 30 bp, Artificial Sequence
  Synthetic oligonucleotide
attaaattttacaacctggatcgtataccg

SEQ ID NO: 359551 - DNA, 30 bp, Artificial Sequence
  Synthetic oligonucleotide
acctcttattttagtgcccatcccctaccg

SEQ ID NO: 359552 - DNA, 30 bp, Artificial Sequence
  Synthetic oligonucleotide
gctggctcacaactcggtgatagcctaccg

SEQ ID NO: 359553 - DNA, 30 bp, Artificial Sequence
  Synthetic oligonucleotide
cgcatatgggcgaaggcccaatcgctaccg

SEQ ID NO: 359554 - DNA, 30 bp, Artificial Sequence
  Synthetic oligonucleotide
atagggatattctggttcttatggctaccg

SEQ ID NO: 359555 - DNA, 30 bp, Artificial Sequence
  Synthetic oligonucleotide
cctatgggtgtgggcgcacccgctctaccg

SEQ ID NO: 359556 - DNA, 30 bp, Artificial Sequence
  Synthetic oligonucleotide
gagtcacaaagtaagattggctcagtaccg

SEQ ID NO: 359557 - DNA, 30 bp, Artificial Sequence
  Synthetic oligonucleotide
atggcgtcagaccgtttcttaatagtaccg

SEQ ID NO: 359558 - DNA, 30 bp, Artificial Sequence
  Synthetic oligonucleotide
ccgatggaggcccctggttcgaaggtaccg

SEQ ID NO: 359559 - DNA, 29 bp, Artificial Sequence
  Synthetic oligonucleotide
tattggatttagagacataaacggtaccg

SEQ ID NO: 359560 - DNA, 30 bp, Artificial Sequence
  Synthetic oligonucleotide
tcttaactgggacggcgtcggttggtaccg

SEQ ID NO: 359561 - DNA, 30 bp, Artificial Sequence
  Synthetic oligonucleotide
tgatagggtttatcccgggcacatgtaccg

SEQ ID NO: 359562 - DNA, 30 bp, Artificial Sequence
  Synthetic oligonucleotide
gagctcgggatccgaccccttgaattaccg

SEQ ID NO: 359563 - DNA, 30 bp, Artificial Sequence
  Synthetic oligonucleotide
cagaaaattagtgtggacggacgattaccg

SEQ ID NO: 359564 - DNA, 30 bp, Artificial Sequence
  Synthetic oligonucleotide
tttacggcagttaccaaattactattaccg

SEQ ID NO: 359565 - DNA, 30 bp, Artificial Sequence
  Synthetic oligonucleotide
ttataggatggactcacaagatccttaccg

SEQ ID NO: 359566 - DNA, 30 bp, Artificial Sequence
  Synthetic oligonucleotide
ttaacaagaaagccccggtagatcttaccg

SEQ ID NO: 359567 - DNA, 30 bp, Artificial Sequence
  Synthetic oligonucleotide
tttgacgcacccgctggtgagttcttaccg

SEQ ID NO: 359568 - DNA, 30 bp, Artificial Sequence
  Synthetic oligonucleotide
tactacgataatgtagttcttcctttaccg

SEQ ID NO: 359569 - DNA, 30 bp, Artificial Sequence
  Synthetic oligonucleotide
gcaagcttccccaatatcatggctttaccg

SEQ ID NO: 359570 - DNA, 30 bp, Artificial Sequence
  Synthetic oligonucleotide
tattgacgtacacgatgagtgtctttaccg

SEQ ID NO: 359571 - DNA, 30 bp, Artificial Sequence
  Synthetic oligonucleotide
gtaaatccactactcccttagtaaaacccg

SEQ ID NO: 359572 - DNA, 30 bp, Artificial Sequence
  Synthetic oligonucleotide
aagacacctgcccatggcctaacaaacccg

SEQ ID NO: 359573 - DNA, 30 bp, Artificial Sequence
  Synthetic oligonucleotide
tcaacttttatggttcggtggggaaacccg

SEQ ID NO: 359574 - DNA, 30 bp, Artificial Sequence
  Synthetic oligonucleotide
agtgcttgctccaatagcgctcgcaacccg

SEQ ID NO: 359575 - DNA, 30 bp, Artificial Sequence
  Synthetic oligonucleotide
gattagccagtatttcctttgactaacccg

SEQ ID NO: 359576 - DNA, 30 bp, Artificial Sequence
  Synthetic oligonucleotide
tataagggtaggtaagatggcagacacccg

SEQ ID NO: 359577 - DNA, 30 bp, Artificial Sequence
  Synthetic oligonucleotide
cgggggcgtaaactcggggagatacacccg

SEQ ID NO: 359578 - DNA, 29 bp, Artificial Sequence
  Synthetic oligonucleotide
cttagggatctggtatctgctcgcacccg

SEQ ID NO: 359579 - DNA, 30 bp, Artificial Sequence
  Synthetic oligonucleotide
aaacactcttagatgttcattaggcacccg

SEQ ID NO: 359580 - DNA, 30 bp, Artificial Sequence
  Synthetic oligonucleotide
tacgaggttctatatcacgaaatgcacccg

SEQ ID NO: 359581 - DNA, 30 bp, Artificial Sequence
  Synthetic oligonucleotide
ggcacacctttcgggctatccattcacccg

SEQ ID NO: 359582 - DNA, 30 bp, Artificial Sequence
  Synthetic oligonucleotide
gaggtatgccgaccattgcgatcagacccg

SEQ ID NO: 359583 - DNA, 30 bp, Artificial Sequence
  Synthetic oligonucleotide
caggcctttggtgaaaggtcaaccgacccg

SEQ ID NO: 359584 - DNA, 30 bp, Artificial Sequence
  Synthetic oligonucleotide
gggcgtgtctaaatacgcttaggggacccg

SEQ ID NO: 359585 - DNA, 30 bp, Artificial Sequence
  Synthetic oligonucleotide
ctaagaattacgacccgtggccaatacccg

SEQ ID NO: 359586 - DNA, 30 bp, Artificial Sequence
  Synthetic oligonucleotide
tcagtgcatcatgtgtgcccgggatacccg

SEQ ID NO: 359587 - DNA, 30 bp, Artificial Sequence
  Synthetic oligonucleotide
aggtgttacaacagggttttacgctacccg

SEQ ID NO: 359588 - DNA, 30 bp, Artificial Sequence
  Synthetic oligonucleotide
actgccgggaatcacttactaggctacccg

SEQ ID NO: 359589 - DNA, 30 bp, Artificial Sequence
  Synthetic oligonucleotide
ccaacctttgttaccgtttaatagtacccg

SEQ ID NO: 359590 - DNA, 30 bp, Artificial Sequence
  Synthetic oligonucleotide
caactatgtttgcggaacaacgtttacccg

SEQ ID NO: 359591 - DNA, 30 bp, Artificial Sequence
  Synthetic oligonucleotide
gcccagacctattaaccgcttgtaaccccg

SEQ ID NO: 359592 - DNA, 30 bp, Artificial Sequence
  Synthetic oligonucleotide
aggacggggagagtgggcggtagcaccccg

SEQ ID NO: 359593 - DNA, 30 bp, Artificial Sequence
  Synthetic oligonucleotide
aaggcgactgaagaatggacggagaccccg

SEQ ID NO: 359594 - DNA, 30 bp, Artificial Sequence
  Synthetic oligonucleotide
accatttgcctgggtagtgatccgaccccg

SEQ ID NO: 359595 - DNA, 30 bp, Artificial Sequence
  Synthetic oligonucleotide
cagctcatatgtgcaaaagggaataccccg

SEQ ID NO: 359596 - DNA, 30 bp, Artificial Sequence
  Synthetic oligonucleotide
acactctagcggcagactcagtaacccccg

SEQ ID NO: 359597 - DNA, 30 bp, Artificial Sequence
  Synthetic oligonucleotide
tcgagtacgtctagcagtcgcggacccccg

SEQ ID NO: 359598 - DNA, 30 bp, Artificial Sequence
  Synthetic oligonucleotide
gatatagcagagtaagttcgaatacccccg

SEQ ID NO: 359599 - DNA, 30 bp, Artificial Sequence
  Synthetic oligonucleotide
tcttcagttgttgtctgtgtcaaccccccg

SEQ ID NO: 359600 - DNA, 30 bp, Artificial Sequence
  Synthetic oligonucleotide
cggctttatagttggactgtcacccccccg

SEQ ID NO: 359601 - DNA, 30 bp, Artificial Sequence
  Synthetic oligonucleotide
gggggaggaaaatactgtcctgtagccccg

SEQ ID NO: 359602 - DNA, 30 bp, Artificial Sequence
  Synthetic oligonucleotide
taaatacagttactccgatggtacgccccg

SEQ ID NO: 359603 - DNA, 30 bp, Artificial Sequence
  Synthetic oligonucleotide
tagtgtggacatggttggtgcatcgccccg

SEQ ID NO: 359604 - DNA, 30 bp, Artificial Sequence
  Synthetic oligonucleotide
gcacgggagtgctatctacgtacggccccg

SEQ ID NO: 359605 - DNA, 30 bp, Artificial Sequence
  Synthetic oligonucleotide
accaatccacatttcgaactgggggccccg

SEQ ID NO: 359606 - DNA, 30 bp, Artificial Sequence
  Synthetic oligonucleotide
tgtttcccgcgattctactagaatgccccg

SEQ ID NO: 359607 - DNA, 30 bp, Artificial Sequence
  Synthetic oligonucleotide
tatgacaaagctgtattgcaaagtgccccg

SEQ ID NO: 359608 - DNA, 30 bp, Artificial Sequence
  Synthetic oligonucleotide
atccgtgggttttattatacgtgtgccccg

SEQ ID NO: 359609 - DNA, 30 bp, Artificial Sequence
  Synthetic oligonucleotide
atccggtgtaaagctgtaaagaaatccccg

SEQ ID NO: 359610 - DNA, 30 bp, Artificial Sequence
  Synthetic oligonucleotide
cttgctaccgaatgagatctggcatccccg

SEQ ID NO: 359611 - DNA, 30 bp, Artificial Sequence
  Synthetic oligonucleotide
aattgctctaatgcgtattctagaagcccg

SEQ ID NO: 359612 - DNA, 30 bp, Artificial Sequence
  Synthetic oligonucleotide
atgaccacactttgggcattcctgagcccg

SEQ ID NO: 359613 - DNA, 30 bp, Artificial Sequence
  Synthetic oligonucleotide
ttaatggcgtcggatgtttcatatagcccg

SEQ ID NO: 359614 - DNA, 30 bp, Artificial Sequence
  Synthetic oligonucleotide
gtcggatgcaagatatgtatatctagcccg

SEQ ID NO: 359615 - DNA, 30 bp, Artificial Sequence
  Synthetic oligonucleotide
caaacgactgctcctttatacagtagcccg

SEQ ID NO: 359616 - DNA, 30 bp, Artificial Sequence
  Synthetic oligonucleotide
cacacgggtaaatcattagtcaaacgcccg

SEQ ID NO: 359617 - DNA, 30 bp, Artificial Sequence
  Synthetic oligonucleotide
cttcctacatattggaaacgttaccgcccg

SEQ ID NO: 359618 - DNA, 30 bp, Artificial Sequence
  Synthetic oligonucleotide
tatttcacgaaatctttgggtctccgcccg

SEQ ID NO: 359619 - DNA, 30 bp, Artificial Sequence
  Synthetic oligonucleotide
atcggagacggagcgtatcgcgggcgcccg

SEQ ID NO: 359620 - DNA, 30 bp, Artificial Sequence
  Synthetic oligonucleotide
gtgtcacactgcggcaactcttcaggcccg

SEQ ID NO: 359621 - DNA, 30 bp, Artificial Sequence
  Synthetic oligonucleotide
ctatatagaggggaagggttatccggcccg

SEQ ID NO: 359622 - DNA, 30 bp, Artificial Sequence
  Synthetic oligonucleotide
tgaccaaatgctggttaaatacgcggcccg

SEQ ID NO: 359623 - DNA, 30 bp, Artificial Sequence
  Synthetic oligonucleotide
acgtcgccatcccaatgaagcgggggcccg

SEQ ID NO: 359624 - DNA, 30 bp, Artificial Sequence
  Synthetic oligonucleotide
gtcgagataacgaggaggaaatctggcccg

SEQ ID NO: 359625 - DNA, 30 bp, Artificial Sequence
  Synthetic oligonucleotide
gatatcatgcgtagatagtgtcgatgcccg

SEQ ID NO: 359626 - DNA, 30 bp, Artificial Sequence
  Synthetic oligonucleotide
catgcatgtaacacggaacgagtatgcccg

SEQ ID NO: 359627 - DNA, 30 bp, Artificial Sequence
  Synthetic oligonucleotide
gcgttttaatatacaacgtagacttgcccg

SEQ ID NO: 359628 - DNA, 30 bp, Artificial Sequence
  Synthetic oligonucleotide
gtccgacagatttgtcagggccgttgcccg

SEQ ID NO: 359629 - DNA, 30 bp, Artificial Sequence
  Synthetic oligonucleotide
aggtttcctcagatagctctgtaaatcccg

SEQ ID NO: 359630 - DNA, 30 bp, Artificial Sequence
  Synthetic oligonucleotide
gtgatcataatcctgtgtattgtaatcccg

SEQ ID NO: 359631 - DNA, 30 bp, Artificial Sequence
  Synthetic oligonucleotide
gacggacattttgtcctagggtacatcccg

SEQ ID NO: 359632 - DNA, 30 bp, Artificial Sequence
  Synthetic oligonucleotide
taagtgaccctatttttcatcggcatcccg

SEQ ID NO: 359633 - DNA, 30 bp, Artificial Sequence
  Synthetic oligonucleotide
atgagatttagagttgtgggaaagatcccg

SEQ ID NO: 359634 - DNA, 30 bp, Artificial Sequence
  Synthetic oligonucleotide
caagcctaatatggaaccagccggctcccg

SEQ ID NO: 359635 - DNA, 30 bp, Artificial Sequence
  Synthetic oligonucleotide
catgtgacggttcgatagttagctctcccg

SEQ ID NO: 359636 - DNA, 30 bp, Artificial Sequence
  Synthetic oligonucleotide
aaacatagatggaaagatccacttctcccg

SEQ ID NO: 359637 - DNA, 30 bp, Artificial Sequence
  Synthetic oligonucleotide
gttcaaagtgcagttaaaagccgagtcccg

SEQ ID NO: 359638 - DNA, 30 bp, Artificial Sequence
  Synthetic oligonucleotide
tcaattatactgatgtaagcaagcgtcccg

SEQ ID NO: 359639 - DNA, 30 bp, Artificial Sequence
  Synthetic oligonucleotide
atattcacactaatgacagagaaggtcccg

SEQ ID NO: 359640 - DNA, 30 bp, Artificial Sequence
  Synthetic oligonucleotide
aggctcgcacgtttgacgaaatgggtcccg

SEQ ID NO: 359641 - DNA, 30 bp, Artificial Sequence
  Synthetic oligonucleotide
ggccggtcggctgtgggttgtcatgtcccg

SEQ ID NO: 359642 - DNA, 30 bp, Artificial Sequence
  Synthetic oligonucleotide
tcccgtattgtggtctcgacgtatgtcccg

SEQ ID NO: 359643 - DNA, 30 bp, Artificial Sequence
  Synthetic oligonucleotide
cacgcccgaccgcgcaggcgcgaattcccg

SEQ ID NO: 359644 - DNA, 30 bp, Artificial Sequence
  Synthetic oligonucleotide
gatgcccctcctgcaggcttcgtgttcccg

SEQ ID NO: 359645 - DNA, 30 bp, Artificial Sequence
  Synthetic oligonucleotide
ttagggctatgcgataacctcaatttcccg

SEQ ID NO: 359646 - DNA, 30 bp, Artificial Sequence
  Synthetic oligonucleotide
gcgtttacgaagcggggctattgtttcccg

SEQ ID NO: 359647 - DNA, 30 bp, Artificial Sequence
  Synthetic oligonucleotide
tgccgaagcaccaacccaacgtttttcccg

SEQ ID NO: 359648 - DNA, 30 bp, Artificial Sequence
  Synthetic oligonucleotide
cttggcgtccgggacaggctaaaaaagccg

SEQ ID NO: 359649 - DNA, 30 bp, Artificial Sequence
  Synthetic oligonucleotide
gtcattgcctccattggtctgaaaaagccg

SEQ ID NO: 359650 - DNA, 30 bp, Artificial Sequence
  Synthetic oligonucleotide
acctaacgtgagacaattttctataagccg

SEQ ID NO: 359651 - DNA, 30 bp, Artificial Sequence
  Synthetic oligonucleotide
aagttggagtgtttccaagtaattaagccg

SEQ ID NO: 359652 - DNA, 30 bp, Artificial Sequence
  Synthetic oligonucleotide
ggatgttcctgggagcctagggttaagccg

SEQ ID NO: 359653 - DNA, 30 bp, Artificial Sequence
  Synthetic oligonucleotide
ccggcttctttgtcgaccccaccacagccg

SEQ ID NO: 359654 - DNA, 30 bp, Artificial Sequence
  Synthetic oligonucleotide
aggtgggtatgagtaacggggcagcagccg

SEQ ID NO: 359655 - DNA, 30 bp, Artificial Sequence
  Synthetic oligonucleotide
tgaccctatacagttgctggaactgagccg

SEQ ID NO: 359656 - DNA, 30 bp, Artificial Sequence
  Synthetic oligonucleotide
ccccagaattagcgatatgctccatagccg

SEQ ID NO: 359657 - DNA, 30 bp, Artificial Sequence
  Synthetic oligonucleotide
gtaagttgtttgcgggtttatatgtagccg

SEQ ID NO: 359658 - DNA, 30 bp, Artificial Sequence
  Synthetic oligonucleotide
ggcctcccacttcaactctgatgaacgccg

SEQ ID NO: 359659 - DNA, 30 bp, Artificial Sequence
  Synthetic oligonucleotide
aggcaattattatttgtcacgtcgacgccg

SEQ ID NO: 359660 - DNA, 30 bp, Artificial Sequence
  Synthetic oligonucleotide
agaaaaagaggtccacgtatctgtacgccg

SEQ ID NO: 359661 - DNA, 30 bp, Artificial Sequence
  Synthetic oligonucleotide
aactcggtcatttactacgtacgaccgccg

SEQ ID NO: 359662 - DNA, 30 bp, Artificial Sequence
  Synthetic oligonucleotide
agtaacgtttttcggtgtccgagcccgccg

SEQ ID NO: 359663 - DNA, 30 bp, Artificial Sequence
  Synthetic oligonucleotide
tggccggcatagtaggggggatttccgccg

SEQ ID NO: 359664 - DNA, 30 bp, Artificial Sequence
  Synthetic oligonucleotide
ccggggaattatagaagacatgccgcgccg

SEQ ID NO: 359665 - DNA, 30 bp, Artificial Sequence
  Synthetic oligonucleotide
cttcatgtggctctatacacgcgttcgccg

SEQ ID NO: 359666 - DNA, 30 bp, Artificial Sequence
  Synthetic oligonucleotide
aacagcgttttggcccgtaattcaaggccg

SEQ ID NO: 359667 - DNA, 30 bp, Artificial Sequence
  Synthetic oligonucleotide
aggtattcataggaaaacgttgacaggccg

SEQ ID NO: 359668 - DNA, 30 bp, Artificial Sequence
  Synthetic oligonucleotide
tgtcaaggcaatagggtggtgtacaggccg

SEQ ID NO: 359669 - DNA, 30 bp, Artificial Sequence
  Synthetic oligonucleotide
tatagtagggccgggaagtgttccaggccg

SEQ ID NO: 359670 - DNA, 30 bp, Artificial Sequence
  Synthetic oligonucleotide
agttactctaactagcgatctgagaggccg

SEQ ID NO: 359671 - DNA, 30 bp, Artificial Sequence
  Synthetic oligonucleotide
tgtcgtaatccttttacggggcaccggccg

SEQ ID NO: 359672 - DNA, 30 bp, Artificial Sequence
  Synthetic oligonucleotide
cgttagcacaattaaacggccgaccggccg

SEQ ID NO: 359673 - DNA, 30 bp, Artificial Sequence
  Synthetic oligonucleotide
agcaaaatacgctttgaactcacccggccg

SEQ ID NO: 359674 - DNA, 30 bp, Artificial Sequence
  Synthetic oligonucleotide
aagatttagccagctttgagagttcggccg

SEQ ID NO: 359675 - DNA, 30 bp, Artificial Sequence
  Synthetic oligonucleotide
aatttaacttataacagacgggaagggccg

SEQ ID NO: 359676 - DNA, 30 bp, Artificial Sequence
  Synthetic oligonucleotide
agccctaaaagtgcgggcatataagggccg

SEQ ID NO: 359677 - DNA, 30 bp, Artificial Sequence
  Synthetic oligonucleotide
ctccgtcaaccgaggcttcagacagggccg

SEQ ID NO: 359678 - DNA, 30 bp, Artificial Sequence
  Synthetic oligonucleotide
atccggctatagagctcattaagagggccg

SEQ ID NO: 359679 - DNA, 30 bp, Artificial Sequence
  Synthetic oligonucleotide
ctgttatttgtttagtctactagcgggccg

SEQ ID NO: 359680 - DNA, 30 bp, Artificial Sequence
  Synthetic oligonucleotide
ccaccatcttctcttgatcgattcgggccg

SEQ ID NO: 359681 - DNA, 30 bp, Artificial Sequence
  Synthetic oligonucleotide
ttcctggaggtaatatagacctctgggccg

SEQ ID NO: 359682 - DNA, 30 bp, Artificial Sequence
  Synthetic oligonucleotide
caaatctcgagggtcaataatgcctggccg

SEQ ID NO: 359683 - DNA, 30 bp, Artificial Sequence
  Synthetic oligonucleotide
ggcaagttaattatgctaaccctctggccg

SEQ ID NO: 359684 - DNA, 30 bp, Artificial Sequence
  Synthetic oligonucleotide
ctgaataagatgagagtcactgcttggccg

SEQ ID NO: 359685 - DNA, 30 bp, Artificial Sequence
  Synthetic oligonucleotide
aagactagtgtccgacgcgtcatttggccg

SEQ ID NO: 359686 - DNA, 30 bp, Artificial Sequence
  Synthetic oligonucleotide
actaatagttacgcacaattggtttggccg

SEQ ID NO: 359687 - DNA, 30 bp, Artificial Sequence
  Synthetic oligonucleotide
agcagatggagcacctagcataaaatgccg

SEQ ID NO: 359688 - DNA, 30 bp, Artificial Sequence
  Synthetic oligonucleotide
ttcatcagagctgcaaagtaagtgatgccg

SEQ ID NO: 359689 - DNA, 30 bp, Artificial Sequence
  Synthetic oligonucleotide
acgtcttgcccccgggccgcaaccctgccg

SEQ ID NO: 359690 - DNA, 30 bp, Artificial Sequence
  Synthetic oligonucleotide
gagtcgtaggtaatcctacagaagctgccg

SEQ ID NO: 359691 - DNA, 30 bp, Artificial Sequence
  Synthetic oligonucleotide
cctaacctagattagggacgccggctgccg

SEQ ID NO: 359692 - DNA, 30 bp, Artificial Sequence
  Synthetic oligonucleotide
aaatgaattaggagccagtcttctctgccg

SEQ ID NO: 359693 - DNA, 30 bp, Artificial Sequence
  Synthetic oligonucleotide
acaggatatccgggatggttgtaggtgccg

SEQ ID NO: 359694 - DNA, 30 bp, Artificial Sequence
  Synthetic oligonucleotide
tgctaccgcgtaattattacagttgtgccg

SEQ ID NO: 359695 - DNA, 30 bp, Artificial Sequence
  Synthetic oligonucleotide
aggccgacaatgcaggtcagggttgtgccg

SEQ ID NO: 359696 - DNA, 30 bp, Artificial Sequence
  Synthetic oligonucleotide
taaacggggttagaaaacagctaattgccg

SEQ ID NO: 359697 - DNA, 30 bp, Artificial Sequence
  Synthetic oligonucleotide
agactgatgctgggagtcagtggattgccg

SEQ ID NO: 359698 - DNA, 30 bp, Artificial Sequence
  Synthetic oligonucleotide
tctgcttgggcgccagtctgatgattgccg

SEQ ID NO: 359699 - DNA, 30 bp, Artificial Sequence
  Synthetic oligonucleotide
catatatggttattgatgttttgcttgccg

SEQ ID NO: 359700 - DNA, 30 bp, Artificial Sequence
  Synthetic oligonucleotide
tgaaagagttgattgtgtaatctcttgccg

SEQ ID NO: 359701 - DNA, 30 bp, Artificial Sequence
  Synthetic oligonucleotide
atggggggccttgccacgacacctttgccg

SEQ ID NO: 359702 - DNA, 30 bp, Artificial Sequence
  Synthetic oligonucleotide
tcaccattgaggcgcctagctagtttgccg

SEQ ID NO: 359703 - DNA, 30 bp, Artificial Sequence
  Synthetic oligonucleotide
tttgagttgtatggcgaaggctgtttgccg

SEQ ID NO: 359704 - DNA, 30 bp, Artificial Sequence
  Synthetic oligonucleotide
ggcaaggatctgaatggatcttgtttgccg

SEQ ID NO: 359705 - DNA, 30 bp, Artificial Sequence
  Synthetic oligonucleotide
tgaggttgagttccttgaggcctaaatccg

SEQ ID NO: 359706 - DNA, 30 bp, Artificial Sequence
  Synthetic oligonucleotide
ccgagtgaatgcaatctcccaaccaatccg

SEQ ID NO: 359707 - DNA, 30 bp, Artificial Sequence
  Synthetic oligonucleotide
taacggacccggaacacgggcaggaatccg

SEQ ID NO: 359708 - DNA, 30 bp, Artificial Sequence
  Synthetic oligonucleotide
tgtttatagtgtggcttcataaataatccg

SEQ ID NO: 359709 - DNA, 30 bp, Artificial Sequence
  Synthetic oligonucleotide
ttatacttgtctcaggtcccgcataatccg

SEQ ID NO: 359710 - DNA, 30 bp, Artificial Sequence
  Synthetic oligonucleotide
gatagttggtgatttgattcgcctaatccg

SEQ ID NO: 359711 - DNA, 30 bp, Artificial Sequence
  Synthetic oligonucleotide
tagcgaggagaccgcatctcggaacatccg

SEQ ID NO: 359712 - DNA, 30 bp, Artificial Sequence
  Synthetic oligonucleotide
gtctataactccttgccactaatacatccg

SEQ ID NO: 359713 - DNA, 30 bp, Artificial Sequence
  Synthetic oligonucleotide
cagtcttttcaaactcagataacccatccg

SEQ ID NO: 359714 - DNA, 30 bp, Artificial Sequence
  Synthetic oligonucleotide
tgaggccggaaagcctacggggcccatccg

SEQ ID NO: 359715 - DNA, 30 bp, Artificial Sequence
  Synthetic oligonucleotide
gtcctacagcatcacaatgaacgtcatccg

SEQ ID NO: 359716 - DNA, 30 bp, Artificial Sequence
  Synthetic oligonucleotide
cagcttcactcttcgctcgtagaagatccg

SEQ ID NO: 359717 - DNA, 30 bp, Artificial Sequence
  Synthetic oligonucleotide
gaggtctcgcaatcggtcttcgtagatccg

SEQ ID NO: 359718 - DNA, 30 bp, Artificial Sequence
  Synthetic oligonucleotide
gcccctataggatatgtcccgatcgatccg

SEQ ID NO: 359719 - DNA, 30 bp, Artificial Sequence
  Synthetic oligonucleotide
acccatcagactgcacggtatgtcgatccg

SEQ ID NO: 359720 - DNA, 30 bp, Artificial Sequence
  Synthetic oligonucleotide
cagcttaatattactttaattcaggatccg

SEQ ID NO: 359721 - DNA, 30 bp, Artificial Sequence
  Synthetic oligonucleotide
cccgctaggtggcaaacactggctgatccg

SEQ ID NO: 359722 - DNA, 30 bp, Artificial Sequence
  Synthetic oligonucleotide
tagcacgcggaaagataatggcttgatccg

SEQ ID NO: 359723 - DNA, 30 bp, Artificial Sequence
  Synthetic oligonucleotide
ggcgatcaagcataacgggggtaatatccg

SEQ ID NO: 359724 - DNA, 30 bp, Artificial Sequence
  Synthetic oligonucleotide
tatcgaccatctcctttttagttatatccg

SEQ ID NO: 359725 - DNA, 30 bp, Artificial Sequence
  Synthetic oligonucleotide
taattgaaccccataccacttacctatccg

SEQ ID NO: 359726 - DNA, 30 bp, Artificial Sequence
  Synthetic oligonucleotide
atcatttgggaagcagtatttggctatccg

SEQ ID NO: 359727 - DNA, 30 bp, Artificial Sequence
  Synthetic oligonucleotide
agagtagaagtcacttaatacgcaactccg

SEQ ID NO: 359728 - DNA, 30 bp, Artificial Sequence
  Synthetic oligonucleotide
cacagatttctcaagtgcaagcagactccg

SEQ ID NO: 359729 - DNA, 30 bp, Artificial Sequence
  Synthetic oligonucleotide
tgtcacaggcgttgagaacgacgtactccg

SEQ ID NO: 359730 - DNA, 30 bp, Artificial Sequence
  Synthetic oligonucleotide
ggcaacgggtttcgggcatcgagccctccg

SEQ ID NO: 359731 - DNA, 30 bp, Artificial Sequence
  Synthetic oligonucleotide
gttgcggtcgacctacggagtcgccctccg

SEQ ID NO: 359732 - DNA, 30 bp, Artificial Sequence
  Synthetic oligonucleotide
actcttccagcttagatatgcgtccctccg

SEQ ID NO: 359733 - DNA, 30 bp, Artificial Sequence
  Synthetic oligonucleotide
tgtttaggacttaatgaatataatcctccg

SEQ ID NO: 359734 - DNA, 31 bp, Artificial Sequence
  Synthetic oligonucleotide
tcccactatcgtgagatgctaaccggctccg

SEQ ID NO: 359735 - DNA, 30 bp, Artificial Sequence
  Synthetic oligonucleotide
taaattcccgggatcggtgcacttgctccg

SEQ ID NO: 359736 - DNA, 30 bp, Artificial Sequence
  Synthetic oligonucleotide
tataaaggtagaaatttgcagttatctccg

SEQ ID NO: 359737 - DNA, 31 bp, Artificial Sequence
  Synthetic oligonucleotide
gtcaggatggagatattggtaatactctccg

SEQ ID NO: 359738 - DNA, 30 bp, Artificial Sequence
  Synthetic oligonucleotide
ggtgtttattgtgagccgctctggtctccg

SEQ ID NO: 359739 - DNA, 30 bp, Artificial Sequence
  Synthetic oligonucleotide
ttagaccgtcagagtatttaactgtctccg

SEQ ID NO: 359740 - DNA, 30 bp, Artificial Sequence
  Synthetic oligonucleotide
acattgtttatcctactgtgcaaaagtccg

SEQ ID NO: 359741 - DNA, 30 bp, Artificial Sequence
  Synthetic oligonucleotide
acgctggctaggccttagattcgaagtccg

SEQ ID NO: 359742 - DNA, 30 bp, Artificial Sequence
  Synthetic oligonucleotide
ggcgcgggacagtgggggtagttaagtccg

SEQ ID NO: 359743 - DNA, 30 bp, Artificial Sequence
  Synthetic oligonucleotide
tccacgacccaaccgtgggcatggagtccg

SEQ ID NO: 359744 - DNA, 30 bp, Artificial Sequence
  Synthetic oligonucleotide
gagtaagctagaatcacaagggaacgtccg

SEQ ID NO: 359745 - DNA, 30 bp, Artificial Sequence
  Synthetic oligonucleotide
cttatggaacagtaagcaggggcacgtccg

SEQ ID NO: 359746 - DNA, 30 bp, Artificial Sequence
  Synthetic oligonucleotide
tttatgctccaagggtgcacaagacgtccg

SEQ ID NO: 359747 - DNA, 30 bp, Artificial Sequence
  Synthetic oligonucleotide
gcccagaccggctgtgctaccagacgtccg

SEQ ID NO: 359748 - DNA, 30 bp, Artificial Sequence
  Synthetic oligonucleotide
tccgtttgagtgacagcattgtagcgtccg

SEQ ID NO: 359749 - DNA, 30 bp, Artificial Sequence
  Synthetic oligonucleotide
cgggcgttccggattacccgcatgcgtccg

SEQ ID NO: 359750 - DNA, 30 bp, Artificial Sequence
  Synthetic oligonucleotide
gcctggctttcaccacggtgacatcgtccg

SEQ ID NO: 359751 - DNA, 30 bp, Artificial Sequence
  Synthetic oligonucleotide
aacacttgaaaatgttcatgaaccggtccg

SEQ ID NO: 359752 - DNA, 30 bp, Artificial Sequence
  Synthetic oligonucleotide
cctccgatgttcgtgtccatagtcggtccg

SEQ ID NO: 359753 - DNA, 30 bp, Artificial Sequence
  Synthetic oligonucleotide
ctgcgtcccttatgtttaaaagagggtccg

SEQ ID NO: 359754 - DNA, 31 bp, Artificial Sequence
  Synthetic oligonucleotide
attgaatgcctaccccccagccgggggtccg

SEQ ID NO: 359755 - DNA, 30 bp, Artificial Sequence
  Synthetic oligonucleotide
taccggaaagaagggtggcgggtgggtccg

SEQ ID NO: 359756 - DNA, 30 bp, Artificial Sequence
  Synthetic oligonucleotide
taacccacaccattgtctcttcatggtccg

SEQ ID NO: 359757 - DNA, 30 bp, Artificial Sequence
  Synthetic oligonucleotide
tgcttttgcttcgggacacaagttggtccg

SEQ ID NO: 359758 - DNA, 30 bp, Artificial Sequence
  Synthetic oligonucleotide
ctcctatggcgcatcgctatactgtgtccg

SEQ ID NO: 359759 - DNA, 30 bp, Artificial Sequence
  Synthetic oligonucleotide
gaacgcacctaaatcaactgtgaaattccg

SEQ ID NO: 359760 - DNA, 30 bp, Artificial Sequence
  Synthetic oligonucleotide
cgctggaaaggcgtgtcgggcaacattccg

SEQ ID NO: 359761 - DNA, 30 bp, Artificial Sequence
  Synthetic oligonucleotide
aagtcccatagcgaaaatattatcattccg

SEQ ID NO: 359762 - DNA, 30 bp, Artificial Sequence
  Synthetic oligonucleotide
aagcagaataacctttgaacgaagattccg

SEQ ID NO: 359763 - DNA, 30 bp, Artificial Sequence
  Synthetic oligonucleotide
cgcacatcaagatgacggcgacggattccg

SEQ ID NO: 359764 - DNA, 30 bp, Artificial Sequence
  Synthetic oligonucleotide
agattgtaggccgcatatatggatattccg

SEQ ID NO: 359765 - DNA, 30 bp, Artificial Sequence
  Synthetic oligonucleotide
ttagaccatgccccggaacatactattccg

SEQ ID NO: 359766 - DNA, 30 bp, Artificial Sequence
  Synthetic oligonucleotide
aactacgatacgtatcagagccgtattccg

SEQ ID NO: 359767 - DNA, 30 bp, Artificial Sequence
  Synthetic oligonucleotide
aaatgctccaacaggataacgcaacttccg

SEQ ID NO: 359768 - DNA, 30 bp, Artificial Sequence
  Synthetic oligonucleotide
gggacccgaacagattttaaaccacttccg

SEQ ID NO: 359769 - DNA, 30 bp, Artificial Sequence
  Synthetic oligonucleotide
tactttcttgttgacaatggaacccttccg

SEQ ID NO: 359770 - DNA, 30 bp, Artificial Sequence
  Synthetic oligonucleotide
atatctgtatattcactccgcgttcttccg

SEQ ID NO: 359771 - DNA, 30 bp, Artificial Sequence
  Synthetic oligonucleotide
agaaaaacacattttatgtagttagttccg

SEQ ID NO: 359772 - DNA, 30 bp, Artificial Sequence
  Synthetic oligonucleotide
acgccggatatctccgggtagcacgttccg

SEQ ID NO: 359773 - DNA, 30 bp, Artificial Sequence
  Synthetic oligonucleotide
gtgcacacgacaagccctccaacggttccg

SEQ ID NO: 359774 - DNA, 30 bp, Artificial Sequence
  Synthetic oligonucleotide
tcggggaaacaccgctggtcggttgttccg

SEQ ID NO: 359775 - DNA, 30 bp, Artificial Sequence
  Synthetic oligonucleotide
ctaccgtgaaaatatccccctgaatttccg

SEQ ID NO: 359776 - DNA, 30 bp, Artificial Sequence
  Synthetic oligonucleotide
cgcacggtcgtttggttatttagatttccg

SEQ ID NO: 359777 - DNA, 30 bp, Artificial Sequence
  Synthetic oligonucleotide
gggcctagtgaatgagctgcggtatttccg

SEQ ID NO: 359778 - DNA, 30 bp, Artificial Sequence
  Synthetic oligonucleotide
taataaccaacgacatcgccttagtttccg

SEQ ID NO: 359779 - DNA, 30 bp, Artificial Sequence
  Synthetic oligonucleotide
gttaaacttctttcatacaatgattttccg

SEQ ID NO: 359780 - DNA, 29 bp, Artificial Sequence
  Synthetic oligonucleotide
aaccgtatagccgttatagatcttttccg

SEQ ID NO: 359781 - DNA, 30 bp, Artificial Sequence
  Synthetic oligonucleotide
cagattaacggagaacccttcaaaaaagcg

SEQ ID NO: 359782 - DNA, 30 bp, Artificial Sequence
  Synthetic oligonucleotide
cattatcgcgtttaacgagcctaaaaagcg

SEQ ID NO: 359783 - DNA, 30 bp, Artificial Sequence
  Synthetic oligonucleotide
tatcgttgtatgtatctgctacgcaaagcg

SEQ ID NO: 359784 - DNA, 30 bp, Artificial Sequence
  Synthetic oligonucleotide
ctaaccggatgctgcttttcacataaagcg

SEQ ID NO: 359785 - DNA, 30 bp, Artificial Sequence
  Synthetic oligonucleotide
aaacgcgtctttaactggcaggctaaagcg

SEQ ID NO: 359786 - DNA, 30 bp, Artificial Sequence
  Synthetic oligonucleotide
atcctttaacgcataggcgaaaaacaagcg

SEQ ID NO: 359787 - DNA, 30 bp, Artificial Sequence
  Synthetic oligonucleotide
ttccacagaaccccggctgaccgacaagcg

SEQ ID NO: 359788 - DNA, 30 bp, Artificial Sequence
  Synthetic oligonucleotide
tccaacgtgtgtcgcacgacgtgccaagcg

SEQ ID NO: 359789 - DNA, 30 bp, Artificial Sequence
  Synthetic oligonucleotide
aacgtatcaaggtttagacgggggcaagcg

SEQ ID NO: 359790 - DNA, 30 bp, Artificial Sequence
  Synthetic oligonucleotide
aaaaatgtaaaagatatacattatcaagcg

SEQ ID NO: 359791 - DNA, 30 bp, Artificial Sequence
  Synthetic oligonucleotide
gctgatcgcttaatctggagcttagaagcg

SEQ ID NO: 359792 - DNA, 30 bp, Artificial Sequence
  Synthetic oligonucleotide
tcgaaggttgcgattcagcggtgcgaagcg

SEQ ID NO: 359793 - DNA, 30 bp, Artificial Sequence
  Synthetic oligonucleotide
ggaccgcattggtcatacccgatcgaagcg

SEQ ID NO: 359794 - DNA, 30 bp, Artificial Sequence
  Synthetic oligonucleotide
atggggtcgttatgaaagtccccggaagcg

SEQ ID NO: 359795 - DNA, 30 bp, Artificial Sequence
  Synthetic oligonucleotide
ttctctgttctaatctaactggatgaagcg

SEQ ID NO: 359796 - DNA, 30 bp, Artificial Sequence
  Synthetic oligonucleotide
atggaatttatagtcagttgccttgaagcg

SEQ ID NO: 359797 - DNA, 30 bp, Artificial Sequence
  Synthetic oligonucleotide
taagttcgtgtctcaatcgtattataagcg

SEQ ID NO: 359798 - DNA, 30 bp, Artificial Sequence
  Synthetic oligonucleotide
atgacctagtcactaaacgatgcaacagcg

SEQ ID NO: 359799 - DNA, 30 bp, Artificial Sequence
  Synthetic oligonucleotide
aaatccagaacagatatacgactgacagcg

SEQ ID NO: 359800 - DNA, 30 bp, Artificial Sequence
  Synthetic oligonucleotide
gtttatttccaacgcggcggggtgacagcg

SEQ ID NO: 359801 - DNA, 30 bp, Artificial Sequence
  Synthetic oligonucleotide
gtatgaatttcctgaaagtaatctacagcg

SEQ ID NO: 359802 - DNA, 30 bp, Artificial Sequence
  Synthetic oligonucleotide
agtcccctggtgcggtaatttggaccagcg

SEQ ID NO: 359803 - DNA, 30 bp, Artificial Sequence
  Synthetic oligonucleotide
ggagaggtatgcggcccagtctgaccagcg

SEQ ID NO: 359804 - DNA, 30 bp, Artificial Sequence
  Synthetic oligonucleotide
cgaatacaaaccgtgtgggtgtgcgcagcg

SEQ ID NO: 359805 - DNA, 30 bp, Artificial Sequence
  Synthetic oligonucleotide
ttctagaaaacgagaatacccgcggcagcg

SEQ ID NO: 359806 - DNA, 30 bp, Artificial Sequence
  Synthetic oligonucleotide
tcaaacgttaccaactaaaacggggcagcg

SEQ ID NO: 359807 - DNA, 30 bp, Artificial Sequence
  Synthetic oligonucleotide
aatgtctggattgtcggggccaatgcagcg

SEQ ID NO: 359808 - DNA, 30 bp, Artificial Sequence
  Synthetic oligonucleotide
ttggtcgcagaggattcaccacgatcagcg

SEQ ID NO: 359809 - DNA, 30 bp, Artificial Sequence
  Synthetic oligonucleotide
tattccttgtaaagggtatactagtcagcg

SEQ ID NO: 359810 - DNA, 30 bp, Artificial Sequence
  Synthetic oligonucleotide
aactcatgagggcgaggattgttgtcagcg

SEQ ID NO: 359811 - DNA, 30 bp, Artificial Sequence
  Synthetic oligonucleotide
aagggaaactattagccaagtagttcagcg

SEQ ID NO: 359812 - DNA, 30 bp, Artificial Sequence
  Synthetic oligonucleotide
gcccgagttgcctattcttagctcagagcg

SEQ ID NO: 359813 - DNA, 30 bp, Artificial Sequence
  Synthetic oligonucleotide
atctagcagaggctaccgctttcgagagcg

SEQ ID NO: 359814 - DNA, 30 bp, Artificial Sequence
  Synthetic oligonucleotide
gatgctgccggatgtaccgttacacgagcg

SEQ ID NO: 359815 - DNA, 30 bp, Artificial Sequence
  Synthetic oligonucleotide
agggaagcggaaatagtagggtcacgagcg

SEQ ID NO: 359816 - DNA, 30 bp, Artificial Sequence
  Synthetic oligonucleotide
ggtatagttcggtcttaagaataccgagcg

SEQ ID NO: 359817 - DNA, 30 bp, Artificial Sequence
  Synthetic oligonucleotide
atgcgcacctcacagcaaacactccgagcg

SEQ ID NO: 359818 - DNA, 30 bp, Artificial Sequence
  Synthetic oligonucleotide
attaagcaccctagcatcgctgggcgagcg

SEQ ID NO: 359819 - DNA, 30 bp, Artificial Sequence
  Synthetic oligonucleotide
ggtatctgtacacaccgggccctgcgagcg

SEQ ID NO: 359820 - DNA, 30 bp, Artificial Sequence
  Synthetic oligonucleotide
caaattctcttactatccccagtgcgagcg

SEQ ID NO: 359821 - DNA, 30 bp, Artificial Sequence
  Synthetic oligonucleotide
gggagcgccatggtgacgaaccctcgagcg

SEQ ID NO: 359822 - DNA, 30 bp, Artificial Sequence
  Synthetic oligonucleotide
cgccaagcgaagtgctactctgttcgagcg

SEQ ID NO: 359823 - DNA, 30 bp, Artificial Sequence
  Synthetic oligonucleotide
agttttaggctcatccttgtgaccggagcg

SEQ ID NO: 359824 - DNA, 30 bp, Artificial Sequence
  Synthetic oligonucleotide
cttaatcaatagactgggggcttcggagcg

SEQ ID NO: 359825 - DNA, 30 bp, Artificial Sequence
  Synthetic oligonucleotide
tctattcgtacacttggcgtagggggagcg

SEQ ID NO: 359826 - DNA, 30 bp, Artificial Sequence
  Synthetic oligonucleotide
gtagacgttgattggcgatgctggggagcg

SEQ ID NO: 359827 - DNA, 30 bp, Artificial Sequence
  Synthetic oligonucleotide
tgcccgtcagtctgctagactgatggagcg

SEQ ID NO: 359828 - DNA, 30 bp, Artificial Sequence
  Synthetic oligonucleotide
agataatggttctgagttatttctggagcg

SEQ ID NO: 359829 - DNA, 30 bp, Artificial Sequence
  Synthetic oligonucleotide
agaagtaatccgcggcagacgacatgagcg

SEQ ID NO: 359830 - DNA, 30 bp, Artificial Sequence
  Synthetic oligonucleotide
tgcatttgtccaactggagtcacgtgagcg

SEQ ID NO: 359831 - DNA, 30 bp, Artificial Sequence
  Synthetic oligonucleotide
gccattaaagtgttactcagtgcgtgagcg

SEQ ID NO: 359832 - DNA, 30 bp, Artificial Sequence
  Synthetic oligonucleotide
tcagacattcagaaatgctggcattgagcg

SEQ ID NO: 359833 - DNA, 30 bp, Artificial Sequence
  Synthetic oligonucleotide
acgacaaggtcaacgctaggattttgagcg

SEQ ID NO: 359834 - DNA, 30 bp, Artificial Sequence
  Synthetic oligonucleotide
gtgccttaactcaagcctgtagacatagcg

SEQ ID NO: 359835 - DNA, 30 bp, Artificial Sequence
  Synthetic oligonucleotide
ttatcacaagtctctcaaaggttgatagcg

SEQ ID NO: 359836 - DNA, 30 bp, Artificial Sequence
  Synthetic oligonucleotide
gtcatggtttttgcacttgtagatatagcg

SEQ ID NO: 359837 - DNA, 30 bp, Artificial Sequence
  Synthetic oligonucleotide
gtacgatagtcccggtacgttcgtatagcg

SEQ ID NO: 359838 - DNA, 30 bp, Artificial Sequence
  Synthetic oligonucleotide
aaggctaacgtgatattcgcctttatagcg

SEQ ID NO: 359839 - DNA, 30 bp, Artificial Sequence
  Synthetic oligonucleotide
ctggttgtgtcactgtgtatgacactagcg

SEQ ID NO: 359840 - DNA, 30 bp, Artificial Sequence
  Synthetic oligonucleotide
gaaaacttgcaatatgcaagtacactagcg

SEQ ID NO: 359841 - DNA, 30 bp, Artificial Sequence
  Synthetic oligonucleotide
attctcgccagcgagacgataggactagcg

SEQ ID NO: 359842 - DNA, 30 bp, Artificial Sequence
  Synthetic oligonucleotide
catgtggaccacaagggcgttcacctagcg

SEQ ID NO: 359843 - DNA, 30 bp, Artificial Sequence
  Synthetic oligonucleotide
agtttattcgaaggccaggggcttctagcg

SEQ ID NO: 359844 - DNA, 30 bp, Artificial Sequence
  Synthetic oligonucleotide
ggggtcccgatgggtctacctcttctagcg

SEQ ID NO: 359845 - DNA, 30 bp, Artificial Sequence
  Synthetic oligonucleotide
gtgttgatgcagacattctcgggggtagcg

SEQ ID NO: 359846 - DNA, 30 bp, Artificial Sequence
  Synthetic oligonucleotide
actggtatacaagacttcggtatggtagcg

SEQ ID NO: 359847 - DNA, 30 bp, Artificial Sequence
  Synthetic oligonucleotide
tacttggcgcggcccagaactgtggtagcg

SEQ ID NO: 359848 - DNA, 30 bp, Artificial Sequence
  Synthetic oligonucleotide
ccattgctggcaaccagtctatatgtagcg

SEQ ID NO: 359849 - DNA, 30 bp, Artificial Sequence
  Synthetic oligonucleotide
cattgcgatagccccatgtctaaattagcg

SEQ ID NO: 359850 - DNA, 30 bp, Artificial Sequence
  Synthetic oligonucleotide
tacaattttctctagagagaaacattagcg

SEQ ID NO: 359851 - DNA, 30 bp, Artificial Sequence
  Synthetic oligonucleotide
ggggccctcggaaggctatttttcttagcg

SEQ ID NO: 359852 - DNA, 30 bp, Artificial Sequence
  Synthetic oligonucleotide
gtcttaaagtggagaggcaaggttttagcg

SEQ ID NO: 359853 - DNA, 30 bp, Artificial Sequence
  Synthetic oligonucleotide
ctaaagggattttttcgtggctttttagcg

SEQ ID NO: 359854 - DNA, 30 bp, Artificial Sequence
  Synthetic oligonucleotide
ttcttggtctcgctgagtttacgaaacgcg

SEQ ID NO: 359855 - DNA, 30 bp, Artificial Sequence
  Synthetic oligonucleotide
gcatcgtcccggttctcgtggttaaacgcg

SEQ ID NO: 359856 - DNA, 30 bp, Artificial Sequence
  Synthetic oligonucleotide
tcacacctggtaacgcttagccccaacgcg

SEQ ID NO: 359857 - DNA, 30 bp, Artificial Sequence
  Synthetic oligonucleotide
gtgcctcgggtccccgcagatggcaacgcg

SEQ ID NO: 359858 - DNA, 30 bp, Artificial Sequence
  Synthetic oligonucleotide
aagagagtgccgcgaagtgtttgcaacgcg

SEQ ID NO: 359859 - DNA, 30 bp, Artificial Sequence
  Synthetic oligonucleotide
tcgagcgcaaacgctaggggccagaacgcg

SEQ ID NO: 359860 - DNA, 30 bp, Artificial Sequence
  Synthetic oligonucleotide
aatccaatgggtaatcatggtcgtaacgcg

SEQ ID NO: 359861 - DNA, 30 bp, Artificial Sequence
  Synthetic oligonucleotide
agcaaagctactttatagcgcgttaacgcg

SEQ ID NO: 359862 - DNA, 30 bp, Artificial Sequence
  Synthetic oligonucleotide
tgagtgaaaacacaatgggggccacacgcg

SEQ ID NO: 359863 - DNA, 30 bp, Artificial Sequence
  Synthetic oligonucleotide
gactgagacacacggcagccactacacgcg

SEQ ID NO: 359864 - DNA, 30 bp, Artificial Sequence
  Synthetic oligonucleotide
gcgaccctatttcgcaataaagtacacgcg

SEQ ID NO: 359865 - DNA, 30 bp, Artificial Sequence
  Synthetic oligonucleotide
gattgtctcgccgaataacctgtacacgcg

SEQ ID NO: 359866 - DNA, 30 bp, Artificial Sequence
  Synthetic oligonucleotide
gtttctagatttcaatcgaagatccacgcg

SEQ ID NO: 359867 - DNA, 30 bp, Artificial Sequence
  Synthetic oligonucleotide
ctacagggtcacgtgggaattgggcacgcg

SEQ ID NO: 359868 - DNA, 30 bp, Artificial Sequence
  Synthetic oligonucleotide
tctccgcatatgcccttgaaacatcacgcg

SEQ ID NO: 359869 - DNA, 30 bp, Artificial Sequence
  Synthetic oligonucleotide
attactgagatcccataggacattcacgcg

SEQ ID NO: 359870 - DNA, 30 bp, Artificial Sequence
  Synthetic oligonucleotide
tttaagggtatatgatggttacttcacgcg

SEQ ID NO: 359871 - DNA, 30 bp, Artificial Sequence
  Synthetic oligonucleotide
gctacaaacgtgaactatctcgaagacgcg

SEQ ID NO: 359872 - DNA, 30 bp, Artificial Sequence
  Synthetic oligonucleotide
cgccagatttatgcaactcaatgcgacgcg

SEQ ID NO: 359873 - DNA, 30 bp, Artificial Sequence
  Synthetic oligonucleotide
gctttattcaccacgtacctcaaggacgcg

SEQ ID NO: 359874 - DNA, 30 bp, Artificial Sequence
  Synthetic oligonucleotide
atgccgattgggcttgtcgcttgggacgcg

SEQ ID NO: 359875 - DNA, 30 bp, Artificial Sequence
  Synthetic oligonucleotide
ttgactccgttttccccgcgtttggacgcg

SEQ ID NO: 359876 - DNA, 30 bp, Artificial Sequence
  Synthetic oligonucleotide
tcaaccggctcctgatggagaccatacgcg

SEQ ID NO: 359877 - DNA, 30 bp, Artificial Sequence
  Synthetic oligonucleotide
gcgaagttaggattgagcatatcatacgcg

SEQ ID NO: 359878 - DNA, 30 bp, Artificial Sequence
  Synthetic oligonucleotide
gtagtctgataggagctcaattcatacgcg

SEQ ID NO: 359879 - DNA, 30 bp, Artificial Sequence
  Synthetic oligonucleotide
ttaaatggacattaaataaggatctacgcg

SEQ ID NO: 359880 - DNA, 30 bp, Artificial Sequence
  Synthetic oligonucleotide
gcggaataggctgtccaattcgtctacgcg

SEQ ID NO: 359881 - DNA, 30 bp, Artificial Sequence
  Synthetic oligonucleotide
cgatggctggcgactgctccccagtacgcg

SEQ ID NO: 359882 - DNA, 30 bp, Artificial Sequence
  Synthetic oligonucleotide
cagaagaggttgataatttagctgtacgcg

SEQ ID NO: 359883 - DNA, 30 bp, Artificial Sequence
  Synthetic oligonucleotide
atttgtgcgtttcgaaaaagactttacgcg

SEQ ID NO: 359884 - DNA, 30 bp, Artificial Sequence
  Synthetic oligonucleotide
acagtaagcacgtaagttcagatcaccgcg

SEQ ID NO: 359885 - DNA, 30 bp, Artificial Sequence
  Synthetic oligonucleotide
atagcgagtcaagcaacccttcagaccgcg

SEQ ID NO: 359886 - DNA, 30 bp, Artificial Sequence
  Synthetic oligonucleotide
ctatatgatagctatgccacatggaccgcg

SEQ ID NO: 359887 - DNA, 30 bp, Artificial Sequence
  Synthetic oligonucleotide
aagcaacaatatttgtcgtttatgaccgcg

SEQ ID NO: 359888 - DNA, 30 bp, Artificial Sequence
  Synthetic oligonucleotide
aagcaacgtttgtgacacgctgataccgcg

SEQ ID NO: 359889 - DNA, 30 bp, Artificial Sequence
  Synthetic oligonucleotide
aacgcacacgtccaggaactctataccgcg

SEQ ID NO: 359890 - DNA, 30 bp, Artificial Sequence
  Synthetic oligonucleotide
ctaggttatgtactgaaggatagccccgcg

SEQ ID NO: 359891 - DNA, 30 bp, Artificial Sequence
  Synthetic oligonucleotide
tggaggcttggtttccatgaaaatcccgcg

SEQ ID NO: 359892 - DNA, 30 bp, Artificial Sequence
  Synthetic oligonucleotide
gtagattctatggtatgtacccaagccgcg

SEQ ID NO: 359893 - DNA, 30 bp, Artificial Sequence
  Synthetic oligonucleotide
gtgatacgcagtgtaatgcctccagccgcg

SEQ ID NO: 359894 - DNA, 30 bp, Artificial Sequence
  Synthetic oligonucleotide
cgcggctgttcgtgttgaagctcatccgcg

SEQ ID NO: 359895 - DNA, 30 bp, Artificial Sequence
  Synthetic oligonucleotide
tgtttacgatgcgcggtggacggctccgcg

SEQ ID NO: 359896 - DNA, 30 bp, Artificial Sequence
  Synthetic oligonucleotide
tgtttctaagtaccgaagcgatagtccgcg

SEQ ID NO: 359897 - DNA, 30 bp, Artificial Sequence
  Synthetic oligonucleotide
agaaaaatttctaagtaaaaagattccgcg

SEQ ID NO: 359898 - DNA, 30 bp, Artificial Sequence
  Synthetic oligonucleotide
cgtcgcctcgagacgagcccacgttccgcg

SEQ ID NO: 359899 - DNA, 30 bp, Artificial Sequence
  Synthetic oligonucleotide
tagttaatcctacgggagctacacagcgcg

SEQ ID NO: 359900 - DNA, 30 bp, Artificial Sequence
  Synthetic oligonucleotide
tttacacttccatggatttggatgagcgcg

SEQ ID NO: 359901 - DNA, 30 bp, Artificial Sequence
  Synthetic oligonucleotide
ccctatcggcgtctcaaggttctgagcgcg

SEQ ID NO: 359902 - DNA, 30 bp, Artificial Sequence
  Synthetic oligonucleotide
gcgaagtaagcagcaacgtgaactagcgcg

SEQ ID NO: 359903 - DNA, 30 bp, Artificial Sequence
  Synthetic oligonucleotide
ttagaaggggtttggggggagtctagcgcg

SEQ ID NO: 359904 - DNA, 30 bp, Artificial Sequence
  Synthetic oligonucleotide
gtttgtagtgcggtcggtatataacgcgcg

SEQ ID NO: 359905 - DNA, 30 bp, Artificial Sequence
  Synthetic oligonucleotide
gcaaagtgggcgcacatcgggagacgcgcg

SEQ ID NO: 359906 - DNA, 30 bp, Artificial Sequence
  Synthetic oligonucleotide
taaaaccataaggactcatatattcgcgcg

SEQ ID NO: 359907 - DNA, 30 bp, Artificial Sequence
  Synthetic oligonucleotide
agcgggcggccaaagtcacgtagaggcgcg

SEQ ID NO: 359908 - DNA, 30 bp, Artificial Sequence
  Synthetic oligonucleotide
actctaaattttagggacgcgggaggcgcg

SEQ ID NO: 359909 - DNA, 30 bp, Artificial Sequence
  Synthetic oligonucleotide
ctctgttcgagaaccttagtgtggggcgcg

SEQ ID NO: 359910 - DNA, 30 bp, Artificial Sequence
  Synthetic oligonucleotide
gttgaaagagttcacctgcgtgatggcgcg

SEQ ID NO: 359911 - DNA, 30 bp, Artificial Sequence
  Synthetic oligonucleotide
acgataaaaataaatttgtccagtggcgcg

SEQ ID NO: 359912 - DNA, 30 bp, Artificial Sequence
  Synthetic oligonucleotide
agatcctccactaactcacaacgtggcgcg

SEQ ID NO: 359913 - DNA, 30 bp, Artificial Sequence
  Synthetic oligonucleotide
gtctctgtgaactctattagttttggcgcg

SEQ ID NO: 359914 - DNA, 30 bp, Artificial Sequence
  Synthetic oligonucleotide
ctggtgagtattgcagaaagagtctgcgcg

SEQ ID NO: 359915 - DNA, 30 bp, Artificial Sequence
  Synthetic oligonucleotide
tctaagctcttgctagaatccttctgcgcg

SEQ ID NO: 359916 - DNA, 30 bp, Artificial Sequence
  Synthetic oligonucleotide
acttatcgtcccgcaggtctgatgtgcgcg

SEQ ID NO: 359917 - DNA, 30 bp, Artificial Sequence
  Synthetic oligonucleotide
acgtccaagaagtgcccaagacgttgcgcg

SEQ ID NO: 359918 - DNA, 30 bp, Artificial Sequence
  Synthetic oligonucleotide
taccgcgtgcgtcgattgacctgttgcgcg

SEQ ID NO: 359919 - DNA, 30 bp, Artificial Sequence
  Synthetic oligonucleotide
tagattttgccgctagtagggctttgcgcg

SEQ ID NO: 359920 - DNA, 30 bp, Artificial Sequence
  Synthetic oligonucleotide
atcctcgaatgtgcatcgacaccaatcgcg

SEQ ID NO: 359921 - DNA, 30 bp, Artificial Sequence
  Synthetic oligonucleotide
cgagctcttgatacgggtatgttgatcgcg

SEQ ID NO: 359922 - DNA, 30 bp, Artificial Sequence
  Synthetic oligonucleotide
cgcgttcaagtatgggcttgaaatatcgcg

SEQ ID NO: 359923 - DNA, 30 bp, Artificial Sequence
  Synthetic oligonucleotide
gcctcgctgtactagtttcctgctatcgcg

SEQ ID NO: 359924 - DNA, 30 bp, Artificial Sequence
  Synthetic oligonucleotide
taaatgattcccgtatctgtcagactcgcg

SEQ ID NO: 359925 - DNA, 30 bp, Artificial Sequence
  Synthetic oligonucleotide
ctttgttagctagtcgaacatggactcgcg

SEQ ID NO: 359926 - DNA, 30 bp, Artificial Sequence
  Synthetic oligonucleotide
ttcgaccaaaatggctccgttcagctcgcg

SEQ ID NO: 359927 - DNA, 30 bp, Artificial Sequence
  Synthetic oligonucleotide
cctgatggcaccgccttttactagctcgcg

SEQ ID NO: 359928 - DNA, 30 bp, Artificial Sequence
  Synthetic oligonucleotide
tctgcaagcaagcaattggaagtgctcgcg

SEQ ID NO: 359929 - DNA, 30 bp, Artificial Sequence
  Synthetic oligonucleotide
ttctcgctatctagaattcgtggtctcgcg

SEQ ID NO: 359930 - DNA, 30 bp, Artificial Sequence
  Synthetic oligonucleotide
aacagacgcaactggtaaatcaaagtcgcg

SEQ ID NO: 359931 - DNA, 30 bp, Artificial Sequence
  Synthetic oligonucleotide
agcatctcgatttaagtcctttaagtcgcg

SEQ ID NO: 359932 - DNA, 30 bp, Artificial Sequence
  Synthetic oligonucleotide
tagtgcttccccactgagtagacagtcgcg

SEQ ID NO: 359933 - DNA, 30 bp, Artificial Sequence
  Synthetic oligonucleotide
taaaacgatctgctcctcgctaaggtcgcg

SEQ ID NO: 359934 - DNA, 30 bp, Artificial Sequence
  Synthetic oligonucleotide
caattggactcggatcgacccatggtcgcg

SEQ ID NO: 359935 - DNA, 30 bp, Artificial Sequence
  Synthetic oligonucleotide
ttagtgtttacggtcgtcggttatgtcgcg

SEQ ID NO: 359936 - DNA, 30 bp, Artificial Sequence
  Synthetic oligonucleotide
ggttccacgcacgagttctcatttgtcgcg

SEQ ID NO: 359937 - DNA, 30 bp, Artificial Sequence
  Synthetic oligonucleotide
gaacaccataaaccggtgctcagattcgcg

SEQ ID NO: 359938 - DNA, 30 bp, Artificial Sequence
  Synthetic oligonucleotide
actactggaagcttttgcgtcagattcgcg

SEQ ID NO: 359939 - DNA, 30 bp, Artificial Sequence
  Synthetic oligonucleotide
aatctagcgccgggttacggtgtattcgcg

SEQ ID NO: 359940 - DNA, 30 bp, Artificial Sequence
  Synthetic oligonucleotide
acttatataacggagtcccttttattcgcg

SEQ ID NO: 359941 - DNA, 30 bp, Artificial Sequence
  Synthetic oligonucleotide
gactggcagtacccttgcagcggcttcgcg

SEQ ID NO: 359942 - DNA, 30 bp, Artificial Sequence
  Synthetic oligonucleotide
ccgctgtaggtgcaacagttgctcttcgcg

SEQ ID NO: 359943 - DNA, 30 bp, Artificial Sequence
  Synthetic oligonucleotide
aatgcgtaaaagggcgctcggtagttcgcg

SEQ ID NO: 359944 - DNA, 30 bp, Artificial Sequence
  Synthetic oligonucleotide
gtgaagcgactccggtaggtttagttcgcg

SEQ ID NO: 359945 - DNA, 30 bp, Artificial Sequence
  Synthetic oligonucleotide
ttagagtttcacaaaagtctattgttcgcg

SEQ ID NO: 359946 - DNA, 30 bp, Artificial Sequence
  Synthetic oligonucleotide
aggcagcactggtgatcgatgcatttcgcg

SEQ ID NO: 359947 - DNA, 30 bp, Artificial Sequence
  Synthetic oligonucleotide
tcaagttcgttcgcgtggcatattttcgcg

SEQ ID NO: 359948 - DNA, 30 bp, Artificial Sequence
  Synthetic oligonucleotide
ggtctgtagacgttaatctgtacaaaggcg

SEQ ID NO: 359949 - DNA, 30 bp, Artificial Sequence
  Synthetic oligonucleotide
agccagggttttgagaagctacgaaaggcg

SEQ ID NO: 359950 - DNA, 30 bp, Artificial Sequence
  Synthetic oligonucleotide
ataactttccgagtgtagttgaccaaggcg

SEQ ID NO: 359951 - DNA, 30 bp, Artificial Sequence
  Synthetic oligonucleotide
agtttcttaattgaatgccgcgcgaaggcg

SEQ ID NO: 359952 - DNA, 30 bp, Artificial Sequence
  Synthetic oligonucleotide
gatgttgtcacgccaactggggataaggcg

SEQ ID NO: 359953 - DNA, 30 bp, Artificial Sequence
  Synthetic oligonucleotide
taatctgtgttgggccgtctaattaaggcg

SEQ ID NO: 359954 - DNA, 30 bp, Artificial Sequence
  Synthetic oligonucleotide
aagccgatcgggtcattgtaagcacaggcg

SEQ ID NO: 359955 - DNA, 30 bp, Artificial Sequence
  Synthetic oligonucleotide
ccaacttaacgatacgcgcgttgacaggcg

SEQ ID NO: 359956 - DNA, 30 bp, Artificial Sequence
  Synthetic oligonucleotide
aggccttcagtcctccgcgcaagccaggcg

SEQ ID NO: 359957 - DNA, 30 bp, Artificial Sequence
  Synthetic oligonucleotide
acgtctcgtgatgatttacggcgccaggcg

SEQ ID NO: 359958 - DNA, 30 bp, Artificial Sequence
  Synthetic oligonucleotide
catgtggcagcgggcaaactgcgccaggcg

SEQ ID NO: 359959 - DNA, 30 bp, Artificial Sequence
  Synthetic oligonucleotide
gctcggtgcattagacgcgctacgcaggcg

SEQ ID NO: 359960 - DNA, 30 bp, Artificial Sequence
  Synthetic oligonucleotide
ccgctgtagggacacagtatatccgaggcg

SEQ ID NO: 359961 - DNA, 30 bp, Artificial Sequence
  Synthetic oligonucleotide
atttctccttggggttcgcggtgtgaggcg

SEQ ID NO: 359962 - DNA, 30 bp, Artificial Sequence
  Synthetic oligonucleotide
ctcgactgttcaactcggtctgaataggcg

SEQ ID NO: 359963 - DNA, 30 bp, Artificial Sequence
  Synthetic oligonucleotide
atataaagctcataggacgatcactaggcg

SEQ ID NO: 359964 - DNA, 30 bp, Artificial Sequence
  Synthetic oligonucleotide
agagtttaacggtacgcaacttactaggcg

SEQ ID NO: 359965 - DNA, 30 bp, Artificial Sequence
  Synthetic oligonucleotide
aatccctcatgatatatcacgctgtaggcg

SEQ ID NO: 359966 - DNA, 30 bp, Artificial Sequence
  Synthetic oligonucleotide
gacaaggtgtcgagtgcgctggtttaggcg

SEQ ID NO: 359967 - DNA, 30 bp, Artificial Sequence
  Synthetic oligonucleotide
agcacgtgctcactctatagtttcacggcg

SEQ ID NO: 359968 - DNA, 30 bp, Artificial Sequence
  Synthetic oligonucleotide
ctccgtctgcagctgcaataggggacggcg

SEQ ID NO: 359969 - DNA, 30 bp, Artificial Sequence
  Synthetic oligonucleotide
acgccgagaccaaaatagtcacgtacggcg

SEQ ID NO: 359970 - DNA, 30 bp, Artificial Sequence
  Synthetic oligonucleotide
ctctttcagtgcaataagtgacgtacggcg

SEQ ID NO: 359971 - DNA, 30 bp, Artificial Sequence
  Synthetic oligonucleotide
ggctccaggggtagcgtctgaaacccggcg

SEQ ID NO: 359972 - DNA, 30 bp, Artificial Sequence
  Synthetic oligonucleotide
atgccgatattgctactaatagtcccggcg

SEQ ID NO: 359973 - DNA, 30 bp, Artificial Sequence
  Synthetic oligonucleotide
actaattaatatgtggattcacagccggcg

SEQ ID NO: 359974 - DNA, 30 bp, Artificial Sequence
  Synthetic oligonucleotide
tttatcagggccaatacccccctgccggcg

SEQ ID NO: 359975 - DNA, 30 bp, Artificial Sequence
  Synthetic oligonucleotide
gtggtgtgttttcactactaacatccggcg

SEQ ID NO: 359976 - DNA, 30 bp, Artificial Sequence
  Synthetic oligonucleotide
aaagtatactctacgagtgttagtccggcg

SEQ ID NO: 359977 - DNA, 30 bp, Artificial Sequence
  Synthetic oligonucleotide
ttgattggcgccactgcggtcagatcggcg

SEQ ID NO: 359978 - DNA, 30 bp, Artificial Sequence
  Synthetic oligonucleotide
cagatcgcgagcttttttgtaatatcggcg

SEQ ID NO: 359979 - DNA, 30 bp, Artificial Sequence
  Synthetic oligonucleotide
gtgttgacggcgggatggccaatgtcggcg

SEQ ID NO: 359980 - DNA, 30 bp, Artificial Sequence
  Synthetic oligonucleotide
gaatataacgcggaaggtttcggttcggcg

SEQ ID NO: 359981 - DNA, 30 bp, Artificial Sequence
  Synthetic oligonucleotide
ccctcttaattctttatgaagatttcggcg

SEQ ID NO: 359982 - DNA, 30 bp, Artificial Sequence
  Synthetic oligonucleotide
caagtccctagctaagttgtactttcggcg

SEQ ID NO: 359983 - DNA, 30 bp, Artificial Sequence
  Synthetic oligonucleotide
ccaatttcatcgacgctgttctcaagggcg

SEQ ID NO: 359984 - DNA, 30 bp, Artificial Sequence
  Synthetic oligonucleotide
atgattgcgtcattggatccgagcagggcg

SEQ ID NO: 359985 - DNA, 30 bp, Artificial Sequence
  Synthetic oligonucleotide
ggatgttcggggtagtatttccagagggcg

SEQ ID NO: 359986 - DNA, 30 bp, Artificial Sequence
  Synthetic oligonucleotide
aatttggaaagaaaataggttgggagggcg

SEQ ID NO: 359987 - DNA, 30 bp, Artificial Sequence
  Synthetic oligonucleotide
tggggagcaactcttaccggatggagggcg

SEQ ID NO: 359988 - DNA, 30 bp, Artificial Sequence
  Synthetic oligonucleotide
attgggtgatgaatttgtattaatagggcg

SEQ ID NO: 359989 - DNA, 30 bp, Artificial Sequence
  Synthetic oligonucleotide
tcggtgtaatttctaacaagttctagggcg

SEQ ID NO: 359990 - DNA, 30 bp, Artificial Sequence
  Synthetic oligonucleotide
cataattgtctggtaagcgaaggtagggcg

SEQ ID NO: 359991 - DNA, 30 bp, Artificial Sequence
  Synthetic oligonucleotide
agccgccagtgtattcaatggaaccgggcg

SEQ ID NO: 359992 - DNA, 30 bp, Artificial Sequence
  Synthetic oligonucleotide
aactgtcacttagagttttcagaccgggcg

SEQ ID NO: 359993 - DNA, 30 bp, Artificial Sequence
  Synthetic oligonucleotide
tgggctaccttacgactcggctttcgggcg

SEQ ID NO: 359994 - DNA, 30 bp, Artificial Sequence
  Synthetic oligonucleotide
gctccacgaactataatccgttttcgggcg

SEQ ID NO: 359995 - DNA, 30 bp, Artificial Sequence
  Synthetic oligonucleotide
tcggccaggaggtaacgcccgaaaggggcg

SEQ ID NO: 359996 - DNA, 30 bp, Artificial Sequence
  Synthetic oligonucleotide
gatgcacggagggtggtggccgcatgggcg

SEQ ID NO: 359997 - DNA, 30 bp, Artificial Sequence
  Synthetic oligonucleotide
gctcccgtttgataaaacatgagatgggcg

SEQ ID NO: 359998 - DNA, 30 bp, Artificial Sequence
  Synthetic oligonucleotide
acccgacggtatgggcacgatctctgggcg

SEQ ID NO: 359999 - DNA, 28 bp, Artificial Sequence
  Synthetic oligonucleotide
ggtggtgaaggacgtgtgtcggtgggcg

SEQ ID NO: 360000 - DNA, 31 bp, Artificial Sequence
  Synthetic oligonucleotide
tgaagtgcaggactcaccaacttggtgggcg

SEQ ID NO: 360001 - DNA, 29 bp, Artificial Sequence
  Synthetic oligonucleotide
tgttccatatgtatgcactcttgtgggcg

SEQ ID NO: 360002 - DNA, 30 bp, Artificial Sequence
  Synthetic oligonucleotide
gggttaaacggacggccaggagtttgggcg

SEQ ID NO: 360003 - DNA, 30 bp, Artificial Sequence
  Synthetic oligonucleotide
atgcgacgtgggaaagtaaggcgaatggcg

SEQ ID NO: 360004 - DNA, 30 bp, Artificial Sequence
  Synthetic oligonucleotide
atcgaccaccgttgccctcgtccgatggcg

SEQ ID NO: 360005 - DNA, 30 bp, Artificial Sequence
  Synthetic oligonucleotide
tcaaagccgagtggtcggccatcgatggcg

SEQ ID NO: 360006 - DNA, 30 bp, Artificial Sequence
  Synthetic oligonucleotide
ggcgggtttcgaatcggaatccgtatggcg

SEQ ID NO: 360007 - DNA, 30 bp, Artificial Sequence
  Synthetic oligonucleotide
ggagattagttggataactgaggcctggcg

SEQ ID NO: 360008 - DNA, 30 bp, Artificial Sequence
  Synthetic oligonucleotide
cgtcaggagcttagacgtatcttcctggcg

SEQ ID NO: 360009 - DNA, 30 bp, Artificial Sequence
  Synthetic oligonucleotide
acaggtcttgttacagtacggaagctggcg

SEQ ID NO: 360010 - DNA, 30 bp, Artificial Sequence
  Synthetic oligonucleotide
tttagacctagtaaatgaccttgtctggcg

SEQ ID NO: 360011 - DNA, 30 bp, Artificial Sequence
  Synthetic oligonucleotide
ttgacaacagtacgtgggatgatcgtggcg

SEQ ID NO: 360012 - DNA, 30 bp, Artificial Sequence
  Synthetic oligonucleotide
ggtaggcatcaggccgacatggtcgtggcg

SEQ ID NO: 360013 - DNA, 30 bp, Artificial Sequence
  Synthetic oligonucleotide
ctatatttcccatgtattttattcgtggcg

SEQ ID NO: 360014 - DNA, 30 bp, Artificial Sequence
  Synthetic oligonucleotide
gaacacagtatacttctcgcatgggtggcg

SEQ ID NO: 360015 - DNA, 30 bp, Artificial Sequence
  Synthetic oligonucleotide
ttggccaatacatttacgtgactggtggcg

SEQ ID NO: 360016 - DNA, 30 bp, Artificial Sequence
  Synthetic oligonucleotide
gcctctgcacctccttgccgacctgtggcg

SEQ ID NO: 360017 - DNA, 30 bp, Artificial Sequence
  Synthetic oligonucleotide
tagctcacacagatcgcccgagaattggcg

SEQ ID NO: 360018 - DNA, 30 bp, Artificial Sequence
  Synthetic oligonucleotide
gataggctccatgtaacatagtaattggcg

SEQ ID NO: 360019 - DNA, 30 bp, Artificial Sequence
  Synthetic oligonucleotide
ggacaaaagtataggggtagcatattggcg

SEQ ID NO: 360020 - DNA, 30 bp, Artificial Sequence
  Synthetic oligonucleotide
tccaaattttctagtgtagtacacttggcg

SEQ ID NO: 360021 - DNA, 30 bp, Artificial Sequence
  Synthetic oligonucleotide
ggggtacaatcaggacattatgatttggcg

SEQ ID NO: 360022 - DNA, 30 bp, Artificial Sequence
  Synthetic oligonucleotide
gggtactcacgggttactaccggtttggcg

SEQ ID NO: 360023 - DNA, 31 bp, Artificial Sequence
  Synthetic oligonucleotide
gagttctcttataagtggacgtcacaatgcg

SEQ ID NO: 360024 - DNA, 30 bp, Artificial Sequence
  Synthetic oligonucleotide
tatctgagaatggaagcacgggacaatgcg

SEQ ID NO: 360025 - DNA, 30 bp, Artificial Sequence
  Synthetic oligonucleotide
actgcaccttatgtggcttaaagtaatgcg

SEQ ID NO: 360026 - DNA, 30 bp, Artificial Sequence
  Synthetic oligonucleotide
atgctacattgaccagtacgatgtaatgcg

SEQ ID NO: 360027 - DNA, 30 bp, Artificial Sequence
  Synthetic oligonucleotide
gaattctcggaagtgcccatgtaacatgcg

SEQ ID NO: 360028 - DNA, 30 bp, Artificial Sequence
  Synthetic oligonucleotide
ttaggcgggctccccggcatttgacatgcg

SEQ ID NO: 360029 - DNA, 30 bp, Artificial Sequence
  Synthetic oligonucleotide
cgcacccctccctcatgggactcgcatgcg

SEQ ID NO: 360030 - DNA, 30 bp, Artificial Sequence
  Synthetic oligonucleotide
ctcaggtaatggataaagggtatcgatgcg

SEQ ID NO: 360031 - DNA, 30 bp, Artificial Sequence
  Synthetic oligonucleotide
gaaaacggctgtgtacgaaggctctatgcg

SEQ ID NO: 360032 - DNA, 30 bp, Artificial Sequence
  Synthetic oligonucleotide
aggaacagtagggtcgtgccgtagtatgcg

SEQ ID NO: 360033 - DNA, 30 bp, Artificial Sequence
  Synthetic oligonucleotide
aaatcaaggacaccaccgactccgtatgcg

SEQ ID NO: 360034 - DNA, 30 bp, Artificial Sequence
  Synthetic oligonucleotide
gtcgcgggcaataaaactacagggtatgcg

SEQ ID NO: 360035 - DNA, 30 bp, Artificial Sequence
  Synthetic oligonucleotide
ggaatacacgtacgggagtttaattatgcg

SEQ ID NO: 360036 - DNA, 30 bp, Artificial Sequence
  Synthetic oligonucleotide
tattgtatcaattgttgtaatccttatgcg

SEQ ID NO: 360037 - DNA, 30 bp, Artificial Sequence
  Synthetic oligonucleotide
ttgagaggtttcagccgtaaggccactgcg

SEQ ID NO: 360038 - DNA, 30 bp, Artificial Sequence
  Synthetic oligonucleotide
cagatgtttcaccacacaaatcggactgcg

SEQ ID NO: 360039 - DNA, 30 bp, Artificial Sequence
  Synthetic oligonucleotide
gagacaagtacgttcgcggtaactactgcg

SEQ ID NO: 360040 - DNA, 30 bp, Artificial Sequence
  Synthetic oligonucleotide
atcttacaagtatatatgatgtctactgcg

SEQ ID NO: 360041 - DNA, 30 bp, Artificial Sequence
  Synthetic oligonucleotide
gtcaggctgcccagccagctatgacctgcg

SEQ ID NO: 360042 - DNA, 30 bp, Artificial Sequence
  Synthetic oligonucleotide
ggcgagcctttaccaaggaaaccccctgcg

SEQ ID NO: 360043 - DNA, 30 bp, Artificial Sequence
  Synthetic oligonucleotide
taaagatgggccatctgagaaacgcctgcg

SEQ ID NO: 360044 - DNA, 30 bp, Artificial Sequence
  Synthetic oligonucleotide
aactttaaacatttaaggtttggtcctgcg

SEQ ID NO: 360045 - DNA, 30 bp, Artificial Sequence
  Synthetic oligonucleotide
gctttaagagtgtctcattctcccgctgcg

SEQ ID NO: 360046 - DNA, 30 bp, Artificial Sequence
  Synthetic oligonucleotide
aattctaaggcaacataaactgctgctgcg

SEQ ID NO: 360047 - DNA, 30 bp, Artificial Sequence
  Synthetic oligonucleotide
gcgatgtatgccatgacatataaatctgcg

SEQ ID NO: 360048 - DNA, 30 bp, Artificial Sequence
  Synthetic oligonucleotide
atagaatctctggtttatgcacaatctgcg

SEQ ID NO: 360049 - DNA, 30 bp, Artificial Sequence
  Synthetic oligonucleotide
tatccgcttaccgtctacagacaatctgcg

SEQ ID NO: 360050 - DNA, 30 bp, Artificial Sequence
  Synthetic oligonucleotide
ccggacactgctgccgtagaccgatctgcg

SEQ ID NO: 360051 - DNA, 30 bp, Artificial Sequence
  Synthetic oligonucleotide
ccgtagccgtagtcttgtccctaaagtgcg

SEQ ID NO: 360052 - DNA, 30 bp, Artificial Sequence
  Synthetic oligonucleotide
cggctccactgaacgcctagcgttagtgcg

SEQ ID NO: 360053 - DNA, 30 bp, Artificial Sequence
  Synthetic oligonucleotide
ggaattgacagaaggtactcacaacgtgcg

SEQ ID NO: 360054 - DNA, 30 bp, Artificial Sequence
  Synthetic oligonucleotide
tgccaggagccccttctcctgcaacgtgcg

SEQ ID NO: 360055 - DNA, 30 bp, Artificial Sequence
  Synthetic oligonucleotide
atgttgtgttacattcagaattaacgtgcg

SEQ ID NO: 360056 - DNA, 30 bp, Artificial Sequence
  Synthetic oligonucleotide
aatgttttacgcatccgaaagtgccgtgcg

SEQ ID NO: 360057 - DNA, 30 bp, Artificial Sequence
  Synthetic oligonucleotide
tataaggggctgtcgcggggcgtccgtgcg

SEQ ID NO: 360058 - DNA, 30 bp, Artificial Sequence
  Synthetic oligonucleotide
atatttgggacgccgatcccgtagcgtgcg

SEQ ID NO: 360059 - DNA, 30 bp, Artificial Sequence
  Synthetic oligonucleotide
agattgtcaagtttagtatatcatcgtgcg

SEQ ID NO: 360060 - DNA, 30 bp, Artificial Sequence
  Synthetic oligonucleotide
gatgcgatccggccagcgggccgtcgtgcg

SEQ ID NO: 360061 - DNA, 30 bp, Artificial Sequence
  Synthetic oligonucleotide
tgtattcgaatgatttcgtgtaaaggtgcg

SEQ ID NO: 360062 - DNA, 30 bp, Artificial Sequence
  Synthetic oligonucleotide
gcttgaatacctctgtacgtcataggtgcg

SEQ ID NO: 360063 - DNA, 30 bp, Artificial Sequence
  Synthetic oligonucleotide
tgcgggagcttgttaatatataacggtgcg

SEQ ID NO: 360064 - DNA, 30 bp, Artificial Sequence
  Synthetic oligonucleotide
aactatagtagagggcgttatcacggtgcg

SEQ ID NO: 360065 - DNA, 30 bp, Artificial Sequence
  Synthetic oligonucleotide
tgtagactccattaagccgtatacggtgcg

SEQ ID NO: 360066 - DNA, 30 bp, Artificial Sequence
  Synthetic oligonucleotide
cggatccgggctaaacatgccaccggtgcg

SEQ ID NO: 360067 - DNA, 30 bp, Artificial Sequence
  Synthetic oligonucleotide
gtagtccaccgacaaggagccaagggtgcg

SEQ ID NO: 360068 - DNA, 30 bp, Artificial Sequence
  Synthetic oligonucleotide
agggataaatactagtagtaaacgggtgcg

SEQ ID NO: 360069 - DNA, 30 bp, Artificial Sequence
  Synthetic oligonucleotide
atgttcgcatggatttctagaaggggtgcg

SEQ ID NO: 360070 - DNA, 30 bp, Artificial Sequence
  Synthetic oligonucleotide
atcaccctcttttcaggcaaatctggtgcg

SEQ ID NO: 360071 - DNA, 30 bp, Artificial Sequence
  Synthetic oligonucleotide
gctttcagtcagctcgcaattggatgtgcg

SEQ ID NO: 360072 - DNA, 30 bp, Artificial Sequence
  Synthetic oligonucleotide
cagagtcaagcagtacacacggcctgtgcg

SEQ ID NO: 360073 - DNA, 30 bp, Artificial Sequence
  Synthetic oligonucleotide
ctggatgtgtcatacaagtgattgtgtgcg

SEQ ID NO: 360074 - DNA, 30 bp, Artificial Sequence
  Synthetic oligonucleotide
ttatgcgctgttggtatatagagttgtgcg

SEQ ID NO: 360075 - DNA, 30 bp, Artificial Sequence
  Synthetic oligonucleotide
ttctgttgactggttctgcccttttgtgcg

SEQ ID NO: 360076 - DNA, 30 bp, Artificial Sequence
  Synthetic oligonucleotide
caaggtaaactccgttgtaattaaattgcg

SEQ ID NO: 360077 - DNA, 30 bp, Artificial Sequence
  Synthetic oligonucleotide
gctagtgtaggaatcaatcgaccaattgcg

SEQ ID NO: 360078 - DNA, 30 bp, Artificial Sequence
  Synthetic oligonucleotide
cacgcgataaaacaactcacgtcaattgcg

SEQ ID NO: 360079 - DNA, 30 bp, Artificial Sequence
  Synthetic oligonucleotide
gaggttataaatgacggttgaaccattgcg

SEQ ID NO: 360080 - DNA, 30 bp, Artificial Sequence
  Synthetic oligonucleotide
gaaactctaggcatggatgccgccattgcg

SEQ ID NO: 360081 - DNA, 30 bp, Artificial Sequence
  Synthetic oligonucleotide
gcaagaaaggaacccgtaaggagcattgcg

SEQ ID NO: 360082 - DNA, 30 bp, Artificial Sequence
  Synthetic oligonucleotide
gcttgacgattgctacctagactcattgcg

SEQ ID NO: 360083 - DNA, 30 bp, Artificial Sequence
  Synthetic oligonucleotide
agtaagaattttttgtgaggacagattgcg

SEQ ID NO: 360084 - DNA, 30 bp, Artificial Sequence
  Synthetic oligonucleotide
gaccaggtaaagcacactacaaggattgcg

SEQ ID NO: 360085 - DNA, 30 bp, Artificial Sequence
  Synthetic oligonucleotide
ataagtgttacaaggttagtgaatattgcg

SEQ ID NO: 360086 - DNA, 30 bp, Artificial Sequence
  Synthetic oligonucleotide
aggtttaaactcggggcagtctaacttgcg

SEQ ID NO: 360087 - DNA, 30 bp, Artificial Sequence
  Synthetic oligonucleotide
atccactgactagacgggccaatacttgcg

SEQ ID NO: 360088 - DNA, 30 bp, Artificial Sequence
  Synthetic oligonucleotide
agtacatacgccctatcatttcgccttgcg

SEQ ID NO: 360089 - DNA, 30 bp, Artificial Sequence
  Synthetic oligonucleotide
ccatttcataggaagaccgacttccttgcg

SEQ ID NO: 360090 - DNA, 30 bp, Artificial Sequence
  Synthetic oligonucleotide
ccctcacgttgttgatagattaatcttgcg

SEQ ID NO: 360091 - DNA, 30 bp, Artificial Sequence
  Synthetic oligonucleotide
ataaggtttcatagagcacgggctcttgcg

SEQ ID NO: 360092 - DNA, 30 bp, Artificial Sequence
  Synthetic oligonucleotide
atacgtgaagatccgcattcttaagttgcg

SEQ ID NO: 360093 - DNA, 30 bp, Artificial Sequence
  Synthetic oligonucleotide
aacgtttagttacacatataaagagttgcg

SEQ ID NO: 360094 - DNA, 30 bp, Artificial Sequence
  Synthetic oligonucleotide
gaactacgccattccagtgcctacgttgcg

SEQ ID NO: 360095 - DNA, 30 bp, Artificial Sequence
  Synthetic oligonucleotide
tcttattagaaggcaggtagtgaggttgcg

SEQ ID NO: 360096 - DNA, 30 bp, Artificial Sequence
  Synthetic oligonucleotide
tgattcgagaccaagcgtacctaggttgcg

SEQ ID NO: 360097 - DNA, 30 bp, Artificial Sequence
  Synthetic oligonucleotide
gccgggttaatagtacgtacttgtgttgcg

SEQ ID NO: 360098 - DNA, 30 bp, Artificial Sequence
  Synthetic oligonucleotide
agatatccctaatatttcttaacatttgcg

SEQ ID NO: 360099 - DNA, 30 bp, Artificial Sequence
  Synthetic oligonucleotide
ccagattttgccgtaaggtaacgctttgcg

SEQ ID NO: 360100 - DNA, 30 bp, Artificial Sequence
  Synthetic oligonucleotide
gcatactaattcgacacgcaattctttgcg

SEQ ID NO: 360101 - DNA, 30 bp, Artificial Sequence
  Synthetic oligonucleotide
agcctgtctaggcggtaagcaacgtttgcg

SEQ ID NO: 360102 - DNA, 30 bp, Artificial Sequence
  Synthetic oligonucleotide
ttataatggacgtatattcatatttttgcg

SEQ ID NO: 360103 - DNA, 30 bp, Artificial Sequence
  Synthetic oligonucleotide
tgtacttctacacatggggtcacaaaatcg

SEQ ID NO: 360104 - DNA, 30 bp, Artificial Sequence
  Synthetic oligonucleotide
gtgacgctacctaaagttcatgccaaatcg

SEQ ID NO: 360105 - DNA, 31 bp, Artificial Sequence
  Synthetic oligonucleotide
gaatacagtgattcaagatataagcaaatcg

SEQ ID NO: 360106 - DNA, 30 bp, Artificial Sequence
  Synthetic oligonucleotide
tatgggaatttgaaaccacagctcaaatcg

SEQ ID NO: 360107 - DNA, 30 bp, Artificial Sequence
  Synthetic oligonucleotide
ggttactagaaagcaccttgtgggaaatcg

SEQ ID NO: 360108 - DNA, 30 bp, Artificial Sequence
  Synthetic oligonucleotide
taccgcgtctaggccctctatatacaatcg

SEQ ID NO: 360109 - DNA, 30 bp, Artificial Sequence
  Synthetic oligonucleotide
gccgttatgagttcttcccgggcccaatcg

SEQ ID NO: 360110 - DNA, 30 bp, Artificial Sequence
  Synthetic oligonucleotide
tgtttacccgttctcgggtccttccaatcg

SEQ ID NO: 360111 - DNA, 30 bp, Artificial Sequence
  Synthetic oligonucleotide
aaagttgcattagggtcggctcagcaatcg

SEQ ID NO: 360112 - DNA, 30 bp, Artificial Sequence
  Synthetic oligonucleotide
catggattattcgcttttttcgagcaatcg

SEQ ID NO: 360113 - DNA, 30 bp, Artificial Sequence
  Synthetic oligonucleotide
tgtaggtattgacgaatgcgaccgcaatcg

SEQ ID NO: 360114 - DNA, 30 bp, Artificial Sequence
  Synthetic oligonucleotide
tctggttttacaagcaacattgacgaatcg

SEQ ID NO: 360115 - DNA, 30 bp, Artificial Sequence
  Synthetic oligonucleotide
aaacggaaatgtggcgcgcttccggaatcg

SEQ ID NO: 360116 - DNA, 30 bp, Artificial Sequence
  Synthetic oligonucleotide
actttagttatgtctcacatctcggaatcg

SEQ ID NO: 360117 - DNA, 30 bp, Artificial Sequence
  Synthetic oligonucleotide
atcagttttaaacgagcccgactggaatcg

SEQ ID NO: 360118 - DNA, 30 bp, Artificial Sequence
  Synthetic oligonucleotide
tctttagacgaagcgtacttcattgaatcg

SEQ ID NO: 360119 - DNA, 30 bp, Artificial Sequence
  Synthetic oligonucleotide
tgccatgtgtcacactgggacccataatcg

SEQ ID NO: 360120 - DNA, 30 bp, Artificial Sequence
  Synthetic oligonucleotide
tgggcggatgtgttccggtgacgataatcg

SEQ ID NO: 360121 - DNA, 30 bp, Artificial Sequence
  Synthetic oligonucleotide
aatgggacctacggtgtagcttgctaatcg

SEQ ID NO: 360122 - DNA, 30 bp, Artificial Sequence
  Synthetic oligonucleotide
tttaggaccagacgatgggctttctaatcg

SEQ ID NO: 360123 - DNA, 30 bp, Artificial Sequence
  Synthetic oligonucleotide
tattgacaacgtcccaggtactgttaatcg

SEQ ID NO: 360124 - DNA, 30 bp, Artificial Sequence
  Synthetic oligonucleotide
tatagcaataatgcgtatacggtaacatcg

SEQ ID NO: 360125 - DNA, 30 bp, Artificial Sequence
  Synthetic oligonucleotide
gtatggatagcataaggttatgccacatcg

SEQ ID NO: 360126 - DNA, 30 bp, Artificial Sequence
  Synthetic oligonucleotide
ccgcgttacatgctgaatgccagcacatcg

SEQ ID NO: 360127 - DNA, 31 bp, Artificial Sequence
  Synthetic oligonucleotide
tcaaagcaaatccgcagcctcgaagacatcg

SEQ ID NO: 360128 - DNA, 30 bp, Artificial Sequence
  Synthetic oligonucleotide
gacaacggtggataggcatcaaatacatcg

SEQ ID NO: 360129 - DNA, 30 bp, Artificial Sequence
  Synthetic oligonucleotide
atgtatgaaacttcattggagggtacatcg

SEQ ID NO: 360130 - DNA, 30 bp, Artificial Sequence
  Synthetic oligonucleotide
tattcaaggtagtgggcttcgcggccatcg

SEQ ID NO: 360131 - DNA, 30 bp, Artificial Sequence
  Synthetic oligonucleotide
ggtgtctgtcttttgactacgcctccatcg

SEQ ID NO: 360132 - DNA, 30 bp, Artificial Sequence
  Synthetic oligonucleotide
gagccgatggccacagccagaagtgcatcg

SEQ ID NO: 360133 - DNA, 30 bp, Artificial Sequence
  Synthetic oligonucleotide
atacagtccgggcacggatgtaaatcatcg

SEQ ID NO: 360134 - DNA, 30 bp, Artificial Sequence
  Synthetic oligonucleotide
aggcacacgaggttgtcaataccatcatcg

SEQ ID NO: 360135 - DNA, 30 bp, Artificial Sequence
  Synthetic oligonucleotide
atatggcactggctccatcacatatcatcg

SEQ ID NO: 360136 - DNA, 30 bp, Artificial Sequence
  Synthetic oligonucleotide
tttgaatgcgtactgggctagcactcatcg

SEQ ID NO: 360137 - DNA, 30 bp, Artificial Sequence
  Synthetic oligonucleotide
ggataattagttttttcttctaagtcatcg

SEQ ID NO: 360138 - DNA, 30 bp, Artificial Sequence
  Synthetic oligonucleotide
cactagtcggataaagcaaaagattcatcg

SEQ ID NO: 360139 - DNA, 30 bp, Artificial Sequence
  Synthetic oligonucleotide
atgtggcgcgcatgtggcggataaagatcg

SEQ ID NO: 360140 - DNA, 30 bp, Artificial Sequence
  Synthetic oligonucleotide
tttatggtctccgtctaagacgagagatcg

SEQ ID NO: 360141 - DNA, 30 bp, Artificial Sequence
  Synthetic oligonucleotide
ttttcgaagtatttggtatgcgatagatcg

SEQ ID NO: 360142 - DNA, 30 bp, Artificial Sequence
  Synthetic oligonucleotide
ataccctcctcttacaacagccctagatcg

SEQ ID NO: 360143 - DNA, 30 bp, Artificial Sequence
  Synthetic oligonucleotide
tcaatatcatcaggtgacgttccaggatcg

SEQ ID NO: 360144 - DNA, 30 bp, Artificial Sequence
  Synthetic oligonucleotide
tagctttatctatagtcatcacgaggatcg

SEQ ID NO: 360145 - DNA, 30 bp, Artificial Sequence
  Synthetic oligonucleotide
atagtgtggggaaactgtgggcccggatcg

SEQ ID NO: 360146 - DNA, 30 bp, Artificial Sequence
  Synthetic oligonucleotide
tggtcacactcatgtccgccgcgcggatcg

SEQ ID NO: 360147 - DNA, 30 bp, Artificial Sequence
  Synthetic oligonucleotide
cgggtgacaagggcgtctgtggtcggatcg

SEQ ID NO: 360148 - DNA, 30 bp, Artificial Sequence
  Synthetic oligonucleotide
tccgagaaaacttctcgtatcttcggatcg

SEQ ID NO: 360149 - DNA, 30 bp, Artificial Sequence
  Synthetic oligonucleotide
gccaatcacgtgaagtattcgtctggatcg

SEQ ID NO: 360150 - DNA, 30 bp, Artificial Sequence
  Synthetic oligonucleotide
gaagactcttataggagatgactatgatcg

SEQ ID NO: 360151 - DNA, 30 bp, Artificial Sequence
  Synthetic oligonucleotide
gatctcatacttgaataacggtagtgatcg

SEQ ID NO: 360152 - DNA, 30 bp, Artificial Sequence
  Synthetic oligonucleotide
agtccacttcaggtataattatacatatcg

SEQ ID NO: 360153 - DNA, 30 bp, Artificial Sequence
  Synthetic oligonucleotide
ctttaggcaagttatatatctgccatatcg

SEQ ID NO: 360154 - DNA, 30 bp, Artificial Sequence
  Synthetic oligonucleotide
ttccgctgtgcggtaaatggcagcatatcg

SEQ ID NO: 360155 - DNA, 30 bp, Artificial Sequence
  Synthetic oligonucleotide
acccacaagaggtcgtcatacctcatatcg

SEQ ID NO: 360156 - DNA, 30 bp, Artificial Sequence
  Synthetic oligonucleotide
gaatacgtgatggggctcatggatatatcg

SEQ ID NO: 360157 - DNA, 30 bp, Artificial Sequence
  Synthetic oligonucleotide
acgtgatagggagtattcataaacctatcg

SEQ ID NO: 360158 - DNA, 30 bp, Artificial Sequence
  Synthetic oligonucleotide
tttaacgtacggtcaaggtatgcagtatcg

SEQ ID NO: 360159 - DNA, 30 bp, Artificial Sequence
  Synthetic oligonucleotide
ttcaatcgtctactatcggaaggagtatcg

SEQ ID NO: 360160 - DNA, 30 bp, Artificial Sequence
  Synthetic oligonucleotide
ttagcgtaggtgcgggttgcccgcgtatcg

SEQ ID NO: 360161 - DNA, 30 bp, Artificial Sequence
  Synthetic oligonucleotide
cgtttaaagccggagtccgaggttgtatcg

SEQ ID NO: 360162 - DNA, 30 bp, Artificial Sequence
  Synthetic oligonucleotide
gggatagtcacccgccatgggggcttatcg

SEQ ID NO: 360163 - DNA, 30 bp, Artificial Sequence
  Synthetic oligonucleotide
cctgtgttcctacatctgtcattcttatcg

SEQ ID NO: 360164 - DNA, 30 bp, Artificial Sequence
  Synthetic oligonucleotide
tagcgaccaatggtagcattaacgttatcg

SEQ ID NO: 360165 - DNA, 30 bp, Artificial Sequence
  Synthetic oligonucleotide
caagatctcggtgaggcaaccaggttatcg

SEQ ID NO: 360166 - DNA, 30 bp, Artificial Sequence
  Synthetic oligonucleotide
gcttaaatagcgggtaacccatatttatcg

SEQ ID NO: 360167 - DNA, 30 bp, Artificial Sequence
  Synthetic oligonucleotide
tccaacggcgttccaatgatatctttatcg

SEQ ID NO: 360168 - DNA, 30 bp, Artificial Sequence
  Synthetic oligonucleotide
gttccgatttagttaattaactgtttatcg

SEQ ID NO: 360169 - DNA, 30 bp, Artificial Sequence
  Synthetic oligonucleotide
ccaaggaaaaatccaaatccgattttatcg

SEQ ID NO: 360170 - DNA, 30 bp, Artificial Sequence
  Synthetic oligonucleotide
attccttcatctcgatattttgttttatcg

SEQ ID NO: 360171 - DNA, 30 bp, Artificial Sequence
  Synthetic oligonucleotide
tttagattagtgtcttgcaaatttttatcg

SEQ ID NO: 360172 - DNA, 30 bp, Artificial Sequence
  Synthetic oligonucleotide
caatatggctccaacggatgaatcaactcg

SEQ ID NO: 360173 - DNA, 30 bp, Artificial Sequence
  Synthetic oligonucleotide
ctattttcatagtcgacataaaagaactcg

SEQ ID NO: 360174 - DNA, 30 bp, Artificial Sequence
  Synthetic oligonucleotide
tttctaggaacaccgttggaatctaactcg

SEQ ID NO: 360175 - DNA, 30 bp, Artificial Sequence
  Synthetic oligonucleotide
agaagcacccatcatattcactttaactcg

SEQ ID NO: 360176 - DNA, 30 bp, Artificial Sequence
  Synthetic oligonucleotide
gcacgggtttccaaacatcgaagacactcg

SEQ ID NO: 360177 - DNA, 30 bp, Artificial Sequence
  Synthetic oligonucleotide
cattcctctggggacatcaatcgccactcg

SEQ ID NO: 360178 - DNA, 30 bp, Artificial Sequence
  Synthetic oligonucleotide
gcccgagcttataccactaggaagcactcg

SEQ ID NO: 360179 - DNA, 30 bp, Artificial Sequence
  Synthetic oligonucleotide
caaactcctttggtattatctgagcactcg

SEQ ID NO: 360180 - DNA, 30 bp, Artificial Sequence
  Synthetic oligonucleotide
ctaattggaaacttttgcggggggcactcg

SEQ ID NO: 360181 - DNA, 30 bp, Artificial Sequence
  Synthetic oligonucleotide
atgttagtgccatcgagtggcctgcactcg

SEQ ID NO: 360182 - DNA, 30 bp, Artificial Sequence
  Synthetic oligonucleotide
gcgagaatatggacacgcgccttgcactcg

SEQ ID NO: 360183 - DNA, 30 bp, Artificial Sequence
  Synthetic oligonucleotide
aggtgccatacatacggaatgttgcactcg

SEQ ID NO: 360184 - DNA, 30 bp, Artificial Sequence
  Synthetic oligonucleotide
tttccgcggcaatacagaatgacagactcg

SEQ ID NO: 360185 - DNA, 30 bp, Artificial Sequence
  Synthetic oligonucleotide
ttgacgcagtttactttctagtgagactcg

SEQ ID NO: 360186 - DNA, 30 bp, Artificial Sequence
  Synthetic oligonucleotide
gagtatgtataatgccggacaccggactcg

SEQ ID NO: 360187 - DNA, 29 bp, Artificial Sequence
  Synthetic oligonucleotide
ataaactccgttgttaccaagtggactcg

SEQ ID NO: 360188 - DNA, 30 bp, Artificial Sequence
  Synthetic oligonucleotide
acaatacctgattggtgctatttggactcg

SEQ ID NO: 360189 - DNA, 30 bp, Artificial Sequence
  Synthetic oligonucleotide
atctagggttggcaacattttgatgactcg

SEQ ID NO: 360190 - DNA, 30 bp, Artificial Sequence
  Synthetic oligonucleotide
tggtaggactggtgtaagccggctgactcg

SEQ ID NO: 360191 - DNA, 30 bp, Artificial Sequence
  Synthetic oligonucleotide
tcaactctatttcctatccgcggctactcg

SEQ ID NO: 360192 - DNA, 30 bp, Artificial Sequence
  Synthetic oligonucleotide
ataatttatccaatcattagggagtactcg

SEQ ID NO: 360193 - DNA, 30 bp, Artificial Sequence
  Synthetic oligonucleotide
gcggcactgaaccgtgaggtggcttactcg

SEQ ID NO: 360194 - DNA, 30 bp, Artificial Sequence
  Synthetic oligonucleotide
tcgcccccgtagacttgctcggagacctcg

SEQ ID NO: 360195 - DNA, 30 bp, Artificial Sequence
  Synthetic oligonucleotide
gagtcttaacgttaatctagcaggacctcg

SEQ ID NO: 360196 - DNA, 30 bp, Artificial Sequence
  Synthetic oligonucleotide
ataagaggaccgttgcttacacttacctcg

SEQ ID NO: 360197 - DNA, 30 bp, Artificial Sequence
  Synthetic oligonucleotide
gcaccttgagaatattacacagtgccctcg

SEQ ID NO: 360198 - DNA, 30 bp, Artificial Sequence
  Synthetic oligonucleotide
gctcaccgcattctgattctcaaagcctcg

SEQ ID NO: 360199 - DNA, 30 bp, Artificial Sequence
  Synthetic oligonucleotide
accgtggaagatccgcccagggaagcctcg

SEQ ID NO: 360200 - DNA, 30 bp, Artificial Sequence
  Synthetic oligonucleotide
ttttacaagggctgccggtattgagcctcg

SEQ ID NO: 360201 - DNA, 30 bp, Artificial Sequence
  Synthetic oligonucleotide
agaatcctgtgggcggggcgagtagcctcg

SEQ ID NO: 360202 - DNA, 30 bp, Artificial Sequence
  Synthetic oligonucleotide
ctcacgatttgggtgtctgcggtagcctcg

SEQ ID NO: 360203 - DNA, 30 bp, Artificial Sequence
  Synthetic oligonucleotide
ttaaaggactattcacttttgagggcctcg

SEQ ID NO: 360204 - DNA, 30 bp, Artificial Sequence
  Synthetic oligonucleotide
cgaagggcgtactaagaatgaggtgcctcg

SEQ ID NO: 360205 - DNA, 30 bp, Artificial Sequence
  Synthetic oligonucleotide
tatgttcctctgtaaagttagtaatcctcg

SEQ ID NO: 360206 - DNA, 30 bp, Artificial Sequence
  Synthetic oligonucleotide
gaccgtcggatgacgatcgtcacgtcctcg

SEQ ID NO: 360207 - DNA, 30 bp, Artificial Sequence
  Synthetic oligonucleotide
gcacacggtcgttgtatattagcgtcctcg

SEQ ID NO: 360208 - DNA, 30 bp, Artificial Sequence
  Synthetic oligonucleotide
tatcggaaattaacgcccgggctgtcctcg

SEQ ID NO: 360209 - DNA, 30 bp, Artificial Sequence
  Synthetic oligonucleotide
accgccgattaacggatagaggattcctcg

SEQ ID NO: 360210 - DNA, 30 bp, Artificial Sequence
  Synthetic oligonucleotide
agccttcgcgcttggaacgtcgaaagctcg

SEQ ID NO: 360211 - DNA, 30 bp, Artificial Sequence
  Synthetic oligonucleotide
ttacttcctcatggtttatgctaaagctcg

SEQ ID NO: 360212 - DNA, 30 bp, Artificial Sequence
  Synthetic oligonucleotide
actctgagctgtcttccaattataagctcg

SEQ ID NO: 360213 - DNA, 30 bp, Artificial Sequence
  Synthetic oligonucleotide
gagttgaaagtcctttatcggtccagctcg

SEQ ID NO: 360214 - DNA, 30 bp, Artificial Sequence
  Synthetic oligonucleotide
caaacgttacttgtgtgacgagggagctcg

SEQ ID NO: 360215 - DNA, 30 bp, Artificial Sequence
  Synthetic oligonucleotide
tttctttaacggtgaaactagtatagctcg

SEQ ID NO: 360216 - DNA, 30 bp, Artificial Sequence
  Synthetic oligonucleotide
tgttttctgggtaaatttgctcctagctcg

SEQ ID NO: 360217 - DNA, 30 bp, Artificial Sequence
  Synthetic oligonucleotide
taacaagtatccagtgcctctgtccgctcg

SEQ ID NO: 360218 - DNA, 30 bp, Artificial Sequence
  Synthetic oligonucleotide
tgtcagtagcttttgagggtatgtcgctcg

SEQ ID NO: 360219 - DNA, 30 bp, Artificial Sequence
  Synthetic oligonucleotide
aggcagctacaggccagggatataggctcg

SEQ ID NO: 360220 - DNA, 30 bp, Artificial Sequence
  Synthetic oligonucleotide
gcattggttagtacggcgcttgtaggctcg

SEQ ID NO: 360221 - DNA, 30 bp, Artificial Sequence
  Synthetic oligonucleotide
gaggctgctgtcaataaagcctcgggctcg

SEQ ID NO: 360222 - DNA, 30 bp, Artificial Sequence
  Synthetic oligonucleotide
ttcattagtgcccagacaaaactgggctcg

SEQ ID NO: 360223 - DNA, 30 bp, Artificial Sequence
  Synthetic oligonucleotide
gctggctcatccatacacatgctgggctcg

SEQ ID NO: 360224 - DNA, 30 bp, Artificial Sequence
  Synthetic oligonucleotide
ttcgcgactactcgtacgttaggtggctcg

SEQ ID NO: 360225 - DNA, 30 bp, Artificial Sequence
  Synthetic oligonucleotide
ttttctagtatgcggccaacttgtggctcg

SEQ ID NO: 360226 - DNA, 30 bp, Artificial Sequence
  Synthetic oligonucleotide
agatttgcagtattatgtggacagatctcg

SEQ ID NO: 360227 - DNA, 30 bp, Artificial Sequence
  Synthetic oligonucleotide
gatttagtgtcattatcaaagagtatctcg

SEQ ID NO: 360228 - DNA, 30 bp, Artificial Sequence
  Synthetic oligonucleotide
ccgcagcaagcaaggctagccaaactctcg

SEQ ID NO: 360229 - DNA, 30 bp, Artificial Sequence
  Synthetic oligonucleotide
tatttactctgttgactagttgtactctcg

SEQ ID NO: 360230 - DNA, 30 bp, Artificial Sequence
  Synthetic oligonucleotide
actgaattgcgcactacctattacctctcg

SEQ ID NO: 360231 - DNA, 30 bp, Artificial Sequence
  Synthetic oligonucleotide
gtacacaagtagatacacgccgccctctcg

SEQ ID NO: 360232 - DNA, 30 bp, Artificial Sequence
  Synthetic oligonucleotide
ttttggtatcagaagtgcaatgccctctcg

SEQ ID NO: 360233 - DNA, 30 bp, Artificial Sequence
  Synthetic oligonucleotide
tacacagtatctttaatcgggcgcctctcg

SEQ ID NO: 360234 - DNA, 30 bp, Artificial Sequence
  Synthetic oligonucleotide
ctatggcgattctcaatgctgcttctctcg

SEQ ID NO: 360235 - DNA, 30 bp, Artificial Sequence
  Synthetic oligonucleotide
ctgtatagatgcaccgaaattgcagtctcg

SEQ ID NO: 360236 - DNA, 30 bp, Artificial Sequence
  Synthetic oligonucleotide
aacactcgtttcggtccgggggtagtctcg

SEQ ID NO: 360237 - DNA, 30 bp, Artificial Sequence
  Synthetic oligonucleotide
agaggtatcttggcggcagaaccggtctcg

SEQ ID NO: 360238 - DNA, 30 bp, Artificial Sequence
  Synthetic oligonucleotide
taatgcgcgcgtttcgtcttactggtctcg

SEQ ID NO: 360239 - DNA, 30 bp, Artificial Sequence
  Synthetic oligonucleotide
atgggacgtttgggcccgccaaatgtctcg

SEQ ID NO: 360240 - DNA, 30 bp, Artificial Sequence
  Synthetic oligonucleotide
cctatcttgtcgacttgaactgttgtctcg

SEQ ID NO: 360241 - DNA, 30 bp, Artificial Sequence
  Synthetic oligonucleotide
ctgatggtctttatccccttcgtattctcg

SEQ ID NO: 360242 - DNA, 30 bp, Artificial Sequence
  Synthetic oligonucleotide
ctattagcgacacggactttgaagttctcg

SEQ ID NO: 360243 - DNA, 30 bp, Artificial Sequence
  Synthetic oligonucleotide
attggttcagatatttagttgaatttctcg

SEQ ID NO: 360244 - DNA, 30 bp, Artificial Sequence
  Synthetic oligonucleotide
ggccgtcctcatgcgttggccgaaaagtcg

SEQ ID NO: 360245 - DNA, 30 bp, Artificial Sequence
  Synthetic oligonucleotide
gatcacgccgccgtgttgacaataaagtcg

SEQ ID NO: 360246 - DNA, 30 bp, Artificial Sequence
  Synthetic oligonucleotide
tacactgcgattcattaaatcttcaagtcg

SEQ ID NO: 360247 - DNA, 30 bp, Artificial Sequence
  Synthetic oligonucleotide
gtttagcaaagctggtaggatcagaagtcg

SEQ ID NO: 360248 - DNA, 30 bp, Artificial Sequence
  Synthetic oligonucleotide
taaaacttgttatagtaaacacctaagtcg

SEQ ID NO: 360249 - DNA, 30 bp, Artificial Sequence
  Synthetic oligonucleotide
tacactccaatgctagtggcgtctaagtcg

SEQ ID NO: 360250 - DNA, 30 bp, Artificial Sequence
  Synthetic oligonucleotide
aaatgcaattcgcagagcgtgtttaagtcg

SEQ ID NO: 360251 - DNA, 30 bp, Artificial Sequence
  Synthetic oligonucleotide
cctgttaccgttagtaattgggaacagtcg

SEQ ID NO: 360252 - DNA, 30 bp, Artificial Sequence
  Synthetic oligonucleotide
aaagagatattaacatcttgtccacagtcg

SEQ ID NO: 360253 - DNA, 30 bp, Artificial Sequence
  Synthetic oligonucleotide
ctttatcttagcccaaatcgatcacagtcg

SEQ ID NO: 360254 - DNA, 30 bp, Artificial Sequence
  Synthetic oligonucleotide
ttaactcgattaacatcttgtagacagtcg

SEQ ID NO: 360255 - DNA, 30 bp, Artificial Sequence
  Synthetic oligonucleotide
tcaatgacgtagagggcaaatatacagtcg

SEQ ID NO: 360256 - DNA, 30 bp, Artificial Sequence
  Synthetic oligonucleotide
ggcgcttggcagaacgcattcgaccagtcg

SEQ ID NO: 360257 - DNA, 30 bp, Artificial Sequence
  Synthetic oligonucleotide
aaaaccacgggtgatagcgactttcagtcg

SEQ ID NO: 360258 - DNA, 30 bp, Artificial Sequence
  Synthetic oligonucleotide
cgcatagcgatcgtcctatttggcgagtcg

SEQ ID NO: 360259 - DNA, 30 bp, Artificial Sequence
  Synthetic oligonucleotide
taaaggcaacaagatttctagacggagtcg

SEQ ID NO: 360260 - DNA, 30 bp, Artificial Sequence
  Synthetic oligonucleotide
ggaatgggcgaagaaggaaggcgggagtcg

SEQ ID NO: 360261 - DNA, 30 bp, Artificial Sequence
  Synthetic oligonucleotide
ggactgcagcaatgcccaaacgatgagtcg

SEQ ID NO: 360262 - DNA, 30 bp, Artificial Sequence
  Synthetic oligonucleotide
taggccgccaccggttccggtagatagtcg

SEQ ID NO: 360263 - DNA, 30 bp, Artificial Sequence
  Synthetic oligonucleotide
agtatggcttccacctttatgggatagtcg

SEQ ID NO: 360264 - DNA, 30 bp, Artificial Sequence
  Synthetic oligonucleotide
tttttggcctgcttagtcagagtgtagtcg

SEQ ID NO: 360265 - DNA, 30 bp, Artificial Sequence
  Synthetic oligonucleotide
ctttattgttggacatggtaaacttagtcg

SEQ ID NO: 360266 - DNA, 30 bp, Artificial Sequence
  Synthetic oligonucleotide
aattgcatgtcagtgggcagcatcacgtcg

SEQ ID NO: 360267 - DNA, 30 bp, Artificial Sequence
  Synthetic oligonucleotide
aggttcagcgtcagctaaaacagtacgtcg

SEQ ID NO: 360268 - DNA, 30 bp, Artificial Sequence
  Synthetic oligonucleotide
gtgtcaggagattatctgtgtagtacgtcg

SEQ ID NO: 360269 - DNA, 30 bp, Artificial Sequence
  Synthetic oligonucleotide
catacgagacggttgggaaatgaaccgtcg

SEQ ID NO: 360270 - DNA, 30 bp, Artificial Sequence
  Synthetic oligonucleotide
ctaaattaagggtgctgtgtagcaccgtcg

SEQ ID NO: 360271 - DNA, 30 bp, Artificial Sequence
  Synthetic oligonucleotide
aatgattcccgcagggcaatgcccccgtcg

SEQ ID NO: 360272 - DNA, 30 bp, Artificial Sequence
  Synthetic oligonucleotide
ctctaggagagttgtgggtttttcccgtcg

SEQ ID NO: 360273 - DNA, 30 bp, Artificial Sequence
  Synthetic oligonucleotide
ttaagcgtaatgaggtaacgactagcgtcg

SEQ ID NO: 360274 - DNA, 30 bp, Artificial Sequence
  Synthetic oligonucleotide
tttgtgacaagtcatcagtggttcgcgtcg

SEQ ID NO: 360275 - DNA, 30 bp, Artificial Sequence
  Synthetic oligonucleotide
gagttttacgttcaactccttatggcgtcg

SEQ ID NO: 360276 - DNA, 30 bp, Artificial Sequence
  Synthetic oligonucleotide
gaaggcgtctagaggactattttggcgtcg

SEQ ID NO: 360277 - DNA, 30 bp, Artificial Sequence
  Synthetic oligonucleotide
aaaggacgatagcggttctaaactgcgtcg

SEQ ID NO: 360278 - DNA, 30 bp, Artificial Sequence
  Synthetic oligonucleotide
cggtaatgagggggcaaccaggcatcgtcg

SEQ ID NO: 360279 - DNA, 30 bp, Artificial Sequence
  Synthetic oligonucleotide
aacaagtagcagtgactggatgtatcgtcg

SEQ ID NO: 360280 - DNA, 30 bp, Artificial Sequence
  Synthetic oligonucleotide
cgtagtctaacctcactctgacgaaggtcg

SEQ ID NO: 360281 - DNA, 30 bp, Artificial Sequence
  Synthetic oligonucleotide
gtagaaacttaaagcatgttaataaggtcg

SEQ ID NO: 360282 - DNA, 30 bp, Artificial Sequence
  Synthetic oligonucleotide
gactgtaacgctaaaccgtatgtaaggtcg

SEQ ID NO: 360283 - DNA, 30 bp, Artificial Sequence
  Synthetic oligonucleotide
gctccggctcgagagtgcatactgaggtcg

SEQ ID NO: 360284 - DNA, 30 bp, Artificial Sequence
  Synthetic oligonucleotide
caccatgagttactaactcgtttgaggtcg

SEQ ID NO: 360285 - DNA, 30 bp, Artificial Sequence
  Synthetic oligonucleotide
aacgacatgaaggagcaaccgcataggtcg

SEQ ID NO: 360286 - DNA, 30 bp, Artificial Sequence
  Synthetic oligonucleotide
acatcttattctgataaggcaatacggtcg

SEQ ID NO: 360287 - DNA, 30 bp, Artificial Sequence
  Synthetic oligonucleotide
gctacttcaaaaatacggccgccccggtcg

SEQ ID NO: 360288 - DNA, 30 bp, Artificial Sequence
  Synthetic oligonucleotide
agtattacaatccgagtaacgcggcggtcg

SEQ ID NO: 360289 - DNA, 30 bp, Artificial Sequence
  Synthetic oligonucleotide
gaggttctgtattttacgggtgttcggtcg

SEQ ID NO: 360290 - DNA, 30 bp, Artificial Sequence
  Synthetic oligonucleotide
gagtggaattgtcgtgcggacaccgggtcg

SEQ ID NO: 360291 - DNA, 30 bp, Artificial Sequence
  Synthetic oligonucleotide
cgctggcgtcgggcggagagggtggggtcg

SEQ ID NO: 360292 - DNA, 30 bp, Artificial Sequence
  Synthetic oligonucleotide
gtatattaaccgttagcagatccatggtcg

SEQ ID NO: 360293 - DNA, 30 bp, Artificial Sequence
  Synthetic oligonucleotide
ccgaagactagacgcactcaactatggtcg

SEQ ID NO: 360294 - DNA, 30 bp, Artificial Sequence
  Synthetic oligonucleotide
tgagtgttctgtcctaaacgatattggtcg

SEQ ID NO: 360295 - DNA, 30 bp, Artificial Sequence
  Synthetic oligonucleotide
tagtcaattaatttaacgggactttggtcg

SEQ ID NO: 360296 - DNA, 30 bp, Artificial Sequence
  Synthetic oligonucleotide
gtcctaattttccactgaactcaaatgtcg

SEQ ID NO: 360297 - DNA, 30 bp, Artificial Sequence
  Synthetic oligonucleotide
ttaccaagagagtggggcagggacatgtcg

SEQ ID NO: 360298 - DNA, 30 bp, Artificial Sequence
  Synthetic oligonucleotide
aatatgatgctattggttgtagtcatgtcg

SEQ ID NO: 360299 - DNA, 30 bp, Artificial Sequence
  Synthetic oligonucleotide
cagtgctgattggcttgggagagtatgtcg

SEQ ID NO: 360300 - DNA, 30 bp, Artificial Sequence
  Synthetic oligonucleotide
gaagcaaaaaactttcgtttttcactgtcg

SEQ ID NO: 360301 - DNA, 30 bp, Artificial Sequence
  Synthetic oligonucleotide
gattactacgagcggttaggtagactgtcg

SEQ ID NO: 360302 - DNA, 30 bp, Artificial Sequence
  Synthetic oligonucleotide
tctcgcatacgtcgcagagaagacctgtcg

SEQ ID NO: 360303 - DNA, 30 bp, Artificial Sequence
  Synthetic oligonucleotide
ctctgtgtaaagatacggacggagctgtcg

SEQ ID NO: 360304 - DNA, 30 bp, Artificial Sequence
  Synthetic oligonucleotide
atattagacacacagggccagccagtgtcg

SEQ ID NO: 360305 - DNA, 30 bp, Artificial Sequence
  Synthetic oligonucleotide
agcggtacgtcacgacgtgagtcagtgtcg

SEQ ID NO: 360306 - DNA, 30 bp, Artificial Sequence
  Synthetic oligonucleotide
cagtgttggccggcgctgacgttagtgtcg

SEQ ID NO: 360307 - DNA, 30 bp, Artificial Sequence
  Synthetic oligonucleotide
tagaataatggccgtcttggatacgtgtcg

SEQ ID NO: 360308 - DNA, 30 bp, Artificial Sequence
  Synthetic oligonucleotide
cacacattggtaggtggaagcacgttgtcg

SEQ ID NO: 360309 - DNA, 30 bp, Artificial Sequence
  Synthetic oligonucleotide
cttgaacgagtcacctataatgtgttgtcg

SEQ ID NO: 360310 - DNA, 30 bp, Artificial Sequence
  Synthetic oligonucleotide
gaaattacggacgtccaggcaaatttgtcg

SEQ ID NO: 360311 - DNA, 30 bp, Artificial Sequence
  Synthetic oligonucleotide
aacaggattggatctatagaacatttgtcg

SEQ ID NO: 360312 - DNA, 30 bp, Artificial Sequence
  Synthetic oligonucleotide
catagatcaaagccataggttcttttgtcg

SEQ ID NO: 360313 - DNA, 30 bp, Artificial Sequence
  Synthetic oligonucleotide
catagcgacagtttgttttgctaaaattcg

SEQ ID NO: 360314 - DNA, 30 bp, Artificial Sequence
  Synthetic oligonucleotide
tcatggttaatatagtagtctgcaaattcg

SEQ ID NO: 360315 - DNA, 30 bp, Artificial Sequence
  Synthetic oligonucleotide
accctcgtaataacaaaattgtgcaattcg

SEQ ID NO: 360316 - DNA, 30 bp, Artificial Sequence
  Synthetic oligonucleotide
tttacctaccgttttaatagacagaattcg

SEQ ID NO: 360317 - DNA, 30 bp, Artificial Sequence
  Synthetic oligonucleotide
tacatatgctttacgcttagatctaattcg

SEQ ID NO: 360318 - DNA, 31 bp, Artificial Sequence
  Synthetic oligonucleotide
cagggtgatattcccgttctagcttaattcg

SEQ ID NO: 360319 - DNA, 30 bp, Artificial Sequence
  Synthetic oligonucleotide
gcatactcgccattaataagccggcattcg

SEQ ID NO: 360320 - DNA, 30 bp, Artificial Sequence
  Synthetic oligonucleotide
tgtttgcaggtaactgtgagccaagattcg

SEQ ID NO: 360321 - DNA, 30 bp, Artificial Sequence
  Synthetic oligonucleotide
acatttgggctacggggttttccagattcg

SEQ ID NO: 360322 - DNA, 30 bp, Artificial Sequence
  Synthetic oligonucleotide
gacagtctttaggtctggttcctagattcg

SEQ ID NO: 360323 - DNA, 30 bp, Artificial Sequence
  Synthetic oligonucleotide
taaacgccttttgtgcattggaacgattcg

SEQ ID NO: 360324 - DNA, 30 bp, Artificial Sequence
  Synthetic oligonucleotide
cggattagattgacgggtgtcgtggattcg

SEQ ID NO: 360325 - DNA, 30 bp, Artificial Sequence
  Synthetic oligonucleotide
gttccctgtagactcattacgactgattcg

SEQ ID NO: 360326 - DNA, 30 bp, Artificial Sequence
  Synthetic oligonucleotide
taaaacatacagaataatttctcatattcg

SEQ ID NO: 360327 - DNA, 30 bp, Artificial Sequence
  Synthetic oligonucleotide
gaactctgacagagatgcatacgatattcg

SEQ ID NO: 360328 - DNA, 30 bp, Artificial Sequence
  Synthetic oligonucleotide
ggtctggtgacctgagtagttatctattcg

SEQ ID NO: 360329 - DNA, 30 bp, Artificial Sequence
  Synthetic oligonucleotide
ttgtaaattagtgactagcccaagtattcg

SEQ ID NO: 360330 - DNA, 30 bp, Artificial Sequence
  Synthetic oligonucleotide
gatagaccagttcagctttgaccgtattcg

SEQ ID NO: 360331 - DNA, 30 bp, Artificial Sequence
  Synthetic oligonucleotide
ggcgcattgaagttttttgcaaggtattcg

SEQ ID NO: 360332 - DNA, 30 bp, Artificial Sequence
  Synthetic oligonucleotide
gataaggcctaacaaactaacttgtattcg

SEQ ID NO: 360333 - DNA, 30 bp, Artificial Sequence
  Synthetic oligonucleotide
tggtgttcgcaatatgttgatacttattcg

SEQ ID NO: 360334 - DNA, 30 bp, Artificial Sequence
  Synthetic oligonucleotide
ccagaagtttattataaacaatcttattcg

SEQ ID NO: 360335 - DNA, 30 bp, Artificial Sequence
  Synthetic oligonucleotide
tggcgttggaatgtgtggcatataacttcg

SEQ ID NO: 360336 - DNA, 30 bp, Artificial Sequence
  Synthetic oligonucleotide
tattgtaaagctagtatatatcagacttcg

SEQ ID NO: 360337 - DNA, 30 bp, Artificial Sequence
  Synthetic oligonucleotide
caagtatgctagccggtgacggggacttcg

SEQ ID NO: 360338 - DNA, 30 bp, Artificial Sequence
  Synthetic oligonucleotide
acagtccttactatgtatacgcttacttcg

SEQ ID NO: 360339 - DNA, 30 bp, Artificial Sequence
  Synthetic oligonucleotide
taatcatggatggagtgttcacccccttcg

SEQ ID NO: 360340 - DNA, 30 bp, Artificial Sequence
  Synthetic oligonucleotide
attgtcaaggaggtcctgtgagtcccttcg

SEQ ID NO: 360341 - DNA, 30 bp, Artificial Sequence
  Synthetic oligonucleotide
accgcgacgcgccatgatgaaatgccttcg

SEQ ID NO: 360342 - DNA, 30 bp, Artificial Sequence
  Synthetic oligonucleotide
aattacaacggtggtttggcgatgccttcg

SEQ ID NO: 360343 - DNA, 30 bp, Artificial Sequence
  Synthetic oligonucleotide
gtatcggcagacgaaattttgtttccttcg

SEQ ID NO: 360344 - DNA, 30 bp, Artificial Sequence
  Synthetic oligonucleotide
attctgtttaatgaaaagatccaagcttcg

SEQ ID NO: 360345 - DNA, 30 bp, Artificial Sequence
  Synthetic oligonucleotide
cggacgcacatgatgcgagttgaagcttcg

SEQ ID NO: 360346 - DNA, 30 bp, Artificial Sequence
  Synthetic oligonucleotide
tatgttcacctatgagctaggcgagcttcg

SEQ ID NO: 360347 - DNA, 30 bp, Artificial Sequence
  Synthetic oligonucleotide
cttggccggcgcagttgtggcgtagcttcg

SEQ ID NO: 360348 - DNA, 30 bp, Artificial Sequence
  Synthetic oligonucleotide
gtatttgcccaagtgctcttaaacgcttcg

SEQ ID NO: 360349 - DNA, 30 bp, Artificial Sequence
  Synthetic oligonucleotide
ggaaggggggtgcctggcactcgcgcttcg

SEQ ID NO: 360350 - DNA, 30 bp, Artificial Sequence
  Synthetic oligonucleotide
ccgtacatgtagacttctctatgggcttcg

SEQ ID NO: 360351 - DNA, 30 bp, Artificial Sequence
  Synthetic oligonucleotide
gatatgtcgtctagagtatgcgaatcttcg

SEQ ID NO: 360352 - DNA, 30 bp, Artificial Sequence
  Synthetic oligonucleotide
gattcatgtgcgagctatttgcggtcttcg

SEQ ID NO: 360353 - DNA, 30 bp, Artificial Sequence
  Synthetic oligonucleotide
aaaaatatcaataagacttactattcttcg

SEQ ID NO: 360354 - DNA, 30 bp, Artificial Sequence
  Synthetic oligonucleotide
atcagctattttatgaaataatcttcttcg

SEQ ID NO: 360355 - DNA, 30 bp, Artificial Sequence
  Synthetic oligonucleotide
gttaaagatgcgcacacaacgaagagttcg

SEQ ID NO: 360356 - DNA, 30 bp, Artificial Sequence
  Synthetic oligonucleotide
ccgcatacttcctttagaacagagagttcg

SEQ ID NO: 360357 - DNA, 30 bp, Artificial Sequence
  Synthetic oligonucleotide
ttcgaagtgcacggacaacacagtagttcg

SEQ ID NO: 360358 - DNA, 31 bp, Artificial Sequence
  Synthetic oligonucleotide
tacaaaataaacaggcttgtaagtacgttcg

SEQ ID NO: 360359 - DNA, 30 bp, Artificial Sequence
  Synthetic oligonucleotide
cccgtgtatgcgtcgagagcggtacgttcg

SEQ ID NO: 360360 - DNA, 30 bp, Artificial Sequence
  Synthetic oligonucleotide
atagcgtacgcccgaaccagaagccgttcg

SEQ ID NO: 360361 - DNA, 30 bp, Artificial Sequence
  Synthetic oligonucleotide
gccggacagtgatcccatccagtccgttcg

SEQ ID NO: 360362 - DNA, 30 bp, Artificial Sequence
  Synthetic oligonucleotide
tctaacggcccagccttcgactatcgttcg

SEQ ID NO: 360363 - DNA, 30 bp, Artificial Sequence
  Synthetic oligonucleotide
gcgtgttgtcccacggacgctagaggttcg

SEQ ID NO: 360364 - DNA, 30 bp, Artificial Sequence
  Synthetic oligonucleotide
catttggctctgctgcatgaaccgggttcg

SEQ ID NO: 360365 - DNA, 30 bp, Artificial Sequence
  Synthetic oligonucleotide
tgatatagataagtgcgacgcgggggttcg

SEQ ID NO: 360366 - DNA, 30 bp, Artificial Sequence
  Synthetic oligonucleotide
accgtcaccggaatttgtattcctggttcg

SEQ ID NO: 360367 - DNA, 30 bp, Artificial Sequence
  Synthetic oligonucleotide
tcgcccggcgtataatacatacaatgttcg

SEQ ID NO: 360368 - DNA, 30 bp, Artificial Sequence
  Synthetic oligonucleotide
aatcgctctagcgggaataggcgatgttcg

SEQ ID NO: 360369 - DNA, 30 bp, Artificial Sequence
  Synthetic oligonucleotide
tttgaattcgactcatttcactgatgttcg

SEQ ID NO: 360370 - DNA, 30 bp, Artificial Sequence
  Synthetic oligonucleotide
gtgatccggacgagtgttcacgtatgttcg

SEQ ID NO: 360371 - DNA, 30 bp, Artificial Sequence
  Synthetic oligonucleotide
atgtctaaacgtcctacttacgtatgttcg

SEQ ID NO: 360372 - DNA, 30 bp, Artificial Sequence
  Synthetic oligonucleotide
acgtgccgagtgatcggccgcagctgttcg

SEQ ID NO: 360373 - DNA, 30 bp, Artificial Sequence
  Synthetic oligonucleotide
agcacaagcgcactattatatatgtgttcg

SEQ ID NO: 360374 - DNA, 30 bp, Artificial Sequence
  Synthetic oligonucleotide
tatatgtatttttggggactacgttgttcg

SEQ ID NO: 360375 - DNA, 30 bp, Artificial Sequence
  Synthetic oligonucleotide
cattggcatcactaaagggtgctttgttcg

SEQ ID NO: 360376 - DNA, 30 bp, Artificial Sequence
  Synthetic oligonucleotide
tgtcctgggagaagcgttgacgtttgttcg

SEQ ID NO: 360377 - DNA, 30 bp, Artificial Sequence
  Synthetic oligonucleotide
gggctacaagtagacgctgtaacaatttcg

SEQ ID NO: 360378 - DNA, 30 bp, Artificial Sequence
  Synthetic oligonucleotide
gaagtgtccacacgtataagttctatttcg

SEQ ID NO: 360379 - DNA, 30 bp, Artificial Sequence
  Synthetic oligonucleotide
taggcctagccgttaaagaccattatttcg

SEQ ID NO: 360380 - DNA, 30 bp, Artificial Sequence
  Synthetic oligonucleotide
ggtgacgactgccacgcaaggaaactttcg

SEQ ID NO: 360381 - DNA, 31 bp, Artificial Sequence
  Synthetic oligonucleotide
ctgtcttgaagccaatgattggaaactttcg

SEQ ID NO: 360382 - DNA, 30 bp, Artificial Sequence
  Synthetic oligonucleotide
tccctgatgatgacgggtcggacactttcg

SEQ ID NO: 360383 - DNA, 30 bp, Artificial Sequence
  Synthetic oligonucleotide
aattcgctcctgatattatacaagctttcg

SEQ ID NO: 360384 - DNA, 30 bp, Artificial Sequence
  Synthetic oligonucleotide
caacaagtgtagctcaatgttcagctttcg

SEQ ID NO: 360385 - DNA, 30 bp, Artificial Sequence
  Synthetic oligonucleotide
gcaagacgtgtctcaccgctgacgctttcg

SEQ ID NO: 360386 - DNA, 30 bp, Artificial Sequence
  Synthetic oligonucleotide
ggctaaatcttagtccaggttacagtttcg

SEQ ID NO: 360387 - DNA, 30 bp, Artificial Sequence
  Synthetic oligonucleotide
aacgatcttcatggccctcctccagtttcg

SEQ ID NO: 360388 - DNA, 30 bp, Artificial Sequence
  Synthetic oligonucleotide
atgtcgcagcggacactggaccgcgtttcg

SEQ ID NO: 360389 - DNA, 30 bp, Artificial Sequence
  Synthetic oligonucleotide
gcgagggctttccgatcagcagtcgtttcg

SEQ ID NO: 360390 - DNA, 30 bp, Artificial Sequence
  Synthetic oligonucleotide
tgggttggggagatgtaggaggcattttcg

SEQ ID NO: 360391 - DNA, 30 bp, Artificial Sequence
  Synthetic oligonucleotide
cgctcatagagaggagcagcaggattttcg

SEQ ID NO: 360392 - DNA, 30 bp, Artificial Sequence
  Synthetic oligonucleotide
ctaagacatggggtaagtgtttgattttcg

SEQ ID NO: 360393 - DNA, 30 bp, Artificial Sequence
  Synthetic oligonucleotide
gctcccacttacctcccactgatcttttcg

SEQ ID NO: 360394 - DNA, 30 bp, Artificial Sequence
  Synthetic oligonucleotide
aggggaggtaagagtaagaattctttttcg

SEQ ID NO: 360395 - DNA, 30 bp, Artificial Sequence
  Synthetic oligonucleotide
tgcaaccgcattagggacctagaaaaaagg

SEQ ID NO: 360396 - DNA, 30 bp, Artificial Sequence
  Synthetic oligonucleotide
gttcaccggtctgagaataaatgaaaaagg

SEQ ID NO: 360397 - DNA, 29 bp, Artificial Sequence
  Synthetic oligonucleotide
gccagctccaatggggcgcgagcaaaagg

SEQ ID NO: 360398 - DNA, 30 bp, Artificial Sequence
  Synthetic oligonucleotide
tctcttttggtttatcaactaaagaaaagg

SEQ ID NO: 360399 - DNA, 30 bp, Artificial Sequence
  Synthetic oligonucleotide
agtttagttgttggtacttgtccgaaaagg

SEQ ID NO: 360400 - DNA, 30 bp, Artificial Sequence
  Synthetic oligonucleotide
tcccagtcaaaagcctagtgactgaaaagg

SEQ ID NO: 360401 - DNA, 30 bp, Artificial Sequence
  Synthetic oligonucleotide
aataatcttacatgaaatgcccgtaaaagg

SEQ ID NO: 360402 - DNA, 30 bp, Artificial Sequence
  Synthetic oligonucleotide
ggaactccgacgttcctaaccattaaaagg

SEQ ID NO: 360403 - DNA, 30 bp, Artificial Sequence
  Synthetic oligonucleotide
taaatacaacacattaagcagtttaaaagg

SEQ ID NO: 360404 - DNA, 30 bp, Artificial Sequence
  Synthetic oligonucleotide
tgctacgccattatgcggcaaggacaaagg

SEQ ID NO: 360405 - DNA, 30 bp, Artificial Sequence
  Synthetic oligonucleotide
tgtatactcctaagaccctgtcaccaaagg

SEQ ID NO: 360406 - DNA, 30 bp, Artificial Sequence
  Synthetic oligonucleotide
gtttgtttattactcagaggcattcaaagg

SEQ ID NO: 360407 - DNA, 30 bp, Artificial Sequence
  Synthetic oligonucleotide
gatgatcgttgacagcatcggattcaaagg

SEQ ID NO: 360408 - DNA, 30 bp, Artificial Sequence
  Synthetic oligonucleotide
atatttctttgaggaaaggagaaagaaagg

SEQ ID NO: 360409 - DNA, 30 bp, Artificial Sequence
  Synthetic oligonucleotide
gtagtcaagacgtgaagcacggtagaaagg

SEQ ID NO: 360410 - DNA, 30 bp, Artificial Sequence
  Synthetic oligonucleotide
gagggggctgtgcttctagcgcgcgaaagg

SEQ ID NO: 360411 - DNA, 30 bp, Artificial Sequence
  Synthetic oligonucleotide
cttctccgcatccatagagacatcgaaagg

SEQ ID NO: 360412 - DNA, 30 bp, Artificial Sequence
  Synthetic oligonucleotide
gagtgccaccttgtgcctctcatcgaaagg

SEQ ID NO: 360413 - DNA, 30 bp, Artificial Sequence
  Synthetic oligonucleotide
gcagtgccgggcggggtcgatcaggaaagg

SEQ ID NO: 360414 - DNA, 30 bp, Artificial Sequence
  Synthetic oligonucleotide
ggtgtcggcgctggtaacagtcaggaaagg

SEQ ID NO: 360415 - DNA, 30 bp, Artificial Sequence
  Synthetic oligonucleotide
aaattaaggaaggctggcgctccggaaagg

SEQ ID NO: 360416 - DNA, 30 bp, Artificial Sequence
  Synthetic oligonucleotide
gttgcacatcgggaccgtgcaggtgaaagg

SEQ ID NO: 360417 - DNA, 30 bp, Artificial Sequence
  Synthetic oligonucleotide
catgaacgcaaagtccgcgtccttgaaagg

SEQ ID NO: 360418 - DNA, 30 bp, Artificial Sequence
  Synthetic oligonucleotide
tacccatcttattgggaagcataataaagg

SEQ ID NO: 360419 - DNA, 30 bp, Artificial Sequence
  Synthetic oligonucleotide
aaatgtgtccgtcgctggtgtgtataaagg

SEQ ID NO: 360420 - DNA, 30 bp, Artificial Sequence
  Synthetic oligonucleotide
ctcgcacacaggagcgtttatcactaaagg

SEQ ID NO: 360421 - DNA, 30 bp, Artificial Sequence
  Synthetic oligonucleotide
tctaccttcctgttattgggatactaaagg

SEQ ID NO: 360422 - DNA, 30 bp, Artificial Sequence
  Synthetic oligonucleotide
cgtcgtcagtaactgacgacccagtaaagg

SEQ ID NO: 360423 - DNA, 30 bp, Artificial Sequence
  Synthetic oligonucleotide
ggaatggggttctcgtataaatagtaaagg

SEQ ID NO: 360424 - DNA, 30 bp, Artificial Sequence
  Synthetic oligonucleotide
acgtgttcaacattggccatggattaaagg

SEQ ID NO: 360425 - DNA, 30 bp, Artificial Sequence
  Synthetic oligonucleotide
aaacggacggctgtactgtgcagttaaagg

SEQ ID NO: 360426 - DNA, 30 bp, Artificial Sequence
  Synthetic oligonucleotide
cttccagcgagtcctttgacgagttaaagg

SEQ ID NO: 360427 - DNA, 30 bp, Artificial Sequence
  Synthetic oligonucleotide
cgtaattccccaaccaggcgcgacacaagg

SEQ ID NO: 360428 - DNA, 30 bp, Artificial Sequence
  Synthetic oligonucleotide
ggtctgtagggtagttattgctagacaagg

SEQ ID NO: 360429 - DNA, 30 bp, Artificial Sequence
  Synthetic oligonucleotide
aggcctaatgttttctattaatcgacaagg

SEQ ID NO: 360430 - DNA, 30 bp, Artificial Sequence
  Synthetic oligonucleotide
ttcgttgcataagaacgcgacgggacaagg

SEQ ID NO: 360431 - DNA, 30 bp, Artificial Sequence
  Synthetic oligonucleotide
aggtcaacggtcagctatttctggacaagg

SEQ ID NO: 360432 - DNA, 30 bp, Artificial Sequence
  Synthetic oligonucleotide
gaattatcaacctcatcgtaagtgacaagg

SEQ ID NO: 360433 - DNA, 30 bp, Artificial Sequence
  Synthetic oligonucleotide
agcagaaggagtcacgccgataatacaagg

SEQ ID NO: 360434 - DNA, 30 bp, Artificial Sequence
  Synthetic oligonucleotide
ggtatgcagattacgagtgctaatacaagg

SEQ ID NO: 360435 - DNA, 30 bp, Artificial Sequence
  Synthetic oligonucleotide
atgaacagttccaggaggtttcctacaagg

SEQ ID NO: 360436 - DNA, 30 bp, Artificial Sequence
  Synthetic oligonucleotide
ttgcgatgcgtgtatcgtggttcaccaagg

SEQ ID NO: 360437 - DNA, 30 bp, Artificial Sequence
  Synthetic oligonucleotide
acaccgtggtgtataggggcatacccaagg

SEQ ID NO: 360438 - DNA, 30 bp, Artificial Sequence
  Synthetic oligonucleotide
gtccaaaagcgaccatttttagggccaagg

SEQ ID NO: 360439 - DNA, 30 bp, Artificial Sequence
  Synthetic oligonucleotide
cgctacgatcgcgacaaggcgctgccaagg

SEQ ID NO: 360440 - DNA, 30 bp, Artificial Sequence
  Synthetic oligonucleotide
atcgaagtacgcctacctatacttccaagg

SEQ ID NO: 360441 - DNA, 30 bp, Artificial Sequence
  Synthetic oligonucleotide
aagggtcgctggacgtgttgtgaagcaagg

SEQ ID NO: 360442 - DNA, 30 bp, Artificial Sequence
  Synthetic oligonucleotide
ctctctgagcggatcccacgtgcagcaagg

SEQ ID NO: 360443 - DNA, 30 bp, Artificial Sequence
  Synthetic oligonucleotide
ttaggggaaggtgatattcaccgagcaagg

SEQ ID NO: 360444 - DNA, 30 bp, Artificial Sequence
  Synthetic oligonucleotide
ggctgaatgagaagggtctcctgagcaagg

SEQ ID NO: 360445 - DNA, 30 bp, Artificial Sequence
  Synthetic oligonucleotide
tattgtagaacattagcacctaacgcaagg

SEQ ID NO: 360446 - DNA, 30 bp, Artificial Sequence
  Synthetic oligonucleotide
ggaaagacatgactcactcaggacgcaagg

SEQ ID NO: 360447 - DNA, 30 bp, Artificial Sequence
  Synthetic oligonucleotide
ctatgtggtcttgccaatgcatgggcaagg

SEQ ID NO: 360448 - DNA, 30 bp, Artificial Sequence
  Synthetic oligonucleotide
ttctataaggattcccatgattaatcaagg

SEQ ID NO: 360449 - DNA, 30 bp, Artificial Sequence
  Synthetic oligonucleotide
cgcaagcggacggcttgtggggtatcaagg

SEQ ID NO: 360450 - DNA, 29 bp, Artificial Sequence
  Synthetic oligonucleotide
gctacaaacaatcttgatgcaactcaagg

SEQ ID NO: 360451 - DNA, 30 bp, Artificial Sequence
  Synthetic oligonucleotide
cgtacgccggcaatcagaggtggctcaagg

SEQ ID NO: 360452 - DNA, 30 bp, Artificial Sequence
  Synthetic oligonucleotide
atttttggaagtacggagatggggtcaagg

SEQ ID NO: 360453 - DNA, 30 bp, Artificial Sequence
  Synthetic oligonucleotide
gcacactcgtcgaagaccgacctgtcaagg

SEQ ID NO: 360454 - DNA, 30 bp, Artificial Sequence
  Synthetic oligonucleotide
atgcaactcgttgtgcagacttcttcaagg

SEQ ID NO: 360455 - DNA, 30 bp, Artificial Sequence
  Synthetic oligonucleotide
gaattaccggcaaagtttagaaccagaagg

SEQ ID NO: 360456 - DNA, 30 bp, Artificial Sequence
  Synthetic oligonucleotide
ttgagtacagtatgcttcgggcccagaagg

SEQ ID NO: 360457 - DNA, 30 bp, Artificial Sequence
  Synthetic oligonucleotide
acggcaaactgatacgtactcgccagaagg

SEQ ID NO: 360458 - DNA, 30 bp, Artificial Sequence
  Synthetic oligonucleotide
tgagagtctgattatgccgcacagagaagg

SEQ ID NO: 360459 - DNA, 30 bp, Artificial Sequence
  Synthetic oligonucleotide
taacgccgtactgcgagtgcaccgagaagg

SEQ ID NO: 360460 - DNA, 30 bp, Artificial Sequence
  Synthetic oligonucleotide
ttttgcatacaggtctgccgcccgagaagg

SEQ ID NO: 360461 - DNA, 30 bp, Artificial Sequence
  Synthetic oligonucleotide
attctaaaggcataaaatggtgtgagaagg

SEQ ID NO: 360462 - DNA, 30 bp, Artificial Sequence
  Synthetic oligonucleotide
tcgggccaaaggcggcaggctttgagaagg

SEQ ID NO: 360463 - DNA, 30 bp, Artificial Sequence
  Synthetic oligonucleotide
cagcgccagctcgggttggggtctagaagg

SEQ ID NO: 360464 - DNA, 30 bp, Artificial Sequence
  Synthetic oligonucleotide
gaagagggcccacctaatcgctttagaagg

SEQ ID NO: 360465 - DNA, 30 bp, Artificial Sequence
  Synthetic oligonucleotide
gggagagaaagacctcccgcagaccgaagg

SEQ ID NO: 360466 - DNA, 30 bp, Artificial Sequence
  Synthetic oligonucleotide
acgttatgataatactgacgactccgaagg

SEQ ID NO: 360467 - DNA, 30 bp, Artificial Sequence
  Synthetic oligonucleotide
tcacaggtttcattatgggctccgcgaagg

SEQ ID NO: 360468 - DNA, 30 bp, Artificial Sequence
  Synthetic oligonucleotide
gccacattggccatctaggcgcggcgaagg

SEQ ID NO: 360469 - DNA, 30 bp, Artificial Sequence
  Synthetic oligonucleotide
tccagccttccgaactcgagcgatcgaagg

SEQ ID NO: 360470 - DNA, 30 bp, Artificial Sequence
  Synthetic oligonucleotide
cttgcagcattagcacgtgtggctcgaagg

SEQ ID NO: 360471 - DNA, 30 bp, Artificial Sequence
  Synthetic oligonucleotide
tatgggaaatgactggccttcctaggaagg

SEQ ID NO: 360472 - DNA, 30 bp, Artificial Sequence
  Synthetic oligonucleotide
acataagttatctggaacagtttaggaagg

SEQ ID NO: 360473 - DNA, 30 bp, Artificial Sequence
  Synthetic oligonucleotide
aatttcctaaatataagctaggacggaagg

SEQ ID NO: 360474 - DNA, 30 bp, Artificial Sequence
  Synthetic oligonucleotide
ctcgatcggataaagttggcaaagggaagg

SEQ ID NO: 360475 - DNA, 30 bp, Artificial Sequence
  Synthetic oligonucleotide
taagactactaccgagaggggccgggaagg

SEQ ID NO: 360476 - DNA, 30 bp, Artificial Sequence
  Synthetic oligonucleotide
gggccgatgctagggtggcagtatggaagg

SEQ ID NO: 360477 - DNA, 30 bp, Artificial Sequence
  Synthetic oligonucleotide
gcaagttatgtggctggaaggtctggaagg

SEQ ID NO: 360478 - DNA, 30 bp, Artificial Sequence
  Synthetic oligonucleotide
gctagcctgtgtagggagtccattggaagg

SEQ ID NO: 360479 - DNA, 30 bp, Artificial Sequence
  Synthetic oligonucleotide
gaaaagcatagatacaggtacgttggaagg

SEQ ID NO: 360480 - DNA, 30 bp, Artificial Sequence
  Synthetic oligonucleotide
aggcaccctggatttagaattatatgaagg

SEQ ID NO: 360481 - DNA, 30 bp, Artificial Sequence
  Synthetic oligonucleotide
gaagcctaacgtgcctgcagattatgaagg

SEQ ID NO: 360482 - DNA, 30 bp, Artificial Sequence
  Synthetic oligonucleotide
gacatggaatagtgattcttccgctgaagg

SEQ ID NO: 360483 - DNA, 30 bp, Artificial Sequence
  Synthetic oligonucleotide
tccacttcgaagtcgaggactacgtgaagg

SEQ ID NO: 360484 - DNA, 30 bp, Artificial Sequence
  Synthetic oligonucleotide
atgccatgtgaatttaaccctaggtgaagg

SEQ ID NO: 360485 - DNA, 30 bp, Artificial Sequence
  Synthetic oligonucleotide
ttataatacatcaagctgagtatgtgaagg

SEQ ID NO: 360486 - DNA, 30 bp, Artificial Sequence
  Synthetic oligonucleotide
tctccttctcgccgaccgaaccgttgaagg

SEQ ID NO: 360487 - DNA, 30 bp, Artificial Sequence
  Synthetic oligonucleotide
gagggccaccagctattagcggtttgaagg

SEQ ID NO: 360488 - DNA, 30 bp, Artificial Sequence
  Synthetic oligonucleotide
ctgagggacgtgcaaagcctcttttgaagg

SEQ ID NO: 360489 - DNA, 30 bp, Artificial Sequence
  Synthetic oligonucleotide
tgacctgcaatttcaagtcctgacataagg

SEQ ID NO: 360490 - DNA, 30 bp, Artificial Sequence
  Synthetic oligonucleotide
gacattgcctgtgacatctacaagataagg

SEQ ID NO: 360491 - DNA, 30 bp, Artificial Sequence
  Synthetic oligonucleotide
tccgaccttgttattatgtatcagataagg

SEQ ID NO: 360492 - DNA, 32 bp, Artificial Sequence
  Synthetic oligonucleotide
gctgggctttagatggtccgcaatcgataagg

SEQ ID NO: 360493 - DNA, 30 bp, Artificial Sequence
  Synthetic oligonucleotide
acggctgcctatagaaaagtagggataagg

SEQ ID NO: 360494 - DNA, 30 bp, Artificial Sequence
  Synthetic oligonucleotide
ggtgggctgatcccccatagggggataagg

SEQ ID NO: 360495 - DNA, 30 bp, Artificial Sequence
  Synthetic oligonucleotide
gtgtttaaactgacatcgaatgtgataagg

SEQ ID NO: 360496 - DNA, 30 bp, Artificial Sequence
  Synthetic oligonucleotide
aataaaaaagagtttaggggcattataagg

SEQ ID NO: 360497 - DNA, 30 bp, Artificial Sequence
  Synthetic oligonucleotide
aatcaatggtatcgcatttgggcactaagg

SEQ ID NO: 360498 - DNA, 30 bp, Artificial Sequence
  Synthetic oligonucleotide
cttgagattatcccagcggagcacctaagg

SEQ ID NO: 360499 - DNA, 30 bp, Artificial Sequence
  Synthetic oligonucleotide
gtgactttacgtattagattcagcctaagg

SEQ ID NO: 360500 - DNA, 30 bp, Artificial Sequence
  Synthetic oligonucleotide
tgctctcccagccaaaccgccaagctaagg

SEQ ID NO: 360501 - DNA, 30 bp, Artificial Sequence
  Synthetic oligonucleotide
ggggggcggtttcggtggcgttagctaagg

SEQ ID NO: 360502 - DNA, 30 bp, Artificial Sequence
  Synthetic oligonucleotide
agtatttacacgtcatcccacccgctaagg

SEQ ID NO: 360503 - DNA, 30 bp, Artificial Sequence
  Synthetic oligonucleotide
gcattcgatccggtaatctattgtctaagg

SEQ ID NO: 360504 - DNA, 30 bp, Artificial Sequence
  Synthetic oligonucleotide
tcttttgtatgatgattggttggagtaagg

SEQ ID NO: 360505 - DNA, 30 bp, Artificial Sequence
  Synthetic oligonucleotide
agtgagccggcgcttagagccttagtaagg

SEQ ID NO: 360506 - DNA, 30 bp, Artificial Sequence
  Synthetic oligonucleotide
ctcacagtaggtttggttctgggcgtaagg

SEQ ID NO: 360507 - DNA, 30 bp, Artificial Sequence
  Synthetic oligonucleotide
tcccgttagatttacatggcactcgtaagg

SEQ ID NO: 360508 - DNA, 30 bp, Artificial Sequence
  Synthetic oligonucleotide
gattggctgtactgggtatcaagggtaagg

SEQ ID NO: 360509 - DNA, 30 bp, Artificial Sequence
  Synthetic oligonucleotide
cagtaacggctggtaacggcccgggtaagg

SEQ ID NO: 360510 - DNA, 30 bp, Artificial Sequence
  Synthetic oligonucleotide
ggcctgattgaacgttcttactgggtaagg

SEQ ID NO: 360511 - DNA, 30 bp, Artificial Sequence
  Synthetic oligonucleotide
gttgaaaggaacctccataagtgggtaagg

SEQ ID NO: 360512 - DNA, 30 bp, Artificial Sequence
  Synthetic oligonucleotide
agctatcactccatccggttctatgtaagg

SEQ ID NO: 360513 - DNA, 30 bp, Artificial Sequence
  Synthetic oligonucleotide
tcctcgcatggatagaacacggcattaagg

SEQ ID NO: 360514 - DNA, 30 bp, Artificial Sequence
  Synthetic oligonucleotide
acgcccaccgcacagcgcactggattaagg

SEQ ID NO: 360515 - DNA, 30 bp, Artificial Sequence
  Synthetic oligonucleotide
aaaagcatcttcgtggatgagttattaagg

SEQ ID NO: 360516 - DNA, 30 bp, Artificial Sequence
  Synthetic oligonucleotide
caacattacaagcactaattatacttaagg

SEQ ID NO: 360517 - DNA, 30 bp, Artificial Sequence
  Synthetic oligonucleotide
aggctttaatctgccctagccttgttaagg

SEQ ID NO: 360518 - DNA, 30 bp, Artificial Sequence
  Synthetic oligonucleotide
ggacgtgtcactttctagcatttgttaagg

SEQ ID NO: 360519 - DNA, 30 bp, Artificial Sequence
  Synthetic oligonucleotide
tttacatagggcctaactgagtatttaagg

SEQ ID NO: 360520 - DNA, 30 bp, Artificial Sequence
  Synthetic oligonucleotide
tggggggttcgtaaaatgacgtttttaagg

SEQ ID NO: 360521 - DNA, 30 bp, Artificial Sequence
  Synthetic oligonucleotide
tacagtggagtgttgataggcgaaaacagg

SEQ ID NO: 360522 - DNA, 30 bp, Artificial Sequence
  Synthetic oligonucleotide
tgaagcagtccaaagacatgtcccaacagg

SEQ ID NO: 360523 - DNA, 30 bp, Artificial Sequence
  Synthetic oligonucleotide
ggcttgatacaatattggcaggccaacagg

SEQ ID NO: 360524 - DNA, 30 bp, Artificial Sequence
  Synthetic oligonucleotide
aatctaattcccaacaagtataataacagg

SEQ ID NO: 360525 - DNA, 30 bp, Artificial Sequence
  Synthetic oligonucleotide
atattggagagggttcataatcataacagg

SEQ ID NO: 360526 - DNA, 30 bp, Artificial Sequence
  Synthetic oligonucleotide
accttaacgccggacgttacagctaacagg

SEQ ID NO: 360527 - DNA, 30 bp, Artificial Sequence
  Synthetic oligonucleotide
cggacctcaagaaaggtacttggccacagg

SEQ ID NO: 360528 - DNA, 29 bp, Artificial Sequence
  Synthetic oligonucleotide
gtagggttatcgactggacaaagcacagg

SEQ ID NO: 360529 - DNA, 30 bp, Artificial Sequence
  Synthetic oligonucleotide
tactacgaaatgatgttggcaaagcacagg

SEQ ID NO: 360530 - DNA, 26 bp, Artificial Sequence
  Synthetic oligonucleotide
ctcctccatctgagtgtctgcacagg

SEQ ID NO: 360531 - DNA, 30 bp, Artificial Sequence
  Synthetic oligonucleotide
ggtcgtaataaagattgtcgatatcacagg

SEQ ID NO: 360532 - DNA, 30 bp, Artificial Sequence
  Synthetic oligonucleotide
taaacgcgtggtggcgggctcgcagacagg

SEQ ID NO: 360533 - DNA, 30 bp, Artificial Sequence
  Synthetic oligonucleotide
gaactgatcgctcagaacttgtgtgacagg

SEQ ID NO: 360534 - DNA, 30 bp, Artificial Sequence
  Synthetic oligonucleotide
agactaagtgcatccggaactttctacagg

SEQ ID NO: 360535 - DNA, 30 bp, Artificial Sequence
  Synthetic oligonucleotide
tttgcctgaatgcacaaactggcgtacagg

SEQ ID NO: 360536 - DNA, 30 bp, Artificial Sequence
  Synthetic oligonucleotide
gccacgaactcaacgatgttgaggtacagg

SEQ ID NO: 360537 - DNA, 30 bp, Artificial Sequence
  Synthetic oligonucleotide
aatctgtgcttggtgcaatctcggtacagg

SEQ ID NO: 360538 - DNA, 30 bp, Artificial Sequence
  Synthetic oligonucleotide
aggcgatgatttaaactcccgtggtacagg

SEQ ID NO: 360539 - DNA, 30 bp, Artificial Sequence
  Synthetic oligonucleotide
gggctcaatcccgtcctaagcctgtacagg

SEQ ID NO: 360540 - DNA, 30 bp, Artificial Sequence
  Synthetic oligonucleotide
taaatacttcatcacgtagcccgttacagg

SEQ ID NO: 360541 - DNA, 30 bp, Artificial Sequence
  Synthetic oligonucleotide
gggacttgcagatttgtgtaccccaccagg

SEQ ID NO: 360542 - DNA, 30 bp, Artificial Sequence
  Synthetic oligonucleotide
acacgccggttttctggctcatccaccagg

SEQ ID NO: 360543 - DNA, 30 bp, Artificial Sequence
  Synthetic oligonucleotide
gccgtccggtcgcatggtgatactaccagg

SEQ ID NO: 360544 - DNA, 30 bp, Artificial Sequence
  Synthetic oligonucleotide
gtacgttaatgtcgtcctgagtctaccagg

SEQ ID NO: 360545 - DNA, 30 bp, Artificial Sequence
  Synthetic oligonucleotide
atctacagtactggcagtgtcgatcccagg

SEQ ID NO: 360546 - DNA, 30 bp, Artificial Sequence
  Synthetic oligonucleotide
accgaattcttatgtacttactgtcccagg

SEQ ID NO: 360547 - DNA, 30 bp, Artificial Sequence
  Synthetic oligonucleotide
caataaaccatggatgtggccattcccagg

SEQ ID NO: 360548 - DNA, 30 bp, Artificial Sequence
  Synthetic oligonucleotide
acaccgctaggctcacggccgtttcccagg

SEQ ID NO: 360549 - DNA, 30 bp, Artificial Sequence
  Synthetic oligonucleotide
aatgatttacaagtggtatcccaagccagg

SEQ ID NO: 360550 - DNA, 30 bp, Artificial Sequence
  Synthetic oligonucleotide
ttcaacgcgactaccagggatgaagccagg

SEQ ID NO: 360551 - DNA, 30 bp, Artificial Sequence
  Synthetic oligonucleotide
tttcaagctaccgcgctgatgccggccagg

SEQ ID NO: 360552 - DNA, 30 bp, Artificial Sequence
  Synthetic oligonucleotide
atcgcacctgggacggatccatgatccagg

SEQ ID NO: 360553 - DNA, 30 bp, Artificial Sequence
  Synthetic oligonucleotide
ttaaagcgcctcttgcggaatctatccagg

SEQ ID NO: 360554 - DNA, 30 bp, Artificial Sequence
  Synthetic oligonucleotide
acggagataatttcggccgcgcagtccagg

SEQ ID NO: 360555 - DNA, 30 bp, Artificial Sequence
  Synthetic oligonucleotide
taaacacggaagatatcttagtattccagg

SEQ ID NO: 360556 - DNA, 30 bp, Artificial Sequence
  Synthetic oligonucleotide
tccgttgtcactgtgttatggacaagcagg

SEQ ID NO: 360557 - DNA, 30 bp, Artificial Sequence
  Synthetic oligonucleotide
tgtagtatccgtgatagattcacgagcagg

SEQ ID NO: 360558 - DNA, 30 bp, Artificial Sequence
  Synthetic oligonucleotide
gccggctcacttgcggggaaggggagcagg

SEQ ID NO: 360559 - DNA, 30 bp, Artificial Sequence
  Synthetic oligonucleotide
acttactctgcggcttgaaggcgtagcagg

SEQ ID NO: 360560 - DNA, 30 bp, Artificial Sequence
  Synthetic oligonucleotide
tctcttgccagggttgttccacttagcagg

SEQ ID NO: 360561 - DNA, 30 bp, Artificial Sequence
  Synthetic oligonucleotide
aacaattacggataaaggtcgcaacgcagg

SEQ ID NO: 360562 - DNA, 30 bp, Artificial Sequence
  Synthetic oligonucleotide
aacctggtccatcccggagagacccgcagg

SEQ ID NO: 360563 - DNA, 30 bp, Artificial Sequence
  Synthetic oligonucleotide
gctaacgtaatcgggaaattcgcccgcagg

SEQ ID NO: 360564 - DNA, 30 bp, Artificial Sequence
  Synthetic oligonucleotide
tgcctaattgtgtctcaagtatgccgcagg

SEQ ID NO: 360565 - DNA, 30 bp, Artificial Sequence
  Synthetic oligonucleotide
aagcgtcattgtggagaggtggggcgcagg

SEQ ID NO: 360566 - DNA, 30 bp, Artificial Sequence
  Synthetic oligonucleotide
aggctagggcaccgaagacaagtgcgcagg

SEQ ID NO: 360567 - DNA, 30 bp, Artificial Sequence
  Synthetic oligonucleotide
gaagaattatcccaggcggtgttgcgcagg

SEQ ID NO: 360568 - DNA, 30 bp, Artificial Sequence
  Synthetic oligonucleotide
tcattacggtgtacttggcttcttcgcagg

SEQ ID NO: 360569 - DNA, 30 bp, Artificial Sequence
  Synthetic oligonucleotide
agaagaaggggccggcaacgtagaggcagg

SEQ ID NO: 360570 - DNA, 30 bp, Artificial Sequence
  Synthetic oligonucleotide
tagttatactgcgtttggattataggcagg

SEQ ID NO: 360571 - DNA, 30 bp, Artificial Sequence
  Synthetic oligonucleotide
aggtcatgtgtaaacatagtgttaggcagg

SEQ ID NO: 360572 - DNA, 30 bp, Artificial Sequence
  Synthetic oligonucleotide
ctatatggggccttaaaggttcacggcagg

SEQ ID NO: 360573 - DNA, 30 bp, Artificial Sequence
  Synthetic oligonucleotide
atgggaaccgtcaggacccgcagcggcagg

SEQ ID NO: 360574 - DNA, 30 bp, Artificial Sequence
  Synthetic oligonucleotide
tgggattatgtcacctgtaggctcggcagg

SEQ ID NO: 360575 - DNA, 28 bp, Artificial Sequence
  Synthetic oligonucleotide
cctttgtgtctagagctacactggcagg

SEQ ID NO: 360576 - DNA, 30 bp, Artificial Sequence
  Synthetic oligonucleotide
ggatcttgcctcggacgtcgattatgcagg

SEQ ID NO: 360577 - DNA, 30 bp, Artificial Sequence
  Synthetic oligonucleotide
ctgatgacgtgaactctcgccccctgcagg

SEQ ID NO: 360578 - DNA, 30 bp, Artificial Sequence
  Synthetic oligonucleotide
gcgctctgtccttaacgtatgtgctgcagg

SEQ ID NO: 360579 - DNA, 30 bp, Artificial Sequence
  Synthetic oligonucleotide
gcggcccctaaagggagcggcttctgcagg

SEQ ID NO: 360580 - DNA, 30 bp, Artificial Sequence
  Synthetic oligonucleotide
acctgtacacgatttgtgataaggtgcagg

SEQ ID NO: 360581 - DNA, 30 bp, Artificial Sequence
  Synthetic oligonucleotide
ccatgcactaaataagctcgccggtgcagg

SEQ ID NO: 360582 - DNA, 30 bp, Artificial Sequence
  Synthetic oligonucleotide
gagttataccgtcttccgccgatgtgcagg

SEQ ID NO: 360583 - DNA, 30 bp, Artificial Sequence
  Synthetic oligonucleotide
aatcacagaacaggtggtccagattgcagg

SEQ ID NO: 360584 - DNA, 30 bp, Artificial Sequence
  Synthetic oligonucleotide
ctaatattccccccgcacgggccaatcagg

SEQ ID NO: 360585 - DNA, 30 bp, Artificial Sequence
  Synthetic oligonucleotide
agcaccggttagttgttcacatgaatcagg

SEQ ID NO: 360586 - DNA, 30 bp, Artificial Sequence
  Synthetic oligonucleotide
tatcagatggtacgagtgggtctaatcagg

SEQ ID NO: 360587 - DNA, 30 bp, Artificial Sequence
  Synthetic oligonucleotide
gaaaataaagctatgtccctctgcatcagg

SEQ ID NO: 360588 - DNA, 30 bp, Artificial Sequence
  Synthetic oligonucleotide
cattggggggtccgagcgctatagatcagg

SEQ ID NO: 360589 - DNA, 30 bp, Artificial Sequence
  Synthetic oligonucleotide
ttgcgcgcatcagagagcctagtgatcagg

SEQ ID NO: 360590 - DNA, 30 bp, Artificial Sequence
  Synthetic oligonucleotide
taactcttcatatatctttcggaactcagg

SEQ ID NO: 360591 - DNA, 30 bp, Artificial Sequence
  Synthetic oligonucleotide
taccatgttcggggacggtgaaggctcagg

SEQ ID NO: 360592 - DNA, 30 bp, Artificial Sequence
  Synthetic oligonucleotide
tcctctggaaactcgagcaagcctctcagg

SEQ ID NO: 360593 - DNA, 30 bp, Artificial Sequence
  Synthetic oligonucleotide
aatttcttgccgtagactacgtttctcagg

SEQ ID NO: 360594 - DNA, 30 bp, Artificial Sequence
  Synthetic oligonucleotide
gtcattctggcgccatgtgacaatgtcagg

SEQ ID NO: 360595 - DNA, 30 bp, Artificial Sequence
  Synthetic oligonucleotide
ccgctcatttgtttgaaatgaagtgtcagg

SEQ ID NO: 360596 - DNA, 30 bp, Artificial Sequence
  Synthetic oligonucleotide
gggtcggaagaacccgggttcaaattcagg

SEQ ID NO: 360597 - DNA, 30 bp, Artificial Sequence
  Synthetic oligonucleotide
aattgtatgacacaaggctttcaattcagg

SEQ ID NO: 360598 - DNA, 30 bp, Artificial Sequence
  Synthetic oligonucleotide
tctgtatggttaagtggacgcgaattcagg

SEQ ID NO: 360599 - DNA, 30 bp, Artificial Sequence
  Synthetic oligonucleotide
tacttgacgcaaattgcaacacggttcagg

SEQ ID NO: 360600 - DNA, 30 bp, Artificial Sequence
  Synthetic oligonucleotide
taggacctctgttcgctttttatgttcagg

SEQ ID NO: 360601 - DNA, 30 bp, Artificial Sequence
  Synthetic oligonucleotide
tggagttttgtgatccatacttctttcagg

SEQ ID NO: 360602 - DNA, 30 bp, Artificial Sequence
  Synthetic oligonucleotide
gaattcaagtgtgagtgttgtaaaaagagg

SEQ ID NO: 360603 - DNA, 30 bp, Artificial Sequence
  Synthetic oligonucleotide
gtatagtccgcacctgtacgatgaaagagg

SEQ ID NO: 360604 - DNA, 30 bp, Artificial Sequence
  Synthetic oligonucleotide
acgcgcgtggagagatactaaaggaagagg

SEQ ID NO: 360605 - DNA, 31 bp, Artificial Sequence
  Synthetic oligonucleotide
tggggtccttttgttcagataaaataagagg

SEQ ID NO: 360606 - DNA, 30 bp, Artificial Sequence
  Synthetic oligonucleotide
gccttcttcaaaggggctgccaataagagg

SEQ ID NO: 360607 - DNA, 30 bp, Artificial Sequence
  Synthetic oligonucleotide
aactgaaagggctctggagggcctaagagg

SEQ ID NO: 360608 - DNA, 30 bp, Artificial Sequence
  Synthetic oligonucleotide
aacctgcggacagcgccagccgttaagagg

SEQ ID NO: 360609 - DNA, 30 bp, Artificial Sequence
  Synthetic oligonucleotide
aactggattaagtaacccggtgttaagagg

SEQ ID NO: 360610 - DNA, 30 bp, Artificial Sequence
  Synthetic oligonucleotide
tgctttctataccgggcattctcccagagg

SEQ ID NO: 360611 - DNA, 30 bp, Artificial Sequence
  Synthetic oligonucleotide
aatagaggacactaacacattccgcagagg

SEQ ID NO: 360612 - DNA, 30 bp, Artificial Sequence
  Synthetic oligonucleotide
ttagatttagggtccgtaaaatggcagagg

SEQ ID NO: 360613 - DNA, 30 bp, Artificial Sequence
  Synthetic oligonucleotide
cggcaggccgccaccgtgcctcctcagagg

SEQ ID NO: 360614 - DNA, 30 bp, Artificial Sequence
  Synthetic oligonucleotide
taggtatggcccggctaacaactagagagg

SEQ ID NO: 360615 - DNA, 30 bp, Artificial Sequence
  Synthetic oligonucleotide
aaccggagacaatgtttgtggtacgagagg

SEQ ID NO: 360616 - DNA, 28 bp, Artificial Sequence
  Synthetic oligonucleotide
gctttataaatgccaggactccgagagg

SEQ ID NO: 360617 - DNA, 30 bp, Artificial Sequence
  Synthetic oligonucleotide
tggatagatgctccggttgctccggagagg

SEQ ID NO: 360618 - DNA, 30 bp, Artificial Sequence
  Synthetic oligonucleotide
atccatttcgatggtcccaggagggagagg

SEQ ID NO: 360619 - DNA, 30 bp, Artificial Sequence
  Synthetic oligonucleotide
gcgaaaaaggcttcgggacatctggagagg

SEQ ID NO: 360620 - DNA, 30 bp, Artificial Sequence
  Synthetic oligonucleotide
ccactcagccacatactgttgtatgagagg

SEQ ID NO: 360621 - DNA, 30 bp, Artificial Sequence
  Synthetic oligonucleotide
gcctgcaggtactatgcgggtgactagagg

SEQ ID NO: 360622 - DNA, 30 bp, Artificial Sequence
  Synthetic oligonucleotide
cagggtgggtgaaaccagatcccctagagg

SEQ ID NO: 360623 - DNA, 30 bp, Artificial Sequence
  Synthetic oligonucleotide
aagccccacatggcactcaggccctagagg

SEQ ID NO: 360624 - DNA, 30 bp, Artificial Sequence
  Synthetic oligonucleotide
agtacccaacaaactttaagcctctagagg

SEQ ID NO: 360625 - DNA, 30 bp, Artificial Sequence
  Synthetic oligonucleotide
attcacgagcgttggcatgaagattagagg

SEQ ID NO: 360626 - DNA, 30 bp, Artificial Sequence
  Synthetic oligonucleotide
gtgctttatcactagagactttcttagagg

SEQ ID NO: 360627 - DNA, 30 bp, Artificial Sequence
  Synthetic oligonucleotide
gaagcaaagttggcacgggaactttagagg

SEQ ID NO: 360628 - DNA, 30 bp, Artificial Sequence
  Synthetic oligonucleotide
ttattactgaagacgacgagttaaacgagg

SEQ ID NO: 360629 - DNA, 30 bp, Artificial Sequence
  Synthetic oligonucleotide
tagtcgtactcaaacttctctatcacgagg

SEQ ID NO: 360630 - DNA, 30 bp, Artificial Sequence
  Synthetic oligonucleotide
gggattctttctttcggacgtacgacgagg

SEQ ID NO: 360631 - DNA, 30 bp, Artificial Sequence
  Synthetic oligonucleotide
tgatctatactttagataattactacgagg

SEQ ID NO: 360632 - DNA, 30 bp, Artificial Sequence
  Synthetic oligonucleotide
cttatcgtgctattgaaatgcggtacgagg

SEQ ID NO: 360633 - DNA, 30 bp, Artificial Sequence
  Synthetic oligonucleotide
gtaggtcttagatctgatccaaaaccgagg

SEQ ID NO: 360634 - DNA, 30 bp, Artificial Sequence
  Synthetic oligonucleotide
gaataacaatcgataaccatataaccgagg

SEQ ID NO: 360635 - DNA, 30 bp, Artificial Sequence
  Synthetic oligonucleotide
actggttgtactgattgagagtagccgagg

SEQ ID NO: 360636 - DNA, 30 bp, Artificial Sequence
  Synthetic oligonucleotide
attattgccattgtggataattggccgagg

SEQ ID NO: 360637 - DNA, 30 bp, Artificial Sequence
  Synthetic oligonucleotide
gtttcattttgggcaatcccgagtccgagg

SEQ ID NO: 360638 - DNA, 30 bp, Artificial Sequence
  Synthetic oligonucleotide
ttctagccaagcaagtttcgacacgcgagg

SEQ ID NO: 360639 - DNA, 30 bp, Artificial Sequence
  Synthetic oligonucleotide
taaggcgctttagttcgcttgatcgcgagg

SEQ ID NO: 360640 - DNA, 30 bp, Artificial Sequence
  Synthetic oligonucleotide
ggttttgggaaggacagcggctaggcgagg

SEQ ID NO: 360641 - DNA, 30 bp, Artificial Sequence
  Synthetic oligonucleotide
cgcagggtgacggagtaagcgacggcgagg

SEQ ID NO: 360642 - DNA, 29 bp, Artificial Sequence
  Synthetic oligonucleotide
tactcaagtaccaatgtatggctgcgagg

SEQ ID NO: 360643 - DNA, 30 bp, Artificial Sequence
  Synthetic oligonucleotide
atgccttttacattggcacgggaatcgagg

SEQ ID NO: 360644 - DNA, 30 bp, Artificial Sequence
  Synthetic oligonucleotide
gtcattcggcagggatgatgcgcatcgagg

SEQ ID NO: 360645 - DNA, 30 bp, Artificial Sequence
  Synthetic oligonucleotide
tacaaggccctcaaggaccatgtgtcgagg

SEQ ID NO: 360646 - DNA, 30 bp, Artificial Sequence
  Synthetic oligonucleotide
gagtccccacgtcgtcagacattgtcgagg

SEQ ID NO: 360647 - DNA, 30 bp, Artificial Sequence
  Synthetic oligonucleotide
gaatttgttaggcggtcgaacccttcgagg

SEQ ID NO: 360648 - DNA, 30 bp, Artificial Sequence
  Synthetic oligonucleotide
cagattgcacgagatgcgtttccaaggagg

SEQ ID NO: 360649 - DNA, 30 bp, Artificial Sequence
  Synthetic oligonucleotide
cccatccatccagtaagggggcacaggagg

SEQ ID NO: 360650 - DNA, 30 bp, Artificial Sequence
  Synthetic oligonucleotide
cagggcaaggaatgtaggggactcaggagg

SEQ ID NO: 360651 - DNA, 30 bp, Artificial Sequence
  Synthetic oligonucleotide
accttccggtcaaagcaagaaccccggagg

SEQ ID NO: 360652 - DNA, 30 bp, Artificial Sequence
  Synthetic oligonucleotide
gccctcagctaggactgcattttccggagg

SEQ ID NO: 360653 - DNA, 30 bp, Artificial Sequence
  Synthetic oligonucleotide
atctttaagccaatattcggtattcggagg

SEQ ID NO: 360654 - DNA, 30 bp, Artificial Sequence
  Synthetic oligonucleotide
taaagtctagggtcctagcgctaagggagg

SEQ ID NO: 360655 - DNA, 30 bp, Artificial Sequence
  Synthetic oligonucleotide
gaaaatctggcacacgatcaaacagggagg

SEQ ID NO: 360656 - DNA, 30 bp, Artificial Sequence
  Synthetic oligonucleotide
ctggatttgtcgggataaaagatggggagg

SEQ ID NO: 360657 - DNA, 30 bp, Artificial Sequence
  Synthetic oligonucleotide
ctgcgagtaccagcccatgcatatgggagg

SEQ ID NO: 360658 - DNA, 30 bp, Artificial Sequence
  Synthetic oligonucleotide
aacacataggtgaattataaacgtgggagg

SEQ ID NO: 360659 - DNA, 30 bp, Artificial Sequence
  Synthetic oligonucleotide
atggtcgcgtttgtgacatgacgtgggagg

SEQ ID NO: 360660 - DNA, 30 bp, Artificial Sequence
  Synthetic oligonucleotide
ccgccgagaggagcctttataggtgggagg

SEQ ID NO: 360661 - DNA, 30 bp, Artificial Sequence
  Synthetic oligonucleotide
caaccttagaattgatcacaggttgggagg

SEQ ID NO: 360662 - DNA, 30 bp, Artificial Sequence
  Synthetic oligonucleotide
ttcgcggtaaaagaagcgaagtcatggagg

SEQ ID NO: 360663 - DNA, 30 bp, Artificial Sequence
  Synthetic oligonucleotide
atctactgaagtaaaggtttaaactggagg

SEQ ID NO: 360664 - DNA, 30 bp, Artificial Sequence
  Synthetic oligonucleotide
tgaatcggagcttcagacgtcggctggagg

SEQ ID NO: 360665 - DNA, 30 bp, Artificial Sequence
  Synthetic oligonucleotide
atgcgtaaggttctgtcttaccattggagg

SEQ ID NO: 360666 - DNA, 30 bp, Artificial Sequence
  Synthetic oligonucleotide
tgagattgatgatctcggcgcgattggagg

SEQ ID NO: 360667 - DNA, 30 bp, Artificial Sequence
  Synthetic oligonucleotide
gacatgtcgggcatgtccgctataatgagg

SEQ ID NO: 360668 - DNA, 30 bp, Artificial Sequence
  Synthetic oligonucleotide
acatacaatggttggacaagcggcatgagg

SEQ ID NO: 360669 - DNA, 30 bp, Artificial Sequence
  Synthetic oligonucleotide
tcccgtttgtagcctaaggaatagatgagg

SEQ ID NO: 360670 - DNA, 30 bp, Artificial Sequence
  Synthetic oligonucleotide
cggctttcttggtgttgatgcctgatgagg

SEQ ID NO: 360671 - DNA, 30 bp, Artificial Sequence
  Synthetic oligonucleotide
taccgatataattgccgtctggatatgagg

SEQ ID NO: 360672 - DNA, 30 bp, Artificial Sequence
  Synthetic oligonucleotide
ccactccacacagcttcattgcctatgagg

SEQ ID NO: 360673 - DNA, 30 bp, Artificial Sequence
  Synthetic oligonucleotide
cttacagggtggtgatcaaagcgtatgagg

SEQ ID NO: 360674 - DNA, 30 bp, Artificial Sequence
  Synthetic oligonucleotide
tacggagtatatggctattaatcactgagg

SEQ ID NO: 360675 - DNA, 30 bp, Artificial Sequence
  Synthetic oligonucleotide
atcgaccgttgtaacttgcatgtcctgagg

SEQ ID NO: 360676 - DNA, 30 bp, Artificial Sequence
  Synthetic oligonucleotide
aacttgaccttactagaacagttcctgagg

SEQ ID NO: 360677 - DNA, 30 bp, Artificial Sequence
  Synthetic oligonucleotide
tgtccccggtaaagaggatcgttcctgagg

SEQ ID NO: 360678 - DNA, 30 bp, Artificial Sequence
  Synthetic oligonucleotide
ctctagatccgtagccattctcggctgagg

SEQ ID NO: 360679 - DNA, 30 bp, Artificial Sequence
  Synthetic oligonucleotide
ggttaagaagagttcagccttatgctgagg

SEQ ID NO: 360680 - DNA, 30 bp, Artificial Sequence
  Synthetic oligonucleotide
ggctactctagctggtattggctgctgagg

SEQ ID NO: 360681 - DNA, 30 bp, Artificial Sequence
  Synthetic oligonucleotide
tatctcggaaaccggagtatgcatctgagg

SEQ ID NO: 360682 - DNA, 30 bp, Artificial Sequence
  Synthetic oligonucleotide
ccaccggcacaatggtgggttcgagtgagg

SEQ ID NO: 360683 - DNA, 30 bp, Artificial Sequence
  Synthetic oligonucleotide
aacacttgcagagtcataacccacgtgagg

SEQ ID NO: 360684 - DNA, 30 bp, Artificial Sequence
  Synthetic oligonucleotide
ccacggtaggacgatcgcgccccggtgagg

SEQ ID NO: 360685 - DNA, 30 bp, Artificial Sequence
  Synthetic oligonucleotide
tatcctcgatactggagatttggggtgagg

SEQ ID NO: 360686 - DNA, 30 bp, Artificial Sequence
  Synthetic oligonucleotide
acacggtgagaactatacctggatgtgagg

SEQ ID NO: 360687 - DNA, 30 bp, Artificial Sequence
  Synthetic oligonucleotide
gccgtattattttcagtttggcttgtgagg

SEQ ID NO: 360688 - DNA, 30 bp, Artificial Sequence
  Synthetic oligonucleotide
ttcctcaaacaaccgacggagtgattgagg

SEQ ID NO: 360689 - DNA, 30 bp, Artificial Sequence
  Synthetic oligonucleotide
accgggtaaagcagctacagagtattgagg

SEQ ID NO: 360690 - DNA, 30 bp, Artificial Sequence
  Synthetic oligonucleotide
cccgcaggaccgagttatgcccacttgagg

SEQ ID NO: 360691 - DNA, 30 bp, Artificial Sequence
  Synthetic oligonucleotide
gtaaaatttcacgcccaggactgcttgagg

SEQ ID NO: 360692 - DNA, 30 bp, Artificial Sequence
  Synthetic oligonucleotide
tgctcgtccttacacgtgacctgtttgagg

SEQ ID NO: 360693 - DNA, 30 bp, Artificial Sequence
  Synthetic oligonucleotide
tgtcgatttgattccgggtccgttttgagg

SEQ ID NO: 360694 - DNA, 30 bp, Artificial Sequence
  Synthetic oligonucleotide
atggtgcttaaaactaccttagacaatagg

SEQ ID NO: 360695 - DNA, 30 bp, Artificial Sequence
  Synthetic oligonucleotide
actagattgatagctatcggagccaatagg

SEQ ID NO: 360696 - DNA, 30 bp, Artificial Sequence
  Synthetic oligonucleotide
taggtacggcagctacaaatggtcaatagg

SEQ ID NO: 360697 - DNA, 30 bp, Artificial Sequence
  Synthetic oligonucleotide
gccgttttggctgctcggaacttcaatagg

SEQ ID NO: 360698 - DNA, 30 bp, Artificial Sequence
  Synthetic oligonucleotide
ctttagcaggaggcgggagtggttaatagg

SEQ ID NO: 360699 - DNA, 30 bp, Artificial Sequence
  Synthetic oligonucleotide
ttccgccgttaaaatatgcatgcacatagg

SEQ ID NO: 360700 - DNA, 30 bp, Artificial Sequence
  Synthetic oligonucleotide
gaacttactcaggataacacccgacatagg

SEQ ID NO: 360701 - DNA, 30 bp, Artificial Sequence
  Synthetic oligonucleotide
ttatagatcaatgccctggagtgacatagg

SEQ ID NO: 360702 - DNA, 30 bp, Artificial Sequence
  Synthetic oligonucleotide
aagttttgtcgtagccaaagggaccatagg

SEQ ID NO: 360703 - DNA, 30 bp, Artificial Sequence
  Synthetic oligonucleotide
agtactcgtctagaagcggtaaggcatagg

SEQ ID NO: 360704 - DNA, 30 bp, Artificial Sequence
  Synthetic oligonucleotide
tttatgaccggtcgtttaggcgctcatagg

SEQ ID NO: 360705 - DNA, 30 bp, Artificial Sequence
  Synthetic oligonucleotide
aacgcgcaatcaatcgatgcgtctcatagg

SEQ ID NO: 360706 - DNA, 30 bp, Artificial Sequence
  Synthetic oligonucleotide
cgcaggaggccgactttcgactttcatagg

SEQ ID NO: 360707 - DNA, 30 bp, Artificial Sequence
  Synthetic oligonucleotide
gtgcgacaacggtgcgagcccacagatagg

SEQ ID NO: 360708 - DNA, 30 bp, Artificial Sequence
  Synthetic oligonucleotide
gctggcgtaaatgggacccacggagatagg

SEQ ID NO: 360709 - DNA, 30 bp, Artificial Sequence
  Synthetic oligonucleotide
atcaacttgtaggtgtcttagttagatagg

SEQ ID NO: 360710 - DNA, 30 bp, Artificial Sequence
  Synthetic oligonucleotide
ttgatgaggcggagtctaaacggcgatagg

SEQ ID NO: 360711 - DNA, 30 bp, Artificial Sequence
  Synthetic oligonucleotide
aatgtcgtatcttaccgacctcaggatagg

SEQ ID NO: 360712 - DNA, 30 bp, Artificial Sequence
  Synthetic oligonucleotide
ggtacactggctccgtgtacctaggatagg

SEQ ID NO: 360713 - DNA, 30 bp, Artificial Sequence
  Synthetic oligonucleotide
gtcaaccaccaattctttcacatggatagg

SEQ ID NO: 360714 - DNA, 30 bp, Artificial Sequence
  Synthetic oligonucleotide
ccagagagatttagatttcggttggatagg

SEQ ID NO: 360715 - DNA, 30 bp, Artificial Sequence
  Synthetic oligonucleotide
gctcttaatgcggcgggagcctgtgatagg

SEQ ID NO: 360716 - DNA, 30 bp, Artificial Sequence
  Synthetic oligonucleotide
aaatggtccaacttgagtcgttttgatagg

SEQ ID NO: 360717 - DNA, 30 bp, Artificial Sequence
  Synthetic oligonucleotide
ggtcacaaaatcacatcaagtacatatagg

SEQ ID NO: 360718 - DNA, 30 bp, Artificial Sequence
  Synthetic oligonucleotide
gaacaacggatttaccaactgccatatagg

SEQ ID NO: 360719 - DNA, 30 bp, Artificial Sequence
  Synthetic oligonucleotide
ttacatctccgttcacagttgtcatatagg

SEQ ID NO: 360720 - DNA, 30 bp, Artificial Sequence
  Synthetic oligonucleotide
cggatcgccggccagctccgggactatagg

SEQ ID NO: 360721 - DNA, 30 bp, Artificial Sequence
  Synthetic oligonucleotide
acaaatcgcttgcgggatggtggctatagg

SEQ ID NO: 360722 - DNA, 30 bp, Artificial Sequence
  Synthetic oligonucleotide
acccgtggttaggagcgtggtttctatagg

SEQ ID NO: 360723 - DNA, 30 bp, Artificial Sequence
  Synthetic oligonucleotide
cataacttgttttgcccatataagtatagg

SEQ ID NO: 360724 - DNA, 30 bp, Artificial Sequence
  Synthetic oligonucleotide
agatgtcattacgaataacgaccgtatagg

SEQ ID NO: 360725 - DNA, 30 bp, Artificial Sequence
  Synthetic oligonucleotide
aaagtaacaatcttcatctctatgtatagg

SEQ ID NO: 360726 - DNA, 30 bp, Artificial Sequence
  Synthetic oligonucleotide
aagagaagatagaggctgcaacattatagg

SEQ ID NO: 360727 - DNA, 30 bp, Artificial Sequence
  Synthetic oligonucleotide
atcgggaagctgtagttggtgacttatagg

SEQ ID NO: 360728 - DNA, 30 bp, Artificial Sequence
  Synthetic oligonucleotide
tcttcacagctgattccactgtaaactagg

SEQ ID NO: 360729 - DNA, 30 bp, Artificial Sequence
  Synthetic oligonucleotide
ttactgcaccagctacttccttaaactagg

SEQ ID NO: 360730 - DNA, 30 bp, Artificial Sequence
  Synthetic oligonucleotide
tagaaccgaacggttgcttcttaaactagg

SEQ ID NO: 360731 - DNA, 30 bp, Artificial Sequence
  Synthetic oligonucleotide
gcgtgcttacaatgagctttcttaactagg

SEQ ID NO: 360732 - DNA, 30 bp, Artificial Sequence
  Synthetic oligonucleotide
ataattccactgacagagacttgcactagg

SEQ ID NO: 360733 - DNA, 30 bp, Artificial Sequence
  Synthetic oligonucleotide
tgtccgttatagccaggtaatctcactagg

SEQ ID NO: 360734 - DNA, 30 bp, Artificial Sequence
  Synthetic oligonucleotide
ggattgcaattaccgaggcctgtcactagg

SEQ ID NO: 360735 - DNA, 30 bp, Artificial Sequence
  Synthetic oligonucleotide
ttctgttaccattgccgccacaagactagg

SEQ ID NO: 360736 - DNA, 30 bp, Artificial Sequence
  Synthetic oligonucleotide
tagccaactcctcaacacggtgctactagg

SEQ ID NO: 360737 - DNA, 30 bp, Artificial Sequence
  Synthetic oligonucleotide
ttcgggcattgggtatctcgtcaacctagg

SEQ ID NO: 360738 - DNA, 30 bp, Artificial Sequence
  Synthetic oligonucleotide
ggacaagcccgtgtgacgttgccacctagg

SEQ ID NO: 360739 - DNA, 30 bp, Artificial Sequence
  Synthetic oligonucleotide
gagtaagagaggccttgcgcccaccctagg

SEQ ID NO: 360740 - DNA, 30 bp, Artificial Sequence
  Synthetic oligonucleotide
agggttcgtcagccttcctccagccctagg

SEQ ID NO: 360741 - DNA, 30 bp, Artificial Sequence
  Synthetic oligonucleotide
ataacaatgcaggactcggcccggcctagg

SEQ ID NO: 360742 - DNA, 30 bp, Artificial Sequence
  Synthetic oligonucleotide
ccggccggctcataaaagattcggcctagg

SEQ ID NO: 360743 - DNA, 30 bp, Artificial Sequence
  Synthetic oligonucleotide
tgatacccatatatctggacggttcctagg

SEQ ID NO: 360744 - DNA, 30 bp, Artificial Sequence
  Synthetic oligonucleotide
cccggggggttgcgggcttatatagctagg

SEQ ID NO: 360745 - DNA, 30 bp, Artificial Sequence
  Synthetic oligonucleotide
tcgggttctggtagagactggcacgctagg

SEQ ID NO: 360746 - DNA, 30 bp, Artificial Sequence
  Synthetic oligonucleotide
atgaaacaattacggggtgttcacgctagg

SEQ ID NO: 360747 - DNA, 30 bp, Artificial Sequence
  Synthetic oligonucleotide
attggtcagtacaattggtgtgacgctagg

SEQ ID NO: 360748 - DNA, 30 bp, Artificial Sequence
  Synthetic oligonucleotide
gggtgattcggggtggtagcaaccgctagg

SEQ ID NO: 360749 - DNA, 30 bp, Artificial Sequence
  Synthetic oligonucleotide
gcactcgacagtcggcgcccaaatgctagg

SEQ ID NO: 360750 - DNA, 30 bp, Artificial Sequence
  Synthetic oligonucleotide
ggaggtatcgctgcgtgcatgcatgctagg

SEQ ID NO: 360751 - DNA, 30 bp, Artificial Sequence
  Synthetic oligonucleotide
ttagcagatttgctcgccgaagcatctagg

SEQ ID NO: 360752 - DNA, 30 bp, Artificial Sequence
  Synthetic oligonucleotide
caagccgtagctctgggagattactctagg

SEQ ID NO: 360753 - DNA, 30 bp, Artificial Sequence
  Synthetic oligonucleotide
ttgataacgttgaatagaattggctctagg

SEQ ID NO: 360754 - DNA, 30 bp, Artificial Sequence
  Synthetic oligonucleotide
gatggggagtccagtcgctacaggtctagg

SEQ ID NO: 360755 - DNA, 30 bp, Artificial Sequence
  Synthetic oligonucleotide
gtacaatggaattgtcggagatcttctagg

SEQ ID NO: 360756 - DNA, 30 bp, Artificial Sequence
  Synthetic oligonucleotide
gtagccagcagacctgtttgtaaaagtagg

SEQ ID NO: 360757 - DNA, 30 bp, Artificial Sequence
  Synthetic oligonucleotide
cacccaccgctctgtttagtatcaagtagg

SEQ ID NO: 360758 - DNA, 30 bp, Artificial Sequence
  Synthetic oligonucleotide
ttcgatcaccgcgaatctcgaaagagtagg

SEQ ID NO: 360759 - DNA, 30 bp, Artificial Sequence
  Synthetic oligonucleotide
ggaatgcttagtcgcaattgaatgagtagg

SEQ ID NO: 360760 - DNA, 30 bp, Artificial Sequence
  Synthetic oligonucleotide
aatcaatttctacggtgtgtactgagtagg

SEQ ID NO: 360761 - DNA, 30 bp, Artificial Sequence
  Synthetic oligonucleotide
agcagatctgcagtttcacgtttgagtagg

SEQ ID NO: 360762 - DNA, 30 bp, Artificial Sequence
  Synthetic oligonucleotide
ggtcgagggcagcgccaatcggttagtagg

SEQ ID NO: 360763 - DNA, 30 bp, Artificial Sequence
  Synthetic oligonucleotide
tcccgccacttattataaattgtacgtagg

SEQ ID NO: 360764 - DNA, 30 bp, Artificial Sequence
  Synthetic oligonucleotide
gggcaattgagtccgctggaatcccgtagg

SEQ ID NO: 360765 - DNA, 30 bp, Artificial Sequence
  Synthetic oligonucleotide
agccccagctacaactcaccgctccgtagg

SEQ ID NO: 360766 - DNA, 30 bp, Artificial Sequence
  Synthetic oligonucleotide
tatgagactgcgccgaagacagatcgtagg

SEQ ID NO: 360767 - DNA, 30 bp, Artificial Sequence
  Synthetic oligonucleotide
cggacgcttgtttaagtgcttggtcgtagg

SEQ ID NO: 360768 - DNA, 30 bp, Artificial Sequence
  Synthetic oligonucleotide
attagttctcacatatgattacacggtagg

SEQ ID NO: 360769 - DNA, 30 bp, Artificial Sequence
  Synthetic oligonucleotide
atgttttaaccgttacatcttgccggtagg

SEQ ID NO: 360770 - DNA, 30 bp, Artificial Sequence
  Synthetic oligonucleotide
gttctggttgtgtaagggtattccggtagg

SEQ ID NO: 360771 - DNA, 30 bp, Artificial Sequence
  Synthetic oligonucleotide
agaagaactaacttactgcctcgcggtagg

SEQ ID NO: 360772 - DNA, 30 bp, Artificial Sequence
  Synthetic oligonucleotide
tgtactgtaattgtattgttcaggggtagg

SEQ ID NO: 360773 - DNA, 30 bp, Artificial Sequence
  Synthetic oligonucleotide
ccggctgacatggtccgggtgtcatgtagg

SEQ ID NO: 360774 - DNA, 30 bp, Artificial Sequence
  Synthetic oligonucleotide
aggcccttcttcttactcgtgatctgtagg

SEQ ID NO: 360775 - DNA, 30 bp, Artificial Sequence
  Synthetic oligonucleotide
gtagcgagagctaggtattaattctgtagg

SEQ ID NO: 360776 - DNA, 30 bp, Artificial Sequence
  Synthetic oligonucleotide
caaccacgtaaacagcaggtccattgtagg

SEQ ID NO: 360777 - DNA, 30 bp, Artificial Sequence
  Synthetic oligonucleotide
ggtcaacaggtgttttcgggtccaattagg

SEQ ID NO: 360778 - DNA, 30 bp, Artificial Sequence
  Synthetic oligonucleotide
taattcaccggcattgcggtcgtaattagg

SEQ ID NO: 360779 - DNA, 30 bp, Artificial Sequence
  Synthetic oligonucleotide
gcaaaaaatggaacccgatgggccattagg

SEQ ID NO: 360780 - DNA, 30 bp, Artificial Sequence
  Synthetic oligonucleotide
ctcgagtcttgagggattgtacagattagg

SEQ ID NO: 360781 - DNA, 30 bp, Artificial Sequence
  Synthetic oligonucleotide
gtaggcaagctccgctaaggttatattagg

SEQ ID NO: 360782 - DNA, 30 bp, Artificial Sequence
  Synthetic oligonucleotide
ttcaatcgcttctgaattaggtgtattagg

SEQ ID NO: 360783 - DNA, 30 bp, Artificial Sequence
  Synthetic oligonucleotide
acccaagggtcacgttccgatgtccttagg

SEQ ID NO: 360784 - DNA, 30 bp, Artificial Sequence
  Synthetic oligonucleotide
tcactttattgcgcaaggatcaagcttagg

SEQ ID NO: 360785 - DNA, 30 bp, Artificial Sequence
  Synthetic oligonucleotide
tttcgtgtaccaggcacatcggttcttagg

SEQ ID NO: 360786 - DNA, 30 bp, Artificial Sequence
  Synthetic oligonucleotide
agttggggattgcacctgagtgttcttagg

SEQ ID NO: 360787 - DNA, 30 bp, Artificial Sequence
  Synthetic oligonucleotide
ccacctagtcacctatgttcatttcttagg

SEQ ID NO: 360788 - DNA, 30 bp, Artificial Sequence
  Synthetic oligonucleotide
gttcgatatcagaatccacattttcttagg

SEQ ID NO: 360789 - DNA, 30 bp, Artificial Sequence
  Synthetic oligonucleotide
tgcccagaaagacccgacataatagttagg

SEQ ID NO: 360790 - DNA, 30 bp, Artificial Sequence
  Synthetic oligonucleotide
atagccaccccagaacttttgttagttagg

SEQ ID NO: 360791 - DNA, 30 bp, Artificial Sequence
  Synthetic oligonucleotide
tgccaacacgctcaattagcaagcgttagg

SEQ ID NO: 360792 - DNA, 30 bp, Artificial Sequence
  Synthetic oligonucleotide
aatcgaccactgcgttggatgacggttagg

SEQ ID NO: 360793 - DNA, 30 bp, Artificial Sequence
  Synthetic oligonucleotide
atcattaagtataggtacctttttgttagg

SEQ ID NO: 360794 - DNA, 30 bp, Artificial Sequence
  Synthetic oligonucleotide
agcctaggatgctagcgcattcactttagg

SEQ ID NO: 360795 - DNA, 30 bp, Artificial Sequence
  Synthetic oligonucleotide
agcaggtacgacgcgatacctccctttagg

SEQ ID NO: 360796 - DNA, 30 bp, Artificial Sequence
  Synthetic oligonucleotide
aacggatttgaattagtctccagctttagg

SEQ ID NO: 360797 - DNA, 30 bp, Artificial Sequence
  Synthetic oligonucleotide
cagtaagaggagctcgtcaactgctttagg

SEQ ID NO: 360798 - DNA, 30 bp, Artificial Sequence
  Synthetic oligonucleotide
agatgaacccctgtcgaatttacttttagg

SEQ ID NO: 360799 - DNA, 30 bp, Artificial Sequence
  Synthetic oligonucleotide
aagctgccgtattcgtagtttataaaacgg

SEQ ID NO: 360800 - DNA, 30 bp, Artificial Sequence
  Synthetic oligonucleotide
ttgaaatgatgtcgggggtgcagcaaacgg

SEQ ID NO: 360801 - DNA, 30 bp, Artificial Sequence
  Synthetic oligonucleotide
tcccgaggaggcaaatcttcgttcaaacgg

SEQ ID NO: 360802 - DNA, 30 bp, Artificial Sequence
  Synthetic oligonucleotide
cagtcggaacatcccggggtagggaaacgg

SEQ ID NO: 360803 - DNA, 30 bp, Artificial Sequence
  Synthetic oligonucleotide
cgcgaaaggtcaagtcgcctggggaaacgg

SEQ ID NO: 360804 - DNA, 30 bp, Artificial Sequence
  Synthetic oligonucleotide
tgctggtgatcatcggcacgctgtaaacgg

SEQ ID NO: 360805 - DNA, 30 bp, Artificial Sequence
  Synthetic oligonucleotide
caatagtgcttatcgcgagatgttaaacgg

SEQ ID NO: 360806 - DNA, 30 bp, Artificial Sequence
  Synthetic oligonucleotide
ttatacccccataacaaggtgaaacaacgg

SEQ ID NO: 360807 - DNA, 30 bp, Artificial Sequence
  Synthetic oligonucleotide
tcagagtaccttcggttgtagggacaacgg

SEQ ID NO: 360808 - DNA, 30 bp, Artificial Sequence
  Synthetic oligonucleotide
agatgttccggcgcccactgttaccaacgg

SEQ ID NO: 360809 - DNA, 30 bp, Artificial Sequence
  Synthetic oligonucleotide
atctatacactagcactaattgagcaacgg

SEQ ID NO: 360810 - DNA, 30 bp, Artificial Sequence
  Synthetic oligonucleotide
gggtgatgtcggggcgaggttgcgcaacgg

SEQ ID NO: 360811 - DNA, 30 bp, Artificial Sequence
  Synthetic oligonucleotide
tgtgatggatgtaaaatcacagttcaacgg

SEQ ID NO: 360812 - DNA, 30 bp, Artificial Sequence
  Synthetic oligonucleotide
gagatggttatgtcgtttggggttcaacgg

SEQ ID NO: 360813 - DNA, 30 bp, Artificial Sequence
  Synthetic oligonucleotide
gttaaccatgctatttgaacattcgaacgg

SEQ ID NO: 360814 - DNA, 30 bp, Artificial Sequence
  Synthetic oligonucleotide
ggccataggactgcttaaaaaaaggaacgg

SEQ ID NO: 360815 - DNA, 30 bp, Artificial Sequence
  Synthetic oligonucleotide
taactgctgcccatttagagcactgaacgg

SEQ ID NO: 360816 - DNA, 30 bp, Artificial Sequence
  Synthetic oligonucleotide
tcttggtaccctcagaactcgtgtgaacgg

SEQ ID NO: 360817 - DNA, 30 bp, Artificial Sequence
  Synthetic oligonucleotide
ctgttatattataggtatcggacataacgg

SEQ ID NO: 360818 - DNA, 30 bp, Artificial Sequence
  Synthetic oligonucleotide
tcatatctcttgcaatagggtcgataacgg

SEQ ID NO: 360819 - DNA, 30 bp, Artificial Sequence
  Synthetic oligonucleotide
gtatggtaactaataggacgcgactaacgg

SEQ ID NO: 360820 - DNA, 30 bp, Artificial Sequence
  Synthetic oligonucleotide
tttgggatcgtaaggatgatcccctaacgg

SEQ ID NO: 360821 - DNA, 30 bp, Artificial Sequence
  Synthetic oligonucleotide
tggtaatgagtgtcaagtgggcgctaacgg

SEQ ID NO: 360822 - DNA, 30 bp, Artificial Sequence
  Synthetic oligonucleotide
gagcggcgtgctcgctatttagagtaacgg

SEQ ID NO: 360823 - DNA, 30 bp, Artificial Sequence
  Synthetic oligonucleotide
gtgagggggccaacgcgtttcgcgtaacgg

SEQ ID NO: 360824 - DNA, 30 bp, Artificial Sequence
  Synthetic oligonucleotide
ggcggcgggaagggcccctgcaggtaacgg

SEQ ID NO: 360825 - DNA, 30 bp, Artificial Sequence
  Synthetic oligonucleotide
agggcctaaaagtgcccgcgctattaacgg

SEQ ID NO: 360826 - DNA, 30 bp, Artificial Sequence
  Synthetic oligonucleotide
cccgatcatgaaatcgtacttggttaacgg

SEQ ID NO: 360827 - DNA, 30 bp, Artificial Sequence
  Synthetic oligonucleotide
gtatcctagagaggcgtaaatatttaacgg

SEQ ID NO: 360828 - DNA, 30 bp, Artificial Sequence
  Synthetic oligonucleotide
aattgttactaggtgattaagcgaacacgg

SEQ ID NO: 360829 - DNA, 30 bp, Artificial Sequence
  Synthetic oligonucleotide
aatccgtgaaagcatgactctctaacacgg

SEQ ID NO: 360830 - DNA, 30 bp, Artificial Sequence
  Synthetic oligonucleotide
gttaaattgtgactcttttcgaacacacgg

SEQ ID NO: 360831 - DNA, 30 bp, Artificial Sequence
  Synthetic oligonucleotide
ggtgaaaaagcagttcaaggaatgacacgg

SEQ ID NO: 360832 - DNA, 30 bp, Artificial Sequence
  Synthetic oligonucleotide
tcattctgcgggggtgaatctgtgacacgg

SEQ ID NO: 360833 - DNA, 30 bp, Artificial Sequence
  Synthetic oligonucleotide
ttacggtgaattcgggatgacttgacacgg

SEQ ID NO: 360834 - DNA, 30 bp, Artificial Sequence
  Synthetic oligonucleotide
cctcgaagggattgaggaggtcgaccacgg

SEQ ID NO: 360835 - DNA, 30 bp, Artificial Sequence
  Synthetic oligonucleotide
gtcctcttcttagtcttacgttccccacgg

SEQ ID NO: 360836 - DNA, 30 bp, Artificial Sequence
  Synthetic oligonucleotide
atgtcactattgcgagcgacgagcccacgg

SEQ ID NO: 360837 - DNA, 30 bp, Artificial Sequence
  Synthetic oligonucleotide
atgatattgcgggggataacctagccacgg

SEQ ID NO: 360838 - DNA, 30 bp, Artificial Sequence
  Synthetic oligonucleotide
atcctccatccacagctatgtaatccacgg

SEQ ID NO: 360839 - DNA, 30 bp, Artificial Sequence
  Synthetic oligonucleotide
tggaaggctgaagtttacccgtccgcacgg

SEQ ID NO: 360840 - DNA, 30 bp, Artificial Sequence
  Synthetic oligonucleotide
gagtacacgtgagtaagtgtgggcgcacgg

SEQ ID NO: 360841 - DNA, 30 bp, Artificial Sequence
  Synthetic oligonucleotide
ccttaaggaattggattagttgaggcacgg

SEQ ID NO: 360842 - DNA, 30 bp, Artificial Sequence
  Synthetic oligonucleotide
ggaggggctgtgagggaactaccggcacgg

SEQ ID NO: 360843 - DNA, 30 bp, Artificial Sequence
  Synthetic oligonucleotide
cgaagccccgcatcttcctcatgggcacgg

SEQ ID NO: 360844 - DNA, 30 bp, Artificial Sequence
  Synthetic oligonucleotide
aggcgaattccatttagccacatggcacgg

SEQ ID NO: 360845 - DNA, 30 bp, Artificial Sequence
  Synthetic oligonucleotide
tgagcatgaaatatgagtccccctgcacgg

SEQ ID NO: 360846 - DNA, 30 bp, Artificial Sequence
  Synthetic oligonucleotide
ggacgattaagtttggatgagtctgcacgg

SEQ ID NO: 360847 - DNA, 30 bp, Artificial Sequence
  Synthetic oligonucleotide
ttaaggttcgatggcgtgatgcttgcacgg

SEQ ID NO: 360848 - DNA, 30 bp, Artificial Sequence
  Synthetic oligonucleotide
atcagagtgtgtcggtcatcgtaatcacgg

SEQ ID NO: 360849 - DNA, 30 bp, Artificial Sequence
  Synthetic oligonucleotide
tacctcactttgtactcccgcacatcacgg

SEQ ID NO: 360850 - DNA, 30 bp, Artificial Sequence
  Synthetic oligonucleotide
atcgccgtacagcacttcggcacatcacgg

SEQ ID NO: 360851 - DNA, 30 bp, Artificial Sequence
  Synthetic oligonucleotide
gatctgaattgagcagagacatgatcacgg

SEQ ID NO: 360852 - DNA, 30 bp, Artificial Sequence
  Synthetic oligonucleotide
aacaagactcatacgattaaaatatcacgg

SEQ ID NO: 360853 - DNA, 30 bp, Artificial Sequence
  Synthetic oligonucleotide
cagttcatcaacggaagactggtctcacgg

SEQ ID NO: 360854 - DNA, 30 bp, Artificial Sequence
  Synthetic oligonucleotide
atgagcttttcggtttttattgtctcacgg

SEQ ID NO: 360855 - DNA, 30 bp, Artificial Sequence
  Synthetic oligonucleotide
gtaagtcggatatctgcacccaagtcacgg

SEQ ID NO: 360856 - DNA, 30 bp, Artificial Sequence
  Synthetic oligonucleotide
caagtacagagtgcaaatagttagtcacgg

SEQ ID NO: 360857 - DNA, 30 bp, Artificial Sequence
  Synthetic oligonucleotide
cacgggtgtactcaaacctatccgtcacgg

SEQ ID NO: 360858 - DNA, 30 bp, Artificial Sequence
  Synthetic oligonucleotide
tgaaggtaccagtactacaagtggtcacgg

SEQ ID NO: 360859 - DNA, 30 bp, Artificial Sequence
  Synthetic oligonucleotide
acggatatcttcctccgctcatcttcacgg

SEQ ID NO: 360860 - DNA, 30 bp, Artificial Sequence
  Synthetic oligonucleotide
ttcgtcgagtacagacttgactaaagacgg

SEQ ID NO: 360861 - DNA, 30 bp, Artificial Sequence
  Synthetic oligonucleotide
ggggacgtagaacggattatatcgagacgg

SEQ ID NO: 360862 - DNA, 30 bp, Artificial Sequence
  Synthetic oligonucleotide
caactgatgaaatacacttcgactagacgg

SEQ ID NO: 360863 - DNA, 30 bp, Artificial Sequence
  Synthetic oligonucleotide
cgacggacctttgtagccgggtctagacgg

SEQ ID NO: 360864 - DNA, 30 bp, Artificial Sequence
  Synthetic oligonucleotide
taaggactaattgagcctttagaacgacgg

SEQ ID NO: 360865 - DNA, 30 bp, Artificial Sequence
  Synthetic oligonucleotide
tatccatgtctcgcatgaggtgaacgacgg

SEQ ID NO: 360866 - DNA, 30 bp, Artificial Sequence
  Synthetic oligonucleotide
taattcccgtacattataataattcgacgg

SEQ ID NO: 360867 - DNA, 30 bp, Artificial Sequence
  Synthetic oligonucleotide
tgaggtgctaccagtgctagtgttcgacgg

SEQ ID NO: 360868 - DNA, 30 bp, Artificial Sequence
  Synthetic oligonucleotide
aacgtctctcccatcagcacgtttcgacgg

SEQ ID NO: 360869 - DNA, 30 bp, Artificial Sequence
  Synthetic oligonucleotide
ggtcggcggcggaagcttgggagaggacgg

SEQ ID NO: 360870 - DNA, 30 bp, Artificial Sequence
  Synthetic oligonucleotide
gactttgaagatcacgactagataggacgg

SEQ ID NO: 360871 - DNA, 30 bp, Artificial Sequence
  Synthetic oligonucleotide
caccgaactgatcttatcgtattaggacgg

SEQ ID NO: 360872 - DNA, 30 bp, Artificial Sequence
  Synthetic oligonucleotide
caggactgtggcactgcattcttcggacgg

SEQ ID NO: 360873 - DNA, 30 bp, Artificial Sequence
  Synthetic oligonucleotide
ctgaacaaaccggcataattcaggggacgg

SEQ ID NO: 360874 - DNA, 30 bp, Artificial Sequence
  Synthetic oligonucleotide
tgtactggtccagctaatttgctgggacgg

SEQ ID NO: 360875 - DNA, 30 bp, Artificial Sequence
  Synthetic oligonucleotide
cccctattgagatgctcgacggttggacgg

SEQ ID NO: 360876 - DNA, 30 bp, Artificial Sequence
  Synthetic oligonucleotide
acatccgggcataatatcggggactgacgg

SEQ ID NO: 360877 - DNA, 30 bp, Artificial Sequence
  Synthetic oligonucleotide
tcctcgggagattcattatcaggctgacgg

SEQ ID NO: 360878 - DNA, 30 bp, Artificial Sequence
  Synthetic oligonucleotide
ggtagagtagtaagccgatatcagtgacgg

SEQ ID NO: 360879 - DNA, 30 bp, Artificial Sequence
  Synthetic oligonucleotide
aggggccgccaatccgccgcgatgtgacgg

SEQ ID NO: 360880 - DNA, 30 bp, Artificial Sequence
  Synthetic oligonucleotide
gccccgagccataatgagagcttaatacgg

SEQ ID NO: 360881 - DNA, 30 bp, Artificial Sequence
  Synthetic oligonucleotide
ctaggccaaaatggccgtatgaacatacgg

SEQ ID NO: 360882 - DNA, 30 bp, Artificial Sequence
  Synthetic oligonucleotide
cccgtatatcgactcaataaaacgatacgg

SEQ ID NO: 360883 - DNA, 30 bp, Artificial Sequence
  Synthetic oligonucleotide
ccaggcgtttcccgggtcatagggatacgg

SEQ ID NO: 360884 - DNA, 30 bp, Artificial Sequence
  Synthetic oligonucleotide
gaacagtcccgccgggaaaaaatgatacgg

SEQ ID NO: 360885 - DNA, 30 bp, Artificial Sequence
  Synthetic oligonucleotide
taaaacggatgagctgtaattgatatacgg

SEQ ID NO: 360886 - DNA, 30 bp, Artificial Sequence
  Synthetic oligonucleotide
tgctgatccggcctcgtccgggctatacgg

SEQ ID NO: 360887 - DNA, 30 bp, Artificial Sequence
  Synthetic oligonucleotide
tgcatcttcgagaagacagtgattatacgg

SEQ ID NO: 360888 - DNA, 30 bp, Artificial Sequence
  Synthetic oligonucleotide
tgtgtctagtcatgtctgagagttatacgg

SEQ ID NO: 360889 - DNA, 30 bp, Artificial Sequence
  Synthetic oligonucleotide
gccctcgggcatcgagcacggtaactacgg

SEQ ID NO: 360890 - DNA, 30 bp, Artificial Sequence
  Synthetic oligonucleotide
tcagtatgtgcctcaatatgttcactacgg

SEQ ID NO: 360891 - DNA, 30 bp, Artificial Sequence
  Synthetic oligonucleotide
ctaactttcgtagtctggaaacacctacgg

SEQ ID NO: 360892 - DNA, 30 bp, Artificial Sequence
  Synthetic oligonucleotide
actgtgttattgtccgattttgggctacgg

SEQ ID NO: 360893 - DNA, 30 bp, Artificial Sequence
  Synthetic oligonucleotide
gctggacgtccgagttcggaattgctacgg

SEQ ID NO: 360894 - DNA, 30 bp, Artificial Sequence
  Synthetic oligonucleotide
gttccttgttgtattctgtctcctctacgg

SEQ ID NO: 360895 - DNA, 30 bp, Artificial Sequence
  Synthetic oligonucleotide
catatcttgcttcggcagtcacaagtacgg

SEQ ID NO: 360896 - DNA, 30 bp, Artificial Sequence
  Synthetic oligonucleotide
accaaggtgctaatcgacaccccagtacgg

SEQ ID NO: 360897 - DNA, 30 bp, Artificial Sequence
  Synthetic oligonucleotide
tcagtacttgaatcggaggcggcagtacgg

SEQ ID NO: 360898 - DNA, 30 bp, Artificial Sequence
  Synthetic oligonucleotide
aacaaggtgaccaggacagggaccgtacgg

SEQ ID NO: 360899 - DNA, 30 bp, Artificial Sequence
  Synthetic oligonucleotide
ataagtacatgagttaattcgttcgtacgg

SEQ ID NO: 360900 - DNA, 30 bp, Artificial Sequence
  Synthetic oligonucleotide
cagctacaacaattattctatatggtacgg

SEQ ID NO: 360901 - DNA, 30 bp, Artificial Sequence
  Synthetic oligonucleotide
tgatttgaatagagctcgattatggtacgg

SEQ ID NO: 360902 - DNA, 30 bp, Artificial Sequence
  Synthetic oligonucleotide
gaggtacttccgacagaggatttggtacgg

SEQ ID NO: 360903 - DNA, 30 bp, Artificial Sequence
  Synthetic oligonucleotide
gaaatctaggcgcagggataaggtgtacgg

SEQ ID NO: 360904 - DNA, 30 bp, Artificial Sequence
  Synthetic oligonucleotide
ggacaacagcagcgacacattggtgtacgg

SEQ ID NO: 360905 - DNA, 30 bp, Artificial Sequence
  Synthetic oligonucleotide
ggcacctaacagaagtgaaatcttgtacgg

SEQ ID NO: 360906 - DNA, 30 bp, Artificial Sequence
  Synthetic oligonucleotide
tttagtacgtaagggcttctcgttgtacgg

SEQ ID NO: 360907 - DNA, 30 bp, Artificial Sequence
  Synthetic oligonucleotide
agtttatgtgttccaattgctggattacgg

SEQ ID NO: 360908 - DNA, 30 bp, Artificial Sequence
  Synthetic oligonucleotide
acaattacaatggcactttaggacttacgg

SEQ ID NO: 360909 - DNA, 30 bp, Artificial Sequence
  Synthetic oligonucleotide
ctgatatgtgttgtttaaaggagcttacgg

SEQ ID NO: 360910 - DNA, 30 bp, Artificial Sequence
  Synthetic oligonucleotide
tgaaaatcgatgcgggtagtacatttacgg

SEQ ID NO: 360911 - DNA, 30 bp, Artificial Sequence
  Synthetic oligonucleotide
ttaacaaaataaggaccttaacctttacgg

SEQ ID NO: 360912 - DNA, 30 bp, Artificial Sequence
  Synthetic oligonucleotide
cggtaccaatttacaattttttctttacgg

SEQ ID NO: 360913 - DNA, 30 bp, Artificial Sequence
  Synthetic oligonucleotide
agaccgccactgtcttggtattacaaccgg

SEQ ID NO: 360914 - DNA, 30 bp, Artificial Sequence
  Synthetic oligonucleotide
tactttgaccgtcgaggcgtgtgcaaccgg

SEQ ID NO: 360915 - DNA, 30 bp, Artificial Sequence
  Synthetic oligonucleotide
ggtatgcacaactgctgaacttgcaaccgg

SEQ ID NO: 360916 - DNA, 30 bp, Artificial Sequence
  Synthetic oligonucleotide
acttgactcacatgaccatatgtcaaccgg

SEQ ID NO: 360917 - DNA, 30 bp, Artificial Sequence
  Synthetic oligonucleotide
ctgttacgcaacaatacgttagagaaccgg

SEQ ID NO: 360918 - DNA, 30 bp, Artificial Sequence
  Synthetic oligonucleotide
tttcttaataaaactctctttaggaaccgg

SEQ ID NO: 360919 - DNA, 30 bp, Artificial Sequence
  Synthetic oligonucleotide
aggatgtgaaccatccgacctgggaaccgg

SEQ ID NO: 360920 - DNA, 30 bp, Artificial Sequence
  Synthetic oligonucleotide
catggatagtctaactttcgaagtaaccgg

SEQ ID NO: 360921 - DNA, 30 bp, Artificial Sequence
  Synthetic oligonucleotide
tagggatgtacccatcttgtgacccaccgg

SEQ ID NO: 360922 - DNA, 30 bp, Artificial Sequence
  Synthetic oligonucleotide
tttgcgagtaactacgtcacagcgcaccgg

SEQ ID NO: 360923 - DNA, 30 bp, Artificial Sequence
  Synthetic oligonucleotide
gtgattgcctatagcaggcaggggcaccgg

SEQ ID NO: 360924 - DNA, 30 bp, Artificial Sequence
  Synthetic oligonucleotide
aatgtttcggggtatcatcgtctagaccgg

SEQ ID NO: 360925 - DNA, 30 bp, Artificial Sequence
  Synthetic oligonucleotide
attatgaaaaccgcgttggaagacgaccgg

SEQ ID NO: 360926 - DNA, 30 bp, Artificial Sequence
  Synthetic oligonucleotide
tttcgggtgggggatcaaaagggcgaccgg

SEQ ID NO: 360927 - DNA, 30 bp, Artificial Sequence
  Synthetic oligonucleotide
ggcatgtggaggtatctggagcaggaccgg

SEQ ID NO: 360928 - DNA, 30 bp, Artificial Sequence
  Synthetic oligonucleotide
tgttgatgcggcttgtagcgttgggaccgg

SEQ ID NO: 360929 - DNA, 30 bp, Artificial Sequence
  Synthetic oligonucleotide
gccgaacgttggttcatgtttggtgaccgg

SEQ ID NO: 360930 - DNA, 30 bp, Artificial Sequence
  Synthetic oligonucleotide
ttatgtcttgtcactgaccaagttgaccgg

SEQ ID NO: 360931 - DNA, 30 bp, Artificial Sequence
  Synthetic oligonucleotide
tatttcccgtgaggataccgagactaccgg

SEQ ID NO: 360932 - DNA, 30 bp, Artificial Sequence
  Synthetic oligonucleotide
ctgcggcagtggcatcctattggctaccgg

SEQ ID NO: 360933 - DNA, 30 bp, Artificial Sequence
  Synthetic oligonucleotide
caccctaagtattccaacgtgttctaccgg

SEQ ID NO: 360934 - DNA, 30 bp, Artificial Sequence
  Synthetic oligonucleotide
aaacgggcccgtgcttagtggtcgtaccgg

SEQ ID NO: 360935 - DNA, 30 bp, Artificial Sequence
  Synthetic oligonucleotide
attgattcattttgagcgctaaattaccgg

SEQ ID NO: 360936 - DNA, 30 bp, Artificial Sequence
  Synthetic oligonucleotide
attaatggtgggatttcaaccccttaccgg

SEQ ID NO: 360937 - DNA, 30 bp, Artificial Sequence
  Synthetic oligonucleotide
tgtaagacattgtaagggccggtttaccgg

SEQ ID NO: 360938 - DNA, 30 bp, Artificial Sequence
  Synthetic oligonucleotide
ggcgaccatgtcttgacctaccggacccgg

SEQ ID NO: 360939 - DNA, 30 bp, Artificial Sequence
  Synthetic oligonucleotide
tgaagaaatccgtaatcggtgcggacccgg

SEQ ID NO: 360940 - DNA, 30 bp, Artificial Sequence
  Synthetic oligonucleotide
aacgggcttggacggacaccatgaccccgg

SEQ ID NO: 360941 - DNA, 30 bp, Artificial Sequence
  Synthetic oligonucleotide
tacgacgcctagactaccatgcatccccgg

SEQ ID NO: 360942 - DNA, 30 bp, Artificial Sequence
  Synthetic oligonucleotide
aaatggccgaacctagtcatgattccccgg

SEQ ID NO: 360943 - DNA, 30 bp, Artificial Sequence
  Synthetic oligonucleotide
taatcactttacagtattaggacagcccgg

SEQ ID NO: 360944 - DNA, 30 bp, Artificial Sequence
  Synthetic oligonucleotide
ctgactcccgagggtccataaagggcccgg

SEQ ID NO: 360945 - DNA, 30 bp, Artificial Sequence
  Synthetic oligonucleotide
gacctcaaataggctgtctttggggcccgg

SEQ ID NO: 360946 - DNA, 30 bp, Artificial Sequence
  Synthetic oligonucleotide
ttccctgcccgctatacggcagtatcccgg

SEQ ID NO: 360947 - DNA, 30 bp, Artificial Sequence
  Synthetic oligonucleotide
cccagcataacatgtggccgagtatcccgg

SEQ ID NO: 360948 - DNA, 30 bp, Artificial Sequence
  Synthetic oligonucleotide
gtatggtgcgcctcattctgcaactcccgg

SEQ ID NO: 360949 - DNA, 30 bp, Artificial Sequence
  Synthetic oligonucleotide
ctgattcttcgtcgcgctgctgactcccgg

SEQ ID NO: 360950 - DNA, 30 bp, Artificial Sequence
  Synthetic oligonucleotide
attcctcgtcacattgtaatgagttcccgg

SEQ ID NO: 360951 - DNA, 30 bp, Artificial Sequence
  Synthetic oligonucleotide
agcaagtgactaagtccgaacttttcccgg

SEQ ID NO: 360952 - DNA, 30 bp, Artificial Sequence
  Synthetic oligonucleotide
cgtcaccttcccatgttcgtcgcaagccgg

SEQ ID NO: 360953 - DNA, 30 bp, Artificial Sequence
  Synthetic oligonucleotide
gtatcgttcaggattggactctgcagccgg

SEQ ID NO: 360954 - DNA, 30 bp, Artificial Sequence
  Synthetic oligonucleotide
acgttgcctaggcgggaatggatcagccgg

SEQ ID NO: 360955 - DNA, 30 bp, Artificial Sequence
  Synthetic oligonucleotide
ccgcagataggtggggggttgtctagccgg

SEQ ID NO: 360956 - DNA, 30 bp, Artificial Sequence
  Synthetic oligonucleotide
acccgtcccagcgcatcaaaacaccgccgg

SEQ ID NO: 360957 - DNA, 30 bp, Artificial Sequence
  Synthetic oligonucleotide
aaaaacaccccagggtccgttgaccgccgg

SEQ ID NO: 360958 - DNA, 30 bp, Artificial Sequence
  Synthetic oligonucleotide
taagcatgccgccataagaaatgccgccgg

SEQ ID NO: 360959 - DNA, 30 bp, Artificial Sequence
  Synthetic oligonucleotide
tcgacgcatgtatcttcaattccgcgccgg

SEQ ID NO: 360960 - DNA, 30 bp, Artificial Sequence
  Synthetic oligonucleotide
gcgggggctctgaagatgattcatcgccgg

SEQ ID NO: 360961 - DNA, 30 bp, Artificial Sequence
  Synthetic oligonucleotide
tatagaaatcgcgactggcaacctcgccgg

SEQ ID NO: 360962 - DNA, 30 bp, Artificial Sequence
  Synthetic oligonucleotide
catggcagcctcggcccccactgtcgccgg

SEQ ID NO: 360963 - DNA, 30 bp, Artificial Sequence
  Synthetic oligonucleotide
aaggaccagtacttggaagatattcgccgg

SEQ ID NO: 360964 - DNA, 31 bp, Artificial Sequence
  Synthetic oligonucleotide
attacgacacggggatgcaacttctggccgg

SEQ ID NO: 360965 - DNA, 30 bp, Artificial Sequence
  Synthetic oligonucleotide
ctgggtgagcggcgtcggagcccgtgccgg

SEQ ID NO: 360966 - DNA, 30 bp, Artificial Sequence
  Synthetic oligonucleotide
atcagacctgtagatgaactacattgccgg

SEQ ID NO: 360967 - DNA, 30 bp, Artificial Sequence
  Synthetic oligonucleotide
aggactatgcagcggtgaccttattgccgg

SEQ ID NO: 360968 - DNA, 30 bp, Artificial Sequence
  Synthetic oligonucleotide
tccccgggcaaggaaggttagtgttgccgg

SEQ ID NO: 360969 - DNA, 30 bp, Artificial Sequence
  Synthetic oligonucleotide
aagtatacataggtctcatgtataatccgg

SEQ ID NO: 360970 - DNA, 30 bp, Artificial Sequence
  Synthetic oligonucleotide
cgtgtagcattttaattctttaacatccgg

SEQ ID NO: 360971 - DNA, 30 bp, Artificial Sequence
  Synthetic oligonucleotide
gtccgccaggctggttaataaaagatccgg

SEQ ID NO: 360972 - DNA, 30 bp, Artificial Sequence
  Synthetic oligonucleotide
ggcatttttgatgcatcaggacagatccgg

SEQ ID NO: 360973 - DNA, 30 bp, Artificial Sequence
  Synthetic oligonucleotide
tgagcgtcttatggcttcggccggatccgg

SEQ ID NO: 360974 - DNA, 30 bp, Artificial Sequence
  Synthetic oligonucleotide
agtggtcttgccgaagacaactatatccgg

SEQ ID NO: 360975 - DNA, 30 bp, Artificial Sequence
  Synthetic oligonucleotide
ttgtcatattaagctgcccgttctatccgg

SEQ ID NO: 360976 - DNA, 30 bp, Artificial Sequence
  Synthetic oligonucleotide
gcttacaatgttcgtccaccgtttatccgg

SEQ ID NO: 360977 - DNA, 30 bp, Artificial Sequence
  Synthetic oligonucleotide
tgttatgggatgttgtacagaacactccgg

SEQ ID NO: 360978 - DNA, 30 bp, Artificial Sequence
  Synthetic oligonucleotide
catgctatagtgggacgaaaggcactccgg

SEQ ID NO: 360979 - DNA, 30 bp, Artificial Sequence
  Synthetic oligonucleotide
tttctgttctcttatccgtgattactccgg

SEQ ID NO: 360980 - DNA, 30 bp, Artificial Sequence
  Synthetic oligonucleotide
tacaatggcaatcggccgtaacccctccgg

SEQ ID NO: 360981 - DNA, 30 bp, Artificial Sequence
  Synthetic oligonucleotide
taatatcaaaattccattgcagcgctccgg

SEQ ID NO: 360982 - DNA, 30 bp, Artificial Sequence
  Synthetic oligonucleotide
tctcgcgttgtgcgggacgccaggctccgg

SEQ ID NO: 360983 - DNA, 30 bp, Artificial Sequence
  Synthetic oligonucleotide
tgcgcgcaatatagcccgacggggctccgg

SEQ ID NO: 360984 - DNA, 30 bp, Artificial Sequence
  Synthetic oligonucleotide
ttacggtcctcaaacggcctccgtctccgg

SEQ ID NO: 360985 - DNA, 30 bp, Artificial Sequence
  Synthetic oligonucleotide
agataaattgtgtataatactatagtccgg

SEQ ID NO: 360986 - DNA, 30 bp, Artificial Sequence
  Synthetic oligonucleotide
cagcgtccgatctgttgcgtgcacgtccgg

SEQ ID NO: 360987 - DNA, 30 bp, Artificial Sequence
  Synthetic oligonucleotide
cggataaccttttcggttaggcgcgtccgg

SEQ ID NO: 360988 - DNA, 30 bp, Artificial Sequence
  Synthetic oligonucleotide
cacgcccaggaatgtataactcaggtccgg

SEQ ID NO: 360989 - DNA, 30 bp, Artificial Sequence
  Synthetic oligonucleotide
ataaggtataagtagatttgattggtccgg

SEQ ID NO: 360990 - DNA, 30 bp, Artificial Sequence
  Synthetic oligonucleotide
agagcgcttcatctcagagcgcatgtccgg

SEQ ID NO: 360991 - DNA, 30 bp, Artificial Sequence
  Synthetic oligonucleotide
acgttataattaaactggccggatgtccgg

SEQ ID NO: 360992 - DNA, 30 bp, Artificial Sequence
  Synthetic oligonucleotide
ccgggcatccctccaggtctctctgtccgg

SEQ ID NO: 360993 - DNA, 30 bp, Artificial Sequence
  Synthetic oligonucleotide
cccctcacacacgcatggccatttgtccgg

SEQ ID NO: 360994 - DNA, 30 bp, Artificial Sequence
  Synthetic oligonucleotide
actgagaacgcgacgatcacgacattccgg

SEQ ID NO: 360995 - DNA, 30 bp, Artificial Sequence
  Synthetic oligonucleotide
tattattaggtgtaacatcttagattccgg

SEQ ID NO: 360996 - DNA, 30 bp, Artificial Sequence
  Synthetic oligonucleotide
cctaccccgtagtcacccctaatattccgg

SEQ ID NO: 360997 - DNA, 30 bp, Artificial Sequence
  Synthetic oligonucleotide
ggaattgtaatagggtctgggaggttccgg

SEQ ID NO: 360998 - DNA, 30 bp, Artificial Sequence
  Synthetic oligonucleotide
tgatcaacgccttgcgtaattttgttccgg

SEQ ID NO: 360999 - DNA, 30 bp, Artificial Sequence
  Synthetic oligonucleotide
taggtaggccaagaactctcctctttccgg

SEQ ID NO: 361000 - DNA, 30 bp, Artificial Sequence
  Synthetic oligonucleotide
cacggacaaaacactccgcgtggaaagcgg

SEQ ID NO: 361001 - DNA, 30 bp, Artificial Sequence
  Synthetic oligonucleotide
tgggtcatcctggtcgtctggtataagcgg

SEQ ID NO: 361002 - DNA, 30 bp, Artificial Sequence
  Synthetic oligonucleotide
caggttgccgagtcggtacattctaagcgg

SEQ ID NO: 361003 - DNA, 30 bp, Artificial Sequence
  Synthetic oligonucleotide
gagcggtttttcataaaggggaaacagcgg

SEQ ID NO: 361004 - DNA, 30 bp, Artificial Sequence
  Synthetic oligonucleotide
ctaggtcgaaaggaacgtagctcacagcgg

SEQ ID NO: 361005 - DNA, 30 bp, Artificial Sequence
  Synthetic oligonucleotide
ccccctattgctaggatggccagacagcgg

SEQ ID NO: 361006 - DNA, 30 bp, Artificial Sequence
  Synthetic oligonucleotide
aggtttaatgattttagtccgcgccagcgg

SEQ ID NO: 361007 - DNA, 30 bp, Artificial Sequence
  Synthetic oligonucleotide
ccgagagcctcgataaagaggctccagcgg

SEQ ID NO: 361008 - DNA, 30 bp, Artificial Sequence
  Synthetic oligonucleotide
atgggactggttaaacattacgggcagcgg

SEQ ID NO: 361009 - DNA, 30 bp, Artificial Sequence
  Synthetic oligonucleotide
ttgtgtccagctgggggctctaatcagcgg

SEQ ID NO: 361010 - DNA, 30 bp, Artificial Sequence
  Synthetic oligonucleotide
tgataacgcagtttatcgtatggtcagcgg

SEQ ID NO: 361011 - DNA, 30 bp, Artificial Sequence
  Synthetic oligonucleotide
atagtgcgtgaacgtagcggtcttcagcgg

SEQ ID NO: 361012 - DNA, 30 bp, Artificial Sequence
  Synthetic oligonucleotide
gccctatccacagtaacccggagcgagcgg

SEQ ID NO: 361013 - DNA, 30 bp, Artificial Sequence
  Synthetic oligonucleotide
attgccctgtcactcaactgcaaggagcgg

SEQ ID NO: 361014 - DNA, 30 bp, Artificial Sequence
  Synthetic oligonucleotide
ggctagccggcaggtccctagaaggagcgg

SEQ ID NO: 361015 - DNA, 30 bp, Artificial Sequence
  Synthetic oligonucleotide
ttgtcaaggatagtaaccggtatggagcgg

SEQ ID NO: 361016 - DNA, 30 bp, Artificial Sequence
  Synthetic oligonucleotide
aaacctcccgtggggaatgcgagtgagcgg

SEQ ID NO: 361017 - DNA, 29 bp, Artificial Sequence
  Synthetic oligonucleotide
ttgggcttgctgtacgggaaccatagcgg

SEQ ID NO: 361018 - DNA, 30 bp, Artificial Sequence
  Synthetic oligonucleotide
aaacggctatatgatcaacaacactagcgg

SEQ ID NO: 361019 - DNA, 30 bp, Artificial Sequence
  Synthetic oligonucleotide
ccctgacttgcgttaagatgtcgttagcgg

SEQ ID NO: 361020 - DNA, 30 bp, Artificial Sequence
  Synthetic oligonucleotide
cccaaaacgtacagggggtggtcaacgcgg

SEQ ID NO: 361021 - DNA, 30 bp, Artificial Sequence
  Synthetic oligonucleotide
ttgtactatgaggggcatgcaggaacgcgg

SEQ ID NO: 361022 - DNA, 30 bp, Artificial Sequence
  Synthetic oligonucleotide
gatgggatgggcacgacgctctccacgcgg

SEQ ID NO: 361023 - DNA, 30 bp, Artificial Sequence
  Synthetic oligonucleotide
aggaaggcagcaagcgaggggccgacgcgg

SEQ ID NO: 361024 - DNA, 30 bp, Artificial Sequence
  Synthetic oligonucleotide
ccttggctaagtaatggcggtattacgcgg

SEQ ID NO: 361025 - DNA, 30 bp, Artificial Sequence
  Synthetic oligonucleotide
tgtgaccagattatcttgaggcgtccgcgg

SEQ ID NO: 361026 - DNA, 30 bp, Artificial Sequence
  Synthetic oligonucleotide
ggtccttatactgaggaaacgtcagcgcgg

SEQ ID NO: 361027 - DNA, 30 bp, Artificial Sequence
  Synthetic oligonucleotide
cacgtaatgtacaacctccataccgcgcgg

SEQ ID NO: 361028 - DNA, 30 bp, Artificial Sequence
  Synthetic oligonucleotide
ggtacacgtgcggaaggtcatcgcgcgcgg

SEQ ID NO: 361029 - DNA, 30 bp, Artificial Sequence
  Synthetic oligonucleotide
ctcggcaaggccaaacatacccgggcgcgg

SEQ ID NO: 361030 - DNA, 30 bp, Artificial Sequence
  Synthetic oligonucleotide
gttatagggtgataagcgttctgtgcgcgg

SEQ ID NO: 361031 - DNA, 30 bp, Artificial Sequence
  Synthetic oligonucleotide
tacacggccgatcttaatagcttatcgcgg

SEQ ID NO: 361032 - DNA, 30 bp, Artificial Sequence
  Synthetic oligonucleotide
ggaggctcctgtttgccaaacaactcgcgg

SEQ ID NO: 361033 - DNA, 30 bp, Artificial Sequence
  Synthetic oligonucleotide
tagtcgaaaattggtattgcttactcgcgg

SEQ ID NO: 361034 - DNA, 30 bp, Artificial Sequence
  Synthetic oligonucleotide
gaagattcgcctatggccccaacctcgcgg

SEQ ID NO: 361035 - DNA, 30 bp, Artificial Sequence
  Synthetic oligonucleotide
tctcgacaatggctatgcgatcagtcgcgg

SEQ ID NO: 361036 - DNA, 30 bp, Artificial Sequence
  Synthetic oligonucleotide
agattcaccgtgaccgctaaagtgtcgcgg

SEQ ID NO: 361037 - DNA, 30 bp, Artificial Sequence
  Synthetic oligonucleotide
agagttgactgtggaaccctgttttcgcgg

SEQ ID NO: 361038 - DNA, 30 bp, Artificial Sequence
  Synthetic oligonucleotide
taattgatctattagtgggcaaaaaggcgg

SEQ ID NO: 361039 - DNA, 30 bp, Artificial Sequence
  Synthetic oligonucleotide
cgagatttaattttatattgagaaaggcgg

SEQ ID NO: 361040 - DNA, 30 bp, Artificial Sequence
  Synthetic oligonucleotide
tttaagtaccgacgtacgcgcccaaggcgg

SEQ ID NO: 361041 - DNA, 30 bp, Artificial Sequence
  Synthetic oligonucleotide
agttgagcgaataccattgtcccaaggcgg

SEQ ID NO: 361042 - DNA, 30 bp, Artificial Sequence
  Synthetic oligonucleotide
aggcccaaaaaatgacgcaattcaaggcgg

SEQ ID NO: 361043 - DNA, 30 bp, Artificial Sequence
  Synthetic oligonucleotide
tttgccctctctcgccccaatcgaaggcgg

SEQ ID NO: 361044 - DNA, 30 bp, Artificial Sequence
  Synthetic oligonucleotide
aagtgcatgagagaccctacgacgaggcgg

SEQ ID NO: 361045 - DNA, 30 bp, Artificial Sequence
  Synthetic oligonucleotide
tatggcgctatcctcgcctctgaccggcgg

SEQ ID NO: 361046 - DNA, 30 bp, Artificial Sequence
  Synthetic oligonucleotide
tccgcatgttattttgaccctggccggcgg

SEQ ID NO: 361047 - DNA, 30 bp, Artificial Sequence
  Synthetic oligonucleotide
catggatggcaatgcaggccatcgcggcgg

SEQ ID NO: 361048 - DNA, 30 bp, Artificial Sequence
  Synthetic oligonucleotide
gagaatctcgcgcaatgcgactggcggcgg

SEQ ID NO: 361049 - DNA, 30 bp, Artificial Sequence
  Synthetic oligonucleotide
acgcccttgtaagtgcgttttttgcggcgg

SEQ ID NO: 361050 - DNA, 30 bp, Artificial Sequence
  Synthetic oligonucleotide
cgattttaccaggcggcccatcgtcggcgg

SEQ ID NO: 361051 - DNA, 30 bp, Artificial Sequence
  Synthetic oligonucleotide
ggatagctaagatccgactcatcagggcgg

SEQ ID NO: 361052 - DNA, 30 bp, Artificial Sequence
  Synthetic oligonucleotide
cggggcaacttatacgctccgtgagggcgg

SEQ ID NO: 361053 - DNA, 30 bp, Artificial Sequence
  Synthetic oligonucleotide
tactgggtgggttatacgactaaggggcgg

SEQ ID NO: 361054 - DNA, 30 bp, Artificial Sequence
  Synthetic oligonucleotide
gatcagttgtgactacacggcggggggcgg

SEQ ID NO: 361055 - DNA, 30 bp, Artificial Sequence
  Synthetic oligonucleotide
tgtcgttgtgtgaaagcgcgcgtggggcgg

SEQ ID NO: 361056 - DNA, 30 bp, Artificial Sequence
  Synthetic oligonucleotide
tcacgcgtgtttacattagcgccgtggcgg

SEQ ID NO: 361057 - DNA, 30 bp, Artificial Sequence
  Synthetic oligonucleotide
gaatcagggacggaagggggacgttggcgg

SEQ ID NO: 361058 - DNA, 30 bp, Artificial Sequence
  Synthetic oligonucleotide
agtcacctagggcattatgacatttggcgg

SEQ ID NO: 361059 - DNA, 30 bp, Artificial Sequence
  Synthetic oligonucleotide
acaaaattgcaactgtacgtcgtaatgcgg

SEQ ID NO: 361060 - DNA, 30 bp, Artificial Sequence
  Synthetic oligonucleotide
agctgcgccttaacagggtttgacatgcgg

SEQ ID NO: 361061 - DNA, 30 bp, Artificial Sequence
  Synthetic oligonucleotide
acggttcggtccccagcacggtacatgcgg

SEQ ID NO: 361062 - DNA, 30 bp, Artificial Sequence
  Synthetic oligonucleotide
tcttaggtcccctattatgcatctatgcgg

SEQ ID NO: 361063 - DNA, 30 bp, Artificial Sequence
  Synthetic oligonucleotide
tacactgtaaggccacggacctttatgcgg

SEQ ID NO: 361064 - DNA, 30 bp, Artificial Sequence
  Synthetic oligonucleotide
tgcgggtctccccagcgtaaattgctgcgg

SEQ ID NO: 361065 - DNA, 30 bp, Artificial Sequence
  Synthetic oligonucleotide
cccaggttgccgatccagcagtacgtgcgg

SEQ ID NO: 361066 - DNA, 30 bp, Artificial Sequence
  Synthetic oligonucleotide
accgaggactgggaggacacaatcgtgcgg

SEQ ID NO: 361067 - DNA, 30 bp, Artificial Sequence
  Synthetic oligonucleotide
ggcgattttactaaaaagtcactggtgcgg

SEQ ID NO: 361068 - DNA, 30 bp, Artificial Sequence
  Synthetic oligonucleotide
agaaaatctgaccggatgttgtatgtgcgg

SEQ ID NO: 361069 - DNA, 30 bp, Artificial Sequence
  Synthetic oligonucleotide
acgattgaggcaagggagtatcctgtgcgg

SEQ ID NO: 361070 - DNA, 30 bp, Artificial Sequence
  Synthetic oligonucleotide
atgggttgaatgagctttctcgaattgcgg

SEQ ID NO: 361071 - DNA, 30 bp, Artificial Sequence
  Synthetic oligonucleotide
agaagcatattctggtaaaacctattgcgg

SEQ ID NO: 361072 - DNA, 30 bp, Artificial Sequence
  Synthetic oligonucleotide
aacaagcaatagtacccatcagtattgcgg

SEQ ID NO: 361073 - DNA, 30 bp, Artificial Sequence
  Synthetic oligonucleotide
tctccaacgaacatcctcgggttattgcgg

SEQ ID NO: 361074 - DNA, 30 bp, Artificial Sequence
  Synthetic oligonucleotide
agcagtactagagctattgagaacttgcgg

SEQ ID NO: 361075 - DNA, 30 bp, Artificial Sequence
  Synthetic oligonucleotide
ggcaagtaacgccgaattactcgcttgcgg

SEQ ID NO: 361076 - DNA, 30 bp, Artificial Sequence
  Synthetic oligonucleotide
ggtagtatatcgttataacaggtgttgcgg

SEQ ID NO: 361077 - DNA, 30 bp, Artificial Sequence
  Synthetic oligonucleotide
gctactatatgcatagcgctgcatttgcgg

SEQ ID NO: 361078 - DNA, 30 bp, Artificial Sequence
  Synthetic oligonucleotide
gcctttcaactacgctacgcctatttgcgg

SEQ ID NO: 361079 - DNA, 30 bp, Artificial Sequence
  Synthetic oligonucleotide
gtacccagatttaaaataaggtgaaatcgg

SEQ ID NO: 361080 - DNA, 30 bp, Artificial Sequence
  Synthetic oligonucleotide
gaagaaaacagggtaacatttcacaatcgg

SEQ ID NO: 361081 - DNA, 30 bp, Artificial Sequence
  Synthetic oligonucleotide
tattgtgaagtgcgcatactgggcaatcgg

SEQ ID NO: 361082 - DNA, 30 bp, Artificial Sequence
  Synthetic oligonucleotide
caaatgtggttggtttctgaacggaatcgg

SEQ ID NO: 361083 - DNA, 30 bp, Artificial Sequence
  Synthetic oligonucleotide
aaggggcagccaccctacggggtgaatcgg

SEQ ID NO: 361084 - DNA, 30 bp, Artificial Sequence
  Synthetic oligonucleotide
gcaacgtcgggtgagatggtctataatcgg

SEQ ID NO: 361085 - DNA, 30 bp, Artificial Sequence
  Synthetic oligonucleotide
aaagccggcattaaagcacatgctaatcgg

SEQ ID NO: 361086 - DNA, 30 bp, Artificial Sequence
  Synthetic oligonucleotide
tacacataagtcccctccccgggtaatcgg

SEQ ID NO: 361087 - DNA, 30 bp, Artificial Sequence
  Synthetic oligonucleotide
taagaggatatatggtgctatattaatcgg

SEQ ID NO: 361088 - DNA, 30 bp, Artificial Sequence
  Synthetic oligonucleotide
tcagctacaatcgtagctaaaggtcatcgg

SEQ ID NO: 361089 - DNA, 30 bp, Artificial Sequence
  Synthetic oligonucleotide
agaaagggtgagattttatagattcatcgg

SEQ ID NO: 361090 - DNA, 30 bp, Artificial Sequence
  Synthetic oligonucleotide
ctaaggtattttctactaagctaagatcgg

SEQ ID NO: 361091 - DNA, 30 bp, Artificial Sequence
  Synthetic oligonucleotide
tttggatgggcatagggatggacagatcgg

SEQ ID NO: 361092 - DNA, 30 bp, Artificial Sequence
  Synthetic oligonucleotide
gtactagagggggcgcccttctgagatcgg

SEQ ID NO: 361093 - DNA, 30 bp, Artificial Sequence
  Synthetic oligonucleotide
gggactgtaattatttaaatttgagatcgg

SEQ ID NO: 361094 - DNA, 30 bp, Artificial Sequence
  Synthetic oligonucleotide
ttgtctatcgtctcgcctatgatagatcgg

SEQ ID NO: 361095 - DNA, 30 bp, Artificial Sequence
  Synthetic oligonucleotide
tgatgtacctcaagacatgcactagatcgg

SEQ ID NO: 361096 - DNA, 30 bp, Artificial Sequence
  Synthetic oligonucleotide
ggagccaagtcgagctggctgcgcgatcgg

SEQ ID NO: 361097 - DNA, 30 bp, Artificial Sequence
  Synthetic oligonucleotide
acattggcggtttctcaggggctcgatcgg

SEQ ID NO: 361098 - DNA, 30 bp, Artificial Sequence
  Synthetic oligonucleotide
gtgtaacgagcctaggcatgaggggatcgg

SEQ ID NO: 361099 - DNA, 30 bp, Artificial Sequence
  Synthetic oligonucleotide
cttaggccacagcagcatcagctggatcgg

SEQ ID NO: 361100 - DNA, 30 bp, Artificial Sequence
  Synthetic oligonucleotide
tttcatcgtccatgagctctgattgatcgg

SEQ ID NO: 361101 - DNA, 30 bp, Artificial Sequence
  Synthetic oligonucleotide
acggccccgggaccgtacgcctcatatcgg

SEQ ID NO: 361102 - DNA, 30 bp, Artificial Sequence
  Synthetic oligonucleotide
aagtaactgtaagtaacccattagtatcgg

SEQ ID NO: 361103 - DNA, 30 bp, Artificial Sequence
  Synthetic oligonucleotide
taatggataaaagtccgcatacattatcgg

SEQ ID NO: 361104 - DNA, 30 bp, Artificial Sequence
  Synthetic oligonucleotide
taatgctccaatgtgggcccttgcactcgg

SEQ ID NO: 361105 - DNA, 30 bp, Artificial Sequence
  Synthetic oligonucleotide
tctcccaccattgtgcgcagcatgactcgg

SEQ ID NO: 361106 - DNA, 30 bp, Artificial Sequence
  Synthetic oligonucleotide
cagtacctcgtgtattctctattgactcgg

SEQ ID NO: 361107 - DNA, 30 bp, Artificial Sequence
  Synthetic oligonucleotide
ccatacgaactttatattgtatctactcgg

SEQ ID NO: 361108 - DNA, 30 bp, Artificial Sequence
  Synthetic oligonucleotide
gcgcctagcagggcacggatgtgtactcgg

SEQ ID NO: 361109 - DNA, 30 bp, Artificial Sequence
  Synthetic oligonucleotide
caattcggcactttgtgcatctgacctcgg

SEQ ID NO: 361110 - DNA, 30 bp, Artificial Sequence
  Synthetic oligonucleotide
ttagtacatatcaggcgagcataccctcgg

SEQ ID NO: 361111 - DNA, 30 bp, Artificial Sequence
  Synthetic oligonucleotide
gtccatactccgggcagaatcgcccctcgg

SEQ ID NO: 361112 - DNA, 30 bp, Artificial Sequence
  Synthetic oligonucleotide
aacgtgttcgttggggtcattagccctcgg

SEQ ID NO: 361113 - DNA, 30 bp, Artificial Sequence
  Synthetic oligonucleotide
gtgcatagtactgggtcgcgcatccctcgg

SEQ ID NO: 361114 - DNA, 30 bp, Artificial Sequence
  Synthetic oligonucleotide
tcactagtcgtatgaggctcgttgcctcgg

SEQ ID NO: 361115 - DNA, 30 bp, Artificial Sequence
  Synthetic oligonucleotide
caggcccatgttcatgggtgctgtcctcgg

SEQ ID NO: 361116 - DNA, 30 bp, Artificial Sequence
  Synthetic oligonucleotide
tctgttggctcgaatcccatcgttcctcgg

SEQ ID NO: 361117 - DNA, 30 bp, Artificial Sequence
  Synthetic oligonucleotide
ttaaagtacacattttccgcttccgctcgg

SEQ ID NO: 361118 - DNA, 30 bp, Artificial Sequence
  Synthetic oligonucleotide
acgagctactcgaatgtacgatatgctcgg

SEQ ID NO: 361119 - DNA, 30 bp, Artificial Sequence
  Synthetic oligonucleotide
tatcgtcgctaggtatcgcatgactctcgg

SEQ ID NO: 361120 - DNA, 30 bp, Artificial Sequence
  Synthetic oligonucleotide
cgggcaatccgagagttcatcaagtctcgg

SEQ ID NO: 361121 - DNA, 30 bp, Artificial Sequence
  Synthetic oligonucleotide
ggtatagcccgtgaggtttgtaggtctcgg

SEQ ID NO: 361122 - DNA, 30 bp, Artificial Sequence
  Synthetic oligonucleotide
gataggttctctaaggcatccgaaagtcgg

SEQ ID NO: 361123 - DNA, 30 bp, Artificial Sequence
  Synthetic oligonucleotide
cagacagtcagtcgaccgtcttgaagtcgg

SEQ ID NO: 361124 - DNA, 30 bp, Artificial Sequence
  Synthetic oligonucleotide
tgtttcatgagaattgcataccttagtcgg

SEQ ID NO: 361125 - DNA, 30 bp, Artificial Sequence
  Synthetic oligonucleotide
tttcgacgtggtgggtcccggtcacgtcgg

SEQ ID NO: 361126 - DNA, 30 bp, Artificial Sequence
  Synthetic oligonucleotide
agtgtaaggacgctttagacacgacgtcgg

SEQ ID NO: 361127 - DNA, 30 bp, Artificial Sequence
  Synthetic oligonucleotide
ggttcttacgtcatcgagcgcgatcgtcgg

SEQ ID NO: 361128 - DNA, 30 bp, Artificial Sequence
  Synthetic oligonucleotide
cggtgcacttaagggcttagtcctcgtcgg

SEQ ID NO: 361129 - DNA, 30 bp, Artificial Sequence
  Synthetic oligonucleotide
catctggcaggcctcgccactcaaggtcgg

SEQ ID NO: 361130 - DNA, 30 bp, Artificial Sequence
  Synthetic oligonucleotide
tcgagacccttcttagatgggagaggtcgg

SEQ ID NO: 361131 - DNA, 30 bp, Artificial Sequence
  Synthetic oligonucleotide
tacttggcataaggcaacccagcgggtcgg

SEQ ID NO: 361132 - DNA, 30 bp, Artificial Sequence
  Synthetic oligonucleotide
gacggaggggggggcggcgcacatggtcgg

SEQ ID NO: 361133 - DNA, 30 bp, Artificial Sequence
  Synthetic oligonucleotide
ttttagaggaagattatcgagcttggtcgg

SEQ ID NO: 361134 - DNA, 30 bp, Artificial Sequence
  Synthetic oligonucleotide
tttgctagacgcatgggccctgtctgtcgg

SEQ ID NO: 361135 - DNA, 30 bp, Artificial Sequence
  Synthetic oligonucleotide
gacgagccacagagaacgctaaagtgtcgg

SEQ ID NO: 361136 - DNA, 30 bp, Artificial Sequence
  Synthetic oligonucleotide
gcgtatacccgatactatacgtcttgtcgg

SEQ ID NO: 361137 - DNA, 30 bp, Artificial Sequence
  Synthetic oligonucleotide
atagaggcccctcgctctatccgttgtcgg

SEQ ID NO: 361138 - DNA, 30 bp, Artificial Sequence
  Synthetic oligonucleotide
ctccggcctagcaaatccatgcgttgtcgg

SEQ ID NO: 361139 - DNA, 30 bp, Artificial Sequence
  Synthetic oligonucleotide
gtctggtcttaaatcaactgatgttgtcgg

SEQ ID NO: 361140 - DNA, 30 bp, Artificial Sequence
  Synthetic oligonucleotide
ctttagctcacccttgaaagttcaattcgg

SEQ ID NO: 361141 - DNA, 30 bp, Artificial Sequence
  Synthetic oligonucleotide
tcttgtgataaaggcgcggcgttcattcgg

SEQ ID NO: 361142 - DNA, 30 bp, Artificial Sequence
  Synthetic oligonucleotide
tagattaaagtcgcgcatcatttgattcgg

SEQ ID NO: 361143 - DNA, 30 bp, Artificial Sequence
  Synthetic oligonucleotide
cgtttatcagtacggcgttggcctattcgg

SEQ ID NO: 361144 - DNA, 30 bp, Artificial Sequence
  Synthetic oligonucleotide
cttagttccacactttgacagattattcgg

SEQ ID NO: 361145 - DNA, 30 bp, Artificial Sequence
  Synthetic oligonucleotide
ggtgttgtgttgcgctattgccttattcgg

SEQ ID NO: 361146 - DNA, 30 bp, Artificial Sequence
  Synthetic oligonucleotide
gaggaccccatctgcggcagttaacttcgg

SEQ ID NO: 361147 - DNA, 30 bp, Artificial Sequence
  Synthetic oligonucleotide
cgcctcgaggtgctcgtaaagaggcttcgg

SEQ ID NO: 361148 - DNA, 30 bp, Artificial Sequence
  Synthetic oligonucleotide
aggggacaacctagctgcgggtatcttcgg

SEQ ID NO: 361149 - DNA, 30 bp, Artificial Sequence
  Synthetic oligonucleotide
ggattaagagaaactccacctactcttcgg

SEQ ID NO: 361150 - DNA, 30 bp, Artificial Sequence
  Synthetic oligonucleotide
cttgacgaggcacaggacaggccagttcgg

SEQ ID NO: 361151 - DNA, 30 bp, Artificial Sequence
  Synthetic oligonucleotide
gatgggtagtggtgacgtaggaacgttcgg

SEQ ID NO: 361152 - DNA, 30 bp, Artificial Sequence
  Synthetic oligonucleotide
tagagtccacgaccaaggtcgccggttcgg

SEQ ID NO: 361153 - DNA, 30 bp, Artificial Sequence
  Synthetic oligonucleotide
ccagaaccccacaaagacctagctgttcgg

SEQ ID NO: 361154 - DNA, 30 bp, Artificial Sequence
  Synthetic oligonucleotide
agcgcgtgtgctcgctaaggccgtgttcgg

SEQ ID NO: 361155 - DNA, 30 bp, Artificial Sequence
  Synthetic oligonucleotide
acacctgtggtagatcaaacccaatttcgg

SEQ ID NO: 361156 - DNA, 30 bp, Artificial Sequence
  Synthetic oligonucleotide
aatctcgggggtcgggacttgatatttcgg

SEQ ID NO: 361157 - DNA, 30 bp, Artificial Sequence
  Synthetic oligonucleotide
aagagtgtcagccactctatcccctttcgg

SEQ ID NO: 361158 - DNA, 30 bp, Artificial Sequence
  Synthetic oligonucleotide
gaagttacgtgggagggaagtaggtttcgg

SEQ ID NO: 361159 - DNA, 30 bp, Artificial Sequence
  Synthetic oligonucleotide
tacaaacgtcgttgccaataaatttttcgg

SEQ ID NO: 361160 - DNA, 30 bp, Artificial Sequence
  Synthetic oligonucleotide
ttttcagaaggtaaccaggagaaaaaaggg

SEQ ID NO: 361161 - DNA, 30 bp, Artificial Sequence
  Synthetic oligonucleotide
tattagaagtcggcgcgtttgagaaaaggg

SEQ ID NO: 361162 - DNA, 30 bp, Artificial Sequence
  Synthetic oligonucleotide
accaacgttattgagtaaatttccaaaggg

SEQ ID NO: 361163 - DNA, 30 bp, Artificial Sequence
  Synthetic oligonucleotide
gtcggtagtaaaggccagactgagaaaggg

SEQ ID NO: 361164 - DNA, 30 bp, Artificial Sequence
  Synthetic oligonucleotide
ataactatagtagggctcctcgcgaaaggg

SEQ ID NO: 361165 - DNA, 30 bp, Artificial Sequence
  Synthetic oligonucleotide
gcactaggagttagttgttaaactaaaggg

SEQ ID NO: 361166 - DNA, 30 bp, Artificial Sequence
  Synthetic oligonucleotide
tgtcgacgttgcctcaccaccattaaaggg

SEQ ID NO: 361167 - DNA, 30 bp, Artificial Sequence
  Synthetic oligonucleotide
gcaggcactgagtgcgttagtagccaaggg

SEQ ID NO: 361168 - DNA, 30 bp, Artificial Sequence
  Synthetic oligonucleotide
cgcacatttgtatgaattggacgccaaggg

SEQ ID NO: 361169 - DNA, 30 bp, Artificial Sequence
  Synthetic oligonucleotide
tgaagttcacctctaacaaatgtgcaaggg

SEQ ID NO: 361170 - DNA, 30 bp, Artificial Sequence
  Synthetic oligonucleotide
ttaatttggagtacgtcatctggtcaaggg

SEQ ID NO: 361171 - DNA, 30 bp, Artificial Sequence
  Synthetic oligonucleotide
ctgagtatttgaattttaaatattcaaggg

SEQ ID NO: 361172 - DNA, 30 bp, Artificial Sequence
  Synthetic oligonucleotide
ctgaaggatttacgcacccgctcagaaggg

SEQ ID NO: 361173 - DNA, 30 bp, Artificial Sequence
  Synthetic oligonucleotide
gatgtacgattgcaaccatctatcgaaggg

SEQ ID NO: 361174 - DNA, 30 bp, Artificial Sequence
  Synthetic oligonucleotide
ggggcgggtatactacctaccccggaaggg

SEQ ID NO: 361175 - DNA, 30 bp, Artificial Sequence
  Synthetic oligonucleotide
atcggttacctattgaattcaggtgaaggg

SEQ ID NO: 361176 - DNA, 30 bp, Artificial Sequence
  Synthetic oligonucleotide
tgtcttaactgcgagtctcccgcataaggg

SEQ ID NO: 361177 - DNA, 30 bp, Artificial Sequence
  Synthetic oligonucleotide
gggtgttgactcagaatgcttgtctaaggg

SEQ ID NO: 361178 - DNA, 30 bp, Artificial Sequence
  Synthetic oligonucleotide
gcagccacctagttacaacttgcgtaaggg

SEQ ID NO: 361179 - DNA, 30 bp, Artificial Sequence
  Synthetic oligonucleotide
tgcacagggtagttctggactaggtaaggg

SEQ ID NO: 361180 - DNA, 30 bp, Artificial Sequence
  Synthetic oligonucleotide
aaagttgagccatacttttatcggtaaggg

SEQ ID NO: 361181 - DNA, 30 bp, Artificial Sequence
  Synthetic oligonucleotide
ggcgtactcgcacggggagccgggtaaggg

SEQ ID NO: 361182 - DNA, 30 bp, Artificial Sequence
  Synthetic oligonucleotide
tttattgaagtttgcttcttaataacaggg

SEQ ID NO: 361183 - DNA, 30 bp, Artificial Sequence
  Synthetic oligonucleotide
tttactagttaagcggacagcacgacaggg

SEQ ID NO: 361184 - DNA, 30 bp, Artificial Sequence
  Synthetic oligonucleotide
gaatatactggacaagaagtcgggacaggg

SEQ ID NO: 361185 - DNA, 30 bp, Artificial Sequence
  Synthetic oligonucleotide
tttgtccgcgtcgtcttatcgtcaccaggg

SEQ ID NO: 361186 - DNA, 30 bp, Artificial Sequence
  Synthetic oligonucleotide
gcctttgagcagtccagcttgtgaccaggg

SEQ ID NO: 361187 - DNA, 30 bp, Artificial Sequence
  Synthetic oligonucleotide
tagtgcggactggtgcatgcctagccaggg

SEQ ID NO: 361188 - DNA, 30 bp, Artificial Sequence
  Synthetic oligonucleotide
aagtcgaggcgataacctggggggccaggg

SEQ ID NO: 361189 - DNA, 30 bp, Artificial Sequence
  Synthetic oligonucleotide
cgtaaatctacaatggcgaccatgccaggg

SEQ ID NO: 361190 - DNA, 30 bp, Artificial Sequence
  Synthetic oligonucleotide
taaggcccggccatggcgtttagtccaggg

SEQ ID NO: 361191 - DNA, 30 bp, Artificial Sequence
  Synthetic oligonucleotide
ctccgcacggactgagtgtcttcagcaggg

SEQ ID NO: 361192 - DNA, 30 bp, Artificial Sequence
  Synthetic oligonucleotide
cgtctaacgggtggttgggggcacgcaggg

SEQ ID NO: 361193 - DNA, 30 bp, Artificial Sequence
  Synthetic oligonucleotide
catctctattctaaacttttcgaggcaggg

SEQ ID NO: 361194 - DNA, 30 bp, Artificial Sequence
  Synthetic oligonucleotide
gtcgcgacccgagcgggaagggcggcaggg

SEQ ID NO: 361195 - DNA, 30 bp, Artificial Sequence
  Synthetic oligonucleotide
tttggcgtagtcttcctacgcttatcaggg

SEQ ID NO: 361196 - DNA, 30 bp, Artificial Sequence
  Synthetic oligonucleotide
gctgacaggccaggctattatcactcaggg

SEQ ID NO: 361197 - DNA, 30 bp, Artificial Sequence
  Synthetic oligonucleotide
gcaaaaatgaaccggtgctgcttctcaggg

SEQ ID NO: 361198 - DNA, 30 bp, Artificial Sequence
  Synthetic oligonucleotide
agtttgtccgactcggtatttagttcaggg

SEQ ID NO: 361199 - DNA, 30 bp, Artificial Sequence
  Synthetic oligonucleotide
attggaaactaccccaagctcattagaggg

SEQ ID NO: 361200 - DNA, 30 bp, Artificial Sequence
  Synthetic oligonucleotide
cgcatgtggccagtatcgcattgacgaggg

SEQ ID NO: 361201 - DNA, 30 bp, Artificial Sequence
  Synthetic oligonucleotide
tgcgtcgtttgtgtccccctacaccgaggg

SEQ ID NO: 361202 - DNA, 30 bp, Artificial Sequence
  Synthetic oligonucleotide
gtaaggatgttggtgtttaggccccgaggg

SEQ ID NO: 361203 - DNA, 30 bp, Artificial Sequence
  Synthetic oligonucleotide
gaatcaagatacgtccgcctagtgcgaggg

SEQ ID NO: 361204 - DNA, 30 bp, Artificial Sequence
  Synthetic oligonucleotide
aaatagcatccgaataaatacctcggaggg

SEQ ID NO: 361205 - DNA, 30 bp, Artificial Sequence
  Synthetic oligonucleotide
gtgtagaaatctcgcggttgttggggaggg

SEQ ID NO: 361206 - DNA, 30 bp, Artificial Sequence
  Synthetic oligonucleotide
cttaggcgtcctccggcagctgatggaggg

SEQ ID NO: 361207 - DNA, 30 bp, Artificial Sequence
  Synthetic oligonucleotide
cggagtcaatggtgaaggaccggtggaggg

SEQ ID NO: 361208 - DNA, 30 bp, Artificial Sequence
  Synthetic oligonucleotide
atggcttggccctggattttacactgaggg

SEQ ID NO: 361209 - DNA, 30 bp, Artificial Sequence
  Synthetic oligonucleotide
gttatcaactatcacggtgcaacctgaggg

SEQ ID NO: 361210 - DNA, 30 bp, Artificial Sequence
  Synthetic oligonucleotide
aaaagtttaagagctgcaatatcctgaggg

SEQ ID NO: 361211 - DNA, 30 bp, Artificial Sequence
  Synthetic oligonucleotide
atcccagaatggcctgggtggggctgaggg

SEQ ID NO: 361212 - DNA, 30 bp, Artificial Sequence
  Synthetic oligonucleotide
acccgggctcctccaaccgctacgtgaggg

SEQ ID NO: 361213 - DNA, 31 bp, Artificial Sequence
  Synthetic oligonucleotide
aagtgaatcgtaaaattataggttttgaggg

SEQ ID NO: 361214 - DNA, 30 bp, Artificial Sequence
  Synthetic oligonucleotide
ggtattacttgggggcgtgcaagcataggg

SEQ ID NO: 361215 - DNA, 30 bp, Artificial Sequence
  Synthetic oligonucleotide
gaaaaatctctgaactaaacagagataggg

SEQ ID NO: 361216 - DNA, 30 bp, Artificial Sequence
  Synthetic oligonucleotide
acggggtgatgatgggaaccctcgataggg

SEQ ID NO: 361217 - DNA, 30 bp, Artificial Sequence
  Synthetic oligonucleotide
gcacgcatacaatattaacgagatataggg

SEQ ID NO: 361218 - DNA, 30 bp, Artificial Sequence
  Synthetic oligonucleotide
ggacccgtaatttagctagaaattataggg

SEQ ID NO: 361219 - DNA, 30 bp, Artificial Sequence
  Synthetic oligonucleotide
tcatgttggacgtcatcccgggacctaggg

SEQ ID NO: 361220 - DNA, 30 bp, Artificial Sequence
  Synthetic oligonucleotide
aacgaactaatgtccggaagtatcctaggg

SEQ ID NO: 361221 - DNA, 30 bp, Artificial Sequence
  Synthetic oligonucleotide
attcatcgaggtttgaagatttgtctaggg

SEQ ID NO: 361222 - DNA, 30 bp, Artificial Sequence
  Synthetic oligonucleotide
tatcacaagttcttgcttttgcaagtaggg

SEQ ID NO: 361223 - DNA, 30 bp, Artificial Sequence
  Synthetic oligonucleotide
ctatataggttgattcgtgcggcagtaggg

SEQ ID NO: 361224 - DNA, 30 bp, Artificial Sequence
  Synthetic oligonucleotide
gaacctgaggggcgcgactgcggagtaggg

SEQ ID NO: 361225 - DNA, 30 bp, Artificial Sequence
  Synthetic oligonucleotide
tcaccgcttcattttaagtgtaacgtaggg

SEQ ID NO: 361226 - DNA, 30 bp, Artificial Sequence
  Synthetic oligonucleotide
caggatgaccaagctatacttgacgtaggg

SEQ ID NO: 361227 - DNA, 30 bp, Artificial Sequence
  Synthetic oligonucleotide
agccaaagcaatggcggggccggggtaggg

SEQ ID NO: 361228 - DNA, 30 bp, Artificial Sequence
  Synthetic oligonucleotide
cggcattggcccatgccatcgcgtgtaggg

SEQ ID NO: 361229 - DNA, 30 bp, Artificial Sequence
  Synthetic oligonucleotide
gtcgggaaacacaacacccccggtgtaggg

SEQ ID NO: 361230 - DNA, 30 bp, Artificial Sequence
  Synthetic oligonucleotide
ggcaagatgaatcatcctgcctgattaggg

SEQ ID NO: 361231 - DNA, 30 bp, Artificial Sequence
  Synthetic oligonucleotide
caagattattaatcctgactaccgttaggg

SEQ ID NO: 361232 - DNA, 30 bp, Artificial Sequence
  Synthetic oligonucleotide
ggcatcgcacaagacccggcagggttaggg

SEQ ID NO: 361233 - DNA, 30 bp, Artificial Sequence
  Synthetic oligonucleotide
ctccgttcctcgcccaggacggggttaggg

SEQ ID NO: 361234 - DNA, 30 bp, Artificial Sequence
  Synthetic oligonucleotide
tattatagctgaagtctggaacatttaggg

SEQ ID NO: 361235 - DNA, 30 bp, Artificial Sequence
  Synthetic oligonucleotide
gccgtgatgtgaaggacatcatcaaacggg

SEQ ID NO: 361236 - DNA, 30 bp, Artificial Sequence
  Synthetic oligonucleotide
tttgggtaagtgggtacaatttcaaacggg

SEQ ID NO: 361237 - DNA, 30 bp, Artificial Sequence
  Synthetic oligonucleotide
cgggaaggcccgatgaggggaagacacggg

SEQ ID NO: 361238 - DNA, 30 bp, Artificial Sequence
  Synthetic oligonucleotide
ccattcacggttcgtcgtgtaccccacggg

SEQ ID NO: 361239 - DNA, 30 bp, Artificial Sequence
  Synthetic oligonucleotide
cccgcgtcgaaattattagagcgccacggg

SEQ ID NO: 361240 - DNA, 30 bp, Artificial Sequence
  Synthetic oligonucleotide
agctcgctggtccacctctaagggcacggg

SEQ ID NO: 361241 - DNA, 30 bp, Artificial Sequence
  Synthetic oligonucleotide
gggtcccgccttttcaatagttatcacggg

SEQ ID NO: 361242 - DNA, 30 bp, Artificial Sequence
  Synthetic oligonucleotide
gcgtggctcctgacggtgtcacgtcacggg

SEQ ID NO: 361243 - DNA, 30 bp, Artificial Sequence
  Synthetic oligonucleotide
ccaaacgggcttatcttttcatttcacggg

SEQ ID NO: 361244 - DNA, 30 bp, Artificial Sequence
  Synthetic oligonucleotide
gtaaatacacgacggcaattgttagacggg

SEQ ID NO: 361245 - DNA, 30 bp, Artificial Sequence
  Synthetic oligonucleotide
cccgagatggtgtattggggatacgacggg

SEQ ID NO: 361246 - DNA, 30 bp, Artificial Sequence
  Synthetic oligonucleotide
attggcctaggcggctaagggagcgacggg

SEQ ID NO: 361247 - DNA, 30 bp, Artificial Sequence
  Synthetic oligonucleotide
tttgcctatggcggacctaagtgtgacggg

SEQ ID NO: 361248 - DNA, 30 bp, Artificial Sequence
  Synthetic oligonucleotide
tggtcctacttttttgaggcataatacggg

SEQ ID NO: 361249 - DNA, 30 bp, Artificial Sequence
  Synthetic oligonucleotide
tgtactcagctcaattagctgtaatacggg

SEQ ID NO: 361250 - DNA, 30 bp, Artificial Sequence
  Synthetic oligonucleotide
atactagagagaccgctttgcgcctacggg

SEQ ID NO: 361251 - DNA, 30 bp, Artificial Sequence
  Synthetic oligonucleotide
ctcggcctccagtataaagttctgtacggg

SEQ ID NO: 361252 - DNA, 30 bp, Artificial Sequence
  Synthetic oligonucleotide
tctacgagctgaaatatcccgtaaaccggg

SEQ ID NO: 361253 - DNA, 30 bp, Artificial Sequence
  Synthetic oligonucleotide
ggtgaaatatccccgcgggtttcaaccggg

SEQ ID NO: 361254 - DNA, 30 bp, Artificial Sequence
  Synthetic oligonucleotide
tgctggttttaaataaaccaaggaaccggg

SEQ ID NO: 361255 - DNA, 30 bp, Artificial Sequence
  Synthetic oligonucleotide
ggggactgcgtaacggttatctccaccggg

SEQ ID NO: 361256 - DNA, 30 bp, Artificial Sequence
  Synthetic oligonucleotide
atactctttggacattacgccccgaccggg

SEQ ID NO: 361257 - DNA, 30 bp, Artificial Sequence
  Synthetic oligonucleotide
tgatttagtgttttagctcgtgataccggg

SEQ ID NO: 361258 - DNA, 30 bp, Artificial Sequence
  Synthetic oligonucleotide
cgtatttcagccgccgtggctaaacccggg

SEQ ID NO: 361259 - DNA, 30 bp, Artificial Sequence
  Synthetic oligonucleotide
aaaggctgtcagaattgaagcctacccggg

SEQ ID NO: 361260 - DNA, 30 bp, Artificial Sequence
  Synthetic oligonucleotide
aacgcttcaaagtttggagacggccccggg

SEQ ID NO: 361261 - DNA, 30 bp, Artificial Sequence
  Synthetic oligonucleotide
cccaagaacgatcgtattggcaagcccggg

SEQ ID NO: 361262 - DNA, 30 bp, Artificial Sequence
  Synthetic oligonucleotide
aaacacaattaagttgtcgaaggtcccggg

SEQ ID NO: 361263 - DNA, 30 bp, Artificial Sequence
  Synthetic oligonucleotide
gagtggagagaaacatgtgggtaggccggg

SEQ ID NO: 361264 - DNA, 30 bp, Artificial Sequence
  Synthetic oligonucleotide
gccggtttgttcataccctccaaatccggg

SEQ ID NO: 361265 - DNA, 30 bp, Artificial Sequence
  Synthetic oligonucleotide
caaaaggtcgcctttgtagtcgtgtccggg

SEQ ID NO: 361266 - DNA, 30 bp, Artificial Sequence
  Synthetic oligonucleotide
gactttgcattaaattcatcggcttccggg

SEQ ID NO: 361267 - DNA, 30 bp, Artificial Sequence
  Synthetic oligonucleotide
accggacgtttagtctatggtataagcggg

SEQ ID NO: 361268 - DNA, 30 bp, Artificial Sequence
  Synthetic oligonucleotide
ttactacaaatagggccgaagaccagcggg

SEQ ID NO: 361269 - DNA, 30 bp, Artificial Sequence
  Synthetic oligonucleotide
agtttgtttaaaccattgacacctagcggg

SEQ ID NO: 361270 - DNA, 30 bp, Artificial Sequence
  Synthetic oligonucleotide
cgtgcctgcgggtcatggggtccacgcggg

SEQ ID NO: 361271 - DNA, 30 bp, Artificial Sequence
  Synthetic oligonucleotide
ggacttccgggctaatctagtaatcgcggg

SEQ ID NO: 361272 - DNA, 30 bp, Artificial Sequence
  Synthetic oligonucleotide
atcatattaagagcctcatttaatcgcggg

SEQ ID NO: 361273 - DNA, 30 bp, Artificial Sequence
  Synthetic oligonucleotide
ggcctgctggttaatagattacatcgcggg

SEQ ID NO: 361274 - DNA, 30 bp, Artificial Sequence
  Synthetic oligonucleotide
gactagataacgcttctttaaactcgcggg

SEQ ID NO: 361275 - DNA, 30 bp, Artificial Sequence
  Synthetic oligonucleotide
ttccttcaagaagcggtcaagagtcgcggg

SEQ ID NO: 361276 - DNA, 30 bp, Artificial Sequence
  Synthetic oligonucleotide
gctctgttgtgccggtgagcgagtcgcggg

SEQ ID NO: 361277 - DNA, 30 bp, Artificial Sequence
  Synthetic oligonucleotide
ctttacaagccccttctgtctaccggcggg

SEQ ID NO: 361278 - DNA, 30 bp, Artificial Sequence
  Synthetic oligonucleotide
agtagtcgggcggatggtgctcatggcggg

SEQ ID NO: 361279 - DNA, 30 bp, Artificial Sequence
  Synthetic oligonucleotide
aaaaccaattgggttttcacccctggcggg

SEQ ID NO: 361280 - DNA, 30 bp, Artificial Sequence
  Synthetic oligonucleotide
ccagtcggcccagacaaccgtgctggcggg

SEQ ID NO: 361281 - DNA, 30 bp, Artificial Sequence
  Synthetic oligonucleotide
ttgcgctaggcagtaagcgtacttggcggg

SEQ ID NO: 361282 - DNA, 30 bp, Artificial Sequence
  Synthetic oligonucleotide
gacggaaaggcctgtgctcccccgtgcggg

SEQ ID NO: 361283 - DNA, 30 bp, Artificial Sequence
  Synthetic oligonucleotide
cttgtgcctccgctactggctctgtgcggg

SEQ ID NO: 361284 - DNA, 30 bp, Artificial Sequence
  Synthetic oligonucleotide
tggatttcttccggtccttgagcttgcggg

SEQ ID NO: 361285 - DNA, 30 bp, Artificial Sequence
  Synthetic oligonucleotide
caaccggccgtttaagtgaagatttgcggg

SEQ ID NO: 361286 - DNA, 30 bp, Artificial Sequence
  Synthetic oligonucleotide
tgaatgtcatggcatcgcacactttgcggg

SEQ ID NO: 361287 - DNA, 30 bp, Artificial Sequence
  Synthetic oligonucleotide
ctactgtctagacatcctgtttcaatcggg

SEQ ID NO: 361288 - DNA, 30 bp, Artificial Sequence
  Synthetic oligonucleotide
gcttcttggacaaccttttcggttatcggg

SEQ ID NO: 361289 - DNA, 30 bp, Artificial Sequence
  Synthetic oligonucleotide
acccatagcgggccaattggtaaactcggg

SEQ ID NO: 361290 - DNA, 30 bp, Artificial Sequence
  Synthetic oligonucleotide
tttaagcgggttcttggatcttaactcggg

SEQ ID NO: 361291 - DNA, 30 bp, Artificial Sequence
  Synthetic oligonucleotide
actcagtcctcttgccgacgaagcctcggg

SEQ ID NO: 361292 - DNA, 30 bp, Artificial Sequence
  Synthetic oligonucleotide
ttctaagcgagtccgcagtcgatcctcggg

SEQ ID NO: 361293 - DNA, 30 bp, Artificial Sequence
  Synthetic oligonucleotide
atctgcacctcgaaagcacctcgtctcggg

SEQ ID NO: 361294 - DNA, 30 bp, Artificial Sequence
  Synthetic oligonucleotide
aaccagggttatcaaatttgtcaagtcggg

SEQ ID NO: 361295 - DNA, 30 bp, Artificial Sequence
  Synthetic oligonucleotide
ataatgcacctgcttgcatcaaaggtcggg

SEQ ID NO: 361296 - DNA, 30 bp, Artificial Sequence
  Synthetic oligonucleotide
gacgcactcgtacaggggtacagggtcggg

SEQ ID NO: 361297 - DNA, 30 bp, Artificial Sequence
  Synthetic oligonucleotide
ttggaaagtttctacgtactttggttcggg

SEQ ID NO: 361298 - DNA, 30 bp, Artificial Sequence
  Synthetic oligonucleotide
catatatcgctctgcagaagatatttcggg

SEQ ID NO: 361299 - DNA, 30 bp, Artificial Sequence
  Synthetic oligonucleotide
tacgggtatcatataacaggttatttcggg

SEQ ID NO: 361300 - DNA, 30 bp, Artificial Sequence
  Synthetic oligonucleotide
aagaggagttgccggcagaattctttcggg

SEQ ID NO: 361301 - DNA, 30 bp, Artificial Sequence
  Synthetic oligonucleotide
actatcctagggagacggcccagcaagggg

SEQ ID NO: 361302 - DNA, 30 bp, Artificial Sequence
  Synthetic oligonucleotide
tatatcaggagccttcgagcattcaagggg

SEQ ID NO: 361303 - DNA, 30 bp, Artificial Sequence
  Synthetic oligonucleotide
accatgataagggggtacccagggaagggg

SEQ ID NO: 361304 - DNA, 30 bp, Artificial Sequence
  Synthetic oligonucleotide
aaattctgcaggacgggtgcagataagggg

SEQ ID NO: 361305 - DNA, 30 bp, Artificial Sequence
  Synthetic oligonucleotide
cctactcggtgtatgagtggccgacagggg

SEQ ID NO: 361306 - DNA, 30 bp, Artificial Sequence
  Synthetic oligonucleotide
tgggagggtgccagcagcttatctcagggg

SEQ ID NO: 361307 - DNA, 30 bp, Artificial Sequence
  Synthetic oligonucleotide
tataacacatcttcttaggtttccgagggg

SEQ ID NO: 361308 - DNA, 30 bp, Artificial Sequence
  Synthetic oligonucleotide
cgatgctgcgttgaggttcctccggagggg

SEQ ID NO: 361309 - DNA, 30 bp, Artificial Sequence
  Synthetic oligonucleotide
tagttatgatgtggtgatatacgggagggg

SEQ ID NO: 361310 - DNA, 30 bp, Artificial Sequence
  Synthetic oligonucleotide
gctagcgctgggagcggggtgggggagggg

SEQ ID NO: 361311 - DNA, 30 bp, Artificial Sequence
  Synthetic oligonucleotide
taagggcacggggccatggtatgggagggg

SEQ ID NO: 361312 - DNA, 30 bp, Artificial Sequence
  Synthetic oligonucleotide
ggggaactcggcatcattgaggtggagggg

SEQ ID NO: 361313 - DNA, 30 bp, Artificial Sequence
  Synthetic oligonucleotide
agtgtttaggccagcgctggtgatgagggg

SEQ ID NO: 361314 - DNA, 30 bp, Artificial Sequence
  Synthetic oligonucleotide
tccagggattagatgggatagcttgagggg

SEQ ID NO: 361315 - DNA, 30 bp, Artificial Sequence
  Synthetic oligonucleotide
agtatattataaacataaagcaaatagggg

SEQ ID NO: 361316 - DNA, 30 bp, Artificial Sequence
  Synthetic oligonucleotide
ggtgttatatttgtgaatcgaagctagggg

SEQ ID NO: 361317 - DNA, 30 bp, Artificial Sequence
  Synthetic oligonucleotide
gtaaccttagcttgccaaaggaattagggg

SEQ ID NO: 361318 - DNA, 30 bp, Artificial Sequence
  Synthetic oligonucleotide
gagtcttctacgacagggtacctttagggg

SEQ ID NO: 361319 - DNA, 30 bp, Artificial Sequence
  Synthetic oligonucleotide
tgacctattttagggtcgctcataacgggg

SEQ ID NO: 361320 - DNA, 30 bp, Artificial Sequence
  Synthetic oligonucleotide
gtgggcggtattgacttataatacacgggg

SEQ ID NO: 361321 - DNA, 30 bp, Artificial Sequence
  Synthetic oligonucleotide
tggaccgtcaagggagacacgtgcacgggg

SEQ ID NO: 361322 - DNA, 30 bp, Artificial Sequence
  Synthetic oligonucleotide
cggcgttcaaaggttggaggccggacgggg

SEQ ID NO: 361323 - DNA, 30 bp, Artificial Sequence
  Synthetic oligonucleotide
ggcggacaatagagttgtcgatggacgggg

SEQ ID NO: 361324 - DNA, 30 bp, Artificial Sequence
  Synthetic oligonucleotide
agtttctacccaccgggggaagatacgggg

SEQ ID NO: 361325 - DNA, 30 bp, Artificial Sequence
  Synthetic oligonucleotide
acataattggcaagcgacttatctacgggg

SEQ ID NO: 361326 - DNA, 30 bp, Artificial Sequence
  Synthetic oligonucleotide
ggctgtagcagtcgaatagagcttacgggg

SEQ ID NO: 361327 - DNA, 30 bp, Artificial Sequence
  Synthetic oligonucleotide
tcggtctccaggaatgtacgaacaccgggg

SEQ ID NO: 361328 - DNA, 30 bp, Artificial Sequence
  Synthetic oligonucleotide
cgggcgcgacccaaagggaaggccccgggg

SEQ ID NO: 361329 - DNA, 30 bp, Artificial Sequence
  Synthetic oligonucleotide
gttaggacacagatcgaactacgtccgggg

SEQ ID NO: 361330 - DNA, 31 bp, Artificial Sequence
  Synthetic oligonucleotide
ccggacacttcggtgcacgagaattccgggg

SEQ ID NO: 361331 - DNA, 30 bp, Artificial Sequence
  Synthetic oligonucleotide
cacgggggttaaataataacgtccgcgggg

SEQ ID NO: 361332 - DNA, 30 bp, Artificial Sequence
  Synthetic oligonucleotide
agtgatgaagtccgctacctaccggcgggg

SEQ ID NO: 361333 - DNA, 30 bp, Artificial Sequence
  Synthetic oligonucleotide
gccataccacgaccaggggtaggggcgggg

SEQ ID NO: 361334 - DNA, 30 bp, Artificial Sequence
  Synthetic oligonucleotide
ggtcacatagttattagatccctggcgggg

SEQ ID NO: 361335 - DNA, 30 bp, Artificial Sequence
  Synthetic oligonucleotide
ctgtacccacacgcatcaaaacgtgcgggg

SEQ ID NO: 361336 - DNA, 30 bp, Artificial Sequence
  Synthetic oligonucleotide
gcttgcatttgttagtttgtcgttgcgggg

SEQ ID NO: 361337 - DNA, 30 bp, Artificial Sequence
  Synthetic oligonucleotide
gagataaggcgctagctcttgtaatcgggg

SEQ ID NO: 361338 - DNA, 30 bp, Artificial Sequence
  Synthetic oligonucleotide
agcgggacagaaacagggacagagtcgggg

SEQ ID NO: 361339 - DNA, 30 bp, Artificial Sequence
  Synthetic oligonucleotide
cgattctaatgtccgagtaactattcgggg

SEQ ID NO: 361340 - DNA, 30 bp, Artificial Sequence
  Synthetic oligonucleotide
gttcagagaggcataggcgcgcgttcgggg

SEQ ID NO: 361341 - DNA, 30 bp, Artificial Sequence
  Synthetic oligonucleotide
cttaaggaaacggctctgctcctttcgggg

SEQ ID NO: 361342 - DNA, 30 bp, Artificial Sequence
  Synthetic oligonucleotide
ctatcaacatagaggggcctgtgaaggggg

SEQ ID NO: 361343 - DNA, 30 bp, Artificial Sequence
  Synthetic oligonucleotide
ggggccggagttagcgaatcctagaggggg

SEQ ID NO: 361344 - DNA, 30 bp, Artificial Sequence
  Synthetic oligonucleotide
caccggcccgatccctagcggagtaggggg

SEQ ID NO: 361345 - DNA, 30 bp, Artificial Sequence
  Synthetic oligonucleotide
atgagcaattggtccctcactcaacggggg

SEQ ID NO: 361346 - DNA, 30 bp, Artificial Sequence
  Synthetic oligonucleotide
gactgcgtgattttacgtcaccgccggggg

SEQ ID NO: 361347 - DNA, 30 bp, Artificial Sequence
  Synthetic oligonucleotide
atttgcctgataaggttctgggagcggggg

SEQ ID NO: 361348 - DNA, 30 bp, Artificial Sequence
  Synthetic oligonucleotide
catactaataacggatcggcacggcggggg

SEQ ID NO: 361349 - DNA, 30 bp, Artificial Sequence
  Synthetic oligonucleotide
attctctggtgtgtaacgcaagggcggggg

SEQ ID NO: 361350 - DNA, 30 bp, Artificial Sequence
  Synthetic oligonucleotide
gagggacaatatctaactgtgctgcggggg

SEQ ID NO: 361351 - DNA, 30 bp, Artificial Sequence
  Synthetic oligonucleotide
ctcccgccatcggctgacatcgtgcggggg

SEQ ID NO: 361352 - DNA, 30 bp, Artificial Sequence
  Synthetic oligonucleotide
tgggaaccggcccaaccctaagcagggggg

SEQ ID NO: 361353 - DNA, 30 bp, Artificial Sequence
  Synthetic oligonucleotide
acggtcgctccaaagcggtggggagggggg

SEQ ID NO: 361354 - DNA, 30 bp, Artificial Sequence
  Synthetic oligonucleotide
ggagtgcacaagtccggaccaggggggggg

SEQ ID NO: 361355 - DNA, 30 bp, Artificial Sequence
  Synthetic oligonucleotide
tggcagtggtagccgctaacagtggggggg

SEQ ID NO: 361356 - DNA, 30 bp, Artificial Sequence
  Synthetic oligonucleotide
ggggggaggtccctgtcaacgggtgggggg

SEQ ID NO: 361357 - DNA, 30 bp, Artificial Sequence
  Synthetic oligonucleotide
gaccaacataagattaacgagcagtggggg

SEQ ID NO: 361358 - DNA, 30 bp, Artificial Sequence
  Synthetic oligonucleotide
actgtgcaagattgtcgcaacagttggggg

SEQ ID NO: 361359 - DNA, 30 bp, Artificial Sequence
  Synthetic oligonucleotide
tgaacttcggtgatttaggaattttggggg

SEQ ID NO: 361360 - DNA, 30 bp, Artificial Sequence
  Synthetic oligonucleotide
tattgggaacgtgcccctcttttttggggg

SEQ ID NO: 361361 - DNA, 30 bp, Artificial Sequence
  Synthetic oligonucleotide
ttctatgcacagtagattgaccgaatgggg

SEQ ID NO: 361362 - DNA, 30 bp, Artificial Sequence
  Synthetic oligonucleotide
ccgcctatccatgcagccaagggcatgggg

SEQ ID NO: 361363 - DNA, 30 bp, Artificial Sequence
  Synthetic oligonucleotide
attcatctgaatcggagattgtgactgggg

SEQ ID NO: 361364 - DNA, 30 bp, Artificial Sequence
  Synthetic oligonucleotide
gaattaagagtgtctaatgacttcctgggg

SEQ ID NO: 361365 - DNA, 29 bp, Artificial Sequence
  Synthetic oligonucleotide
tatttgatacacaatatacgatgctgggg

SEQ ID NO: 361366 - DNA, 30 bp, Artificial Sequence
  Synthetic oligonucleotide
ctcgttctgtcgcaatttgttgatctgggg

SEQ ID NO: 361367 - DNA, 30 bp, Artificial Sequence
  Synthetic oligonucleotide
agcattttctgtgaggtctaatctctgggg

SEQ ID NO: 361368 - DNA, 30 bp, Artificial Sequence
  Synthetic oligonucleotide
attggtaaggtagcgtaaccggcagtgggg

SEQ ID NO: 361369 - DNA, 30 bp, Artificial Sequence
  Synthetic oligonucleotide
cgtactataacgtcaggagcccaggtgggg

SEQ ID NO: 361370 - DNA, 30 bp, Artificial Sequence
  Synthetic oligonucleotide
cttgggctctcacacgatctctcggtgggg

SEQ ID NO: 361371 - DNA, 30 bp, Artificial Sequence
  Synthetic oligonucleotide
cttacagtgggtaggtgccacctggtgggg

SEQ ID NO: 361372 - DNA, 30 bp, Artificial Sequence
  Synthetic oligonucleotide
ttaacatttatagtttggaaggatgtgggg

SEQ ID NO: 361373 - DNA, 30 bp, Artificial Sequence
  Synthetic oligonucleotide
gcatcgcacttatgttactcccgtgtgggg

SEQ ID NO: 361374 - DNA, 30 bp, Artificial Sequence
  Synthetic oligonucleotide
actcagtccgggggttcgaattgattgggg

SEQ ID NO: 361375 - DNA, 30 bp, Artificial Sequence
  Synthetic oligonucleotide
ctcttgcgacacttagggagcaggttgggg

SEQ ID NO: 361376 - DNA, 30 bp, Artificial Sequence
  Synthetic oligonucleotide
ggtttaaactggtcacaacactatttgggg

SEQ ID NO: 361377 - DNA, 30 bp, Artificial Sequence
  Synthetic oligonucleotide
ctcgctccgtggaactacgcatgaaatggg

SEQ ID NO: 361378 - DNA, 30 bp, Artificial Sequence
  Synthetic oligonucleotide
attaaaattggactgggtcgtacgaatggg

SEQ ID NO: 361379 - DNA, 30 bp, Artificial Sequence
  Synthetic oligonucleotide
tcagagtggggcgtcctactcaggaatggg

SEQ ID NO: 361380 - DNA, 30 bp, Artificial Sequence
  Synthetic oligonucleotide
cggctgtggctgtgggtcaggtggaatggg

SEQ ID NO: 361381 - DNA, 30 bp, Artificial Sequence
  Synthetic oligonucleotide
gattctccgttggcgacaaggcctaatggg

SEQ ID NO: 361382 - DNA, 30 bp, Artificial Sequence
  Synthetic oligonucleotide
aatggtccgaattttgagggtacacatggg

SEQ ID NO: 361383 - DNA, 30 bp, Artificial Sequence
  Synthetic oligonucleotide
acgtagtccaattggctaagttaccatggg

SEQ ID NO: 361384 - DNA, 30 bp, Artificial Sequence
  Synthetic oligonucleotide
ctgggatagcggcagtcctggtgccatggg

SEQ ID NO: 361385 - DNA, 30 bp, Artificial Sequence
  Synthetic oligonucleotide
tgtggcgaaccacgttataattttcatggg

SEQ ID NO: 361386 - DNA, 30 bp, Artificial Sequence
  Synthetic oligonucleotide
ggtacagtcgactactaaaagttagatggg

SEQ ID NO: 361387 - DNA, 30 bp, Artificial Sequence
  Synthetic oligonucleotide
aacctgaatgtcctcgggtaaatcgatggg

SEQ ID NO: 361388 - DNA, 30 bp, Artificial Sequence
  Synthetic oligonucleotide
attgcaacaccaaggcttgaactcgatggg

SEQ ID NO: 361389 - DNA, 30 bp, Artificial Sequence
  Synthetic oligonucleotide
caacttacaggctgcaattcttaggatggg

SEQ ID NO: 361390 - DNA, 31 bp, Artificial Sequence
  Synthetic oligonucleotide
gggtacggccctgcgcaaccagggggatggg

SEQ ID NO: 361391 - DNA, 30 bp, Artificial Sequence
  Synthetic oligonucleotide
gtcgttattagcggctagataaaatatggg

SEQ ID NO: 361392 - DNA, 30 bp, Artificial Sequence
  Synthetic oligonucleotide
taaattacatcaacgctgtgttgatatggg

SEQ ID NO: 361393 - DNA, 30 bp, Artificial Sequence
  Synthetic oligonucleotide
attgctttgccctttagctcttgctatggg

SEQ ID NO: 361394 - DNA, 30 bp, Artificial Sequence
  Synthetic oligonucleotide
taagttaagcaatgcagcgttgcgtatggg

SEQ ID NO: 361395 - DNA, 30 bp, Artificial Sequence
  Synthetic oligonucleotide
acgtaggataattgtccgggtaattatggg

SEQ ID NO: 361396 - DNA, 30 bp, Artificial Sequence
  Synthetic oligonucleotide
tacgatagcttatcttgttatagttatggg

SEQ ID NO: 361397 - DNA, 30 bp, Artificial Sequence
  Synthetic oligonucleotide
gaatcactttgcgtaagtaagacaactggg

SEQ ID NO: 361398 - DNA, 30 bp, Artificial Sequence
  Synthetic oligonucleotide
ctacgcgaatcttctcggcgaggcactggg

SEQ ID NO: 361399 - DNA, 30 bp, Artificial Sequence
  Synthetic oligonucleotide
ggcaacccggtaagacctgggccgactggg

SEQ ID NO: 361400 - DNA, 30 bp, Artificial Sequence
  Synthetic oligonucleotide
cccaatgccacatgttgtagggggactggg

SEQ ID NO: 361401 - DNA, 30 bp, Artificial Sequence
  Synthetic oligonucleotide
ggaggtcggttattgagcaactatactggg

SEQ ID NO: 361402 - DNA, 30 bp, Artificial Sequence
  Synthetic oligonucleotide
acttcgatgtgggggcgtgtctaccctggg

SEQ ID NO: 361403 - DNA, 30 bp, Artificial Sequence
  Synthetic oligonucleotide
ccaatgccgatgcttgaaagcccgcctggg

SEQ ID NO: 361404 - DNA, 30 bp, Artificial Sequence
  Synthetic oligonucleotide
gtaatagatagtatggggtcttggcctggg

SEQ ID NO: 361405 - DNA, 30 bp, Artificial Sequence
  Synthetic oligonucleotide
taatgtaattaggccctgggtctgcctggg

SEQ ID NO: 361406 - DNA, 30 bp, Artificial Sequence
  Synthetic oligonucleotide
accttgttttgtgatgcttagaatcctggg

SEQ ID NO: 361407 - DNA, 30 bp, Artificial Sequence
  Synthetic oligonucleotide
cgtggaagaaaaagggtatccggcgctggg

SEQ ID NO: 361408 - DNA, 30 bp, Artificial Sequence
  Synthetic oligonucleotide
gtagtcaggggaattagctttgcatctggg

SEQ ID NO: 361409 - DNA, 30 bp, Artificial Sequence
  Synthetic oligonucleotide
tgcggaatgacgttaccctaattctctggg

SEQ ID NO: 361410 - DNA, 30 bp, Artificial Sequence
  Synthetic oligonucleotide
atgatcatcgttatataactccagtctggg

SEQ ID NO: 361411 - DNA, 30 bp, Artificial Sequence
  Synthetic oligonucleotide
cattgagcttctcaaaaaggggggtctggg

SEQ ID NO: 361412 - DNA, 30 bp, Artificial Sequence
  Synthetic oligonucleotide
ttgtcagggcaatagccaactctttctggg

SEQ ID NO: 361413 - DNA, 30 bp, Artificial Sequence
  Synthetic oligonucleotide
gatggcaggtggcagtgactggcaagtggg

SEQ ID NO: 361414 - DNA, 30 bp, Artificial Sequence
  Synthetic oligonucleotide
tacgccataaaatagatgctattcagtggg

SEQ ID NO: 361415 - DNA, 30 bp, Artificial Sequence
  Synthetic oligonucleotide
gtgcatgacctggctgcgccacaacgtggg

SEQ ID NO: 361416 - DNA, 30 bp, Artificial Sequence
  Synthetic oligonucleotide
ccggagcgacgtaagagccggagacgtggg

SEQ ID NO: 361417 - DNA, 30 bp, Artificial Sequence
  Synthetic oligonucleotide
tataaaatagctaacgcaagtggccgtggg

SEQ ID NO: 361418 - DNA, 30 bp, Artificial Sequence
  Synthetic oligonucleotide
tagtatcgaggcggatagccgttgcgtggg

SEQ ID NO: 361419 - DNA, 30 bp, Artificial Sequence
  Synthetic oligonucleotide
ggtacatacctcgggccggtcagtcgtggg

SEQ ID NO: 361420 - DNA, 30 bp, Artificial Sequence
  Synthetic oligonucleotide
attactgcggtgtggctcagcaaaggtggg

SEQ ID NO: 361421 - DNA, 30 bp, Artificial Sequence
  Synthetic oligonucleotide
ccttgcgtggctagctacgcactaggtggg

SEQ ID NO: 361422 - DNA, 30 bp, Artificial Sequence
  Synthetic oligonucleotide
gccaactaaacgcgaagcaaccacggtggg

SEQ ID NO: 361423 - DNA, 30 bp, Artificial Sequence
  Synthetic oligonucleotide
gagacatctactttcggatcgcacggtggg

SEQ ID NO: 361424 - DNA, 30 bp, Artificial Sequence
  Synthetic oligonucleotide
cataaaagcgtaggggggtacgagggtggg

SEQ ID NO: 361425 - DNA, 30 bp, Artificial Sequence
  Synthetic oligonucleotide
attccacgcggaggcaatcaggggggtggg

SEQ ID NO: 361426 - DNA, 30 bp, Artificial Sequence
  Synthetic oligonucleotide
aactccgaattttcgtattaatgtggtggg

SEQ ID NO: 361427 - DNA, 31 bp, Artificial Sequence
  Synthetic oligonucleotide
ggcctcgggagacaggttcgatcaatgtggg

SEQ ID NO: 361428 - DNA, 30 bp, Artificial Sequence
  Synthetic oligonucleotide
aaatgaatagggtgttaaagctaatgtggg

SEQ ID NO: 361429 - DNA, 30 bp, Artificial Sequence
  Synthetic oligonucleotide
agatactataagtatactaacgcatgtggg

SEQ ID NO: 361430 - DNA, 30 bp, Artificial Sequence
  Synthetic oligonucleotide
tgtgctgggtggcagtcccctgtatgtggg

SEQ ID NO: 361431 - DNA, 30 bp, Artificial Sequence
  Synthetic oligonucleotide
ctacatgattcggttaggttggcctgtggg

SEQ ID NO: 361432 - DNA, 30 bp, Artificial Sequence
  Synthetic oligonucleotide
ggtccggagttaagcactcttgcctgtggg

SEQ ID NO: 361433 - DNA, 30 bp, Artificial Sequence
  Synthetic oligonucleotide
cccccagatctatcaaactcattgtgtggg

SEQ ID NO: 361434 - DNA, 30 bp, Artificial Sequence
  Synthetic oligonucleotide
tcgcgatggctttacgggctgcaaattggg

SEQ ID NO: 361435 - DNA, 30 bp, Artificial Sequence
  Synthetic oligonucleotide
gacacctgtgcctgcagtaacgcaattggg

SEQ ID NO: 361436 - DNA, 30 bp, Artificial Sequence
  Synthetic oligonucleotide
gccatgctatgacgagcctggagaattggg

SEQ ID NO: 361437 - DNA, 30 bp, Artificial Sequence
  Synthetic oligonucleotide
tgtacctctgagctgggtggtataattggg

SEQ ID NO: 361438 - DNA, 30 bp, Artificial Sequence
  Synthetic oligonucleotide
gtgtgttctgttctagttaatctaattggg

SEQ ID NO: 361439 - DNA, 30 bp, Artificial Sequence
  Synthetic oligonucleotide
actggactcttagggaccttggacattggg

SEQ ID NO: 361440 - DNA, 30 bp, Artificial Sequence
  Synthetic oligonucleotide
ttccgcgacctgaagagcgccatcattggg

SEQ ID NO: 361441 - DNA, 30 bp, Artificial Sequence
  Synthetic oligonucleotide
tagattacacgtaatcagggtttcattggg

SEQ ID NO: 361442 - DNA, 30 bp, Artificial Sequence
  Synthetic oligonucleotide
aaagcggattgctttattactaagattggg

SEQ ID NO: 361443 - DNA, 30 bp, Artificial Sequence
  Synthetic oligonucleotide
cgagcgatcggttgttcaacgcagattggg

SEQ ID NO: 361444 - DNA, 30 bp, Artificial Sequence
  Synthetic oligonucleotide
tagtataaccggctaagctcatagattggg

SEQ ID NO: 361445 - DNA, 30 bp, Artificial Sequence
  Synthetic oligonucleotide
gtgggaatatcagggcaaaggggtattggg

SEQ ID NO: 361446 - DNA, 30 bp, Artificial Sequence
  Synthetic oligonucleotide
acgcagaacgtcaatgtctagatacttggg

SEQ ID NO: 361447 - DNA, 30 bp, Artificial Sequence
  Synthetic oligonucleotide
gtagggtcattcgctctcgagaggcttggg

SEQ ID NO: 361448 - DNA, 30 bp, Artificial Sequence
  Synthetic oligonucleotide
agccgcaagaatttcctcgcaattcttggg

SEQ ID NO: 361449 - DNA, 30 bp, Artificial Sequence
  Synthetic oligonucleotide
gctccctttcacaaaggactatttcttggg

SEQ ID NO: 361450 - DNA, 30 bp, Artificial Sequence
  Synthetic oligonucleotide
agaattcaaaaccagcaatcgtttcttggg

SEQ ID NO: 361451 - DNA, 30 bp, Artificial Sequence
  Synthetic oligonucleotide
tcatagttggattatcctctacaagttggg

SEQ ID NO: 361452 - DNA, 30 bp, Artificial Sequence
  Synthetic oligonucleotide
tgtatattcagagcccttaatggagttggg

SEQ ID NO: 361453 - DNA, 30 bp, Artificial Sequence
  Synthetic oligonucleotide
ttgaattggtaaaccttctcccacgttggg

SEQ ID NO: 361454 - DNA, 30 bp, Artificial Sequence
  Synthetic oligonucleotide
cgaacacagcatgaggtcattatcgttggg

SEQ ID NO: 361455 - DNA, 30 bp, Artificial Sequence
  Synthetic oligonucleotide
atcgctgcggctcgctgattcttcgttggg

SEQ ID NO: 361456 - DNA, 30 bp, Artificial Sequence
  Synthetic oligonucleotide
gctgatgtgataaaactgctggtggttggg

SEQ ID NO: 361457 - DNA, 33 bp, Artificial Sequence
  Synthetic oligonucleotide
tttgttgtgtaggtttactcatctactgttggg

SEQ ID NO: 361458 - DNA, 30 bp, Artificial Sequence
  Synthetic oligonucleotide
caaatcacatcaagtgcatgttgatttggg

SEQ ID NO: 361459 - DNA, 30 bp, Artificial Sequence
  Synthetic oligonucleotide
tcgtctcacgacatgtcacacttatttggg

SEQ ID NO: 361460 - DNA, 30 bp, Artificial Sequence
  Synthetic oligonucleotide
aaggtcacttacgtgactttcgattttggg

SEQ ID NO: 361461 - DNA, 30 bp, Artificial Sequence
  Synthetic oligonucleotide
ttgtgatgtttgttattcaattattttggg

SEQ ID NO: 361462 - DNA, 30 bp, Artificial Sequence
  Synthetic oligonucleotide
gcttttacaagcacgggccactgttttggg

SEQ ID NO: 361463 - DNA, 30 bp, Artificial Sequence
  Synthetic oligonucleotide
catctgaaattacgatctcacatttttggg

SEQ ID NO: 361464 - DNA, 30 bp, Artificial Sequence
  Synthetic oligonucleotide
ccattttgtctgaatcgaccggaaaaatgg

SEQ ID NO: 361465 - DNA, 30 bp, Artificial Sequence
  Synthetic oligonucleotide
acacttgccagtcactcttgtctaaaatgg

SEQ ID NO: 361466 - DNA, 30 bp, Artificial Sequence
  Synthetic oligonucleotide
ggtaaagtccgaccatttggattaaaatgg

SEQ ID NO: 361467 - DNA, 30 bp, Artificial Sequence
  Synthetic oligonucleotide
gttgttcatagaaataattgagtcaaatgg

SEQ ID NO: 361468 - DNA, 30 bp, Artificial Sequence
  Synthetic oligonucleotide
cactaattttctgccatatcggggaaatgg

SEQ ID NO: 361469 - DNA, 30 bp, Artificial Sequence
  Synthetic oligonucleotide
gggacccccaccgtatcatgggctaaatgg

SEQ ID NO: 361470 - DNA, 31 bp, Artificial Sequence
  Synthetic oligonucleotide
ataaagaggcaccattcgcatgaaacaatgg

SEQ ID NO: 361471 - DNA, 30 bp, Artificial Sequence
  Synthetic oligonucleotide
ctataatgtgggtgtcctgcggcacaatgg

SEQ ID NO: 361472 - DNA, 30 bp, Artificial Sequence
  Synthetic oligonucleotide
acagaagttctgccttgggcaggacaatgg

SEQ ID NO: 361473 - DNA, 30 bp, Artificial Sequence
  Synthetic oligonucleotide
ttcataacttcattgcgtcatgggcaatgg

SEQ ID NO: 361474 - DNA, 30 bp, Artificial Sequence
  Synthetic oligonucleotide
gcaaccgtgcaaaatgcagggatgcaatgg

SEQ ID NO: 361475 - DNA, 30 bp, Artificial Sequence
  Synthetic oligonucleotide
gcgcctaattatatgataataaatcaatgg

SEQ ID NO: 361476 - DNA, 30 bp, Artificial Sequence
  Synthetic oligonucleotide
ggcatccttgaaagctgagttagtcaatgg

SEQ ID NO: 361477 - DNA, 30 bp, Artificial Sequence
  Synthetic oligonucleotide
tcggtaccgtacagttctagtggtcaatgg

SEQ ID NO: 361478 - DNA, 30 bp, Artificial Sequence
  Synthetic oligonucleotide
gatctacgacatctggttctccttcaatgg

SEQ ID NO: 361479 - DNA, 30 bp, Artificial Sequence
  Synthetic oligonucleotide
tggctagttctttccgttcagtttcaatgg

SEQ ID NO: 361480 - DNA, 30 bp, Artificial Sequence
  Synthetic oligonucleotide
ctattcttggcagctccgatatccgaatgg

SEQ ID NO: 361481 - DNA, 30 bp, Artificial Sequence
  Synthetic oligonucleotide
ttgcagttggagtagacgccgacggaatgg

SEQ ID NO: 361482 - DNA, 30 bp, Artificial Sequence
  Synthetic oligonucleotide
gcacaggcgtagaccttgcacggggaatgg

SEQ ID NO: 361483 - DNA, 30 bp, Artificial Sequence
  Synthetic oligonucleotide
gaggtttttccatcaccggacggggaatgg

SEQ ID NO: 361484 - DNA, 30 bp, Artificial Sequence
  Synthetic oligonucleotide
gtgttacccgcgaagttaacatatgaatgg

SEQ ID NO: 361485 - DNA, 30 bp, Artificial Sequence
  Synthetic oligonucleotide
tactctccagtaaaatggctcagtgaatgg

SEQ ID NO: 361486 - DNA, 30 bp, Artificial Sequence
  Synthetic oligonucleotide
gcaactagtatgtgtccctatcaataatgg

SEQ ID NO: 361487 - DNA, 30 bp, Artificial Sequence
  Synthetic oligonucleotide
gattacctgaaggcgctcacgaactaatgg

SEQ ID NO: 361488 - DNA, 30 bp, Artificial Sequence
  Synthetic oligonucleotide
cacgctgatttctgcaaagaccactaatgg

SEQ ID NO: 361489 - DNA, 30 bp, Artificial Sequence
  Synthetic oligonucleotide
agcgttagggtccaagccgctaggtaatgg

SEQ ID NO: 361490 - DNA, 30 bp, Artificial Sequence
  Synthetic oligonucleotide
tgggaaagcgaagcgccgcacctgtaatgg

SEQ ID NO: 361491 - DNA, 30 bp, Artificial Sequence
  Synthetic oligonucleotide
gacatctgtcgcgagaaaatatattaatgg

SEQ ID NO: 361492 - DNA, 30 bp, Artificial Sequence
  Synthetic oligonucleotide
ctgaattgctttgaggtaaagagttaatgg

SEQ ID NO: 361493 - DNA, 30 bp, Artificial Sequence
  Synthetic oligonucleotide
tagaccgcttaaagttcgtcgtgttaatgg

SEQ ID NO: 361494 - DNA, 30 bp, Artificial Sequence
  Synthetic oligonucleotide
ctagctaagttgtgtaggcagtgcacatgg

SEQ ID NO: 361495 - DNA, 30 bp, Artificial Sequence
  Synthetic oligonucleotide
atatcgggggggtgtgatgttgtcacatgg

SEQ ID NO: 361496 - DNA, 30 bp, Artificial Sequence
  Synthetic oligonucleotide
gtaagcagcccttggctgtcgtagacatgg

SEQ ID NO: 361497 - DNA, 30 bp, Artificial Sequence
  Synthetic oligonucleotide
gggagttcgcctcgggtaacgaggacatgg

SEQ ID NO: 361498 - DNA, 30 bp, Artificial Sequence
  Synthetic oligonucleotide
tacattcttttcaagcaaagccggacatgg

SEQ ID NO: 361499 - DNA, 30 bp, Artificial Sequence
  Synthetic oligonucleotide
ggtttcctggttgttagagcgagtacatgg

SEQ ID NO: 361500 - DNA, 30 bp, Artificial Sequence
  Synthetic oligonucleotide
ttgctacggcatacctgcaatgttacatgg

SEQ ID NO: 361501 - DNA, 30 bp, Artificial Sequence
  Synthetic oligonucleotide
ttctggttgaaccaacctgattttacatgg

SEQ ID NO: 361502 - DNA, 30 bp, Artificial Sequence
  Synthetic oligonucleotide
ttgctttcgtacgacaagcagtaaccatgg

SEQ ID NO: 361503 - DNA, 30 bp, Artificial Sequence
  Synthetic oligonucleotide
ctgcggggtgcgtaaagttcccccccatgg

SEQ ID NO: 361504 - DNA, 30 bp, Artificial Sequence
  Synthetic oligonucleotide
atctaccagaaaggttatgctgccccatgg

SEQ ID NO: 361505 - DNA, 30 bp, Artificial Sequence
  Synthetic oligonucleotide
atcgacagaatcgatacgttgttcccatgg

SEQ ID NO: 361506 - DNA, 30 bp, Artificial Sequence
  Synthetic oligonucleotide
cacttaggtccgtgtgacatcaagccatgg

SEQ ID NO: 361507 - DNA, 30 bp, Artificial Sequence
  Synthetic oligonucleotide
ggtcgtcagatctaatcgcggcttccatgg

SEQ ID NO: 361508 - DNA, 30 bp, Artificial Sequence
  Synthetic oligonucleotide
ctgtcggtcaatgcgctgccagttccatgg

SEQ ID NO: 361509 - DNA, 30 bp, Artificial Sequence
  Synthetic oligonucleotide
aactcttagagcctataaaaacacgcatgg

SEQ ID NO: 361510 - DNA, 30 bp, Artificial Sequence
  Synthetic oligonucleotide
gtaacgtgattatatcgtcgcgacgcatgg

SEQ ID NO: 361511 - DNA, 30 bp, Artificial Sequence
  Synthetic oligonucleotide
gagacggactgtgtatcagacagcgcatgg

SEQ ID NO: 361512 - DNA, 30 bp, Artificial Sequence
  Synthetic oligonucleotide
agataccggctataaaaccggcaggcatgg

SEQ ID NO: 361513 - DNA, 30 bp, Artificial Sequence
  Synthetic oligonucleotide
tataggtgctcgcgaatatgagaggcatgg

SEQ ID NO: 361514 - DNA, 30 bp, Artificial Sequence
  Synthetic oligonucleotide
gaataatacagtgcctcagacccggcatgg

SEQ ID NO: 361515 - DNA, 30 bp, Artificial Sequence
  Synthetic oligonucleotide
aagtggtagggatggatagggccggcatgg

SEQ ID NO: 361516 - DNA, 30 bp, Artificial Sequence
  Synthetic oligonucleotide
cttatatgaggacgatggcaagcggcatgg

SEQ ID NO: 361517 - DNA, 30 bp, Artificial Sequence
  Synthetic oligonucleotide
cccggtgccgttactggaagtgcggcatgg

SEQ ID NO: 361518 - DNA, 30 bp, Artificial Sequence
  Synthetic oligonucleotide
ccccatagctaattctctccgtgggcatgg

SEQ ID NO: 361519 - DNA, 30 bp, Artificial Sequence
  Synthetic oligonucleotide
aagcctccatgtgtcggaggacatgcatgg

SEQ ID NO: 361520 - DNA, 30 bp, Artificial Sequence
  Synthetic oligonucleotide
aggtgcctgtagcttctgatgattgcatgg

SEQ ID NO: 361521 - DNA, 30 bp, Artificial Sequence
  Synthetic oligonucleotide
tcgtccacttacacggctccagcatcatgg

SEQ ID NO: 361522 - DNA, 30 bp, Artificial Sequence
  Synthetic oligonucleotide
taagggcataaggatcccttggactcatgg

SEQ ID NO: 361523 - DNA, 30 bp, Artificial Sequence
  Synthetic oligonucleotide
tcgtctgaatccaatccgtggctttcatgg

SEQ ID NO: 361524 - DNA, 30 bp, Artificial Sequence
  Synthetic oligonucleotide
ctcctgttcaattgaactgtgaggagatgg

SEQ ID NO: 361525 - DNA, 30 bp, Artificial Sequence
  Synthetic oligonucleotide
attcgtcggcactcaagagttatgagatgg

SEQ ID NO: 361526 - DNA, 30 bp, Artificial Sequence
  Synthetic oligonucleotide
gggacctcaacgccacaggtacgacgatgg

SEQ ID NO: 361527 - DNA, 30 bp, Artificial Sequence
  Synthetic oligonucleotide
ggtgttacggcctggggcaaacaccgatgg

SEQ ID NO: 361528 - DNA, 30 bp, Artificial Sequence
  Synthetic oligonucleotide
actcctaattattccgttgaacaccgatgg

SEQ ID NO: 361529 - DNA, 30 bp, Artificial Sequence
  Synthetic oligonucleotide
agatgacgcgtgtctttagctatccgatgg

SEQ ID NO: 361530 - DNA, 30 bp, Artificial Sequence
  Synthetic oligonucleotide
gatatcggggtaaagttcggtctccgatgg

SEQ ID NO: 361531 - DNA, 30 bp, Artificial Sequence
  Synthetic oligonucleotide
gtccgggtgagtggcttcgtggggcgatgg

SEQ ID NO: 361532 - DNA, 30 bp, Artificial Sequence
  Synthetic oligonucleotide
tttgaattgctactccaatgagctcgatgg

SEQ ID NO: 361533 - DNA, 30 bp, Artificial Sequence
  Synthetic oligonucleotide
accccaccggcctccggcctcgctcgatgg

SEQ ID NO: 361534 - DNA, 30 bp, Artificial Sequence
  Synthetic oligonucleotide
gcagggagtctaatagcaaatgctcgatgg

SEQ ID NO: 361535 - DNA, 30 bp, Artificial Sequence
  Synthetic oligonucleotide
cgcgtaacagctaaccctaggattcgatgg

SEQ ID NO: 361536 - DNA, 30 bp, Artificial Sequence
  Synthetic oligonucleotide
gtgtaaggaagttagtgcggccttcgatgg

SEQ ID NO: 361537 - DNA, 30 bp, Artificial Sequence
  Synthetic oligonucleotide
acagtctggtgtgtgagatgtggaggatgg

SEQ ID NO: 361538 - DNA, 30 bp, Artificial Sequence
  Synthetic oligonucleotide
cttatcttgagctgcatggtgataggatgg

SEQ ID NO: 361539 - DNA, 30 bp, Artificial Sequence
  Synthetic oligonucleotide
tatcaattatgagtgtttacacacggatgg

SEQ ID NO: 361540 - DNA, 30 bp, Artificial Sequence
  Synthetic oligonucleotide
ttccgctgcattgagcgcgccagtggatgg

SEQ ID NO: 361541 - DNA, 30 bp, Artificial Sequence
  Synthetic oligonucleotide
ataaatgcaggcaactattgtggtggatgg

SEQ ID NO: 361542 - DNA, 30 bp, Artificial Sequence
  Synthetic oligonucleotide
aaaatcgatttggccggattacactgatgg

SEQ ID NO: 361543 - DNA, 30 bp, Artificial Sequence
  Synthetic oligonucleotide
ccctagattgtgtcaactcccacctgatgg

SEQ ID NO: 361544 - DNA, 30 bp, Artificial Sequence
  Synthetic oligonucleotide
gcgccgtcctgtccagtcccgtcctgatgg

SEQ ID NO: 361545 - DNA, 30 bp, Artificial Sequence
  Synthetic oligonucleotide
tacattctacccgagtgctcgaagtgatgg

SEQ ID NO: 361546 - DNA, 30 bp, Artificial Sequence
  Synthetic oligonucleotide
agtgcgttctgacgctgctgcgcgtgatgg

SEQ ID NO: 361547 - DNA, 30 bp, Artificial Sequence
  Synthetic oligonucleotide
acatttggaggacatattatgtggtgatgg

SEQ ID NO: 361548 - DNA, 30 bp, Artificial Sequence
  Synthetic oligonucleotide
acattgctcgtacgatcgactttttgatgg

SEQ ID NO: 361549 - DNA, 30 bp, Artificial Sequence
  Synthetic oligonucleotide
tacaaggccgttttctgtaaaagaatatgg

SEQ ID NO: 361550 - DNA, 30 bp, Artificial Sequence
  Synthetic oligonucleotide
ctcgcattataattttggcgcggaatatgg

SEQ ID NO: 361551 - DNA, 30 bp, Artificial Sequence
  Synthetic oligonucleotide
acgtgtctatagctcacagaagtaatatgg

SEQ ID NO: 361552 - DNA, 30 bp, Artificial Sequence
  Synthetic oligonucleotide
tgggggcggactattagggttcctatatgg

SEQ ID NO: 361553 - DNA, 30 bp, Artificial Sequence
  Synthetic oligonucleotide
tacttggctaggggctcgggaagtatatgg

SEQ ID NO: 361554 - DNA, 30 bp, Artificial Sequence
  Synthetic oligonucleotide
tatatcctacgtacgacctagagtatatgg

SEQ ID NO: 361555 - DNA, 30 bp, Artificial Sequence
  Synthetic oligonucleotide
atcactcttaacgacagcattattatatgg

SEQ ID NO: 361556 - DNA, 30 bp, Artificial Sequence
  Synthetic oligonucleotide
taggtcgccagtctttattttgtactatgg

SEQ ID NO: 361557 - DNA, 30 bp, Artificial Sequence
  Synthetic oligonucleotide
ccgctgttgacgtagtttataatcctatgg

SEQ ID NO: 361558 - DNA, 30 bp, Artificial Sequence
  Synthetic oligonucleotide
catctacaaagacttgcaaaaaagctatgg

SEQ ID NO: 361559 - DNA, 30 bp, Artificial Sequence
  Synthetic oligonucleotide
cctgggcgcgcggaaaactatgatctatgg

SEQ ID NO: 361560 - DNA, 30 bp, Artificial Sequence
  Synthetic oligonucleotide
caccaggtcgtccccttcaaggttctatgg

SEQ ID NO: 361561 - DNA, 30 bp, Artificial Sequence
  Synthetic oligonucleotide
agaccagtataggaacaccggtcagtatgg

SEQ ID NO: 361562 - DNA, 30 bp, Artificial Sequence
  Synthetic oligonucleotide
gcgattcgcttgcccactcttggagtatgg

SEQ ID NO: 361563 - DNA, 30 bp, Artificial Sequence
  Synthetic oligonucleotide
gcttcgagttaatgatgcattaacgtatgg

SEQ ID NO: 361564 - DNA, 30 bp, Artificial Sequence
  Synthetic oligonucleotide
gtcttagatacagactttattggcgtatgg

SEQ ID NO: 361565 - DNA, 30 bp, Artificial Sequence
  Synthetic oligonucleotide
cggttgggtttcggaaggggagcggtatgg

SEQ ID NO: 361566 - DNA, 30 bp, Artificial Sequence
  Synthetic oligonucleotide
aacgttagtaggttgtgagcaactgtatgg

SEQ ID NO: 361567 - DNA, 30 bp, Artificial Sequence
  Synthetic oligonucleotide
ggagttagttggagtctctcaagtgtatgg

SEQ ID NO: 361568 - DNA, 30 bp, Artificial Sequence
  Synthetic oligonucleotide
tattttgccaagcccgggtccagcttatgg

SEQ ID NO: 361569 - DNA, 30 bp, Artificial Sequence
  Synthetic oligonucleotide
ttacaacttcatccaaggaggttgttatgg

SEQ ID NO: 361570 - DNA, 30 bp, Artificial Sequence
  Synthetic oligonucleotide
cggaccaaggggccgcgtgcccttttatgg

SEQ ID NO: 361571 - DNA, 30 bp, Artificial Sequence
  Synthetic oligonucleotide
ccttttatcgaattagtagagggaaactgg

SEQ ID NO: 361572 - DNA, 30 bp, Artificial Sequence
  Synthetic oligonucleotide
aaactagggaaagtaagcgcttacaactgg

SEQ ID NO: 361573 - DNA, 30 bp, Artificial Sequence
  Synthetic oligonucleotide
agtaaaggactacgcgagagcacgaactgg

SEQ ID NO: 361574 - DNA, 30 bp, Artificial Sequence
  Synthetic oligonucleotide
ctaatcggaggtttaatcgtcgataactgg

SEQ ID NO: 361575 - DNA, 30 bp, Artificial Sequence
  Synthetic oligonucleotide
cccgggaaacaaccagtcccggggcactgg

SEQ ID NO: 361576 - DNA, 30 bp, Artificial Sequence
  Synthetic oligonucleotide
cgcttttaaccgtgcatcccagatcactgg

SEQ ID NO: 361577 - DNA, 30 bp, Artificial Sequence
  Synthetic oligonucleotide
agttatcttggatttaaggactctcactgg

SEQ ID NO: 361578 - DNA, 30 bp, Artificial Sequence
  Synthetic oligonucleotide
caaaccacattagaagtgcggtttcactgg

SEQ ID NO: 361579 - DNA, 30 bp, Artificial Sequence
  Synthetic oligonucleotide
gtgtattatatacggacctctgtagactgg

SEQ ID NO: 361580 - DNA, 30 bp, Artificial Sequence
  Synthetic oligonucleotide
tttaaacgtctacttccgaaattagactgg

SEQ ID NO: 361581 - DNA, 30 bp, Artificial Sequence
  Synthetic oligonucleotide
gtagtatttgcgttccccatccccgactgg

SEQ ID NO: 361582 - DNA, 30 bp, Artificial Sequence
  Synthetic oligonucleotide
gactttcgaagataccgcgttaaggactgg

SEQ ID NO: 361583 - DNA, 30 bp, Artificial Sequence
  Synthetic oligonucleotide
gggccgtccaagtatgcgtggggtgactgg

SEQ ID NO: 361584 - DNA, 30 bp, Artificial Sequence
  Synthetic oligonucleotide
aaatggacgcccggagggtctacatactgg

SEQ ID NO: 361585 - DNA, 30 bp, Artificial Sequence
  Synthetic oligonucleotide
agtgtaatttccccggaggtcaactactgg

SEQ ID NO: 361586 - DNA, 30 bp, Artificial Sequence
  Synthetic oligonucleotide
tgcgttgcagagcattaacgcccctactgg

SEQ ID NO: 361587 - DNA, 30 bp, Artificial Sequence
  Synthetic oligonucleotide
agacgctcattttgaaactttccctactgg

SEQ ID NO: 361588 - DNA, 30 bp, Artificial Sequence
  Synthetic oligonucleotide
tgaaaaacttgaggagcccttggctactgg

SEQ ID NO: 361589 - DNA, 30 bp, Artificial Sequence
  Synthetic oligonucleotide
ggtatcctatgtatacccgcgttgtactgg

SEQ ID NO: 361590 - DNA, 30 bp, Artificial Sequence
  Synthetic oligonucleotide
gtcagcgggtacggagttctcacttactgg

SEQ ID NO: 361591 - DNA, 30 bp, Artificial Sequence
  Synthetic oligonucleotide
gtggttgcggggcctgaagtcatttactgg

SEQ ID NO: 361592 - DNA, 30 bp, Artificial Sequence
  Synthetic oligonucleotide
tagtcattgcctatctttgttggaacctgg

SEQ ID NO: 361593 - DNA, 30 bp, Artificial Sequence
  Synthetic oligonucleotide
acccgcgcaatgaagcagaggataacctgg

SEQ ID NO: 361594 - DNA, 30 bp, Artificial Sequence
  Synthetic oligonucleotide
cggagacggtatactggccattcgacctgg

SEQ ID NO: 361595 - DNA, 30 bp, Artificial Sequence
  Synthetic oligonucleotide
atacgccttaagtgtataaggcatacctgg

SEQ ID NO: 361596 - DNA, 30 bp, Artificial Sequence
  Synthetic oligonucleotide
tatagggcgctggctcaacgtcctacctgg

SEQ ID NO: 361597 - DNA, 30 bp, Artificial Sequence
  Synthetic oligonucleotide
gaagtctatttctacgatacgccaccctgg

SEQ ID NO: 361598 - DNA, 30 bp, Artificial Sequence
  Synthetic oligonucleotide
agtaatcagtccccctaatgcagaccctgg

SEQ ID NO: 361599 - DNA, 30 bp, Artificial Sequence
  Synthetic oligonucleotide
ggaggagcgactttacgagcgaccccctgg

SEQ ID NO: 361600 - DNA, 30 bp, Artificial Sequence
  Synthetic oligonucleotide
cgaggtgggtatggcagcccttccccctgg

SEQ ID NO: 361601 - DNA, 30 bp, Artificial Sequence
  Synthetic oligonucleotide
attattattttgcttagttcacggccctgg

SEQ ID NO: 361602 - DNA, 30 bp, Artificial Sequence
  Synthetic oligonucleotide
ccgagggcgtgctgcacacctatgccctgg

SEQ ID NO: 361603 - DNA, 30 bp, Artificial Sequence
  Synthetic oligonucleotide
tagcggtgtgtgtacagatcaaatccctgg

SEQ ID NO: 361604 - DNA, 30 bp, Artificial Sequence
  Synthetic oligonucleotide
aaaatgagttctgatagtaccagtccctgg

SEQ ID NO: 361605 - DNA, 30 bp, Artificial Sequence
  Synthetic oligonucleotide
actcgcttctcgggaatgtgacgggcctgg

SEQ ID NO: 361606 - DNA, 30 bp, Artificial Sequence
  Synthetic oligonucleotide
tagtaaatactaattgttaaaatggcctgg

SEQ ID NO: 361607 - DNA, 30 bp, Artificial Sequence
  Synthetic oligonucleotide
aaacctagtaagtttcaatgcttggcctgg

SEQ ID NO: 361608 - DNA, 30 bp, Artificial Sequence
  Synthetic oligonucleotide
gcctataattccattatagctgatgcctgg

SEQ ID NO: 361609 - DNA, 30 bp, Artificial Sequence
  Synthetic oligonucleotide
cgccgtggagaaatcccgctttaatcctgg

SEQ ID NO: 361610 - DNA, 30 bp, Artificial Sequence
  Synthetic oligonucleotide
catgggtgatacattataacgtactcctgg

SEQ ID NO: 361611 - DNA, 30 bp, Artificial Sequence
  Synthetic oligonucleotide
tacattacttgtctgaaggtcgtctcctgg

SEQ ID NO: 361612 - DNA, 30 bp, Artificial Sequence
  Synthetic oligonucleotide
tgaaactttgttaagcccaattcttcctgg

SEQ ID NO: 361613 - DNA, 30 bp, Artificial Sequence
  Synthetic oligonucleotide
cgccagtcaggaactctatttctttcctgg

SEQ ID NO: 361614 - DNA, 30 bp, Artificial Sequence
  Synthetic oligonucleotide
aattacagagacgacagtgccggaagctgg

SEQ ID NO: 361615 - DNA, 30 bp, Artificial Sequence
  Synthetic oligonucleotide
ctttgtgtctcggattggcggctaagctgg

SEQ ID NO: 361616 - DNA, 30 bp, Artificial Sequence
  Synthetic oligonucleotide
cggcgggtacccactgtggaacacagctgg

SEQ ID NO: 361617 - DNA, 30 bp, Artificial Sequence
  Synthetic oligonucleotide
gtagcaattggtctcaggattaatagctgg

SEQ ID NO: 361618 - DNA, 30 bp, Artificial Sequence
  Synthetic oligonucleotide
cttccctagaaacgacgctcaatccgctgg

SEQ ID NO: 361619 - DNA, 30 bp, Artificial Sequence
  Synthetic oligonucleotide
cgcccgtgttatcttgtttcacatcgctgg

SEQ ID NO: 361620 - DNA, 30 bp, Artificial Sequence
  Synthetic oligonucleotide
tagccttcatgataaagatagtcaggctgg

SEQ ID NO: 361621 - DNA, 30 bp, Artificial Sequence
  Synthetic oligonucleotide
ctaattgacagacacgaccgaagaggctgg

SEQ ID NO: 361622 - DNA, 30 bp, Artificial Sequence
  Synthetic oligonucleotide
gcctactgtcgttaggtgactagaggctgg

SEQ ID NO: 361623 - DNA, 30 bp, Artificial Sequence
  Synthetic oligonucleotide
ggtatgagagaagccgaggttgccggctgg

SEQ ID NO: 361624 - DNA, 30 bp, Artificial Sequence
  Synthetic oligonucleotide
gttcgcctgccaccgtcgacacggggctgg

SEQ ID NO: 361625 - DNA, 30 bp, Artificial Sequence
  Synthetic oligonucleotide
atttcgttctattgttattgcgatggctgg

SEQ ID NO: 361626 - DNA, 30 bp, Artificial Sequence
  Synthetic oligonucleotide
tgagggcacagccctttgctgcgtggctgg

SEQ ID NO: 361627 - DNA, 30 bp, Artificial Sequence
  Synthetic oligonucleotide
ggtataatacctcggtaccgcgttggctgg

SEQ ID NO: 361628 - DNA, 30 bp, Artificial Sequence
  Synthetic oligonucleotide
agtactaagatcatattacaatttggctgg

SEQ ID NO: 361629 - DNA, 30 bp, Artificial Sequence
  Synthetic oligonucleotide
cgatggatgccggcctgtttggcatgctgg

SEQ ID NO: 361630 - DNA, 30 bp, Artificial Sequence
  Synthetic oligonucleotide
aacgccacctgttatcacccctgatgctgg

SEQ ID NO: 361631 - DNA, 30 bp, Artificial Sequence
  Synthetic oligonucleotide
gaagccctaccgtcaggccacttctgctgg

SEQ ID NO: 361632 - DNA, 30 bp, Artificial Sequence
  Synthetic oligonucleotide
attagcaggttaaactcctctcggtgctgg

SEQ ID NO: 361633 - DNA, 30 bp, Artificial Sequence
  Synthetic oligonucleotide
tcaggcctcagagactttaagtattgctgg

SEQ ID NO: 361634 - DNA, 30 bp, Artificial Sequence
  Synthetic oligonucleotide
ctcagaggatatgtaggctttcaaatctgg

SEQ ID NO: 361635 - DNA, 30 bp, Artificial Sequence
  Synthetic oligonucleotide
gaaaggctctgcttccagcggataatctgg

SEQ ID NO: 361636 - DNA, 30 bp, Artificial Sequence
  Synthetic oligonucleotide
ttatggacttatagaagtgtttacatctgg

SEQ ID NO: 361637 - DNA, 30 bp, Artificial Sequence
  Synthetic oligonucleotide
ttaaagagcatgtacttcccccgcatctgg

SEQ ID NO: 361638 - DNA, 30 bp, Artificial Sequence
  Synthetic oligonucleotide
tcgcggatcacatgttaggtaatcatctgg

SEQ ID NO: 361639 - DNA, 30 bp, Artificial Sequence
  Synthetic oligonucleotide
gatcggtcacgtacatgccaggcgatctgg

SEQ ID NO: 361640 - DNA, 30 bp, Artificial Sequence
  Synthetic oligonucleotide
tgcgcaggtagtattcccgttgccctctgg

SEQ ID NO: 361641 - DNA, 30 bp, Artificial Sequence
  Synthetic oligonucleotide
atgtaaaaggtgctgcggcctttcctctgg

SEQ ID NO: 361642 - DNA, 30 bp, Artificial Sequence
  Synthetic oligonucleotide
ctttccttaatctcagctaaagctctctgg

SEQ ID NO: 361643 - DNA, 30 bp, Artificial Sequence
  Synthetic oligonucleotide
tctcccggggcccgttcagagcttctctgg

SEQ ID NO: 361644 - DNA, 30 bp, Artificial Sequence
  Synthetic oligonucleotide
agttctcaataatcagaccatcttctctgg

SEQ ID NO: 361645 - DNA, 30 bp, Artificial Sequence
  Synthetic oligonucleotide
ttttatgaatggtgtgctggaacagtctgg

SEQ ID NO: 361646 - DNA, 30 bp, Artificial Sequence
  Synthetic oligonucleotide
gggtaaatgacttcggaatttacagtctgg

SEQ ID NO: 361647 - DNA, 30 bp, Artificial Sequence
  Synthetic oligonucleotide
cggcattttgactcgagtccaggggtctgg

SEQ ID NO: 361648 - DNA, 30 bp, Artificial Sequence
  Synthetic oligonucleotide
taatctaagtcagtctgtaattgggtctgg

SEQ ID NO: 361649 - DNA, 29 bp, Artificial Sequence
  Synthetic oligonucleotide
gctatatcgtacgtcaaaggtgtgtctgg

SEQ ID NO: 361650 - DNA, 30 bp, Artificial Sequence
  Synthetic oligonucleotide
ccactaggaaaaaggtaggctgcattctgg

SEQ ID NO: 361651 - DNA, 30 bp, Artificial Sequence
  Synthetic oligonucleotide
tcttaatggtgggtcagctatgtattctgg

SEQ ID NO: 361652 - DNA, 30 bp, Artificial Sequence
  Synthetic oligonucleotide
cgcaaccatttcgggatatacccgttctgg

SEQ ID NO: 361653 - DNA, 30 bp, Artificial Sequence
  Synthetic oligonucleotide
tgccggctatcgagatttttggcgttctgg

SEQ ID NO: 361654 - DNA, 30 bp, Artificial Sequence
  Synthetic oligonucleotide
atattgcttgcttattagttatgtttctgg

SEQ ID NO: 361655 - DNA, 30 bp, Artificial Sequence
  Synthetic oligonucleotide
caggcccacagaaggctgtagcacaagtgg

SEQ ID NO: 361656 - DNA, 30 bp, Artificial Sequence
  Synthetic oligonucleotide
ggttacacataccttgcgtatggcaagtgg

SEQ ID NO: 361657 - DNA, 30 bp, Artificial Sequence
  Synthetic oligonucleotide
atcggcagcacttatagcactccgaagtgg

SEQ ID NO: 361658 - DNA, 30 bp, Artificial Sequence
  Synthetic oligonucleotide
ttaacactcggggtaacggccaggaagtgg

SEQ ID NO: 361659 - DNA, 30 bp, Artificial Sequence
  Synthetic oligonucleotide
gtatgtgcccggaagttaaagaataagtgg

SEQ ID NO: 361660 - DNA, 30 bp, Artificial Sequence
  Synthetic oligonucleotide
gagcatacgaatggccacatgactaagtgg

SEQ ID NO: 361661 - DNA, 30 bp, Artificial Sequence
  Synthetic oligonucleotide
agagttccaagccccgccagtagtaagtgg

SEQ ID NO: 361662 - DNA, 30 bp, Artificial Sequence
  Synthetic oligonucleotide
ttgttttgttcagaatcggcgagacagtgg

SEQ ID NO: 361663 - DNA, 30 bp, Artificial Sequence
  Synthetic oligonucleotide
tttactcggggtgagctgaaaatccagtgg

SEQ ID NO: 361664 - DNA, 30 bp, Artificial Sequence
  Synthetic oligonucleotide
gctcacgagtacgagtatcgagacgagtgg

SEQ ID NO: 361665 - DNA, 30 bp, Artificial Sequence
  Synthetic oligonucleotide
cccacagttcaactaactagaaccgagtgg

SEQ ID NO: 361666 - DNA, 30 bp, Artificial Sequence
  Synthetic oligonucleotide
ggtctccataaacacactcagtaggagtgg

SEQ ID NO: 361667 - DNA, 30 bp, Artificial Sequence
  Synthetic oligonucleotide
tgcgcacccgatagaactggatcggagtgg

SEQ ID NO: 361668 - DNA, 30 bp, Artificial Sequence
  Synthetic oligonucleotide
gtaatccgataagcgtatacgcatgagtgg

SEQ ID NO: 361669 - DNA, 30 bp, Artificial Sequence
  Synthetic oligonucleotide
ggaaatcttattacctgacccatatagtgg

SEQ ID NO: 361670 - DNA, 30 bp, Artificial Sequence
  Synthetic oligonucleotide
gaaagttctgcctttcatagtgtatagtgg

SEQ ID NO: 361671 - DNA, 30 bp, Artificial Sequence
  Synthetic oligonucleotide
tcgaactaaatggtcgcaacgcactagtgg

SEQ ID NO: 361672 - DNA, 30 bp, Artificial Sequence
  Synthetic oligonucleotide
tcgtagcgagtccctagcatgtactagtgg

SEQ ID NO: 361673 - DNA, 30 bp, Artificial Sequence
  Synthetic oligonucleotide
tagaccgattgctgaattctgtactagtgg

SEQ ID NO: 361674 - DNA, 30 bp, Artificial Sequence
  Synthetic oligonucleotide
gggggctagccgggcttcttcgtctagtgg

SEQ ID NO: 361675 - DNA, 30 bp, Artificial Sequence
  Synthetic oligonucleotide
atctcttgtaactgggttcgcttttagtgg

SEQ ID NO: 361676 - DNA, 30 bp, Artificial Sequence
  Synthetic oligonucleotide
gtcagcacgactcgaaattagagaacgtgg

SEQ ID NO: 361677 - DNA, 30 bp, Artificial Sequence
  Synthetic oligonucleotide
ttcggtttgtttgggtatactcatacgtgg

SEQ ID NO: 361678 - DNA, 30 bp, Artificial Sequence
  Synthetic oligonucleotide
tgaaatgaatgaggctgagcatatacgtgg

SEQ ID NO: 361679 - DNA, 30 bp, Artificial Sequence
  Synthetic oligonucleotide
ctggcttcgattggtgtgtagtctacgtgg

SEQ ID NO: 361680 - DNA, 30 bp, Artificial Sequence
  Synthetic oligonucleotide
gagattctgaccccgatccatgcgccgtgg

SEQ ID NO: 361681 - DNA, 30 bp, Artificial Sequence
  Synthetic oligonucleotide
aagatatgtgatgccaattcatctccgtgg

SEQ ID NO: 361682 - DNA, 30 bp, Artificial Sequence
  Synthetic oligonucleotide
gttacaagagtcgtgacgaaatttccgtgg

SEQ ID NO: 361683 - DNA, 30 bp, Artificial Sequence
  Synthetic oligonucleotide
atgggcctgggacacccgcgagccgcgtgg

SEQ ID NO: 361684 - DNA, 30 bp, Artificial Sequence
  Synthetic oligonucleotide
ctaaacacacgacctaccagtgttgcgtgg

SEQ ID NO: 361685 - DNA, 30 bp, Artificial Sequence
  Synthetic oligonucleotide
caattgtcctgttggatcccgatatcgtgg

SEQ ID NO: 361686 - DNA, 30 bp, Artificial Sequence
  Synthetic oligonucleotide
gcccactaccaagttggatataactcgtgg

SEQ ID NO: 361687 - DNA, 30 bp, Artificial Sequence
  Synthetic oligonucleotide
atcggcaagaattgcgacagagcaaggtgg

SEQ ID NO: 361688 - DNA, 30 bp, Artificial Sequence
  Synthetic oligonucleotide
atgttataaaccggttcgcatcgcaggtgg

SEQ ID NO: 361689 - DNA, 30 bp, Artificial Sequence
  Synthetic oligonucleotide
ctagggaatgagccattacatcttaggtgg

SEQ ID NO: 361690 - DNA, 30 bp, Artificial Sequence
  Synthetic oligonucleotide
ttaggagcttaacatataggtatccggtgg

SEQ ID NO: 361691 - DNA, 30 bp, Artificial Sequence
  Synthetic oligonucleotide
tggtcataccaacaagcccataagcggtgg

SEQ ID NO: 361692 - DNA, 30 bp, Artificial Sequence
  Synthetic oligonucleotide
aatacgtcggtcgtttgtttacagcggtgg

SEQ ID NO: 361693 - DNA, 30 bp, Artificial Sequence
  Synthetic oligonucleotide
tgtccgtatgatcgtgtccgcctagggtgg

SEQ ID NO: 361694 - DNA, 30 bp, Artificial Sequence
  Synthetic oligonucleotide
cggggaaatccactcgttagaagggggtgg

SEQ ID NO: 361695 - DNA, 30 bp, Artificial Sequence
  Synthetic oligonucleotide
cagcggagctacacggttcgtcatgggtgg

SEQ ID NO: 361696 - DNA, 30 bp, Artificial Sequence
  Synthetic oligonucleotide
gacagtcccacatgcaagataagtgggtgg

SEQ ID NO: 361697 - DNA, 30 bp, Artificial Sequence
  Synthetic oligonucleotide
cccgatgtttagcattccaagatatggtgg

SEQ ID NO: 361698 - DNA, 30 bp, Artificial Sequence
  Synthetic oligonucleotide
gtagtaccatcaatcagcggtgactggtgg

SEQ ID NO: 361699 - DNA, 30 bp, Artificial Sequence
  Synthetic oligonucleotide
gaacttcaggttttggtttggtcctggtgg

SEQ ID NO: 361700 - DNA, 30 bp, Artificial Sequence
  Synthetic oligonucleotide
ccactgggtttcagcagtgatggaatgtgg

SEQ ID NO: 361701 - DNA, 30 bp, Artificial Sequence
  Synthetic oligonucleotide
agtccgctagaggcttggagatgcatgtgg

SEQ ID NO: 361702 - DNA, 30 bp, Artificial Sequence
  Synthetic oligonucleotide
acgatcgttgatgactgggcgcatatgtgg

SEQ ID NO: 361703 - DNA, 30 bp, Artificial Sequence
  Synthetic oligonucleotide
cgttcttattaggaggtgccacctatgtgg

SEQ ID NO: 361704 - DNA, 30 bp, Artificial Sequence
  Synthetic oligonucleotide
tcacattgagctgacgttcggcctatgtgg

SEQ ID NO: 361705 - DNA, 30 bp, Artificial Sequence
  Synthetic oligonucleotide
gattagtattaacaataaccggaactgtgg

SEQ ID NO: 361706 - DNA, 30 bp, Artificial Sequence
  Synthetic oligonucleotide
aaacgcttgacgggttaattgtaactgtgg

SEQ ID NO: 361707 - DNA, 30 bp, Artificial Sequence
  Synthetic oligonucleotide
caatggtcgttcttgccaatggcgctgtgg

SEQ ID NO: 361708 - DNA, 30 bp, Artificial Sequence
  Synthetic oligonucleotide
ggaagtttcatactaattatgaggctgtgg

SEQ ID NO: 361709 - DNA, 30 bp, Artificial Sequence
  Synthetic oligonucleotide
tggccaggtcggtgggaggggtggctgtgg

SEQ ID NO: 361710 - DNA, 30 bp, Artificial Sequence
  Synthetic oligonucleotide
tgttcgctttgttactgaaagcatctgtgg

SEQ ID NO: 361711 - DNA, 30 bp, Artificial Sequence
  Synthetic oligonucleotide
cgctgcgctattaattgtggcactctgtgg

SEQ ID NO: 361712 - DNA, 30 bp, Artificial Sequence
  Synthetic oligonucleotide
caggctcaccagatcattggctgtctgtgg

SEQ ID NO: 361713 - DNA, 30 bp, Artificial Sequence
  Synthetic oligonucleotide
tagcggagtttttaagatttaattctgtgg

SEQ ID NO: 361714 - DNA, 30 bp, Artificial Sequence
  Synthetic oligonucleotide
aatctttaaactgttcttactcaagtgtgg

SEQ ID NO: 361715 - DNA, 30 bp, Artificial Sequence
  Synthetic oligonucleotide
gatatctgaggctcagcggattaagtgtgg

SEQ ID NO: 361716 - DNA, 30 bp, Artificial Sequence
  Synthetic oligonucleotide
caatccgatttcagtgggactctagtgtgg

SEQ ID NO: 361717 - DNA, 30 bp, Artificial Sequence
  Synthetic oligonucleotide
attcccatgtcttctaggatattagtgtgg

SEQ ID NO: 361718 - DNA, 30 bp, Artificial Sequence
  Synthetic oligonucleotide
acaatctggaacgcggtcgcagccgtgtgg

SEQ ID NO: 361719 - DNA, 30 bp, Artificial Sequence
  Synthetic oligonucleotide
aataagggacactctagcggacaggtgtgg

SEQ ID NO: 361720 - DNA, 30 bp, Artificial Sequence
  Synthetic oligonucleotide
tatcctgtacgactgccggaaacggtgtgg

SEQ ID NO: 361721 - DNA, 30 bp, Artificial Sequence
  Synthetic oligonucleotide
atcgtgtgacttgtttagttgtcggtgtgg

SEQ ID NO: 361722 - DNA, 30 bp, Artificial Sequence
  Synthetic oligonucleotide
gcctgacgttacctcgttaccatggtgtgg

SEQ ID NO: 361723 - DNA, 30 bp, Artificial Sequence
  Synthetic oligonucleotide
ttggaacctctgcggacggaaaatgtgtgg

SEQ ID NO: 361724 - DNA, 30 bp, Artificial Sequence
  Synthetic oligonucleotide
ccggactaactagtcatggtagcattgtgg

SEQ ID NO: 361725 - DNA, 30 bp, Artificial Sequence
  Synthetic oligonucleotide
tattaattaacgtaagacggtaacttgtgg

SEQ ID NO: 361726 - DNA, 30 bp, Artificial Sequence
  Synthetic oligonucleotide
attaggcacgactaccgcgttaccttgtgg

SEQ ID NO: 361727 - DNA, 31 bp, Artificial Sequence
  Synthetic oligonucleotide
caaatcgtgctggctattggcgagcttgtgg

SEQ ID NO: 361728 - DNA, 30 bp, Artificial Sequence
  Synthetic oligonucleotide
actgcttgcagtcaatcccgacgcttgtgg

SEQ ID NO: 361729 - DNA, 30 bp, Artificial Sequence
  Synthetic oligonucleotide
atataggggttagggaggcatgagttgtgg

SEQ ID NO: 361730 - DNA, 30 bp, Artificial Sequence
  Synthetic oligonucleotide
ctctgccgcatgagagttcgtgcgttgtgg

SEQ ID NO: 361731 - DNA, 30 bp, Artificial Sequence
  Synthetic oligonucleotide
cgaaatcacaagccctatattggtttgtgg

SEQ ID NO: 361732 - DNA, 30 bp, Artificial Sequence
  Synthetic oligonucleotide
ccacgacacgatgccaaatcaagcaattgg

SEQ ID NO: 361733 - DNA, 30 bp, Artificial Sequence
  Synthetic oligonucleotide
aaagatttgtctccaattgcaggcaattgg

SEQ ID NO: 361734 - DNA, 30 bp, Artificial Sequence
  Synthetic oligonucleotide
gtgaggttcgacaggtctggggtcaattgg

SEQ ID NO: 361735 - DNA, 30 bp, Artificial Sequence
  Synthetic oligonucleotide
ttcgaatcagatctacgccgggttaattgg

SEQ ID NO: 361736 - DNA, 30 bp, Artificial Sequence
  Synthetic oligonucleotide
gtgattgcgcgaggggtaacttaacattgg

SEQ ID NO: 361737 - DNA, 30 bp, Artificial Sequence
  Synthetic oligonucleotide
cctcccgtgggaattggctgaaaccattgg

SEQ ID NO: 361738 - DNA, 30 bp, Artificial Sequence
  Synthetic oligonucleotide
acgtttcgttgtccgtggcggatccattgg

SEQ ID NO: 361739 - DNA, 30 bp, Artificial Sequence
  Synthetic oligonucleotide
tcaacaaaatgtgtctgaagtgtccattgg

SEQ ID NO: 361740 - DNA, 30 bp, Artificial Sequence
  Synthetic oligonucleotide
tgtgcgccatagcatgaaccaaggcattgg

SEQ ID NO: 361741 - DNA, 30 bp, Artificial Sequence
  Synthetic oligonucleotide
atatgaggttggagacagggcccagattgg

SEQ ID NO: 361742 - DNA, 30 bp, Artificial Sequence
  Synthetic oligonucleotide
aagatacataggaatcggagtagagattgg

SEQ ID NO: 361743 - DNA, 30 bp, Artificial Sequence
  Synthetic oligonucleotide
tgatgacgcaaatgctaacaacgagattgg

SEQ ID NO: 361744 - DNA, 30 bp, Artificial Sequence
  Synthetic oligonucleotide
tagttgtcaaacggtacacccatcgattgg

SEQ ID NO: 361745 - DNA, 30 bp, Artificial Sequence
  Synthetic oligonucleotide
gtcagtccagcggagaactttacggattgg

SEQ ID NO: 361746 - DNA, 30 bp, Artificial Sequence
  Synthetic oligonucleotide
gcatagctggttggccccactctggattgg

SEQ ID NO: 361747 - DNA, 30 bp, Artificial Sequence
  Synthetic oligonucleotide
caccaattcacggatcgttagtctgattgg

SEQ ID NO: 361748 - DNA, 30 bp, Artificial Sequence
  Synthetic oligonucleotide
agtgttgcgtacgcattgttgtttgattgg

SEQ ID NO: 361749 - DNA, 30 bp, Artificial Sequence
  Synthetic oligonucleotide
taattcccttgagtctatgccaaatattgg

SEQ ID NO: 361750 - DNA, 30 bp, Artificial Sequence
  Synthetic oligonucleotide
caaaggatgagccccgggatataatattgg

SEQ ID NO: 361751 - DNA, 30 bp, Artificial Sequence
  Synthetic oligonucleotide
ttacctgggctatttaactgagagtattgg

SEQ ID NO: 361752 - DNA, 30 bp, Artificial Sequence
  Synthetic oligonucleotide
aggcatgaagtgttgtcacgggagtattgg

SEQ ID NO: 361753 - DNA, 30 bp, Artificial Sequence
  Synthetic oligonucleotide
cgcacacgccccacagtccagtcgtattgg

SEQ ID NO: 361754 - DNA, 30 bp, Artificial Sequence
  Synthetic oligonucleotide
atcgatctctacgacgggggcagttattgg

SEQ ID NO: 361755 - DNA, 30 bp, Artificial Sequence
  Synthetic oligonucleotide
gcaccgtacttacgctcatactgttattgg

SEQ ID NO: 361756 - DNA, 30 bp, Artificial Sequence
  Synthetic oligonucleotide
gctactacgggacccgggtaacaaacttgg

SEQ ID NO: 361757 - DNA, 30 bp, Artificial Sequence
  Synthetic oligonucleotide
agaatgggtgttagtttcatgcacacttgg

SEQ ID NO: 361758 - DNA, 30 bp, Artificial Sequence
  Synthetic oligonucleotide
aactgattcggttcgatcttccctacttgg

SEQ ID NO: 361759 - DNA, 30 bp, Artificial Sequence
  Synthetic oligonucleotide
attcttatagtagtcattgccgctacttgg

SEQ ID NO: 361760 - DNA, 30 bp, Artificial Sequence
  Synthetic oligonucleotide
ctcgtcatgtaatgactaggatgaccttgg

SEQ ID NO: 361761 - DNA, 30 bp, Artificial Sequence
  Synthetic oligonucleotide
aaaaatgcgccgccgtcatgattaccttgg

SEQ ID NO: 361762 - DNA, 30 bp, Artificial Sequence
  Synthetic oligonucleotide
gggtgtatggaacgtgctcgctccccttgg

SEQ ID NO: 361763 - DNA, 30 bp, Artificial Sequence
  Synthetic oligonucleotide
accggtgatcgcactttagtatgcccttgg

SEQ ID NO: 361764 - DNA, 30 bp, Artificial Sequence
  Synthetic oligonucleotide
tttacgtttggaggcgacattcttccttgg

SEQ ID NO: 361765 - DNA, 30 bp, Artificial Sequence
  Synthetic oligonucleotide
acgaccacaggggctgggcgggttccttgg

SEQ ID NO: 361766 - DNA, 30 bp, Artificial Sequence
  Synthetic oligonucleotide
tcaccagggaaaaataagacggccgcttgg

SEQ ID NO: 361767 - DNA, 30 bp, Artificial Sequence
  Synthetic oligonucleotide
acccgaagatagaatgtgtcgatcgcttgg

SEQ ID NO: 361768 - DNA, 30 bp, Artificial Sequence
  Synthetic oligonucleotide
agctgtaagagggtagtgatattcgcttgg

SEQ ID NO: 361769 - DNA, 30 bp, Artificial Sequence
  Synthetic oligonucleotide
tgtgtttcctggaagattgacggggcttgg

SEQ ID NO: 361770 - DNA, 30 bp, Artificial Sequence
  Synthetic oligonucleotide
cgctaggattttttaccgagtttggcttgg

SEQ ID NO: 361771 - DNA, 30 bp, Artificial Sequence
  Synthetic oligonucleotide
tgacttaaccgaaagaaccgctaatcttgg

SEQ ID NO: 361772 - DNA, 30 bp, Artificial Sequence
  Synthetic oligonucleotide
atttaagcgctgaaggtttacagatcttgg

SEQ ID NO: 361773 - DNA, 30 bp, Artificial Sequence
  Synthetic oligonucleotide
agtctcatcgggaacagagaaggttcttgg

SEQ ID NO: 361774 - DNA, 30 bp, Artificial Sequence
  Synthetic oligonucleotide
acagcctattcgataaaagtagtttcttgg

SEQ ID NO: 361775 - DNA, 30 bp, Artificial Sequence
  Synthetic oligonucleotide
tttatatcgattcgttatggtaaaagttgg

SEQ ID NO: 361776 - DNA, 30 bp, Artificial Sequence
  Synthetic oligonucleotide
tgtaggggctcgctcttgggaggaagttgg

SEQ ID NO: 361777 - DNA, 30 bp, Artificial Sequence
  Synthetic oligonucleotide
ttcatactgctttttcccacgggaagttgg

SEQ ID NO: 361778 - DNA, 30 bp, Artificial Sequence
  Synthetic oligonucleotide
agcgtatcattctcattcatttccagttgg

SEQ ID NO: 361779 - DNA, 30 bp, Artificial Sequence
  Synthetic oligonucleotide
aacgactatgtatctgggatcgtcagttgg

SEQ ID NO: 361780 - DNA, 30 bp, Artificial Sequence
  Synthetic oligonucleotide
ttactccgattgggaatgaaatcacgttgg

SEQ ID NO: 361781 - DNA, 30 bp, Artificial Sequence
  Synthetic oligonucleotide
tttcgcctacggcaacaatcaggccgttgg

SEQ ID NO: 361782 - DNA, 30 bp, Artificial Sequence
  Synthetic oligonucleotide
acgctgggtagggcgtccatggtccgttgg

SEQ ID NO: 361783 - DNA, 30 bp, Artificial Sequence
  Synthetic oligonucleotide
ttgcatctaccggacggggtgcagcgttgg

SEQ ID NO: 361784 - DNA, 30 bp, Artificial Sequence
  Synthetic oligonucleotide
agcaataaatatagcagtatcctgcgttgg

SEQ ID NO: 361785 - DNA, 30 bp, Artificial Sequence
  Synthetic oligonucleotide
ataacagtttgacatcttgcctatcgttgg

SEQ ID NO: 361786 - DNA, 30 bp, Artificial Sequence
  Synthetic oligonucleotide
ccgacccgtacccgactgagtggtcgttgg

SEQ ID NO: 361787 - DNA, 30 bp, Artificial Sequence
  Synthetic oligonucleotide
tgtgaggaagttttcaggggggttcgttgg

SEQ ID NO: 361788 - DNA, 30 bp, Artificial Sequence
  Synthetic oligonucleotide
ccactacggtttggttctggcgaaggttgg

SEQ ID NO: 361789 - DNA, 30 bp, Artificial Sequence
  Synthetic oligonucleotide
agcagttgtgggtatatttatgcaggttgg

SEQ ID NO: 361790 - DNA, 30 bp, Artificial Sequence
  Synthetic oligonucleotide
ctaaggccccgtactttggcacgaggttgg

SEQ ID NO: 361791 - DNA, 30 bp, Artificial Sequence
  Synthetic oligonucleotide
gccatgtttaggggcggcgaatacggttgg

SEQ ID NO: 361792 - DNA, 30 bp, Artificial Sequence
  Synthetic oligonucleotide
gaatgcgggttctgacgcgatgaatgttgg

SEQ ID NO: 361793 - DNA, 30 bp, Artificial Sequence
  Synthetic oligonucleotide
tcattctgactcttgccacacttctgttgg

SEQ ID NO: 361794 - DNA, 30 bp, Artificial Sequence
  Synthetic oligonucleotide
atacagcaccggtattccgcgcagtgttgg

SEQ ID NO: 361795 - DNA, 30 bp, Artificial Sequence
  Synthetic oligonucleotide
agccaggtaccgcgttctcggtggtgttgg

SEQ ID NO: 361796 - DNA, 30 bp, Artificial Sequence
  Synthetic oligonucleotide
agtataatggtgggcctcatactgtgttgg

SEQ ID NO: 361797 - DNA, 30 bp, Artificial Sequence
  Synthetic oligonucleotide
tgagtccaggcttcaggtttgtattgttgg

SEQ ID NO: 361798 - DNA, 30 bp, Artificial Sequence
  Synthetic oligonucleotide
tgcgcaagtctcaagaccccgctttgttgg

SEQ ID NO: 361799 - DNA, 30 bp, Artificial Sequence
  Synthetic oligonucleotide
tagaagtgcccaaaagttgcgctttgttgg

SEQ ID NO: 361800 - DNA, 30 bp, Artificial Sequence
  Synthetic oligonucleotide
ggggtcaacatgatattatgtcaaatttgg

SEQ ID NO: 361801 - DNA, 30 bp, Artificial Sequence
  Synthetic oligonucleotide
acctagacagcggttctttttaccatttgg

SEQ ID NO: 361802 - DNA, 30 bp, Artificial Sequence
  Synthetic oligonucleotide
aagaagtcctactcgcttcgctgcatttgg

SEQ ID NO: 361803 - DNA, 30 bp, Artificial Sequence
  Synthetic oligonucleotide
aatgaaaagaagattcaacgtctcatttgg

SEQ ID NO: 361804 - DNA, 30 bp, Artificial Sequence
  Synthetic oligonucleotide
caaactcacagtgttgggtcagagatttgg

SEQ ID NO: 361805 - DNA, 30 bp, Artificial Sequence
  Synthetic oligonucleotide
ccgtttaccggactttgcggcacgatttgg

SEQ ID NO: 361806 - DNA, 30 bp, Artificial Sequence
  Synthetic oligonucleotide
tgtgaacttagaatgtccagaaggatttgg

SEQ ID NO: 361807 - DNA, 30 bp, Artificial Sequence
  Synthetic oligonucleotide
tccctgaatggtttagacctaatgatttgg

SEQ ID NO: 361808 - DNA, 30 bp, Artificial Sequence
  Synthetic oligonucleotide
cagtgcgcgtgactagcgtttgctatttgg

SEQ ID NO: 361809 - DNA, 30 bp, Artificial Sequence
  Synthetic oligonucleotide
actgttgaataagaacatagtggtatttgg

SEQ ID NO: 361810 - DNA, 30 bp, Artificial Sequence
  Synthetic oligonucleotide
agttccattacggacaaatacattatttgg

SEQ ID NO: 361811 - DNA, 30 bp, Artificial Sequence
  Synthetic oligonucleotide
tccgggtaataaaattgcctaaaactttgg

SEQ ID NO: 361812 - DNA, 30 bp, Artificial Sequence
  Synthetic oligonucleotide
aaggcagtgtcaaagatccagttcctttgg

SEQ ID NO: 361813 - DNA, 30 bp, Artificial Sequence
  Synthetic oligonucleotide
cagaaagctatacaaaggtaacggctttgg

SEQ ID NO: 361814 - DNA, 30 bp, Artificial Sequence
  Synthetic oligonucleotide
tacctacgtcggcatatagcttatctttgg

SEQ ID NO: 361815 - DNA, 30 bp, Artificial Sequence
  Synthetic oligonucleotide
tctccgggtcacggaagacagcgtctttgg

SEQ ID NO: 361816 - DNA, 30 bp, Artificial Sequence
  Synthetic oligonucleotide
accccacgagcgtgcggacatcgtctttgg

SEQ ID NO: 361817 - DNA, 30 bp, Artificial Sequence
  Synthetic oligonucleotide
ctgttagtaccatgtttcttaagagtttgg

SEQ ID NO: 361818 - DNA, 30 bp, Artificial Sequence
  Synthetic oligonucleotide
tgcgcctaggttataggcgccggagtttgg

SEQ ID NO: 361819 - DNA, 30 bp, Artificial Sequence
  Synthetic oligonucleotide
tcctcttgagtaggcgtgtcatgagtttgg

SEQ ID NO: 361820 - DNA, 30 bp, Artificial Sequence
  Synthetic oligonucleotide
gatgtcaattgactctgactctgcgtttgg

SEQ ID NO: 361821 - DNA, 30 bp, Artificial Sequence
  Synthetic oligonucleotide
atggttcttagtagtgctcagggggtttgg

SEQ ID NO: 361822 - DNA, 30 bp, Artificial Sequence
  Synthetic oligonucleotide
ctcgaccacccctgccaaaggtcattttgg

SEQ ID NO: 361823 - DNA, 30 bp, Artificial Sequence
  Synthetic oligonucleotide
ccgtgctccgcgaatactaagtgattttgg

SEQ ID NO: 361824 - DNA, 30 bp, Artificial Sequence
  Synthetic oligonucleotide
ccaattgtaatattataggggtgattttgg

SEQ ID NO: 361825 - DNA, 30 bp, Artificial Sequence
  Synthetic oligonucleotide
attgggaggcccttagaaaggtgcttttgg

SEQ ID NO: 361826 - DNA, 30 bp, Artificial Sequence
  Synthetic oligonucleotide
gttggtggcagcccagtatcgcggttttgg

SEQ ID NO: 361827 - DNA, 30 bp, Artificial Sequence
  Synthetic oligonucleotide
cagattagtcgtctataggatagtttttgg

SEQ ID NO: 361828 - DNA, 30 bp, Artificial Sequence
  Synthetic oligonucleotide
gacgtaaaatccgacctccgcggtttttgg

SEQ ID NO: 361829 - DNA, 30 bp, Artificial Sequence
  Synthetic oligonucleotide
tgtctcagtgcaggcactatctaaaaaatg

SEQ ID NO: 361830 - DNA, 30 bp, Artificial Sequence
  Synthetic oligonucleotide
cgtacagtcaaatgacgaagcaagaaaatg

SEQ ID NO: 361831 - DNA, 31 bp, Artificial Sequence
  Synthetic oligonucleotide
agggcgcagcgacaaaacttaggataaaatg

SEQ ID NO: 361832 - DNA, 30 bp, Artificial Sequence
  Synthetic oligonucleotide
aatacgattaagcgactgtgctgacaaatg

SEQ ID NO: 361833 - DNA, 30 bp, Artificial Sequence
  Synthetic oligonucleotide
ttaactgttatgtataaaaagatacaaatg

SEQ ID NO: 361834 - DNA, 30 bp, Artificial Sequence
  Synthetic oligonucleotide
ctcatgcaccgtgttggagctgcccaaatg

SEQ ID NO: 361835 - DNA, 30 bp, Artificial Sequence
  Synthetic oligonucleotide
ggggaggccgctcaagtaaacggccaaatg

SEQ ID NO: 361836 - DNA, 30 bp, Artificial Sequence
  Synthetic oligonucleotide
accaataccggggattgcaatcagcaaatg

SEQ ID NO: 361837 - DNA, 30 bp, Artificial Sequence
  Synthetic oligonucleotide
tgtgatacaggcttgttgatctggcaaatg

SEQ ID NO: 361838 - DNA, 30 bp, Artificial Sequence
  Synthetic oligonucleotide
ggcattcgtacttcaaagattactcaaatg

SEQ ID NO: 361839 - DNA, 30 bp, Artificial Sequence
  Synthetic oligonucleotide
ggaatacgattatgctctcacattcaaatg

SEQ ID NO: 361840 - DNA, 30 bp, Artificial Sequence
  Synthetic oligonucleotide
actcacaggtaccatggtctatttcaaatg

SEQ ID NO: 361841 - DNA, 30 bp, Artificial Sequence
  Synthetic oligonucleotide
tctgttccgcagtgatcaaccccagaaatg

SEQ ID NO: 361842 - DNA, 30 bp, Artificial Sequence
  Synthetic oligonucleotide
cctttatctagtctggatagaaacgaaatg

SEQ ID NO: 361843 - DNA, 30 bp, Artificial Sequence
  Synthetic oligonucleotide
ctaccgggctcacgagtgagttacgaaatg

SEQ ID NO: 361844 - DNA, 30 bp, Artificial Sequence
  Synthetic oligonucleotide
cgcctggtatggacaggggatagggaaatg

SEQ ID NO: 361845 - DNA, 30 bp, Artificial Sequence
  Synthetic oligonucleotide
tgagcagccggattacaatcccgggaaatg

SEQ ID NO: 361846 - DNA, 30 bp, Artificial Sequence
  Synthetic oligonucleotide
ttcaaactggttgctgtacgcatggaaatg

SEQ ID NO: 361847 - DNA, 30 bp, Artificial Sequence
  Synthetic oligonucleotide
ctgccagttcaagcgaagagtcatgaaatg

SEQ ID NO: 361848 - DNA, 30 bp, Artificial Sequence
  Synthetic oligonucleotide
tgtatgttagccatgacagtgcaataaatg

SEQ ID NO: 361849 - DNA, 30 bp, Artificial Sequence
  Synthetic oligonucleotide
aaggtgccggggtggggcaggggataaatg

SEQ ID NO: 361850 - DNA, 30 bp, Artificial Sequence
  Synthetic oligonucleotide
ggaattagatgccattctgcatgataaatg

SEQ ID NO: 361851 - DNA, 30 bp, Artificial Sequence
  Synthetic oligonucleotide
agtgtcttcgctatatccttcgactaaatg

SEQ ID NO: 361852 - DNA, 30 bp, Artificial Sequence
  Synthetic oligonucleotide
tctttgtaactgtggcattagctctaaatg

SEQ ID NO: 361853 - DNA, 30 bp, Artificial Sequence
  Synthetic oligonucleotide
ttcccaaggacggcgttttaccagtaaatg

SEQ ID NO: 361854 - DNA, 30 bp, Artificial Sequence
  Synthetic oligonucleotide
tcgaccataaagggactcagttcgtaaatg

SEQ ID NO: 361855 - DNA, 30 bp, Artificial Sequence
  Synthetic oligonucleotide
gaccaattccgaaaggcaatttcgtaaatg

SEQ ID NO: 361856 - DNA, 30 bp, Artificial Sequence
  Synthetic oligonucleotide
gtgttttctgggatcattccaaggtaaatg

SEQ ID NO: 361857 - DNA, 30 bp, Artificial Sequence
  Synthetic oligonucleotide
cttcgcgctgccggttcgtgatacacaatg

SEQ ID NO: 361858 - DNA, 30 bp, Artificial Sequence
  Synthetic oligonucleotide
gggcattctataacattacggtgcacaatg

SEQ ID NO: 361859 - DNA, 30 bp, Artificial Sequence
  Synthetic oligonucleotide
gaacccattgatttctaacgctagacaatg

SEQ ID NO: 361860 - DNA, 30 bp, Artificial Sequence
  Synthetic oligonucleotide
ttaggatcaatcttggaccaggaaccaatg

SEQ ID NO: 361861 - DNA, 30 bp, Artificial Sequence
  Synthetic oligonucleotide
tattgtgctctaaccccgagatagccaatg

SEQ ID NO: 361862 - DNA, 30 bp, Artificial Sequence
  Synthetic oligonucleotide
cttcgtggaggcaatggctccgtagcaatg

SEQ ID NO: 361863 - DNA, 30 bp, Artificial Sequence
  Synthetic oligonucleotide
gaaggcttcagcttctagcatttagcaatg

SEQ ID NO: 361864 - DNA, 30 bp, Artificial Sequence
  Synthetic oligonucleotide
gatatgtcattacgatgcattaccgcaatg

SEQ ID NO: 361865 - DNA, 30 bp, Artificial Sequence
  Synthetic oligonucleotide
gccttcggtcggtttcggagagccgcaatg

SEQ ID NO: 361866 - DNA, 30 bp, Artificial Sequence
  Synthetic oligonucleotide
ctatcaatccgcaggctgctttccgcaatg

SEQ ID NO: 361867 - DNA, 30 bp, Artificial Sequence
  Synthetic oligonucleotide
cttgagaggccctgcgctactagggcaatg

SEQ ID NO: 361868 - DNA, 30 bp, Artificial Sequence
  Synthetic oligonucleotide
cgcttatcttctgataggggcttggcaatg

SEQ ID NO: 361869 - DNA, 30 bp, Artificial Sequence
  Synthetic oligonucleotide
atgtcacacacggtgctgggaagatcaatg

SEQ ID NO: 361870 - DNA, 30 bp, Artificial Sequence
  Synthetic oligonucleotide
taccggacccgtcaagtatagcactcaatg

SEQ ID NO: 361871 - DNA, 31 bp, Artificial Sequence
  Synthetic oligonucleotide
tggaagggattcccgcttacgcgcctcaatg

SEQ ID NO: 361872 - DNA, 30 bp, Artificial Sequence
  Synthetic oligonucleotide
agagcatgcttgtccgacgtcagctcaatg

SEQ ID NO: 361873 - DNA, 30 bp, Artificial Sequence
  Synthetic oligonucleotide
ttgaatttagaggttatgtatcggtcaatg

SEQ ID NO: 361874 - DNA, 30 bp, Artificial Sequence
  Synthetic oligonucleotide
agatgcgctagggataacgccctgtcaatg

SEQ ID NO: 361875 - DNA, 30 bp, Artificial Sequence
  Synthetic oligonucleotide
gtgatgcaagcaatggcaaatcattcaatg

SEQ ID NO: 361876 - DNA, 30 bp, Artificial Sequence
  Synthetic oligonucleotide
atctggcgcgtgggcgcacatacaagaatg

SEQ ID NO: 361877 - DNA, 30 bp, Artificial Sequence
  Synthetic oligonucleotide
tatagatatttagagccgtagtacagaatg

SEQ ID NO: 361878 - DNA, 30 bp, Artificial Sequence
  Synthetic oligonucleotide
actatcaattcgaaggtccccggcagaatg

SEQ ID NO: 361879 - DNA, 30 bp, Artificial Sequence
  Synthetic oligonucleotide
catgttagttcctcagtaatcttgagaatg

SEQ ID NO: 361880 - DNA, 30 bp, Artificial Sequence
  Synthetic oligonucleotide
tagcgacgccggttgaatagcattagaatg

SEQ ID NO: 361881 - DNA, 30 bp, Artificial Sequence
  Synthetic oligonucleotide
tcccatctactagcggttgtctcacgaatg

SEQ ID NO: 361882 - DNA, 30 bp, Artificial Sequence
  Synthetic oligonucleotide
atatggcttggtgattcgagtcaccgaatg

SEQ ID NO: 361883 - DNA, 30 bp, Artificial Sequence
  Synthetic oligonucleotide
gccccgtcggccgagaaagaaggccgaatg

SEQ ID NO: 361884 - DNA, 30 bp, Artificial Sequence
  Synthetic oligonucleotide
gtacttgcggccaatcgatcctagcgaatg

SEQ ID NO: 361885 - DNA, 30 bp, Artificial Sequence
  Synthetic oligonucleotide
gcgtcgaggttttatgatcaatctcgaatg

SEQ ID NO: 361886 - DNA, 30 bp, Artificial Sequence
  Synthetic oligonucleotide
ctggagcgcctaggcaaagaaagaggaatg

SEQ ID NO: 361887 - DNA, 30 bp, Artificial Sequence
  Synthetic oligonucleotide
gtaagcttcagaacagacgtaatgggaatg

SEQ ID NO: 361888 - DNA, 30 bp, Artificial Sequence
  Synthetic oligonucleotide
gcagaaactccagtgggagtaagtggaatg

SEQ ID NO: 361889 - DNA, 30 bp, Artificial Sequence
  Synthetic oligonucleotide
gcttgattcatctcaaggatagactgaatg

SEQ ID NO: 361890 - DNA, 30 bp, Artificial Sequence
  Synthetic oligonucleotide
taaagcggaattgttagttctgcttgaatg

SEQ ID NO: 361891 - DNA, 30 bp, Artificial Sequence
  Synthetic oligonucleotide
gtcattgccagttcacgaatcacaataatg

SEQ ID NO: 361892 - DNA, 30 bp, Artificial Sequence
  Synthetic oligonucleotide
ctcttcaaactgtcctgctagggaataatg

SEQ ID NO: 361893 - DNA, 30 bp, Artificial Sequence
  Synthetic oligonucleotide
gagtgggttctagattagtttttaataatg

SEQ ID NO: 361894 - DNA, 31 bp, Artificial Sequence
  Synthetic oligonucleotide
aaagggcctctcgatcgcgatatgcataatg

SEQ ID NO: 361895 - DNA, 30 bp, Artificial Sequence
  Synthetic oligonucleotide
aatcgattcgttgacatataatagataatg

SEQ ID NO: 361896 - DNA, 30 bp, Artificial Sequence
  Synthetic oligonucleotide
taatactgattcataagagcgtatataatg

SEQ ID NO: 361897 - DNA, 30 bp, Artificial Sequence
  Synthetic oligonucleotide
ggcaggcaggtccctgacgggcgtataatg

SEQ ID NO: 361898 - DNA, 30 bp, Artificial Sequence
  Synthetic oligonucleotide
gacattagcgaccttagagcgagcctaatg

SEQ ID NO: 361899 - DNA, 30 bp, Artificial Sequence
  Synthetic oligonucleotide
ggcgttgaatagaaacgtatttgcctaatg

SEQ ID NO: 361900 - DNA, 30 bp, Artificial Sequence
  Synthetic oligonucleotide
gccaaatcaccaggatggcgtttcctaatg

SEQ ID NO: 361901 - DNA, 30 bp, Artificial Sequence
  Synthetic oligonucleotide
gagcttcgtacaaacacttttaagctaatg

SEQ ID NO: 361902 - DNA, 30 bp, Artificial Sequence
  Synthetic oligonucleotide
ttcacctccatgggccaaagcacgctaatg

SEQ ID NO: 361903 - DNA, 30 bp, Artificial Sequence
  Synthetic oligonucleotide
gcagcgctatttggcactggagggctaatg

SEQ ID NO: 361904 - DNA, 30 bp, Artificial Sequence
  Synthetic oligonucleotide
gggtcaactatattactacaattgctaatg

SEQ ID NO: 361905 - DNA, 30 bp, Artificial Sequence
  Synthetic oligonucleotide
atcttgtcataggataacttacatctaatg

SEQ ID NO: 361906 - DNA, 30 bp, Artificial Sequence
  Synthetic oligonucleotide
gcttagcaggggttcactctgagtctaatg

SEQ ID NO: 361907 - DNA, 30 bp, Artificial Sequence
  Synthetic oligonucleotide
aatatggtaagctatggtcttgttctaatg

SEQ ID NO: 361908 - DNA, 30 bp, Artificial Sequence
  Synthetic oligonucleotide
gagctttatacttgagaggataaagtaatg

SEQ ID NO: 361909 - DNA, 30 bp, Artificial Sequence
  Synthetic oligonucleotide
aggtagtagctgagcgtcttttcagtaatg

SEQ ID NO: 361910 - DNA, 30 bp, Artificial Sequence
  Synthetic oligonucleotide
gactggcaagtgcctgggctccgcgtaatg

SEQ ID NO: 361911 - DNA, 30 bp, Artificial Sequence
  Synthetic oligonucleotide
aacatggagagattcccctatccggtaatg

SEQ ID NO: 361912 - DNA, 30 bp, Artificial Sequence
  Synthetic oligonucleotide
gcttatgatatacattaaatagatgtaatg

SEQ ID NO: 361913 - DNA, 30 bp, Artificial Sequence
  Synthetic oligonucleotide
tcccaaaaaatttcggaacaaacattaatg

SEQ ID NO: 361914 - DNA, 30 bp, Artificial Sequence
  Synthetic oligonucleotide
ccacttaaggtatcttgcccaccattaatg

SEQ ID NO: 361915 - DNA, 30 bp, Artificial Sequence
  Synthetic oligonucleotide
gtgccgcatgggttagtccgcgcattaatg

SEQ ID NO: 361916 - DNA, 30 bp, Artificial Sequence
  Synthetic oligonucleotide
gaatcttgagttaaacatcgatcattaatg

SEQ ID NO: 361917 - DNA, 30 bp, Artificial Sequence
  Synthetic oligonucleotide
ggatttgtttcgagccccgagggcaacatg

SEQ ID NO: 361918 - DNA, 30 bp, Artificial Sequence
  Synthetic oligonucleotide
tatcgctgaatgcgataggaatgcaacatg

SEQ ID NO: 361919 - DNA, 30 bp, Artificial Sequence
  Synthetic oligonucleotide
cggaatttgtttcatgttcggccgaacatg

SEQ ID NO: 361920 - DNA, 30 bp, Artificial Sequence
  Synthetic oligonucleotide
ccaaccttgcctgccaaaggcaggaacatg

SEQ ID NO: 361921 - DNA, 30 bp, Artificial Sequence
  Synthetic oligonucleotide
cagcgttttttagcaagcccgtggaacatg

SEQ ID NO: 361922 - DNA, 30 bp, Artificial Sequence
  Synthetic oligonucleotide
gcaagcaccgttgcaaggtcatgtaacatg

SEQ ID NO: 361923 - DNA, 30 bp, Artificial Sequence
  Synthetic oligonucleotide
ggcattgtctattgaggcaggggacacatg

SEQ ID NO: 361924 - DNA, 30 bp, Artificial Sequence
  Synthetic oligonucleotide
caagggtcacctattctacccgctcacatg

SEQ ID NO: 361925 - DNA, 30 bp, Artificial Sequence
  Synthetic oligonucleotide
aacgctccaattacgagtaacagtcacatg

SEQ ID NO: 361926 - DNA, 30 bp, Artificial Sequence
  Synthetic oligonucleotide
tatattaagattaaaacgctatttcacatg

SEQ ID NO: 361927 - DNA, 30 bp, Artificial Sequence
  Synthetic oligonucleotide
gcgtacatgactctaaatctaatagacatg

SEQ ID NO: 361928 - DNA, 30 bp, Artificial Sequence
  Synthetic oligonucleotide
tccagactgcactcctgtcagttagacatg

SEQ ID NO: 361929 - DNA, 30 bp, Artificial Sequence
  Synthetic oligonucleotide
ccgaccttgactgttttactcaaggacatg

SEQ ID NO: 361930 - DNA, 30 bp, Artificial Sequence
  Synthetic oligonucleotide
tcaagcttgatacagattcggaaggacatg

SEQ ID NO: 361931 - DNA, 30 bp, Artificial Sequence
  Synthetic oligonucleotide
tatccctaacctaattaactgccggacatg

SEQ ID NO: 361932 - DNA, 30 bp, Artificial Sequence
  Synthetic oligonucleotide
aacattgcaccacacggtactatggacatg

SEQ ID NO: 361933 - DNA, 30 bp, Artificial Sequence
  Synthetic oligonucleotide
gcccctatggtccactttagctcatacatg

SEQ ID NO: 361934 - DNA, 30 bp, Artificial Sequence
  Synthetic oligonucleotide
agtgctaagcgagcgcgcggtcgctacatg

SEQ ID NO: 361935 - DNA, 30 bp, Artificial Sequence
  Synthetic oligonucleotide
gagtcactatatctgaactcaggctacatg

SEQ ID NO: 361936 - DNA, 30 bp, Artificial Sequence
  Synthetic oligonucleotide
aatccgttgcaggattagcgaaggtacatg

SEQ ID NO: 361937 - DNA, 30 bp, Artificial Sequence
  Synthetic oligonucleotide
agtccagcataatattgtgtgtattacatg

SEQ ID NO: 361938 - DNA, 30 bp, Artificial Sequence
  Synthetic oligonucleotide
ttaataccgggagtcgccacaatttacatg

SEQ ID NO: 361939 - DNA, 30 bp, Artificial Sequence
  Synthetic oligonucleotide
gagttcggcgaccttaaaaaaacaaccatg

SEQ ID NO: 361940 - DNA, 30 bp, Artificial Sequence
  Synthetic oligonucleotide
aatctcatcagcgtccatgtaacaaccatg

SEQ ID NO: 361941 - DNA, 30 bp, Artificial Sequence
  Synthetic oligonucleotide
actgggcaacacgctgtggtggcaaccatg

SEQ ID NO: 361942 - DNA, 30 bp, Artificial Sequence
  Synthetic oligonucleotide
aaactggcgggctaactaggtataaccatg

SEQ ID NO: 361943 - DNA, 30 bp, Artificial Sequence
  Synthetic oligonucleotide
tttaatcattgggatagatacaacaccatg

SEQ ID NO: 361944 - DNA, 30 bp, Artificial Sequence
  Synthetic oligonucleotide
ttccgggaccctgcttgttaggacaccatg

SEQ ID NO: 361945 - DNA, 30 bp, Artificial Sequence
  Synthetic oligonucleotide
cttcagtatacgtgtaaacgacttaccatg

SEQ ID NO: 361946 - DNA, 30 bp, Artificial Sequence
  Synthetic oligonucleotide
ggtccaagattttcctatgaaatacccatg

SEQ ID NO: 361947 - DNA, 30 bp, Artificial Sequence
  Synthetic oligonucleotide
cttgggaccatcgggaagtcagtacccatg

SEQ ID NO: 361948 - DNA, 30 bp, Artificial Sequence
  Synthetic oligonucleotide
ataggctgagctcttaccagttcccccatg

SEQ ID NO: 361949 - DNA, 30 bp, Artificial Sequence
  Synthetic oligonucleotide
aaaacacgtcgcactttacagagccccatg

SEQ ID NO: 361950 - DNA, 30 bp, Artificial Sequence
  Synthetic oligonucleotide
gctaaacttcacgggtaccgaagtcccatg

SEQ ID NO: 361951 - DNA, 30 bp, Artificial Sequence
  Synthetic oligonucleotide
tgggctctaggccttcgtgagggtcccatg

SEQ ID NO: 361952 - DNA, 30 bp, Artificial Sequence
  Synthetic oligonucleotide
cggctaatgaccaacgtatcgtgtcccatg

SEQ ID NO: 361953 - DNA, 30 bp, Artificial Sequence
  Synthetic oligonucleotide
agattatcgggtcacgtgccggtggccatg

SEQ ID NO: 361954 - DNA, 30 bp, Artificial Sequence
  Synthetic oligonucleotide
gtggcaaacttaagacgcacagagtccatg

SEQ ID NO: 361955 - DNA, 30 bp, Artificial Sequence
  Synthetic oligonucleotide
atgaccgatggtgtcgcccctgtgtccatg

SEQ ID NO: 361956 - DNA, 30 bp, Artificial Sequence
  Synthetic oligonucleotide
gcacgtggcagacattaatacggttccatg

SEQ ID NO: 361957 - DNA, 30 bp, Artificial Sequence
  Synthetic oligonucleotide
gaatcttcccggctcgtcctaacaagcatg

SEQ ID NO: 361958 - DNA, 30 bp, Artificial Sequence
  Synthetic oligonucleotide
gattccacggtgcactactagacaagcatg

SEQ ID NO: 361959 - DNA, 30 bp, Artificial Sequence
  Synthetic oligonucleotide
catagtgtgttggcacagcggcccagcatg

SEQ ID NO: 361960 - DNA, 30 bp, Artificial Sequence
  Synthetic oligonucleotide
caacttgccttacatgagatatagagcatg

SEQ ID NO: 361961 - DNA, 30 bp, Artificial Sequence
  Synthetic oligonucleotide
gaacatgctgtcatcgaaggagcgagcatg

SEQ ID NO: 361962 - DNA, 30 bp, Artificial Sequence
  Synthetic oligonucleotide
gcacatcagaaatatcttgataggagcatg

SEQ ID NO: 361963 - DNA, 30 bp, Artificial Sequence
  Synthetic oligonucleotide
catctacctaccaagctataggtgagcatg

SEQ ID NO: 361964 - DNA, 30 bp, Artificial Sequence
  Synthetic oligonucleotide
ctgatctttattatacaatttgtgagcatg

SEQ ID NO: 361965 - DNA, 30 bp, Artificial Sequence
  Synthetic oligonucleotide
ctgtatggactcttaaactgtgcacgcatg

SEQ ID NO: 361966 - DNA, 30 bp, Artificial Sequence
  Synthetic oligonucleotide
cacatttaaatagctaggaacatacgcatg

SEQ ID NO: 361967 - DNA, 30 bp, Artificial Sequence
  Synthetic oligonucleotide
accagggaacgacacgggagagaccgcatg

SEQ ID NO: 361968 - DNA, 31 bp, Artificial Sequence
  Synthetic oligonucleotide
atcgcaatgatgtagtatcaatctccgcatg

SEQ ID NO: 361969 - DNA, 30 bp, Artificial Sequence
  Synthetic oligonucleotide
cacccaaacgttataaatgacatgcgcatg

SEQ ID NO: 361970 - DNA, 30 bp, Artificial Sequence
  Synthetic oligonucleotide
gcctgcgtaaatctcctacgatgaggcatg

SEQ ID NO: 361971 - DNA, 30 bp, Artificial Sequence
  Synthetic oligonucleotide
gagggaaagttactcgctacttacggcatg

SEQ ID NO: 361972 - DNA, 30 bp, Artificial Sequence
  Synthetic oligonucleotide
ggtcgtccggtagagccccataccggcatg

SEQ ID NO: 361973 - DNA, 30 bp, Artificial Sequence
  Synthetic oligonucleotide
tttcatgctgctaggacctcggcgggcatg

SEQ ID NO: 361974 - DNA, 30 bp, Artificial Sequence
  Synthetic oligonucleotide
ctggttattcgttaaaaaatgggtggcatg

SEQ ID NO: 361975 - DNA, 30 bp, Artificial Sequence
  Synthetic oligonucleotide
ttgctgactaaggacacacgctgtggcatg

SEQ ID NO: 361976 - DNA, 30 bp, Artificial Sequence
  Synthetic oligonucleotide
aacagaaaaagggggaataaggttggcatg

SEQ ID NO: 361977 - DNA, 30 bp, Artificial Sequence
  Synthetic oligonucleotide
aataaggactcgacctattggctatgcatg

SEQ ID NO: 361978 - DNA, 30 bp, Artificial Sequence
  Synthetic oligonucleotide
gtacgttaggatcggaagtcagtatgcatg

SEQ ID NO: 361979 - DNA, 30 bp, Artificial Sequence
  Synthetic oligonucleotide
gggatacgatgtggtggggtagcgtgcatg

SEQ ID NO: 361980 - DNA, 30 bp, Artificial Sequence
  Synthetic oligonucleotide
gtgggggacagagccctaatggggtgcatg

SEQ ID NO: 361981 - DNA, 30 bp, Artificial Sequence
  Synthetic oligonucleotide
gttatcgtgcgggtcttatattcttgcatg

SEQ ID NO: 361982 - DNA, 30 bp, Artificial Sequence
  Synthetic oligonucleotide
caacggtaaagatgaacgccggtaatcatg

SEQ ID NO: 361983 - DNA, 30 bp, Artificial Sequence
  Synthetic oligonucleotide
gcacattgataggaagacatattaatcatg

SEQ ID NO: 361984 - DNA, 30 bp, Artificial Sequence
  Synthetic oligonucleotide
tgtaaacctaacgattaggagaggatcatg

SEQ ID NO: 361985 - DNA, 30 bp, Artificial Sequence
  Synthetic oligonucleotide
ggggaggccacggatcagaaaatgatcatg

SEQ ID NO: 361986 - DNA, 30 bp, Artificial Sequence
  Synthetic oligonucleotide
gctgaagaaataacgaccagccttatcatg

SEQ ID NO: 361987 - DNA, 31 bp, Artificial Sequence
  Synthetic oligonucleotide
cggcgtggcaccaggagctccagttatcatg

SEQ ID NO: 361988 - DNA, 30 bp, Artificial Sequence
  Synthetic oligonucleotide
aaaaaggagtcattaccactcagactcatg

SEQ ID NO: 361989 - DNA, 30 bp, Artificial Sequence
  Synthetic oligonucleotide
cgcatgctcgttatacacataatactcatg

SEQ ID NO: 361990 - DNA, 30 bp, Artificial Sequence
  Synthetic oligonucleotide
ccagattctaaccaggatctcttgctcatg

SEQ ID NO: 361991 - DNA, 30 bp, Artificial Sequence
  Synthetic oligonucleotide
cttacgcctccagcatccaccaaggtcatg

SEQ ID NO: 361992 - DNA, 30 bp, Artificial Sequence
  Synthetic oligonucleotide
cccgcatcgtcacaactttggggggtcatg

SEQ ID NO: 361993 - DNA, 30 bp, Artificial Sequence
  Synthetic oligonucleotide
gtcgggttaatgttaggagatcctgtcatg

SEQ ID NO: 361994 - DNA, 30 bp, Artificial Sequence
  Synthetic oligonucleotide
cctgtaactaatctctcgggctgtgtcatg

SEQ ID NO: 361995 - DNA, 30 bp, Artificial Sequence
  Synthetic oligonucleotide
tcagtgaaccccttttctaagggattcatg

SEQ ID NO: 361996 - DNA, 30 bp, Artificial Sequence
  Synthetic oligonucleotide
tataatcttgtgggtaagtccaccttcatg

SEQ ID NO: 361997 - DNA, 30 bp, Artificial Sequence
  Synthetic oligonucleotide
aagccaatggtaccttccggccgcttcatg

SEQ ID NO: 361998 - DNA, 30 bp, Artificial Sequence
  Synthetic oligonucleotide
tagaagcgttagatctcagtatgcttcatg

SEQ ID NO: 361999 - DNA, 30 bp, Artificial Sequence
  Synthetic oligonucleotide
ttaaagtacttggtatgggccttgttcatg

SEQ ID NO: 362000 - DNA, 30 bp, Artificial Sequence
  Synthetic oligonucleotide
cgttcggaggtgactgctataaatttcatg

SEQ ID NO: 362001 - DNA, 30 bp, Artificial Sequence
  Synthetic oligonucleotide
cgtcttgtcagacaggacagatatttcatg

SEQ ID NO: 362002 - DNA, 30 bp, Artificial Sequence
  Synthetic oligonucleotide
gtaagcctcttatagggagctctgaagatg

SEQ ID NO: 362003 - DNA, 30 bp, Artificial Sequence
  Synthetic oligonucleotide
tcccaggttgcgataggtctgtataagatg

SEQ ID NO: 362004 - DNA, 30 bp, Artificial Sequence
  Synthetic oligonucleotide
ttcgtctcacgcgacttcgtgtgccagatg

SEQ ID NO: 362005 - DNA, 30 bp, Artificial Sequence
  Synthetic oligonucleotide
gggcaagccacggacgcggataagcagatg

SEQ ID NO: 362006 - DNA, 30 bp, Artificial Sequence
  Synthetic oligonucleotide
ggctggtgacggatctactgcacgcagatg

SEQ ID NO: 362007 - DNA, 30 bp, Artificial Sequence
  Synthetic oligonucleotide
gcatccaagcgtctgggtggcccgcagatg

SEQ ID NO: 362008 - DNA, 30 bp, Artificial Sequence
  Synthetic oligonucleotide
cccaatttcccactattagcctgtcagatg

SEQ ID NO: 362009 - DNA, 30 bp, Artificial Sequence
  Synthetic oligonucleotide
acctgagaaaggcattcccggccagagatg

SEQ ID NO: 362010 - DNA, 30 bp, Artificial Sequence
  Synthetic oligonucleotide
atttaagcgaattgatcgttagtagagatg

SEQ ID NO: 362011 - DNA, 30 bp, Artificial Sequence
  Synthetic oligonucleotide
aacaatggtcttgcttttcgcgacgagatg

SEQ ID NO: 362012 - DNA, 30 bp, Artificial Sequence
  Synthetic oligonucleotide
tcattcacgaaaaacactgcccgtgagatg

SEQ ID NO: 362013 - DNA, 30 bp, Artificial Sequence
  Synthetic oligonucleotide
gggccgacttgaagatagggattatagatg

SEQ ID NO: 362014 - DNA, 30 bp, Artificial Sequence
  Synthetic oligonucleotide
acatccggagtcgctttgaggtcgtagatg

SEQ ID NO: 362015 - DNA, 30 bp, Artificial Sequence
  Synthetic oligonucleotide
gatctgagagtttttctcatgatcacgatg

SEQ ID NO: 362016 - DNA, 30 bp, Artificial Sequence
  Synthetic oligonucleotide
gaagcggctcagatgtacccatcgacgatg

SEQ ID NO: 362017 - DNA, 30 bp, Artificial Sequence
  Synthetic oligonucleotide
acagatggagctccatttccctggacgatg

SEQ ID NO: 362018 - DNA, 30 bp, Artificial Sequence
  Synthetic oligonucleotide
cccgtgagtttgcggaacgggggtacgatg

SEQ ID NO: 362019 - DNA, 30 bp, Artificial Sequence
  Synthetic oligonucleotide
aatcttgtgaattgttgagggttaccgatg

SEQ ID NO: 362020 - DNA, 30 bp, Artificial Sequence
  Synthetic oligonucleotide
attgatgaacggtgagcaaaacccccgatg

SEQ ID NO: 362021 - DNA, 30 bp, Artificial Sequence
  Synthetic oligonucleotide
ggttcagatttgtccttttcctggccgatg

SEQ ID NO: 362022 - DNA, 30 bp, Artificial Sequence
  Synthetic oligonucleotide
taagacgcggcctgctacttagaagcgatg

SEQ ID NO: 362023 - DNA, 30 bp, Artificial Sequence
  Synthetic oligonucleotide
tttgcagccttaggtaccagtggagcgatg

SEQ ID NO: 362024 - DNA, 30 bp, Artificial Sequence
  Synthetic oligonucleotide
atatacactcgctataaatctgtcgcgatg

SEQ ID NO: 362025 - DNA, 30 bp, Artificial Sequence
  Synthetic oligonucleotide
ggccttttcatagctgactatggggcgatg

SEQ ID NO: 362026 - DNA, 30 bp, Artificial Sequence
  Synthetic oligonucleotide
cggatacgtcgccgggaacgcaatgcgatg

SEQ ID NO: 362027 - DNA, 30 bp, Artificial Sequence
  Synthetic oligonucleotide
atgggtgatcgtccatgggcatggtcgatg

SEQ ID NO: 362028 - DNA, 30 bp, Artificial Sequence
  Synthetic oligonucleotide
attaaaacgtgcgttccacttcattcgatg

SEQ ID NO: 362029 - DNA, 30 bp, Artificial Sequence
  Synthetic oligonucleotide
cttcaggaaagctcgcgttaggaaaggatg

SEQ ID NO: 362030 - DNA, 30 bp, Artificial Sequence
  Synthetic oligonucleotide
catcctatccagttggtgaatgaaaggatg

SEQ ID NO: 362031 - DNA, 30 bp, Artificial Sequence
  Synthetic oligonucleotide
aaataatccaacatcgcgcttcgaaggatg

SEQ ID NO: 362032 - DNA, 30 bp, Artificial Sequence
  Synthetic oligonucleotide
gctaagcatatcactgaacggctaaggatg

SEQ ID NO: 362033 - DNA, 30 bp, Artificial Sequence
  Synthetic oligonucleotide
cccgtgatagtgcttgagatgcgcaggatg

SEQ ID NO: 362034 - DNA, 30 bp, Artificial Sequence
  Synthetic oligonucleotide
ggccgtcagacgaggcttttctcgaggatg

SEQ ID NO: 362035 - DNA, 30 bp, Artificial Sequence
  Synthetic oligonucleotide
aacccgtgcccgatttagttcgggaggatg

SEQ ID NO: 362036 - DNA, 30 bp, Artificial Sequence
  Synthetic oligonucleotide
cgggcagcgctttaataagatgtgaggatg

SEQ ID NO: 362037 - DNA, 30 bp, Artificial Sequence
  Synthetic oligonucleotide
gtagtataaacagtcctccgctgacggatg

SEQ ID NO: 362038 - DNA, 30 bp, Artificial Sequence
  Synthetic oligonucleotide
agttttgttggaagtgggaaatgccggatg

SEQ ID NO: 362039 - DNA, 30 bp, Artificial Sequence
  Synthetic oligonucleotide
cgaaacctcgctcattcggggacgcggatg

SEQ ID NO: 362040 - DNA, 30 bp, Artificial Sequence
  Synthetic oligonucleotide
acagacagcttttgagacttgccgcggatg

SEQ ID NO: 362041 - DNA, 30 bp, Artificial Sequence
  Synthetic oligonucleotide
gttctgtctgaccctagtgtgtctcggatg

SEQ ID NO: 362042 - DNA, 30 bp, Artificial Sequence
  Synthetic oligonucleotide
taggaacccaccgcggtgcacccatggatg

SEQ ID NO: 362043 - DNA, 30 bp, Artificial Sequence
  Synthetic oligonucleotide
tgagtcacatttcggctaagactatggatg

SEQ ID NO: 362044 - DNA, 30 bp, Artificial Sequence
  Synthetic oligonucleotide
tgtgatgaactcagctcagctctatggatg

SEQ ID NO: 362045 - DNA, 30 bp, Artificial Sequence
  Synthetic oligonucleotide
agtctttcactagagcccaaattatggatg

SEQ ID NO: 362046 - DNA, 30 bp, Artificial Sequence
  Synthetic oligonucleotide
gatctcgattcatgcttaaccatctggatg

SEQ ID NO: 362047 - DNA, 30 bp, Artificial Sequence
  Synthetic oligonucleotide
atcgcccacgtggttatctcaaagtggatg

SEQ ID NO: 362048 - DNA, 30 bp, Artificial Sequence
  Synthetic oligonucleotide
gcacatgtgtactcgggacatcagtggatg

SEQ ID NO: 362049 - DNA, 30 bp, Artificial Sequence
  Synthetic oligonucleotide
ttctccggatcttcaagcgggaattggatg

SEQ ID NO: 362050 - DNA, 30 bp, Artificial Sequence
  Synthetic oligonucleotide
agtttctatagttaaacacgcctttggatg

SEQ ID NO: 362051 - DNA, 31 bp, Artificial Sequence
  Synthetic oligonucleotide
cgacggctctgttagacaatgacaaatgatg

SEQ ID NO: 362052 - DNA, 30 bp, Artificial Sequence
  Synthetic oligonucleotide
tatctttgtaggataaatccgggaatgatg

SEQ ID NO: 362053 - DNA, 30 bp, Artificial Sequence
  Synthetic oligonucleotide
taatagtagagtggagcaggcttaatgatg

SEQ ID NO: 362054 - DNA, 30 bp, Artificial Sequence
  Synthetic oligonucleotide
ttctaactaattcgagaagtagacatgatg

SEQ ID NO: 362055 - DNA, 30 bp, Artificial Sequence
  Synthetic oligonucleotide
tatgaaagtggtagccggggtgccatgatg

SEQ ID NO: 362056 - DNA, 30 bp, Artificial Sequence
  Synthetic oligonucleotide
gtttcggtaccgccctgactttgcatgatg

SEQ ID NO: 362057 - DNA, 30 bp, Artificial Sequence
  Synthetic oligonucleotide
aacccggggtggtcgttcgaactcatgatg

SEQ ID NO: 362058 - DNA, 30 bp, Artificial Sequence
  Synthetic oligonucleotide
agtgtagctagccgctacacccagatgatg

SEQ ID NO: 362059 - DNA, 30 bp, Artificial Sequence
  Synthetic oligonucleotide
tcatttgttcagagggtgggcaatatgatg

SEQ ID NO: 362060 - DNA, 30 bp, Artificial Sequence
  Synthetic oligonucleotide
ttagcttcggcctttcataacacactgatg

SEQ ID NO: 362061 - DNA, 30 bp, Artificial Sequence
  Synthetic oligonucleotide
gatgcccgttcgtaaccgggcctcctgatg

SEQ ID NO: 362062 - DNA, 30 bp, Artificial Sequence
  Synthetic oligonucleotide
gtttagtttaattacggactttagctgatg

SEQ ID NO: 362063 - DNA, 30 bp, Artificial Sequence
  Synthetic oligonucleotide
tatgactattaaccatattattatctgatg

SEQ ID NO: 362064 - DNA, 30 bp, Artificial Sequence
  Synthetic oligonucleotide
gtgctcgttgttcgttgctaaactctgatg

SEQ ID NO: 362065 - DNA, 30 bp, Artificial Sequence
  Synthetic oligonucleotide
cattcgaacaccctcttgatcagagtgatg

SEQ ID NO: 362066 - DNA, 30 bp, Artificial Sequence
  Synthetic oligonucleotide
cagctattgacgacttaaggaatcgtgatg

SEQ ID NO: 362067 - DNA, 30 bp, Artificial Sequence
  Synthetic oligonucleotide
tccctacacattccacgtagttgggtgatg

SEQ ID NO: 362068 - DNA, 30 bp, Artificial Sequence
  Synthetic oligonucleotide
atctgacatgaacggatgtacatggtgatg

SEQ ID NO: 362069 - DNA, 30 bp, Artificial Sequence
  Synthetic oligonucleotide
gagaaacccaccgattgggttctggtgatg

SEQ ID NO: 362070 - DNA, 30 bp, Artificial Sequence
  Synthetic oligonucleotide
gcccgcatgaatcaatcgtgcgatgtgatg

SEQ ID NO: 362071 - DNA, 30 bp, Artificial Sequence
  Synthetic oligonucleotide
acaatgggttgggtccgtagcagtgtgatg

SEQ ID NO: 362072 - DNA, 30 bp, Artificial Sequence
  Synthetic oligonucleotide
cgtcaaacactcaaccggatcggattgatg

SEQ ID NO: 362073 - DNA, 30 bp, Artificial Sequence
  Synthetic oligonucleotide
atggccttctgaagccagtaagacttgatg

SEQ ID NO: 362074 - DNA, 30 bp, Artificial Sequence
  Synthetic oligonucleotide
aagggcttctacacgaattagttaaatatg

SEQ ID NO: 362075 - DNA, 30 bp, Artificial Sequence
  Synthetic oligonucleotide
aatcaacagagtcgttatacgttaaatatg

SEQ ID NO: 362076 - DNA, 30 bp, Artificial Sequence
  Synthetic oligonucleotide
tgcttgaaaagttaagatggaggcaatatg

SEQ ID NO: 362077 - DNA, 30 bp, Artificial Sequence
  Synthetic oligonucleotide
tgtagtatttcaggatcatgcttcaatatg

SEQ ID NO: 362078 - DNA, 30 bp, Artificial Sequence
  Synthetic oligonucleotide
accatgggtatgagtgtacacgtgaatatg

SEQ ID NO: 362079 - DNA, 30 bp, Artificial Sequence
  Synthetic oligonucleotide
agaccgaaaacctgcccaatgggacatatg

SEQ ID NO: 362080 - DNA, 30 bp, Artificial Sequence
  Synthetic oligonucleotide
gtgaatgtgttccgtacatacatacatatg

SEQ ID NO: 362081 - DNA, 30 bp, Artificial Sequence
  Synthetic oligonucleotide
agcccactacgtagaagttttctacatatg

SEQ ID NO: 362082 - DNA, 30 bp, Artificial Sequence
  Synthetic oligonucleotide
gtagaccaatgtcagacaccgtaccatatg

SEQ ID NO: 362083 - DNA, 30 bp, Artificial Sequence
  Synthetic oligonucleotide
tatttgtgagtccgtaagggcgggcatatg

SEQ ID NO: 362084 - DNA, 30 bp, Artificial Sequence
  Synthetic oligonucleotide
gacgggcttagagagtttaattggcatatg

SEQ ID NO: 362085 - DNA, 30 bp, Artificial Sequence
  Synthetic oligonucleotide
ggttaggattataacgtagacaatcatatg

SEQ ID NO: 362086 - DNA, 30 bp, Artificial Sequence
  Synthetic oligonucleotide
ttatgggtgccagctcttagtcttcatatg

SEQ ID NO: 362087 - DNA, 30 bp, Artificial Sequence
  Synthetic oligonucleotide
gcagttaagtgacataagaataaagatatg

SEQ ID NO: 362088 - DNA, 31 bp, Artificial Sequence
  Synthetic oligonucleotide
tagcaatccctcctagattcccacagatatg

SEQ ID NO: 362089 - DNA, 30 bp, Artificial Sequence
  Synthetic oligonucleotide
aactttactgaactggacatctcagatatg

SEQ ID NO: 362090 - DNA, 30 bp, Artificial Sequence
  Synthetic oligonucleotide
cctagcgtagacacgtgtacgctagatatg

SEQ ID NO: 362091 - DNA, 30 bp, Artificial Sequence
  Synthetic oligonucleotide
aacagcgtaatttaatatggaagcgatatg

SEQ ID NO: 362092 - DNA, 30 bp, Artificial Sequence
  Synthetic oligonucleotide
tgtgattgcgtcacatagactcaggatatg

SEQ ID NO: 362093 - DNA, 30 bp, Artificial Sequence
  Synthetic oligonucleotide
aggtatcatcaaaaaagtactgatgatatg

SEQ ID NO: 362094 - DNA, 30 bp, Artificial Sequence
  Synthetic oligonucleotide
ggatataagttcttgggattaatatatatg

SEQ ID NO: 362095 - DNA, 30 bp, Artificial Sequence
  Synthetic oligonucleotide
ttatacaacgattcggcggtcggctatatg

SEQ ID NO: 362096 - DNA, 30 bp, Artificial Sequence
  Synthetic oligonucleotide
ccgacctgcacccttaggtacatctatatg

SEQ ID NO: 362097 - DNA, 30 bp, Artificial Sequence
  Synthetic oligonucleotide
atatcgtgagatgtcaattaacagtatatg

SEQ ID NO: 362098 - DNA, 30 bp, Artificial Sequence
  Synthetic oligonucleotide
aatcaacacttatcgtcgatgttgtatatg

SEQ ID NO: 362099 - DNA, 30 bp, Artificial Sequence
  Synthetic oligonucleotide
agcgcagcgctgcccatctggccttatatg

SEQ ID NO: 362100 - DNA, 30 bp, Artificial Sequence
  Synthetic oligonucleotide
tacggatttggtcccctgagattcactatg

SEQ ID NO: 362101 - DNA, 30 bp, Artificial Sequence
  Synthetic oligonucleotide
ctatctcgtggcggtgcactagggactatg

SEQ ID NO: 362102 - DNA, 30 bp, Artificial Sequence
  Synthetic oligonucleotide
ccgcgctaataggatagtttggggactatg

SEQ ID NO: 362103 - DNA, 30 bp, Artificial Sequence
  Synthetic oligonucleotide
accggacagcggggtgcgttattgactatg

SEQ ID NO: 362104 - DNA, 30 bp, Artificial Sequence
  Synthetic oligonucleotide
ggcccaggatcctctagtgtaattactatg

SEQ ID NO: 362105 - DNA, 30 bp, Artificial Sequence
  Synthetic oligonucleotide
ctggaatacgtcggggtgccctttactatg

SEQ ID NO: 362106 - DNA, 30 bp, Artificial Sequence
  Synthetic oligonucleotide
tagtcatgggtaagtgtggtttttactatg

SEQ ID NO: 362107 - DNA, 30 bp, Artificial Sequence
  Synthetic oligonucleotide
gcatagaggagagtgcgtcgcccacctatg

SEQ ID NO: 362108 - DNA, 30 bp, Artificial Sequence
  Synthetic oligonucleotide
ttatattagacagtgtaacagtgacctatg

SEQ ID NO: 362109 - DNA, 30 bp, Artificial Sequence
  Synthetic oligonucleotide
gagtactcgcatttactcgaggcccctatg

SEQ ID NO: 362110 - DNA, 30 bp, Artificial Sequence
  Synthetic oligonucleotide
accgctaaaggacacatacaacatcctatg

SEQ ID NO: 362111 - DNA, 30 bp, Artificial Sequence
  Synthetic oligonucleotide
aaacgcattccgtcaggtccccaagctatg

SEQ ID NO: 362112 - DNA, 30 bp, Artificial Sequence
  Synthetic oligonucleotide
ccgctaaggtgtcaggtttatgaagctatg

SEQ ID NO: 362113 - DNA, 29 bp, Artificial Sequence
  Synthetic oligonucleotide
gcgcaatttaacgagtagtttacgctatg

SEQ ID NO: 362114 - DNA, 30 bp, Artificial Sequence
  Synthetic oligonucleotide
ataatccggaacccgtcccgctaggctatg

SEQ ID NO: 362115 - DNA, 30 bp, Artificial Sequence
  Synthetic oligonucleotide
gcagccgatttcgacgccgtaatggctatg

SEQ ID NO: 362116 - DNA, 30 bp, Artificial Sequence
  Synthetic oligonucleotide
gcatcgaatagtgatatagagctggctatg

SEQ ID NO: 362117 - DNA, 30 bp, Artificial Sequence
  Synthetic oligonucleotide
gacatatacgggcgactgaacttggctatg

SEQ ID NO: 362118 - DNA, 30 bp, Artificial Sequence
  Synthetic oligonucleotide
gtcccgccattaccaggcgcgggatctatg

SEQ ID NO: 362119 - DNA, 30 bp, Artificial Sequence
  Synthetic oligonucleotide
acccagttgctaggctaagtaggctctatg

SEQ ID NO: 362120 - DNA, 30 bp, Artificial Sequence
  Synthetic oligonucleotide
atactgagtaccgagatcggatgctctatg

SEQ ID NO: 362121 - DNA, 30 bp, Artificial Sequence
  Synthetic oligonucleotide
gcaggtacttaacccacagccgtctctatg

SEQ ID NO: 362122 - DNA, 30 bp, Artificial Sequence
  Synthetic oligonucleotide
tttattcgcatccggccctcccagtctatg

SEQ ID NO: 362123 - DNA, 30 bp, Artificial Sequence
  Synthetic oligonucleotide
acgcatttaatcctcacgcgtgagtctatg

SEQ ID NO: 362124 - DNA, 30 bp, Artificial Sequence
  Synthetic oligonucleotide
aaaagcgacggggctccaactgcgtctatg

SEQ ID NO: 362125 - DNA, 30 bp, Artificial Sequence
  Synthetic oligonucleotide
gaagagaccaatagaaaggggccttctatg

SEQ ID NO: 362126 - DNA, 30 bp, Artificial Sequence
  Synthetic oligonucleotide
cagcaccgcgtctctgttcgctgaagtatg

SEQ ID NO: 362127 - DNA, 30 bp, Artificial Sequence
  Synthetic oligonucleotide
tgggtgcccgtttatgcgttgataagtatg

SEQ ID NO: 362128 - DNA, 30 bp, Artificial Sequence
  Synthetic oligonucleotide
aacatgagtcgtgctcaatgtcacagtatg

SEQ ID NO: 362129 - DNA, 30 bp, Artificial Sequence
  Synthetic oligonucleotide
gaaagtgagggttgtcgggactacagtatg

SEQ ID NO: 362130 - DNA, 30 bp, Artificial Sequence
  Synthetic oligonucleotide
attatgctttgaaaagctaccaccagtatg

SEQ ID NO: 362131 - DNA, 30 bp, Artificial Sequence
  Synthetic oligonucleotide
aacccttgagcgggaaactcctccagtatg

SEQ ID NO: 362132 - DNA, 30 bp, Artificial Sequence
  Synthetic oligonucleotide
aaactttattagactcatgatagcagtatg

SEQ ID NO: 362133 - DNA, 30 bp, Artificial Sequence
  Synthetic oligonucleotide
tgtcgattgcatgtgagtatgacgagtatg

SEQ ID NO: 362134 - DNA, 30 bp, Artificial Sequence
  Synthetic oligonucleotide
ggttgcacttcgaattagcagccgagtatg

SEQ ID NO: 362135 - DNA, 30 bp, Artificial Sequence
  Synthetic oligonucleotide
aggagtattctatcaaggtcagttagtatg

SEQ ID NO: 362136 - DNA, 30 bp, Artificial Sequence
  Synthetic oligonucleotide
aagagatctaagcttgtacctccacgtatg

SEQ ID NO: 362137 - DNA, 30 bp, Artificial Sequence
  Synthetic oligonucleotide
cccgtaatgtagacaaccgccccccgtatg

SEQ ID NO: 362138 - DNA, 30 bp, Artificial Sequence
  Synthetic oligonucleotide
tccgctcagaaaggcctcgcgggccgtatg

SEQ ID NO: 362139 - DNA, 30 bp, Artificial Sequence
  Synthetic oligonucleotide
agggtttgtgggacggagattatgcgtatg

SEQ ID NO: 362140 - DNA, 30 bp, Artificial Sequence
  Synthetic oligonucleotide
catcttttgtaggttcggccgttgcgtatg

SEQ ID NO: 362141 - DNA, 30 bp, Artificial Sequence
  Synthetic oligonucleotide
ataccgttatttggaaaaccttgtcgtatg

SEQ ID NO: 362142 - DNA, 30 bp, Artificial Sequence
  Synthetic oligonucleotide
tgtttgggttaaattcgagggggcggtatg

SEQ ID NO: 362143 - DNA, 31 bp, Artificial Sequence
  Synthetic oligonucleotide
cagaggctgtcaggattaacttacgggtatg

SEQ ID NO: 362144 - DNA, 30 bp, Artificial Sequence
  Synthetic oligonucleotide
gaatctcggcgtagtaagacaatgggtatg

SEQ ID NO: 362145 - DNA, 30 bp, Artificial Sequence
  Synthetic oligonucleotide
tacatatcttagcaaacgcaccatggtatg

SEQ ID NO: 362146 - DNA, 30 bp, Artificial Sequence
  Synthetic oligonucleotide
tagcgggcatatccgcgtttatatggtatg

SEQ ID NO: 362147 - DNA, 30 bp, Artificial Sequence
  Synthetic oligonucleotide
gtgaacccgtttgtgtgtagccgtggtatg

SEQ ID NO: 362148 - DNA, 30 bp, Artificial Sequence
  Synthetic oligonucleotide
cgaaagcacagaatagcgatctgtggtatg

SEQ ID NO: 362149 - DNA, 30 bp, Artificial Sequence
  Synthetic oligonucleotide
tgtggcggacgtccatgtcattgtggtatg

SEQ ID NO: 362150 - DNA, 30 bp, Artificial Sequence
  Synthetic oligonucleotide
gggtcctagaaaatccaggtttgtggtatg

SEQ ID NO: 362151 - DNA, 30 bp, Artificial Sequence
  Synthetic oligonucleotide
gaaagtaaacttagtttgcatacaattatg

SEQ ID NO: 362152 - DNA, 30 bp, Artificial Sequence
  Synthetic oligonucleotide
aattgatctccgcgcataccatcaattatg

SEQ ID NO: 362153 - DNA, 30 bp, Artificial Sequence
  Synthetic oligonucleotide
tgggactgtacaccggtctaaggaattatg

SEQ ID NO: 362154 - DNA, 30 bp, Artificial Sequence
  Synthetic oligonucleotide
cactctgacatggggatgaagggcattatg

SEQ ID NO: 362155 - DNA, 30 bp, Artificial Sequence
  Synthetic oligonucleotide
atctcgtaatgccattgtgggtgcattatg

SEQ ID NO: 362156 - DNA, 30 bp, Artificial Sequence
  Synthetic oligonucleotide
gaggcgcctcctactgagagcaggattatg

SEQ ID NO: 362157 - DNA, 30 bp, Artificial Sequence
  Synthetic oligonucleotide
taaattagtttggctacacggtatattatg

SEQ ID NO: 362158 - DNA, 30 bp, Artificial Sequence
  Synthetic oligonucleotide
cgtcctgcgcgtcgtcgcagaggtattatg

SEQ ID NO: 362159 - DNA, 30 bp, Artificial Sequence
  Synthetic oligonucleotide
caatgagtttgctgggtgctgggtattatg

SEQ ID NO: 362160 - DNA, 30 bp, Artificial Sequence
  Synthetic oligonucleotide
aatacagttcaatttcaggtttgtattatg

SEQ ID NO: 362161 - DNA, 30 bp, Artificial Sequence
  Synthetic oligonucleotide
acgttcatccttgtatagttagttattatg

SEQ ID NO: 362162 - DNA, 30 bp, Artificial Sequence
  Synthetic oligonucleotide
gtcaccatcattactagaaatgttattatg

SEQ ID NO: 362163 - DNA, 30 bp, Artificial Sequence
  Synthetic oligonucleotide
catttggagcggtagaggctagaacttatg

SEQ ID NO: 362164 - DNA, 30 bp, Artificial Sequence
  Synthetic oligonucleotide
actaaactggtctttgtgagtagacttatg

SEQ ID NO: 362165 - DNA, 30 bp, Artificial Sequence
  Synthetic oligonucleotide
aacagggccctttacgactttctacttatg

SEQ ID NO: 362166 - DNA, 30 bp, Artificial Sequence
  Synthetic oligonucleotide
aacaagctgccatgattcggccaccttatg

SEQ ID NO: 362167 - DNA, 30 bp, Artificial Sequence
  Synthetic oligonucleotide
gtcgatgcctcgggagatatagaccttatg

SEQ ID NO: 362168 - DNA, 30 bp, Artificial Sequence
  Synthetic oligonucleotide
aggccattattttaagcatgtagccttatg

SEQ ID NO: 362169 - DNA, 30 bp, Artificial Sequence
  Synthetic oligonucleotide
ttccggtctgcgaatagaagtcagcttatg

SEQ ID NO: 362170 - DNA, 30 bp, Artificial Sequence
  Synthetic oligonucleotide
gatcctcaacagcccgataatcctcttatg

SEQ ID NO: 362171 - DNA, 30 bp, Artificial Sequence
  Synthetic oligonucleotide
caacttaggctttttgaatgccgtcttatg

SEQ ID NO: 362172 - DNA, 30 bp, Artificial Sequence
  Synthetic oligonucleotide
agtttccttatgtcgtgggagggtcttatg

SEQ ID NO: 362173 - DNA, 30 bp, Artificial Sequence
  Synthetic oligonucleotide
gtcaagatgggtgtacgtcaagttcttatg

SEQ ID NO: 362174 - DNA, 30 bp, Artificial Sequence
  Synthetic oligonucleotide
gatctattagagattgggcaggaagttatg

SEQ ID NO: 362175 - DNA, 30 bp, Artificial Sequence
  Synthetic oligonucleotide
tgttaaatcccatgccacaagtcagttatg

SEQ ID NO: 362176 - DNA, 30 bp, Artificial Sequence
  Synthetic oligonucleotide
atacacattcctgcagaatacttagttatg

SEQ ID NO: 362177 - DNA, 29 bp, Artificial Sequence
  Synthetic oligonucleotide
agctcctcgccaggaaaagaatcgttatg

SEQ ID NO: 362178 - DNA, 30 bp, Artificial Sequence
  Synthetic oligonucleotide
ttttgcgggaagatggtttagacggttatg

SEQ ID NO: 362179 - DNA, 30 bp, Artificial Sequence
  Synthetic oligonucleotide
catgacttacagtcttcccccacatttatg

SEQ ID NO: 362180 - DNA, 30 bp, Artificial Sequence
  Synthetic oligonucleotide
catcctttgcgattatataatacatttatg

SEQ ID NO: 362181 - DNA, 30 bp, Artificial Sequence
  Synthetic oligonucleotide
tgcccccggtacatcgtgaatgtatttatg

SEQ ID NO: 362182 - DNA, 30 bp, Artificial Sequence
  Synthetic oligonucleotide
cctatgtttaatgtggggacgcggtttatg

SEQ ID NO: 362183 - DNA, 30 bp, Artificial Sequence
  Synthetic oligonucleotide
aggtgatatagtcggtgcgtctaaaaactg

SEQ ID NO: 362184 - DNA, 30 bp, Artificial Sequence
  Synthetic oligonucleotide
ctgaatgtgcccgagcagcaacagaaactg

SEQ ID NO: 362185 - DNA, 30 bp, Artificial Sequence
  Synthetic oligonucleotide
gccccgtcatccaagcttcctccgaaactg

SEQ ID NO: 362186 - DNA, 30 bp, Artificial Sequence
  Synthetic oligonucleotide
tatgtagtgttatcgcgacgtccgaaactg

SEQ ID NO: 362187 - DNA, 30 bp, Artificial Sequence
  Synthetic oligonucleotide
agtatcgttacagtatgccaatcgaaactg

SEQ ID NO: 362188 - DNA, 31 bp, Artificial Sequence
  Synthetic oligonucleotide
tacccatgtctgcgatgccgtaaggaaactg

SEQ ID NO: 362189 - DNA, 30 bp, Artificial Sequence
  Synthetic oligonucleotide
gacaatcacgtgcatccacaggggaaactg

SEQ ID NO: 362190 - DNA, 30 bp, Artificial Sequence
  Synthetic oligonucleotide
aatctaacgcgtctcgactgtcatcaactg

SEQ ID NO: 362191 - DNA, 30 bp, Artificial Sequence
  Synthetic oligonucleotide
agcttgacatgtcactcaggtcccgaactg

SEQ ID NO: 362192 - DNA, 30 bp, Artificial Sequence
  Synthetic oligonucleotide
gctgagtttgctagtcacaggtcggaactg

SEQ ID NO: 362193 - DNA, 30 bp, Artificial Sequence
  Synthetic oligonucleotide
gagcacgagacgaactttagccgggaactg

SEQ ID NO: 362194 - DNA, 30 bp, Artificial Sequence
  Synthetic oligonucleotide
aagtttgaaggacttgtcaaccttgaactg

SEQ ID NO: 362195 - DNA, 30 bp, Artificial Sequence
  Synthetic oligonucleotide
ctagttcgcatggaccaggactcataactg

SEQ ID NO: 362196 - DNA, 30 bp, Artificial Sequence
  Synthetic oligonucleotide
atagatgctcacctcaggcctaactaactg

SEQ ID NO: 362197 - DNA, 30 bp, Artificial Sequence
  Synthetic oligonucleotide
gacgtgacgtcagaagttacatactaactg

SEQ ID NO: 362198 - DNA, 30 bp, Artificial Sequence
  Synthetic oligonucleotide
actattgcccttctcgttagttgctaactg

SEQ ID NO: 362199 - DNA, 30 bp, Artificial Sequence
  Synthetic oligonucleotide
ggagtcgtggagatgtagcgctagtaactg

SEQ ID NO: 362200 - DNA, 30 bp, Artificial Sequence
  Synthetic oligonucleotide
cgacaatgacaaaattatatccgttaactg

SEQ ID NO: 362201 - DNA, 30 bp, Artificial Sequence
  Synthetic oligonucleotide
tagccttgatgtacacgggtggaaacactg

SEQ ID NO: 362202 - DNA, 30 bp, Artificial Sequence
  Synthetic oligonucleotide
cgtgcatagatatgcatctcaaccacactg

SEQ ID NO: 362203 - DNA, 30 bp, Artificial Sequence
  Synthetic oligonucleotide
gccggtatagttatggctgcatagacactg

SEQ ID NO: 362204 - DNA, 30 bp, Artificial Sequence
  Synthetic oligonucleotide
atttcgattctgaaactaggtctgacactg

SEQ ID NO: 362205 - DNA, 30 bp, Artificial Sequence
  Synthetic oligonucleotide
agaggagcgttgaagattgaatctacactg

SEQ ID NO: 362206 - DNA, 30 bp, Artificial Sequence
  Synthetic oligonucleotide
gcagctttgcgacgccaactacgtacactg

SEQ ID NO: 362207 - DNA, 30 bp, Artificial Sequence
  Synthetic oligonucleotide
agtatcctgccacgccccagtcgaccactg

SEQ ID NO: 362208 - DNA, 30 bp, Artificial Sequence
  Synthetic oligonucleotide
taacagcgattaagcgactcgagcccactg

SEQ ID NO: 362209 - DNA, 30 bp, Artificial Sequence
  Synthetic oligonucleotide
ttctgtggcttttgatctttaggcccactg

SEQ ID NO: 362210 - DNA, 30 bp, Artificial Sequence
  Synthetic oligonucleotide
agccatagggaaactctgtttgagccactg

SEQ ID NO: 362211 - DNA, 30 bp, Artificial Sequence
  Synthetic oligonucleotide
gggagtcttaaacatggaacggggccactg

SEQ ID NO: 362212 - DNA, 30 bp, Artificial Sequence
  Synthetic oligonucleotide
gcgcgtcagatctcgtcaatacttccactg

SEQ ID NO: 362213 - DNA, 30 bp, Artificial Sequence
  Synthetic oligonucleotide
tcagttataacctgatcaaggtaagcactg

SEQ ID NO: 362214 - DNA, 30 bp, Artificial Sequence
  Synthetic oligonucleotide
agtgcgagctgtattagttatggagcactg

SEQ ID NO: 362215 - DNA, 30 bp, Artificial Sequence
  Synthetic oligonucleotide
acagaaaagtgctggattgacgtagcactg

SEQ ID NO: 362216 - DNA, 30 bp, Artificial Sequence
  Synthetic oligonucleotide
agggggcgtgttagacttctgaacgcactg

SEQ ID NO: 362217 - DNA, 30 bp, Artificial Sequence
  Synthetic oligonucleotide
taaagtgcacccagacgttgcccggcactg

SEQ ID NO: 362218 - DNA, 30 bp, Artificial Sequence
  Synthetic oligonucleotide
gcactgtaagactacttatttagtgcactg

SEQ ID NO: 362219 - DNA, 30 bp, Artificial Sequence
  Synthetic oligonucleotide
tactttattaacccgaacggcagttcactg

SEQ ID NO: 362220 - DNA, 30 bp, Artificial Sequence
  Synthetic oligonucleotide
gatgtagtcgtgagggtttagttaagactg

SEQ ID NO: 362221 - DNA, 30 bp, Artificial Sequence
  Synthetic oligonucleotide
gccacaattacgagagcacagccacgactg

SEQ ID NO: 362222 - DNA, 31 bp, Artificial Sequence
  Synthetic oligonucleotide
agggccttgcgtgggggagactgggcgactg

SEQ ID NO: 362223 - DNA, 30 bp, Artificial Sequence
  Synthetic oligonucleotide
ttttagaaacgtcactgccgatggcgactg

SEQ ID NO: 362224 - DNA, 30 bp, Artificial Sequence
  Synthetic oligonucleotide
agcagacgattctttctacgcgacggactg

SEQ ID NO: 362225 - DNA, 30 bp, Artificial Sequence
  Synthetic oligonucleotide
gtaggctgcgtatgggaaaaaatcggactg

SEQ ID NO: 362226 - DNA, 30 bp, Artificial Sequence
  Synthetic oligonucleotide
cccgataatgtatcgcattcgttgggactg

SEQ ID NO: 362227 - DNA, 30 bp, Artificial Sequence
  Synthetic oligonucleotide
gaggtcatcgtgatggtgtgcaatggactg

SEQ ID NO: 362228 - DNA, 30 bp, Artificial Sequence
  Synthetic oligonucleotide
aagagtcacgcgtggttgcttatctgactg

SEQ ID NO: 362229 - DNA, 30 bp, Artificial Sequence
  Synthetic oligonucleotide
ttatttggttcaagatgctggtaaatactg

SEQ ID NO: 362230 - DNA, 30 bp, Artificial Sequence
  Synthetic oligonucleotide
gatgagaactctatttttatttaaatactg

SEQ ID NO: 362231 - DNA, 30 bp, Artificial Sequence
  Synthetic oligonucleotide
gtaatacgtgggtttggacgtagaatactg

SEQ ID NO: 362232 - DNA, 30 bp, Artificial Sequence
  Synthetic oligonucleotide
ggagatgatgcaactcaggagctcatactg

SEQ ID NO: 362233 - DNA, 30 bp, Artificial Sequence
  Synthetic oligonucleotide
gtgtaggactacgcgttgcgttgactactg

SEQ ID NO: 362234 - DNA, 30 bp, Artificial Sequence
  Synthetic oligonucleotide
cggttcacatggcgccgtgtatacctactg

SEQ ID NO: 362235 - DNA, 30 bp, Artificial Sequence
  Synthetic oligonucleotide
gtaaatctggcctgctgaagctcagtactg

SEQ ID NO: 362236 - DNA, 30 bp, Artificial Sequence
  Synthetic oligonucleotide
aaaaatgactcaggtcaagcttgattactg

SEQ ID NO: 362237 - DNA, 30 bp, Artificial Sequence
  Synthetic oligonucleotide
gttatagggcatttacgagccatattactg

SEQ ID NO: 362238 - DNA, 30 bp, Artificial Sequence
  Synthetic oligonucleotide
gtatcacatgcggcacggggggtattactg

SEQ ID NO: 362239 - DNA, 30 bp, Artificial Sequence
  Synthetic oligonucleotide
caattcaaggcactctgggccaccttactg

SEQ ID NO: 362240 - DNA, 31 bp, Artificial Sequence
  Synthetic oligonucleotide
tagacgtcagaaagctgactctcgcttactg

SEQ ID NO: 362241 - DNA, 30 bp, Artificial Sequence
  Synthetic oligonucleotide
gctcacaggatcggtagttcatcgttactg

SEQ ID NO: 362242 - DNA, 30 bp, Artificial Sequence
  Synthetic oligonucleotide
cgtttcgatttgtgtatagtatggttactg

SEQ ID NO: 362243 - DNA, 30 bp, Artificial Sequence
  Synthetic oligonucleotide
aatgtcgtttagcagtgaccccgcaacctg

SEQ ID NO: 362244 - DNA, 30 bp, Artificial Sequence
  Synthetic oligonucleotide
gaccacgatgggaacgttcaggtcaacctg

SEQ ID NO: 362245 - DNA, 30 bp, Artificial Sequence
  Synthetic oligonucleotide
tcgcctttctcctaccactatttcaacctg

SEQ ID NO: 362246 - DNA, 30 bp, Artificial Sequence
  Synthetic oligonucleotide
cacgcgtaagccaatgaaggccggaacctg

SEQ ID NO: 362247 - DNA, 30 bp, Artificial Sequence
  Synthetic oligonucleotide
ggcacgcaggtgctaagtagaactaacctg

SEQ ID NO: 362248 - DNA, 30 bp, Artificial Sequence
  Synthetic oligonucleotide
ccaattacaggatgttttcgtacacacctg

SEQ ID NO: 362249 - DNA, 30 bp, Artificial Sequence
  Synthetic oligonucleotide
actaatattaatatccaccaaagccacctg

SEQ ID NO: 362250 - DNA, 30 bp, Artificial Sequence
  Synthetic oligonucleotide
agtattcggtaacgtgggctcgggcacctg

SEQ ID NO: 362251 - DNA, 30 bp, Artificial Sequence
  Synthetic oligonucleotide
cagaacaaaagctcgatcgtaatgcacctg

SEQ ID NO: 362252 - DNA, 30 bp, Artificial Sequence
  Synthetic oligonucleotide
atgtcaagctgacgttgacagtttcacctg

SEQ ID NO: 362253 - DNA, 30 bp, Artificial Sequence
  Synthetic oligonucleotide
gctaagggttgcaagaattctacctacctg

SEQ ID NO: 362254 - DNA, 30 bp, Artificial Sequence
  Synthetic oligonucleotide
ttctgaaacgtccgcgaacccggctacctg

SEQ ID NO: 362255 - DNA, 30 bp, Artificial Sequence
  Synthetic oligonucleotide
ctagcattgatgtacggcgcaaagtacctg

SEQ ID NO: 362256 - DNA, 30 bp, Artificial Sequence
  Synthetic oligonucleotide
gaatatattgcgcgacggtaagagtacctg

SEQ ID NO: 362257 - DNA, 30 bp, Artificial Sequence
  Synthetic oligonucleotide
tttaccgctatgagagaggggacttacctg

SEQ ID NO: 362258 - DNA, 30 bp, Artificial Sequence
  Synthetic oligonucleotide
agatcgatctggccttattagtcaaccctg

SEQ ID NO: 362259 - DNA, 30 bp, Artificial Sequence
  Synthetic oligonucleotide
gagacaatggcacagatcctatgaaccctg

SEQ ID NO: 362260 - DNA, 30 bp, Artificial Sequence
  Synthetic oligonucleotide
acacccattacagtgacagtaaccaccctg

SEQ ID NO: 362261 - DNA, 30 bp, Artificial Sequence
  Synthetic oligonucleotide
tcataaaatgacttaaatcttaggaccctg

SEQ ID NO: 362262 - DNA, 30 bp, Artificial Sequence
  Synthetic oligonucleotide
cttcatgggcgcagatgaatttcacccctg

SEQ ID NO: 362263 - DNA, 30 bp, Artificial Sequence
  Synthetic oligonucleotide
ggcggaatcagacgaagccaaagccccctg

SEQ ID NO: 362264 - DNA, 30 bp, Artificial Sequence
  Synthetic oligonucleotide
agtcacacatggaccgtgcatgggcccctg

SEQ ID NO: 362265 - DNA, 30 bp, Artificial Sequence
  Synthetic oligonucleotide
aatctgttggccctgtcgttggaagccctg

SEQ ID NO: 362266 - DNA, 30 bp, Artificial Sequence
  Synthetic oligonucleotide
tgcgcgtggttagggggcttcggagccctg

SEQ ID NO: 362267 - DNA, 30 bp, Artificial Sequence
  Synthetic oligonucleotide
tctgggaagtgggcgggggacctcgccctg

SEQ ID NO: 362268 - DNA, 30 bp, Artificial Sequence
  Synthetic oligonucleotide
gatggcgccgcgagtccggaagaggccctg

SEQ ID NO: 362269 - DNA, 30 bp, Artificial Sequence
  Synthetic oligonucleotide
ctgttcaaggtgcacatcttgacggccctg

SEQ ID NO: 362270 - DNA, 30 bp, Artificial Sequence
  Synthetic oligonucleotide
ttactttatacgcaatttcgaactgccctg

SEQ ID NO: 362271 - DNA, 30 bp, Artificial Sequence
  Synthetic oligonucleotide
accagtatcgctctggcctacggtgccctg

SEQ ID NO: 362272 - DNA, 30 bp, Artificial Sequence
  Synthetic oligonucleotide
tctgtcaggctgttgggacgcatatccctg

SEQ ID NO: 362273 - DNA, 30 bp, Artificial Sequence
  Synthetic oligonucleotide
ctttgacctaaccaggtcagccagtccctg

SEQ ID NO: 362274 - DNA, 30 bp, Artificial Sequence
  Synthetic oligonucleotide
catttgggataaggtggaacttcttccctg

SEQ ID NO: 362275 - DNA, 30 bp, Artificial Sequence
  Synthetic oligonucleotide
gttctgtaactacaacctgggcgaagcctg

SEQ ID NO: 362276 - DNA, 30 bp, Artificial Sequence
  Synthetic oligonucleotide
tttgtgttatacacctctctcgacagcctg

SEQ ID NO: 362277 - DNA, 30 bp, Artificial Sequence
  Synthetic oligonucleotide
ccgtcactaaggactatttgtaagagcctg

SEQ ID NO: 362278 - DNA, 30 bp, Artificial Sequence
  Synthetic oligonucleotide
gtagattgtacaggcggagccgctagcctg

SEQ ID NO: 362279 - DNA, 30 bp, Artificial Sequence
  Synthetic oligonucleotide
ggtgaccttttacgtaagctttctagcctg

SEQ ID NO: 362280 - DNA, 30 bp, Artificial Sequence
  Synthetic oligonucleotide
tattttcacggaataggacaccgtagcctg

SEQ ID NO: 362281 - DNA, 30 bp, Artificial Sequence
  Synthetic oligonucleotide
gaccgcttttgttgcgagggacttagcctg

SEQ ID NO: 362282 - DNA, 30 bp, Artificial Sequence
  Synthetic oligonucleotide
gcgtatttagttacgaacaatctacgcctg

SEQ ID NO: 362283 - DNA, 30 bp, Artificial Sequence
  Synthetic oligonucleotide
aggctaagccaactggtgtcttcccgcctg

SEQ ID NO: 362284 - DNA, 30 bp, Artificial Sequence
  Synthetic oligonucleotide
acagtggggccggataccttgaagcgcctg

SEQ ID NO: 362285 - DNA, 30 bp, Artificial Sequence
  Synthetic oligonucleotide
actccttgtacgagtttgggctggcgcctg

SEQ ID NO: 362286 - DNA, 30 bp, Artificial Sequence
  Synthetic oligonucleotide
ttgtgctaaaacttgtcatcaatgcgcctg

SEQ ID NO: 362287 - DNA, 30 bp, Artificial Sequence
  Synthetic oligonucleotide
gaataatgaactaagattgaataaggcctg

SEQ ID NO: 362288 - DNA, 30 bp, Artificial Sequence
  Synthetic oligonucleotide
agtcgtctcactctggtcgcggcaggcctg

SEQ ID NO: 362289 - DNA, 30 bp, Artificial Sequence
  Synthetic oligonucleotide
cgaacgcggaactttactcttctaggcctg

SEQ ID NO: 362290 - DNA, 30 bp, Artificial Sequence
  Synthetic oligonucleotide
aggaacaggcttcatataataaatggcctg

SEQ ID NO: 362291 - DNA, 30 bp, Artificial Sequence
  Synthetic oligonucleotide
tgttgatacagcgggcccgcgtctggcctg

SEQ ID NO: 362292 - DNA, 30 bp, Artificial Sequence
  Synthetic oligonucleotide
atgccttgcgaatttccgaggccatgcctg

SEQ ID NO: 362293 - DNA, 30 bp, Artificial Sequence
  Synthetic oligonucleotide
ctagcctgtcacagggtattatcatgcctg

SEQ ID NO: 362294 - DNA, 30 bp, Artificial Sequence
  Synthetic oligonucleotide
attcgtcgaattacaatacgctcatgcctg

SEQ ID NO: 362295 - DNA, 30 bp, Artificial Sequence
  Synthetic oligonucleotide
ctattaagtgtgcaatcaagactatgcctg

SEQ ID NO: 362296 - DNA, 30 bp, Artificial Sequence
  Synthetic oligonucleotide
tctaaaacctcctcaggtagttactgcctg

SEQ ID NO: 362297 - DNA, 30 bp, Artificial Sequence
  Synthetic oligonucleotide
atcctttcagatgattgatgacagtgcctg

SEQ ID NO: 362298 - DNA, 30 bp, Artificial Sequence
  Synthetic oligonucleotide
tttgcgtgtcgcaaggatgaatcttgcctg

SEQ ID NO: 362299 - DNA, 30 bp, Artificial Sequence
  Synthetic oligonucleotide
aatgtcctctgtggcatggagccaatcctg

SEQ ID NO: 362300 - DNA, 30 bp, Artificial Sequence
  Synthetic oligonucleotide
tggcagtaaccattggctctttgaatcctg

SEQ ID NO: 362301 - DNA, 30 bp, Artificial Sequence
  Synthetic oligonucleotide
gcttaggttagtttatctataaacatcctg

SEQ ID NO: 362302 - DNA, 30 bp, Artificial Sequence
  Synthetic oligonucleotide
caggtggcatagtataccacatcgatcctg

SEQ ID NO: 362303 - DNA, 30 bp, Artificial Sequence
  Synthetic oligonucleotide
gaaagaaagcgtccagtttgtagactcctg

SEQ ID NO: 362304 - DNA, 30 bp, Artificial Sequence
  Synthetic oligonucleotide
ctcgggcaactagcgtaccaagtactcctg

SEQ ID NO: 362305 - DNA, 30 bp, Artificial Sequence
  Synthetic oligonucleotide
ccaatatgttcaaattattcacccctcctg

SEQ ID NO: 362306 - DNA, 30 bp, Artificial Sequence
  Synthetic oligonucleotide
gatgacccgtttatatattagagcctcctg

SEQ ID NO: 362307 - DNA, 30 bp, Artificial Sequence
  Synthetic oligonucleotide
cattgtaactgtataatgcgtggcctcctg

SEQ ID NO: 362308 - DNA, 30 bp, Artificial Sequence
  Synthetic oligonucleotide
accgatattcctatgggagggcgggtcctg

SEQ ID NO: 362309 - DNA, 30 bp, Artificial Sequence
  Synthetic oligonucleotide
acccgcgccacgccgggtacatcattcctg

SEQ ID NO: 362310 - DNA, 30 bp, Artificial Sequence
  Synthetic oligonucleotide
agataacgctgccgctgatcacgattcctg

SEQ ID NO: 362311 - DNA, 30 bp, Artificial Sequence
  Synthetic oligonucleotide
gctgagtcccttcgtgatttacgattcctg

SEQ ID NO: 362312 - DNA, 30 bp, Artificial Sequence
  Synthetic oligonucleotide
gtgtggctatcgcttggtgaattcttcctg

SEQ ID NO: 362313 - DNA, 30 bp, Artificial Sequence
  Synthetic oligonucleotide
cttaaatgccccaaatcatacttgttcctg

SEQ ID NO: 362314 - DNA, 30 bp, Artificial Sequence
  Synthetic oligonucleotide
gttatcagagttagtataatctgtttcctg

SEQ ID NO: 362315 - DNA, 30 bp, Artificial Sequence
  Synthetic oligonucleotide
ttcgtgaattaacacgataagattttcctg

SEQ ID NO: 362316 - DNA, 30 bp, Artificial Sequence
  Synthetic oligonucleotide
atcagagagccttgggcgtgctttttcctg

SEQ ID NO: 362317 - DNA, 30 bp, Artificial Sequence
  Synthetic oligonucleotide
tgtccgagtgcggtatgaaactaaaagctg

SEQ ID NO: 362318 - DNA, 30 bp, Artificial Sequence
  Synthetic oligonucleotide
tgttaatgagaagtggagattccaaagctg

SEQ ID NO: 362319 - DNA, 30 bp, Artificial Sequence
  Synthetic oligonucleotide
ctattccgtgggggagtttaagtcaagctg

SEQ ID NO: 362320 - DNA, 30 bp, Artificial Sequence
  Synthetic oligonucleotide
ggtattatagaagcaggtattaggaagctg

SEQ ID NO: 362321 - DNA, 30 bp, Artificial Sequence
  Synthetic oligonucleotide
gcaccacgctgcaacccggttatgaagctg

SEQ ID NO: 362322 - DNA, 30 bp, Artificial Sequence
  Synthetic oligonucleotide
tgggctttgagatacccaacctctaagctg

SEQ ID NO: 362323 - DNA, 30 bp, Artificial Sequence
  Synthetic oligonucleotide
aacttctaacaactacctgagcgtaagctg

SEQ ID NO: 362324 - DNA, 30 bp, Artificial Sequence
  Synthetic oligonucleotide
tgcatcctaaattagtgctggattaagctg

SEQ ID NO: 362325 - DNA, 30 bp, Artificial Sequence
  Synthetic oligonucleotide
tgtgttctccgcgcggcaaggcaccagctg

SEQ ID NO: 362326 - DNA, 30 bp, Artificial Sequence
  Synthetic oligonucleotide
ggcagctcatgtgacatgtaagaccagctg

SEQ ID NO: 362327 - DNA, 30 bp, Artificial Sequence
  Synthetic oligonucleotide
caaaacaatccacctcagcgtgagcagctg

SEQ ID NO: 362328 - DNA, 30 bp, Artificial Sequence
  Synthetic oligonucleotide
tagggtataaaatggataaccttgcagctg

SEQ ID NO: 362329 - DNA, 30 bp, Artificial Sequence
  Synthetic oligonucleotide
gtgtaagcttgctagcacagaaatcagctg

SEQ ID NO: 362330 - DNA, 30 bp, Artificial Sequence
  Synthetic oligonucleotide
tgtgtctaagctcagattacgagagagctg

SEQ ID NO: 362331 - DNA, 30 bp, Artificial Sequence
  Synthetic oligonucleotide
gaaatctgggctgataagttgagagagctg

SEQ ID NO: 362332 - DNA, 30 bp, Artificial Sequence
  Synthetic oligonucleotide
gtgattgactagatgttctgaatggagctg

SEQ ID NO: 362333 - DNA, 30 bp, Artificial Sequence
  Synthetic oligonucleotide
ggaaactattgaaggttccgggtggagctg

SEQ ID NO: 362334 - DNA, 30 bp, Artificial Sequence
  Synthetic oligonucleotide
aggactggtgggccgtgggtacaatagctg

SEQ ID NO: 362335 - DNA, 30 bp, Artificial Sequence
  Synthetic oligonucleotide
acgtgcctcaacaatccgggcctgtagctg

SEQ ID NO: 362336 - DNA, 31 bp, Artificial Sequence
  Synthetic oligonucleotide
tcggcacattataaccgcaggtggttagctg

SEQ ID NO: 362337 - DNA, 30 bp, Artificial Sequence
  Synthetic oligonucleotide
ttcggcaatgatataaggcgtttttagctg

SEQ ID NO: 362338 - DNA, 30 bp, Artificial Sequence
  Synthetic oligonucleotide
cgggtaatataaacgcctgcttttacgctg

SEQ ID NO: 362339 - DNA, 30 bp, Artificial Sequence
  Synthetic oligonucleotide
caaggtggccttccaatgaacacgccgctg

SEQ ID NO: 362340 - DNA, 30 bp, Artificial Sequence
  Synthetic oligonucleotide
tacagtttagggctaatctatcatccgctg

SEQ ID NO: 362341 - DNA, 30 bp, Artificial Sequence
  Synthetic oligonucleotide
cggaaccctgtttcttatattagtccgctg

SEQ ID NO: 362342 - DNA, 30 bp, Artificial Sequence
  Synthetic oligonucleotide
ccgatggggatcccatgtaatgaggcgctg

SEQ ID NO: 362343 - DNA, 30 bp, Artificial Sequence
  Synthetic oligonucleotide
ttcgaaaattttgcatcctaggttgcgctg

SEQ ID NO: 362344 - DNA, 30 bp, Artificial Sequence
  Synthetic oligonucleotide
cggttgaggctagcagcttccttctcgctg

SEQ ID NO: 362345 - DNA, 30 bp, Artificial Sequence
  Synthetic oligonucleotide
gacaagcgacattactaataaaggtcgctg

SEQ ID NO: 362346 - DNA, 30 bp, Artificial Sequence
  Synthetic oligonucleotide
ttttggcgtctagacatgcgcaggtcgctg

SEQ ID NO: 362347 - DNA, 30 bp, Artificial Sequence
  Synthetic oligonucleotide
gatatgctgatgctatgctaagtttcgctg

SEQ ID NO: 362348 - DNA, 30 bp, Artificial Sequence
  Synthetic oligonucleotide
ctccatgtagctatccgtgtctgcaggctg

SEQ ID NO: 362349 - DNA, 30 bp, Artificial Sequence
  Synthetic oligonucleotide
acactaatttaaggagcccctttcaggctg

SEQ ID NO: 362350 - DNA, 30 bp, Artificial Sequence
  Synthetic oligonucleotide
ttgctgaaatggagagcccgtcggaggctg

SEQ ID NO: 362351 - DNA, 30 bp, Artificial Sequence
  Synthetic oligonucleotide
gcgcccatctttacaataggtcgtaggctg

SEQ ID NO: 362352 - DNA, 30 bp, Artificial Sequence
  Synthetic oligonucleotide
cttcgaatgtgtccgaaggcagttaggctg

SEQ ID NO: 362353 - DNA, 30 bp, Artificial Sequence
  Synthetic oligonucleotide
cgagggggaccctcataatggcgacggctg

SEQ ID NO: 362354 - DNA, 30 bp, Artificial Sequence
  Synthetic oligonucleotide
gaatcaactagataggagtgtgagcggctg

SEQ ID NO: 362355 - DNA, 30 bp, Artificial Sequence
  Synthetic oligonucleotide
tacaggtgttgcaggctaggcgggcggctg

SEQ ID NO: 362356 - DNA, 30 bp, Artificial Sequence
  Synthetic oligonucleotide
gaggtagtaactcgacgctaggttcggctg

SEQ ID NO: 362357 - DNA, 30 bp, Artificial Sequence
  Synthetic oligonucleotide
caatggctcgattgatccagtttggggctg

SEQ ID NO: 362358 - DNA, 30 bp, Artificial Sequence
  Synthetic oligonucleotide
ccggagattgtacggacaggggctgggctg

SEQ ID NO: 362359 - DNA, 30 bp, Artificial Sequence
  Synthetic oligonucleotide
tccactcacttgtaaaggggcgttgggctg

SEQ ID NO: 362360 - DNA, 30 bp, Artificial Sequence
  Synthetic oligonucleotide
atgttccgctacgtagatgccgaatggctg

SEQ ID NO: 362361 - DNA, 30 bp, Artificial Sequence
  Synthetic oligonucleotide
ctctaattggcagatttcttcccatggctg

SEQ ID NO: 362362 - DNA, 30 bp, Artificial Sequence
  Synthetic oligonucleotide
gtaggttaattttcgtttgtgctatggctg

SEQ ID NO: 362363 - DNA, 30 bp, Artificial Sequence
  Synthetic oligonucleotide
accaagtgtcaaaaggaaagtaactggctg

SEQ ID NO: 362364 - DNA, 30 bp, Artificial Sequence
  Synthetic oligonucleotide
gctgacgtacttgggggttgccactggctg

SEQ ID NO: 362365 - DNA, 30 bp, Artificial Sequence
  Synthetic oligonucleotide
gcggtatcggccgtgtattggtactggctg

SEQ ID NO: 362366 - DNA, 30 bp, Artificial Sequence
  Synthetic oligonucleotide
tgggtttgtccgcttaattcgacgtggctg

SEQ ID NO: 362367 - DNA, 30 bp, Artificial Sequence
  Synthetic oligonucleotide
ggtaggcaccgttacaagcctgggtggctg

SEQ ID NO: 362368 - DNA, 30 bp, Artificial Sequence
  Synthetic oligonucleotide
gacaggttttccctaggatgacattggctg

SEQ ID NO: 362369 - DNA, 30 bp, Artificial Sequence
  Synthetic oligonucleotide
gtttgttgtttcaggtaacacgcttggctg

SEQ ID NO: 362370 - DNA, 30 bp, Artificial Sequence
  Synthetic oligonucleotide
tgtggccactaaaacacggagatttggctg

SEQ ID NO: 362371 - DNA, 30 bp, Artificial Sequence
  Synthetic oligonucleotide
tacactgtctacgcgccgcgcgaaatgctg

SEQ ID NO: 362372 - DNA, 30 bp, Artificial Sequence
  Synthetic oligonucleotide
gctacccctcgggtagaaagtataatgctg

SEQ ID NO: 362373 - DNA, 30 bp, Artificial Sequence
  Synthetic oligonucleotide
ctaaattagtgtaataagccttacatgctg

SEQ ID NO: 362374 - DNA, 30 bp, Artificial Sequence
  Synthetic oligonucleotide
accagcatcgtggcagcacgggccatgctg

SEQ ID NO: 362375 - DNA, 30 bp, Artificial Sequence
  Synthetic oligonucleotide
ctagtaaagctcccgagaaaaattatgctg

SEQ ID NO: 362376 - DNA, 30 bp, Artificial Sequence
  Synthetic oligonucleotide
taccgcggtgatctgcgaccatgactgctg

SEQ ID NO: 362377 - DNA, 30 bp, Artificial Sequence
  Synthetic oligonucleotide
gttaacttcgattcgtctgaggtgctgctg

SEQ ID NO: 362378 - DNA, 30 bp, Artificial Sequence
  Synthetic oligonucleotide
gaaattacgtcttattagcacactctgctg

SEQ ID NO: 362379 - DNA, 30 bp, Artificial Sequence
  Synthetic oligonucleotide
ctttcgcatgttttaggtagtaacgtgctg

SEQ ID NO: 362380 - DNA, 30 bp, Artificial Sequence
  Synthetic oligonucleotide
tttggtactaaagtcgctcgtcatgtgctg

SEQ ID NO: 362381 - DNA, 30 bp, Artificial Sequence
  Synthetic oligonucleotide
gagattaccatttagccatagaagttgctg

SEQ ID NO: 362382 - DNA, 30 bp, Artificial Sequence
  Synthetic oligonucleotide
atcacatgtttaactgagagcgcgttgctg

SEQ ID NO: 362383 - DNA, 30 bp, Artificial Sequence
  Synthetic oligonucleotide
tttgagcattagtgaacgatggggttgctg

SEQ ID NO: 362384 - DNA, 30 bp, Artificial Sequence
  Synthetic oligonucleotide
ctttttaaaattaatacaggacaaaatctg

SEQ ID NO: 362385 - DNA, 30 bp, Artificial Sequence
  Synthetic oligonucleotide
cacgatagttagatacgatggtaaaatctg

SEQ ID NO: 362386 - DNA, 30 bp, Artificial Sequence
  Synthetic oligonucleotide
tgaaagctcacagacgccccagcaaatctg

SEQ ID NO: 362387 - DNA, 30 bp, Artificial Sequence
  Synthetic oligonucleotide
attgtttacggctacatgaatgcaaatctg

SEQ ID NO: 362388 - DNA, 30 bp, Artificial Sequence
  Synthetic oligonucleotide
taaccgagcttaatacatggtagaaatctg

SEQ ID NO: 362389 - DNA, 30 bp, Artificial Sequence
  Synthetic oligonucleotide
tggaaaaggcggtatgatctgataaatctg

SEQ ID NO: 362390 - DNA, 30 bp, Artificial Sequence
  Synthetic oligonucleotide
atagtcaaatactaatgtgaacacaatctg

SEQ ID NO: 362391 - DNA, 30 bp, Artificial Sequence
  Synthetic oligonucleotide
gtgttagccagctacttcttcagcaatctg

SEQ ID NO: 362392 - DNA, 30 bp, Artificial Sequence
  Synthetic oligonucleotide
tgctatacgtgaggtctgcatggcaatctg

SEQ ID NO: 362393 - DNA, 30 bp, Artificial Sequence
  Synthetic oligonucleotide
gctaaatatgagcgcgccgatgtgaatctg

SEQ ID NO: 362394 - DNA, 30 bp, Artificial Sequence
  Synthetic oligonucleotide
cgttattgtcaagttgtgtctgctaatctg

SEQ ID NO: 362395 - DNA, 30 bp, Artificial Sequence
  Synthetic oligonucleotide
agcacatgtattgacagtgcattacatctg

SEQ ID NO: 362396 - DNA, 30 bp, Artificial Sequence
  Synthetic oligonucleotide
gatagtcggcccgagtgacataggcatctg

SEQ ID NO: 362397 - DNA, 30 bp, Artificial Sequence
  Synthetic oligonucleotide
ccagaggatatgatattgtagatgcatctg

SEQ ID NO: 362398 - DNA, 30 bp, Artificial Sequence
  Synthetic oligonucleotide
tggacgttaggcggctagagtatgcatctg

SEQ ID NO: 362399 - DNA, 30 bp, Artificial Sequence
  Synthetic oligonucleotide
gagcgcatccgcgctaaatcactgcatctg

SEQ ID NO: 362400 - DNA, 30 bp, Artificial Sequence
  Synthetic oligonucleotide
caaagactgtctagctatgttctggatctg

SEQ ID NO: 362401 - DNA, 30 bp, Artificial Sequence
  Synthetic oligonucleotide
cggaaccctcagggcgttggcactgatctg

SEQ ID NO: 362402 - DNA, 30 bp, Artificial Sequence
  Synthetic oligonucleotide
attgaatgttcataaaatactatatatctg

SEQ ID NO: 362403 - DNA, 30 bp, Artificial Sequence
  Synthetic oligonucleotide
ttataaaacgggagccatcatataactctg

SEQ ID NO: 362404 - DNA, 30 bp, Artificial Sequence
  Synthetic oligonucleotide
aacaactgcgggtcgttccccaacactctg

SEQ ID NO: 362405 - DNA, 30 bp, Artificial Sequence
  Synthetic oligonucleotide
cggtagggacatggtacctatggacctctg

SEQ ID NO: 362406 - DNA, 30 bp, Artificial Sequence
  Synthetic oligonucleotide
agcgaactagaatactttcatggccctctg

SEQ ID NO: 362407 - DNA, 30 bp, Artificial Sequence
  Synthetic oligonucleotide
gtacaacagggtggggaacatctccctctg

SEQ ID NO: 362408 - DNA, 30 bp, Artificial Sequence
  Synthetic oligonucleotide
gttctgacgtcttaatgagacaggcctctg

SEQ ID NO: 362409 - DNA, 30 bp, Artificial Sequence
  Synthetic oligonucleotide
gacagaattggcagcggacccgggcctctg

SEQ ID NO: 362410 - DNA, 30 bp, Artificial Sequence
  Synthetic oligonucleotide
gccagggattcagaatgttcctggcctctg

SEQ ID NO: 362411 - DNA, 30 bp, Artificial Sequence
  Synthetic oligonucleotide
atttgcggtgctgaagcctcgctgcctctg

SEQ ID NO: 362412 - DNA, 30 bp, Artificial Sequence
  Synthetic oligonucleotide
gacccggtaaggggcttcgacggagctctg

SEQ ID NO: 362413 - DNA, 30 bp, Artificial Sequence
  Synthetic oligonucleotide
gagcagggtgacccatgctgccaggctctg

SEQ ID NO: 362414 - DNA, 30 bp, Artificial Sequence
  Synthetic oligonucleotide
agagggtttacggttaaacctatatctctg

SEQ ID NO: 362415 - DNA, 30 bp, Artificial Sequence
  Synthetic oligonucleotide
tttttgagtgagttgaaagtgaactctctg

SEQ ID NO: 362416 - DNA, 30 bp, Artificial Sequence
  Synthetic oligonucleotide
gagttactcgttttcaaggagtgttctctg

SEQ ID NO: 362417 - DNA, 30 bp, Artificial Sequence
  Synthetic oligonucleotide
gggtctcgtcgcaggcttgcggtttctctg

SEQ ID NO: 362418 - DNA, 29 bp, Artificial Sequence
  Synthetic oligonucleotide
aaagaccaacgaggacttgtccaagtctg

SEQ ID NO: 362419 - DNA, 30 bp, Artificial Sequence
  Synthetic oligonucleotide
gatactgcttaggatttactaggaagtctg

SEQ ID NO: 362420 - DNA, 30 bp, Artificial Sequence
  Synthetic oligonucleotide
agcgatccccgcggaggctcacacagtctg

SEQ ID NO: 362421 - DNA, 30 bp, Artificial Sequence
  Synthetic oligonucleotide
ataatggaattatgatgcttatacagtctg

SEQ ID NO: 362422 - DNA, 30 bp, Artificial Sequence
  Synthetic oligonucleotide
tcatctaggagaggcagaaagctcagtctg

SEQ ID NO: 362423 - DNA, 30 bp, Artificial Sequence
  Synthetic oligonucleotide
tcatgctgggctcgtaatgagccgagtctg

SEQ ID NO: 362424 - DNA, 30 bp, Artificial Sequence
  Synthetic oligonucleotide
gggcacacgagattacgctggcggagtctg

SEQ ID NO: 362425 - DNA, 30 bp, Artificial Sequence
  Synthetic oligonucleotide
ttgggggagatcagggaggtttatagtctg

SEQ ID NO: 362426 - DNA, 30 bp, Artificial Sequence
  Synthetic oligonucleotide
ggcgatgaaagacaaacatttggacgtctg

SEQ ID NO: 362427 - DNA, 30 bp, Artificial Sequence
  Synthetic oligonucleotide
tgcggggttgtgtcggtgcgcctacgtctg

SEQ ID NO: 362428 - DNA, 30 bp, Artificial Sequence
  Synthetic oligonucleotide
gttaatagttgaggcaagatacagcgtctg

SEQ ID NO: 362429 - DNA, 30 bp, Artificial Sequence
  Synthetic oligonucleotide
gtcccagcgtgcctggccctcccgcgtctg

SEQ ID NO: 362430 - DNA, 30 bp, Artificial Sequence
  Synthetic oligonucleotide
gctctgtgaaaacatcgagctgttcgtctg

SEQ ID NO: 362431 - DNA, 30 bp, Artificial Sequence
  Synthetic oligonucleotide
tgcacagagcgtgtcaacattcaaggtctg

SEQ ID NO: 362432 - DNA, 30 bp, Artificial Sequence
  Synthetic oligonucleotide
tgcttaaatggccggggctgaccaggtctg

SEQ ID NO: 362433 - DNA, 30 bp, Artificial Sequence
  Synthetic oligonucleotide
ggtacacgaataagctcaccctccggtctg

SEQ ID NO: 362434 - DNA, 30 bp, Artificial Sequence
  Synthetic oligonucleotide
tctgtcatatcggtttcgggccagggtctg

SEQ ID NO: 362435 - DNA, 30 bp, Artificial Sequence
  Synthetic oligonucleotide
ggaatatgtgtagagcatggcaatggtctg

SEQ ID NO: 362436 - DNA, 30 bp, Artificial Sequence
  Synthetic oligonucleotide
cgccgatccctggtagatggtagtggtctg

SEQ ID NO: 362437 - DNA, 30 bp, Artificial Sequence
  Synthetic oligonucleotide
accgaatgtgttttgtgttcgcgtggtctg

SEQ ID NO: 362438 - DNA, 30 bp, Artificial Sequence
  Synthetic oligonucleotide
ttgacgggagatagcgtcttagttggtctg

SEQ ID NO: 362439 - DNA, 30 bp, Artificial Sequence
  Synthetic oligonucleotide
attgagcggtgacaggactcagaatgtctg

SEQ ID NO: 362440 - DNA, 30 bp, Artificial Sequence
  Synthetic oligonucleotide
tctaattacgcttcattgtggggatgtctg

SEQ ID NO: 362441 - DNA, 30 bp, Artificial Sequence
  Synthetic oligonucleotide
gcagcgctggtctgtaggccttactgtctg

SEQ ID NO: 362442 - DNA, 30 bp, Artificial Sequence
  Synthetic oligonucleotide
atagaggtggacatatcttttatctgtctg

SEQ ID NO: 362443 - DNA, 30 bp, Artificial Sequence
  Synthetic oligonucleotide
agagccttggccagtatggaaacgtgtctg

SEQ ID NO: 362444 - DNA, 30 bp, Artificial Sequence
  Synthetic oligonucleotide
cttcgacagtcgttcagtccccggtgtctg

SEQ ID NO: 362445 - DNA, 30 bp, Artificial Sequence
  Synthetic oligonucleotide
tatatatttaactgcaggagcatgtgtctg

SEQ ID NO: 362446 - DNA, 30 bp, Artificial Sequence
  Synthetic oligonucleotide
gcatttaagtttcctgtgctatattgtctg

SEQ ID NO: 362447 - DNA, 30 bp, Artificial Sequence
  Synthetic oligonucleotide
acagctacagggtcccacaaagcttgtctg

SEQ ID NO: 362448 - DNA, 30 bp, Artificial Sequence
  Synthetic oligonucleotide
tatgcgcttatactgaaacgtccaattctg

SEQ ID NO: 362449 - DNA, 30 bp, Artificial Sequence
  Synthetic oligonucleotide
attgtttaatactattattggagcattctg

SEQ ID NO: 362450 - DNA, 30 bp, Artificial Sequence
  Synthetic oligonucleotide
ccaaagaccacctctaagaggcagattctg

SEQ ID NO: 362451 - DNA, 30 bp, Artificial Sequence
  Synthetic oligonucleotide
caacttaagtcttgttcattgacgattctg

SEQ ID NO: 362452 - DNA, 30 bp, Artificial Sequence
  Synthetic oligonucleotide
tggtactgcaggagacctgcgggtattctg

SEQ ID NO: 362453 - DNA, 30 bp, Artificial Sequence
  Synthetic oligonucleotide
acgttacgcccgagggactataaacttctg

SEQ ID NO: 362454 - DNA, 30 bp, Artificial Sequence
  Synthetic oligonucleotide
ggtaacaagcgtaacgaccgctcacttctg

SEQ ID NO: 362455 - DNA, 30 bp, Artificial Sequence
  Synthetic oligonucleotide
actaagtggcaaccgcaccggtgacttctg

SEQ ID NO: 362456 - DNA, 30 bp, Artificial Sequence
  Synthetic oligonucleotide
tatagttaccagatgattaacaagcttctg

SEQ ID NO: 362457 - DNA, 30 bp, Artificial Sequence
  Synthetic oligonucleotide
ggcaggcgtgaaattgccctgtaagttctg

SEQ ID NO: 362458 - DNA, 30 bp, Artificial Sequence
  Synthetic oligonucleotide
tagttggttggctacgccatcaacgttctg

SEQ ID NO: 362459 - DNA, 30 bp, Artificial Sequence
  Synthetic oligonucleotide
ttttcagtgactggaacccacgcggttctg

SEQ ID NO: 362460 - DNA, 30 bp, Artificial Sequence
  Synthetic oligonucleotide
gcaaggcggtaccgaggcagtttggttctg

SEQ ID NO: 362461 - DNA, 30 bp, Artificial Sequence
  Synthetic oligonucleotide
gcgtataaaattatggggctaagtgttctg

SEQ ID NO: 362462 - DNA, 30 bp, Artificial Sequence
  Synthetic oligonucleotide
tactgttttagttcacaaaaactatttctg

SEQ ID NO: 362463 - DNA, 30 bp, Artificial Sequence
  Synthetic oligonucleotide
accgtagtttatcctatgtcagtatttctg

SEQ ID NO: 362464 - DNA, 30 bp, Artificial Sequence
  Synthetic oligonucleotide
ttcagagaggttaagataaccatgtttctg

SEQ ID NO: 362465 - DNA, 30 bp, Artificial Sequence
  Synthetic oligonucleotide
ccaatcggttggttgggggctcgttttctg

SEQ ID NO: 362466 - DNA, 30 bp, Artificial Sequence
  Synthetic oligonucleotide
ttctcctcaagttgattcttgttttttctg

SEQ ID NO: 362467 - DNA, 30 bp, Artificial Sequence
  Synthetic oligonucleotide
agcatcaaggtggtaaccttgtacaaagtg

SEQ ID NO: 362468 - DNA, 30 bp, Artificial Sequence
  Synthetic oligonucleotide
tacaggcatgtcgattgcagccttaaagtg

SEQ ID NO: 362469 - DNA, 30 bp, Artificial Sequence
  Synthetic oligonucleotide
tttagccgacctaggcgaatcatacaagtg

SEQ ID NO: 362470 - DNA, 30 bp, Artificial Sequence
  Synthetic oligonucleotide
gcgatatagattagtaatgcggtgcaagtg

SEQ ID NO: 362471 - DNA, 30 bp, Artificial Sequence
  Synthetic oligonucleotide
gtataggatctcgaacgttaaggagaagtg

SEQ ID NO: 362472 - DNA, 30 bp, Artificial Sequence
  Synthetic oligonucleotide
cttagtctaactggatactatgaggaagtg

SEQ ID NO: 362473 - DNA, 30 bp, Artificial Sequence
  Synthetic oligonucleotide
aatagggtccatgggttcagaattgaagtg

SEQ ID NO: 362474 - DNA, 30 bp, Artificial Sequence
  Synthetic oligonucleotide
ctgtcctttgtcgacgcaagcgaataagtg

SEQ ID NO: 362475 - DNA, 30 bp, Artificial Sequence
  Synthetic oligonucleotide
gaaaacatgcgacttatacgcacctaagtg

SEQ ID NO: 362476 - DNA, 30 bp, Artificial Sequence
  Synthetic oligonucleotide
ttatcccctgaggccgaagcccagtaagtg

SEQ ID NO: 362477 - DNA, 30 bp, Artificial Sequence
  Synthetic oligonucleotide
ttcggccttgaagggaactaatggtaagtg

SEQ ID NO: 362478 - DNA, 30 bp, Artificial Sequence
  Synthetic oligonucleotide
aaagacgcgcccgaaagttccaattaagtg

SEQ ID NO: 362479 - DNA, 30 bp, Artificial Sequence
  Synthetic oligonucleotide
acatcacccatggaattggcctcttaagtg

SEQ ID NO: 362480 - DNA, 30 bp, Artificial Sequence
  Synthetic oligonucleotide
aaccatacttaaccatagtcaccaacagtg

SEQ ID NO: 362481 - DNA, 30 bp, Artificial Sequence
  Synthetic oligonucleotide
cgcacgcgacacatgaagggactgacagtg

SEQ ID NO: 362482 - DNA, 30 bp, Artificial Sequence
  Synthetic oligonucleotide
cgagccagggatggctcataggtgacagtg

SEQ ID NO: 362483 - DNA, 30 bp, Artificial Sequence
  Synthetic oligonucleotide
ttctgcggtcattttctgaattgtacagtg

SEQ ID NO: 362484 - DNA, 30 bp, Artificial Sequence
  Synthetic oligonucleotide
gcggatctgctcggtggctctaagccagtg

SEQ ID NO: 362485 - DNA, 30 bp, Artificial Sequence
  Synthetic oligonucleotide
aaaacgggctgcgacccctgcgcgccagtg

SEQ ID NO: 362486 - DNA, 30 bp, Artificial Sequence
  Synthetic oligonucleotide
ttacagatttgaagctacttatttccagtg

SEQ ID NO: 362487 - DNA, 30 bp, Artificial Sequence
  Synthetic oligonucleotide
gtcgcgacctcccgaccccaggatgcagtg

SEQ ID NO: 362488 - DNA, 30 bp, Artificial Sequence
  Synthetic oligonucleotide
tattatctaatgcggtattcccgtgcagtg

SEQ ID NO: 362489 - DNA, 30 bp, Artificial Sequence
  Synthetic oligonucleotide
gtatctgcgaaaagtgcggcctcttcagtg

SEQ ID NO: 362490 - DNA, 30 bp, Artificial Sequence
  Synthetic oligonucleotide
gcttcactggcttgagcatgcggtagagtg

SEQ ID NO: 362491 - DNA, 30 bp, Artificial Sequence
  Synthetic oligonucleotide
tggcacggggccattatgcatggacgagtg

SEQ ID NO: 362492 - DNA, 30 bp, Artificial Sequence
  Synthetic oligonucleotide
acgttacggagactctcccctcagcgagtg

SEQ ID NO: 362493 - DNA, 30 bp, Artificial Sequence
  Synthetic oligonucleotide
accctctcgtacgaaggaggaccgcgagtg

SEQ ID NO: 362494 - DNA, 30 bp, Artificial Sequence
  Synthetic oligonucleotide
cagttctaaagagctgcgccccgtcgagtg

SEQ ID NO: 362495 - DNA, 30 bp, Artificial Sequence
  Synthetic oligonucleotide
cctcctcggccttctggatcgataggagtg

SEQ ID NO: 362496 - DNA, 30 bp, Artificial Sequence
  Synthetic oligonucleotide
gtctgaacgctctttattggcaacggagtg

SEQ ID NO: 362497 - DNA, 30 bp, Artificial Sequence
  Synthetic oligonucleotide
attgactaaccgggcggatgtgccggagtg

SEQ ID NO: 362498 - DNA, 30 bp, Artificial Sequence
  Synthetic oligonucleotide
aaagcctatagctcccgtgaaaggggagtg

SEQ ID NO: 362499 - DNA, 30 bp, Artificial Sequence
  Synthetic oligonucleotide
attatattactttcacgagtcaggggagtg

SEQ ID NO: 362500 - DNA, 30 bp, Artificial Sequence
  Synthetic oligonucleotide
gtaagtaagcttgcaagttacactggagtg

SEQ ID NO: 362501 - DNA, 30 bp, Artificial Sequence
  Synthetic oligonucleotide
ctctagacgataagcctgagctttggagtg

SEQ ID NO: 362502 - DNA, 30 bp, Artificial Sequence
  Synthetic oligonucleotide
tgaaaacgcctggtgggaccaacttgagtg

SEQ ID NO: 362503 - DNA, 30 bp, Artificial Sequence
  Synthetic oligonucleotide
ctccaccaagcttaaggttgcctttgagtg

SEQ ID NO: 362504 - DNA, 30 bp, Artificial Sequence
  Synthetic oligonucleotide
gtctggatagtcagatcgttattttgagtg

SEQ ID NO: 362505 - DNA, 30 bp, Artificial Sequence
  Synthetic oligonucleotide
gataagacgtcactcaggtcctaaatagtg

SEQ ID NO: 362506 - DNA, 30 bp, Artificial Sequence
  Synthetic oligonucleotide
atgcttttagacatgttccttgcaatagtg

SEQ ID NO: 362507 - DNA, 30 bp, Artificial Sequence
  Synthetic oligonucleotide
gtactggaatagggctacgcggacatagtg

SEQ ID NO: 362508 - DNA, 30 bp, Artificial Sequence
  Synthetic oligonucleotide
taacatgagcggaacaaatttcgcatagtg

SEQ ID NO: 362509 - DNA, 30 bp, Artificial Sequence
  Synthetic oligonucleotide
ctaagaccggctcttaacagcggcatagtg

SEQ ID NO: 362510 - DNA, 30 bp, Artificial Sequence
  Synthetic oligonucleotide
cgcactatgacaccgtcgtaattcatagtg

SEQ ID NO: 362511 - DNA, 30 bp, Artificial Sequence
  Synthetic oligonucleotide
aagcctttacccaacagtggacgtatagtg

SEQ ID NO: 362512 - DNA, 30 bp, Artificial Sequence
  Synthetic oligonucleotide
tacatacgttagggtggattatgtatagtg

SEQ ID NO: 362513 - DNA, 30 bp, Artificial Sequence
  Synthetic oligonucleotide
ggactgtggtatctaggtcattgtatagtg

SEQ ID NO: 362514 - DNA, 30 bp, Artificial Sequence
  Synthetic oligonucleotide
ttacatttaaaggagaggccggttatagtg

SEQ ID NO: 362515 - DNA, 30 bp, Artificial Sequence
  Synthetic oligonucleotide
ttaacgtctcccggacacagctttatagtg

SEQ ID NO: 362516 - DNA, 30 bp, Artificial Sequence
  Synthetic oligonucleotide
gatatatgtcctaccaaatgaaccctagtg

SEQ ID NO: 362517 - DNA, 30 bp, Artificial Sequence
  Synthetic oligonucleotide
gaagatgtttgtatcggatacatgctagtg

SEQ ID NO: 362518 - DNA, 30 bp, Artificial Sequence
  Synthetic oligonucleotide
attccgacacgataatacttacatctagtg

SEQ ID NO: 362519 - DNA, 30 bp, Artificial Sequence
  Synthetic oligonucleotide
gtaatacggtgtatttacgcgactctagtg

SEQ ID NO: 362520 - DNA, 30 bp, Artificial Sequence
  Synthetic oligonucleotide
gttcccttaaatgagaagtcctttctagtg

SEQ ID NO: 362521 - DNA, 30 bp, Artificial Sequence
  Synthetic oligonucleotide
gtaggttgactcaggaagtcgccagtagtg

SEQ ID NO: 362522 - DNA, 30 bp, Artificial Sequence
  Synthetic oligonucleotide
ccctcttctacatatgatctgggagtagtg

SEQ ID NO: 362523 - DNA, 30 bp, Artificial Sequence
  Synthetic oligonucleotide
tgcaacagattcctgcgttgcagcgtagtg

SEQ ID NO: 362524 - DNA, 30 bp, Artificial Sequence
  Synthetic oligonucleotide
ggcagcgggatcccggtcttactcgtagtg

SEQ ID NO: 362525 - DNA, 30 bp, Artificial Sequence
  Synthetic oligonucleotide
tgacggtgataaagggtatttgaggtagtg

SEQ ID NO: 362526 - DNA, 30 bp, Artificial Sequence
  Synthetic oligonucleotide
gaagacttttgcctaaaagctatggtagtg

SEQ ID NO: 362527 - DNA, 30 bp, Artificial Sequence
  Synthetic oligonucleotide
cacgtactacgacgcaaccacgatgtagtg

SEQ ID NO: 362528 - DNA, 30 bp, Artificial Sequence
  Synthetic oligonucleotide
gtggacgtcgcaaccccgcacgctttagtg

SEQ ID NO: 362529 - DNA, 30 bp, Artificial Sequence
  Synthetic oligonucleotide
gtggaggcgcggccatattgcggaaacgtg

SEQ ID NO: 362530 - DNA, 30 bp, Artificial Sequence
  Synthetic oligonucleotide
atgtttttgataagtccatggaacaacgtg

SEQ ID NO: 362531 - DNA, 30 bp, Artificial Sequence
  Synthetic oligonucleotide
tatttctatcgggaggttttcgccaacgtg

SEQ ID NO: 362532 - DNA, 30 bp, Artificial Sequence
  Synthetic oligonucleotide
agagttcatttccgtcctattaggaacgtg

SEQ ID NO: 362533 - DNA, 30 bp, Artificial Sequence
  Synthetic oligonucleotide
ttagaattcaaaacataatttgtgaacgtg

SEQ ID NO: 362534 - DNA, 30 bp, Artificial Sequence
  Synthetic oligonucleotide
gccggtattaatagaactggtcttaacgtg

SEQ ID NO: 362535 - DNA, 30 bp, Artificial Sequence
  Synthetic oligonucleotide
cggacatcgctgatttgccttcgacacgtg

SEQ ID NO: 362536 - DNA, 30 bp, Artificial Sequence
  Synthetic oligonucleotide
gaagtccatctcaacgaaaggagccacgtg

SEQ ID NO: 362537 - DNA, 30 bp, Artificial Sequence
  Synthetic oligonucleotide
gcgaacagagtaagaacggtaatccacgtg

SEQ ID NO: 362538 - DNA, 30 bp, Artificial Sequence
  Synthetic oligonucleotide
ttcccgtggtaacgctatttgtatcacgtg

SEQ ID NO: 362539 - DNA, 30 bp, Artificial Sequence
  Synthetic oligonucleotide
tccatctacgacgagtaagcaactcacgtg

SEQ ID NO: 362540 - DNA, 30 bp, Artificial Sequence
  Synthetic oligonucleotide
gtcacattgcatcggtatttcggtcacgtg

SEQ ID NO: 362541 - DNA, 30 bp, Artificial Sequence
  Synthetic oligonucleotide
tggagaatggagtacatgaggatagacgtg

SEQ ID NO: 362542 - DNA, 30 bp, Artificial Sequence
  Synthetic oligonucleotide
gccgacgtcctaatcaataggcccgacgtg

SEQ ID NO: 362543 - DNA, 30 bp, Artificial Sequence
  Synthetic oligonucleotide
cactatcaaccaagtacccctgtcgacgtg

SEQ ID NO: 362544 - DNA, 30 bp, Artificial Sequence
  Synthetic oligonucleotide
cgtacactcaatattagtgatgaggacgtg

SEQ ID NO: 362545 - DNA, 30 bp, Artificial Sequence
  Synthetic oligonucleotide
aaaggttcaaataatccttgtgcggacgtg

SEQ ID NO: 362546 - DNA, 30 bp, Artificial Sequence
  Synthetic oligonucleotide
atttatgtgactaaaaaggcttaatacgtg

SEQ ID NO: 362547 - DNA, 30 bp, Artificial Sequence
  Synthetic oligonucleotide
gctggaaccctcaccaccacatgatacgtg

SEQ ID NO: 362548 - DNA, 30 bp, Artificial Sequence
  Synthetic oligonucleotide
agtctagtacgtggccaggctaactacgtg

SEQ ID NO: 362549 - DNA, 30 bp, Artificial Sequence
  Synthetic oligonucleotide
ttggaaggaacgtagtcagctgactacgtg

SEQ ID NO: 362550 - DNA, 30 bp, Artificial Sequence
  Synthetic oligonucleotide
aaagagtataatcaactttatccaaccgtg

SEQ ID NO: 362551 - DNA, 30 bp, Artificial Sequence
  Synthetic oligonucleotide
ttgagcaagtctgtcggccaatcaaccgtg

SEQ ID NO: 362552 - DNA, 30 bp, Artificial Sequence
  Synthetic oligonucleotide
ggctccaaagatttttttctggtaaccgtg

SEQ ID NO: 362553 - DNA, 30 bp, Artificial Sequence
  Synthetic oligonucleotide
gtctaacgacattaactgccctgccccgtg

SEQ ID NO: 362554 - DNA, 30 bp, Artificial Sequence
  Synthetic oligonucleotide
agagactacgggggtcctataccgcccgtg

SEQ ID NO: 362555 - DNA, 30 bp, Artificial Sequence
  Synthetic oligonucleotide
tcatttctacgtggaacccatatgcccgtg

SEQ ID NO: 362556 - DNA, 30 bp, Artificial Sequence
  Synthetic oligonucleotide
ctcccttttgcataaatgtttgtgcccgtg

SEQ ID NO: 362557 - DNA, 30 bp, Artificial Sequence
  Synthetic oligonucleotide
tgtgagagcgctaatggtctctaagccgtg

SEQ ID NO: 362558 - DNA, 30 bp, Artificial Sequence
  Synthetic oligonucleotide
aaatcttgccgcgctgtatccgtagccgtg

SEQ ID NO: 362559 - DNA, 30 bp, Artificial Sequence
  Synthetic oligonucleotide
ggtaatttatcaatggttgatttcgccgtg

SEQ ID NO: 362560 - DNA, 30 bp, Artificial Sequence
  Synthetic oligonucleotide
catagccggccattgggtaggggggccgtg

SEQ ID NO: 362561 - DNA, 30 bp, Artificial Sequence
  Synthetic oligonucleotide
ctccagagataagcatcgaagtgggccgtg

SEQ ID NO: 362562 - DNA, 30 bp, Artificial Sequence
  Synthetic oligonucleotide
tttattgggacatcgtggcaaaaatccgtg

SEQ ID NO: 362563 - DNA, 30 bp, Artificial Sequence
  Synthetic oligonucleotide
actttcttcggcttcctacgcatatccgtg

SEQ ID NO: 362564 - DNA, 30 bp, Artificial Sequence
  Synthetic oligonucleotide
gtatgaacttggtcacttgtcgtctccgtg

SEQ ID NO: 362565 - DNA, 30 bp, Artificial Sequence
  Synthetic oligonucleotide
gggcatcccatcgctgcatccatttccgtg

SEQ ID NO: 362566 - DNA, 30 bp, Artificial Sequence
  Synthetic oligonucleotide
tatataaggtaatcaaatggtatttccgtg

SEQ ID NO: 362567 - DNA, 30 bp, Artificial Sequence
  Synthetic oligonucleotide
gatttctggagcgactaaggcgcaagcgtg

SEQ ID NO: 362568 - DNA, 30 bp, Artificial Sequence
  Synthetic oligonucleotide
gaataaattccacggtcgcgggacagcgtg

SEQ ID NO: 362569 - DNA, 30 bp, Artificial Sequence
  Synthetic oligonucleotide
ccaggggcgtgtgctaccgccctcagcgtg

SEQ ID NO: 362570 - DNA, 30 bp, Artificial Sequence
  Synthetic oligonucleotide
tagatgataaaacactgacgcctcagcgtg

SEQ ID NO: 362571 - DNA, 30 bp, Artificial Sequence
  Synthetic oligonucleotide
atgagcggtccctggttgtcaaagagcgtg

SEQ ID NO: 362572 - DNA, 30 bp, Artificial Sequence
  Synthetic oligonucleotide
aaaaaatcaacatgtggcaagacgagcgtg

SEQ ID NO: 362573 - DNA, 30 bp, Artificial Sequence
  Synthetic oligonucleotide
aacacgcttaagggacataggaggagcgtg

SEQ ID NO: 362574 - DNA, 30 bp, Artificial Sequence
  Synthetic oligonucleotide
atctattttagcgctaatgtcgatagcgtg

SEQ ID NO: 362575 - DNA, 30 bp, Artificial Sequence
  Synthetic oligonucleotide
acatcatcattacctgactcactccgcgtg

SEQ ID NO: 362576 - DNA, 30 bp, Artificial Sequence
  Synthetic oligonucleotide
ttcatacgggagaggcgttggctgcgcgtg

SEQ ID NO: 362577 - DNA, 30 bp, Artificial Sequence
  Synthetic oligonucleotide
tgtcttccccttgtggcagtatatcgcgtg

SEQ ID NO: 362578 - DNA, 30 bp, Artificial Sequence
  Synthetic oligonucleotide
tgggacgactccgcgttgggggttcgcgtg

SEQ ID NO: 362579 - DNA, 30 bp, Artificial Sequence
  Synthetic oligonucleotide
gataacgatacgccacatgtgggcggcgtg

SEQ ID NO: 362580 - DNA, 30 bp, Artificial Sequence
  Synthetic oligonucleotide
ttgtacggggtattgctgcgcatgggcgtg

SEQ ID NO: 362581 - DNA, 30 bp, Artificial Sequence
  Synthetic oligonucleotide
ctatggagcgggccggcggacgtgggcgtg

SEQ ID NO: 362582 - DNA, 29 bp, Artificial Sequence
  Synthetic oligonucleotide
atgagctcagctcaccagaccctggcgtg

SEQ ID NO: 362583 - DNA, 30 bp, Artificial Sequence
  Synthetic oligonucleotide
cagctagtaacagtggatacattatgcgtg

SEQ ID NO: 362584 - DNA, 30 bp, Artificial Sequence
  Synthetic oligonucleotide
tctgttgtgggaaccaaggtcacgtgcgtg

SEQ ID NO: 362585 - DNA, 30 bp, Artificial Sequence
  Synthetic oligonucleotide
agaggcttttggtgatcatagcacatcgtg

SEQ ID NO: 362586 - DNA, 30 bp, Artificial Sequence
  Synthetic oligonucleotide
atttacgcgaagagcgatcaggccatcgtg

SEQ ID NO: 362587 - DNA, 30 bp, Artificial Sequence
  Synthetic oligonucleotide
catcaaagcccccctatttcactcatcgtg

SEQ ID NO: 362588 - DNA, 30 bp, Artificial Sequence
  Synthetic oligonucleotide
aacagaactgtctgttaactttagatcgtg

SEQ ID NO: 362589 - DNA, 30 bp, Artificial Sequence
  Synthetic oligonucleotide
tgaacacagccatacttatgcaatatcgtg

SEQ ID NO: 362590 - DNA, 30 bp, Artificial Sequence
  Synthetic oligonucleotide
aagtcggcacggtaggtatcgggactcgtg

SEQ ID NO: 362591 - DNA, 30 bp, Artificial Sequence
  Synthetic oligonucleotide
atcggagctaacagtctagtgtgactcgtg

SEQ ID NO: 362592 - DNA, 30 bp, Artificial Sequence
  Synthetic oligonucleotide
gttttgcattgagttccagcaatactcgtg

SEQ ID NO: 362593 - DNA, 30 bp, Artificial Sequence
  Synthetic oligonucleotide
aataaggtctcggcttggatcatcctcgtg

SEQ ID NO: 362594 - DNA, 30 bp, Artificial Sequence
  Synthetic oligonucleotide
tactttataaccccattggacaggctcgtg

SEQ ID NO: 362595 - DNA, 30 bp, Artificial Sequence
  Synthetic oligonucleotide
gagtttgtagaagtatagtcaaatctcgtg

SEQ ID NO: 362596 - DNA, 30 bp, Artificial Sequence
  Synthetic oligonucleotide
cccgctgtaatatagagggtacatctcgtg

SEQ ID NO: 362597 - DNA, 30 bp, Artificial Sequence
  Synthetic oligonucleotide
aagtgagtgaggacgtctaacccagtcgtg

SEQ ID NO: 362598 - DNA, 30 bp, Artificial Sequence
  Synthetic oligonucleotide
actggtttatggacgaagcatccagtcgtg

SEQ ID NO: 362599 - DNA, 30 bp, Artificial Sequence
  Synthetic oligonucleotide
cttgggcaatgattgtgatttagagtcgtg

SEQ ID NO: 362600 - DNA, 30 bp, Artificial Sequence
  Synthetic oligonucleotide
tcgacggttttgcgattaccgatagtcgtg

SEQ ID NO: 362601 - DNA, 30 bp, Artificial Sequence
  Synthetic oligonucleotide
aaaaagccgaatcaaatttcatgggtcgtg

SEQ ID NO: 362602 - DNA, 30 bp, Artificial Sequence
  Synthetic oligonucleotide
gagttaatgggagcccggtgtctggtcgtg

SEQ ID NO: 362603 - DNA, 30 bp, Artificial Sequence
  Synthetic oligonucleotide
tttaagctctactacgacggtcatgtcgtg

SEQ ID NO: 362604 - DNA, 30 bp, Artificial Sequence
  Synthetic oligonucleotide
tcccaccatgagtggtatgattttgtcgtg

SEQ ID NO: 362605 - DNA, 30 bp, Artificial Sequence
  Synthetic oligonucleotide
tcataatactgacaagggtggcccttcgtg

SEQ ID NO: 362606 - DNA, 30 bp, Artificial Sequence
  Synthetic oligonucleotide
gaattcaatatagtgtttgagtccttcgtg

SEQ ID NO: 362607 - DNA, 30 bp, Artificial Sequence
  Synthetic oligonucleotide
ggcaggcgtctaagcaaaaagtggttcgtg

SEQ ID NO: 362608 - DNA, 30 bp, Artificial Sequence
  Synthetic oligonucleotide
gacacgaatcaaaaccttcagagtttcgtg

SEQ ID NO: 362609 - DNA, 30 bp, Artificial Sequence
  Synthetic oligonucleotide
gacgttacgggttgttgcaaagcaaaggtg

SEQ ID NO: 362610 - DNA, 30 bp, Artificial Sequence
  Synthetic oligonucleotide
ttcggtcatgcccgtgtcatcagaaaggtg

SEQ ID NO: 362611 - DNA, 30 bp, Artificial Sequence
  Synthetic oligonucleotide
cgcgtaccatcttatcgtcaaataaaggtg

SEQ ID NO: 362612 - DNA, 30 bp, Artificial Sequence
  Synthetic oligonucleotide
ttgaagttatccttcggccgcagccaggtg

SEQ ID NO: 362613 - DNA, 30 bp, Artificial Sequence
  Synthetic oligonucleotide
agccaaaatgccgtctgttgaaagcaggtg

SEQ ID NO: 362614 - DNA, 30 bp, Artificial Sequence
  Synthetic oligonucleotide
gttccgaacaaatgttgtttacggcaggtg

SEQ ID NO: 362615 - DNA, 30 bp, Artificial Sequence
  Synthetic oligonucleotide
ctcccaagggcaaaattatgtcggcaggtg

SEQ ID NO: 362616 - DNA, 31 bp, Artificial Sequence
  Synthetic oligonucleotide
ttccttgtatgcaggcggacacgttcaggtg

SEQ ID NO: 362617 - DNA, 30 bp, Artificial Sequence
  Synthetic oligonucleotide
ggatagtgacaactgtgtgaaggagaggtg

SEQ ID NO: 362618 - DNA, 30 bp, Artificial Sequence
  Synthetic oligonucleotide
ttcttggcaccctcacgttgcgacgaggtg

SEQ ID NO: 362619 - DNA, 30 bp, Artificial Sequence
  Synthetic oligonucleotide
gagccaataggtaccagcaaatttgaggtg

SEQ ID NO: 362620 - DNA, 30 bp, Artificial Sequence
  Synthetic oligonucleotide
ttcgtgagcaatggcgacaccaaataggtg

SEQ ID NO: 362621 - DNA, 30 bp, Artificial Sequence
  Synthetic oligonucleotide
attcaacaaaataacggcttgtgataggtg

SEQ ID NO: 362622 - DNA, 30 bp, Artificial Sequence
  Synthetic oligonucleotide
gcccaccgaatcgatagtgctatataggtg

SEQ ID NO: 362623 - DNA, 30 bp, Artificial Sequence
  Synthetic oligonucleotide
tgaagaggctggctcgttatccagtaggtg

SEQ ID NO: 362624 - DNA, 30 bp, Artificial Sequence
  Synthetic oligonucleotide
gaatccaggacctatattaatctgtaggtg

SEQ ID NO: 362625 - DNA, 30 bp, Artificial Sequence
  Synthetic oligonucleotide
tatatagagttctgttattcgaattaggtg

SEQ ID NO: 362626 - DNA, 30 bp, Artificial Sequence
  Synthetic oligonucleotide
atagcctggacaagccactattcttaggtg

SEQ ID NO: 362627 - DNA, 30 bp, Artificial Sequence
  Synthetic oligonucleotide
agcttaagcatggggtcttggtaaacggtg

SEQ ID NO: 362628 - DNA, 30 bp, Artificial Sequence
  Synthetic oligonucleotide
ctggttctaggtgtcacctccgcaacggtg

SEQ ID NO: 362629 - DNA, 30 bp, Artificial Sequence
  Synthetic oligonucleotide
aggtcgtagtattcataccgcagaacggtg

SEQ ID NO: 362630 - DNA, 30 bp, Artificial Sequence
  Synthetic oligonucleotide
acgtatggccacattgaagttcgaacggtg

SEQ ID NO: 362631 - DNA, 30 bp, Artificial Sequence
  Synthetic oligonucleotide
ggactccttcgactgaattctgtcacggtg

SEQ ID NO: 362632 - DNA, 30 bp, Artificial Sequence
  Synthetic oligonucleotide
tgtacggccattgccaaaatcaatacggtg

SEQ ID NO: 362633 - DNA, 30 bp, Artificial Sequence
  Synthetic oligonucleotide
gtatatggaccggaacctccaattacggtg

SEQ ID NO: 362634 - DNA, 30 bp, Artificial Sequence
  Synthetic oligonucleotide
gacacagcgcgtaaccaaagcacaccggtg

SEQ ID NO: 362635 - DNA, 30 bp, Artificial Sequence
  Synthetic oligonucleotide
ttcgaggttggcgtggcatctaccccggtg

SEQ ID NO: 362636 - DNA, 30 bp, Artificial Sequence
  Synthetic oligonucleotide
gtgggtgatgttcgggtgccttgtccggtg

SEQ ID NO: 362637 - DNA, 30 bp, Artificial Sequence
  Synthetic oligonucleotide
accagacatatattaagtctggcagcggtg

SEQ ID NO: 362638 - DNA, 30 bp, Artificial Sequence
  Synthetic oligonucleotide
ctaacctaattaagcgtattgggagcggtg

SEQ ID NO: 362639 - DNA, 30 bp, Artificial Sequence
  Synthetic oligonucleotide
cccgacgtgataccttggtgtggcgcggtg

SEQ ID NO: 362640 - DNA, 30 bp, Artificial Sequence
  Synthetic oligonucleotide
tatactttgtgtttggacttttgggcggtg

SEQ ID NO: 362641 - DNA, 30 bp, Artificial Sequence
  Synthetic oligonucleotide
gcaataagtccaacagggcaacctgcggtg

SEQ ID NO: 362642 - DNA, 30 bp, Artificial Sequence
  Synthetic oligonucleotide
gattctttatagcctcgggctcgtgcggtg

SEQ ID NO: 362643 - DNA, 30 bp, Artificial Sequence
  Synthetic oligonucleotide
aagttattgttttaaaatgcagttgcggtg

SEQ ID NO: 362644 - DNA, 30 bp, Artificial Sequence
  Synthetic oligonucleotide
ttcggatctaccgatacctgctttgcggtg

SEQ ID NO: 362645 - DNA, 30 bp, Artificial Sequence
  Synthetic oligonucleotide
gtggggccgttaagtaggcctgcatcggtg

SEQ ID NO: 362646 - DNA, 30 bp, Artificial Sequence
  Synthetic oligonucleotide
gtaagcgcgttcctgctgcatctctcggtg

SEQ ID NO: 362647 - DNA, 30 bp, Artificial Sequence
  Synthetic oligonucleotide
attcattacttagtaccctttcacagggtg

SEQ ID NO: 362648 - DNA, 30 bp, Artificial Sequence
  Synthetic oligonucleotide
cgtttgtcgccattccagcaagagagggtg

SEQ ID NO: 362649 - DNA, 30 bp, Artificial Sequence
  Synthetic oligonucleotide
aggctaatagttatacctgcacggagggtg

SEQ ID NO: 362650 - DNA, 30 bp, Artificial Sequence
  Synthetic oligonucleotide
atcttggtagactatatagaaccgcgggtg

SEQ ID NO: 362651 - DNA, 30 bp, Artificial Sequence
  Synthetic oligonucleotide
cctcacggggtgtggatatcggttcgggtg

SEQ ID NO: 362652 - DNA, 30 bp, Artificial Sequence
  Synthetic oligonucleotide
aatcctatactgtgtatatcggttcgggtg

SEQ ID NO: 362653 - DNA, 30 bp, Artificial Sequence
  Synthetic oligonucleotide
tgtaaataggatgcaatgcccaaaggggtg

SEQ ID NO: 362654 - DNA, 30 bp, Artificial Sequence
  Synthetic oligonucleotide
aaagtctgacggtcactttgtccaggggtg

SEQ ID NO: 362655 - DNA, 30 bp, Artificial Sequence
  Synthetic oligonucleotide
ttcttcagaccacagttttaattaggggtg

SEQ ID NO: 362656 - DNA, 30 bp, Artificial Sequence
  Synthetic oligonucleotide
aaaagaaaacaggagtctccaggcggggtg

SEQ ID NO: 362657 - DNA, 30 bp, Artificial Sequence
  Synthetic oligonucleotide
actaagttggcatttgtagagctcggggtg

SEQ ID NO: 362658 - DNA, 30 bp, Artificial Sequence
  Synthetic oligonucleotide
cccgtagcgtgttgagagtaagcgggggtg

SEQ ID NO: 362659 - DNA, 30 bp, Artificial Sequence
  Synthetic oligonucleotide
tggtgtgctggcaactcgggggcgggggtg

SEQ ID NO: 362660 - DNA, 30 bp, Artificial Sequence
  Synthetic oligonucleotide
aacattcgcatgactcatgtactgggggtg

SEQ ID NO: 362661 - DNA, 30 bp, Artificial Sequence
  Synthetic oligonucleotide
ggaggggggcaatcgcttctagtgggggtg

SEQ ID NO: 362662 - DNA, 30 bp, Artificial Sequence
  Synthetic oligonucleotide
agtagaggttccttgactttgacctgggtg

SEQ ID NO: 362663 - DNA, 30 bp, Artificial Sequence
  Synthetic oligonucleotide
tgctgattataaaaccagcggccctgggtg

SEQ ID NO: 362664 - DNA, 30 bp, Artificial Sequence
  Synthetic oligonucleotide
ggcttcccgctgggttttcaaatctgggtg

SEQ ID NO: 362665 - DNA, 30 bp, Artificial Sequence
  Synthetic oligonucleotide
tacgctgcgcaatagaggcttaagtgggtg

SEQ ID NO: 362666 - DNA, 30 bp, Artificial Sequence
  Synthetic oligonucleotide
gcctaattcggtgttgtgtacttgtgggtg

SEQ ID NO: 362667 - DNA, 30 bp, Artificial Sequence
  Synthetic oligonucleotide
agacgatcacgttattcagtacgttgggtg

SEQ ID NO: 362668 - DNA, 30 bp, Artificial Sequence
  Synthetic oligonucleotide
gattacggcagactaaatctccgaatggtg

SEQ ID NO: 362669 - DNA, 30 bp, Artificial Sequence
  Synthetic oligonucleotide
gtaacgtaacgctcttcgtttaacatggtg

SEQ ID NO: 362670 - DNA, 30 bp, Artificial Sequence
  Synthetic oligonucleotide
gtaccattcttatgcaatcttgacatggtg

SEQ ID NO: 362671 - DNA, 30 bp, Artificial Sequence
  Synthetic oligonucleotide
cgcagcgaaaacaggttctagcagatggtg

SEQ ID NO: 362672 - DNA, 30 bp, Artificial Sequence
  Synthetic oligonucleotide
atctcctttctgtatacgatgcgtatggtg

SEQ ID NO: 362673 - DNA, 30 bp, Artificial Sequence
  Synthetic oligonucleotide
cttgcgcaggtagtaatgtcacttatggtg

SEQ ID NO: 362674 - DNA, 30 bp, Artificial Sequence
  Synthetic oligonucleotide
caaccatgtgtaaggtcgtgggttatggtg

SEQ ID NO: 362675 - DNA, 30 bp, Artificial Sequence
  Synthetic oligonucleotide
gtcgccctggcaaccgtgtagttcctggtg

SEQ ID NO: 362676 - DNA, 30 bp, Artificial Sequence
  Synthetic oligonucleotide
taatctccgaatgtgtgtgcaaagctggtg

SEQ ID NO: 362677 - DNA, 31 bp, Artificial Sequence
  Synthetic oligonucleotide
ttggtgggcatagtgcagatttccgctggtg

SEQ ID NO: 362678 - DNA, 30 bp, Artificial Sequence
  Synthetic oligonucleotide
tagatggcgtccggcgtggggtgagtggtg

SEQ ID NO: 362679 - DNA, 30 bp, Artificial Sequence
  Synthetic oligonucleotide
gttggcgttggtccgtacttgcccgtggtg

SEQ ID NO: 362680 - DNA, 30 bp, Artificial Sequence
  Synthetic oligonucleotide
aatgtagcgagccgcttaggccgcgtggtg

SEQ ID NO: 362681 - DNA, 30 bp, Artificial Sequence
  Synthetic oligonucleotide
tttcaaaggcgacgaactccgcgcgtggtg

SEQ ID NO: 362682 - DNA, 30 bp, Artificial Sequence
  Synthetic oligonucleotide
cattactacaccggtgcacattgcgtggtg

SEQ ID NO: 362683 - DNA, 30 bp, Artificial Sequence
  Synthetic oligonucleotide
tactggtggaggccaagaggatatgtggtg

SEQ ID NO: 362684 - DNA, 30 bp, Artificial Sequence
  Synthetic oligonucleotide
taaagtaaatagtccctgtgctctgtggtg

SEQ ID NO: 362685 - DNA, 30 bp, Artificial Sequence
  Synthetic oligonucleotide
aaaccctgtggctcgaaccatgcattggtg

SEQ ID NO: 362686 - DNA, 30 bp, Artificial Sequence
  Synthetic oligonucleotide
ttgggagacattttctgtcgatccttggtg

SEQ ID NO: 362687 - DNA, 30 bp, Artificial Sequence
  Synthetic oligonucleotide
tttcgttcatgtgtctagttcgccaatgtg

SEQ ID NO: 362688 - DNA, 30 bp, Artificial Sequence
  Synthetic oligonucleotide
ggtcgtagcaactggacactcctcaatgtg

SEQ ID NO: 362689 - DNA, 30 bp, Artificial Sequence
  Synthetic oligonucleotide
cgtgaggtaaacgcagccggcgggaatgtg

SEQ ID NO: 362690 - DNA, 30 bp, Artificial Sequence
  Synthetic oligonucleotide
ttatgtgtgcaagttctctagggtaatgtg

SEQ ID NO: 362691 - DNA, 30 bp, Artificial Sequence
  Synthetic oligonucleotide
gttttatgggtatgatccatcgtgcatgtg

SEQ ID NO: 362692 - DNA, 30 bp, Artificial Sequence
  Synthetic oligonucleotide
ccgtcccattctggccgatggtatcatgtg

SEQ ID NO: 362693 - DNA, 30 bp, Artificial Sequence
  Synthetic oligonucleotide
atataaaatacgtccagttggtatcatgtg

SEQ ID NO: 362694 - DNA, 30 bp, Artificial Sequence
  Synthetic oligonucleotide
cgcgagtacgcaggaaccgtgtatcatgtg

SEQ ID NO: 362695 - DNA, 30 bp, Artificial Sequence
  Synthetic oligonucleotide
tggattttcaggatgaactcgccagatgtg

SEQ ID NO: 362696 - DNA, 30 bp, Artificial Sequence
  Synthetic oligonucleotide
caaaagcggagcgagattgtgttagatgtg

SEQ ID NO: 362697 - DNA, 30 bp, Artificial Sequence
  Synthetic oligonucleotide
tttggcggtatattgaaatagtaggatgtg

SEQ ID NO: 362698 - DNA, 30 bp, Artificial Sequence
  Synthetic oligonucleotide
gactctacaatgagtttaagaactgatgtg

SEQ ID NO: 362699 - DNA, 30 bp, Artificial Sequence
  Synthetic oligonucleotide
gcggcttggcatttagagtccgcatatgtg

SEQ ID NO: 362700 - DNA, 30 bp, Artificial Sequence
  Synthetic oligonucleotide
ggttttaacacaaggtgtgcggcatatgtg

SEQ ID NO: 362701 - DNA, 30 bp, Artificial Sequence
  Synthetic oligonucleotide
ttagaggccgccatgtgccaccgatatgtg

SEQ ID NO: 362702 - DNA, 30 bp, Artificial Sequence
  Synthetic oligonucleotide
atctggtaatgtcccgcagtagtatatgtg

SEQ ID NO: 362703 - DNA, 30 bp, Artificial Sequence
  Synthetic oligonucleotide
cgtgccacaagcgcaagatgggtctatgtg

SEQ ID NO: 362704 - DNA, 30 bp, Artificial Sequence
  Synthetic oligonucleotide
tgcgaactaattgtttaaaagcggtatgtg

SEQ ID NO: 362705 - DNA, 30 bp, Artificial Sequence
  Synthetic oligonucleotide
aacctgtgaccaggcgggttacattatgtg

SEQ ID NO: 362706 - DNA, 30 bp, Artificial Sequence
  Synthetic oligonucleotide
ccgcggcaacgcattacccaatcttatgtg

SEQ ID NO: 362707 - DNA, 30 bp, Artificial Sequence
  Synthetic oligonucleotide
ccgcttacagagatgtattcgctaactgtg

SEQ ID NO: 362708 - DNA, 30 bp, Artificial Sequence
  Synthetic oligonucleotide
ttacgcgcaattttatttggtattactgtg

SEQ ID NO: 362709 - DNA, 30 bp, Artificial Sequence
  Synthetic oligonucleotide
atccggggacgtgaattggaccgacctgtg

SEQ ID NO: 362710 - DNA, 30 bp, Artificial Sequence
  Synthetic oligonucleotide
aacacagcacatggaatcagcggccctgtg

SEQ ID NO: 362711 - DNA, 30 bp, Artificial Sequence
  Synthetic oligonucleotide
gtaccgattaaggccctagcagatcctgtg

SEQ ID NO: 362712 - DNA, 30 bp, Artificial Sequence
  Synthetic oligonucleotide
cagtcctcgagcgctgacatatatcctgtg

SEQ ID NO: 362713 - DNA, 30 bp, Artificial Sequence
  Synthetic oligonucleotide
gtgatgctgaggacacaagaacccgctgtg

SEQ ID NO: 362714 - DNA, 30 bp, Artificial Sequence
  Synthetic oligonucleotide
aacgaacgcacgctatgatcacccgctgtg

SEQ ID NO: 362715 - DNA, 30 bp, Artificial Sequence
  Synthetic oligonucleotide
cagcaggattctgggagactgggcgctgtg

SEQ ID NO: 362716 - DNA, 30 bp, Artificial Sequence
  Synthetic oligonucleotide
tgtttgtgccccatgctatctggcgctgtg

SEQ ID NO: 362717 - DNA, 30 bp, Artificial Sequence
  Synthetic oligonucleotide
gagattacgacccggcacccccaggctgtg

SEQ ID NO: 362718 - DNA, 30 bp, Artificial Sequence
  Synthetic oligonucleotide
gtgcgctgccacttacagtttttggctgtg

SEQ ID NO: 362719 - DNA, 30 bp, Artificial Sequence
  Synthetic oligonucleotide
gtagcatgacttatctattctaatgctgtg

SEQ ID NO: 362720 - DNA, 30 bp, Artificial Sequence
  Synthetic oligonucleotide
gctccttactttgtaacagtaaaatctgtg

SEQ ID NO: 362721 - DNA, 30 bp, Artificial Sequence
  Synthetic oligonucleotide
acccacttatagcctatgccgtaatctgtg

SEQ ID NO: 362722 - DNA, 30 bp, Artificial Sequence
  Synthetic oligonucleotide
gaaactagggaacagtggagcttatctgtg

SEQ ID NO: 362723 - DNA, 30 bp, Artificial Sequence
  Synthetic oligonucleotide
actggaccacgtgtatgggttaagtctgtg

SEQ ID NO: 362724 - DNA, 30 bp, Artificial Sequence
  Synthetic oligonucleotide
ccgaccattcaaatctggcgcccgtctgtg

SEQ ID NO: 362725 - DNA, 30 bp, Artificial Sequence
  Synthetic oligonucleotide
attcgcgattaacattactaaatttctgtg

SEQ ID NO: 362726 - DNA, 30 bp, Artificial Sequence
  Synthetic oligonucleotide
tatgatagacacaggttggatctttctgtg

SEQ ID NO: 362727 - DNA, 30 bp, Artificial Sequence
  Synthetic oligonucleotide
gtagctcatattgcggtgagggcaagtgtg

SEQ ID NO: 362728 - DNA, 30 bp, Artificial Sequence
  Synthetic oligonucleotide
ttggccgctaacacgaacttgaagagtgtg

SEQ ID NO: 362729 - DNA, 30 bp, Artificial Sequence
  Synthetic oligonucleotide
agtttgctaccggtggatcattatagtgtg

SEQ ID NO: 362730 - DNA, 30 bp, Artificial Sequence
  Synthetic oligonucleotide
ccagaggtttaagttaggtattgtagtgtg

SEQ ID NO: 362731 - DNA, 30 bp, Artificial Sequence
  Synthetic oligonucleotide
tatgtgcatcgccggtagccgcgtcgtgtg

SEQ ID NO: 362732 - DNA, 30 bp, Artificial Sequence
  Synthetic oligonucleotide
atttcttgaagagtgaagggaattcgtgtg

SEQ ID NO: 362733 - DNA, 30 bp, Artificial Sequence
  Synthetic oligonucleotide
gcgcccgtcatctgaaattcatttcgtgtg

SEQ ID NO: 362734 - DNA, 30 bp, Artificial Sequence
  Synthetic oligonucleotide
atagtgtcggagataggaacaccgggtgtg

SEQ ID NO: 362735 - DNA, 30 bp, Artificial Sequence
  Synthetic oligonucleotide
gatgtgttggggaattaaaagctgggtgtg

SEQ ID NO: 362736 - DNA, 30 bp, Artificial Sequence
  Synthetic oligonucleotide
tcagcacgaacgccgaatacggctggtgtg

SEQ ID NO: 362737 - DNA, 30 bp, Artificial Sequence
  Synthetic oligonucleotide
ttgtatttaagccgctctattggatgtgtg

SEQ ID NO: 362738 - DNA, 30 bp, Artificial Sequence
  Synthetic oligonucleotide
cacattagcggggcctcggaggtatgtgtg

SEQ ID NO: 362739 - DNA, 30 bp, Artificial Sequence
  Synthetic oligonucleotide
cccaaggaagtgtttttaaaaaactgtgtg

SEQ ID NO: 362740 - DNA, 30 bp, Artificial Sequence
  Synthetic oligonucleotide
tattgctagattgccgtattcatctgtgtg

SEQ ID NO: 362741 - DNA, 30 bp, Artificial Sequence
  Synthetic oligonucleotide
attcaggtttcggctagttcccgttgtgtg

SEQ ID NO: 362742 - DNA, 30 bp, Artificial Sequence
  Synthetic oligonucleotide
ccctccggtttcaatttaaggtaaattgtg

SEQ ID NO: 362743 - DNA, 30 bp, Artificial Sequence
  Synthetic oligonucleotide
ctcgcaatagtattagtcctgtgaattgtg

SEQ ID NO: 362744 - DNA, 30 bp, Artificial Sequence
  Synthetic oligonucleotide
ctaaaaataatgcagcacataaccattgtg

SEQ ID NO: 362745 - DNA, 30 bp, Artificial Sequence
  Synthetic oligonucleotide
taatcgcggggcatggcatgcaccattgtg

SEQ ID NO: 362746 - DNA, 30 bp, Artificial Sequence
  Synthetic oligonucleotide
aggatatacttgtttaaatctagcattgtg

SEQ ID NO: 362747 - DNA, 30 bp, Artificial Sequence
  Synthetic oligonucleotide
gtggtacagtgtggttgtcgactcattgtg

SEQ ID NO: 362748 - DNA, 30 bp, Artificial Sequence
  Synthetic oligonucleotide
ggcgaactatcatcggcgcgtgtgattgtg

SEQ ID NO: 362749 - DNA, 30 bp, Artificial Sequence
  Synthetic oligonucleotide
gtttttccataaaaaggcgtccatattgtg

SEQ ID NO: 362750 - DNA, 30 bp, Artificial Sequence
  Synthetic oligonucleotide
atttcgtgattacagtatgtggatattgtg

SEQ ID NO: 362751 - DNA, 30 bp, Artificial Sequence
  Synthetic oligonucleotide
tatggccgcaaccgtctcccgagtattgtg

SEQ ID NO: 362752 - DNA, 30 bp, Artificial Sequence
  Synthetic oligonucleotide
tacgagcgactatcgatttttcgtattgtg

SEQ ID NO: 362753 - DNA, 30 bp, Artificial Sequence
  Synthetic oligonucleotide
cggaatcgagccctttcgctctcacttgtg

SEQ ID NO: 362754 - DNA, 30 bp, Artificial Sequence
  Synthetic oligonucleotide
tcaagccgatctagaataaattgacttgtg

SEQ ID NO: 362755 - DNA, 30 bp, Artificial Sequence
  Synthetic oligonucleotide
tctgccgggtggcgccaaaaactacttgtg

SEQ ID NO: 362756 - DNA, 30 bp, Artificial Sequence
  Synthetic oligonucleotide
cagcatacgcatcataaacttttacttgtg

SEQ ID NO: 362757 - DNA, 30 bp, Artificial Sequence
  Synthetic oligonucleotide
aacaaataaccaaaggagcatcaccttgtg

SEQ ID NO: 362758 - DNA, 30 bp, Artificial Sequence
  Synthetic oligonucleotide
aagcagcatctacataacacactggttgtg

SEQ ID NO: 362759 - DNA, 30 bp, Artificial Sequence
  Synthetic oligonucleotide
tcgatcgtcctcattttggaggttgttgtg

SEQ ID NO: 362760 - DNA, 30 bp, Artificial Sequence
  Synthetic oligonucleotide
gtcattacgtctatacattgagaatttgtg

SEQ ID NO: 362761 - DNA, 30 bp, Artificial Sequence
  Synthetic oligonucleotide
ctctacggtatgctaatttcgtcgtttgtg

SEQ ID NO: 362762 - DNA, 30 bp, Artificial Sequence
  Synthetic oligonucleotide
gtgaggcaaggcacttctactttttttgtg

SEQ ID NO: 362763 - DNA, 30 bp, Artificial Sequence
  Synthetic oligonucleotide
aatcgcccgggttgacacacatcaaaattg

SEQ ID NO: 362764 - DNA, 30 bp, Artificial Sequence
  Synthetic oligonucleotide
cttcgggggcggtgtcaaaaaaacaaattg

SEQ ID NO: 362765 - DNA, 31 bp, Artificial Sequence
  Synthetic oligonucleotide
tggtttttaagtagactgccaatacaaattg

SEQ ID NO: 362766 - DNA, 30 bp, Artificial Sequence
  Synthetic oligonucleotide
atttaaacctggaggttcaaaaccaaattg

SEQ ID NO: 362767 - DNA, 30 bp, Artificial Sequence
  Synthetic oligonucleotide
cgctcattgagacggaaggtccctaaattg

SEQ ID NO: 362768 - DNA, 30 bp, Artificial Sequence
  Synthetic oligonucleotide
gtatgtatagaggatgtatgccgtaaattg

SEQ ID NO: 362769 - DNA, 30 bp, Artificial Sequence
  Synthetic oligonucleotide
acatagttccctgtgctaaccgaacaattg

SEQ ID NO: 362770 - DNA, 30 bp, Artificial Sequence
  Synthetic oligonucleotide
atgggctacgctataggacaaatacaattg

SEQ ID NO: 362771 - DNA, 30 bp, Artificial Sequence
  Synthetic oligonucleotide
gtcgcgctttatacgggagcaatacaattg

SEQ ID NO: 362772 - DNA, 30 bp, Artificial Sequence
  Synthetic oligonucleotide
acgcccgttcaggctggcctggcccaattg

SEQ ID NO: 362773 - DNA, 30 bp, Artificial Sequence
  Synthetic oligonucleotide
gcttttcctaccggttcgtccagccaattg

SEQ ID NO: 362774 - DNA, 30 bp, Artificial Sequence
  Synthetic oligonucleotide
gccgctcacatactcgccccacgccaattg

SEQ ID NO: 362775 - DNA, 30 bp, Artificial Sequence
  Synthetic oligonucleotide
caggccgagacgactttgatgccgcaattg

SEQ ID NO: 362776 - DNA, 30 bp, Artificial Sequence
  Synthetic oligonucleotide
gcacatagctacgtgtgtgtaatgcaattg

SEQ ID NO: 362777 - DNA, 30 bp, Artificial Sequence
  Synthetic oligonucleotide
gctgggctgcagcttcgacaaattcaattg

SEQ ID NO: 362778 - DNA, 30 bp, Artificial Sequence
  Synthetic oligonucleotide
cttgaggaagttagtagcagccttcaattg

SEQ ID NO: 362779 - DNA, 30 bp, Artificial Sequence
  Synthetic oligonucleotide
atatcgtccatatagagccgggtagaattg

SEQ ID NO: 362780 - DNA, 30 bp, Artificial Sequence
  Synthetic oligonucleotide
caatgctacgcgtggttgctacacgaattg

SEQ ID NO: 362781 - DNA, 30 bp, Artificial Sequence
  Synthetic oligonucleotide
catctagttctagtcttaggagaggaattg

SEQ ID NO: 362782 - DNA, 30 bp, Artificial Sequence
  Synthetic oligonucleotide
gtaataacccggatgtaaactcgggaattg

SEQ ID NO: 362783 - DNA, 30 bp, Artificial Sequence
  Synthetic oligonucleotide
acgctatcgaacacgacgcatagtgaattg

SEQ ID NO: 362784 - DNA, 31 bp, Artificial Sequence
  Synthetic oligonucleotide
tggcatgtgccttatacgtaattttgaattg

SEQ ID NO: 362785 - DNA, 30 bp, Artificial Sequence
  Synthetic oligonucleotide
ctgaagtgtggaggtagagcaaagtaattg

SEQ ID NO: 362786 - DNA, 30 bp, Artificial Sequence
  Synthetic oligonucleotide
tgccacgcgggatcacctacatcgtaattg

SEQ ID NO: 362787 - DNA, 30 bp, Artificial Sequence
  Synthetic oligonucleotide
agtggattttatgagtcagaactgtaattg

SEQ ID NO: 362788 - DNA, 30 bp, Artificial Sequence
  Synthetic oligonucleotide
actattaaggggtaacaggctctgtaattg

SEQ ID NO: 362789 - DNA, 30 bp, Artificial Sequence
  Synthetic oligonucleotide
agtataaatattccatgccaatattaattg

SEQ ID NO: 362790 - DNA, 30 bp, Artificial Sequence
  Synthetic oligonucleotide
gtcattggcatcgacagaggggcttaattg

SEQ ID NO: 362791 - DNA, 30 bp, Artificial Sequence
  Synthetic oligonucleotide
ggttgctgctgtgcggagttcaacacattg

SEQ ID NO: 362792 - DNA, 30 bp, Artificial Sequence
  Synthetic oligonucleotide
cagataattccatatgagtcgcacacattg

SEQ ID NO: 362793 - DNA, 30 bp, Artificial Sequence
  Synthetic oligonucleotide
ttatacgcacagccttcgtcaagcacattg

SEQ ID NO: 362794 - DNA, 30 bp, Artificial Sequence
  Synthetic oligonucleotide
gtgtaagttgggtacggtccatagacattg

SEQ ID NO: 362795 - DNA, 30 bp, Artificial Sequence
  Synthetic oligonucleotide
agtggactaaattcaactctggcgacattg

SEQ ID NO: 362796 - DNA, 30 bp, Artificial Sequence
  Synthetic oligonucleotide
ctaactatttgccccgatatgctgacattg

SEQ ID NO: 362797 - DNA, 30 bp, Artificial Sequence
  Synthetic oligonucleotide
ccaagtccaggggcatatgcgcatacattg

SEQ ID NO: 362798 - DNA, 30 bp, Artificial Sequence
  Synthetic oligonucleotide
aaggaactggatgagacgctcaaaccattg

SEQ ID NO: 362799 - DNA, 30 bp, Artificial Sequence
  Synthetic oligonucleotide
cccacgagaggggagtcgctgtccccattg

SEQ ID NO: 362800 - DNA, 30 bp, Artificial Sequence
  Synthetic oligonucleotide
gagttaaggtgatgcggaaatacgccattg

SEQ ID NO: 362801 - DNA, 30 bp, Artificial Sequence
  Synthetic oligonucleotide
aacaatctccgtaacatatcggcgccattg

SEQ ID NO: 362802 - DNA, 30 bp, Artificial Sequence
  Synthetic oligonucleotide
ggataagactttagagaacttactccattg

SEQ ID NO: 362803 - DNA, 30 bp, Artificial Sequence
  Synthetic oligonucleotide
cgttgctttgtatacgcatcttgtccattg

SEQ ID NO: 362804 - DNA, 30 bp, Artificial Sequence
  Synthetic oligonucleotide
ggcatttcccgcgattttaatacagcattg

SEQ ID NO: 362805 - DNA, 30 bp, Artificial Sequence
  Synthetic oligonucleotide
gatacatgttgttacgtaatgtcagcattg

SEQ ID NO: 362806 - DNA, 30 bp, Artificial Sequence
  Synthetic oligonucleotide
atagtcggttgcattacaaacagagcattg

SEQ ID NO: 362807 - DNA, 30 bp, Artificial Sequence
  Synthetic oligonucleotide
ccggaatgcttatcagagccttatgcattg

SEQ ID NO: 362808 - DNA, 30 bp, Artificial Sequence
  Synthetic oligonucleotide
gagcctatgccctatggtgcaactgcattg

SEQ ID NO: 362809 - DNA, 30 bp, Artificial Sequence
  Synthetic oligonucleotide
ctcaaacggtatacaaggtatcgatcattg

SEQ ID NO: 362810 - DNA, 30 bp, Artificial Sequence
  Synthetic oligonucleotide
tgatttgacggacgcaagaaatgatcattg

SEQ ID NO: 362811 - DNA, 30 bp, Artificial Sequence
  Synthetic oligonucleotide
ggtaatgcgcgctgacaatcgcgctcattg

SEQ ID NO: 362812 - DNA, 30 bp, Artificial Sequence
  Synthetic oligonucleotide
caactagtgctcgcaatctcaatttcattg

SEQ ID NO: 362813 - DNA, 30 bp, Artificial Sequence
  Synthetic oligonucleotide
gtggcaatgcacgaattccttcaaagattg

SEQ ID NO: 362814 - DNA, 30 bp, Artificial Sequence
  Synthetic oligonucleotide
gccagtatcgtgttcttcatcgtaagattg

SEQ ID NO: 362815 - DNA, 30 bp, Artificial Sequence
  Synthetic oligonucleotide
tactatcgaagcgcccacggagccagattg

SEQ ID NO: 362816 - DNA, 30 bp, Artificial Sequence
  Synthetic oligonucleotide
ctaatcgatctcatttagatgtcgagattg

SEQ ID NO: 362817 - DNA, 30 bp, Artificial Sequence
  Synthetic oligonucleotide
ttaaatctggtattgtgcgacaggagattg

SEQ ID NO: 362818 - DNA, 30 bp, Artificial Sequence
  Synthetic oligonucleotide
acgacacggtatgccattatgcctagattg

SEQ ID NO: 362819 - DNA, 30 bp, Artificial Sequence
  Synthetic oligonucleotide
atctgagcatccaaaccccggcgtagattg

SEQ ID NO: 362820 - DNA, 30 bp, Artificial Sequence
  Synthetic oligonucleotide
ttaataattgagctattattagaacgattg

SEQ ID NO: 362821 - DNA, 30 bp, Artificial Sequence
  Synthetic oligonucleotide
aacggagacgcgcattcagcgtcacgattg

SEQ ID NO: 362822 - DNA, 30 bp, Artificial Sequence
  Synthetic oligonucleotide
ccgccaagaagcaattttctatgacgattg

SEQ ID NO: 362823 - DNA, 30 bp, Artificial Sequence
  Synthetic oligonucleotide
gcgtttgcccggaattggacgttccgattg

SEQ ID NO: 362824 - DNA, 30 bp, Artificial Sequence
  Synthetic oligonucleotide
ctttgctgaattggttattatgcgcgattg

SEQ ID NO: 362825 - DNA, 30 bp, Artificial Sequence
  Synthetic oligonucleotide
catggcccagactccttccactcgcgattg

SEQ ID NO: 362826 - DNA, 30 bp, Artificial Sequence
  Synthetic oligonucleotide
acagatgcttcttaggaccctaggcgattg

SEQ ID NO: 362827 - DNA, 30 bp, Artificial Sequence
  Synthetic oligonucleotide
gtgatcgtatgcccgtaaagggtgcgattg

SEQ ID NO: 362828 - DNA, 30 bp, Artificial Sequence
  Synthetic oligonucleotide
catttaatcgttgagggaccttctcgattg

SEQ ID NO: 362829 - DNA, 30 bp, Artificial Sequence
  Synthetic oligonucleotide
aacaattcgtggactggaaacaccggattg

SEQ ID NO: 362830 - DNA, 30 bp, Artificial Sequence
  Synthetic oligonucleotide
aagggcttcgtactatcacattagggattg

SEQ ID NO: 362831 - DNA, 30 bp, Artificial Sequence
  Synthetic oligonucleotide
gggcgctcccgactcctattgcggggattg

SEQ ID NO: 362832 - DNA, 30 bp, Artificial Sequence
  Synthetic oligonucleotide
tgggttgctaatggcctcctatatggattg

SEQ ID NO: 362833 - DNA, 30 bp, Artificial Sequence
  Synthetic oligonucleotide
caaccatgttagggcacggtaaaatgattg

SEQ ID NO: 362834 - DNA, 30 bp, Artificial Sequence
  Synthetic oligonucleotide
tgaagcacaaagagaggctccacatgattg

SEQ ID NO: 362835 - DNA, 30 bp, Artificial Sequence
  Synthetic oligonucleotide
gctacagttactgaaggtaggccatgattg

SEQ ID NO: 362836 - DNA, 30 bp, Artificial Sequence
  Synthetic oligonucleotide
ctcttaaacagtgcatcgtatagatgattg

SEQ ID NO: 362837 - DNA, 30 bp, Artificial Sequence
  Synthetic oligonucleotide
acgtagcgaagccggtctcatcgatgattg

SEQ ID NO: 362838 - DNA, 30 bp, Artificial Sequence
  Synthetic oligonucleotide
tgtgtgggccgggtacccgccctatgattg

SEQ ID NO: 362839 - DNA, 30 bp, Artificial Sequence
  Synthetic oligonucleotide
gctccgtctgagtatgccgctcactgattg

SEQ ID NO: 362840 - DNA, 30 bp, Artificial Sequence
  Synthetic oligonucleotide
cattacgcagtacacgcaccaacgtgattg

SEQ ID NO: 362841 - DNA, 30 bp, Artificial Sequence
  Synthetic oligonucleotide
cagtggcgcaaactagcctcctgttgattg

SEQ ID NO: 362842 - DNA, 30 bp, Artificial Sequence
  Synthetic oligonucleotide
agagaaagttcatgctgcatactttgattg

SEQ ID NO: 362843 - DNA, 30 bp, Artificial Sequence
  Synthetic oligonucleotide
tagaatggttcatagattcgaaacatattg

SEQ ID NO: 362844 - DNA, 30 bp, Artificial Sequence
  Synthetic oligonucleotide
tacaatctaggcataactagggccatattg

SEQ ID NO: 362845 - DNA, 30 bp, Artificial Sequence
  Synthetic oligonucleotide
gaggacgtatcgacacgcaacgagatattg

SEQ ID NO: 362846 - DNA, 30 bp, Artificial Sequence
  Synthetic oligonucleotide
aactgtatgtcacgtattgttccgatattg

SEQ ID NO: 362847 - DNA, 30 bp, Artificial Sequence
  Synthetic oligonucleotide
ctcgctttcactgtgtacgcctggatattg

SEQ ID NO: 362848 - DNA, 30 bp, Artificial Sequence
  Synthetic oligonucleotide
tacataggtctggtcagttcaactatattg

SEQ ID NO: 362849 - DNA, 30 bp, Artificial Sequence
  Synthetic oligonucleotide
ggtttgtcccgtaggtaccgacctatattg

SEQ ID NO: 362850 - DNA, 30 bp, Artificial Sequence
  Synthetic oligonucleotide
tatcttacctgccacacaaaccttatattg

SEQ ID NO: 362851 - DNA, 30 bp, Artificial Sequence
  Synthetic oligonucleotide
cttcccggaaccgagccggtttaactattg

SEQ ID NO: 362852 - DNA, 30 bp, Artificial Sequence
  Synthetic oligonucleotide
cttaatttaaacgaactgtcgatcctattg

SEQ ID NO: 362853 - DNA, 30 bp, Artificial Sequence
  Synthetic oligonucleotide
tccaaagttgttataaaagttaagctattg

SEQ ID NO: 362854 - DNA, 30 bp, Artificial Sequence
  Synthetic oligonucleotide
tgttgcggttcttattgtccacggctattg

SEQ ID NO: 362855 - DNA, 30 bp, Artificial Sequence
  Synthetic oligonucleotide
tcgacggttggctaacggtagcctctattg

SEQ ID NO: 362856 - DNA, 30 bp, Artificial Sequence
  Synthetic oligonucleotide
cccgcaatttttatgctgaaccaagtattg

SEQ ID NO: 362857 - DNA, 30 bp, Artificial Sequence
  Synthetic oligonucleotide
catcggtttaccccgaatggctcagtattg

SEQ ID NO: 362858 - DNA, 30 bp, Artificial Sequence
  Synthetic oligonucleotide
caaaaaacgcatcttaggcggttcgtattg

SEQ ID NO: 362859 - DNA, 30 bp, Artificial Sequence
  Synthetic oligonucleotide
cctagggggagccttgtatttcctgtattg

SEQ ID NO: 362860 - DNA, 30 bp, Artificial Sequence
  Synthetic oligonucleotide
cccgactgccgagaggccagcatattattg

SEQ ID NO: 362861 - DNA, 30 bp, Artificial Sequence
  Synthetic oligonucleotide
gtcataggattttatgcgtttttattattg

SEQ ID NO: 362862 - DNA, 30 bp, Artificial Sequence
  Synthetic oligonucleotide
gcctggcattggtcctgcgtgaccttattg

SEQ ID NO: 362863 - DNA, 30 bp, Artificial Sequence
  Synthetic oligonucleotide
tagagccccctaataagcgttctcttattg

SEQ ID NO: 362864 - DNA, 30 bp, Artificial Sequence
  Synthetic oligonucleotide
aaagggctcaacgcggttctattcttattg

SEQ ID NO: 362865 - DNA, 30 bp, Artificial Sequence
  Synthetic oligonucleotide
atacagagtttgtggtttacttggttattg

SEQ ID NO: 362866 - DNA, 30 bp, Artificial Sequence
  Synthetic oligonucleotide
aaagtcagcaggcggagtataggtttattg

SEQ ID NO: 362867 - DNA, 30 bp, Artificial Sequence
  Synthetic oligonucleotide
ccttagtagatatttctgccgattttattg

SEQ ID NO: 362868 - DNA, 30 bp, Artificial Sequence
  Synthetic oligonucleotide
gactcgggtgagcctctaggccaaaacttg

SEQ ID NO: 362869 - DNA, 30 bp, Artificial Sequence
  Synthetic oligonucleotide
tcccttggaattgcatagggccaaaacttg

SEQ ID NO: 362870 - DNA, 30 bp, Artificial Sequence
  Synthetic oligonucleotide
actgaatttagctactctagccgaaacttg

SEQ ID NO: 362871 - DNA, 30 bp, Artificial Sequence
  Synthetic oligonucleotide
aacatttataccactctatgtggaaacttg

SEQ ID NO: 362872 - DNA, 30 bp, Artificial Sequence
  Synthetic oligonucleotide
gcgtaacctgcaatacaagcaggcaacttg

SEQ ID NO: 362873 - DNA, 30 bp, Artificial Sequence
  Synthetic oligonucleotide
gctagaaatcaatcattgggattgaacttg

SEQ ID NO: 362874 - DNA, 30 bp, Artificial Sequence
  Synthetic oligonucleotide
atctcctagggagggcaagtttgccacttg

SEQ ID NO: 362875 - DNA, 30 bp, Artificial Sequence
  Synthetic oligonucleotide
ccctcctaagcgctctagccgatccacttg

SEQ ID NO: 362876 - DNA, 30 bp, Artificial Sequence
  Synthetic oligonucleotide
aaggtgaacgtttactacattcggcacttg

SEQ ID NO: 362877 - DNA, 30 bp, Artificial Sequence
  Synthetic oligonucleotide
aacatggtctagggtcagtgtgggcacttg

SEQ ID NO: 362878 - DNA, 30 bp, Artificial Sequence
  Synthetic oligonucleotide
acaactagcacgaacgccaatgttcacttg

SEQ ID NO: 362879 - DNA, 31 bp, Artificial Sequence
  Synthetic oligonucleotide
cccactgtgtggttacaatggaatagacttg

SEQ ID NO: 362880 - DNA, 30 bp, Artificial Sequence
  Synthetic oligonucleotide
ctcacgtaattcttaagtgagaacgacttg

SEQ ID NO: 362881 - DNA, 30 bp, Artificial Sequence
  Synthetic oligonucleotide
ctgccagaaaagagtccttcagaggacttg

SEQ ID NO: 362882 - DNA, 30 bp, Artificial Sequence
  Synthetic oligonucleotide
gtcgtgcgcctctagccattgatggacttg

SEQ ID NO: 362883 - DNA, 30 bp, Artificial Sequence
  Synthetic oligonucleotide
aaccatactacgcattttgccttggacttg

SEQ ID NO: 362884 - DNA, 30 bp, Artificial Sequence
  Synthetic oligonucleotide
ttgggatggtgacacgacgcgggtgacttg

SEQ ID NO: 362885 - DNA, 30 bp, Artificial Sequence
  Synthetic oligonucleotide
catctcggtcgcccggtccactactacttg

SEQ ID NO: 362886 - DNA, 30 bp, Artificial Sequence
  Synthetic oligonucleotide
tgacagagaaagaatgcggacacctacttg

SEQ ID NO: 362887 - DNA, 30 bp, Artificial Sequence
  Synthetic oligonucleotide
atccctgtggggcgttggtgaatctacttg

SEQ ID NO: 362888 - DNA, 30 bp, Artificial Sequence
  Synthetic oligonucleotide
gctacgggaataaataagggactctacttg

SEQ ID NO: 362889 - DNA, 30 bp, Artificial Sequence
  Synthetic oligonucleotide
aacaggctttctactagtaaaaagtacttg

SEQ ID NO: 362890 - DNA, 30 bp, Artificial Sequence
  Synthetic oligonucleotide
tctgatgctctctcctatccgaggtacttg

SEQ ID NO: 362891 - DNA, 30 bp, Artificial Sequence
  Synthetic oligonucleotide
tctgataaccactagcccctggtttacttg

SEQ ID NO: 362892 - DNA, 30 bp, Artificial Sequence
  Synthetic oligonucleotide
agactttcatccgcgggcagttcaaccttg

SEQ ID NO: 362893 - DNA, 30 bp, Artificial Sequence
  Synthetic oligonucleotide
gcactggcctattcgggccggagaaccttg

SEQ ID NO: 362894 - DNA, 30 bp, Artificial Sequence
  Synthetic oligonucleotide
agccgggatgataccgtcaattgcaccttg

SEQ ID NO: 362895 - DNA, 30 bp, Artificial Sequence
  Synthetic oligonucleotide
ctagcggggtagttggaattaatcaccttg

SEQ ID NO: 362896 - DNA, 30 bp, Artificial Sequence
  Synthetic oligonucleotide
tgggaaggatgctcgggaggggcgaccttg

SEQ ID NO: 362897 - DNA, 30 bp, Artificial Sequence
  Synthetic oligonucleotide
gcatagccagactatcatagtcggaccttg

SEQ ID NO: 362898 - DNA, 30 bp, Artificial Sequence
  Synthetic oligonucleotide
ttgtgccacatgtacgtccttgataccttg

SEQ ID NO: 362899 - DNA, 30 bp, Artificial Sequence
  Synthetic oligonucleotide
gtcggaaggggcatatatgttcgccccttg

SEQ ID NO: 362900 - DNA, 30 bp, Artificial Sequence
  Synthetic oligonucleotide
gcgcggtcccgtgaaacagagggccccttg

SEQ ID NO: 362901 - DNA, 30 bp, Artificial Sequence
  Synthetic oligonucleotide
cctacgatcgcgccgataattctccccttg

SEQ ID NO: 362902 - DNA, 30 bp, Artificial Sequence
  Synthetic oligonucleotide
acccccatcatggcatgtgcgaatcccttg

SEQ ID NO: 362903 - DNA, 30 bp, Artificial Sequence
  Synthetic oligonucleotide
aaatagtagaccggattatagtaagccttg

SEQ ID NO: 362904 - DNA, 30 bp, Artificial Sequence
  Synthetic oligonucleotide
ccaaatcttttgtcaaacggtggagccttg

SEQ ID NO: 362905 - DNA, 30 bp, Artificial Sequence
  Synthetic oligonucleotide
tcgccttgcttgagtgatgtctccgccttg

SEQ ID NO: 362906 - DNA, 30 bp, Artificial Sequence
  Synthetic oligonucleotide
atcaaggccgattcgacatgacgtgccttg

SEQ ID NO: 362907 - DNA, 30 bp, Artificial Sequence
  Synthetic oligonucleotide
tagtcggataaccgtcaaggttaatccttg

SEQ ID NO: 362908 - DNA, 30 bp, Artificial Sequence
  Synthetic oligonucleotide
aacaggggacccagtttaaaggcatccttg

SEQ ID NO: 362909 - DNA, 30 bp, Artificial Sequence
  Synthetic oligonucleotide
caccatatttagcgggccctgaactccttg

SEQ ID NO: 362910 - DNA, 30 bp, Artificial Sequence
  Synthetic oligonucleotide
tatttgatcgttcatgaagttgggtccttg

SEQ ID NO: 362911 - DNA, 30 bp, Artificial Sequence
  Synthetic oligonucleotide
gcaccagataacgagccttcgatgtccttg

SEQ ID NO: 362912 - DNA, 30 bp, Artificial Sequence
  Synthetic oligonucleotide
aggaaggtatcactctatgaaaattccttg

SEQ ID NO: 362913 - DNA, 30 bp, Artificial Sequence
  Synthetic oligonucleotide
ttaaatgcggtataacggataaattccttg

SEQ ID NO: 362914 - DNA, 30 bp, Artificial Sequence
  Synthetic oligonucleotide
tgggatcacgtcggcccggacccaagcttg

SEQ ID NO: 362915 - DNA, 30 bp, Artificial Sequence
  Synthetic oligonucleotide
gctcataggtccatccacggcataagcttg

SEQ ID NO: 362916 - DNA, 30 bp, Artificial Sequence
  Synthetic oligonucleotide
attgccaggtcggaggtcctggccagcttg

SEQ ID NO: 362917 - DNA, 30 bp, Artificial Sequence
  Synthetic oligonucleotide
agcctgggcgaaggtcgtagacatagcttg

SEQ ID NO: 362918 - DNA, 30 bp, Artificial Sequence
  Synthetic oligonucleotide
gcagtccaacaagcttcgcgcacacgcttg

SEQ ID NO: 362919 - DNA, 30 bp, Artificial Sequence
  Synthetic oligonucleotide
cggaactgaacgcaaacagacgcacgcttg

SEQ ID NO: 362920 - DNA, 30 bp, Artificial Sequence
  Synthetic oligonucleotide
aacccgcgaaggccttctgcccaccgcttg

SEQ ID NO: 362921 - DNA, 30 bp, Artificial Sequence
  Synthetic oligonucleotide
ctttagaatcacagatgaagcggccgcttg

SEQ ID NO: 362922 - DNA, 30 bp, Artificial Sequence
  Synthetic oligonucleotide
tattccgttatagtacggcattgccgcttg

SEQ ID NO: 362923 - DNA, 30 bp, Artificial Sequence
  Synthetic oligonucleotide
agattcgaattccccccgcaattccgcttg

SEQ ID NO: 362924 - DNA, 30 bp, Artificial Sequence
  Synthetic oligonucleotide
tggatgatagaagtttgtcagcggcgcttg

SEQ ID NO: 362925 - DNA, 30 bp, Artificial Sequence
  Synthetic oligonucleotide
gctatcattacggctctcacttggcgcttg

SEQ ID NO: 362926 - DNA, 30 bp, Artificial Sequence
  Synthetic oligonucleotide
ttgatatatcaactcaggatgagtcgcttg

SEQ ID NO: 362927 - DNA, 30 bp, Artificial Sequence
  Synthetic oligonucleotide
ggcaagtgcgacttgtaaactggtcgcttg

SEQ ID NO: 362928 - DNA, 30 bp, Artificial Sequence
  Synthetic oligonucleotide
ttagcaactgggggcgttccggccggcttg

SEQ ID NO: 362929 - DNA, 30 bp, Artificial Sequence
  Synthetic oligonucleotide
gctttgaggaaagggaacgcaggcggcttg

SEQ ID NO: 362930 - DNA, 30 bp, Artificial Sequence
  Synthetic oligonucleotide
ttaatatatatcagatggctttctggcttg

SEQ ID NO: 362931 - DNA, 30 bp, Artificial Sequence
  Synthetic oligonucleotide
tcttacagcacaacgacacaaagatgcttg

SEQ ID NO: 362932 - DNA, 30 bp, Artificial Sequence
  Synthetic oligonucleotide
actaacggtgctagctagattctatgcttg

SEQ ID NO: 362933 - DNA, 30 bp, Artificial Sequence
  Synthetic oligonucleotide
gcattaccatgggaatacgatacgtgcttg

SEQ ID NO: 362934 - DNA, 30 bp, Artificial Sequence
  Synthetic oligonucleotide
atttgtaaaagaacccaggcggcaatcttg

SEQ ID NO: 362935 - DNA, 30 bp, Artificial Sequence
  Synthetic oligonucleotide
aactcataatgacagatgccagtaatcttg

SEQ ID NO: 362936 - DNA, 30 bp, Artificial Sequence
  Synthetic oligonucleotide
tgccgccttccctgccgctccagcatcttg

SEQ ID NO: 362937 - DNA, 30 bp, Artificial Sequence
  Synthetic oligonucleotide
tgaatatcggcccggagactgggcatcttg

SEQ ID NO: 362938 - DNA, 30 bp, Artificial Sequence
  Synthetic oligonucleotide
ttacagtatcttccgctggaccagatcttg

SEQ ID NO: 362939 - DNA, 30 bp, Artificial Sequence
  Synthetic oligonucleotide
cattgaaagatcaatcgaacgtggatcttg

SEQ ID NO: 362940 - DNA, 30 bp, Artificial Sequence
  Synthetic oligonucleotide
gatccgcgcaaatcgagtatagtgatcttg

SEQ ID NO: 362941 - DNA, 30 bp, Artificial Sequence
  Synthetic oligonucleotide
gcacctcattaatcgagctctattatcttg

SEQ ID NO: 362942 - DNA, 30 bp, Artificial Sequence
  Synthetic oligonucleotide
ggctaatacatcaatgggattcttatcttg

SEQ ID NO: 362943 - DNA, 30 bp, Artificial Sequence
  Synthetic oligonucleotide
gaagagtccgatgcgcgcaccatactcttg

SEQ ID NO: 362944 - DNA, 30 bp, Artificial Sequence
  Synthetic oligonucleotide
tattgggcacggttgatccctcccctcttg

SEQ ID NO: 362945 - DNA, 30 bp, Artificial Sequence
  Synthetic oligonucleotide
gccagaccagcctgtacgacgaggctcttg

SEQ ID NO: 362946 - DNA, 30 bp, Artificial Sequence
  Synthetic oligonucleotide
gagacgcacaaagaatacggctaagtcttg

SEQ ID NO: 362947 - DNA, 30 bp, Artificial Sequence
  Synthetic oligonucleotide
aaaacaggtttgtggcccttgagagtcttg

SEQ ID NO: 362948 - DNA, 30 bp, Artificial Sequence
  Synthetic oligonucleotide
agacggtagtttatccctgcaggagtcttg

SEQ ID NO: 362949 - DNA, 30 bp, Artificial Sequence
  Synthetic oligonucleotide
gcaatcgacgtcatgcatacacacgtcttg

SEQ ID NO: 362950 - DNA, 30 bp, Artificial Sequence
  Synthetic oligonucleotide
ataaccgaataattcgtacgaagcgtcttg

SEQ ID NO: 362951 - DNA, 30 bp, Artificial Sequence
  Synthetic oligonucleotide
tcctagggtccatcgcgcggtcgggtcttg

SEQ ID NO: 362952 - DNA, 30 bp, Artificial Sequence
  Synthetic oligonucleotide
atgacatggcacaaccttgtcttggtcttg

SEQ ID NO: 362953 - DNA, 30 bp, Artificial Sequence
  Synthetic oligonucleotide
ctcaaagagttcgggctcagcgaattcttg

SEQ ID NO: 362954 - DNA, 30 bp, Artificial Sequence
  Synthetic oligonucleotide
attgagtctcagtcactttcaagattcttg

SEQ ID NO: 362955 - DNA, 30 bp, Artificial Sequence
  Synthetic oligonucleotide
attcatcagaggagtcagagccgattcttg

SEQ ID NO: 362956 - DNA, 30 bp, Artificial Sequence
  Synthetic oligonucleotide
actttagccgaagttctttactacttcttg

SEQ ID NO: 362957 - DNA, 30 bp, Artificial Sequence
  Synthetic oligonucleotide
gctcgagtgacaacttttcaacgcttcttg

SEQ ID NO: 362958 - DNA, 30 bp, Artificial Sequence
  Synthetic oligonucleotide
ccgatgggaacacgccctgttggcttcttg

SEQ ID NO: 362959 - DNA, 30 bp, Artificial Sequence
  Synthetic oligonucleotide
aaaaatgggtggaccggccggaatttcttg

SEQ ID NO: 362960 - DNA, 30 bp, Artificial Sequence
  Synthetic oligonucleotide
tatctagcgttagtattgcttcgaaagttg

SEQ ID NO: 362961 - DNA, 30 bp, Artificial Sequence
  Synthetic oligonucleotide
ggcctgcggggtctagaggaccggaagttg

SEQ ID NO: 362962 - DNA, 30 bp, Artificial Sequence
  Synthetic oligonucleotide
ggggttgggcttgcttcggagtataagttg

SEQ ID NO: 362963 - DNA, 30 bp, Artificial Sequence
  Synthetic oligonucleotide
agcactcgccgctgagcgtaacagcagttg

SEQ ID NO: 362964 - DNA, 30 bp, Artificial Sequence
  Synthetic oligonucleotide
gggggctaagaacggcgctcttggcagttg

SEQ ID NO: 362965 - DNA, 30 bp, Artificial Sequence
  Synthetic oligonucleotide
acccccctcgccccatacccagatcagttg

SEQ ID NO: 362966 - DNA, 30 bp, Artificial Sequence
  Synthetic oligonucleotide
cccgggctgcatgccgcgctctaagagttg

SEQ ID NO: 362967 - DNA, 30 bp, Artificial Sequence
  Synthetic oligonucleotide
ccagcaccaccagtgcaacgctcagagttg

SEQ ID NO: 362968 - DNA, 30 bp, Artificial Sequence
  Synthetic oligonucleotide
tgttactgtagtttcctgcagagagagttg

SEQ ID NO: 362969 - DNA, 35 bp, Artificial Sequence
  Synthetic oligonucleotide
attaacatcggcaaacttaggttccagccgagttg

SEQ ID NO: 362970 - DNA, 30 bp, Artificial Sequence
  Synthetic oligonucleotide
gcaagtaagcagttgctctatttggagttg

SEQ ID NO: 362971 - DNA, 30 bp, Artificial Sequence
  Synthetic oligonucleotide
acgggagcgctcgaagtgttttctgagttg

SEQ ID NO: 362972 - DNA, 30 bp, Artificial Sequence
  Synthetic oligonucleotide
ttattcagtgaccgtcaacgtatatagttg

SEQ ID NO: 362973 - DNA, 30 bp, Artificial Sequence
  Synthetic oligonucleotide
atgcattcatcatacgaaagattatagttg

SEQ ID NO: 362974 - DNA, 30 bp, Artificial Sequence
  Synthetic oligonucleotide
tagccgacttcgcgcgtaaacgcgtagttg

SEQ ID NO: 362975 - DNA, 30 bp, Artificial Sequence
  Synthetic oligonucleotide
gatattctcccgccttaagcaaggtagttg

SEQ ID NO: 362976 - DNA, 30 bp, Artificial Sequence
  Synthetic oligonucleotide
gggtatgaaccggcggataatggttagttg

SEQ ID NO: 362977 - DNA, 30 bp, Artificial Sequence
  Synthetic oligonucleotide
gtgagcaattccccatcctgctgaacgttg

SEQ ID NO: 362978 - DNA, 30 bp, Artificial Sequence
  Synthetic oligonucleotide
tactctaaacattgggggtgcgtaacgttg

SEQ ID NO: 362979 - DNA, 30 bp, Artificial Sequence
  Synthetic oligonucleotide
gtacgcggttgttgttgaagggtaacgttg

SEQ ID NO: 362980 - DNA, 30 bp, Artificial Sequence
  Synthetic oligonucleotide
agcaagcacagttaggactgcaacacgttg

SEQ ID NO: 362981 - DNA, 30 bp, Artificial Sequence
  Synthetic oligonucleotide
ggcgtgtcaaatccagttaaacgcacgttg

SEQ ID NO: 362982 - DNA, 30 bp, Artificial Sequence
  Synthetic oligonucleotide
ggtcagaccagcacctcggttgtcacgttg

SEQ ID NO: 362983 - DNA, 30 bp, Artificial Sequence
  Synthetic oligonucleotide
tgcggatcagagtactttctgttgacgttg

SEQ ID NO: 362984 - DNA, 30 bp, Artificial Sequence
  Synthetic oligonucleotide
ttccaagtagcggttatatgtagtacgttg

SEQ ID NO: 362985 - DNA, 30 bp, Artificial Sequence
  Synthetic oligonucleotide
cctggagggttcggccgtgctcaaccgttg

SEQ ID NO: 362986 - DNA, 30 bp, Artificial Sequence
  Synthetic oligonucleotide
cattattttcgctggtccttgccaccgttg

SEQ ID NO: 362987 - DNA, 30 bp, Artificial Sequence
  Synthetic oligonucleotide
attgtaagccggatctcaacagcaccgttg

SEQ ID NO: 362988 - DNA, 31 bp, Artificial Sequence
  Synthetic oligonucleotide
agccatccttttttccaggttaagaccgttg

SEQ ID NO: 362989 - DNA, 30 bp, Artificial Sequence
  Synthetic oligonucleotide
tgcacatcgctttgtcccaatgtcccgttg

SEQ ID NO: 362990 - DNA, 30 bp, Artificial Sequence
  Synthetic oligonucleotide
tgcgcgtataacatagtgaggcggccgttg

SEQ ID NO: 362991 - DNA, 30 bp, Artificial Sequence
  Synthetic oligonucleotide
agaaaagctacttcgctgcgacttccgttg

SEQ ID NO: 362992 - DNA, 30 bp, Artificial Sequence
  Synthetic oligonucleotide
cgtaggaacctgtgagcaggatttccgttg

SEQ ID NO: 362993 - DNA, 30 bp, Artificial Sequence
  Synthetic oligonucleotide
tatctcgttacagggttagtctacgcgttg

SEQ ID NO: 362994 - DNA, 30 bp, Artificial Sequence
  Synthetic oligonucleotide
tgaatagtcactcttatagaggaggcgttg

SEQ ID NO: 362995 - DNA, 30 bp, Artificial Sequence
  Synthetic oligonucleotide
acgcaaggtaaagaatcggctctggcgttg

SEQ ID NO: 362996 - DNA, 30 bp, Artificial Sequence
  Synthetic oligonucleotide
gaaaggccaaagatacacccggatgcgttg

SEQ ID NO: 362997 - DNA, 30 bp, Artificial Sequence
  Synthetic oligonucleotide
tgtggcgcacttcattaggcttgtgcgttg

SEQ ID NO: 362998 - DNA, 30 bp, Artificial Sequence
  Synthetic oligonucleotide
tagcgttgccccggctcgctgacctcgttg

SEQ ID NO: 362999 - DNA, 30 bp, Artificial Sequence
  Synthetic oligonucleotide
atagtgaatgttatagtccaaccctcgttg

SEQ ID NO: 363000 - DNA, 30 bp, Artificial Sequence
  Synthetic oligonucleotide
ctttttcggatccataagaatgtgtcgttg

SEQ ID NO: 363001 - DNA, 30 bp, Artificial Sequence
  Synthetic oligonucleotide
ttgagatcatgaccattcaagtattcgttg

SEQ ID NO: 363002 - DNA, 30 bp, Artificial Sequence
  Synthetic oligonucleotide
tacctagtactcagggaggattattcgttg

SEQ ID NO: 363003 - DNA, 30 bp, Artificial Sequence
  Synthetic oligonucleotide
cgtctgtgtctctgcacgtgggacaggttg

SEQ ID NO: 363004 - DNA, 30 bp, Artificial Sequence
  Synthetic oligonucleotide
gagactaggtcacaacgcagtcgcaggttg

SEQ ID NO: 363005 - DNA, 30 bp, Artificial Sequence
  Synthetic oligonucleotide
gattaagagcattgaaggccgggcaggttg

SEQ ID NO: 363006 - DNA, 30 bp, Artificial Sequence
  Synthetic oligonucleotide
acaaaagtggcaaccaagctgacgaggttg

SEQ ID NO: 363007 - DNA, 30 bp, Artificial Sequence
  Synthetic oligonucleotide
gaaagaggtaacgaatctgacgctaggttg

SEQ ID NO: 363008 - DNA, 30 bp, Artificial Sequence
  Synthetic oligonucleotide
gctcctagttgttccacacaaagtaggttg

SEQ ID NO: 363009 - DNA, 30 bp, Artificial Sequence
  Synthetic oligonucleotide
acaactgagagaattattagagttaggttg

SEQ ID NO: 363010 - DNA, 30 bp, Artificial Sequence
  Synthetic oligonucleotide
gttgttatttccctttcgaatccacggttg

SEQ ID NO: 363011 - DNA, 30 bp, Artificial Sequence
  Synthetic oligonucleotide
ccaagctcgcactgcatctgtttacggttg

SEQ ID NO: 363012 - DNA, 30 bp, Artificial Sequence
  Synthetic oligonucleotide
gcatcctccgagggtcaggggggccggttg

SEQ ID NO: 363013 - DNA, 30 bp, Artificial Sequence
  Synthetic oligonucleotide
tgtgttttcggatgaccgctttgccggttg

SEQ ID NO: 363014 - DNA, 30 bp, Artificial Sequence
  Synthetic oligonucleotide
tgctaaatacgtgtagagtcggtccggttg

SEQ ID NO: 363015 - DNA, 30 bp, Artificial Sequence
  Synthetic oligonucleotide
aagtgcgattttaaccgttaggcgcggttg

SEQ ID NO: 363016 - DNA, 30 bp, Artificial Sequence
  Synthetic oligonucleotide
tgttagtccatttcgcatgggcaagggttg

SEQ ID NO: 363017 - DNA, 30 bp, Artificial Sequence
  Synthetic oligonucleotide
tatctaaagtgacgcaaggtggaagggttg

SEQ ID NO: 363018 - DNA, 30 bp, Artificial Sequence
  Synthetic oligonucleotide
aagtttaaagtgcacaggttggcagggttg

SEQ ID NO: 363019 - DNA, 30 bp, Artificial Sequence
  Synthetic oligonucleotide
ggacctacattagacgacctagaggggttg

SEQ ID NO: 363020 - DNA, 30 bp, Artificial Sequence
  Synthetic oligonucleotide
cttagatcgagttcttagggttcggggttg

SEQ ID NO: 363021 - DNA, 30 bp, Artificial Sequence
  Synthetic oligonucleotide
tcttacatattcattttgcccagggggttg

SEQ ID NO: 363022 - DNA, 30 bp, Artificial Sequence
  Synthetic oligonucleotide
cctgcatcagatactgttcgcggggggttg

SEQ ID NO: 363023 - DNA, 30 bp, Artificial Sequence
  Synthetic oligonucleotide
gttcgtttcgcgggtaataatcatgggttg

SEQ ID NO: 363024 - DNA, 30 bp, Artificial Sequence
  Synthetic oligonucleotide
cgccatgcctcacacgtcgagtgtgggttg

SEQ ID NO: 363025 - DNA, 30 bp, Artificial Sequence
  Synthetic oligonucleotide
gaagtggcgcgacttttagcctttgggttg

SEQ ID NO: 363026 - DNA, 31 bp, Artificial Sequence
  Synthetic oligonucleotide
gtgtgaagttatagctttaccattatggttg

SEQ ID NO: 363027 - DNA, 30 bp, Artificial Sequence
  Synthetic oligonucleotide
gagatgtctggttcagagtagtggtggttg

SEQ ID NO: 363028 - DNA, 30 bp, Artificial Sequence
  Synthetic oligonucleotide
actatgacgcgaaacaaaacggcaatgttg

SEQ ID NO: 363029 - DNA, 30 bp, Artificial Sequence
  Synthetic oligonucleotide
ggtaggccattagtatttgtgataatgttg

SEQ ID NO: 363030 - DNA, 30 bp, Artificial Sequence
  Synthetic oligonucleotide
ttcggggcgggtgcgaatagactaatgttg

SEQ ID NO: 363031 - DNA, 30 bp, Artificial Sequence
  Synthetic oligonucleotide
gctaagaggtgtcaaaattttcggatgttg

SEQ ID NO: 363032 - DNA, 30 bp, Artificial Sequence
  Synthetic oligonucleotide
aaatacaattcggtccgagcggggatgttg

SEQ ID NO: 363033 - DNA, 30 bp, Artificial Sequence
  Synthetic oligonucleotide
atgactataagttttcaatattctatgttg

SEQ ID NO: 363034 - DNA, 30 bp, Artificial Sequence
  Synthetic oligonucleotide
aaaatcgactttgatatttctttcctgttg

SEQ ID NO: 363035 - DNA, 30 bp, Artificial Sequence
  Synthetic oligonucleotide
caattcgggcaccgtcgtgctgatctgttg

SEQ ID NO: 363036 - DNA, 30 bp, Artificial Sequence
  Synthetic oligonucleotide
ctctccggcgctatcagtagggctctgttg

SEQ ID NO: 363037 - DNA, 30 bp, Artificial Sequence
  Synthetic oligonucleotide
gtacagcacagcggctaaagagcagtgttg

SEQ ID NO: 363038 - DNA, 30 bp, Artificial Sequence
  Synthetic oligonucleotide
gaagataagggtaatggataacgagtgttg

SEQ ID NO: 363039 - DNA, 30 bp, Artificial Sequence
  Synthetic oligonucleotide
atggcgcaatgcctgtacgcagacgtgttg

SEQ ID NO: 363040 - DNA, 30 bp, Artificial Sequence
  Synthetic oligonucleotide
tgctcacaaatacggtgaccattcgtgttg

SEQ ID NO: 363041 - DNA, 30 bp, Artificial Sequence
  Synthetic oligonucleotide
agaattatgtccggcgacggttcggtgttg

SEQ ID NO: 363042 - DNA, 30 bp, Artificial Sequence
  Synthetic oligonucleotide
tcaagacgcttcgtacaccctggggtgttg

SEQ ID NO: 363043 - DNA, 30 bp, Artificial Sequence
  Synthetic oligonucleotide
gtgtgactccgagcgtatggtttggtgttg

SEQ ID NO: 363044 - DNA, 30 bp, Artificial Sequence
  Synthetic oligonucleotide
ttgattcctatacgtttaagagaattgttg

SEQ ID NO: 363045 - DNA, 30 bp, Artificial Sequence
  Synthetic oligonucleotide
attaccgtcggaggaaggcacgtattgttg

SEQ ID NO: 363046 - DNA, 30 bp, Artificial Sequence
  Synthetic oligonucleotide
cctcatagaaccctccagggtggcttgttg

SEQ ID NO: 363047 - DNA, 30 bp, Artificial Sequence
  Synthetic oligonucleotide
acggtaaatatagatttattccagttgttg

SEQ ID NO: 363048 - DNA, 30 bp, Artificial Sequence
  Synthetic oligonucleotide
ttaccgcaatgccaggtctattcgttgttg

SEQ ID NO: 363049 - DNA, 30 bp, Artificial Sequence
  Synthetic oligonucleotide
aacccgcgtagctcacagccagtgttgttg

SEQ ID NO: 363050 - DNA, 30 bp, Artificial Sequence
  Synthetic oligonucleotide
cgctggaaggaaatgttctcggctttgttg

SEQ ID NO: 363051 - DNA, 30 bp, Artificial Sequence
  Synthetic oligonucleotide
tagcatggtaccggttattggagtttgttg

SEQ ID NO: 363052 - DNA, 30 bp, Artificial Sequence
  Synthetic oligonucleotide
ggttgaacaggtttggtcggtaaaaatttg

SEQ ID NO: 363053 - DNA, 30 bp, Artificial Sequence
  Synthetic oligonucleotide
aattgggccggcggcatcttgcaaaatttg

SEQ ID NO: 363054 - DNA, 30 bp, Artificial Sequence
  Synthetic oligonucleotide
ctagaggccgaggaccttgctcaaaatttg

SEQ ID NO: 363055 - DNA, 30 bp, Artificial Sequence
  Synthetic oligonucleotide
cacgggtctcaactcttggggctaaatttg

SEQ ID NO: 363056 - DNA, 30 bp, Artificial Sequence
  Synthetic oligonucleotide
aatatgcaaaaccgaaggaaaggcaatttg

SEQ ID NO: 363057 - DNA, 30 bp, Artificial Sequence
  Synthetic oligonucleotide
taaatagccggacctgagggcttgaatttg

SEQ ID NO: 363058 - DNA, 30 bp, Artificial Sequence
  Synthetic oligonucleotide
tctagaaaagtcgtccgttataataatttg

SEQ ID NO: 363059 - DNA, 30 bp, Artificial Sequence
  Synthetic oligonucleotide
aataaattcgttggtaacgtagataatttg

SEQ ID NO: 363060 - DNA, 30 bp, Artificial Sequence
  Synthetic oligonucleotide
tgcacattaactgccgaacgggcacatttg

SEQ ID NO: 363061 - DNA, 30 bp, Artificial Sequence
  Synthetic oligonucleotide
tcaaacagtatattgggtgtaagacatttg

SEQ ID NO: 363062 - DNA, 30 bp, Artificial Sequence
  Synthetic oligonucleotide
cccaggtctcctgaggccgcataccatttg

SEQ ID NO: 363063 - DNA, 30 bp, Artificial Sequence
  Synthetic oligonucleotide
agctagagtcatgcatatggggtccatttg

SEQ ID NO: 363064 - DNA, 30 bp, Artificial Sequence
  Synthetic oligonucleotide
ctagaacggtagctttgacgaacgcatttg

SEQ ID NO: 363065 - DNA, 30 bp, Artificial Sequence
  Synthetic oligonucleotide
cggttgaaccggaagtcttaaaatcatttg

SEQ ID NO: 363066 - DNA, 30 bp, Artificial Sequence
  Synthetic oligonucleotide
caaaatcggactgtgtgcgacgctcatttg

SEQ ID NO: 363067 - DNA, 30 bp, Artificial Sequence
  Synthetic oligonucleotide
aagtgtactgctgtggctacttctcatttg

SEQ ID NO: 363068 - DNA, 30 bp, Artificial Sequence
  Synthetic oligonucleotide
tgtggtgactggcgctacactcgtcatttg

SEQ ID NO: 363069 - DNA, 30 bp, Artificial Sequence
  Synthetic oligonucleotide
gcccataaggttacacaaaaaccagatttg

SEQ ID NO: 363070 - DNA, 30 bp, Artificial Sequence
  Synthetic oligonucleotide
agcatgttaatagaggccccaaaggatttg

SEQ ID NO: 363071 - DNA, 30 bp, Artificial Sequence
  Synthetic oligonucleotide
gagcaaaagctgccaggaattgaatatttg

SEQ ID NO: 363072 - DNA, 30 bp, Artificial Sequence
  Synthetic oligonucleotide
acccagccatggttgatccggccatatttg

SEQ ID NO: 363073 - DNA, 30 bp, Artificial Sequence
  Synthetic oligonucleotide
ccaggtgatacacacaccgaggtatatttg

SEQ ID NO: 363074 - DNA, 30 bp, Artificial Sequence
  Synthetic oligonucleotide
ttccctcaccatcttccgaattcctatttg

SEQ ID NO: 363075 - DNA, 30 bp, Artificial Sequence
  Synthetic oligonucleotide
gccgattcacagagagtatcagagtatttg

SEQ ID NO: 363076 - DNA, 30 bp, Artificial Sequence
  Synthetic oligonucleotide
tcccaacagatgatcccggaatcgtatttg

SEQ ID NO: 363077 - DNA, 30 bp, Artificial Sequence
  Synthetic oligonucleotide
cgcacggccgactttgcttttaggtatttg

SEQ ID NO: 363078 - DNA, 30 bp, Artificial Sequence
  Synthetic oligonucleotide
aatggatggacccatcggggtatttatttg

SEQ ID NO: 363079 - DNA, 30 bp, Artificial Sequence
  Synthetic oligonucleotide
atcctgaccgacggtgaggagacaactttg

SEQ ID NO: 363080 - DNA, 30 bp, Artificial Sequence
  Synthetic oligonucleotide
gcccgacaggtggccggccgaccaactttg

SEQ ID NO: 363081 - DNA, 30 bp, Artificial Sequence
  Synthetic oligonucleotide
gaaaatttacggttagaaaaggacactttg

SEQ ID NO: 363082 - DNA, 30 bp, Artificial Sequence
  Synthetic oligonucleotide
attagcccaagcagctatggatggactttg

SEQ ID NO: 363083 - DNA, 30 bp, Artificial Sequence
  Synthetic oligonucleotide
gcagaacatttggtgaaatccaaccctttg

SEQ ID NO: 363084 - DNA, 30 bp, Artificial Sequence
  Synthetic oligonucleotide
atatgtttgtgaggggggatgtcgcctttg

SEQ ID NO: 363085 - DNA, 30 bp, Artificial Sequence
  Synthetic oligonucleotide
gactcatctccaagttctcggaaggctttg

SEQ ID NO: 363086 - DNA, 30 bp, Artificial Sequence
  Synthetic oligonucleotide
gcacagatatcggggttgagttatgctttg

SEQ ID NO: 363087 - DNA, 30 bp, Artificial Sequence
  Synthetic oligonucleotide
aagttgagtgctcgttccagtcttgctttg

SEQ ID NO: 363088 - DNA, 30 bp, Artificial Sequence
  Synthetic oligonucleotide
gaattgcgtaccgtgggggatgcatctttg

SEQ ID NO: 363089 - DNA, 30 bp, Artificial Sequence
  Synthetic oligonucleotide
tgataatgcgacattattgcgctatctttg

SEQ ID NO: 363090 - DNA, 30 bp, Artificial Sequence
  Synthetic oligonucleotide
cccagcgaaacagtcgaatataactctttg

SEQ ID NO: 363091 - DNA, 30 bp, Artificial Sequence
  Synthetic oligonucleotide
tggccactggttatacgagactgctctttg

SEQ ID NO: 363092 - DNA, 30 bp, Artificial Sequence
  Synthetic oligonucleotide
cacagggctaaatacactttacagtctttg

SEQ ID NO: 363093 - DNA, 30 bp, Artificial Sequence
  Synthetic oligonucleotide
tagtcgtttccgcggtacataacgtctttg

SEQ ID NO: 363094 - DNA, 30 bp, Artificial Sequence
  Synthetic oligonucleotide
gccccacaagcctctatattcggttctttg

SEQ ID NO: 363095 - DNA, 30 bp, Artificial Sequence
  Synthetic oligonucleotide
ggtagcgactcagggcgttgctcaagtttg

SEQ ID NO: 363096 - DNA, 30 bp, Artificial Sequence
  Synthetic oligonucleotide
atcctatgatctatatgcgttcacagtttg

SEQ ID NO: 363097 - DNA, 30 bp, Artificial Sequence
  Synthetic oligonucleotide
gagtgtgtgggacattggggtcagagtttg

SEQ ID NO: 363098 - DNA, 30 bp, Artificial Sequence
  Synthetic oligonucleotide
agacgttcggatgccttttcatgtagtttg

SEQ ID NO: 363099 - DNA, 31 bp, Artificial Sequence
  Synthetic oligonucleotide
cccggtcacatacaactcgggttgtagtttg

SEQ ID NO: 363100 - DNA, 30 bp, Artificial Sequence
  Synthetic oligonucleotide
ttcctgttatcgttagtacaagcacgtttg

SEQ ID NO: 363101 - DNA, 30 bp, Artificial Sequence
  Synthetic oligonucleotide
ttaagcccggggatcacggaatggcgtttg

SEQ ID NO: 363102 - DNA, 29 bp, Artificial Sequence
  Synthetic oligonucleotide
aaagttaagttagaaaaaattctcgtttg

SEQ ID NO: 363103 - DNA, 30 bp, Artificial Sequence
  Synthetic oligonucleotide
agaaccaaacttctgtcatacacaggtttg

SEQ ID NO: 363104 - DNA, 30 bp, Artificial Sequence
  Synthetic oligonucleotide
ggtattaaatcatgtggtaattccggtttg

SEQ ID NO: 363105 - DNA, 30 bp, Artificial Sequence
  Synthetic oligonucleotide
gtggtagttggtatactatcagcgggtttg

SEQ ID NO: 363106 - DNA, 30 bp, Artificial Sequence
  Synthetic oligonucleotide
atagattacagtaggtagttcaggggtttg

SEQ ID NO: 363107 - DNA, 30 bp, Artificial Sequence
  Synthetic oligonucleotide
gaaaacagttaacattagatccggggtttg

SEQ ID NO: 363108 - DNA, 30 bp, Artificial Sequence
  Synthetic oligonucleotide
ggcataacgagtcgtcgtggatggggtttg

SEQ ID NO: 363109 - DNA, 30 bp, Artificial Sequence
  Synthetic oligonucleotide
taccgtttgataacattagggttgggtttg

SEQ ID NO: 363110 - DNA, 30 bp, Artificial Sequence
  Synthetic oligonucleotide
gttggggtaataataggaccgaaatgtttg

SEQ ID NO: 363111 - DNA, 30 bp, Artificial Sequence
  Synthetic oligonucleotide
tgtgagcctaactggggtgtaagttgtttg

SEQ ID NO: 363112 - DNA, 30 bp, Artificial Sequence
  Synthetic oligonucleotide
gataatgcatttcgcagcctgacaattttg

SEQ ID NO: 363113 - DNA, 30 bp, Artificial Sequence
  Synthetic oligonucleotide
caacagacctacttagcatgttgaattttg

SEQ ID NO: 363114 - DNA, 30 bp, Artificial Sequence
  Synthetic oligonucleotide
tgcgagcattgctctgcagagctaattttg

SEQ ID NO: 363115 - DNA, 30 bp, Artificial Sequence
  Synthetic oligonucleotide
aagtcgtttataaatcttgagacgattttg

SEQ ID NO: 363116 - DNA, 30 bp, Artificial Sequence
  Synthetic oligonucleotide
cataaatgggcctatagcgcccggattttg

SEQ ID NO: 363117 - DNA, 30 bp, Artificial Sequence
  Synthetic oligonucleotide
ttacgtcctgagatgagtttaattattttg

SEQ ID NO: 363118 - DNA, 30 bp, Artificial Sequence
  Synthetic oligonucleotide
agccacatgaatgaattaagttttattttg

SEQ ID NO: 363119 - DNA, 30 bp, Artificial Sequence
  Synthetic oligonucleotide
gaattgtggcacgaaacgcgataccttttg

SEQ ID NO: 363120 - DNA, 30 bp, Artificial Sequence
  Synthetic oligonucleotide
atccgcaggaatttgcggtaggagcttttg

SEQ ID NO: 363121 - DNA, 30 bp, Artificial Sequence
  Synthetic oligonucleotide
cgaactgtggtcgctcgtaaaattcttttg

SEQ ID NO: 363122 - DNA, 30 bp, Artificial Sequence
  Synthetic oligonucleotide
acttgatttaagtcatgtgaagttcttttg

SEQ ID NO: 363123 - DNA, 30 bp, Artificial Sequence
  Synthetic oligonucleotide
gcaaggaattgcaatacccgaagagttttg

SEQ ID NO: 363124 - DNA, 30 bp, Artificial Sequence
  Synthetic oligonucleotide
tatcgggggcgaaccccgagatacgttttg

SEQ ID NO: 363125 - DNA, 30 bp, Artificial Sequence
  Synthetic oligonucleotide
ccgccagcggtgagtagtgtcgccgttttg

SEQ ID NO: 363126 - DNA, 30 bp, Artificial Sequence
  Synthetic oligonucleotide
atgatccgtttagttggaaatttcgttttg

SEQ ID NO: 363127 - DNA, 30 bp, Artificial Sequence
  Synthetic oligonucleotide
cgaaagcacgcttgtagcatcaaggttttg

SEQ ID NO: 363128 - DNA, 30 bp, Artificial Sequence
  Synthetic oligonucleotide
aaactagtcagaactgtcaagtatgttttg

SEQ ID NO: 363129 - DNA, 30 bp, Artificial Sequence
  Synthetic oligonucleotide
tgcagtcgaaggtaaccactgggtgttttg

SEQ ID NO: 363130 - DNA, 30 bp, Artificial Sequence
  Synthetic oligonucleotide
acttgatatgttggttaaatgtgtgttttg

SEQ ID NO: 363131 - DNA, 30 bp, Artificial Sequence
  Synthetic oligonucleotide
ccgagcataaagggtgagcatcttgttttg

SEQ ID NO: 363132 - DNA, 30 bp, Artificial Sequence
  Synthetic oligonucleotide
gccagaaggtattctcggtgttttgttttg

SEQ ID NO: 363133 - DNA, 30 bp, Artificial Sequence
  Synthetic oligonucleotide
gattccgggaaatcgaggtacaaatttttg

SEQ ID NO: 363134 - DNA, 29 bp, Artificial Sequence
  Synthetic oligonucleotide
ggctagcctagctattttgcttatttttg

SEQ ID NO: 363135 - DNA, 30 bp, Artificial Sequence
  Synthetic oligonucleotide
tatggcaaaaagtatttattatcgtttttg

SEQ ID NO: 363136 - DNA, 30 bp, Artificial Sequence
  Synthetic oligonucleotide
gaatgaggtgaaaataggtgaatgtttttg

SEQ ID NO: 363137 - DNA, 30 bp, Artificial Sequence
  Synthetic oligonucleotide
tttccctgttatgtatgtgttatgtttttg

SEQ ID NO: 363138 - DNA, 30 bp, Artificial Sequence
  Synthetic oligonucleotide
tacaaattcgatccagactgtagttttttg

SEQ ID NO: 363139 - DNA, 30 bp, Artificial Sequence
  Synthetic oligonucleotide
gccagcctcttagggatacactaaaaaaat

SEQ ID NO: 363140 - DNA, 30 bp, Artificial Sequence
  Synthetic oligonucleotide
atgaaacattcaacggtgacaccaaaaaat

SEQ ID NO: 363141 - DNA, 30 bp, Artificial Sequence
  Synthetic oligonucleotide
ctcgggataatgggaagatgctcaaaaaat

SEQ ID NO: 363142 - DNA, 30 bp, Artificial Sequence
  Synthetic oligonucleotide
attgcggccacattgtggggtctaaaaaat

SEQ ID NO: 363143 - DNA, 30 bp, Artificial Sequence
  Synthetic oligonucleotide
gaggaaggtctgcttgacactgtaaaaaat

SEQ ID NO: 363144 - DNA, 30 bp, Artificial Sequence
  Synthetic oligonucleotide
gagtagcccgctatacattaagacaaaaat

SEQ ID NO: 363145 - DNA, 30 bp, Artificial Sequence
  Synthetic oligonucleotide
aatagaatcgggcagggcaaaatcaaaaat

SEQ ID NO: 363146 - DNA, 30 bp, Artificial Sequence
  Synthetic oligonucleotide
cgctggcgcactctgcgtgagttgaaaaat

SEQ ID NO: 363147 - DNA, 30 bp, Artificial Sequence
  Synthetic oligonucleotide
ccgtaccgaaaacattggagtactaaaaat

SEQ ID NO: 363148 - DNA, 30 bp, Artificial Sequence
  Synthetic oligonucleotide
tacatgtggcaaagatgtccaggtaaaaat

SEQ ID NO: 363149 - DNA, 30 bp, Artificial Sequence
  Synthetic oligonucleotide
taccacatacacgattcaagctgccaaaat

SEQ ID NO: 363150 - DNA, 30 bp, Artificial Sequence
  Synthetic oligonucleotide
agcgggtcgtttttaagtgccgtccaaaat

SEQ ID NO: 363151 - DNA, 30 bp, Artificial Sequence
  Synthetic oligonucleotide
taaatcggagtgttagacacgtggcaaaat

SEQ ID NO: 363152 - DNA, 30 bp, Artificial Sequence
  Synthetic oligonucleotide
gcactcgtcaccgaaaggtgctgtcaaaat

SEQ ID NO: 363153 - DNA, 30 bp, Artificial Sequence
  Synthetic oligonucleotide
cagcccggcagatgtgtgaattttcaaaat

SEQ ID NO: 363154 - DNA, 30 bp, Artificial Sequence
  Synthetic oligonucleotide
ataaagtcaccaaattgttgtgaagaaaat

SEQ ID NO: 363155 - DNA, 30 bp, Artificial Sequence
  Synthetic oligonucleotide
cttgtgatcttggtcgacataacagaaaat

SEQ ID NO: 363156 - DNA, 30 bp, Artificial Sequence
  Synthetic oligonucleotide
aagctttcacaatacctggtcacagaaaat

SEQ ID NO: 363157 - DNA, 30 bp, Artificial Sequence
  Synthetic oligonucleotide
gcgcggagaaaaggtctaatacgagaaaat

SEQ ID NO: 363158 - DNA, 30 bp, Artificial Sequence
  Synthetic oligonucleotide
atacttggataaactctggctcgagaaaat

SEQ ID NO: 363159 - DNA, 30 bp, Artificial Sequence
  Synthetic oligonucleotide
ctaactatggaggcgacagcttgagaaaat

SEQ ID NO: 363160 - DNA, 30 bp, Artificial Sequence
  Synthetic oligonucleotide
aatgttatcgggtagggaacccgcgaaaat

SEQ ID NO: 363161 - DNA, 30 bp, Artificial Sequence
  Synthetic oligonucleotide
ttccacaatataagcaataatgtcgaaaat

SEQ ID NO: 363162 - DNA, 30 bp, Artificial Sequence
  Synthetic oligonucleotide
gacaattgtgtgcctgacagattcgaaaat

SEQ ID NO: 363163 - DNA, 30 bp, Artificial Sequence
  Synthetic oligonucleotide
cgaataattcaccccacggagggggaaaat

SEQ ID NO: 363164 - DNA, 30 bp, Artificial Sequence
  Synthetic oligonucleotide
actaggatttttagaggaaggatggaaaat

SEQ ID NO: 363165 - DNA, 30 bp, Artificial Sequence
  Synthetic oligonucleotide
atgtgcagggagaccgtgaatgtggaaaat

SEQ ID NO: 363166 - DNA, 30 bp, Artificial Sequence
  Synthetic oligonucleotide
accagcacaaagtacctagatagtgaaaat

SEQ ID NO: 363167 - DNA, 30 bp, Artificial Sequence
  Synthetic oligonucleotide
gtacattctttcgccaagagcgaataaaat

SEQ ID NO: 363168 - DNA, 30 bp, Artificial Sequence
  Synthetic oligonucleotide
gaacatggttcggcggtattaatataaaat

SEQ ID NO: 363169 - DNA, 30 bp, Artificial Sequence
  Synthetic oligonucleotide
tgcgggcgccaccggagggtggagtaaaat

SEQ ID NO: 363170 - DNA, 30 bp, Artificial Sequence
  Synthetic oligonucleotide
aaagaacaatctagtcgcccgtagtaaaat

SEQ ID NO: 363171 - DNA, 30 bp, Artificial Sequence
  Synthetic oligonucleotide
caagattccggtgaagtgtcgccttaaaat

SEQ ID NO: 363172 - DNA, 30 bp, Artificial Sequence
  Synthetic oligonucleotide
actaggggaacgggcggcaaaggttaaaat

SEQ ID NO: 363173 - DNA, 30 bp, Artificial Sequence
  Synthetic oligonucleotide
aaacgcctccaaaacggactaggttaaaat

SEQ ID NO: 363174 - DNA, 30 bp, Artificial Sequence
  Synthetic oligonucleotide
agtccatattttaagaatcacggttaaaat

SEQ ID NO: 363175 - DNA, 30 bp, Artificial Sequence
  Synthetic oligonucleotide
ccctacgttcgagcaaaggtaacaacaaat

SEQ ID NO: 363176 - DNA, 30 bp, Artificial Sequence
  Synthetic oligonucleotide
cccttcaaacggcttgggtgggcaacaaat

SEQ ID NO: 363177 - DNA, 30 bp, Artificial Sequence
  Synthetic oligonucleotide
tagatcggttacatgcgagtttcgacaaat

SEQ ID NO: 363178 - DNA, 30 bp, Artificial Sequence
  Synthetic oligonucleotide
ctgacccgccaggtaataggaatgacaaat

SEQ ID NO: 363179 - DNA, 30 bp, Artificial Sequence
  Synthetic oligonucleotide
aaacggcggattcgatagaccctgacaaat

SEQ ID NO: 363180 - DNA, 30 bp, Artificial Sequence
  Synthetic oligonucleotide
ttcctggcccatgcaaagtgtacaccaaat

SEQ ID NO: 363181 - DNA, 30 bp, Artificial Sequence
  Synthetic oligonucleotide
ctgaatggtgatatctatatacccccaaat

SEQ ID NO: 363182 - DNA, 30 bp, Artificial Sequence
  Synthetic oligonucleotide
aagttggcacagtcagtttggtcgccaaat

SEQ ID NO: 363183 - DNA, 31 bp, Artificial Sequence
  Synthetic oligonucleotide
ttggttcacaagttgagcgatgtcgccaaat

SEQ ID NO: 363184 - DNA, 30 bp, Artificial Sequence
  Synthetic oligonucleotide
aatacgatcacaggttgtacaatgccaaat

SEQ ID NO: 363185 - DNA, 30 bp, Artificial Sequence
  Synthetic oligonucleotide
cgggtaagtcatcgtgcagtgcatccaaat

SEQ ID NO: 363186 - DNA, 30 bp, Artificial Sequence
  Synthetic oligonucleotide
atccgggtgaacggatggaggtctccaaat

SEQ ID NO: 363187 - DNA, 30 bp, Artificial Sequence
  Synthetic oligonucleotide
tttcgatcacttatgtttaacggtccaaat

SEQ ID NO: 363188 - DNA, 30 bp, Artificial Sequence
  Synthetic oligonucleotide
aagagcgcaacaaccgcggacacagcaaat

SEQ ID NO: 363189 - DNA, 30 bp, Artificial Sequence
  Synthetic oligonucleotide
gcaagaagtttagatgcatgcgccgcaaat

SEQ ID NO: 363190 - DNA, 30 bp, Artificial Sequence
  Synthetic oligonucleotide
gactcgacgtcccggattccgggcgcaaat

SEQ ID NO: 363191 - DNA, 30 bp, Artificial Sequence
  Synthetic oligonucleotide
attgaatacggcgtataggtacaggcaaat

SEQ ID NO: 363192 - DNA, 30 bp, Artificial Sequence
  Synthetic oligonucleotide
gttggctgatccttggcggtgctggcaaat

SEQ ID NO: 363193 - DNA, 30 bp, Artificial Sequence
  Synthetic oligonucleotide
aaatcccgtcgaattagagtattggcaaat

SEQ ID NO: 363194 - DNA, 30 bp, Artificial Sequence
  Synthetic oligonucleotide
ctgattagtccgctacatgcatatgcaaat

SEQ ID NO: 363195 - DNA, 30 bp, Artificial Sequence
  Synthetic oligonucleotide
actagtagggggcaatcgtataaatcaaat

SEQ ID NO: 363196 - DNA, 30 bp, Artificial Sequence
  Synthetic oligonucleotide
ggaattaatcaaaagtaaatgagatcaaat

SEQ ID NO: 363197 - DNA, 30 bp, Artificial Sequence
  Synthetic oligonucleotide
ggtgcataggtacataaggtatcctcaaat

SEQ ID NO: 363198 - DNA, 30 bp, Artificial Sequence
  Synthetic oligonucleotide
cgcgtatatggaccgcaacggccaagaaat

SEQ ID NO: 363199 - DNA, 30 bp, Artificial Sequence
  Synthetic oligonucleotide
ggagtttcggtggacagcggtagaagaaat

SEQ ID NO: 363200 - DNA, 30 bp, Artificial Sequence
  Synthetic oligonucleotide
gcatctgattgggcactacagctaagaaat

SEQ ID NO: 363201 - DNA, 30 bp, Artificial Sequence
  Synthetic oligonucleotide
cttagcagtaaggtccagtaagtaagaaat

SEQ ID NO: 363202 - DNA, 30 bp, Artificial Sequence
  Synthetic oligonucleotide
ttgcgtgaggtgctgtaagtggtaagaaat

SEQ ID NO: 363203 - DNA, 30 bp, Artificial Sequence
  Synthetic oligonucleotide
gtagcactaagactacatatattaagaaat

SEQ ID NO: 363204 - DNA, 30 bp, Artificial Sequence
  Synthetic oligonucleotide
taacggtaagagtgagagctctacagaaat

SEQ ID NO: 363205 - DNA, 30 bp, Artificial Sequence
  Synthetic oligonucleotide
cgttacgcctgatagagttaaatcagaaat

SEQ ID NO: 363206 - DNA, 30 bp, Artificial Sequence
  Synthetic oligonucleotide
tatgatgtgagatagagagaaacgagaaat

SEQ ID NO: 363207 - DNA, 30 bp, Artificial Sequence
  Synthetic oligonucleotide
gtttagtattatagcccatacaggagaaat

SEQ ID NO: 363208 - DNA, 30 bp, Artificial Sequence
  Synthetic oligonucleotide
acgctgcgtcatctaggtggtgctagaaat

SEQ ID NO: 363209 - DNA, 30 bp, Artificial Sequence
  Synthetic oligonucleotide
acctgtattttcacctgcggttctagaaat

SEQ ID NO: 363210 - DNA, 30 bp, Artificial Sequence
  Synthetic oligonucleotide
gcagttcgggtagactatggttaacgaaat

SEQ ID NO: 363211 - DNA, 30 bp, Artificial Sequence
  Synthetic oligonucleotide
ctgacgtactctagccgccgcggacgaaat

SEQ ID NO: 363212 - DNA, 30 bp, Artificial Sequence
  Synthetic oligonucleotide
aatgtcaacgtctagtcatggaaccgaaat

SEQ ID NO: 363213 - DNA, 30 bp, Artificial Sequence
  Synthetic oligonucleotide
gcctaatgcatttattgcatttagcgaaat

SEQ ID NO: 363214 - DNA, 30 bp, Artificial Sequence
  Synthetic oligonucleotide
atatcgatgtggataccggcatatcgaaat

SEQ ID NO: 363215 - DNA, 30 bp, Artificial Sequence
  Synthetic oligonucleotide
tttatatacgattcagtaaaccaaggaaat

SEQ ID NO: 363216 - DNA, 30 bp, Artificial Sequence
  Synthetic oligonucleotide
tgccctagcacggtttggagcatcggaaat

SEQ ID NO: 363217 - DNA, 30 bp, Artificial Sequence
  Synthetic oligonucleotide
tataataaacaacgcgctctccggggaaat

SEQ ID NO: 363218 - DNA, 30 bp, Artificial Sequence
  Synthetic oligonucleotide
aagtgctccaggatcggcgggcggggaaat

SEQ ID NO: 363219 - DNA, 30 bp, Artificial Sequence
  Synthetic oligonucleotide
tattacctcgtagggtcgtaattgggaaat

SEQ ID NO: 363220 - DNA, 30 bp, Artificial Sequence
  Synthetic oligonucleotide
aacaaaaacgcaatgatctgctgtggaaat

SEQ ID NO: 363221 - DNA, 30 bp, Artificial Sequence
  Synthetic oligonucleotide
ggcctgcggctagctaaacaccttggaaat

SEQ ID NO: 363222 - DNA, 30 bp, Artificial Sequence
  Synthetic oligonucleotide
gtcagcatgggtgctagatgtggatgaaat

SEQ ID NO: 363223 - DNA, 30 bp, Artificial Sequence
  Synthetic oligonucleotide
gcacgatttcgaaggggtccgttatgaaat

SEQ ID NO: 363224 - DNA, 30 bp, Artificial Sequence
  Synthetic oligonucleotide
atggtattgcatgtgtggcggttatgaaat

SEQ ID NO: 363225 - DNA, 30 bp, Artificial Sequence
  Synthetic oligonucleotide
cgttagcagttgtaagaagatccctgaaat

SEQ ID NO: 363226 - DNA, 30 bp, Artificial Sequence
  Synthetic oligonucleotide
ggacggcctccgttggcggggttctgaaat

SEQ ID NO: 363227 - DNA, 30 bp, Artificial Sequence
  Synthetic oligonucleotide
agccttggactatgaaaatctctttgaaat

SEQ ID NO: 363228 - DNA, 30 bp, Artificial Sequence
  Synthetic oligonucleotide
tattataggcttgcaacctaaacaataaat

SEQ ID NO: 363229 - DNA, 30 bp, Artificial Sequence
  Synthetic oligonucleotide
ctgacatgagagccatggttcggaataaat

SEQ ID NO: 363230 - DNA, 30 bp, Artificial Sequence
  Synthetic oligonucleotide
gtaactgcagggcgcttgtgtataataaat

SEQ ID NO: 363231 - DNA, 30 bp, Artificial Sequence
  Synthetic oligonucleotide
ggggagtcgtgtctagggcaattaataaat

SEQ ID NO: 363232 - DNA, 30 bp, Artificial Sequence
  Synthetic oligonucleotide
ggcaaaaaccatatgcgcaggaccataaat

SEQ ID NO: 363233 - DNA, 30 bp, Artificial Sequence
  Synthetic oligonucleotide
attgaagccattcaacggattaccataaat

SEQ ID NO: 363234 - DNA, 30 bp, Artificial Sequence
  Synthetic oligonucleotide
gattgcgcgccccaagctaaggatataaat

SEQ ID NO: 363235 - DNA, 30 bp, Artificial Sequence
  Synthetic oligonucleotide
atgtctctggagtaaacgaagcctataaat

SEQ ID NO: 363236 - DNA, 30 bp, Artificial Sequence
  Synthetic oligonucleotide
ttggaccctatgtggatcatatctataaat

SEQ ID NO: 363237 - DNA, 30 bp, Artificial Sequence
  Synthetic oligonucleotide
ctaaatgtaatgacctggcatggactaaat

SEQ ID NO: 363238 - DNA, 30 bp, Artificial Sequence
  Synthetic oligonucleotide
tgtaccgaacacgttcaatctaacctaaat

SEQ ID NO: 363239 - DNA, 30 bp, Artificial Sequence
  Synthetic oligonucleotide
gtcctctcgtgaatacaaacaaccctaaat

SEQ ID NO: 363240 - DNA, 30 bp, Artificial Sequence
  Synthetic oligonucleotide
atcaccgatatgcaaagtcatgtcctaaat

SEQ ID NO: 363241 - DNA, 30 bp, Artificial Sequence
  Synthetic oligonucleotide
tttacgaggtgctagaagggatgtctaaat

SEQ ID NO: 363242 - DNA, 30 bp, Artificial Sequence
  Synthetic oligonucleotide
tattcacgcaacgtagtagtgtaagtaaat

SEQ ID NO: 363243 - DNA, 30 bp, Artificial Sequence
  Synthetic oligonucleotide
aaacctgattagcagactaacccagtaaat

SEQ ID NO: 363244 - DNA, 30 bp, Artificial Sequence
  Synthetic oligonucleotide
taaccggtgagctcgcaaaggccagtaaat

SEQ ID NO: 363245 - DNA, 30 bp, Artificial Sequence
  Synthetic oligonucleotide
attatcgtaagactaagattggtagtaaat

SEQ ID NO: 363246 - DNA, 30 bp, Artificial Sequence
  Synthetic oligonucleotide
gactgaatatatttagcacgaagcgtaaat

SEQ ID NO: 363247 - DNA, 30 bp, Artificial Sequence
  Synthetic oligonucleotide
cgtaattccggattgaccctgtgggtaaat

SEQ ID NO: 363248 - DNA, 30 bp, Artificial Sequence
  Synthetic oligonucleotide
tttccccaccactaacgtgtaggtgtaaat

SEQ ID NO: 363249 - DNA, 30 bp, Artificial Sequence
  Synthetic oligonucleotide
ttctaacgacagggactaacggtattaaat

SEQ ID NO: 363250 - DNA, 30 bp, Artificial Sequence
  Synthetic oligonucleotide
ggccgtagaaagaactaaccggtattaaat

SEQ ID NO: 363251 - DNA, 30 bp, Artificial Sequence
  Synthetic oligonucleotide
cgtatcatcactgcggcgttaaacttaaat

SEQ ID NO: 363252 - DNA, 30 bp, Artificial Sequence
  Synthetic oligonucleotide
tgactactttacagtcacgtgcacttaaat

SEQ ID NO: 363253 - DNA, 30 bp, Artificial Sequence
  Synthetic oligonucleotide
agcacggcgttttcccacagaaggttaaat

SEQ ID NO: 363254 - DNA, 30 bp, Artificial Sequence
  Synthetic oligonucleotide
tcactcgccctggaggcgcgtgggttaaat

SEQ ID NO: 363255 - DNA, 30 bp, Artificial Sequence
  Synthetic oligonucleotide
ggcgttgtcatagccttccgccatttaaat

SEQ ID NO: 363256 - DNA, 30 bp, Artificial Sequence
  Synthetic oligonucleotide
atgcctggctgccacggataaactttaaat

SEQ ID NO: 363257 - DNA, 30 bp, Artificial Sequence
  Synthetic oligonucleotide
agcaacagaaagccacccttagctttaaat

SEQ ID NO: 363258 - DNA, 30 bp, Artificial Sequence
  Synthetic oligonucleotide
tcaatggagcgaagttgacctgttttaaat

SEQ ID NO: 363259 - DNA, 30 bp, Artificial Sequence
  Synthetic oligonucleotide
tgtggtacgtaacaacgcttatttttaaat

SEQ ID NO: 363260 - DNA, 30 bp, Artificial Sequence
  Synthetic oligonucleotide
cagggtcagttggggcacgcaataaacaat

SEQ ID NO: 363261 - DNA, 30 bp, Artificial Sequence
  Synthetic oligonucleotide
cccataatgtttgtggcatagcccaacaat

SEQ ID NO: 363262 - DNA, 30 bp, Artificial Sequence
  Synthetic oligonucleotide
tttacttgtcggtaaatcagaaagaacaat

SEQ ID NO: 363263 - DNA, 30 bp, Artificial Sequence
  Synthetic oligonucleotide
tcagcaatctcccttaccacgtagaacaat

SEQ ID NO: 363264 - DNA, 30 bp, Artificial Sequence
  Synthetic oligonucleotide
tggctttaacgaggtgagcaagcgaacaat

SEQ ID NO: 363265 - DNA, 30 bp, Artificial Sequence
  Synthetic oligonucleotide
gccctgattacacttgaattcaggaacaat

SEQ ID NO: 363266 - DNA, 30 bp, Artificial Sequence
  Synthetic oligonucleotide
tggagtcacccttcagtcatattgaacaat

SEQ ID NO: 363267 - DNA, 30 bp, Artificial Sequence
  Synthetic oligonucleotide
gttctacatatcagcacactcattaacaat

SEQ ID NO: 363268 - DNA, 30 bp, Artificial Sequence
  Synthetic oligonucleotide
agtgcaatacaatgaactctcgcacacaat

SEQ ID NO: 363269 - DNA, 30 bp, Artificial Sequence
  Synthetic oligonucleotide
atccgaataactaccgcacgcgggcacaat

SEQ ID NO: 363270 - DNA, 30 bp, Artificial Sequence
  Synthetic oligonucleotide
gagcgtagtactaagaaatatggtcacaat

SEQ ID NO: 363271 - DNA, 30 bp, Artificial Sequence
  Synthetic oligonucleotide
cgcgagcacaggctgtcatggagagacaat

SEQ ID NO: 363272 - DNA, 30 bp, Artificial Sequence
  Synthetic oligonucleotide
gtcgggccgcatgaaagtcgaaacgacaat

SEQ ID NO: 363273 - DNA, 30 bp, Artificial Sequence
  Synthetic oligonucleotide
tcgctcccctcgtaatcttttagcgacaat

SEQ ID NO: 363274 - DNA, 30 bp, Artificial Sequence
  Synthetic oligonucleotide
caacctttcaaaagcatcactacggacaat

SEQ ID NO: 363275 - DNA, 30 bp, Artificial Sequence
  Synthetic oligonucleotide
aatcgttgggtcatatgatcactggacaat

SEQ ID NO: 363276 - DNA, 30 bp, Artificial Sequence
  Synthetic oligonucleotide
tttaccaaaccgcagagtaattctgacaat

SEQ ID NO: 363277 - DNA, 30 bp, Artificial Sequence
  Synthetic oligonucleotide
ttttgcagtggaaagttttgataatacaat

SEQ ID NO: 363278 - DNA, 30 bp, Artificial Sequence
  Synthetic oligonucleotide
tacttgggacagtctaatactacatacaat

SEQ ID NO: 363279 - DNA, 30 bp, Artificial Sequence
  Synthetic oligonucleotide
gatgttggtcctgaggccaatgcatacaat

SEQ ID NO: 363280 - DNA, 30 bp, Artificial Sequence
  Synthetic oligonucleotide
taacagcacgggctcattgtgtcatacaat

SEQ ID NO: 363281 - DNA, 30 bp, Artificial Sequence
  Synthetic oligonucleotide
gtttgagagcttgagcatagtagatacaat

SEQ ID NO: 363282 - DNA, 30 bp, Artificial Sequence
  Synthetic oligonucleotide
cccggccaagcaatacataacatatacaat

SEQ ID NO: 363283 - DNA, 30 bp, Artificial Sequence
  Synthetic oligonucleotide
ttatctcgcaatcaatctagatgctacaat

SEQ ID NO: 363284 - DNA, 30 bp, Artificial Sequence
  Synthetic oligonucleotide
aggactgatcacattcccagaaattacaat

SEQ ID NO: 363285 - DNA, 30 bp, Artificial Sequence
  Synthetic oligonucleotide
ccgtaagaaattaaccttttaatttacaat

SEQ ID NO: 363286 - DNA, 30 bp, Artificial Sequence
  Synthetic oligonucleotide
tctagcgaaattggcggcaaattttacaat

SEQ ID NO: 363287 - DNA, 30 bp, Artificial Sequence
  Synthetic oligonucleotide
tgtcgcacagatgtggaacgtttttacaat

SEQ ID NO: 363288 - DNA, 30 bp, Artificial Sequence
  Synthetic oligonucleotide
ttacacacctcgcgcagagtaaaaaccaat

SEQ ID NO: 363289 - DNA, 30 bp, Artificial Sequence
  Synthetic oligonucleotide
tctgatccactctgacgaaaagaaaccaat

SEQ ID NO: 363290 - DNA, 30 bp, Artificial Sequence
  Synthetic oligonucleotide
tgtggttctcttggggagatcgaaaccaat

SEQ ID NO: 363291 - DNA, 30 bp, Artificial Sequence
  Synthetic oligonucleotide
tagatgggtacagcctacagggtaaccaat

SEQ ID NO: 363292 - DNA, 30 bp, Artificial Sequence
  Synthetic oligonucleotide
gaagtgttaactaggaaggtaaacaccaat

SEQ ID NO: 363293 - DNA, 30 bp, Artificial Sequence
  Synthetic oligonucleotide
cacaagccacgctctagacattccaccaat

SEQ ID NO: 363294 - DNA, 30 bp, Artificial Sequence
  Synthetic oligonucleotide
accacgcataagcacgctccaagcaccaat

SEQ ID NO: 363295 - DNA, 30 bp, Artificial Sequence
  Synthetic oligonucleotide
ggctcagtataccgtcctgtgtagaccaat

SEQ ID NO: 363296 - DNA, 30 bp, Artificial Sequence
  Synthetic oligonucleotide
gaacgtccggtgacataacttggacccaat

SEQ ID NO: 363297 - DNA, 30 bp, Artificial Sequence
  Synthetic oligonucleotide
gagaggctagccgcccttacgaaccccaat

SEQ ID NO: 363298 - DNA, 30 bp, Artificial Sequence
  Synthetic oligonucleotide
taatcatcgtcagatagctcggagcccaat

SEQ ID NO: 363299 - DNA, 30 bp, Artificial Sequence
  Synthetic oligonucleotide
aatagagcgacagccattgaatcgcccaat

SEQ ID NO: 363300 - DNA, 30 bp, Artificial Sequence
  Synthetic oligonucleotide
cgtaagcaccttggccgtaggtggcccaat

SEQ ID NO: 363301 - DNA, 30 bp, Artificial Sequence
  Synthetic oligonucleotide
gatctacccaaggagacttggtctcccaat

SEQ ID NO: 363302 - DNA, 30 bp, Artificial Sequence
  Synthetic oligonucleotide
gtaaatgatatgctgccagtctatgccaat

SEQ ID NO: 363303 - DNA, 30 bp, Artificial Sequence
  Synthetic oligonucleotide
attatatggctgcttatgaaaacgtccaat

SEQ ID NO: 363304 - DNA, 30 bp, Artificial Sequence
  Synthetic oligonucleotide
tttaatgtaatgtcagtctcaacgtccaat

SEQ ID NO: 363305 - DNA, 30 bp, Artificial Sequence
  Synthetic oligonucleotide
ccagccgaggtttctagtggtaggtccaat

SEQ ID NO: 363306 - DNA, 30 bp, Artificial Sequence
  Synthetic oligonucleotide
tctaatggggaggacattataatgtccaat

SEQ ID NO: 363307 - DNA, 30 bp, Artificial Sequence
  Synthetic oligonucleotide
gggcctgtaatttatagcgaaaattccaat

SEQ ID NO: 363308 - DNA, 30 bp, Artificial Sequence
  Synthetic oligonucleotide
ttggacgtatgactaagagacaattccaat

SEQ ID NO: 363309 - DNA, 30 bp, Artificial Sequence
  Synthetic oligonucleotide
ttatgggaaattacgaccgggtattccaat

SEQ ID NO: 363310 - DNA, 30 bp, Artificial Sequence
  Synthetic oligonucleotide
cgttgagtcccagttatggatctttccaat

SEQ ID NO: 363311 - DNA, 30 bp, Artificial Sequence
  Synthetic oligonucleotide
ttgctactagcctgccttggtggaagcaat

SEQ ID NO: 363312 - DNA, 30 bp, Artificial Sequence
  Synthetic oligonucleotide
gcttagccaacccattaaacaaacagcaat

SEQ ID NO: 363313 - DNA, 30 bp, Artificial Sequence
  Synthetic oligonucleotide
agagcagaccggacccgttgtaccagcaat

SEQ ID NO: 363314 - DNA, 30 bp, Artificial Sequence
  Synthetic oligonucleotide
gtatcgcacacaatggactgaatcagcaat

SEQ ID NO: 363315 - DNA, 30 bp, Artificial Sequence
  Synthetic oligonucleotide
gagtcacatgcggtactggcttcgagcaat

SEQ ID NO: 363316 - DNA, 30 bp, Artificial Sequence
  Synthetic oligonucleotide
gcactccaggtgatgccgggcggtagcaat

SEQ ID NO: 363317 - DNA, 30 bp, Artificial Sequence
  Synthetic oligonucleotide
caaatcccctaaacggtgggcattagcaat

SEQ ID NO: 363318 - DNA, 30 bp, Artificial Sequence
  Synthetic oligonucleotide
gtttgtgaaggtgctggaaaataacgcaat

SEQ ID NO: 363319 - DNA, 30 bp, Artificial Sequence
  Synthetic oligonucleotide
aagggaatggggccttgaagtcaccgcaat

SEQ ID NO: 363320 - DNA, 30 bp, Artificial Sequence
  Synthetic oligonucleotide
tagctatttgcaccgatccgctagcgcaat

SEQ ID NO: 363321 - DNA, 30 bp, Artificial Sequence
  Synthetic oligonucleotide
agtccgaggctcgtcactgtccggcgcaat

SEQ ID NO: 363322 - DNA, 30 bp, Artificial Sequence
  Synthetic oligonucleotide
tgtctcaagttacgagttgcaaatcgcaat

SEQ ID NO: 363323 - DNA, 30 bp, Artificial Sequence
  Synthetic oligonucleotide
ggtcaccggacgggtcgaatggaaggcaat

SEQ ID NO: 363324 - DNA, 30 bp, Artificial Sequence
  Synthetic oligonucleotide
tatatgccttacggggcaggttcaggcaat

SEQ ID NO: 363325 - DNA, 30 bp, Artificial Sequence
  Synthetic oligonucleotide
gcaggtttatagaataacacaataggcaat

SEQ ID NO: 363326 - DNA, 30 bp, Artificial Sequence
  Synthetic oligonucleotide
gtacgagctagtgtccggttagacggcaat

SEQ ID NO: 363327 - DNA, 30 bp, Artificial Sequence
  Synthetic oligonucleotide
tcagtgttccgttaagaaggcatgggcaat

SEQ ID NO: 363328 - DNA, 30 bp, Artificial Sequence
  Synthetic oligonucleotide
ggtctttgtttcgaaaaggggctgggcaat

SEQ ID NO: 363329 - DNA, 30 bp, Artificial Sequence
  Synthetic oligonucleotide
cgtatggatggtaggatggttttgggcaat

SEQ ID NO: 363330 - DNA, 30 bp, Artificial Sequence
  Synthetic oligonucleotide
aaatcgcaaacaaagtgtatcggtggcaat

SEQ ID NO: 363331 - DNA, 30 bp, Artificial Sequence
  Synthetic oligonucleotide
cgcagttccgtcgaataacgcattggcaat

SEQ ID NO: 363332 - DNA, 30 bp, Artificial Sequence
  Synthetic oligonucleotide
actcactgtcaggcagggggatcctgcaat

SEQ ID NO: 363333 - DNA, 30 bp, Artificial Sequence
  Synthetic oligonucleotide
gatccgattgtatgatatgccttctgcaat

SEQ ID NO: 363334 - DNA, 30 bp, Artificial Sequence
  Synthetic oligonucleotide
taatgagtcagtcgacgcggaaagtgcaat

SEQ ID NO: 363335 - DNA, 30 bp, Artificial Sequence
  Synthetic oligonucleotide
actgagtttgtttcgaagccatagtgcaat

SEQ ID NO: 363336 - DNA, 30 bp, Artificial Sequence
  Synthetic oligonucleotide
catccatcatagtcgattatgcaaatcaat

SEQ ID NO: 363337 - DNA, 30 bp, Artificial Sequence
  Synthetic oligonucleotide
cccggagaaatcatctgggaacacatcaat

SEQ ID NO: 363338 - DNA, 30 bp, Artificial Sequence
  Synthetic oligonucleotide
cattatgggacattgaggctcttcatcaat

SEQ ID NO: 363339 - DNA, 30 bp, Artificial Sequence
  Synthetic oligonucleotide
tttaaaccgttccctcgtcactcgatcaat

SEQ ID NO: 363340 - DNA, 30 bp, Artificial Sequence
  Synthetic oligonucleotide
tttaacgactgtctgagctctcggatcaat

SEQ ID NO: 363341 - DNA, 31 bp, Artificial Sequence
  Synthetic oligonucleotide
gccctcaatgcgctcatagagttggatcaat

SEQ ID NO: 363342 - DNA, 30 bp, Artificial Sequence
  Synthetic oligonucleotide
gtatctgttcaagctgagcgcaatatcaat

SEQ ID NO: 363343 - DNA, 30 bp, Artificial Sequence
  Synthetic oligonucleotide
gagcgtcccggtatacaatttggtatcaat

SEQ ID NO: 363344 - DNA, 30 bp, Artificial Sequence
  Synthetic oligonucleotide
gtcattgtgctcgttaagctagaactcaat

SEQ ID NO: 363345 - DNA, 30 bp, Artificial Sequence
  Synthetic oligonucleotide
gcaatgcgactagtgactctcccactcaat

SEQ ID NO: 363346 - DNA, 30 bp, Artificial Sequence
  Synthetic oligonucleotide
gcagtacgaacgattctatagacgctcaat

SEQ ID NO: 363347 - DNA, 30 bp, Artificial Sequence
  Synthetic oligonucleotide
cagttgtttttagagtggaagatgctcaat

SEQ ID NO: 363348 - DNA, 30 bp, Artificial Sequence
  Synthetic oligonucleotide
ggtagtacagtacgcttgaactgtctcaat

SEQ ID NO: 363349 - DNA, 30 bp, Artificial Sequence
  Synthetic oligonucleotide
ctagttctgtcgcccctactctttctcaat

SEQ ID NO: 363350 - DNA, 30 bp, Artificial Sequence
  Synthetic oligonucleotide
acgcactcataacttataggtcaagtcaat

SEQ ID NO: 363351 - DNA, 30 bp, Artificial Sequence
  Synthetic oligonucleotide
gactaatgagcggattactccaacgtcaat

SEQ ID NO: 363352 - DNA, 30 bp, Artificial Sequence
  Synthetic oligonucleotide
ttacctgccccgataagcgccagcgtcaat

SEQ ID NO: 363353 - DNA, 30 bp, Artificial Sequence
  Synthetic oligonucleotide
gtaattgacaatcgccgtcaaacggtcaat

SEQ ID NO: 363354 - DNA, 30 bp, Artificial Sequence
  Synthetic oligonucleotide
atatcatccgggattcatagaagggtcaat

SEQ ID NO: 363355 - DNA, 30 bp, Artificial Sequence
  Synthetic oligonucleotide
acatgtggaaaattcattggttgggtcaat

SEQ ID NO: 363356 - DNA, 30 bp, Artificial Sequence
  Synthetic oligonucleotide
gaggttggcgctcaggataatttggtcaat

SEQ ID NO: 363357 - DNA, 30 bp, Artificial Sequence
  Synthetic oligonucleotide
agcgttgacgtttatcttaagagtgtcaat

SEQ ID NO: 363358 - DNA, 30 bp, Artificial Sequence
  Synthetic oligonucleotide
cattttgacgtacgtccttaaattgtcaat

SEQ ID NO: 363359 - DNA, 30 bp, Artificial Sequence
  Synthetic oligonucleotide
gcagcgtggaatacaagaggagttgtcaat

SEQ ID NO: 363360 - DNA, 30 bp, Artificial Sequence
  Synthetic oligonucleotide
ataatagcccgccgcgtgggcgcattcaat

SEQ ID NO: 363361 - DNA, 30 bp, Artificial Sequence
  Synthetic oligonucleotide
tgtctccaccaccgcaatcagttattcaat

SEQ ID NO: 363362 - DNA, 30 bp, Artificial Sequence
  Synthetic oligonucleotide
actccaactgaagtgcaaatctacttcaat

SEQ ID NO: 363363 - DNA, 30 bp, Artificial Sequence
  Synthetic oligonucleotide
atcgctcaaaagaggtgtgtatccttcaat

SEQ ID NO: 363364 - DNA, 30 bp, Artificial Sequence
  Synthetic oligonucleotide
gtacagagcctttatataccggggttcaat

SEQ ID NO: 363365 - DNA, 30 bp, Artificial Sequence
  Synthetic oligonucleotide
gggcgatacagcaaactgtatagaaagaat

SEQ ID NO: 363366 - DNA, 30 bp, Artificial Sequence
  Synthetic oligonucleotide
ggcccgtcattaatgtttggtcacaagaat

SEQ ID NO: 363367 - DNA, 30 bp, Artificial Sequence
  Synthetic oligonucleotide
cagcagcctgacatatattttatcaagaat

SEQ ID NO: 363368 - DNA, 30 bp, Artificial Sequence
  Synthetic oligonucleotide
acggggatcttcagtggataagtcaagaat

SEQ ID NO: 363369 - DNA, 30 bp, Artificial Sequence
  Synthetic oligonucleotide
ggaattgccagtacggcgccctataagaat

SEQ ID NO: 363370 - DNA, 30 bp, Artificial Sequence
  Synthetic oligonucleotide
tggtttaaaatctgaacgtggactaagaat

SEQ ID NO: 363371 - DNA, 30 bp, Artificial Sequence
  Synthetic oligonucleotide
cgagggccctcaaggacctggcttaagaat

SEQ ID NO: 363372 - DNA, 30 bp, Artificial Sequence
  Synthetic oligonucleotide
caattacctctcttgtcccgttttaagaat

SEQ ID NO: 363373 - DNA, 30 bp, Artificial Sequence
  Synthetic oligonucleotide
cgccgcaaagacctatgcataccacagaat

SEQ ID NO: 363374 - DNA, 30 bp, Artificial Sequence
  Synthetic oligonucleotide
atacccaacgacctctgggcaagacagaat

SEQ ID NO: 363375 - DNA, 30 bp, Artificial Sequence
  Synthetic oligonucleotide
accaaagtcgataccattctacaccagaat

SEQ ID NO: 363376 - DNA, 30 bp, Artificial Sequence
  Synthetic oligonucleotide
aatgcttagaatacccgagcataccagaat

SEQ ID NO: 363377 - DNA, 30 bp, Artificial Sequence
  Synthetic oligonucleotide
actaggaagtcacatttcagaatccagaat

SEQ ID NO: 363378 - DNA, 30 bp, Artificial Sequence
  Synthetic oligonucleotide
tgcgacaaacccctgctaggtacgcagaat

SEQ ID NO: 363379 - DNA, 30 bp, Artificial Sequence
  Synthetic oligonucleotide
agaccagccgcttcaaaaaagaggcagaat

SEQ ID NO: 363380 - DNA, 30 bp, Artificial Sequence
  Synthetic oligonucleotide
gtaaaaaggtttattcttaatcttcagaat

SEQ ID NO: 363381 - DNA, 30 bp, Artificial Sequence
  Synthetic oligonucleotide
ggggatcacaagcgtctactcgcagagaat

SEQ ID NO: 363382 - DNA, 30 bp, Artificial Sequence
  Synthetic oligonucleotide
agctgctataaatctgaatctcgcgagaat

SEQ ID NO: 363383 - DNA, 30 bp, Artificial Sequence
  Synthetic oligonucleotide
tgtcgtgtagggtggctcagataggagaat

SEQ ID NO: 363384 - DNA, 30 bp, Artificial Sequence
  Synthetic oligonucleotide
ttctcaattggtatctgatttcttgagaat

SEQ ID NO: 363385 - DNA, 30 bp, Artificial Sequence
  Synthetic oligonucleotide
acatttacgtcattatcatagccatagaat

SEQ ID NO: 363386 - DNA, 30 bp, Artificial Sequence
  Synthetic oligonucleotide
ataaccccctggttacccgtaagatagaat

SEQ ID NO: 363387 - DNA, 30 bp, Artificial Sequence
  Synthetic oligonucleotide
tatcaggccatcagccctctaggatagaat

SEQ ID NO: 363388 - DNA, 30 bp, Artificial Sequence
  Synthetic oligonucleotide
catcccggtgagggttcaagcggatagaat

SEQ ID NO: 363389 - DNA, 30 bp, Artificial Sequence
  Synthetic oligonucleotide
acgttcgggctatagaactatatatagaat

SEQ ID NO: 363390 - DNA, 30 bp, Artificial Sequence
  Synthetic oligonucleotide
aaaaagggtcaggttgggaatttatagaat

SEQ ID NO: 363391 - DNA, 30 bp, Artificial Sequence
  Synthetic oligonucleotide
gatgcttagagggaccaagaatcctagaat

SEQ ID NO: 363392 - DNA, 30 bp, Artificial Sequence
  Synthetic oligonucleotide
gtacttattattaatagtcgatggtagaat

SEQ ID NO: 363393 - DNA, 30 bp, Artificial Sequence
  Synthetic oligonucleotide
gtatcggtcgtaaagaccgccatgtagaat

SEQ ID NO: 363394 - DNA, 30 bp, Artificial Sequence
  Synthetic oligonucleotide
gtggaaatagtgtcatcgggaacaacgaat

SEQ ID NO: 363395 - DNA, 30 bp, Artificial Sequence
  Synthetic oligonucleotide
gaagaagccgggctactcagacgaacgaat

SEQ ID NO: 363396 - DNA, 30 bp, Artificial Sequence
  Synthetic oligonucleotide
gggggttaagccatgatgacagtcacgaat

SEQ ID NO: 363397 - DNA, 30 bp, Artificial Sequence
  Synthetic oligonucleotide
cggccttcacgtgaatcctgcgagacgaat

SEQ ID NO: 363398 - DNA, 30 bp, Artificial Sequence
  Synthetic oligonucleotide
accggccgaaatgcctttacatggacgaat

SEQ ID NO: 363399 - DNA, 30 bp, Artificial Sequence
  Synthetic oligonucleotide
aaatcagctggctgatcccatcatacgaat

SEQ ID NO: 363400 - DNA, 30 bp, Artificial Sequence
  Synthetic oligonucleotide
tttcgtgaatatcgaagtcctcttacgaat

SEQ ID NO: 363401 - DNA, 30 bp, Artificial Sequence
  Synthetic oligonucleotide
acagcattactctggtattctccaccgaat

SEQ ID NO: 363402 - DNA, 30 bp, Artificial Sequence
  Synthetic oligonucleotide
ctgctggtcaccggggtgtaatgaccgaat

SEQ ID NO: 363403 - DNA, 30 bp, Artificial Sequence
  Synthetic oligonucleotide
taccaagaagtacggaccgggctaccgaat

SEQ ID NO: 363404 - DNA, 30 bp, Artificial Sequence
  Synthetic oligonucleotide
atatacaaattcgggcgcgttttcccgaat

SEQ ID NO: 363405 - DNA, 30 bp, Artificial Sequence
  Synthetic oligonucleotide
tgaagttagttgttaatggtgcggccgaat

SEQ ID NO: 363406 - DNA, 30 bp, Artificial Sequence
  Synthetic oligonucleotide
tgtcgcaaattgtccgttatacgtccgaat

SEQ ID NO: 363407 - DNA, 30 bp, Artificial Sequence
  Synthetic oligonucleotide
tttaatatggtgggtcgccctggagcgaat

SEQ ID NO: 363408 - DNA, 31 bp, Artificial Sequence
  Synthetic oligonucleotide
caaagttacgtgtttgacgtggaacgcgaat

SEQ ID NO: 363409 - DNA, 30 bp, Artificial Sequence
  Synthetic oligonucleotide
catacccatctctctggagcaagggcgaat

SEQ ID NO: 363410 - DNA, 30 bp, Artificial Sequence
  Synthetic oligonucleotide
ttaaaatggacgccctaacatgcatcgaat

SEQ ID NO: 363411 - DNA, 30 bp, Artificial Sequence
  Synthetic oligonucleotide
cactctctggatgcgatgttgtcgtcgaat

SEQ ID NO: 363412 - DNA, 30 bp, Artificial Sequence
  Synthetic oligonucleotide
cgtcaagtattgcatagtccacggtcgaat

SEQ ID NO: 363413 - DNA, 30 bp, Artificial Sequence
  Synthetic oligonucleotide
gggacgaacgtcccaacctggtattcgaat

SEQ ID NO: 363414 - DNA, 30 bp, Artificial Sequence
  Synthetic oligonucleotide
gagcgggtttttacaattataccttcgaat

SEQ ID NO: 363415 - DNA, 30 bp, Artificial Sequence
  Synthetic oligonucleotide
acaattgcatcagacggacggtcaaggaat

SEQ ID NO: 363416 - DNA, 30 bp, Artificial Sequence
  Synthetic oligonucleotide
gtccttggtaagtcccacaatataaggaat

SEQ ID NO: 363417 - DNA, 30 bp, Artificial Sequence
  Synthetic oligonucleotide
catatgataaaaagaaatctgaagaggaat

SEQ ID NO: 363418 - DNA, 30 bp, Artificial Sequence
  Synthetic oligonucleotide
tgttacagatatctggttcgaacgaggaat

SEQ ID NO: 363419 - DNA, 30 bp, Artificial Sequence
  Synthetic oligonucleotide
ctgtctaggttatcgtgagctccgaggaat

SEQ ID NO: 363420 - DNA, 30 bp, Artificial Sequence
  Synthetic oligonucleotide
tccatggcttcgtcgcatctgtcgaggaat

SEQ ID NO: 363421 - DNA, 30 bp, Artificial Sequence
  Synthetic oligonucleotide
tctgtgctaggcgcgcgcaaaaaacggaat

SEQ ID NO: 363422 - DNA, 30 bp, Artificial Sequence
  Synthetic oligonucleotide
gtagagaccaccgcgtacatagaccggaat

SEQ ID NO: 363423 - DNA, 30 bp, Artificial Sequence
  Synthetic oligonucleotide
tagtatgaacgtcctaaacgacgccggaat

SEQ ID NO: 363424 - DNA, 30 bp, Artificial Sequence
  Synthetic oligonucleotide
ctccttgattcataccccggatgccggaat

SEQ ID NO: 363425 - DNA, 30 bp, Artificial Sequence
  Synthetic oligonucleotide
cattaaacgtaggcgctaactctccggaat

SEQ ID NO: 363426 - DNA, 30 bp, Artificial Sequence
  Synthetic oligonucleotide
agacccggggtctgaatacactagcggaat

SEQ ID NO: 363427 - DNA, 30 bp, Artificial Sequence
  Synthetic oligonucleotide
tatcaaacggacctgtgatacatgcggaat

SEQ ID NO: 363428 - DNA, 30 bp, Artificial Sequence
  Synthetic oligonucleotide
ggacccgcagaatcgacttcgcttcggaat

SEQ ID NO: 363429 - DNA, 30 bp, Artificial Sequence
  Synthetic oligonucleotide
tggccatgcagagtggctatagttcggaat

SEQ ID NO: 363430 - DNA, 30 bp, Artificial Sequence
  Synthetic oligonucleotide
ggctgcaatgtatacggtacacaagggaat

SEQ ID NO: 363431 - DNA, 30 bp, Artificial Sequence
  Synthetic oligonucleotide
acatttattgaggactactccgaagggaat

SEQ ID NO: 363432 - DNA, 30 bp, Artificial Sequence
  Synthetic oligonucleotide
aagttggtaagccaggactgcatcgggaat

SEQ ID NO: 363433 - DNA, 30 bp, Artificial Sequence
  Synthetic oligonucleotide
tacgccggcaaagctcggatcctcgggaat

SEQ ID NO: 363434 - DNA, 30 bp, Artificial Sequence
  Synthetic oligonucleotide
agaccccttaattaaaagagagaggggaat

SEQ ID NO: 363435 - DNA, 30 bp, Artificial Sequence
  Synthetic oligonucleotide
ggttactctaaatcgcaaataagggggaat

SEQ ID NO: 363436 - DNA, 29 bp, Artificial Sequence
  Synthetic oligonucleotide
gtgctcggtacgggagataatctgggaat

SEQ ID NO: 363437 - DNA, 30 bp, Artificial Sequence
  Synthetic oligonucleotide
atctaccctctcgactcgggtggtgggaat

SEQ ID NO: 363438 - DNA, 30 bp, Artificial Sequence
  Synthetic oligonucleotide
ggtctatcccggtgcgcaaactttgggaat

SEQ ID NO: 363439 - DNA, 30 bp, Artificial Sequence
  Synthetic oligonucleotide
caatgttgagtcccgtactcactatggaat

SEQ ID NO: 363440 - DNA, 30 bp, Artificial Sequence
  Synthetic oligonucleotide
gttcagatttaacagaatttacactggaat

SEQ ID NO: 363441 - DNA, 30 bp, Artificial Sequence
  Synthetic oligonucleotide
ccataataaaggcgctgtgtagcctggaat

SEQ ID NO: 363442 - DNA, 30 bp, Artificial Sequence
  Synthetic oligonucleotide
ggattaaggcttatggatcctcgctggaat

SEQ ID NO: 363443 - DNA, 30 bp, Artificial Sequence
  Synthetic oligonucleotide
actcgggatattgcccgcagtatctggaat

SEQ ID NO: 363444 - DNA, 30 bp, Artificial Sequence
  Synthetic oligonucleotide
gaggttcgtgcaccatatagcttctggaat

SEQ ID NO: 363445 - DNA, 30 bp, Artificial Sequence
  Synthetic oligonucleotide
ttcgaaaattctgcagggaaggagtggaat

SEQ ID NO: 363446 - DNA, 30 bp, Artificial Sequence
  Synthetic oligonucleotide
gtcgagcctgcctgccagctagcgtggaat

SEQ ID NO: 363447 - DNA, 30 bp, Artificial Sequence
  Synthetic oligonucleotide
gagcgtcggtttccattccacaggtggaat

SEQ ID NO: 363448 - DNA, 30 bp, Artificial Sequence
  Synthetic oligonucleotide
gtgtgctttggcccctttgggccttggaat

SEQ ID NO: 363449 - DNA, 30 bp, Artificial Sequence
  Synthetic oligonucleotide
ggacgggtgctgcaattgttatcttggaat

SEQ ID NO: 363450 - DNA, 30 bp, Artificial Sequence
  Synthetic oligonucleotide
taatggtttcagatctagcgctcttggaat

SEQ ID NO: 363451 - DNA, 30 bp, Artificial Sequence
  Synthetic oligonucleotide
tagaccctacgaattggcgcaagttggaat

SEQ ID NO: 363452 - DNA, 30 bp, Artificial Sequence
  Synthetic oligonucleotide
aacgcgaacattttgagaaacgtttggaat

SEQ ID NO: 363453 - DNA, 30 bp, Artificial Sequence
  Synthetic oligonucleotide
agtctattaatctgacagtacagaatgaat

SEQ ID NO: 363454 - DNA, 30 bp, Artificial Sequence
  Synthetic oligonucleotide
atttagagaggggtacgacgggagatgaat

SEQ ID NO: 363455 - DNA, 30 bp, Artificial Sequence
  Synthetic oligonucleotide
gttacgcatgtagccttcctaactatgaat

SEQ ID NO: 363456 - DNA, 30 bp, Artificial Sequence
  Synthetic oligonucleotide
ggcaattcagtgactactgaggctatgaat

SEQ ID NO: 363457 - DNA, 30 bp, Artificial Sequence
  Synthetic oligonucleotide
acttgctcacgaggtgaactacttatgaat

SEQ ID NO: 363458 - DNA, 30 bp, Artificial Sequence
  Synthetic oligonucleotide
ttctgcagggtttccaaccatagactgaat

SEQ ID NO: 363459 - DNA, 30 bp, Artificial Sequence
  Synthetic oligonucleotide
cctctatgactaggtccacgtttactgaat

SEQ ID NO: 363460 - DNA, 30 bp, Artificial Sequence
  Synthetic oligonucleotide
cgcacgatttattcttcgtctaacctgaat

SEQ ID NO: 363461 - DNA, 30 bp, Artificial Sequence
  Synthetic oligonucleotide
taactcatcacgagcggcgtgagcctgaat

SEQ ID NO: 363462 - DNA, 30 bp, Artificial Sequence
  Synthetic oligonucleotide
cctgtccaagctcagcaatgtatcctgaat

SEQ ID NO: 363463 - DNA, 30 bp, Artificial Sequence
  Synthetic oligonucleotide
tcgcaccgaccgatttctaggacgctgaat

SEQ ID NO: 363464 - DNA, 30 bp, Artificial Sequence
  Synthetic oligonucleotide
gctctgagcctcgtacgcgcggatctgaat

SEQ ID NO: 363465 - DNA, 30 bp, Artificial Sequence
  Synthetic oligonucleotide
ccgtacgtgaaacgcggaaaatatctgaat

SEQ ID NO: 363466 - DNA, 30 bp, Artificial Sequence
  Synthetic oligonucleotide
gtaagcttaacggcaaaagcctctctgaat

SEQ ID NO: 363467 - DNA, 30 bp, Artificial Sequence
  Synthetic oligonucleotide
gtgatagtacgctgttgctggtttctgaat

SEQ ID NO: 363468 - DNA, 30 bp, Artificial Sequence
  Synthetic oligonucleotide
gacgcggtgtatacgtgcataccagtgaat

SEQ ID NO: 363469 - DNA, 30 bp, Artificial Sequence
  Synthetic oligonucleotide
ccagtcagagaactcatagttttagtgaat

SEQ ID NO: 363470 - DNA, 29 bp, Artificial Sequence
  Synthetic oligonucleotide
ccatctaggaacgtgttatgatcgtgaat

SEQ ID NO: 363471 - DNA, 30 bp, Artificial Sequence
  Synthetic oligonucleotide
cgaaattcgtctgcggtagttaaggtgaat

SEQ ID NO: 363472 - DNA, 30 bp, Artificial Sequence
  Synthetic oligonucleotide
ctagcttacggttggcactctgaggtgaat

SEQ ID NO: 363473 - DNA, 30 bp, Artificial Sequence
  Synthetic oligonucleotide
acacgtaagagtataaggtggacggtgaat

SEQ ID NO: 363474 - DNA, 30 bp, Artificial Sequence
  Synthetic oligonucleotide
gtctttgagtgcatcactaatcctgtgaat

SEQ ID NO: 363475 - DNA, 30 bp, Artificial Sequence
  Synthetic oligonucleotide
gtcaattccccagaaaagctcgttgtgaat

SEQ ID NO: 363476 - DNA, 30 bp, Artificial Sequence
  Synthetic oligonucleotide
tcaagtcatgtcgattaaggatcattgaat

SEQ ID NO: 363477 - DNA, 30 bp, Artificial Sequence
  Synthetic oligonucleotide
cacaatcttcctgaatgttacggattgaat

SEQ ID NO: 363478 - DNA, 30 bp, Artificial Sequence
  Synthetic oligonucleotide
tctttacgacaaattcggcctctcttgaat

SEQ ID NO: 363479 - DNA, 30 bp, Artificial Sequence
  Synthetic oligonucleotide
cgacgggcacctagattccgtgtcttgaat

SEQ ID NO: 363480 - DNA, 30 bp, Artificial Sequence
  Synthetic oligonucleotide
ctgtttataattaactccagccagttgaat

SEQ ID NO: 363481 - DNA, 30 bp, Artificial Sequence
  Synthetic oligonucleotide
gtcgatcgtggggaattgagttcgttgaat

SEQ ID NO: 363482 - DNA, 30 bp, Artificial Sequence
  Synthetic oligonucleotide
cctgaatcgcagtcttcaaaacggttgaat

SEQ ID NO: 363483 - DNA, 30 bp, Artificial Sequence
  Synthetic oligonucleotide
gcgaatagtgtgacacacgtcgggttgaat

SEQ ID NO: 363484 - DNA, 30 bp, Artificial Sequence
  Synthetic oligonucleotide
cagtggccggtagtatctaaccctttgaat

SEQ ID NO: 363485 - DNA, 30 bp, Artificial Sequence
  Synthetic oligonucleotide
gaaaggcagttccgggaaacatgtttgaat

SEQ ID NO: 363486 - DNA, 30 bp, Artificial Sequence
  Synthetic oligonucleotide
tgcgtacacaccagctggcaaccaaataat

SEQ ID NO: 363487 - DNA, 30 bp, Artificial Sequence
  Synthetic oligonucleotide
cggctcagtctgttgtatgggtgcaataat

SEQ ID NO: 363488 - DNA, 30 bp, Artificial Sequence
  Synthetic oligonucleotide
tccacgaacgaacggttgtttcagaataat

SEQ ID NO: 363489 - DNA, 30 bp, Artificial Sequence
  Synthetic oligonucleotide
gacccggcctcacttggctcaaggaataat

SEQ ID NO: 363490 - DNA, 30 bp, Artificial Sequence
  Synthetic oligonucleotide
ccatatcgtcagttcttaggggtgaataat

SEQ ID NO: 363491 - DNA, 30 bp, Artificial Sequence
  Synthetic oligonucleotide
aaccaattatcgggcggtggcgataataat

SEQ ID NO: 363492 - DNA, 30 bp, Artificial Sequence
  Synthetic oligonucleotide
acacttgtgaccgttatgggtaaacataat

SEQ ID NO: 363493 - DNA, 30 bp, Artificial Sequence
  Synthetic oligonucleotide
atgcgggtacccgacgctttataacataat

SEQ ID NO: 363494 - DNA, 30 bp, Artificial Sequence
  Synthetic oligonucleotide
agtcataagaaagtattgctttcacataat

SEQ ID NO: 363495 - DNA, 30 bp, Artificial Sequence
  Synthetic oligonucleotide
agaaataattgtagtgaatacatacataat

SEQ ID NO: 363496 - DNA, 30 bp, Artificial Sequence
  Synthetic oligonucleotide
cgccagggcattaactgaatgcaccataat

SEQ ID NO: 363497 - DNA, 30 bp, Artificial Sequence
  Synthetic oligonucleotide
gcccaaatctccgtcctggagatccataat

SEQ ID NO: 363498 - DNA, 30 bp, Artificial Sequence
  Synthetic oligonucleotide
ggcgcgggcacttttggtccgctccataat

SEQ ID NO: 363499 - DNA, 30 bp, Artificial Sequence
  Synthetic oligonucleotide
gtccacgacgggttggcactattccataat

SEQ ID NO: 363500 - DNA, 30 bp, Artificial Sequence
  Synthetic oligonucleotide
gttgcactttctcgcgtattacggcataat

SEQ ID NO: 363501 - DNA, 30 bp, Artificial Sequence
  Synthetic oligonucleotide
tattcgactatcaaaataagggggcataat

SEQ ID NO: 363502 - DNA, 30 bp, Artificial Sequence
  Synthetic oligonucleotide
gaaaaagcaactattggtatttggcataat

SEQ ID NO: 363503 - DNA, 29 bp, Artificial Sequence
  Synthetic oligonucleotide
acgccatccaatatccccgggatcataat

SEQ ID NO: 363504 - DNA, 30 bp, Artificial Sequence
  Synthetic oligonucleotide
agtttgcctcttgatttaagtgatcataat

SEQ ID NO: 363505 - DNA, 30 bp, Artificial Sequence
  Synthetic oligonucleotide
gagacacgagaaaacggccagtaagataat

SEQ ID NO: 363506 - DNA, 30 bp, Artificial Sequence
  Synthetic oligonucleotide
taatttgatatctggaatgcgtaagataat

SEQ ID NO: 363507 - DNA, 30 bp, Artificial Sequence
  Synthetic oligonucleotide
taaatactaatacggatcgcggtcgataat

SEQ ID NO: 363508 - DNA, 30 bp, Artificial Sequence
  Synthetic oligonucleotide
gaaaaatcagatatttcgtgattcgataat

SEQ ID NO: 363509 - DNA, 30 bp, Artificial Sequence
  Synthetic oligonucleotide
gaacaattaaactttaacgccgaggataat

SEQ ID NO: 363510 - DNA, 30 bp, Artificial Sequence
  Synthetic oligonucleotide
tagtcaagtatcgtttactgcacggataat

SEQ ID NO: 363511 - DNA, 30 bp, Artificial Sequence
  Synthetic oligonucleotide
ctcttcgttattggaggcgtgtcggataat

SEQ ID NO: 363512 - DNA, 30 bp, Artificial Sequence
  Synthetic oligonucleotide
taggtggggaatttttttgaatgtgataat

SEQ ID NO: 363513 - DNA, 30 bp, Artificial Sequence
  Synthetic oligonucleotide
taagttgattccgataccttatgtgataat

SEQ ID NO: 363514 - DNA, 30 bp, Artificial Sequence
  Synthetic oligonucleotide
cacataatcctatctgacccaagatataat

SEQ ID NO: 363515 - DNA, 30 bp, Artificial Sequence
  Synthetic oligonucleotide
taagtgaacctgatctcagggggatataat

SEQ ID NO: 363516 - DNA, 30 bp, Artificial Sequence
  Synthetic oligonucleotide
tttgggggcaaacttcggtttggatataat

SEQ ID NO: 363517 - DNA, 30 bp, Artificial Sequence
  Synthetic oligonucleotide
ggaggaaggcgaactgacactgagtataat

SEQ ID NO: 363518 - DNA, 30 bp, Artificial Sequence
  Synthetic oligonucleotide
gaggtaaaagcaatcttcgctgcgtataat

SEQ ID NO: 363519 - DNA, 30 bp, Artificial Sequence
  Synthetic oligonucleotide
ttcctcgtaccaatgagagctatgtataat

SEQ ID NO: 363520 - DNA, 30 bp, Artificial Sequence
  Synthetic oligonucleotide
gggttgatccggcagttagcggcttataat

SEQ ID NO: 363521 - DNA, 30 bp, Artificial Sequence
  Synthetic oligonucleotide
agatataacagtattcacagctgttataat

SEQ ID NO: 363522 - DNA, 30 bp, Artificial Sequence
  Synthetic oligonucleotide
aaattcaaagtggagataactatttataat

SEQ ID NO: 363523 - DNA, 30 bp, Artificial Sequence
  Synthetic oligonucleotide
agagtttagatcatcgataggctaactaat

SEQ ID NO: 363524 - DNA, 30 bp, Artificial Sequence
  Synthetic oligonucleotide
tacgccttgggggtggaacggcccactaat

SEQ ID NO: 363525 - DNA, 30 bp, Artificial Sequence
  Synthetic oligonucleotide
attcaccactctaatggtgaaatcactaat

SEQ ID NO: 363526 - DNA, 30 bp, Artificial Sequence
  Synthetic oligonucleotide
cttctatgtgtaatatgcacaacgactaat

SEQ ID NO: 363527 - DNA, 30 bp, Artificial Sequence
  Synthetic oligonucleotide
acatttactaaaactgtaaatatgactaat

SEQ ID NO: 363528 - DNA, 30 bp, Artificial Sequence
  Synthetic oligonucleotide
gtctgtagtgtcgtatatttcgtgactaat

SEQ ID NO: 363529 - DNA, 30 bp, Artificial Sequence
  Synthetic oligonucleotide
cataccagcgctaaagctggcttgactaat

SEQ ID NO: 363530 - DNA, 30 bp, Artificial Sequence
  Synthetic oligonucleotide
ttcaacgttacgaagagtcacgatactaat

SEQ ID NO: 363531 - DNA, 30 bp, Artificial Sequence
  Synthetic oligonucleotide
aaaattcggtgtaaggagctatatactaat

SEQ ID NO: 363532 - DNA, 30 bp, Artificial Sequence
  Synthetic oligonucleotide
tacgtgccgggaaagttagagtatactaat

SEQ ID NO: 363533 - DNA, 30 bp, Artificial Sequence
  Synthetic oligonucleotide
gaaggagagggagggaatgtggctactaat

SEQ ID NO: 363534 - DNA, 30 bp, Artificial Sequence
  Synthetic oligonucleotide
tacacctcgcgactcatgggctgtactaat

SEQ ID NO: 363535 - DNA, 30 bp, Artificial Sequence
  Synthetic oligonucleotide
cagagcaaggatcaggtccagaaacctaat

SEQ ID NO: 363536 - DNA, 30 bp, Artificial Sequence
  Synthetic oligonucleotide
gatactgctgagcgggcaacgagacctaat

SEQ ID NO: 363537 - DNA, 30 bp, Artificial Sequence
  Synthetic oligonucleotide
cgggtccaggggcgcagacatagacctaat

SEQ ID NO: 363538 - DNA, 30 bp, Artificial Sequence
  Synthetic oligonucleotide
cgcgaagcgtccggtggtttgcaccctaat

SEQ ID NO: 363539 - DNA, 30 bp, Artificial Sequence
  Synthetic oligonucleotide
gactagtacgtacgatgagggagccctaat

SEQ ID NO: 363540 - DNA, 30 bp, Artificial Sequence
  Synthetic oligonucleotide
ctataaaacttctcggcttgatgccctaat

SEQ ID NO: 363541 - DNA, 30 bp, Artificial Sequence
  Synthetic oligonucleotide
ggttcgaacatcacgcggcttaagcctaat

SEQ ID NO: 363542 - DNA, 30 bp, Artificial Sequence
  Synthetic oligonucleotide
aattagagacggtagaggttatggcctaat

SEQ ID NO: 363543 - DNA, 30 bp, Artificial Sequence
  Synthetic oligonucleotide
ctactcaccagaggttgtgcgcgtcctaat

SEQ ID NO: 363544 - DNA, 30 bp, Artificial Sequence
  Synthetic oligonucleotide
acggtccaattggactctaatcgtcctaat

SEQ ID NO: 363545 - DNA, 30 bp, Artificial Sequence
  Synthetic oligonucleotide
acagcaacgcgcggcatgctccttcctaat

SEQ ID NO: 363546 - DNA, 30 bp, Artificial Sequence
  Synthetic oligonucleotide
gtattgacaaattttaaggggaacgctaat

SEQ ID NO: 363547 - DNA, 30 bp, Artificial Sequence
  Synthetic oligonucleotide
gcaaaaataaggcacatctcgaatgctaat

SEQ ID NO: 363548 - DNA, 30 bp, Artificial Sequence
  Synthetic oligonucleotide
catcccaataatcagttcaacgatgctaat

SEQ ID NO: 363549 - DNA, 30 bp, Artificial Sequence
  Synthetic oligonucleotide
cgtagcgtccaggaggagtgcagtgctaat

SEQ ID NO: 363550 - DNA, 30 bp, Artificial Sequence
  Synthetic oligonucleotide
taagcacgcgcgttagagctgagtgctaat

SEQ ID NO: 363551 - DNA, 30 bp, Artificial Sequence
  Synthetic oligonucleotide
ggctgactccaagatattgcggttgctaat

SEQ ID NO: 363552 - DNA, 30 bp, Artificial Sequence
  Synthetic oligonucleotide
ggaattaaattagggaaccgtgcatctaat

SEQ ID NO: 363553 - DNA, 30 bp, Artificial Sequence
  Synthetic oligonucleotide
ggatcgggggtcgttagtttaagatctaat

SEQ ID NO: 363554 - DNA, 30 bp, Artificial Sequence
  Synthetic oligonucleotide
atccatagtccacaagagtagtactctaat

SEQ ID NO: 363555 - DNA, 30 bp, Artificial Sequence
  Synthetic oligonucleotide
agctaagcatacttggtgcacatctctaat

SEQ ID NO: 363556 - DNA, 30 bp, Artificial Sequence
  Synthetic oligonucleotide
tgataaggatcggtgattaaagtgtctaat

SEQ ID NO: 363557 - DNA, 30 bp, Artificial Sequence
  Synthetic oligonucleotide
caaatactggcggtacgagccctaagtaat

SEQ ID NO: 363558 - DNA, 30 bp, Artificial Sequence
  Synthetic oligonucleotide
ctaaggccacatatagagttagtaagtaat

SEQ ID NO: 363559 - DNA, 30 bp, Artificial Sequence
  Synthetic oligonucleotide
cctccgtgaagctttggaccagccagtaat

SEQ ID NO: 363560 - DNA, 30 bp, Artificial Sequence
  Synthetic oligonucleotide
caaggcgttcgcgtgcttagatgcagtaat

SEQ ID NO: 363561 - DNA, 30 bp, Artificial Sequence
  Synthetic oligonucleotide
gcaggcagtggccatgttagattcagtaat
